United States Patent Application Publication US 2018/0305689 A1 - sequence listing, part 74

SEQ ID NO: 1045847 - RNA, 19 nt, Artificial Sequence
  Description of Artificial Sequence: Synthetic oligonucleotide
  Antisense strand to SEQ ID NO: 1045846
ucauucauacugaucuagc

SEQ ID NO: 1045848 - RNA, 19 nt, Artificial Sequence
  Description of Artificial Sequence: Synthetic oligonucleotide
  Sense strand starting at position 2479 of SEQ ID NO: 914997
gagaaacccuagguaaagu

SEQ ID NO: 1045849 - RNA, 19 nt, Artificial Sequence
  Description of Artificial Sequence: Synthetic oligonucleotide
  Antisense strand to SEQ ID NO: 1045848
acuuuaccuaggguuucuc

SEQ ID NO: 1045850 - RNA, 19 nt, Artificial Sequence
  Description of Artificial Sequence: Synthetic oligonucleotide
  Sense strand starting at position 2488 of SEQ ID NO: 914997
uagguaaaguugcuagaua

SEQ ID NO: 1045851 - RNA, 19 nt, Artificial Sequence
  Description of Artificial Sequence: Synthetic oligonucleotide
  Antisense strand to SEQ ID NO: 1045850
uaucuagcaacuuuaccua

SEQ ID NO: 1045852 - RNA, 19 nt, Artificial Sequence
  Description of Artificial Sequence: Synthetic oligonucleotide
  Sense strand starting at position 2617 of SEQ ID NO: 914997
guuugauaaauccgggaac

SEQ ID NO: 1045853 - RNA, 19 nt, Artificial Sequence
  Description of Artificial Sequence: Synthetic oligonucleotide
  Antisense strand to SEQ ID NO: 1045852
guucccggauuuaucaaac

SEQ ID NO: 1045854 - RNA, 19 nt, Artificial Sequence
  Description of Artificial Sequence: Synthetic oligonucleotide
  Sense strand starting at position 2672 of SEQ ID NO: 914997
uucaguagucaugguagag

SEQ ID NO: 1045855 - RNA, 19 nt, Artificial Sequence
  Description of Artificial Sequence: Synthetic oligonucleotide
  Antisense strand to SEQ ID NO: 1045854
cucuaccaugacuacugaa

SEQ ID NO: 1045856 - RNA, 19 nt, Artificial Sequence
  Description of Artificial Sequence: Synthetic oligonucleotide
  Sense strand starting at position 2791 of SEQ ID NO: 914997
ggcagaugcucuccacuga

SEQ ID NO: 1045857 - RNA, 19 nt, Artificial Sequence
  Description of Artificial Sequence: Synthetic oligonucleotide
  Antisense strand to SEQ ID NO: 1045856
ucaguggagagcaucugcc

SEQ ID NO: 1045858 - RNA, 19 nt, Artificial Sequence
  Description of Artificial Sequence: Synthetic oligonucleotide
  Sense strand starting at position 2877 of SEQ ID NO: 914997
uucugugugguuguuguaa

SEQ ID NO: 1045859 - RNA, 19 nt, Artificial Sequence
  Description of Artificial Sequence: Synthetic oligonucleotide
  Antisense strand to SEQ ID NO: 1045858
uuacaacaaccacacagaa

SEQ ID NO: 1045860 - RNA, 19 nt, Artificial Sequence
  Description of Artificial Sequence: Synthetic oligonucleotide
  Sense strand starting at position 2886 of SEQ ID NO: 914997
guuguuguaagagagauca

SEQ ID NO: 1045861 - RNA, 19 nt, Artificial Sequence
  Description of Artificial Sequence: Synthetic oligonucleotide
  Antisense strand to SEQ ID NO: 1045860
ugaucucucuuacaacaac

SEQ ID NO: 1045862 - RNA, 19 nt, Artificial Sequence
  Description of Artificial Sequence: Synthetic oligonucleotide
  Sense strand starting at position 2928 of SEQ ID NO: 914997
guccgcuacccucaucaau

SEQ ID NO: 1045863 - RNA, 19 nt, Artificial Sequence
  Description of Artificial Sequence: Synthetic oligonucleotide
  Antisense strand to SEQ ID NO: 1045862
auugaugaggguagcggac

SEQ ID NO: 1045864 - RNA, 19 nt, Artificial Sequence
  Description of Artificial Sequence: Synthetic oligonucleotide
  Sense strand starting at position 3096 of SEQ ID NO: 914997
gcaaguauauggucuagaa

SEQ ID NO: 1045865 - RNA, 19 nt, Artificial Sequence
  Description of Artificial Sequence: Synthetic oligonucleotide
  Antisense strand to SEQ ID NO: 1045864
uucuagaccauauacuugc

SEQ ID NO: 1045866 - RNA, 19 nt, Artificial Sequence
  Description of Artificial Sequence: Synthetic oligonucleotide
  Sense strand starting at position 3275 of SEQ ID NO: 914997
auguacuugguccaaggau

SEQ ID NO: 1045867 - RNA, 19 nt, Artificial Sequence
  Description of Artificial Sequence: Synthetic oligonucleotide
  Antisense strand to SEQ ID NO: 1045866
auccuuggaccaaguacau

SEQ ID NO: 1045868 - RNA, 19 nt, Artificial Sequence
  Description of Artificial Sequence: Synthetic oligonucleotide
  Sense strand starting at position 3462 of SEQ ID NO: 914997
auaucauauugaguaccua

SEQ ID NO: 1045869 - RNA, 19 nt, Artificial Sequence
  Description of Artificial Sequence: Synthetic oligonucleotide
  Antisense strand to SEQ ID NO: 1045868
uagguacucaauaugauau

SEQ ID NO: 1045870 - RNA, 19 nt, Artificial Sequence
  Description of Artificial Sequence: Synthetic oligonucleotide
  Sense strand starting at position 3621 of SEQ ID NO: 914997
acagcacugagaugugaau

SEQ ID NO: 1045871 - RNA, 19 nt, Artificial Sequence
  Description of Artificial Sequence: Synthetic oligonucleotide
  Antisense strand to SEQ ID NO: 1045870
auucacaucucagugcugu

SEQ ID NO: 1045872 - RNA, 19 nt, Artificial Sequence
  Description of Artificial Sequence: Synthetic oligonucleotide
  Sense strand starting at position 3781 of SEQ ID NO: 914997
uguuucucuuggguaaaga

SEQ ID NO: 1045873 - RNA, 19 nt, Artificial Sequence
  Description of Artificial Sequence: Synthetic oligonucleotide
  Antisense strand to SEQ ID NO: 1045872
ucuuuacccaagagaaaca

SEQ ID NO: 1045874 - RNA, 19 nt, Artificial Sequence
  Description of Artificial Sequence: Synthetic oligonucleotide
  Sense strand starting at position 3782 of SEQ ID NO: 914997
guuucucuuggguaaagac

SEQ ID NO: 1045875 - RNA, 19 nt, Artificial Sequence
  Description of Artificial Sequence: Synthetic oligonucleotide
  Antisense strand to SEQ ID NO: 1045874
gucuuuacccaagagaaac

SEQ ID NO: 1045876 - RNA, 19 nt, Artificial Sequence
  Description of Artificial Sequence: Synthetic oligonucleotide
  Sense strand starting at position 3792 of SEQ ID NO: 914997
gguaaagacccacagcuuu

SEQ ID NO: 1045877 - RNA, 19 nt, Artificial Sequence
  Description of Artificial Sequence: Synthetic oligonucleotide
  Antisense strand to SEQ ID NO: 1045876
aaagcugugggucuuuacc

SEQ ID NO: 1045878 - RNA, 19 nt, Artificial Sequence
  Description of Artificial Sequence: Synthetic oligonucleotide
  Sense strand starting at position 3874 of SEQ ID NO: 914997
acacaugacuugucagugu

SEQ ID NO: 1045879 - RNA, 19 nt, Artificial Sequence
  Description of Artificial Sequence: Synthetic oligonucleotide
  Antisense strand to SEQ ID NO: 1045878
acacugacaagucaugugu

SEQ ID NO: 1045880 - RNA, 19 nt, Artificial Sequence
  Description of Artificial Sequence: Synthetic oligonucleotide
  Sense strand starting at position 47 of SEQ ID NO: 914998
gugagcuuggacgagucau

SEQ ID NO: 1045881 - RNA, 19 nt, Artificial Sequence
  Description of Artificial Sequence: Synthetic oligonucleotide
  Antisense strand to SEQ ID NO: 1045880
augacucguccaagcucac

SEQ ID NO: 1045882 - RNA, 19 nt, Artificial Sequence
  Description of Artificial Sequence: Synthetic oligonucleotide
  Sense strand starting at position 146 of SEQ ID NO: 914998
ugugaaaucccucguggaa

SEQ ID NO: 1045883 - RNA, 19 nt, Artificial Sequence
  Description of Artificial Sequence: Synthetic oligonucleotide
  Antisense strand to SEQ ID NO: 1045882
uuccacgagggauuucaca

SEQ ID NO: 1045884 - RNA, 19 nt, Artificial Sequence
  Description of Artificial Sequence: Synthetic oligonucleotide
  Sense strand starting at position 325 of SEQ ID NO: 914998
aguguccuccucuacaaga

SEQ ID NO: 1045885 - RNA, 19 nt, Artificial Sequence
  Description of Artificial Sequence: Synthetic oligonucleotide
  Antisense strand to SEQ ID NO: 1045884
ucuuguagaggaggacacu

SEQ ID NO: 1045886 - RNA, 19 nt, Artificial Sequence
  Description of Artificial Sequence: Synthetic oligonucleotide
  Sense strand starting at position 383 of SEQ ID NO: 914998
ggagucaugaguuacugua

SEQ ID NO: 1045887 - RNA, 19 nt, Artificial Sequence
  Description of Artificial Sequence: Synthetic oligonucleotide
  Antisense strand to SEQ ID NO: 1045886
uacaguaacucaugacucc

SEQ ID NO: 1045888 - RNA, 19 nt, Artificial Sequence
  Description of Artificial Sequence: Synthetic oligonucleotide
  Sense strand starting at position 390 of SEQ ID NO: 914998
ugaguuacuguaugggaag

SEQ ID NO: 1045889 - RNA, 19 nt, Artificial Sequence
  Description of Artificial Sequence: Synthetic oligonucleotide
  Antisense strand to SEQ ID NO: 1045888
cuucccauacaguaacuca

SEQ ID NO: 1045890 - RNA, 19 nt, Artificial Sequence
  Description of Artificial Sequence: Synthetic oligonucleotide
  Sense strand starting at position 428 of SEQ ID NO: 914998
uaguaagaaccauguguuu

SEQ ID NO: 1045891 - RNA, 19 nt, Artificial Sequence
  Description of Artificial Sequence: Synthetic oligonucleotide
  Antisense strand to SEQ ID NO: 1045890
aaacacaugguucuuacua

SEQ ID NO: 1045892 - RNA, 19 nt, Artificial Sequence
  Description of Artificial Sequence: Synthetic oligonucleotide
  Sense strand starting at position 512 of SEQ ID NO: 914998
ugguuaucccuccaagaug

SEQ ID NO: 1045893 - RNA, 19 nt, Artificial Sequence
  Description of Artificial Sequence: Synthetic oligonucleotide
  Antisense strand to SEQ ID NO: 1045892
caucuuggagggauaacca

SEQ ID NO: 1045894 - RNA, 19 nt, Artificial Sequence
  Description of Artificial Sequence: Synthetic oligonucleotide
  Sense strand starting at position 749 of SEQ ID NO: 914998
gucuguguugagaggcaug

SEQ ID NO: 1045895 - RNA, 19 nt, Artificial Sequence
  Description of Artificial Sequence: Synthetic oligonucleotide
  Antisense strand to SEQ ID NO: 1045894
caugccucucaacacagac

SEQ ID NO: 1045896 - RNA, 19 nt, Artificial Sequence
  Description of Artificial Sequence: Synthetic oligonucleotide
  Sense strand starting at position 1010 of SEQ ID NO: 914998
ccaggaagcuuccuccuuu

SEQ ID NO: 1045897 - RNA, 19 nt, Artificial Sequence
  Description of Artificial Sequence: Synthetic oligonucleotide
  Antisense strand to SEQ ID NO: 1045896
aaaggaggaagcuuccugg

SEQ ID NO: 1045898 - RNA, 19 nt, Artificial Sequence
  Description of Artificial Sequence: Synthetic oligonucleotide
  Sense strand starting at position 1198 of SEQ ID NO: 914998
aacuguuuccugggcagga

SEQ ID NO: 1045899 - RNA, 19 nt, Artificial Sequence
  Description of Artificial Sequence: Synthetic oligonucleotide
  Antisense strand to SEQ ID NO: 1045898
uccugcccaggaaacaguu

SEQ ID NO: 1045900 - RNA, 19 nt, Artificial Sequence
  Description of Artificial Sequence: Synthetic oligonucleotide
  Sense strand starting at position 1286 of SEQ ID NO: 914998
ucaaauggugcucacucua

SEQ ID NO: 1045901 - RNA, 19 nt, Artificial Sequence
  Description of Artificial Sequence: Synthetic oligonucleotide
  Antisense strand to SEQ ID NO: 1045900
uagagugagcaccauuuga

SEQ ID NO: 1045902 - RNA, 19 nt, Artificial Sequence
  Description of Artificial Sequence: Synthetic oligonucleotide
  Sense strand starting at position 1291 of SEQ ID NO: 914998
uggugcucacucuaggaau

SEQ ID NO: 1045903 - RNA, 19 nt, Artificial Sequence
  Description of Artificial Sequence: Synthetic oligonucleotide
  Antisense strand to SEQ ID NO: 1045902
auuccuagagugagcacca

SEQ ID NO: 1045904 - RNA, 19 nt, Artificial Sequence
  Description of Artificial Sequence: Synthetic oligonucleotide
  Sense strand starting at position 1486 of SEQ ID NO: 914998
gaaauagaggcaggcuuaa

SEQ ID NO: 1045905 - RNA, 19 nt, Artificial Sequence
  Description of Artificial Sequence: Synthetic oligonucleotide
  Antisense strand to SEQ ID NO: 1045904
uuaagccugccucuauuuc

SEQ ID NO: 1045906 - RNA, 19 nt, Artificial Sequence
  Description of Artificial Sequence: Synthetic oligonucleotide
  Sense strand starting at position 1586 of SEQ ID NO: 914998
gggagaaagcucugcuuag

SEQ ID NO: 1045907 - RNA, 19 nt, Artificial Sequence
  Description of Artificial Sequence: Synthetic oligonucleotide
  Antisense strand to SEQ ID NO: 1045906
cuaagcagagcuuucuccc

SEQ ID NO: 1045908 - RNA, 19 nt, Artificial Sequence
  Description of Artificial Sequence: Synthetic oligonucleotide
  Sense strand starting at position 1587 of SEQ ID NO: 914998
ggagaaagcucugcuuagc

SEQ ID NO: 1045909 - RNA, 19 nt, Artificial Sequence
  Description of Artificial Sequence: Synthetic oligonucleotide
  Antisense strand to SEQ ID NO: 1045908
gcuaagcagagcuuucucc

SEQ ID NO: 1045910 - RNA, 19 nt, Artificial Sequence
  Description of Artificial Sequence: Synthetic oligonucleotide
  Sense strand starting at position 1736 of SEQ ID NO: 914998
agcacaaucuaguuaaguu

SEQ ID NO: 1045911 - RNA, 19 nt, Artificial Sequence
  Description of Artificial Sequence: Synthetic oligonucleotide
  Antisense strand to SEQ ID NO: 1045910
aacuuaacuagauugugcu

SEQ ID NO: 1045912 - RNA, 19 nt, Artificial Sequence
  Description of Artificial Sequence: Synthetic oligonucleotide
  Sense strand starting at position 1740 of SEQ ID NO: 914998
caaucuaguuaaguuagga

SEQ ID NO: 1045913 - RNA, 19 nt, Artificial Sequence
  Description of Artificial Sequence: Synthetic oligonucleotide
  Antisense strand to SEQ ID NO: 1045912
uccuaacuuaacuagauug

SEQ ID NO: 1045914 - RNA, 19 nt, Artificial Sequence
  Description of Artificial Sequence: Synthetic oligonucleotide
  Sense strand starting at position 1927 of SEQ ID NO: 914998
gaggcagguuauucuagga

SEQ ID NO: 1045915 - RNA, 19 nt, Artificial Sequence
  Description of Artificial Sequence: Synthetic oligonucleotide
  Antisense strand to SEQ ID NO: 1045914
uccuagaauaaccugccuc

SEQ ID NO: 1045916 - RNA, 19 nt, Artificial Sequence
  Description of Artificial Sequence: Synthetic oligonucleotide
  Sense strand starting at position 1931 of SEQ ID NO: 914998
cagguuauucuaggauaua

SEQ ID NO: 1045917 - RNA, 19 nt, Artificial Sequence
  Description of Artificial Sequence: Synthetic oligonucleotide
  Antisense strand to SEQ ID NO: 1045916
uauauccuagaauaaccug

SEQ ID NO: 1045918 - RNA, 19 nt, Artificial Sequence
  Description of Artificial Sequence: Synthetic oligonucleotide
  Sense strand starting at position 2474 of SEQ ID NO: 914998
cguuaaacucuugggauug

SEQ ID NO: 1045919 - RNA, 19 nt, Artificial Sequence
  Description of Artificial Sequence: Synthetic oligonucleotide
  Antisense strand to SEQ ID NO: 1045918
caaucccaagaguuuaacg

SEQ ID NO: 1045920 - RNA, 19 nt, Artificial Sequence
  Description of Artificial Sequence: Synthetic oligonucleotide
  Sense strand starting at position 2479 of SEQ ID NO: 914998
aacucuugggauugccaga

SEQ ID NO: 1045921 - RNA, 19 nt, Artificial Sequence
  Description of Artificial Sequence: Synthetic oligonucleotide
  Antisense strand to SEQ ID NO: 1045920
ucuggcaaucccaagaguu

SEQ ID NO: 1045922 - RNA, 19 nt, Artificial Sequence
  Description of Artificial Sequence: Synthetic oligonucleotide
  Sense strand starting at position 2498 of SEQ ID NO: 914998
gagaauggccugggagauu

SEQ ID NO: 1045923 - RNA, 19 nt, Artificial Sequence
  Description of Artificial Sequence: Synthetic oligonucleotide
  Antisense strand to SEQ ID NO: 1045922
aaucucccaggccauucuc

SEQ ID NO: 1045924 - RNA, 19 nt, Artificial Sequence
  Description of Artificial Sequence: Synthetic oligonucleotide
  Sense strand starting at position 2606 of SEQ ID NO: 914998
gucuccucaucucuaaagu

SEQ ID NO: 1045925 - RNA, 19 nt, Artificial Sequence
  Description of Artificial Sequence: Synthetic oligonucleotide
  Antisense strand to SEQ ID NO: 1045924
acuuuagagaugaggagac

SEQ ID NO: 1045926 - RNA, 19 nt, Artificial Sequence
  Description of Artificial Sequence: Synthetic oligonucleotide
  Sense strand starting at position 2673 of SEQ ID NO: 914998
augagauguuagucaagug

SEQ ID NO: 1045927 - RNA, 19 nt, Artificial Sequence
  Description of Artificial Sequence: Synthetic oligonucleotide
  Antisense strand to SEQ ID NO: 1045926
cacuugacuaacaucucau

SEQ ID NO: 1045928 - RNA, 19 nt, Artificial Sequence
  Description of Artificial Sequence: Synthetic oligonucleotide
  Sense strand starting at position 2674 of SEQ ID NO: 914998
ugagauguuagucaagugu

SEQ ID NO: 1045929 - RNA, 19 nt, Artificial Sequence
  Description of Artificial Sequence: Synthetic oligonucleotide
  Antisense strand to SEQ ID NO: 1045928
acacuugacuaacaucuca

SEQ ID NO: 1045930 - RNA, 19 nt, Artificial Sequence
  Description of Artificial Sequence: Synthetic oligonucleotide
  Sense strand starting at position 2678 of SEQ ID NO: 914998
auguuagucaaguguuuaa

SEQ ID NO: 1045931 - RNA, 19 nt, Artificial Sequence
  Description of Artificial Sequence: Synthetic oligonucleotide
  Antisense strand to SEQ ID NO: 1045930
uuaaacacuugacuaacau

SEQ ID NO: 1045932 - RNA, 19 nt, Artificial Sequence
  Description of Artificial Sequence: Synthetic oligonucleotide
  Sense strand starting at position 2712 of SEQ ID NO: 914998
ucauaagagcuagaucagu

SEQ ID NO: 1045933 - RNA, 19 nt, Artificial Sequence
  Description of Artificial Sequence: Synthetic oligonucleotide
  Antisense strand to SEQ ID NO: 1045932
acugaucuagcucuuauga

SEQ ID NO: 1045934 - RNA, 19 nt, Artificial Sequence
  Description of Artificial Sequence: Synthetic oligonucleotide
  Sense strand starting at position 2717 of SEQ ID NO: 914998
agagcuagaucaguaugaa

SEQ ID NO: 1045935 - RNA, 19 nt, Artificial Sequence
  Description of Artificial Sequence: Synthetic oligonucleotide
  Antisense strand to SEQ ID NO: 1045934
uucauacugaucuagcucu

SEQ ID NO: 1045936 - RNA, 19 nt, Artificial Sequence
  Description of Artificial Sequence: Synthetic oligonucleotide
  Sense strand starting at position 2720 of SEQ ID NO: 914998
gcuagaucaguaugaauga

SEQ ID NO: 1045937 - RNA, 19 nt, Artificial Sequence
  Description of Artificial Sequence: Synthetic oligonucleotide
  Antisense strand to SEQ ID NO: 1045936
ucauucauacugaucuagc

SEQ ID NO: 1045938 - RNA, 19 nt, Artificial Sequence
  Description of Artificial Sequence: Synthetic oligonucleotide
  Sense strand starting at position 2893 of SEQ ID NO: 914998
gagaaacccuagguaaagu

SEQ ID NO: 1045939 - RNA, 19 nt, Artificial Sequence
  Description of Artificial Sequence: Synthetic oligonucleotide
  Antisense strand to SEQ ID NO: 1045938
acuuuaccuaggguuucuc

SEQ ID NO: 1045940 - RNA, 19 nt, Artificial Sequence
  Description of Artificial Sequence: Synthetic oligonucleotide
  Sense strand starting at position 2902 of SEQ ID NO: 914998
uagguaaaguugcuagaua

SEQ ID NO: 1045941 - RNA, 19 nt, Artificial Sequence
  Description of Artificial Sequence: Synthetic oligonucleotide
  Antisense strand to SEQ ID NO: 1045940
uaucuagcaacuuuaccua

SEQ ID NO: 1045942 - RNA, 19 nt, Artificial Sequence
  Description of Artificial Sequence: Synthetic oligonucleotide
  Sense strand starting at position 3031 of SEQ ID NO: 914998
guuugauaaauccgggaac

SEQ ID NO: 1045943 - RNA, 19 nt, Artificial Sequence
  Description of Artificial Sequence: Synthetic oligonucleotide
  Antisense strand to SEQ ID NO: 1045942
guucccggauuuaucaaac

SEQ ID NO: 1045944 - RNA, 19 nt, Artificial Sequence
  Description of Artificial Sequence: Synthetic oligonucleotide
  Sense strand starting at position 3086 of SEQ ID NO: 914998
uucaguagucaugguagag

SEQ ID NO: 1045945 - RNA, 19 nt, Artificial Sequence
  Description of Artificial Sequence: Synthetic oligonucleotide
  Antisense strand to SEQ ID NO: 1045944
cucuaccaugacuacugaa

SEQ ID NO: 1045946 - RNA, 19 nt, Artificial Sequence
  Description of Artificial Sequence: Synthetic oligonucleotide
  Sense strand starting at position 3205 of SEQ ID NO: 914998
ggcagaugcucuccacuga

SEQ ID NO: 1045947 - RNA, 19 nt, Artificial Sequence
  Description of Artificial Sequence: Synthetic oligonucleotide
  Antisense strand to SEQ ID NO: 1045946
ucaguggagagcaucugcc

SEQ ID NO: 1045948 - RNA, 19 nt, Artificial Sequence
  Description of Artificial Sequence: Synthetic oligonucleotide
  Sense strand starting at position 3291 of SEQ ID NO: 914998
uucugugugguuguuguaa

SEQ ID NO: 1045949 - RNA, 19 nt, Artificial Sequence
  Description of Artificial Sequence: Synthetic oligonucleotide
  Antisense strand to SEQ ID NO: 1045948
uuacaacaaccacacagaa

SEQ ID NO: 1045950 - RNA, 19 nt, Artificial Sequence
  Description of Artificial Sequence: Synthetic oligonucleotide
  Sense strand starting at position 3300 of SEQ ID NO: 914998
guuguuguaagagagauca

SEQ ID NO: 1045951 - RNA, 19 nt, Artificial Sequence
  Description of Artificial Sequence: Synthetic oligonucleotide
  Antisense strand to SEQ ID NO: 1045950
ugaucucucuuacaacaac

SEQ ID NO: 1045952 - RNA, 19 nt, Artificial Sequence
  Description of Artificial Sequence: Synthetic oligonucleotide
  Sense strand starting at position 3342 of SEQ ID NO: 914998
guccgcuacccucaucaau

SEQ ID NO: 1045953 - RNA, 19 nt, Artificial Sequence
  Description of Artificial Sequence: Synthetic oligonucleotide
  Antisense strand to SEQ ID NO: 1045952
auugaugaggguagcggac

SEQ ID NO: 1045954 - RNA, 19 nt, Artificial Sequence
  Description of Artificial Sequence: Synthetic oligonucleotide
  Sense strand starting at position 3510 of SEQ ID NO: 914998
gcaaguauauggucuagaa

SEQ ID NO: 1045955 - RNA, 19 nt, Artificial Sequence
  Description of Artificial Sequence: Synthetic oligonucleotide
  Antisense strand to SEQ ID NO: 1045954
uucuagaccauauacuugc

SEQ ID NO: 1045956 - RNA, 19 nt, Artificial Sequence
  Description of Artificial Sequence: Synthetic oligonucleotide
  Sense strand starting at position 3689 of SEQ ID NO: 914998
auguacuugguccaaggau

SEQ ID NO: 1045957 - RNA, 19 nt, Artificial Sequence
  Description of Artificial Sequence: Synthetic oligonucleotide
  Antisense strand to SEQ ID NO: 1045956
auccuuggaccaaguacau

SEQ ID NO: 1045958 - RNA, 19 nt, Artificial Sequence
  Description of Artificial Sequence: Synthetic oligonucleotide
  Sense strand starting at position 3876 of SEQ ID NO: 914998
auaucauauugaguaccua

SEQ ID NO: 1045959 - RNA, 19 nt, Artificial Sequence
  Description of Artificial Sequence: Synthetic oligonucleotide
  Antisense strand to SEQ ID NO: 1045958
uagguacucaauaugauau

SEQ ID NO: 1045960 - RNA, 19 nt, Artificial Sequence
  Description of Artificial Sequence: Synthetic oligonucleotide
  Sense strand starting at position 52 of SEQ ID NO: 914999
uggacugaaacuggucuuu

SEQ ID NO: 1045961 - RNA, 19 nt, Artificial Sequence
  Description of Artificial Sequence: Synthetic oligonucleotide
  Antisense strand to SEQ ID NO: 1045960
aaagaccaguuucagucca

SEQ ID NO: 1045962 - RNA, 19 nt, Artificial Sequence
  Description of Artificial Sequence: Synthetic oligonucleotide
  Sense strand starting at position 54 of SEQ ID NO: 914999
gacugaaacuggucuuuga

SEQ ID NO: 1045963 - RNA, 19 nt, Artificial Sequence
  Description of Artificial Sequence: Synthetic oligonucleotide
  Antisense strand to SEQ ID NO: 1045962
ucaaagaccaguuucaguc

SEQ ID NO: 1045964 - RNA, 19 nt, Artificial Sequence
  Description of Artificial Sequence: Synthetic oligonucleotide
  Sense strand starting at position 57 of SEQ ID NO: 914999
ugaaacuggucuuugagga

SEQ ID NO: 1045965 - RNA, 19 nt, Artificial Sequence
  Description of Artificial Sequence: Synthetic oligonucleotide
  Antisense strand to SEQ ID NO: 1045964
uccucaaagaccaguuuca

SEQ ID NO: 1045966 - RNA, 19 nt, Artificial Sequence
  Description of Artificial Sequence: Synthetic oligonucleotide
  Sense strand starting at position 58 of SEQ ID NO: 914999
gaaacuggucuuugaggac

SEQ ID NO: 1045967 - RNA, 19 nt, Artificial Sequence
  Description of Artificial Sequence: Synthetic oligonucleotide
  Antisense strand to SEQ ID NO: 1045966
guccucaaagaccaguuuc

SEQ ID NO: 1045968 - RNA, 19 nt, Artificial Sequence
  Description of Artificial Sequence: Synthetic oligonucleotide
  Sense strand starting at position 283 of SEQ ID NO: 914999
uuucuauauccagagucac

SEQ ID NO: 1045969 - RNA, 19 nt, Artificial Sequence
  Description of Artificial Sequence: Synthetic oligonucleotide
  Antisense strand to SEQ ID NO: 1045968
gugacucuggauauagaaa

SEQ ID NO: 1045970 - RNA, 19 nt, Artificial Sequence
  Description of Artificial Sequence: Synthetic oligonucleotide
  Sense strand starting at position 300 of SEQ ID NO: 914999
accugugaguuucucauuu

SEQ ID NO: 1045971 - RNA, 19 nt, Artificial Sequence
  Description of Artificial Sequence: Synthetic oligonucleotide
  Antisense strand to SEQ ID NO: 1045970
aaaugagaaacucacaggu

SEQ ID NO: 1045972 - RNA, 19 nt, Artificial Sequence
  Description of Artificial Sequence: Synthetic oligonucleotide
  Sense strand starting at position 304 of SEQ ID NO: 914999
gugaguuucucauuuccau

SEQ ID NO: 1045973 - RNA, 19 nt, Artificial Sequence
  Description of Artificial Sequence: Synthetic oligonucleotide
  Antisense strand to SEQ ID NO: 1045972
auggaaaugagaaacucac

SEQ ID NO: 1045974 - RNA, 19 nt, Artificial Sequence
  Description of Artificial Sequence: Synthetic oligonucleotide
  Sense strand starting at position 446 of SEQ ID NO: 914999
ucauuaccugcuggagaaa

SEQ ID NO: 1045975 - RNA, 19 nt, Artificial Sequence
  Description of Artificial Sequence: Synthetic oligonucleotide
  Antisense strand to SEQ ID NO: 1045974
uuucuccagcagguaauga

SEQ ID NO: 1045976 - RNA, 19 nt, Artificial Sequence
  Description of Artificial Sequence: Synthetic oligonucleotide
  Sense strand starting at position 543 of SEQ ID NO: 914999
gagccacuggucuauacau

SEQ ID NO: 1045977 - RNA, 19 nt, Artificial Sequence
  Description of Artificial Sequence: Synthetic oligonucleotide
  Antisense strand to SEQ ID NO: 1045976
auguauagaccaguggcuc

SEQ ID NO: 1045978 - RNA, 19 nt, Artificial Sequence
  Description of Artificial Sequence: Synthetic oligonucleotide
  Sense strand starting at position 745 of SEQ ID NO: 914999
acuuucuucggagaauccu

SEQ ID NO: 1045979 - RNA, 19 nt, Artificial Sequence
  Description of Artificial Sequence: Synthetic oligonucleotide
  Antisense strand to SEQ ID NO: 1045978
aggauucuccgaagaaagu

SEQ ID NO: 1045980 - RNA, 19 nt, Artificial Sequence
  Description of Artificial Sequence: Synthetic oligonucleotide
  Sense strand starting at position 753 of SEQ ID NO: 914999
cggagaauccuguauccua

SEQ ID NO: 1045981 - RNA, 19 nt, Artificial Sequence
  Description of Artificial Sequence: Synthetic oligonucleotide
  Antisense strand to SEQ ID NO: 1045980
uaggauacaggauucuccg

SEQ ID NO: 1045982 - RNA, 19 nt, Artificial Sequence
  Description of Artificial Sequence: Synthetic oligonucleotide
  Sense strand starting at position 1069 of SEQ ID NO: 914999
accggauucucagugagau

SEQ ID NO: 1045983 - RNA, 19 nt, Artificial Sequence
  Description of Artificial Sequence: Synthetic oligonucleotide
  Antisense strand to SEQ ID NO: 1045982
aucucacugagaauccggu

SEQ ID NO: 1045984 - RNA, 19 nt, Artificial Sequence
  Description of Artificial Sequence: Synthetic oligonucleotide
  Sense strand starting at position 1071 of SEQ ID NO: 914999
cggauucucagugagauua

SEQ ID NO: 1045985 - RNA, 19 nt, Artificial Sequence
  Description of Artificial Sequence: Synthetic oligonucleotide
  Antisense strand to SEQ ID NO: 1045984
uaaucucacugagaauccg

SEQ ID NO: 1045986 - RNA, 19 nt, Artificial Sequence
  Description of Artificial Sequence: Synthetic oligonucleotide
  Sense strand starting at position 1144 of SEQ ID NO: 914999
acaguaauggcaugauuaa

SEQ ID NO: 1045987 - RNA, 19 nt, Artificial Sequence
  Description of Artificial Sequence: Synthetic oligonucleotide
  Antisense strand to SEQ ID NO: 1045986
uuaaucaugccauuacugu

SEQ ID NO: 1045988 - RNA, 19 nt, Artificial Sequence
  Description of Artificial Sequence: Synthetic oligonucleotide
  Sense strand starting at position 1263 of SEQ ID NO: 914999
ucaacuugguguccacaaa

SEQ ID NO: 1045989 - RNA, 19 nt, Artificial Sequence
  Description of Artificial Sequence: Synthetic oligonucleotide
  Antisense strand to SEQ ID NO: 1045988
uuuguggacaccaaguuga

SEQ ID NO: 1045990 - RNA, 19 nt, Artificial Sequence
  Description of Artificial Sequence: Synthetic oligonucleotide
  Sense strand starting at position 1314 of SEQ ID NO: 914999
ccuauacuucuagguauau

SEQ ID NO: 1045991 - RNA, 19 nt, Artificial Sequence
  Description of Artificial Sequence: Synthetic oligonucleotide
  Antisense strand to SEQ ID NO: 1045990
auauaccuagaaguauagg

SEQ ID NO: 1045992 - RNA, 19 nt, Artificial Sequence
  Description of Artificial Sequence: Synthetic oligonucleotide
  Sense strand starting at position 1315 of SEQ ID NO: 914999
cuauacuucuagguauauu

SEQ ID NO: 1045993 - RNA, 19 nt, Artificial Sequence
  Description of Artificial Sequence: Synthetic oligonucleotide
  Antisense strand to SEQ ID NO: 1045992
aauauaccuagaaguauag

SEQ ID NO: 1045994 - RNA, 19 nt, Artificial Sequence
  Description of Artificial Sequence: Synthetic oligonucleotide
  Sense strand starting at position 1384 of SEQ ID NO: 914999
ucauuaugccuaugacuga

SEQ ID NO: 1045995 - RNA, 19 nt, Artificial Sequence
  Description of Artificial Sequence: Synthetic oligonucleotide
  Antisense strand to SEQ ID NO: 1045994
ucagucauaggcauaauga

SEQ ID NO: 1045996 - RNA, 19 nt, Artificial Sequence
  Description of Artificial Sequence: Synthetic oligonucleotide
  Sense strand starting at position 1464 of SEQ ID NO: 914999
uaauguaauggguaccauu

SEQ ID NO: 1045997 - RNA, 19 nt, Artificial Sequence
  Description of Artificial Sequence: Synthetic oligonucleotide
  Antisense strand to SEQ ID NO: 1045996
aaugguacccauuacauua

SEQ ID NO: 1045998 - RNA, 19 nt, Artificial Sequence
  Description of Artificial Sequence: Synthetic oligonucleotide
  Sense strand starting at position 1512 of SEQ ID NO: 914999
gcuuuagagguuuaguaau

SEQ ID NO: 1045999 - RNA, 19 nt, Artificial Sequence
  Description of Artificial Sequence: Synthetic oligonucleotide
  Antisense strand to SEQ ID NO: 1045998
auuacuaaaccucuaaagc

SEQ ID NO: 1046000 - RNA, 19 nt, Artificial Sequence
  Description of Artificial Sequence: Synthetic oligonucleotide
  Sense strand starting at position 1852 of SEQ ID NO: 914999
auugauuccuuaccugagu

SEQ ID NO: 1046001 - RNA, 19 nt, Artificial Sequence
  Description of Artificial Sequence: Synthetic oligonucleotide
  Antisense strand to SEQ ID NO: 1046000
acucagguaaggaaucaau

SEQ ID NO: 1046002 - RNA, 19 nt, Artificial Sequence
  Description of Artificial Sequence: Synthetic oligonucleotide
  Sense strand starting at position 2212 of SEQ ID NO: 914999
gaugguaggucccugagga

SEQ ID NO: 1046003 - RNA, 19 nt, Artificial Sequence
  Description of Artificial Sequence: Synthetic oligonucleotide
  Antisense strand to SEQ ID NO: 1046002
uccucagggaccuaccauc

SEQ ID NO: 1046004 - RNA, 19 nt, Artificial Sequence
  Description of Artificial Sequence: Synthetic oligonucleotide
  Sense strand starting at position 2239 of SEQ ID NO: 914999
auucuagaaguuggucaaa

SEQ ID NO: 1046005 - RNA, 19 nt, Artificial Sequence
  Description of Artificial Sequence: Synthetic oligonucleotide
  Antisense strand to SEQ ID NO: 1046004
uuugaccaacuucuagaau

SEQ ID NO: 1046006 - RNA, 19 nt, Artificial Sequence
  Description of Artificial Sequence: Synthetic oligonucleotide
  Sense strand starting at position 2241 of SEQ ID NO: 914999
ucuagaaguuggucaaaga

SEQ ID NO: 1046007 - RNA, 19 nt, Artificial Sequence
  Description of Artificial Sequence: Synthetic oligonucleotide
  Antisense strand to SEQ ID NO: 1046006
ucuuugaccaacuucuaga

SEQ ID NO: 1046008 - RNA, 19 nt, Artificial Sequence
  Description of Artificial Sequence: Synthetic oligonucleotide
  Sense strand starting at position 2708 of SEQ ID NO: 914999
cuaaauauuugggauguga

SEQ ID NO: 1046009 - RNA, 19 nt, Artificial Sequence
  Description of Artificial Sequence: Synthetic oligonucleotide
  Antisense strand to SEQ ID NO: 1046008
ucacaucccaaauauuuag

SEQ ID NO: 1046010 - RNA, 19 nt, Artificial Sequence
  Description of Artificial Sequence: Synthetic oligonucleotide
  Sense strand starting at position 2909 of SEQ ID NO: 914999
ggcagcucuguugccuaau

SEQ ID NO: 1046011 - RNA, 19 nt, Artificial Sequence
  Description of Artificial Sequence: Synthetic oligonucleotide
  Antisense strand to SEQ ID NO: 1046010
auuaggcaacagagcugcc

SEQ ID NO: 1046012 - RNA, 19 nt, Artificial Sequence
  Description of Artificial Sequence: Synthetic oligonucleotide
  Sense strand starting at position 3018 of SEQ ID NO: 914999
guuagauccacuggguaga

SEQ ID NO: 1046013 - RNA, 19 nt, Artificial Sequence
  Description of Artificial Sequence: Synthetic oligonucleotide
  Antisense strand to SEQ ID NO: 1046012
ucuacccaguggaucuaac

SEQ ID NO: 1046014 - RNA, 19 nt, Artificial Sequence
  Description of Artificial Sequence: Synthetic oligonucleotide
  Sense strand starting at position 3194 of SEQ ID NO: 914999
agagaugcuguagagugaa

SEQ ID NO: 1046015 - RNA, 19 nt, Artificial Sequence
  Description of Artificial Sequence: Synthetic oligonucleotide
  Antisense strand to SEQ ID NO: 1046014
uucacucuacagcaucucu

SEQ ID NO: 1046016 - RNA, 19 nt, Artificial Sequence
  Description of Artificial Sequence: Synthetic oligonucleotide
  Sense strand starting at position 3249 of SEQ ID NO: 914999
auucuaauugagggucuau

SEQ ID NO: 1046017 - RNA, 19 nt, Artificial Sequence
  Description of Artificial Sequence: Synthetic oligonucleotide
  Antisense strand to SEQ ID NO: 1046016
auagacccucaauuagaau

SEQ ID NO: 1046018 - RNA, 19 nt, Artificial Sequence
  Description of Artificial Sequence: Synthetic oligonucleotide
  Sense strand starting at position 3276 of SEQ ID NO: 914999
gcugaaaugcuugagugau

SEQ ID NO: 1046019 - RNA, 19 nt, Artificial Sequence
  Description of Artificial Sequence: Synthetic oligonucleotide
  Antisense strand to SEQ ID NO: 1046018
aucacucaagcauuucagc

SEQ ID NO: 1046020 - RNA, 19 nt, Artificial Sequence
  Description of Artificial Sequence: Synthetic oligonucleotide
  Sense strand starting at position 3278 of SEQ ID NO: 914999
ugaaaugcuugagugauug

SEQ ID NO: 1046021 - RNA, 19 nt, Artificial Sequence
  Description of Artificial Sequence: Synthetic oligonucleotide
  Antisense strand to SEQ ID NO: 1046020
caaucacucaagcauuuca

SEQ ID NO: 1046022 - RNA, 19 nt, Artificial Sequence
  Description of Artificial Sequence: Synthetic oligonucleotide
  Sense strand starting at position 3321 of SEQ ID NO: 914999
gucugaguuguggaugauu

SEQ ID NO: 1046023 - RNA, 19 nt, Artificial Sequence
  Description of Artificial Sequence: Synthetic oligonucleotide
  Antisense strand to SEQ ID NO: 1046022
aaucauccacaacucagac

SEQ ID NO: 1046024 - RNA, 19 nt, Artificial Sequence
  Description of Artificial Sequence: Synthetic oligonucleotide
  Sense strand starting at position 3326 of SEQ ID NO: 914999
aguuguggaugauugugaa

SEQ ID NO: 1046025 - RNA, 19 nt, Artificial Sequence
  Description of Artificial Sequence: Synthetic oligonucleotide
  Antisense strand to SEQ ID NO: 1046024
uucacaaucauccacaacu

SEQ ID NO: 1046026 - RNA, 19 nt, Artificial Sequence
  Description of Artificial Sequence: Synthetic oligonucleotide
  Sense strand starting at position 3336 of SEQ ID NO: 914999
gauugugaaaccugagguu

SEQ ID NO: 1046027 - RNA, 19 nt, Artificial Sequence
  Description of Artificial Sequence: Synthetic oligonucleotide
  Antisense strand to SEQ ID NO: 1046026
aaccucagguuucacaauc

SEQ ID NO: 1046028 - RNA, 19 nt, Artificial Sequence
  Description of Artificial Sequence: Synthetic oligonucleotide
  Sense strand starting at position 3352 of SEQ ID NO: 914999
guuugaguccuggauggug

SEQ ID NO: 1046029 - RNA, 19 nt, Artificial Sequence
  Description of Artificial Sequence: Synthetic oligonucleotide
  Antisense strand to SEQ ID NO: 1046028
caccauccaggacucaaac

SEQ ID NO: 1046030 - RNA, 19 nt, Artificial Sequence
  Description of Artificial Sequence: Synthetic oligonucleotide
  Sense strand starting at position 3397 of SEQ ID NO: 914999
uuuaguuggcaugggaaca

SEQ ID NO: 1046031 - RNA, 19 nt, Artificial Sequence
  Description of Artificial Sequence: Synthetic oligonucleotide
  Antisense strand to SEQ ID NO: 1046030
uguucccaugccaacuaaa

SEQ ID NO: 1046032 - RNA, 19 nt, Artificial Sequence
  Description of Artificial Sequence: Synthetic oligonucleotide
  Sense strand starting at position 3416 of SEQ ID NO: 914999
gggucaggacuuggcaaau

SEQ ID NO: 1046033 - RNA, 19 nt, Artificial Sequence
  Description of Artificial Sequence: Synthetic oligonucleotide
  Antisense strand to SEQ ID NO: 1046032
auuugccaaguccugaccc

SEQ ID NO: 1046034 - RNA, 19 nt, Artificial Sequence
  Description of Artificial Sequence: Synthetic oligonucleotide
  Sense strand starting at position 3495 of SEQ ID NO: 914999
cuguuugagcccuguauuu

SEQ ID NO: 1046035 - RNA, 19 nt, Artificial Sequence
  Description of Artificial Sequence: Synthetic oligonucleotide
  Antisense strand to SEQ ID NO: 1046034
aaauacagggcucaaacag

SEQ ID NO: 1046036 - RNA, 19 nt, Artificial Sequence
  Description of Artificial Sequence: Synthetic oligonucleotide
  Sense strand starting at position 3636 of SEQ ID NO: 914999
ugucuuugcucauuugaau

SEQ ID NO: 1046037 - RNA, 19 nt, Artificial Sequence
  Description of Artificial Sequence: Synthetic oligonucleotide
  Antisense strand to SEQ ID NO: 1046036
auucaaaugagcaaagaca

SEQ ID NO: 1046038 - RNA, 19 nt, Artificial Sequence
  Description of Artificial Sequence: Synthetic oligonucleotide
  Sense strand starting at position 3701 of SEQ ID NO: 914999
uggacuugucaauagcauc

SEQ ID NO: 1046039 - RNA, 19 nt, Artificial Sequence
  Description of Artificial Sequence: Synthetic oligonucleotide
  Antisense strand to SEQ ID NO: 1046038
gaugcuauugacaagucca

SEQ ID NO: 1046040 - RNA, 19 nt, Artificial Sequence
  Description of Artificial Sequence: Synthetic oligonucleotide
  Sense strand starting at position 84 of SEQ ID NO: 915000
cuguuuggugcauaaagga

SEQ ID NO: 1046041 - RNA, 19 nt, Artificial Sequence
  Description of Artificial Sequence: Synthetic oligonucleotide
  Antisense strand to SEQ ID NO: 1046040
uccuuuaugcaccaaacag

SEQ ID NO: 1046042 - RNA, 19 nt, Artificial Sequence
  Description of Artificial Sequence: Synthetic oligonucleotide
  Sense strand starting at position 170 of SEQ ID NO: 915000
cuugguaucccacgggaaa

SEQ ID NO: 1046043 - RNA, 19 nt, Artificial Sequence
  Description of Artificial Sequence: Synthetic oligonucleotide
  Antisense strand to SEQ ID NO: 1046042
uuucccgugggauaccaag

SEQ ID NO: 1046044 - RNA, 19 nt, Artificial Sequence
  Description of Artificial Sequence: Synthetic oligonucleotide
  Sense strand starting at position 171 of SEQ ID NO: 915000
uugguaucccacgggaaac

SEQ ID NO: 1046045 - RNA, 19 nt, Artificial Sequence
  Description of Artificial Sequence: Synthetic oligonucleotide
  Antisense strand to SEQ ID NO: 1046044
guuucccgugggauaccaa

SEQ ID NO: 1046046 - RNA, 19 nt, Artificial Sequence
  Description of Artificial Sequence: Synthetic oligonucleotide
  Sense strand starting at position 548 of SEQ ID NO: 915000
gggacuggcguauagcaau

SEQ ID NO: 1046047 - RNA, 19 nt, Artificial Sequence
  Description of Artificial Sequence: Synthetic oligonucleotide
  Antisense strand to SEQ ID NO: 1046046
auugcuauacgccaguccc

SEQ ID NO: 1046048 - RNA, 19 nt, Artificial Sequence
  Description of Artificial Sequence: Synthetic oligonucleotide
  Sense strand starting at position 591 of SEQ ID NO: 915000
gccuguugcgugucuagaa

SEQ ID NO: 1046049 - RNA, 19 nt, Artificial Sequence
  Description of Artificial Sequence: Synthetic oligonucleotide
  Antisense strand to SEQ ID NO: 1046048
uucuagacacgcaacaggc

SEQ ID NO: 1046050 - RNA, 19 nt, Artificial Sequence
  Description of Artificial Sequence: Synthetic oligonucleotide
  Sense strand starting at position 641 of SEQ ID NO: 915000
cugguucucgguuaagaca

SEQ ID NO: 1046051 - RNA, 19 nt, Artificial Sequence
  Description of Artificial Sequence: Synthetic oligonucleotide
  Antisense strand to SEQ ID NO: 1046050
ugucuuaaccgagaaccag

SEQ ID NO: 1046052 - RNA, 19 nt, Artificial Sequence
  Description of Artificial Sequence: Synthetic oligonucleotide
  Sense strand starting at position 648 of SEQ ID NO: 915000
ucgguuaagacaugguaca

SEQ ID NO: 1046053 - RNA, 19 nt, Artificial Sequence
  Description of Artificial Sequence: Synthetic oligonucleotide
  Antisense strand to SEQ ID NO: 1046052
uguaccaugucuuaaccga

SEQ ID NO: 1046054 - RNA, 19 nt, Artificial Sequence
  Description of Artificial Sequence: Synthetic oligonucleotide
  Sense strand starting at position 767 of SEQ ID NO: 915000
cugguucuugguuaagaca

SEQ ID NO: 1046055 - RNA, 19 nt, Artificial Sequence
  Description of Artificial Sequence: Synthetic oligonucleotide
  Antisense strand to SEQ ID NO: 1046054
ugucuuaaccaagaaccag

SEQ ID NO: 1046056 - RNA, 19 nt, Artificial Sequence
  Description of Artificial Sequence: Synthetic oligonucleotide
  Sense strand starting at position 922 of SEQ ID NO: 915000
aguguauugagcuagugau

SEQ ID NO: 1046057 - RNA, 19 nt, Artificial Sequence
  Description of Artificial Sequence: Synthetic oligonucleotide
  Antisense strand to SEQ ID NO: 1046056
aucacuagcucaauacacu

SEQ ID NO: 1046058 - RNA, 19 nt, Artificial Sequence
  Description of Artificial Sequence: Synthetic oligonucleotide
  Sense strand starting at position 928 of SEQ ID NO: 915000
uugagcuagugaucugaga

SEQ ID NO: 1046059 - RNA, 19 nt, Artificial Sequence
  Description of Artificial Sequence: Synthetic oligonucleotide
  Antisense strand to SEQ ID NO: 1046058
ucucagaucacuagcucaa

SEQ ID NO: 1046060 - RNA, 19 nt, Artificial Sequence
  Description of Artificial Sequence: Synthetic oligonucleotide
  Sense strand starting at position 954 of SEQ ID NO: 915000
cugucauucguggauuugu

SEQ ID NO: 1046061 - RNA, 19 nt, Artificial Sequence
  Description of Artificial Sequence: Synthetic oligonucleotide
  Antisense strand to SEQ ID NO: 1046060
acaaauccacgaaugacag

SEQ ID NO: 1046062 - RNA, 19 nt, Artificial Sequence
  Description of Artificial Sequence: Synthetic oligonucleotide
  Sense strand starting at position 962 of SEQ ID NO: 915000
cguggauuuguuuguggag

SEQ ID NO: 1046063 - RNA, 19 nt, Artificial Sequence
  Description of Artificial Sequence: Synthetic oligonucleotide
  Antisense strand to SEQ ID NO: 1046062
cuccacaaacaaauccacg

SEQ ID NO: 1046064 - RNA, 19 nt, Artificial Sequence
  Description of Artificial Sequence: Synthetic oligonucleotide
  Sense strand starting at position 1017 of SEQ ID NO: 915000
ugaguaagauguguccaug

SEQ ID NO: 1046065 - RNA, 19 nt, Artificial Sequence
  Description of Artificial Sequence: Synthetic oligonucleotide
  Antisense strand to SEQ ID NO: 1046064
cauggacacaucuuacuca

SEQ ID NO: 1046066 - RNA, 19 nt, Artificial Sequence
  Description of Artificial Sequence: Synthetic oligonucleotide
  Sense strand starting at position 1020 of SEQ ID NO: 915000
guaagauguguccauggga

SEQ ID NO: 1046067 - RNA, 19 nt, Artificial Sequence
  Description of Artificial Sequence: Synthetic oligonucleotide
  Antisense strand to SEQ ID NO: 1046066
ucccauggacacaucuuac

SEQ ID NO: 1046068 - RNA, 19 nt, Artificial Sequence
  Description of Artificial Sequence: Synthetic oligonucleotide
  Sense strand starting at position 1023 of SEQ ID NO: 915000
agauguguccaugggaggu

SEQ ID NO: 1046069 - RNA, 19 nt, Artificial Sequence
  Description of Artificial Sequence: Synthetic oligonucleotide
  Antisense strand to SEQ ID NO: 1046068
accucccauggacacaucu

SEQ ID NO: 1046070 - RNA, 19 nt, Artificial Sequence
  Description of Artificial Sequence: Synthetic oligonucleotide
  Sense strand starting at position 1061 of SEQ ID NO: 915000
ggaaacguggcaugaauaa

SEQ ID NO: 1046071 - RNA, 19 nt, Artificial Sequence
  Description of Artificial Sequence: Synthetic oligonucleotide
  Antisense strand to SEQ ID NO: 1046070
uuauucaugccacguuucc

SEQ ID NO: 1046072 - RNA, 19 nt, Artificial Sequence
  Description of Artificial Sequence: Synthetic oligonucleotide
  Sense strand starting at position 1196 of SEQ ID NO: 915000
caugcaugucaaggacaga

SEQ ID NO: 1046073 - RNA, 19 nt, Artificial Sequence
  Description of Artificial Sequence: Synthetic oligonucleotide
  Antisense strand to SEQ ID NO: 1046072
ucuguccuugacaugcaug

SEQ ID NO: 1046074 - RNA, 19 nt, Artificial Sequence
  Description of Artificial Sequence: Synthetic oligonucleotide
  Sense strand starting at position 1237 of SEQ ID NO: 915000
gagugacaagagugucaca

SEQ ID NO: 1046075 - RNA, 19 nt, Artificial Sequence
  Description of Artificial Sequence: Synthetic oligonucleotide
  Antisense strand to SEQ ID NO: 1046074
ugugacacucuugucacuc

SEQ ID NO: 1046076 - RNA, 19 nt, Artificial Sequence
  Description of Artificial Sequence: Synthetic oligonucleotide
  Sense strand starting at position 1552 of SEQ ID NO: 915000
guguaugcauuuccagacu

SEQ ID NO: 1046077 - RNA, 19 nt, Artificial Sequence
  Description of Artificial Sequence: Synthetic oligonucleotide
  Antisense strand to SEQ ID NO: 1046076
agucuggaaaugcauacac

SEQ ID NO: 1046078 - RNA, 19 nt, Artificial Sequence
  Description of Artificial Sequence: Synthetic oligonucleotide
  Sense strand starting at position 2159 of SEQ ID NO: 915000
augucucuccuugacaguu

SEQ ID NO: 1046079 - RNA, 19 nt, Artificial Sequence
  Description of Artificial Sequence: Synthetic oligonucleotide
  Antisense strand to SEQ ID NO: 1046078
aacugucaaggagagacau

SEQ ID NO: 1046080 - RNA, 19 nt, Artificial Sequence
  Description of Artificial Sequence: Synthetic oligonucleotide
  Sense strand starting at position 2176 of SEQ ID NO: 915000
uuguaaauuuccuuuggca

SEQ ID NO: 1046081 - RNA, 19 nt, Artificial Sequence
  Description of Artificial Sequence: Synthetic oligonucleotide
  Antisense strand to SEQ ID NO: 1046080
ugccaaaggaaauuuacaa

SEQ ID NO: 1046082 - RNA, 19 nt, Artificial Sequence
  Description of Artificial Sequence: Synthetic oligonucleotide
  Sense strand starting at position 2184 of SEQ ID NO: 915000
uuccuuuggcaagggaaau

SEQ ID NO: 1046083 - RNA, 19 nt, Artificial Sequence
  Description of Artificial Sequence: Synthetic oligonucleotide
  Antisense strand to SEQ ID NO: 1046082
auuucccuugccaaaggaa

SEQ ID NO: 1046084 - RNA, 19 nt, Artificial Sequence
  Description of Artificial Sequence: Synthetic oligonucleotide
  Sense strand starting at position 2190 of SEQ ID NO: 915000
uggcaagggaaauguugau

SEQ ID NO: 1046085 - RNA, 19 nt, Artificial Sequence
  Description of Artificial Sequence: Synthetic oligonucleotide
  Antisense strand to SEQ ID NO: 1046084
aucaacauuucccuugcca

SEQ ID NO: 1046086 - RNA, 19 nt, Artificial Sequence
  Description of Artificial Sequence: Synthetic oligonucleotide
  Sense strand starting at position 2196 of SEQ ID NO: 915000
gggaaauguugauaauuua

SEQ ID NO: 1046087 - RNA, 19 nt, Artificial Sequence
  Description of Artificial Sequence: Synthetic oligonucleotide
  Antisense strand to SEQ ID NO: 1046086
uaaauuaucaacauuuccc

SEQ ID NO: 1046088 - RNA, 19 nt, Artificial Sequence
  Description of Artificial Sequence: Synthetic oligonucleotide
  Sense strand starting at position 2240 of SEQ ID NO: 915000
gagugaaagugguuguaau

SEQ ID NO: 1046089 - RNA, 19 nt, Artificial Sequence
  Description of Artificial Sequence: Synthetic oligonucleotide
  Antisense strand to SEQ ID NO: 1046088
auuacaaccacuuucacuc

SEQ ID NO: 1046090 - RNA, 19 nt, Artificial Sequence
  Description of Artificial Sequence: Synthetic oligonucleotide
  Sense strand starting at position 2260 of SEQ ID NO: 915000
gucuuagauccugggagug

SEQ ID NO: 1046091 - RNA, 19 nt, Artificial Sequence
  Description of Artificial Sequence: Synthetic oligonucleotide
  Antisense strand to SEQ ID NO: 1046090
cacucccaggaucuaagac

SEQ ID NO: 1046092 - RNA, 19 nt, Artificial Sequence
  Description of Artificial Sequence: Synthetic oligonucleotide
  Sense strand starting at position 2278 of SEQ ID NO: 915000
ggaguaagaaguugaaccu

SEQ ID NO: 1046093 - RNA, 19 nt, Artificial Sequence
  Description of Artificial Sequence: Synthetic oligonucleotide
  Antisense strand to SEQ ID NO: 1046092
agguucaacuucuuacucc

SEQ ID NO: 1046094 - RNA, 19 nt, Artificial Sequence
  Description of Artificial Sequence: Synthetic oligonucleotide
  Sense strand starting at position 2574 of SEQ ID NO: 915000
aggucuauuuacgcucaga

SEQ ID NO: 1046095 - RNA, 19 nt, Artificial Sequence
  Description of Artificial Sequence: Synthetic oligonucleotide
  Antisense strand to SEQ ID NO: 1046094
ucugagcguaaauagaccu

SEQ ID NO: 1046096 - RNA, 19 nt, Artificial Sequence
  Description of Artificial Sequence: Synthetic oligonucleotide
  Sense strand starting at position 2612 of SEQ ID NO: 915000
cagagcucuguugaacauu

SEQ ID NO: 1046097 - RNA, 19 nt, Artificial Sequence
  Description of Artificial Sequence: Synthetic oligonucleotide
  Antisense strand to SEQ ID NO: 1046096
aauguucaacagagcucug

SEQ ID NO: 1046098 - RNA, 19 nt, Artificial Sequence
  Description of Artificial Sequence: Synthetic oligonucleotide
  Sense strand starting at position 3056 of SEQ ID NO: 915000
augguucugggaugaaauu

SEQ ID NO: 1046099 - RNA, 19 nt, Artificial Sequence
  Description of Artificial Sequence: Synthetic oligonucleotide
  Antisense strand to SEQ ID NO: 1046098
aauuucaucccagaaccau

SEQ ID NO: 1046100 - RNA, 19 nt, Artificial Sequence
  Description of Artificial Sequence: Synthetic oligonucleotide
  Sense strand starting at position 3065 of SEQ ID NO: 915000
ggaugaaauuaguccaccu

SEQ ID NO: 1046101 - RNA, 19 nt, Artificial Sequence
  Description of Artificial Sequence: Synthetic oligonucleotide
  Antisense strand to SEQ ID NO: 1046100
agguggacuaauuucaucc

SEQ ID NO: 1046102 - RNA, 19 nt, Artificial Sequence
  Description of Artificial Sequence: Synthetic oligonucleotide
  Sense strand starting at position 3098 of SEQ ID NO: 915000
uucgauucucaugagggua

SEQ ID NO: 1046103 - RNA, 19 nt, Artificial Sequence
  Description of Artificial Sequence: Synthetic oligonucleotide
  Antisense strand to SEQ ID NO: 1046102
uacccucaugagaaucgaa

SEQ ID NO: 1046104 - RNA, 19 nt, Artificial Sequence
  Description of Artificial Sequence: Synthetic oligonucleotide
  Sense strand starting at position 3328 of SEQ ID NO: 915000
caagcuuaacccuaggagu

SEQ ID NO: 1046105 - RNA, 19 nt, Artificial Sequence
  Description of Artificial Sequence: Synthetic oligonucleotide
  Antisense strand to SEQ ID NO: 1046104
acuccuaggguuaagcuug

SEQ ID NO: 1046106 - RNA, 19 nt, Artificial Sequence
  Description of Artificial Sequence: Synthetic oligonucleotide
  Sense strand starting at position 3330 of SEQ ID NO: 915000
agcuuaacccuaggaguca

SEQ ID NO: 1046107 - RNA, 19 nt, Artificial Sequence
  Description of Artificial Sequence: Synthetic oligonucleotide
  Antisense strand to SEQ ID NO: 1046106
ugacuccuaggguuaagcu

SEQ ID NO: 1046108 - RNA, 19 nt, Artificial Sequence
  Description of Artificial Sequence: Synthetic oligonucleotide
  Sense strand starting at position 3376 of SEQ ID NO: 915000
guacuuaccggguaucaaa

SEQ ID NO: 1046109 - RNA, 19 nt, Artificial Sequence
  Description of Artificial Sequence: Synthetic oligonucleotide
  Antisense strand to SEQ ID NO: 1046108
uuugauacccgguaaguac

SEQ ID NO: 1046110 - RNA, 19 nt, Artificial Sequence
  Description of Artificial Sequence: Synthetic oligonucleotide
  Sense strand starting at position 3392 of SEQ ID NO: 915000
aaauaacuagucggagcuu

SEQ ID NO: 1046111 - RNA, 19 nt, Artificial Sequence
  Description of Artificial Sequence: Synthetic oligonucleotide
  Antisense strand to SEQ ID NO: 1046110
aagcuccgacuaguuauuu

SEQ ID NO: 1046112 - RNA, 19 nt, Artificial Sequence
  Description of Artificial Sequence: Synthetic oligonucleotide
  Sense strand starting at position 3410 of SEQ ID NO: 915000
ucaguuucugauuaucuca

SEQ ID NO: 1046113 - RNA, 19 nt, Artificial Sequence
  Description of Artificial Sequence: Synthetic oligonucleotide
  Antisense strand to SEQ ID NO: 1046112
ugagauaaucagaaacuga

SEQ ID NO: 1046114 - RNA, 19 nt, Artificial Sequence
  Description of Artificial Sequence: Synthetic oligonucleotide
  Sense strand starting at position 3412 of SEQ ID NO: 915000
aguuucugauuaucucaca

SEQ ID NO: 1046115 - RNA, 19 nt, Artificial Sequence
  Description of Artificial Sequence: Synthetic oligonucleotide
  Antisense strand to SEQ ID NO: 1046114
ugugagauaaucagaaacu

SEQ ID NO: 1046116 - RNA, 19 nt, Artificial Sequence
  Description of Artificial Sequence: Synthetic oligonucleotide
  Sense strand starting at position 3528 of SEQ ID NO: 915000
cugaucuuuccaugagcac

SEQ ID NO: 1046117 - RNA, 19 nt, Artificial Sequence
  Description of Artificial Sequence: Synthetic oligonucleotide
  Antisense strand to SEQ ID NO: 1046116
gugcucauggaaagaucag

SEQ ID NO: 1046118 - RNA, 19 nt, Artificial Sequence
  Description of Artificial Sequence: Synthetic oligonucleotide
  Sense strand starting at position 3791 of SEQ ID NO: 915000
cugugacucccagauccua

SEQ ID NO: 1046119 - RNA, 19 nt, Artificial Sequence
  Description of Artificial Sequence: Synthetic oligonucleotide
  Antisense strand to SEQ ID NO: 1046118
uaggaucugggagucacag

SEQ ID NO: 1046120 - RNA, 19 nt, Artificial Sequence
  Description of Artificial Sequence: Synthetic oligonucleotide
  Sense strand starting at position 20 of SEQ ID NO: 915001
guuaguuccuaugucucaa

SEQ ID NO: 1046121 - RNA, 19 nt, Artificial Sequence
  Description of Artificial Sequence: Synthetic oligonucleotide
  Antisense strand to SEQ ID NO: 1046120
uugagacauaggaacuaac

SEQ ID NO: 1046122 - RNA, 19 nt, Artificial Sequence
  Description of Artificial Sequence: Synthetic oligonucleotide
  Sense strand starting at position 61 of SEQ ID NO: 915001
uaaggaggcuagucuaaag

SEQ ID NO: 1046123 - RNA, 19 nt, Artificial Sequence
  Description of Artificial Sequence: Synthetic oligonucleotide
  Antisense strand to SEQ ID NO: 1046122
cuuuagacuagccuccuua

SEQ ID NO: 1046124 - RNA, 19 nt, Artificial Sequence
  Description of Artificial Sequence: Synthetic oligonucleotide
  Sense strand starting at position 163 of SEQ ID NO: 915001
auuagaucccaagguauuc

SEQ ID NO: 1046125 - RNA, 19 nt, Artificial Sequence
  Description of Artificial Sequence: Synthetic oligonucleotide
  Antisense strand to SEQ ID NO: 1046124
gaauaccuugggaucuaau

SEQ ID NO: 1046126 - RNA, 19 nt, Artificial Sequence
  Description of Artificial Sequence: Synthetic oligonucleotide
  Sense strand starting at position 266 of SEQ ID NO: 915001
ggagauggguacucagagu

SEQ ID NO: 1046127 - RNA, 19 nt, Artificial Sequence
  Description of Artificial Sequence: Synthetic oligonucleotide
  Antisense strand to SEQ ID NO: 1046126
acucugaguacccaucucc

SEQ ID NO: 1046128 - RNA, 19 nt, Artificial Sequence
  Description of Artificial Sequence: Synthetic oligonucleotide
  Sense strand starting at position 274 of SEQ ID NO: 915001
guacucagaguacaguaau

SEQ ID NO: 1046129 - RNA, 19 nt, Artificial Sequence
  Description of Artificial Sequence: Synthetic oligonucleotide
  Antisense strand to SEQ ID NO: 1046128
auuacuguacucugaguac

SEQ ID NO: 1046130 - RNA, 19 nt, Artificial Sequence
  Description of Artificial Sequence: Synthetic oligonucleotide
  Sense strand starting at position 337 of SEQ ID NO: 915001
uaaagaauuguccacguuu

SEQ ID NO: 1046131 - RNA, 19 nt, Artificial Sequence
  Description of Artificial Sequence: Synthetic oligonucleotide
  Antisense strand to SEQ ID NO: 1046130
aaacguggacaauucuuua

SEQ ID NO: 1046132 - RNA, 19 nt, Artificial Sequence
  Description of Artificial Sequence: Synthetic oligonucleotide
  Sense strand starting at position 339 of SEQ ID NO: 915001
aagaauuguccacguuucu

SEQ ID NO: 1046133 - RNA, 19 nt, Artificial Sequence
  Description of Artificial Sequence: Synthetic oligonucleotide
  Antisense strand to SEQ ID NO: 1046132
agaaacguggacaauucuu

SEQ ID NO: 1046134 - RNA, 19 nt, Artificial Sequence
  Description of Artificial Sequence: Synthetic oligonucleotide
  Sense strand starting at position 351 of SEQ ID NO: 915001
cguuucugcauguauauga

SEQ ID NO: 1046135 - RNA, 19 nt, Artificial Sequence
  Description of Artificial Sequence: Synthetic oligonucleotide
  Antisense strand to SEQ ID NO: 1046134
ucauauacaugcagaaacg

SEQ ID NO: 1046136 - RNA, 19 nt, Artificial Sequence
  Description of Artificial Sequence: Synthetic oligonucleotide
  Sense strand starting at position 383 of SEQ ID NO: 915001
uccuuugcuguugaucauu

SEQ ID NO: 1046137 - RNA, 19 nt, Artificial Sequence
  Description of Artificial Sequence: Synthetic oligonucleotide
  Antisense strand to SEQ ID NO: 1046136
aaugaucaacagcaaagga

SEQ ID NO: 1046138 - RNA, 19 nt, Artificial Sequence
  Description of Artificial Sequence: Synthetic oligonucleotide
  Sense strand starting at position 484 of SEQ ID NO: 915001
gcuguuuaguuucuggacu

SEQ ID NO: 1046139 - RNA, 19 nt, Artificial Sequence
  Description of Artificial Sequence: Synthetic oligonucleotide
  Antisense strand to SEQ ID NO: 1046138
aguccagaaacuaaacagc

SEQ ID NO: 1046140 - RNA, 19 nt, Artificial Sequence
  Description of Artificial Sequence: Synthetic oligonucleotide
  Sense strand starting at position 498 of SEQ ID NO: 915001
ggacuaagaucuguaaauu

SEQ ID NO: 1046141 - RNA, 19 nt, Artificial Sequence
  Description of Artificial Sequence: Synthetic oligonucleotide
  Antisense strand to SEQ ID NO: 1046140
aauuuacagaucuuagucc

SEQ ID NO: 1046142 - RNA, 19 nt, Artificial Sequence
  Description of Artificial Sequence: Synthetic oligonucleotide
  Sense strand starting at position 538 of SEQ ID NO: 915001
cauggcuaggucuauaguu

SEQ ID NO: 1046143 - RNA, 19 nt, Artificial Sequence
  Description of Artificial Sequence: Synthetic oligonucleotide
  Antisense strand to SEQ ID NO: 1046142
aacuauagaccuagccaug

SEQ ID NO: 1046144 - RNA, 19 nt, Artificial Sequence
  Description of Artificial Sequence: Synthetic oligonucleotide
  Sense strand starting at position 540 of SEQ ID NO: 915001
uggcuaggucuauaguuau

SEQ ID NO: 1046145 - RNA, 19 nt, Artificial Sequence
  Description of Artificial Sequence: Synthetic oligonucleotide
  Antisense strand to SEQ ID NO: 1046144
auaacuauagaccuagcca

SEQ ID NO: 1046146 - RNA, 19 nt, Artificial Sequence
  Description of Artificial Sequence: Synthetic oligonucleotide
  Sense strand starting at position 546 of SEQ ID NO: 915001
ggucuauaguuauuaggac

SEQ ID NO: 1046147 - RNA, 19 nt, Artificial Sequence
  Description of Artificial Sequence: Synthetic oligonucleotide
  Antisense strand to SEQ ID NO: 1046146
guccuaauaacuauagacc

SEQ ID NO: 1046148 - RNA, 19 nt, Artificial Sequence
  Description of Artificial Sequence: Synthetic oligonucleotide
  Sense strand starting at position 668 of SEQ ID NO: 915001
uucuguaaaugauacauga

SEQ ID NO: 1046149 - RNA, 19 nt, Artificial Sequence
  Description of Artificial Sequence: Synthetic oligonucleotide
  Antisense strand to SEQ ID NO: 1046148
ucauguaucauuuacagaa

SEQ ID NO: 1046150 - RNA, 19 nt, Artificial Sequence
  Description of Artificial Sequence: Synthetic oligonucleotide
  Sense strand starting at position 726 of SEQ ID NO: 915001
ccuauugacuuaguaggau

SEQ ID NO: 1046151 - RNA, 19 nt, Artificial Sequence
  Description of Artificial Sequence: Synthetic oligonucleotide
  Antisense strand to SEQ ID NO: 1046150
auccuacuaagucaauagg

SEQ ID NO: 1046152 - RNA, 19 nt, Artificial Sequence
  Description of Artificial Sequence: Synthetic oligonucleotide
  Sense strand starting at position 735 of SEQ ID NO: 915001
uuaguaggauuguucucuu

SEQ ID NO: 1046153 - RNA, 19 nt, Artificial Sequence
  Description of Artificial Sequence: Synthetic oligonucleotide
  Antisense strand to SEQ ID NO: 1046152
aagagaacaauccuacuaa

SEQ ID NO: 1046154 - RNA, 19 nt, Artificial Sequence
  Description of Artificial Sequence: Synthetic oligonucleotide
  Sense strand starting at position 738 of SEQ ID NO: 915001
guaggauuguucucuugac

SEQ ID NO: 1046155 - RNA, 19 nt, Artificial Sequence
  Description of Artificial Sequence: Synthetic oligonucleotide
  Antisense strand to SEQ ID NO: 1046154
gucaagagaacaauccuac

SEQ ID NO: 1046156 - RNA, 19 nt, Artificial Sequence
  Description of Artificial Sequence: Synthetic oligonucleotide
  Sense strand starting at position 742 of SEQ ID NO: 915001
gauuguucucuugacaguu

SEQ ID NO: 1046157 - RNA, 19 nt, Artificial Sequence
  Description of Artificial Sequence: Synthetic oligonucleotide
  Antisense strand to SEQ ID NO: 1046156
aacugucaagagaacaauc

SEQ ID NO: 1046158 - RNA, 19 nt, Artificial Sequence
  Description of Artificial Sequence: Synthetic oligonucleotide
  Sense strand starting at position 855 of SEQ ID NO: 915001
gagcucugaugagaucaaa

SEQ ID NO: 1046159 - RNA, 19 nt, Artificial Sequence
  Description of Artificial Sequence: Synthetic oligonucleotide
  Antisense strand to SEQ ID NO: 1046158
uuugaucucaucagagcuc

SEQ ID NO: 1046160 - RNA, 19 nt, Artificial Sequence
  Description of Artificial Sequence: Synthetic oligonucleotide
  Sense strand starting at position 906 of SEQ ID NO: 915001
agcaauuugcucugugauu

SEQ ID NO: 1046161 - RNA, 19 nt, Artificial Sequence
  Description of Artificial Sequence: Synthetic oligonucleotide
  Antisense strand to SEQ ID NO: 1046160
aaucacagagcaaauugcu

SEQ ID NO: 1046162 - RNA, 19 nt, Artificial Sequence
  Description of Artificial Sequence: Synthetic oligonucleotide
  Sense strand starting at position 907 of SEQ ID NO: 915001
gcaauuugcucugugauua

SEQ ID NO: 1046163 - RNA, 19 nt, Artificial Sequence
  Description of Artificial Sequence: Synthetic oligonucleotide
  Antisense strand to SEQ ID NO: 1046162
uaaucacagagcaaauugc

SEQ ID NO: 1046164 - RNA, 19 nt, Artificial Sequence
  Description of Artificial Sequence: Synthetic oligonucleotide
  Sense strand starting at position 911 of SEQ ID NO: 915001
uuugcucugugauuacauu

SEQ ID NO: 1046165 - RNA, 19 nt, Artificial Sequence
  Description of Artificial Sequence: Synthetic oligonucleotide
  Antisense strand to SEQ ID NO: 1046164
aauguaaucacagagcaaa

SEQ ID NO: 1046166 - RNA, 19 nt, Artificial Sequence
  Description of Artificial Sequence: Synthetic oligonucleotide
  Sense strand starting at position 912 of SEQ ID NO: 915001
uugcucugugauuacauua

SEQ ID NO: 1046167 - RNA, 19 nt, Artificial Sequence
  Description of Artificial Sequence: Synthetic oligonucleotide
  Antisense strand to SEQ ID NO: 1046166
uaauguaaucacagagcaa

SEQ ID NO: 1046168 - RNA, 19 nt, Artificial Sequence
  Description of Artificial Sequence: Synthetic oligonucleotide
  Sense strand starting at position 1089 of SEQ ID NO: 915001
ccaguacauccacagguau

SEQ ID NO: 1046169 - RNA, 19 nt, Artificial Sequence
  Description of Artificial Sequence: Synthetic oligonucleotide
  Antisense strand to SEQ ID NO: 1046168
auaccuguggauguacugg

SEQ ID NO: 1046170 - RNA, 19 nt, Artificial Sequence
  Description of Artificial Sequence: Synthetic oligonucleotide
  Sense strand starting at position 1228 of SEQ ID NO: 915001
agccaagggcuccaguauu

SEQ ID NO: 1046171 - RNA, 19 nt, Artificial Sequence
  Description of Artificial Sequence: Synthetic oligonucleotide
  Antisense strand to SEQ ID NO: 1046170
aauacuggagcccuuggcu

SEQ ID NO: 1046172 - RNA, 19 nt, Artificial Sequence
  Description of Artificial Sequence: Synthetic oligonucleotide
  Sense strand starting at position 1241 of SEQ ID NO: 915001
aguauuacuucuguguucu

SEQ ID NO: 1046173 - RNA, 19 nt, Artificial Sequence
  Description of Artificial Sequence: Synthetic oligonucleotide
  Antisense strand to SEQ ID NO: 1046172
agaacacagaaguaauacu

SEQ ID NO: 1046174 - RNA, 19 nt, Artificial Sequence
  Description of Artificial Sequence: Synthetic oligonucleotide
  Sense strand starting at position 1242 of SEQ ID NO: 915001
guauuacuucuguguucua

SEQ ID NO: 1046175 - RNA, 19 nt, Artificial Sequence
  Description of Artificial Sequence: Synthetic oligonucleotide
  Antisense strand to SEQ ID NO: 1046174
uagaacacagaaguaauac

SEQ ID NO: 1046176 - RNA, 19 nt, Artificial Sequence
  Description of Artificial Sequence: Synthetic oligonucleotide
  Sense strand starting at position 1245 of SEQ ID NO: 915001
uuacuucuguguucuaugu

SEQ ID NO: 1046177 - RNA, 19 nt, Artificial Sequence
  Description of Artificial Sequence: Synthetic oligonucleotide
  Antisense strand to SEQ ID NO: 1046176
acauagaacacagaaguaa

SEQ ID NO: 1046178 - RNA, 19 nt, Artificial Sequence
  Description of Artificial Sequence: Synthetic oligonucleotide
  Sense strand starting at position 1334 of SEQ ID NO: 915001
cauggaauggcauacaguu

SEQ ID NO: 1046179 - RNA, 19 nt, Artificial Sequence
  Description of Artificial Sequence: Synthetic oligonucleotide
  Antisense strand to SEQ ID NO: 1046178
aacuguaugccauuccaug

SEQ ID NO: 1046180 - RNA, 19 nt, Artificial Sequence
  Description of Artificial Sequence: Synthetic oligonucleotide
  Sense strand starting at position 1776 of SEQ ID NO: 915001
ucuuguuucguucaugguu

SEQ ID NO: 1046181 - RNA, 19 nt, Artificial Sequence
  Description of Artificial Sequence: Synthetic oligonucleotide
  Antisense strand to SEQ ID NO: 1046180
aaccaugaacgaaacaaga

SEQ ID NO: 1046182 - RNA, 19 nt, Artificial Sequence
  Description of Artificial Sequence: Synthetic oligonucleotide
  Sense strand starting at position 1892 of SEQ ID NO: 915001
cacaguuugugcccauuga

SEQ ID NO: 1046183 - RNA, 19 nt, Artificial Sequence
  Description of Artificial Sequence: Synthetic oligonucleotide
  Antisense strand to SEQ ID NO: 1046182
ucaaugggcacaaacugug

SEQ ID NO: 1046184 - RNA, 19 nt, Artificial Sequence
  Description of Artificial Sequence: Synthetic oligonucleotide
  Sense strand starting at position 1893 of SEQ ID NO: 915001
acaguuugugcccauugau

SEQ ID NO: 1046185 - RNA, 19 nt, Artificial Sequence
  Description of Artificial Sequence: Synthetic oligonucleotide
  Antisense strand to SEQ ID NO: 1046184
aucaaugggcacaaacugu

SEQ ID NO: 1046186 - RNA, 19 nt, Artificial Sequence
  Description of Artificial Sequence: Synthetic oligonucleotide
  Sense strand starting at position 1896 of SEQ ID NO: 915001
guuugugcccauugauuug

SEQ ID NO: 1046187 - RNA, 19 nt, Artificial Sequence
  Description of Artificial Sequence: Synthetic oligonucleotide
  Antisense strand to SEQ ID NO: 1046186
caaaucaaugggcacaaac

SEQ ID NO: 1046188 - RNA, 19 nt, Artificial Sequence
  Description of Artificial Sequence: Synthetic oligonucleotide
  Sense strand starting at position 1903 of SEQ ID NO: 915001
cccauugauuuggaggaga

SEQ ID NO: 1046189 - RNA, 19 nt, Artificial Sequence
  Description of Artificial Sequence: Synthetic oligonucleotide
  Antisense strand to SEQ ID NO: 1046188
ucuccuccaaaucaauggg

SEQ ID NO: 1046190 - RNA, 19 nt, Artificial Sequence
  Description of Artificial Sequence: Synthetic oligonucleotide
  Sense strand starting at position 1947 of SEQ ID NO: 915001
uuacuuuguuccuuuggca

SEQ ID NO: 1046191 - RNA, 19 nt, Artificial Sequence
  Description of Artificial Sequence: Synthetic oligonucleotide
  Antisense strand to SEQ ID NO: 1046190
ugccaaaggaacaaaguaa

SEQ ID NO: 1046192 - RNA, 19 nt, Artificial Sequence
  Description of Artificial Sequence: Synthetic oligonucleotide
  Sense strand starting at position 2000 of SEQ ID NO: 915001
gugccaguaucagauauuu

SEQ ID NO: 1046193 - RNA, 19 nt, Artificial Sequence
  Description of Artificial Sequence: Synthetic oligonucleotide
  Antisense strand to SEQ ID NO: 1046192
aaauaucugauacuggcac

SEQ ID NO: 1046194 - RNA, 19 nt, Artificial Sequence
  Description of Artificial Sequence: Synthetic oligonucleotide
  Sense strand starting at position 2065 of SEQ ID NO: 915001
ugucuuguaucuuuaugua

SEQ ID NO: 1046195 - RNA, 19 nt, Artificial Sequence
  Description of Artificial Sequence: Synthetic oligonucleotide
  Antisense strand to SEQ ID NO: 1046194
uacauaaagauacaagaca

SEQ ID NO: 1046196 - RNA, 19 nt, Artificial Sequence
  Description of Artificial Sequence: Synthetic oligonucleotide
  Sense strand starting at position 2137 of SEQ ID NO: 915001
aacuguaaaguuuggaaua

SEQ ID NO: 1046197 - RNA, 19 nt, Artificial Sequence
  Description of Artificial Sequence: Synthetic oligonucleotide
  Antisense strand to SEQ ID NO: 1046196
uauuccaaacuuuacaguu

SEQ ID NO: 1046198 - RNA, 19 nt, Artificial Sequence
  Description of Artificial Sequence: Synthetic oligonucleotide
  Sense strand starting at position 3580 of SEQ ID NO: 915001
gaacgagacuccguauaca

SEQ ID NO: 1046199 - RNA, 19 nt, Artificial Sequence
  Description of Artificial Sequence: Synthetic oligonucleotide
  Antisense strand to SEQ ID NO: 1046198
uguauacggagucucguuc

SEQ ID NO: 1046200 - RNA, 19 nt, Artificial Sequence
  Description of Artificial Sequence: Synthetic oligonucleotide
  Sense strand starting at position 7 of SEQ ID NO: 915002
gaauuuauaugugaacuga

SEQ ID NO: 1046201 - RNA, 19 nt, Artificial Sequence
  Description of Artificial Sequence: Synthetic oligonucleotide
  Antisense strand to SEQ ID NO: 1046200
ucaguucacauauaaauuc

SEQ ID NO: 1046202 - RNA, 19 nt, Artificial Sequence
  Description of Artificial Sequence: Synthetic oligonucleotide
  Sense strand starting at position 324 of SEQ ID NO: 915002
uccagaaauucuuuggauu

SEQ ID NO: 1046203 - RNA, 19 nt, Artificial Sequence
  Description of Artificial Sequence: Synthetic oligonucleotide
  Antisense strand to SEQ ID NO: 1046202
aauccaaagaauuucugga

SEQ ID NO: 1046204 - RNA, 19 nt, Artificial Sequence
  Description of Artificial Sequence: Synthetic oligonucleotide
  Sense strand starting at position 426 of SEQ ID NO: 915002
cuaauauggugcccagaau

SEQ ID NO: 1046205 - RNA, 19 nt, Artificial Sequence
  Description of Artificial Sequence: Synthetic oligonucleotide
  Antisense strand to SEQ ID NO: 1046204
auucugggcaccauauuag

SEQ ID NO: 1046206 - RNA, 19 nt, Artificial Sequence
  Description of Artificial Sequence: Synthetic oligonucleotide
  Sense strand starting at position 427 of SEQ ID NO: 915002
uaauauggugcccagaaua

SEQ ID NO: 1046207 - RNA, 19 nt, Artificial Sequence
  Description of Artificial Sequence: Synthetic oligonucleotide
  Antisense strand to SEQ ID NO: 1046206
uauucugggcaccauauua

SEQ ID NO: 1046208 - RNA, 19 nt, Artificial Sequence
  Description of Artificial Sequence: Synthetic oligonucleotide
  Sense strand starting at position 484 of SEQ ID NO: 915002
uggugucaagaauagugau

SEQ ID NO: 1046209 - RNA, 19 nt, Artificial Sequence
  Description of Artificial Sequence: Synthetic oligonucleotide
  Antisense strand to SEQ ID NO: 1046208
aucacuauucuugacacca

SEQ ID NO: 1046210 - RNA, 19 nt, Artificial Sequence
  Description of Artificial Sequence: Synthetic oligonucleotide
  Sense strand starting at position 595 of SEQ ID NO: 915002
ugagauagcuaauuagcca

SEQ ID NO: 1046211 - RNA, 19 nt, Artificial Sequence
  Description of Artificial Sequence: Synthetic oligonucleotide
  Antisense strand to SEQ ID NO: 1046210
uggcuaauuagcuaucuca

SEQ ID NO: 1046212 - RNA, 19 nt, Artificial Sequence
  Description of Artificial Sequence: Synthetic oligonucleotide
  Sense strand starting at position 694 of SEQ ID NO: 915002
auaugaguuccaggagguc

SEQ ID NO: 1046213 - RNA, 19 nt, Artificial Sequence
  Description of Artificial Sequence: Synthetic oligonucleotide
  Antisense strand to SEQ ID NO: 1046212
gaccuccuggaacucauau

SEQ ID NO: 1046214 - RNA, 19 nt, Artificial Sequence
  Description of Artificial Sequence: Synthetic oligonucleotide
  Sense strand starting at position 753 of SEQ ID NO: 915002
aggauugugacauguacau

SEQ ID NO: 1046215 - RNA, 19 nt, Artificial Sequence
  Description of Artificial Sequence: Synthetic oligonucleotide
  Antisense strand to SEQ ID NO: 1046214
auguacaugucacaauccu

SEQ ID NO: 1046216 - RNA, 19 nt, Artificial Sequence
  Description of Artificial Sequence: Synthetic oligonucleotide
  Sense strand starting at position 757 of SEQ ID NO: 915002
uugugacauguacauaauu

SEQ ID NO: 1046217 - RNA, 19 nt, Artificial Sequence
  Description of Artificial Sequence: Synthetic oligonucleotide
  Antisense strand to SEQ ID NO: 1046216
aauuauguacaugucacaa

SEQ ID NO: 1046218 - RNA, 19 nt, Artificial Sequence
  Description of Artificial Sequence: Synthetic oligonucleotide
  Sense strand starting at position 865 of SEQ ID NO: 915002
cgacuuagauaauugaucu

SEQ ID NO: 1046219 - RNA, 19 nt, Artificial Sequence
  Description of Artificial Sequence: Synthetic oligonucleotide
  Antisense strand to SEQ ID NO: 1046218
agaucaauuaucuaagucg

SEQ ID NO: 1046220 - RNA, 19 nt, Artificial Sequence
  Description of Artificial Sequence: Synthetic oligonucleotide
  Sense strand starting at position 1679 of SEQ ID NO: 915002
aucaucucugaguaguaaa

SEQ ID NO: 1046221 - RNA, 19 nt, Artificial Sequence
  Description of Artificial Sequence: Synthetic oligonucleotide
  Antisense strand to SEQ ID NO: 1046220
uuuacuacucagagaugau

SEQ ID NO: 1046222 - RNA, 19 nt, Artificial Sequence
  Description of Artificial Sequence: Synthetic oligonucleotide
  Sense strand starting at position 1707 of SEQ ID NO: 915002
cuguuuacagaguaugaua

SEQ ID NO: 1046223 - RNA, 19 nt, Artificial Sequence
  Description of Artificial Sequence: Synthetic oligonucleotide
  Antisense strand to SEQ ID NO: 1046222
uaucauacucuguaaacag

SEQ ID NO: 1046224 - RNA, 19 nt, Artificial Sequence
  Description of Artificial Sequence: Synthetic oligonucleotide
  Sense strand starting at position 2182 of SEQ ID NO: 915002
gcaaaccucuauucugaga

SEQ ID NO: 1046225 - RNA, 19 nt, Artificial Sequence
  Description of Artificial Sequence: Synthetic oligonucleotide
  Antisense strand to SEQ ID NO: 1046224
ucucagaauagagguuugc

SEQ ID NO: 1046226 - RNA, 19 nt, Artificial Sequence
  Description of Artificial Sequence: Synthetic oligonucleotide
  Sense strand starting at position 2196 of SEQ ID NO: 915002
ugagauugcccauauuggu

SEQ ID NO: 1046227 - RNA, 19 nt, Artificial Sequence
  Description of Artificial Sequence: Synthetic oligonucleotide
  Antisense strand to SEQ ID NO: 1046226
accaauaugggcaaucuca

SEQ ID NO: 1046228 - RNA, 19 nt, Artificial Sequence
  Description of Artificial Sequence: Synthetic oligonucleotide
  Sense strand starting at position 2339 of SEQ ID NO: 915002
gagugaaguggcuaaauca

SEQ ID NO: 1046229 - RNA, 19 nt, Artificial Sequence
  Description of Artificial Sequence: Synthetic oligonucleotide
  Antisense strand to SEQ ID NO: 1046228
ugauuuagccacuucacuc

SEQ ID NO: 1046230 - RNA, 19 nt, Artificial Sequence
  Description of Artificial Sequence: Synthetic oligonucleotide
  Sense strand starting at position 2482 of SEQ ID NO: 915002
gugacacgugguguuaguu

SEQ ID NO: 1046231 - RNA, 19 nt, Artificial Sequence
  Description of Artificial Sequence: Synthetic oligonucleotide
  Antisense strand to SEQ ID NO: 1046230
aacuaacaccacgugucac

SEQ ID NO: 1046232 - RNA, 19 nt, Artificial Sequence
  Description of Artificial Sequence: Synthetic oligonucleotide
  Sense strand starting at position 2505 of SEQ ID NO: 915002
guuugagguguagacagua

SEQ ID NO: 1046233 - RNA, 19 nt, Artificial Sequence
  Description of Artificial Sequence: Synthetic oligonucleotide
  Antisense strand to SEQ ID NO: 1046232
uacugucuacaccucaaac

SEQ ID NO: 1046234 - RNA, 19 nt, Artificial Sequence
  Description of Artificial Sequence: Synthetic oligonucleotide
  Sense strand starting at position 2510 of SEQ ID NO: 915002
agguguagacaguaguuaa

SEQ ID NO: 1046235 - RNA, 19 nt, Artificial Sequence
  Description of Artificial Sequence: Synthetic oligonucleotide
  Antisense strand to SEQ ID NO: 1046234
uuaacuacugucuacaccu

SEQ ID NO: 1046236 - RNA, 19 nt, Artificial Sequence
  Description of Artificial Sequence: Synthetic oligonucleotide
  Sense strand starting at position 2549 of SEQ ID NO: 915002
gcuuuagaugagcaguaca

SEQ ID NO: 1046237 - RNA, 19 nt, Artificial Sequence
  Description of Artificial Sequence: Synthetic oligonucleotide
  Antisense strand to SEQ ID NO: 1046236
uguacugcucaucuaaagc

SEQ ID NO: 1046238 - RNA, 19 nt, Artificial Sequence
  Description of Artificial Sequence: Synthetic oligonucleotide
  Sense strand starting at position 2606 of SEQ ID NO: 915002
guuuaaaguaccuggagaa

SEQ ID NO: 1046239 - RNA, 19 nt, Artificial Sequence
  Description of Artificial Sequence: Synthetic oligonucleotide
  Antisense strand to SEQ ID NO: 1046238
uucuccagguacuuuaaac

SEQ ID NO: 1046240 - RNA, 19 nt, Artificial Sequence
  Description of Artificial Sequence: Synthetic oligonucleotide
  Sense strand starting at position 2664 of SEQ ID NO: 915002
uuaaauugacauuguggaa

SEQ ID NO: 1046241 - RNA, 19 nt, Artificial Sequence
  Description of Artificial Sequence: Synthetic oligonucleotide
  Antisense strand to SEQ ID NO: 1046240
uuccacaaugucaauuuaa

SEQ ID NO: 1046242 - RNA, 19 nt, Artificial Sequence
  Description of Artificial Sequence: Synthetic oligonucleotide
  Sense strand starting at position 2720 of SEQ ID NO: 915002
aaugauagccagugaguaa

SEQ ID NO: 1046243 - RNA, 19 nt, Artificial Sequence
  Description of Artificial Sequence: Synthetic oligonucleotide
  Antisense strand to SEQ ID NO: 1046242
uuacucacuggcuaucauu

SEQ ID NO: 1046244 - RNA, 19 nt, Artificial Sequence
  Description of Artificial Sequence: Synthetic oligonucleotide
  Sense strand starting at position 2721 of SEQ ID NO: 915002
augauagccagugaguaaa

SEQ ID NO: 1046245 - RNA, 19 nt, Artificial Sequence
  Description of Artificial Sequence: Synthetic oligonucleotide
  Antisense strand to SEQ ID NO: 1046244
uuuacucacuggcuaucau

SEQ ID NO: 1046246 - RNA, 19 nt, Artificial Sequence
  Description of Artificial Sequence: Synthetic oligonucleotide
  Sense strand starting at position 2818 of SEQ ID NO: 915002
aaucaugagugugucuaaa

SEQ ID NO: 1046247 - RNA, 19 nt, Artificial Sequence
  Description of Artificial Sequence: Synthetic oligonucleotide
  Antisense strand to SEQ ID NO: 1046246
uuuagacacacucaugauu

SEQ ID NO: 1046248 - RNA, 19 nt, Artificial Sequence
  Description of Artificial Sequence: Synthetic oligonucleotide
  Sense strand starting at position 3013 of SEQ ID NO: 915002
uaugucauugaagguaaua

SEQ ID NO: 1046249 - RNA, 19 nt, Artificial Sequence
  Description of Artificial Sequence: Synthetic oligonucleotide
  Antisense strand to SEQ ID NO: 1046248
uauuaccuucaaugacaua

SEQ ID NO: 1046250 - RNA, 19 nt, Artificial Sequence
  Description of Artificial Sequence: Synthetic oligonucleotide
  Sense strand starting at position 3015 of SEQ ID NO: 915002
ugucauugaagguaauagu

SEQ ID NO: 1046251 - RNA, 19 nt, Artificial Sequence
  Description of Artificial Sequence: Synthetic oligonucleotide
  Antisense strand to SEQ ID NO: 1046250
acuauuaccuucaaugaca

SEQ ID NO: 1046252 - RNA, 19 nt, Artificial Sequence
  Description of Artificial Sequence: Synthetic oligonucleotide
  Sense strand starting at position 3104 of SEQ ID NO: 915002
cagacagggcuccgauaau

SEQ ID NO: 1046253 - RNA, 19 nt, Artificial Sequence
  Description of Artificial Sequence: Synthetic oligonucleotide
  Antisense strand to SEQ ID NO: 1046252
auuaucggagcccugucug

SEQ ID NO: 1046254 - RNA, 19 nt, Artificial Sequence
  Description of Artificial Sequence: Synthetic oligonucleotide
  Sense strand starting at position 3131 of SEQ ID NO: 915002
uucucuuugcuguagaaag

SEQ ID NO: 1046255 - RNA, 19 nt, Artificial Sequence
  Description of Artificial Sequence: Synthetic oligonucleotide
  Antisense strand to SEQ ID NO: 1046254
cuuucuacagcaaagagaa

SEQ ID NO: 1046256 - RNA, 19 nt, Artificial Sequence
  Description of Artificial Sequence: Synthetic oligonucleotide
  Sense strand starting at position 3242 of SEQ ID NO: 915002
gcugccaagacugauugau

SEQ ID NO: 1046257 - RNA, 19 nt, Artificial Sequence
  Description of Artificial Sequence: Synthetic oligonucleotide
  Antisense strand to SEQ ID NO: 1046256
aucaaucagucuuggcagc

SEQ ID NO: 1046258 - RNA, 19 nt, Artificial Sequence
  Description of Artificial Sequence: Synthetic oligonucleotide
  Sense strand starting at position 3244 of SEQ ID NO: 915002
ugccaagacugauugauua

SEQ ID NO: 1046259 - RNA, 19 nt, Artificial Sequence
  Description of Artificial Sequence: Synthetic oligonucleotide
  Antisense strand to SEQ ID NO: 1046258
uaaucaaucagucuuggca

SEQ ID NO: 1046260 - RNA, 19 nt, Artificial Sequence
  Description of Artificial Sequence: Synthetic oligonucleotide
  Sense strand starting at position 3256 of SEQ ID NO: 915002
uugauuauuugugagagaa

SEQ ID NO: 1046261 - RNA, 19 nt, Artificial Sequence
  Description of Artificial Sequence: Synthetic oligonucleotide
  Antisense strand to SEQ ID NO: 1046260
uucucucacaaauaaucaa

SEQ ID NO: 1046262 - RNA, 19 nt, Artificial Sequence
  Description of Artificial Sequence: Synthetic oligonucleotide
  Sense strand starting at position 3264 of SEQ ID NO: 915002
uugugagagaagugacaua

SEQ ID NO: 1046263 - RNA, 19 nt, Artificial Sequence
  Description of Artificial Sequence: Synthetic oligonucleotide
  Antisense strand to SEQ ID NO: 1046262
uaugucacuucucucacaa

SEQ ID NO: 1046264 - RNA, 19 nt, Artificial Sequence
  Description of Artificial Sequence: Synthetic oligonucleotide
  Sense strand starting at position 3288 of SEQ ID NO: 915002
ucauuuaagcuuuggccaa

SEQ ID NO: 1046265 - RNA, 19 nt, Artificial Sequence
  Description of Artificial Sequence: Synthetic oligonucleotide
  Antisense strand to SEQ ID NO: 1046264
uuggccaaagcuuaaauga

SEQ ID NO: 1046266 - RNA, 19 nt, Artificial Sequence
  Description of Artificial Sequence: Synthetic oligonucleotide
  Sense strand starting at position 3301 of SEQ ID NO: 915002
ggccaacagucucuggaaa

SEQ ID NO: 1046267 - RNA, 19 nt, Artificial Sequence
  Description of Artificial Sequence: Synthetic oligonucleotide
  Antisense strand to SEQ ID NO: 1046266
uuuccagagacuguuggcc

SEQ ID NO: 1046268 - RNA, 19 nt, Artificial Sequence
  Description of Artificial Sequence: Synthetic oligonucleotide
  Sense strand starting at position 3406 of SEQ ID NO: 915002
cuaugagacaggcaugguu

SEQ ID NO: 1046269 - RNA, 19 nt, Artificial Sequence
  Description of Artificial Sequence: Synthetic oligonucleotide
  Antisense strand to SEQ ID NO: 1046268
aaccaugccugucucauag

SEQ ID NO: 1046270 - RNA, 19 nt, Artificial Sequence
  Description of Artificial Sequence: Synthetic oligonucleotide
  Sense strand starting at position 3421 of SEQ ID NO: 915002
gguuccuugguacaucuua

SEQ ID NO: 1046271 - RNA, 19 nt, Artificial Sequence
  Description of Artificial Sequence: Synthetic oligonucleotide
  Antisense strand to SEQ ID NO: 1046270
uaagauguaccaaggaacc

SEQ ID NO: 1046272 - RNA, 19 nt, Artificial Sequence
  Description of Artificial Sequence: Synthetic oligonucleotide
  Sense strand starting at position 3655 of SEQ ID NO: 915002
auuaguucccaguauacaa

SEQ ID NO: 1046273 - RNA, 19 nt, Artificial Sequence
  Description of Artificial Sequence: Synthetic oligonucleotide
  Antisense strand to SEQ ID NO: 1046272
uuguauacugggaacuaau

SEQ ID NO: 1046274 - RNA, 19 nt, Artificial Sequence
  Description of Artificial Sequence: Synthetic oligonucleotide
  Sense strand starting at position 3788 of SEQ ID NO: 915002
ccagauuucuuugaggaau

SEQ ID NO: 1046275 - RNA, 19 nt, Artificial Sequence
  Description of Artificial Sequence: Synthetic oligonucleotide
  Antisense strand to SEQ ID NO: 1046274
auuccucaaagaaaucugg

SEQ ID NO: 1046276 - RNA, 19 nt, Artificial Sequence
  Description of Artificial Sequence: Synthetic oligonucleotide
  Sense strand starting at position 3879 of SEQ ID NO: 915002
auggaaaucuaugcaaacu

SEQ ID NO: 1046277 - RNA, 19 nt, Artificial Sequence
  Description of Artificial Sequence: Synthetic oligonucleotide
  Antisense strand to SEQ ID NO: 1046276
aguuugcauagauuuccau

SEQ ID NO: 1046278 - RNA, 19 nt, Artificial Sequence
  Description of Artificial Sequence: Synthetic oligonucleotide
  Sense strand starting at position 3970 of SEQ ID NO: 915002
ucuauauguauguagguau

SEQ ID NO: 1046279 - RNA, 19 nt, Artificial Sequence
  Description of Artificial Sequence: Synthetic oligonucleotide
  Antisense strand to SEQ ID NO: 1046278
auaccuacauacauauaga

SEQ ID NO: 1046280 - RNA, 19 nt, Artificial Sequence
  Description of Artificial Sequence: Synthetic oligonucleotide
  Sense strand starting at position 6 of SEQ ID NO: 915003
cuccaaagcuucuaaucga

SEQ ID NO: 1046281 - RNA, 19 nt, Artificial Sequence
  Description of Artificial Sequence: Synthetic oligonucleotide
  Antisense strand to SEQ ID NO: 1046280
ucgauuagaagcuuuggag

SEQ ID NO: 1046282 - RNA, 19 nt, Artificial Sequence
  Description of Artificial Sequence: Synthetic oligonucleotide
  Sense strand starting at position 13 of SEQ ID NO: 915003
gcuucuaaucgacaguacu

SEQ ID NO: 1046283 - RNA, 19 nt, Artificial Sequence
  Description of Artificial Sequence: Synthetic oligonucleotide
  Antisense strand to SEQ ID NO: 1046282
aguacugucgauuagaagc

SEQ ID NO: 1046284 - RNA, 19 nt, Artificial Sequence
  Description of Artificial Sequence: Synthetic oligonucleotide
  Sense strand starting at position 181 of SEQ ID NO: 915003
gguacaugagguuacaagu

SEQ ID NO: 1046285 - RNA, 19 nt, Artificial Sequence
  Description of Artificial Sequence: Synthetic oligonucleotide
  Antisense strand to SEQ ID NO: 1046284
acuuguaaccucauguacc

SEQ ID NO: 1046286 - RNA, 19 nt, Artificial Sequence
  Description of Artificial Sequence: Synthetic oligonucleotide
  Sense strand starting at position 295 of SEQ ID NO: 915003
ucauucucagauuguuaag

SEQ ID NO: 1046287 - RNA, 19 nt, Artificial Sequence
  Description of Artificial Sequence: Synthetic oligonucleotide
  Antisense strand to SEQ ID NO: 1046286
cuuaacaaucugagaauga

SEQ ID NO: 1046288 - RNA, 19 nt, Artificial Sequence
  Description of Artificial Sequence: Synthetic oligonucleotide
  Sense strand starting at position 298 of SEQ ID NO: 915003
uucucagauuguuaagaga

SEQ ID NO: 1046289 - RNA, 19 nt, Artificial Sequence
  Description of Artificial Sequence: Synthetic oligonucleotide
  Antisense strand to SEQ ID NO: 1046288
ucucuuaacaaucugagaa

SEQ ID NO: 1046290 - RNA, 19 nt, Artificial Sequence
  Description of Artificial Sequence: Synthetic oligonucleotide
  Sense strand starting at position 398 of SEQ ID NO: 915003
ucuaucuucccugguguua

SEQ ID NO: 1046291 - RNA, 19 nt, Artificial Sequence
  Description of Artificial Sequence: Synthetic oligonucleotide
  Antisense strand to SEQ ID NO: 1046290
uaacaccagggaagauaga

SEQ ID NO: 1046292 - RNA, 19 nt, Artificial Sequence
  Description of Artificial Sequence: Synthetic oligonucleotide
  Sense strand starting at position 442 of SEQ ID NO: 915003
uugaguacaugucugacua

SEQ ID NO: 1046293 - RNA, 19 nt, Artificial Sequence
  Description of Artificial Sequence: Synthetic oligonucleotide
  Antisense strand to SEQ ID NO: 1046292
uagucagacauguacucaa

SEQ ID NO: 1046294 - RNA, 19 nt, Artificial Sequence
  Description of Artificial Sequence: Synthetic oligonucleotide
  Sense strand starting at position 443 of SEQ ID NO: 915003
ugaguacaugucugacuac

SEQ ID NO: 1046295 - RNA, 19 nt, Artificial Sequence
  Description of Artificial Sequence: Synthetic oligonucleotide
  Antisense strand to SEQ ID NO: 1046294
guagucagacauguacuca

SEQ ID NO: 1046296 - RNA, 19 nt, Artificial Sequence
  Description of Artificial Sequence: Synthetic oligonucleotide
  Sense strand starting at position 524 of SEQ ID NO: 915003
ucgucugucucaccaguau

SEQ ID NO: 1046297 - RNA, 19 nt, Artificial Sequence
  Description of Artificial Sequence: Synthetic oligonucleotide
  Antisense strand to SEQ ID NO: 1046296
auacuggugagacagacga

SEQ ID NO: 1046298 - RNA, 19 nt, Artificial Sequence
  Description of Artificial Sequence: Synthetic oligonucleotide
  Sense strand starting at position 528 of SEQ ID NO: 915003
cugucucaccaguauccua

SEQ ID NO: 1046299 - RNA, 19 nt, Artificial Sequence
  Description of Artificial Sequence: Synthetic oligonucleotide
  Antisense strand to SEQ ID NO: 1046298
uaggauacuggugagacag

SEQ ID NO: 1046300 - RNA, 19 nt, Artificial Sequence
  Description of Artificial Sequence: Synthetic oligonucleotide
  Sense strand starting at position 638 of SEQ ID NO: 915003
aaaguuugaugacauagag

SEQ ID NO: 1046301 - RNA, 19 nt, Artificial Sequence
  Description of Artificial Sequence: Synthetic oligonucleotide
  Antisense strand to SEQ ID NO: 1046300
cucuaugucaucaaacuuu

SEQ ID NO: 1046302 - RNA, 19 nt, Artificial Sequence
  Description of Artificial Sequence: Synthetic oligonucleotide
  Sense strand starting at position 665 of SEQ ID NO: 915003
cugggaugagcuugcauuu

SEQ ID NO: 1046303 - RNA, 19 nt, Artificial Sequence
  Description of Artificial Sequence: Synthetic oligonucleotide
  Antisense strand to SEQ ID NO: 1046302
aaaugcaagcucaucccag

SEQ ID NO: 1046304 - RNA, 19 nt, Artificial Sequence
  Description of Artificial Sequence: Synthetic oligonucleotide
  Sense strand starting at position 733 of SEQ ID NO: 915003
ggccuaucagcuuguagga

SEQ ID NO: 1046305 - RNA, 19 nt, Artificial Sequence
  Description of Artificial Sequence: Synthetic oligonucleotide
  Antisense strand to SEQ ID NO: 1046304
uccuacaagcugauaggcc

SEQ ID NO: 1046306 - RNA, 19 nt, Artificial Sequence
  Description of Artificial Sequence: Synthetic oligonucleotide
  Sense strand starting at position 735 of SEQ ID NO: 915003
ccuaucagcuuguaggaau

SEQ ID NO: 1046307 - RNA, 19 nt, Artificial Sequence
  Description of Artificial Sequence: Synthetic oligonucleotide
  Antisense strand to SEQ ID NO: 1046306
auuccuacaagcugauagg

SEQ ID NO: 1046308 - RNA, 19 nt, Artificial Sequence
  Description of Artificial Sequence: Synthetic oligonucleotide
  Sense strand starting at position 789 of SEQ ID NO: 915003
gcgcaacuucucuggcagu

SEQ ID NO: 1046309 - RNA, 19 nt, Artificial Sequence
  Description of Artificial Sequence: Synthetic oligonucleotide
  Antisense strand to SEQ ID NO: 1046308
acugccagagaaguugcgc

SEQ ID NO: 1046310 - RNA, 19 nt, Artificial Sequence
  Description of Artificial Sequence: Synthetic oligonucleotide
  Sense strand starting at position 908 of SEQ ID NO: 915003
gggugcauuugugaugaaa

SEQ ID NO: 1046311 - RNA, 19 nt, Artificial Sequence
  Description of Artificial Sequence: Synthetic oligonucleotide
  Antisense strand to SEQ ID NO: 1046310
uuucaucacaaaugcaccc

SEQ ID NO: 1046312 - RNA, 19 nt, Artificial Sequence
  Description of Artificial Sequence: Synthetic oligonucleotide
  Sense strand starting at position 1028 of SEQ ID NO: 915003
cuccacuuaugguuucuua

SEQ ID NO: 1046313 - RNA, 19 nt, Artificial Sequence
  Description of Artificial Sequence: Synthetic oligonucleotide
  Antisense strand to SEQ ID NO: 1046312
uaagaaaccauaaguggag

SEQ ID NO: 1046314 - RNA, 19 nt, Artificial Sequence
  Description of Artificial Sequence: Synthetic oligonucleotide
  Sense strand starting at position 1152 of SEQ ID NO: 915003
guacuaauuucucauguaa

SEQ ID NO: 1046315 - RNA, 19 nt, Artificial Sequence
  Description of Artificial Sequence: Synthetic oligonucleotide
  Antisense strand to SEQ ID NO: 1046314
uuacaugagaaauuaguac

SEQ ID NO: 1046316 - RNA, 19 nt, Artificial Sequence
  Description of Artificial Sequence: Synthetic oligonucleotide
  Sense strand starting at position 1154 of SEQ ID NO: 915003
acuaauuucucauguaagg

SEQ ID NO: 1046317 - RNA, 19 nt, Artificial Sequence
  Description of Artificial Sequence: Synthetic oligonucleotide
  Antisense strand to SEQ ID NO: 1046316
ccuuacaugagaaauuagu

SEQ ID NO: 1046318 - RNA, 19 nt, Artificial Sequence
  Description of Artificial Sequence: Synthetic oligonucleotide
  Sense strand starting at position 1217 of SEQ ID NO: 915003
cugcauaucucugcagaca

SEQ ID NO: 1046319 - RNA, 19 nt, Artificial Sequence
  Description of Artificial Sequence: Synthetic oligonucleotide
  Antisense strand to SEQ ID NO: 1046318
ugucugcagagauaugcag

SEQ ID NO: 1046320 - RNA, 19 nt, Artificial Sequence
  Description of Artificial Sequence: Synthetic oligonucleotide
  Sense strand starting at position 1218 of SEQ ID NO: 915003
ugcauaucucugcagacau

SEQ ID NO: 1046321 - RNA, 19 nt, Artificial Sequence
  Description of Artificial Sequence: Synthetic oligonucleotide
  Antisense strand to SEQ ID NO: 1046320
augucugcagagauaugca

SEQ ID NO: 1046322 - RNA, 19 nt, Artificial Sequence
  Description of Artificial Sequence: Synthetic oligonucleotide
  Sense strand starting at position 2052 of SEQ ID NO: 915003
guagauaacuuugaauuuc

SEQ ID NO: 1046323 - RNA, 19 nt, Artificial Sequence
  Description of Artificial Sequence: Synthetic oligonucleotide
  Antisense strand to SEQ ID NO: 1046322
gaaauucaaaguuaucuac

SEQ ID NO: 1046324 - RNA, 19 nt, Artificial Sequence
  Description of Artificial Sequence: Synthetic oligonucleotide
  Sense strand starting at position 164 of SEQ ID NO: 915004
ccaauaaagucagcuauug

SEQ ID NO: 1046325 - RNA, 19 nt, Artificial Sequence
  Description of Artificial Sequence: Synthetic oligonucleotide
  Antisense strand to SEQ ID NO: 1046324
caauagcugacuuuauugg

SEQ ID NO: 1046326 - RNA, 19 nt, Artificial Sequence
  Description of Artificial Sequence: Synthetic oligonucleotide
  Sense strand starting at position 176 of SEQ ID NO: 915004
gcuauugcgauuugccaau

SEQ ID NO: 1046327 - RNA, 19 nt, Artificial Sequence
  Description of Artificial Sequence: Synthetic oligonucleotide
  Antisense strand to SEQ ID NO: 1046326
auuggcaaaucgcaauagc

SEQ ID NO: 1046328 - RNA, 19 nt, Artificial Sequence
  Description of Artificial Sequence: Synthetic oligonucleotide
  Sense strand starting at position 206 of SEQ ID NO: 915004
gcuagaagaguaugaaauu

SEQ ID NO: 1046329 - RNA, 19 nt, Artificial Sequence
  Description of Artificial Sequence: Synthetic oligonucleotide
  Antisense strand to SEQ ID NO: 1046328
aauuucauacucuucuagc

SEQ ID NO: 1046330 - RNA, 19 nt, Artificial Sequence
  Description of Artificial Sequence: Synthetic oligonucleotide
  Sense strand starting at position 300 of SEQ ID NO: 915004
ugugguuccggucauuauu

SEQ ID NO: 1046331 - RNA, 19 nt, Artificial Sequence
  Description of Artificial Sequence: Synthetic oligonucleotide
  Antisense strand to SEQ ID NO: 1046330
aauaaugaccggaaccaca

SEQ ID NO: 1046332 - RNA, 19 nt, Artificial Sequence
  Description of Artificial Sequence: Synthetic oligonucleotide
  Sense strand starting at position 342 of SEQ ID NO: 915004
aguuguagugccuauauuu

SEQ ID NO: 1046333 - RNA, 19 nt, Artificial Sequence
  Description of Artificial Sequence: Synthetic oligonucleotide
  Antisense strand to SEQ ID NO: 1046332
aaauauaggcacuacaacu

SEQ ID NO: 1046334 - RNA, 19 nt, Artificial Sequence
  Description of Artificial Sequence: Synthetic oligonucleotide
  Sense strand starting at position 411 of SEQ ID NO: 915004
aguuauugcugucugacaa

SEQ ID NO: 1046335 - RNA, 19 nt, Artificial Sequence
  Description of Artificial Sequence: Synthetic oligonucleotide
  Antisense strand to SEQ ID NO: 1046334
uugucagacagcaauaacu

SEQ ID NO: 1046336 - RNA, 19 nt, Artificial Sequence
  Description of Artificial Sequence: Synthetic oligonucleotide
  Sense strand starting at position 412 of SEQ ID NO: 915004
guuauugcugucugacaau

SEQ ID NO: 1046337 - RNA, 19 nt, Artificial Sequence
  Description of Artificial Sequence: Synthetic oligonucleotide
  Antisense strand to SEQ ID NO: 1046336
auugucagacagcaauaac

SEQ ID NO: 1046338 - RNA, 19 nt, Artificial Sequence
  Description of Artificial Sequence: Synthetic oligonucleotide
  Sense strand starting at position 475 of SEQ ID NO: 915004
guagccuuaggaugggaua

SEQ ID NO: 1046339 - RNA, 19 nt, Artificial Sequence
  Description of Artificial Sequence: Synthetic oligonucleotide
  Antisense strand to SEQ ID NO: 1046338
uaucccauccuaaggcuac

SEQ ID NO: 1046340 - RNA, 19 nt, Artificial Sequence
  Description of Artificial Sequence: Synthetic oligonucleotide
  Sense strand starting at position 708 of SEQ ID NO: 915004
ucaaguuguaucgggauau

SEQ ID NO: 1046341 - RNA, 19 nt, Artificial Sequence
  Description of Artificial Sequence: Synthetic oligonucleotide
  Antisense strand to SEQ ID NO: 1046340
auaucccgauacaacuuga

SEQ ID NO: 1046342 - RNA, 19 nt, Artificial Sequence
  Description of Artificial Sequence: Synthetic oligonucleotide
  Sense strand starting at position 712 of SEQ ID NO: 915004
guuguaucgggauauuauu

SEQ ID NO: 1046343 - RNA, 19 nt, Artificial Sequence
  Description of Artificial Sequence: Synthetic oligonucleotide
  Antisense strand to SEQ ID NO: 1046342
aauaauaucccgauacaac

SEQ ID NO: 1046344 - RNA, 19 nt, Artificial Sequence
  Description of Artificial Sequence: Synthetic oligonucleotide
  Sense strand starting at position 757 of SEQ ID NO: 915004
uggcuaaaucacuguacuc

SEQ ID NO: 1046345 - RNA, 19 nt, Artificial Sequence
  Description of Artificial Sequence: Synthetic oligonucleotide
  Antisense strand to SEQ ID NO: 1046344
gaguacagugauuuagcca

SEQ ID NO: 1046346 - RNA, 19 nt, Artificial Sequence
  Description of Artificial Sequence: Synthetic oligonucleotide
  Sense strand starting at position 882 of SEQ ID NO: 915004
uucguaaacggugaaugua

SEQ ID NO: 1046347 - RNA, 19 nt, Artificial Sequence
  Description of Artificial Sequence: Synthetic oligonucleotide
  Antisense strand to SEQ ID NO: 1046346
uacauucaccguuuacgaa

SEQ ID NO: 1046348 - RNA, 19 nt, Artificial Sequence
  Description of Artificial Sequence: Synthetic oligonucleotide
  Sense strand starting at position 1010 of SEQ ID NO: 915004
cucagagucucccuuccua

SEQ ID NO: 1046349 - RNA, 19 nt, Artificial Sequence
  Description of Artificial Sequence: Synthetic oligonucleotide
  Antisense strand to SEQ ID NO: 1046348
uaggaagggagacucugag

SEQ ID NO: 1046350 - RNA, 19 nt, Artificial Sequence
  Description of Artificial Sequence: Synthetic oligonucleotide
  Sense strand starting at position 1450 of SEQ ID NO: 915004
ugcaaucuggcagauaaag

SEQ ID NO: 1046351 - RNA, 19 nt, Artificial Sequence
  Description of Artificial Sequence: Synthetic oligonucleotide
  Antisense strand to SEQ ID NO: 1046350
cuuuaucugccagauugca

SEQ ID NO: 1046352 - RNA, 19 nt, Artificial Sequence
  Description of Artificial Sequence: Synthetic oligonucleotide
  Sense strand starting at position 1581 of SEQ ID NO: 915004
gucuaagguuccuugauca

SEQ ID NO: 1046353 - RNA, 19 nt, Artificial Sequence
  Description of Artificial Sequence: Synthetic oligonucleotide
  Antisense strand to SEQ ID NO: 1046352
ugaucaaggaaccuuagac

SEQ ID NO: 1046354 - RNA, 19 nt, Artificial Sequence
  Description of Artificial Sequence: Synthetic oligonucleotide
  Sense strand starting at position 1667 of SEQ ID NO: 915004
acugguuagccuuaaguag

SEQ ID NO: 1046355 - RNA, 19 nt, Artificial Sequence
  Description of Artificial Sequence: Synthetic oligonucleotide
  Antisense strand to SEQ ID NO: 1046354
cuacuuaaggcuaaccagu

SEQ ID NO: 1046356 - RNA, 19 nt, Artificial Sequence
  Description of Artificial Sequence: Synthetic oligonucleotide
  Sense strand starting at position 2255 of SEQ ID NO: 915004
ccucaaaugccacguacau

SEQ ID NO: 1046357 - RNA, 19 nt, Artificial Sequence
  Description of Artificial Sequence: Synthetic oligonucleotide
  Antisense strand to SEQ ID NO: 1046356
auguacguggcauuugagg

SEQ ID NO: 1046358 - RNA, 19 nt, Artificial Sequence
  Description of Artificial Sequence: Synthetic oligonucleotide
  Sense strand starting at position 2267 of SEQ ID NO: 915004
cguacauaagcuuggauau

SEQ ID NO: 1046359 - RNA, 19 nt, Artificial Sequence
  Description of Artificial Sequence: Synthetic oligonucleotide
  Antisense strand to SEQ ID NO: 1046358
auauccaagcuuauguacg

SEQ ID NO: 1046360 - RNA, 19 nt, Artificial Sequence
  Description of Artificial Sequence: Synthetic oligonucleotide
  Sense strand starting at position 2278 of SEQ ID NO: 915004
uuggauauguugccaugua

SEQ ID NO: 1046361 - RNA, 19 nt, Artificial Sequence
  Description of Artificial Sequence: Synthetic oligonucleotide
  Antisense strand to SEQ ID NO: 1046360
uacauggcaacauauccaa

SEQ ID NO: 1046362 - RNA, 19 nt, Artificial Sequence
  Description of Artificial Sequence: Synthetic oligonucleotide
  Sense strand starting at position 2347 of SEQ ID NO: 915004
acccauuacccagguguca

SEQ ID NO: 1046363 - RNA, 19 nt, Artificial Sequence
  Description of Artificial Sequence: Synthetic oligonucleotide
  Antisense strand to SEQ ID NO: 1046362
ugacaccuggguaaugggu

SEQ ID NO: 1046364 - RNA, 19 nt, Artificial Sequence
  Description of Artificial Sequence: Synthetic oligonucleotide
  Sense strand starting at position 2370 of SEQ ID NO: 915004
augagcuuaccaggaaaca

SEQ ID NO: 1046365 - RNA, 19 nt, Artificial Sequence
  Description of Artificial Sequence: Synthetic oligonucleotide
  Antisense strand to SEQ ID NO: 1046364
uguuuccugguaagcucau

SEQ ID NO: 1046366 - RNA, 19 nt, Artificial Sequence
  Description of Artificial Sequence: Synthetic oligonucleotide
  Sense strand starting at position 2393 of SEQ ID NO: 915004
agugcugaaucugccagau

SEQ ID NO: 1046367 - RNA, 19 nt, Artificial Sequence
  Description of Artificial Sequence: Synthetic oligonucleotide
  Antisense strand to SEQ ID NO: 1046366
aucuggcagauucagcacu

SEQ ID NO: 1046368 - RNA, 19 nt, Artificial Sequence
  Description of Artificial Sequence: Synthetic oligonucleotide
  Sense strand starting at position 2397 of SEQ ID NO: 915004
cugaaucugccagauuaua

SEQ ID NO: 1046369 - RNA, 19 nt, Artificial Sequence
  Description of Artificial Sequence: Synthetic oligonucleotide
  Antisense strand to SEQ ID NO: 1046368
uauaaucuggcagauucag

SEQ ID NO: 1046370 - RNA, 19 nt, Artificial Sequence
  Description of Artificial Sequence: Synthetic oligonucleotide
  Sense strand starting at position 2410 of SEQ ID NO: 915004
auuauacaaugagaucgaa

SEQ ID NO: 1046371 - RNA, 19 nt, Artificial Sequence
  Description of Artificial Sequence: Synthetic oligonucleotide
  Antisense strand to SEQ ID NO: 1046370
uucgaucucauuguauaau

SEQ ID NO: 1046372 - RNA, 19 nt, Artificial Sequence
  Description of Artificial Sequence: Synthetic oligonucleotide
  Sense strand starting at position 2452 of SEQ ID NO: 915004
ugggugugugaggaguuua

SEQ ID NO: 1046373 - RNA, 19 nt, Artificial Sequence
  Description of Artificial Sequence: Synthetic oligonucleotide
  Antisense strand to SEQ ID NO: 1046372
uaaacuccucacacaccca

SEQ ID NO: 1046374 - RNA, 19 nt, Artificial Sequence
  Description of Artificial Sequence: Synthetic oligonucleotide
  Sense strand starting at position 2457 of SEQ ID NO: 915004
gugugaggaguuuaccagu

SEQ ID NO: 1046375 - RNA, 19 nt, Artificial Sequence
  Description of Artificial Sequence: Synthetic oligonucleotide
  Antisense strand to SEQ ID NO: 1046374
acugguaaacuccucacac

SEQ ID NO: 1046376 - RNA, 19 nt, Artificial Sequence
  Description of Artificial Sequence: Synthetic oligonucleotide
  Sense strand starting at position 2478 of SEQ ID NO: 915004
aguguaagggucugagaua

SEQ ID NO: 1046377 - RNA, 19 nt, Artificial Sequence
  Description of Artificial Sequence: Synthetic oligonucleotide
  Antisense strand to SEQ ID NO: 1046376
uaucucagacccuuacacu

SEQ ID NO: 1046378 - RNA, 19 nt, Artificial Sequence
  Description of Artificial Sequence: Synthetic oligonucleotide
  Sense strand starting at position 2493 of SEQ ID NO: 915004
gauagaagccaggguuuga

SEQ ID NO: 1046379 - RNA, 19 nt, Artificial Sequence
  Description of Artificial Sequence: Synthetic oligonucleotide
  Antisense strand to SEQ ID NO: 1046378
ucaaacccuggcuucuauc

SEQ ID NO: 1046380 - RNA, 19 nt, Artificial Sequence
  Description of Artificial Sequence: Synthetic oligonucleotide
  Sense strand starting at position 2608 of SEQ ID NO: 915004
uagaguuuggugggaaaca

SEQ ID NO: 1046381 - RNA, 19 nt, Artificial Sequence
  Description of Artificial Sequence: Synthetic oligonucleotide
  Antisense strand to SEQ ID NO: 1046380
uguuucccaccaaacucua

SEQ ID NO: 1046382 - RNA, 19 nt, Artificial Sequence
  Description of Artificial Sequence: Synthetic oligonucleotide
  Sense strand starting at position 2652 of SEQ ID NO: 915004
cuuacaacgugacuuguua

SEQ ID NO: 1046383 - RNA, 19 nt, Artificial Sequence
  Description of Artificial Sequence: Synthetic oligonucleotide
  Antisense strand to SEQ ID NO: 1046382
uaacaagucacguuguaag

SEQ ID NO: 1046384 - RNA, 19 nt, Artificial Sequence
  Description of Artificial Sequence: Synthetic oligonucleotide
  Sense strand starting at position 2656 of SEQ ID NO: 915004
caacgugacuuguuauaac

SEQ ID NO: 1046385 - RNA, 19 nt, Artificial Sequence
  Description of Artificial Sequence: Synthetic oligonucleotide
  Antisense strand to SEQ ID NO: 1046384
guuauaacaagucacguug

SEQ ID NO: 1046386 - RNA, 19 nt, Artificial Sequence
  Description of Artificial Sequence: Synthetic oligonucleotide
  Sense strand starting at position 2886 of SEQ ID NO: 915004
gugugucuucaggaagccu

SEQ ID NO: 1046387 - RNA, 19 nt, Artificial Sequence
  Description of Artificial Sequence: Synthetic oligonucleotide
  Antisense strand to SEQ ID NO: 1046386
aggcuuccugaagacacac

SEQ ID NO: 1046388 - RNA, 19 nt, Artificial Sequence
  Description of Artificial Sequence: Synthetic oligonucleotide
  Sense strand starting at position 2919 of SEQ ID NO: 915004
uugugauaggucugaccua

SEQ ID NO: 1046389 - RNA, 19 nt, Artificial Sequence
  Description of Artificial Sequence: Synthetic oligonucleotide
  Antisense strand to SEQ ID NO: 1046388
uaggucagaccuaucacaa

SEQ ID NO: 1046390 - RNA, 19 nt, Artificial Sequence
  Description of Artificial Sequence: Synthetic oligonucleotide
  Sense strand starting at position 2931 of SEQ ID NO: 915004
ugaccuauauuggugaaca

SEQ ID NO: 1046391 - RNA, 19 nt, Artificial Sequence
  Description of Artificial Sequence: Synthetic oligonucleotide
  Antisense strand to SEQ ID NO: 1046390
uguucaccaauauagguca

SEQ ID NO: 1046392 - RNA, 19 nt, Artificial Sequence
  Description of Artificial Sequence: Synthetic oligonucleotide
  Sense strand starting at position 3196 of SEQ ID NO: 915004
gggauugugcugugacuuc

SEQ ID NO: 1046393 - RNA, 19 nt, Artificial Sequence
  Description of Artificial Sequence: Synthetic oligonucleotide
  Antisense strand to SEQ ID NO: 1046392
gaagucacagcacaauccc

SEQ ID NO: 1046394 - RNA, 19 nt, Artificial Sequence
  Description of Artificial Sequence: Synthetic oligonucleotide
  Sense strand starting at position 3203 of SEQ ID NO: 915004
ugcugugacuucccaaaua

SEQ ID NO: 1046395 - RNA, 19 nt, Artificial Sequence
  Description of Artificial Sequence: Synthetic oligonucleotide
  Antisense strand to SEQ ID NO: 1046394
uauuugggaagucacagca

SEQ ID NO: 1046396 - RNA, 19 nt, Artificial Sequence
  Description of Artificial Sequence: Synthetic oligonucleotide
  Sense strand starting at position 3265 of SEQ ID NO: 915004
accugauuauuaguagaca

SEQ ID NO: 1046397 - RNA, 19 nt, Artificial Sequence
  Description of Artificial Sequence: Synthetic oligonucleotide
  Antisense strand to SEQ ID NO: 1046396
ugucuacuaauaaucaggu

SEQ ID NO: 1046398 - RNA, 19 nt, Artificial Sequence
  Description of Artificial Sequence: Synthetic oligonucleotide
  Sense strand starting at position 3625 of SEQ ID NO: 915004
aagagagaaucagauagua

SEQ ID NO: 1046399 - RNA, 19 nt, Artificial Sequence
  Description of Artificial Sequence: Synthetic oligonucleotide
  Antisense strand to SEQ ID NO: 1046398
uacuaucugauucucucuu

SEQ ID NO: 1046400 - RNA, 19 nt, Artificial Sequence
  Description of Artificial Sequence: Synthetic oligonucleotide
  Sense strand starting at position 3722 of SEQ ID NO: 915004
ggcaauauauacccaaaug

SEQ ID NO: 1046401 - RNA, 19 nt, Artificial Sequence
  Description of Artificial Sequence: Synthetic oligonucleotide
  Antisense strand to SEQ ID NO: 1046400
cauuuggguauauauugcc

SEQ ID NO: 1046402 - RNA, 19 nt, Artificial Sequence
  Description of Artificial Sequence: Synthetic oligonucleotide
  Sense strand starting at position 3766 of SEQ ID NO: 915004
uuauuuaugccugggugca

SEQ ID NO: 1046403 - RNA, 19 nt, Artificial Sequence
  Description of Artificial Sequence: Synthetic oligonucleotide
  Antisense strand to SEQ ID NO: 1046402
ugcacccaggcauaaauaa

SEQ ID NO: 1046404 - RNA, 19 nt, Artificial Sequence
  Description of Artificial Sequence: Synthetic oligonucleotide
  Sense strand starting at position 33 of SEQ ID NO: 915005
guuguuaaugagcauaucu

SEQ ID NO: 1046405 - RNA, 19 nt, Artificial Sequence
  Description of Artificial Sequence: Synthetic oligonucleotide
  Antisense strand to SEQ ID NO: 1046404
agauaugcucauuaacaac

SEQ ID NO: 1046406 - RNA, 19 nt, Artificial Sequence
  Description of Artificial Sequence: Synthetic oligonucleotide
  Sense strand starting at position 54 of SEQ ID NO: 915005
guuauauaugcucacauau

SEQ ID NO: 1046407 - RNA, 19 nt, Artificial Sequence
  Description of Artificial Sequence: Synthetic oligonucleotide
  Antisense strand to SEQ ID NO: 1046406
auaugugagcauauauaac

SEQ ID NO: 1046408 - RNA, 19 nt, Artificial Sequence
  Description of Artificial Sequence: Synthetic oligonucleotide
  Sense strand starting at position 420 of SEQ ID NO: 915005
ugcguuaguguccuagacu

SEQ ID NO: 1046409 - RNA, 19 nt, Artificial Sequence
  Description of Artificial Sequence: Synthetic oligonucleotide
  Antisense strand to SEQ ID NO: 1046408
agucuaggacacuaacgca

SEQ ID NO: 1046410 - RNA, 19 nt, Artificial Sequence
  Description of Artificial Sequence: Synthetic oligonucleotide
  Sense strand starting at position 429 of SEQ ID NO: 915005
guccuagacuguccugaga

SEQ ID NO: 1046411 - RNA, 19 nt, Artificial Sequence
  Description of Artificial Sequence: Synthetic oligonucleotide
  Antisense strand to SEQ ID NO: 1046410
ucucaggacagucuaggac

SEQ ID NO: 1046412 - RNA, 19 nt, Artificial Sequence
  Description of Artificial Sequence: Synthetic oligonucleotide
  Sense strand starting at position 538 of SEQ ID NO: 915005
cuccaugcgccuuuaugua

SEQ ID NO: 1046413 - RNA, 19 nt, Artificial Sequence
  Description of Artificial Sequence: Synthetic oligonucleotide
  Antisense strand to SEQ ID NO: 1046412
uacauaaaggcgcauggag

SEQ ID NO: 1046414 - RNA, 19 nt, Artificial Sequence
  Description of Artificial Sequence: Synthetic oligonucleotide
  Sense strand starting at position 560 of SEQ ID NO: 915005
agucauguugaacaucagu

SEQ ID NO: 1046415 - RNA, 19 nt, Artificial Sequence
  Description of Artificial Sequence: Synthetic oligonucleotide
  Antisense strand to SEQ ID NO: 1046414
acugauguucaacaugacu

SEQ ID NO: 1046416 - RNA, 19 nt, Artificial Sequence
  Description of Artificial Sequence: Synthetic oligonucleotide
  Sense strand starting at position 565 of SEQ ID NO: 915005
uguugaacaucaguaauug

SEQ ID NO: 1046417 - RNA, 19 nt, Artificial Sequence
  Description of Artificial Sequence: Synthetic oligonucleotide
  Antisense strand to SEQ ID NO: 1046416
caauuacugauguucaaca

SEQ ID NO: 1046418 - RNA, 19 nt, Artificial Sequence
  Description of Artificial Sequence: Synthetic oligonucleotide
  Sense strand starting at position 566 of SEQ ID NO: 915005
guugaacaucaguaauugu

SEQ ID NO: 1046419 - RNA, 19 nt, Artificial Sequence
  Description of Artificial Sequence: Synthetic oligonucleotide
  Antisense strand to SEQ ID NO: 1046418
acaauuacugauguucaac

SEQ ID NO: 1046420 - RNA, 19 nt, Artificial Sequence
  Description of Artificial Sequence: Synthetic oligonucleotide
  Sense strand starting at position 577 of SEQ ID NO: 915005
guaauuguucuuuacaucu

SEQ ID NO: 1046421 - RNA, 19 nt, Artificial Sequence
  Description of Artificial Sequence: Synthetic oligonucleotide
  Antisense strand to SEQ ID NO: 1046420
agauguaaagaacaauuac

SEQ ID NO: 1046422 - RNA, 19 nt, Artificial Sequence
  Description of Artificial Sequence: Synthetic oligonucleotide
  Sense strand starting at position 704 of SEQ ID NO: 915005
gugucaacucuuuaucuac

SEQ ID NO: 1046423 - RNA, 19 nt, Artificial Sequence
  Description of Artificial Sequence: Synthetic oligonucleotide
  Antisense strand to SEQ ID NO: 1046422
guagauaaagaguugacac

SEQ ID NO: 1046424 - RNA, 19 nt, Artificial Sequence
  Description of Artificial Sequence: Synthetic oligonucleotide
  Sense strand starting at position 1001 of SEQ ID NO: 915005
ugagaacauucuguaacuc

SEQ ID NO: 1046425 - RNA, 19 nt, Artificial Sequence
  Description of Artificial Sequence: Synthetic oligonucleotide
  Antisense strand to SEQ ID NO: 1046424
gaguuacagaauguucuca

SEQ ID NO: 1046426 - RNA, 19 nt, Artificial Sequence
  Description of Artificial Sequence: Synthetic oligonucleotide
  Sense strand starting at position 1391 of SEQ ID NO: 915005
ggcuuugaauagcuagaug

SEQ ID NO: 1046427 - RNA, 19 nt, Artificial Sequence
  Description of Artificial Sequence: Synthetic oligonucleotide
  Antisense strand to SEQ ID NO: 1046426
caucuagcuauucaaagcc

SEQ ID NO: 1046428 - RNA, 19 nt, Artificial Sequence
  Description of Artificial Sequence: Synthetic oligonucleotide
  Sense strand starting at position 1437 of SEQ ID NO: 915005
agaagcaucccacagcuua

SEQ ID NO: 1046429 - RNA, 19 nt, Artificial Sequence
  Description of Artificial Sequence: Synthetic oligonucleotide
  Antisense strand to SEQ ID NO: 1046428
uaagcugugggaugcuucu

SEQ ID NO: 1046430 - RNA, 19 nt, Artificial Sequence
  Description of Artificial Sequence: Synthetic oligonucleotide
  Sense strand starting at position 1477 of SEQ ID NO: 915005
gaagcagguuacuuuauca

SEQ ID NO: 1046431 - RNA, 19 nt, Artificial Sequence
  Description of Artificial Sequence: Synthetic oligonucleotide
  Antisense strand to SEQ ID NO: 1046430
ugauaaaguaaccugcuuc

SEQ ID NO: 1046432 - RNA, 19 nt, Artificial Sequence
  Description of Artificial Sequence: Synthetic oligonucleotide
  Sense strand starting at position 1509 of SEQ ID NO: 915005
gcaugugugaaggauaugu

SEQ ID NO: 1046433 - RNA, 19 nt, Artificial Sequence
  Description of Artificial Sequence: Synthetic oligonucleotide
  Antisense strand to SEQ ID NO: 1046432
acauauccuucacacaugc

SEQ ID NO: 1046434 - RNA, 19 nt, Artificial Sequence
  Description of Artificial Sequence: Synthetic oligonucleotide
  Sense strand starting at position 1654 of SEQ ID NO: 915005
aaauguuccucuccaggga

SEQ ID NO: 1046435 - RNA, 19 nt, Artificial Sequence
  Description of Artificial Sequence: Synthetic oligonucleotide
  Antisense strand to SEQ ID NO: 1046434
ucccuggagaggaacauuu

SEQ ID NO: 1046436 - RNA, 19 nt, Artificial Sequence
  Description of Artificial Sequence: Synthetic oligonucleotide
  Sense strand starting at position 1658 of SEQ ID NO: 915005
guuccucuccagggagaga

SEQ ID NO: 1046437 - RNA, 19 nt, Artificial Sequence
  Description of Artificial Sequence: Synthetic oligonucleotide
  Antisense strand to SEQ ID NO: 1046436
ucucucccuggagaggaac

SEQ ID NO: 1046438 - RNA, 19 nt, Artificial Sequence
  Description of Artificial Sequence: Synthetic oligonucleotide
  Sense strand starting at position 1737 of SEQ ID NO: 915005
uggauccaugccuaaauca

SEQ ID NO: 1046439 - RNA, 19 nt, Artificial Sequence
  Description of Artificial Sequence: Synthetic oligonucleotide
  Antisense strand to SEQ ID NO: 1046438
ugauuuaggcauggaucca

SEQ ID NO: 1046440 - RNA, 19 nt, Artificial Sequence
  Description of Artificial Sequence: Synthetic oligonucleotide
  Sense strand starting at position 1989 of SEQ ID NO: 915005
guugaaauggguuaccuca

SEQ ID NO: 1046441 - RNA, 19 nt, Artificial Sequence
  Description of Artificial Sequence: Synthetic oligonucleotide
  Antisense strand to SEQ ID NO: 1046440
ugagguaacccauuucaac

SEQ ID NO: 1046442 - RNA, 19 nt, Artificial Sequence
  Description of Artificial Sequence: Synthetic oligonucleotide
  Sense strand starting at position 2002 of SEQ ID NO: 915005
accucaugacauugaugau

SEQ ID NO: 1046443 - RNA, 19 nt, Artificial Sequence
  Description of Artificial Sequence: Synthetic oligonucleotide
  Antisense strand to SEQ ID NO: 1046442
aucaucaaugucaugaggu

SEQ ID NO: 1046444 - RNA, 19 nt, Artificial Sequence
  Description of Artificial Sequence: Synthetic oligonucleotide
  Sense strand starting at position 2055 of SEQ ID NO: 915005
aguuucuuggcugauuaag

SEQ ID NO: 1046445 - RNA, 19 nt, Artificial Sequence
  Description of Artificial Sequence: Synthetic oligonucleotide
  Antisense strand to SEQ ID NO: 1046444
cuuaaucagccaagaaacu

SEQ ID NO: 1046446 - RNA, 19 nt, Artificial Sequence
  Description of Artificial Sequence: Synthetic oligonucleotide
  Sense strand starting at position 2057 of SEQ ID NO: 915005
uuucuuggcugauuaagau

SEQ ID NO: 1046447 - RNA, 19 nt, Artificial Sequence
  Description of Artificial Sequence: Synthetic oligonucleotide
  Antisense strand to SEQ ID NO: 1046446
aucuuaaucagccaagaaa

SEQ ID NO: 1046448 - RNA, 19 nt, Artificial Sequence
  Description of Artificial Sequence: Synthetic oligonucleotide
  Sense strand starting at position 2217 of SEQ ID NO: 915005
uuuaguaggaguugagaag

SEQ ID NO: 1046449 - RNA, 19 nt, Artificial Sequence
  Description of Artificial Sequence: Synthetic oligonucleotide
  Antisense strand to SEQ ID NO: 1046448
cuucucaacuccuacuaaa

SEQ ID NO: 1046450 - RNA, 19 nt, Artificial Sequence
  Description of Artificial Sequence: Synthetic oligonucleotide
  Sense strand starting at position 2319 of SEQ ID NO: 915005
ggcagaaguuauccaauug

SEQ ID NO: 1046451 - RNA, 19 nt, Artificial Sequence
  Description of Artificial Sequence: Synthetic oligonucleotide
  Antisense strand to SEQ ID NO: 1046450
caauuggauaacuucugcc

SEQ ID NO: 1046452 - RNA, 19 nt, Artificial Sequence
  Description of Artificial Sequence: Synthetic oligonucleotide
  Sense strand starting at position 2499 of SEQ ID NO: 915005
uuuggaaacuguuuacaug

SEQ ID NO: 1046453 - RNA, 19 nt, Artificial Sequence
  Description of Artificial Sequence: Synthetic oligonucleotide
  Antisense strand to SEQ ID NO: 1046452
cauguaaacaguuuccaaa

SEQ ID NO: 1046454 - RNA, 19 nt, Artificial Sequence
  Description of Artificial Sequence: Synthetic oligonucleotide
  Sense strand starting at position 2528 of SEQ ID NO: 915005
gcagauggucuuggaaaua

SEQ ID NO: 1046455 - RNA, 19 nt, Artificial Sequence
  Description of Artificial Sequence: Synthetic oligonucleotide
  Antisense strand to SEQ ID NO: 1046454
uauuuccaagaccaucugc

SEQ ID NO: 1046456 - RNA, 19 nt, Artificial Sequence
  Description of Artificial Sequence: Synthetic oligonucleotide
  Sense strand starting at position 2566 of SEQ ID NO: 915005
ugcugugaaccauaccuga

SEQ ID NO: 1046457 - RNA, 19 nt, Artificial Sequence
  Description of Artificial Sequence: Synthetic oligonucleotide
  Antisense strand to SEQ ID NO: 1046456
ucagguaugguucacagca

SEQ ID NO: 1046458 - RNA, 19 nt, Artificial Sequence
  Description of Artificial Sequence: Synthetic oligonucleotide
  Sense strand starting at position 2621 of SEQ ID NO: 915005
aaauuauuagacugauggu

SEQ ID NO: 1046459 - RNA, 19 nt, Artificial Sequence
  Description of Artificial Sequence: Synthetic oligonucleotide
  Antisense strand to SEQ ID NO: 1046458
accaucagucuaauaauuu

SEQ ID NO: 1046460 - RNA, 19 nt, Artificial Sequence
  Description of Artificial Sequence: Synthetic oligonucleotide
  Sense strand starting at position 2639 of SEQ ID NO: 915005
ugcuuagaucuuuacagug

SEQ ID NO: 1046461 - RNA, 19 nt, Artificial Sequence
  Description of Artificial Sequence: Synthetic oligonucleotide
  Antisense strand to SEQ ID NO: 1046460
cacuguaaagaucuaagca

SEQ ID NO: 1046462 - RNA, 19 nt, Artificial Sequence
  Description of Artificial Sequence: Synthetic oligonucleotide
  Sense strand starting at position 2655 of SEQ ID NO: 915005
guggcaagaaugggauagu

SEQ ID NO: 1046463 - RNA, 19 nt, Artificial Sequence
  Description of Artificial Sequence: Synthetic oligonucleotide
  Antisense strand to SEQ ID NO: 1046462
acuaucccauucuugccac

SEQ ID NO: 1046464 - RNA, 19 nt, Artificial Sequence
  Description of Artificial Sequence: Synthetic oligonucleotide
  Sense strand starting at position 2726 of SEQ ID NO: 915005
cagcauuggauugaguagu

SEQ ID NO: 1046465 - RNA, 19 nt, Artificial Sequence
  Description of Artificial Sequence: Synthetic oligonucleotide
  Antisense strand to SEQ ID NO: 1046464
acuacucaauccaaugcug

SEQ ID NO: 1046466 - RNA, 19 nt, Artificial Sequence
  Description of Artificial Sequence: Synthetic oligonucleotide
  Sense strand starting at position 2762 of SEQ ID NO: 915005
agggcuaaaccaugugauc

SEQ ID NO: 1046467 - RNA, 19 nt, Artificial Sequence
  Description of Artificial Sequence: Synthetic oligonucleotide
  Antisense strand to SEQ ID NO: 1046466
gaucacaugguuuagcccu

SEQ ID NO: 1046468 - RNA, 19 nt, Artificial Sequence
  Description of Artificial Sequence: Synthetic oligonucleotide
  Sense strand starting at position 2771 of SEQ ID NO: 915005
ccaugugaucauugaaaua

SEQ ID NO: 1046469 - RNA, 19 nt, Artificial Sequence
  Description of Artificial Sequence: Synthetic oligonucleotide
  Antisense strand to SEQ ID NO: 1046468
uauuucaaugaucacaugg

SEQ ID NO: 1046470 - RNA, 19 nt, Artificial Sequence
  Description of Artificial Sequence: Synthetic oligonucleotide
  Sense strand starting at position 2981 of SEQ ID NO: 915005
gcaggaaacuaagauauuu

SEQ ID NO: 1046471 - RNA, 19 nt, Artificial Sequence
  Description of Artificial Sequence: Synthetic oligonucleotide
  Antisense strand to SEQ ID NO: 1046470
aaauaucuuaguuuccugc

SEQ ID NO: 1046472 - RNA, 19 nt, Artificial Sequence
  Description of Artificial Sequence: Synthetic oligonucleotide
  Sense strand starting at position 3022 of SEQ ID NO: 915005
gacauauugguauagcuuu

SEQ ID NO: 1046473 - RNA, 19 nt, Artificial Sequence
  Description of Artificial Sequence: Synthetic oligonucleotide
  Antisense strand to SEQ ID NO: 1046472
aaagcuauaccaauauguc

SEQ ID NO: 1046474 - RNA, 19 nt, Artificial Sequence
  Description of Artificial Sequence: Synthetic oligonucleotide
  Sense strand starting at position 3049 of SEQ ID NO: 915005
aguuuauuaacucaggugu

SEQ ID NO: 1046475 - RNA, 19 nt, Artificial Sequence
  Description of Artificial Sequence: Synthetic oligonucleotide
  Antisense strand to SEQ ID NO: 1046474
acaccugaguuaauaaacu

SEQ ID NO: 1046476 - RNA, 19 nt, Artificial Sequence
  Description of Artificial Sequence: Synthetic oligonucleotide
  Sense strand starting at position 3086 of SEQ ID NO: 915005
ucaggaauugguggaccua

SEQ ID NO: 1046477 - RNA, 19 nt, Artificial Sequence
  Description of Artificial Sequence: Synthetic oligonucleotide
  Antisense strand to SEQ ID NO: 1046476
uagguccaccaauuccuga

SEQ ID NO: 1046478 - RNA, 19 nt, Artificial Sequence
  Description of Artificial Sequence: Synthetic oligonucleotide
  Sense strand starting at position 3207 of SEQ ID NO: 915005
ugcacagaugaaugccaaa

SEQ ID NO: 1046479 - RNA, 19 nt, Artificial Sequence
  Description of Artificial Sequence: Synthetic oligonucleotide
  Antisense strand to SEQ ID NO: 1046478
uuuggcauucaucugugca

SEQ ID NO: 1046480 - RNA, 19 nt, Artificial Sequence
  Description of Artificial Sequence: Synthetic oligonucleotide
  Sense strand starting at position 3359 of SEQ ID NO: 915005
uguagaguucagggaagga

SEQ ID NO: 1046481 - RNA, 19 nt, Artificial Sequence
  Description of Artificial Sequence: Synthetic oligonucleotide
  Antisense strand to SEQ ID NO: 1046480
uccuucccugaacucuaca

SEQ ID NO: 1046482 - RNA, 19 nt, Artificial Sequence
  Description of Artificial Sequence: Synthetic oligonucleotide
  Sense strand starting at position 3390 of SEQ ID NO: 915005
gguaacauuugagagcaga

SEQ ID NO: 1046483 - RNA, 19 nt, Artificial Sequence
  Description of Artificial Sequence: Synthetic oligonucleotide
  Antisense strand to SEQ ID NO: 1046482
ucugcucucaaauguuacc

SEQ ID NO: 1046484 - RNA, 19 nt, Artificial Sequence
  Description of Artificial Sequence: Synthetic oligonucleotide
  Sense strand starting at position 532 of SEQ ID NO: 915006
acuuaaucagccugagcuu

SEQ ID NO: 1046485 - RNA, 19 nt, Artificial Sequence
  Description of Artificial Sequence: Synthetic oligonucleotide
  Antisense strand to SEQ ID NO: 1046484
aagcucaggcugauuaagu

SEQ ID NO: 1046486 - RNA, 19 nt, Artificial Sequence
  Description of Artificial Sequence: Synthetic oligonucleotide
  Sense strand starting at position 533 of SEQ ID NO: 915006
cuuaaucagccugagcuuu

SEQ ID NO: 1046487 - RNA, 19 nt, Artificial Sequence
  Description of Artificial Sequence: Synthetic oligonucleotide
  Antisense strand to SEQ ID NO: 1046486
aaagcucaggcugauuaag

SEQ ID NO: 1046488 - RNA, 19 nt, Artificial Sequence
  Description of Artificial Sequence: Synthetic oligonucleotide
  Sense strand starting at position 545 of SEQ ID NO: 915006
gagcuuuaauugccuggau

SEQ ID NO: 1046489 - RNA, 19 nt, Artificial Sequence
  Description of Artificial Sequence: Synthetic oligonucleotide
  Antisense strand to SEQ ID NO: 1046488
auccaggcaauuaaagcuc

SEQ ID NO: 1046490 - RNA, 19 nt, Artificial Sequence
  Description of Artificial Sequence: Synthetic oligonucleotide
  Sense strand starting at position 546 of SEQ ID NO: 915006
agcuuuaauugccuggaua

SEQ ID NO: 1046491 - RNA, 19 nt, Artificial Sequence
  Description of Artificial Sequence: Synthetic oligonucleotide
  Antisense strand to SEQ ID NO: 1046490
uauccaggcaauuaaagcu

SEQ ID NO: 1046492 - RNA, 19 nt, Artificial Sequence
  Description of Artificial Sequence: Synthetic oligonucleotide
  Sense strand starting at position 548 of SEQ ID NO: 915006
cuuuaauugccuggauacu

SEQ ID NO: 1046493 - RNA, 19 nt, Artificial Sequence
  Description of Artificial Sequence: Synthetic oligonucleotide
  Antisense strand to SEQ ID NO: 1046492
aguauccaggcaauuaaag

SEQ ID NO: 1046494 - RNA, 19 nt, Artificial Sequence
  Description of Artificial Sequence: Synthetic oligonucleotide
  Sense strand starting at position 549 of SEQ ID NO: 915006
uuuaauugccuggauacuu

SEQ ID NO: 1046495 - RNA, 19 nt, Artificial Sequence
  Description of Artificial Sequence: Synthetic oligonucleotide
  Antisense strand to SEQ ID NO: 1046494
aaguauccaggcaauuaaa

SEQ ID NO: 1046496 - RNA, 19 nt, Artificial Sequence
  Description of Artificial Sequence: Synthetic oligonucleotide
  Sense strand starting at position 557 of SEQ ID NO: 915006
ccuggauacuugucuguua

SEQ ID NO: 1046497 - RNA, 19 nt, Artificial Sequence
  Description of Artificial Sequence: Synthetic oligonucleotide
  Antisense strand to SEQ ID NO: 1046496
uaacagacaaguauccagg

SEQ ID NO: 1046498 - RNA, 19 nt, Artificial Sequence
  Description of Artificial Sequence: Synthetic oligonucleotide
  Sense strand starting at position 560 of SEQ ID NO: 915006
ggauacuugucuguuaccu

SEQ ID NO: 1046499 - RNA, 19 nt, Artificial Sequence
  Description of Artificial Sequence: Synthetic oligonucleotide
  Antisense strand to SEQ ID NO: 1046498
agguaacagacaaguaucc

SEQ ID NO: 1046500 - RNA, 19 nt, Artificial Sequence
  Description of Artificial Sequence: Synthetic oligonucleotide
  Sense strand starting at position 568 of SEQ ID NO: 915006
gucuguuaccucguugucu

SEQ ID NO: 1046501 - RNA, 19 nt, Artificial Sequence
  Description of Artificial Sequence: Synthetic oligonucleotide
  Antisense strand to SEQ ID NO: 1046500
agacaacgagguaacagac

SEQ ID NO: 1046502 - RNA, 19 nt, Artificial Sequence
  Description of Artificial Sequence: Synthetic oligonucleotide
  Sense strand starting at position 689 of SEQ ID NO: 915006
gguagccauccugauaaau

SEQ ID NO: 1046503 - RNA, 19 nt, Artificial Sequence
  Description of Artificial Sequence: Synthetic oligonucleotide
  Antisense strand to SEQ ID NO: 1046502
auuuaucaggauggcuacc

SEQ ID NO: 1046504 - RNA, 19 nt, Artificial Sequence
  Description of Artificial Sequence: Synthetic oligonucleotide
  Sense strand starting at position 761 of SEQ ID NO: 915006
aagagcauuucugaagaga

SEQ ID NO: 1046505 - RNA, 19 nt, Artificial Sequence
  Description of Artificial Sequence: Synthetic oligonucleotide
  Antisense strand to SEQ ID NO: 1046504
ucucuucagaaaugcucuu

SEQ ID NO: 1046506 - RNA, 19 nt, Artificial Sequence
  Description of Artificial Sequence: Synthetic oligonucleotide
  Sense strand starting at position 1055 of SEQ ID NO: 915006
aaauuagcugguugugaca

SEQ ID NO: 1046507 - RNA, 19 nt, Artificial Sequence
  Description of Artificial Sequence: Synthetic oligonucleotide
  Antisense strand to SEQ ID NO: 1046506
ugucacaaccagcuaauuu

SEQ ID NO: 1046508 - RNA, 19 nt, Artificial Sequence
  Description of Artificial Sequence: Synthetic oligonucleotide
  Sense strand starting at position 1299 of SEQ ID NO: 915006
guggcaggcauuuguucua

SEQ ID NO: 1046509 - RNA, 19 nt, Artificial Sequence
  Description of Artificial Sequence: Synthetic oligonucleotide
  Antisense strand to SEQ ID NO: 1046508
uagaacaaaugccugccac

SEQ ID NO: 1046510 - RNA, 19 nt, Artificial Sequence
  Description of Artificial Sequence: Synthetic oligonucleotide
  Sense strand starting at position 1313 of SEQ ID NO: 915006
uucuaagggcuuuauccau

SEQ ID NO: 1046511 - RNA, 19 nt, Artificial Sequence
  Description of Artificial Sequence: Synthetic oligonucleotide
  Antisense strand to SEQ ID NO: 1046510
auggauaaagcccuuagaa

SEQ ID NO: 1046512 - RNA, 19 nt, Artificial Sequence
  Description of Artificial Sequence: Synthetic oligonucleotide
  Sense strand starting at position 1649 of SEQ ID NO: 915006
guguauccauacccacauu

SEQ ID NO: 1046513 - RNA, 19 nt, Artificial Sequence
  Description of Artificial Sequence: Synthetic oligonucleotide
  Antisense strand to SEQ ID NO: 1046512
aauguggguauggauacac

SEQ ID NO: 1046514 - RNA, 19 nt, Artificial Sequence
  Description of Artificial Sequence: Synthetic oligonucleotide
  Sense strand starting at position 1683 of SEQ ID NO: 915006
cuguauuauuaugucuaac

SEQ ID NO: 1046515 - RNA, 19 nt, Artificial Sequence
  Description of Artificial Sequence: Synthetic oligonucleotide
  Antisense strand to SEQ ID NO: 1046514
guuagacauaauaauacag

SEQ ID NO: 1046516 - RNA, 19 nt, Artificial Sequence
  Description of Artificial Sequence: Synthetic oligonucleotide
  Sense strand starting at position 1685 of SEQ ID NO: 915006
guauuauuaugucuaacac

SEQ ID NO: 1046517 - RNA, 19 nt, Artificial Sequence
  Description of Artificial Sequence: Synthetic oligonucleotide
  Antisense strand to SEQ ID NO: 1046516
guguuagacauaauaauac

SEQ ID NO: 1046518 - RNA, 19 nt, Artificial Sequence
  Description of Artificial Sequence: Synthetic oligonucleotide
  Sense strand starting at position 1756 of SEQ ID NO: 915006
acaguuaaauguuccaaac

SEQ ID NO: 1046519 - RNA, 19 nt, Artificial Sequence
  Description of Artificial Sequence: Synthetic oligonucleotide
  Antisense strand to SEQ ID NO: 1046518
guuuggaacauuuaacugu

SEQ ID NO: 1046520 - RNA, 19 nt, Artificial Sequence
  Description of Artificial Sequence: Synthetic oligonucleotide
  Sense strand starting at position 2069 of SEQ ID NO: 915006
gacugaccagugugcuaau

SEQ ID NO: 1046521 - RNA, 19 nt, Artificial Sequence
  Description of Artificial Sequence: Synthetic oligonucleotide
  Antisense strand to SEQ ID NO: 1046520
auuagcacacuggucaguc

SEQ ID NO: 1046522 - RNA, 19 nt, Artificial Sequence
  Description of Artificial Sequence: Synthetic oligonucleotide
  Sense strand starting at position 2106 of SEQ ID NO: 915006
cucgcugauccauuguguu

SEQ ID NO: 1046523 - RNA, 19 nt, Artificial Sequence
  Description of Artificial Sequence: Synthetic oligonucleotide
  Antisense strand to SEQ ID NO: 1046522
aacacaauggaucagcgag

SEQ ID NO: 1046524 - RNA, 19 nt, Artificial Sequence
  Description of Artificial Sequence: Synthetic oligonucleotide
  Sense strand starting at position 2163 of SEQ ID NO: 915006
ggauaacugucuucuggcu

SEQ ID NO: 1046525 - RNA, 19 nt, Artificial Sequence
  Description of Artificial Sequence: Synthetic oligonucleotide
  Antisense strand to SEQ ID NO: 1046524
agccagaagacaguuaucc

SEQ ID NO: 1046526 - RNA, 19 nt, Artificial Sequence
  Description of Artificial Sequence: Synthetic oligonucleotide
  Sense strand starting at position 2183 of SEQ ID NO: 915006
ucagauguugcuuaacaca

SEQ ID NO: 1046527 - RNA, 19 nt, Artificial Sequence
  Description of Artificial Sequence: Synthetic oligonucleotide
  Antisense strand to SEQ ID NO: 1046526
uguguuaagcaacaucuga

SEQ ID NO: 1046528 - RNA, 19 nt, Artificial Sequence
  Description of Artificial Sequence: Synthetic oligonucleotide
  Sense strand starting at position 2223 of SEQ ID NO: 915006
gcaacaauauggguagaca

SEQ ID NO: 1046529 - RNA, 19 nt, Artificial Sequence
  Description of Artificial Sequence: Synthetic oligonucleotide
  Antisense strand to SEQ ID NO: 1046528
ugucuacccauauuguugc

SEQ ID NO: 1046530 - RNA, 19 nt, Artificial Sequence
  Description of Artificial Sequence: Synthetic oligonucleotide
  Sense strand starting at position 2388 of SEQ ID NO: 915006
uaccuuauaugcgugauga

SEQ ID NO: 1046531 - RNA, 19 nt, Artificial Sequence
  Description of Artificial Sequence: Synthetic oligonucleotide
  Antisense strand to SEQ ID NO: 1046530
ucaucacgcauauaaggua

SEQ ID NO: 1046532 - RNA, 19 nt, Artificial Sequence
  Description of Artificial Sequence: Synthetic oligonucleotide
  Sense strand starting at position 2390 of SEQ ID NO: 915006
ccuuauaugcgugaugaca

SEQ ID NO: 1046533 - RNA, 19 nt, Artificial Sequence
  Description of Artificial Sequence: Synthetic oligonucleotide
  Antisense strand to SEQ ID NO: 1046532
ugucaucacgcauauaagg

SEQ ID NO: 1046534 - RNA, 19 nt, Artificial Sequence
  Description of Artificial Sequence: Synthetic oligonucleotide
  Sense strand starting at position 2413 of SEQ ID NO: 915006
auucuuacaugcuuagaga

SEQ ID NO: 1046535 - RNA, 19 nt, Artificial Sequence
  Description of Artificial Sequence: Synthetic oligonucleotide
  Antisense strand to SEQ ID NO: 1046534
ucucuaagcauguaagaau

SEQ ID NO: 1046536 - RNA, 19 nt, Artificial Sequence
  Description of Artificial Sequence: Synthetic oligonucleotide
  Sense strand starting at position 2414 of SEQ ID NO: 915006
uucuuacaugcuuagagag

SEQ ID NO: 1046537 - RNA, 19 nt, Artificial Sequence
  Description of Artificial Sequence: Synthetic oligonucleotide
  Antisense strand to SEQ ID NO: 1046536
cucucuaagcauguaagaa

SEQ ID NO: 1046538 - RNA, 19 nt, Artificial Sequence
  Description of Artificial Sequence: Synthetic oligonucleotide
  Sense strand starting at position 2426 of SEQ ID NO: 915006
uagagagguuaauuacuuu

SEQ ID NO: 1046539 - RNA, 19 nt, Artificial Sequence
  Description of Artificial Sequence: Synthetic oligonucleotide
  Antisense strand to SEQ ID NO: 1046538
aaaguaauuaaccucucua

SEQ ID NO: 1046540 - RNA, 19 nt, Artificial Sequence
  Description of Artificial Sequence: Synthetic oligonucleotide
  Sense strand starting at position 2490 of SEQ ID NO: 915006
guauuaaaugguuacuaca

SEQ ID NO: 1046541 - RNA, 19 nt, Artificial Sequence
  Description of Artificial Sequence: Synthetic oligonucleotide
  Antisense strand to SEQ ID NO: 1046540
uguaguaaccauuuaauac

SEQ ID NO: 1046542 - RNA, 19 nt, Artificial Sequence
  Description of Artificial Sequence: Synthetic oligonucleotide
  Sense strand starting at position 2510 of SEQ ID NO: 915006
acaggucauuguucugaau

SEQ ID NO: 1046543 - RNA, 19 nt, Artificial Sequence
  Description of Artificial Sequence: Synthetic oligonucleotide
  Antisense strand to SEQ ID NO: 1046542
auucagaacaaugaccugu

SEQ ID NO: 1046544 - RNA, 19 nt, Artificial Sequence
  Description of Artificial Sequence: Synthetic oligonucleotide
  Sense strand starting at position 2584 of SEQ ID NO: 915006
cuauuaacccgauguuaug

SEQ ID NO: 1046545 - RNA, 19 nt, Artificial Sequence
  Description of Artificial Sequence: Synthetic oligonucleotide
  Antisense strand to SEQ ID NO: 1046544
cauaacaucggguuaauag

SEQ ID NO: 1046546 - RNA, 19 nt, Artificial Sequence
  Description of Artificial Sequence: Synthetic oligonucleotide
  Sense strand starting at position 2697 of SEQ ID NO: 915006
gcccgaagugugccuguua

SEQ ID NO: 1046547 - RNA, 19 nt, Artificial Sequence
  Description of Artificial Sequence: Synthetic oligonucleotide
  Antisense strand to SEQ ID NO: 1046546
uaacaggcacacuucgggc

SEQ ID NO: 1046548 - RNA, 19 nt, Artificial Sequence
  Description of Artificial Sequence: Synthetic oligonucleotide
  Sense strand starting at position 3160 of SEQ ID NO: 915006
auagaaagaucagagccaa

SEQ ID NO: 1046549 - RNA, 19 nt, Artificial Sequence
  Description of Artificial Sequence: Synthetic oligonucleotide
  Antisense strand to SEQ ID NO: 1046548
uuggcucugaucuuucuau

SEQ ID NO: 1046550 - RNA, 19 nt, Artificial Sequence
  Description of Artificial Sequence: Synthetic oligonucleotide
  Sense strand starting at position 3399 of SEQ ID NO: 915006
gccaguuaccaagaccaaa

SEQ ID NO: 1046551 - RNA, 19 nt, Artificial Sequence
  Description of Artificial Sequence: Synthetic oligonucleotide
  Antisense strand to SEQ ID NO: 1046550
uuuggucuugguaacuggc

SEQ ID NO: 1046552 - RNA, 19 nt, Artificial Sequence
  Description of Artificial Sequence: Synthetic oligonucleotide
  Sense strand starting at position 3423 of SEQ ID NO: 915006
gugugugggcagagauugu

SEQ ID NO: 1046553 - RNA, 19 nt, Artificial Sequence
  Description of Artificial Sequence: Synthetic oligonucleotide
  Antisense strand to SEQ ID NO: 1046552
acaaucucugcccacacac

SEQ ID NO: 1046554 - RNA, 19 nt, Artificial Sequence
  Description of Artificial Sequence: Synthetic oligonucleotide
  Sense strand starting at position 3427 of SEQ ID NO: 915006
gugggcagagauugugaau

SEQ ID NO: 1046555 - RNA, 19 nt, Artificial Sequence
  Description of Artificial Sequence: Synthetic oligonucleotide
  Antisense strand to SEQ ID NO: 1046554
auucacaaucucugcccac

SEQ ID NO: 1046556 - RNA, 19 nt, Artificial Sequence
  Description of Artificial Sequence: Synthetic oligonucleotide
  Sense strand starting at position 3485 of SEQ ID NO: 915006
acaggugcuucugcuaaga

SEQ ID NO: 1046557 - RNA, 19 nt, Artificial Sequence
  Description of Artificial Sequence: Synthetic oligonucleotide
  Antisense strand to SEQ ID NO: 1046556
ucuuagcagaagcaccugu

SEQ ID NO: 1046558 - RNA, 19 nt, Artificial Sequence
  Description of Artificial Sequence: Synthetic oligonucleotide
  Sense strand starting at position 3620 of SEQ ID NO: 915006
aaaggaaggugguaaagau

SEQ ID NO: 1046559 - RNA, 19 nt, Artificial Sequence
  Description of Artificial Sequence: Synthetic oligonucleotide
  Antisense strand to SEQ ID NO: 1046558
aucuuuaccaccuuccuuu

SEQ ID NO: 1046560 - RNA, 19 nt, Artificial Sequence
  Description of Artificial Sequence: Synthetic oligonucleotide
  Sense strand starting at position 3843 of SEQ ID NO: 915006
gguucucccauuuguaagu

SEQ ID NO: 1046561 - RNA, 19 nt, Artificial Sequence
  Description of Artificial Sequence: Synthetic oligonucleotide
  Antisense strand to SEQ ID NO: 1046560
acuuacaaaugggagaacc

SEQ ID NO: 1046562 - RNA, 19 nt, Artificial Sequence
  Description of Artificial Sequence: Synthetic oligonucleotide
  Sense strand starting at position 3903 of SEQ ID NO: 915006
acagaaugcauguaaaggu

SEQ ID NO: 1046563 - RNA, 19 nt, Artificial Sequence
  Description of Artificial Sequence: Synthetic oligonucleotide
  Antisense strand to SEQ ID NO: 1046562
accuuuacaugcauucugu

SEQ ID NO: 1046564 - RNA, 19 nt, Artificial Sequence
  Description of Artificial Sequence: Synthetic oligonucleotide
  Sense strand starting at position 78 of SEQ ID NO: 915007
agccuaugacgguaaauaa

SEQ ID NO: 1046565 - RNA, 19 nt, Artificial Sequence
  Description of Artificial Sequence: Synthetic oligonucleotide
  Antisense strand to SEQ ID NO: 1046564
uuauuuaccgucauaggcu

SEQ ID NO: 1046566 - RNA, 19 nt, Artificial Sequence
  Description of Artificial Sequence: Synthetic oligonucleotide
  Sense strand starting at position 86 of SEQ ID NO: 915007
acgguaaauaaggguuuaa

SEQ ID NO: 1046567 - RNA, 19 nt, Artificial Sequence
  Description of Artificial Sequence: Synthetic oligonucleotide
  Antisense strand to SEQ ID NO: 1046566
uuaaacccuuauuuaccgu

SEQ ID NO: 1046568 - RNA, 19 nt, Artificial Sequence
  Description of Artificial Sequence: Synthetic oligonucleotide
  Sense strand starting at position 97 of SEQ ID NO: 915007
ggguuuaagaaauguguua

SEQ ID NO: 1046569 - RNA, 19 nt, Artificial Sequence
  Description of Artificial Sequence: Synthetic oligonucleotide
  Antisense strand to SEQ ID NO: 1046568
uaacacauuucuuaaaccc

SEQ ID NO: 1046570 - RNA, 19 nt, Artificial Sequence
  Description of Artificial Sequence: Synthetic oligonucleotide
  Sense strand starting at position 139 of SEQ ID NO: 915007
caaaguuauuuggaaagug

SEQ ID NO: 1046571 - RNA, 19 nt, Artificial Sequence
  Description of Artificial Sequence: Synthetic oligonucleotide
  Antisense strand to SEQ ID NO: 1046570
cacuuuccaaauaacuuug

SEQ ID NO: 1046572 - RNA, 19 nt, Artificial Sequence
  Description of Artificial Sequence: Synthetic oligonucleotide
  Sense strand starting at position 254 of SEQ ID NO: 915007
cugagaauuuaggacaugu

SEQ ID NO: 1046573 - RNA, 19 nt, Artificial Sequence
  Description of Artificial Sequence: Synthetic oligonucleotide
  Antisense strand to SEQ ID NO: 1046572
acauguccuaaauucucag

SEQ ID NO: 1046574 - RNA, 19 nt, Artificial Sequence
  Description of Artificial Sequence: Synthetic oligonucleotide
  Sense strand starting at position 327 of SEQ ID NO: 915007
cugguaagacuguaagcuu

SEQ ID NO: 1046575 - RNA, 19 nt, Artificial Sequence
  Description of Artificial Sequence: Synthetic oligonucleotide
  Antisense strand to SEQ ID NO: 1046574
aagcuuacagucuuaccag

SEQ ID NO: 1046576 - RNA, 19 nt, Artificial Sequence
  Description of Artificial Sequence: Synthetic oligonucleotide
  Sense strand starting at position 515 of SEQ ID NO: 915007
agaaauccuuguguuaauu

SEQ ID NO: 1046577 - RNA, 19 nt, Artificial Sequence
  Description of Artificial Sequence: Synthetic oligonucleotide
  Antisense strand to SEQ ID NO: 1046576
aauuaacacaaggauuucu

SEQ ID NO: 1046578 - RNA, 19 nt, Artificial Sequence
  Description of Artificial Sequence: Synthetic oligonucleotide
  Sense strand starting at position 622 of SEQ ID NO: 915007
gagaauauuggaugcauau

SEQ ID NO: 1046579 - RNA, 19 nt, Artificial Sequence
  Description of Artificial Sequence: Synthetic oligonucleotide
  Antisense strand to SEQ ID NO: 1046578
auaugcauccaauauucuc

SEQ ID NO: 1046580 - RNA, 19 nt, Artificial Sequence
  Description of Artificial Sequence: Synthetic oligonucleotide
  Sense strand starting at position 632 of SEQ ID NO: 915007
gaugcauaugagggacauu

SEQ ID NO: 1046581 - RNA, 19 nt, Artificial Sequence
  Description of Artificial Sequence: Synthetic oligonucleotide
  Antisense strand to SEQ ID NO: 1046580
aaugucccucauaugcauc

SEQ ID NO: 1046582 - RNA, 19 nt, Artificial Sequence
  Description of Artificial Sequence: Synthetic oligonucleotide
  Sense strand starting at position 649 of SEQ ID NO: 915007
uuucuuccagguuggagaa

SEQ ID NO: 1046583 - RNA, 19 nt, Artificial Sequence
  Description of Artificial Sequence: Synthetic oligonucleotide
  Antisense strand to SEQ ID NO: 1046582
uucuccaaccuggaagaaa

SEQ ID NO: 1046584 - RNA, 19 nt, Artificial Sequence
  Description of Artificial Sequence: Synthetic oligonucleotide
  Sense strand starting at position 858 of SEQ ID NO: 915007
cuccucaugggucacaauu

SEQ ID NO: 1046585 - RNA, 19 nt, Artificial Sequence
  Description of Artificial Sequence: Synthetic oligonucleotide
  Antisense strand to SEQ ID NO: 1046584
aauugugacccaugaggag

SEQ ID NO: 1046586 - RNA, 19 nt, Artificial Sequence
  Description of Artificial Sequence: Synthetic oligonucleotide
  Sense strand starting at position 1110 of SEQ ID NO: 915007
ugugauucuggguacauua

SEQ ID NO: 1046587 - RNA, 19 nt, Artificial Sequence
  Description of Artificial Sequence: Synthetic oligonucleotide
  Antisense strand to SEQ ID NO: 1046586
uaauguacccagaaucaca

SEQ ID NO: 1046588 - RNA, 19 nt, Artificial Sequence
  Description of Artificial Sequence: Synthetic oligonucleotide
  Sense strand starting at position 1112 of SEQ ID NO: 915007
ugauucuggguacauuauu

SEQ ID NO: 1046589 - RNA, 19 nt, Artificial Sequence
  Description of Artificial Sequence: Synthetic oligonucleotide
  Antisense strand to SEQ ID NO: 1046588
aauaauguacccagaauca

SEQ ID NO: 1046590 - RNA, 19 nt, Artificial Sequence
  Description of Artificial Sequence: Synthetic oligonucleotide
  Sense strand starting at position 1492 of SEQ ID NO: 915007
gagguaacuagucaaaggu

SEQ ID NO: 1046591 - RNA, 19 nt, Artificial Sequence
  Description of Artificial Sequence: Synthetic oligonucleotide
  Antisense strand to SEQ ID NO: 1046590
accuuugacuaguuaccuc

SEQ ID NO: 1046592 - RNA, 19 nt, Artificial Sequence
  Description of Artificial Sequence: Synthetic oligonucleotide
  Sense strand starting at position 1984 of SEQ ID NO: 915007
aaaggcugugcugagaauu

SEQ ID NO: 1046593 - RNA, 19 nt, Artificial Sequence
  Description of Artificial Sequence: Synthetic oligonucleotide
  Antisense strand to SEQ ID NO: 1046592
aauucucagcacagccuuu

SEQ ID NO: 1046594 - RNA, 19 nt, Artificial Sequence
  Description of Artificial Sequence: Synthetic oligonucleotide
  Sense strand starting at position 2059 of SEQ ID NO: 915007
ucccaauauggguguggau

SEQ ID NO: 1046595 - RNA, 19 nt, Artificial Sequence
  Description of Artificial Sequence: Synthetic oligonucleotide
  Antisense strand to SEQ ID NO: 1046594
auccacacccauauuggga

SEQ ID NO: 1046596 - RNA, 19 nt, Artificial Sequence
  Description of Artificial Sequence: Synthetic oligonucleotide
  Sense strand starting at position 2155 of SEQ ID NO: 915007
guggauaucagugguagag

SEQ ID NO: 1046597 - RNA, 19 nt, Artificial Sequence
  Description of Artificial Sequence: Synthetic oligonucleotide
  Antisense strand to SEQ ID NO: 1046596
cucuaccacugauauccac

SEQ ID NO: 1046598 - RNA, 19 nt, Artificial Sequence
  Description of Artificial Sequence: Synthetic oligonucleotide
  Sense strand starting at position 2516 of SEQ ID NO: 915007
gcugguaucauagaacgag

SEQ ID NO: 1046599 - RNA, 19 nt, Artificial Sequence
  Description of Artificial Sequence: Synthetic oligonucleotide
  Antisense strand to SEQ ID NO: 1046598
cucguucuaugauaccagc

SEQ ID NO: 1046600 - RNA, 19 nt, Artificial Sequence
  Description of Artificial Sequence: Synthetic oligonucleotide
  Sense strand starting at position 2535 of SEQ ID NO: 915007
cuggucuuugacuaagauc

SEQ ID NO: 1046601 - RNA, 19 nt, Artificial Sequence
  Description of Artificial Sequence: Synthetic oligonucleotide
  Antisense strand to SEQ ID NO: 1046600
gaucuuagucaaagaccag

SEQ ID NO: 1046602 - RNA, 19 nt, Artificial Sequence
  Description of Artificial Sequence: Synthetic oligonucleotide
  Sense strand starting at position 2629 of SEQ ID NO: 915007
gccuacuuuacauggagga

SEQ ID NO: 1046603 - RNA, 19 nt, Artificial Sequence
  Description of Artificial Sequence: Synthetic oligonucleotide
  Antisense strand to SEQ ID NO: 1046602
uccuccauguaaaguaggc

SEQ ID NO: 1046604 - RNA, 19 nt, Artificial Sequence
  Description of Artificial Sequence: Synthetic oligonucleotide
  Sense strand starting at position 2825 of SEQ ID NO: 915007
aucaguuaucugcaaggua

SEQ ID NO: 1046605 - RNA, 19 nt, Artificial Sequence
  Description of Artificial Sequence: Synthetic oligonucleotide
  Antisense strand to SEQ ID NO: 1046604
uaccuugcagauaacugau

SEQ ID NO: 1046606 - RNA, 19 nt, Artificial Sequence
  Description of Artificial Sequence: Synthetic oligonucleotide
  Sense strand starting at position 2847 of SEQ ID NO: 915007
uggcaauacagaugaguaa

SEQ ID NO: 1046607 - RNA, 19 nt, Artificial Sequence
  Description of Artificial Sequence: Synthetic oligonucleotide
  Antisense strand to SEQ ID NO: 1046606
uuacucaucuguauugcca

SEQ ID NO: 1046608 - RNA, 19 nt, Artificial Sequence
  Description of Artificial Sequence: Synthetic oligonucleotide
  Sense strand starting at position 2889 of SEQ ID NO: 915007
aucagugaucugcaaggua

SEQ ID NO: 1046609 - RNA, 19 nt, Artificial Sequence
  Description of Artificial Sequence: Synthetic oligonucleotide
  Antisense strand to SEQ ID NO: 1046608
uaccuugcagaucacugau

SEQ ID NO: 1046610 - RNA, 19 nt, Artificial Sequence
  Description of Artificial Sequence: Synthetic oligonucleotide
  Sense strand starting at position 2892 of SEQ ID NO: 915007
agugaucugcaagguaaag

SEQ ID NO: 1046611 - RNA, 19 nt, Artificial Sequence
  Description of Artificial Sequence: Synthetic oligonucleotide
  Antisense strand to SEQ ID NO: 1046610
cuuuaccuugcagaucacu

SEQ ID NO: 1046612 - RNA, 19 nt, Artificial Sequence
  Description of Artificial Sequence: Synthetic oligonucleotide
  Sense strand starting at position 2894 of SEQ ID NO: 915007
ugaucugcaagguaaagua

SEQ ID NO: 1046613 - RNA, 19 nt, Artificial Sequence
  Description of Artificial Sequence: Synthetic oligonucleotide
  Antisense strand to SEQ ID NO: 1046612
uacuuuaccuugcagauca

SEQ ID NO: 1046614 - RNA, 19 nt, Artificial Sequence
  Description of Artificial Sequence: Synthetic oligonucleotide
  Sense strand starting at position 3094 of SEQ ID NO: 915007
cucagagauauucguauag

SEQ ID NO: 1046615 - RNA, 19 nt, Artificial Sequence
  Description of Artificial Sequence: Synthetic oligonucleotide
  Antisense strand to SEQ ID NO: 1046614
cuauacgaauaucucugag

SEQ ID NO: 1046616 - RNA, 19 nt, Artificial Sequence
  Description of Artificial Sequence: Synthetic oligonucleotide
  Sense strand starting at position 3158 of SEQ ID NO: 915007
cuauguggucuauaaucug

SEQ ID NO: 1046617 - RNA, 19 nt, Artificial Sequence
  Description of Artificial Sequence: Synthetic oligonucleotide
  Antisense strand to SEQ ID NO: 1046616
cagauuauagaccacauag

SEQ ID NO: 1046618 - RNA, 19 nt, Artificial Sequence
  Description of Artificial Sequence: Synthetic oligonucleotide
  Sense strand starting at position 3161 of SEQ ID NO: 915007
uguggucuauaaucugaaa

SEQ ID NO: 1046619 - RNA, 19 nt, Artificial Sequence
  Description of Artificial Sequence: Synthetic oligonucleotide
  Antisense strand to SEQ ID NO: 1046618
uuucagauuauagaccaca

SEQ ID NO: 1046620 - RNA, 19 nt, Artificial Sequence
  Description of Artificial Sequence: Synthetic oligonucleotide
  Sense strand starting at position 3283 of SEQ ID NO: 915007
gaggcaguucucuagggaa

SEQ ID NO: 1046621 - RNA, 19 nt, Artificial Sequence
  Description of Artificial Sequence: Synthetic oligonucleotide
  Antisense strand to SEQ ID NO: 1046620
uucccuagagaacugccuc

SEQ ID NO: 1046622 - RNA, 19 nt, Artificial Sequence
  Description of Artificial Sequence: Synthetic oligonucleotide
  Sense strand starting at position 3303 of SEQ ID NO: 915007
ggaugaugguuacugaacu

SEQ ID NO: 1046623 - RNA, 19 nt, Artificial Sequence
  Description of Artificial Sequence: Synthetic oligonucleotide
  Antisense strand to SEQ ID NO: 1046622
aguucaguaaccaucaucc

SEQ ID NO: 1046624 - RNA, 19 nt, Artificial Sequence
  Description of Artificial Sequence: Synthetic oligonucleotide
  Sense strand starting at position 3359 of SEQ ID NO: 915007
uuugaaagaugcuuaggaa

SEQ ID NO: 1046625 - RNA, 19 nt, Artificial Sequence
  Description of Artificial Sequence: Synthetic oligonucleotide
  Antisense strand to SEQ ID NO: 1046624
uuccuaagcaucuuucaaa

SEQ ID NO: 1046626 - RNA, 19 nt, Artificial Sequence
  Description of Artificial Sequence: Synthetic oligonucleotide
  Sense strand starting at position 3398 of SEQ ID NO: 915007
ugguauaauggauguguaa

SEQ ID NO: 1046627 - RNA, 19 nt, Artificial Sequence
  Description of Artificial Sequence: Synthetic oligonucleotide
  Antisense strand to SEQ ID NO: 1046626
uuacacauccauuauacca

SEQ ID NO: 1046628 - RNA, 19 nt, Artificial Sequence
  Description of Artificial Sequence: Synthetic oligonucleotide
  Sense strand starting at position 3400 of SEQ ID NO: 915007
guauaauggauguguaaau

SEQ ID NO: 1046629 - RNA, 19 nt, Artificial Sequence
  Description of Artificial Sequence: Synthetic oligonucleotide
  Antisense strand to SEQ ID NO: 1046628
auuuacacauccauuauac

SEQ ID NO: 1046630 - RNA, 19 nt, Artificial Sequence
  Description of Artificial Sequence: Synthetic oligonucleotide
  Sense strand starting at position 3401 of SEQ ID NO: 915007
uauaauggauguguaaauc

SEQ ID NO: 1046631 - RNA, 19 nt, Artificial Sequence
  Description of Artificial Sequence: Synthetic oligonucleotide
  Antisense strand to SEQ ID NO: 1046630
gauuuacacauccauuaua

SEQ ID NO: 1046632 - RNA, 19 nt, Artificial Sequence
  Description of Artificial Sequence: Synthetic oligonucleotide
  Sense strand starting at position 3446 of SEQ ID NO: 915007
cucagauucuggguuagga

SEQ ID NO: 1046633 - RNA, 19 nt, Artificial Sequence
  Description of Artificial Sequence: Synthetic oligonucleotide
  Antisense strand to SEQ ID NO: 1046632
uccuaacccagaaucugag

SEQ ID NO: 1046634 - RNA, 19 nt, Artificial Sequence
  Description of Artificial Sequence: Synthetic oligonucleotide
  Sense strand starting at position 3851 of SEQ ID NO: 915007
cuuccuaagagagguugaa

SEQ ID NO: 1046635 - RNA, 19 nt, Artificial Sequence
  Description of Artificial Sequence: Synthetic oligonucleotide
  Antisense strand to SEQ ID NO: 1046634
uucaaccucucuuaggaag

SEQ ID NO: 1046636 - RNA, 19 nt, Artificial Sequence
  Description of Artificial Sequence: Synthetic oligonucleotide
  Sense strand starting at position 3907 of SEQ ID NO: 915007
cuccauaugguaugaaaug

SEQ ID NO: 1046637 - RNA, 19 nt, Artificial Sequence
  Description of Artificial Sequence: Synthetic oligonucleotide
  Antisense strand to SEQ ID NO: 1046636
cauuucauaccauauggag

SEQ ID NO: 1046638 - RNA, 19 nt, Artificial Sequence
  Description of Artificial Sequence: Synthetic oligonucleotide
  Sense strand starting at position 3928 of SEQ ID NO: 915007
acaguaucagguuauuauu

SEQ ID NO: 1046639 - RNA, 19 nt, Artificial Sequence
  Description of Artificial Sequence: Synthetic oligonucleotide
  Antisense strand to SEQ ID NO: 1046638
aauaauaaccugauacugu

SEQ ID NO: 1046640 - RNA, 19 nt, Artificial Sequence
  Description of Artificial Sequence: Synthetic oligonucleotide
  Sense strand starting at position 3936 of SEQ ID NO: 915007
agguuauuauuagcagaua

SEQ ID NO: 1046641 - RNA, 19 nt, Artificial Sequence
  Description of Artificial Sequence: Synthetic oligonucleotide
  Antisense strand to SEQ ID NO: 1046640
uaucugcuaauaauaaccu

SEQ ID NO: 1046642 - RNA, 19 nt, Artificial Sequence
  Description of Artificial Sequence: Synthetic oligonucleotide
  Sense strand starting at position 3964 of SEQ ID NO: 915007
agagaacaauaacaugaaa

SEQ ID NO: 1046643 - RNA, 19 nt, Artificial Sequence
  Description of Artificial Sequence: Synthetic oligonucleotide
  Antisense strand to SEQ ID NO: 1046642
uuucauguuauuguucucu

SEQ ID NO: 1046644 - RNA, 19 nt, Artificial Sequence
  Description of Artificial Sequence: Synthetic oligonucleotide
  Sense strand starting at position 122 of SEQ ID NO: 915008
gcacuaaauuagguccuaa

SEQ ID NO: 1046645 - RNA, 19 nt, Artificial Sequence
  Description of Artificial Sequence: Synthetic oligonucleotide
  Antisense strand to SEQ ID NO: 1046644
uuaggaccuaauuuagugc

SEQ ID NO: 1046646 - RNA, 19 nt, Artificial Sequence
  Description of Artificial Sequence: Synthetic oligonucleotide
  Sense strand starting at position 158 of SEQ ID NO: 915008
gugacuacacuggguuuaa

SEQ ID NO: 1046647 - RNA, 19 nt, Artificial Sequence
  Description of Artificial Sequence: Synthetic oligonucleotide
  Antisense strand to SEQ ID NO: 1046646
uuaaacccaguguagucac

SEQ ID NO: 1046648 - RNA, 19 nt, Artificial Sequence
  Description of Artificial Sequence: Synthetic oligonucleotide
  Sense strand starting at position 341 of SEQ ID NO: 915008
gcuagacugagaggucuuu

SEQ ID NO: 1046649 - RNA, 19 nt, Artificial Sequence
  Description of Artificial Sequence: Synthetic oligonucleotide
  Antisense strand to SEQ ID NO: 1046648
aaagaccucucagucuagc

SEQ ID NO: 1046650 - RNA, 19 nt, Artificial Sequence
  Description of Artificial Sequence: Synthetic oligonucleotide
  Sense strand starting at position 386 of SEQ ID NO: 915008
guguaucuggcuuauaaua

SEQ ID NO: 1046651 - RNA, 19 nt, Artificial Sequence
  Description of Artificial Sequence: Synthetic oligonucleotide
  Antisense strand to SEQ ID NO: 1046650
uauuauaagccagauacac

SEQ ID NO: 1046652 - RNA, 19 nt, Artificial Sequence
  Description of Artificial Sequence: Synthetic oligonucleotide
  Sense strand starting at position 495 of SEQ ID NO: 915008
auggaauaucagugacugu

SEQ ID NO: 1046653 - RNA, 19 nt, Artificial Sequence
  Description of Artificial Sequence: Synthetic oligonucleotide
  Antisense strand to SEQ ID NO: 1046652
acagucacugauauuccau

SEQ ID NO: 1046654 - RNA, 19 nt, Artificial Sequence
  Description of Artificial Sequence: Synthetic oligonucleotide
  Sense strand starting at position 601 of SEQ ID NO: 915008
ugugaagaauucccuaaca

SEQ ID NO: 1046655 - RNA, 19 nt, Artificial Sequence
  Description of Artificial Sequence: Synthetic oligonucleotide
  Antisense strand to SEQ ID NO: 1046654
uguuagggaauucuucaca

SEQ ID NO: 1046656 - RNA, 19 nt, Artificial Sequence
  Description of Artificial Sequence: Synthetic oligonucleotide
  Sense strand starting at position 641 of SEQ ID NO: 915008
auugaacuugauugacuau

SEQ ID NO: 1046657 - RNA, 19 nt, Artificial Sequence
  Description of Artificial Sequence: Synthetic oligonucleotide
  Antisense strand to SEQ ID NO: 1046656
auagucaaucaaguucaau

SEQ ID NO: 1046658 - RNA, 19 nt, Artificial Sequence
  Description of Artificial Sequence: Synthetic oligonucleotide
  Sense strand starting at position 782 of SEQ ID NO: 915008
ggaucuggauagucugcaa

SEQ ID NO: 1046659 - RNA, 19 nt, Artificial Sequence
  Description of Artificial Sequence: Synthetic oligonucleotide
  Antisense strand to SEQ ID NO: 1046658
uugcagacuauccagaucc

SEQ ID NO: 1046660 - RNA, 19 nt, Artificial Sequence
  Description of Artificial Sequence: Synthetic oligonucleotide
  Sense strand starting at position 785 of SEQ ID NO: 915008
ucuggauagucugcaaaua

SEQ ID NO: 1046661 - RNA, 19 nt, Artificial Sequence
  Description of Artificial Sequence: Synthetic oligonucleotide
  Antisense strand to SEQ ID NO: 1046660
uauuugcagacuauccaga

SEQ ID NO: 1046662 - RNA, 19 nt, Artificial Sequence
  Description of Artificial Sequence: Synthetic oligonucleotide
  Sense strand starting at position 786 of SEQ ID NO: 915008
cuggauagucugcaaauag

SEQ ID NO: 1046663 - RNA, 19 nt, Artificial Sequence
  Description of Artificial Sequence: Synthetic oligonucleotide
  Antisense strand to SEQ ID NO: 1046662
cuauuugcagacuauccag

SEQ ID NO: 1046664 - RNA, 19 nt, Artificial Sequence
  Description of Artificial Sequence: Synthetic oligonucleotide
  Sense strand starting at position 994 of SEQ ID NO: 915008
cuaaaucagugcuccugaa

SEQ ID NO: 1046665 - RNA, 19 nt, Artificial Sequence
  Description of Artificial Sequence: Synthetic oligonucleotide
  Antisense strand to SEQ ID NO: 1046664
uucaggagcacugauuuag

SEQ ID NO: 1046666 - RNA, 19 nt, Artificial Sequence
  Description of Artificial Sequence: Synthetic oligonucleotide
  Sense strand starting at position 1154 of SEQ ID NO: 915008
cauaaaugugaaugucuga

SEQ ID NO: 1046667 - RNA, 19 nt, Artificial Sequence
  Description of Artificial Sequence: Synthetic oligonucleotide
  Antisense strand to SEQ ID NO: 1046666
ucagacauucacauuuaug

SEQ ID NO: 1046668 - RNA, 19 nt, Artificial Sequence
  Description of Artificial Sequence: Synthetic oligonucleotide
  Sense strand starting at position 1157 of SEQ ID NO: 915008
aaaugugaaugucugagaa

SEQ ID NO: 1046669 - RNA, 19 nt, Artificial Sequence
  Description of Artificial Sequence: Synthetic oligonucleotide
  Antisense strand to SEQ ID NO: 1046668
uucucagacauucacauuu

SEQ ID NO: 1046670 - RNA, 19 nt, Artificial Sequence
  Description of Artificial Sequence: Synthetic oligonucleotide
  Sense strand starting at position 1214 of SEQ ID NO: 915008
gcagaauuggacugugagg

SEQ ID NO: 1046671 - RNA, 19 nt, Artificial Sequence
  Description of Artificial Sequence: Synthetic oligonucleotide
  Antisense strand to SEQ ID NO: 1046670
ccucacaguccaauucugc

SEQ ID NO: 1046672 - RNA, 19 nt, Artificial Sequence
  Description of Artificial Sequence: Synthetic oligonucleotide
  Sense strand starting at position 1372 of SEQ ID NO: 915008
caagcagugguuugacaag

SEQ ID NO: 1046673 - RNA, 19 nt, Artificial Sequence
  Description of Artificial Sequence: Synthetic oligonucleotide
  Antisense strand to SEQ ID NO: 1046672
cuugucaaaccacugcuug

SEQ ID NO: 1046674 - RNA, 19 nt, Artificial Sequence
  Description of Artificial Sequence: Synthetic oligonucleotide
  Sense strand starting at position 1384 of SEQ ID NO: 915008
ugacaagugcugggaaaga

SEQ ID NO: 1046675 - RNA, 19 nt, Artificial Sequence
  Description of Artificial Sequence: Synthetic oligonucleotide
  Antisense strand to SEQ ID NO: 1046674
ucuuucccagcacuuguca

SEQ ID NO: 1046676 - RNA, 19 nt, Artificial Sequence
  Description of Artificial Sequence: Synthetic oligonucleotide
  Sense strand starting at position 1539 of SEQ ID NO: 915008
uuaaguaggugaguccuaa

SEQ ID NO: 1046677 - RNA, 19 nt, Artificial Sequence
  Description of Artificial Sequence: Synthetic oligonucleotide
  Antisense strand to SEQ ID NO: 1046676
uuaggacucaccuacuuaa

SEQ ID NO: 1046678 - RNA, 19 nt, Artificial Sequence
  Description of Artificial Sequence: Synthetic oligonucleotide
  Sense strand starting at position 2083 of SEQ ID NO: 915008
ucccaagauggcuauaagu

SEQ ID NO: 1046679 - RNA, 19 nt, Artificial Sequence
  Description of Artificial Sequence: Synthetic oligonucleotide
  Antisense strand to SEQ ID NO: 1046678
acuuauagccaucuuggga

SEQ ID NO: 1046680 - RNA, 19 nt, Artificial Sequence
  Description of Artificial Sequence: Synthetic oligonucleotide
  Sense strand starting at position 2155 of SEQ ID NO: 915008
aggaguuuacugugacuuu

SEQ ID NO: 1046681 - RNA, 19 nt, Artificial Sequence
  Description of Artificial Sequence: Synthetic oligonucleotide
  Antisense strand to SEQ ID NO: 1046680
aaagucacaguaaacuccu

SEQ ID NO: 1046682 - RNA, 19 nt, Artificial Sequence
  Description of Artificial Sequence: Synthetic oligonucleotide
  Sense strand starting at position 2198 of SEQ ID NO: 915008
gguuucugauuccucauau

SEQ ID NO: 1046683 - RNA, 19 nt, Artificial Sequence
  Description of Artificial Sequence: Synthetic oligonucleotide
  Antisense strand to SEQ ID NO: 1046682
auaugaggaaucagaaacc

SEQ ID NO: 1046684 - RNA, 19 nt, Artificial Sequence
  Description of Artificial Sequence: Synthetic oligonucleotide
  Sense strand starting at position 2199 of SEQ ID NO: 915008
guuucugauuccucauaua

SEQ ID NO: 1046685 - RNA, 19 nt, Artificial Sequence
  Description of Artificial Sequence: Synthetic oligonucleotide
  Antisense strand to SEQ ID NO: 1046684
uauaugaggaaucagaaac

SEQ ID NO: 1046686 - RNA, 19 nt, Artificial Sequence
  Description of Artificial Sequence: Synthetic oligonucleotide
  Sense strand starting at position 2482 of SEQ ID NO: 915008
ggagguuuccuugagcuga

SEQ ID NO: 1046687 - RNA, 19 nt, Artificial Sequence
  Description of Artificial Sequence: Synthetic oligonucleotide
  Antisense strand to SEQ ID NO: 1046686
ucagcucaaggaaaccucc

SEQ ID NO: 1046688 - RNA, 19 nt, Artificial Sequence
  Description of Artificial Sequence: Synthetic oligonucleotide
  Sense strand starting at position 2484 of SEQ ID NO: 915008
agguuuccuugagcugaaa

SEQ ID NO: 1046689 - RNA, 19 nt, Artificial Sequence
  Description of Artificial Sequence: Synthetic oligonucleotide
  Antisense strand to SEQ ID NO: 1046688
uuucagcucaaggaaaccu

SEQ ID NO: 1046690 - RNA, 19 nt, Artificial Sequence
  Description of Artificial Sequence: Synthetic oligonucleotide
  Sense strand starting at position 2711 of SEQ ID NO: 915008
uuugccaccugauuuaagu

SEQ ID NO: 1046691 - RNA, 19 nt, Artificial Sequence
  Description of Artificial Sequence: Synthetic oligonucleotide
  Antisense strand to SEQ ID NO: 1046690
acuuaaaucagguggcaaa

SEQ ID NO: 1046692 - RNA, 19 nt, Artificial Sequence
  Description of Artificial Sequence: Synthetic oligonucleotide
  Sense strand starting at position 2728 of SEQ ID NO: 915008
guagcuuuagcuguguaac

SEQ ID NO: 1046693 - RNA, 19 nt, Artificial Sequence
  Description of Artificial Sequence: Synthetic oligonucleotide
  Antisense strand to SEQ ID NO: 1046692
guuacacagcuaaagcuac

SEQ ID NO: 1046694 - RNA, 19 nt, Artificial Sequence
  Description of Artificial Sequence: Synthetic oligonucleotide
  Sense strand starting at position 2814 of SEQ ID NO: 915008
guguguggucugucucauc

SEQ ID NO: 1046695 - RNA, 19 nt, Artificial Sequence
  Description of Artificial Sequence: Synthetic oligonucleotide
  Antisense strand to SEQ ID NO: 1046694
gaugagacagaccacacac

SEQ ID NO: 1046696 - RNA, 19 nt, Artificial Sequence
  Description of Artificial Sequence: Synthetic oligonucleotide
  Sense strand starting at position 2909 of SEQ ID NO: 915008
uuaggauggccucagucau

SEQ ID NO: 1046697 - RNA, 19 nt, Artificial Sequence
  Description of Artificial Sequence: Synthetic oligonucleotide
  Antisense strand to SEQ ID NO: 1046696
augacugaggccauccuaa

SEQ ID NO: 1046698 - RNA, 19 nt, Artificial Sequence
  Description of Artificial Sequence: Synthetic oligonucleotide
  Sense strand starting at position 3007 of SEQ ID NO: 915008
augucauauuggccaauca

SEQ ID NO: 1046699 - RNA, 19 nt, Artificial Sequence
  Description of Artificial Sequence: Synthetic oligonucleotide
  Antisense strand to SEQ ID NO: 1046698
ugauuggccaauaugacau

SEQ ID NO: 1046700 - RNA, 19 nt, Artificial Sequence
  Description of Artificial Sequence: Synthetic oligonucleotide
  Sense strand starting at position 3008 of SEQ ID NO: 915008
ugucauauuggccaaucaa

SEQ ID NO: 1046701 - RNA, 19 nt, Artificial Sequence
  Description of Artificial Sequence: Synthetic oligonucleotide
  Antisense strand to SEQ ID NO: 1046700
uugauuggccaauaugaca

SEQ ID NO: 1046702 - RNA, 19 nt, Artificial Sequence
  Description of Artificial Sequence: Synthetic oligonucleotide
  Sense strand starting at position 3082 of SEQ ID NO: 915008
augggaggaucuguacuuu

SEQ ID NO: 1046703 - RNA, 19 nt, Artificial Sequence
  Description of Artificial Sequence: Synthetic oligonucleotide
  Antisense strand to SEQ ID NO: 1046702
aaaguacagauccucccau

SEQ ID NO: 1046704 - RNA, 19 nt, Artificial Sequence
  Description of Artificial Sequence: Synthetic oligonucleotide
  Sense strand starting at position 3187 of SEQ ID NO: 915008
gagaucaggucuuccuuaa

SEQ ID NO: 1046705 - RNA, 19 nt, Artificial Sequence
  Description of Artificial Sequence: Synthetic oligonucleotide
  Antisense strand to SEQ ID NO: 1046704
uuaaggaagaccugaucuc

SEQ ID NO: 1046706 - RNA, 19 nt, Artificial Sequence
  Description of Artificial Sequence: Synthetic oligonucleotide
  Sense strand starting at position 3191 of SEQ ID NO: 915008
ucaggucuuccuuaauuga

SEQ ID NO: 1046707 - RNA, 19 nt, Artificial Sequence
  Description of Artificial Sequence: Synthetic oligonucleotide
  Antisense strand to SEQ ID NO: 1046706
ucaauuaaggaagaccuga

SEQ ID NO: 1046708 - RNA, 19 nt, Artificial Sequence
  Description of Artificial Sequence: Synthetic oligonucleotide
  Sense strand starting at position 3324 of SEQ ID NO: 915008
uucuauggacguugaauca

SEQ ID NO: 1046709 - RNA, 19 nt, Artificial Sequence
  Description of Artificial Sequence: Synthetic oligonucleotide
  Antisense strand to SEQ ID NO: 1046708
ugauucaacguccauagaa

SEQ ID NO: 1046710 - RNA, 19 nt, Artificial Sequence
  Description of Artificial Sequence: Synthetic oligonucleotide
  Sense strand starting at position 3340 of SEQ ID NO: 915008
ucauaauggugauuauccu

SEQ ID NO: 1046711 - RNA, 19 nt, Artificial Sequence
  Description of Artificial Sequence: Synthetic oligonucleotide
  Antisense strand to SEQ ID NO: 1046710
aggauaaucaccauuauga

SEQ ID NO: 1046712 - RNA, 19 nt, Artificial Sequence
  Description of Artificial Sequence: Synthetic oligonucleotide
  Sense strand starting at position 3700 of SEQ ID NO: 915008
aggcuaaguuaucuauuaa

SEQ ID NO: 1046713 - RNA, 19 nt, Artificial Sequence
  Description of Artificial Sequence: Synthetic oligonucleotide
  Antisense strand to SEQ ID NO: 1046712
uuaauagauaacuuagccu

SEQ ID NO: 1046714 - RNA, 19 nt, Artificial Sequence
  Description of Artificial Sequence: Synthetic oligonucleotide
  Sense strand starting at position 3810 of SEQ ID NO: 915008
aguagaugcuaaguaaauu

SEQ ID NO: 1046715 - RNA, 19 nt, Artificial Sequence
  Description of Artificial Sequence: Synthetic oligonucleotide
  Antisense strand to SEQ ID NO: 1046714
aauuuacuuagcaucuacu

SEQ ID NO: 1046716 - RNA, 19 nt, Artificial Sequence
  Description of Artificial Sequence: Synthetic oligonucleotide
  Sense strand starting at position 3811 of SEQ ID NO: 915008
guagaugcuaaguaaauug

SEQ ID NO: 1046717 - RNA, 19 nt, Artificial Sequence
  Description of Artificial Sequence: Synthetic oligonucleotide
  Antisense strand to SEQ ID NO: 1046716
caauuuacuuagcaucuac

SEQ ID NO: 1046718 - RNA, 19 nt, Artificial Sequence
  Description of Artificial Sequence: Synthetic oligonucleotide
  Sense strand starting at position 3964 of SEQ ID NO: 915008
uuaaauguguuucuaugag

SEQ ID NO: 1046719 - RNA, 19 nt, Artificial Sequence
  Description of Artificial Sequence: Synthetic oligonucleotide
  Antisense strand to SEQ ID NO: 1046718
cucauagaaacacauuuaa

SEQ ID NO: 1046720 - RNA, 19 nt, Artificial Sequence
  Description of Artificial Sequence: Synthetic oligonucleotide
  Sense strand starting at position 3973 of SEQ ID NO: 915008
uuucuaugagcuuagcuau

SEQ ID NO: 1046721 - RNA, 19 nt, Artificial Sequence
  Description of Artificial Sequence: Synthetic oligonucleotide
  Antisense strand to SEQ ID NO: 1046720
auagcuaagcucauagaaa

SEQ ID NO: 1046722 - RNA, 19 nt, Artificial Sequence
  Description of Artificial Sequence: Synthetic oligonucleotide
  Sense strand starting at position 3979 of SEQ ID NO: 915008
ugagcuuagcuauaauacu

SEQ ID NO: 1046723 - RNA, 19 nt, Artificial Sequence
  Description of Artificial Sequence: Synthetic oligonucleotide
  Antisense strand to SEQ ID NO: 1046722
aguauuauagcuaagcuca

SEQ ID NO: 1046724 - RNA, 19 nt, Artificial Sequence
  Description of Artificial Sequence: Synthetic oligonucleotide
  Sense strand starting at position 43 of SEQ ID NO: 915009
guuuacaaauggucuaaac

SEQ ID NO: 1046725 - RNA, 19 nt, Artificial Sequence
  Description of Artificial Sequence: Synthetic oligonucleotide
  Antisense strand to SEQ ID NO: 1046724
guuuagaccauuuguaaac

SEQ ID NO: 1046726 - RNA, 19 nt, Artificial Sequence
  Description of Artificial Sequence: Synthetic oligonucleotide
  Sense strand starting at position 110 of SEQ ID NO: 915009
guaagugacucacugaguu

SEQ ID NO: 1046727 - RNA, 19 nt, Artificial Sequence
  Description of Artificial Sequence: Synthetic oligonucleotide
  Antisense strand to SEQ ID NO: 1046726
aacucagugagucacuuac

SEQ ID NO: 1046728 - RNA, 19 nt, Artificial Sequence
  Description of Artificial Sequence: Synthetic oligonucleotide
  Sense strand starting at position 114 of SEQ ID NO: 915009
gugacucacugaguuuaug

SEQ ID NO: 1046729 - RNA, 19 nt, Artificial Sequence
  Description of Artificial Sequence: Synthetic oligonucleotide
  Antisense strand to SEQ ID NO: 1046728
cauaaacucagugagucac

SEQ ID NO: 1046730 - RNA, 19 nt, Artificial Sequence
  Description of Artificial Sequence: Synthetic oligonucleotide
  Sense strand starting at position 218 of SEQ ID NO: 915009
aacugcugucaaggaguuu

SEQ ID NO: 1046731 - RNA, 19 nt, Artificial Sequence
  Description of Artificial Sequence: Synthetic oligonucleotide
  Antisense strand to SEQ ID NO: 1046730
aaacuccuugacagcaguu

SEQ ID NO: 1046732 - RNA, 19 nt, Artificial Sequence
  Description of Artificial Sequence: Synthetic oligonucleotide
  Sense strand starting at position 271 of SEQ ID NO: 915009
agggaauagugagaugaga

SEQ ID NO: 1046733 - RNA, 19 nt, Artificial Sequence
  Description of Artificial Sequence: Synthetic oligonucleotide
  Antisense strand to SEQ ID NO: 1046732
ucucaucucacuauucccu

SEQ ID NO: 1046734 - RNA, 19 nt, Artificial Sequence
  Description of Artificial Sequence: Synthetic oligonucleotide
  Sense strand starting at position 327 of SEQ ID NO: 915009
ccagcugaguccucagaag

SEQ ID NO: 1046735 - RNA, 19 nt, Artificial Sequence
  Description of Artificial Sequence: Synthetic oligonucleotide
  Antisense strand to SEQ ID NO: 1046734
cuucugaggacucagcugg

SEQ ID NO: 1046736 - RNA, 19 nt, Artificial Sequence
  Description of Artificial Sequence: Synthetic oligonucleotide
  Sense strand starting at position 446 of SEQ ID NO: 915009
agcuauacaggaugugaua

SEQ ID NO: 1046737 - RNA, 19 nt, Artificial Sequence
  Description of Artificial Sequence: Synthetic oligonucleotide
  Antisense strand to SEQ ID NO: 1046736
uaucacauccuguauagcu

SEQ ID NO: 1046738 - RNA, 19 nt, Artificial Sequence
  Description of Artificial Sequence: Synthetic oligonucleotide
  Sense strand starting at position 462 of SEQ ID NO: 915009
auacucacagauuguagau

SEQ ID NO: 1046739 - RNA, 19 nt, Artificial Sequence
  Description of Artificial Sequence: Synthetic oligonucleotide
  Antisense strand to SEQ ID NO: 1046738
aucuacaaucugugaguau

SEQ ID NO: 1046740 - RNA, 19 nt, Artificial Sequence
  Description of Artificial Sequence: Synthetic oligonucleotide
  Sense strand starting at position 551 of SEQ ID NO: 915009
acuaauauuugugagaguu

SEQ ID NO: 1046741 - RNA, 19 nt, Artificial Sequence
  Description of Artificial Sequence: Synthetic oligonucleotide
  Antisense strand to SEQ ID NO: 1046740
aacucucacaaauauuagu

SEQ ID NO: 1046742 - RNA, 19 nt, Artificial Sequence
  Description of Artificial Sequence: Synthetic oligonucleotide
  Sense strand starting at position 561 of SEQ ID NO: 915009
gugagaguucaggagucau

SEQ ID NO: 1046743 - RNA, 19 nt, Artificial Sequence
  Description of Artificial Sequence: Synthetic oligonucleotide
  Antisense strand to SEQ ID NO: 1046742
augacuccugaacucucac

SEQ ID NO: 1046744 - RNA, 19 nt, Artificial Sequence
  Description of Artificial Sequence: Synthetic oligonucleotide
  Sense strand starting at position 579 of SEQ ID NO: 915009
uggagccuuaugugugaau

SEQ ID NO: 1046745 - RNA, 19 nt, Artificial Sequence
  Description of Artificial Sequence: Synthetic oligonucleotide
  Antisense strand to SEQ ID NO: 1046744
auucacacauaaggcucca

SEQ ID NO: 1046746 - RNA, 19 nt, Artificial Sequence
  Description of Artificial Sequence: Synthetic oligonucleotide
  Sense strand starting at position 580 of SEQ ID NO: 915009
ggagccuuaugugugaauu

SEQ ID NO: 1046747 - RNA, 19 nt, Artificial Sequence
  Description of Artificial Sequence: Synthetic oligonucleotide
  Antisense strand to SEQ ID NO: 1046746
aauucacacauaaggcucc

SEQ ID NO: 1046748 - RNA, 19 nt, Artificial Sequence
  Description of Artificial Sequence: Synthetic oligonucleotide
  Sense strand starting at position 581 of SEQ ID NO: 915009
gagccuuaugugugaauug

SEQ ID NO: 1046749 - RNA, 19 nt, Artificial Sequence
  Description of Artificial Sequence: Synthetic oligonucleotide
  Antisense strand to SEQ ID NO: 1046748
caauucacacauaaggcuc

SEQ ID NO: 1046750 - RNA, 19 nt, Artificial Sequence
  Description of Artificial Sequence: Synthetic oligonucleotide
  Sense strand starting at position 631 of SEQ ID NO: 915009
aggcaagucuguucuugaa

SEQ ID NO: 1046751 - RNA, 19 nt, Artificial Sequence
  Description of Artificial Sequence: Synthetic oligonucleotide
  Antisense strand to SEQ ID NO: 1046750
uucaagaacagacuugccu

SEQ ID NO: 1046752 - RNA, 19 nt, Artificial Sequence
  Description of Artificial Sequence: Synthetic oligonucleotide
  Sense strand starting at position 635 of SEQ ID NO: 915009
aagucuguucuugaagcuu

SEQ ID NO: 1046753 - RNA, 19 nt, Artificial Sequence
  Description of Artificial Sequence: Synthetic oligonucleotide
  Antisense strand to SEQ ID NO: 1046752
aagcuucaagaacagacuu

SEQ ID NO: 1046754 - RNA, 19 nt, Artificial Sequence
  Description of Artificial Sequence: Synthetic oligonucleotide
  Sense strand starting at position 666 of SEQ ID NO: 915009
cuguuaaauagaggagcaa

SEQ ID NO: 1046755 - RNA, 19 nt, Artificial Sequence
  Description of Artificial Sequence: Synthetic oligonucleotide
  Antisense strand to SEQ ID NO: 1046754
uugcuccucuauuuaacag

SEQ ID NO: 1046756 - RNA, 19 nt, Artificial Sequence
  Description of Artificial Sequence: Synthetic oligonucleotide
  Sense strand starting at position 695 of SEQ ID NO: 915009
ggagaauugucauaaagau

SEQ ID NO: 1046757 - RNA, 19 nt, Artificial Sequence
  Description of Artificial Sequence: Synthetic oligonucleotide
  Antisense strand to SEQ ID NO: 1046756
aucuuuaugacaauucucc

SEQ ID NO: 1046758 - RNA, 19 nt, Artificial Sequence
  Description of Artificial Sequence: Synthetic oligonucleotide
  Sense strand starting at position 862 of SEQ ID NO: 915009
ugacuacacugcuuuaaag

SEQ ID NO: 1046759 - RNA, 19 nt, Artificial Sequence
  Description of Artificial Sequence: Synthetic oligonucleotide
  Antisense strand to SEQ ID NO: 1046758
cuuuaaagcaguguaguca

SEQ ID NO: 1046760 - RNA, 19 nt, Artificial Sequence
  Description of Artificial Sequence: Synthetic oligonucleotide
  Sense strand starting at position 1103 of SEQ ID NO: 915009
aucuuugcccuccagaaag

SEQ ID NO: 1046761 - RNA, 19 nt, Artificial Sequence
  Description of Artificial Sequence: Synthetic oligonucleotide
  Antisense strand to SEQ ID NO: 1046760
cuuucuggagggcaaagau

SEQ ID NO: 1046762 - RNA, 19 nt, Artificial Sequence
  Description of Artificial Sequence: Synthetic oligonucleotide
  Sense strand starting at position 1499 of SEQ ID NO: 915009
uuuagaaggcuggauuagu

SEQ ID NO: 1046763 - RNA, 19 nt, Artificial Sequence
  Description of Artificial Sequence: Synthetic oligonucleotide
  Antisense strand to SEQ ID NO: 1046762
acuaauccagccuucuaaa

SEQ ID NO: 1046764 - RNA, 19 nt, Artificial Sequence
  Description of Artificial Sequence: Synthetic oligonucleotide
  Sense strand starting at position 1544 of SEQ ID NO: 915009
uaugaaauguaauuggcuu

SEQ ID NO: 1046765 - RNA, 19 nt, Artificial Sequence
  Description of Artificial Sequence: Synthetic oligonucleotide
  Antisense strand to SEQ ID NO: 1046764
aagccaauuacauuucaua

SEQ ID NO: 1046766 - RNA, 19 nt, Artificial Sequence
  Description of Artificial Sequence: Synthetic oligonucleotide
  Sense strand starting at position 1552 of SEQ ID NO: 915009
guaauuggcuugucuuaag

SEQ ID NO: 1046767 - RNA, 19 nt, Artificial Sequence
  Description of Artificial Sequence: Synthetic oligonucleotide
  Antisense strand to SEQ ID NO: 1046766
cuuaagacaagccaauuac

SEQ ID NO: 1046768 - RNA, 19 nt, Artificial Sequence
  Description of Artificial Sequence: Synthetic oligonucleotide
  Sense strand starting at position 1765 of SEQ ID NO: 915009
ccuccugagcuuugauuaa

SEQ ID NO: 1046769 - RNA, 19 nt, Artificial Sequence
  Description of Artificial Sequence: Synthetic oligonucleotide
  Antisense strand to SEQ ID NO: 1046768
uuaaucaaagcucaggagg

SEQ ID NO: 1046770 - RNA, 19 nt, Artificial Sequence
  Description of Artificial Sequence: Synthetic oligonucleotide
  Sense strand starting at position 1860 of SEQ ID NO: 915009
aguuaaaguugccuaccua

SEQ ID NO: 1046771 - RNA, 19 nt, Artificial Sequence
  Description of Artificial Sequence: Synthetic oligonucleotide
  Antisense strand to SEQ ID NO: 1046770
uagguaggcaacuuuaacu

SEQ ID NO: 1046772 - RNA, 19 nt, Artificial Sequence
  Description of Artificial Sequence: Synthetic oligonucleotide
  Sense strand starting at position 1861 of SEQ ID NO: 915009
guuaaaguugccuaccuaa

SEQ ID NO: 1046773 - RNA, 19 nt, Artificial Sequence
  Description of Artificial Sequence: Synthetic oligonucleotide
  Antisense strand to SEQ ID NO: 1046772
uuagguaggcaacuuuaac

SEQ ID NO: 1046774 - RNA, 19 nt, Artificial Sequence
  Description of Artificial Sequence: Synthetic oligonucleotide
  Sense strand starting at position 1959 of SEQ ID NO: 915009
agacaacacguguaagguu

SEQ ID NO: 1046775 - RNA, 19 nt, Artificial Sequence
  Description of Artificial Sequence: Synthetic oligonucleotide
  Antisense strand to SEQ ID NO: 1046774
aaccuuacacguguugucu

SEQ ID NO: 1046776 - RNA, 19 nt, Artificial Sequence
  Description of Artificial Sequence: Synthetic oligonucleotide
  Sense strand starting at position 2072 of SEQ ID NO: 915009
uggcuuuaguaagcuuaaa

SEQ ID NO: 1046777 - RNA, 19 nt, Artificial Sequence
  Description of Artificial Sequence: Synthetic oligonucleotide
  Antisense strand to SEQ ID NO: 1046776
uuuaagcuuacuaaagcca

SEQ ID NO: 1046778 - RNA, 19 nt, Artificial Sequence
  Description of Artificial Sequence: Synthetic oligonucleotide
  Sense strand starting at position 2210 of SEQ ID NO: 915009
acacguucugauuaaugau

SEQ ID NO: 1046779 - RNA, 19 nt, Artificial Sequence
  Description of Artificial Sequence: Synthetic oligonucleotide
  Antisense strand to SEQ ID NO: 1046778
aucauuaaucagaacgugu

SEQ ID NO: 1046780 - RNA, 19 nt, Artificial Sequence
  Description of Artificial Sequence: Synthetic oligonucleotide
  Sense strand starting at position 2260 of SEQ ID NO: 915009
gccacuuuggacuggguaa

SEQ ID NO: 1046781 - RNA, 19 nt, Artificial Sequence
  Description of Artificial Sequence: Synthetic oligonucleotide
  Antisense strand to SEQ ID NO: 1046780
uuacccaguccaaaguggc

SEQ ID NO: 1046782 - RNA, 19 nt, Artificial Sequence
  Description of Artificial Sequence: Synthetic oligonucleotide
  Sense strand starting at position 2261 of SEQ ID NO: 915009
ccacuuuggacuggguaau

SEQ ID NO: 1046783 - RNA, 19 nt, Artificial Sequence
  Description of Artificial Sequence: Synthetic oligonucleotide
  Antisense strand to SEQ ID NO: 1046782
auuacccaguccaaagugg

SEQ ID NO: 1046784 - RNA, 19 nt, Artificial Sequence
  Description of Artificial Sequence: Synthetic oligonucleotide
  Sense strand starting at position 2271 of SEQ ID NO: 915009
cuggguaauucuuuacagu

SEQ ID NO: 1046785 - RNA, 19 nt, Artificial Sequence
  Description of Artificial Sequence: Synthetic oligonucleotide
  Antisense strand to SEQ ID NO: 1046784
acuguaaagaauuacccag

SEQ ID NO: 1046786 - RNA, 19 nt, Artificial Sequence
  Description of Artificial Sequence: Synthetic oligonucleotide
  Sense strand starting at position 2272 of SEQ ID NO: 915009
uggguaauucuuuacagua

SEQ ID NO: 1046787 - RNA, 19 nt, Artificial Sequence
  Description of Artificial Sequence: Synthetic oligonucleotide
  Antisense strand to SEQ ID NO: 1046786
uacuguaaagaauuaccca

SEQ ID NO: 1046788 - RNA, 19 nt, Artificial Sequence
  Description of Artificial Sequence: Synthetic oligonucleotide
  Sense strand starting at position 2310 of SEQ ID NO: 915009
guaggaugcuuagcagacu

SEQ ID NO: 1046789 - RNA, 19 nt, Artificial Sequence
  Description of Artificial Sequence: Synthetic oligonucleotide
  Antisense strand to SEQ ID NO: 1046788
agucugcuaagcauccuac

SEQ ID NO: 1046790 - RNA, 19 nt, Artificial Sequence
  Description of Artificial Sequence: Synthetic oligonucleotide
  Sense strand starting at position 2491 of SEQ ID NO: 915009
gcaggugugcuagaaacag

SEQ ID NO: 1046791 - RNA, 19 nt, Artificial Sequence
  Description of Artificial Sequence: Synthetic oligonucleotide
  Antisense strand to SEQ ID NO: 1046790
cuguuucuagcacaccugc

SEQ ID NO: 1046792 - RNA, 19 nt, Artificial Sequence
  Description of Artificial Sequence: Synthetic oligonucleotide
  Sense strand starting at position 2608 of SEQ ID NO: 915009
uguacagaccacuaguauu

SEQ ID NO: 1046793 - RNA, 19 nt, Artificial Sequence
  Description of Artificial Sequence: Synthetic oligonucleotide
  Antisense strand to SEQ ID NO: 1046792
aauacuaguggucuguaca

SEQ ID NO: 1046794 - RNA, 19 nt, Artificial Sequence
  Description of Artificial Sequence: Synthetic oligonucleotide
  Sense strand starting at position 2768 of SEQ ID NO: 915009
uugcucugucucuaaggga

SEQ ID NO: 1046795 - RNA, 19 nt, Artificial Sequence
  Description of Artificial Sequence: Synthetic oligonucleotide
  Antisense strand to SEQ ID NO: 1046794
ucccuuagagacagagcaa

SEQ ID NO: 1046796 - RNA, 19 nt, Artificial Sequence
  Description of Artificial Sequence: Synthetic oligonucleotide
  Sense strand starting at position 3871 of SEQ ID NO: 915009
aaacuagaacuuuguguga

SEQ ID NO: 1046797 - RNA, 19 nt, Artificial Sequence
  Description of Artificial Sequence: Synthetic oligonucleotide
  Antisense strand to SEQ ID NO: 1046796
ucacacaaaguucuaguuu

SEQ ID NO: 1046798 - RNA, 19 nt, Artificial Sequence
  Description of Artificial Sequence: Synthetic oligonucleotide
  Sense strand starting at position 3874 of SEQ ID NO: 915009
cuagaacuuugugugaaau

SEQ ID NO: 1046799 - RNA, 19 nt, Artificial Sequence
  Description of Artificial Sequence: Synthetic oligonucleotide
  Antisense strand to SEQ ID NO: 1046798
auuucacacaaaguucuag

SEQ ID NO: 1046800 - RNA, 19 nt, Artificial Sequence
  Description of Artificial Sequence: Synthetic oligonucleotide
  Sense strand starting at position 3886 of SEQ ID NO: 915009
gugaaauagacuggccagu

SEQ ID NO: 1046801 - RNA, 19 nt, Artificial Sequence
  Description of Artificial Sequence: Synthetic oligonucleotide
  Antisense strand to SEQ ID NO: 1046800
acuggccagucuauuucac

SEQ ID NO: 1046802 - RNA, 19 nt, Artificial Sequence
  Description of Artificial Sequence: Synthetic oligonucleotide
  Sense strand starting at position 3888 of SEQ ID NO: 915009
gaaauagacuggccaguau

SEQ ID NO: 1046803 - RNA, 19 nt, Artificial Sequence
  Description of Artificial Sequence: Synthetic oligonucleotide
  Antisense strand to SEQ ID NO: 1046802
auacuggccagucuauuuc

SEQ ID NO: 1046804 - RNA, 19 nt, Artificial Sequence
  Description of Artificial Sequence: Synthetic oligonucleotide
  Sense strand starting at position 258 of SEQ ID NO: 915010
cuuugauuucugcguguag

SEQ ID NO: 1046805 - RNA, 19 nt, Artificial Sequence
  Description of Artificial Sequence: Synthetic oligonucleotide
  Antisense strand to SEQ ID NO: 1046804
cuacacgcagaaaucaaag

SEQ ID NO: 1046806 - RNA, 19 nt, Artificial Sequence
  Description of Artificial Sequence: Synthetic oligonucleotide
  Sense strand starting at position 259 of SEQ ID NO: 915010
uuugauuucugcguguaga

SEQ ID NO: 1046807 - RNA, 19 nt, Artificial Sequence
  Description of Artificial Sequence: Synthetic oligonucleotide
  Antisense strand to SEQ ID NO: 1046806
ucuacacgcagaaaucaaa

SEQ ID NO: 1046808 - RNA, 19 nt, Artificial Sequence
  Description of Artificial Sequence: Synthetic oligonucleotide
  Sense strand starting at position 260 of SEQ ID NO: 915010
uugauuucugcguguagau

SEQ ID NO: 1046809 - RNA, 19 nt, Artificial Sequence
  Description of Artificial Sequence: Synthetic oligonucleotide
  Antisense strand to SEQ ID NO: 1046808
aucuacacgcagaaaucaa

SEQ ID NO: 1046810 - RNA, 19 nt, Artificial Sequence
  Description of Artificial Sequence: Synthetic oligonucleotide
  Sense strand starting at position 262 of SEQ ID NO: 915010
gauuucugcguguagaugu

SEQ ID NO: 1046811 - RNA, 19 nt, Artificial Sequence
  Description of Artificial Sequence: Synthetic oligonucleotide
  Antisense strand to SEQ ID NO: 1046810
acaucuacacgcagaaauc

SEQ ID NO: 1046812 - RNA, 19 nt, Artificial Sequence
  Description of Artificial Sequence: Synthetic oligonucleotide
  Sense strand starting at position 333 of SEQ ID NO: 915010
agaaguugaugacauuuga

SEQ ID NO: 1046813 - RNA, 19 nt, Artificial Sequence
  Description of Artificial Sequence: Synthetic oligonucleotide
  Antisense strand to SEQ ID NO: 1046812
ucaaaugucaucaacuucu

SEQ ID NO: 1046814 - RNA, 19 nt, Artificial Sequence
  Description of Artificial Sequence: Synthetic oligonucleotide
  Sense strand starting at position 403 of SEQ ID NO: 915010
guugccaacuauguaagaa

SEQ ID NO: 1046815 - RNA, 19 nt, Artificial Sequence
  Description of Artificial Sequence: Synthetic oligonucleotide
  Antisense strand to SEQ ID NO: 1046814
uucuuacauaguuggcaac

SEQ ID NO: 1046816 - RNA, 19 nt, Artificial Sequence
  Description of Artificial Sequence: Synthetic oligonucleotide
  Sense strand starting at position 509 of SEQ ID NO: 915010
uggccuguccauuagagaa

SEQ ID NO: 1046817 - RNA, 19 nt, Artificial Sequence
  Description of Artificial Sequence: Synthetic oligonucleotide
  Antisense strand to SEQ ID NO: 1046816
uucucuaauggacaggcca

SEQ ID NO: 1046818 - RNA, 19 nt, Artificial Sequence
  Description of Artificial Sequence: Synthetic oligonucleotide
  Sense strand starting at position 645 of SEQ ID NO: 915010
ugaaucuugagaggucuca

SEQ ID NO: 1046819 - RNA, 19 nt, Artificial Sequence
  Description of Artificial Sequence: Synthetic oligonucleotide
  Antisense strand to SEQ ID NO: 1046818
ugagaccucucaagauuca

SEQ ID NO: 1046820 - RNA, 19 nt, Artificial Sequence
  Description of Artificial Sequence: Synthetic oligonucleotide
  Sense strand starting at position 659 of SEQ ID NO: 915010
ucucaauguccagaggcaa

SEQ ID NO: 1046821 - RNA, 19 nt, Artificial Sequence
  Description of Artificial Sequence: Synthetic oligonucleotide
  Antisense strand to SEQ ID NO: 1046820
uugccucuggacauugaga

SEQ ID NO: 1046822 - RNA, 19 nt, Artificial Sequence
  Description of Artificial Sequence: Synthetic oligonucleotide
  Sense strand starting at position 746 of SEQ ID NO: 915010
ugccauauauuugaugaau

SEQ ID NO: 1046823 - RNA, 19 nt, Artificial Sequence
  Description of Artificial Sequence: Synthetic oligonucleotide
  Antisense strand to SEQ ID NO: 1046822
auucaucaaauauauggca

SEQ ID NO: 1046824 - RNA, 19 nt, Artificial Sequence
  Description of Artificial Sequence: Synthetic oligonucleotide
  Sense strand starting at position 895 of SEQ ID NO: 915010
acaacagcucugcauguua

SEQ ID NO: 1046825 - RNA, 19 nt, Artificial Sequence
  Description of Artificial Sequence: Synthetic oligonucleotide
  Antisense strand to SEQ ID NO: 1046824
uaacaugcagagcuguugu

SEQ ID NO: 1046826 - RNA, 19 nt, Artificial Sequence
  Description of Artificial Sequence: Synthetic oligonucleotide
  Sense strand starting at position 983 of SEQ ID NO: 915010
auaccuauugcauauaugu

SEQ ID NO: 1046827 - RNA, 19 nt, Artificial Sequence
  Description of Artificial Sequence: Synthetic oligonucleotide
  Antisense strand to SEQ ID NO: 1046826
acauauaugcaauagguau

SEQ ID NO: 1046828 - RNA, 19 nt, Artificial Sequence
  Description of Artificial Sequence: Synthetic oligonucleotide
  Sense strand starting at position 1190 of SEQ ID NO: 915010
guuuacucaggcuggagaa

SEQ ID NO: 1046829 - RNA, 19 nt, Artificial Sequence
  Description of Artificial Sequence: Synthetic oligonucleotide
  Antisense strand to SEQ ID NO: 1046828
uucuccagccugaguaaac

SEQ ID NO: 1046830 - RNA, 19 nt, Artificial Sequence
  Description of Artificial Sequence: Synthetic oligonucleotide
  Sense strand starting at position 1216 of SEQ ID NO: 915010
caugcagugguaugagaac

SEQ ID NO: 1046831 - RNA, 19 nt, Artificial Sequence
  Description of Artificial Sequence: Synthetic oligonucleotide
  Antisense strand to SEQ ID NO: 1046830
guucucauaccacugcaug

SEQ ID NO: 1046832 - RNA, 19 nt, Artificial Sequence
  Description of Artificial Sequence: Synthetic oligonucleotide
  Sense strand starting at position 1222 of SEQ ID NO: 915010
gugguaugagaacaagucu

SEQ ID NO: 1046833 - RNA, 19 nt, Artificial Sequence
  Description of Artificial Sequence: Synthetic oligonucleotide
  Antisense strand to SEQ ID NO: 1046832
agacuuguucucauaccac

SEQ ID NO: 1046834 - RNA, 19 nt, Artificial Sequence
  Description of Artificial Sequence: Synthetic oligonucleotide
  Sense strand starting at position 1230 of SEQ ID NO: 915010
agaacaagucuuggacuca

SEQ ID NO: 1046835 - RNA, 19 nt, Artificial Sequence
  Description of Artificial Sequence: Synthetic oligonucleotide
  Antisense strand to SEQ ID NO: 1046834
ugaguccaagacuuguucu

SEQ ID NO: 1046836 - RNA, 19 nt, Artificial Sequence
  Description of Artificial Sequence: Synthetic oligonucleotide
  Sense strand starting at position 1310 of SEQ ID NO: 915010
ugguauuuguugcuaagcu

SEQ ID NO: 1046837 - RNA, 19 nt, Artificial Sequence
  Description of Artificial Sequence: Synthetic oligonucleotide
  Antisense strand to SEQ ID NO: 1046836
agcuuagcaacaaauacca

SEQ ID NO: 1046838 - RNA, 19 nt, Artificial Sequence
  Description of Artificial Sequence: Synthetic oligonucleotide
  Sense strand starting at position 1378 of SEQ ID NO: 915010
guuuacaaauggucuaaac

SEQ ID NO: 1046839 - RNA, 19 nt, Artificial Sequence
  Description of Artificial Sequence: Synthetic oligonucleotide
  Antisense strand to SEQ ID NO: 1046838
guuuagaccauuuguaaac

SEQ ID NO: 1046840 - RNA, 19 nt, Artificial Sequence
  Description of Artificial Sequence: Synthetic oligonucleotide
  Sense strand starting at position 1445 of SEQ ID NO: 915010
guaagugacucacugaguu

SEQ ID NO: 1046841 - RNA, 19 nt, Artificial Sequence
  Description of Artificial Sequence: Synthetic oligonucleotide
  Antisense strand to SEQ ID NO: 1046840
aacucagugagucacuuac

SEQ ID NO: 1046842 - RNA, 19 nt, Artificial Sequence
  Description of Artificial Sequence: Synthetic oligonucleotide
  Sense strand starting at position 1449 of SEQ ID NO: 915010
gugacucacugaguuuaug

SEQ ID NO: 1046843 - RNA, 19 nt, Artificial Sequence
  Description of Artificial Sequence: Synthetic oligonucleotide
  Antisense strand to SEQ ID NO: 1046842
cauaaacucagugagucac

SEQ ID NO: 1046844 - RNA, 19 nt, Artificial Sequence
  Description of Artificial Sequence: Synthetic oligonucleotide
  Sense strand starting at position 1606 of SEQ ID NO: 915010
agggaauagugagaugaga

SEQ ID NO: 1046845 - RNA, 19 nt, Artificial Sequence
  Description of Artificial Sequence: Synthetic oligonucleotide
  Antisense strand to SEQ ID NO: 1046844
ucucaucucacuauucccu

SEQ ID NO: 1046846 - RNA, 19 nt, Artificial Sequence
  Description of Artificial Sequence: Synthetic oligonucleotide
  Sense strand starting at position 1662 of SEQ ID NO: 915010
ccagcugaguccucagaag

SEQ ID NO: 1046847 - RNA, 19 nt, Artificial Sequence
  Description of Artificial Sequence: Synthetic oligonucleotide
  Antisense strand to SEQ ID NO: 1046846
cuucugaggacucagcugg

SEQ ID NO: 1046848 - RNA, 19 nt, Artificial Sequence
  Description of Artificial Sequence: Synthetic oligonucleotide
  Sense strand starting at position 1781 of SEQ ID NO: 915010
agcuauacaggaugugaua

SEQ ID NO: 1046849 - RNA, 19 nt, Artificial Sequence
  Description of Artificial Sequence: Synthetic oligonucleotide
  Antisense strand to SEQ ID NO: 1046848
uaucacauccuguauagcu

SEQ ID NO: 1046850 - RNA, 19 nt, Artificial Sequence
  Description of Artificial Sequence: Synthetic oligonucleotide
  Sense strand starting at position 1797 of SEQ ID NO: 915010
auacucacagauuguagau

SEQ ID NO: 1046851 - RNA, 19 nt, Artificial Sequence
  Description of Artificial Sequence: Synthetic oligonucleotide
  Antisense strand to SEQ ID NO: 1046850
aucuacaaucugugaguau

SEQ ID NO: 1046852 - RNA, 19 nt, Artificial Sequence
  Description of Artificial Sequence: Synthetic oligonucleotide
  Sense strand starting at position 1896 of SEQ ID NO: 915010
gugagaguucaggagucau

SEQ ID NO: 1046853 - RNA, 19 nt, Artificial Sequence
  Description of Artificial Sequence: Synthetic oligonucleotide
  Antisense strand to SEQ ID NO: 1046852
augacuccugaacucucac

SEQ ID NO: 1046854 - RNA, 19 nt, Artificial Sequence
  Description of Artificial Sequence: Synthetic oligonucleotide
  Sense strand starting at position 2001 of SEQ ID NO: 915010
cuguuaaauagaggagcaa

SEQ ID NO: 1046855 - RNA, 19 nt, Artificial Sequence
  Description of Artificial Sequence: Synthetic oligonucleotide
  Antisense strand to SEQ ID NO: 1046854
uugcuccucuauuuaacag

SEQ ID NO: 1046856 - RNA, 19 nt, Artificial Sequence
  Description of Artificial Sequence: Synthetic oligonucleotide
  Sense strand starting at position 2197 of SEQ ID NO: 915010
ugacuacacugcuuuaaag

SEQ ID NO: 1046857 - RNA, 19 nt, Artificial Sequence
  Description of Artificial Sequence: Synthetic oligonucleotide
  Antisense strand to SEQ ID NO: 1046856
cuuuaaagcaguguaguca

SEQ ID NO: 1046858 - RNA, 19 nt, Artificial Sequence
  Description of Artificial Sequence: Synthetic oligonucleotide
  Sense strand starting at position 2438 of SEQ ID NO: 915010
aucuuugcccuccagaaag

SEQ ID NO: 1046859 - RNA, 19 nt, Artificial Sequence
  Description of Artificial Sequence: Synthetic oligonucleotide
  Antisense strand to SEQ ID NO: 1046858
cuuucuggagggcaaagau

SEQ ID NO: 1046860 - RNA, 19 nt, Artificial Sequence
  Description of Artificial Sequence: Synthetic oligonucleotide
  Sense strand starting at position 2834 of SEQ ID NO: 915010
uuuagaaggcuggauuagu

SEQ ID NO: 1046861 - RNA, 19 nt, Artificial Sequence
  Description of Artificial Sequence: Synthetic oligonucleotide
  Antisense strand to SEQ ID NO: 1046860
acuaauccagccuucuaaa

SEQ ID NO: 1046862 - RNA, 19 nt, Artificial Sequence
  Description of Artificial Sequence: Synthetic oligonucleotide
  Sense strand starting at position 2879 of SEQ ID NO: 915010
uaugaaauguaauuggcuu

SEQ ID NO: 1046863 - RNA, 19 nt, Artificial Sequence
  Description of Artificial Sequence: Synthetic oligonucleotide
  Antisense strand to SEQ ID NO: 1046862
aagccaauuacauuucaua

SEQ ID NO: 1046864 - RNA, 19 nt, Artificial Sequence
  Description of Artificial Sequence: Synthetic oligonucleotide
  Sense strand starting at position 3100 of SEQ ID NO: 915010
ccuccugagcuuugauuaa

SEQ ID NO: 1046865 - RNA, 19 nt, Artificial Sequence
  Description of Artificial Sequence: Synthetic oligonucleotide
  Antisense strand to SEQ ID NO: 1046864
uuaaucaaagcucaggagg

SEQ ID NO: 1046866 - RNA, 19 nt, Artificial Sequence
  Description of Artificial Sequence: Synthetic oligonucleotide
  Sense strand starting at position 3196 of SEQ ID NO: 915010
guuaaaguugccuaccuaa

SEQ ID NO: 1046867 - RNA, 19 nt, Artificial Sequence
  Description of Artificial Sequence: Synthetic oligonucleotide
  Antisense strand to SEQ ID NO: 1046866
uuagguaggcaacuuuaac

SEQ ID NO: 1046868 - RNA, 19 nt, Artificial Sequence
  Description of Artificial Sequence: Synthetic oligonucleotide
  Sense strand starting at position 3294 of SEQ ID NO: 915010
agacaacacguguaagguu

SEQ ID NO: 1046869 - RNA, 19 nt, Artificial Sequence
  Description of Artificial Sequence: Synthetic oligonucleotide
  Antisense strand to SEQ ID NO: 1046868
aaccuuacacguguugucu

SEQ ID NO: 1046870 - RNA, 19 nt, Artificial Sequence
  Description of Artificial Sequence: Synthetic oligonucleotide
  Sense strand starting at position 3545 of SEQ ID NO: 915010
acacguucugauuaaugau

SEQ ID NO: 1046871 - RNA, 19 nt, Artificial Sequence
  Description of Artificial Sequence: Synthetic oligonucleotide
  Antisense strand to SEQ ID NO: 1046870
aucauuaaucagaacgugu

SEQ ID NO: 1046872 - RNA, 19 nt, Artificial Sequence
  Description of Artificial Sequence: Synthetic oligonucleotide
  Sense strand starting at position 3595 of SEQ ID NO: 915010
gccacuuuggacuggguaa

SEQ ID NO: 1046873 - RNA, 19 nt, Artificial Sequence
  Description of Artificial Sequence: Synthetic oligonucleotide
  Antisense strand to SEQ ID NO: 1046872
uuacccaguccaaaguggc

SEQ ID NO: 1046874 - RNA, 19 nt, Artificial Sequence
  Description of Artificial Sequence: Synthetic oligonucleotide
  Sense strand starting at position 3596 of SEQ ID NO: 915010
ccacuuuggacuggguaau

SEQ ID NO: 1046875 - RNA, 19 nt, Artificial Sequence
  Description of Artificial Sequence: Synthetic oligonucleotide
  Antisense strand to SEQ ID NO: 1046874
auuacccaguccaaagugg

SEQ ID NO: 1046876 - RNA, 19 nt, Artificial Sequence
  Description of Artificial Sequence: Synthetic oligonucleotide
  Sense strand starting at position 3606 of SEQ ID NO: 915010
cuggguaauucuuuacagu

SEQ ID NO: 1046877 - RNA, 19 nt, Artificial Sequence
  Description of Artificial Sequence: Synthetic oligonucleotide
  Antisense strand to SEQ ID NO: 1046876
acuguaaagaauuacccag

SEQ ID NO: 1046878 - RNA, 19 nt, Artificial Sequence
  Description of Artificial Sequence: Synthetic oligonucleotide
  Sense strand starting at position 3607 of SEQ ID NO: 915010
uggguaauucuuuacagua

SEQ ID NO: 1046879 - RNA, 19 nt, Artificial Sequence
  Description of Artificial Sequence: Synthetic oligonucleotide
  Antisense strand to SEQ ID NO: 1046878
uacuguaaagaauuaccca

SEQ ID NO: 1046880 - RNA, 19 nt, Artificial Sequence
  Description of Artificial Sequence: Synthetic oligonucleotide
  Sense strand starting at position 3826 of SEQ ID NO: 915010
gcaggugugcuagaaacag

SEQ ID NO: 1046881 - RNA, 19 nt, Artificial Sequence
  Description of Artificial Sequence: Synthetic oligonucleotide
  Antisense strand to SEQ ID NO: 1046880
cuguuucuagcacaccugc

SEQ ID NO: 1046882 - RNA, 19 nt, Artificial Sequence
  Description of Artificial Sequence: Synthetic oligonucleotide
  Sense strand starting at position 3943 of SEQ ID NO: 915010
uguacagaccacuaguauu

SEQ ID NO: 1046883 - RNA, 19 nt, Artificial Sequence
  Description of Artificial Sequence: Synthetic oligonucleotide
  Antisense strand to SEQ ID NO: 1046882
aauacuaguggucuguaca

SEQ ID NO: 1046884 - RNA, 19 nt, Artificial Sequence
  Description of Artificial Sequence: Synthetic oligonucleotide
  Sense strand starting at position 7 of SEQ ID NO: 915011
agaagugacuuccuuuacu

SEQ ID NO: 1046885 - RNA, 19 nt, Artificial Sequence
  Description of Artificial Sequence: Synthetic oligonucleotide
  Antisense strand to SEQ ID NO: 1046884
aguaaaggaagucacuucu

SEQ ID NO: 1046886 - RNA, 19 nt, Artificial Sequence
  Description of Artificial Sequence: Synthetic oligonucleotide
  Sense strand starting at position 247 of SEQ ID NO: 915011
agucuugaugccuagaguc

SEQ ID NO: 1046887 - RNA, 19 nt, Artificial Sequence
  Description of Artificial Sequence: Synthetic oligonucleotide
  Antisense strand to SEQ ID NO: 1046886
gacucuaggcaucaagacu

SEQ ID NO: 1046888 - RNA, 19 nt, Artificial Sequence
  Description of Artificial Sequence: Synthetic oligonucleotide
  Sense strand starting at position 249 of SEQ ID NO: 915011
ucuugaugccuagagucua

SEQ ID NO: 1046889 - RNA, 19 nt, Artificial Sequence
  Description of Artificial Sequence: Synthetic oligonucleotide
  Antisense strand to SEQ ID NO: 1046888
uagacucuaggcaucaaga

SEQ ID NO: 1046890 - RNA, 19 nt, Artificial Sequence
  Description of Artificial Sequence: Synthetic oligonucleotide
  Sense strand starting at position 271 of SEQ ID NO: 915011
uucuuagaauaagcuagau

SEQ ID NO: 1046891 - RNA, 19 nt, Artificial Sequence
  Description of Artificial Sequence: Synthetic oligonucleotide
  Antisense strand to SEQ ID NO: 1046890
aucuagcuuauucuaagaa

SEQ ID NO: 1046892 - RNA, 19 nt, Artificial Sequence
  Description of Artificial Sequence: Synthetic oligonucleotide
  Sense strand starting at position 440 of SEQ ID NO: 915011
gugggauuguucucuggag

SEQ ID NO: 1046893 - RNA, 19 nt, Artificial Sequence
  Description of Artificial Sequence: Synthetic oligonucleotide
  Antisense strand to SEQ ID NO: 1046892
cuccagagaacaaucccac

SEQ ID NO: 1046894 - RNA, 19 nt, Artificial Sequence
  Description of Artificial Sequence: Synthetic oligonucleotide
  Sense strand starting at position 441 of SEQ ID NO: 915011
ugggauuguucucuggagu

SEQ ID NO: 1046895 - RNA, 19 nt, Artificial Sequence
  Description of Artificial Sequence: Synthetic oligonucleotide
  Antisense strand to SEQ ID NO: 1046894
acuccagagaacaauccca

SEQ ID NO: 1046896 - RNA, 19 nt, Artificial Sequence
  Description of Artificial Sequence: Synthetic oligonucleotide
  Sense strand starting at position 442 of SEQ ID NO: 915011
gggauuguucucuggagua

SEQ ID NO: 1046897 - RNA, 19 nt, Artificial Sequence
  Description of Artificial Sequence: Synthetic oligonucleotide
  Antisense strand to SEQ ID NO: 1046896
uacuccagagaacaauccc

SEQ ID NO: 1046898 - RNA, 19 nt, Artificial Sequence
  Description of Artificial Sequence: Synthetic oligonucleotide
  Sense strand starting at position 444 of SEQ ID NO: 915011
gauuguucucuggaguaag

SEQ ID NO: 1046899 - RNA, 19 nt, Artificial Sequence
  Description of Artificial Sequence: Synthetic oligonucleotide
  Antisense strand to SEQ ID NO: 1046898
cuuacuccagagaacaauc

SEQ ID NO: 1046900 - RNA, 19 nt, Artificial Sequence
  Description of Artificial Sequence: Synthetic oligonucleotide
  Sense strand starting at position 611 of SEQ ID NO: 915011
caucgauagccacauguga

SEQ ID NO: 1046901 - RNA, 19 nt, Artificial Sequence
  Description of Artificial Sequence: Synthetic oligonucleotide
  Antisense strand to SEQ ID NO: 1046900
ucacauguggcuaucgaug

SEQ ID NO: 1046902 - RNA, 19 nt, Artificial Sequence
  Description of Artificial Sequence: Synthetic oligonucleotide
  Sense strand starting at position 734 of SEQ ID NO: 915011
uggauuguaacugaggguu

SEQ ID NO: 1046903 - RNA, 19 nt, Artificial Sequence
  Description of Artificial Sequence: Synthetic oligonucleotide
  Antisense strand to SEQ ID NO: 1046902
aacccucaguuacaaucca

SEQ ID NO: 1046904 - RNA, 19 nt, Artificial Sequence
  Description of Artificial Sequence: Synthetic oligonucleotide
  Sense strand starting at position 1119 of SEQ ID NO: 915011
agaaguuuccuagaccuuu

SEQ ID NO: 1046905 - RNA, 19 nt, Artificial Sequence
  Description of Artificial Sequence: Synthetic oligonucleotide
  Antisense strand to SEQ ID NO: 1046904
aaaggucuaggaaacuucu

SEQ ID NO: 1046906 - RNA, 19 nt, Artificial Sequence
  Description of Artificial Sequence: Synthetic oligonucleotide
  Sense strand starting at position 1140 of SEQ ID NO: 915011
ucaccugagccucauagaa

SEQ ID NO: 1046907 - RNA, 19 nt, Artificial Sequence
  Description of Artificial Sequence: Synthetic oligonucleotide
  Antisense strand to SEQ ID NO: 1046906
uucuaugaggcucagguga

SEQ ID NO: 1046908 - RNA, 19 nt, Artificial Sequence
  Description of Artificial Sequence: Synthetic oligonucleotide
  Sense strand starting at position 1479 of SEQ ID NO: 915011
aaagaaucaguguggauug

SEQ ID NO: 1046909 - RNA, 19 nt, Artificial Sequence
  Description of Artificial Sequence: Synthetic oligonucleotide
  Antisense strand to SEQ ID NO: 1046908
caauccacacugauucuuu

SEQ ID NO: 1046910 - RNA, 19 nt, Artificial Sequence
  Description of Artificial Sequence: Synthetic oligonucleotide
  Sense strand starting at position 1481 of SEQ ID NO: 915011
agaaucaguguggauuguu

SEQ ID NO: 1046911 - RNA, 19 nt, Artificial Sequence
  Description of Artificial Sequence: Synthetic oligonucleotide
  Antisense strand to SEQ ID NO: 1046910
aacaauccacacugauucu

SEQ ID NO: 1046912 - RNA, 19 nt, Artificial Sequence
  Description of Artificial Sequence: Synthetic oligonucleotide
  Sense strand starting at position 1506 of SEQ ID NO: 915011
gcaguugugaaauacagaa

SEQ ID NO: 1046913 - RNA, 19 nt, Artificial Sequence
  Description of Artificial Sequence: Synthetic oligonucleotide
  Antisense strand to SEQ ID NO: 1046912
uucuguauuucacaacugc

SEQ ID NO: 1046914 - RNA, 19 nt, Artificial Sequence
  Description of Artificial Sequence: Synthetic oligonucleotide
  Sense strand starting at position 1581 of SEQ ID NO: 915011
agagaaguacuguauugca

SEQ ID NO: 1046915 - RNA, 19 nt, Artificial Sequence
  Description of Artificial Sequence: Synthetic oligonucleotide
  Antisense strand to SEQ ID NO: 1046914
ugcaauacaguacuucucu

SEQ ID NO: 1046916 - RNA, 19 nt, Artificial Sequence
  Description of Artificial Sequence: Synthetic oligonucleotide
  Sense strand starting at position 2081 of SEQ ID NO: 915011
ugccaauuaguccagacuu

SEQ ID NO: 1046917 - RNA, 19 nt, Artificial Sequence
  Description of Artificial Sequence: Synthetic oligonucleotide
  Antisense strand to SEQ ID NO: 1046916
aagucuggacuaauuggca

SEQ ID NO: 1046918 - RNA, 19 nt, Artificial Sequence
  Description of Artificial Sequence: Synthetic oligonucleotide
  Sense strand starting at position 2103 of SEQ ID NO: 915011
cuguguguuagagaaagaa

SEQ ID NO: 1046919 - RNA, 19 nt, Artificial Sequence
  Description of Artificial Sequence: Synthetic oligonucleotide
  Antisense strand to SEQ ID NO: 1046918
uucuuucucuaacacacag

SEQ ID NO: 1046920 - RNA, 19 nt, Artificial Sequence
  Description of Artificial Sequence: Synthetic oligonucleotide
  Sense strand starting at position 2122 of SEQ ID NO: 915011
acugauauuauggagcagu

SEQ ID NO: 1046921 - RNA, 19 nt, Artificial Sequence
  Description of Artificial Sequence: Synthetic oligonucleotide
  Antisense strand to SEQ ID NO: 1046920
acugcuccauaauaucagu

SEQ ID NO: 1046922 - RNA, 19 nt, Artificial Sequence
  Description of Artificial Sequence: Synthetic oligonucleotide
  Sense strand starting at position 2489 of SEQ ID NO: 915011
cuccuccagucauuacaga

SEQ ID NO: 1046923 - RNA, 19 nt, Artificial Sequence
  Description of Artificial Sequence: Synthetic oligonucleotide
  Antisense strand to SEQ ID NO: 1046922
ucuguaaugacuggaggag

SEQ ID NO: 1046924 - RNA, 19 nt, Artificial Sequence
  Description of Artificial Sequence: Synthetic oligonucleotide
  Sense strand starting at position 2523 of SEQ ID NO: 915011
ggaagaccuuuauugguua

SEQ ID NO: 1046925 - RNA, 19 nt, Artificial Sequence
  Description of Artificial Sequence: Synthetic oligonucleotide
  Antisense strand to SEQ ID NO: 1046924
uaaccaauaaaggucuucc

SEQ ID NO: 1046926 - RNA, 19 nt, Artificial Sequence
  Description of Artificial Sequence: Synthetic oligonucleotide
  Sense strand starting at position 2526 of SEQ ID NO: 915011
agaccuuuauugguuagca

SEQ ID NO: 1046927 - RNA, 19 nt, Artificial Sequence
  Description of Artificial Sequence: Synthetic oligonucleotide
  Antisense strand to SEQ ID NO: 1046926
ugcuaaccaauaaaggucu

SEQ ID NO: 1046928 - RNA, 19 nt, Artificial Sequence
  Description of Artificial Sequence: Synthetic oligonucleotide
  Sense strand starting at position 2528 of SEQ ID NO: 915011
accuuuauugguuagcaua

SEQ ID NO: 1046929 - RNA, 19 nt, Artificial Sequence
  Description of Artificial Sequence: Synthetic oligonucleotide
  Antisense strand to SEQ ID NO: 1046928
uaugcuaaccaauaaaggu

SEQ ID NO: 1046930 - RNA, 19 nt, Artificial Sequence
  Description of Artificial Sequence: Synthetic oligonucleotide
  Sense strand starting at position 2539 of SEQ ID NO: 915011
uuagcauagcuagagauuc

SEQ ID NO: 1046931 - RNA, 19 nt, Artificial Sequence
  Description of Artificial Sequence: Synthetic oligonucleotide
  Antisense strand to SEQ ID NO: 1046930
gaaucucuagcuaugcuaa

SEQ ID NO: 1046932 - RNA, 19 nt, Artificial Sequence
  Description of Artificial Sequence: Synthetic oligonucleotide
  Sense strand starting at position 2803 of SEQ ID NO: 915011
cccagaaugcuggacucau

SEQ ID NO: 1046933 - RNA, 19 nt, Artificial Sequence
  Description of Artificial Sequence: Synthetic oligonucleotide
  Antisense strand to SEQ ID NO: 1046932
augaguccagcauucuggg

SEQ ID NO: 1046934 - RNA, 19 nt, Artificial Sequence
  Description of Artificial Sequence: Synthetic oligonucleotide
  Sense strand starting at position 2888 of SEQ ID NO: 915011
acuguaucagggugaaaga

SEQ ID NO: 1046935 - RNA, 19 nt, Artificial Sequence
  Description of Artificial Sequence: Synthetic oligonucleotide
  Antisense strand to SEQ ID NO: 1046934
ucuuucacccugauacagu

SEQ ID NO: 1046936 - RNA, 19 nt, Artificial Sequence
  Description of Artificial Sequence: Synthetic oligonucleotide
  Sense strand starting at position 3341 of SEQ ID NO: 915011
auguguccuucucuuauuu

SEQ ID NO: 1046937 - RNA, 19 nt, Artificial Sequence
  Description of Artificial Sequence: Synthetic oligonucleotide
  Antisense strand to SEQ ID NO: 1046936
aaauaagagaaggacacau

SEQ ID NO: 1046938 - RNA, 19 nt, Artificial Sequence
  Description of Artificial Sequence: Synthetic oligonucleotide
  Sense strand starting at position 3462 of SEQ ID NO: 915011
gugagauauuguucuuugg

SEQ ID NO: 1046939 - RNA, 19 nt, Artificial Sequence
  Description of Artificial Sequence: Synthetic oligonucleotide
  Antisense strand to SEQ ID NO: 1046938
ccaaagaacaauaucucac

SEQ ID NO: 1046940 - RNA, 19 nt, Artificial Sequence
  Description of Artificial Sequence: Synthetic oligonucleotide
  Sense strand starting at position 3464 of SEQ ID NO: 915011
gagauauuguucuuuggau

SEQ ID NO: 1046941 - RNA, 19 nt, Artificial Sequence
  Description of Artificial Sequence: Synthetic oligonucleotide
  Antisense strand to SEQ ID NO: 1046940
auccaaagaacaauaucuc

SEQ ID NO: 1046942 - RNA, 19 nt, Artificial Sequence
  Description of Artificial Sequence: Synthetic oligonucleotide
  Sense strand starting at position 3465 of SEQ ID NO: 915011
agauauuguucuuuggauu

SEQ ID NO: 1046943 - RNA, 19 nt, Artificial Sequence
  Description of Artificial Sequence: Synthetic oligonucleotide
  Antisense strand to SEQ ID NO: 1046942
aauccaaagaacaauaucu

SEQ ID NO: 1046944 - RNA, 19 nt, Artificial Sequence
  Description of Artificial Sequence: Synthetic oligonucleotide
  Sense strand starting at position 3466 of SEQ ID NO: 915011
gauauuguucuuuggauug

SEQ ID NO: 1046945 - RNA, 19 nt, Artificial Sequence
  Description of Artificial Sequence: Synthetic oligonucleotide
  Antisense strand to SEQ ID NO: 1046944
caauccaaagaacaauauc

SEQ ID NO: 1046946 - RNA, 19 nt, Artificial Sequence
  Description of Artificial Sequence: Synthetic oligonucleotide
  Sense strand starting at position 3473 of SEQ ID NO: 915011
uucuuuggauugcuggaaa

SEQ ID NO: 1046947 - RNA, 19 nt, Artificial Sequence
  Description of Artificial Sequence: Synthetic oligonucleotide
  Antisense strand to SEQ ID NO: 1046946
uuuccagcaauccaaagaa

SEQ ID NO: 1046948 - RNA, 19 nt, Artificial Sequence
  Description of Artificial Sequence: Synthetic oligonucleotide
  Sense strand starting at position 3609 of SEQ ID NO: 915011
agucuuaaaugcuugggau

SEQ ID NO: 1046949 - RNA, 19 nt, Artificial Sequence
  Description of Artificial Sequence: Synthetic oligonucleotide
  Antisense strand to SEQ ID NO: 1046948
aucccaagcauuuaagacu

SEQ ID NO: 1046950 - RNA, 19 nt, Artificial Sequence
  Description of Artificial Sequence: Synthetic oligonucleotide
  Sense strand starting at position 3610 of SEQ ID NO: 915011
gucuuaaaugcuugggaua

SEQ ID NO: 1046951 - RNA, 19 nt, Artificial Sequence
  Description of Artificial Sequence: Synthetic oligonucleotide
  Antisense strand to SEQ ID NO: 1046950
uaucccaagcauuuaagac

SEQ ID NO: 1046952 - RNA, 19 nt, Artificial Sequence
  Description of Artificial Sequence: Synthetic oligonucleotide
  Sense strand starting at position 3669 of SEQ ID NO: 915011
ucuuguaaucugcauugga

SEQ ID NO: 1046953 - RNA, 19 nt, Artificial Sequence
  Description of Artificial Sequence: Synthetic oligonucleotide
  Antisense strand to SEQ ID NO: 1046952
uccaaugcagauuacaaga

SEQ ID NO: 1046954 - RNA, 19 nt, Artificial Sequence
  Description of Artificial Sequence: Synthetic oligonucleotide
  Sense strand starting at position 3676 of SEQ ID NO: 915011
aucugcauuggauacauua

SEQ ID NO: 1046955 - RNA, 19 nt, Artificial Sequence
  Description of Artificial Sequence: Synthetic oligonucleotide
  Antisense strand to SEQ ID NO: 1046954
uaauguauccaaugcagau

SEQ ID NO: 1046956 - RNA, 19 nt, Artificial Sequence
  Description of Artificial Sequence: Synthetic oligonucleotide
  Sense strand starting at position 3820 of SEQ ID NO: 915011
ucauauguaagugagaagu

SEQ ID NO: 1046957 - RNA, 19 nt, Artificial Sequence
  Description of Artificial Sequence: Synthetic oligonucleotide
  Antisense strand to SEQ ID NO: 1046956
acuucucacuuacauauga

SEQ ID NO: 1046958 - RNA, 19 nt, Artificial Sequence
  Description of Artificial Sequence: Synthetic oligonucleotide
  Sense strand starting at position 3831 of SEQ ID NO: 915011
ugagaaguuucuuccuaua

SEQ ID NO: 1046959 - RNA, 19 nt, Artificial Sequence
  Description of Artificial Sequence: Synthetic oligonucleotide
  Antisense strand to SEQ ID NO: 1046958
uauaggaagaaacuucuca

SEQ ID NO: 1046960 - RNA, 19 nt, Artificial Sequence
  Description of Artificial Sequence: Synthetic oligonucleotide
  Sense strand starting at position 3926 of SEQ ID NO: 915011
gcgugugggcucuuuguga

SEQ ID NO: 1046961 - RNA, 19 nt, Artificial Sequence
  Description of Artificial Sequence: Synthetic oligonucleotide
  Antisense strand to SEQ ID NO: 1046960
ucacaaagagcccacacgc

SEQ ID NO: 1046962 - RNA, 19 nt, Artificial Sequence
  Description of Artificial Sequence: Synthetic oligonucleotide
  Sense strand starting at position 3963 of SEQ ID NO: 915011
uagaaagagucaucugguu

SEQ ID NO: 1046963 - RNA, 19 nt, Artificial Sequence
  Description of Artificial Sequence: Synthetic oligonucleotide
  Antisense strand to SEQ ID NO: 1046962
aaccagaugacucuuucua

SEQ ID NO: 1046964 - RNA, 19 nt, Artificial Sequence
  Description of Artificial Sequence: Synthetic oligonucleotide
  Sense strand starting at position 222 of SEQ ID NO: 915012
cggaaauagucauucuauc

SEQ ID NO: 1046965 - RNA, 19 nt, Artificial Sequence
  Description of Artificial Sequence: Synthetic oligonucleotide
  Antisense strand to SEQ ID NO: 1046964
gauagaaugacuauuuccg

SEQ ID NO: 1046966 - RNA, 19 nt, Artificial Sequence
  Description of Artificial Sequence: Synthetic oligonucleotide
  Sense strand starting at position 283 of SEQ ID NO: 915012
uguagacaucuuugaccga

SEQ ID NO: 1046967 - RNA, 19 nt, Artificial Sequence
  Description of Artificial Sequence: Synthetic oligonucleotide
  Antisense strand to SEQ ID NO: 1046966
ucggucaaagaugucuaca

SEQ ID NO: 1046968 - RNA, 19 nt, Artificial Sequence
  Description of Artificial Sequence: Synthetic oligonucleotide
  Sense strand starting at position 286 of SEQ ID NO: 915012
agacaucuuugaccgauga

SEQ ID NO: 1046969 - RNA, 19 nt, Artificial Sequence
  Description of Artificial Sequence: Synthetic oligonucleotide
  Antisense strand to SEQ ID NO: 1046968
ucaucggucaaagaugucu

SEQ ID NO: 1046970 - RNA, 19 nt, Artificial Sequence
  Description of Artificial Sequence: Synthetic oligonucleotide
  Sense strand starting at position 287 of SEQ ID NO: 915012
gacaucuuugaccgaugaa

SEQ ID NO: 1046971 - RNA, 19 nt, Artificial Sequence
  Description of Artificial Sequence: Synthetic oligonucleotide
  Antisense strand to SEQ ID NO: 1046970
uucaucggucaaagauguc

SEQ ID NO: 1046972 - RNA, 19 nt, Artificial Sequence
  Description of Artificial Sequence: Synthetic oligonucleotide
  Sense strand starting at position 290 of SEQ ID NO: 915012
aucuuugaccgaugaauag

SEQ ID NO: 1046973 - RNA, 19 nt, Artificial Sequence
  Description of Artificial Sequence: Synthetic oligonucleotide
  Antisense strand to SEQ ID NO: 1046972
cuauucaucggucaaagau

SEQ ID NO: 1046974 - RNA, 19 nt, Artificial Sequence
  Description of Artificial Sequence: Synthetic oligonucleotide
  Sense strand starting at position 1181 of SEQ ID NO: 915012
auuaucucacagugaugua

SEQ ID NO: 1046975 - RNA, 19 nt, Artificial Sequence
  Description of Artificial Sequence: Synthetic oligonucleotide
  Antisense strand to SEQ ID NO: 1046974
uacaucacugugagauaau

SEQ ID NO: 1046976 - RNA, 19 nt, Artificial Sequence
  Description of Artificial Sequence: Synthetic oligonucleotide
  Sense strand starting at position 1188 of SEQ ID NO: 915012
cacagugauguauggaagu

SEQ ID NO: 1046977 - RNA, 19 nt, Artificial Sequence
  Description of Artificial Sequence: Synthetic oligonucleotide
  Antisense strand to SEQ ID NO: 1046976
acuuccauacaucacugug

SEQ ID NO: 1046978 - RNA, 19 nt, Artificial Sequence
  Description of Artificial Sequence: Synthetic oligonucleotide
  Sense strand starting at position 1191 of SEQ ID NO: 915012
agugauguauggaagugga

SEQ ID NO: 1046979 - RNA, 19 nt, Artificial Sequence
  Description of Artificial Sequence: Synthetic oligonucleotide
  Antisense strand to SEQ ID NO: 1046978
uccacuuccauacaucacu

SEQ ID NO: 1046980 - RNA, 19 nt, Artificial Sequence
  Description of Artificial Sequence: Synthetic oligonucleotide
  Sense strand starting at position 1194 of SEQ ID NO: 915012
gauguauggaaguggaauu

SEQ ID NO: 1046981 - RNA, 19 nt, Artificial Sequence
  Description of Artificial Sequence: Synthetic oligonucleotide
  Antisense strand to SEQ ID NO: 1046980
aauuccacuuccauacauc

SEQ ID NO: 1046982 - RNA, 19 nt, Artificial Sequence
  Description of Artificial Sequence: Synthetic oligonucleotide
  Sense strand starting at position 1195 of SEQ ID NO: 915012
auguauggaaguggaauua

SEQ ID NO: 1046983 - RNA, 19 nt, Artificial Sequence
  Description of Artificial Sequence: Synthetic oligonucleotide
  Antisense strand to SEQ ID NO: 1046982
uaauuccacuuccauacau

SEQ ID NO: 1046984 - RNA, 19 nt, Artificial Sequence
  Description of Artificial Sequence: Synthetic oligonucleotide
  Sense strand starting at position 1366 of SEQ ID NO: 915012
cacauucgccuugaggaga

SEQ ID NO: 1046985 - RNA, 19 nt, Artificial Sequence
  Description of Artificial Sequence: Synthetic oligonucleotide
  Antisense strand to SEQ ID NO: 1046984
ucuccucaaggcgaaugug

SEQ ID NO: 1046986 - RNA, 19 nt, Artificial Sequence
  Description of Artificial Sequence: Synthetic oligonucleotide
  Sense strand starting at position 1426 of SEQ ID NO: 915012
ccgugcuuugaagauaaau

SEQ ID NO: 1046987 - RNA, 19 nt, Artificial Sequence
  Description of Artificial Sequence: Synthetic oligonucleotide
  Antisense strand to SEQ ID NO: 1046986
auuuaucuucaaagcacgg

SEQ ID NO: 1046988 - RNA, 19 nt, Artificial Sequence
  Description of Artificial Sequence: Synthetic oligonucleotide
  Sense strand starting at position 1530 of SEQ ID NO: 915012
agucuaauugcacaguauu

SEQ ID NO: 1046989 - RNA, 19 nt, Artificial Sequence
  Description of Artificial Sequence: Synthetic oligonucleotide
  Antisense strand to SEQ ID NO: 1046988
aauacugugcaauuagacu

SEQ ID NO: 1046990 - RNA, 19 nt, Artificial Sequence
  Description of Artificial Sequence: Synthetic oligonucleotide
  Sense strand starting at position 1553 of SEQ ID NO: 915012
gagaguagacucuguaaga

SEQ ID NO: 1046991 - RNA, 19 nt, Artificial Sequence
  Description of Artificial Sequence: Synthetic oligonucleotide
  Antisense strand to SEQ ID NO: 1046990
ucuuacagagucuacucuc

SEQ ID NO: 1046992 - RNA, 19 nt, Artificial Sequence
  Description of Artificial Sequence: Synthetic oligonucleotide
  Sense strand starting at position 1554 of SEQ ID NO: 915012
agaguagacucuguaagac

SEQ ID NO: 1046993 - RNA, 19 nt, Artificial Sequence
  Description of Artificial Sequence: Synthetic oligonucleotide
  Antisense strand to SEQ ID NO: 1046992
gucuuacagagucuacucu

SEQ ID NO: 1046994 - RNA, 19 nt, Artificial Sequence
  Description of Artificial Sequence: Synthetic oligonucleotide
  Sense strand starting at position 2007 of SEQ ID NO: 915012
uguaguuacagacaguuga

SEQ ID NO: 1046995 - RNA, 19 nt, Artificial Sequence
  Description of Artificial Sequence: Synthetic oligonucleotide
  Antisense strand to SEQ ID NO: 1046994
ucaacugucuguaacuaca

SEQ ID NO: 1046996 - RNA, 19 nt, Artificial Sequence
  Description of Artificial Sequence: Synthetic oligonucleotide
  Sense strand starting at position 2058 of SEQ ID NO: 915012
aauucugaggucuggcaaa

SEQ ID NO: 1046997 - RNA, 19 nt, Artificial Sequence
  Description of Artificial Sequence: Synthetic oligonucleotide
  Antisense strand to SEQ ID NO: 1046996
uuugccagaccucagaauu

SEQ ID NO: 1046998 - RNA, 19 nt, Artificial Sequence
  Description of Artificial Sequence: Synthetic oligonucleotide
  Sense strand starting at position 2110 of SEQ ID NO: 915012
gaccuuugugcagacuagu

SEQ ID NO: 1046999 - RNA, 19 nt, Artificial Sequence
  Description of Artificial Sequence: Synthetic oligonucleotide
  Antisense strand to SEQ ID NO: 1046998
acuagucugcacaaagguc

SEQ ID NO: 1047000 - RNA, 19 nt, Artificial Sequence
  Description of Artificial Sequence: Synthetic oligonucleotide
  Sense strand starting at position 2113 of SEQ ID NO: 915012
cuuugugcagacuagugau

SEQ ID NO: 1047001 - RNA, 19 nt, Artificial Sequence
  Description of Artificial Sequence: Synthetic oligonucleotide
  Antisense strand to SEQ ID NO: 1047000
aucacuagucugcacaaag

SEQ ID NO: 1047002 - RNA, 19 nt, Artificial Sequence
  Description of Artificial Sequence: Synthetic oligonucleotide
  Sense strand starting at position 2415 of SEQ ID NO: 915012
ccgugucuccuuguuacuu

SEQ ID NO: 1047003 - RNA, 19 nt, Artificial Sequence
  Description of Artificial Sequence: Synthetic oligonucleotide
  Antisense strand to SEQ ID NO: 1047002
aaguaacaaggagacacgg

SEQ ID NO: 1047004 - RNA, 19 nt, Artificial Sequence
  Description of Artificial Sequence: Synthetic oligonucleotide
  Sense strand starting at position 2497 of SEQ ID NO: 915012
gaaagaugccaguggauug

SEQ ID NO: 1047005 - RNA, 19 nt, Artificial Sequence
  Description of Artificial Sequence: Synthetic oligonucleotide
  Antisense strand to SEQ ID NO: 1047004
caauccacuggcaucuuuc

SEQ ID NO: 1047006 - RNA, 19 nt, Artificial Sequence
  Description of Artificial Sequence: Synthetic oligonucleotide
  Sense strand starting at position 2652 of SEQ ID NO: 915012
uuaagauggcucugggaca

SEQ ID NO: 1047007 - RNA, 19 nt, Artificial Sequence
  Description of Artificial Sequence: Synthetic oligonucleotide
  Antisense strand to SEQ ID NO: 1047006
ugucccagagccaucuuaa

SEQ ID NO: 1047008 - RNA, 19 nt, Artificial Sequence
  Description of Artificial Sequence: Synthetic oligonucleotide
  Sense strand starting at position 2753 of SEQ ID NO: 915012
aaaccuaagccugggagau

SEQ ID NO: 1047009 - RNA, 19 nt, Artificial Sequence
  Description of Artificial Sequence: Synthetic oligonucleotide
  Antisense strand to SEQ ID NO: 1047008
aucucccaggcuuagguuu

SEQ ID NO: 1047010 - RNA, 19 nt, Artificial Sequence
  Description of Artificial Sequence: Synthetic oligonucleotide
  Sense strand starting at position 2754 of SEQ ID NO: 915012
aaccuaagccugggagauu

SEQ ID NO: 1047011 - RNA, 19 nt, Artificial Sequence
  Description of Artificial Sequence: Synthetic oligonucleotide
  Antisense strand to SEQ ID NO: 1047010
aaucucccaggcuuagguu

SEQ ID NO: 1047012 - RNA, 19 nt, Artificial Sequence
  Description of Artificial Sequence: Synthetic oligonucleotide
  Sense strand starting at position 2755 of SEQ ID NO: 915012
accuaagccugggagauuu

SEQ ID NO: 1047013 - RNA, 19 nt, Artificial Sequence
  Description of Artificial Sequence: Synthetic oligonucleotide
  Antisense strand to SEQ ID NO: 1047012
aaaucucccaggcuuaggu

SEQ ID NO: 1047014 - RNA, 19 nt, Artificial Sequence
  Description of Artificial Sequence: Synthetic oligonucleotide
  Sense strand starting at position 2785 of SEQ ID NO: 915012
aaacuacuuggaggguauu

SEQ ID NO: 1047015 - RNA, 19 nt, Artificial Sequence
  Description of Artificial Sequence: Synthetic oligonucleotide
  Antisense strand to SEQ ID NO: 1047014
aauacccuccaaguaguuu

SEQ ID NO: 1047016 - RNA, 19 nt, Artificial Sequence
  Description of Artificial Sequence: Synthetic oligonucleotide
  Sense strand starting at position 2831 of SEQ ID NO: 915012
gauauugcugaaggaaucu

SEQ ID NO: 1047017 - RNA, 19 nt, Artificial Sequence
  Description of Artificial Sequence: Synthetic oligonucleotide
  Antisense strand to SEQ ID NO: 1047016
agauuccuucagcaauauc

SEQ ID NO: 1047018 - RNA, 19 nt, Artificial Sequence
  Description of Artificial Sequence: Synthetic oligonucleotide
  Sense strand starting at position 2931 of SEQ ID NO: 915012
uggcaagagucugccauuu

SEQ ID NO: 1047019 - RNA, 19 nt, Artificial Sequence
  Description of Artificial Sequence: Synthetic oligonucleotide
  Antisense strand to SEQ ID NO: 1047018
aaauggcagacucuugcca

SEQ ID NO: 1047020 - RNA, 19 nt, Artificial Sequence
  Description of Artificial Sequence: Synthetic oligonucleotide
  Sense strand starting at position 2940 of SEQ ID NO: 915012
ucugccauuuggucaacau

SEQ ID NO: 1047021 - RNA, 19 nt, Artificial Sequence
  Description of Artificial Sequence: Synthetic oligonucleotide
  Antisense strand to SEQ ID NO: 1047020
auguugaccaaauggcaga

SEQ ID NO: 1047022 - RNA, 19 nt, Artificial Sequence
  Description of Artificial Sequence: Synthetic oligonucleotide
  Sense strand starting at position 3285 of SEQ ID NO: 915012
acugucuuugcuuaagaaa

SEQ ID NO: 1047023 - RNA, 19 nt, Artificial Sequence
  Description of Artificial Sequence: Synthetic oligonucleotide
  Antisense strand to SEQ ID NO: 1047022
uuucuuaagcaaagacagu

SEQ ID NO: 1047024 - RNA, 19 nt, Artificial Sequence
  Description of Artificial Sequence: Synthetic oligonucleotide
  Sense strand starting at position 3356 of SEQ ID NO: 915012
guuaaagaaccuuggucau

SEQ ID NO: 1047025 - RNA, 19 nt, Artificial Sequence
  Description of Artificial Sequence: Synthetic oligonucleotide
  Antisense strand to SEQ ID NO: 1047024
augaccaagguucuuuaac

SEQ ID NO: 1047026 - RNA, 19 nt, Artificial Sequence
  Description of Artificial Sequence: Synthetic oligonucleotide
  Sense strand starting at position 3401 of SEQ ID NO: 915012
ucagaaggaauucgugaga

SEQ ID NO: 1047027 - RNA, 19 nt, Artificial Sequence
  Description of Artificial Sequence: Synthetic oligonucleotide
  Antisense strand to SEQ ID NO: 1047026
ucucacgaauuccuucuga

SEQ ID NO: 1047028 - RNA, 19 nt, Artificial Sequence
  Description of Artificial Sequence: Synthetic oligonucleotide
  Sense strand starting at position 3479 of SEQ ID NO: 915012
uguugugaggauuaaguca

SEQ ID NO: 1047029 - RNA, 19 nt, Artificial Sequence
  Description of Artificial Sequence: Synthetic oligonucleotide
  Antisense strand to SEQ ID NO: 1047028
ugacuuaauccucacaaca

SEQ ID NO: 1047030 - RNA, 19 nt, Artificial Sequence
  Description of Artificial Sequence: Synthetic oligonucleotide
  Sense strand starting at position 3609 of SEQ ID NO: 915012
ucucuagauugaucucuga

SEQ ID NO: 1047031 - RNA, 19 nt, Artificial Sequence
  Description of Artificial Sequence: Synthetic oligonucleotide
  Antisense strand to SEQ ID NO: 1047030
ucagagaucaaucuagaga

SEQ ID NO: 1047032 - RNA, 19 nt, Artificial Sequence
  Description of Artificial Sequence: Synthetic oligonucleotide
  Sense strand starting at position 3612 of SEQ ID NO: 915012
cuagauugaucucugaucu

SEQ ID NO: 1047033 - RNA, 19 nt, Artificial Sequence
  Description of Artificial Sequence: Synthetic oligonucleotide
  Antisense strand to SEQ ID NO: 1047032
agaucagagaucaaucuag

SEQ ID NO: 1047034 - RNA, 19 nt, Artificial Sequence
  Description of Artificial Sequence: Synthetic oligonucleotide
  Sense strand starting at position 3637 of SEQ ID NO: 915012
guaaucuauguuuacucua

SEQ ID NO: 1047035 - RNA, 19 nt, Artificial Sequence
  Description of Artificial Sequence: Synthetic oligonucleotide
  Antisense strand to SEQ ID NO: 1047034
uagaguaaacauagauuac

SEQ ID NO: 1047036 - RNA, 19 nt, Artificial Sequence
  Description of Artificial Sequence: Synthetic oligonucleotide
  Sense strand starting at position 3820 of SEQ ID NO: 915012
gucuuauauguuggaggac

SEQ ID NO: 1047037 - RNA, 19 nt, Artificial Sequence
  Description of Artificial Sequence: Synthetic oligonucleotide
  Antisense strand to SEQ ID NO: 1047036
guccuccaacauauaagac

SEQ ID NO: 1047038 - RNA, 19 nt, Artificial Sequence
  Description of Artificial Sequence: Synthetic oligonucleotide
  Sense strand starting at position 3850 of SEQ ID NO: 915012
uggacagacuaacuguauu

SEQ ID NO: 1047039 - RNA, 19 nt, Artificial Sequence
  Description of Artificial Sequence: Synthetic oligonucleotide
  Antisense strand to SEQ ID NO: 1047038
aauacaguuagucugucca

SEQ ID NO: 1047040 - RNA, 19 nt, Artificial Sequence
  Description of Artificial Sequence: Synthetic oligonucleotide
  Sense strand starting at position 3913 of SEQ ID NO: 915012
aggucugguuauccagaga

SEQ ID NO: 1047041 - RNA, 19 nt, Artificial Sequence
  Description of Artificial Sequence: Synthetic oligonucleotide
  Antisense strand to SEQ ID NO: 1047040
ucucuggauaaccagaccu

SEQ ID NO: 1047042 - RNA, 19 nt, Artificial Sequence
  Description of Artificial Sequence: Synthetic oligonucleotide
  Sense strand starting at position 3930 of SEQ ID NO: 915012
gagagauuccuuggagcag

SEQ ID NO: 1047043 - RNA, 19 nt, Artificial Sequence
  Description of Artificial Sequence: Synthetic oligonucleotide
  Antisense strand to SEQ ID NO: 1047042
cugcuccaaggaaucucuc

SEQ ID NO: 1047044 - RNA, 19 nt, Artificial Sequence
  Description of Artificial Sequence: Synthetic oligonucleotide
  Sense strand starting at position 109 of SEQ ID NO: 915013
guuuccuguugggcaaaua

SEQ ID NO: 1047045 - RNA, 19 nt, Artificial Sequence
  Description of Artificial Sequence: Synthetic oligonucleotide
  Antisense strand to SEQ ID NO: 1047044
uauuugcccaacaggaaac

SEQ ID NO: 1047046 - RNA, 19 nt, Artificial Sequence
  Description of Artificial Sequence: Synthetic oligonucleotide
  Sense strand starting at position 119 of SEQ ID NO: 915013
gggcaaauauuugauucga

SEQ ID NO: 1047047 - RNA, 19 nt, Artificial Sequence
  Description of Artificial Sequence: Synthetic oligonucleotide
  Antisense strand to SEQ ID NO: 1047046
ucgaaucaaauauuugccc

SEQ ID NO: 1047048 - RNA, 19 nt, Artificial Sequence
  Description of Artificial Sequence: Synthetic oligonucleotide
  Sense strand starting at position 461 of SEQ ID NO: 915013
gcagucuguggccugcaaa

SEQ ID NO: 1047049 - RNA, 19 nt, Artificial Sequence
  Description of Artificial Sequence: Synthetic oligonucleotide
  Antisense strand to SEQ ID NO: 1047048
uuugcaggccacagacugc

SEQ ID NO: 1047050 - RNA, 19 nt, Artificial Sequence
  Description of Artificial Sequence: Synthetic oligonucleotide
  Sense strand starting at position 711 of SEQ ID NO: 915013
ucaugcugccaagaaauaa

SEQ ID NO: 1047051 - RNA, 19 nt, Artificial Sequence
  Description of Artificial Sequence: Synthetic oligonucleotide
  Antisense strand to SEQ ID NO: 1047050
uuauuucuuggcagcauga

SEQ ID NO: 1047052 - RNA, 19 nt, Artificial Sequence
  Description of Artificial Sequence: Synthetic oligonucleotide
  Sense strand starting at position 791 of SEQ ID NO: 915013
agcucauuggagcaucuua

SEQ ID NO: 1047053 - RNA, 19 nt, Artificial Sequence
  Description of Artificial Sequence: Synthetic oligonucleotide
  Antisense strand to SEQ ID NO: 1047052
uaagaugcuccaaugagcu

SEQ ID NO: 1047054 - RNA, 19 nt, Artificial Sequence
  Description of Artificial Sequence: Synthetic oligonucleotide
  Sense strand starting at position 853 of SEQ ID NO: 915013
ucaguuauagggcacuuaa

SEQ ID NO: 1047055 - RNA, 19 nt, Artificial Sequence
  Description of Artificial Sequence: Synthetic oligonucleotide
  Antisense strand to SEQ ID NO: 1047054
uuaagugcccuauaacuga

SEQ ID NO: 1047056 - RNA, 19 nt, Artificial Sequence
  Description of Artificial Sequence: Synthetic oligonucleotide
  Sense strand starting at position 1311 of SEQ ID NO: 915013
cucucauaguguuuagagu

SEQ ID NO: 1047057 - RNA, 19 nt, Artificial Sequence
  Description of Artificial Sequence: Synthetic oligonucleotide
  Antisense strand to SEQ ID NO: 1047056
acucuaaacacuaugagag

SEQ ID NO: 1047058 - RNA, 19 nt, Artificial Sequence
  Description of Artificial Sequence: Synthetic oligonucleotide
  Sense strand starting at position 1319 of SEQ ID NO: 915013
guguuuagagugcugcuuu

SEQ ID NO: 1047059 - RNA, 19 nt, Artificial Sequence
  Description of Artificial Sequence: Synthetic oligonucleotide
  Antisense strand to SEQ ID NO: 1047058
aaagcagcacucuaaacac

SEQ ID NO: 1047060 - RNA, 19 nt, Artificial Sequence
  Description of Artificial Sequence: Synthetic oligonucleotide
  Sense strand starting at position 1322 of SEQ ID NO: 915013
uuuagagugcugcuuugca

SEQ ID NO: 1047061 - RNA, 19 nt, Artificial Sequence
  Description of Artificial Sequence: Synthetic oligonucleotide
  Antisense strand to SEQ ID NO: 1047060
ugcaaagcagcacucuaaa

SEQ ID NO: 1047062 - RNA, 19 nt, Artificial Sequence
  Description of Artificial Sequence: Synthetic oligonucleotide
  Sense strand starting at position 1463 of SEQ ID NO: 915013
ggucccagguaugucaaua

SEQ ID NO: 1047063 - RNA, 19 nt, Artificial Sequence
  Description of Artificial Sequence: Synthetic oligonucleotide
  Antisense strand to SEQ ID NO: 1047062
uauugacauaccugggacc

SEQ ID NO: 1047064 - RNA, 19 nt, Artificial Sequence
  Description of Artificial Sequence: Synthetic oligonucleotide
  Sense strand starting at position 1468 of SEQ ID NO: 915013
cagguaugucaauauuagu

SEQ ID NO: 1047065 - RNA, 19 nt, Artificial Sequence
  Description of Artificial Sequence: Synthetic oligonucleotide
  Antisense strand to SEQ ID NO: 1047064
acuaauauugacauaccug

SEQ ID NO: 1047066 - RNA, 19 nt, Artificial Sequence
  Description of Artificial Sequence: Synthetic oligonucleotide
  Sense strand starting at position 1491 of SEQ ID NO: 915013
uggagauuauccuucucaa

SEQ ID NO: 1047067 - RNA, 19 nt, Artificial Sequence
  Description of Artificial Sequence: Synthetic oligonucleotide
  Antisense strand to SEQ ID NO: 1047066
uugagaaggauaaucucca

SEQ ID NO: 1047068 - RNA, 19 nt, Artificial Sequence
  Description of Artificial Sequence: Synthetic oligonucleotide
  Sense strand starting at position 1549 of SEQ ID NO: 915013
ggcuuccacugcucaauuu

SEQ ID NO: 1047069 - RNA, 19 nt, Artificial Sequence
  Description of Artificial Sequence: Synthetic oligonucleotide
  Antisense strand to SEQ ID NO: 1047068
aaauugagcaguggaagcc

SEQ ID NO: 1047070 - RNA, 19 nt, Artificial Sequence
  Description of Artificial Sequence: Synthetic oligonucleotide
  Sense strand starting at position 1729 of SEQ ID NO: 915013
guaagucucacuugguaga

SEQ ID NO: 1047071 - RNA, 19 nt, Artificial Sequence
  Description of Artificial Sequence: Synthetic oligonucleotide
  Antisense strand to SEQ ID NO: 1047070
ucuaccaagugagacuuac

SEQ ID NO: 1047072 - RNA, 19 nt, Artificial Sequence
  Description of Artificial Sequence: Synthetic oligonucleotide
  Sense strand starting at position 1730 of SEQ ID NO: 915013
uaagucucacuugguagaa

SEQ ID NO: 1047073 - RNA, 19 nt, Artificial Sequence
  Description of Artificial Sequence: Synthetic oligonucleotide
  Antisense strand to SEQ ID NO: 1047072
uucuaccaagugagacuua

SEQ ID NO: 1047074 - RNA, 19 nt, Artificial Sequence
  Description of Artificial Sequence: Synthetic oligonucleotide
  Sense strand starting at position 1731 of SEQ ID NO: 915013
aagucucacuugguagaaa

SEQ ID NO: 1047075 - RNA, 19 nt, Artificial Sequence
  Description of Artificial Sequence: Synthetic oligonucleotide
  Antisense strand to SEQ ID NO: 1047074
uuucuaccaagugagacuu

SEQ ID NO: 1047076 - RNA, 19 nt, Artificial Sequence
  Description of Artificial Sequence: Synthetic oligonucleotide
  Sense strand starting at position 2002 of SEQ ID NO: 915013
ugguuaaugagccaguuaa

SEQ ID NO: 1047077 - RNA, 19 nt, Artificial Sequence
  Description of Artificial Sequence: Synthetic oligonucleotide
  Antisense strand to SEQ ID NO: 1047076
uuaacuggcucauuaacca

SEQ ID NO: 1047078 - RNA, 19 nt, Artificial Sequence
  Description of Artificial Sequence: Synthetic oligonucleotide
  Sense strand starting at position 2023 of SEQ ID NO: 915013
augguuugauuugacaaga

SEQ ID NO: 1047079 - RNA, 19 nt, Artificial Sequence
  Description of Artificial Sequence: Synthetic oligonucleotide
  Antisense strand to SEQ ID NO: 1047078
ucuugucaaaucaaaccau

SEQ ID NO: 1047080 - RNA, 19 nt, Artificial Sequence
  Description of Artificial Sequence: Synthetic oligonucleotide
  Sense strand starting at position 2046 of SEQ ID NO: 915013
augguauaaucuccaugga

SEQ ID NO: 1047081 - RNA, 19 nt, Artificial Sequence
  Description of Artificial Sequence: Synthetic oligonucleotide
  Antisense strand to SEQ ID NO: 1047080
uccauggagauuauaccau

SEQ ID NO: 1047082 - RNA, 19 nt, Artificial Sequence
  Description of Artificial Sequence: Synthetic oligonucleotide
  Sense strand starting at position 2049 of SEQ ID NO: 915013
guauaaucuccauggagaa

SEQ ID NO: 1047083 - RNA, 19 nt, Artificial Sequence
  Description of Artificial Sequence: Synthetic oligonucleotide
  Antisense strand to SEQ ID NO: 1047082
uucuccauggagauuauac

SEQ ID NO: 1047084 - RNA, 19 nt, Artificial Sequence
  Description of Artificial Sequence: Synthetic oligonucleotide
  Sense strand starting at position 2080 of SEQ ID NO: 915013
cugguugcucugggagaca

SEQ ID NO: 1047085 - RNA, 19 nt, Artificial Sequence
  Description of Artificial Sequence: Synthetic oligonucleotide
  Antisense strand to SEQ ID NO: 1047084
ugucucccagagcaaccag

SEQ ID NO: 1047086 - RNA, 19 nt, Artificial Sequence
  Description of Artificial Sequence: Synthetic oligonucleotide
  Sense strand starting at position 2210 of SEQ ID NO: 915013
aaugauuuguuggacuuga

SEQ ID NO: 1047087 - RNA, 19 nt, Artificial Sequence
  Description of Artificial Sequence: Synthetic oligonucleotide
  Antisense strand to SEQ ID NO: 1047086
ucaaguccaacaaaucauu

SEQ ID NO: 1047088 - RNA, 19 nt, Artificial Sequence
  Description of Artificial Sequence: Synthetic oligonucleotide
  Sense strand starting at position 2295 of SEQ ID NO: 915013
auagaaucacagcgaguga

SEQ ID NO: 1047089 - RNA, 19 nt, Artificial Sequence
  Description of Artificial Sequence: Synthetic oligonucleotide
  Antisense strand to SEQ ID NO: 1047088
ucacucgcugugauucuau

SEQ ID NO: 1047090 - RNA, 19 nt, Artificial Sequence
  Description of Artificial Sequence: Synthetic oligonucleotide
  Sense strand starting at position 2316 of SEQ ID NO: 915013
ugagacuuguaaucaacuu

SEQ ID NO: 1047091 - RNA, 19 nt, Artificial Sequence
  Description of Artificial Sequence: Synthetic oligonucleotide
  Antisense strand to SEQ ID NO: 1047090
aaguugauuacaagucuca

SEQ ID NO: 1047092 - RNA, 19 nt, Artificial Sequence
  Description of Artificial Sequence: Synthetic oligonucleotide
  Sense strand starting at position 2388 of SEQ ID NO: 915013
gagggcauuccacauaucu

SEQ ID NO: 1047093 - RNA, 19 nt, Artificial Sequence
  Description of Artificial Sequence: Synthetic oligonucleotide
  Antisense strand to SEQ ID NO: 1047092
agauauguggaaugcccuc

SEQ ID NO: 1047094 - RNA, 19 nt, Artificial Sequence
  Description of Artificial Sequence: Synthetic oligonucleotide
  Sense strand starting at position 2410 of SEQ ID NO: 915013
acauacaucgugugaauug

SEQ ID NO: 1047095 - RNA, 19 nt, Artificial Sequence
  Description of Artificial Sequence: Synthetic oligonucleotide
  Antisense strand to SEQ ID NO: 1047094
caauucacacgauguaugu

SEQ ID NO: 1047096 - RNA, 19 nt, Artificial Sequence
  Description of Artificial Sequence: Synthetic oligonucleotide
  Sense strand starting at position 2419 of SEQ ID NO: 915013
gugugaauugcacaguaca

SEQ ID NO: 1047097 - RNA, 19 nt, Artificial Sequence
  Description of Artificial Sequence: Synthetic oligonucleotide
  Antisense strand to SEQ ID NO: 1047096
uguacugugcaauucacac

SEQ ID NO: 1047098 - RNA, 19 nt, Artificial Sequence
  Description of Artificial Sequence: Synthetic oligonucleotide
  Sense strand starting at position 2450 of SEQ ID NO: 915013
uguaauaguccaugacaga

SEQ ID NO: 1047099 - RNA, 19 nt, Artificial Sequence
  Description of Artificial Sequence: Synthetic oligonucleotide
  Antisense strand to SEQ ID NO: 1047098
ucugucauggacuauuaca

SEQ ID NO: 1047100 - RNA, 19 nt, Artificial Sequence
  Description of Artificial Sequence: Synthetic oligonucleotide
  Sense strand starting at position 2518 of SEQ ID NO: 915013
uggcuagaacauuguaaga

SEQ ID NO: 1047101 - RNA, 19 nt, Artificial Sequence
  Description of Artificial Sequence: Synthetic oligonucleotide
  Antisense strand to SEQ ID NO: 1047100
ucuuacaauguucuagcca

SEQ ID NO: 1047102 - RNA, 19 nt, Artificial Sequence
  Description of Artificial Sequence: Synthetic oligonucleotide
  Sense strand starting at position 3013 of SEQ ID NO: 915013
ggaccuuugucccuuaauu

SEQ ID NO: 1047103 - RNA, 19 nt, Artificial Sequence
  Description of Artificial Sequence: Synthetic oligonucleotide
  Antisense strand to SEQ ID NO: 1047102
aauuaagggacaaaggucc

SEQ ID NO: 1047104 - RNA, 19 nt, Artificial Sequence
  Description of Artificial Sequence: Synthetic oligonucleotide
  Sense strand starting at position 3193 of SEQ ID NO: 915013
gcauuugagucauuguuug

SEQ ID NO: 1047105 - RNA, 19 nt, Artificial Sequence
  Description of Artificial Sequence: Synthetic oligonucleotide
  Antisense strand to SEQ ID NO: 1047104
caaacaaugacucaaaugc

SEQ ID NO: 1047106 - RNA, 19 nt, Artificial Sequence
  Description of Artificial Sequence: Synthetic oligonucleotide
  Sense strand starting at position 3197 of SEQ ID NO: 915013
uugagucauuguuugaaag

SEQ ID NO: 1047107 - RNA, 19 nt, Artificial Sequence
  Description of Artificial Sequence: Synthetic oligonucleotide
  Antisense strand to SEQ ID NO: 1047106
cuuucaaacaaugacucaa

SEQ ID NO: 1047108 - RNA, 19 nt, Artificial Sequence
  Description of Artificial Sequence: Synthetic oligonucleotide
  Sense strand starting at position 3198 of SEQ ID NO: 915013
ugagucauuguuugaaagc

SEQ ID NO: 1047109 - RNA, 19 nt, Artificial Sequence
  Description of Artificial Sequence: Synthetic oligonucleotide
  Antisense strand to SEQ ID NO: 1047108
gcuuucaaacaaugacuca

SEQ ID NO: 1047110 - RNA, 19 nt, Artificial Sequence
  Description of Artificial Sequence: Synthetic oligonucleotide
  Sense strand starting at position 3324 of SEQ ID NO: 915013
uugugaaugcuaugagaug

SEQ ID NO: 1047111 - RNA, 19 nt, Artificial Sequence
  Description of Artificial Sequence: Synthetic oligonucleotide
  Antisense strand to SEQ ID NO: 1047110
caucucauagcauucacaa

SEQ ID NO: 1047112 - RNA, 19 nt, Artificial Sequence
  Description of Artificial Sequence: Synthetic oligonucleotide
  Sense strand starting at position 3333 of SEQ ID NO: 915013
cuaugagaugugggucuaa

SEQ ID NO: 1047113 - RNA, 19 nt, Artificial Sequence
  Description of Artificial Sequence: Synthetic oligonucleotide
  Antisense strand to SEQ ID NO: 1047112
uuagacccacaucucauag

SEQ ID NO: 1047114 - RNA, 19 nt, Artificial Sequence
  Description of Artificial Sequence: Synthetic oligonucleotide
  Sense strand starting at position 3387 of SEQ ID NO: 915013
agggcaauuuauuaaauag

SEQ ID NO: 1047115 - RNA, 19 nt, Artificial Sequence
  Description of Artificial Sequence: Synthetic oligonucleotide
  Antisense strand to SEQ ID NO: 1047114
cuauuuaauaaauugcccu

SEQ ID NO: 1047116 - RNA, 19 nt, Artificial Sequence
  Description of Artificial Sequence: Synthetic oligonucleotide
  Sense strand starting at position 3587 of SEQ ID NO: 915013
uuagucuccuguguaauuu

SEQ ID NO: 1047117 - RNA, 19 nt, Artificial Sequence
  Description of Artificial Sequence: Synthetic oligonucleotide
  Antisense strand to SEQ ID NO: 1047116
aaauuacacaggagacuaa

SEQ ID NO: 1047118 - RNA, 19 nt, Artificial Sequence
  Description of Artificial Sequence: Synthetic oligonucleotide
  Sense strand starting at position 3671 of SEQ ID NO: 915013
ugucuaacucuauaaagua

SEQ ID NO: 1047119 - RNA, 19 nt, Artificial Sequence
  Description of Artificial Sequence: Synthetic oligonucleotide
  Antisense strand to SEQ ID NO: 1047118
uacuuuauagaguuagaca

SEQ ID NO: 1047120 - RNA, 19 nt, Artificial Sequence
  Description of Artificial Sequence: Synthetic oligonucleotide
  Sense strand starting at position 3765 of SEQ ID NO: 915013
aggacauauagguggcuaa

SEQ ID NO: 1047121 - RNA, 19 nt, Artificial Sequence
  Description of Artificial Sequence: Synthetic oligonucleotide
  Antisense strand to SEQ ID NO: 1047120
uuagccaccuauauguccu

SEQ ID NO: 1047122 - RNA, 19 nt, Artificial Sequence
  Description of Artificial Sequence: Synthetic oligonucleotide
  Sense strand starting at position 3910 of SEQ ID NO: 915013
gggagauuauuauugucca

SEQ ID NO: 1047123 - RNA, 19 nt, Artificial Sequence
  Description of Artificial Sequence: Synthetic oligonucleotide
  Antisense strand to SEQ ID NO: 1047122
uggacaauaauaaucuccc

SEQ ID NO: 1047124 - RNA, 19 nt, Artificial Sequence
  Description of Artificial Sequence: Synthetic oligonucleotide
  Sense strand starting at position 146 of SEQ ID NO: 915014
gaguaauuaauggguggca

SEQ ID NO: 1047125 - RNA, 19 nt, Artificial Sequence
  Description of Artificial Sequence: Synthetic oligonucleotide
  Antisense strand to SEQ ID NO: 1047124
ugccacccauuaauuacuc

SEQ ID NO: 1047126 - RNA, 19 nt, Artificial Sequence
  Description of Artificial Sequence: Synthetic oligonucleotide
  Sense strand starting at position 147 of SEQ ID NO: 915014
aguaauuaauggguggcaa

SEQ ID NO: 1047127 - RNA, 19 nt, Artificial Sequence
  Description of Artificial Sequence: Synthetic oligonucleotide
  Antisense strand to SEQ ID NO: 1047126
uugccacccauuaauuacu

SEQ ID NO: 1047128 - RNA, 19 nt, Artificial Sequence
  Description of Artificial Sequence: Synthetic oligonucleotide
  Sense strand starting at position 148 of SEQ ID NO: 915014
guaauuaauggguggcaaa

SEQ ID NO: 1047129 - RNA, 19 nt, Artificial Sequence
  Description of Artificial Sequence: Synthetic oligonucleotide
  Antisense strand to SEQ ID NO: 1047128
uuugccacccauuaauuac

SEQ ID NO: 1047130 - RNA, 19 nt, Artificial Sequence
  Description of Artificial Sequence: Synthetic oligonucleotide
  Sense strand starting at position 149 of SEQ ID NO: 915014
uaauuaauggguggcaaau

SEQ ID NO: 1047131 - RNA, 19 nt, Artificial Sequence
  Description of Artificial Sequence: Synthetic oligonucleotide
  Antisense strand to SEQ ID NO: 1047130
auuugccacccauuaauua

SEQ ID NO: 1047132 - RNA, 19 nt, Artificial Sequence
  Description of Artificial Sequence: Synthetic oligonucleotide
  Sense strand starting at position 159 of SEQ ID NO: 915014
guggcaaauuccuugaaca

SEQ ID NO: 1047133 - RNA, 19 nt, Artificial Sequence
  Description of Artificial Sequence: Synthetic oligonucleotide
  Antisense strand to SEQ ID NO: 1047132
uguucaaggaauuugccac

SEQ ID NO: 1047134 - RNA, 19 nt, Artificial Sequence
  Description of Artificial Sequence: Synthetic oligonucleotide
  Sense strand starting at position 160 of SEQ ID NO: 915014
uggcaaauuccuugaacaa

SEQ ID NO: 1047135 - RNA, 19 nt, Artificial Sequence
  Description of Artificial Sequence: Synthetic oligonucleotide
  Antisense strand to SEQ ID NO: 1047134
uuguucaaggaauuugcca

SEQ ID NO: 1047136 - RNA, 19 nt, Artificial Sequence
  Description of Artificial Sequence: Synthetic oligonucleotide
  Sense strand starting at position 262 of SEQ ID NO: 915014
uggagaacuuuggugcaau

SEQ ID NO: 1047137 - RNA, 19 nt, Artificial Sequence
  Description of Artificial Sequence: Synthetic oligonucleotide
  Antisense strand to SEQ ID NO: 1047136
auugcaccaaaguucucca

SEQ ID NO: 1047138 - RNA, 19 nt, Artificial Sequence
  Description of Artificial Sequence: Synthetic oligonucleotide
  Sense strand starting at position 273 of SEQ ID NO: 915014
ggugcaauuucccuccuuu

SEQ ID NO: 1047139 - RNA, 19 nt, Artificial Sequence
  Description of Artificial Sequence: Synthetic oligonucleotide
  Antisense strand to SEQ ID NO: 1047138
aaaggagggaaauugcacc

SEQ ID NO: 1047140 - RNA, 19 nt, Artificial Sequence
  Description of Artificial Sequence: Synthetic oligonucleotide
  Sense strand starting at position 306 of SEQ ID NO: 915014
caugauugcgccuauuaga

SEQ ID NO: 1047141 - RNA, 19 nt, Artificial Sequence
  Description of Artificial Sequence: Synthetic oligonucleotide
  Antisense strand to SEQ ID NO: 1047140
ucuaauaggcgcaaucaug

SEQ ID NO: 1047142 - RNA, 19 nt, Artificial Sequence
  Description of Artificial Sequence: Synthetic oligonucleotide
  Sense strand starting at position 595 of SEQ ID NO: 915014
aucuuaaccuggcuaagau

SEQ ID NO: 1047143 - RNA, 19 nt, Artificial Sequence
  Description of Artificial Sequence: Synthetic oligonucleotide
  Antisense strand to SEQ ID NO: 1047142
aucuuagccagguuaagau

SEQ ID NO: 1047144 - RNA, 19 nt, Artificial Sequence
  Description of Artificial Sequence: Synthetic oligonucleotide
  Sense strand starting at position 596 of SEQ ID NO: 915014
ucuuaaccuggcuaagauu

SEQ ID NO: 1047145 - RNA, 19 nt, Artificial Sequence
  Description of Artificial Sequence: Synthetic oligonucleotide
  Antisense strand to SEQ ID NO: 1047144
aaucuuagccagguuaaga

SEQ ID NO: 1047146 - RNA, 19 nt, Artificial Sequence
  Description of Artificial Sequence: Synthetic oligonucleotide
  Sense strand starting at position 918 of SEQ ID NO: 915014
gucuuacucguccuucgua

SEQ ID NO: 1047147 - RNA, 19 nt, Artificial Sequence
  Description of Artificial Sequence: Synthetic oligonucleotide
  Antisense strand to SEQ ID NO: 1047146
uacgaaggacgaguaagac

SEQ ID NO: 1047148 - RNA, 19 nt, Artificial Sequence
  Description of Artificial Sequence: Synthetic oligonucleotide
  Sense strand starting at position 928 of SEQ ID NO: 915014
uccuucguagcucaagaua

SEQ ID NO: 1047149 - RNA, 19 nt, Artificial Sequence
  Description of Artificial Sequence: Synthetic oligonucleotide
  Antisense strand to SEQ ID NO: 1047148
uaucuugagcuacgaagga

SEQ ID NO: 1047150 - RNA, 19 nt, Artificial Sequence
  Description of Artificial Sequence: Synthetic oligonucleotide
  Sense strand starting at position 931 of SEQ ID NO: 915014
uucguagcucaagauagaa

SEQ ID NO: 1047151 - RNA, 19 nt, Artificial Sequence
  Description of Artificial Sequence: Synthetic oligonucleotide
  Antisense strand to SEQ ID NO: 1047150
uucuaucuugagcuacgaa

SEQ ID NO: 1047152 - RNA, 19 nt, Artificial Sequence
  Description of Artificial Sequence: Synthetic oligonucleotide
  Sense strand starting at position 1217 of SEQ ID NO: 915014
acaucucaauuggcaagaa

SEQ ID NO: 1047153 - RNA, 19 nt, Artificial Sequence
  Description of Artificial Sequence: Synthetic oligonucleotide
  Antisense strand to SEQ ID NO: 1047152
uucuugccaauugagaugu

SEQ ID NO: 1047154 - RNA, 19 nt, Artificial Sequence
  Description of Artificial Sequence: Synthetic oligonucleotide
  Sense strand starting at position 1858 of SEQ ID NO: 915014
gucggacagcgauggauuu

SEQ ID NO: 1047155 - RNA, 19 nt, Artificial Sequence
  Description of Artificial Sequence: Synthetic oligonucleotide
  Antisense strand to SEQ ID NO: 1047154
aaauccaucgcuguccgac

SEQ ID NO: 1047156 - RNA, 19 nt, Artificial Sequence
  Description of Artificial Sequence: Synthetic oligonucleotide
  Sense strand starting at position 2851 of SEQ ID NO: 915014
cugguaaugaauuagugua

SEQ ID NO: 1047157 - RNA, 19 nt, Artificial Sequence
  Description of Artificial Sequence: Synthetic oligonucleotide
  Antisense strand to SEQ ID NO: 1047156
uacacuaauucauuaccag

SEQ ID NO: 1047158 - RNA, 19 nt, Artificial Sequence
  Description of Artificial Sequence: Synthetic oligonucleotide
  Sense strand starting at position 2853 of SEQ ID NO: 915014
gguaaugaauuaguguauu

SEQ ID NO: 1047159 - RNA, 19 nt, Artificial Sequence
  Description of Artificial Sequence: Synthetic oligonucleotide
  Antisense strand to SEQ ID NO: 1047158
aauacacuaauucauuacc

SEQ ID NO: 1047160 - RNA, 19 nt, Artificial Sequence
  Description of Artificial Sequence: Synthetic oligonucleotide
  Sense strand starting at position 2870 of SEQ ID NO: 915014
uuagucacuccugaaacgu

SEQ ID NO: 1047161 - RNA, 19 nt, Artificial Sequence
  Description of Artificial Sequence: Synthetic oligonucleotide
  Antisense strand to SEQ ID NO: 1047160
acguuucaggagugacuaa

SEQ ID NO: 1047162 - RNA, 19 nt, Artificial Sequence
  Description of Artificial Sequence: Synthetic oligonucleotide
  Sense strand starting at position 2879 of SEQ ID NO: 915014
ccugaaacguuccuuaaag

SEQ ID NO: 1047163 - RNA, 19 nt, Artificial Sequence
  Description of Artificial Sequence: Synthetic oligonucleotide
  Antisense strand to SEQ ID NO: 1047162
cuuuaaggaacguuucagg

SEQ ID NO: 1047164 - RNA, 19 nt, Artificial Sequence
  Description of Artificial Sequence: Synthetic oligonucleotide
  Sense strand starting at position 2880 of SEQ ID NO: 915014
cugaaacguuccuuaaagu

SEQ ID NO: 1047165 - RNA, 19 nt, Artificial Sequence
  Description of Artificial Sequence: Synthetic oligonucleotide
  Antisense strand to SEQ ID NO: 1047164
acuuuaaggaacguuucag

SEQ ID NO: 1047166 - RNA, 19 nt, Artificial Sequence
  Description of Artificial Sequence: Synthetic oligonucleotide
  Sense strand starting at position 2881 of SEQ ID NO: 915014
ugaaacguuccuuaaagug

SEQ ID NO: 1047167 - RNA, 19 nt, Artificial Sequence
  Description of Artificial Sequence: Synthetic oligonucleotide
  Antisense strand to SEQ ID NO: 1047166
cacuuuaaggaacguuuca

SEQ ID NO: 1047168 - RNA, 19 nt, Artificial Sequence
  Description of Artificial Sequence: Synthetic oligonucleotide
  Sense strand starting at position 2890 of SEQ ID NO: 915014
ccuuaaagugcuggaacuu

SEQ ID NO: 1047169 - RNA, 19 nt, Artificial Sequence
  Description of Artificial Sequence: Synthetic oligonucleotide
  Antisense strand to SEQ ID NO: 1047168
aaguuccagcacuuuaagg

SEQ ID NO: 1047170 - RNA, 19 nt, Artificial Sequence
  Description of Artificial Sequence: Synthetic oligonucleotide
  Sense strand starting at position 2891 of SEQ ID NO: 915014
cuuaaagugcuggaacuua

SEQ ID NO: 1047171 - RNA, 19 nt, Artificial Sequence
  Description of Artificial Sequence: Synthetic oligonucleotide
  Antisense strand to SEQ ID NO: 1047170
uaaguuccagcacuuuaag

SEQ ID NO: 1047172 - RNA, 19 nt, Artificial Sequence
  Description of Artificial Sequence: Synthetic oligonucleotide
  Sense strand starting at position 2937 of SEQ ID NO: 915014
gcuguaccguauuuccaua

SEQ ID NO: 1047173 - RNA, 19 nt, Artificial Sequence
  Description of Artificial Sequence: Synthetic oligonucleotide
  Antisense strand to SEQ ID NO: 1047172
uauggaaauacgguacagc

SEQ ID NO: 1047174 - RNA, 19 nt, Artificial Sequence
  Description of Artificial Sequence: Synthetic oligonucleotide
  Sense strand starting at position 2975 of SEQ ID NO: 915014
uuaauuggauaucuuggau

SEQ ID NO: 1047175 - RNA, 19 nt, Artificial Sequence
  Description of Artificial Sequence: Synthetic oligonucleotide
  Antisense strand to SEQ ID NO: 1047174
auccaagauauccaauuaa

SEQ ID NO: 1047176 - RNA, 19 nt, Artificial Sequence
  Description of Artificial Sequence: Synthetic oligonucleotide
  Sense strand starting at position 2978 of SEQ ID NO: 915014
auuggauaucuuggaucau

SEQ ID NO: 1047177 - RNA, 19 nt, Artificial Sequence
  Description of Artificial Sequence: Synthetic oligonucleotide
  Antisense strand to SEQ ID NO: 1047176
augauccaagauauccaau

SEQ ID NO: 1047178 - RNA, 19 nt, Artificial Sequence
  Description of Artificial Sequence: Synthetic oligonucleotide
  Sense strand starting at position 3041 of SEQ ID NO: 915014
ugaggaugcugaccaauga

SEQ ID NO: 1047179 - RNA, 19 nt, Artificial Sequence
  Description of Artificial Sequence: Synthetic oligonucleotide
  Antisense strand to SEQ ID NO: 1047178
ucauuggucagcauccuca

SEQ ID NO: 1047180 - RNA, 19 nt, Artificial Sequence
  Description of Artificial Sequence: Synthetic oligonucleotide
  Sense strand starting at position 3346 of SEQ ID NO: 915014
guaucauucuuauugaaga

SEQ ID NO: 1047181 - RNA, 19 nt, Artificial Sequence
  Description of Artificial Sequence: Synthetic oligonucleotide
  Antisense strand to SEQ ID NO: 1047180
ucuucaauaagaaugauac

SEQ ID NO: 1047182 - RNA, 19 nt, Artificial Sequence
  Description of Artificial Sequence: Synthetic oligonucleotide
  Sense strand starting at position 3395 of SEQ ID NO: 915014
gagagaaugacugguuguc

SEQ ID NO: 1047183 - RNA, 19 nt, Artificial Sequence
  Description of Artificial Sequence: Synthetic oligonucleotide
  Antisense strand to SEQ ID NO: 1047182
gacaaccagucauucucuc

SEQ ID NO: 1047184 - RNA, 19 nt, Artificial Sequence
  Description of Artificial Sequence: Synthetic oligonucleotide
  Sense strand starting at position 3397 of SEQ ID NO: 915014
gagaaugacugguugucuu

SEQ ID NO: 1047185 - RNA, 19 nt, Artificial Sequence
  Description of Artificial Sequence: Synthetic oligonucleotide
  Antisense strand to SEQ ID NO: 1047184
aagacaaccagucauucuc

SEQ ID NO: 1047186 - RNA, 19 nt, Artificial Sequence
  Description of Artificial Sequence: Synthetic oligonucleotide
  Sense strand starting at position 3464 of SEQ ID NO: 915014
ggaggagauaauuguucuc

SEQ ID NO: 1047187 - RNA, 19 nt, Artificial Sequence
  Description of Artificial Sequence: Synthetic oligonucleotide
  Antisense strand to SEQ ID NO: 1047186
gagaacaauuaucuccucc

SEQ ID NO: 1047188 - RNA, 19 nt, Artificial Sequence
  Description of Artificial Sequence: Synthetic oligonucleotide
  Sense strand starting at position 3466 of SEQ ID NO: 915014
aggagauaauuguucucgu

SEQ ID NO: 1047189 - RNA, 19 nt, Artificial Sequence
  Description of Artificial Sequence: Synthetic oligonucleotide
  Antisense strand to SEQ ID NO: 1047188
acgagaacaauuaucuccu

SEQ ID NO: 1047190 - RNA, 19 nt, Artificial Sequence
  Description of Artificial Sequence: Synthetic oligonucleotide
  Sense strand starting at position 3467 of SEQ ID NO: 915014
ggagauaauuguucucgua

SEQ ID NO: 1047191 - RNA, 19 nt, Artificial Sequence
  Description of Artificial Sequence: Synthetic oligonucleotide
  Antisense strand to SEQ ID NO: 1047190
uacgagaacaauuaucucc

SEQ ID NO: 1047192 - RNA, 19 nt, Artificial Sequence
  Description of Artificial Sequence: Synthetic oligonucleotide
  Sense strand starting at position 3752 of SEQ ID NO: 915014
cagguaaaguccuuagaac

SEQ ID NO: 1047193 - RNA, 19 nt, Artificial Sequence
  Description of Artificial Sequence: Synthetic oligonucleotide
  Antisense strand to SEQ ID NO: 1047192
guucuaaggacuuuaccug

SEQ ID NO: 1047194 - RNA, 19 nt, Artificial Sequence
  Description of Artificial Sequence: Synthetic oligonucleotide
  Sense strand starting at position 3753 of SEQ ID NO: 915014
agguaaaguccuuagaacg

SEQ ID NO: 1047195 - RNA, 19 nt, Artificial Sequence
  Description of Artificial Sequence: Synthetic oligonucleotide
  Antisense strand to SEQ ID NO: 1047194
cguucuaaggacuuuaccu

SEQ ID NO: 1047196 - RNA, 19 nt, Artificial Sequence
  Description of Artificial Sequence: Synthetic oligonucleotide
  Sense strand starting at position 3782 of SEQ ID NO: 915014
cacaguaaacauuguguga

SEQ ID NO: 1047197 - RNA, 19 nt, Artificial Sequence
  Description of Artificial Sequence: Synthetic oligonucleotide
  Antisense strand to SEQ ID NO: 1047196
ucacacaauguuuacugug

SEQ ID NO: 1047198 - RNA, 19 nt, Artificial Sequence
  Description of Artificial Sequence: Synthetic oligonucleotide
  Sense strand starting at position 3881 of SEQ ID NO: 915014
agguauuugguguguauga

SEQ ID NO: 1047199 - RNA, 19 nt, Artificial Sequence
  Description of Artificial Sequence: Synthetic oligonucleotide
  Antisense strand to SEQ ID NO: 1047198
ucauacacaccaaauaccu

SEQ ID NO: 1047200 - RNA, 19 nt, Artificial Sequence
  Description of Artificial Sequence: Synthetic oligonucleotide
  Sense strand starting at position 3882 of SEQ ID NO: 915014
gguauuugguguguaugaa

SEQ ID NO: 1047201 - RNA, 19 nt, Artificial Sequence
  Description of Artificial Sequence: Synthetic oligonucleotide
  Antisense strand to SEQ ID NO: 1047200
uucauacacaccaaauacc

SEQ ID NO: 1047202 - RNA, 19 nt, Artificial Sequence
  Description of Artificial Sequence: Synthetic oligonucleotide
  Sense strand starting at position 3904 of SEQ ID NO: 915014
gagaguugugccuaaauca

SEQ ID NO: 1047203 - RNA, 19 nt, Artificial Sequence
  Description of Artificial Sequence: Synthetic oligonucleotide
  Antisense strand to SEQ ID NO: 1047202
ugauuuaggcacaacucuc

SEQ ID NO: 1047204 - RNA, 19 nt, Artificial Sequence
  Description of Artificial Sequence: Synthetic oligonucleotide
  Sense strand starting at position 96 of SEQ ID NO: 915015
cgaauucuggcuuaauaag

SEQ ID NO: 1047205 - RNA, 19 nt, Artificial Sequence
  Description of Artificial Sequence: Synthetic oligonucleotide
  Antisense strand to SEQ ID NO: 1047204
cuuauuaagccagaauucg

SEQ ID NO: 1047206 - RNA, 19 nt, Artificial Sequence
  Description of Artificial Sequence: Synthetic oligonucleotide
  Sense strand starting at position 180 of SEQ ID NO: 915015
gcaggcuaccauuaauaug

SEQ ID NO: 1047207 - RNA, 19 nt, Artificial Sequence
  Description of Artificial Sequence: Synthetic oligonucleotide
  Antisense strand to SEQ ID NO: 1047206
cauauuaaugguagccugc

SEQ ID NO: 1047208 - RNA, 19 nt, Artificial Sequence
  Description of Artificial Sequence: Synthetic oligonucleotide
  Sense strand starting at position 199 of SEQ ID NO: 915015
gaagaacuguuacuguagu

SEQ ID NO: 1047209 - RNA, 19 nt, Artificial Sequence
  Description of Artificial Sequence: Synthetic oligonucleotide
  Antisense strand to SEQ ID NO: 1047208
acuacaguaacaguucuuc

SEQ ID NO: 1047210 - RNA, 19 nt, Artificial Sequence
  Description of Artificial Sequence: Synthetic oligonucleotide
  Sense strand starting at position 260 of SEQ ID NO: 915015
auugaaguugucgagaguc

SEQ ID NO: 1047211 - RNA, 19 nt, Artificial Sequence
  Description of Artificial Sequence: Synthetic oligonucleotide
  Antisense strand to SEQ ID NO: 1047210
gacucucgacaacuucaau

SEQ ID NO: 1047212 - RNA, 19 nt, Artificial Sequence
  Description of Artificial Sequence: Synthetic oligonucleotide
  Sense strand starting at position 262 of SEQ ID NO: 915015
ugaaguugucgagagucca

SEQ ID NO: 1047213 - RNA, 19 nt, Artificial Sequence
  Description of Artificial Sequence: Synthetic oligonucleotide
  Antisense strand to SEQ ID NO: 1047212
uggacucucgacaacuuca

SEQ ID NO: 1047214 - RNA, 19 nt, Artificial Sequence
  Description of Artificial Sequence: Synthetic oligonucleotide
  Sense strand starting at position 290 of SEQ ID NO: 915015
agauauccaccguaagauu

SEQ ID NO: 1047215 - RNA, 19 nt, Artificial Sequence
  Description of Artificial Sequence: Synthetic oligonucleotide
  Antisense strand to SEQ ID NO: 1047214
aaucuuacgguggauaucu

SEQ ID NO: 1047216 - RNA, 19 nt, Artificial Sequence
  Description of Artificial Sequence: Synthetic oligonucleotide
  Sense strand starting at position 350 of SEQ ID NO: 915015
guaaauguauugguacaug

SEQ ID NO: 1047217 - RNA, 19 nt, Artificial Sequence
  Description of Artificial Sequence: Synthetic oligonucleotide
  Antisense strand to SEQ ID NO: 1047216
cauguaccaauacauuuac

SEQ ID NO: 1047218 - RNA, 19 nt, Artificial Sequence
  Description of Artificial Sequence: Synthetic oligonucleotide
  Sense strand starting at position 353 of SEQ ID NO: 915015
aauguauugguacauggua

SEQ ID NO: 1047219 - RNA, 19 nt, Artificial Sequence
  Description of Artificial Sequence: Synthetic oligonucleotide
  Antisense strand to SEQ ID NO: 1047218
uaccauguaccaauacauu

SEQ ID NO: 1047220 - RNA, 19 nt, Artificial Sequence
  Description of Artificial Sequence: Synthetic oligonucleotide
  Sense strand starting at position 710 of SEQ ID NO: 915015
guugaaguucuguagauau

SEQ ID NO: 1047221 - RNA, 19 nt, Artificial Sequence
  Description of Artificial Sequence: Synthetic oligonucleotide
  Antisense strand to SEQ ID NO: 1047220
auaucuacagaacuucaac

SEQ ID NO: 1047222 - RNA, 19 nt, Artificial Sequence
  Description of Artificial Sequence: Synthetic oligonucleotide
  Sense strand starting at position 722 of SEQ ID NO: 915015
uagauaugcuuaccuggau

SEQ ID NO: 1047223 - RNA, 19 nt, Artificial Sequence
  Description of Artificial Sequence: Synthetic oligonucleotide
  Antisense strand to SEQ ID NO: 1047222
auccagguaagcauaucua

SEQ ID NO: 1047224 - RNA, 19 nt, Artificial Sequence
  Description of Artificial Sequence: Synthetic oligonucleotide
  Sense strand starting at position 723 of SEQ ID NO: 915015
agauaugcuuaccuggaua

SEQ ID NO: 1047225 - RNA, 19 nt, Artificial Sequence
  Description of Artificial Sequence: Synthetic oligonucleotide
  Antisense strand to SEQ ID NO: 1047224
uauccagguaagcauaucu

SEQ ID NO: 1047226 - RNA, 19 nt, Artificial Sequence
  Description of Artificial Sequence: Synthetic oligonucleotide
  Sense strand starting at position 725 of SEQ ID NO: 915015
auaugcuuaccuggauaaa

SEQ ID NO: 1047227 - RNA, 19 nt, Artificial Sequence
  Description of Artificial Sequence: Synthetic oligonucleotide
  Antisense strand to SEQ ID NO: 1047226
uuuauccagguaagcauau

SEQ ID NO: 1047228 - RNA, 19 nt, Artificial Sequence
  Description of Artificial Sequence: Synthetic oligonucleotide
  Sense strand starting at position 789 of SEQ ID NO: 915015
ccgguauccaaguaacaga

SEQ ID NO: 1047229 - RNA, 19 nt, Artificial Sequence
  Description of Artificial Sequence: Synthetic oligonucleotide
  Antisense strand to SEQ ID NO: 1047228
ucuguuacuuggauaccgg

SEQ ID NO: 1047230 - RNA, 19 nt, Artificial Sequence
  Description of Artificial Sequence: Synthetic oligonucleotide
  Sense strand starting at position 875 of SEQ ID NO: 915015
cugugugaaaggcacuauu

SEQ ID NO: 1047231 - RNA, 19 nt, Artificial Sequence
  Description of Artificial Sequence: Synthetic oligonucleotide
  Antisense strand to SEQ ID NO: 1047230
aauagugccuuucacacag

SEQ ID NO: 1047232 - RNA, 19 nt, Artificial Sequence
  Description of Artificial Sequence: Synthetic oligonucleotide
  Sense strand starting at position 972 of SEQ ID NO: 915015
gccugucaucgcucucuua

SEQ ID NO: 1047233 - RNA, 19 nt, Artificial Sequence
  Description of Artificial Sequence: Synthetic oligonucleotide
  Antisense strand to SEQ ID NO: 1047232
uaagagagcgaugacaggc

SEQ ID NO: 1047234 - RNA, 19 nt, Artificial Sequence
  Description of Artificial Sequence: Synthetic oligonucleotide
  Sense strand starting at position 982 of SEQ ID NO: 915015
gcucucuuagcagaaagga

SEQ ID NO: 1047235 - RNA, 19 nt, Artificial Sequence
  Description of Artificial Sequence: Synthetic oligonucleotide
  Antisense strand to SEQ ID NO: 1047234
uccuuucugcuaagagagc

SEQ ID NO: 1047236 - RNA, 19 nt, Artificial Sequence
  Description of Artificial Sequence: Synthetic oligonucleotide
  Sense strand starting at position 1105 of SEQ ID NO: 915015
acaggaaugagauguaguu

SEQ ID NO: 1047237 - RNA, 19 nt, Artificial Sequence
  Description of Artificial Sequence: Synthetic oligonucleotide
  Antisense strand to SEQ ID NO: 1047236
aacuacaucucauuccugu

SEQ ID NO: 1047238 - RNA, 19 nt, Artificial Sequence
  Description of Artificial Sequence: Synthetic oligonucleotide
  Sense strand starting at position 1154 of SEQ ID NO: 915015
cugccaauggcauaauaua

SEQ ID NO: 1047239 - RNA, 19 nt, Artificial Sequence
  Description of Artificial Sequence: Synthetic oligonucleotide
  Antisense strand to SEQ ID NO: 1047238
uauauuaugccauuggcag

SEQ ID NO: 1047240 - RNA, 19 nt, Artificial Sequence
  Description of Artificial Sequence: Synthetic oligonucleotide
  Sense strand starting at position 1293 of SEQ ID NO: 915015
aggguaaauuaguuaagca

SEQ ID NO: 1047241 - RNA, 19 nt, Artificial Sequence
  Description of Artificial Sequence: Synthetic oligonucleotide
  Antisense strand to SEQ ID NO: 1047240
ugcuuaacuaauuuacccu

SEQ ID NO: 1047242 - RNA, 19 nt, Artificial Sequence
  Description of Artificial Sequence: Synthetic oligonucleotide
  Sense strand starting at position 1294 of SEQ ID NO: 915015
ggguaaauuaguuaagcag

SEQ ID NO: 1047243 - RNA, 19 nt, Artificial Sequence
  Description of Artificial Sequence: Synthetic oligonucleotide
  Antisense strand to SEQ ID NO: 1047242
cugcuuaacuaauuuaccc

SEQ ID NO: 1047244 - RNA, 19 nt, Artificial Sequence
  Description of Artificial Sequence: Synthetic oligonucleotide
  Sense strand starting at position 1475 of SEQ ID NO: 915015
ugggucgacgguuaucaaa

SEQ ID NO: 1047245 - RNA, 19 nt, Artificial Sequence
  Description of Artificial Sequence: Synthetic oligonucleotide
  Antisense strand to SEQ ID NO: 1047244
uuugauaaccgucgaccca

SEQ ID NO: 1047246 - RNA, 19 nt, Artificial Sequence
  Description of Artificial Sequence: Synthetic oligonucleotide
  Sense strand starting at position 1688 of SEQ ID NO: 915015
cuggguauuaaaugagagu

SEQ ID NO: 1047247 - RNA, 19 nt, Artificial Sequence
  Description of Artificial Sequence: Synthetic oligonucleotide
  Antisense strand to SEQ ID NO: 1047246
acucucauuuaauacccag

SEQ ID NO: 1047248 - RNA, 19 nt, Artificial Sequence
  Description of Artificial Sequence: Synthetic oligonucleotide
  Sense strand starting at position 2102 of SEQ ID NO: 915015
ugaugagucucauccauug

SEQ ID NO: 1047249 - RNA, 19 nt, Artificial Sequence
  Description of Artificial Sequence: Synthetic oligonucleotide
  Antisense strand to SEQ ID NO: 1047248
caauggaugagacucauca

SEQ ID NO: 1047250 - RNA, 19 nt, Artificial Sequence
  Description of Artificial Sequence: Synthetic oligonucleotide
  Sense strand starting at position 2109 of SEQ ID NO: 915015
ucucauccauugguuagaa

SEQ ID NO: 1047251 - RNA, 19 nt, Artificial Sequence
  Description of Artificial Sequence: Synthetic oligonucleotide
  Antisense strand to SEQ ID NO: 1047250
uucuaaccaauggaugaga

SEQ ID NO: 1047252 - RNA, 19 nt, Artificial Sequence
  Description of Artificial Sequence: Synthetic oligonucleotide
  Sense strand starting at position 2110 of SEQ ID NO: 915015
cucauccauugguuagaau

SEQ ID NO: 1047253 - RNA, 19 nt, Artificial Sequence
  Description of Artificial Sequence: Synthetic oligonucleotide
  Antisense strand to SEQ ID NO: 1047252
auucuaaccaauggaugag

SEQ ID NO: 1047254 - RNA, 19 nt, Artificial Sequence
  Description of Artificial Sequence: Synthetic oligonucleotide
  Sense strand starting at position 2548 of SEQ ID NO: 915015
uggcuaaaucuaggaguca

SEQ ID NO: 1047255 - RNA, 19 nt, Artificial Sequence
  Description of Artificial Sequence: Synthetic oligonucleotide
  Antisense strand to SEQ ID NO: 1047254
ugacuccuagauuuagcca

SEQ ID NO: 1047256 - RNA, 19 nt, Artificial Sequence
  Description of Artificial Sequence: Synthetic oligonucleotide
  Sense strand starting at position 2914 of SEQ ID NO: 915015
gaaucucaccacuggugau

SEQ ID NO: 1047257 - RNA, 19 nt, Artificial Sequence
  Description of Artificial Sequence: Synthetic oligonucleotide
  Antisense strand to SEQ ID NO: 1047256
aucaccaguggugagauuc

SEQ ID NO: 1047258 - RNA, 19 nt, Artificial Sequence
  Description of Artificial Sequence: Synthetic oligonucleotide
  Sense strand starting at position 2935 of SEQ ID NO: 915015
aguacaaacuccuuaucga

SEQ ID NO: 1047259 - RNA, 19 nt, Artificial Sequence
  Description of Artificial Sequence: Synthetic oligonucleotide
  Antisense strand to SEQ ID NO: 1047258
ucgauaaggaguuuguacu

SEQ ID NO: 1047260 - RNA, 19 nt, Artificial Sequence
  Description of Artificial Sequence: Synthetic oligonucleotide
  Sense strand starting at position 2936 of SEQ ID NO: 915015
guacaaacuccuuaucgaa

SEQ ID NO: 1047261 - RNA, 19 nt, Artificial Sequence
  Description of Artificial Sequence: Synthetic oligonucleotide
  Antisense strand to SEQ ID NO: 1047260
uucgauaaggaguuuguac

SEQ ID NO: 1047262 - RNA, 19 nt, Artificial Sequence
  Description of Artificial Sequence: Synthetic oligonucleotide
  Sense strand starting at position 3297 of SEQ ID NO: 915015
uggaauauuugguauccau

SEQ ID NO: 1047263 - RNA, 19 nt, Artificial Sequence
  Description of Artificial Sequence: Synthetic oligonucleotide
  Antisense strand to SEQ ID NO: 1047262
auggauaccaaauauucca

SEQ ID NO: 1047264 - RNA, 19 nt, Artificial Sequence
  Description of Artificial Sequence: Synthetic oligonucleotide
  Sense strand starting at position 3311 of SEQ ID NO: 915015
uccauauguuuauuugcua

SEQ ID NO: 1047265 - RNA, 19 nt, Artificial Sequence
  Description of Artificial Sequence: Synthetic oligonucleotide
  Antisense strand to SEQ ID NO: 1047264
uagcaaauaaacauaugga

SEQ ID NO: 1047266 - RNA, 19 nt, Artificial Sequence
  Description of Artificial Sequence: Synthetic oligonucleotide
  Sense strand starting at position 3471 of SEQ ID NO: 915015
gugccuagaauguaacaga

SEQ ID NO: 1047267 - RNA, 19 nt, Artificial Sequence
  Description of Artificial Sequence: Synthetic oligonucleotide
  Antisense strand to SEQ ID NO: 1047266
ucuguuacauucuaggcac

SEQ ID NO: 1047268 - RNA, 19 nt, Artificial Sequence
  Description of Artificial Sequence: Synthetic oligonucleotide
  Sense strand starting at position 3526 of SEQ ID NO: 915015
ggaggaauggugcauccuu

SEQ ID NO: 1047269 - RNA, 19 nt, Artificial Sequence
  Description of Artificial Sequence: Synthetic oligonucleotide
  Antisense strand to SEQ ID NO: 1047268
aaggaugcaccauuccucc

SEQ ID NO: 1047270 - RNA, 19 nt, Artificial Sequence
  Description of Artificial Sequence: Synthetic oligonucleotide
  Sense strand starting at position 3627 of SEQ ID NO: 915015
ucuuacagauuguuacuua

SEQ ID NO: 1047271 - RNA, 19 nt, Artificial Sequence
  Description of Artificial Sequence: Synthetic oligonucleotide
  Antisense strand to SEQ ID NO: 1047270
uaaguaacaaucuguaaga

SEQ ID NO: 1047272 - RNA, 19 nt, Artificial Sequence
  Description of Artificial Sequence: Synthetic oligonucleotide
  Sense strand starting at position 3631 of SEQ ID NO: 915015
acagauuguuacuuaugac

SEQ ID NO: 1047273 - RNA, 19 nt, Artificial Sequence
  Description of Artificial Sequence: Synthetic oligonucleotide
  Antisense strand to SEQ ID NO: 1047272
gucauaaguaacaaucugu

SEQ ID NO: 1047274 - RNA, 19 nt, Artificial Sequence
  Description of Artificial Sequence: Synthetic oligonucleotide
  Sense strand starting at position 3646 of SEQ ID NO: 915015
ugacuuugucaguaaguau

SEQ ID NO: 1047275 - RNA, 19 nt, Artificial Sequence
  Description of Artificial Sequence: Synthetic oligonucleotide
  Antisense strand to SEQ ID NO: 1047274
auacuuacugacaaaguca

SEQ ID NO: 1047276 - RNA, 19 nt, Artificial Sequence
  Description of Artificial Sequence: Synthetic oligonucleotide
  Sense strand starting at position 3663 of SEQ ID NO: 915015
auagacauguuugucaaag

SEQ ID NO: 1047277 - RNA, 19 nt, Artificial Sequence
  Description of Artificial Sequence: Synthetic oligonucleotide
  Antisense strand to SEQ ID NO: 1047276
cuuugacaaacaugucuau

SEQ ID NO: 1047278 - RNA, 19 nt, Artificial Sequence
  Description of Artificial Sequence: Synthetic oligonucleotide
  Sense strand starting at position 3664 of SEQ ID NO: 915015
uagacauguuugucaaaga

SEQ ID NO: 1047279 - RNA, 19 nt, Artificial Sequence
  Description of Artificial Sequence: Synthetic oligonucleotide
  Antisense strand to SEQ ID NO: 1047278
ucuuugacaaacaugucua

SEQ ID NO: 1047280 - RNA, 19 nt, Artificial Sequence
  Description of Artificial Sequence: Synthetic oligonucleotide
  Sense strand starting at position 3793 of SEQ ID NO: 915015
ugaugagugcagugagaaa

SEQ ID NO: 1047281 - RNA, 19 nt, Artificial Sequence
  Description of Artificial Sequence: Synthetic oligonucleotide
  Antisense strand to SEQ ID NO: 1047280
uuucucacugcacucauca

SEQ ID NO: 1047282 - RNA, 19 nt, Artificial Sequence
  Description of Artificial Sequence: Synthetic oligonucleotide
  Sense strand starting at position 3914 of SEQ ID NO: 915015
aauggugaaucaguauuaa

SEQ ID NO: 1047283 - RNA, 19 nt, Artificial Sequence
  Description of Artificial Sequence: Synthetic oligonucleotide
  Antisense strand to SEQ ID NO: 1047282
uuaauacugauucaccauu

SEQ ID NO: 1047284 - RNA, 19 nt, Artificial Sequence
  Description of Artificial Sequence: Synthetic oligonucleotide
  Sense strand starting at position 71 of SEQ ID NO: 915016
guccucauacucuaaaugu

SEQ ID NO: 1047285 - RNA, 19 nt, Artificial Sequence
  Description of Artificial Sequence: Synthetic oligonucleotide
  Antisense strand to SEQ ID NO: 1047284
acauuuagaguaugaggac

SEQ ID NO: 1047286 - RNA, 19 nt, Artificial Sequence
  Description of Artificial Sequence: Synthetic oligonucleotide
  Sense strand starting at position 254 of SEQ ID NO: 915016
gaaauaccugcagggacau

SEQ ID NO: 1047287 - RNA, 19 nt, Artificial Sequence
  Description of Artificial Sequence: Synthetic oligonucleotide
  Antisense strand to SEQ ID NO: 1047286
augucccugcagguauuuc

SEQ ID NO: 1047288 - RNA, 19 nt, Artificial Sequence
  Description of Artificial Sequence: Synthetic oligonucleotide
  Sense strand starting at position 313 of SEQ ID NO: 915016
ggaagauacucacuggcau

SEQ ID NO: 1047289 - RNA, 19 nt, Artificial Sequence
  Description of Artificial Sequence: Synthetic oligonucleotide
  Antisense strand to SEQ ID NO: 1047288
augccagugaguaucuucc

SEQ ID NO: 1047290 - RNA, 19 nt, Artificial Sequence
  Description of Artificial Sequence: Synthetic oligonucleotide
  Sense strand starting at position 344 of SEQ ID NO: 915016
ggcuguugaggcuacuaga

SEQ ID NO: 1047291 - RNA, 19 nt, Artificial Sequence
  Description of Artificial Sequence: Synthetic oligonucleotide
  Antisense strand to SEQ ID NO: 1047290
ucuaguagccucaacagcc

SEQ ID NO: 1047292 - RNA, 19 nt, Artificial Sequence
  Description of Artificial Sequence: Synthetic oligonucleotide
  Sense strand starting at position 455 of SEQ ID NO: 915016
agcaguggaaauugaucau

SEQ ID NO: 1047293 - RNA, 19 nt, Artificial Sequence
  Description of Artificial Sequence: Synthetic oligonucleotide
  Antisense strand to SEQ ID NO: 1047292
augaucaauuuccacugcu

SEQ ID NO: 1047294 - RNA, 19 nt, Artificial Sequence
  Description of Artificial Sequence: Synthetic oligonucleotide
  Sense strand starting at position 466 of SEQ ID NO: 915016
uugaucaucugggaacaga

SEQ ID NO: 1047295 - RNA, 19 nt, Artificial Sequence
  Description of Artificial Sequence: Synthetic oligonucleotide
  Antisense strand to SEQ ID NO: 1047294
ucuguucccagaugaucaa

SEQ ID NO: 1047296 - RNA, 19 nt, Artificial Sequence
  Description of Artificial Sequence: Synthetic oligonucleotide
  Sense strand starting at position 606 of SEQ ID NO: 915016
gagacagaauaguaaaguu

SEQ ID NO: 1047297 - RNA, 19 nt, Artificial Sequence
  Description of Artificial Sequence: Synthetic oligonucleotide
  Antisense strand to SEQ ID NO: 1047296
aacuuuacuauucugucuc

SEQ ID NO: 1047298 - RNA, 19 nt, Artificial Sequence
  Description of Artificial Sequence: Synthetic oligonucleotide
  Sense strand starting at position 614 of SEQ ID NO: 915016
auaguaaaguuccugcuaa

SEQ ID NO: 1047299 - RNA, 19 nt, Artificial Sequence
  Description of Artificial Sequence: Synthetic oligonucleotide
  Antisense strand to SEQ ID NO: 1047298
uuagcaggaacuuuacuau

SEQ ID NO: 1047300 - RNA, 19 nt, Artificial Sequence
  Description of Artificial Sequence: Synthetic oligonucleotide
  Sense strand starting at position 676 of SEQ ID NO: 915016
cgaauaugaauggguacuu

SEQ ID NO: 1047301 - RNA, 19 nt, Artificial Sequence
  Description of Artificial Sequence: Synthetic oligonucleotide
  Antisense strand to SEQ ID NO: 1047300
aaguacccauucauauucg

SEQ ID NO: 1047302 - RNA, 19 nt, Artificial Sequence
  Description of Artificial Sequence: Synthetic oligonucleotide
  Sense strand starting at position 681 of SEQ ID NO: 915016
augaauggguacuuaguau

SEQ ID NO: 1047303 - RNA, 19 nt, Artificial Sequence
  Description of Artificial Sequence: Synthetic oligonucleotide
  Antisense strand to SEQ ID NO: 1047302
auacuaaguacccauucau

SEQ ID NO: 1047304 - RNA, 19 nt, Artificial Sequence
  Description of Artificial Sequence: Synthetic oligonucleotide
  Sense strand starting at position 723 of SEQ ID NO: 915016
uuagaaaccucagaagaga

SEQ ID NO: 1047305 - RNA, 19 nt, Artificial Sequence
  Description of Artificial Sequence: Synthetic oligonucleotide
  Antisense strand to SEQ ID NO: 1047304
ucucuucugagguuucuaa

SEQ ID NO: 1047306 - RNA, 19 nt, Artificial Sequence
  Description of Artificial Sequence: Synthetic oligonucleotide
  Sense strand starting at position 761 of SEQ ID NO: 915016
gagggauucugcuccacuc

SEQ ID NO: 1047307 - RNA, 19 nt, Artificial Sequence
  Description of Artificial Sequence: Synthetic oligonucleotide
  Antisense strand to SEQ ID NO: 1047306
gaguggagcagaaucccuc

SEQ ID NO: 1047308 - RNA, 19 nt, Artificial Sequence
  Description of Artificial Sequence: Synthetic oligonucleotide
  Sense strand starting at position 801 of SEQ ID NO: 915016
cgucuaaccagguaaggau

SEQ ID NO: 1047309 - RNA, 19 nt, Artificial Sequence
  Description of Artificial Sequence: Synthetic oligonucleotide
  Antisense strand to SEQ ID NO: 1047308
auccuuaccugguuagacg

SEQ ID NO: 1047310 - RNA, 19 nt, Artificial Sequence
  Description of Artificial Sequence: Synthetic oligonucleotide
  Sense strand starting at position 841 of SEQ ID NO: 915016
agacguaaucuguaaggga

SEQ ID NO: 1047311 - RNA, 19 nt, Artificial Sequence
  Description of Artificial Sequence: Synthetic oligonucleotide
  Antisense strand to SEQ ID NO: 1047310
ucccuuacagauuacgucu

SEQ ID NO: 1047312 - RNA, 19 nt, Artificial Sequence
  Description of Artificial Sequence: Synthetic oligonucleotide
  Sense strand starting at position 920 of SEQ ID NO: 915016
agagaaaguuggccugagu

SEQ ID NO: 1047313 - RNA, 19 nt, Artificial Sequence
  Description of Artificial Sequence: Synthetic oligonucleotide
  Antisense strand to SEQ ID NO: 1047312
acucaggccaacuuucucu

SEQ ID NO: 1047314 - RNA, 19 nt, Artificial Sequence
  Description of Artificial Sequence: Synthetic oligonucleotide
  Sense strand starting at position 923 of SEQ ID NO: 915016
gaaaguuggccugagugga

SEQ ID NO: 1047315 - RNA, 19 nt, Artificial Sequence
  Description of Artificial Sequence: Synthetic oligonucleotide
  Antisense strand to SEQ ID NO: 1047314
uccacucaggccaacuuuc

SEQ ID NO: 1047316 - RNA, 19 nt, Artificial Sequence
  Description of Artificial Sequence: Synthetic oligonucleotide
  Sense strand starting at position 1113 of SEQ ID NO: 915016
ccacaacucagcgaugagu

SEQ ID NO: 1047317 - RNA, 19 nt, Artificial Sequence
  Description of Artificial Sequence: Synthetic oligonucleotide
  Antisense strand to SEQ ID NO: 1047316
acucaucgcugaguugugg

SEQ ID NO: 1047318 - RNA, 19 nt, Artificial Sequence
  Description of Artificial Sequence: Synthetic oligonucleotide
  Sense strand starting at position 1138 of SEQ ID NO: 915016
ccagucgcggcgaaguaau

SEQ ID NO: 1047319 - RNA, 19 nt, Artificial Sequence
  Description of Artificial Sequence: Synthetic oligonucleotide
  Antisense strand to SEQ ID NO: 1047318
auuacuucgccgcgacugg

SEQ ID NO: 1047320 - RNA, 19 nt, Artificial Sequence
  Description of Artificial Sequence: Synthetic oligonucleotide
  Sense strand starting at position 1149 of SEQ ID NO: 915016
gaaguaauuguccgcucua

SEQ ID NO: 1047321 - RNA, 19 nt, Artificial Sequence
  Description of Artificial Sequence: Synthetic oligonucleotide
  Antisense strand to SEQ ID NO: 1047320
uagagcggacaauuacuuc

SEQ ID NO: 1047322 - RNA, 19 nt, Artificial Sequence
  Description of Artificial Sequence: Synthetic oligonucleotide
  Sense strand starting at position 1150 of SEQ ID NO: 915016
aaguaauuguccgcucuag

SEQ ID NO: 1047323 - RNA, 19 nt, Artificial Sequence
  Description of Artificial Sequence: Synthetic oligonucleotide
  Antisense strand to SEQ ID NO: 1047322
cuagagcggacaauuacuu

SEQ ID NO: 1047324 - RNA, 19 nt, Artificial Sequence
  Description of Artificial Sequence: Synthetic oligonucleotide
  Sense strand starting at position 1201 of SEQ ID NO: 915016
acaauaacgccugggaaga

SEQ ID NO: 1047325 - RNA, 19 nt, Artificial Sequence
  Description of Artificial Sequence: Synthetic oligonucleotide
  Antisense strand to SEQ ID NO: 1047324
ucuucccaggcguuauugu

SEQ ID NO: 1047326 - RNA, 19 nt, Artificial Sequence
  Description of Artificial Sequence: Synthetic oligonucleotide
  Sense strand starting at position 1288 of SEQ ID NO: 915016
ccugucagcuccuucggaa

SEQ ID NO: 1047327 - RNA, 19 nt, Artificial Sequence
  Description of Artificial Sequence: Synthetic oligonucleotide
  Antisense strand to SEQ ID NO: 1047326
uuccgaaggagcugacagg

SEQ ID NO: 1047328 - RNA, 19 nt, Artificial Sequence
  Description of Artificial Sequence: Synthetic oligonucleotide
  Sense strand starting at position 2061 of SEQ ID NO: 915016
cggcuacuuccggaagaag

SEQ ID NO: 1047329 - RNA, 19 nt, Artificial Sequence
  Description of Artificial Sequence: Synthetic oligonucleotide
  Antisense strand to SEQ ID NO: 1047328
cuucuuccggaaguagccg

SEQ ID NO: 1047330 - RNA, 19 nt, Artificial Sequence
  Description of Artificial Sequence: Synthetic oligonucleotide
  Sense strand starting at position 2514 of SEQ ID NO: 915016
cgggaaugucucgaaguca

SEQ ID NO: 1047331 - RNA, 19 nt, Artificial Sequence
  Description of Artificial Sequence: Synthetic oligonucleotide
  Antisense strand to SEQ ID NO: 1047330
ugacuucgagacauucccg

SEQ ID NO: 1047332 - RNA, 19 nt, Artificial Sequence
  Description of Artificial Sequence: Synthetic oligonucleotide
  Sense strand starting at position 2515 of SEQ ID NO: 915016
gggaaugucucgaagucag

SEQ ID NO: 1047333 - RNA, 19 nt, Artificial Sequence
  Description of Artificial Sequence: Synthetic oligonucleotide
  Antisense strand to SEQ ID NO: 1047332
cugacuucgagacauuccc

SEQ ID NO: 1047334 - RNA, 19 nt, Artificial Sequence
  Description of Artificial Sequence: Synthetic oligonucleotide
  Sense strand starting at position 2945 of SEQ ID NO: 915016
agagaugcacuuugcagaa

SEQ ID NO: 1047335 - RNA, 19 nt, Artificial Sequence
  Description of Artificial Sequence: Synthetic oligonucleotide
  Antisense strand to SEQ ID NO: 1047334
uucugcaaagugcaucucu

SEQ ID NO: 1047336 - RNA, 19 nt, Artificial Sequence
  Description of Artificial Sequence: Synthetic oligonucleotide
  Sense strand starting at position 3351 of SEQ ID NO: 915016
cccggucucggcucucaua

SEQ ID NO: 1047337 - RNA, 19 nt, Artificial Sequence
  Description of Artificial Sequence: Synthetic oligonucleotide
  Antisense strand to SEQ ID NO: 1047336
uaugagagccgagaccggg

SEQ ID NO: 1047338 - RNA, 19 nt, Artificial Sequence
  Description of Artificial Sequence: Synthetic oligonucleotide
  Sense strand starting at position 3360 of SEQ ID NO: 915016
ggcucucauagcgauucuu

SEQ ID NO: 1047339 - RNA, 19 nt, Artificial Sequence
  Description of Artificial Sequence: Synthetic oligonucleotide
  Antisense strand to SEQ ID NO: 1047338
aagaaucgcuaugagagcc

SEQ ID NO: 1047340 - RNA, 19 nt, Artificial Sequence
  Description of Artificial Sequence: Synthetic oligonucleotide
  Sense strand starting at position 3481 of SEQ ID NO: 915016
uggaaagacuggcaugaaa

SEQ ID NO: 1047341 - RNA, 19 nt, Artificial Sequence
  Description of Artificial Sequence: Synthetic oligonucleotide
  Antisense strand to SEQ ID NO: 1047340
uuucaugccagucuuucca

SEQ ID NO: 1047342 - RNA, 19 nt, Artificial Sequence
  Description of Artificial Sequence: Synthetic oligonucleotide
  Sense strand starting at position 3512 of SEQ ID NO: 915016
augugaucuggucaccgua

SEQ ID NO: 1047343 - RNA, 19 nt, Artificial Sequence
  Description of Artificial Sequence: Synthetic oligonucleotide
  Antisense strand to SEQ ID NO: 1047342
uacggugaccagaucacau

SEQ ID NO: 1047344 - RNA, 19 nt, Artificial Sequence
  Description of Artificial Sequence: Synthetic oligonucleotide
  Sense strand starting at position 3515 of SEQ ID NO: 915016
ugaucuggucaccguagua

SEQ ID NO: 1047345 - RNA, 19 nt, Artificial Sequence
  Description of Artificial Sequence: Synthetic oligonucleotide
  Antisense strand to SEQ ID NO: 1047344
uacuacggugaccagauca

SEQ ID NO: 1047346 - RNA, 19 nt, Artificial Sequence
  Description of Artificial Sequence: Synthetic oligonucleotide
  Sense strand starting at position 3580 of SEQ ID NO: 915016
cugagcucuggcugaaguu

SEQ ID NO: 1047347 - RNA, 19 nt, Artificial Sequence
  Description of Artificial Sequence: Synthetic oligonucleotide
  Antisense strand to SEQ ID NO: 1047346
aacuucagccagagcucag

SEQ ID NO: 1047348 - RNA, 19 nt, Artificial Sequence
  Description of Artificial Sequence: Synthetic oligonucleotide
  Sense strand starting at position 3614 of SEQ ID NO: 915016
aguuccuccucccuagaua

SEQ ID NO: 1047349 - RNA, 19 nt, Artificial Sequence
  Description of Artificial Sequence: Synthetic oligonucleotide
  Antisense strand to SEQ ID NO: 1047348
uaucuagggaggaggaacu

SEQ ID NO: 1047350 - RNA, 19 nt, Artificial Sequence
  Description of Artificial Sequence: Synthetic oligonucleotide
  Sense strand starting at position 3633 of SEQ ID NO: 915016
agucaagugcuccacacuu

SEQ ID NO: 1047351 - RNA, 19 nt, Artificial Sequence
  Description of Artificial Sequence: Synthetic oligonucleotide
  Antisense strand to SEQ ID NO: 1047350
aaguguggagcacuugacu

SEQ ID NO: 1047352 - RNA, 19 nt, Artificial Sequence
  Description of Artificial Sequence: Synthetic oligonucleotide
  Sense strand starting at position 3644 of SEQ ID NO: 915016
ccacacuugcccugagaaa

SEQ ID NO: 1047353 - RNA, 19 nt, Artificial Sequence
  Description of Artificial Sequence: Synthetic oligonucleotide
  Antisense strand to SEQ ID NO: 1047352
uuucucagggcaagugugg

SEQ ID NO: 1047354 - RNA, 19 nt, Artificial Sequence
  Description of Artificial Sequence: Synthetic oligonucleotide
  Sense strand starting at position 3714 of SEQ ID NO: 915016
caagacauggugugaaacu

SEQ ID NO: 1047355 - RNA, 19 nt, Artificial Sequence
  Description of Artificial Sequence: Synthetic oligonucleotide
  Antisense strand to SEQ ID NO: 1047354
aguuucacaccaugucuug

SEQ ID NO: 1047356 - RNA, 19 nt, Artificial Sequence
  Description of Artificial Sequence: Synthetic oligonucleotide
  Sense strand starting at position 3723 of SEQ ID NO: 915016
gugugaaacuaguuguuuc

SEQ ID NO: 1047357 - RNA, 19 nt, Artificial Sequence
  Description of Artificial Sequence: Synthetic oligonucleotide
  Antisense strand to SEQ ID NO: 1047356
gaaacaacuaguuucacac

SEQ ID NO: 1047358 - RNA, 19 nt, Artificial Sequence
  Description of Artificial Sequence: Synthetic oligonucleotide
  Sense strand starting at position 3726 of SEQ ID NO: 915016
ugaaacuaguuguuuccaa

SEQ ID NO: 1047359 - RNA, 19 nt, Artificial Sequence
  Description of Artificial Sequence: Synthetic oligonucleotide
  Antisense strand to SEQ ID NO: 1047358
uuggaaacaacuaguuuca

SEQ ID NO: 1047360 - RNA, 19 nt, Artificial Sequence
  Description of Artificial Sequence: Synthetic oligonucleotide
  Sense strand starting at position 3879 of SEQ ID NO: 915016
ugccacucacaguaaagaa

SEQ ID NO: 1047361 - RNA, 19 nt, Artificial Sequence
  Description of Artificial Sequence: Synthetic oligonucleotide
  Antisense strand to SEQ ID NO: 1047360
uucuuuacugugaguggca

SEQ ID NO: 1047362 - RNA, 19 nt, Artificial Sequence
  Description of Artificial Sequence: Synthetic oligonucleotide
  Sense strand starting at position 3945 of SEQ ID NO: 915016
cagucaagaugagugauga

SEQ ID NO: 1047363 - RNA, 19 nt, Artificial Sequence
  Description of Artificial Sequence: Synthetic oligonucleotide
  Antisense strand to SEQ ID NO: 1047362
ucaucacucaucuugacug

SEQ ID NO: 1047364 - RNA, 19 nt, Artificial Sequence
  Description of Artificial Sequence: Synthetic oligonucleotide
  Sense strand starting at position 80 of SEQ ID NO: 915017
aacugagcauuugggaauu

SEQ ID NO: 1047365 - RNA, 19 nt, Artificial Sequence
  Description of Artificial Sequence: Synthetic oligonucleotide
  Antisense strand to SEQ ID NO: 1047364
aauucccaaaugcucaguu

SEQ ID NO: 1047366 - RNA, 19 nt, Artificial Sequence
  Description of Artificial Sequence: Synthetic oligonucleotide
  Sense strand starting at position 173 of SEQ ID NO: 915017
gggcaagagcucugaacau

SEQ ID NO: 1047367 - RNA, 19 nt, Artificial Sequence
  Description of Artificial Sequence: Synthetic oligonucleotide
  Antisense strand to SEQ ID NO: 1047366
auguucagagcucuugccc

SEQ ID NO: 1047368 - RNA, 19 nt, Artificial Sequence
  Description of Artificial Sequence: Synthetic oligonucleotide
  Sense strand starting at position 204 of SEQ ID NO: 915017
ccgucucccagagaaguau

SEQ ID NO: 1047369 - RNA, 19 nt, Artificial Sequence
  Description of Artificial Sequence: Synthetic oligonucleotide
  Antisense strand to SEQ ID NO: 1047368
auacuucucugggagacgg

SEQ ID NO: 1047370 - RNA, 19 nt, Artificial Sequence
  Description of Artificial Sequence: Synthetic oligonucleotide
  Sense strand starting at position 212 of SEQ ID NO: 915017
cagagaaguauugaguagu

SEQ ID NO: 1047371 - RNA, 19 nt, Artificial Sequence
  Description of Artificial Sequence: Synthetic oligonucleotide
  Antisense strand to SEQ ID NO: 1047370
acuacucaauacuucucug

SEQ ID NO: 1047372 - RNA, 19 nt, Artificial Sequence
  Description of Artificial Sequence: Synthetic oligonucleotide
  Sense strand starting at position 220 of SEQ ID NO: 915017
uauugaguaguggguucuu

SEQ ID NO: 1047373 - RNA, 19 nt, Artificial Sequence
  Description of Artificial Sequence: Synthetic oligonucleotide
  Antisense strand to SEQ ID NO: 1047372
aagaacccacuacucaaua

SEQ ID NO: 1047374 - RNA, 19 nt, Artificial Sequence
  Description of Artificial Sequence: Synthetic oligonucleotide
  Sense strand starting at position 622 of SEQ ID NO: 915017
aguacauucuaaucagucu

SEQ ID NO: 1047375 - RNA, 19 nt, Artificial Sequence
  Description of Artificial Sequence: Synthetic oligonucleotide
  Antisense strand to SEQ ID NO: 1047374
agacugauuagaauguacu

SEQ ID NO: 1047376 - RNA, 19 nt, Artificial Sequence
  Description of Artificial Sequence: Synthetic oligonucleotide
  Sense strand starting at position 630 of SEQ ID NO: 915017
cuaaucagucuuuguucua

SEQ ID NO: 1047377 - RNA, 19 nt, Artificial Sequence
  Description of Artificial Sequence: Synthetic oligonucleotide
  Antisense strand to SEQ ID NO: 1047376
uagaacaaagacugauuag

SEQ ID NO: 1047378 - RNA, 19 nt, Artificial Sequence
  Description of Artificial Sequence: Synthetic oligonucleotide
  Sense strand starting at position 633 of SEQ ID NO: 915017
aucagucuuuguucuaagu

SEQ ID NO: 1047379 - RNA, 19 nt, Artificial Sequence
  Description of Artificial Sequence: Synthetic oligonucleotide
  Antisense strand to SEQ ID NO: 1047378
acuuagaacaaagacugau

SEQ ID NO: 1047380 - RNA, 19 nt, Artificial Sequence
  Description of Artificial Sequence: Synthetic oligonucleotide
  Sense strand starting at position 702 of SEQ ID NO: 915017
caggucuacucagcaagaa

SEQ ID NO: 1047381 - RNA, 19 nt, Artificial Sequence
  Description of Artificial Sequence: Synthetic oligonucleotide
  Antisense strand to SEQ ID NO: 1047380
uucuugcugaguagaccug

SEQ ID NO: 1047382 - RNA, 19 nt, Artificial Sequence
  Description of Artificial Sequence: Synthetic oligonucleotide
  Sense strand starting at position 766 of SEQ ID NO: 915017
ucuagugucuugccuauuu

SEQ ID NO: 1047383 - RNA, 19 nt, Artificial Sequence
  Description of Artificial Sequence: Synthetic oligonucleotide
  Antisense strand to SEQ ID NO: 1047382
aaauaggcaagacacuaga

SEQ ID NO: 1047384 - RNA, 19 nt, Artificial Sequence
  Description of Artificial Sequence: Synthetic oligonucleotide
  Sense strand starting at position 846 of SEQ ID NO: 915017
gcaugagguaauuauguca

SEQ ID NO: 1047385 - RNA, 19 nt, Artificial Sequence
  Description of Artificial Sequence: Synthetic oligonucleotide
  Antisense strand to SEQ ID NO: 1047384
ugacauaauuaccucaugc

SEQ ID NO: 1047386 - RNA, 19 nt, Artificial Sequence
  Description of Artificial Sequence: Synthetic oligonucleotide
  Sense strand starting at position 849 of SEQ ID NO: 915017
ugagguaauuaugucaacu

SEQ ID NO: 1047387 - RNA, 19 nt, Artificial Sequence
  Description of Artificial Sequence: Synthetic oligonucleotide
  Antisense strand to SEQ ID NO: 1047386
aguugacauaauuaccuca

SEQ ID NO: 1047388 - RNA, 19 nt, Artificial Sequence
  Description of Artificial Sequence: Synthetic oligonucleotide
  Sense strand starting at position 898 of SEQ ID NO: 915017
ugcccauuacagggauaua

SEQ ID NO: 1047389 - RNA, 19 nt, Artificial Sequence
  Description of Artificial Sequence: Synthetic oligonucleotide
  Antisense strand to SEQ ID NO: 1047388
uauaucccuguaaugggca

SEQ ID NO: 1047390 - RNA, 19 nt, Artificial Sequence
  Description of Artificial Sequence: Synthetic oligonucleotide
  Sense strand starting at position 954 of SEQ ID NO: 915017
ggccuaccugcaugugaau

SEQ ID NO: 1047391 - RNA, 19 nt, Artificial Sequence
  Description of Artificial Sequence: Synthetic oligonucleotide
  Antisense strand to SEQ ID NO: 1047390
auucacaugcagguaggcc

SEQ ID NO: 1047392 - RNA, 19 nt, Artificial Sequence
  Description of Artificial Sequence: Synthetic oligonucleotide
  Sense strand starting at position 998 of SEQ ID NO: 915017
gacaguagauuagaaacua

SEQ ID NO: 1047393 - RNA, 19 nt, Artificial Sequence
  Description of Artificial Sequence: Synthetic oligonucleotide
  Antisense strand to SEQ ID NO: 1047392
uaguuucuaaucuacuguc

SEQ ID NO: 1047394 - RNA, 19 nt, Artificial Sequence
  Description of Artificial Sequence: Synthetic oligonucleotide
  Sense strand starting at position 1119 of SEQ ID NO: 915017
cucaaugcauccuuccgaa

SEQ ID NO: 1047395 - RNA, 19 nt, Artificial Sequence
  Description of Artificial Sequence: Synthetic oligonucleotide
  Antisense strand to SEQ ID NO: 1047394
uucggaaggaugcauugag

SEQ ID NO: 1047396 - RNA, 19 nt, Artificial Sequence
  Description of Artificial Sequence: Synthetic oligonucleotide
  Sense strand starting at position 1171 of SEQ ID NO: 915017
gaaugagcuccuuguguuu

SEQ ID NO: 1047397 - RNA, 19 nt, Artificial Sequence
  Description of Artificial Sequence: Synthetic oligonucleotide
  Antisense strand to SEQ ID NO: 1047396
aaacacaaggagcucauuc

SEQ ID NO: 1047398 - RNA, 19 nt, Artificial Sequence
  Description of Artificial Sequence: Synthetic oligonucleotide
  Sense strand starting at position 1180 of SEQ ID NO: 915017
ccuuguguuucucucagua

SEQ ID NO: 1047399 - RNA, 19 nt, Artificial Sequence
  Description of Artificial Sequence: Synthetic oligonucleotide
  Antisense strand to SEQ ID NO: 1047398
uacugagagaaacacaagg

SEQ ID NO: 1047400 - RNA, 19 nt, Artificial Sequence
  Description of Artificial Sequence: Synthetic oligonucleotide
  Sense strand starting at position 1351 of SEQ ID NO: 915017
aguaguggugaaugugaau

SEQ ID NO: 1047401 - RNA, 19 nt, Artificial Sequence
  Description of Artificial Sequence: Synthetic oligonucleotide
  Antisense strand to SEQ ID NO: 1047400
auucacauucaccacuacu

SEQ ID NO: 1047402 - RNA, 19 nt, Artificial Sequence
  Description of Artificial Sequence: Synthetic oligonucleotide
  Sense strand starting at position 1612 of SEQ ID NO: 915017
gcagcaucucgggagaaug

SEQ ID NO: 1047403 - RNA, 19 nt, Artificial Sequence
  Description of Artificial Sequence: Synthetic oligonucleotide
  Antisense strand to SEQ ID NO: 1047402
cauucucccgagaugcugc

SEQ ID NO: 1047404 - RNA, 19 nt, Artificial Sequence
  Description of Artificial Sequence: Synthetic oligonucleotide
  Sense strand starting at position 1714 of SEQ ID NO: 915017
acgccucauaccuggauga

SEQ ID NO: 1047405 - RNA, 19 nt, Artificial Sequence
  Description of Artificial Sequence: Synthetic oligonucleotide
  Antisense strand to SEQ ID NO: 1047404
ucauccagguaugaggcgu

SEQ ID NO: 1047406 - RNA, 19 nt, Artificial Sequence
  Description of Artificial Sequence: Synthetic oligonucleotide
  Sense strand starting at position 2132 of SEQ ID NO: 915017
gaagaaugggagugucagu

SEQ ID NO: 1047407 - RNA, 19 nt, Artificial Sequence
  Description of Artificial Sequence: Synthetic oligonucleotide
  Antisense strand to SEQ ID NO: 1047406
acugacacucccauucuuc

SEQ ID NO: 1047408 - RNA, 19 nt, Artificial Sequence
  Description of Artificial Sequence: Synthetic oligonucleotide
  Sense strand starting at position 2281 of SEQ ID NO: 915017
gcaucagagccguaacagu

SEQ ID NO: 1047409 - RNA, 19 nt, Artificial Sequence
  Description of Artificial Sequence: Synthetic oligonucleotide
  Antisense strand to SEQ ID NO: 1047408
acuguuacggcucugaugc

SEQ ID NO: 1047410 - RNA, 19 nt, Artificial Sequence
  Description of Artificial Sequence: Synthetic oligonucleotide
  Sense strand starting at position 2295 of SEQ ID NO: 915017
acagucucgugacugacaa

SEQ ID NO: 1047411 - RNA, 19 nt, Artificial Sequence
  Description of Artificial Sequence: Synthetic oligonucleotide
  Antisense strand to SEQ ID NO: 1047410
uugucagucacgagacugu

SEQ ID NO: 1047412 - RNA, 19 nt, Artificial Sequence
  Description of Artificial Sequence: Synthetic oligonucleotide
  Sense strand starting at position 2296 of SEQ ID NO: 915017
cagucucgugacugacaaa

SEQ ID NO: 1047413 - RNA, 19 nt, Artificial Sequence
  Description of Artificial Sequence: Synthetic oligonucleotide
  Antisense strand to SEQ ID NO: 1047412
uuugucagucacgagacug

SEQ ID NO: 1047414 - RNA, 19 nt, Artificial Sequence
  Description of Artificial Sequence: Synthetic oligonucleotide
  Sense strand starting at position 2335 of SEQ ID NO: 915017
uaaugaauccgcuagcgag

SEQ ID NO: 1047415 - RNA, 19 nt, Artificial Sequence
  Description of Artificial Sequence: Synthetic oligonucleotide
  Antisense strand to SEQ ID NO: 1047414
cucgcuagcggauucauua

SEQ ID NO: 1047416 - RNA, 19 nt, Artificial Sequence
  Description of Artificial Sequence: Synthetic oligonucleotide
  Sense strand starting at position 2784 of SEQ ID NO: 915017
gucguagcauuaucacuga

SEQ ID NO: 1047417 - RNA, 19 nt, Artificial Sequence
  Description of Artificial Sequence: Synthetic oligonucleotide
  Antisense strand to SEQ ID NO: 1047416
ucagugauaaugcuacgac

SEQ ID NO: 1047418 - RNA, 19 nt, Artificial Sequence
  Description of Artificial Sequence: Synthetic oligonucleotide
  Sense strand starting at position 2787 of SEQ ID NO: 915017
guagcauuaucacugaaau

SEQ ID NO: 1047419 - RNA, 19 nt, Artificial Sequence
  Description of Artificial Sequence: Synthetic oligonucleotide
  Antisense strand to SEQ ID NO: 1047418
auuucagugauaaugcuac

SEQ ID NO: 1047420 - RNA, 19 nt, Artificial Sequence
  Description of Artificial Sequence: Synthetic oligonucleotide
  Sense strand starting at position 2824 of SEQ ID NO: 915017
augaaagcuccaugaguuc

SEQ ID NO: 1047421 - RNA, 19 nt, Artificial Sequence
  Description of Artificial Sequence: Synthetic oligonucleotide
  Antisense strand to SEQ ID NO: 1047420
gaacucauggagcuuucau

SEQ ID NO: 1047422 - RNA, 19 nt, Artificial Sequence
  Description of Artificial Sequence: Synthetic oligonucleotide
  Sense strand starting at position 2833 of SEQ ID NO: 915017
ccaugaguucaggaaccgu

SEQ ID NO: 1047423 - RNA, 19 nt, Artificial Sequence
  Description of Artificial Sequence: Synthetic oligonucleotide
  Antisense strand to SEQ ID NO: 1047422
acgguuccugaacucaugg

SEQ ID NO: 1047424 - RNA, 19 nt, Artificial Sequence
  Description of Artificial Sequence: Synthetic oligonucleotide
  Sense strand starting at position 3008 of SEQ ID NO: 915017
cagcucacguguucuauca

SEQ ID NO: 1047425 - RNA, 19 nt, Artificial Sequence
  Description of Artificial Sequence: Synthetic oligonucleotide
  Antisense strand to SEQ ID NO: 1047424
ugauagaacacgugagcug

SEQ ID NO: 1047426 - RNA, 19 nt, Artificial Sequence
  Description of Artificial Sequence: Synthetic oligonucleotide
  Sense strand starting at position 3036 of SEQ ID NO: 915017
uggugaaucugagcuugga

SEQ ID NO: 1047427 - RNA, 19 nt, Artificial Sequence
  Description of Artificial Sequence: Synthetic oligonucleotide
  Antisense strand to SEQ ID NO: 1047426
uccaagcucagauucacca

SEQ ID NO: 1047428 - RNA, 19 nt, Artificial Sequence
  Description of Artificial Sequence: Synthetic oligonucleotide
  Sense strand starting at position 3054 of SEQ ID NO: 915017
agcagagugaaguacugua

SEQ ID NO: 1047429 - RNA, 19 nt, Artificial Sequence
  Description of Artificial Sequence: Synthetic oligonucleotide
  Antisense strand to SEQ ID NO: 1047428
uacaguacuucacucugcu

SEQ ID NO: 1047430 - RNA, 19 nt, Artificial Sequence
  Description of Artificial Sequence: Synthetic oligonucleotide
  Sense strand starting at position 3085 of SEQ ID NO: 915017
ggauuuggauccuggcuuu

SEQ ID NO: 1047431 - RNA, 19 nt, Artificial Sequence
  Description of Artificial Sequence: Synthetic oligonucleotide
  Antisense strand to SEQ ID NO: 1047430
aaagccaggauccaaaucc

SEQ ID NO: 1047432 - RNA, 19 nt, Artificial Sequence
  Description of Artificial Sequence: Synthetic oligonucleotide
  Sense strand starting at position 3173 of SEQ ID NO: 915017
uguaucucucaggguuauu

SEQ ID NO: 1047433 - RNA, 19 nt, Artificial Sequence
  Description of Artificial Sequence: Synthetic oligonucleotide
  Antisense strand to SEQ ID NO: 1047432
aauaacccugagagauaca

SEQ ID NO: 1047434 - RNA, 19 nt, Artificial Sequence
  Description of Artificial Sequence: Synthetic oligonucleotide
  Sense strand starting at position 3184 of SEQ ID NO: 915017
ggguuauuaugagcauuaa

SEQ ID NO: 1047435 - RNA, 19 nt, Artificial Sequence
  Description of Artificial Sequence: Synthetic oligonucleotide
  Antisense strand to SEQ ID NO: 1047434
uuaaugcucauaauaaccc

SEQ ID NO: 1047436 - RNA, 19 nt, Artificial Sequence
  Description of Artificial Sequence: Synthetic oligonucleotide
  Sense strand starting at position 3185 of SEQ ID NO: 915017
gguuauuaugagcauuaag

SEQ ID NO: 1047437 - RNA, 19 nt, Artificial Sequence
  Description of Artificial Sequence: Synthetic oligonucleotide
  Antisense strand to SEQ ID NO: 1047436
cuuaaugcucauaauaacc

SEQ ID NO: 1047438 - RNA, 19 nt, Artificial Sequence
  Description of Artificial Sequence: Synthetic oligonucleotide
  Sense strand starting at position 3188 of SEQ ID NO: 915017
uauuaugagcauuaaguga

SEQ ID NO: 1047439 - RNA, 19 nt, Artificial Sequence
  Description of Artificial Sequence: Synthetic oligonucleotide
  Antisense strand to SEQ ID NO: 1047438
ucacuuaaugcucauaaua

SEQ ID NO: 1047440 - RNA, 19 nt, Artificial Sequence
  Description of Artificial Sequence: Synthetic oligonucleotide
  Sense strand starting at position 3577 of SEQ ID NO: 915017
agaaacaaguugcuucuaa

SEQ ID NO: 1047441 - RNA, 19 nt, Artificial Sequence
  Description of Artificial Sequence: Synthetic oligonucleotide
  Antisense strand to SEQ ID NO: 1047440
uuagaagcaacuuguuucu

SEQ ID NO: 1047442 - RNA, 19 nt, Artificial Sequence
  Description of Artificial Sequence: Synthetic oligonucleotide
  Sense strand starting at position 3958 of SEQ ID NO: 915017
ggauuugugcauugauggu

SEQ ID NO: 1047443 - RNA, 19 nt, Artificial Sequence
  Description of Artificial Sequence: Synthetic oligonucleotide
  Antisense strand to SEQ ID NO: 1047442
accaucaaugcacaaaucc

SEQ ID NO: 1047444 - RNA, 19 nt, Artificial Sequence
  Description of Artificial Sequence: Synthetic oligonucleotide
  Sense strand starting at position 90 of SEQ ID NO: 915018
ucuuuaggcucugauuuac

SEQ ID NO: 1047445 - RNA, 19 nt, Artificial Sequence
  Description of Artificial Sequence: Synthetic oligonucleotide
  Antisense strand to SEQ ID NO: 1047444
guaaaucagagccuaaaga

SEQ ID NO: 1047446 - RNA, 19 nt, Artificial Sequence
  Description of Artificial Sequence: Synthetic oligonucleotide
  Sense strand starting at position 109 of SEQ ID NO: 915018
auugcauaugcuugaagag

SEQ ID NO: 1047447 - RNA, 19 nt, Artificial Sequence
  Description of Artificial Sequence: Synthetic oligonucleotide
  Antisense strand to SEQ ID NO: 1047446
cucuucaagcauaugcaau

SEQ ID NO: 1047448 - RNA, 19 nt, Artificial Sequence
  Description of Artificial Sequence: Synthetic oligonucleotide
  Sense strand starting at position 187 of SEQ ID NO: 915018
aguauuaacucugaguccu

SEQ ID NO: 1047449 - RNA, 19 nt, Artificial Sequence
  Description of Artificial Sequence: Synthetic oligonucleotide
  Antisense strand to SEQ ID NO: 1047448
aggacucagaguuaauacu

SEQ ID NO: 1047450 - RNA, 19 nt, Artificial Sequence
  Description of Artificial Sequence: Synthetic oligonucleotide
  Sense strand starting at position 197 of SEQ ID NO: 915018
cugaguccuugcuguggau

SEQ ID NO: 1047451 - RNA, 19 nt, Artificial Sequence
  Description of Artificial Sequence: Synthetic oligonucleotide
  Antisense strand to SEQ ID NO: 1047450
auccacagcaaggacucag

SEQ ID NO: 1047452 - RNA, 19 nt, Artificial Sequence
  Description of Artificial Sequence: Synthetic oligonucleotide
  Sense strand starting at position 212 of SEQ ID NO: 915018
ggauuccaagccugguaaa

SEQ ID NO: 1047453 - RNA, 19 nt, Artificial Sequence
  Description of Artificial Sequence: Synthetic oligonucleotide
  Antisense strand to SEQ ID NO: 1047452
uuuaccaggcuuggaaucc

SEQ ID NO: 1047454 - RNA, 19 nt, Artificial Sequence
  Description of Artificial Sequence: Synthetic oligonucleotide
  Sense strand starting at position 215 of SEQ ID NO: 915018
uuccaagccugguaaaguu

SEQ ID NO: 1047455 - RNA, 19 nt, Artificial Sequence
  Description of Artificial Sequence: Synthetic oligonucleotide
  Antisense strand to SEQ ID NO: 1047454
aacuuuaccaggcuuggaa

SEQ ID NO: 1047456 - RNA, 19 nt, Artificial Sequence
  Description of Artificial Sequence: Synthetic oligonucleotide
  Sense strand starting at position 299 of SEQ ID NO: 915018
gacaauaguuaccagcaga

SEQ ID NO: 1047457 - RNA, 19 nt, Artificial Sequence
  Description of Artificial Sequence: Synthetic oligonucleotide
  Antisense strand to SEQ ID NO: 1047456
ucugcugguaacuauuguc

SEQ ID NO: 1047458 - RNA, 19 nt, Artificial Sequence
  Description of Artificial Sequence: Synthetic oligonucleotide
  Sense strand starting at position 478 of SEQ ID NO: 915018
gccgaugcauguuggauua

SEQ ID NO: 1047459 - RNA, 19 nt, Artificial Sequence
  Description of Artificial Sequence: Synthetic oligonucleotide
  Antisense strand to SEQ ID NO: 1047458
uaauccaacaugcaucggc

SEQ ID NO: 1047460 - RNA, 19 nt, Artificial Sequence
  Description of Artificial Sequence: Synthetic oligonucleotide
  Sense strand starting at position 659 of SEQ ID NO: 915018
gcgguucuuacugggauca

SEQ ID NO: 1047461 - RNA, 19 nt, Artificial Sequence
  Description of Artificial Sequence: Synthetic oligonucleotide
  Antisense strand to SEQ ID NO: 1047460
ugaucccaguaagaaccgc

SEQ ID NO: 1047462 - RNA, 19 nt, Artificial Sequence
  Description of Artificial Sequence: Synthetic oligonucleotide
  Sense strand starting at position 660 of SEQ ID NO: 915018
cgguucuuacugggaucau

SEQ ID NO: 1047463 - RNA, 19 nt, Artificial Sequence
  Description of Artificial Sequence: Synthetic oligonucleotide
  Antisense strand to SEQ ID NO: 1047462
augaucccaguaagaaccg

SEQ ID NO: 1047464 - RNA, 19 nt, Artificial Sequence
  Description of Artificial Sequence: Synthetic oligonucleotide
  Sense strand starting at position 661 of SEQ ID NO: 915018
gguucuuacugggaucaug

SEQ ID NO: 1047465 - RNA, 19 nt, Artificial Sequence
  Description of Artificial Sequence: Synthetic oligonucleotide
  Antisense strand to SEQ ID NO: 1047464
caugaucccaguaagaacc

SEQ ID NO: 1047466 - RNA, 19 nt, Artificial Sequence
  Description of Artificial Sequence: Synthetic oligonucleotide
  Sense strand starting at position 979 of SEQ ID NO: 915018
cagguacgcuucuuugaag

SEQ ID NO: 1047467 - RNA, 19 nt, Artificial Sequence
  Description of Artificial Sequence: Synthetic oligonucleotide
  Antisense strand to SEQ ID NO: 1047466
cuucaaagaagcguaccug

SEQ ID NO: 1047468 - RNA, 19 nt, Artificial Sequence
  Description of Artificial Sequence: Synthetic oligonucleotide
  Sense strand starting at position 980 of SEQ ID NO: 915018
agguacgcuucuuugaaga

SEQ ID NO: 1047469 - RNA, 19 nt, Artificial Sequence
  Description of Artificial Sequence: Synthetic oligonucleotide
  Antisense strand to SEQ ID NO: 1047468
ucuucaaagaagcguaccu

SEQ ID NO: 1047470 - RNA, 19 nt, Artificial Sequence
  Description of Artificial Sequence: Synthetic oligonucleotide
  Sense strand starting at position 987 of SEQ ID NO: 915018
cuucuuugaagacguggaa

SEQ ID NO: 1047471 - RNA, 19 nt, Artificial Sequence
  Description of Artificial Sequence: Synthetic oligonucleotide
  Antisense strand to SEQ ID NO: 1047470
uuccacgucuucaaagaag

SEQ ID NO: 1047472 - RNA, 19 nt, Artificial Sequence
  Description of Artificial Sequence: Synthetic oligonucleotide
  Sense strand starting at position 2642 of SEQ ID NO: 915018
ucgagcucucaagacagau

SEQ ID NO: 1047473 - RNA, 19 nt, Artificial Sequence
  Description of Artificial Sequence: Synthetic oligonucleotide
  Antisense strand to SEQ ID NO: 1047472
aucugucuugagagcucga

SEQ ID NO: 1047474 - RNA, 19 nt, Artificial Sequence
  Description of Artificial Sequence: Synthetic oligonucleotide
  Sense strand starting at position 2769 of SEQ ID NO: 915018
uggaguuggucccgaaaua

SEQ ID NO: 1047475 - RNA, 19 nt, Artificial Sequence
  Description of Artificial Sequence: Synthetic oligonucleotide
  Antisense strand to SEQ ID NO: 1047474
uauuucgggaccaacucca

SEQ ID NO: 1047476 - RNA, 19 nt, Artificial Sequence
  Description of Artificial Sequence: Synthetic oligonucleotide
  Sense strand starting at position 2770 of SEQ ID NO: 915018
ggaguuggucccgaaauag

SEQ ID NO: 1047477 - RNA, 19 nt, Artificial Sequence
  Description of Artificial Sequence: Synthetic oligonucleotide
  Antisense strand to SEQ ID NO: 1047476
cuauuucgggaccaacucc

SEQ ID NO: 1047478 - RNA, 19 nt, Artificial Sequence
  Description of Artificial Sequence: Synthetic oligonucleotide
  Sense strand starting at position 3155 of SEQ ID NO: 915018
gucaauagauaucacuguu

SEQ ID NO: 1047479 - RNA, 19 nt, Artificial Sequence
  Description of Artificial Sequence: Synthetic oligonucleotide
  Antisense strand to SEQ ID NO: 1047478
aacagugauaucuauugac

SEQ ID NO: 1047480 - RNA, 19 nt, Artificial Sequence
  Description of Artificial Sequence: Synthetic oligonucleotide
  Sense strand starting at position 3165 of SEQ ID NO: 915018
aucacuguuuaaucaagag

SEQ ID NO: 1047481 - RNA, 19 nt, Artificial Sequence
  Description of Artificial Sequence: Synthetic oligonucleotide
  Antisense strand to SEQ ID NO: 1047480
cucuugauuaaacagugau

SEQ ID NO: 1047482 - RNA, 19 nt, Artificial Sequence
  Description of Artificial Sequence: Synthetic oligonucleotide
  Sense strand starting at position 3270 of SEQ ID NO: 915018
gguacugucuacucaggua

SEQ ID NO: 1047483 - RNA, 19 nt, Artificial Sequence
  Description of Artificial Sequence: Synthetic oligonucleotide
  Antisense strand to SEQ ID NO: 1047482
uaccugaguagacaguacc

SEQ ID NO: 1047484 - RNA, 19 nt, Artificial Sequence
  Description of Artificial Sequence: Synthetic oligonucleotide
  Sense strand starting at position 3390 of SEQ ID NO: 915018
agcaacaccguguacuauu

SEQ ID NO: 1047485 - RNA, 19 nt, Artificial Sequence
  Description of Artificial Sequence: Synthetic oligonucleotide
  Antisense strand to SEQ ID NO: 1047484
aauaguacacgguguugcu

SEQ ID NO: 1047486 - RNA, 19 nt, Artificial Sequence
  Description of Artificial Sequence: Synthetic oligonucleotide
  Sense strand starting at position 3400 of SEQ ID NO: 915018
uguacuauuuaguuguaca

SEQ ID NO: 1047487 - RNA, 19 nt, Artificial Sequence
  Description of Artificial Sequence: Synthetic oligonucleotide
  Antisense strand to SEQ ID NO: 1047486
uguacaacuaaauaguaca

SEQ ID NO: 1047488 - RNA, 19 nt, Artificial Sequence
  Description of Artificial Sequence: Synthetic oligonucleotide
  Sense strand starting at position 3504 of SEQ ID NO: 915018
guggucagaucacuuaaag

SEQ ID NO: 1047489 - RNA, 19 nt, Artificial Sequence
  Description of Artificial Sequence: Synthetic oligonucleotide
  Antisense strand to SEQ ID NO: 1047488
cuuuaagugaucugaccac

SEQ ID NO: 1047490 - RNA, 19 nt, Artificial Sequence
  Description of Artificial Sequence: Synthetic oligonucleotide
  Sense strand starting at position 3881 of SEQ ID NO: 915018
uucguuuacuaaucagaau

SEQ ID NO: 1047491 - RNA, 19 nt, Artificial Sequence
  Description of Artificial Sequence: Synthetic oligonucleotide
  Antisense strand to SEQ ID NO: 1047490
auucugauuaguaaacgaa

SEQ ID NO: 1047492 - RNA, 19 nt, Artificial Sequence
  Description of Artificial Sequence: Synthetic oligonucleotide
  Sense strand starting at position 3902 of SEQ ID NO: 915018
gacgucuacugaguagcau

SEQ ID NO: 1047493 - RNA, 19 nt, Artificial Sequence
  Description of Artificial Sequence: Synthetic oligonucleotide
  Antisense strand to SEQ ID NO: 1047492
augcuacucaguagacguc

SEQ ID NO: 1047494 - RNA, 19 nt, Artificial Sequence
  Description of Artificial Sequence: Synthetic oligonucleotide
  Sense strand starting at position 91 of SEQ ID NO: 915019
acuucucugccuuggauga

SEQ ID NO: 1047495 - RNA, 19 nt, Artificial Sequence
  Description of Artificial Sequence: Synthetic oligonucleotide
  Antisense strand to SEQ ID NO: 1047494
ucauccaaggcagagaagu

SEQ ID NO: 1047496 - RNA, 19 nt, Artificial Sequence
  Description of Artificial Sequence: Synthetic oligonucleotide
  Sense strand starting at position 130 of SEQ ID NO: 915019
gcuauucugaggcauaguu

SEQ ID NO: 1047497 - RNA, 19 nt, Artificial Sequence
  Description of Artificial Sequence: Synthetic oligonucleotide
  Antisense strand to SEQ ID NO: 1047496
aacuaugccucagaauagc

SEQ ID NO: 1047498 - RNA, 19 nt, Artificial Sequence
  Description of Artificial Sequence: Synthetic oligonucleotide
  Sense strand starting at position 381 of SEQ ID NO: 915019
cuaucacaugcugagacua

SEQ ID NO: 1047499 - RNA, 19 nt, Artificial Sequence
  Description of Artificial Sequence: Synthetic oligonucleotide
  Antisense strand to SEQ ID NO: 1047498
uagucucagcaugugauag

SEQ ID NO: 1047500 - RNA, 19 nt, Artificial Sequence
  Description of Artificial Sequence: Synthetic oligonucleotide
  Sense strand starting at position 386 of SEQ ID NO: 915019
acaugcugagacuauguua

SEQ ID NO: 1047501 - RNA, 19 nt, Artificial Sequence
  Description of Artificial Sequence: Synthetic oligonucleotide
  Antisense strand to SEQ ID NO: 1047500
uaacauagucucagcaugu

SEQ ID NO: 1047502 - RNA, 19 nt, Artificial Sequence
  Description of Artificial Sequence: Synthetic oligonucleotide
  Sense strand starting at position 389 of SEQ ID NO: 915019
ugcugagacuauguuaagu

SEQ ID NO: 1047503 - RNA, 19 nt, Artificial Sequence
  Description of Artificial Sequence: Synthetic oligonucleotide
  Antisense strand to SEQ ID NO: 1047502
acuuaacauagucucagca

SEQ ID NO: 1047504 - RNA, 19 nt, Artificial Sequence
  Description of Artificial Sequence: Synthetic oligonucleotide
  Sense strand starting at position 395 of SEQ ID NO: 915019
gacuauguuaagugcugga

SEQ ID NO: 1047505 - RNA, 19 nt, Artificial Sequence
  Description of Artificial Sequence: Synthetic oligonucleotide
  Antisense strand to SEQ ID NO: 1047504
uccagcacuuaacauaguc

SEQ ID NO: 1047506 - RNA, 19 nt, Artificial Sequence
  Description of Artificial Sequence: Synthetic oligonucleotide
  Sense strand starting at position 399 of SEQ ID NO: 915019
auguuaagugcuggagaua

SEQ ID NO: 1047507 - RNA, 19 nt, Artificial Sequence
  Description of Artificial Sequence: Synthetic oligonucleotide
  Antisense strand to SEQ ID NO: 1047506
uaucuccagcacuuaacau

SEQ ID NO: 1047508 - RNA, 19 nt, Artificial Sequence
  Description of Artificial Sequence: Synthetic oligonucleotide
  Sense strand starting at position 400 of SEQ ID NO: 915019
uguuaagugcuggagauau

SEQ ID NO: 1047509 - RNA, 19 nt, Artificial Sequence
  Description of Artificial Sequence: Synthetic oligonucleotide
  Antisense strand to SEQ ID NO: 1047508
auaucuccagcacuuaaca

SEQ ID NO: 1047510 - RNA, 19 nt, Artificial Sequence
  Description of Artificial Sequence: Synthetic oligonucleotide
  Sense strand starting at position 424 of SEQ ID NO: 915019
ugauuaagauugcccucaa

SEQ ID NO: 1047511 - RNA, 19 nt, Artificial Sequence
  Description of Artificial Sequence: Synthetic oligonucleotide
  Antisense strand to SEQ ID NO: 1047510
uugagggcaaucuuaauca

SEQ ID NO: 1047512 - RNA, 19 nt, Artificial Sequence
  Description of Artificial Sequence: Synthetic oligonucleotide
  Sense strand starting at position 450 of SEQ ID NO: 915019
agcuuauaaccugguagaa

SEQ ID NO: 1047513 - RNA, 19 nt, Artificial Sequence
  Description of Artificial Sequence: Synthetic oligonucleotide
  Antisense strand to SEQ ID NO: 1047512
uucuaccagguuauaagcu

SEQ ID NO: 1047514 - RNA, 19 nt, Artificial Sequence
  Description of Artificial Sequence: Synthetic oligonucleotide
  Sense strand starting at position 530 of SEQ ID NO: 915019
gggagcuaugagugcauau

SEQ ID NO: 1047515 - RNA, 19 nt, Artificial Sequence
  Description of Artificial Sequence: Synthetic oligonucleotide
  Antisense strand to SEQ ID NO: 1047514
auaugcacucauagcuccc

SEQ ID NO: 1047516 - RNA, 19 nt, Artificial Sequence
  Description of Artificial Sequence: Synthetic oligonucleotide
  Sense strand starting at position 542 of SEQ ID NO: 915019
ugcauauggcaauguagaa

SEQ ID NO: 1047517 - RNA, 19 nt, Artificial Sequence
  Description of Artificial Sequence: Synthetic oligonucleotide
  Antisense strand to SEQ ID NO: 1047516
uucuacauugccauaugca

SEQ ID NO: 1047518 - RNA, 19 nt, Artificial Sequence
  Description of Artificial Sequence: Synthetic oligonucleotide
  Sense strand starting at position 1571 of SEQ ID NO: 915019
aaaccagaauccgcgaauu

SEQ ID NO: 1047519 - RNA, 19 nt, Artificial Sequence
  Description of Artificial Sequence: Synthetic oligonucleotide
  Antisense strand to SEQ ID NO: 1047518
aauucgcggauucugguuu

SEQ ID NO: 1047520 - RNA, 19 nt, Artificial Sequence
  Description of Artificial Sequence: Synthetic oligonucleotide
  Sense strand starting at position 2088 of SEQ ID NO: 915019
ggagaaauccuagguguaa

SEQ ID NO: 1047521 - RNA, 19 nt, Artificial Sequence
  Description of Artificial Sequence: Synthetic oligonucleotide
  Antisense strand to SEQ ID NO: 1047520
uuacaccuaggauuucucc

SEQ ID NO: 1047522 - RNA, 19 nt, Artificial Sequence
  Description of Artificial Sequence: Synthetic oligonucleotide
  Sense strand starting at position 2089 of SEQ ID NO: 915019
gagaaauccuagguguaag

SEQ ID NO: 1047523 - RNA, 19 nt, Artificial Sequence
  Description of Artificial Sequence: Synthetic oligonucleotide
  Antisense strand to SEQ ID NO: 1047522
cuuacaccuaggauuucuc

SEQ ID NO: 1047524 - RNA, 19 nt, Artificial Sequence
  Description of Artificial Sequence: Synthetic oligonucleotide
  Sense strand starting at position 2090 of SEQ ID NO: 915019
agaaauccuagguguaaga

SEQ ID NO: 1047525 - RNA, 19 nt, Artificial Sequence
  Description of Artificial Sequence: Synthetic oligonucleotide
  Antisense strand to SEQ ID NO: 1047524
ucuuacaccuaggauuucu

SEQ ID NO: 1047526 - RNA, 19 nt, Artificial Sequence
  Description of Artificial Sequence: Synthetic oligonucleotide
  Sense strand starting at position 2438 of SEQ ID NO: 915019
ggaaaugcuucugcuagga

SEQ ID NO: 1047527 - RNA, 19 nt, Artificial Sequence
  Description of Artificial Sequence: Synthetic oligonucleotide
  Antisense strand to SEQ ID NO: 1047526
uccuagcagaagcauuucc

SEQ ID NO: 1047528 - RNA, 19 nt, Artificial Sequence
  Description of Artificial Sequence: Synthetic oligonucleotide
  Sense strand starting at position 2602 of SEQ ID NO: 915019
acuuccuugcuaggauaaa

SEQ ID NO: 1047529 - RNA, 19 nt, Artificial Sequence
  Description of Artificial Sequence: Synthetic oligonucleotide
  Antisense strand to SEQ ID NO: 1047528
uuuauccuagcaaggaagu

SEQ ID NO: 1047530 - RNA, 19 nt, Artificial Sequence
  Description of Artificial Sequence: Synthetic oligonucleotide
  Sense strand starting at position 2711 of SEQ ID NO: 915019
gcaaguacauucccaagaa

SEQ ID NO: 1047531 - RNA, 19 nt, Artificial Sequence
  Description of Artificial Sequence: Synthetic oligonucleotide
  Antisense strand to SEQ ID NO: 1047530
uucuugggaauguacuugc

SEQ ID NO: 1047532 - RNA, 19 nt, Artificial Sequence
  Description of Artificial Sequence: Synthetic oligonucleotide
  Sense strand starting at position 2746 of SEQ ID NO: 915019
uuauguucaguguaaggua

SEQ ID NO: 1047533 - RNA, 19 nt, Artificial Sequence
  Description of Artificial Sequence: Synthetic oligonucleotide
  Antisense strand to SEQ ID NO: 1047532
uaccuuacacugaacauaa

SEQ ID NO: 1047534 - RNA, 19 nt, Artificial Sequence
  Description of Artificial Sequence: Synthetic oligonucleotide
  Sense strand starting at position 2753 of SEQ ID NO: 915019
caguguaagguagaauagu

SEQ ID NO: 1047535 - RNA, 19 nt, Artificial Sequence
  Description of Artificial Sequence: Synthetic oligonucleotide
  Antisense strand to SEQ ID NO: 1047534
acuauucuaccuuacacug

SEQ ID NO: 1047536 - RNA, 19 nt, Artificial Sequence
  Description of Artificial Sequence: Synthetic oligonucleotide
  Sense strand starting at position 2759 of SEQ ID NO: 915019
aagguagaauaguuacuga

SEQ ID NO: 1047537 - RNA, 19 nt, Artificial Sequence
  Description of Artificial Sequence: Synthetic oligonucleotide
  Antisense strand to SEQ ID NO: 1047536
ucaguaacuauucuaccuu

SEQ ID NO: 1047538 - RNA, 19 nt, Artificial Sequence
  Description of Artificial Sequence: Synthetic oligonucleotide
  Sense strand starting at position 2762 of SEQ ID NO: 915019
guagaauaguuacugauga

SEQ ID NO: 1047539 - RNA, 19 nt, Artificial Sequence
  Description of Artificial Sequence: Synthetic oligonucleotide
  Antisense strand to SEQ ID NO: 1047538
ucaucaguaacuauucuac

SEQ ID NO: 1047540 - RNA, 19 nt, Artificial Sequence
  Description of Artificial Sequence: Synthetic oligonucleotide
  Sense strand starting at position 2773 of SEQ ID NO: 915019
acugaugaguauguguuua

SEQ ID NO: 1047541 - RNA, 19 nt, Artificial Sequence
  Description of Artificial Sequence: Synthetic oligonucleotide
  Antisense strand to SEQ ID NO: 1047540
uaaacacauacucaucagu

SEQ ID NO: 1047542 - RNA, 19 nt, Artificial Sequence
  Description of Artificial Sequence: Synthetic oligonucleotide
  Sense strand starting at position 2775 of SEQ ID NO: 915019
ugaugaguauguguuuaag

SEQ ID NO: 1047543 - RNA, 19 nt, Artificial Sequence
  Description of Artificial Sequence: Synthetic oligonucleotide
  Antisense strand to SEQ ID NO: 1047542
cuuaaacacauacucauca

SEQ ID NO: 1047544 - RNA, 19 nt, Artificial Sequence
  Description of Artificial Sequence: Synthetic oligonucleotide
  Sense strand starting at position 2778 of SEQ ID NO: 915019
ugaguauguguuuaagcac

SEQ ID NO: 1047545 - RNA, 19 nt, Artificial Sequence
  Description of Artificial Sequence: Synthetic oligonucleotide
  Antisense strand to SEQ ID NO: 1047544
gugcuuaaacacauacuca

SEQ ID NO: 1047546 - RNA, 19 nt, Artificial Sequence
  Description of Artificial Sequence: Synthetic oligonucleotide
  Sense strand starting at position 2815 of SEQ ID NO: 915019
ugaguuuggcgaggacaga

SEQ ID NO: 1047547 - RNA, 19 nt, Artificial Sequence
  Description of Artificial Sequence: Synthetic oligonucleotide
  Antisense strand to SEQ ID NO: 1047546
ucuguccucgccaaacuca

SEQ ID NO: 1047548 - RNA, 19 nt, Artificial Sequence
  Description of Artificial Sequence: Synthetic oligonucleotide
  Sense strand starting at position 3035 of SEQ ID NO: 915019
cuuagugaaggcugaugaa

SEQ ID NO: 1047549 - RNA, 19 nt, Artificial Sequence
  Description of Artificial Sequence: Synthetic oligonucleotide
  Antisense strand to SEQ ID NO: 1047548
uucaucagccuucacuaag

SEQ ID NO: 1047550 - RNA, 19 nt, Artificial Sequence
  Description of Artificial Sequence: Synthetic oligonucleotide
  Sense strand starting at position 3061 of SEQ ID NO: 915019
augggagaccuauguacuu

SEQ ID NO: 1047551 - RNA, 19 nt, Artificial Sequence
  Description of Artificial Sequence: Synthetic oligonucleotide
  Antisense strand to SEQ ID NO: 1047550
aaguacauaggucucccau

SEQ ID NO: 1047552 - RNA, 19 nt, Artificial Sequence
  Description of Artificial Sequence: Synthetic oligonucleotide
  Sense strand starting at position 3124 of SEQ ID NO: 915019
gaaaccuucugccugaugu

SEQ ID NO: 1047553 - RNA, 19 nt, Artificial Sequence
  Description of Artificial Sequence: Synthetic oligonucleotide
  Antisense strand to SEQ ID NO: 1047552
acaucaggcagaagguuuc

SEQ ID NO: 1047554 - RNA, 19 nt, Artificial Sequence
  Description of Artificial Sequence: Synthetic oligonucleotide
  Sense strand starting at position 3141 of SEQ ID NO: 915019
guaacaauauguguauggu

SEQ ID NO: 1047555 - RNA, 19 nt, Artificial Sequence
  Description of Artificial Sequence: Synthetic oligonucleotide
  Antisense strand to SEQ ID NO: 1047554
accauacacauauuguuac

SEQ ID NO: 1047556 - RNA, 19 nt, Artificial Sequence
  Description of Artificial Sequence: Synthetic oligonucleotide
  Sense strand starting at position 3142 of SEQ ID NO: 915019
uaacaauauguguaugguu

SEQ ID NO: 1047557 - RNA, 19 nt, Artificial Sequence
  Description of Artificial Sequence: Synthetic oligonucleotide
  Antisense strand to SEQ ID NO: 1047556
aaccauacacauauuguua

SEQ ID NO: 1047558 - RNA, 19 nt, Artificial Sequence
  Description of Artificial Sequence: Synthetic oligonucleotide
  Sense strand starting at position 3174 of SEQ ID NO: 915019
aauaaagaacaguguagua

SEQ ID NO: 1047559 - RNA, 19 nt, Artificial Sequence
  Description of Artificial Sequence: Synthetic oligonucleotide
  Antisense strand to SEQ ID NO: 1047558
uacuacacuguucuuuauu

SEQ ID NO: 1047560 - RNA, 19 nt, Artificial Sequence
  Description of Artificial Sequence: Synthetic oligonucleotide
  Sense strand starting at position 3366 of SEQ ID NO: 915019
cggucucacuaaguagauu

SEQ ID NO: 1047561 - RNA, 19 nt, Artificial Sequence
  Description of Artificial Sequence: Synthetic oligonucleotide
  Antisense strand to SEQ ID NO: 1047560
aaucuacuuagugagaccg

SEQ ID NO: 1047562 - RNA, 19 nt, Artificial Sequence
  Description of Artificial Sequence: Synthetic oligonucleotide
  Sense strand starting at position 3406 of SEQ ID NO: 915019
ugaacuuacugcuugacuu

SEQ ID NO: 1047563 - RNA, 19 nt, Artificial Sequence
  Description of Artificial Sequence: Synthetic oligonucleotide
  Antisense strand to SEQ ID NO: 1047562
aagucaagcaguaaguuca

SEQ ID NO: 1047564 - RNA, 19 nt, Artificial Sequence
  Description of Artificial Sequence: Synthetic oligonucleotide
  Sense strand starting at position 3422 of SEQ ID NO: 915019
cuucuaaccugacugguaa

SEQ ID NO: 1047565 - RNA, 19 nt, Artificial Sequence
  Description of Artificial Sequence: Synthetic oligonucleotide
  Antisense strand to SEQ ID NO: 1047564
uuaccagucagguuagaag

SEQ ID NO: 1047566 - RNA, 19 nt, Artificial Sequence
  Description of Artificial Sequence: Synthetic oligonucleotide
  Sense strand starting at position 3423 of SEQ ID NO: 915019
uucuaaccugacugguaaa

SEQ ID NO: 1047567 - RNA, 19 nt, Artificial Sequence
  Description of Artificial Sequence: Synthetic oligonucleotide
  Antisense strand to SEQ ID NO: 1047566
uuuaccagucagguuagaa

SEQ ID NO: 1047568 - RNA, 19 nt, Artificial Sequence
  Description of Artificial Sequence: Synthetic oligonucleotide
  Sense strand starting at position 3441 of SEQ ID NO: 915019
aaugguaacuucucagagu

SEQ ID NO: 1047569 - RNA, 19 nt, Artificial Sequence
  Description of Artificial Sequence: Synthetic oligonucleotide
  Antisense strand to SEQ ID NO: 1047568
acucugagaaguuaccauu

SEQ ID NO: 1047570 - RNA, 19 nt, Artificial Sequence
  Description of Artificial Sequence: Synthetic oligonucleotide
  Sense strand starting at position 3474 of SEQ ID NO: 915019
agaauaucagcuggaaauu

SEQ ID NO: 1047571 - RNA, 19 nt, Artificial Sequence
  Description of Artificial Sequence: Synthetic oligonucleotide
  Antisense strand to SEQ ID NO: 1047570
aauuuccagcugauauucu

SEQ ID NO: 1047572 - RNA, 19 nt, Artificial Sequence
  Description of Artificial Sequence: Synthetic oligonucleotide
  Sense strand starting at position 3483 of SEQ ID NO: 915019
gcuggaaauuaauuaguga

SEQ ID NO: 1047573 - RNA, 19 nt, Artificial Sequence
  Description of Artificial Sequence: Synthetic oligonucleotide
  Antisense strand to SEQ ID NO: 1047572
ucacuaauuaauuuccagc

SEQ ID NO: 1047574 - RNA, 19 nt, Artificial Sequence
  Description of Artificial Sequence: Synthetic oligonucleotide
  Sense strand starting at position 83 of SEQ ID NO: 915020
uucccugugcuggaaauga

SEQ ID NO: 1047575 - RNA, 19 nt, Artificial Sequence
  Description of Artificial Sequence: Synthetic oligonucleotide
  Antisense strand to SEQ ID NO: 1047574
ucauuuccagcacagggaa

SEQ ID NO: 1047576 - RNA, 19 nt, Artificial Sequence
  Description of Artificial Sequence: Synthetic oligonucleotide
  Sense strand starting at position 91 of SEQ ID NO: 915020
gcuggaaaugaauguuuau

SEQ ID NO: 1047577 - RNA, 19 nt, Artificial Sequence
  Description of Artificial Sequence: Synthetic oligonucleotide
  Antisense strand to SEQ ID NO: 1047576
auaaacauucauuuccagc

SEQ ID NO: 1047578 - RNA, 19 nt, Artificial Sequence
  Description of Artificial Sequence: Synthetic oligonucleotide
  Sense strand starting at position 106 of SEQ ID NO: 915020
uuaugauggcugcaaggga

SEQ ID NO: 1047579 - RNA, 19 nt, Artificial Sequence
  Description of Artificial Sequence: Synthetic oligonucleotide
  Antisense strand to SEQ ID NO: 1047578
ucccuugcagccaucauaa

SEQ ID NO: 1047580 - RNA, 19 nt, Artificial Sequence
  Description of Artificial Sequence: Synthetic oligonucleotide
  Sense strand starting at position 281 of SEQ ID NO: 915020
auguuauguuucccauaug

SEQ ID NO: 1047581 - RNA, 19 nt, Artificial Sequence
  Description of Artificial Sequence: Synthetic oligonucleotide
  Antisense strand to SEQ ID NO: 1047580
cauaugggaaacauaacau

SEQ ID NO: 1047582 - RNA, 19 nt, Artificial Sequence
  Description of Artificial Sequence: Synthetic oligonucleotide
  Sense strand starting at position 284 of SEQ ID NO: 915020
uuauguuucccauaugaug

SEQ ID NO: 1047583 - RNA, 19 nt, Artificial Sequence
  Description of Artificial Sequence: Synthetic oligonucleotide
  Antisense strand to SEQ ID NO: 1047582
caucauaugggaaacauaa

SEQ ID NO: 1047584 - RNA, 19 nt, Artificial Sequence
  Description of Artificial Sequence: Synthetic oligonucleotide
  Sense strand starting at position 292 of SEQ ID NO: 915020
cccauaugauggcuggaua

SEQ ID NO: 1047585 - RNA, 19 nt, Artificial Sequence
  Description of Artificial Sequence: Synthetic oligonucleotide
  Antisense strand to SEQ ID NO: 1047584
uauccagccaucauauggg

SEQ ID NO: 1047586 - RNA, 19 nt, Artificial Sequence
  Description of Artificial Sequence: Synthetic oligonucleotide
  Sense strand starting at position 311 of SEQ ID NO: 915020
cucacaguuggaggaguuu

SEQ ID NO: 1047587 - RNA, 19 nt, Artificial Sequence
  Description of Artificial Sequence: Synthetic oligonucleotide
  Antisense strand to SEQ ID NO: 1047586
aaacuccuccaacugugag

SEQ ID NO: 1047588 - RNA, 19 nt, Artificial Sequence
  Description of Artificial Sequence: Synthetic oligonucleotide
  Sense strand starting at position 464 of SEQ ID NO: 915020
ggugaaauacugugucuac

SEQ ID NO: 1047589 - RNA, 19 nt, Artificial Sequence
  Description of Artificial Sequence: Synthetic oligonucleotide
  Antisense strand to SEQ ID NO: 1047588
guagacacaguauuucacc

SEQ ID NO: 1047590 - RNA, 19 nt, Artificial Sequence
  Description of Artificial Sequence: Synthetic oligonucleotide
  Sense strand starting at position 710 of SEQ ID NO: 915020
uggucugacuccuuagaaa

SEQ ID NO: 1047591 - RNA, 19 nt, Artificial Sequence
  Description of Artificial Sequence: Synthetic oligonucleotide
  Antisense strand to SEQ ID NO: 1047590
uuucuaaggagucagacca

SEQ ID NO: 1047592 - RNA, 19 nt, Artificial Sequence
  Description of Artificial Sequence: Synthetic oligonucleotide
  Sense strand starting at position 890 of SEQ ID NO: 915020
accugugagggcuagaguu

SEQ ID NO: 1047593 - RNA, 19 nt, Artificial Sequence
  Description of Artificial Sequence: Synthetic oligonucleotide
  Antisense strand to SEQ ID NO: 1047592
aacucuagcccucacaggu

SEQ ID NO: 1047594 - RNA, 19 nt, Artificial Sequence
  Description of Artificial Sequence: Synthetic oligonucleotide
  Sense strand starting at position 1059 of SEQ ID NO: 915020
aauucccagucuucggaaa

SEQ ID NO: 1047595 - RNA, 19 nt, Artificial Sequence
  Description of Artificial Sequence: Synthetic oligonucleotide
  Antisense strand to SEQ ID NO: 1047594
uuuccgaagacugggaauu

SEQ ID NO: 1047596 - RNA, 19 nt, Artificial Sequence
  Description of Artificial Sequence: Synthetic oligonucleotide
  Sense strand starting at position 1132 of SEQ ID NO: 915020
ugcauuuacucuccgucaa

SEQ ID NO: 1047597 - RNA, 19 nt, Artificial Sequence
  Description of Artificial Sequence: Synthetic oligonucleotide
  Antisense strand to SEQ ID NO: 1047596
uugacggagaguaaaugca

SEQ ID NO: 1047598 - RNA, 19 nt, Artificial Sequence
  Description of Artificial Sequence: Synthetic oligonucleotide
  Sense strand starting at position 1133 of SEQ ID NO: 915020
gcauuuacucuccgucaac

SEQ ID NO: 1047599 - RNA, 19 nt, Artificial Sequence
  Description of Artificial Sequence: Synthetic oligonucleotide
  Antisense strand to SEQ ID NO: 1047598
guugacggagaguaaaugc

SEQ ID NO: 1047600 - RNA, 19 nt, Artificial Sequence
  Description of Artificial Sequence: Synthetic oligonucleotide
  Sense strand starting at position 1153 of SEQ ID NO: 915020
ggaauugggucuucagaug

SEQ ID NO: 1047601 - RNA, 19 nt, Artificial Sequence
  Description of Artificial Sequence: Synthetic oligonucleotide
  Antisense strand to SEQ ID NO: 1047600
caucugaagacccaauucc

SEQ ID NO: 1047602 - RNA, 19 nt, Artificial Sequence
  Description of Artificial Sequence: Synthetic oligonucleotide
  Sense strand starting at position 1245 of SEQ ID NO: 915020
uuucuaagcgacuacuaca

SEQ ID NO: 1047603 - RNA, 19 nt, Artificial Sequence
  Description of Artificial Sequence: Synthetic oligonucleotide
  Antisense strand to SEQ ID NO: 1047602
uguaguagucgcuuagaaa

SEQ ID NO: 1047604 - RNA, 19 nt, Artificial Sequence
  Description of Artificial Sequence: Synthetic oligonucleotide
  Sense strand starting at position 1314 of SEQ ID NO: 915020
gugagauuucuguggccug

SEQ ID NO: 1047605 - RNA, 19 nt, Artificial Sequence
  Description of Artificial Sequence: Synthetic oligonucleotide
  Antisense strand to SEQ ID NO: 1047604
caggccacagaaaucucac

SEQ ID NO: 1047606 - RNA, 19 nt, Artificial Sequence
  Description of Artificial Sequence: Synthetic oligonucleotide
  Sense strand starting at position 1540 of SEQ ID NO: 915020
ggaauagguuagagugaag

SEQ ID NO: 1047607 - RNA, 19 nt, Artificial Sequence
  Description of Artificial Sequence: Synthetic oligonucleotide
  Antisense strand to SEQ ID NO: 1047606
cuucacucuaaccuauucc

SEQ ID NO: 1047608 - RNA, 19 nt, Artificial Sequence
  Description of Artificial Sequence: Synthetic oligonucleotide
  Sense strand starting at position 1545 of SEQ ID NO: 915020
agguuagagugaagggaaa

SEQ ID NO: 1047609 - RNA, 19 nt, Artificial Sequence
  Description of Artificial Sequence: Synthetic oligonucleotide
  Antisense strand to SEQ ID NO: 1047608
uuucccuucacucuaaccu

SEQ ID NO: 1047610 - RNA, 19 nt, Artificial Sequence
  Description of Artificial Sequence: Synthetic oligonucleotide
  Sense strand starting at position 1612 of SEQ ID NO: 915020
gggacaagaucagaagaca

SEQ ID NO: 1047611 - RNA, 19 nt, Artificial Sequence
  Description of Artificial Sequence: Synthetic oligonucleotide
  Antisense strand to SEQ ID NO: 1047610
ugucuucugaucuuguccc

SEQ ID NO: 1047612 - RNA, 19 nt, Artificial Sequence
  Description of Artificial Sequence: Synthetic oligonucleotide
  Sense strand starting at position 2230 of SEQ ID NO: 915020
gcuucugucccugaguaua

SEQ ID NO: 1047613 - RNA, 19 nt, Artificial Sequence
  Description of Artificial Sequence: Synthetic oligonucleotide
  Antisense strand to SEQ ID NO: 1047612
uauacucagggacagaagc

SEQ ID NO: 1047614 - RNA, 19 nt, Artificial Sequence
  Description of Artificial Sequence: Synthetic oligonucleotide
  Sense strand starting at position 2232 of SEQ ID NO: 915020
uucugucccugaguauaua

SEQ ID NO: 1047615 - RNA, 19 nt, Artificial Sequence
  Description of Artificial Sequence: Synthetic oligonucleotide
  Antisense strand to SEQ ID NO: 1047614
uauauacucagggacagaa

SEQ ID NO: 1047616 - RNA, 19 nt, Artificial Sequence
  Description of Artificial Sequence: Synthetic oligonucleotide
  Sense strand starting at position 2337 of SEQ ID NO: 915020
ggagaaggugcugauggua

SEQ ID NO: 1047617 - RNA, 19 nt, Artificial Sequence
  Description of Artificial Sequence: Synthetic oligonucleotide
  Antisense strand to SEQ ID NO: 1047616
uaccaucagcaccuucucc

SEQ ID NO: 1047618 - RNA, 19 nt, Artificial Sequence
  Description of Artificial Sequence: Synthetic oligonucleotide
  Sense strand starting at position 2362 of SEQ ID NO: 915020
ucccaucaguugucaagaa

SEQ ID NO: 1047619 - RNA, 19 nt, Artificial Sequence
  Description of Artificial Sequence: Synthetic oligonucleotide
  Antisense strand to SEQ ID NO: 1047618
uucuugacaacugauggga

SEQ ID NO: 1047620 - RNA, 19 nt, Artificial Sequence
  Description of Artificial Sequence: Synthetic oligonucleotide
  Sense strand starting at position 2630 of SEQ ID NO: 915020
uaaauagauguauggccaa

SEQ ID NO: 1047621 - RNA, 19 nt, Artificial Sequence
  Description of Artificial Sequence: Synthetic oligonucleotide
  Antisense strand to SEQ ID NO: 1047620
uuggccauacaucuauuua

SEQ ID NO: 1047622 - RNA, 19 nt, Artificial Sequence
  Description of Artificial Sequence: Synthetic oligonucleotide
  Sense strand starting at position 2633 of SEQ ID NO: 915020
auagauguauggccaauau

SEQ ID NO: 1047623 - RNA, 19 nt, Artificial Sequence
  Description of Artificial Sequence: Synthetic oligonucleotide
  Antisense strand to SEQ ID NO: 1047622
auauuggccauacaucuau

SEQ ID NO: 1047624 - RNA, 19 nt, Artificial Sequence
  Description of Artificial Sequence: Synthetic oligonucleotide
  Sense strand starting at position 2694 of SEQ ID NO: 915020
aagauugaggcaugauuac

SEQ ID NO: 1047625 - RNA, 19 nt, Artificial Sequence
  Description of Artificial Sequence: Synthetic oligonucleotide
  Antisense strand to SEQ ID NO: 1047624
guaaucaugccucaaucuu

SEQ ID NO: 1047626 - RNA, 19 nt, Artificial Sequence
  Description of Artificial Sequence: Synthetic oligonucleotide
  Sense strand starting at position 2727 of SEQ ID NO: 915020
ucaggugcccuuuauuaaa

SEQ ID NO: 1047627 - RNA, 19 nt, Artificial Sequence
  Description of Artificial Sequence: Synthetic oligonucleotide
  Antisense strand to SEQ ID NO: 1047626
uuuaauaaagggcaccuga

SEQ ID NO: 1047628 - RNA, 19 nt, Artificial Sequence
  Description of Artificial Sequence: Synthetic oligonucleotide
  Sense strand starting at position 2756 of SEQ ID NO: 915020
ucgugaucuggugauaaua

SEQ ID NO: 1047629 - RNA, 19 nt, Artificial Sequence
  Description of Artificial Sequence: Synthetic oligonucleotide
  Antisense strand to SEQ ID NO: 1047628
uauuaucaccagaucacga

SEQ ID NO: 1047630 - RNA, 19 nt, Artificial Sequence
  Description of Artificial Sequence: Synthetic oligonucleotide
  Sense strand starting at position 3136 of SEQ ID NO: 915020
augguaugaccuugcaaug

SEQ ID NO: 1047631 - RNA, 19 nt, Artificial Sequence
  Description of Artificial Sequence: Synthetic oligonucleotide
  Antisense strand to SEQ ID NO: 1047630
cauugcaaggucauaccau

SEQ ID NO: 1047632 - RNA, 19 nt, Artificial Sequence
  Description of Artificial Sequence: Synthetic oligonucleotide
  Sense strand starting at position 3141 of SEQ ID NO: 915020
augaccuugcaauggaaua

SEQ ID NO: 1047633 - RNA, 19 nt, Artificial Sequence
  Description of Artificial Sequence: Synthetic oligonucleotide
  Antisense strand to SEQ ID NO: 1047632
uauuccauugcaaggucau

SEQ ID NO: 1047634 - RNA, 19 nt, Artificial Sequence
  Description of Artificial Sequence: Synthetic oligonucleotide
  Sense strand starting at position 3539 of SEQ ID NO: 915020
ugagcucauccuugaagug

SEQ ID NO: 1047635 - RNA, 19 nt, Artificial Sequence
  Description of Artificial Sequence: Synthetic oligonucleotide
  Antisense strand to SEQ ID NO: 1047634
cacuucaaggaugagcuca

SEQ ID NO: 1047636 - RNA, 19 nt, Artificial Sequence
  Description of Artificial Sequence: Synthetic oligonucleotide
  Sense strand starting at position 3540 of SEQ ID NO: 915020
gagcucauccuugaaguga

SEQ ID NO: 1047637 - RNA, 19 nt, Artificial Sequence
  Description of Artificial Sequence: Synthetic oligonucleotide
  Antisense strand to SEQ ID NO: 1047636
ucacuucaaggaugagcuc

SEQ ID NO: 1047638 - RNA, 19 nt, Artificial Sequence
  Description of Artificial Sequence: Synthetic oligonucleotide
  Sense strand starting at position 3624 of SEQ ID NO: 915020
gagggaggcuuucuuucuu

SEQ ID NO: 1047639 - RNA, 19 nt, Artificial Sequence
  Description of Artificial Sequence: Synthetic oligonucleotide
  Antisense strand to SEQ ID NO: 1047638
aagaaagaaagccucccuc

SEQ ID NO: 1047640 - RNA, 19 nt, Artificial Sequence
  Description of Artificial Sequence: Synthetic oligonucleotide
  Sense strand starting at position 3687 of SEQ ID NO: 915020
ucuaaacuggugugaggaa

SEQ ID NO: 1047641 - RNA, 19 nt, Artificial Sequence
  Description of Artificial Sequence: Synthetic oligonucleotide
  Antisense strand to SEQ ID NO: 1047640
uuccucacaccaguuuaga

SEQ ID NO: 1047642 - RNA, 19 nt, Artificial Sequence
  Description of Artificial Sequence: Synthetic oligonucleotide
  Sense strand starting at position 3709 of SEQ ID NO: 915020
agagaacucuugucuggcu

SEQ ID NO: 1047643 - RNA, 19 nt, Artificial Sequence
  Description of Artificial Sequence: Synthetic oligonucleotide
  Antisense strand to SEQ ID NO: 1047642
agccagacaagaguucucu

SEQ ID NO: 1047644 - RNA, 19 nt, Artificial Sequence
  Description of Artificial Sequence: Synthetic oligonucleotide
  Sense strand starting at position 3710 of SEQ ID NO: 915020
gagaacucuugucuggcuu

SEQ ID NO: 1047645 - RNA, 19 nt, Artificial Sequence
  Description of Artificial Sequence: Synthetic oligonucleotide
  Antisense strand to SEQ ID NO: 1047644
aagccagacaagaguucuc

SEQ ID NO: 1047646 - RNA, 19 nt, Artificial Sequence
  Description of Artificial Sequence: Synthetic oligonucleotide
  Sense strand starting at position 3725 of SEQ ID NO: 915020
gcuucuguauucucaggga

SEQ ID NO: 1047647 - RNA, 19 nt, Artificial Sequence
  Description of Artificial Sequence: Synthetic oligonucleotide
  Antisense strand to SEQ ID NO: 1047646
ucccugagaauacagaagc

SEQ ID NO: 1047648 - RNA, 19 nt, Artificial Sequence
  Description of Artificial Sequence: Synthetic oligonucleotide
  Sense strand starting at position 3729 of SEQ ID NO: 915020
cuguauucucagggagaua

SEQ ID NO: 1047649 - RNA, 19 nt, Artificial Sequence
  Description of Artificial Sequence: Synthetic oligonucleotide
  Antisense strand to SEQ ID NO: 1047648
uaucucccugagaauacag

SEQ ID NO: 1047650 - RNA, 19 nt, Artificial Sequence
  Description of Artificial Sequence: Synthetic oligonucleotide
  Sense strand starting at position 3774 of SEQ ID NO: 915020
gggaacaguguaggagauu

SEQ ID NO: 1047651 - RNA, 19 nt, Artificial Sequence
  Description of Artificial Sequence: Synthetic oligonucleotide
  Antisense strand to SEQ ID NO: 1047650
aaucuccuacacuguuccc

SEQ ID NO: 1047652 - RNA, 19 nt, Artificial Sequence
  Description of Artificial Sequence: Synthetic oligonucleotide
  Sense strand starting at position 3775 of SEQ ID NO: 915020
ggaacaguguaggagauuu

SEQ ID NO: 1047653 - RNA, 19 nt, Artificial Sequence
  Description of Artificial Sequence: Synthetic oligonucleotide
  Antisense strand to SEQ ID NO: 1047652
aaaucuccuacacuguucc

SEQ ID NO: 1047654 - RNA, 19 nt, Artificial Sequence
  Description of Artificial Sequence: Synthetic oligonucleotide
  Sense strand starting at position 393 of SEQ ID NO: 915021
cuaggacuguggcucaaua

SEQ ID NO: 1047655 - RNA, 19 nt, Artificial Sequence
  Description of Artificial Sequence: Synthetic oligonucleotide
  Antisense strand to SEQ ID NO: 1047654
uauugagccacaguccuag

SEQ ID NO: 1047656 - RNA, 19 nt, Artificial Sequence
  Description of Artificial Sequence: Synthetic oligonucleotide
  Sense strand starting at position 395 of SEQ ID NO: 915021
aggacuguggcucaauagu

SEQ ID NO: 1047657 - RNA, 19 nt, Artificial Sequence
  Description of Artificial Sequence: Synthetic oligonucleotide
  Antisense strand to SEQ ID NO: 1047656
acuauugagccacaguccu

SEQ ID NO: 1047658 - RNA, 19 nt, Artificial Sequence
  Description of Artificial Sequence: Synthetic oligonucleotide
  Sense strand starting at position 466 of SEQ ID NO: 915021
ucuuaagauugggcaccau

SEQ ID NO: 1047659 - RNA, 19 nt, Artificial Sequence
  Description of Artificial Sequence: Synthetic oligonucleotide
  Antisense strand to SEQ ID NO: 1047658
auggugcccaaucuuaaga

SEQ ID NO: 1047660 - RNA, 19 nt, Artificial Sequence
  Description of Artificial Sequence: Synthetic oligonucleotide
  Sense strand starting at position 519 of SEQ ID NO: 915021
uuacuaagacuccgacaug

SEQ ID NO: 1047661 - RNA, 19 nt, Artificial Sequence
  Description of Artificial Sequence: Synthetic oligonucleotide
  Antisense strand to SEQ ID NO: 1047660
caugucggagucuuaguaa

SEQ ID NO: 1047662 - RNA, 19 nt, Artificial Sequence
  Description of Artificial Sequence: Synthetic oligonucleotide
  Sense strand starting at position 528 of SEQ ID NO: 915021
cuccgacaugaaugacauu

SEQ ID NO: 1047663 - RNA, 19 nt, Artificial Sequence
  Description of Artificial Sequence: Synthetic oligonucleotide
  Antisense strand to SEQ ID NO: 1047662
aaugucauucaugucggag

SEQ ID NO: 1047664 - RNA, 19 nt, Artificial Sequence
  Description of Artificial Sequence: Synthetic oligonucleotide
  Sense strand starting at position 645 of SEQ ID NO: 915021
ugagcaaagcuauacaugu

SEQ ID NO: 1047665 - RNA, 19 nt, Artificial Sequence
  Description of Artificial Sequence: Synthetic oligonucleotide
  Antisense strand to SEQ ID NO: 1047664
acauguauagcuuugcuca

SEQ ID NO: 1047666 - RNA, 19 nt, Artificial Sequence
  Description of Artificial Sequence: Synthetic oligonucleotide
  Sense strand starting at position 702 of SEQ ID NO: 915021
gcuaacaccuuguugauau

SEQ ID NO: 1047667 - RNA, 19 nt, Artificial Sequence
  Description of Artificial Sequence: Synthetic oligonucleotide
  Antisense strand to SEQ ID NO: 1047666
auaucaacaagguguuagc

SEQ ID NO: 1047668 - RNA, 19 nt, Artificial Sequence
  Description of Artificial Sequence: Synthetic oligonucleotide
  Sense strand starting at position 771 of SEQ ID NO: 915021
ggucaaguuauuggaucaa

SEQ ID NO: 1047669 - RNA, 19 nt, Artificial Sequence
  Description of Artificial Sequence: Synthetic oligonucleotide
  Antisense strand to SEQ ID NO: 1047668
uugauccaauaacuugacc

SEQ ID NO: 1047670 - RNA, 19 nt, Artificial Sequence
  Description of Artificial Sequence: Synthetic oligonucleotide
  Sense strand starting at position 783 of SEQ ID NO: 915021
ggaucaauuaaacguggua

SEQ ID NO: 1047671 - RNA, 19 nt, Artificial Sequence
  Description of Artificial Sequence: Synthetic oligonucleotide
  Antisense strand to SEQ ID NO: 1047670
uaccacguuuaauugaucc

SEQ ID NO: 1047672 - RNA, 19 nt, Artificial Sequence
  Description of Artificial Sequence: Synthetic oligonucleotide
  Sense strand starting at position 786 of SEQ ID NO: 915021
ucaauuaaacgugguaauu

SEQ ID NO: 1047673 - RNA, 19 nt, Artificial Sequence
  Description of Artificial Sequence: Synthetic oligonucleotide
  Antisense strand to SEQ ID NO: 1047672
aauuaccacguuuaauuga

SEQ ID NO: 1047674 - RNA, 19 nt, Artificial Sequence
  Description of Artificial Sequence: Synthetic oligonucleotide
  Sense strand starting at position 927 of SEQ ID NO: 915021
guuugcguuaaugaauuaa

SEQ ID NO: 1047675 - RNA, 19 nt, Artificial Sequence
  Description of Artificial Sequence: Synthetic oligonucleotide
  Antisense strand to SEQ ID NO: 1047674
uuaauucauuaacgcaaac

SEQ ID NO: 1047676 - RNA, 19 nt, Artificial Sequence
  Description of Artificial Sequence: Synthetic oligonucleotide
  Sense strand starting at position 931 of SEQ ID NO: 915021
gcguuaaugaauuaaagcu

SEQ ID NO: 1047677 - RNA, 19 nt, Artificial Sequence
  Description of Artificial Sequence: Synthetic oligonucleotide
  Antisense strand to SEQ ID NO: 1047676
agcuuuaauucauuaacgc

SEQ ID NO: 1047678 - RNA, 19 nt, Artificial Sequence
  Description of Artificial Sequence: Synthetic oligonucleotide
  Sense strand starting at position 956 of SEQ ID NO: 915021
ggucuucucgucuuguuau

SEQ ID NO: 1047679 - RNA, 19 nt, Artificial Sequence
  Description of Artificial Sequence: Synthetic oligonucleotide
  Antisense strand to SEQ ID NO: 1047678
auaacaagacgagaagacc

SEQ ID NO: 1047680 - RNA, 19 nt, Artificial Sequence
  Description of Artificial Sequence: Synthetic oligonucleotide
  Sense strand starting at position 1157 of SEQ ID NO: 915021
gagaaugcuagaggugaug

SEQ ID NO: 1047681 - RNA, 19 nt, Artificial Sequence
  Description of Artificial Sequence: Synthetic oligonucleotide
  Antisense strand to SEQ ID NO: 1047680
caucaccucuagcauucuc

SEQ ID NO: 1047682 - RNA, 19 nt, Artificial Sequence
  Description of Artificial Sequence: Synthetic oligonucleotide
  Sense strand starting at position 1159 of SEQ ID NO: 915021
gaaugcuagaggugauguu

SEQ ID NO: 1047683 - RNA, 19 nt, Artificial Sequence
  Description of Artificial Sequence: Synthetic oligonucleotide
  Antisense strand to SEQ ID NO: 1047682
aacaucaccucuagcauuc

SEQ ID NO: 1047684 - RNA, 19 nt, Artificial Sequence
  Description of Artificial Sequence: Synthetic oligonucleotide
  Sense strand starting at position 1293 of SEQ ID NO: 915021
uauagauauugggcuguua

SEQ ID NO: 1047685 - RNA, 19 nt, Artificial Sequence
  Description of Artificial Sequence: Synthetic oligonucleotide
  Antisense strand to SEQ ID NO: 1047684
uaacagcccaauaucuaua

SEQ ID NO: 1047686 - RNA, 19 nt, Artificial Sequence
  Description of Artificial Sequence: Synthetic oligonucleotide
  Sense strand starting at position 1385 of SEQ ID NO: 915021
uuagcucuucuauagggua

SEQ ID NO: 1047687 - RNA, 19 nt, Artificial Sequence
  Description of Artificial Sequence: Synthetic oligonucleotide
  Antisense strand to SEQ ID NO: 1047686
uacccuauagaagagcuaa

SEQ ID NO: 1047688 - RNA, 19 nt, Artificial Sequence
  Description of Artificial Sequence: Synthetic oligonucleotide
  Sense strand starting at position 1398 of SEQ ID NO: 915021
aggguaauagauuggucca

SEQ ID NO: 1047689 - RNA, 19 nt, Artificial Sequence
  Description of Artificial Sequence: Synthetic oligonucleotide
  Antisense strand to SEQ ID NO: 1047688
uggaccaaucuauuacccu

SEQ ID NO: 1047690 - RNA, 19 nt, Artificial Sequence
  Description of Artificial Sequence: Synthetic oligonucleotide
  Sense strand starting at position 1399 of SEQ ID NO: 915021
ggguaauagauugguccaa

SEQ ID NO: 1047691 - RNA, 19 nt, Artificial Sequence
  Description of Artificial Sequence: Synthetic oligonucleotide
  Antisense strand to SEQ ID NO: 1047690
uuggaccaaucuauuaccc

SEQ ID NO: 1047692 - RNA, 19 nt, Artificial Sequence
  Description of Artificial Sequence: Synthetic oligonucleotide
  Sense strand starting at position 1422 of SEQ ID NO: 915021
gugcaaggaguucaguuau

SEQ ID NO: 1047693 - RNA, 19 nt, Artificial Sequence
  Description of Artificial Sequence: Synthetic oligonucleotide
  Antisense strand to SEQ ID NO: 1047692
auaacugaacuccuugcac

SEQ ID NO: 1047694 - RNA, 19 nt, Artificial Sequence
  Description of Artificial Sequence: Synthetic oligonucleotide
  Sense strand starting at position 1508 of SEQ ID NO: 915021
gccuacuguggguauuaaa

SEQ ID NO: 1047695 - RNA, 19 nt, Artificial Sequence
  Description of Artificial Sequence: Synthetic oligonucleotide
  Antisense strand to SEQ ID NO: 1047694
uuuaauacccacaguaggc

SEQ ID NO: 1047696 - RNA, 19 nt, Artificial Sequence
  Description of Artificial Sequence: Synthetic oligonucleotide
  Sense strand starting at position 1904 of SEQ ID NO: 915021
uaucuauugcgccgauuua

SEQ ID NO: 1047697 - RNA, 19 nt, Artificial Sequence
  Description of Artificial Sequence: Synthetic oligonucleotide
  Antisense strand to SEQ ID NO: 1047696
uaaaucggcgcaauagaua

SEQ ID NO: 1047698 - RNA, 19 nt, Artificial Sequence
  Description of Artificial Sequence: Synthetic oligonucleotide
  Sense strand starting at position 2019 of SEQ ID NO: 915021
cggucaaguugaguugaaa

SEQ ID NO: 1047699 - RNA, 19 nt, Artificial Sequence
  Description of Artificial Sequence: Synthetic oligonucleotide
  Antisense strand to SEQ ID NO: 1047698
uuucaacucaacuugaccg

SEQ ID NO: 1047700 - RNA, 19 nt, Artificial Sequence
  Description of Artificial Sequence: Synthetic oligonucleotide
  Sense strand starting at position 2055 of SEQ ID NO: 915021
gggugcuuuguguuaagcu

SEQ ID NO: 1047701 - RNA, 19 nt, Artificial Sequence
  Description of Artificial Sequence: Synthetic oligonucleotide
  Antisense strand to SEQ ID NO: 1047700
agcuuaacacaaagcaccc

SEQ ID NO: 1047702 - RNA, 19 nt, Artificial Sequence
  Description of Artificial Sequence: Synthetic oligonucleotide
  Sense strand starting at position 2157 of SEQ ID NO: 915021
aguuaaguguccuuugaag

SEQ ID NO: 1047703 - RNA, 19 nt, Artificial Sequence
  Description of Artificial Sequence: Synthetic oligonucleotide
  Antisense strand to SEQ ID NO: 1047702
cuucaaaggacacuuaacu

SEQ ID NO: 1047704 - RNA, 19 nt, Artificial Sequence
  Description of Artificial Sequence: Synthetic oligonucleotide
  Sense strand starting at position 2815 of SEQ ID NO: 915021
guuaguauggcuuaguuaa

SEQ ID NO: 1047705 - RNA, 19 nt, Artificial Sequence
  Description of Artificial Sequence: Synthetic oligonucleotide
  Antisense strand to SEQ ID NO: 1047704
uuaacuaagccauacuaac

SEQ ID NO: 1047706 - RNA, 19 nt, Artificial Sequence
  Description of Artificial Sequence: Synthetic oligonucleotide
  Sense strand starting at position 2817 of SEQ ID NO: 915021
uaguauggcuuaguuaaac

SEQ ID NO: 1047707 - RNA, 19 nt, Artificial Sequence
  Description of Artificial Sequence: Synthetic oligonucleotide
  Antisense strand to SEQ ID NO: 1047706
guuuaacuaagccauacua

SEQ ID NO: 1047708 - RNA, 19 nt, Artificial Sequence
  Description of Artificial Sequence: Synthetic oligonucleotide
  Sense strand starting at position 2829 of SEQ ID NO: 915021
guuaaacuuugguuuauug

SEQ ID NO: 1047709 - RNA, 19 nt, Artificial Sequence
  Description of Artificial Sequence: Synthetic oligonucleotide
  Antisense strand to SEQ ID NO: 1047708
caauaaaccaaaguuuaac

SEQ ID NO: 1047710 - RNA, 19 nt, Artificial Sequence
  Description of Artificial Sequence: Synthetic oligonucleotide
  Sense strand starting at position 3260 of SEQ ID NO: 915021
guguuugcaacuggaauaa

SEQ ID NO: 1047711 - RNA, 19 nt, Artificial Sequence
  Description of Artificial Sequence: Synthetic oligonucleotide
  Antisense strand to SEQ ID NO: 1047710
uuauuccaguugcaaacac

SEQ ID NO: 1047712 - RNA, 19 nt, Artificial Sequence
  Description of Artificial Sequence: Synthetic oligonucleotide
  Sense strand starting at position 3278 of SEQ ID NO: 915021
agaggcaauuaauuguaua

SEQ ID NO: 1047713 - RNA, 19 nt, Artificial Sequence
  Description of Artificial Sequence: Synthetic oligonucleotide
  Antisense strand to SEQ ID NO: 1047712
uauacaauuaauugccucu

SEQ ID NO: 1047714 - RNA, 19 nt, Artificial Sequence
  Description of Artificial Sequence: Synthetic oligonucleotide
  Sense strand starting at position 3397 of SEQ ID NO: 915021
gaaaccgaucgacaucauu

SEQ ID NO: 1047715 - RNA, 19 nt, Artificial Sequence
  Description of Artificial Sequence: Synthetic oligonucleotide
  Antisense strand to SEQ ID NO: 1047714
aaugaugucgaucgguuuc

SEQ ID NO: 1047716 - RNA, 19 nt, Artificial Sequence
  Description of Artificial Sequence: Synthetic oligonucleotide
  Sense strand starting at position 3414 of SEQ ID NO: 915021
uugcucuuugccucgugaa

SEQ ID NO: 1047717 - RNA, 19 nt, Artificial Sequence
  Description of Artificial Sequence: Synthetic oligonucleotide
  Antisense strand to SEQ ID NO: 1047716
uucacgaggcaaagagcaa

SEQ ID NO: 1047718 - RNA, 19 nt, Artificial Sequence
  Description of Artificial Sequence: Synthetic oligonucleotide
  Sense strand starting at position 3521 of SEQ ID NO: 915021
uucugaguguuggugaaac

SEQ ID NO: 1047719 - RNA, 19 nt, Artificial Sequence
  Description of Artificial Sequence: Synthetic oligonucleotide
  Antisense strand to SEQ ID NO: 1047718
guuucaccaacacucagaa

SEQ ID NO: 1047720 - RNA, 19 nt, Artificial Sequence
  Description of Artificial Sequence: Synthetic oligonucleotide
  Sense strand starting at position 3523 of SEQ ID NO: 915021
cugaguguuggugaaacaa

SEQ ID NO: 1047721 - RNA, 19 nt, Artificial Sequence
  Description of Artificial Sequence: Synthetic oligonucleotide
  Antisense strand to SEQ ID NO: 1047720
uuguuucaccaacacucag

SEQ ID NO: 1047722 - RNA, 19 nt, Artificial Sequence
  Description of Artificial Sequence: Synthetic oligonucleotide
  Sense strand starting at position 3550 of SEQ ID NO: 915021
auuuccugcguuugagaca

SEQ ID NO: 1047723 - RNA, 19 nt, Artificial Sequence
  Description of Artificial Sequence: Synthetic oligonucleotide
  Antisense strand to SEQ ID NO: 1047722
ugucucaaacgcaggaaau

SEQ ID NO: 1047724 - RNA, 19 nt, Artificial Sequence
  Description of Artificial Sequence: Synthetic oligonucleotide
  Sense strand starting at position 3555 of SEQ ID NO: 915021
cugcguuugagacaugacu

SEQ ID NO: 1047725 - RNA, 19 nt, Artificial Sequence
  Description of Artificial Sequence: Synthetic oligonucleotide
  Antisense strand to SEQ ID NO: 1047724
agucaugucucaaacgcag

SEQ ID NO: 1047726 - RNA, 19 nt, Artificial Sequence
  Description of Artificial Sequence: Synthetic oligonucleotide
  Sense strand starting at position 3557 of SEQ ID NO: 915021
gcguuugagacaugacuga

SEQ ID NO: 1047727 - RNA, 19 nt, Artificial Sequence
  Description of Artificial Sequence: Synthetic oligonucleotide
  Antisense strand to SEQ ID NO: 1047726
ucagucaugucucaaacgc

SEQ ID NO: 1047728 - RNA, 19 nt, Artificial Sequence
  Description of Artificial Sequence: Synthetic oligonucleotide
  Sense strand starting at position 3596 of SEQ ID NO: 915021
cugccugaacuaugaucau

SEQ ID NO: 1047729 - RNA, 19 nt, Artificial Sequence
  Description of Artificial Sequence: Synthetic oligonucleotide
  Antisense strand to SEQ ID NO: 1047728
augaucauaguucaggcag

SEQ ID NO: 1047730 - RNA, 19 nt, Artificial Sequence
  Description of Artificial Sequence: Synthetic oligonucleotide
  Sense strand starting at position 3651 of SEQ ID NO: 915021
gauaaacaguuccuuggaa

SEQ ID NO: 1047731 - RNA, 19 nt, Artificial Sequence
  Description of Artificial Sequence: Synthetic oligonucleotide
  Antisense strand to SEQ ID NO: 1047730
uuccaaggaacuguuuauc

SEQ ID NO: 1047732 - RNA, 19 nt, Artificial Sequence
  Description of Artificial Sequence: Synthetic oligonucleotide
  Sense strand starting at position 3928 of SEQ ID NO: 915021
cuacaauaggguugagcau

SEQ ID NO: 1047733 - RNA, 19 nt, Artificial Sequence
  Description of Artificial Sequence: Synthetic oligonucleotide
  Antisense strand to SEQ ID NO: 1047732
augcucaacccuauuguag

SEQ ID NO: 1047734 - RNA, 19 nt, Artificial Sequence
  Description of Artificial Sequence: Synthetic oligonucleotide
  Sense strand starting at position 122 of SEQ ID NO: 915022
gcauaaagucauuauucug

SEQ ID NO: 1047735 - RNA, 19 nt, Artificial Sequence
  Description of Artificial Sequence: Synthetic oligonucleotide
  Antisense strand to SEQ ID NO: 1047734
cagaauaaugacuuuaugc

SEQ ID NO: 1047736 - RNA, 19 nt, Artificial Sequence
  Description of Artificial Sequence: Synthetic oligonucleotide
  Sense strand starting at position 156 of SEQ ID NO: 915022
gaaaucgugggucauacuu

SEQ ID NO: 1047737 - RNA, 19 nt, Artificial Sequence
  Description of Artificial Sequence: Synthetic oligonucleotide
  Antisense strand to SEQ ID NO: 1047736
aaguaugacccacgauuuc

SEQ ID NO: 1047738 - RNA, 19 nt, Artificial Sequence
  Description of Artificial Sequence: Synthetic oligonucleotide
  Sense strand starting at position 388 of SEQ ID NO: 915022
aguuguguuugaucauuuc

SEQ ID NO: 1047739 - RNA, 19 nt, Artificial Sequence
  Description of Artificial Sequence: Synthetic oligonucleotide
  Antisense strand to SEQ ID NO: 1047738
gaaaugaucaaacacaacu

SEQ ID NO: 1047740 - RNA, 19 nt, Artificial Sequence
  Description of Artificial Sequence: Synthetic oligonucleotide
  Sense strand starting at position 391 of SEQ ID NO: 915022
uguguuugaucauuucuuc

SEQ ID NO: 1047741 - RNA, 19 nt, Artificial Sequence
  Description of Artificial Sequence: Synthetic oligonucleotide
  Antisense strand to SEQ ID NO: 1047740
gaagaaaugaucaaacaca

SEQ ID NO: 1047742 - RNA, 19 nt, Artificial Sequence
  Description of Artificial Sequence: Synthetic oligonucleotide
  Sense strand starting at position 411 of SEQ ID NO: 915022
cacagauguuaggcuacaa

SEQ ID NO: 1047743 - RNA, 19 nt, Artificial Sequence
  Description of Artificial Sequence: Synthetic oligonucleotide
  Antisense strand to SEQ ID NO: 1047742
uuguagccuaacaucugug

SEQ ID NO: 1047744 - RNA, 19 nt, Artificial Sequence
  Description of Artificial Sequence: Synthetic oligonucleotide
  Sense strand starting at position 415 of SEQ ID NO: 915022
gauguuaggcuacaaauua

SEQ ID NO: 1047745 - RNA, 19 nt, Artificial Sequence
  Description of Artificial Sequence: Synthetic oligonucleotide
  Antisense strand to SEQ ID NO: 1047744
uaauuuguagccuaacauc

SEQ ID NO: 1047746 - RNA, 19 nt, Artificial Sequence
  Description of Artificial Sequence: Synthetic oligonucleotide
  Sense strand starting at position 493 of SEQ ID NO: 915022
ucaggaagaacuugagugu

SEQ ID NO: 1047747 - RNA, 19 nt, Artificial Sequence
  Description of Artificial Sequence: Synthetic oligonucleotide
  Antisense strand to SEQ ID NO: 1047746
acacucaaguucuuccuga

SEQ ID NO: 1047748 - RNA, 19 nt, Artificial Sequence
  Description of Artificial Sequence: Synthetic oligonucleotide
  Sense strand starting at position 496 of SEQ ID NO: 915022
ggaagaacuugaguguuac

SEQ ID NO: 1047749 - RNA, 19 nt, Artificial Sequence
  Description of Artificial Sequence: Synthetic oligonucleotide
  Antisense strand to SEQ ID NO: 1047748
guaacacucaaguucuucc

SEQ ID NO: 1047750 - RNA, 19 nt, Artificial Sequence
  Description of Artificial Sequence: Synthetic oligonucleotide
  Sense strand starting at position 497 of SEQ ID NO: 915022
gaagaacuugaguguuacu

SEQ ID NO: 1047751 - RNA, 19 nt, Artificial Sequence
  Description of Artificial Sequence: Synthetic oligonucleotide
  Antisense strand to SEQ ID NO: 1047750
aguaacacucaaguucuuc

SEQ ID NO: 1047752 - RNA, 19 nt, Artificial Sequence
  Description of Artificial Sequence: Synthetic oligonucleotide
  Sense strand starting at position 529 of SEQ ID NO: 915022
uccaauguuggacaguauu

SEQ ID NO: 1047753 - RNA, 19 nt, Artificial Sequence
  Description of Artificial Sequence: Synthetic oligonucleotide
  Antisense strand to SEQ ID NO: 1047752
aauacuguccaacauugga

SEQ ID NO: 1047754 - RNA, 19 nt, Artificial Sequence
  Description of Artificial Sequence: Synthetic oligonucleotide
  Sense strand starting at position 875 of SEQ ID NO: 915022
guacuuaacuaauuaguga

SEQ ID NO: 1047755 - RNA, 19 nt, Artificial Sequence
  Description of Artificial Sequence: Synthetic oligonucleotide
  Antisense strand to SEQ ID NO: 1047754
ucacuaauuaguuaaguac

SEQ ID NO: 1047756 - RNA, 19 nt, Artificial Sequence
  Description of Artificial Sequence: Synthetic oligonucleotide
  Sense strand starting at position 895 of SEQ ID NO: 915022
gagugucaagcuuagaaag

SEQ ID NO: 1047757 - RNA, 19 nt, Artificial Sequence
  Description of Artificial Sequence: Synthetic oligonucleotide
  Antisense strand to SEQ ID NO: 1047756
cuuucuaagcuugacacuc

SEQ ID NO: 1047758 - RNA, 19 nt, Artificial Sequence
  Description of Artificial Sequence: Synthetic oligonucleotide
  Sense strand starting at position 913 of SEQ ID NO: 915022
gaaagaaaguuucuccgaa

SEQ ID NO: 1047759 - RNA, 19 nt, Artificial Sequence
  Description of Artificial Sequence: Synthetic oligonucleotide
  Antisense strand to SEQ ID NO: 1047758
uucggagaaacuuucuuuc

SEQ ID NO: 1047760 - RNA, 19 nt, Artificial Sequence
  Description of Artificial Sequence: Synthetic oligonucleotide
  Sense strand starting at position 915 of SEQ ID NO: 915022
aagaaaguuucuccgaaag

SEQ ID NO: 1047761 - RNA, 19 nt, Artificial Sequence
  Description of Artificial Sequence: Synthetic oligonucleotide
  Antisense strand to SEQ ID NO: 1047760
cuuucggagaaacuuucuu

SEQ ID NO: 1047762 - RNA, 19 nt, Artificial Sequence
  Description of Artificial Sequence: Synthetic oligonucleotide
  Sense strand starting at position 986 of SEQ ID NO: 915022
uacuguaaugucuauagga

SEQ ID NO: 1047763 - RNA, 19 nt, Artificial Sequence
  Description of Artificial Sequence: Synthetic oligonucleotide
  Antisense strand to SEQ ID NO: 1047762
uccuauagacauuacagua

SEQ ID NO: 1047764 - RNA, 19 nt, Artificial Sequence
  Description of Artificial Sequence: Synthetic oligonucleotide
  Sense strand starting at position 1069 of SEQ ID NO: 915022
aggcuuauauagccacaaa

SEQ ID NO: 1047765 - RNA, 19 nt, Artificial Sequence
  Description of Artificial Sequence: Synthetic oligonucleotide
  Antisense strand to SEQ ID NO: 1047764
uuuguggcuauauaagccu

SEQ ID NO: 1047766 - RNA, 19 nt, Artificial Sequence
  Description of Artificial Sequence: Synthetic oligonucleotide
  Sense strand starting at position 1173 of SEQ ID NO: 915022
gugaaaguuagacauguac

SEQ ID NO: 1047767 - RNA, 19 nt, Artificial Sequence
  Description of Artificial Sequence: Synthetic oligonucleotide
  Antisense strand to SEQ ID NO: 1047766
guacaugucuaacuuucac

SEQ ID NO: 1047768 - RNA, 19 nt, Artificial Sequence
  Description of Artificial Sequence: Synthetic oligonucleotide
  Sense strand starting at position 1179 of SEQ ID NO: 915022
guuagacauguacacauau

SEQ ID NO: 1047769 - RNA, 19 nt, Artificial Sequence
  Description of Artificial Sequence: Synthetic oligonucleotide
  Antisense strand to SEQ ID NO: 1047768
auauguguacaugucuaac

SEQ ID NO: 1047770 - RNA, 19 nt, Artificial Sequence
  Description of Artificial Sequence: Synthetic oligonucleotide
  Sense strand starting at position 1210 of SEQ ID NO: 915022
uuauauguacuguacaaca

SEQ ID NO: 1047771 - RNA, 19 nt, Artificial Sequence
  Description of Artificial Sequence: Synthetic oligonucleotide
  Antisense strand to SEQ ID NO: 1047770
uguuguacaguacauauaa

SEQ ID NO: 1047772 - RNA, 19 nt, Artificial Sequence
  Description of Artificial Sequence: Synthetic oligonucleotide
  Sense strand starting at position 1589 of SEQ ID NO: 915022
uuuggaaggucauuacuua

SEQ ID NO: 1047773 - RNA, 19 nt, Artificial Sequence
  Description of Artificial Sequence: Synthetic oligonucleotide
  Antisense strand to SEQ ID NO: 1047772
uaaguaaugaccuuccaaa

SEQ ID NO: 1047774 - RNA, 19 nt, Artificial Sequence
  Description of Artificial Sequence: Synthetic oligonucleotide
  Sense strand starting at position 1983 of SEQ ID NO: 915022
agcuguaagcauuaagaua

SEQ ID NO: 1047775 - RNA, 19 nt, Artificial Sequence
  Description of Artificial Sequence: Synthetic oligonucleotide
  Antisense strand to SEQ ID NO: 1047774
uaucuuaaugcuuacagcu

SEQ ID NO: 1047776 - RNA, 19 nt, Artificial Sequence
  Description of Artificial Sequence: Synthetic oligonucleotide
  Sense strand starting at position 2070 of SEQ ID NO: 915022
uuagcuuugggacaaggua

SEQ ID NO: 1047777 - RNA, 19 nt, Artificial Sequence
  Description of Artificial Sequence: Synthetic oligonucleotide
  Antisense strand to SEQ ID NO: 1047776
uaccuugucccaaagcuaa

SEQ ID NO: 1047778 - RNA, 19 nt, Artificial Sequence
  Description of Artificial Sequence: Synthetic oligonucleotide
  Sense strand starting at position 2315 of SEQ ID NO: 915022
cuaguagauugcccuauuu

SEQ ID NO: 1047779 - RNA, 19 nt, Artificial Sequence
  Description of Artificial Sequence: Synthetic oligonucleotide
  Antisense strand to SEQ ID NO: 1047778
aaauagggcaaucuacuag

SEQ ID NO: 1047780 - RNA, 19 nt, Artificial Sequence
  Description of Artificial Sequence: Synthetic oligonucleotide
  Sense strand starting at position 2324 of SEQ ID NO: 915022
ugcccuauuuguguacuua

SEQ ID NO: 1047781 - RNA, 19 nt, Artificial Sequence
  Description of Artificial Sequence: Synthetic oligonucleotide
  Antisense strand to SEQ ID NO: 1047780
uaaguacacaaauagggca

SEQ ID NO: 1047782 - RNA, 19 nt, Artificial Sequence
  Description of Artificial Sequence: Synthetic oligonucleotide
  Sense strand starting at position 2370 of SEQ ID NO: 915022
gucaguagugaggcgucua

SEQ ID NO: 1047783 - RNA, 19 nt, Artificial Sequence
  Description of Artificial Sequence: Synthetic oligonucleotide
  Antisense strand to SEQ ID NO: 1047782
uagacgccucacuacugac

SEQ ID NO: 1047784 - RNA, 19 nt, Artificial Sequence
  Description of Artificial Sequence: Synthetic oligonucleotide
  Sense strand starting at position 2442 of SEQ ID NO: 915022
gaauuaguagcauauauug

SEQ ID NO: 1047785 - RNA, 19 nt, Artificial Sequence
  Description of Artificial Sequence: Synthetic oligonucleotide
  Antisense strand to SEQ ID NO: 1047784
caauauaugcuacuaauuc

SEQ ID NO: 1047786 - RNA, 19 nt, Artificial Sequence
  Description of Artificial Sequence: Synthetic oligonucleotide
  Sense strand starting at position 2571 of SEQ ID NO: 915022
ccaugugauccucacuuau

SEQ ID NO: 1047787 - RNA, 19 nt, Artificial Sequence
  Description of Artificial Sequence: Synthetic oligonucleotide
  Antisense strand to SEQ ID NO: 1047786
auaagugaggaucacaugg

SEQ ID NO: 1047788 - RNA, 19 nt, Artificial Sequence
  Description of Artificial Sequence: Synthetic oligonucleotide
  Sense strand starting at position 2593 of SEQ ID NO: 915022
aggagccuucucgauuaag

SEQ ID NO: 1047789 - RNA, 19 nt, Artificial Sequence
  Description of Artificial Sequence: Synthetic oligonucleotide
  Antisense strand to SEQ ID NO: 1047788
cuuaaucgagaaggcuccu

SEQ ID NO: 1047790 - RNA, 19 nt, Artificial Sequence
  Description of Artificial Sequence: Synthetic oligonucleotide
  Sense strand starting at position 2647 of SEQ ID NO: 915022
acuuuagaagcuggagaau

SEQ ID NO: 1047791 - RNA, 19 nt, Artificial Sequence
  Description of Artificial Sequence: Synthetic oligonucleotide
  Antisense strand to SEQ ID NO: 1047790
auucuccagcuucuaaagu

SEQ ID NO: 1047792 - RNA, 19 nt, Artificial Sequence
  Description of Artificial Sequence: Synthetic oligonucleotide
  Sense strand starting at position 2678 of SEQ ID NO: 915022
cagguaaugcuugauuaaa

SEQ ID NO: 1047793 - RNA, 19 nt, Artificial Sequence
  Description of Artificial Sequence: Synthetic oligonucleotide
  Antisense strand to SEQ ID NO: 1047792
uuuaaucaagcauuaccug

SEQ ID NO: 1047794 - RNA, 19 nt, Artificial Sequence
  Description of Artificial Sequence: Synthetic oligonucleotide
  Sense strand starting at position 2680 of SEQ ID NO: 915022
gguaaugcuugauuaaaua

SEQ ID NO: 1047795 - RNA, 19 nt, Artificial Sequence
  Description of Artificial Sequence: Synthetic oligonucleotide
  Antisense strand to SEQ ID NO: 1047794
uauuuaaucaagcauuacc

SEQ ID NO: 1047796 - RNA, 19 nt, Artificial Sequence
  Description of Artificial Sequence: Synthetic oligonucleotide
  Sense strand starting at position 2772 of SEQ ID NO: 915022
ugggaucuuccgcacauca

SEQ ID NO: 1047797 - RNA, 19 nt, Artificial Sequence
  Description of Artificial Sequence: Synthetic oligonucleotide
  Antisense strand to SEQ ID NO: 1047796
ugaugugcggaagauccca

SEQ ID NO: 1047798 - RNA, 19 nt, Artificial Sequence
  Description of Artificial Sequence: Synthetic oligonucleotide
  Sense strand starting at position 2956 of SEQ ID NO: 915022
guuaauuggcccgaggaaa

SEQ ID NO: 1047799 - RNA, 19 nt, Artificial Sequence
  Description of Artificial Sequence: Synthetic oligonucleotide
  Antisense strand to SEQ ID NO: 1047798
uuuccucgggccaauuaac

SEQ ID NO: 1047800 - RNA, 19 nt, Artificial Sequence
  Description of Artificial Sequence: Synthetic oligonucleotide
  Sense strand starting at position 3140 of SEQ ID NO: 915022
acugaacaguggcuuaaua

SEQ ID NO: 1047801 - RNA, 19 nt, Artificial Sequence
  Description of Artificial Sequence: Synthetic oligonucleotide
  Antisense strand to SEQ ID NO: 1047800
uauuaagccacuguucagu

SEQ ID NO: 1047802 - RNA, 19 nt, Artificial Sequence
  Description of Artificial Sequence: Synthetic oligonucleotide
  Sense strand starting at position 3221 of SEQ ID NO: 915022
ucuguuuguaguuagagaa

SEQ ID NO: 1047803 - RNA, 19 nt, Artificial Sequence
  Description of Artificial Sequence: Synthetic oligonucleotide
  Antisense strand to SEQ ID NO: 1047802
uucucuaacuacaaacaga

SEQ ID NO: 1047804 - RNA, 19 nt, Artificial Sequence
  Description of Artificial Sequence: Synthetic oligonucleotide
  Sense strand starting at position 3335 of SEQ ID NO: 915022
guaauuauggcuuauacca

SEQ ID NO: 1047805 - RNA, 19 nt, Artificial Sequence
  Description of Artificial Sequence: Synthetic oligonucleotide
  Antisense strand to SEQ ID NO: 1047804
ugguauaagccauaauuac

SEQ ID NO: 1047806 - RNA, 19 nt, Artificial Sequence
  Description of Artificial Sequence: Synthetic oligonucleotide
  Sense strand starting at position 3377 of SEQ ID NO: 915022
uugcuauagcucuccguuu

SEQ ID NO: 1047807 - RNA, 19 nt, Artificial Sequence
  Description of Artificial Sequence: Synthetic oligonucleotide
  Antisense strand to SEQ ID NO: 1047806
aaacggagagcuauagcaa

SEQ ID NO: 1047808 - RNA, 19 nt, Artificial Sequence
  Description of Artificial Sequence: Synthetic oligonucleotide
  Sense strand starting at position 3412 of SEQ ID NO: 915022
cccgcuaauuucucauguu

SEQ ID NO: 1047809 - RNA, 19 nt, Artificial Sequence
  Description of Artificial Sequence: Synthetic oligonucleotide
  Antisense strand to SEQ ID NO: 1047808
aacaugagaaauuagcggg

SEQ ID NO: 1047810 - RNA, 19 nt, Artificial Sequence
  Description of Artificial Sequence: Synthetic oligonucleotide
  Sense strand starting at position 3577 of SEQ ID NO: 915022
aaauguaaacuguacguaa

SEQ ID NO: 1047811 - RNA, 19 nt, Artificial Sequence
  Description of Artificial Sequence: Synthetic oligonucleotide
  Antisense strand to SEQ ID NO: 1047810
uuacguacaguuuacauuu

SEQ ID NO: 1047812 - RNA, 19 nt, Artificial Sequence
  Description of Artificial Sequence: Synthetic oligonucleotide
  Sense strand starting at position 3829 of SEQ ID NO: 915022
ugugcagugcuuguauaau

SEQ ID NO: 1047813 - RNA, 19 nt, Artificial Sequence
  Description of Artificial Sequence: Synthetic oligonucleotide
  Antisense strand to SEQ ID NO: 1047812
auuauacaagcacugcaca

SEQ ID NO: 1047814 - RNA, 19 nt, Artificial Sequence
  Description of Artificial Sequence: Synthetic oligonucleotide
  Sense strand starting at position 527 of SEQ ID NO: 915023
gccucauuguucuggagac

SEQ ID NO: 1047815 - RNA, 19 nt, Artificial Sequence
  Description of Artificial Sequence: Synthetic oligonucleotide
  Antisense strand to SEQ ID NO: 1047814
gucuccagaacaaugaggc

SEQ ID NO: 1047816 - RNA, 19 nt, Artificial Sequence
  Description of Artificial Sequence: Synthetic oligonucleotide
  Sense strand starting at position 528 of SEQ ID NO: 915023
ccucauuguucuggagaca

SEQ ID NO: 1047817 - RNA, 19 nt, Artificial Sequence
  Description of Artificial Sequence: Synthetic oligonucleotide
  Antisense strand to SEQ ID NO: 1047816
ugucuccagaacaaugagg

SEQ ID NO: 1047818 - RNA, 19 nt, Artificial Sequence
  Description of Artificial Sequence: Synthetic oligonucleotide
  Sense strand starting at position 783 of SEQ ID NO: 915023
gcucaucaguguuuguuga

SEQ ID NO: 1047819 - RNA, 19 nt, Artificial Sequence
  Description of Artificial Sequence: Synthetic oligonucleotide
  Antisense strand to SEQ ID NO: 1047818
ucaacaaacacugaugagc

SEQ ID NO: 1047820 - RNA, 19 nt, Artificial Sequence
  Description of Artificial Sequence: Synthetic oligonucleotide
  Sense strand starting at position 802 of SEQ ID NO: 915023
augaauuagugaccugaac

SEQ ID NO: 1047821 - RNA, 19 nt, Artificial Sequence
  Description of Artificial Sequence: Synthetic oligonucleotide
  Antisense strand to SEQ ID NO: 1047820
guucaggucacuaauucau

SEQ ID NO: 1047822 - RNA, 19 nt, Artificial Sequence
  Description of Artificial Sequence: Synthetic oligonucleotide
  Sense strand starting at position 832 of SEQ ID NO: 915023
ggcuguucuccugagcugu

SEQ ID NO: 1047823 - RNA, 19 nt, Artificial Sequence
  Description of Artificial Sequence: Synthetic oligonucleotide
  Antisense strand to SEQ ID NO: 1047822
acagcucaggagaacagcc

SEQ ID NO: 1047824 - RNA, 19 nt, Artificial Sequence
  Description of Artificial Sequence: Synthetic oligonucleotide
  Sense strand starting at position 888 of SEQ ID NO: 915023
auaucccuuugggaaacau

SEQ ID NO: 1047825 - RNA, 19 nt, Artificial Sequence
  Description of Artificial Sequence: Synthetic oligonucleotide
  Antisense strand to SEQ ID NO: 1047824
auguuucccaaagggauau

SEQ ID NO: 1047826 - RNA, 19 nt, Artificial Sequence
  Description of Artificial Sequence: Synthetic oligonucleotide
  Sense strand starting at position 1215 of SEQ ID NO: 915023
gguucugcccucugaggga

SEQ ID NO: 1047827 - RNA, 19 nt, Artificial Sequence
  Description of Artificial Sequence: Synthetic oligonucleotide
  Antisense strand to SEQ ID NO: 1047826
ucccucagagggcagaacc

SEQ ID NO: 1047828 - RNA, 19 nt, Artificial Sequence
  Description of Artificial Sequence: Synthetic oligonucleotide
  Sense strand starting at position 1279 of SEQ ID NO: 915023
ccaagcuacccucgagaga

SEQ ID NO: 1047829 - RNA, 19 nt, Artificial Sequence
  Description of Artificial Sequence: Synthetic oligonucleotide
  Antisense strand to SEQ ID NO: 1047828
ucucucgaggguagcuugg

SEQ ID NO: 1047830 - RNA, 19 nt, Artificial Sequence
  Description of Artificial Sequence: Synthetic oligonucleotide
  Sense strand starting at position 1280 of SEQ ID NO: 915023
caagcuacccucgagagaa

SEQ ID NO: 1047831 - RNA, 19 nt, Artificial Sequence
  Description of Artificial Sequence: Synthetic oligonucleotide
  Antisense strand to SEQ ID NO: 1047830
uucucucgaggguagcuug

SEQ ID NO: 1047832 - RNA, 19 nt, Artificial Sequence
  Description of Artificial Sequence: Synthetic oligonucleotide
  Sense strand starting at position 1353 of SEQ ID NO: 915023
cgggaaagguuccuuccua

SEQ ID NO: 1047833 - RNA, 19 nt, Artificial Sequence
  Description of Artificial Sequence: Synthetic oligonucleotide
  Antisense strand to SEQ ID NO: 1047832
uaggaaggaaccuuucccg

SEQ ID NO: 1047834 - RNA, 19 nt, Artificial Sequence
  Description of Artificial Sequence: Synthetic oligonucleotide
  Sense strand starting at position 1354 of SEQ ID NO: 915023
gggaaagguuccuuccuau

SEQ ID NO: 1047835 - RNA, 19 nt, Artificial Sequence
  Description of Artificial Sequence: Synthetic oligonucleotide
  Antisense strand to SEQ ID NO: 1047834
auaggaaggaaccuuuccc

SEQ ID NO: 1047836 - RNA, 19 nt, Artificial Sequence
  Description of Artificial Sequence: Synthetic oligonucleotide
  Sense strand starting at position 1711 of SEQ ID NO: 915023
cuuccagcuccuugaaagu

SEQ ID NO: 1047837 - RNA, 19 nt, Artificial Sequence
  Description of Artificial Sequence: Synthetic oligonucleotide
  Antisense strand to SEQ ID NO: 1047836
acuuucaaggagcuggaag

SEQ ID NO: 1047838 - RNA, 19 nt, Artificial Sequence
  Description of Artificial Sequence: Synthetic oligonucleotide
  Sense strand starting at position 2015 of SEQ ID NO: 915023
gggucugguccuuauaugu

SEQ ID NO: 1047839 - RNA, 19 nt, Artificial Sequence
  Description of Artificial Sequence: Synthetic oligonucleotide
  Antisense strand to SEQ ID NO: 1047838
acauauaaggaccagaccc

SEQ ID NO: 1047840 - RNA, 19 nt, Artificial Sequence
  Description of Artificial Sequence: Synthetic oligonucleotide
  Sense strand starting at position 2025 of SEQ ID NO: 915023
cuuauauguccuggcagga

SEQ ID NO: 1047841 - RNA, 19 nt, Artificial Sequence
  Description of Artificial Sequence: Synthetic oligonucleotide
  Antisense strand to SEQ ID NO: 1047840
uccugccaggacauauaag

SEQ ID NO: 1047842 - RNA, 19 nt, Artificial Sequence
  Description of Artificial Sequence: Synthetic oligonucleotide
  Sense strand starting at position 2081 of SEQ ID NO: 915023
ggguguggcaucugccaga

SEQ ID NO: 1047843 - RNA, 19 nt, Artificial Sequence
  Description of Artificial Sequence: Synthetic oligonucleotide
  Antisense strand to SEQ ID NO: 1047842
ucuggcagaugccacaccc

SEQ ID NO: 1047844 - RNA, 19 nt, Artificial Sequence
  Description of Artificial Sequence: Synthetic oligonucleotide
  Sense strand starting at position 2084 of SEQ ID NO: 915023
uguggcaucugccagauga

SEQ ID NO: 1047845 - RNA, 19 nt, Artificial Sequence
  Description of Artificial Sequence: Synthetic oligonucleotide
  Antisense strand to SEQ ID NO: 1047844
ucaucuggcagaugccaca

SEQ ID NO: 1047846 - RNA, 19 nt, Artificial Sequence
  Description of Artificial Sequence: Synthetic oligonucleotide
  Sense strand starting at position 2086 of SEQ ID NO: 915023
uggcaucugccagaugauc

SEQ ID NO: 1047847 - RNA, 19 nt, Artificial Sequence
  Description of Artificial Sequence: Synthetic oligonucleotide
  Antisense strand to SEQ ID NO: 1047846
gaucaucuggcagaugcca

SEQ ID NO: 1047848 - RNA, 19 nt, Artificial Sequence
  Description of Artificial Sequence: Synthetic oligonucleotide
  Sense strand starting at position 2145 of SEQ ID NO: 915023
auugauucagguuaucgga

SEQ ID NO: 1047849 - RNA, 19 nt, Artificial Sequence
  Description of Artificial Sequence: Synthetic oligonucleotide
  Antisense strand to SEQ ID NO: 1047848
uccgauaaccugaaucaau

SEQ ID NO: 1047850 - RNA, 19 nt, Artificial Sequence
  Description of Artificial Sequence: Synthetic oligonucleotide
  Sense strand starting at position 2152 of SEQ ID NO: 915023
cagguuaucggaggucauc

SEQ ID NO: 1047851 - RNA, 19 nt, Artificial Sequence
  Description of Artificial Sequence: Synthetic oligonucleotide
  Antisense strand to SEQ ID NO: 1047850
gaugaccuccgauaaccug

SEQ ID NO: 1047852 - RNA, 19 nt, Artificial Sequence
  Description of Artificial Sequence: Synthetic oligonucleotide
  Sense strand starting at position 2163 of SEQ ID NO: 915023
aggucaucucuuuauggcu

SEQ ID NO: 1047853 - RNA, 19 nt, Artificial Sequence
  Description of Artificial Sequence: Synthetic oligonucleotide
  Antisense strand to SEQ ID NO: 1047852
agccauaaagagaugaccu

SEQ ID NO: 1047854 - RNA, 19 nt, Artificial Sequence
  Description of Artificial Sequence: Synthetic oligonucleotide
  Sense strand starting at position 2298 of SEQ ID NO: 915023
gguguccugccagaagcaa

SEQ ID NO: 1047855 - RNA, 19 nt, Artificial Sequence
  Description of Artificial Sequence: Synthetic oligonucleotide
  Antisense strand to SEQ ID NO: 1047854
uugcuucuggcaggacacc

SEQ ID NO: 1047856 - RNA, 19 nt, Artificial Sequence
  Description of Artificial Sequence: Synthetic oligonucleotide
  Sense strand starting at position 2517 of SEQ ID NO: 915023
cacugacuugugugggacu

SEQ ID NO: 1047857 - RNA, 19 nt, Artificial Sequence
  Description of Artificial Sequence: Synthetic oligonucleotide
  Antisense strand to SEQ ID NO: 1047856
agucccacacaagucagug

SEQ ID NO: 1047858 - RNA, 19 nt, Artificial Sequence
  Description of Artificial Sequence: Synthetic oligonucleotide
  Sense strand starting at position 2520 of SEQ ID NO: 915023
ugacuugugugggacucuu

SEQ ID NO: 1047859 - RNA, 19 nt, Artificial Sequence
  Description of Artificial Sequence: Synthetic oligonucleotide
  Antisense strand to SEQ ID NO: 1047858
aagagucccacacaaguca

SEQ ID NO: 1047860 - RNA, 19 nt, Artificial Sequence
  Description of Artificial Sequence: Synthetic oligonucleotide
  Sense strand starting at position 2544 of SEQ ID NO: 915023
ggcucauggagcuguguca

SEQ ID NO: 1047861 - RNA, 19 nt, Artificial Sequence
  Description of Artificial Sequence: Synthetic oligonucleotide
  Antisense strand to SEQ ID NO: 1047860
ugacacagcuccaugagcc

SEQ ID NO: 1047862 - RNA, 19 nt, Artificial Sequence
  Description of Artificial Sequence: Synthetic oligonucleotide
  Sense strand starting at position 2611 of SEQ ID NO: 915023
gagcccuucucugcaguua

SEQ ID NO: 1047863 - RNA, 19 nt, Artificial Sequence
  Description of Artificial Sequence: Synthetic oligonucleotide
  Antisense strand to SEQ ID NO: 1047862
uaacugcagagaagggcuc

SEQ ID NO: 1047864 - RNA, 19 nt, Artificial Sequence
  Description of Artificial Sequence: Synthetic oligonucleotide
  Sense strand starting at position 2667 of SEQ ID NO: 915023
gggacauguuacggaauca

SEQ ID NO: 1047865 - RNA, 19 nt, Artificial Sequence
  Description of Artificial Sequence: Synthetic oligonucleotide
  Antisense strand to SEQ ID NO: 1047864
ugauuccguaacauguccc

SEQ ID NO: 1047866 - RNA, 19 nt, Artificial Sequence
  Description of Artificial Sequence: Synthetic oligonucleotide
  Sense strand starting at position 2877 of SEQ ID NO: 915023
cccagcaguugucuggaaa

SEQ ID NO: 1047867 - RNA, 19 nt, Artificial Sequence
  Description of Artificial Sequence: Synthetic oligonucleotide
  Antisense strand to SEQ ID NO: 1047866
uuuccagacaacugcuggg

SEQ ID NO: 1047868 - RNA, 19 nt, Artificial Sequence
  Description of Artificial Sequence: Synthetic oligonucleotide
  Sense strand starting at position 3088 of SEQ ID NO: 915023
cuggcuuuggccugaacau

SEQ ID NO: 1047869 - RNA, 19 nt, Artificial Sequence
  Description of Artificial Sequence: Synthetic oligonucleotide
  Antisense strand to SEQ ID NO: 1047868
auguucaggccaaagccag

SEQ ID NO: 1047870 - RNA, 19 nt, Artificial Sequence
  Description of Artificial Sequence: Synthetic oligonucleotide
  Sense strand starting at position 3089 of SEQ ID NO: 915023
uggcuuuggccugaacaug

SEQ ID NO: 1047871 - RNA, 19 nt, Artificial Sequence
  Description of Artificial Sequence: Synthetic oligonucleotide
  Antisense strand to SEQ ID NO: 1047870
cauguucaggccaaagcca

SEQ ID NO: 1047872 - RNA, 19 nt, Artificial Sequence
  Description of Artificial Sequence: Synthetic oligonucleotide
  Sense strand starting at position 3383 of SEQ ID NO: 915023
gccagaggagaucauuguu

SEQ ID NO: 1047873 - RNA, 19 nt, Artificial Sequence
  Description of Artificial Sequence: Synthetic oligonucleotide
  Antisense strand to SEQ ID NO: 1047872
aacaaugaucuccucuggc

SEQ ID NO: 1047874 - RNA, 19 nt, Artificial Sequence
  Description of Artificial Sequence: Synthetic oligonucleotide
  Sense strand starting at position 3724 of SEQ ID NO: 915023
agcccugucugagguuaca

SEQ ID NO: 1047875 - RNA, 19 nt, Artificial Sequence
  Description of Artificial Sequence: Synthetic oligonucleotide
  Antisense strand to SEQ ID NO: 1047874
uguaaccucagacagggcu

SEQ ID NO: 1047876 - RNA, 19 nt, Artificial Sequence
  Description of Artificial Sequence: Synthetic oligonucleotide
  Sense strand starting at position 96 of SEQ ID NO: 915024
gccauugucugcccaguuu

SEQ ID NO: 1047877 - RNA, 19 nt, Artificial Sequence
  Description of Artificial Sequence: Synthetic oligonucleotide
  Antisense strand to SEQ ID NO: 1047876
aaacugggcagacaauggc

SEQ ID NO: 1047878 - RNA, 19 nt, Artificial Sequence
  Description of Artificial Sequence: Synthetic oligonucleotide
  Sense strand starting at position 154 of SEQ ID NO: 915024
ccuggauccugaucugaga

SEQ ID NO: 1047879 - RNA, 19 nt, Artificial Sequence
  Description of Artificial Sequence: Synthetic oligonucleotide
  Antisense strand to SEQ ID NO: 1047878
ucucagaucaggauccagg

SEQ ID NO: 1047880 - RNA, 19 nt, Artificial Sequence
  Description of Artificial Sequence: Synthetic oligonucleotide
  Sense strand starting at position 621 of SEQ ID NO: 915024
gcugacugcccuugguuau

SEQ ID NO: 1047881 - RNA, 19 nt, Artificial Sequence
  Description of Artificial Sequence: Synthetic oligonucleotide
  Antisense strand to SEQ ID NO: 1047880
auaaccaagggcagucagc

SEQ ID NO: 1047882 - RNA, 19 nt, Artificial Sequence
  Description of Artificial Sequence: Synthetic oligonucleotide
  Sense strand starting at position 682 of SEQ ID NO: 915024
uccaucuuguagccagaga

SEQ ID NO: 1047883 - RNA, 19 nt, Artificial Sequence
  Description of Artificial Sequence: Synthetic oligonucleotide
  Antisense strand to SEQ ID NO: 1047882
ucucuggcuacaagaugga

SEQ ID NO: 1047884 - RNA, 19 nt, Artificial Sequence
  Description of Artificial Sequence: Synthetic oligonucleotide
  Sense strand starting at position 789 of SEQ ID NO: 915024
acgugcaucuggugacuaa

SEQ ID NO: 1047885 - RNA, 19 nt, Artificial Sequence
  Description of Artificial Sequence: Synthetic oligonucleotide
  Antisense strand to SEQ ID NO: 1047884
uuagucaccagaugcacgu

SEQ ID NO: 1047886 - RNA, 19 nt, Artificial Sequence
  Description of Artificial Sequence: Synthetic oligonucleotide
  Sense strand starting at position 790 of SEQ ID NO: 915024
cgugcaucuggugacuaaa

SEQ ID NO: 1047887 - RNA, 19 nt, Artificial Sequence
  Description of Artificial Sequence: Synthetic oligonucleotide
  Antisense strand to SEQ ID NO: 1047886
uuuagucaccagaugcacg

SEQ ID NO: 1047888 - RNA, 19 nt, Artificial Sequence
  Description of Artificial Sequence: Synthetic oligonucleotide
  Sense strand starting at position 921 of SEQ ID NO: 915024
gcugcauggcccggaagaa

SEQ ID NO: 1047889 - RNA, 19 nt, Artificial Sequence
  Description of Artificial Sequence: Synthetic oligonucleotide
  Antisense strand to SEQ ID NO: 1047888
uucuuccgggccaugcagc

SEQ ID NO: 1047890 - RNA, 19 nt, Artificial Sequence
  Description of Artificial Sequence: Synthetic oligonucleotide
  Sense strand starting at position 922 of SEQ ID NO: 915024
cugcauggcccggaagaau

SEQ ID NO: 1047891 - RNA, 19 nt, Artificial Sequence
  Description of Artificial Sequence: Synthetic oligonucleotide
  Antisense strand to SEQ ID NO: 1047890
auucuuccgggccaugcag

SEQ ID NO: 1047892 - RNA, 19 nt, Artificial Sequence
  Description of Artificial Sequence: Synthetic oligonucleotide
  Sense strand starting at position 931 of SEQ ID NO: 915024
ccggaagaaucagaugcaa

SEQ ID NO: 1047893 - RNA, 19 nt, Artificial Sequence
  Description of Artificial Sequence: Synthetic oligonucleotide
  Antisense strand to SEQ ID NO: 1047892
uugcaucugauucuuccgg

SEQ ID NO: 1047894 - RNA, 19 nt, Artificial Sequence
  Description of Artificial Sequence: Synthetic oligonucleotide
  Sense strand starting at position 953 of SEQ ID NO: 915024
gguggcuauucuggucaaa

SEQ ID NO: 1047895 - RNA, 19 nt, Artificial Sequence
  Description of Artificial Sequence: Synthetic oligonucleotide
  Antisense strand to SEQ ID NO: 1047894
uuugaccagaauagccacc

SEQ ID NO: 1047896 - RNA, 19 nt, Artificial Sequence
  Description of Artificial Sequence: Synthetic oligonucleotide
  Sense strand starting at position 955 of SEQ ID NO: 915024
uggcuauucuggucaaacc

SEQ ID NO: 1047897 - RNA, 19 nt, Artificial Sequence
  Description of Artificial Sequence: Synthetic oligonucleotide
  Antisense strand to SEQ ID NO: 1047896
gguuugaccagaauagcca

SEQ ID NO: 1047898 - RNA, 19 nt, Artificial Sequence
  Description of Artificial Sequence: Synthetic oligonucleotide
  Sense strand starting at position 956 of SEQ ID NO: 915024
ggcuauucuggucaaacca

SEQ ID NO: 1047899 - RNA, 19 nt, Artificial Sequence
  Description of Artificial Sequence: Synthetic oligonucleotide
  Antisense strand to SEQ ID NO: 1047898
ugguuugaccagaauagcc

SEQ ID NO: 1047900 - RNA, 19 nt, Artificial Sequence
  Description of Artificial Sequence: Synthetic oligonucleotide
  Sense strand starting at position 1217 of SEQ ID NO: 915024
ggcugcaucuuucucuauu

SEQ ID NO: 1047901 - RNA, 19 nt, Artificial Sequence
  Description of Artificial Sequence: Synthetic oligonucleotide
  Antisense strand to SEQ ID NO: 1047900
aauagagaaagaugcagcc

SEQ ID NO: 1047902 - RNA, 19 nt, Artificial Sequence
  Description of Artificial Sequence: Synthetic oligonucleotide
  Sense strand starting at position 1223 of SEQ ID NO: 915024
aucuuucucuauugacagu

SEQ ID NO: 1047903 - RNA, 19 nt, Artificial Sequence
  Description of Artificial Sequence: Synthetic oligonucleotide
  Antisense strand to SEQ ID NO: 1047902
acugucaauagagaaagau

SEQ ID NO: 1047904 - RNA, 19 nt, Artificial Sequence
  Description of Artificial Sequence: Synthetic oligonucleotide
  Sense strand starting at position 1229 of SEQ ID NO: 915024
cucuauugacaguaaguau

SEQ ID NO: 1047905 - RNA, 19 nt, Artificial Sequence
  Description of Artificial Sequence: Synthetic oligonucleotide
  Antisense strand to SEQ ID NO: 1047904
auacuuacugucaauagag

SEQ ID NO: 1047906 - RNA, 19 nt, Artificial Sequence
  Description of Artificial Sequence: Synthetic oligonucleotide
  Sense strand starting at position 1236 of SEQ ID NO: 915024
gacaguaaguauuaaugcu

SEQ ID NO: 1047907 - RNA, 19 nt, Artificial Sequence
  Description of Artificial Sequence: Synthetic oligonucleotide
  Antisense strand to SEQ ID NO: 1047906
agcauuaauacuuacuguc

SEQ ID NO: 1047908 - RNA, 19 nt, Artificial Sequence
  Description of Artificial Sequence: Synthetic oligonucleotide
  Sense strand starting at position 1320 of SEQ ID NO: 915024
gcaugagaugcccacagau

SEQ ID NO: 1047909 - RNA, 19 nt, Artificial Sequence
  Description of Artificial Sequence: Synthetic oligonucleotide
  Antisense strand to SEQ ID NO: 1047908
aucugugggcaucucaugc

SEQ ID NO: 1047910 - RNA, 19 nt, Artificial Sequence
  Description of Artificial Sequence: Synthetic oligonucleotide
  Sense strand starting at position 1674 of SEQ ID NO: 915024
cccugaguuuccugacacu

SEQ ID NO: 1047911 - RNA, 19 nt, Artificial Sequence
  Description of Artificial Sequence: Synthetic oligonucleotide
  Antisense strand to SEQ ID NO: 1047910
agugucaggaaacucaggg

SEQ ID NO: 1047912 - RNA, 19 nt, Artificial Sequence
  Description of Artificial Sequence: Synthetic oligonucleotide
  Sense strand starting at position 2195 of SEQ ID NO: 915024
cccagcagcuucugagaau

SEQ ID NO: 1047913 - RNA, 19 nt, Artificial Sequence
  Description of Artificial Sequence: Synthetic oligonucleotide
  Antisense strand to SEQ ID NO: 1047912
auucucagaagcugcuggg

SEQ ID NO: 1047914 - RNA, 19 nt, Artificial Sequence
  Description of Artificial Sequence: Synthetic oligonucleotide
  Sense strand starting at position 2665 of SEQ ID NO: 915024
cagagugucuccuggccau

SEQ ID NO: 1047915 - RNA, 19 nt, Artificial Sequence
  Description of Artificial Sequence: Synthetic oligonucleotide
  Antisense strand to SEQ ID NO: 1047914
auggccaggagacacucug

SEQ ID NO: 1047916 - RNA, 19 nt, Artificial Sequence
  Description of Artificial Sequence: Synthetic oligonucleotide
  Sense strand starting at position 2929 of SEQ ID NO: 915024
ugguaaaccuccuugacga

SEQ ID NO: 1047917 - RNA, 19 nt, Artificial Sequence
  Description of Artificial Sequence: Synthetic oligonucleotide
  Antisense strand to SEQ ID NO: 1047916
ucgucaaggagguuuacca

SEQ ID NO: 1047918 - RNA, 19 nt, Artificial Sequence
  Description of Artificial Sequence: Synthetic oligonucleotide
  Sense strand starting at position 2930 of SEQ ID NO: 915024
gguaaaccuccuugacgag

SEQ ID NO: 1047919 - RNA, 19 nt, Artificial Sequence
  Description of Artificial Sequence: Synthetic oligonucleotide
  Antisense strand to SEQ ID NO: 1047918
cucgucaaggagguuuacc

SEQ ID NO: 1047920 - RNA, 19 nt, Artificial Sequence
  Description of Artificial Sequence: Synthetic oligonucleotide
  Sense strand starting at position 2946 of SEQ ID NO: 915024
gagcgucaucuacaggaca

SEQ ID NO: 1047921 - RNA, 19 nt, Artificial Sequence
  Description of Artificial Sequence: Synthetic oligonucleotide
  Antisense strand to SEQ ID NO: 1047920
uguccuguagaugacgcuc

SEQ ID NO: 1047922 - RNA, 19 nt, Artificial Sequence
  Description of Artificial Sequence: Synthetic oligonucleotide
  Sense strand starting at position 2948 of SEQ ID NO: 915024
gcgucaucuacaggacaga

SEQ ID NO: 1047923 - RNA, 19 nt, Artificial Sequence
  Description of Artificial Sequence: Synthetic oligonucleotide
  Antisense strand to SEQ ID NO: 1047922
ucuguccuguagaugacgc

SEQ ID NO: 1047924 - RNA, 19 nt, Artificial Sequence
  Description of Artificial Sequence: Synthetic oligonucleotide
  Sense strand starting at position 2969 of SEQ ID NO: 915024
gcgucaucugcaggacacu

SEQ ID NO: 1047925 - RNA, 19 nt, Artificial Sequence
  Description of Artificial Sequence: Synthetic oligonucleotide
  Antisense strand to SEQ ID NO: 1047924
aguguccugcagaugacgc

SEQ ID NO: 1047926 - RNA, 19 nt, Artificial Sequence
  Description of Artificial Sequence: Synthetic oligonucleotide
  Sense strand starting at position 3230 of SEQ ID NO: 915024
ccgcguuugucuuucugaa

SEQ ID NO: 1047927 - RNA, 19 nt, Artificial Sequence
  Description of Artificial Sequence: Synthetic oligonucleotide
  Antisense strand to SEQ ID NO: 1047926
uucagaaagacaaacgcgg

SEQ ID NO: 1047928 - RNA, 19 nt, Artificial Sequence
  Description of Artificial Sequence: Synthetic oligonucleotide
  Sense strand starting at position 3231 of SEQ ID NO: 915024
cgcguuugucuuucugaag

SEQ ID NO: 1047929 - RNA, 19 nt, Artificial Sequence
  Description of Artificial Sequence: Synthetic oligonucleotide
  Antisense strand to SEQ ID NO: 1047928
cuucagaaagacaaacgcg

SEQ ID NO: 1047930 - RNA, 19 nt, Artificial Sequence
  Description of Artificial Sequence: Synthetic oligonucleotide
  Sense strand starting at position 3232 of SEQ ID NO: 915024
gcguuugucuuucugaagu

SEQ ID NO: 1047931 - RNA, 19 nt, Artificial Sequence
  Description of Artificial Sequence: Synthetic oligonucleotide
  Antisense strand to SEQ ID NO: 1047930
acuucagaaagacaaacgc

SEQ ID NO: 1047932 - RNA, 19 nt, Artificial Sequence
  Description of Artificial Sequence: Synthetic oligonucleotide
  Sense strand starting at position 3234 of SEQ ID NO: 915024
guuugucuuucugaaguua

SEQ ID NO: 1047933 - RNA, 19 nt, Artificial Sequence
  Description of Artificial Sequence: Synthetic oligonucleotide
  Antisense strand to SEQ ID NO: 1047932
uaacuucagaaagacaaac

SEQ ID NO: 1047934 - RNA, 19 nt, Artificial Sequence
  Description of Artificial Sequence: Synthetic oligonucleotide
  Sense strand starting at position 3247 of SEQ ID NO: 915024
aaguuaaauucuuagaggu

SEQ ID NO: 1047935 - RNA, 19 nt, Artificial Sequence
  Description of Artificial Sequence: Synthetic oligonucleotide
  Antisense strand to SEQ ID NO: 1047934
accucuaagaauuuaacuu

SEQ ID NO: 1047936 - RNA, 19 nt, Artificial Sequence
  Description of Artificial Sequence: Synthetic oligonucleotide
  Sense strand starting at position 3357 of SEQ ID NO: 915024
uaggaaguguuggcagaga

SEQ ID NO: 1047937 - RNA, 19 nt, Artificial Sequence
  Description of Artificial Sequence: Synthetic oligonucleotide
  Antisense strand to SEQ ID NO: 1047936
ucucugccaacacuuccua

SEQ ID NO: 1047938 - RNA, 19 nt, Artificial Sequence
  Description of Artificial Sequence: Synthetic oligonucleotide
  Sense strand starting at position 3566 of SEQ ID NO: 915024
ugauccgugcgguggaaua

SEQ ID NO: 1047939 - RNA, 19 nt, Artificial Sequence
  Description of Artificial Sequence: Synthetic oligonucleotide
  Antisense strand to SEQ ID NO: 1047938
uauuccaccgcacggauca

SEQ ID NO: 1047940 - RNA, 19 nt, Artificial Sequence
  Description of Artificial Sequence: Synthetic oligonucleotide
  Sense strand starting at position 3798 of SEQ ID NO: 915024
aggguuucagcuugggaau

SEQ ID NO: 1047941 - RNA, 19 nt, Artificial Sequence
  Description of Artificial Sequence: Synthetic oligonucleotide
  Antisense strand to SEQ ID NO: 1047940
auucccaagcugaaacccu

SEQ ID NO: 1047942 - RNA, 19 nt, Artificial Sequence
  Description of Artificial Sequence: Synthetic oligonucleotide
  Sense strand starting at position 3799 of SEQ ID NO: 915024
ggguuucagcuugggaaug

SEQ ID NO: 1047943 - RNA, 19 nt, Artificial Sequence
  Description of Artificial Sequence: Synthetic oligonucleotide
  Antisense strand to SEQ ID NO: 1047942
cauucccaagcugaaaccc

SEQ ID NO: 1047944 - RNA, 19 nt, Artificial Sequence
  Description of Artificial Sequence: Synthetic oligonucleotide
  Sense strand starting at position 3800 of SEQ ID NO: 915024
gguuucagcuugggaaugu

SEQ ID NO: 1047945 - RNA, 19 nt, Artificial Sequence
  Description of Artificial Sequence: Synthetic oligonucleotide
  Antisense strand to SEQ ID NO: 1047944
acauucccaagcugaaacc

SEQ ID NO: 1047946 - RNA, 19 nt, Artificial Sequence
  Description of Artificial Sequence: Synthetic oligonucleotide
  Sense strand starting at position 3804 of SEQ ID NO: 915024
ucagcuugggaaugugaga

SEQ ID NO: 1047947 - RNA, 19 nt, Artificial Sequence
  Description of Artificial Sequence: Synthetic oligonucleotide
  Antisense strand to SEQ ID NO: 1047946
ucucacauucccaagcuga

SEQ ID NO: 1047948 - RNA, 19 nt, Artificial Sequence
  Description of Artificial Sequence: Synthetic oligonucleotide
  Sense strand starting at position 3809 of SEQ ID NO: 915024
uugggaaugugagaacguu

SEQ ID NO: 1047949 - RNA, 19 nt, Artificial Sequence
  Description of Artificial Sequence: Synthetic oligonucleotide
  Antisense strand to SEQ ID NO: 1047948
aacguucucacauucccaa

SEQ ID NO: 1047950 - RNA, 19 nt, Artificial Sequence
  Description of Artificial Sequence: Synthetic oligonucleotide
  Sense strand starting at position 3967 of SEQ ID NO: 915024
cucccuuuguucuuuguga

SEQ ID NO: 1047951 - RNA, 19 nt, Artificial Sequence
  Description of Artificial Sequence: Synthetic oligonucleotide
  Antisense strand to SEQ ID NO: 1047950
ucacaaagaacaaagggag

SEQ ID NO: 1047952 - RNA, 19 nt, Artificial Sequence
  Description of Artificial Sequence: Synthetic oligonucleotide
  Sense strand starting at position 3980 of SEQ ID NO: 915024
uugugacgguuucuuuaac

SEQ ID NO: 1047953 - RNA, 19 nt, Artificial Sequence
  Description of Artificial Sequence: Synthetic oligonucleotide
  Antisense strand to SEQ ID NO: 1047952
guuaaagaaaccgucacaa

SEQ ID NO: 1047954 - RNA, 19 nt, Artificial Sequence
  Description of Artificial Sequence: Synthetic oligonucleotide
  Sense strand starting at position 3981 of SEQ ID NO: 915024
ugugacgguuucuuuaacu

SEQ ID NO: 1047955 - RNA, 19 nt, Artificial Sequence
  Description of Artificial Sequence: Synthetic oligonucleotide
  Antisense strand to SEQ ID NO: 1047954
aguuaaagaaaccgucaca

SEQ ID NO: 1047956 - RNA, 19 nt, Artificial Sequence
  Description of Artificial Sequence: Synthetic oligonucleotide
  Sense strand starting at position 467 of SEQ ID NO: 915025
cucccauguuggcagagau

SEQ ID NO: 1047957 - RNA, 19 nt, Artificial Sequence
  Description of Artificial Sequence: Synthetic oligonucleotide
  Antisense strand to SEQ ID NO: 1047956
aucucugccaacaugggag

SEQ ID NO: 1047958 - RNA, 19 nt, Artificial Sequence
  Description of Artificial Sequence: Synthetic oligonucleotide
  Sense strand starting at position 480 of SEQ ID NO: 915025
agagauggcgcucagagau

SEQ ID NO: 1047959 - RNA, 19 nt, Artificial Sequence
  Description of Artificial Sequence: Synthetic oligonucleotide
  Antisense strand to SEQ ID NO: 1047958
aucucugagcgccaucucu

SEQ ID NO: 1047960 - RNA, 19 nt, Artificial Sequence
  Description of Artificial Sequence: Synthetic oligonucleotide
  Sense strand starting at position 815 of SEQ ID NO: 915025
ccauaucuccuacaguuga

SEQ ID NO: 1047961 - RNA, 19 nt, Artificial Sequence
  Description of Artificial Sequence: Synthetic oligonucleotide
  Antisense strand to SEQ ID NO: 1047960
ucaacuguaggagauaugg

SEQ ID NO: 1047962 - RNA, 19 nt, Artificial Sequence
  Description of Artificial Sequence: Synthetic oligonucleotide
  Sense strand starting at position 1806 of SEQ ID NO: 915025
ccgaguugucgaggcgaga

SEQ ID NO: 1047963 - RNA, 19 nt, Artificial Sequence
  Description of Artificial Sequence: Synthetic oligonucleotide
  Antisense strand to SEQ ID NO: 1047962
ucucgccucgacaacucgg

SEQ ID NO: 1047964 - RNA, 19 nt, Artificial Sequence
  Description of Artificial Sequence: Synthetic oligonucleotide
  Sense strand starting at position 2022 of SEQ ID NO: 915025
gguccugggugccuuauau

SEQ ID NO: 1047965 - RNA, 19 nt, Artificial Sequence
  Description of Artificial Sequence: Synthetic oligonucleotide
  Antisense strand to SEQ ID NO: 1047964
auauaaggcacccaggacc

SEQ ID NO: 1047966 - RNA, 19 nt, Artificial Sequence
  Description of Artificial Sequence: Synthetic oligonucleotide
  Sense strand starting at position 2519 of SEQ ID NO: 915025
cccugaguucccugcccaa

SEQ ID NO: 1047967 - RNA, 19 nt, Artificial Sequence
  Description of Artificial Sequence: Synthetic oligonucleotide
  Antisense strand to SEQ ID NO: 1047966
uugggcagggaacucaggg

SEQ ID NO: 1047968 - RNA, 19 nt, Artificial Sequence
  Description of Artificial Sequence: Synthetic oligonucleotide
  Sense strand starting at position 2686 of SEQ ID NO: 915025
caggcuugcuccugaagac

SEQ ID NO: 1047969 - RNA, 19 nt, Artificial Sequence
  Description of Artificial Sequence: Synthetic oligonucleotide
  Antisense strand to SEQ ID NO: 1047968
gucuucaggagcaagccug

SEQ ID NO: 1047970 - RNA, 19 nt, Artificial Sequence
  Description of Artificial Sequence: Synthetic oligonucleotide
  Sense strand starting at position 2977 of SEQ ID NO: 915025
cugaguggucaccaggauu

SEQ ID NO: 1047971 - RNA, 19 nt, Artificial Sequence
  Description of Artificial Sequence: Synthetic oligonucleotide
  Antisense strand to SEQ ID NO: 1047970
aauccuggugaccacucag

SEQ ID NO: 1047972 - RNA, 19 nt, Artificial Sequence
  Description of Artificial Sequence: Synthetic oligonucleotide
  Sense strand starting at position 3312 of SEQ ID NO: 915025
guaggugucgcguguuuca

SEQ ID NO: 1047973 - RNA, 19 nt, Artificial Sequence
  Description of Artificial Sequence: Synthetic oligonucleotide
  Antisense strand to SEQ ID NO: 1047972
ugaaacacgcgacaccuac

SEQ ID NO: 1047974 - RNA, 19 nt, Artificial Sequence
  Description of Artificial Sequence: Synthetic oligonucleotide
  Sense strand starting at position 3317 of SEQ ID NO: 915025
ugucgcguguuucacuuaa

SEQ ID NO: 1047975 - RNA, 19 nt, Artificial Sequence
  Description of Artificial Sequence: Synthetic oligonucleotide
  Antisense strand to SEQ ID NO: 1047974
uuaagugaaacacgcgaca

SEQ ID NO: 1047976 - RNA, 19 nt, Artificial Sequence
  Description of Artificial Sequence: Synthetic oligonucleotide
  Sense strand starting at position 3351 of SEQ ID NO: 915025
guggaacguugcuugaagu

SEQ ID NO: 1047977 - RNA, 19 nt, Artificial Sequence
  Description of Artificial Sequence: Synthetic oligonucleotide
  Antisense strand to SEQ ID NO: 1047976
acuucaagcaacguuccac

SEQ ID NO: 1047978 - RNA, 19 nt, Artificial Sequence
  Description of Artificial Sequence: Synthetic oligonucleotide
  Sense strand starting at position 3352 of SEQ ID NO: 915025
uggaacguugcuugaaguu

SEQ ID NO: 1047979 - RNA, 19 nt, Artificial Sequence
  Description of Artificial Sequence: Synthetic oligonucleotide
  Antisense strand to SEQ ID NO: 1047978
aacuucaagcaacguucca

SEQ ID NO: 1047980 - RNA, 19 nt, Artificial Sequence
  Description of Artificial Sequence: Synthetic oligonucleotide
  Sense strand starting at position 3389 of SEQ ID NO: 915025
aggaaauugcaguacgugu

SEQ ID NO: 1047981 - RNA, 19 nt, Artificial Sequence
  Description of Artificial Sequence: Synthetic oligonucleotide
  Antisense strand to SEQ ID NO: 1047980
acacguacugcaauuuccu

SEQ ID NO: 1047982 - RNA, 19 nt, Artificial Sequence
  Description of Artificial Sequence: Synthetic oligonucleotide
  Sense strand starting at position 3435 of SEQ ID NO: 915025
aggcauucuggguguucua

SEQ ID NO: 1047983 - RNA, 19 nt, Artificial Sequence
  Description of Artificial Sequence: Synthetic oligonucleotide
  Antisense strand to SEQ ID NO: 1047982
uagaacacccagaaugccu

SEQ ID NO: 1047984 - RNA, 19 nt, Artificial Sequence
  Description of Artificial Sequence: Synthetic oligonucleotide
  Sense strand starting at position 3899 of SEQ ID NO: 915025
ggcgguugugcuugucuga

SEQ ID NO: 1047985 - RNA, 19 nt, Artificial Sequence
  Description of Artificial Sequence: Synthetic oligonucleotide
  Antisense strand to SEQ ID NO: 1047984
ucagacaagcacaaccgcc

SEQ ID NO: 1047986 - RNA, 19 nt, Artificial Sequence
  Description of Artificial Sequence: Synthetic oligonucleotide
  Sense strand starting at position 3902 of SEQ ID NO: 915025
gguugugcuugucugacca

SEQ ID NO: 1047987 - RNA, 19 nt, Artificial Sequence
  Description of Artificial Sequence: Synthetic oligonucleotide
  Antisense strand to SEQ ID NO: 1047986
uggucagacaagcacaacc

SEQ ID NO: 1047988 - RNA, 19 nt, Artificial Sequence
  Description of Artificial Sequence: Synthetic oligonucleotide
  Sense strand starting at position 3921 of SEQ ID NO: 915025
ccugucugggcuugugaga

SEQ ID NO: 1047989 - RNA, 19 nt, Artificial Sequence
  Description of Artificial Sequence: Synthetic oligonucleotide
  Antisense strand to SEQ ID NO: 1047988
ucucacaagcccagacagg

SEQ ID NO: 1047990 - RNA, 19 nt, Artificial Sequence
  Description of Artificial Sequence: Synthetic oligonucleotide
  Sense strand starting at position 3959 of SEQ ID NO: 915025
gagggauccuaugaagcuu

SEQ ID NO: 1047991 - RNA, 19 nt, Artificial Sequence
  Description of Artificial Sequence: Synthetic oligonucleotide
  Antisense strand to SEQ ID NO: 1047990
aagcuucauaggaucccuc

SEQ ID NO: 1047992 - RNA, 19 nt, Artificial Sequence
  Description of Artificial Sequence: Synthetic oligonucleotide
  Sense strand starting at position 3967 of SEQ ID NO: 915025
cuaugaagcuuugaaugua

SEQ ID NO: 1047993 - RNA, 19 nt, Artificial Sequence
  Description of Artificial Sequence: Synthetic oligonucleotide
  Antisense strand to SEQ ID NO: 1047992
uacauucaaagcuucauag

SEQ ID NO: 1047994 - RNA, 19 nt, Artificial Sequence
  Description of Artificial Sequence: Synthetic oligonucleotide
  Sense strand starting at position 488 of SEQ ID NO: 915026
gccagccagucaucuuuga

SEQ ID NO: 1047995 - RNA, 19 nt, Artificial Sequence
  Description of Artificial Sequence: Synthetic oligonucleotide
  Antisense strand to SEQ ID NO: 1047994
ucaaagaugacuggcuggc

SEQ ID NO: 1047996 - RNA, 19 nt, Artificial Sequence
  Description of Artificial Sequence: Synthetic oligonucleotide
  Sense strand starting at position 492 of SEQ ID NO: 915026
gccagucaucuuugaauaa

SEQ ID NO: 1047997 - RNA, 19 nt, Artificial Sequence
  Description of Artificial Sequence: Synthetic oligonucleotide
  Antisense strand to SEQ ID NO: 1047996
uuauucaaagaugacuggc

SEQ ID NO: 1047998 - RNA, 19 nt, Artificial Sequence
  Description of Artificial Sequence: Synthetic oligonucleotide
  Sense strand starting at position 533 of SEQ ID NO: 915026
cuggguaagucacucaguu

SEQ ID NO: 1047999 - RNA, 19 nt, Artificial Sequence
  Description of Artificial Sequence: Synthetic oligonucleotide
  Antisense strand to SEQ ID NO: 1047998
aacugagugacuuacccag

SEQ ID NO: 1048000 - RNA, 19 nt, Artificial Sequence
  Description of Artificial Sequence: Synthetic oligonucleotide
  Sense strand starting at position 535 of SEQ ID NO: 915026
ggguaagucacucaguugu

SEQ ID NO: 1048001 - RNA, 19 nt, Artificial Sequence
  Description of Artificial Sequence: Synthetic oligonucleotide
  Antisense strand to SEQ ID NO: 1048000
acaacugagugacuuaccc

SEQ ID NO: 1048002 - RNA, 19 nt, Artificial Sequence
  Description of Artificial Sequence: Synthetic oligonucleotide
  Sense strand starting at position 589 of SEQ ID NO: 915026
augggaugauccgcugcaa

SEQ ID NO: 1048003 - RNA, 19 nt, Artificial Sequence
  Description of Artificial Sequence: Synthetic oligonucleotide
  Antisense strand to SEQ ID NO: 1048002
uugcagcggaucaucccau

SEQ ID NO: 1048004 - RNA, 19 nt, Artificial Sequence
  Description of Artificial Sequence: Synthetic oligonucleotide
  Sense strand starting at position 601 of SEQ ID NO: 915026
gcugcaaaucugggauaaa

SEQ ID NO: 1048005 - RNA, 19 nt, Artificial Sequence
  Description of Artificial Sequence: Synthetic oligonucleotide
  Antisense strand to SEQ ID NO: 1048004
uuuaucccagauuugcagc

SEQ ID NO: 1048006 - RNA, 19 nt, Artificial Sequence
  Description of Artificial Sequence: Synthetic oligonucleotide
  Sense strand starting at position 754 of SEQ ID NO: 915026
ccuuaaguagcuugaucau

SEQ ID NO: 1048007 - RNA, 19 nt, Artificial Sequence
  Description of Artificial Sequence: Synthetic oligonucleotide
  Antisense strand to SEQ ID NO: 1048006
augaucaagcuacuuaagg

SEQ ID NO: 1048008 - RNA, 19 nt, Artificial Sequence
  Description of Artificial Sequence: Synthetic oligonucleotide
  Sense strand starting at position 757 of SEQ ID NO: 915026
uaaguagcuugaucaugga

SEQ ID NO: 1048009 - RNA, 19 nt, Artificial Sequence
  Description of Artificial Sequence: Synthetic oligonucleotide
  Antisense strand to SEQ ID NO: 1048008
uccaugaucaagcuacuua

SEQ ID NO: 1048010 - RNA, 19 nt, Artificial Sequence
  Description of Artificial Sequence: Synthetic oligonucleotide
  Sense strand starting at position 858 of SEQ ID NO: 915026
ccaggcaucacuggugaga

SEQ ID NO: 1048011 - RNA, 19 nt, Artificial Sequence
  Description of Artificial Sequence: Synthetic oligonucleotide
  Antisense strand to SEQ ID NO: 1048010
ucucaccagugaugccugg

SEQ ID NO: 1048012 - RNA, 19 nt, Artificial Sequence
  Description of Artificial Sequence: Synthetic oligonucleotide
  Sense strand starting at position 879 of SEQ ID NO: 915026
uggacucaggcuugccaaa

SEQ ID NO: 1048013 - RNA, 19 nt, Artificial Sequence
  Description of Artificial Sequence: Synthetic oligonucleotide
  Antisense strand to SEQ ID NO: 1048012
uuuggcaagccugagucca

SEQ ID NO: 1048014 - RNA, 19 nt, Artificial Sequence
  Description of Artificial Sequence: Synthetic oligonucleotide
  Sense strand starting at position 2082 of SEQ ID NO: 915026
gcucuaaggucucuuaaga

SEQ ID NO: 1048015 - RNA, 19 nt, Artificial Sequence
  Description of Artificial Sequence: Synthetic oligonucleotide
  Antisense strand to SEQ ID NO: 1048014
ucuuaagagaccuuagagc

SEQ ID NO: 1048016 - RNA, 19 nt, Artificial Sequence
  Description of Artificial Sequence: Synthetic oligonucleotide
  Sense strand starting at position 2092 of SEQ ID NO: 915026
cucuuaagauugucagcuu

SEQ ID NO: 1048017 - RNA, 19 nt, Artificial Sequence
  Description of Artificial Sequence: Synthetic oligonucleotide
  Antisense strand to SEQ ID NO: 1048016
aagcugacaaucuuaagag

SEQ ID NO: 1048018 - RNA, 19 nt, Artificial Sequence
  Description of Artificial Sequence: Synthetic oligonucleotide
  Sense strand starting at position 2283 of SEQ ID NO: 915026
aggaaauggugauccucau

SEQ ID NO: 1048019 - RNA, 19 nt, Artificial Sequence
  Description of Artificial Sequence: Synthetic oligonucleotide
  Antisense strand to SEQ ID NO: 1048018
augaggaucaccauuuccu

SEQ ID NO: 1048020 - RNA, 19 nt, Artificial Sequence
  Description of Artificial Sequence: Synthetic oligonucleotide
  Sense strand starting at position 2419 of SEQ ID NO: 915026
guaagaggugcuugggcau

SEQ ID NO: 1048021 - RNA, 19 nt, Artificial Sequence
  Description of Artificial Sequence: Synthetic oligonucleotide
  Antisense strand to SEQ ID NO: 1048020
augcccaagcaccucuuac

SEQ ID NO: 1048022 - RNA, 19 nt, Artificial Sequence
  Description of Artificial Sequence: Synthetic oligonucleotide
  Sense strand starting at position 2530 of SEQ ID NO: 915026
gggagaacacuucgucauu

SEQ ID NO: 1048023 - RNA, 19 nt, Artificial Sequence
  Description of Artificial Sequence: Synthetic oligonucleotide
  Antisense strand to SEQ ID NO: 1048022
aaugacgaaguguucuccc

SEQ ID NO: 1048024 - RNA, 19 nt, Artificial Sequence
  Description of Artificial Sequence: Synthetic oligonucleotide
  Sense strand starting at position 2913 of SEQ ID NO: 915026
ucgagucucuuguccuaau

SEQ ID NO: 1048025 - RNA, 19 nt, Artificial Sequence
  Description of Artificial Sequence: Synthetic oligonucleotide
  Antisense strand to SEQ ID NO: 1048024
auuaggacaagagacucga

SEQ ID NO: 1048026 - RNA, 19 nt, Artificial Sequence
  Description of Artificial Sequence: Synthetic oligonucleotide
  Sense strand starting at position 2914 of SEQ ID NO: 915026
cgagucucuuguccuaaua

SEQ ID NO: 1048027 - RNA, 19 nt, Artificial Sequence
  Description of Artificial Sequence: Synthetic oligonucleotide
  Antisense strand to SEQ ID NO: 1048026
uauuaggacaagagacucg

SEQ ID NO: 1048028 - RNA, 19 nt, Artificial Sequence
  Description of Artificial Sequence: Synthetic oligonucleotide
  Sense strand starting at position 3170 of SEQ ID NO: 915026
cgguaugcucugcaaggua

SEQ ID NO: 1048029 - RNA, 19 nt, Artificial Sequence
  Description of Artificial Sequence: Synthetic oligonucleotide
  Antisense strand to SEQ ID NO: 1048028
uaccuugcagagcauaccg

SEQ ID NO: 1048030 - RNA, 19 nt, Artificial Sequence
  Description of Artificial Sequence: Synthetic oligonucleotide
  Sense strand starting at position 3222 of SEQ ID NO: 915026
cuuaauuccguuuauagga

SEQ ID NO: 1048031 - RNA, 19 nt, Artificial Sequence
  Description of Artificial Sequence: Synthetic oligonucleotide
  Antisense strand to SEQ ID NO: 1048030
uccuauaaacggaauuaag

SEQ ID NO: 1048032 - RNA, 19 nt, Artificial Sequence
  Description of Artificial Sequence: Synthetic oligonucleotide
  Sense strand starting at position 3317 of SEQ ID NO: 915026
uguggucacuguucuagaa

SEQ ID NO: 1048033 - RNA, 19 nt, Artificial Sequence
  Description of Artificial Sequence: Synthetic oligonucleotide
  Antisense strand to SEQ ID NO: 1048032
uucuagaacagugaccaca

SEQ ID NO: 1048034 - RNA, 19 nt, Artificial Sequence
  Description of Artificial Sequence: Synthetic oligonucleotide
  Sense strand starting at position 3321 of SEQ ID NO: 915026
gucacuguucuagaacaac

SEQ ID NO: 1048035 - RNA, 19 nt, Artificial Sequence
  Description of Artificial Sequence: Synthetic oligonucleotide
  Antisense strand to SEQ ID NO: 1048034
guuguucuagaacagugac

SEQ ID NO: 1048036 - RNA, 19 nt, Artificial Sequence
  Description of Artificial Sequence: Synthetic oligonucleotide
  Sense strand starting at position 3420 of SEQ ID NO: 915026
auguuagaauaaccaugua

SEQ ID NO: 1048037 - RNA, 19 nt, Artificial Sequence
  Description of Artificial Sequence: Synthetic oligonucleotide
  Antisense strand to SEQ ID NO: 1048036
uacaugguuauucuaacau

SEQ ID NO: 1048038 - RNA, 19 nt, Artificial Sequence
  Description of Artificial Sequence: Synthetic oligonucleotide
  Sense strand starting at position 3432 of SEQ ID NO: 915026
ccauguaccuggcuaucaa

SEQ ID NO: 1048039 - RNA, 19 nt, Artificial Sequence
  Description of Artificial Sequence: Synthetic oligonucleotide
  Antisense strand to SEQ ID NO: 1048038
uugauagccagguacaugg

SEQ ID NO: 1048040 - RNA, 19 nt, Artificial Sequence
  Description of Artificial Sequence: Synthetic oligonucleotide
  Sense strand starting at position 3450 of SEQ ID NO: 915026
acucgagagcuggguucaa

SEQ ID NO: 1048041 - RNA, 19 nt, Artificial Sequence
  Description of Artificial Sequence: Synthetic oligonucleotide
  Antisense strand to SEQ ID NO: 1048040
uugaacccagcucucgagu

SEQ ID NO: 1048042 - RNA, 19 nt, Artificial Sequence
  Description of Artificial Sequence: Synthetic oligonucleotide
  Sense strand starting at position 3460 of SEQ ID NO: 915026
uggguucaagucugguuua

SEQ ID NO: 1048043 - RNA, 19 nt, Artificial Sequence
  Description of Artificial Sequence: Synthetic oligonucleotide
  Antisense strand to SEQ ID NO: 1048042
uaaaccagacuugaaccca

SEQ ID NO: 1048044 - RNA, 19 nt, Artificial Sequence
  Description of Artificial Sequence: Synthetic oligonucleotide
  Sense strand starting at position 3465 of SEQ ID NO: 915026
ucaagucugguuuaauauc

SEQ ID NO: 1048045 - RNA, 19 nt, Artificial Sequence
  Description of Artificial Sequence: Synthetic oligonucleotide
  Antisense strand to SEQ ID NO: 1048044
gauauuaaaccagacuuga

SEQ ID NO: 1048046 - RNA, 19 nt, Artificial Sequence
  Description of Artificial Sequence: Synthetic oligonucleotide
  Sense strand starting at position 3490 of SEQ ID NO: 915026
uucucauuggcacguaaag

SEQ ID NO: 1048047 - RNA, 19 nt, Artificial Sequence
  Description of Artificial Sequence: Synthetic oligonucleotide
  Antisense strand to SEQ ID NO: 1048046
cuuuacgugccaaugagaa

SEQ ID NO: 1048048 - RNA, 19 nt, Artificial Sequence
  Description of Artificial Sequence: Synthetic oligonucleotide
  Sense strand starting at position 3500 of SEQ ID NO: 915026
cacguaaaggcauguaaag

SEQ ID NO: 1048049 - RNA, 19 nt, Artificial Sequence
  Description of Artificial Sequence: Synthetic oligonucleotide
  Antisense strand to SEQ ID NO: 1048048
cuuuacaugccuuuacgug

SEQ ID NO: 1048050 - RNA, 19 nt, Artificial Sequence
  Description of Artificial Sequence: Synthetic oligonucleotide
  Sense strand starting at position 3502 of SEQ ID NO: 915026
cguaaaggcauguaaagaa

SEQ ID NO: 1048051 - RNA, 19 nt, Artificial Sequence
  Description of Artificial Sequence: Synthetic oligonucleotide
  Antisense strand to SEQ ID NO: 1048050
uucuuuacaugccuuuacg

SEQ ID NO: 1048052 - RNA, 19 nt, Artificial Sequence
  Description of Artificial Sequence: Synthetic oligonucleotide
  Sense strand starting at position 3522 of SEQ ID NO: 915026
ccuugaauugaaugcacaa

SEQ ID NO: 1048053 - RNA, 19 nt, Artificial Sequence
  Description of Artificial Sequence: Synthetic oligonucleotide
  Antisense strand to SEQ ID NO: 1048052
uugugcauucaauucaagg

SEQ ID NO: 1048054 - RNA, 19 nt, Artificial Sequence
  Description of Artificial Sequence: Synthetic oligonucleotide
  Sense strand starting at position 3555 of SEQ ID NO: 915026
ccuuuaacgccucaugacu

SEQ ID NO: 1048055 - RNA, 19 nt, Artificial Sequence
  Description of Artificial Sequence: Synthetic oligonucleotide
  Antisense strand to SEQ ID NO: 1048054
agucaugaggcguuaaagg

SEQ ID NO: 1048056 - RNA, 19 nt, Artificial Sequence
  Description of Artificial Sequence: Synthetic oligonucleotide
  Sense strand starting at position 3563 of SEQ ID NO: 915026
gccucaugacuuugccaaa

SEQ ID NO: 1048057 - RNA, 19 nt, Artificial Sequence
  Description of Artificial Sequence: Synthetic oligonucleotide
  Antisense strand to SEQ ID NO: 1048056
uuuggcaaagucaugaggc

SEQ ID NO: 1048058 - RNA, 19 nt, Artificial Sequence
  Description of Artificial Sequence: Synthetic oligonucleotide
  Sense strand starting at position 3688 of SEQ ID NO: 915026
agacgagaguggcuuuaca

SEQ ID NO: 1048059 - RNA, 19 nt, Artificial Sequence
  Description of Artificial Sequence: Synthetic oligonucleotide
  Antisense strand to SEQ ID NO: 1048058
uguaaagccacucucgucu

SEQ ID NO: 1048060 - RNA, 19 nt, Artificial Sequence
  Description of Artificial Sequence: Synthetic oligonucleotide
  Sense strand starting at position 3714 of SEQ ID NO: 915026
aguacuaguguuuauccga

SEQ ID NO: 1048061 - RNA, 19 nt, Artificial Sequence
  Description of Artificial Sequence: Synthetic oligonucleotide
  Antisense strand to SEQ ID NO: 1048060
ucggauaaacacuaguacu

SEQ ID NO: 1048062 - RNA, 19 nt, Artificial Sequence
  Description of Artificial Sequence: Synthetic oligonucleotide
  Sense strand starting at position 3722 of SEQ ID NO: 915026
uguuuauccgacugacgac

SEQ ID NO: 1048063 - RNA, 19 nt, Artificial Sequence
  Description of Artificial Sequence: Synthetic oligonucleotide
  Antisense strand to SEQ ID NO: 1048062
gucgucagucggauaaaca

SEQ ID NO: 1048064 - RNA, 19 nt, Artificial Sequence
  Description of Artificial Sequence: Synthetic oligonucleotide
  Sense strand starting at position 3752 of SEQ ID NO: 915026
ugugauuuccuuugcuuua

SEQ ID NO: 1048065 - RNA, 19 nt, Artificial Sequence
  Description of Artificial Sequence: Synthetic oligonucleotide
  Antisense strand to SEQ ID NO: 1048064
uaaagcaaaggaaaucaca

SEQ ID NO: 1048066 - RNA, 19 nt, Artificial Sequence
  Description of Artificial Sequence: Synthetic oligonucleotide
  Sense strand starting at position 3753 of SEQ ID NO: 915026
gugauuuccuuugcuuuag

SEQ ID NO: 1048067 - RNA, 19 nt, Artificial Sequence
  Description of Artificial Sequence: Synthetic oligonucleotide
  Antisense strand to SEQ ID NO: 1048066
cuaaagcaaaggaaaucac

SEQ ID NO: 1048068 - RNA, 19 nt, Artificial Sequence
  Description of Artificial Sequence: Synthetic oligonucleotide
  Sense strand starting at position 3765 of SEQ ID NO: 915026
gcuuuaggucgggauucca

SEQ ID NO: 1048069 - RNA, 19 nt, Artificial Sequence
  Description of Artificial Sequence: Synthetic oligonucleotide
  Antisense strand to SEQ ID NO: 1048068
uggaaucccgaccuaaagc

SEQ ID NO: 1048070 - RNA, 19 nt, Artificial Sequence
  Description of Artificial Sequence: Synthetic oligonucleotide
  Sense strand starting at position 3788 of SEQ ID NO: 915026
aaucaauaguugcuucgau

SEQ ID NO: 1048071 - RNA, 19 nt, Artificial Sequence
  Description of Artificial Sequence: Synthetic oligonucleotide
  Antisense strand to SEQ ID NO: 1048070
aucgaagcaacuauugauu

SEQ ID NO: 1048072 - RNA, 19 nt, Artificial Sequence
  Description of Artificial Sequence: Synthetic oligonucleotide
  Sense strand starting at position 3789 of SEQ ID NO: 915026
aucaauaguugcuucgauu

SEQ ID NO: 1048073 - RNA, 19 nt, Artificial Sequence
  Description of Artificial Sequence: Synthetic oligonucleotide
  Antisense strand to SEQ ID NO: 1048072
aaucgaagcaacuauugau

SEQ ID NO: 1048074 - RNA, 19 nt, Artificial Sequence
  Description of Artificial Sequence: Synthetic oligonucleotide
  Sense strand starting at position 296 of SEQ ID NO: 915027
gguugugucuuguucaucu

SEQ ID NO: 1048075 - RNA, 19 nt, Artificial Sequence
  Description of Artificial Sequence: Synthetic oligonucleotide
  Antisense strand to SEQ ID NO: 1048074
agaugaacaagacacaacc

SEQ ID NO: 1048076 - RNA, 19 nt, Artificial Sequence
  Description of Artificial Sequence: Synthetic oligonucleotide
  Sense strand starting at position 452 of SEQ ID NO: 915027
uccuguucccuggauggau

SEQ ID NO: 1048077 - RNA, 19 nt, Artificial Sequence
  Description of Artificial Sequence: Synthetic oligonucleotide
  Antisense strand to SEQ ID NO: 1048076
auccauccagggaacagga

SEQ ID NO: 1048078 - RNA, 19 nt, Artificial Sequence
  Description of Artificial Sequence: Synthetic oligonucleotide
  Sense strand starting at position 540 of SEQ ID NO: 915027
ccucuaugaccuugagguc

SEQ ID NO: 1048079 - RNA, 19 nt, Artificial Sequence
  Description of Artificial Sequence: Synthetic oligonucleotide
  Antisense strand to SEQ ID NO: 1048078
gaccucaaggucauagagg

SEQ ID NO: 1048080 - RNA, 19 nt, Artificial Sequence
  Description of Artificial Sequence: Synthetic oligonucleotide
  Sense strand starting at position 558 of SEQ ID NO: 915027
cgaacuugaccuuggagga

SEQ ID NO: 1048081 - RNA, 19 nt, Artificial Sequence
  Description of Artificial Sequence: Synthetic oligonucleotide
  Antisense strand to SEQ ID NO: 1048080
uccuccaaggucaaguucg

SEQ ID NO: 1048082 - RNA, 19 nt, Artificial Sequence
  Description of Artificial Sequence: Synthetic oligonucleotide
  Sense strand starting at position 577 of SEQ ID NO: 915027
gccagcaaugacugcguaa

SEQ ID NO: 1048083 - RNA, 19 nt, Artificial Sequence
  Description of Artificial Sequence: Synthetic oligonucleotide
  Antisense strand to SEQ ID NO: 1048082
uuacgcagucauugcuggc

SEQ ID NO: 1048084 - RNA, 19 nt, Artificial Sequence
  Description of Artificial Sequence: Synthetic oligonucleotide
  Sense strand starting at position 579 of SEQ ID NO: 915027
cagcaaugacugcguaaga

SEQ ID NO: 1048085 - RNA, 19 nt, Artificial Sequence
  Description of Artificial Sequence: Synthetic oligonucleotide
  Antisense strand to SEQ ID NO: 1048084
ucuuacgcagucauugcug

SEQ ID NO: 1048086 - RNA, 19 nt, Artificial Sequence
  Description of Artificial Sequence: Synthetic oligonucleotide
  Sense strand starting at position 580 of SEQ ID NO: 915027
agcaaugacugcguaagau

SEQ ID NO: 1048087 - RNA, 19 nt, Artificial Sequence
  Description of Artificial Sequence: Synthetic oligonucleotide
  Antisense strand to SEQ ID NO: 1048086
aucuuacgcagucauugcu

SEQ ID NO: 1048088 - RNA, 19 nt, Artificial Sequence
  Description of Artificial Sequence: Synthetic oligonucleotide
  Sense strand starting at position 776 of SEQ ID NO: 915027
gaccguggcuucuugcuaa

SEQ ID NO: 1048089 - RNA, 19 nt, Artificial Sequence
  Description of Artificial Sequence: Synthetic oligonucleotide
  Antisense strand to SEQ ID NO: 1048088
uuagcaagaagccacgguc

SEQ ID NO: 1048090 - RNA, 19 nt, Artificial Sequence
  Description of Artificial Sequence: Synthetic oligonucleotide
  Sense strand starting at position 873 of SEQ ID NO: 915027
aguaaauacugugcuagca

SEQ ID NO: 1048091 - RNA, 19 nt, Artificial Sequence
  Description of Artificial Sequence: Synthetic oligonucleotide
  Antisense strand to SEQ ID NO: 1048090
ugcuagcacaguauuuacu

SEQ ID NO: 1048092 - RNA, 19 nt, Artificial Sequence
  Description of Artificial Sequence: Synthetic oligonucleotide
  Sense strand starting at position 920 of SEQ ID NO: 915027
cuaccaguucucugaggua

SEQ ID NO: 1048093 - RNA, 19 nt, Artificial Sequence
  Description of Artificial Sequence: Synthetic oligonucleotide
  Antisense strand to SEQ ID NO: 1048092
uaccucagagaacugguag

SEQ ID NO: 1048094 - RNA, 19 nt, Artificial Sequence
  Description of Artificial Sequence: Synthetic oligonucleotide
  Sense strand starting at position 953 of SEQ ID NO: 915027
guucauuucucagaggagg

SEQ ID NO: 1048095 - RNA, 19 nt, Artificial Sequence
  Description of Artificial Sequence: Synthetic oligonucleotide
  Antisense strand to SEQ ID NO: 1048094
ccuccucugagaaaugaac

SEQ ID NO: 1048096 - RNA, 19 nt, Artificial Sequence
  Description of Artificial Sequence: Synthetic oligonucleotide
  Sense strand starting at position 1082 of SEQ ID NO: 915027
cacuuucccugcuuggaga

SEQ ID NO: 1048097 - RNA, 19 nt, Artificial Sequence
  Description of Artificial Sequence: Synthetic oligonucleotide
  Antisense strand to SEQ ID NO: 1048096
ucuccaagcagggaaagug

SEQ ID NO: 1048098 - RNA, 19 nt, Artificial Sequence
  Description of Artificial Sequence: Synthetic oligonucleotide
  Sense strand starting at position 1095 of SEQ ID NO: 915027
uggagacacccgugaugaa

SEQ ID NO: 1048099 - RNA, 19 nt, Artificial Sequence
  Description of Artificial Sequence: Synthetic oligonucleotide
  Antisense strand to SEQ ID NO: 1048098
uucaucacgggugucucca

SEQ ID NO: 1048100 - RNA, 19 nt, Artificial Sequence
  Description of Artificial Sequence: Synthetic oligonucleotide
  Sense strand starting at position 1163 of SEQ ID NO: 915027
aagucugccuacuuggaau

SEQ ID NO: 1048101 - RNA, 19 nt, Artificial Sequence
  Description of Artificial Sequence: Synthetic oligonucleotide
  Antisense strand to SEQ ID NO: 1048100
auuccaaguaggcagacuu

SEQ ID NO: 1048102 - RNA, 19 nt, Artificial Sequence
  Description of Artificial Sequence: Synthetic oligonucleotide
  Sense strand starting at position 1174 of SEQ ID NO: 915027
cuuggaauguggccaaauu

SEQ ID NO: 1048103 - RNA, 19 nt, Artificial Sequence
  Description of Artificial Sequence: Synthetic oligonucleotide
  Antisense strand to SEQ ID NO: 1048102
aauuuggccacauuccaag

SEQ ID NO: 1048104 - RNA, 19 nt, Artificial Sequence
  Description of Artificial Sequence: Synthetic oligonucleotide
  Sense strand starting at position 1216 of SEQ ID NO: 915027
gguaucagcaacugagaua

SEQ ID NO: 1048105 - RNA, 19 nt, Artificial Sequence
  Description of Artificial Sequence: Synthetic oligonucleotide
  Antisense strand to SEQ ID NO: 1048104
uaucucaguugcugauacc

SEQ ID NO: 1048106 - RNA, 19 nt, Artificial Sequence
  Description of Artificial Sequence: Synthetic oligonucleotide
  Sense strand starting at position 1271 of SEQ ID NO: 915027
ggaucucugcccuggacaa

SEQ ID NO: 1048107 - RNA, 19 nt, Artificial Sequence
  Description of Artificial Sequence: Synthetic oligonucleotide
  Antisense strand to SEQ ID NO: 1048106
uuguccagggcagagaucc

SEQ ID NO: 1048108 - RNA, 19 nt, Artificial Sequence
  Description of Artificial Sequence: Synthetic oligonucleotide
  Sense strand starting at position 1369 of SEQ ID NO: 915027
acuguccucucucagagaa

SEQ ID NO: 1048109 - RNA, 19 nt, Artificial Sequence
  Description of Artificial Sequence: Synthetic oligonucleotide
  Antisense strand to SEQ ID NO: 1048108
uucucugagagaggacagu

SEQ ID NO: 1048110 - RNA, 19 nt, Artificial Sequence
  Description of Artificial Sequence: Synthetic oligonucleotide
  Sense strand starting at position 1371 of SEQ ID NO: 915027
uguccucucucagagaaga

SEQ ID NO: 1048111 - RNA, 19 nt, Artificial Sequence
  Description of Artificial Sequence: Synthetic oligonucleotide
  Antisense strand to SEQ ID NO: 1048110
ucuucucugagagaggaca

SEQ ID NO: 1048112 - RNA, 19 nt, Artificial Sequence
  Description of Artificial Sequence: Synthetic oligonucleotide
  Sense strand starting at position 1513 of SEQ ID NO: 915027
gacccauaguggguagaga

SEQ ID NO: 1048113 - RNA, 19 nt, Artificial Sequence
  Description of Artificial Sequence: Synthetic oligonucleotide
  Antisense strand to SEQ ID NO: 1048112
ucucuacccacuauggguc

SEQ ID NO: 1048114 - RNA, 19 nt, Artificial Sequence
  Description of Artificial Sequence: Synthetic oligonucleotide
  Sense strand starting at position 1524 of SEQ ID NO: 915027
gguagagacuggucugaag

SEQ ID NO: 1048115 - RNA, 19 nt, Artificial Sequence
  Description of Artificial Sequence: Synthetic oligonucleotide
  Antisense strand to SEQ ID NO: 1048114
cuucagaccagucucuacc

SEQ ID NO: 1048116 - RNA, 19 nt, Artificial Sequence
  Description of Artificial Sequence: Synthetic oligonucleotide
  Sense strand starting at position 1558 of SEQ ID NO: 915027
ggcucagcuccauacuaaa

SEQ ID NO: 1048117 - RNA, 19 nt, Artificial Sequence
  Description of Artificial Sequence: Synthetic oligonucleotide
  Antisense strand to SEQ ID NO: 1048116
uuuaguauggagcugagcc

SEQ ID NO: 1048118 - RNA, 19 nt, Artificial Sequence
  Description of Artificial Sequence: Synthetic oligonucleotide
  Sense strand starting at position 1728 of SEQ ID NO: 915027
caccucucaucagagggau

SEQ ID NO: 1048119 - RNA, 19 nt, Artificial Sequence
  Description of Artificial Sequence: Synthetic oligonucleotide
  Antisense strand to SEQ ID NO: 1048118
aucccucugaugagaggug

SEQ ID NO: 1048120 - RNA, 19 nt, Artificial Sequence
  Description of Artificial Sequence: Synthetic oligonucleotide
  Sense strand starting at position 2112 of SEQ ID NO: 915027
gaggucucuccagggagaa

SEQ ID NO: 1048121 - RNA, 19 nt, Artificial Sequence
  Description of Artificial Sequence: Synthetic oligonucleotide
  Antisense strand to SEQ ID NO: 1048120
uucucccuggagagaccuc

SEQ ID NO: 1048122 - RNA, 19 nt, Artificial Sequence
  Description of Artificial Sequence: Synthetic oligonucleotide
  Sense strand starting at position 2465 of SEQ ID NO: 915027
aggauugucacacguauga

SEQ ID NO: 1048123 - RNA, 19 nt, Artificial Sequence
  Description of Artificial Sequence: Synthetic oligonucleotide
  Antisense strand to SEQ ID NO: 1048122
ucauacgugugacaauccu

SEQ ID NO: 1048124 - RNA, 19 nt, Artificial Sequence
  Description of Artificial Sequence: Synthetic oligonucleotide
  Sense strand starting at position 2467 of SEQ ID NO: 915027
gauugucacacguaugaag

SEQ ID NO: 1048125 - RNA, 19 nt, Artificial Sequence
  Description of Artificial Sequence: Synthetic oligonucleotide
  Antisense strand to SEQ ID NO: 1048124
cuucauacgugugacaauc

SEQ ID NO: 1048126 - RNA, 19 nt, Artificial Sequence
  Description of Artificial Sequence: Synthetic oligonucleotide
  Sense strand starting at position 2475 of SEQ ID NO: 915027
cacguaugaaguggguuua

SEQ ID NO: 1048127 - RNA, 19 nt, Artificial Sequence
  Description of Artificial Sequence: Synthetic oligonucleotide
  Antisense strand to SEQ ID NO: 1048126
uaaacccacuucauacgug

SEQ ID NO: 1048128 - RNA, 19 nt, Artificial Sequence
  Description of Artificial Sequence: Synthetic oligonucleotide
  Sense strand starting at position 2476 of SEQ ID NO: 915027
acguaugaaguggguuuau

SEQ ID NO: 1048129 - RNA, 19 nt, Artificial Sequence
  Description of Artificial Sequence: Synthetic oligonucleotide
  Antisense strand to SEQ ID NO: 1048128
auaaacccacuucauacgu

SEQ ID NO: 1048130 - RNA, 19 nt, Artificial Sequence
  Description of Artificial Sequence: Synthetic oligonucleotide
  Sense strand starting at position 2797 of SEQ ID NO: 915027
gugacagagugauaauaau

SEQ ID NO: 1048131 - RNA, 19 nt, Artificial Sequence
  Description of Artificial Sequence: Synthetic oligonucleotide
  Antisense strand to SEQ ID NO: 1048130
auuauuaucacucugucac

SEQ ID NO: 1048132 - RNA, 19 nt, Artificial Sequence
  Description of Artificial Sequence: Synthetic oligonucleotide
  Sense strand starting at position 3300 of SEQ ID NO: 915027
ggguauuugucccuacgau

SEQ ID NO: 1048133 - RNA, 19 nt, Artificial Sequence
  Description of Artificial Sequence: Synthetic oligonucleotide
  Antisense strand to SEQ ID NO: 1048132
aucguagggacaaauaccc

SEQ ID NO: 1048134 - RNA, 19 nt, Artificial Sequence
  Description of Artificial Sequence: Synthetic oligonucleotide
  Sense strand starting at position 3304 of SEQ ID NO: 915027
auuugucccuacgauaaug

SEQ ID NO: 1048135 - RNA, 19 nt, Artificial Sequence
  Description of Artificial Sequence: Synthetic oligonucleotide
  Antisense strand to SEQ ID NO: 1048134
cauuaucguagggacaaau

SEQ ID NO: 1048136 - RNA, 19 nt, Artificial Sequence
  Description of Artificial Sequence: Synthetic oligonucleotide
  Sense strand starting at position 3514 of SEQ ID NO: 915027
agggauucacuugggucua

SEQ ID NO: 1048137 - RNA, 19 nt, Artificial Sequence
  Description of Artificial Sequence: Synthetic oligonucleotide
  Antisense strand to SEQ ID NO: 1048136
uagacccaagugaaucccu

SEQ ID NO: 1048138 - RNA, 19 nt, Artificial Sequence
  Description of Artificial Sequence: Synthetic oligonucleotide
  Sense strand starting at position 3593 of SEQ ID NO: 915027
uaauuccuguccucggaau

SEQ ID NO: 1048139 - RNA, 19 nt, Artificial Sequence
  Description of Artificial Sequence: Synthetic oligonucleotide
  Antisense strand to SEQ ID NO: 1048138
auuccgaggacaggaauua

SEQ ID NO: 1048140 - RNA, 19 nt, Artificial Sequence
  Description of Artificial Sequence: Synthetic oligonucleotide
  Sense strand starting at position 3614 of SEQ ID NO: 915027
ugaagaguauccucuucca

SEQ ID NO: 1048141 - RNA, 19 nt, Artificial Sequence
  Description of Artificial Sequence: Synthetic oligonucleotide
  Antisense strand to SEQ ID NO: 1048140
uggaagaggauacucuuca

SEQ ID NO: 1048142 - RNA, 19 nt, Artificial Sequence
  Description of Artificial Sequence: Synthetic oligonucleotide
  Sense strand starting at position 3617 of SEQ ID NO: 915027
agaguauccucuuccagau

SEQ ID NO: 1048143 - RNA, 19 nt, Artificial Sequence
  Description of Artificial Sequence: Synthetic oligonucleotide
  Antisense strand to SEQ ID NO: 1048142
aucuggaagaggauacucu

SEQ ID NO: 1048144 - RNA, 19 nt, Artificial Sequence
  Description of Artificial Sequence: Synthetic oligonucleotide
  Sense strand starting at position 3676 of SEQ ID NO: 915027
ccuggagugugauccaacu

SEQ ID NO: 1048145 - RNA, 19 nt, Artificial Sequence
  Description of Artificial Sequence: Synthetic oligonucleotide
  Antisense strand to SEQ ID NO: 1048144
aguuggaucacacuccagg

SEQ ID NO: 1048146 - RNA, 19 nt, Artificial Sequence
  Description of Artificial Sequence: Synthetic oligonucleotide
  Sense strand starting at position 3720 of SEQ ID NO: 915027
gggaaauaauuugaccucu

SEQ ID NO: 1048147 - RNA, 19 nt, Artificial Sequence
  Description of Artificial Sequence: Synthetic oligonucleotide
  Antisense strand to SEQ ID NO: 1048146
agaggucaaauuauuuccc

SEQ ID NO: 1048148 - RNA, 19 nt, Artificial Sequence
  Description of Artificial Sequence: Synthetic oligonucleotide
  Sense strand starting at position 3788 of SEQ ID NO: 915027
aucucaagguuggcagaua

SEQ ID NO: 1048149 - RNA, 19 nt, Artificial Sequence
  Description of Artificial Sequence: Synthetic oligonucleotide
  Antisense strand to SEQ ID NO: 1048148
uaucugccaaccuugagau

SEQ ID NO: 1048150 - RNA, 19 nt, Artificial Sequence
  Description of Artificial Sequence: Synthetic oligonucleotide
  Sense strand starting at position 3796 of SEQ ID NO: 915027
guuggcagauacuaauuga

SEQ ID NO: 1048151 - RNA, 19 nt, Artificial Sequence
  Description of Artificial Sequence: Synthetic oligonucleotide
  Antisense strand to SEQ ID NO: 1048150
ucaauuaguaucugccaac

SEQ ID NO: 1048152 - RNA, 19 nt, Artificial Sequence
  Description of Artificial Sequence: Synthetic oligonucleotide
  Sense strand starting at position 3799 of SEQ ID NO: 915027
ggcagauacuaauugacca

SEQ ID NO: 1048153 - RNA, 19 nt, Artificial Sequence
  Description of Artificial Sequence: Synthetic oligonucleotide
  Antisense strand to SEQ ID NO: 1048152
uggucaauuaguaucugcc

SEQ ID NO: 1048154 - RNA, 19 nt, Artificial Sequence
  Description of Artificial Sequence: Synthetic oligonucleotide
  Sense strand starting at position 1121 of SEQ ID NO: 915028
gccuucuccuccugguuua

SEQ ID NO: 1048155 - RNA, 19 nt, Artificial Sequence
  Description of Artificial Sequence: Synthetic oligonucleotide
  Antisense strand to SEQ ID NO: 1048154
uaaaccaggaggagaaggc

SEQ ID NO: 1048156 - RNA, 19 nt, Artificial Sequence
  Description of Artificial Sequence: Synthetic oligonucleotide
  Sense strand starting at position 1131 of SEQ ID NO: 915028
ccugguuuauagccacaga

SEQ ID NO: 1048157 - RNA, 19 nt, Artificial Sequence
  Description of Artificial Sequence: Synthetic oligonucleotide
  Antisense strand to SEQ ID NO: 1048156
ucuguggcuauaaaccagg

SEQ ID NO: 1048158 - RNA, 19 nt, Artificial Sequence
  Description of Artificial Sequence: Synthetic oligonucleotide
  Sense strand starting at position 1134 of SEQ ID NO: 915028
gguuuauagccacagauga

SEQ ID NO: 1048159 - RNA, 19 nt, Artificial Sequence
  Description of Artificial Sequence: Synthetic oligonucleotide
  Antisense strand to SEQ ID NO: 1048158
ucaucuguggcuauaaacc

SEQ ID NO: 1048160 - RNA, 19 nt, Artificial Sequence
  Description of Artificial Sequence: Synthetic oligonucleotide
  Sense strand starting at position 1316 of SEQ ID NO: 915028
guaggagguguccaccaga

SEQ ID NO: 1048161 - RNA, 19 nt, Artificial Sequence
  Description of Artificial Sequence: Synthetic oligonucleotide
  Antisense strand to SEQ ID NO: 1048160
ucugguggacaccuccuac

SEQ ID NO: 1048162 - RNA, 19 nt, Artificial Sequence
  Description of Artificial Sequence: Synthetic oligonucleotide
  Sense strand starting at position 1457 of SEQ ID NO: 915028
ccagccuuguaaugaguca

SEQ ID NO: 1048163 - RNA, 19 nt, Artificial Sequence
  Description of Artificial Sequence: Synthetic oligonucleotide
  Antisense strand to SEQ ID NO: 1048162
ugacucauuacaaggcugg

SEQ ID NO: 1048164 - RNA, 19 nt, Artificial Sequence
  Description of Artificial Sequence: Synthetic oligonucleotide
  Sense strand starting at position 2202 of SEQ ID NO: 915028
ugcccugggugaguuaaga

SEQ ID NO: 1048165 - RNA, 19 nt, Artificial Sequence
  Description of Artificial Sequence: Synthetic oligonucleotide
  Antisense strand to SEQ ID NO: 1048164
ucuuaacucacccagggca

SEQ ID NO: 1048166 - RNA, 19 nt, Artificial Sequence
  Description of Artificial Sequence: Synthetic oligonucleotide
  Sense strand starting at position 2262 of SEQ ID NO: 915028
ggccaaccuccucaaggau

SEQ ID NO: 1048167 - RNA, 19 nt, Artificial Sequence
  Description of Artificial Sequence: Synthetic oligonucleotide
  Antisense strand to SEQ ID NO: 1048166
auccuugaggagguuggcc

SEQ ID NO: 1048168 - RNA, 19 nt, Artificial Sequence
  Description of Artificial Sequence: Synthetic oligonucleotide
  Sense strand starting at position 2305 of SEQ ID NO: 915028
gggcuagggugccauucau

SEQ ID NO: 1048169 - RNA, 19 nt, Artificial Sequence
  Description of Artificial Sequence: Synthetic oligonucleotide
  Antisense strand to SEQ ID NO: 1048168
augaauggcacccuagccc

SEQ ID NO: 1048170 - RNA, 19 nt, Artificial Sequence
  Description of Artificial Sequence: Synthetic oligonucleotide
  Sense strand starting at position 2368 of SEQ ID NO: 915028
ccacccuuuccuggguaau

SEQ ID NO: 1048171 - RNA, 19 nt, Artificial Sequence
  Description of Artificial Sequence: Synthetic oligonucleotide
  Antisense strand to SEQ ID NO: 1048170
auuacccaggaaagggugg

SEQ ID NO: 1048172 - RNA, 19 nt, Artificial Sequence
  Description of Artificial Sequence: Synthetic oligonucleotide
  Sense strand starting at position 2371 of SEQ ID NO: 915028
cccuuuccuggguaauauu

SEQ ID NO: 1048173 - RNA, 19 nt, Artificial Sequence
  Description of Artificial Sequence: Synthetic oligonucleotide
  Antisense strand to SEQ ID NO: 1048172
aauauuacccaggaaaggg

SEQ ID NO: 1048174 - RNA, 19 nt, Artificial Sequence
  Description of Artificial Sequence: Synthetic oligonucleotide
  Sense strand starting at position 2505 of SEQ ID NO: 915028
guccucacuuaauagauga

SEQ ID NO: 1048175 - RNA, 19 nt, Artificial Sequence
  Description of Artificial Sequence: Synthetic oligonucleotide
  Antisense strand to SEQ ID NO: 1048174
ucaucuauuaagugaggac

SEQ ID NO: 1048176 - RNA, 19 nt, Artificial Sequence
  Description of Artificial Sequence: Synthetic oligonucleotide
  Sense strand starting at position 2627 of SEQ ID NO: 915028
uguacacaucuugggaagu

SEQ ID NO: 1048177 - RNA, 19 nt, Artificial Sequence
  Description of Artificial Sequence: Synthetic oligonucleotide
  Antisense strand to SEQ ID NO: 1048176
acuucccaagauguguaca

SEQ ID NO: 1048178 - RNA, 19 nt, Artificial Sequence
  Description of Artificial Sequence: Synthetic oligonucleotide
  Sense strand starting at position 2628 of SEQ ID NO: 915028
guacacaucuugggaagua

SEQ ID NO: 1048179 - RNA, 19 nt, Artificial Sequence
  Description of Artificial Sequence: Synthetic oligonucleotide
  Antisense strand to SEQ ID NO: 1048178
uacuucccaagauguguac

SEQ ID NO: 1048180 - RNA, 19 nt, Artificial Sequence
  Description of Artificial Sequence: Synthetic oligonucleotide
  Sense strand starting at position 2653 of SEQ ID NO: 915028
augaguacuugcucaaguc

SEQ ID NO: 1048181 - RNA, 19 nt, Artificial Sequence
  Description of Artificial Sequence: Synthetic oligonucleotide
  Antisense strand to SEQ ID NO: 1048180
gacuugagcaaguacucau

SEQ ID NO: 1048182 - RNA, 19 nt, Artificial Sequence
  Description of Artificial Sequence: Synthetic oligonucleotide
  Sense strand starting at position 3086 of SEQ ID NO: 915028
ugcagaaacugggcuauau

SEQ ID NO: 1048183 - RNA, 19 nt, Artificial Sequence
  Description of Artificial Sequence: Synthetic oligonucleotide
  Antisense strand to SEQ ID NO: 1048182
auauagcccaguuucugca

SEQ ID NO: 1048184 - RNA, 19 nt, Artificial Sequence
  Description of Artificial Sequence: Synthetic oligonucleotide
  Sense strand starting at position 3208 of SEQ ID NO: 915028
gggugacccugauugauag

SEQ ID NO: 1048185 - RNA, 19 nt, Artificial Sequence
  Description of Artificial Sequence: Synthetic oligonucleotide
  Antisense strand to SEQ ID NO: 1048184
cuaucaaucagggucaccc

SEQ ID NO: 1048186 - RNA, 19 nt, Artificial Sequence
  Description of Artificial Sequence: Synthetic oligonucleotide
  Sense strand starting at position 3212 of SEQ ID NO: 915028
gacccugauugauaggacu

SEQ ID NO: 1048187 - RNA, 19 nt, Artificial Sequence
  Description of Artificial Sequence: Synthetic oligonucleotide
  Antisense strand to SEQ ID NO: 1048186
aguccuaucaaucaggguc

SEQ ID NO: 1048188 - RNA, 19 nt, Artificial Sequence
  Description of Artificial Sequence: Synthetic oligonucleotide
  Sense strand starting at position 3261 of SEQ ID NO: 915028
gaggguuauccagacagcu

SEQ ID NO: 1048189 - RNA, 19 nt, Artificial Sequence
  Description of Artificial Sequence: Synthetic oligonucleotide
  Antisense strand to SEQ ID NO: 1048188
agcugucuggauaacccuc

SEQ ID NO: 1048190 - RNA, 19 nt, Artificial Sequence
  Description of Artificial Sequence: Synthetic oligonucleotide
  Sense strand starting at position 3433 of SEQ ID NO: 915028
gcuggagaugccuguacaa

SEQ ID NO: 1048191 - RNA, 19 nt, Artificial Sequence
  Description of Artificial Sequence: Synthetic oligonucleotide
  Antisense strand to SEQ ID NO: 1048190
uuguacaggcaucuccagc

SEQ ID NO: 1048192 - RNA, 19 nt, Artificial Sequence
  Description of Artificial Sequence: Synthetic oligonucleotide
  Sense strand starting at position 3446 of SEQ ID NO: 915028
guacaaagcuucuaagaua

SEQ ID NO: 1048193 - RNA, 19 nt, Artificial Sequence
  Description of Artificial Sequence: Synthetic oligonucleotide
  Antisense strand to SEQ ID NO: 1048192
uaucuuagaagcuuuguac

SEQ ID NO: 1048194 - RNA, 19 nt, Artificial Sequence
  Description of Artificial Sequence: Synthetic oligonucleotide
  Sense strand starting at position 3705 of SEQ ID NO: 915028
caagaugacgccuguuuga

SEQ ID NO: 1048195 - RNA, 19 nt, Artificial Sequence
  Description of Artificial Sequence: Synthetic oligonucleotide
  Antisense strand to SEQ ID NO: 1048194
ucaaacaggcgucaucuug

SEQ ID NO: 1048196 - RNA, 19 nt, Artificial Sequence
  Description of Artificial Sequence: Synthetic oligonucleotide
  Sense strand starting at position 3744 of SEQ ID NO: 915028
ggcauaagaccucaguucu

SEQ ID NO: 1048197 - RNA, 19 nt, Artificial Sequence
  Description of Artificial Sequence: Synthetic oligonucleotide
  Antisense strand to SEQ ID NO: 1048196
agaacugaggucuuaugcc

SEQ ID NO: 1048198 - RNA, 19 nt, Artificial Sequence
  Description of Artificial Sequence: Synthetic oligonucleotide
  Sense strand starting at position 3754 of SEQ ID NO: 915028
cucaguucuuccuggcaga

SEQ ID NO: 1048199 - RNA, 19 nt, Artificial Sequence
  Description of Artificial Sequence: Synthetic oligonucleotide
  Antisense strand to SEQ ID NO: 1048198
ucugccaggaagaacugag

SEQ ID NO: 1048200 - RNA, 19 nt, Artificial Sequence
  Description of Artificial Sequence: Synthetic oligonucleotide
  Sense strand starting at position 3755 of SEQ ID NO: 915028
ucaguucuuccuggcagau

SEQ ID NO: 1048201 - RNA, 19 nt, Artificial Sequence
  Description of Artificial Sequence: Synthetic oligonucleotide
  Antisense strand to SEQ ID NO: 1048200
aucugccaggaagaacuga

SEQ ID NO: 1048202 - RNA, 19 nt, Artificial Sequence
  Description of Artificial Sequence: Synthetic oligonucleotide
  Sense strand starting at position 3767 of SEQ ID NO: 915028
ggcagauccucuccaaaga

SEQ ID NO: 1048203 - RNA, 19 nt, Artificial Sequence
  Description of Artificial Sequence: Synthetic oligonucleotide
  Antisense strand to SEQ ID NO: 1048202
ucuuuggagaggaucugcc

SEQ ID NO: 1048204 - RNA, 19 nt, Artificial Sequence
  Description of Artificial Sequence: Synthetic oligonucleotide
  Sense strand starting at position 3815 of SEQ ID NO: 915028
ggugucaggagauaccuua

SEQ ID NO: 1048205 - RNA, 19 nt, Artificial Sequence
  Description of Artificial Sequence: Synthetic oligonucleotide
  Antisense strand to SEQ ID NO: 1048204
uaagguaucuccugacacc

SEQ ID NO: 1048206 - RNA, 19 nt, Artificial Sequence
  Description of Artificial Sequence: Synthetic oligonucleotide
  Sense strand starting at position 3822 of SEQ ID NO: 915028
ggagauaccuuaucuuacu

SEQ ID NO: 1048207 - RNA, 19 nt, Artificial Sequence
  Description of Artificial Sequence: Synthetic oligonucleotide
  Antisense strand to SEQ ID NO: 1048206
aguaagauaagguaucucc

SEQ ID NO: 1048208 - RNA, 19 nt, Artificial Sequence
  Description of Artificial Sequence: Synthetic oligonucleotide
  Sense strand starting at position 3894 of SEQ ID NO: 915028
gucacucagucucaccaua

SEQ ID NO: 1048209 - RNA, 19 nt, Artificial Sequence
  Description of Artificial Sequence: Synthetic oligonucleotide
  Antisense strand to SEQ ID NO: 1048208
uauggugagacugagugac

SEQ ID NO: 1048210 - RNA, 19 nt, Artificial Sequence
  Description of Artificial Sequence: Synthetic oligonucleotide
  Sense strand starting at position 3949 of SEQ ID NO: 915028
gauaucugcuucugggacu

SEQ ID NO: 1048211 - RNA, 19 nt, Artificial Sequence
  Description of Artificial Sequence: Synthetic oligonucleotide
  Antisense strand to SEQ ID NO: 1048210
agucccagaagcagauauc

SEQ ID NO: 1048212 - RNA, 19 nt, Artificial Sequence
  Description of Artificial Sequence: Synthetic oligonucleotide
  Sense strand starting at position 36 of SEQ ID NO: 915029
ggacuuaaucuccggcacu

SEQ ID NO: 1048213 - RNA, 19 nt, Artificial Sequence
  Description of Artificial Sequence: Synthetic oligonucleotide
  Antisense strand to SEQ ID NO: 1048212
agugccggagauuaagucc

SEQ ID NO: 1048214 - RNA, 19 nt, Artificial Sequence
  Description of Artificial Sequence: Synthetic oligonucleotide
  Sense strand starting at position 71 of SEQ ID NO: 915029
ccaggaaugugggugacaa

SEQ ID NO: 1048215 - RNA, 19 nt, Artificial Sequence
  Description of Artificial Sequence: Synthetic oligonucleotide
  Antisense strand to SEQ ID NO: 1048214
uugucacccacauuccugg

SEQ ID NO: 1048216 - RNA, 19 nt, Artificial Sequence
  Description of Artificial Sequence: Synthetic oligonucleotide
  Sense strand starting at position 72 of SEQ ID NO: 915029
caggaaugugggugacaag

SEQ ID NO: 1048217 - RNA, 19 nt, Artificial Sequence
  Description of Artificial Sequence: Synthetic oligonucleotide
  Antisense strand to SEQ ID NO: 1048216
cuugucacccacauuccug

SEQ ID NO: 1048218 - RNA, 19 nt, Artificial Sequence
  Description of Artificial Sequence: Synthetic oligonucleotide
  Sense strand starting at position 383 of SEQ ID NO: 915029
ggacauccucagugacuca

SEQ ID NO: 1048219 - RNA, 19 nt, Artificial Sequence
  Description of Artificial Sequence: Synthetic oligonucleotide
  Antisense strand to SEQ ID NO: 1048218
ugagucacugaggaugucc

SEQ ID NO: 1048220 - RNA, 19 nt, Artificial Sequence
  Description of Artificial Sequence: Synthetic oligonucleotide
  Sense strand starting at position 394 of SEQ ID NO: 915029
gugacucacuguuccugaa

SEQ ID NO: 1048221 - RNA, 19 nt, Artificial Sequence
  Description of Artificial Sequence: Synthetic oligonucleotide
  Antisense strand to SEQ ID NO: 1048220
uucaggaacagugagucac

SEQ ID NO: 1048222 - RNA, 19 nt, Artificial Sequence
  Description of Artificial Sequence: Synthetic oligonucleotide
  Sense strand starting at position 511 of SEQ ID NO: 915029
gaugauaccuccuccagga

SEQ ID NO: 1048223 - RNA, 19 nt, Artificial Sequence
  Description of Artificial Sequence: Synthetic oligonucleotide
  Antisense strand to SEQ ID NO: 1048222
uccuggaggagguaucauc

SEQ ID NO: 1048224 - RNA, 19 nt, Artificial Sequence
  Description of Artificial Sequence: Synthetic oligonucleotide
  Sense strand starting at position 666 of SEQ ID NO: 915029
ggauguggccaaugggaga

SEQ ID NO: 1048225 - RNA, 19 nt, Artificial Sequence
  Description of Artificial Sequence: Synthetic oligonucleotide
  Antisense strand to SEQ ID NO: 1048224
ucucccauuggccacaucc

SEQ ID NO: 1048226 - RNA, 19 nt, Artificial Sequence
  Description of Artificial Sequence: Synthetic oligonucleotide
  Sense strand starting at position 679 of SEQ ID NO: 915029
gggagagggucugagacau

SEQ ID NO: 1048227 - RNA, 19 nt, Artificial Sequence
  Description of Artificial Sequence: Synthetic oligonucleotide
  Antisense strand to SEQ ID NO: 1048226
augucucagacccucuccc

SEQ ID NO: 1048228 - RNA, 19 nt, Artificial Sequence
  Description of Artificial Sequence: Synthetic oligonucleotide
  Sense strand starting at position 1027 of SEQ ID NO: 915029
ccgggcacuugucugaaga

SEQ ID NO: 1048229 - RNA, 19 nt, Artificial Sequence
  Description of Artificial Sequence: Synthetic oligonucleotide
  Antisense strand to SEQ ID NO: 1048228
ucuucagacaagugcccgg

SEQ ID NO: 1048230 - RNA, 19 nt, Artificial Sequence
  Description of Artificial Sequence: Synthetic oligonucleotide
  Sense strand starting at position 1028 of SEQ ID NO: 915029
cgggcacuugucugaagau

SEQ ID NO: 1048231 - RNA, 19 nt, Artificial Sequence
  Description of Artificial Sequence: Synthetic oligonucleotide
  Antisense strand to SEQ ID NO: 1048230
aucuucagacaagugcccg

SEQ ID NO: 1048232 - RNA, 19 nt, Artificial Sequence
  Description of Artificial Sequence: Synthetic oligonucleotide
  Sense strand starting at position 1152 of SEQ ID NO: 915029
gaguggugagggcgugaaa

SEQ ID NO: 1048233 - RNA, 19 nt, Artificial Sequence
  Description of Artificial Sequence: Synthetic oligonucleotide
  Antisense strand to SEQ ID NO: 1048232
uuucacgcccucaccacuc

SEQ ID NO: 1048234 - RNA, 19 nt, Artificial Sequence
  Description of Artificial Sequence: Synthetic oligonucleotide
  Sense strand starting at position 1154 of SEQ ID NO: 915029
guggugagggcgugaaauu

SEQ ID NO: 1048235 - RNA, 19 nt, Artificial Sequence
  Description of Artificial Sequence: Synthetic oligonucleotide
  Antisense strand to SEQ ID NO: 1048234
aauuucacgcccucaccac

SEQ ID NO: 1048236 - RNA, 19 nt, Artificial Sequence
  Description of Artificial Sequence: Synthetic oligonucleotide
  Sense strand starting at position 1290 of SEQ ID NO: 915029
uuucuaugucuauaccuga

SEQ ID NO: 1048237 - RNA, 19 nt, Artificial Sequence
  Description of Artificial Sequence: Synthetic oligonucleotide
  Antisense strand to SEQ ID NO: 1048236
ucagguauagacauagaaa

SEQ ID NO: 1048238 - RNA, 19 nt, Artificial Sequence
  Description of Artificial Sequence: Synthetic oligonucleotide
  Sense strand starting at position 1416 of SEQ ID NO: 915029
gauaaagagugucagagag

SEQ ID NO: 1048239 - RNA, 19 nt, Artificial Sequence
  Description of Artificial Sequence: Synthetic oligonucleotide
  Antisense strand to SEQ ID NO: 1048238
cucucugacacucuuuauc

SEQ ID NO: 1048240 - RNA, 19 nt, Artificial Sequence
  Description of Artificial Sequence: Synthetic oligonucleotide
  Sense strand starting at position 1418 of SEQ ID NO: 915029
uaaagagugucagagagaa

SEQ ID NO: 1048241 - RNA, 19 nt, Artificial Sequence
  Description of Artificial Sequence: Synthetic oligonucleotide
  Antisense strand to SEQ ID NO: 1048240
uucucucugacacucuuua

SEQ ID NO: 1048242 - RNA, 19 nt, Artificial Sequence
  Description of Artificial Sequence: Synthetic oligonucleotide
  Sense strand starting at position 1687 of SEQ ID NO: 915029
ggcagaggcucuagaggua

SEQ ID NO: 1048243 - RNA, 19 nt, Artificial Sequence
  Description of Artificial Sequence: Synthetic oligonucleotide
  Antisense strand to SEQ ID NO: 1048242
uaccucuagagccucugcc

SEQ ID NO: 1048244 - RNA, 19 nt, Artificial Sequence
  Description of Artificial Sequence: Synthetic oligonucleotide
  Sense strand starting at position 1712 of SEQ ID NO: 915029
guccaugacuccuccacau

SEQ ID NO: 1048245 - RNA, 19 nt, Artificial Sequence
  Description of Artificial Sequence: Synthetic oligonucleotide
  Antisense strand to SEQ ID NO: 1048244
auguggaggagucauggac

SEQ ID NO: 1048246 - RNA, 19 nt, Artificial Sequence
  Description of Artificial Sequence: Synthetic oligonucleotide
  Sense strand starting at position 2327 of SEQ ID NO: 915029
gcaccugauccugacuuaa

SEQ ID NO: 1048247 - RNA, 19 nt, Artificial Sequence
  Description of Artificial Sequence: Synthetic oligonucleotide
  Antisense strand to SEQ ID NO: 1048246
uuaagucaggaucaggugc

SEQ ID NO: 1048248 - RNA, 19 nt, Artificial Sequence
  Description of Artificial Sequence: Synthetic oligonucleotide
  Sense strand starting at position 2337 of SEQ ID NO: 915029
cugacuuaaucacugaugu

SEQ ID NO: 1048249 - RNA, 19 nt, Artificial Sequence
  Description of Artificial Sequence: Synthetic oligonucleotide
  Antisense strand to SEQ ID NO: 1048248
acaucagugauuaagucag

SEQ ID NO: 1048250 - RNA, 19 nt, Artificial Sequence
  Description of Artificial Sequence: Synthetic oligonucleotide
  Sense strand starting at position 2338 of SEQ ID NO: 915029
ugacuuaaucacugaugug

SEQ ID NO: 1048251 - RNA, 19 nt, Artificial Sequence
  Description of Artificial Sequence: Synthetic oligonucleotide
  Antisense strand to SEQ ID NO: 1048250
cacaucagugauuaaguca

SEQ ID NO: 1048252 - RNA, 19 nt, Artificial Sequence
  Description of Artificial Sequence: Synthetic oligonucleotide
  Sense strand starting at position 2569 of SEQ ID NO: 915029
ggacacauguuauuccgua

SEQ ID NO: 1048253 - RNA, 19 nt, Artificial Sequence
  Description of Artificial Sequence: Synthetic oligonucleotide
  Antisense strand to SEQ ID NO: 1048252
uacggaauaacaugugucc

SEQ ID NO: 1048254 - RNA, 19 nt, Artificial Sequence
  Description of Artificial Sequence: Synthetic oligonucleotide
  Sense strand starting at position 2570 of SEQ ID NO: 915029
gacacauguuauuccguaa

SEQ ID NO: 1048255 - RNA, 19 nt, Artificial Sequence
  Description of Artificial Sequence: Synthetic oligonucleotide
  Antisense strand to SEQ ID NO: 1048254
uuacggaauaacauguguc

SEQ ID NO: 1048256 - RNA, 19 nt, Artificial Sequence
  Description of Artificial Sequence: Synthetic oligonucleotide
  Sense strand starting at position 2573 of SEQ ID NO: 915029
acauguuauuccguaauca

SEQ ID NO: 1048257 - RNA, 19 nt, Artificial Sequence
  Description of Artificial Sequence: Synthetic oligonucleotide
  Antisense strand to SEQ ID NO: 1048256
ugauuacggaauaacaugu

SEQ ID NO: 1048258 - RNA, 19 nt, Artificial Sequence
  Description of Artificial Sequence: Synthetic oligonucleotide
  Sense strand starting at position 2577 of SEQ ID NO: 915029
guuauuccguaaucaucca

SEQ ID NO: 1048259 - RNA, 19 nt, Artificial Sequence
  Description of Artificial Sequence: Synthetic oligonucleotide
  Antisense strand to SEQ ID NO: 1048258
uggaugauuacggaauaac

SEQ ID NO: 1048260 - RNA, 19 nt, Artificial Sequence
  Description of Artificial Sequence: Synthetic oligonucleotide
  Sense strand starting at position 2584 of SEQ ID NO: 915029
cguaaucauccagaaacuu

SEQ ID NO: 1048261 - RNA, 19 nt, Artificial Sequence
  Description of Artificial Sequence: Synthetic oligonucleotide
  Antisense strand to SEQ ID NO: 1048260
aaguuucuggaugauuacg

SEQ ID NO: 1048262 - RNA, 19 nt, Artificial Sequence
  Description of Artificial Sequence: Synthetic oligonucleotide
  Sense strand starting at position 2657 of SEQ ID NO: 915029
ugaagugaaaucugugauu

SEQ ID NO: 1048263 - RNA, 19 nt, Artificial Sequence
  Description of Artificial Sequence: Synthetic oligonucleotide
  Antisense strand to SEQ ID NO: 1048262
aaucacagauuucacuuca

SEQ ID NO: 1048264 - RNA, 19 nt, Artificial Sequence
  Description of Artificial Sequence: Synthetic oligonucleotide
  Sense strand starting at position 2660 of SEQ ID NO: 915029
agugaaaucugugauuuaa

SEQ ID NO: 1048265 - RNA, 19 nt, Artificial Sequence
  Description of Artificial Sequence: Synthetic oligonucleotide
  Antisense strand to SEQ ID NO: 1048264
uuaaaucacagauuucacu

SEQ ID NO: 1048266 - RNA, 19 nt, Artificial Sequence
  Description of Artificial Sequence: Synthetic oligonucleotide
  Sense strand starting at position 2717 of SEQ ID NO: 915029
uuguuauuagcguugucga

SEQ ID NO: 1048267 - RNA, 19 nt, Artificial Sequence
  Description of Artificial Sequence: Synthetic oligonucleotide
  Antisense strand to SEQ ID NO: 1048266
ucgacaacgcuaauaacaa

SEQ ID NO: 1048268 - RNA, 19 nt, Artificial Sequence
  Description of Artificial Sequence: Synthetic oligonucleotide
  Sense strand starting at position 2724 of SEQ ID NO: 915029
uagcguugucgaggaugga

SEQ ID NO: 1048269 - RNA, 19 nt, Artificial Sequence
  Description of Artificial Sequence: Synthetic oligonucleotide
  Antisense strand to SEQ ID NO: 1048268
uccauccucgacaacgcua

SEQ ID NO: 1048270 - RNA, 19 nt, Artificial Sequence
  Description of Artificial Sequence: Synthetic oligonucleotide
  Sense strand starting at position 2754 of SEQ ID NO: 915029
gcccuaucgggacaugaca

SEQ ID NO: 1048271 - RNA, 19 nt, Artificial Sequence
  Description of Artificial Sequence: Synthetic oligonucleotide
  Antisense strand to SEQ ID NO: 1048270
ugucaugucccgauagggc

SEQ ID NO: 1048272 - RNA, 19 nt, Artificial Sequence
  Description of Artificial Sequence: Synthetic oligonucleotide
  Sense strand starting at position 3341 of SEQ ID NO: 915029
ugcagugagcugugggaau

SEQ ID NO: 1048273 - RNA, 19 nt, Artificial Sequence
  Description of Artificial Sequence: Synthetic oligonucleotide
  Antisense strand to SEQ ID NO: 1048272
auucccacagcucacugca

SEQ ID NO: 1048274 - RNA, 19 nt, Artificial Sequence
  Description of Artificial Sequence: Synthetic oligonucleotide
  Sense strand starting at position 3451 of SEQ ID NO: 915029
gcacuaugcuaagcagauc

SEQ ID NO: 1048275 - RNA, 19 nt, Artificial Sequence
  Description of Artificial Sequence: Synthetic oligonucleotide
  Antisense strand to SEQ ID NO: 1048274
gaucugcuuagcauagugc

SEQ ID NO: 1048276 - RNA, 19 nt, Artificial Sequence
  Description of Artificial Sequence: Synthetic oligonucleotide
  Sense strand starting at position 3490 of SEQ ID NO: 915029
uucucagucccaugaagaa

SEQ ID NO: 1048277 - RNA, 19 nt, Artificial Sequence
  Description of Artificial Sequence: Synthetic oligonucleotide
  Antisense strand to SEQ ID NO: 1048276
uucuucaugggacugagaa

SEQ ID NO: 1048278 - RNA, 19 nt, Artificial Sequence
  Description of Artificial Sequence: Synthetic oligonucleotide
  Sense strand starting at position 3807 of SEQ ID NO: 915029
agugucugucaugaccaga

SEQ ID NO: 1048279 - RNA, 19 nt, Artificial Sequence
  Description of Artificial Sequence: Synthetic oligonucleotide
  Antisense strand to SEQ ID NO: 1048278
ucuggucaugacagacacu

SEQ ID NO: 1048280 - RNA, 19 nt, Artificial Sequence
  Description of Artificial Sequence: Synthetic oligonucleotide
  Sense strand starting at position 3810 of SEQ ID NO: 915029
gucugucaugaccagagua

SEQ ID NO: 1048281 - RNA, 19 nt, Artificial Sequence
  Description of Artificial Sequence: Synthetic oligonucleotide
  Antisense strand to SEQ ID NO: 1048280
uacucuggucaugacagac

SEQ ID NO: 1048282 - RNA, 19 nt, Artificial Sequence
  Description of Artificial Sequence: Synthetic oligonucleotide
  Sense strand starting at position 3812 of SEQ ID NO: 915029
cugucaugaccagaguaug

SEQ ID NO: 1048283 - RNA, 19 nt, Artificial Sequence
  Description of Artificial Sequence: Synthetic oligonucleotide
  Antisense strand to SEQ ID NO: 1048282
cauacucuggucaugacag

SEQ ID NO: 1048284 - RNA, 19 nt, Artificial Sequence
  Description of Artificial Sequence: Synthetic oligonucleotide
  Sense strand starting at position 3820 of SEQ ID NO: 915029
accagaguaugucuuuguu

SEQ ID NO: 1048285 - RNA, 19 nt, Artificial Sequence
  Description of Artificial Sequence: Synthetic oligonucleotide
  Antisense strand to SEQ ID NO: 1048284
aacaaagacauacucuggu

SEQ ID NO: 1048286 - RNA, 19 nt, Artificial Sequence
  Description of Artificial Sequence: Synthetic oligonucleotide
  Sense strand starting at position 3822 of SEQ ID NO: 915029
cagaguaugucuuuguucu

SEQ ID NO: 1048287 - RNA, 19 nt, Artificial Sequence
  Description of Artificial Sequence: Synthetic oligonucleotide
  Antisense strand to SEQ ID NO: 1048286
agaacaaagacauacucug

SEQ ID NO: 1048288 - RNA, 19 nt, Artificial Sequence
  Description of Artificial Sequence: Synthetic oligonucleotide
  Sense strand starting at position 3823 of SEQ ID NO: 915029
agaguaugucuuuguucuc

SEQ ID NO: 1048289 - RNA, 19 nt, Artificial Sequence
  Description of Artificial Sequence: Synthetic oligonucleotide
  Antisense strand to SEQ ID NO: 1048288
gagaacaaagacauacucu

SEQ ID NO: 1048290 - RNA, 19 nt, Artificial Sequence
  Description of Artificial Sequence: Synthetic oligonucleotide
  Sense strand starting at position 3839 of SEQ ID NO: 915029
cucgcugcucguuuguaga

SEQ ID NO: 1048291 - RNA, 19 nt, Artificial Sequence
  Description of Artificial Sequence: Synthetic oligonucleotide
  Antisense strand to SEQ ID NO: 1048290
ucuacaaacgagcagcgag

SEQ ID NO: 1048292 - RNA, 19 nt, Artificial Sequence
  Description of Artificial Sequence: Synthetic oligonucleotide
  Sense strand starting at position 42 of SEQ ID NO: 915030
ggacuuaaucuccggcacu

SEQ ID NO: 1048293 - RNA, 19 nt, Artificial Sequence
  Description of Artificial Sequence: Synthetic oligonucleotide
  Antisense strand to SEQ ID NO: 1048292
agugccggagauuaagucc

SEQ ID NO: 1048294 - RNA, 19 nt, Artificial Sequence
  Description of Artificial Sequence: Synthetic oligonucleotide
  Sense strand starting at position 77 of SEQ ID NO: 915030
ccaggaaugugggugacaa

SEQ ID NO: 1048295 - RNA, 19 nt, Artificial Sequence
  Description of Artificial Sequence: Synthetic oligonucleotide
  Antisense strand to SEQ ID NO: 1048294
uugucacccacauuccugg

SEQ ID NO: 1048296 - RNA, 19 nt, Artificial Sequence
  Description of Artificial Sequence: Synthetic oligonucleotide
  Sense strand starting at position 78 of SEQ ID NO: 915030
caggaaugugggugacaag

SEQ ID NO: 1048297 - RNA, 19 nt, Artificial Sequence
  Description of Artificial Sequence: Synthetic oligonucleotide
  Antisense strand to SEQ ID NO: 1048296
cuugucacccacauuccug

SEQ ID NO: 1048298 - RNA, 19 nt, Artificial Sequence
  Description of Artificial Sequence: Synthetic oligonucleotide
  Sense strand starting at position 389 of SEQ ID NO: 915030
ggacauccucagugacuca

SEQ ID NO: 1048299 - RNA, 19 nt, Artificial Sequence
  Description of Artificial Sequence: Synthetic oligonucleotide
  Antisense strand to SEQ ID NO: 1048298
ugagucacugaggaugucc

SEQ ID NO: 1048300 - RNA, 19 nt, Artificial Sequence
  Description of Artificial Sequence: Synthetic oligonucleotide
  Sense strand starting at position 400 of SEQ ID NO: 915030
gugacucacuguuccugaa

SEQ ID NO: 1048301 - RNA, 19 nt, Artificial Sequence
  Description of Artificial Sequence: Synthetic oligonucleotide
  Antisense strand to SEQ ID NO: 1048300
uucaggaacagugagucac

SEQ ID NO: 1048302 - RNA, 19 nt, Artificial Sequence
  Description of Artificial Sequence: Synthetic oligonucleotide
  Sense strand starting at position 517 of SEQ ID NO: 915030
gaugauaccuccuccagga

SEQ ID NO: 1048303 - RNA, 19 nt, Artificial Sequence
  Description of Artificial Sequence: Synthetic oligonucleotide
  Antisense strand to SEQ ID NO: 1048302
uccuggaggagguaucauc

SEQ ID NO: 1048304 - RNA, 19 nt, Artificial Sequence
  Description of Artificial Sequence: Synthetic oligonucleotide
  Sense strand starting at position 672 of SEQ ID NO: 915030
ggauguggccaaugggaga

SEQ ID NO: 1048305 - RNA, 19 nt, Artificial Sequence
  Description of Artificial Sequence: Synthetic oligonucleotide
  Antisense strand to SEQ ID NO: 1048304
ucucccauuggccacaucc

SEQ ID NO: 1048306 - RNA, 19 nt, Artificial Sequence
  Description of Artificial Sequence: Synthetic oligonucleotide
  Sense strand starting at position 685 of SEQ ID NO: 915030
gggagagggucugagacau

SEQ ID NO: 1048307 - RNA, 19 nt, Artificial Sequence
  Description of Artificial Sequence: Synthetic oligonucleotide
  Antisense strand to SEQ ID NO: 1048306
augucucagacccucuccc

SEQ ID NO: 1048308 - RNA, 19 nt, Artificial Sequence
  Description of Artificial Sequence: Synthetic oligonucleotide
  Sense strand starting at position 1033 of SEQ ID NO: 915030
ccgggcacuugucugaaga

SEQ ID NO: 1048309 - RNA, 19 nt, Artificial Sequence
  Description of Artificial Sequence: Synthetic oligonucleotide
  Antisense strand to SEQ ID NO: 1048308
ucuucagacaagugcccgg

SEQ ID NO: 1048310 - RNA, 19 nt, Artificial Sequence
  Description of Artificial Sequence: Synthetic oligonucleotide
  Sense strand starting at position 1034 of SEQ ID NO: 915030
cgggcacuugucugaagau

SEQ ID NO: 1048311 - RNA, 19 nt, Artificial Sequence
  Description of Artificial Sequence: Synthetic oligonucleotide
  Antisense strand to SEQ ID NO: 1048310
aucuucagacaagugcccg

SEQ ID NO: 1048312 - RNA, 19 nt, Artificial Sequence
  Description of Artificial Sequence: Synthetic oligonucleotide
  Sense strand starting at position 1158 of SEQ ID NO: 915030
gaguggugagggcgugaaa

SEQ ID NO: 1048313 - RNA, 19 nt, Artificial Sequence
  Description of Artificial Sequence: Synthetic oligonucleotide
  Antisense strand to SEQ ID NO: 1048312
uuucacgcccucaccacuc

SEQ ID NO: 1048314 - RNA, 19 nt, Artificial Sequence
  Description of Artificial Sequence: Synthetic oligonucleotide
  Sense strand starting at position 1160 of SEQ ID NO: 915030
guggugagggcgugaaauu

SEQ ID NO: 1048315 - RNA, 19 nt, Artificial Sequence
  Description of Artificial Sequence: Synthetic oligonucleotide
  Antisense strand to SEQ ID NO: 1048314
aauuucacgcccucaccac

SEQ ID NO: 1048316 - RNA, 19 nt, Artificial Sequence
  Description of Artificial Sequence: Synthetic oligonucleotide
  Sense strand starting at position 1296 of SEQ ID NO: 915030
uuucuaugucuauaccuga

SEQ ID NO: 1048317 - RNA, 19 nt, Artificial Sequence
  Description of Artificial Sequence: Synthetic oligonucleotide
  Antisense strand to SEQ ID NO: 1048316
ucagguauagacauagaaa

SEQ ID NO: 1048318 - RNA, 19 nt, Artificial Sequence
  Description of Artificial Sequence: Synthetic oligonucleotide
  Sense strand starting at position 1422 of SEQ ID NO: 915030
gauaaagagugucagagag

SEQ ID NO: 1048319 - RNA, 19 nt, Artificial Sequence
  Description of Artificial Sequence: Synthetic oligonucleotide
  Antisense strand to SEQ ID NO: 1048318
cucucugacacucuuuauc

SEQ ID NO: 1048320 - RNA, 19 nt, Artificial Sequence
  Description of Artificial Sequence: Synthetic oligonucleotide
  Sense strand starting at position 1424 of SEQ ID NO: 915030
uaaagagugucagagagaa

SEQ ID NO: 1048321 - RNA, 19 nt, Artificial Sequence
  Description of Artificial Sequence: Synthetic oligonucleotide
  Antisense strand to SEQ ID NO: 1048320
uucucucugacacucuuua

SEQ ID NO: 1048322 - RNA, 19 nt, Artificial Sequence
  Description of Artificial Sequence: Synthetic oligonucleotide
  Sense strand starting at position 1693 of SEQ ID NO: 915030
ggcagaggcucuagaggua

SEQ ID NO: 1048323 - RNA, 19 nt, Artificial Sequence
  Description of Artificial Sequence: Synthetic oligonucleotide
  Antisense strand to SEQ ID NO: 1048322
uaccucuagagccucugcc

SEQ ID NO: 1048324 - RNA, 19 nt, Artificial Sequence
  Description of Artificial Sequence: Synthetic oligonucleotide
  Sense strand starting at position 1718 of SEQ ID NO: 915030
guccaugacuccuccacau

SEQ ID NO: 1048325 - RNA, 19 nt, Artificial Sequence
  Description of Artificial Sequence: Synthetic oligonucleotide
  Antisense strand to SEQ ID NO: 1048324
auguggaggagucauggac

SEQ ID NO: 1048326 - RNA, 19 nt, Artificial Sequence
  Description of Artificial Sequence: Synthetic oligonucleotide
  Sense strand starting at position 2333 of SEQ ID NO: 915030
gcaccugauccugacuuaa

SEQ ID NO: 1048327 - RNA, 19 nt, Artificial Sequence
  Description of Artificial Sequence: Synthetic oligonucleotide
  Antisense strand to SEQ ID NO: 1048326
uuaagucaggaucaggugc

SEQ ID NO: 1048328 - RNA, 19 nt, Artificial Sequence
  Description of Artificial Sequence: Synthetic oligonucleotide
  Sense strand starting at position 2343 of SEQ ID NO: 915030
cugacuuaaucacugaugu

SEQ ID NO: 1048329 - RNA, 19 nt, Artificial Sequence
  Description of Artificial Sequence: Synthetic oligonucleotide
  Antisense strand to SEQ ID NO: 1048328
acaucagugauuaagucag

SEQ ID NO: 1048330 - RNA, 19 nt, Artificial Sequence
  Description of Artificial Sequence: Synthetic oligonucleotide
  Sense strand starting at position 2344 of SEQ ID NO: 915030
ugacuuaaucacugaugug

SEQ ID NO: 1048331 - RNA, 19 nt, Artificial Sequence
  Description of Artificial Sequence: Synthetic oligonucleotide
  Antisense strand to SEQ ID NO: 1048330
cacaucagugauuaaguca

SEQ ID NO: 1048332 - RNA, 19 nt, Artificial Sequence
  Description of Artificial Sequence: Synthetic oligonucleotide
  Sense strand starting at position 2575 of SEQ ID NO: 915030
ggacacauguuauuccgua

SEQ ID NO: 1048333 - RNA, 19 nt, Artificial Sequence
  Description of Artificial Sequence: Synthetic oligonucleotide
  Antisense strand to SEQ ID NO: 1048332
uacggaauaacaugugucc

SEQ ID NO: 1048334 - RNA, 19 nt, Artificial Sequence
  Description of Artificial Sequence: Synthetic oligonucleotide
  Sense strand starting at position 2576 of SEQ ID NO: 915030
gacacauguuauuccguaa

SEQ ID NO: 1048335 - RNA, 19 nt, Artificial Sequence
  Description of Artificial Sequence: Synthetic oligonucleotide
  Antisense strand to SEQ ID NO: 1048334
uuacggaauaacauguguc

SEQ ID NO: 1048336 - RNA, 19 nt, Artificial Sequence
  Description of Artificial Sequence: Synthetic oligonucleotide
  Sense strand starting at position 2579 of SEQ ID NO: 915030
acauguuauuccguaauca

SEQ ID NO: 1048337 - RNA, 19 nt, Artificial Sequence
  Description of Artificial Sequence: Synthetic oligonucleotide
  Antisense strand to SEQ ID NO: 1048336
ugauuacggaauaacaugu

SEQ ID NO: 1048338 - RNA, 19 nt, Artificial Sequence
  Description of Artificial Sequence: Synthetic oligonucleotide
  Sense strand starting at position 2583 of SEQ ID NO: 915030
guuauuccguaaucaucca

SEQ ID NO: 1048339 - RNA, 19 nt, Artificial Sequence
  Description of Artificial Sequence: Synthetic oligonucleotide
  Antisense strand to SEQ ID NO: 1048338
uggaugauuacggaauaac

SEQ ID NO: 1048340 - RNA, 19 nt, Artificial Sequence
  Description of Artificial Sequence: Synthetic oligonucleotide
  Sense strand starting at position 2590 of SEQ ID NO: 915030
cguaaucauccagaaacuu

SEQ ID NO: 1048341 - RNA, 19 nt, Artificial Sequence
  Description of Artificial Sequence: Synthetic oligonucleotide
  Antisense strand to SEQ ID NO: 1048340
aaguuucuggaugauuacg

SEQ ID NO: 1048342 - RNA, 19 nt, Artificial Sequence
  Description of Artificial Sequence: Synthetic oligonucleotide
  Sense strand starting at position 2663 of SEQ ID NO: 915030
ugaagugaaaucugugauu

SEQ ID NO: 1048343 - RNA, 19 nt, Artificial Sequence
  Description of Artificial Sequence: Synthetic oligonucleotide
  Antisense strand to SEQ ID NO: 1048342
aaucacagauuucacuuca

SEQ ID NO: 1048344 - RNA, 19 nt, Artificial Sequence
  Description of Artificial Sequence: Synthetic oligonucleotide
  Sense strand starting at position 2666 of SEQ ID NO: 915030
agugaaaucugugauuuaa

SEQ ID NO: 1048345 - RNA, 19 nt, Artificial Sequence
  Description of Artificial Sequence: Synthetic oligonucleotide
  Antisense strand to SEQ ID NO: 1048344
uuaaaucacagauuucacu

SEQ ID NO: 1048346 - RNA, 19 nt, Artificial Sequence
  Description of Artificial Sequence: Synthetic oligonucleotide
  Sense strand starting at position 2723 of SEQ ID NO: 915030
uuguuauuagcguugucga

SEQ ID NO: 1048347 - RNA, 19 nt, Artificial Sequence
  Description of Artificial Sequence: Synthetic oligonucleotide
  Antisense strand to SEQ ID NO: 1048346
ucgacaacgcuaauaacaa

SEQ ID NO: 1048348 - RNA, 19 nt, Artificial Sequence
  Description of Artificial Sequence: Synthetic oligonucleotide
  Sense strand starting at position 2730 of SEQ ID NO: 915030
uagcguugucgaggaugga

SEQ ID NO: 1048349 - RNA, 19 nt, Artificial Sequence
  Description of Artificial Sequence: Synthetic oligonucleotide
  Antisense strand to SEQ ID NO: 1048348
uccauccucgacaacgcua

SEQ ID NO: 1048350 - RNA, 19 nt, Artificial Sequence
  Description of Artificial Sequence: Synthetic oligonucleotide
  Sense strand starting at position 2760 of SEQ ID NO: 915030
gcccuaucgggacaugaca

SEQ ID NO: 1048351 - RNA, 19 nt, Artificial Sequence
  Description of Artificial Sequence: Synthetic oligonucleotide
  Antisense strand to SEQ ID NO: 1048350
ugucaugucccgauagggc

SEQ ID NO: 1048352 - RNA, 19 nt, Artificial Sequence
  Description of Artificial Sequence: Synthetic oligonucleotide
  Sense strand starting at position 3347 of SEQ ID NO: 915030
ugcagugagcugugggaau

SEQ ID NO: 1048353 - RNA, 19 nt, Artificial Sequence
  Description of Artificial Sequence: Synthetic oligonucleotide
  Antisense strand to SEQ ID NO: 1048352
auucccacagcucacugca

SEQ ID NO: 1048354 - RNA, 19 nt, Artificial Sequence
  Description of Artificial Sequence: Synthetic oligonucleotide
  Sense strand starting at position 3457 of SEQ ID NO: 915030
gcacuaugcuaagcagauc

SEQ ID NO: 1048355 - RNA, 19 nt, Artificial Sequence
  Description of Artificial Sequence: Synthetic oligonucleotide
  Antisense strand to SEQ ID NO: 1048354
gaucugcuuagcauagugc

SEQ ID NO: 1048356 - RNA, 19 nt, Artificial Sequence
  Description of Artificial Sequence: Synthetic oligonucleotide
  Sense strand starting at position 3496 of SEQ ID NO: 915030
uucucagucccaugaagaa

SEQ ID NO: 1048357 - RNA, 19 nt, Artificial Sequence
  Description of Artificial Sequence: Synthetic oligonucleotide
  Antisense strand to SEQ ID NO: 1048356
uucuucaugggacugagaa

SEQ ID NO: 1048358 - RNA, 19 nt, Artificial Sequence
  Description of Artificial Sequence: Synthetic oligonucleotide
  Sense strand starting at position 3813 of SEQ ID NO: 915030
agugucugucaugaccaga

SEQ ID NO: 1048359 - RNA, 19 nt, Artificial Sequence
  Description of Artificial Sequence: Synthetic oligonucleotide
  Antisense strand to SEQ ID NO: 1048358
ucuggucaugacagacacu

SEQ ID NO: 1048360 - RNA, 19 nt, Artificial Sequence
  Description of Artificial Sequence: Synthetic oligonucleotide
  Sense strand starting at position 3816 of SEQ ID NO: 915030
gucugucaugaccagagua

SEQ ID NO: 1048361 - RNA, 19 nt, Artificial Sequence
  Description of Artificial Sequence: Synthetic oligonucleotide
  Antisense strand to SEQ ID NO: 1048360
uacucuggucaugacagac

SEQ ID NO: 1048362 - RNA, 19 nt, Artificial Sequence
  Description of Artificial Sequence: Synthetic oligonucleotide
  Sense strand starting at position 3818 of SEQ ID NO: 915030
cugucaugaccagaguaug

SEQ ID NO: 1048363 - RNA, 19 nt, Artificial Sequence
  Description of Artificial Sequence: Synthetic oligonucleotide
  Antisense strand to SEQ ID NO: 1048362
cauacucuggucaugacag

SEQ ID NO: 1048364 - RNA, 19 nt, Artificial Sequence
  Description of Artificial Sequence: Synthetic oligonucleotide
  Sense strand starting at position 3826 of SEQ ID NO: 915030
accagaguaugucuuuguu

SEQ ID NO: 1048365 - RNA, 19 nt, Artificial Sequence
  Description of Artificial Sequence: Synthetic oligonucleotide
  Antisense strand to SEQ ID NO: 1048364
aacaaagacauacucuggu

SEQ ID NO: 1048366 - RNA, 19 nt, Artificial Sequence
  Description of Artificial Sequence: Synthetic oligonucleotide
  Sense strand starting at position 3828 of SEQ ID NO: 915030
cagaguaugucuuuguucu

SEQ ID NO: 1048367 - RNA, 19 nt, Artificial Sequence
  Description of Artificial Sequence: Synthetic oligonucleotide
  Antisense strand to SEQ ID NO: 1048366
agaacaaagacauacucug

SEQ ID NO: 1048368 - RNA, 19 nt, Artificial Sequence
  Description of Artificial Sequence: Synthetic oligonucleotide
  Sense strand starting at position 3829 of SEQ ID NO: 915030
agaguaugucuuuguucuc

SEQ ID NO: 1048369 - RNA, 19 nt, Artificial Sequence
  Description of Artificial Sequence: Synthetic oligonucleotide
  Antisense strand to SEQ ID NO: 1048368
gagaacaaagacauacucu

SEQ ID NO: 1048370 - RNA, 19 nt, Artificial Sequence
  Description of Artificial Sequence: Synthetic oligonucleotide
  Sense strand starting at position 3845 of SEQ ID NO: 915030
cucgcugcucguuuguaga

SEQ ID NO: 1048371 - RNA, 19 nt, Artificial Sequence
  Description of Artificial Sequence: Synthetic oligonucleotide
  Antisense strand to SEQ ID NO: 1048370
ucuacaaacgagcagcgag

SEQ ID NO: 1048372 - RNA, 19 nt, Artificial Sequence
  Description of Artificial Sequence: Synthetic oligonucleotide
  Sense strand starting at position 371 of SEQ ID NO: 915031
ggcccaguacuuugagaca

SEQ ID NO: 1048373 - RNA, 19 nt, Artificial Sequence
  Description of Artificial Sequence: Synthetic oligonucleotide
  Antisense strand to SEQ ID NO: 1048372
ugucucaaaguacugggcc

SEQ ID NO: 1048374 - RNA, 19 nt, Artificial Sequence
  Description of Artificial Sequence: Synthetic oligonucleotide
  Sense strand starting at position 400 of SEQ ID NO: 915031
ugaggacuuuaguuagagu

SEQ ID NO: 1048375 - RNA, 19 nt, Artificial Sequence
  Description of Artificial Sequence: Synthetic oligonucleotide
  Antisense strand to SEQ ID NO: 1048374
acucuaacuaaaguccuca

SEQ ID NO: 1048376 - RNA, 19 nt, Artificial Sequence
  Description of Artificial Sequence: Synthetic oligonucleotide
  Sense strand starting at position 401 of SEQ ID NO: 915031
gaggacuuuaguuagaguc

SEQ ID NO: 1048377 - RNA, 19 nt, Artificial Sequence
  Description of Artificial Sequence: Synthetic oligonucleotide
  Antisense strand to SEQ ID NO: 1048376
gacucuaacuaaaguccuc

SEQ ID NO: 1048378 - RNA, 19 nt, Artificial Sequence
  Description of Artificial Sequence: Synthetic oligonucleotide
  Sense strand starting at position 411 of SEQ ID NO: 915031
guuagaguccgggacaauc

SEQ ID NO: 1048379 - RNA, 19 nt, Artificial Sequence
  Description of Artificial Sequence: Synthetic oligonucleotide
  Antisense strand to SEQ ID NO: 1048378
gauugucccggacucuaac

SEQ ID NO: 1048380 - RNA, 19 nt, Artificial Sequence
  Description of Artificial Sequence: Synthetic oligonucleotide
  Sense strand starting at position 439 of SEQ ID NO: 915031
gggagcuacuugcuuagua

SEQ ID NO: 1048381 - RNA, 19 nt, Artificial Sequence
  Description of Artificial Sequence: Synthetic oligonucleotide
  Antisense strand to SEQ ID NO: 1048380
uacuaagcaaguagcuccc

SEQ ID NO: 1048382 - RNA, 19 nt, Artificial Sequence
  Description of Artificial Sequence: Synthetic oligonucleotide
  Sense strand starting at position 441 of SEQ ID NO: 915031
gagcuacuugcuuaguauu

SEQ ID NO: 1048383 - RNA, 19 nt, Artificial Sequence
  Description of Artificial Sequence: Synthetic oligonucleotide
  Antisense strand to SEQ ID NO: 1048382
aauacuaagcaaguagcuc

SEQ ID NO: 1048384 - RNA, 19 nt, Artificial Sequence
  Description of Artificial Sequence: Synthetic oligonucleotide
  Sense strand starting at position 650 of SEQ ID NO: 915031
cgcuguaguccaucugcaa

SEQ ID NO: 1048385 - RNA, 19 nt, Artificial Sequence
  Description of Artificial Sequence: Synthetic oligonucleotide
  Antisense strand to SEQ ID NO: 1048384
uugcagauggacuacagcg

SEQ ID NO: 1048386 - RNA, 19 nt, Artificial Sequence
  Description of Artificial Sequence: Synthetic oligonucleotide
  Sense strand starting at position 653 of SEQ ID NO: 915031
uguaguccaucugcaaaca

SEQ ID NO: 1048387 - RNA, 19 nt, Artificial Sequence
  Description of Artificial Sequence: Synthetic oligonucleotide
  Antisense strand to SEQ ID NO: 1048386
uguuugcagauggacuaca

SEQ ID NO: 1048388 - RNA, 19 nt, Artificial Sequence
  Description of Artificial Sequence: Synthetic oligonucleotide
  Sense strand starting at position 814 of SEQ ID NO: 915031
ggagaugaggucugcaaca

SEQ ID NO: 1048389 - RNA, 19 nt, Artificial Sequence
  Description of Artificial Sequence: Synthetic oligonucleotide
  Antisense strand to SEQ ID NO: 1048388
uguugcagaccucaucucc

SEQ ID NO: 1048390 - RNA, 19 nt, Artificial Sequence
  Description of Artificial Sequence: Synthetic oligonucleotide
  Sense strand starting at position 923 of SEQ ID NO: 915031
cgcgcugcaguguucuaau

SEQ ID NO: 1048391 - RNA, 19 nt, Artificial Sequence
  Description of Artificial Sequence: Synthetic oligonucleotide
  Antisense strand to SEQ ID NO: 1048390
auuagaacacugcagcgcg

SEQ ID NO: 1048392 - RNA, 19 nt, Artificial Sequence
  Description of Artificial Sequence: Synthetic oligonucleotide
  Sense strand starting at position 1040 of SEQ ID NO: 915031
gaaggauccuggcccaaac

SEQ ID NO: 1048393 - RNA, 19 nt, Artificial Sequence
  Description of Artificial Sequence: Synthetic oligonucleotide
  Antisense strand to SEQ ID NO: 1048392
guuugggccaggauccuuc

SEQ ID NO: 1048394 - RNA, 19 nt, Artificial Sequence
  Description of Artificial Sequence: Synthetic oligonucleotide
  Sense strand starting at position 2013 of SEQ ID NO: 915031
ugggcuauuuauccguagu

SEQ ID NO: 1048395 - RNA, 19 nt, Artificial Sequence
  Description of Artificial Sequence: Synthetic oligonucleotide
  Antisense strand to SEQ ID NO: 1048394
acuacggauaaauagccca

SEQ ID NO: 1048396 - RNA, 19 nt, Artificial Sequence
  Description of Artificial Sequence: Synthetic oligonucleotide
  Sense strand starting at position 2014 of SEQ ID NO: 915031
gggcuauuuauccguagua

SEQ ID NO: 1048397 - RNA, 19 nt, Artificial Sequence
  Description of Artificial Sequence: Synthetic oligonucleotide
  Antisense strand to SEQ ID NO: 1048396
uacuacggauaaauagccc

SEQ ID NO: 1048398 - RNA, 19 nt, Artificial Sequence
  Description of Artificial Sequence: Synthetic oligonucleotide
  Sense strand starting at position 2015 of SEQ ID NO: 915031
ggcuauuuauccguaguag

SEQ ID NO: 1048399 - RNA, 19 nt, Artificial Sequence
  Description of Artificial Sequence: Synthetic oligonucleotide
  Antisense strand to SEQ ID NO: 1048398
cuacuacggauaaauagcc

SEQ ID NO: 1048400 - RNA, 19 nt, Artificial Sequence
  Description of Artificial Sequence: Synthetic oligonucleotide
  Sense strand starting at position 2016 of SEQ ID NO: 915031
gcuauuuauccguaguagc

SEQ ID NO: 1048401 - RNA, 19 nt, Artificial Sequence
  Description of Artificial Sequence: Synthetic oligonucleotide
  Antisense strand to SEQ ID NO: 1048400
gcuacuacggauaaauagc

SEQ ID NO: 1048402 - RNA, 19 nt, Artificial Sequence
  Description of Artificial Sequence: Synthetic oligonucleotide
  Sense strand starting at position 2393 of SEQ ID NO: 915031
uagaaaucaggucgugaga

SEQ ID NO: 1048403 - RNA, 19 nt, Artificial Sequence
  Description of Artificial Sequence: Synthetic oligonucleotide
  Antisense strand to SEQ ID NO: 1048402
ucucacgaccugauuucua

SEQ ID NO: 1048404 - RNA, 19 nt, Artificial Sequence
  Description of Artificial Sequence: Synthetic oligonucleotide
  Sense strand starting at position 2396 of SEQ ID NO: 915031
aaaucaggucgugagagau

SEQ ID NO: 1048405 - RNA, 19 nt, Artificial Sequence
  Description of Artificial Sequence: Synthetic oligonucleotide
  Antisense strand to SEQ ID NO: 1048404
aucucucacgaccugauuu

SEQ ID NO: 1048406 - RNA, 19 nt, Artificial Sequence
  Description of Artificial Sequence: Synthetic oligonucleotide
  Sense strand starting at position 2451 of SEQ ID NO: 915031
ggagugagaccgugaaaga

SEQ ID NO: 1048407 - RNA, 19 nt, Artificial Sequence
  Description of Artificial Sequence: Synthetic oligonucleotide
  Antisense strand to SEQ ID NO: 1048406
ucuuucacggucucacucc

SEQ ID NO: 1048408 - RNA, 19 nt, Artificial Sequence
  Description of Artificial Sequence: Synthetic oligonucleotide
  Sense strand starting at position 2672 of SEQ ID NO: 915031
ucccuagacgcuuagaaac

SEQ ID NO: 1048409 - RNA, 19 nt, Artificial Sequence
  Description of Artificial Sequence: Synthetic oligonucleotide
  Antisense strand to SEQ ID NO: 1048408
guuucuaagcgucuaggga

SEQ ID NO: 1048410 - RNA, 19 nt, Artificial Sequence
  Description of Artificial Sequence: Synthetic oligonucleotide
  Sense strand starting at position 2702 of SEQ ID NO: 915031
uguacaggaaucggagauu

SEQ ID NO: 1048411 - RNA, 19 nt, Artificial Sequence
  Description of Artificial Sequence: Synthetic oligonucleotide
  Antisense strand to SEQ ID NO: 1048410
aaucuccgauuccuguaca

SEQ ID NO: 1048412 - RNA, 19 nt, Artificial Sequence
  Description of Artificial Sequence: Synthetic oligonucleotide
  Sense strand starting at position 2905 of SEQ ID NO: 915031
ggugcugagucaaggaaag

SEQ ID NO: 1048413 - RNA, 19 nt, Artificial Sequence
  Description of Artificial Sequence: Synthetic oligonucleotide
  Antisense strand to SEQ ID NO: 1048412
cuuuccuugacucagcacc

SEQ ID NO: 1048414 - RNA, 19 nt, Artificial Sequence
  Description of Artificial Sequence: Synthetic oligonucleotide
  Sense strand starting at position 2925 of SEQ ID NO: 915031
gcauuucgccaagguguca

SEQ ID NO: 1048415 - RNA, 19 nt, Artificial Sequence
  Description of Artificial Sequence: Synthetic oligonucleotide
  Antisense strand to SEQ ID NO: 1048414
ugacaccuuggcgaaaugc

SEQ ID NO: 1048416 - RNA, 19 nt, Artificial Sequence
  Description of Artificial Sequence: Synthetic oligonucleotide
  Sense strand starting at position 2981 of SEQ ID NO: 915031
accugaagucuccgagagu

SEQ ID NO: 1048417 - RNA, 19 nt, Artificial Sequence
  Description of Artificial Sequence: Synthetic oligonucleotide
  Antisense strand to SEQ ID NO: 1048416
acucucggagacuucaggu

SEQ ID NO: 1048418 - RNA, 19 nt, Artificial Sequence
  Description of Artificial Sequence: Synthetic oligonucleotide
  Sense strand starting at position 2993 of SEQ ID NO: 915031
cgagagugcgguuugcaga

SEQ ID NO: 1048419 - RNA, 19 nt, Artificial Sequence
  Description of Artificial Sequence: Synthetic oligonucleotide
  Antisense strand to SEQ ID NO: 1048418
ucugcaaaccgcacucucg

SEQ ID NO: 1048420 - RNA, 19 nt, Artificial Sequence
  Description of Artificial Sequence: Synthetic oligonucleotide
  Sense strand starting at position 3060 of SEQ ID NO: 915031
agucaugucuccuuccuga

SEQ ID NO: 1048421 - RNA, 19 nt, Artificial Sequence
  Description of Artificial Sequence: Synthetic oligonucleotide
  Antisense strand to SEQ ID NO: 1048420
ucaggaaggagacaugacu

SEQ ID NO: 1048422 - RNA, 19 nt, Artificial Sequence
  Description of Artificial Sequence: Synthetic oligonucleotide
  Sense strand starting at position 3084 of SEQ ID NO: 915031
aguuuccaguuauagauuu

SEQ ID NO: 1048423 - RNA, 19 nt, Artificial Sequence
  Description of Artificial Sequence: Synthetic oligonucleotide
  Antisense strand to SEQ ID NO: 1048422
aaaucuauaacuggaaacu

SEQ ID NO: 1048424 - RNA, 19 nt, Artificial Sequence
  Description of Artificial Sequence: Synthetic oligonucleotide
  Sense strand starting at position 3139 of SEQ ID NO: 915031
ggaugacagucugaagaga

SEQ ID NO: 1048425 - RNA, 19 nt, Artificial Sequence
  Description of Artificial Sequence: Synthetic oligonucleotide
  Antisense strand to SEQ ID NO: 1048424
ucucuucagacugucaucc

SEQ ID NO: 1048426 - RNA, 19 nt, Artificial Sequence
  Description of Artificial Sequence: Synthetic oligonucleotide
  Sense strand starting at position 3367 of SEQ ID NO: 915031
ugggauaucuggcucccau

SEQ ID NO: 1048427 - RNA, 19 nt, Artificial Sequence
  Description of Artificial Sequence: Synthetic oligonucleotide
  Antisense strand to SEQ ID NO: 1048426
augggagccagauauccca

SEQ ID NO: 1048428 - RNA, 19 nt, Artificial Sequence
  Description of Artificial Sequence: Synthetic oligonucleotide
  Sense strand starting at position 3462 of SEQ ID NO: 915031
cagcacucuggcuaggaau

SEQ ID NO: 1048429 - RNA, 19 nt, Artificial Sequence
  Description of Artificial Sequence: Synthetic oligonucleotide
  Antisense strand to SEQ ID NO: 1048428
auuccuagccagagugcug

SEQ ID NO: 1048430 - RNA, 19 nt, Artificial Sequence
  Description of Artificial Sequence: Synthetic oligonucleotide
  Sense strand starting at position 3475 of SEQ ID NO: 915031
aggaaucuccguuggccau

SEQ ID NO: 1048431 - RNA, 19 nt, Artificial Sequence
  Description of Artificial Sequence: Synthetic oligonucleotide
  Antisense strand to SEQ ID NO: 1048430
auggccaacggagauuccu

SEQ ID NO: 1048432 - RNA, 19 nt, Artificial Sequence
  Description of Artificial Sequence: Synthetic oligonucleotide
  Sense strand starting at position 3476 of SEQ ID NO: 915031
ggaaucuccguuggccaua

SEQ ID NO: 1048433 - RNA, 19 nt, Artificial Sequence
  Description of Artificial Sequence: Synthetic oligonucleotide
  Antisense strand to SEQ ID NO: 1048432
uauggccaacggagauucc

SEQ ID NO: 1048434 - RNA, 19 nt, Artificial Sequence
  Description of Artificial Sequence: Synthetic oligonucleotide
  Sense strand starting at position 3539 of SEQ ID NO: 915031
aggagugaucuuugugccu

SEQ ID NO: 1048435 - RNA, 19 nt, Artificial Sequence
  Description of Artificial Sequence: Synthetic oligonucleotide
  Antisense strand to SEQ ID NO: 1048434
aggcacaaagaucacuccu

SEQ ID NO: 1048436 - RNA, 19 nt, Artificial Sequence
  Description of Artificial Sequence: Synthetic oligonucleotide
  Sense strand starting at position 3860 of SEQ ID NO: 915031
auccacauauuguuaggua

SEQ ID NO: 1048437 - RNA, 19 nt, Artificial Sequence
  Description of Artificial Sequence: Synthetic oligonucleotide
  Antisense strand to SEQ ID NO: 1048436
uaccuaacaauauguggau

SEQ ID NO: 1048438 - RNA, 19 nt, Artificial Sequence
  Description of Artificial Sequence: Synthetic oligonucleotide
  Sense strand starting at position 3864 of SEQ ID NO: 915031
acauauuguuagguaucca

SEQ ID NO: 1048439 - RNA, 19 nt, Artificial Sequence
  Description of Artificial Sequence: Synthetic oligonucleotide
  Antisense strand to SEQ ID NO: 1048438
uggauaccuaacaauaugu

SEQ ID NO: 1048440 - RNA, 19 nt, Artificial Sequence
  Description of Artificial Sequence: Synthetic oligonucleotide
  Sense strand starting at position 3868 of SEQ ID NO: 915031
auuguuagguauccauuau

SEQ ID NO: 1048441 - RNA, 19 nt, Artificial Sequence
  Description of Artificial Sequence: Synthetic oligonucleotide
  Antisense strand to SEQ ID NO: 1048440
auaauggauaccuaacaau

SEQ ID NO: 1048442 - RNA, 19 nt, Artificial Sequence
  Description of Artificial Sequence: Synthetic oligonucleotide
  Sense strand starting at position 3911 of SEQ ID NO: 915031
gggcuagagcaaugaacaa

SEQ ID NO: 1048443 - RNA, 19 nt, Artificial Sequence
  Description of Artificial Sequence: Synthetic oligonucleotide
  Antisense strand to SEQ ID NO: 1048442
uuguucauugcucuagccc

SEQ ID NO: 1048444 - RNA, 19 nt, Artificial Sequence
  Description of Artificial Sequence: Synthetic oligonucleotide
  Sense strand starting at position 3932 of SEQ ID NO: 915031
ccaagacucugcuuacaug

SEQ ID NO: 1048445 - RNA, 19 nt, Artificial Sequence
  Description of Artificial Sequence: Synthetic oligonucleotide
  Antisense strand to SEQ ID NO: 1048444
cauguaagcagagucuugg

SEQ ID NO: 1048446 - RNA, 19 nt, Artificial Sequence
  Description of Artificial Sequence: Synthetic oligonucleotide
  Sense strand starting at position 3949 of SEQ ID NO: 915031
uggcacuuacauugucaau

SEQ ID NO: 1048447 - RNA, 19 nt, Artificial Sequence
  Description of Artificial Sequence: Synthetic oligonucleotide
  Antisense strand to SEQ ID NO: 1048446
auugacaauguaagugcca

SEQ ID NO: 1048448 - RNA, 19 nt, Artificial Sequence
  Description of Artificial Sequence: Synthetic oligonucleotide
  Sense strand starting at position 3951 of SEQ ID NO: 915031
gcacuuacauugucaaugu

SEQ ID NO: 1048449 - RNA, 19 nt, Artificial Sequence
  Description of Artificial Sequence: Synthetic oligonucleotide
  Antisense strand to SEQ ID NO: 1048448
acauugacaauguaagugc

SEQ ID NO: 1048450 - RNA, 19 nt, Artificial Sequence
  Description of Artificial Sequence: Synthetic oligonucleotide
  Sense strand starting at position 3964 of SEQ ID NO: 915031
caauguaagcagggugaua

SEQ ID NO: 1048451 - RNA, 19 nt, Artificial Sequence
  Description of Artificial Sequence: Synthetic oligonucleotide
  Antisense strand to SEQ ID NO: 1048450
uaucacccugcuuacauug

SEQ ID NO: 1048452 - RNA, 19 nt, Artificial Sequence
  Description of Artificial Sequence: Synthetic oligonucleotide
  Sense strand starting at position 221 of SEQ ID NO: 915032
gcuccuauggaucaacagu

SEQ ID NO: 1048453 - RNA, 19 nt, Artificial Sequence
  Description of Artificial Sequence: Synthetic oligonucleotide
  Antisense strand to SEQ ID NO: 1048452
acuguugauccauaggagc

SEQ ID NO: 1048454 - RNA, 19 nt, Artificial Sequence
  Description of Artificial Sequence: Synthetic oligonucleotide
  Sense strand starting at position 336 of SEQ ID NO: 915032
gccugaacucuuggguucu

SEQ ID NO: 1048455 - RNA, 19 nt, Artificial Sequence
  Description of Artificial Sequence: Synthetic oligonucleotide
  Antisense strand to SEQ ID NO: 1048454
agaacccaagaguucaggc

SEQ ID NO: 1048456 - RNA, 19 nt, Artificial Sequence
  Description of Artificial Sequence: Synthetic oligonucleotide
  Sense strand starting at position 562 of SEQ ID NO: 915032
cccuguagcccugauaggu

SEQ ID NO: 1048457 - RNA, 19 nt, Artificial Sequence
  Description of Artificial Sequence: Synthetic oligonucleotide
  Antisense strand to SEQ ID NO: 1048456
accuaucagggcuacaggg

SEQ ID NO: 1048458 - RNA, 19 nt, Artificial Sequence
  Description of Artificial Sequence: Synthetic oligonucleotide
  Sense strand starting at position 591 of SEQ ID NO: 915032
agggaagguucucaaugca

SEQ ID NO: 1048459 - RNA, 19 nt, Artificial Sequence
  Description of Artificial Sequence: Synthetic oligonucleotide
  Antisense strand to SEQ ID NO: 1048458
ugcauugagaaccuucccu

SEQ ID NO: 1048460 - RNA, 19 nt, Artificial Sequence
  Description of Artificial Sequence: Synthetic oligonucleotide
  Sense strand starting at position 594 of SEQ ID NO: 915032
gaagguucucaaugcacca

SEQ ID NO: 1048461 - RNA, 19 nt, Artificial Sequence
  Description of Artificial Sequence: Synthetic oligonucleotide
  Antisense strand to SEQ ID NO: 1048460
uggugcauugagaaccuuc

SEQ ID NO: 1048462 - RNA, 19 nt, Artificial Sequence
  Description of Artificial Sequence: Synthetic oligonucleotide
  Sense strand starting at position 712 of SEQ ID NO: 915032
gcuagauguuccagggagg

SEQ ID NO: 1048463 - RNA, 19 nt, Artificial Sequence
  Description of Artificial Sequence: Synthetic oligonucleotide
  Antisense strand to SEQ ID NO: 1048462
ccucccuggaacaucuagc

SEQ ID NO: 1048464 - RNA, 19 nt, Artificial Sequence
  Description of Artificial Sequence: Synthetic oligonucleotide
  Sense strand starting at position 713 of SEQ ID NO: 915032
cuagauguuccagggaggu

SEQ ID NO: 1048465 - RNA, 19 nt, Artificial Sequence
  Description of Artificial Sequence: Synthetic oligonucleotide
  Antisense strand to SEQ ID NO: 1048464
accucccuggaacaucuag

SEQ ID NO: 1048466 - RNA, 19 nt, Artificial Sequence
  Description of Artificial Sequence: Synthetic oligonucleotide
  Sense strand starting at position 1535 of SEQ ID NO: 915032
gcgagagugucacaauuua

SEQ ID NO: 1048467 - RNA, 19 nt, Artificial Sequence
  Description of Artificial Sequence: Synthetic oligonucleotide
  Antisense strand to SEQ ID NO: 1048466
uaaauugugacacucucgc

SEQ ID NO: 1048468 - RNA, 19 nt, Artificial Sequence
  Description of Artificial Sequence: Synthetic oligonucleotide
  Sense strand starting at position 1543 of SEQ ID NO: 915032
gucacaauuuagggaaagu

SEQ ID NO: 1048469 - RNA, 19 nt, Artificial Sequence
  Description of Artificial Sequence: Synthetic oligonucleotide
  Antisense strand to SEQ ID NO: 1048468
acuuucccuaaauugugac

SEQ ID NO: 1048470 - RNA, 19 nt, Artificial Sequence
  Description of Artificial Sequence: Synthetic oligonucleotide
  Sense strand starting at position 1554 of SEQ ID NO: 915032
gggaaaguuccggguccug

SEQ ID NO: 1048471 - RNA, 19 nt, Artificial Sequence
  Description of Artificial Sequence: Synthetic oligonucleotide
  Antisense strand to SEQ ID NO: 1048470
caggacccggaacuuuccc

SEQ ID NO: 1048472 - RNA, 19 nt, Artificial Sequence
  Description of Artificial Sequence: Synthetic oligonucleotide
  Sense strand starting at position 1839 of SEQ ID NO: 915032
gucucucaccuucgaagaa

SEQ ID NO: 1048473 - RNA, 19 nt, Artificial Sequence
  Description of Artificial Sequence: Synthetic oligonucleotide
  Antisense strand to SEQ ID NO: 1048472
uucuucgaaggugagagac

SEQ ID NO: 1048474 - RNA, 19 nt, Artificial Sequence
  Description of Artificial Sequence: Synthetic oligonucleotide
  Sense strand starting at position 2347 of SEQ ID NO: 915032
gggacaagaugucacgauu

SEQ ID NO: 1048475 - RNA, 19 nt, Artificial Sequence
  Description of Artificial Sequence: Synthetic oligonucleotide
  Antisense strand to SEQ ID NO: 1048474
aaucgugacaucuuguccc

SEQ ID NO: 1048476 - RNA, 19 nt, Artificial Sequence
  Description of Artificial Sequence: Synthetic oligonucleotide
  Sense strand starting at position 2449 of SEQ ID NO: 915032
uagggaacguguguuaugu

SEQ ID NO: 1048477 - RNA, 19 nt, Artificial Sequence
  Description of Artificial Sequence: Synthetic oligonucleotide
  Antisense strand to SEQ ID NO: 1048476
acauaacacacguucccua

SEQ ID NO: 1048478 - RNA, 19 nt, Artificial Sequence
  Description of Artificial Sequence: Synthetic oligonucleotide
  Sense strand starting at position 2507 of SEQ ID NO: 915032
gcaccuuaucaaggagaug

SEQ ID NO: 1048479 - RNA, 19 nt, Artificial Sequence
  Description of Artificial Sequence: Synthetic oligonucleotide
  Antisense strand to SEQ ID NO: 1048478
caucuccuugauaaggugc

SEQ ID NO: 1048480 - RNA, 19 nt, Artificial Sequence
  Description of Artificial Sequence: Synthetic oligonucleotide
  Sense strand starting at position 2562 of SEQ ID NO: 915032
ggcucaaugcauuaaggac

SEQ ID NO: 1048481 - RNA, 19 nt, Artificial Sequence
  Description of Artificial Sequence: Synthetic oligonucleotide
  Antisense strand to SEQ ID NO: 1048480
guccuuaaugcauugagcc

SEQ ID NO: 1048482 - RNA, 19 nt, Artificial Sequence
  Description of Artificial Sequence: Synthetic oligonucleotide
  Sense strand starting at position 2612 of SEQ ID NO: 915032
auggaaauguucccugugu

SEQ ID NO: 1048483 - RNA, 19 nt, Artificial Sequence
  Description of Artificial Sequence: Synthetic oligonucleotide
  Antisense strand to SEQ ID NO: 1048482
acacagggaacauuuccau

SEQ ID NO: 1048484 - RNA, 19 nt, Artificial Sequence
  Description of Artificial Sequence: Synthetic oligonucleotide
  Sense strand starting at position 2616 of SEQ ID NO: 915032
aaauguucccuguguuguu

SEQ ID NO: 1048485 - RNA, 19 nt, Artificial Sequence
  Description of Artificial Sequence: Synthetic oligonucleotide
  Antisense strand to SEQ ID NO: 1048484
aacaacacagggaacauuu

SEQ ID NO: 1048486 - RNA, 19 nt, Artificial Sequence
  Description of Artificial Sequence: Synthetic oligonucleotide
  Sense strand starting at position 2623 of SEQ ID NO: 915032
cccuguguuguucaguaug

SEQ ID NO: 1048487 - RNA, 19 nt, Artificial Sequence
  Description of Artificial Sequence: Synthetic oligonucleotide
  Antisense strand to SEQ ID NO: 1048486
cauacugaacaacacaggg

SEQ ID NO: 1048488 - RNA, 19 nt, Artificial Sequence
  Description of Artificial Sequence: Synthetic oligonucleotide
  Sense strand starting at position 2626 of SEQ ID NO: 915032
uguguuguucaguauggua

SEQ ID NO: 1048489 - RNA, 19 nt, Artificial Sequence
  Description of Artificial Sequence: Synthetic oligonucleotide
  Antisense strand to SEQ ID NO: 1048488
uaccauacugaacaacaca

SEQ ID NO: 1048490 - RNA, 19 nt, Artificial Sequence
  Description of Artificial Sequence: Synthetic oligonucleotide
  Sense strand starting at position 2628 of SEQ ID NO: 915032
uguuguucaguaugguagu

SEQ ID NO: 1048491 - RNA, 19 nt, Artificial Sequence
  Description of Artificial Sequence: Synthetic oligonucleotide
  Antisense strand to SEQ ID NO: 1048490
acuaccauacugaacaaca

SEQ ID NO: 1048492 - RNA, 19 nt, Artificial Sequence
  Description of Artificial Sequence: Synthetic oligonucleotide
  Sense strand starting at position 2655 of SEQ ID NO: 915032
acaagugagcacuggaaau

SEQ ID NO: 1048493 - RNA, 19 nt, Artificial Sequence
  Description of Artificial Sequence: Synthetic oligonucleotide
  Antisense strand to SEQ ID NO: 1048492
auuuccagugcucacuugu

SEQ ID NO: 1048494 - RNA, 19 nt, Artificial Sequence
  Description of Artificial Sequence: Synthetic oligonucleotide
  Sense strand starting at position 2666 of SEQ ID NO: 915032
cuggaaaugugccuauuga

SEQ ID NO: 1048495 - RNA, 19 nt, Artificial Sequence
  Description of Artificial Sequence: Synthetic oligonucleotide
  Antisense strand to SEQ ID NO: 1048494
ucaauaggcacauuuccag

SEQ ID NO: 1048496 - RNA, 19 nt, Artificial Sequence
  Description of Artificial Sequence: Synthetic oligonucleotide
  Sense strand starting at position 2667 of SEQ ID NO: 915032
uggaaaugugccuauugag

SEQ ID NO: 1048497 - RNA, 19 nt, Artificial Sequence
  Description of Artificial Sequence: Synthetic oligonucleotide
  Antisense strand to SEQ ID NO: 1048496
cucaauaggcacauuucca

SEQ ID NO: 1048498 - RNA, 19 nt, Artificial Sequence
  Description of Artificial Sequence: Synthetic oligonucleotide
  Sense strand starting at position 2676 of SEQ ID NO: 915032
gccuauugagacugaggaa

SEQ ID NO: 1048499 - RNA, 19 nt, Artificial Sequence
  Description of Artificial Sequence: Synthetic oligonucleotide
  Antisense strand to SEQ ID NO: 1048498
uuccucagucucaauaggc

SEQ ID NO: 1048500 - RNA, 19 nt, Artificial Sequence
  Description of Artificial Sequence: Synthetic oligonucleotide
  Sense strand starting at position 2739 of SEQ ID NO: 915032
ggcugugguauuggacaau

SEQ ID NO: 1048501 - RNA, 19 nt, Artificial Sequence
  Description of Artificial Sequence: Synthetic oligonucleotide
  Antisense strand to SEQ ID NO: 1048500
auuguccaauaccacagcc

SEQ ID NO: 1048502 - RNA, 19 nt, Artificial Sequence
  Description of Artificial Sequence: Synthetic oligonucleotide
  Sense strand starting at position 2742 of SEQ ID NO: 915032
ugugguauuggacaaugca

SEQ ID NO: 1048503 - RNA, 19 nt, Artificial Sequence
  Description of Artificial Sequence: Synthetic oligonucleotide
  Antisense strand to SEQ ID NO: 1048502
ugcauuguccaauaccaca

SEQ ID NO: 1048504 - RNA, 19 nt, Artificial Sequence
  Description of Artificial Sequence: Synthetic oligonucleotide
  Sense strand starting at position 3141 of SEQ ID NO: 915032
cccugucugguauaaugaa

SEQ ID NO: 1048505 - RNA, 19 nt, Artificial Sequence
  Description of Artificial Sequence: Synthetic oligonucleotide
  Antisense strand to SEQ ID NO: 1048504
uucauuauaccagacaggg

SEQ ID NO: 1048506 - RNA, 19 nt, Artificial Sequence
  Description of Artificial Sequence: Synthetic oligonucleotide
  Sense strand starting at position 3166 of SEQ ID NO: 915032
agguucuaacucgauauaa

SEQ ID NO: 1048507 - RNA, 19 nt, Artificial Sequence
  Description of Artificial Sequence: Synthetic oligonucleotide
  Antisense strand to SEQ ID NO: 1048506
uuauaucgaguuagaaccu

SEQ ID NO: 1048508 - RNA, 19 nt, Artificial Sequence
  Description of Artificial Sequence: Synthetic oligonucleotide
  Sense strand starting at position 3168 of SEQ ID NO: 915032
guucuaacucgauauaagu

SEQ ID NO: 1048509 - RNA, 19 nt, Artificial Sequence
  Description of Artificial Sequence: Synthetic oligonucleotide
  Antisense strand to SEQ ID NO: 1048508
acuuauaucgaguuagaac

SEQ ID NO: 1048510 - RNA, 19 nt, Artificial Sequence
  Description of Artificial Sequence: Synthetic oligonucleotide
  Sense strand starting at position 3190 of SEQ ID NO: 915032
ggauaaagcgguuguccuu

SEQ ID NO: 1048511 - RNA, 19 nt, Artificial Sequence
  Description of Artificial Sequence: Synthetic oligonucleotide
  Antisense strand to SEQ ID NO: 1048510
aaggacaaccgcuuuaucc

SEQ ID NO: 1048512 - RNA, 19 nt, Artificial Sequence
  Description of Artificial Sequence: Synthetic oligonucleotide
  Sense strand starting at position 3273 of SEQ ID NO: 915032
ccucucgucucacugauau

SEQ ID NO: 1048513 - RNA, 19 nt, Artificial Sequence
  Description of Artificial Sequence: Synthetic oligonucleotide
  Antisense strand to SEQ ID NO: 1048512
auaucagugagacgagagg

SEQ ID NO: 1048514 - RNA, 19 nt, Artificial Sequence
  Description of Artificial Sequence: Synthetic oligonucleotide
  Sense strand starting at position 3541 of SEQ ID NO: 915032
gcuauuccaucuguuuaca

SEQ ID NO: 1048515 - RNA, 19 nt, Artificial Sequence
  Description of Artificial Sequence: Synthetic oligonucleotide
  Antisense strand to SEQ ID NO: 1048514
uguaaacagauggaauagc

SEQ ID NO: 1048516 - RNA, 19 nt, Artificial Sequence
  Description of Artificial Sequence: Synthetic oligonucleotide
  Sense strand starting at position 3575 of SEQ ID NO: 915032
uggcuacuucuuuguagca

SEQ ID NO: 1048517 - RNA, 19 nt, Artificial Sequence
  Description of Artificial Sequence: Synthetic oligonucleotide
  Antisense strand to SEQ ID NO: 1048516
ugcuacaaagaaguagcca

SEQ ID NO: 1048518 - RNA, 19 nt, Artificial Sequence
  Description of Artificial Sequence: Synthetic oligonucleotide
  Sense strand starting at position 3656 of SEQ ID NO: 915032
ggccuuucuugcucaccau

SEQ ID NO: 1048519 - RNA, 19 nt, Artificial Sequence
  Description of Artificial Sequence: Synthetic oligonucleotide
  Antisense strand to SEQ ID NO: 1048518
auggugagcaagaaaggcc

SEQ ID NO: 1048520 - RNA, 19 nt, Artificial Sequence
  Description of Artificial Sequence: Synthetic oligonucleotide
  Sense strand starting at position 3659 of SEQ ID NO: 915032
cuuucuugcucaccaugua

SEQ ID NO: 1048521 - RNA, 19 nt, Artificial Sequence
  Description of Artificial Sequence: Synthetic oligonucleotide
  Antisense strand to SEQ ID NO: 1048520
uacauggugagcaagaaag

SEQ ID NO: 1048522 - RNA, 19 nt, Artificial Sequence
  Description of Artificial Sequence: Synthetic oligonucleotide
  Sense strand starting at position 3685 of SEQ ID NO: 915032
ccuauuuaguuucuguuau

SEQ ID NO: 1048523 - RNA, 19 nt, Artificial Sequence
  Description of Artificial Sequence: Synthetic oligonucleotide
  Antisense strand to SEQ ID NO: 1048522
auaacagaaacuaaauagg

SEQ ID NO: 1048524 - RNA, 19 nt, Artificial Sequence
  Description of Artificial Sequence: Synthetic oligonucleotide
  Sense strand starting at position 3706 of SEQ ID NO: 915032
uccuucuugcucuagaaug

SEQ ID NO: 1048525 - RNA, 19 nt, Artificial Sequence
  Description of Artificial Sequence: Synthetic oligonucleotide
  Antisense strand to SEQ ID NO: 1048524
cauucuagagcaagaagga

SEQ ID NO: 1048526 - RNA, 19 nt, Artificial Sequence
  Description of Artificial Sequence: Synthetic oligonucleotide
  Sense strand starting at position 3708 of SEQ ID NO: 915032
cuucuugcucuagaaugga

SEQ ID NO: 1048527 - RNA, 19 nt, Artificial Sequence
  Description of Artificial Sequence: Synthetic oligonucleotide
  Antisense strand to SEQ ID NO: 1048526
uccauucuagagcaagaag

SEQ ID NO: 1048528 - RNA, 19 nt, Artificial Sequence
  Description of Artificial Sequence: Synthetic oligonucleotide
  Sense strand starting at position 3753 of SEQ ID NO: 915032
uguaucggucacugcuaua

SEQ ID NO: 1048529 - RNA, 19 nt, Artificial Sequence
  Description of Artificial Sequence: Synthetic oligonucleotide
  Antisense strand to SEQ ID NO: 1048528
uauagcagugaccgauaca

SEQ ID NO: 1048530 - RNA, 19 nt, Artificial Sequence
  Description of Artificial Sequence: Synthetic oligonucleotide
  Sense strand starting at position 3817 of SEQ ID NO: 915032
aaauguguugaaugaaugu

SEQ ID NO: 1048531 - RNA, 19 nt, Artificial Sequence
  Description of Artificial Sequence: Synthetic oligonucleotide
  Antisense strand to SEQ ID NO: 1048530
acauucauucaacacauuu

SEQ ID NO: 1048532 - RNA, 19 nt, Artificial Sequence
  Description of Artificial Sequence: Synthetic oligonucleotide
  Sense strand starting at position 52 of SEQ ID NO: 915033
cccugauacggccaagaga

SEQ ID NO: 1048533 - RNA, 19 nt, Artificial Sequence
  Description of Artificial Sequence: Synthetic oligonucleotide
  Antisense strand to SEQ ID NO: 1048532
ucucuuggccguaucaggg

SEQ ID NO: 1048534 - RNA, 19 nt, Artificial Sequence
  Description of Artificial Sequence: Synthetic oligonucleotide
  Sense strand starting at position 122 of SEQ ID NO: 915033
ggcgaaugcacagaaccau

SEQ ID NO: 1048535 - RNA, 19 nt, Artificial Sequence
  Description of Artificial Sequence: Synthetic oligonucleotide
  Antisense strand to SEQ ID NO: 1048534
augguucugugcauucgcc

SEQ ID NO: 1048536 - RNA, 19 nt, Artificial Sequence
  Description of Artificial Sequence: Synthetic oligonucleotide
  Sense strand starting at position 197 of SEQ ID NO: 915033
ggcugaaggccuggagaua

SEQ ID NO: 1048537 - RNA, 19 nt, Artificial Sequence
  Description of Artificial Sequence: Synthetic oligonucleotide
  Antisense strand to SEQ ID NO: 1048536
uaucuccaggccuucagcc

SEQ ID NO: 1048538 - RNA, 19 nt, Artificial Sequence
  Description of Artificial Sequence: Synthetic oligonucleotide
  Sense strand starting at position 276 of SEQ ID NO: 915033
ggugcuagguccgugaaga

SEQ ID NO: 1048539 - RNA, 19 nt, Artificial Sequence
  Description of Artificial Sequence: Synthetic oligonucleotide
  Antisense strand to SEQ ID NO: 1048538
ucuucacggaccuagcacc

SEQ ID NO: 1048540 - RNA, 19 nt, Artificial Sequence
  Description of Artificial Sequence: Synthetic oligonucleotide
  Sense strand starting at position 277 of SEQ ID NO: 915033
gugcuagguccgugaagag

SEQ ID NO: 1048541 - RNA, 19 nt, Artificial Sequence
  Description of Artificial Sequence: Synthetic oligonucleotide
  Antisense strand to SEQ ID NO: 1048540
cucuucacggaccuagcac

SEQ ID NO: 1048542 - RNA, 19 nt, Artificial Sequence
  Description of Artificial Sequence: Synthetic oligonucleotide
  Sense strand starting at position 334 of SEQ ID NO: 915033
gggccacccaguuaaugau

SEQ ID NO: 1048543 - RNA, 19 nt, Artificial Sequence
  Description of Artificial Sequence: Synthetic oligonucleotide
  Antisense strand to SEQ ID NO: 1048542
aucauuaacuggguggccc

SEQ ID NO: 1048544 - RNA, 19 nt, Artificial Sequence
  Description of Artificial Sequence: Synthetic oligonucleotide
  Sense strand starting at position 372 of SEQ ID NO: 915033
cccaguuccuuaucaggga

SEQ ID NO: 1048545 - RNA, 19 nt, Artificial Sequence
  Description of Artificial Sequence: Synthetic oligonucleotide
  Antisense strand to SEQ ID NO: 1048544
ucccugauaaggaacuggg

SEQ ID NO: 1048546 - RNA, 19 nt, Artificial Sequence
  Description of Artificial Sequence: Synthetic oligonucleotide
  Sense strand starting at position 521 of SEQ ID NO: 915033
aggccauucugcccucaaa

SEQ ID NO: 1048547 - RNA, 19 nt, Artificial Sequence
  Description of Artificial Sequence: Synthetic oligonucleotide
  Antisense strand to SEQ ID NO: 1048546
uuugagggcagaauggccu

SEQ ID NO: 1048548 - RNA, 19 nt, Artificial Sequence
  Description of Artificial Sequence: Synthetic oligonucleotide
  Sense strand starting at position 587 of SEQ ID NO: 915033
cuuccagucucaggagagu

SEQ ID NO: 1048549 - RNA, 19 nt, Artificial Sequence
  Description of Artificial Sequence: Synthetic oligonucleotide
  Antisense strand to SEQ ID NO: 1048548
acucuccugagacuggaag

SEQ ID NO: 1048550 - RNA, 19 nt, Artificial Sequence
  Description of Artificial Sequence: Synthetic oligonucleotide
  Sense strand starting at position 720 of SEQ ID NO: 915033
acccauuguugucaccauu

SEQ ID NO: 1048551 - RNA, 19 nt, Artificial Sequence
  Description of Artificial Sequence: Synthetic oligonucleotide
  Antisense strand to SEQ ID NO: 1048550
aauggugacaacaaugggu

SEQ ID NO: 1048552 - RNA, 19 nt, Artificial Sequence
  Description of Artificial Sequence: Synthetic oligonucleotide
  Sense strand starting at position 971 of SEQ ID NO: 915033
gauuccuguccagguggga

SEQ ID NO: 1048553 - RNA, 19 nt, Artificial Sequence
  Description of Artificial Sequence: Synthetic oligonucleotide
  Antisense strand to SEQ ID NO: 1048552
ucccaccuggacaggaauc

SEQ ID NO: 1048554 - RNA, 19 nt, Artificial Sequence
  Description of Artificial Sequence: Synthetic oligonucleotide
  Sense strand starting at position 987 of SEQ ID NO: 915033
ggaguccucucuuccaaau

SEQ ID NO: 1048555 - RNA, 19 nt, Artificial Sequence
  Description of Artificial Sequence: Synthetic oligonucleotide
  Antisense strand to SEQ ID NO: 1048554
auuuggaagagaggacucc

SEQ ID NO: 1048556 - RNA, 19 nt, Artificial Sequence
  Description of Artificial Sequence: Synthetic oligonucleotide
  Sense strand starting at position 1050 of SEQ ID NO: 915033
cagagauguuggucccuga

SEQ ID NO: 1048557 - RNA, 19 nt, Artificial Sequence
  Description of Artificial Sequence: Synthetic oligonucleotide
  Antisense strand to SEQ ID NO: 1048556
ucagggaccaacaucucug

SEQ ID NO: 1048558 - RNA, 19 nt, Artificial Sequence
  Description of Artificial Sequence: Synthetic oligonucleotide
  Sense strand starting at position 1297 of SEQ ID NO: 915033
aggagacuaugaguuuguu

SEQ ID NO: 1048559 - RNA, 19 nt, Artificial Sequence
  Description of Artificial Sequence: Synthetic oligonucleotide
  Antisense strand to SEQ ID NO: 1048558
aacaaacucauagucuccu

SEQ ID NO: 1048560 - RNA, 19 nt, Artificial Sequence
  Description of Artificial Sequence: Synthetic oligonucleotide
  Sense strand starting at position 1300 of SEQ ID NO: 915033
agacuaugaguuuguuuga

SEQ ID NO: 1048561 - RNA, 19 nt, Artificial Sequence
  Description of Artificial Sequence: Synthetic oligonucleotide
  Antisense strand to SEQ ID NO: 1048560
ucaaacaaacucauagucu

SEQ ID NO: 1048562 - RNA, 19 nt, Artificial Sequence
  Description of Artificial Sequence: Synthetic oligonucleotide
  Sense strand starting at position 1301 of SEQ ID NO: 915033
gacuaugaguuuguuugau

SEQ ID NO: 1048563 - RNA, 19 nt, Artificial Sequence
  Description of Artificial Sequence: Synthetic oligonucleotide
  Antisense strand to SEQ ID NO: 1048562
aucaaacaaacucauaguc

SEQ ID NO: 1048564 - RNA, 19 nt, Artificial Sequence
  Description of Artificial Sequence: Synthetic oligonucleotide
  Sense strand starting at position 1305 of SEQ ID NO: 915033
augaguuuguuugaugguu

SEQ ID NO: 1048565 - RNA, 19 nt, Artificial Sequence
  Description of Artificial Sequence: Synthetic oligonucleotide
  Antisense strand to SEQ ID NO: 1048564
aaccaucaaacaaacucau

SEQ ID NO: 1048566 - RNA, 19 nt, Artificial Sequence
  Description of Artificial Sequence: Synthetic oligonucleotide
  Sense strand starting at position 1307 of SEQ ID NO: 915033
gaguuuguuugaugguuaa

SEQ ID NO: 1048567 - RNA, 19 nt, Artificial Sequence
  Description of Artificial Sequence: Synthetic oligonucleotide
  Antisense strand to SEQ ID NO: 1048566
uuaaccaucaaacaaacuc

SEQ ID NO: 1048568 - RNA, 19 nt, Artificial Sequence
  Description of Artificial Sequence: Synthetic oligonucleotide
  Sense strand starting at position 1745 of SEQ ID NO: 915033
cugucuugcaggugaggaa

SEQ ID NO: 1048569 - RNA, 19 nt, Artificial Sequence
  Description of Artificial Sequence: Synthetic oligonucleotide
  Antisense strand to SEQ ID NO: 1048568
uuccucaccugcaagacag

SEQ ID NO: 1048570 - RNA, 19 nt, Artificial Sequence
  Description of Artificial Sequence: Synthetic oligonucleotide
  Sense strand starting at position 1746 of SEQ ID NO: 915033
ugucuugcaggugaggaaa

SEQ ID NO: 1048571 - RNA, 19 nt, Artificial Sequence
  Description of Artificial Sequence: Synthetic oligonucleotide
  Antisense strand to SEQ ID NO: 1048570
uuuccucaccugcaagaca

SEQ ID NO: 1048572 - RNA, 19 nt, Artificial Sequence
  Description of Artificial Sequence: Synthetic oligonucleotide
  Sense strand starting at position 1864 of SEQ ID NO: 915033
cuggcaggauucucagaca

SEQ ID NO: 1048573 - RNA, 19 nt, Artificial Sequence
  Description of Artificial Sequence: Synthetic oligonucleotide
  Antisense strand to SEQ ID NO: 1048572
ugucugagaauccugccag

SEQ ID NO: 1048574 - RNA, 19 nt, Artificial Sequence
  Description of Artificial Sequence: Synthetic oligonucleotide
  Sense strand starting at position 1867 of SEQ ID NO: 915033
gcaggauucucagacacug

SEQ ID NO: 1048575 - RNA, 19 nt, Artificial Sequence
  Description of Artificial Sequence: Synthetic oligonucleotide
  Antisense strand to SEQ ID NO: 1048574
cagugucugagaauccugc

SEQ ID NO: 1048576 - RNA, 19 nt, Artificial Sequence
  Description of Artificial Sequence: Synthetic oligonucleotide
  Sense strand starting at position 2648 of SEQ ID NO: 915033
ucuugagucuccucuuauc

SEQ ID NO: 1048577 - RNA, 19 nt, Artificial Sequence
  Description of Artificial Sequence: Synthetic oligonucleotide
  Antisense strand to SEQ ID NO: 1048576
gauaagaggagacucaaga

SEQ ID NO: 1048578 - RNA, 19 nt, Artificial Sequence
  Description of Artificial Sequence: Synthetic oligonucleotide
  Sense strand starting at position 2969 of SEQ ID NO: 915033
gagagcuccuauggaucaa

SEQ ID NO: 1048579 - RNA, 19 nt, Artificial Sequence
  Description of Artificial Sequence: Synthetic oligonucleotide
  Antisense strand to SEQ ID NO: 1048578
uugauccauaggagcucuc

SEQ ID NO: 1048580 - RNA, 19 nt, Artificial Sequence
  Description of Artificial Sequence: Synthetic oligonucleotide
  Sense strand starting at position 2973 of SEQ ID NO: 915033
gcuccuauggaucaacagu

SEQ ID NO: 1048581 - RNA, 19 nt, Artificial Sequence
  Description of Artificial Sequence: Synthetic oligonucleotide
  Antisense strand to SEQ ID NO: 1048580
acuguugauccauaggagc

SEQ ID NO: 1048582 - RNA, 19 nt, Artificial Sequence
  Description of Artificial Sequence: Synthetic oligonucleotide
  Sense strand starting at position 3088 of SEQ ID NO: 915033
gccugaacucuuggguucu

SEQ ID NO: 1048583 - RNA, 19 nt, Artificial Sequence
  Description of Artificial Sequence: Synthetic oligonucleotide
  Antisense strand to SEQ ID NO: 1048582
agaacccaagaguucaggc

SEQ ID NO: 1048584 - RNA, 19 nt, Artificial Sequence
  Description of Artificial Sequence: Synthetic oligonucleotide
  Sense strand starting at position 3314 of SEQ ID NO: 915033
cccuguagcccugauaggu

SEQ ID NO: 1048585 - RNA, 19 nt, Artificial Sequence
  Description of Artificial Sequence: Synthetic oligonucleotide
  Antisense strand to SEQ ID NO: 1048584
accuaucagggcuacaggg

SEQ ID NO: 1048586 - RNA, 19 nt, Artificial Sequence
  Description of Artificial Sequence: Synthetic oligonucleotide
  Sense strand starting at position 3343 of SEQ ID NO: 915033
agggaagguucucaaugca

SEQ ID NO: 1048587 - RNA, 19 nt, Artificial Sequence
  Description of Artificial Sequence: Synthetic oligonucleotide
  Antisense strand to SEQ ID NO: 1048586
ugcauugagaaccuucccu

SEQ ID NO: 1048588 - RNA, 19 nt, Artificial Sequence
  Description of Artificial Sequence: Synthetic oligonucleotide
  Sense strand starting at position 3346 of SEQ ID NO: 915033
gaagguucucaaugcacca

SEQ ID NO: 1048589 - RNA, 19 nt, Artificial Sequence
  Description of Artificial Sequence: Synthetic oligonucleotide
  Antisense strand to SEQ ID NO: 1048588
uggugcauugagaaccuuc

SEQ ID NO: 1048590 - RNA, 19 nt, Artificial Sequence
  Description of Artificial Sequence: Synthetic oligonucleotide
  Sense strand starting at position 3464 of SEQ ID NO: 915033
gcuagauguuccagggagg

SEQ ID NO: 1048591 - RNA, 19 nt, Artificial Sequence
  Description of Artificial Sequence: Synthetic oligonucleotide
  Antisense strand to SEQ ID NO: 1048590
ccucccuggaacaucuagc

SEQ ID NO: 1048592 - RNA, 19 nt, Artificial Sequence
  Description of Artificial Sequence: Synthetic oligonucleotide
  Sense strand starting at position 3465 of SEQ ID NO: 915033
cuagauguuccagggaggu

SEQ ID NO: 1048593 - RNA, 19 nt, Artificial Sequence
  Description of Artificial Sequence: Synthetic oligonucleotide
  Antisense strand to SEQ ID NO: 1048592
accucccuggaacaucuag

SEQ ID NO: 1048594 - RNA, 19 nt, Artificial Sequence
  Description of Artificial Sequence: Synthetic oligonucleotide
  Sense strand starting at position 3716 of SEQ ID NO: 915033
gagggcuccuuucggucaa

SEQ ID NO: 1048595 - RNA, 19 nt, Artificial Sequence
  Description of Artificial Sequence: Synthetic oligonucleotide
  Antisense strand to SEQ ID NO: 1048594
uugaccgaaaggagcccuc

SEQ ID NO: 1048596 - RNA, 19 nt, Artificial Sequence
  Description of Artificial Sequence: Synthetic oligonucleotide
  Sense strand starting at position 112 of SEQ ID NO: 915034
cuguuucagggaggagaau

SEQ ID NO: 1048597 - RNA, 19 nt, Artificial Sequence
  Description of Artificial Sequence: Synthetic oligonucleotide
  Antisense strand to SEQ ID NO: 1048596
auucuccucccugaaacag

SEQ ID NO: 1048598 - RNA, 19 nt, Artificial Sequence
  Description of Artificial Sequence: Synthetic oligonucleotide
  Sense strand starting at position 174 of SEQ ID NO: 915034
uagggucucaugugagaaa

SEQ ID NO: 1048599 - RNA, 19 nt, Artificial Sequence
  Description of Artificial Sequence: Synthetic oligonucleotide
  Antisense strand to SEQ ID NO: 1048598
uuucucacaugagacccua

SEQ ID NO: 1048600 - RNA, 19 nt, Artificial Sequence
  Description of Artificial Sequence: Synthetic oligonucleotide
  Sense strand starting at position 188 of SEQ ID NO: 915034
agaaacacaucuguaaagu

SEQ ID NO: 1048601 - RNA, 19 nt, Artificial Sequence
  Description of Artificial Sequence: Synthetic oligonucleotide
  Antisense strand to SEQ ID NO: 1048600
acuuuacagauguguuucu

SEQ ID NO: 1048602 - RNA, 19 nt, Artificial Sequence
  Description of Artificial Sequence: Synthetic oligonucleotide
  Sense strand starting at position 205 of SEQ ID NO: 915034
guauaagauugaggcccua

SEQ ID NO: 1048603 - RNA, 19 nt, Artificial Sequence
  Description of Artificial Sequence: Synthetic oligonucleotide
  Antisense strand to SEQ ID NO: 1048602
uagggccucaaucuuauac

SEQ ID NO: 1048604 - RNA, 19 nt, Artificial Sequence
  Description of Artificial Sequence: Synthetic oligonucleotide
  Sense strand starting at position 330 of SEQ ID NO: 915034
gaacuagaacggcauguua

SEQ ID NO: 1048605 - RNA, 19 nt, Artificial Sequence
  Description of Artificial Sequence: Synthetic oligonucleotide
  Antisense strand to SEQ ID NO: 1048604
uaacaugccguucuaguuc

SEQ ID NO: 1048606 - RNA, 19 nt, Artificial Sequence
  Description of Artificial Sequence: Synthetic oligonucleotide
  Sense strand starting at position 332 of SEQ ID NO: 915034
acuagaacggcauguuaca

SEQ ID NO: 1048607 - RNA, 19 nt, Artificial Sequence
  Description of Artificial Sequence: Synthetic oligonucleotide
  Antisense strand to SEQ ID NO: 1048606
uguaacaugccguucuagu

SEQ ID NO: 1048608 - RNA, 19 nt, Artificial Sequence
  Description of Artificial Sequence: Synthetic oligonucleotide
  Sense strand starting at position 378 of SEQ ID NO: 915034
ggcugcuucugguuagaca

SEQ ID NO: 1048609 - RNA, 19 nt, Artificial Sequence
  Description of Artificial Sequence: Synthetic oligonucleotide
  Antisense strand to SEQ ID NO: 1048608
ugucuaaccagaagcagcc

SEQ ID NO: 1048610 - RNA, 19 nt, Artificial Sequence
  Description of Artificial Sequence: Synthetic oligonucleotide
  Sense strand starting at position 466 of SEQ ID NO: 915034
gguuaaauaugccuaaggu

SEQ ID NO: 1048611 - RNA, 19 nt, Artificial Sequence
  Description of Artificial Sequence: Synthetic oligonucleotide
  Antisense strand to SEQ ID NO: 1048610
accuuaggcauauuuaacc

SEQ ID NO: 1048612 - RNA, 19 nt, Artificial Sequence
  Description of Artificial Sequence: Synthetic oligonucleotide
  Sense strand starting at position 475 of SEQ ID NO: 915034
ugccuaaggucucuagacu

SEQ ID NO: 1048613 - RNA, 19 nt, Artificial Sequence
  Description of Artificial Sequence: Synthetic oligonucleotide
  Antisense strand to SEQ ID NO: 1048612
agucuagagaccuuaggca

SEQ ID NO: 1048614 - RNA, 19 nt, Artificial Sequence
  Description of Artificial Sequence: Synthetic oligonucleotide
  Sense strand starting at position 476 of SEQ ID NO: 915034
gccuaaggucucuagacuu

SEQ ID NO: 1048615 - RNA, 19 nt, Artificial Sequence
  Description of Artificial Sequence: Synthetic oligonucleotide
  Antisense strand to SEQ ID NO: 1048614
aagucuagagaccuuaggc

SEQ ID NO: 1048616 - RNA, 19 nt, Artificial Sequence
  Description of Artificial Sequence: Synthetic oligonucleotide
  Sense strand starting at position 503 of SEQ ID NO: 915034
acauaugaaguacguaaua

SEQ ID NO: 1048617 - RNA, 19 nt, Artificial Sequence
  Description of Artificial Sequence: Synthetic oligonucleotide
  Antisense strand to SEQ ID NO: 1048616
uauuacguacuucauaugu

SEQ ID NO: 1048618 - RNA, 19 nt, Artificial Sequence
  Description of Artificial Sequence: Synthetic oligonucleotide
  Sense strand starting at position 604 of SEQ ID NO: 915034
ucgauaaauaguggaguga

SEQ ID NO: 1048619 - RNA, 19 nt, Artificial Sequence
  Description of Artificial Sequence: Synthetic oligonucleotide
  Antisense strand to SEQ ID NO: 1048618
ucacuccacuauuuaucga

SEQ ID NO: 1048620 - RNA, 19 nt, Artificial Sequence
  Description of Artificial Sequence: Synthetic oligonucleotide
  Sense strand starting at position 703 of SEQ ID NO: 915034
uaaaguuaaggcugaggau

SEQ ID NO: 1048621 - RNA, 19 nt, Artificial Sequence
  Description of Artificial Sequence: Synthetic oligonucleotide
  Antisense strand to SEQ ID NO: 1048620
auccucagccuuaacuuua

SEQ ID NO: 1048622 - RNA, 19 nt, Artificial Sequence
  Description of Artificial Sequence: Synthetic oligonucleotide
  Sense strand starting at position 749 of SEQ ID NO: 915034
ggagacaccuccuuagcaa

SEQ ID NO: 1048623 - RNA, 19 nt, Artificial Sequence
  Description of Artificial Sequence: Synthetic oligonucleotide
  Antisense strand to SEQ ID NO: 1048622
uugcuaaggaggugucucc

SEQ ID NO: 1048624 - RNA, 19 nt, Artificial Sequence
  Description of Artificial Sequence: Synthetic oligonucleotide
  Sense strand starting at position 946 of SEQ ID NO: 915034
cccuuaaggugauggaaau

SEQ ID NO: 1048625 - RNA, 19 nt, Artificial Sequence
  Description of Artificial Sequence: Synthetic oligonucleotide
  Antisense strand to SEQ ID NO: 1048624
auuuccaucaccuuaaggg

SEQ ID NO: 1048626 - RNA, 19 nt, Artificial Sequence
  Description of Artificial Sequence: Synthetic oligonucleotide
  Sense strand starting at position 947 of SEQ ID NO: 915034
ccuuaaggugauggaaauu

SEQ ID NO: 1048627 - RNA, 19 nt, Artificial Sequence
  Description of Artificial Sequence: Synthetic oligonucleotide
  Antisense strand to SEQ ID NO: 1048626
aauuuccaucaccuuaagg

SEQ ID NO: 1048628 - RNA, 19 nt, Artificial Sequence
  Description of Artificial Sequence: Synthetic oligonucleotide
  Sense strand starting at position 1338 of SEQ ID NO: 915034
cugauacugcuguaauuga

SEQ ID NO: 1048629 - RNA, 19 nt, Artificial Sequence
  Description of Artificial Sequence: Synthetic oligonucleotide
  Antisense strand to SEQ ID NO: 1048628
ucaauuacagcaguaucag

SEQ ID NO: 1048630 - RNA, 19 nt, Artificial Sequence
  Description of Artificial Sequence: Synthetic oligonucleotide
  Sense strand starting at position 1351 of SEQ ID NO: 915034
aauugagacuuaguaaggu

SEQ ID NO: 1048631 - RNA, 19 nt, Artificial Sequence
  Description of Artificial Sequence: Synthetic oligonucleotide
  Antisense strand to SEQ ID NO: 1048630
accuuacuaagucucaauu

SEQ ID NO: 1048632 - RNA, 19 nt, Artificial Sequence
  Description of Artificial Sequence: Synthetic oligonucleotide
  Sense strand starting at position 1355 of SEQ ID NO: 915034
gagacuuaguaaggugaac

SEQ ID NO: 1048633 - RNA, 19 nt, Artificial Sequence
  Description of Artificial Sequence: Synthetic oligonucleotide
  Antisense strand to SEQ ID NO: 1048632
guucaccuuacuaagucuc

SEQ ID NO: 1048634 - RNA, 19 nt, Artificial Sequence
  Description of Artificial Sequence: Synthetic oligonucleotide
  Sense strand starting at position 1404 of SEQ ID NO: 915034
acccuauaucccgggaaag

SEQ ID NO: 1048635 - RNA, 19 nt, Artificial Sequence
  Description of Artificial Sequence: Synthetic oligonucleotide
  Antisense strand to SEQ ID NO: 1048634
cuuucccgggauauagggu

SEQ ID NO: 1048636 - RNA, 19 nt, Artificial Sequence
  Description of Artificial Sequence: Synthetic oligonucleotide
  Sense strand starting at position 1405 of SEQ ID NO: 915034
cccuauaucccgggaaagu

SEQ ID NO: 1048637 - RNA, 19 nt, Artificial Sequence
  Description of Artificial Sequence: Synthetic oligonucleotide
  Antisense strand to SEQ ID NO: 1048636
acuuucccgggauauaggg

SEQ ID NO: 1048638 - RNA, 19 nt, Artificial Sequence
  Description of Artificial Sequence: Synthetic oligonucleotide
  Sense strand starting at position 1406 of SEQ ID NO: 915034
ccuauaucccgggaaagua

SEQ ID NO: 1048639 - RNA, 19 nt, Artificial Sequence
  Description of Artificial Sequence: Synthetic oligonucleotide
  Antisense strand to SEQ ID NO: 1048638
uacuuucccgggauauagg

SEQ ID NO: 1048640 - RNA, 19 nt, Artificial Sequence
  Description of Artificial Sequence: Synthetic oligonucleotide
  Sense strand starting at position 1454 of SEQ ID NO: 915034
cggaacaaguggucaauau

SEQ ID NO: 1048641 - RNA, 19 nt, Artificial Sequence
  Description of Artificial Sequence: Synthetic oligonucleotide
  Antisense strand to SEQ ID NO: 1048640
auauugaccacuuguuccg

SEQ ID NO: 1048642 - RNA, 19 nt, Artificial Sequence
  Description of Artificial Sequence: Synthetic oligonucleotide
  Sense strand starting at position 1458 of SEQ ID NO: 915034
acaaguggucaauauccau

SEQ ID NO: 1048643 - RNA, 19 nt, Artificial Sequence
  Description of Artificial Sequence: Synthetic oligonucleotide
  Antisense strand to SEQ ID NO: 1048642
auggauauugaccacuugu

SEQ ID NO: 1048644 - RNA, 19 nt, Artificial Sequence
  Description of Artificial Sequence: Synthetic oligonucleotide
  Sense strand starting at position 1641 of SEQ ID NO: 915034
aaggaaggcuguguuuauc

SEQ ID NO: 1048645 - RNA, 19 nt, Artificial Sequence
  Description of Artificial Sequence: Synthetic oligonucleotide
  Antisense strand to SEQ ID NO: 1048644
gauaaacacagccuuccuu

SEQ ID NO: 1048646 - RNA, 19 nt, Artificial Sequence
  Description of Artificial Sequence: Synthetic oligonucleotide
  Sense strand starting at position 1678 of SEQ ID NO: 915034
guggagagguuucgaaaga

SEQ ID NO: 1048647 - RNA, 19 nt, Artificial Sequence
  Description of Artificial Sequence: Synthetic oligonucleotide
  Antisense strand to SEQ ID NO: 1048646
ucuuucgaaaccucuccac

SEQ ID NO: 1048648 - RNA, 19 nt, Artificial Sequence
  Description of Artificial Sequence: Synthetic oligonucleotide
  Sense strand starting at position 1679 of SEQ ID NO: 915034
uggagagguuucgaaagag

SEQ ID NO: 1048649 - RNA, 19 nt, Artificial Sequence
  Description of Artificial Sequence: Synthetic oligonucleotide
  Antisense strand to SEQ ID NO: 1048648
cucuuucgaaaccucucca

SEQ ID NO: 1048650 - RNA, 19 nt, Artificial Sequence
  Description of Artificial Sequence: Synthetic oligonucleotide
  Sense strand starting at position 1683 of SEQ ID NO: 915034
gagguuucgaaagagugua

SEQ ID NO: 1048651 - RNA, 19 nt, Artificial Sequence
  Description of Artificial Sequence: Synthetic oligonucleotide
  Antisense strand to SEQ ID NO: 1048650
uacacucuuucgaaaccuc

SEQ ID NO: 1048652 - RNA, 19 nt, Artificial Sequence
  Description of Artificial Sequence: Synthetic oligonucleotide
  Sense strand starting at position 1713 of SEQ ID NO: 915034
uucgcugagacucgaguaa

SEQ ID NO: 1048653 - RNA, 19 nt, Artificial Sequence
  Description of Artificial Sequence: Synthetic oligonucleotide
  Antisense strand to SEQ ID NO: 1048652
uuacucgagucucagcgaa

SEQ ID NO: 1048654 - RNA, 19 nt, Artificial Sequence
  Description of Artificial Sequence: Synthetic oligonucleotide
  Sense strand starting at position 2550 of SEQ ID NO: 915034
agggcugcgucuguaacua

SEQ ID NO: 1048655 - RNA, 19 nt, Artificial Sequence
  Description of Artificial Sequence: Synthetic oligonucleotide
  Antisense strand to SEQ ID NO: 1048654
uaguuacagacgcagcccu

SEQ ID NO: 1048656 - RNA, 19 nt, Artificial Sequence
  Description of Artificial Sequence: Synthetic oligonucleotide
  Sense strand starting at position 2721 of SEQ ID NO: 915034
ucgcgucucgaccucuaaa

SEQ ID NO: 1048657 - RNA, 19 nt, Artificial Sequence
  Description of Artificial Sequence: Synthetic oligonucleotide
  Antisense strand to SEQ ID NO: 1048656
uuuagaggucgagacgcga

SEQ ID NO: 1048658 - RNA, 19 nt, Artificial Sequence
  Description of Artificial Sequence: Synthetic oligonucleotide
  Sense strand starting at position 2723 of SEQ ID NO: 915034
gcgucucgaccucuaaagu

SEQ ID NO: 1048659 - RNA, 19 nt, Artificial Sequence
  Description of Artificial Sequence: Synthetic oligonucleotide
  Antisense strand to SEQ ID NO: 1048658
acuuuagaggucgagacgc

SEQ ID NO: 1048660 - RNA, 19 nt, Artificial Sequence
  Description of Artificial Sequence: Synthetic oligonucleotide
  Sense strand starting at position 2724 of SEQ ID NO: 915034
cgucucgaccucuaaagua

SEQ ID NO: 1048661 - RNA, 19 nt, Artificial Sequence
  Description of Artificial Sequence: Synthetic oligonucleotide
  Antisense strand to SEQ ID NO: 1048660
uacuuuagaggucgagacg

SEQ ID NO: 1048662 - RNA, 19 nt, Artificial Sequence
  Description of Artificial Sequence: Synthetic oligonucleotide
  Sense strand starting at position 2771 of SEQ ID NO: 915034
agcggaagucuuuggaaac

SEQ ID NO: 1048663 - RNA, 19 nt, Artificial Sequence
  Description of Artificial Sequence: Synthetic oligonucleotide
  Antisense strand to SEQ ID NO: 1048662
guuuccaaagacuuccgcu

SEQ ID NO: 1048664 - RNA, 19 nt, Artificial Sequence
  Description of Artificial Sequence: Synthetic oligonucleotide
  Sense strand starting at position 2800 of SEQ ID NO: 915034
uccagaucuugacucuuga

SEQ ID NO: 1048665 - RNA, 19 nt, Artificial Sequence
  Description of Artificial Sequence: Synthetic oligonucleotide
  Antisense strand to SEQ ID NO: 1048664
ucaagagucaagaucugga

SEQ ID NO: 1048666 - RNA, 19 nt, Artificial Sequence
  Description of Artificial Sequence: Synthetic oligonucleotide
  Sense strand starting at position 3001 of SEQ ID NO: 915034
gcacguaagcacuguuuag

SEQ ID NO: 1048667 - RNA, 19 nt, Artificial Sequence
  Description of Artificial Sequence: Synthetic oligonucleotide
  Antisense strand to SEQ ID NO: 1048666
cuaaacagugcuuacgugc

SEQ ID NO: 1048668 - RNA, 19 nt, Artificial Sequence
  Description of Artificial Sequence: Synthetic oligonucleotide
  Sense strand starting at position 3005 of SEQ ID NO: 915034
guaagcacuguuuaggaga

SEQ ID NO: 1048669 - RNA, 19 nt, Artificial Sequence
  Description of Artificial Sequence: Synthetic oligonucleotide
  Antisense strand to SEQ ID NO: 1048668
ucuccuaaacagugcuuac

SEQ ID NO: 1048670 - RNA, 19 nt, Artificial Sequence
  Description of Artificial Sequence: Synthetic oligonucleotide
  Sense strand starting at position 3032 of SEQ ID NO: 915034
agugcuguuagcgugaaca

SEQ ID NO: 1048671 - RNA, 19 nt, Artificial Sequence
  Description of Artificial Sequence: Synthetic oligonucleotide
  Antisense strand to SEQ ID NO: 1048670
uguucacgcuaacagcacu

SEQ ID NO: 1048672 - RNA, 19 nt, Artificial Sequence
  Description of Artificial Sequence: Synthetic oligonucleotide
  Sense strand starting at position 3051 of SEQ ID NO: 915034
ccaggcaucccggaaaguu

SEQ ID NO: 1048673 - RNA, 19 nt, Artificial Sequence
  Description of Artificial Sequence: Synthetic oligonucleotide
  Antisense strand to SEQ ID NO: 1048672
aacuuuccgggaugccugg

SEQ ID NO: 1048674 - RNA, 19 nt, Artificial Sequence
  Description of Artificial Sequence: Synthetic oligonucleotide
  Sense strand starting at position 3614 of SEQ ID NO: 915034
ugugcuuagccucauuauu

SEQ ID NO: 1048675 - RNA, 19 nt, Artificial Sequence
  Description of Artificial Sequence: Synthetic oligonucleotide
  Antisense strand to SEQ ID NO: 1048674
aauaaugaggcuaagcaca

SEQ ID NO: 1048676 - RNA, 19 nt, Artificial Sequence
  Description of Artificial Sequence: Synthetic oligonucleotide
  Sense strand starting at position 15 of SEQ ID NO: 915035
guggcugcuucugguuaga

SEQ ID NO: 1048677 - RNA, 19 nt, Artificial Sequence
  Description of Artificial Sequence: Synthetic oligonucleotide
  Antisense strand to SEQ ID NO: 1048676
ucuaaccagaagcagccac

SEQ ID NO: 1048678 - RNA, 19 nt, Artificial Sequence
  Description of Artificial Sequence: Synthetic oligonucleotide
  Sense strand starting at position 17 of SEQ ID NO: 915035
ggcugcuucugguuagaca

SEQ ID NO: 1048679 - RNA, 19 nt, Artificial Sequence
  Description of Artificial Sequence: Synthetic oligonucleotide
  Antisense strand to SEQ ID NO: 1048678
ugucuaaccagaagcagcc

SEQ ID NO: 1048680 - RNA, 19 nt, Artificial Sequence
  Description of Artificial Sequence: Synthetic oligonucleotide
  Sense strand starting at position 105 of SEQ ID NO: 915035
gguuaaauaugccuaaggu

SEQ ID NO: 1048681 - RNA, 19 nt, Artificial Sequence
  Description of Artificial Sequence: Synthetic oligonucleotide
  Antisense strand to SEQ ID NO: 1048680
accuuaggcauauuuaacc

SEQ ID NO: 1048682 - RNA, 19 nt, Artificial Sequence
  Description of Artificial Sequence: Synthetic oligonucleotide
  Sense strand starting at position 114 of SEQ ID NO: 915035
ugccuaaggucucuagacu

SEQ ID NO: 1048683 - RNA, 19 nt, Artificial Sequence
  Description of Artificial Sequence: Synthetic oligonucleotide
  Antisense strand to SEQ ID NO: 1048682
agucuagagaccuuaggca

SEQ ID NO: 1048684 - RNA, 19 nt, Artificial Sequence
  Description of Artificial Sequence: Synthetic oligonucleotide
  Sense strand starting at position 115 of SEQ ID NO: 915035
gccuaaggucucuagacuu

SEQ ID NO: 1048685 - RNA, 19 nt, Artificial Sequence
  Description of Artificial Sequence: Synthetic oligonucleotide
  Antisense strand to SEQ ID NO: 1048684
aagucuagagaccuuaggc

SEQ ID NO: 1048686 - RNA, 19 nt, Artificial Sequence
  Description of Artificial Sequence: Synthetic oligonucleotide
  Sense strand starting at position 142 of SEQ ID NO: 915035
acauaugaaguacguaaua

SEQ ID NO: 1048687 - RNA, 19 nt, Artificial Sequence
  Description of Artificial Sequence: Synthetic oligonucleotide
  Antisense strand to SEQ ID NO: 1048686
uauuacguacuucauaugu

SEQ ID NO: 1048688 - RNA, 19 nt, Artificial Sequence
  Description of Artificial Sequence: Synthetic oligonucleotide
  Sense strand starting at position 243 of SEQ ID NO: 915035
ucgauaaauaguggaguga

SEQ ID NO: 1048689 - RNA, 19 nt, Artificial Sequence
  Description of Artificial Sequence: Synthetic oligonucleotide
  Antisense strand to SEQ ID NO: 1048688
ucacuccacuauuuaucga

SEQ ID NO: 1048690 - RNA, 19 nt, Artificial Sequence
  Description of Artificial Sequence: Synthetic oligonucleotide
  Sense strand starting at position 342 of SEQ ID NO: 915035
uaaaguuaaggcugaggau

SEQ ID NO: 1048691 - RNA, 19 nt, Artificial Sequence
  Description of Artificial Sequence: Synthetic oligonucleotide
  Antisense strand to SEQ ID NO: 1048690
auccucagccuuaacuuua

SEQ ID NO: 1048692 - RNA, 19 nt, Artificial Sequence
  Description of Artificial Sequence: Synthetic oligonucleotide
  Sense strand starting at position 388 of SEQ ID NO: 915035
ggagacaccuccuuagcaa

SEQ ID NO: 1048693 - RNA, 19 nt, Artificial Sequence
  Description of Artificial Sequence: Synthetic oligonucleotide
  Antisense strand to SEQ ID NO: 1048692
uugcuaaggaggugucucc

SEQ ID NO: 1048694 - RNA, 19 nt, Artificial Sequence
  Description of Artificial Sequence: Synthetic oligonucleotide
  Sense strand starting at position 585 of SEQ ID NO: 915035
cccuuaaggugauggaaau

SEQ ID NO: 1048695 - RNA, 19 nt, Artificial Sequence
  Description of Artificial Sequence: Synthetic oligonucleotide
  Antisense strand to SEQ ID NO: 1048694
auuuccaucaccuuaaggg

SEQ ID NO: 1048696 - RNA, 19 nt, Artificial Sequence
  Description of Artificial Sequence: Synthetic oligonucleotide
  Sense strand starting at position 586 of SEQ ID NO: 915035
ccuuaaggugauggaaauu

SEQ ID NO: 1048697 - RNA, 19 nt, Artificial Sequence
  Description of Artificial Sequence: Synthetic oligonucleotide
  Antisense strand to SEQ ID NO: 1048696
aauuuccaucaccuuaagg

SEQ ID NO: 1048698 - RNA, 19 nt, Artificial Sequence
  Description of Artificial Sequence: Synthetic oligonucleotide
  Sense strand starting at position 975 of SEQ ID NO: 915035
gacugauacugcuguaauu

SEQ ID NO: 1048699 - RNA, 19 nt, Artificial Sequence
  Description of Artificial Sequence: Synthetic oligonucleotide
  Antisense strand to SEQ ID NO: 1048698
aauuacagcaguaucaguc

SEQ ID NO: 1048700 - RNA, 19 nt, Artificial Sequence
  Description of Artificial Sequence: Synthetic oligonucleotide
  Sense strand starting at position 977 of SEQ ID NO: 915035
cugauacugcuguaauuga

SEQ ID NO: 1048701 - RNA, 19 nt, Artificial Sequence
  Description of Artificial Sequence: Synthetic oligonucleotide
  Antisense strand to SEQ ID NO: 1048700
ucaauuacagcaguaucag

SEQ ID NO: 1048702 - RNA, 19 nt, Artificial Sequence
  Description of Artificial Sequence: Synthetic oligonucleotide
  Sense strand starting at position 990 of SEQ ID NO: 915035
aauugagacuuaguaaggu

SEQ ID NO: 1048703 - RNA, 19 nt, Artificial Sequence
  Description of Artificial Sequence: Synthetic oligonucleotide
  Antisense strand to SEQ ID NO: 1048702
accuuacuaagucucaauu

SEQ ID NO: 1048704 - RNA, 19 nt, Artificial Sequence
  Description of Artificial Sequence: Synthetic oligonucleotide
  Sense strand starting at position 994 of SEQ ID NO: 915035
gagacuuaguaaggugaac

SEQ ID NO: 1048705 - RNA, 19 nt, Artificial Sequence
  Description of Artificial Sequence: Synthetic oligonucleotide
  Antisense strand to SEQ ID NO: 1048704
guucaccuuacuaagucuc

SEQ ID NO: 1048706 - RNA, 19 nt, Artificial Sequence
  Description of Artificial Sequence: Synthetic oligonucleotide
  Sense strand starting at position 1043 of SEQ ID NO: 915035
acccuauaucccgggaaag

SEQ ID NO: 1048707 - RNA, 19 nt, Artificial Sequence
  Description of Artificial Sequence: Synthetic oligonucleotide
  Antisense strand to SEQ ID NO: 1048706
cuuucccgggauauagggu

SEQ ID NO: 1048708 - RNA, 19 nt, Artificial Sequence
  Description of Artificial Sequence: Synthetic oligonucleotide
  Sense strand starting at position 1044 of SEQ ID NO: 915035
cccuauaucccgggaaagu

SEQ ID NO: 1048709 - RNA, 19 nt, Artificial Sequence
  Description of Artificial Sequence: Synthetic oligonucleotide
  Antisense strand to SEQ ID NO: 1048708
acuuucccgggauauaggg

SEQ ID NO: 1048710 - RNA, 19 nt, Artificial Sequence
  Description of Artificial Sequence: Synthetic oligonucleotide
  Sense strand starting at position 1045 of SEQ ID NO: 915035
ccuauaucccgggaaagua

SEQ ID NO: 1048711 - RNA, 19 nt, Artificial Sequence
  Description of Artificial Sequence: Synthetic oligonucleotide
  Antisense strand to SEQ ID NO: 1048710
uacuuucccgggauauagg

SEQ ID NO: 1048712 - RNA, 19 nt, Artificial Sequence
  Description of Artificial Sequence: Synthetic oligonucleotide
  Sense strand starting at position 1093 of SEQ ID NO: 915035
cggaacaaguggucaauau

SEQ ID NO: 1048713 - RNA, 19 nt, Artificial Sequence
  Description of Artificial Sequence: Synthetic oligonucleotide
  Antisense strand to SEQ ID NO: 1048712
auauugaccacuuguuccg

SEQ ID NO: 1048714 - RNA, 19 nt, Artificial Sequence
  Description of Artificial Sequence: Synthetic oligonucleotide
  Sense strand starting at position 1097 of SEQ ID NO: 915035
acaaguggucaauauccau

SEQ ID NO: 1048715 - RNA, 19 nt, Artificial Sequence
  Description of Artificial Sequence: Synthetic oligonucleotide
  Antisense strand to SEQ ID NO: 1048714
auggauauugaccacuugu

SEQ ID NO: 1048716 - RNA, 19 nt, Artificial Sequence
  Description of Artificial Sequence: Synthetic oligonucleotide
  Sense strand starting at position 1280 of SEQ ID NO: 915035
aaggaaggcuguguuuauc

SEQ ID NO: 1048717 - RNA, 19 nt, Artificial Sequence
  Description of Artificial Sequence: Synthetic oligonucleotide
  Antisense strand to SEQ ID NO: 1048716
gauaaacacagccuuccuu

SEQ ID NO: 1048718 - RNA, 19 nt, Artificial Sequence
  Description of Artificial Sequence: Synthetic oligonucleotide
  Sense strand starting at position 1288 of SEQ ID NO: 915035
cuguguuuaucaggagcag

SEQ ID NO: 1048719 - RNA, 19 nt, Artificial Sequence
  Description of Artificial Sequence: Synthetic oligonucleotide
  Antisense strand to SEQ ID NO: 1048718
cugcuccugauaaacacag

SEQ ID NO: 1048720 - RNA, 19 nt, Artificial Sequence
  Description of Artificial Sequence: Synthetic oligonucleotide
  Sense strand starting at position 1317 of SEQ ID NO: 915035
guggagagguuucgaaaga

SEQ ID NO: 1048721 - RNA, 19 nt, Artificial Sequence
  Description of Artificial Sequence: Synthetic oligonucleotide
  Antisense strand to SEQ ID NO: 1048720
ucuuucgaaaccucuccac

SEQ ID NO: 1048722 - RNA, 19 nt, Artificial Sequence
  Description of Artificial Sequence: Synthetic oligonucleotide
  Sense strand starting at position 1318 of SEQ ID NO: 915035
uggagagguuucgaaagag

SEQ ID NO: 1048723 - RNA, 19 nt, Artificial Sequence
  Description of Artificial Sequence: Synthetic oligonucleotide
  Antisense strand to SEQ ID NO: 1048722
cucuuucgaaaccucucca

SEQ ID NO: 1048724 - RNA, 19 nt, Artificial Sequence
  Description of Artificial Sequence: Synthetic oligonucleotide
  Sense strand starting at position 1322 of SEQ ID NO: 915035
gagguuucgaaagagugua

SEQ ID NO: 1048725 - RNA, 19 nt, Artificial Sequence
  Description of Artificial Sequence: Synthetic oligonucleotide
  Antisense strand to SEQ ID NO: 1048724
uacacucuuucgaaaccuc

SEQ ID NO: 1048726 - RNA, 19 nt, Artificial Sequence
  Description of Artificial Sequence: Synthetic oligonucleotide
  Sense strand starting at position 1352 of SEQ ID NO: 915035
uucgcugagacucgaguaa

SEQ ID NO: 1048727 - RNA, 19 nt, Artificial Sequence
  Description of Artificial Sequence: Synthetic oligonucleotide
  Antisense strand to SEQ ID NO: 1048726
uuacucgagucucagcgaa

SEQ ID NO: 1048728 - RNA, 19 nt, Artificial Sequence
  Description of Artificial Sequence: Synthetic oligonucleotide
  Sense strand starting at position 2189 of SEQ ID NO: 915035
agggcugcgucuguaacua

SEQ ID NO: 1048729 - RNA, 19 nt, Artificial Sequence
  Description of Artificial Sequence: Synthetic oligonucleotide
  Antisense strand to SEQ ID NO: 1048728
uaguuacagacgcagcccu

SEQ ID NO: 1048730 - RNA, 19 nt, Artificial Sequence
  Description of Artificial Sequence: Synthetic oligonucleotide
  Sense strand starting at position 2360 of SEQ ID NO: 915035
ucgcgucucgaccucuaaa

SEQ ID NO: 1048731 - RNA, 19 nt, Artificial Sequence
  Description of Artificial Sequence: Synthetic oligonucleotide
  Antisense strand to SEQ ID NO: 1048730
uuuagaggucgagacgcga

SEQ ID NO: 1048732 - RNA, 19 nt, Artificial Sequence
  Description of Artificial Sequence: Synthetic oligonucleotide
  Sense strand starting at position 2362 of SEQ ID NO: 915035
gcgucucgaccucuaaagu

SEQ ID NO: 1048733 - RNA, 19 nt, Artificial Sequence
  Description of Artificial Sequence: Synthetic oligonucleotide
  Antisense strand to SEQ ID NO: 1048732
acuuuagaggucgagacgc

SEQ ID NO: 1048734 - RNA, 19 nt, Artificial Sequence
  Description of Artificial Sequence: Synthetic oligonucleotide
  Sense strand starting at position 2363 of SEQ ID NO: 915035
cgucucgaccucuaaagua

SEQ ID NO: 1048735 - RNA, 19 nt, Artificial Sequence
  Description of Artificial Sequence: Synthetic oligonucleotide
  Antisense strand to SEQ ID NO: 1048734
uacuuuagaggucgagacg

SEQ ID NO: 1048736 - RNA, 19 nt, Artificial Sequence
  Description of Artificial Sequence: Synthetic oligonucleotide
  Sense strand starting at position 2410 of SEQ ID NO: 915035
agcggaagucuuuggaaac

SEQ ID NO: 1048737 - RNA, 19 nt, Artificial Sequence
  Description of Artificial Sequence: Synthetic oligonucleotide
  Antisense strand to SEQ ID NO: 1048736
guuuccaaagacuuccgcu

SEQ ID NO: 1048738 - RNA, 19 nt, Artificial Sequence
  Description of Artificial Sequence: Synthetic oligonucleotide
  Sense strand starting at position 2411 of SEQ ID NO: 915035
gcggaagucuuuggaaacu

SEQ ID NO: 1048739 - RNA, 19 nt, Artificial Sequence
  Description of Artificial Sequence: Synthetic oligonucleotide
  Antisense strand to SEQ ID NO: 1048738
aguuuccaaagacuuccgc

SEQ ID NO: 1048740 - RNA, 19 nt, Artificial Sequence
  Description of Artificial Sequence: Synthetic oligonucleotide
  Sense strand starting at position 2439 of SEQ ID NO: 915035
uccagaucuugacucuuga

SEQ ID NO: 1048741 - RNA, 19 nt, Artificial Sequence
  Description of Artificial Sequence: Synthetic oligonucleotide
  Antisense strand to SEQ ID NO: 1048740
ucaagagucaagaucugga

SEQ ID NO: 1048742 - RNA, 19 nt, Artificial Sequence
  Description of Artificial Sequence: Synthetic oligonucleotide
  Sense strand starting at position 2640 of SEQ ID NO: 915035
gcacguaagcacuguuuag

SEQ ID NO: 1048743 - RNA, 19 nt, Artificial Sequence
  Description of Artificial Sequence: Synthetic oligonucleotide
  Antisense strand to SEQ ID NO: 1048742
cuaaacagugcuuacgugc

SEQ ID NO: 1048744 - RNA, 19 nt, Artificial Sequence
  Description of Artificial Sequence: Synthetic oligonucleotide
  Sense strand starting at position 2644 of SEQ ID NO: 915035
guaagcacuguuuaggaga

SEQ ID NO: 1048745 - RNA, 19 nt, Artificial Sequence
  Description of Artificial Sequence: Synthetic oligonucleotide
  Antisense strand to SEQ ID NO: 1048744
ucuccuaaacagugcuuac

SEQ ID NO: 1048746 - RNA, 19 nt, Artificial Sequence
  Description of Artificial Sequence: Synthetic oligonucleotide
  Sense strand starting at position 2671 of SEQ ID NO: 915035
agugcuguuagcgugaaca

SEQ ID NO: 1048747 - RNA, 19 nt, Artificial Sequence
  Description of Artificial Sequence: Synthetic oligonucleotide
  Antisense strand to SEQ ID NO: 1048746
uguucacgcuaacagcacu

SEQ ID NO: 1048748 - RNA, 19 nt, Artificial Sequence
  Description of Artificial Sequence: Synthetic oligonucleotide
  Sense strand starting at position 2690 of SEQ ID NO: 915035
ccaggcaucccggaaaguu

SEQ ID NO: 1048749 - RNA, 19 nt, Artificial Sequence
  Description of Artificial Sequence: Synthetic oligonucleotide
  Antisense strand to SEQ ID NO: 1048748
aacuuuccgggaugccugg

SEQ ID NO: 1048750 - RNA, 19 nt, Artificial Sequence
  Description of Artificial Sequence: Synthetic oligonucleotide
  Sense strand starting at position 3253 of SEQ ID NO: 915035
ugugcuuagccucauuauu

SEQ ID NO: 1048751 - RNA, 19 nt, Artificial Sequence
  Description of Artificial Sequence: Synthetic oligonucleotide
  Antisense strand to SEQ ID NO: 1048750
aauaaugaggcuaagcaca

SEQ ID NO: 1048752 - RNA, 19 nt, Artificial Sequence
  Description of Artificial Sequence: Synthetic oligonucleotide
  Sense strand starting at position 3810 of SEQ ID NO: 915035
ggucaagauuuauaguugu

SEQ ID NO: 1048753 - RNA, 19 nt, Artificial Sequence
  Description of Artificial Sequence: Synthetic oligonucleotide
  Antisense strand to SEQ ID NO: 1048752
acaacuauaaaucuugacc

SEQ ID NO: 1048754 - RNA, 19 nt, Artificial Sequence
  Description of Artificial Sequence: Synthetic oligonucleotide
  Sense strand starting at position 2 of SEQ ID NO: 915036
ggaauucuagucugcaaua

SEQ ID NO: 1048755 - RNA, 19 nt, Artificial Sequence
  Description of Artificial Sequence: Synthetic oligonucleotide
  Antisense strand to SEQ ID NO: 1048754
uauugcagacuagaauucc

SEQ ID NO: 1048756 - RNA, 19 nt, Artificial Sequence
  Description of Artificial Sequence: Synthetic oligonucleotide
  Sense strand starting at position 147 of SEQ ID NO: 915036
gcaaaugaaucuccaguga

SEQ ID NO: 1048757 - RNA, 19 nt, Artificial Sequence
  Description of Artificial Sequence: Synthetic oligonucleotide
  Antisense strand to SEQ ID NO: 1048756
ucacuggagauucauuugc

SEQ ID NO: 1048758 - RNA, 19 nt, Artificial Sequence
  Description of Artificial Sequence: Synthetic oligonucleotide
  Sense strand starting at position 151 of SEQ ID NO: 915036
augaaucuccagugauaua

SEQ ID NO: 1048759 - RNA, 19 nt, Artificial Sequence
  Description of Artificial Sequence: Synthetic oligonucleotide
  Antisense strand to SEQ ID NO: 1048758
uauaucacuggagauucau

SEQ ID NO: 1048760 - RNA, 19 nt, Artificial Sequence
  Description of Artificial Sequence: Synthetic oligonucleotide
  Sense strand starting at position 385 of SEQ ID NO: 915036
uuugaaagagucugaauac

SEQ ID NO: 1048761 - RNA, 19 nt, Artificial Sequence
  Description of Artificial Sequence: Synthetic oligonucleotide
  Antisense strand to SEQ ID NO: 1048760
guauucagacucuuucaaa

SEQ ID NO: 1048762 - RNA, 19 nt, Artificial Sequence
  Description of Artificial Sequence: Synthetic oligonucleotide
  Sense strand starting at position 486 of SEQ ID NO: 915036
gaggaauggcaaugauucu

SEQ ID NO: 1048763 - RNA, 19 nt, Artificial Sequence
  Description of Artificial Sequence: Synthetic oligonucleotide
  Antisense strand to SEQ ID NO: 1048762
agaaucauugccauuccuc

SEQ ID NO: 1048764 - RNA, 19 nt, Artificial Sequence
  Description of Artificial Sequence: Synthetic oligonucleotide
  Sense strand starting at position 882 of SEQ ID NO: 915036
agagaagacuguccucaug

SEQ ID NO: 1048765 - RNA, 19 nt, Artificial Sequence
  Description of Artificial Sequence: Synthetic oligonucleotide
  Antisense strand to SEQ ID NO: 1048764
caugaggacagucuucucu

SEQ ID NO: 1048766 - RNA, 19 nt, Artificial Sequence
  Description of Artificial Sequence: Synthetic oligonucleotide
  Sense strand starting at position 884 of SEQ ID NO: 915036
agaagacuguccucaugca

SEQ ID NO: 1048767 - RNA, 19 nt, Artificial Sequence
  Description of Artificial Sequence: Synthetic oligonucleotide
  Antisense strand to SEQ ID NO: 1048766
ugcaugaggacagucuucu

SEQ ID NO: 1048768 - RNA, 19 nt, Artificial Sequence
  Description of Artificial Sequence: Synthetic oligonucleotide
  Sense strand starting at position 885 of SEQ ID NO: 915036
gaagacuguccucaugcau

SEQ ID NO: 1048769 - RNA, 19 nt, Artificial Sequence
  Description of Artificial Sequence: Synthetic oligonucleotide
  Antisense strand to SEQ ID NO: 1048768
augcaugaggacagucuuc

SEQ ID NO: 1048770 - RNA, 19 nt, Artificial Sequence
  Description of Artificial Sequence: Synthetic oligonucleotide
  Sense strand starting at position 899 of SEQ ID NO: 915036
ugcauauaaccagguauaa

SEQ ID NO: 1048771 - RNA, 19 nt, Artificial Sequence
  Description of Artificial Sequence: Synthetic oligonucleotide
  Antisense strand to SEQ ID NO: 1048770
uuauaccugguuauaugca

SEQ ID NO: 1048772 - RNA, 19 nt, Artificial Sequence
  Description of Artificial Sequence: Synthetic oligonucleotide
  Sense strand starting at position 1205 of SEQ ID NO: 915036
guagaucauggugagcuuu

SEQ ID NO: 1048773 - RNA, 19 nt, Artificial Sequence
  Description of Artificial Sequence: Synthetic oligonucleotide
  Antisense strand to SEQ ID NO: 1048772
aaagcucaccaugaucuac

SEQ ID NO: 1048774 - RNA, 19 nt, Artificial Sequence
  Description of Artificial Sequence: Synthetic oligonucleotide
  Sense strand starting at position 1207 of SEQ ID NO: 915036
agaucauggugagcuuuaa

SEQ ID NO: 1048775 - RNA, 19 nt, Artificial Sequence
  Description of Artificial Sequence: Synthetic oligonucleotide
  Antisense strand to SEQ ID NO: 1048774
uuaaagcucaccaugaucu

SEQ ID NO: 1048776 - RNA, 19 nt, Artificial Sequence
  Description of Artificial Sequence: Synthetic oligonucleotide
  Sense strand starting at position 1374 of SEQ ID NO: 915036
aucucuagucccugacaca

SEQ ID NO: 1048777 - RNA, 19 nt, Artificial Sequence
  Description of Artificial Sequence: Synthetic oligonucleotide
  Antisense strand to SEQ ID NO: 1048776
ugugucagggacuagagau

SEQ ID NO: 1048778 - RNA, 19 nt, Artificial Sequence
  Description of Artificial Sequence: Synthetic oligonucleotide
  Sense strand starting at position 1375 of SEQ ID NO: 915036
ucucuagucccugacacau

SEQ ID NO: 1048779 - RNA, 19 nt, Artificial Sequence
  Description of Artificial Sequence: Synthetic oligonucleotide
  Antisense strand to SEQ ID NO: 1048778
augugucagggacuagaga

SEQ ID NO: 1048780 - RNA, 19 nt, Artificial Sequence
  Description of Artificial Sequence: Synthetic oligonucleotide
  Sense strand starting at position 1502 of SEQ ID NO: 915036
cacuaauguugcuuggaaa

SEQ ID NO: 1048781 - RNA, 19 nt, Artificial Sequence
  Description of Artificial Sequence: Synthetic oligonucleotide
  Antisense strand to SEQ ID NO: 1048780
uuuccaagcaacauuagug

SEQ ID NO: 1048782 - RNA, 19 nt, Artificial Sequence
  Description of Artificial Sequence: Synthetic oligonucleotide
  Sense strand starting at position 1503 of SEQ ID NO: 915036
acuaauguugcuuggaaau

SEQ ID NO: 1048783 - RNA, 19 nt, Artificial Sequence
  Description of Artificial Sequence: Synthetic oligonucleotide
  Antisense strand to SEQ ID NO: 1048782
auuuccaagcaacauuagu

SEQ ID NO: 1048784 - RNA, 19 nt, Artificial Sequence
  Description of Artificial Sequence: Synthetic oligonucleotide
  Sense strand starting at position 1564 of SEQ ID NO: 915036
guugucuuuagugaacuca

SEQ ID NO: 1048785 - RNA, 19 nt, Artificial Sequence
  Description of Artificial Sequence: Synthetic oligonucleotide
  Antisense strand to SEQ ID NO: 1048784
ugaguucacuaaagacaac

SEQ ID NO: 1048786 - RNA, 19 nt, Artificial Sequence
  Description of Artificial Sequence: Synthetic oligonucleotide
  Sense strand starting at position 1572 of SEQ ID NO: 915036
uagugaacucagugaacau

SEQ ID NO: 1048787 - RNA, 19 nt, Artificial Sequence
  Description of Artificial Sequence: Synthetic oligonucleotide
  Antisense strand to SEQ ID NO: 1048786
auguucacugaguucacua

SEQ ID NO: 1048788 - RNA, 19 nt, Artificial Sequence
  Description of Artificial Sequence: Synthetic oligonucleotide
  Sense strand starting at position 1666 of SEQ ID NO: 915036
cugaaaugugcagaguuua

SEQ ID NO: 1048789 - RNA, 19 nt, Artificial Sequence
  Description of Artificial Sequence: Synthetic oligonucleotide
  Antisense strand to SEQ ID NO: 1048788
uaaacucugcacauuucag

SEQ ID NO: 1048790 - RNA, 19 nt, Artificial Sequence
  Description of Artificial Sequence: Synthetic oligonucleotide
  Sense strand starting at position 1671 of SEQ ID NO: 915036
augugcagaguuuaucaua

SEQ ID NO: 1048791 - RNA, 19 nt, Artificial Sequence
  Description of Artificial Sequence: Synthetic oligonucleotide
  Antisense strand to SEQ ID NO: 1048790
uaugauaaacucugcacau

SEQ ID NO: 1048792 - RNA, 19 nt, Artificial Sequence
  Description of Artificial Sequence: Synthetic oligonucleotide
  Sense strand starting at position 1749 of SEQ ID NO: 915036
cccuuuaucucugcagaga

SEQ ID NO: 1048793 - RNA, 19 nt, Artificial Sequence
  Description of Artificial Sequence: Synthetic oligonucleotide
  Antisense strand to SEQ ID NO: 1048792
ucucugcagagauaaaggg

SEQ ID NO: 1048794 - RNA, 19 nt, Artificial Sequence
  Description of Artificial Sequence: Synthetic oligonucleotide
  Sense strand starting at position 1750 of SEQ ID NO: 915036
ccuuuaucucugcagagaa

SEQ ID NO: 1048795 - RNA, 19 nt, Artificial Sequence
  Description of Artificial Sequence: Synthetic oligonucleotide
  Antisense strand to SEQ ID NO: 1048794
uucucugcagagauaaagg

SEQ ID NO: 1048796 - RNA, 19 nt, Artificial Sequence
  Description of Artificial Sequence: Synthetic oligonucleotide
  Sense strand starting at position 1752 of SEQ ID NO: 915036
uuuaucucugcagagaauc

SEQ ID NO: 1048797 - RNA, 19 nt, Artificial Sequence
  Description of Artificial Sequence: Synthetic oligonucleotide
  Antisense strand to SEQ ID NO: 1048796
gauucucugcagagauaaa

SEQ ID NO: 1048798 - RNA, 19 nt, Artificial Sequence
  Description of Artificial Sequence: Synthetic oligonucleotide
  Sense strand starting at position 2093 of SEQ ID NO: 915036
aggagacauucuuccuguu

SEQ ID NO: 1048799 - RNA, 19 nt, Artificial Sequence
  Description of Artificial Sequence: Synthetic oligonucleotide
  Antisense strand to SEQ ID NO: 1048798
aacaggaagaaugucuccu

SEQ ID NO: 1048800 - RNA, 19 nt, Artificial Sequence
  Description of Artificial Sequence: Synthetic oligonucleotide
  Sense strand starting at position 2141 of SEQ ID NO: 915036
caguaacccggacauagua

SEQ ID NO: 1048801 - RNA, 19 nt, Artificial Sequence
  Description of Artificial Sequence: Synthetic oligonucleotide
  Antisense strand to SEQ ID NO: 1048800
uacuauguccggguuacug

SEQ ID NO: 1048802 - RNA, 19 nt, Artificial Sequence
  Description of Artificial Sequence: Synthetic oligonucleotide
  Sense strand starting at position 2282 of SEQ ID NO: 915036
ugaucuauugguuauucuu

SEQ ID NO: 1048803 - RNA, 19 nt, Artificial Sequence
  Description of Artificial Sequence: Synthetic oligonucleotide
  Antisense strand to SEQ ID NO: 1048802
aagaauaaccaauagauca

SEQ ID NO: 1048804 - RNA, 19 nt, Artificial Sequence
  Description of Artificial Sequence: Synthetic oligonucleotide
  Sense strand starting at position 2358 of SEQ ID NO: 915036
cugggugcuccgcuguuaa

SEQ ID NO: 1048805 - RNA, 19 nt, Artificial Sequence
  Description of Artificial Sequence: Synthetic oligonucleotide
  Antisense strand to SEQ ID NO: 1048804
uuaacagcggagcacccag

SEQ ID NO: 1048806 - RNA, 19 nt, Artificial Sequence
  Description of Artificial Sequence: Synthetic oligonucleotide
  Sense strand starting at position 2577 of SEQ ID NO: 915036
ccaguaguuacugagaguc

SEQ ID NO: 1048807 - RNA, 19 nt, Artificial Sequence
  Description of Artificial Sequence: Synthetic oligonucleotide
  Antisense strand to SEQ ID NO: 1048806
gacucucaguaacuacugg

SEQ ID NO: 1048808 - RNA, 19 nt, Artificial Sequence
  Description of Artificial Sequence: Synthetic oligonucleotide
  Sense strand starting at position 2876 of SEQ ID NO: 915036
gcagucugucaauacaacu

SEQ ID NO: 1048809 - RNA, 19 nt, Artificial Sequence
  Description of Artificial Sequence: Synthetic oligonucleotide
  Antisense strand to SEQ ID NO: 1048808
aguuguauugacagacugc

SEQ ID NO: 1048810 - RNA, 19 nt, Artificial Sequence
  Description of Artificial Sequence: Synthetic oligonucleotide
  Sense strand starting at position 3055 of SEQ ID NO: 915036
gguauauuaucaucuguac

SEQ ID NO: 1048811 - RNA, 19 nt, Artificial Sequence
  Description of Artificial Sequence: Synthetic oligonucleotide
  Antisense strand to SEQ ID NO: 1048810
guacagaugauaauauacc

SEQ ID NO: 1048812 - RNA, 19 nt, Artificial Sequence
  Description of Artificial Sequence: Synthetic oligonucleotide
  Sense strand starting at position 3077 of SEQ ID NO: 915036
auugguuauuggguaauca

SEQ ID NO: 1048813 - RNA, 19 nt, Artificial Sequence
  Description of Artificial Sequence: Synthetic oligonucleotide
  Antisense strand to SEQ ID NO: 1048812
ugauuacccaauaaccaau

SEQ ID NO: 1048814 - RNA, 19 nt, Artificial Sequence
  Description of Artificial Sequence: Synthetic oligonucleotide
  Sense strand starting at position 3078 of SEQ ID NO: 915036
uugguuauuggguaaucau

SEQ ID NO: 1048815 - RNA, 19 nt, Artificial Sequence
  Description of Artificial Sequence: Synthetic oligonucleotide
  Antisense strand to SEQ ID NO: 1048814
augauuacccaauaaccaa

SEQ ID NO: 1048816 - RNA, 19 nt, Artificial Sequence
  Description of Artificial Sequence: Synthetic oligonucleotide
  Sense strand starting at position 3448 of SEQ ID NO: 915036
augguaguauaucuaggau

SEQ ID NO: 1048817 - RNA, 19 nt, Artificial Sequence
  Description of Artificial Sequence: Synthetic oligonucleotide
  Antisense strand to SEQ ID NO: 1048816
auccuagauauacuaccau

SEQ ID NO: 1048818 - RNA, 19 nt, Artificial Sequence
  Description of Artificial Sequence: Synthetic oligonucleotide
  Sense strand starting at position 3451 of SEQ ID NO: 915036
guaguauaucuaggauaaa

SEQ ID NO: 1048819 - RNA, 19 nt, Artificial Sequence
  Description of Artificial Sequence: Synthetic oligonucleotide
  Antisense strand to SEQ ID NO: 1048818
uuuauccuagauauacuac

SEQ ID NO: 1048820 - RNA, 19 nt, Artificial Sequence
  Description of Artificial Sequence: Synthetic oligonucleotide
  Sense strand starting at position 3490 of SEQ ID NO: 915036
cccugauagcuuuagguaa

SEQ ID NO: 1048821 - RNA, 19 nt, Artificial Sequence
  Description of Artificial Sequence: Synthetic oligonucleotide
  Antisense strand to SEQ ID NO: 1048820
uuaccuaaagcuaucaggg

SEQ ID NO: 1048822 - RNA, 19 nt, Artificial Sequence
  Description of Artificial Sequence: Synthetic oligonucleotide
  Sense strand starting at position 3602 of SEQ ID NO: 915036
ugaacauaauuguugauag

SEQ ID NO: 1048823 - RNA, 19 nt, Artificial Sequence
  Description of Artificial Sequence: Synthetic oligonucleotide
  Antisense strand to SEQ ID NO: 1048822
cuaucaacaauuauguuca

SEQ ID NO: 1048824 - RNA, 19 nt, Artificial Sequence
  Description of Artificial Sequence: Synthetic oligonucleotide
  Sense strand starting at position 3661 of SEQ ID NO: 915036
ccugguacuuaacuuugaa

SEQ ID NO: 1048825 - RNA, 19 nt, Artificial Sequence
  Description of Artificial Sequence: Synthetic oligonucleotide
  Antisense strand to SEQ ID NO: 1048824
uucaaaguuaaguaccagg

SEQ ID NO: 1048826 - RNA, 19 nt, Artificial Sequence
  Description of Artificial Sequence: Synthetic oligonucleotide
  Sense strand starting at position 3664 of SEQ ID NO: 915036
gguacuuaacuuugaagca

SEQ ID NO: 1048827 - RNA, 19 nt, Artificial Sequence
  Description of Artificial Sequence: Synthetic oligonucleotide
  Antisense strand to SEQ ID NO: 1048826
ugcuucaaaguuaaguacc

SEQ ID NO: 1048828 - RNA, 19 nt, Artificial Sequence
  Description of Artificial Sequence: Synthetic oligonucleotide
  Sense strand starting at position 3767 of SEQ ID NO: 915036
guuagacauuccuugacug

SEQ ID NO: 1048829 - RNA, 19 nt, Artificial Sequence
  Description of Artificial Sequence: Synthetic oligonucleotide
  Antisense strand to SEQ ID NO: 1048828
cagucaaggaaugucuaac

SEQ ID NO: 1048830 - RNA, 19 nt, Artificial Sequence
  Description of Artificial Sequence: Synthetic oligonucleotide
  Sense strand starting at position 3768 of SEQ ID NO: 915036
uuagacauuccuugacuga

SEQ ID NO: 1048831 - RNA, 19 nt, Artificial Sequence
  Description of Artificial Sequence: Synthetic oligonucleotide
  Antisense strand to SEQ ID NO: 1048830
ucagucaaggaaugucuaa

SEQ ID NO: 1048832 - RNA, 19 nt, Artificial Sequence
  Description of Artificial Sequence: Synthetic oligonucleotide
  Sense strand starting at position 3947 of SEQ ID NO: 915036
ccucaaauauggcuuaaga

SEQ ID NO: 1048833 - RNA, 19 nt, Artificial Sequence
  Description of Artificial Sequence: Synthetic oligonucleotide
  Antisense strand to SEQ ID NO: 1048832
ucuuaagccauauuugagg

SEQ ID NO: 1048834 - RNA, 19 nt, Artificial Sequence
  Description of Artificial Sequence: Synthetic oligonucleotide
  Sense strand starting at position 884 of SEQ ID NO: 915037
caaguuugaugcccugagu

SEQ ID NO: 1048835 - RNA, 19 nt, Artificial Sequence
  Description of Artificial Sequence: Synthetic oligonucleotide
  Antisense strand to SEQ ID NO: 1048834
acucagggcaucaaacuug

SEQ ID NO: 1048836 - RNA, 19 nt, Artificial Sequence
  Description of Artificial Sequence: Synthetic oligonucleotide
  Sense strand starting at position 901 of SEQ ID NO: 915037
gucuguagcuccuuaaagu

SEQ ID NO: 1048837 - RNA, 19 nt, Artificial Sequence
  Description of Artificial Sequence: Synthetic oligonucleotide
  Antisense strand to SEQ ID NO: 1048836
acuuuaaggagcuacagac

SEQ ID NO: 1048838 - RNA, 19 nt, Artificial Sequence
  Description of Artificial Sequence: Synthetic oligonucleotide
  Sense strand starting at position 1021 of SEQ ID NO: 915037
ggaaguuugcauggcagga

SEQ ID NO: 1048839 - RNA, 19 nt, Artificial Sequence
  Description of Artificial Sequence: Synthetic oligonucleotide
  Antisense strand to SEQ ID NO: 1048838
uccugccaugcaaacuucc

SEQ ID NO: 1048840 - RNA, 19 nt, Artificial Sequence
  Description of Artificial Sequence: Synthetic oligonucleotide
  Sense strand starting at position 1122 of SEQ ID NO: 915037
cugggugcccuguaacaga

SEQ ID NO: 1048841 - RNA, 19 nt, Artificial Sequence
  Description of Artificial Sequence: Synthetic oligonucleotide
  Antisense strand to SEQ ID NO: 1048840
ucuguuacagggcacccag

SEQ ID NO: 1048842 - RNA, 19 nt, Artificial Sequence
  Description of Artificial Sequence: Synthetic oligonucleotide
  Sense strand starting at position 1157 of SEQ ID NO: 915037
gccacuaguguuuguugaa

SEQ ID NO: 1048843 - RNA, 19 nt, Artificial Sequence
  Description of Artificial Sequence: Synthetic oligonucleotide
  Antisense strand to SEQ ID NO: 1048842
uucaacaaacacuaguggc

SEQ ID NO: 1048844 - RNA, 19 nt, Artificial Sequence
  Description of Artificial Sequence: Synthetic oligonucleotide
  Sense strand starting at position 1158 of SEQ ID NO: 915037
ccacuaguguuuguugaau

SEQ ID NO: 1048845 - RNA, 19 nt, Artificial Sequence
  Description of Artificial Sequence: Synthetic oligonucleotide
  Antisense strand to SEQ ID NO: 1048844
auucaacaaacacuagugg

SEQ ID NO: 1048846 - RNA, 19 nt, Artificial Sequence
  Description of Artificial Sequence: Synthetic oligonucleotide
  Sense strand starting at position 1171 of SEQ ID NO: 915037
uugaaugacugauggagga

SEQ ID NO: 1048847 - RNA, 19 nt, Artificial Sequence
  Description of Artificial Sequence: Synthetic oligonucleotide
  Antisense strand to SEQ ID NO: 1048846
uccuccaucagucauucaa

SEQ ID NO: 1048848 - RNA, 19 nt, Artificial Sequence
  Description of Artificial Sequence: Synthetic oligonucleotide
  Sense strand starting at position 1201 of SEQ ID NO: 915037
auggagugucccggugagu

SEQ ID NO: 1048849 - RNA, 19 nt, Artificial Sequence
  Description of Artificial Sequence: Synthetic oligonucleotide
  Antisense strand to SEQ ID NO: 1048848
acucaccgggacacuccau

SEQ ID NO: 1048850 - RNA, 19 nt, Artificial Sequence
  Description of Artificial Sequence: Synthetic oligonucleotide
  Sense strand starting at position 1203 of SEQ ID NO: 915037
ggagugucccggugaguaa

SEQ ID NO: 1048851 - RNA, 19 nt, Artificial Sequence
  Description of Artificial Sequence: Synthetic oligonucleotide
  Antisense strand to SEQ ID NO: 1048850
uuacucaccgggacacucc

SEQ ID NO: 1048852 - RNA, 19 nt, Artificial Sequence
  Description of Artificial Sequence: Synthetic oligonucleotide
  Sense strand starting at position 1204 of SEQ ID NO: 915037
gagugucccggugaguaaa

SEQ ID NO: 1048853 - RNA, 19 nt, Artificial Sequence
  Description of Artificial Sequence: Synthetic oligonucleotide
  Antisense strand to SEQ ID NO: 1048852
uuuacucaccgggacacuc

SEQ ID NO: 1048854 - RNA, 19 nt, Artificial Sequence
  Description of Artificial Sequence: Synthetic oligonucleotide
  Sense strand starting at position 1205 of SEQ ID NO: 915037
agugucccggugaguaaau

SEQ ID NO: 1048855 - RNA, 19 nt, Artificial Sequence
  Description of Artificial Sequence: Synthetic oligonucleotide
  Antisense strand to SEQ ID NO: 1048854
auuuacucaccgggacacu

SEQ ID NO: 1048856 - RNA, 19 nt, Artificial Sequence
  Description of Artificial Sequence: Synthetic oligonucleotide
  Sense strand starting at position 1206 of SEQ ID NO: 915037
gugucccggugaguaaauu

SEQ ID NO: 1048857 - RNA, 19 nt, Artificial Sequence
  Description of Artificial Sequence: Synthetic oligonucleotide
  Antisense strand to SEQ ID NO: 1048856
aauuuacucaccgggacac

SEQ ID NO: 1048858 - RNA, 19 nt, Artificial Sequence
  Description of Artificial Sequence: Synthetic oligonucleotide
  Sense strand starting at position 1876 of SEQ ID NO: 915037
gggccagugaguuggcuuu

SEQ ID NO: 1048859 - RNA, 19 nt, Artificial Sequence
  Description of Artificial Sequence: Synthetic oligonucleotide
  Antisense strand to SEQ ID NO: 1048858
aaagccaacucacuggccc

SEQ ID NO: 1048860 - RNA, 19 nt, Artificial Sequence
  Description of Artificial Sequence: Synthetic oligonucleotide
  Sense strand starting at position 2009 of SEQ ID NO: 915037
guaggacuggucuauaggu

SEQ ID NO: 1048861 - RNA, 19 nt, Artificial Sequence
  Description of Artificial Sequence: Synthetic oligonucleotide
  Antisense strand to SEQ ID NO: 1048860
accuauagaccaguccuac

SEQ ID NO: 1048862 - RNA, 19 nt, Artificial Sequence
  Description of Artificial Sequence: Synthetic oligonucleotide
  Sense strand starting at position 2011 of SEQ ID NO: 915037
aggacuggucuauagguua

SEQ ID NO: 1048863 - RNA, 19 nt, Artificial Sequence
  Description of Artificial Sequence: Synthetic oligonucleotide
  Antisense strand to SEQ ID NO: 1048862
uaaccuauagaccaguccu

SEQ ID NO: 1048864 - RNA, 19 nt, Artificial Sequence
  Description of Artificial Sequence: Synthetic oligonucleotide
  Sense strand starting at position 2018 of SEQ ID NO: 915037
gucuauagguuauucccua

SEQ ID NO: 1048865 - RNA, 19 nt, Artificial Sequence
  Description of Artificial Sequence: Synthetic oligonucleotide
  Antisense strand to SEQ ID NO: 1048864
uagggaauaaccuauagac

SEQ ID NO: 1048866 - RNA, 19 nt, Artificial Sequence
  Description of Artificial Sequence: Synthetic oligonucleotide
  Sense strand starting at position 2019 of SEQ ID NO: 915037
ucuauagguuauucccuau

SEQ ID NO: 1048867 - RNA, 19 nt, Artificial Sequence
  Description of Artificial Sequence: Synthetic oligonucleotide
  Antisense strand to SEQ ID NO: 1048866
auagggaauaaccuauaga

SEQ ID NO: 1048868 - RNA, 19 nt, Artificial Sequence
  Description of Artificial Sequence: Synthetic oligonucleotide
  Sense strand starting at position 2022 of SEQ ID NO: 915037
auagguuauucccuauaga

SEQ ID NO: 1048869 - RNA, 19 nt, Artificial Sequence
  Description of Artificial Sequence: Synthetic oligonucleotide
  Antisense strand to SEQ ID NO: 1048868
ucuauagggaauaaccuau

SEQ ID NO: 1048870 - RNA, 19 nt, Artificial Sequence
  Description of Artificial Sequence: Synthetic oligonucleotide
  Sense strand starting at position 2043 of SEQ ID NO: 915037
ggguguugugccugguuaa

SEQ ID NO: 1048871 - RNA, 19 nt, Artificial Sequence
  Description of Artificial Sequence: Synthetic oligonucleotide
  Antisense strand to SEQ ID NO: 1048870
uuaaccaggcacaacaccc

SEQ ID NO: 1048872 - RNA, 19 nt, Artificial Sequence
  Description of Artificial Sequence: Synthetic oligonucleotide
  Sense strand starting at position 2044 of SEQ ID NO: 915037
gguguugugccugguuaaa

SEQ ID NO: 1048873 - RNA, 19 nt, Artificial Sequence
  Description of Artificial Sequence: Synthetic oligonucleotide
  Antisense strand to SEQ ID NO: 1048872
uuuaaccaggcacaacacc

SEQ ID NO: 1048874 - RNA, 19 nt, Artificial Sequence
  Description of Artificial Sequence: Synthetic oligonucleotide
  Sense strand starting at position 2046 of SEQ ID NO: 915037
uguugugccugguuaaaca

SEQ ID NO: 1048875 - RNA, 19 nt, Artificial Sequence
  Description of Artificial Sequence: Synthetic oligonucleotide
  Antisense strand to SEQ ID NO: 1048874
uguuuaaccaggcacaaca

SEQ ID NO: 1048876 - RNA, 19 nt, Artificial Sequence
  Description of Artificial Sequence: Synthetic oligonucleotide
  Sense strand starting at position 2806 of SEQ ID NO: 915037
uguagaaauagcuagugca

SEQ ID NO: 1048877 - RNA, 19 nt, Artificial Sequence
  Description of Artificial Sequence: Synthetic oligonucleotide
  Antisense strand to SEQ ID NO: 1048876
ugcacuagcuauuucuaca

SEQ ID NO: 1048878 - RNA, 19 nt, Artificial Sequence
  Description of Artificial Sequence: Synthetic oligonucleotide
  Sense strand starting at position 2886 of SEQ ID NO: 915037
aaauguaaggccuagagcu

SEQ ID NO: 1048879 - RNA, 19 nt, Artificial Sequence
  Description of Artificial Sequence: Synthetic oligonucleotide
  Antisense strand to SEQ ID NO: 1048878
agcucuaggccuuacauuu

SEQ ID NO: 1048880 - RNA, 19 nt, Artificial Sequence
  Description of Artificial Sequence: Synthetic oligonucleotide
  Sense strand starting at position 2888 of SEQ ID NO: 915037
auguaaggccuagagcuaa

SEQ ID NO: 1048881 - RNA, 19 nt, Artificial Sequence
  Description of Artificial Sequence: Synthetic oligonucleotide
  Antisense strand to SEQ ID NO: 1048880
uuagcucuaggccuuacau

SEQ ID NO: 1048882 - RNA, 19 nt, Artificial Sequence
  Description of Artificial Sequence: Synthetic oligonucleotide
  Sense strand starting at position 2924 of SEQ ID NO: 915037
agaagaacucucugugucu

SEQ ID NO: 1048883 - RNA, 19 nt, Artificial Sequence
  Description of Artificial Sequence: Synthetic oligonucleotide
  Antisense strand to SEQ ID NO: 1048882
agacacagagaguucuucu

SEQ ID NO: 1048884 - RNA, 19 nt, Artificial Sequence
  Description of Artificial Sequence: Synthetic oligonucleotide
  Sense strand starting at position 2925 of SEQ ID NO: 915037
gaagaacucucugugucua

SEQ ID NO: 1048885 - RNA, 19 nt, Artificial Sequence
  Description of Artificial Sequence: Synthetic oligonucleotide
  Antisense strand to SEQ ID NO: 1048884
uagacacagagaguucuuc

SEQ ID NO: 1048886 - RNA, 19 nt, Artificial Sequence
  Description of Artificial Sequence: Synthetic oligonucleotide
  Sense strand starting at position 2936 of SEQ ID NO: 915037
ugugucuauccugaaggga

SEQ ID NO: 1048887 - RNA, 19 nt, Artificial Sequence
  Description of Artificial Sequence: Synthetic oligonucleotide
  Antisense strand to SEQ ID NO: 1048886
ucccuucaggauagacaca

SEQ ID NO: 1048888 - RNA, 19 nt, Artificial Sequence
  Description of Artificial Sequence: Synthetic oligonucleotide
  Sense strand starting at position 3165 of SEQ ID NO: 915037
ugugcuauacuagagccau

SEQ ID NO: 1048889 - RNA, 19 nt, Artificial Sequence
  Description of Artificial Sequence: Synthetic oligonucleotide
  Antisense strand to SEQ ID NO: 1048888
auggcucuaguauagcaca

SEQ ID NO: 1048890 - RNA, 19 nt, Artificial Sequence
  Description of Artificial Sequence: Synthetic oligonucleotide
  Sense strand starting at position 3270 of SEQ ID NO: 915037
ucaccaugcucccagugaa

SEQ ID NO: 1048891 - RNA, 19 nt, Artificial Sequence
  Description of Artificial Sequence: Synthetic oligonucleotide
  Antisense strand to SEQ ID NO: 1048890
uucacugggagcaugguga

SEQ ID NO: 1048892 - RNA, 19 nt, Artificial Sequence
  Description of Artificial Sequence: Synthetic oligonucleotide
  Sense strand starting at position 3273 of SEQ ID NO: 915037
ccaugcucccagugaaaga

SEQ ID NO: 1048893 - RNA, 19 nt, Artificial Sequence
  Description of Artificial Sequence: Synthetic oligonucleotide
  Antisense strand to SEQ ID NO: 1048892
ucuuucacugggagcaugg

SEQ ID NO: 1048894 - RNA, 19 nt, Artificial Sequence
  Description of Artificial Sequence: Synthetic oligonucleotide
  Sense strand starting at position 3494 of SEQ ID NO: 915037
ggccuauccugccuugacu

SEQ ID NO: 1048895 - RNA, 19 nt, Artificial Sequence
  Description of Artificial Sequence: Synthetic oligonucleotide
  Antisense strand to SEQ ID NO: 1048894
agucaaggcaggauaggcc

SEQ ID NO: 1048896 - RNA, 19 nt, Artificial Sequence
  Description of Artificial Sequence: Synthetic oligonucleotide
  Sense strand starting at position 3542 of SEQ ID NO: 915037
gcucaaagaugccugcaga

SEQ ID NO: 1048897 - RNA, 19 nt, Artificial Sequence
  Description of Artificial Sequence: Synthetic oligonucleotide
  Antisense strand to SEQ ID NO: 1048896
ucugcaggcaucuuugagc

SEQ ID NO: 1048898 - RNA, 19 nt, Artificial Sequence
  Description of Artificial Sequence: Synthetic oligonucleotide
  Sense strand starting at position 3754 of SEQ ID NO: 915037
agggaugucaugugaucag

SEQ ID NO: 1048899 - RNA, 19 nt, Artificial Sequence
  Description of Artificial Sequence: Synthetic oligonucleotide
  Antisense strand to SEQ ID NO: 1048898
cugaucacaugacaucccu

SEQ ID NO: 1048900 - RNA, 19 nt, Artificial Sequence
  Description of Artificial Sequence: Synthetic oligonucleotide
  Sense strand starting at position 3757 of SEQ ID NO: 915037
gaugucaugugaucaguga

SEQ ID NO: 1048901 - RNA, 19 nt, Artificial Sequence
  Description of Artificial Sequence: Synthetic oligonucleotide
  Antisense strand to SEQ ID NO: 1048900
ucacugaucacaugacauc

SEQ ID NO: 1048902 - RNA, 19 nt, Artificial Sequence
  Description of Artificial Sequence: Synthetic oligonucleotide
  Sense strand starting at position 3761 of SEQ ID NO: 915037
ucaugugaucagugacuuc

SEQ ID NO: 1048903 - RNA, 19 nt, Artificial Sequence
  Description of Artificial Sequence: Synthetic oligonucleotide
  Antisense strand to SEQ ID NO: 1048902
gaagucacugaucacauga

SEQ ID NO: 1048904 - RNA, 19 nt, Artificial Sequence
  Description of Artificial Sequence: Synthetic oligonucleotide
  Sense strand starting at position 3803 of SEQ ID NO: 915037
aguucuuggcaacgugauu

SEQ ID NO: 1048905 - RNA, 19 nt, Artificial Sequence
  Description of Artificial Sequence: Synthetic oligonucleotide
  Antisense strand to SEQ ID NO: 1048904
aaucacguugccaagaacu

SEQ ID NO: 1048906 - RNA, 19 nt, Artificial Sequence
  Description of Artificial Sequence: Synthetic oligonucleotide
  Sense strand starting at position 3808 of SEQ ID NO: 915037
uuggcaacgugauuaucga

SEQ ID NO: 1048907 - RNA, 19 nt, Artificial Sequence
  Description of Artificial Sequence: Synthetic oligonucleotide
  Antisense strand to SEQ ID NO: 1048906
ucgauaaucacguugccaa

SEQ ID NO: 1048908 - RNA, 19 nt, Artificial Sequence
  Description of Artificial Sequence: Synthetic oligonucleotide
  Sense strand starting at position 3819 of SEQ ID NO: 915037
auuaucgacgcccagaaua

SEQ ID NO: 1048909 - RNA, 19 nt, Artificial Sequence
  Description of Artificial Sequence: Synthetic oligonucleotide
  Antisense strand to SEQ ID NO: 1048908
uauucugggcgucgauaau

SEQ ID NO: 1048910 - RNA, 19 nt, Artificial Sequence
  Description of Artificial Sequence: Synthetic oligonucleotide
  Sense strand starting at position 3839 of SEQ ID NO: 915037
gaccuuggaucuuaucaga

SEQ ID NO: 1048911 - RNA, 19 nt, Artificial Sequence
  Description of Artificial Sequence: Synthetic oligonucleotide
  Antisense strand to SEQ ID NO: 1048910
ucugauaagauccaagguc

SEQ ID NO: 1048912 - RNA, 19 nt, Artificial Sequence
  Description of Artificial Sequence: Synthetic oligonucleotide
  Sense strand starting at position 308 of SEQ ID NO: 915038
cugcuuauaucugcaggaa

SEQ ID NO: 1048913 - RNA, 19 nt, Artificial Sequence
  Description of Artificial Sequence: Synthetic oligonucleotide
  Antisense strand to SEQ ID NO: 1048912
uuccugcagauauaagcag

SEQ ID NO: 1048914 - RNA, 19 nt, Artificial Sequence
  Description of Artificial Sequence: Synthetic oligonucleotide
  Sense strand starting at position 311 of SEQ ID NO: 915038
cuuauaucugcaggaaaug

SEQ ID NO: 1048915 - RNA, 19 nt, Artificial Sequence
  Description of Artificial Sequence: Synthetic oligonucleotide
  Antisense strand to SEQ ID NO: 1048914
cauuuccugcagauauaag

SEQ ID NO: 1048916 - RNA, 19 nt, Artificial Sequence
  Description of Artificial Sequence: Synthetic oligonucleotide
  Sense strand starting at position 393 of SEQ ID NO: 915038
aagucagacccugguaguu

SEQ ID NO: 1048917 - RNA, 19 nt, Artificial Sequence
  Description of Artificial Sequence: Synthetic oligonucleotide
  Antisense strand to SEQ ID NO: 1048916
aacuaccagggucugacuu

SEQ ID NO: 1048918 - RNA, 19 nt, Artificial Sequence
  Description of Artificial Sequence: Synthetic oligonucleotide
  Sense strand starting at position 402 of SEQ ID NO: 915038
ccugguaguuuauuaacaa

SEQ ID NO: 1048919 - RNA, 19 nt, Artificial Sequence
  Description of Artificial Sequence: Synthetic oligonucleotide
  Antisense strand to SEQ ID NO: 1048918
uuguuaauaaacuaccagg

SEQ ID NO: 1048920 - RNA, 19 nt, Artificial Sequence
  Description of Artificial Sequence: Synthetic oligonucleotide
  Sense strand starting at position 621 of SEQ ID NO: 915038
gugaaagcagguugauauu

SEQ ID NO: 1048921 - RNA, 19 nt, Artificial Sequence
  Description of Artificial Sequence: Synthetic oligonucleotide
  Antisense strand to SEQ ID NO: 1048920
aauaucaaccugcuuucac

SEQ ID NO: 1048922 - RNA, 19 nt, Artificial Sequence
  Description of Artificial Sequence: Synthetic oligonucleotide
  Sense strand starting at position 624 of SEQ ID NO: 915038
aaagcagguugauauuuaa

SEQ ID NO: 1048923 - RNA, 19 nt, Artificial Sequence
  Description of Artificial Sequence: Synthetic oligonucleotide
  Antisense strand to SEQ ID NO: 1048922
uuaaauaucaaccugcuuu

SEQ ID NO: 1048924 - RNA, 19 nt, Artificial Sequence
  Description of Artificial Sequence: Synthetic oligonucleotide
  Sense strand starting at position 960 of SEQ ID NO: 915038
auaauaauccagggcacau

SEQ ID NO: 1048925 - RNA, 19 nt, Artificial Sequence
  Description of Artificial Sequence: Synthetic oligonucleotide
  Antisense strand to SEQ ID NO: 1048924
augugcccuggauuauuau

SEQ ID NO: 1048926 - RNA, 19 nt, Artificial Sequence
  Description of Artificial Sequence: Synthetic oligonucleotide
  Sense strand starting at position 972 of SEQ ID NO: 915038
ggcacauacugauuagaug

SEQ ID NO: 1048927 - RNA, 19 nt, Artificial Sequence
  Description of Artificial Sequence: Synthetic oligonucleotide
  Antisense strand to SEQ ID NO: 1048926
caucuaaucaguaugugcc

SEQ ID NO: 1048928 - RNA, 19 nt, Artificial Sequence
  Description of Artificial Sequence: Synthetic oligonucleotide
  Sense strand starting at position 1011 of SEQ ID NO: 915038
uuucuauuguuccuggcaa

SEQ ID NO: 1048929 - RNA, 19 nt, Artificial Sequence
  Description of Artificial Sequence: Synthetic oligonucleotide
  Antisense strand to SEQ ID NO: 1048928
uugccaggaacaauagaaa

SEQ ID NO: 1048930 - RNA, 19 nt, Artificial Sequence
  Description of Artificial Sequence: Synthetic oligonucleotide
  Sense strand starting at position 1013 of SEQ ID NO: 915038
ucuauuguuccuggcaaag

SEQ ID NO: 1048931 - RNA, 19 nt, Artificial Sequence
  Description of Artificial Sequence: Synthetic oligonucleotide
  Antisense strand to SEQ ID NO: 1048930
cuuugccaggaacaauaga

SEQ ID NO: 1048932 - RNA, 19 nt, Artificial Sequence
  Description of Artificial Sequence: Synthetic oligonucleotide
  Sense strand starting at position 1031 of SEQ ID NO: 915038
ggcucuugcagucagcaga

SEQ ID NO: 1048933 - RNA, 19 nt, Artificial Sequence
  Description of Artificial Sequence: Synthetic oligonucleotide
  Antisense strand to SEQ ID NO: 1048932
ucugcugacugcaagagcc

SEQ ID NO: 1048934 - RNA, 19 nt, Artificial Sequence
  Description of Artificial Sequence: Synthetic oligonucleotide
  Sense strand starting at position 1095 of SEQ ID NO: 915038
cauuuaggugcagguguaa

SEQ ID NO: 1048935 - RNA, 19 nt, Artificial Sequence
  Description of Artificial Sequence: Synthetic oligonucleotide
  Antisense strand to SEQ ID NO: 1048934
uuacaccugcaccuaaaug

SEQ ID NO: 1048936 - RNA, 19 nt, Artificial Sequence
  Description of Artificial Sequence: Synthetic oligonucleotide
  Sense strand starting at position 1107 of SEQ ID NO: 915038
gguguaauaguuuaacuuu

SEQ ID NO: 1048937 - RNA, 19 nt, Artificial Sequence
  Description of Artificial Sequence: Synthetic oligonucleotide
  Antisense strand to SEQ ID NO: 1048936
aaaguuaaacuauuacacc

SEQ ID NO: 1048938 - RNA, 19 nt, Artificial Sequence
  Description of Artificial Sequence: Synthetic oligonucleotide
  Sense strand starting at position 1454 of SEQ ID NO: 915038
cuuagauaucuccgagaau

SEQ ID NO: 1048939 - RNA, 19 nt, Artificial Sequence
  Description of Artificial Sequence: Synthetic oligonucleotide
  Antisense strand to SEQ ID NO: 1048938
auucucggagauaucuaag

SEQ ID NO: 1048940 - RNA, 19 nt, Artificial Sequence
  Description of Artificial Sequence: Synthetic oligonucleotide
  Sense strand starting at position 1645 of SEQ ID NO: 915038
gucauugcccauuaucuca

SEQ ID NO: 1048941 - RNA, 19 nt, Artificial Sequence
  Description of Artificial Sequence: Synthetic oligonucleotide
  Antisense strand to SEQ ID NO: 1048940
ugagauaaugggcaaugac

SEQ ID NO: 1048942 - RNA, 19 nt, Artificial Sequence
  Description of Artificial Sequence: Synthetic oligonucleotide
  Sense strand starting at position 1685 of SEQ ID NO: 915038
gagaguuucccagggcaag

SEQ ID NO: 1048943 - RNA, 19 nt, Artificial Sequence
  Description of Artificial Sequence: Synthetic oligonucleotide
  Antisense strand to SEQ ID NO: 1048942
cuugcccugggaaacucuc

SEQ ID NO: 1048944 - RNA, 19 nt, Artificial Sequence
  Description of Artificial Sequence: Synthetic oligonucleotide
  Sense strand starting at position 2425 of SEQ ID NO: 915038
ggcgcugaauucuugggaa

SEQ ID NO: 1048945 - RNA, 19 nt, Artificial Sequence
  Description of Artificial Sequence: Synthetic oligonucleotide
  Antisense strand to SEQ ID NO: 1048944
uucccaagaauucagcgcc

SEQ ID NO: 1048946 - RNA, 19 nt, Artificial Sequence
  Description of Artificial Sequence: Synthetic oligonucleotide
  Sense strand starting at position 2602 of SEQ ID NO: 915038
gcaguuugguauuccauag

SEQ ID NO: 1048947 - RNA, 19 nt, Artificial Sequence
  Description of Artificial Sequence: Synthetic oligonucleotide
  Antisense strand to SEQ ID NO: 1048946
cuauggaauaccaaacugc

SEQ ID NO: 1048948 - RNA, 19 nt, Artificial Sequence
  Description of Artificial Sequence: Synthetic oligonucleotide
  Sense strand starting at position 2622 of SEQ ID NO: 915038
ggcaguaaagcagguuuau

SEQ ID NO: 1048949 - RNA, 19 nt, Artificial Sequence
  Description of Artificial Sequence: Synthetic oligonucleotide
  Antisense strand to SEQ ID NO: 1048948
auaaaccugcuuuacugcc

SEQ ID NO: 1048950 - RNA, 19 nt, Artificial Sequence
  Description of Artificial Sequence: Synthetic oligonucleotide
  Sense strand starting at position 2633 of SEQ ID NO: 915038
agguuuauucaauagcgga

SEQ ID NO: 1048951 - RNA, 19 nt, Artificial Sequence
  Description of Artificial Sequence: Synthetic oligonucleotide
  Antisense strand to SEQ ID NO: 1048950
uccgcuauugaauaaaccu

SEQ ID NO: 1048952 - RNA, 19 nt, Artificial Sequence
  Description of Artificial Sequence: Synthetic oligonucleotide
  Sense strand starting at position 2710 of SEQ ID NO: 915038
gcaauuuccuuuccggcaa

SEQ ID NO: 1048953 - RNA, 19 nt, Artificial Sequence
  Description of Artificial Sequence: Synthetic oligonucleotide
  Antisense strand to SEQ ID NO: 1048952
uugccggaaaggaaauugc

SEQ ID NO: 1048954 - RNA, 19 nt, Artificial Sequence
  Description of Artificial Sequence: Synthetic oligonucleotide
  Sense strand starting at position 2764 of SEQ ID NO: 915038
agcagcuuugcagaguagu

SEQ ID NO: 1048955 - RNA, 19 nt, Artificial Sequence
  Description of Artificial Sequence: Synthetic oligonucleotide
  Antisense strand to SEQ ID NO: 1048954
acuacucugcaaagcugcu

SEQ ID NO: 1048956 - RNA, 19 nt, Artificial Sequence
  Description of Artificial Sequence: Synthetic oligonucleotide
  Sense strand starting at position 2784 of SEQ ID NO: 915038
ggguucgugcuguuugacu

SEQ ID NO: 1048957 - RNA, 19 nt, Artificial Sequence
  Description of Artificial Sequence: Synthetic oligonucleotide
  Antisense strand to SEQ ID NO: 1048956
agucaaacagcacgaaccc

SEQ ID NO: 1048958 - RNA, 19 nt, Artificial Sequence
  Description of Artificial Sequence: Synthetic oligonucleotide
  Sense strand starting at position 2792 of SEQ ID NO: 915038
gcuguuugacuuuacuaaa

SEQ ID NO: 1048959 - RNA, 19 nt, Artificial Sequence
  Description of Artificial Sequence: Synthetic oligonucleotide
  Antisense strand to SEQ ID NO: 1048958
uuuaguaaagucaaacagc

SEQ ID NO: 1048960 - RNA, 19 nt, Artificial Sequence
  Description of Artificial Sequence: Synthetic oligonucleotide
  Sense strand starting at position 2942 of SEQ ID NO: 915038
ucaucaucguugcuugaag

SEQ ID NO: 1048961 - RNA, 19 nt, Artificial Sequence
  Description of Artificial Sequence: Synthetic oligonucleotide
  Antisense strand to SEQ ID NO: 1048960
cuucaagcaacgaugauga

SEQ ID NO: 1048962 - RNA, 19 nt, Artificial Sequence
  Description of Artificial Sequence: Synthetic oligonucleotide
  Sense strand starting at position 2943 of SEQ ID NO: 915038
caucaucguugcuugaaga

SEQ ID NO: 1048963 - RNA, 19 nt, Artificial Sequence
  Description of Artificial Sequence: Synthetic oligonucleotide
  Antisense strand to SEQ ID NO: 1048962
ucuucaagcaacgaugaug

SEQ ID NO: 1048964 - RNA, 19 nt, Artificial Sequence
  Description of Artificial Sequence: Synthetic oligonucleotide
  Sense strand starting at position 3088 of SEQ ID NO: 915038
gggaaucugucuccagcca

SEQ ID NO: 1048965 - RNA, 19 nt, Artificial Sequence
  Description of Artificial Sequence: Synthetic oligonucleotide
  Antisense strand to SEQ ID NO: 1048964
uggcuggagacagauuccc

SEQ ID NO: 1048966 - RNA, 19 nt, Artificial Sequence
  Description of Artificial Sequence: Synthetic oligonucleotide
  Sense strand starting at position 3089 of SEQ ID NO: 915038
ggaaucugucuccagccaa

SEQ ID NO: 1048967 - RNA, 19 nt, Artificial Sequence
  Description of Artificial Sequence: Synthetic oligonucleotide
  Antisense strand to SEQ ID NO: 1048966
uuggcuggagacagauucc

SEQ ID NO: 1048968 - RNA, 19 nt, Artificial Sequence
  Description of Artificial Sequence: Synthetic oligonucleotide
  Sense strand starting at position 3157 of SEQ ID NO: 915038
ugcugaagggauuggcuaa

SEQ ID NO: 1048969 - RNA, 19 nt, Artificial Sequence
  Description of Artificial Sequence: Synthetic oligonucleotide
  Antisense strand to SEQ ID NO: 1048968
uuagccaaucccuucagca

SEQ ID NO: 1048970 - RNA, 19 nt, Artificial Sequence
  Description of Artificial Sequence: Synthetic oligonucleotide
  Sense strand starting at position 3158 of SEQ ID NO: 915038
gcugaagggauuggcuaaa

SEQ ID NO: 1048971 - RNA, 19 nt, Artificial Sequence
  Description of Artificial Sequence: Synthetic oligonucleotide
  Antisense strand to SEQ ID NO: 1048970
uuuagccaaucccuucagc

SEQ ID NO: 1048972 - RNA, 19 nt, Artificial Sequence
  Description of Artificial Sequence: Synthetic oligonucleotide
  Sense strand starting at position 3241 of SEQ ID NO: 915038
ccucuuauugagcaaagca

SEQ ID NO: 1048973 - RNA, 19 nt, Artificial Sequence
  Description of Artificial Sequence: Synthetic oligonucleotide
  Antisense strand to SEQ ID NO: 1048972
ugcuuugcucaauaagagg

SEQ ID NO: 1048974 - RNA, 19 nt, Artificial Sequence
  Description of Artificial Sequence: Synthetic oligonucleotide
  Sense strand starting at position 3488 of SEQ ID NO: 915038
gaaacagagucaguuaguu

SEQ ID NO: 1048975 - RNA, 19 nt, Artificial Sequence
  Description of Artificial Sequence: Synthetic oligonucleotide
  Antisense strand to SEQ ID NO: 1048974
aacuaacugacucuguuuc

SEQ ID NO: 1048976 - RNA, 19 nt, Artificial Sequence
  Description of Artificial Sequence: Synthetic oligonucleotide
  Sense strand starting at position 3592 of SEQ ID NO: 915038
uggcucuuagaauauaguu

SEQ ID NO: 1048977 - RNA, 19 nt, Artificial Sequence
  Description of Artificial Sequence: Synthetic oligonucleotide
  Antisense strand to SEQ ID NO: 1048976
aacuauauucuaagagcca

SEQ ID NO: 1048978 - RNA, 19 nt, Artificial Sequence
  Description of Artificial Sequence: Synthetic oligonucleotide
  Sense strand starting at position 3700 of SEQ ID NO: 915038
cguucugucagucuuacga

SEQ ID NO: 1048979 - RNA, 19 nt, Artificial Sequence
  Description of Artificial Sequence: Synthetic oligonucleotide
  Antisense strand to SEQ ID NO: 1048978
ucguaagacugacagaacg

SEQ ID NO: 1048980 - RNA, 19 nt, Artificial Sequence
  Description of Artificial Sequence: Synthetic oligonucleotide
  Sense strand starting at position 3752 of SEQ ID NO: 915038
guguccaaacucugaaaca

SEQ ID NO: 1048981 - RNA, 19 nt, Artificial Sequence
  Description of Artificial Sequence: Synthetic oligonucleotide
  Antisense strand to SEQ ID NO: 1048980
uguuucagaguuuggacac

SEQ ID NO: 1048982 - RNA, 19 nt, Artificial Sequence
  Description of Artificial Sequence: Synthetic oligonucleotide
  Sense strand starting at position 3802 of SEQ ID NO: 915038
aucccaucaugucugggaa

SEQ ID NO: 1048983 - RNA, 19 nt, Artificial Sequence
  Description of Artificial Sequence: Synthetic oligonucleotide
  Antisense strand to SEQ ID NO: 1048982
uucccagacaugaugggau

SEQ ID NO: 1048984 - RNA, 19 nt, Artificial Sequence
  Description of Artificial Sequence: Synthetic oligonucleotide
  Sense strand starting at position 3805 of SEQ ID NO: 915038
ccaucaugucugggaauuc

SEQ ID NO: 1048985 - RNA, 19 nt, Artificial Sequence
  Description of Artificial Sequence: Synthetic oligonucleotide
  Antisense strand to SEQ ID NO: 1048984
gaauucccagacaugaugg

SEQ ID NO: 1048986 - RNA, 19 nt, Artificial Sequence
  Description of Artificial Sequence: Synthetic oligonucleotide
  Sense strand starting at position 3814 of SEQ ID NO: 915038
cugggaauucaguguugag

SEQ ID NO: 1048987 - RNA, 19 nt, Artificial Sequence
  Description of Artificial Sequence: Synthetic oligonucleotide
  Antisense strand to SEQ ID NO: 1048986
cucaacacugaauucccag

SEQ ID NO: 1048988 - RNA, 19 nt, Artificial Sequence
  Description of Artificial Sequence: Synthetic oligonucleotide
  Sense strand starting at position 3856 of SEQ ID NO: 915038
aggagaaggucccuuuggu

SEQ ID NO: 1048989 - RNA, 19 nt, Artificial Sequence
  Description of Artificial Sequence: Synthetic oligonucleotide
  Antisense strand to SEQ ID NO: 1048988
accaaagggaccuucuccu

SEQ ID NO: 1048990 - RNA, 19 nt, Artificial Sequence
  Description of Artificial Sequence: Synthetic oligonucleotide
  Sense strand starting at position 3971 of SEQ ID NO: 915038
ucaugacaauuuggaaacu

SEQ ID NO: 1048991 - RNA, 19 nt, Artificial Sequence
  Description of Artificial Sequence: Synthetic oligonucleotide
  Antisense strand to SEQ ID NO: 1048990
aguuuccaaauugucauga

SEQ ID NO: 1048992 - RNA, 19 nt, Artificial Sequence
  Description of Artificial Sequence: Synthetic oligonucleotide
  Sense strand starting at position 29 of SEQ ID NO: 915039
ccacguugcuuucucugaa

SEQ ID NO: 1048993 - RNA, 19 nt, Artificial Sequence
  Description of Artificial Sequence: Synthetic oligonucleotide
  Antisense strand to SEQ ID NO: 1048992
uucagagaaagcaacgugg

SEQ ID NO: 1048994 - RNA, 19 nt, Artificial Sequence
  Description of Artificial Sequence: Synthetic oligonucleotide
  Sense strand starting at position 82 of SEQ ID NO: 915039
agcaauugcucaucccagu

SEQ ID NO: 1048995 - RNA, 19 nt, Artificial Sequence
  Description of Artificial Sequence: Synthetic oligonucleotide
  Antisense strand to SEQ ID NO: 1048994
acugggaugagcaauugcu

SEQ ID NO: 1048996 - RNA, 19 nt, Artificial Sequence
  Description of Artificial Sequence: Synthetic oligonucleotide
  Sense strand starting at position 131 of SEQ ID NO: 915039
uuuggcauucuguggaaua

SEQ ID NO: 1048997 - RNA, 19 nt, Artificial Sequence
  Description of Artificial Sequence: Synthetic oligonucleotide
  Antisense strand to SEQ ID NO: 1048996
uauuccacagaaugccaaa

SEQ ID NO: 1048998 - RNA, 19 nt, Artificial Sequence
  Description of Artificial Sequence: Synthetic oligonucleotide
  Sense strand starting at position 133 of SEQ ID NO: 915039
uggcauucuguggaauaag

SEQ ID NO: 1048999 - RNA, 19 nt, Artificial Sequence
  Description of Artificial Sequence: Synthetic oligonucleotide
  Antisense strand to SEQ ID NO: 1048998
cuuauuccacagaaugcca

SEQ ID NO: 1049000 - RNA, 19 nt, Artificial Sequence
  Description of Artificial Sequence: Synthetic oligonucleotide
  Sense strand starting at position 208 of SEQ ID NO: 915039
uuaagcuuagcacaaugau

SEQ ID NO: 1049001 - RNA, 19 nt, Artificial Sequence
  Description of Artificial Sequence: Synthetic oligonucleotide
  Antisense strand to SEQ ID NO: 1049000
aucauugugcuaagcuuaa

SEQ ID NO: 1049002 - RNA, 19 nt, Artificial Sequence
  Description of Artificial Sequence: Synthetic oligonucleotide
  Sense strand starting at position 211 of SEQ ID NO: 915039
agcuuagcacaaugaugaa

SEQ ID NO: 1049003 - RNA, 19 nt, Artificial Sequence
  Description of Artificial Sequence: Synthetic oligonucleotide
  Antisense strand to SEQ ID NO: 1049002
uucaucauugugcuaagcu

SEQ ID NO: 1049004 - RNA, 19 nt, Artificial Sequence
  Description of Artificial Sequence: Synthetic oligonucleotide
  Sense strand starting at position 270 of SEQ ID NO: 915039
agcaguaacccuggguaca

SEQ ID NO: 1049005 - RNA, 19 nt, Artificial Sequence
  Description of Artificial Sequence: Synthetic oligonucleotide
  Antisense strand to SEQ ID NO: 1049004
uguacccaggguuacugcu

SEQ ID NO: 1049006 - RNA, 19 nt, Artificial Sequence
  Description of Artificial Sequence: Synthetic oligonucleotide
  Sense strand starting at position 309 of SEQ ID NO: 915039
uaagcuuugucaccucgga

SEQ ID NO: 1049007 - RNA, 19 nt, Artificial Sequence
  Description of Artificial Sequence: Synthetic oligonucleotide
  Antisense strand to SEQ ID NO: 1049006
uccgaggugacaaagcuua

SEQ ID NO: 1049008 - RNA, 19 nt, Artificial Sequence
  Description of Artificial Sequence: Synthetic oligonucleotide
  Sense strand starting at position 324 of SEQ ID NO: 915039
cggacaagucauuauaccu

SEQ ID NO: 1049009 - RNA, 19 nt, Artificial Sequence
  Description of Artificial Sequence: Synthetic oligonucleotide
  Antisense strand to SEQ ID NO: 1049008
agguauaaugacuuguccg

SEQ ID NO: 1049010 - RNA, 19 nt, Artificial Sequence
  Description of Artificial Sequence: Synthetic oligonucleotide
  Sense strand starting at position 358 of SEQ ID NO: 915039
cagcuuccagaguaguuaa

SEQ ID NO: 1049011 - RNA, 19 nt, Artificial Sequence
  Description of Artificial Sequence: Synthetic oligonucleotide
  Antisense strand to SEQ ID NO: 1049010
uuaacuacucuggaagcug

SEQ ID NO: 1049012 - RNA, 19 nt, Artificial Sequence
  Description of Artificial Sequence: Synthetic oligonucleotide
  Sense strand starting at position 361 of SEQ ID NO: 915039
cuuccagaguaguuaaaug

SEQ ID NO: 1049013 - RNA, 19 nt, Artificial Sequence
  Description of Artificial Sequence: Synthetic oligonucleotide
  Antisense strand to SEQ ID NO: 1049012
cauuuaacuacucuggaag

SEQ ID NO: 1049014 - RNA, 19 nt, Artificial Sequence
  Description of Artificial Sequence: Synthetic oligonucleotide
  Sense strand starting at position 394 of SEQ ID NO: 915039
ucuaucucagguuauuaga

SEQ ID NO: 1049015 - RNA, 19 nt, Artificial Sequence
  Description of Artificial Sequence: Synthetic oligonucleotide
  Antisense strand to SEQ ID NO: 1049014
ucuaauaaccugagauaga

SEQ ID NO: 1049016 - RNA, 19 nt, Artificial Sequence
  Description of Artificial Sequence: Synthetic oligonucleotide
  Sense strand starting at position 473 of SEQ ID NO: 915039
auuagucauuuagagguau

SEQ ID NO: 1049017 - RNA, 19 nt, Artificial Sequence
  Description of Artificial Sequence: Synthetic oligonucleotide
  Antisense strand to SEQ ID NO: 1049016
auaccucuaaaugacuaau

SEQ ID NO: 1049018 - RNA, 19 nt, Artificial Sequence
  Description of Artificial Sequence: Synthetic oligonucleotide
  Sense strand starting at position 485 of SEQ ID NO: 915039
gagguauaguuacuauuac

SEQ ID NO: 1049019 - RNA, 19 nt, Artificial Sequence
  Description of Artificial Sequence: Synthetic oligonucleotide
  Antisense strand to SEQ ID NO: 1049018
guaauaguaacuauaccuc

SEQ ID NO: 1049020 - RNA, 19 nt, Artificial Sequence
  Description of Artificial Sequence: Synthetic oligonucleotide
  Sense strand starting at position 493 of SEQ ID NO: 915039
guuacuauuacaggaaggu

SEQ ID NO: 1049021 - RNA, 19 nt, Artificial Sequence
  Description of Artificial Sequence: Synthetic oligonucleotide
  Antisense strand to SEQ ID NO: 1049020
accuuccuguaauaguaac

SEQ ID NO: 1049022 - RNA, 19 nt, Artificial Sequence
  Description of Artificial Sequence: Synthetic oligonucleotide
  Sense strand starting at position 502 of SEQ ID NO: 915039
acaggaagguaguaacuua

SEQ ID NO: 1049023 - RNA, 19 nt, Artificial Sequence
  Description of Artificial Sequence: Synthetic oligonucleotide
  Antisense strand to SEQ ID NO: 1049022
uaaguuacuaccuuccugu

SEQ ID NO: 1049024 - RNA, 19 nt, Artificial Sequence
  Description of Artificial Sequence: Synthetic oligonucleotide
  Sense strand starting at position 509 of SEQ ID NO: 915039
gguaguaacuuagaaagac

SEQ ID NO: 1049025 - RNA, 19 nt, Artificial Sequence
  Description of Artificial Sequence: Synthetic oligonucleotide
  Antisense strand to SEQ ID NO: 1049024
gucuuucuaaguuacuacc

SEQ ID NO: 1049026 - RNA, 19 nt, Artificial Sequence
  Description of Artificial Sequence: Synthetic oligonucleotide
  Sense strand starting at position 564 of SEQ ID NO: 915039
guauauuucuaagguaaga

SEQ ID NO: 1049027 - RNA, 19 nt, Artificial Sequence
  Description of Artificial Sequence: Synthetic oligonucleotide
  Antisense strand to SEQ ID NO: 1049026
ucuuaccuuagaaauauac

SEQ ID NO: 1049028 - RNA, 19 nt, Artificial Sequence
  Description of Artificial Sequence: Synthetic oligonucleotide
  Sense strand starting at position 569 of SEQ ID NO: 915039
uuucuaagguaagagaauu

SEQ ID NO: 1049029 - RNA, 19 nt, Artificial Sequence
  Description of Artificial Sequence: Synthetic oligonucleotide
  Antisense strand to SEQ ID NO: 1049028
aauucucuuaccuuagaaa

SEQ ID NO: 1049030 - RNA, 19 nt, Artificial Sequence
  Description of Artificial Sequence: Synthetic oligonucleotide
  Sense strand starting at position 701 of SEQ ID NO: 915039
cccgacgauuccuccgaga

SEQ ID NO: 1049031 - RNA, 19 nt, Artificial Sequence
  Description of Artificial Sequence: Synthetic oligonucleotide
  Antisense strand to SEQ ID NO: 1049030
ucucggaggaaucgucggg

SEQ ID NO: 1049032 - RNA, 19 nt, Artificial Sequence
  Description of Artificial Sequence: Synthetic oligonucleotide
  Sense strand starting at position 703 of SEQ ID NO: 915039
cgacgauuccuccgagaac

SEQ ID NO: 1049033 - RNA, 19 nt, Artificial Sequence
  Description of Artificial Sequence: Synthetic oligonucleotide
  Antisense strand to SEQ ID NO: 1049032
guucucggaggaaucgucg

SEQ ID NO: 1049034 - RNA, 19 nt, Artificial Sequence
  Description of Artificial Sequence: Synthetic oligonucleotide
  Sense strand starting at position 706 of SEQ ID NO: 915039
cgauuccuccgagaacaua

SEQ ID NO: 1049035 - RNA, 19 nt, Artificial Sequence
  Description of Artificial Sequence: Synthetic oligonucleotide
  Antisense strand to SEQ ID NO: 1049034
uauguucucggaggaaucg

SEQ ID NO: 1049036 - RNA, 19 nt, Artificial Sequence
  Description of Artificial Sequence: Synthetic oligonucleotide
  Sense strand starting at position 714 of SEQ ID NO: 915039
ccgagaacauaaugaaaug

SEQ ID NO: 1049037 - RNA, 19 nt, Artificial Sequence
  Description of Artificial Sequence: Synthetic oligonucleotide
  Antisense strand to SEQ ID NO: 1049036
cauuucauuauguucucgg

SEQ ID NO: 1049038 - RNA, 19 nt, Artificial Sequence
  Description of Artificial Sequence: Synthetic oligonucleotide
  Sense strand starting at position 787 of SEQ ID NO: 915039
cacguuagggucuaaaggu

SEQ ID NO: 1049039 - RNA, 19 nt, Artificial Sequence
  Description of Artificial Sequence: Synthetic oligonucleotide
  Antisense strand to SEQ ID NO: 1049038
accuuuagacccuaacgug

SEQ ID NO: 1049040 - RNA, 19 nt, Artificial Sequence
  Description of Artificial Sequence: Synthetic oligonucleotide
  Sense strand starting at position 887 of SEQ ID NO: 915039
uggaaagucuuaucaugac

SEQ ID NO: 1049041 - RNA, 19 nt, Artificial Sequence
  Description of Artificial Sequence: Synthetic oligonucleotide
  Antisense strand to SEQ ID NO: 1049040
gucaugauaagacuuucca

SEQ ID NO: 1049042 - RNA, 19 nt, Artificial Sequence
  Description of Artificial Sequence: Synthetic oligonucleotide
  Sense strand starting at position 1157 of SEQ ID NO: 915039
gugaguaacuagucuaagg

SEQ ID NO: 1049043 - RNA, 19 nt, Artificial Sequence
  Description of Artificial Sequence: Synthetic oligonucleotide
  Antisense strand to SEQ ID NO: 1049042
ccuuagacuaguuacucac

SEQ ID NO: 1049044 - RNA, 19 nt, Artificial Sequence
  Description of Artificial Sequence: Synthetic oligonucleotide
  Sense strand starting at position 2401 of SEQ ID NO: 915039
ucgcgcuacuccuugagaa

SEQ ID NO: 1049045 - RNA, 19 nt, Artificial Sequence
  Description of Artificial Sequence: Synthetic oligonucleotide
  Antisense strand to SEQ ID NO: 1049044
uucucaaggaguagcgcga

SEQ ID NO: 1049046 - RNA, 19 nt, Artificial Sequence
  Description of Artificial Sequence: Synthetic oligonucleotide
  Sense strand starting at position 2403 of SEQ ID NO: 915039
gcgcuacuccuugagaaca

SEQ ID NO: 1049047 - RNA, 19 nt, Artificial Sequence
  Description of Artificial Sequence: Synthetic oligonucleotide
  Antisense strand to SEQ ID NO: 1049046
uguucucaaggaguagcgc

SEQ ID NO: 1049048 - RNA, 19 nt, Artificial Sequence
  Description of Artificial Sequence: Synthetic oligonucleotide
  Sense strand starting at position 2520 of SEQ ID NO: 915039
gagaacacuuccucugcga

SEQ ID NO: 1049049 - RNA, 19 nt, Artificial Sequence
  Description of Artificial Sequence: Synthetic oligonucleotide
  Antisense strand to SEQ ID NO: 1049048
ucgcagaggaaguguucuc

SEQ ID NO: 1049050 - RNA, 19 nt, Artificial Sequence
  Description of Artificial Sequence: Synthetic oligonucleotide
  Sense strand starting at position 2522 of SEQ ID NO: 915039
gaacacuuccucugcgaag

SEQ ID NO: 1049051 - RNA, 19 nt, Artificial Sequence
  Description of Artificial Sequence: Synthetic oligonucleotide
  Antisense strand to SEQ ID NO: 1049050
cuucgcagaggaaguguuc

SEQ ID NO: 1049052 - RNA, 19 nt, Artificial Sequence
  Description of Artificial Sequence: Synthetic oligonucleotide
  Sense strand starting at position 3011 of SEQ ID NO: 915039
uuagcaaguuauuccugua

SEQ ID NO: 1049053 - RNA, 19 nt, Artificial Sequence
  Description of Artificial Sequence: Synthetic oligonucleotide
  Antisense strand to SEQ ID NO: 1049052
uacaggaauaacuugcuaa

SEQ ID NO: 1049054 - RNA, 19 nt, Artificial Sequence
  Description of Artificial Sequence: Synthetic oligonucleotide
  Sense strand starting at position 3016 of SEQ ID NO: 915039
aaguuauuccuguaauggg

SEQ ID NO: 1049055 - RNA, 19 nt, Artificial Sequence
  Description of Artificial Sequence: Synthetic oligonucleotide
  Antisense strand to SEQ ID NO: 1049054
cccauuacaggaauaacuu

SEQ ID NO: 1049056 - RNA, 19 nt, Artificial Sequence
  Description of Artificial Sequence: Synthetic oligonucleotide
  Sense strand starting at position 3056 of SEQ ID NO: 915039
ggcuccugguugagggauu

SEQ ID NO: 1049057 - RNA, 19 nt, Artificial Sequence
  Description of Artificial Sequence: Synthetic oligonucleotide
  Antisense strand to SEQ ID NO: 1049056
aaucccucaaccaggagcc

SEQ ID NO: 1049058 - RNA, 19 nt, Artificial Sequence
  Description of Artificial Sequence: Synthetic oligonucleotide
  Sense strand starting at position 3076 of SEQ ID NO: 915039
agaacauagcgucgguuau

SEQ ID NO: 1049059 - RNA, 19 nt, Artificial Sequence
  Description of Artificial Sequence: Synthetic oligonucleotide
  Antisense strand to SEQ ID NO: 1049058
auaaccgacgcuauguucu

SEQ ID NO: 1049060 - RNA, 19 nt, Artificial Sequence
  Description of Artificial Sequence: Synthetic oligonucleotide
  Sense strand starting at position 3077 of SEQ ID NO: 915039
gaacauagcgucgguuaua

SEQ ID NO: 1049061 - RNA, 19 nt, Artificial Sequence
  Description of Artificial Sequence: Synthetic oligonucleotide
  Antisense strand to SEQ ID NO: 1049060
uauaaccgacgcuauguuc

SEQ ID NO: 1049062 - RNA, 19 nt, Artificial Sequence
  Description of Artificial Sequence: Synthetic oligonucleotide
  Sense strand starting at position 3078 of SEQ ID NO: 915039
aacauagcgucgguuauaa

SEQ ID NO: 1049063 - RNA, 19 nt, Artificial Sequence
  Description of Artificial Sequence: Synthetic oligonucleotide
  Antisense strand to SEQ ID NO: 1049062
uuauaaccgacgcuauguu

SEQ ID NO: 1049064 - RNA, 19 nt, Artificial Sequence
  Description of Artificial Sequence: Synthetic oligonucleotide
  Sense strand starting at position 3080 of SEQ ID NO: 915039
cauagcgucgguuauaaac

SEQ ID NO: 1049065 - RNA, 19 nt, Artificial Sequence
  Description of Artificial Sequence: Synthetic oligonucleotide
  Antisense strand to SEQ ID NO: 1049064
guuuauaaccgacgcuaug

SEQ ID NO: 1049066 - RNA, 19 nt, Artificial Sequence
  Description of Artificial Sequence: Synthetic oligonucleotide
  Sense strand starting at position 3091 of SEQ ID NO: 915039
uuauaaaccucagagguaa

SEQ ID NO: 1049067 - RNA, 19 nt, Artificial Sequence
  Description of Artificial Sequence: Synthetic oligonucleotide
  Antisense strand to SEQ ID NO: 1049066
uuaccucugagguuuauaa

SEQ ID NO: 1049068 - RNA, 19 nt, Artificial Sequence
  Description of Artificial Sequence: Synthetic oligonucleotide
  Sense strand starting at position 3965 of SEQ ID NO: 915039
augcuuuaugcuuugcgga

SEQ ID NO: 1049069 - RNA, 19 nt, Artificial Sequence
  Description of Artificial Sequence: Synthetic oligonucleotide
  Antisense strand to SEQ ID NO: 1049068
uccgcaaagcauaaagcau

SEQ ID NO: 1049070 - RNA, 19 nt, Artificial Sequence
  Description of Artificial Sequence: Synthetic oligonucleotide
  Sense strand starting at position 3970 of SEQ ID NO: 915039
uuaugcuuugcggaagcau

SEQ ID NO: 1049071 - RNA, 19 nt, Artificial Sequence
  Description of Artificial Sequence: Synthetic oligonucleotide
  Antisense strand to SEQ ID NO: 1049070
augcuuccgcaaagcauaa

SEQ ID NO: 1049072 - RNA, 19 nt, Artificial Sequence
  Description of Artificial Sequence: Synthetic oligonucleotide
  Sense strand starting at position 249 of SEQ ID NO: 915040
agaggagcagauuggucau

SEQ ID NO: 1049073 - RNA, 19 nt, Artificial Sequence
  Description of Artificial Sequence: Synthetic oligonucleotide
  Antisense strand to SEQ ID NO: 1049072
augaccaaucugcuccucu

SEQ ID NO: 1049074 - RNA, 19 nt, Artificial Sequence
  Description of Artificial Sequence: Synthetic oligonucleotide
  Sense strand starting at position 324 of SEQ ID NO: 915040
augacugugucaguacaau

SEQ ID NO: 1049075 - RNA, 19 nt, Artificial Sequence
  Description of Artificial Sequence: Synthetic oligonucleotide
  Antisense strand to SEQ ID NO: 1049074
auuguacugacacagucau

SEQ ID NO: 1049076 - RNA, 19 nt, Artificial Sequence
  Description of Artificial Sequence: Synthetic oligonucleotide
  Sense strand starting at position 335 of SEQ ID NO: 915040
aguacaaucaugggugaca

SEQ ID NO: 1049077 - RNA, 19 nt, Artificial Sequence
  Description of Artificial Sequence: Synthetic oligonucleotide
  Antisense strand to SEQ ID NO: 1049076
ugucacccaugauuguacu

SEQ ID NO: 1049078 - RNA, 19 nt, Artificial Sequence
  Description of Artificial Sequence: Synthetic oligonucleotide
  Sense strand starting at position 336 of SEQ ID NO: 915040
guacaaucaugggugacaa

SEQ ID NO: 1049079 - RNA, 19 nt, Artificial Sequence
  Description of Artificial Sequence: Synthetic oligonucleotide
  Antisense strand to SEQ ID NO: 1049078
uugucacccaugauuguac

SEQ ID NO: 1049080 - RNA, 19 nt, Artificial Sequence
  Description of Artificial Sequence: Synthetic oligonucleotide
  Sense strand starting at position 604 of SEQ ID NO: 915040
ggagguuguagucaucuga

SEQ ID NO: 1049081 - RNA, 19 nt, Artificial Sequence
  Description of Artificial Sequence: Synthetic oligonucleotide
  Antisense strand to SEQ ID NO: 1049080
ucagaugacuacaaccucc

SEQ ID NO: 1049082 - RNA, 19 nt, Artificial Sequence
  Description of Artificial Sequence: Synthetic oligonucleotide
  Sense strand starting at position 720 of SEQ ID NO: 915040
agucaaacaccuuguuuau

SEQ ID NO: 1049083 - RNA, 19 nt, Artificial Sequence
  Description of Artificial Sequence: Synthetic oligonucleotide
  Antisense strand to SEQ ID NO: 1049082
auaaacaagguguuugacu

SEQ ID NO: 1049084 - RNA, 19 nt, Artificial Sequence
  Description of Artificial Sequence: Synthetic oligonucleotide
  Sense strand starting at position 817 of SEQ ID NO: 915040
augagccacuguucuaaau

SEQ ID NO: 1049085 - RNA, 19 nt, Artificial Sequence
  Description of Artificial Sequence: Synthetic oligonucleotide
  Antisense strand to SEQ ID NO: 1049084
auuuagaacaguggcucau

SEQ ID NO: 1049086 - RNA, 19 nt, Artificial Sequence
  Description of Artificial Sequence: Synthetic oligonucleotide
  Sense strand starting at position 1066 of SEQ ID NO: 915040
aaaggcaugguuugaacaa

SEQ ID NO: 1049087 - RNA, 19 nt, Artificial Sequence
  Description of Artificial Sequence: Synthetic oligonucleotide
  Antisense strand to SEQ ID NO: 1049086
uuguucaaaccaugccuuu

SEQ ID NO: 1049088 - RNA, 19 nt, Artificial Sequence
  Description of Artificial Sequence: Synthetic oligonucleotide
  Sense strand starting at position 1254 of SEQ ID NO: 915040
cagguaauacccuggaauc

SEQ ID NO: 1049089 - RNA, 19 nt, Artificial Sequence
  Description of Artificial Sequence: Synthetic oligonucleotide
  Antisense strand to SEQ ID NO: 1049088
gauuccaggguauuaccug

SEQ ID NO: 1049090 - RNA, 19 nt, Artificial Sequence
  Description of Artificial Sequence: Synthetic oligonucleotide
  Sense strand starting at position 1255 of SEQ ID NO: 915040
agguaauacccuggaauca

SEQ ID NO: 1049091 - RNA, 19 nt, Artificial Sequence
  Description of Artificial Sequence: Synthetic oligonucleotide
  Antisense strand to SEQ ID NO: 1049090
ugauuccaggguauuaccu

SEQ ID NO: 1049092 - RNA, 19 nt, Artificial Sequence
  Description of Artificial Sequence: Synthetic oligonucleotide
  Sense strand starting at position 2087 of SEQ ID NO: 915040
gagcuaaugcccuaagguu

SEQ ID NO: 1049093 - RNA, 19 nt, Artificial Sequence
  Description of Artificial Sequence: Synthetic oligonucleotide
  Antisense strand to SEQ ID NO: 1049092
aaccuuagggcauuagcuc

SEQ ID NO: 1049094 - RNA, 19 nt, Artificial Sequence
  Description of Artificial Sequence: Synthetic oligonucleotide
  Sense strand starting at position 2107 of SEQ ID NO: 915040
uagagauuaucgcugaaag

SEQ ID NO: 1049095 - RNA, 19 nt, Artificial Sequence
  Description of Artificial Sequence: Synthetic oligonucleotide
  Antisense strand to SEQ ID NO: 1049094
cuuucagcgauaaucucua

SEQ ID NO: 1049096 - RNA, 19 nt, Artificial Sequence
  Description of Artificial Sequence: Synthetic oligonucleotide
  Sense strand starting at position 2108 of SEQ ID NO: 915040
agagauuaucgcugaaaga

SEQ ID NO: 1049097 - RNA, 19 nt, Artificial Sequence
  Description of Artificial Sequence: Synthetic oligonucleotide
  Antisense strand to SEQ ID NO: 1049096
ucuuucagcgauaaucucu

SEQ ID NO: 1049098 - RNA, 19 nt, Artificial Sequence
  Description of Artificial Sequence: Synthetic oligonucleotide
  Sense strand starting at position 2270 of SEQ ID NO: 915040
uuaacaggauucgcuugaa

SEQ ID NO: 1049099 - RNA, 19 nt, Artificial Sequence
  Description of Artificial Sequence: Synthetic oligonucleotide
  Antisense strand to SEQ ID NO: 1049098
uucaagcgaauccuguuaa

SEQ ID NO: 1049100 - RNA, 19 nt, Artificial Sequence
  Description of Artificial Sequence: Synthetic oligonucleotide
  Sense strand starting at position 2273 of SEQ ID NO: 915040
acaggauucgcuugaagag

SEQ ID NO: 1049101 - RNA, 19 nt, Artificial Sequence
  Description of Artificial Sequence: Synthetic oligonucleotide
  Antisense strand to SEQ ID NO: 1049100
cucuucaagcgaauccugu

SEQ ID NO: 1049102 - RNA, 19 nt, Artificial Sequence
  Description of Artificial Sequence: Synthetic oligonucleotide
  Sense strand starting at position 2308 of SEQ ID NO: 915040
cugaguacuccgcagagaa

SEQ ID NO: 1049103 - RNA, 19 nt, Artificial Sequence
  Description of Artificial Sequence: Synthetic oligonucleotide
  Antisense strand to SEQ ID NO: 1049102
uucucugcggaguacucag

SEQ ID NO: 1049104 - RNA, 19 nt, Artificial Sequence
  Description of Artificial Sequence: Synthetic oligonucleotide
  Sense strand starting at position 2363 of SEQ ID NO: 915040
ugugguaucagacagcuaa

SEQ ID NO: 1049105 - RNA, 19 nt, Artificial Sequence
  Description of Artificial Sequence: Synthetic oligonucleotide
  Antisense strand to SEQ ID NO: 1049104
uuagcugucugauaccaca

SEQ ID NO: 1049106 - RNA, 19 nt, Artificial Sequence
  Description of Artificial Sequence: Synthetic oligonucleotide
  Sense strand starting at position 2405 of SEQ ID NO: 915040
aucaguuugccugacagag

SEQ ID NO: 1049107 - RNA, 19 nt, Artificial Sequence
  Description of Artificial Sequence: Synthetic oligonucleotide
  Antisense strand to SEQ ID NO: 1049106
cucugucaggcaaacugau

SEQ ID NO: 1049108 - RNA, 19 nt, Artificial Sequence
  Description of Artificial Sequence: Synthetic oligonucleotide
  Sense strand starting at position 2446 of SEQ ID NO: 915040
uggcuuccuggagaaagua

SEQ ID NO: 1049109 - RNA, 19 nt, Artificial Sequence
  Description of Artificial Sequence: Synthetic oligonucleotide
  Antisense strand to SEQ ID NO: 1049108
uacuuucuccaggaagcca

SEQ ID NO: 1049110 - RNA, 19 nt, Artificial Sequence
  Description of Artificial Sequence: Synthetic oligonucleotide
  Sense strand starting at position 2459 of SEQ ID NO: 915040
aaaguaguccucugacagg

SEQ ID NO: 1049111 - RNA, 19 nt, Artificial Sequence
  Description of Artificial Sequence: Synthetic oligonucleotide
  Antisense strand to SEQ ID NO: 1049110
ccugucagaggacuacuuu

SEQ ID NO: 1049112 - RNA, 19 nt, Artificial Sequence
  Description of Artificial Sequence: Synthetic oligonucleotide
  Sense strand starting at position 2567 of SEQ ID NO: 915040
gccagaauccuccaagucu

SEQ ID NO: 1049113 - RNA, 19 nt, Artificial Sequence
  Description of Artificial Sequence: Synthetic oligonucleotide
  Antisense strand to SEQ ID NO: 1049112
agacuuggaggauucuggc

SEQ ID NO: 1049114 - RNA, 19 nt, Artificial Sequence
  Description of Artificial Sequence: Synthetic oligonucleotide
  Sense strand starting at position 2622 of SEQ ID NO: 915040
uuuguuugaccuggaaaca

SEQ ID NO: 1049115 - RNA, 19 nt, Artificial Sequence
  Description of Artificial Sequence: Synthetic oligonucleotide
  Antisense strand to SEQ ID NO: 1049114
uguuuccaggucaaacaaa

SEQ ID NO: 1049116 - RNA, 19 nt, Artificial Sequence
  Description of Artificial Sequence: Synthetic oligonucleotide
  Sense strand starting at position 2692 of SEQ ID NO: 915040
cucaaugacggucauuaaa

SEQ ID NO: 1049117 - RNA, 19 nt, Artificial Sequence
  Description of Artificial Sequence: Synthetic oligonucleotide
  Antisense strand to SEQ ID NO: 1049116
uuuaaugaccgucauugag

SEQ ID NO: 1049118 - RNA, 19 nt, Artificial Sequence
  Description of Artificial Sequence: Synthetic oligonucleotide
  Sense strand starting at position 2938 of SEQ ID NO: 915040
gagagaacuuacgcacaga

SEQ ID NO: 1049119 - RNA, 19 nt, Artificial Sequence
  Description of Artificial Sequence: Synthetic oligonucleotide
  Antisense strand to SEQ ID NO: 1049118
ucugugcguaaguucucuc

SEQ ID NO: 1049120 - RNA, 19 nt, Artificial Sequence
  Description of Artificial Sequence: Synthetic oligonucleotide
  Sense strand starting at position 2980 of SEQ ID NO: 915040
auacacauucccuaagugu

SEQ ID NO: 1049121 - RNA, 19 nt, Artificial Sequence
  Description of Artificial Sequence: Synthetic oligonucleotide
  Antisense strand to SEQ ID NO: 1049120
acacuuagggaauguguau

SEQ ID NO: 1049122 - RNA, 19 nt, Artificial Sequence
  Description of Artificial Sequence: Synthetic oligonucleotide
  Sense strand starting at position 2986 of SEQ ID NO: 915040
auucccuaagugugagauu

SEQ ID NO: 1049123 - RNA, 19 nt, Artificial Sequence
  Description of Artificial Sequence: Synthetic oligonucleotide
  Antisense strand to SEQ ID NO: 1049122
aaucucacacuuagggaau

SEQ ID NO: 1049124 - RNA, 19 nt, Artificial Sequence
  Description of Artificial Sequence: Synthetic oligonucleotide
  Sense strand starting at position 2989 of SEQ ID NO: 915040
cccuaagugugagauuuaa

SEQ ID NO: 1049125 - RNA, 19 nt, Artificial Sequence
  Description of Artificial Sequence: Synthetic oligonucleotide
  Antisense strand to SEQ ID NO: 1049124
uuaaaucucacacuuaggg

SEQ ID NO: 1049126 - RNA, 19 nt, Artificial Sequence
  Description of Artificial Sequence: Synthetic oligonucleotide
  Sense strand starting at position 3085 of SEQ ID NO: 915040
gagcucaugcuuuagagau

SEQ ID NO: 1049127 - RNA, 19 nt, Artificial Sequence
  Description of Artificial Sequence: Synthetic oligonucleotide
  Antisense strand to SEQ ID NO: 1049126
aucucuaaagcaugagcuc

SEQ ID NO: 1049128 - RNA, 19 nt, Artificial Sequence
  Description of Artificial Sequence: Synthetic oligonucleotide
  Sense strand starting at position 3091 of SEQ ID NO: 915040
augcuuuagagauggagac

SEQ ID NO: 1049129 - RNA, 19 nt, Artificial Sequence
  Description of Artificial Sequence: Synthetic oligonucleotide
  Antisense strand to SEQ ID NO: 1049128
gucuccaucucuaaagcau

SEQ ID NO: 1049130 - RNA, 19 nt, Artificial Sequence
  Description of Artificial Sequence: Synthetic oligonucleotide
  Sense strand starting at position 3092 of SEQ ID NO: 915040
ugcuuuagagauggagaca

SEQ ID NO: 1049131 - RNA, 19 nt, Artificial Sequence
  Description of Artificial Sequence: Synthetic oligonucleotide
  Antisense strand to SEQ ID NO: 1049130
ugucuccaucucuaaagca

SEQ ID NO: 1049132 - RNA, 19 nt, Artificial Sequence
  Description of Artificial Sequence: Synthetic oligonucleotide
  Sense strand starting at position 3152 of SEQ ID NO: 915040
cacauagauguaugaguug

SEQ ID NO: 1049133 - RNA, 19 nt, Artificial Sequence
  Description of Artificial Sequence: Synthetic oligonucleotide
  Antisense strand to SEQ ID NO: 1049132
caacucauacaucuaugug

SEQ ID NO: 1049134 - RNA, 19 nt, Artificial Sequence
  Description of Artificial Sequence: Synthetic oligonucleotide
  Sense strand starting at position 3161 of SEQ ID NO: 915040
guaugaguugucugcauuu

SEQ ID NO: 1049135 - RNA, 19 nt, Artificial Sequence
  Description of Artificial Sequence: Synthetic oligonucleotide
  Antisense strand to SEQ ID NO: 1049134
aaaugcagacaacucauac

SEQ ID NO: 1049136 - RNA, 19 nt, Artificial Sequence
  Description of Artificial Sequence: Synthetic oligonucleotide
  Sense strand starting at position 3163 of SEQ ID NO: 915040
augaguugucugcauuugu

SEQ ID NO: 1049137 - RNA, 19 nt, Artificial Sequence
  Description of Artificial Sequence: Synthetic oligonucleotide
  Antisense strand to SEQ ID NO: 1049136
acaaaugcagacaacucau

SEQ ID NO: 1049138 - RNA, 19 nt, Artificial Sequence
  Description of Artificial Sequence: Synthetic oligonucleotide
  Sense strand starting at position 3658 of SEQ ID NO: 915040
cuugauguuggagguggaa

SEQ ID NO: 1049139 - RNA, 19 nt, Artificial Sequence
  Description of Artificial Sequence: Synthetic oligonucleotide
  Antisense strand to SEQ ID NO: 1049138
uuccaccuccaacaucaag

SEQ ID NO: 1049140 - RNA, 19 nt, Artificial Sequence
  Description of Artificial Sequence: Synthetic oligonucleotide
  Sense strand starting at position 3671 of SEQ ID NO: 915040
guggaaccuagugagaagu

SEQ ID NO: 1049141 - RNA, 19 nt, Artificial Sequence
  Description of Artificial Sequence: Synthetic oligonucleotide
  Antisense strand to SEQ ID NO: 1049140
acuucucacuagguuccac

SEQ ID NO: 1049142 - RNA, 19 nt, Artificial Sequence
  Description of Artificial Sequence: Synthetic oligonucleotide
  Sense strand starting at position 3681 of SEQ ID NO: 915040
gugagaaguguuuggauca

SEQ ID NO: 1049143 - RNA, 19 nt, Artificial Sequence
  Description of Artificial Sequence: Synthetic oligonucleotide
  Antisense strand to SEQ ID NO: 1049142
ugauccaaacacuucucac

SEQ ID NO: 1049144 - RNA, 19 nt, Artificial Sequence
  Description of Artificial Sequence: Synthetic oligonucleotide
  Sense strand starting at position 3873 of SEQ ID NO: 915040
auuauuuacuuugagugga

SEQ ID NO: 1049145 - RNA, 19 nt, Artificial Sequence
  Description of Artificial Sequence: Synthetic oligonucleotide
  Antisense strand to SEQ ID NO: 1049144
uccacucaaaguaaauaau

SEQ ID NO: 1049146 - RNA, 19 nt, Artificial Sequence
  Description of Artificial Sequence: Synthetic oligonucleotide
  Sense strand starting at position 3877 of SEQ ID NO: 915040
uuuacuuugaguggaagca

SEQ ID NO: 1049147 - RNA, 19 nt, Artificial Sequence
  Description of Artificial Sequence: Synthetic oligonucleotide
  Antisense strand to SEQ ID NO: 1049146
ugcuuccacucaaaguaaa

SEQ ID NO: 1049148 - RNA, 19 nt, Artificial Sequence
  Description of Artificial Sequence: Synthetic oligonucleotide
  Sense strand starting at position 3925 of SEQ ID NO: 915040
ugcagaacugugcaaauaa

SEQ ID NO: 1049149 - RNA, 19 nt, Artificial Sequence
  Description of Artificial Sequence: Synthetic oligonucleotide
  Antisense strand to SEQ ID NO: 1049148
uuauuugcacaguucugca

SEQ ID NO: 1049150 - RNA, 19 nt, Artificial Sequence
  Description of Artificial Sequence: Synthetic oligonucleotide
  Sense strand starting at position 3945 of SEQ ID NO: 915040
ugaauacacuucuuaucga

SEQ ID NO: 1049151 - RNA, 19 nt, Artificial Sequence
  Description of Artificial Sequence: Synthetic oligonucleotide
  Antisense strand to SEQ ID NO: 1049150
ucgauaagaaguguauuca

SEQ ID NO: 1049152 - RNA, 19 nt, Artificial Sequence
  Description of Artificial Sequence: Synthetic oligonucleotide
  Sense strand starting at position 166 of SEQ ID NO: 915041
ugaauaauuccaugaugua

SEQ ID NO: 1049153 - RNA, 19 nt, Artificial Sequence
  Description of Artificial Sequence: Synthetic oligonucleotide
  Antisense strand to SEQ ID NO: 1049152
uacaucauggaauuauuca

SEQ ID NO: 1049154 - RNA, 19 nt, Artificial Sequence
  Description of Artificial Sequence: Synthetic oligonucleotide
  Sense strand starting at position 179 of SEQ ID NO: 915041
gauguaauguguccaacug

SEQ ID NO: 1049155 - RNA, 19 nt, Artificial Sequence
  Description of Artificial Sequence: Synthetic oligonucleotide
  Antisense strand to SEQ ID NO: 1049154
caguuggacacauuacauc

SEQ ID NO: 1049156 - RNA, 19 nt, Artificial Sequence
  Description of Artificial Sequence: Synthetic oligonucleotide
  Sense strand starting at position 221 of SEQ ID NO: 915041
uauugaagccuuuguacag

SEQ ID NO: 1049157 - RNA, 19 nt, Artificial Sequence
  Description of Artificial Sequence: Synthetic oligonucleotide
  Antisense strand to SEQ ID NO: 1049156
cuguacaaaggcuucaaua

SEQ ID NO: 1049158 - RNA, 19 nt, Artificial Sequence
  Description of Artificial Sequence: Synthetic oligonucleotide
  Sense strand starting at position 222 of SEQ ID NO: 915041
auugaagccuuuguacaga

SEQ ID NO: 1049159 - RNA, 19 nt, Artificial Sequence
  Description of Artificial Sequence: Synthetic oligonucleotide
  Antisense strand to SEQ ID NO: 1049158
ucuguacaaaggcuucaau

SEQ ID NO: 1049160 - RNA, 19 nt, Artificial Sequence
  Description of Artificial Sequence: Synthetic oligonucleotide
  Sense strand starting at position 538 of SEQ ID NO: 915041
ugugauuaccuacaguaaa

SEQ ID NO: 1049161 - RNA, 19 nt, Artificial Sequence
  Description of Artificial Sequence: Synthetic oligonucleotide
  Antisense strand to SEQ ID NO: 1049160
uuuacuguagguaaucaca

SEQ ID NO: 1049162 - RNA, 19 nt, Artificial Sequence
  Description of Artificial Sequence: Synthetic oligonucleotide
  Sense strand starting at position 614 of SEQ ID NO: 915041
guaacaugcuacuuagaug

SEQ ID NO: 1049163 - RNA, 19 nt, Artificial Sequence
  Description of Artificial Sequence: Synthetic oligonucleotide
  Antisense strand to SEQ ID NO: 1049162
caucuaaguagcauguuac

SEQ ID NO: 1049164 - RNA, 19 nt, Artificial Sequence
  Description of Artificial Sequence: Synthetic oligonucleotide
  Sense strand starting at position 638 of SEQ ID NO: 915041
gugacaugcuacuuagaaa

SEQ ID NO: 1049165 - RNA, 19 nt, Artificial Sequence
  Description of Artificial Sequence: Synthetic oligonucleotide
  Antisense strand to SEQ ID NO: 1049164
uuucuaaguagcaugucac

SEQ ID NO: 1049166 - RNA, 19 nt, Artificial Sequence
  Description of Artificial Sequence: Synthetic oligonucleotide
  Sense strand starting at position 660 of SEQ ID NO: 915041
ugguaccuacugcauuaua

SEQ ID NO: 1049167 - RNA, 19 nt, Artificial Sequence
  Description of Artificial Sequence: Synthetic oligonucleotide
  Antisense strand to SEQ ID NO: 1049166
uauaaugcaguagguacca

SEQ ID NO: 1049168 - RNA, 19 nt, Artificial Sequence
  Description of Artificial Sequence: Synthetic oligonucleotide
  Sense strand starting at position 799 of SEQ ID NO: 915041
uuuauacguaaaggagaaa

SEQ ID NO: 1049169 - RNA, 19 nt, Artificial Sequence
  Description of Artificial Sequence: Synthetic oligonucleotide
  Antisense strand to SEQ ID NO: 1049168
uuucuccuuuacguauaaa

SEQ ID NO: 1049170 - RNA, 19 nt, Artificial Sequence
  Description of Artificial Sequence: Synthetic oligonucleotide
  Sense strand starting at position 830 of SEQ ID NO: 915041
caaauaucccgaggcagaa

SEQ ID NO: 1049171 - RNA, 19 nt, Artificial Sequence
  Description of Artificial Sequence: Synthetic oligonucleotide
  Antisense strand to SEQ ID NO: 1049170
uucugccucgggauauuug

SEQ ID NO: 1049172 - RNA, 19 nt, Artificial Sequence
  Description of Artificial Sequence: Synthetic oligonucleotide
  Sense strand starting at position 936 of SEQ ID NO: 915041
uuguguugccggccacaua

SEQ ID NO: 1049173 - RNA, 19 nt, Artificial Sequence
  Description of Artificial Sequence: Synthetic oligonucleotide
  Antisense strand to SEQ ID NO: 1049172
uauguggccggcaacacaa

SEQ ID NO: 1049174 - RNA, 19 nt, Artificial Sequence
  Description of Artificial Sequence: Synthetic oligonucleotide
  Sense strand starting at position 1059 of SEQ ID NO: 915041
cuugcauucuucuugaaga

SEQ ID NO: 1049175 - RNA, 19 nt, Artificial Sequence
  Description of Artificial Sequence: Synthetic oligonucleotide
  Antisense strand to SEQ ID NO: 1049174
ucuucaagaagaaugcaag

SEQ ID NO: 1049176 - RNA, 19 nt, Artificial Sequence
  Description of Artificial Sequence: Synthetic oligonucleotide
  Sense strand starting at position 1076 of SEQ ID NO: 915041
gaagguauuuaagagaaug

SEQ ID NO: 1049177 - RNA, 19 nt, Artificial Sequence
  Description of Artificial Sequence: Synthetic oligonucleotide
  Antisense strand to SEQ ID NO: 1049176
cauucucuuaaauaccuuc

SEQ ID NO: 1049178 - RNA, 19 nt, Artificial Sequence
  Description of Artificial Sequence: Synthetic oligonucleotide
  Sense strand starting at position 1326 of SEQ ID NO: 915041
ccaaguccugaaugugacu

SEQ ID NO: 1049179 - RNA, 19 nt, Artificial Sequence
  Description of Artificial Sequence: Synthetic oligonucleotide
  Antisense strand to SEQ ID NO: 1049178
agucacauucaggacuugg

SEQ ID NO: 1049180 - RNA, 19 nt, Artificial Sequence
  Description of Artificial Sequence: Synthetic oligonucleotide
  Sense strand starting at position 1331 of SEQ ID NO: 915041
uccugaaugugacugcuga

SEQ ID NO: 1049181 - RNA, 19 nt, Artificial Sequence
  Description of Artificial Sequence: Synthetic oligonucleotide
  Antisense strand to SEQ ID NO: 1049180
ucagcagucacauucagga

SEQ ID NO: 1049182 - RNA, 19 nt, Artificial Sequence
  Description of Artificial Sequence: Synthetic oligonucleotide
  Sense strand starting at position 1332 of SEQ ID NO: 915041
ccugaaugugacugcugaa

SEQ ID NO: 1049183 - RNA, 19 nt, Artificial Sequence
  Description of Artificial Sequence: Synthetic oligonucleotide
  Antisense strand to SEQ ID NO: 1049182
uucagcagucacauucagg

SEQ ID NO: 1049184 - RNA, 19 nt, Artificial Sequence
  Description of Artificial Sequence: Synthetic oligonucleotide
  Sense strand starting at position 1531 of SEQ ID NO: 915041
gugguuaucgagccacgca

SEQ ID NO: 1049185 - RNA, 19 nt, Artificial Sequence
  Description of Artificial Sequence: Synthetic oligonucleotide
  Antisense strand to SEQ ID NO: 1049184
ugcguggcucgauaaccac

SEQ ID NO: 1049186 - RNA, 19 nt, Artificial Sequence
  Description of Artificial Sequence: Synthetic oligonucleotide
  Sense strand starting at position 1589 of SEQ ID NO: 915041
cugcguauuggagagguga

SEQ ID NO: 1049187 - RNA, 19 nt, Artificial Sequence
  Description of Artificial Sequence: Synthetic oligonucleotide
  Antisense strand to SEQ ID NO: 1049186
ucaccucuccaauacgcag

SEQ ID NO: 1049188 - RNA, 19 nt, Artificial Sequence
  Description of Artificial Sequence: Synthetic oligonucleotide
  Sense strand starting at position 1600 of SEQ ID NO: 915041
agaggugauucuguuaucu

SEQ ID NO: 1049189 - RNA, 19 nt, Artificial Sequence
  Description of Artificial Sequence: Synthetic oligonucleotide
  Antisense strand to SEQ ID NO: 1049188
agauaacagaaucaccucu

SEQ ID NO: 1049190 - RNA, 19 nt, Artificial Sequence
  Description of Artificial Sequence: Synthetic oligonucleotide
  Sense strand starting at position 2013 of SEQ ID NO: 915041
ugaguaaugacguaagcca

SEQ ID NO: 1049191 - RNA, 19 nt, Artificial Sequence
  Description of Artificial Sequence: Synthetic oligonucleotide
  Antisense strand to SEQ ID NO: 1049190
uggcuuacgucauuacuca

SEQ ID NO: 1049192 - RNA, 19 nt, Artificial Sequence
  Description of Artificial Sequence: Synthetic oligonucleotide
  Sense strand starting at position 2144 of SEQ ID NO: 915041
uaaaguaccucggcuaaga

SEQ ID NO: 1049193 - RNA, 19 nt, Artificial Sequence
  Description of Artificial Sequence: Synthetic oligonucleotide
  Antisense strand to SEQ ID NO: 1049192
ucuuagccgagguacuuua

SEQ ID NO: 1049194 - RNA, 19 nt, Artificial Sequence
  Description of Artificial Sequence: Synthetic oligonucleotide
  Sense strand starting at position 2427 of SEQ ID NO: 915041
guauauggucgucaaauga

SEQ ID NO: 1049195 - RNA, 19 nt, Artificial Sequence
  Description of Artificial Sequence: Synthetic oligonucleotide
  Antisense strand to SEQ ID NO: 1049194
ucauuugacgaccauauac

SEQ ID NO: 1049196 - RNA, 19 nt, Artificial Sequence
  Description of Artificial Sequence: Synthetic oligonucleotide
  Sense strand starting at position 2431 of SEQ ID NO: 915041
auggucgucaaaugaaauu

SEQ ID NO: 1049197 - RNA, 19 nt, Artificial Sequence
  Description of Artificial Sequence: Synthetic oligonucleotide
  Antisense strand to SEQ ID NO: 1049196
aauuucauuugacgaccau

SEQ ID NO: 1049198 - RNA, 19 nt, Artificial Sequence
  Description of Artificial Sequence: Synthetic oligonucleotide
  Sense strand starting at position 2566 of SEQ ID NO: 915041
cuugauguuuccuccugga

SEQ ID NO: 1049199 - RNA, 19 nt, Artificial Sequence
  Description of Artificial Sequence: Synthetic oligonucleotide
  Antisense strand to SEQ ID NO: 1049198
uccaggaggaaacaucaag

SEQ ID NO: 1049200 - RNA, 19 nt, Artificial Sequence
  Description of Artificial Sequence: Synthetic oligonucleotide
  Sense strand starting at position 2763 of SEQ ID NO: 915041
ugguuaauucuagguuaag

SEQ ID NO: 1049201 - RNA, 19 nt, Artificial Sequence
  Description of Artificial Sequence: Synthetic oligonucleotide
  Antisense strand to SEQ ID NO: 1049200
cuuaaccuagaauuaacca

SEQ ID NO: 1049202 - RNA, 19 nt, Artificial Sequence
  Description of Artificial Sequence: Synthetic oligonucleotide
  Sense strand starting at position 2764 of SEQ ID NO: 915041
gguuaauucuagguuaagu

SEQ ID NO: 1049203 - RNA, 19 nt, Artificial Sequence
  Description of Artificial Sequence: Synthetic oligonucleotide
  Antisense strand to SEQ ID NO: 1049202
acuuaaccuagaauuaacc

SEQ ID NO: 1049204 - RNA, 19 nt, Artificial Sequence
  Description of Artificial Sequence: Synthetic oligonucleotide
  Sense strand starting at position 2789 of SEQ ID NO: 915041
ugcuauuaagcagaaguau

SEQ ID NO: 1049205 - RNA, 19 nt, Artificial Sequence
  Description of Artificial Sequence: Synthetic oligonucleotide
  Antisense strand to SEQ ID NO: 1049204
auacuucugcuuaauagca

SEQ ID NO: 1049206 - RNA, 19 nt, Artificial Sequence
  Description of Artificial Sequence: Synthetic oligonucleotide
  Sense strand starting at position 2800 of SEQ ID NO: 915041
agaaguauccagugaguaa

SEQ ID NO: 1049207 - RNA, 19 nt, Artificial Sequence
  Description of Artificial Sequence: Synthetic oligonucleotide
  Antisense strand to SEQ ID NO: 1049206
uuacucacuggauacuucu

SEQ ID NO: 1049208 - RNA, 19 nt, Artificial Sequence
  Description of Artificial Sequence: Synthetic oligonucleotide
  Sense strand starting at position 3058 of SEQ ID NO: 915041
ugagaaaccacuggaguuu

SEQ ID NO: 1049209 - RNA, 19 nt, Artificial Sequence
  Description of Artificial Sequence: Synthetic oligonucleotide
  Antisense strand to SEQ ID NO: 1049208
aaacuccagugguuucuca

SEQ ID NO: 1049210 - RNA, 19 nt, Artificial Sequence
  Description of Artificial Sequence: Synthetic oligonucleotide
  Sense strand starting at position 3212 of SEQ ID NO: 915041
gguaguugugguaguaguu

SEQ ID NO: 1049211 - RNA, 19 nt, Artificial Sequence
  Description of Artificial Sequence: Synthetic oligonucleotide
  Antisense strand to SEQ ID NO: 1049210
aacuacuaccacaacuacc

SEQ ID NO: 1049212 - RNA, 19 nt, Artificial Sequence
  Description of Artificial Sequence: Synthetic oligonucleotide
  Sense strand starting at position 3218 of SEQ ID NO: 915041
ugugguaguaguuagaagu

SEQ ID NO: 1049213 - RNA, 19 nt, Artificial Sequence
  Description of Artificial Sequence: Synthetic oligonucleotide
  Antisense strand to SEQ ID NO: 1049212
acuucuaacuacuaccaca

SEQ ID NO: 1049214 - RNA, 19 nt, Artificial Sequence
  Description of Artificial Sequence: Synthetic oligonucleotide
  Sense strand starting at position 3270 of SEQ ID NO: 915041
cguggacucacuuaaggau

SEQ ID NO: 1049215 - RNA, 19 nt, Artificial Sequence
  Description of Artificial Sequence: Synthetic oligonucleotide
  Antisense strand to SEQ ID NO: 1049214
auccuuaagugaguccacg

SEQ ID NO: 1049216 - RNA, 19 nt, Artificial Sequence
  Description of Artificial Sequence: Synthetic oligonucleotide
  Sense strand starting at position 3285 of SEQ ID NO: 915041
ggauuagaugcagguuaua

SEQ ID NO: 1049217 - RNA, 19 nt, Artificial Sequence
  Description of Artificial Sequence: Synthetic oligonucleotide
  Antisense strand to SEQ ID NO: 1049216
uauaaccugcaucuaaucc

SEQ ID NO: 1049218 - RNA, 19 nt, Artificial Sequence
  Description of Artificial Sequence: Synthetic oligonucleotide
  Sense strand starting at position 3359 of SEQ ID NO: 915041
acaacugguguuggguaau

SEQ ID NO: 1049219 - RNA, 19 nt, Artificial Sequence
  Description of Artificial Sequence: Synthetic oligonucleotide
  Antisense strand to SEQ ID NO: 1049218
auuacccaacaccaguugu

SEQ ID NO: 1049220 - RNA, 19 nt, Artificial Sequence
  Description of Artificial Sequence: Synthetic oligonucleotide
  Sense strand starting at position 3362 of SEQ ID NO: 915041
acugguguuggguaaucaa

SEQ ID NO: 1049221 - RNA, 19 nt, Artificial Sequence
  Description of Artificial Sequence: Synthetic oligonucleotide
  Antisense strand to SEQ ID NO: 1049220
uugauuacccaacaccagu

SEQ ID NO: 1049222 - RNA, 19 nt, Artificial Sequence
  Description of Artificial Sequence: Synthetic oligonucleotide
  Sense strand starting at position 3365 of SEQ ID NO: 915041
gguguuggguaaucaagga

SEQ ID NO: 1049223 - RNA, 19 nt, Artificial Sequence
  Description of Artificial Sequence: Synthetic oligonucleotide
  Antisense strand to SEQ ID NO: 1049222
uccuugauuacccaacacc

SEQ ID NO: 1049224 - RNA, 19 nt, Artificial Sequence
  Description of Artificial Sequence: Synthetic oligonucleotide
  Sense strand starting at position 3415 of SEQ ID NO: 915041
agauguugaauaugaguuu

SEQ ID NO: 1049225 - RNA, 19 nt, Artificial Sequence
  Description of Artificial Sequence: Synthetic oligonucleotide
  Antisense strand to SEQ ID NO: 1049224
aaacucauauucaacaucu

SEQ ID NO: 1049226 - RNA, 19 nt, Artificial Sequence
  Description of Artificial Sequence: Synthetic oligonucleotide
  Sense strand starting at position 3579 of SEQ ID NO: 915041
aguagugaccagugagaua

SEQ ID NO: 1049227 - RNA, 19 nt, Artificial Sequence
  Description of Artificial Sequence: Synthetic oligonucleotide
  Antisense strand to SEQ ID NO: 1049226
uaucucacuggucacuacu

SEQ ID NO: 1049228 - RNA, 19 nt, Artificial Sequence
  Description of Artificial Sequence: Synthetic oligonucleotide
  Sense strand starting at position 3690 of SEQ ID NO: 915041
accaucucuugguccauau

SEQ ID NO: 1049229 - RNA, 19 nt, Artificial Sequence
  Description of Artificial Sequence: Synthetic oligonucleotide
  Antisense strand to SEQ ID NO: 1049228
auauggaccaagagauggu

SEQ ID NO: 1049230 - RNA, 19 nt, Artificial Sequence
  Description of Artificial Sequence: Synthetic oligonucleotide
  Sense strand starting at position 3694 of SEQ ID NO: 915041
ucucuugguccauauaugu

SEQ ID NO: 1049231 - RNA, 19 nt, Artificial Sequence
  Description of Artificial Sequence: Synthetic oligonucleotide
  Antisense strand to SEQ ID NO: 1049230
acauauauggaccaagaga

SEQ ID NO: 1049232 - RNA, 19 nt, Artificial Sequence
  Description of Artificial Sequence: Synthetic oligonucleotide
  Sense strand starting at position 108 of SEQ ID NO: 915042
acggcuagaguucaaguua

SEQ ID NO: 1049233 - RNA, 19 nt, Artificial Sequence
  Description of Artificial Sequence: Synthetic oligonucleotide
  Antisense strand to SEQ ID NO: 1049232
uaacuugaacucuagccgu

SEQ ID NO: 1049234 - RNA, 19 nt, Artificial Sequence
  Description of Artificial Sequence: Synthetic oligonucleotide
  Sense strand starting at position 191 of SEQ ID NO: 915042
guuauauucuacuuccaga

SEQ ID NO: 1049235 - RNA, 19 nt, Artificial Sequence
  Description of Artificial Sequence: Synthetic oligonucleotide
  Antisense strand to SEQ ID NO: 1049234
ucuggaaguagaauauaac

SEQ ID NO: 1049236 - RNA, 19 nt, Artificial Sequence
  Description of Artificial Sequence: Synthetic oligonucleotide
  Sense strand starting at position 317 of SEQ ID NO: 915042
gcuguaccagcccaauuaa

SEQ ID NO: 1049237 - RNA, 19 nt, Artificial Sequence
  Description of Artificial Sequence: Synthetic oligonucleotide
  Antisense strand to SEQ ID NO: 1049236
uuaauugggcugguacagc

SEQ ID NO: 1049238 - RNA, 19 nt, Artificial Sequence
  Description of Artificial Sequence: Synthetic oligonucleotide
  Sense strand starting at position 370 of SEQ ID NO: 915042
uccacuaagugucuggaua

SEQ ID NO: 1049239 - RNA, 19 nt, Artificial Sequence
  Description of Artificial Sequence: Synthetic oligonucleotide
  Antisense strand to SEQ ID NO: 1049238
uauccagacacuuagugga

SEQ ID NO: 1049240 - RNA, 19 nt, Artificial Sequence
  Description of Artificial Sequence: Synthetic oligonucleotide
  Sense strand starting at position 371 of SEQ ID NO: 915042
ccacuaagugucuggauac

SEQ ID NO: 1049241 - RNA, 19 nt, Artificial Sequence
  Description of Artificial Sequence: Synthetic oligonucleotide
  Antisense strand to SEQ ID NO: 1049240
guauccagacacuuagugg

SEQ ID NO: 1049242 - RNA, 19 nt, Artificial Sequence
  Description of Artificial Sequence: Synthetic oligonucleotide
  Sense strand starting at position 397 of SEQ ID NO: 915042
ggcuaauacuuagucaaau

SEQ ID NO: 1049243 - RNA, 19 nt, Artificial Sequence
  Description of Artificial Sequence: Synthetic oligonucleotide
  Antisense strand to SEQ ID NO: 1049242
auuugacuaaguauuagcc

SEQ ID NO: 1049244 - RNA, 19 nt, Artificial Sequence
  Description of Artificial Sequence: Synthetic oligonucleotide
  Sense strand starting at position 398 of SEQ ID NO: 915042
gcuaauacuuagucaaaug

SEQ ID NO: 1049245 - RNA, 19 nt, Artificial Sequence
  Description of Artificial Sequence: Synthetic oligonucleotide
  Antisense strand to SEQ ID NO: 1049244
cauuugacuaaguauuagc

SEQ ID NO: 1049246 - RNA, 19 nt, Artificial Sequence
  Description of Artificial Sequence: Synthetic oligonucleotide
  Sense strand starting at position 469 of SEQ ID NO: 915042
cugaaagcuuccguagaaa

SEQ ID NO: 1049247 - RNA, 19 nt, Artificial Sequence
  Description of Artificial Sequence: Synthetic oligonucleotide
  Antisense strand to SEQ ID NO: 1049246
uuucuacggaagcuuucag

SEQ ID NO: 1049248 - RNA, 19 nt, Artificial Sequence
  Description of Artificial Sequence: Synthetic oligonucleotide
  Sense strand starting at position 472 of SEQ ID NO: 915042
aaagcuuccguagaaauag

SEQ ID NO: 1049249 - RNA, 19 nt, Artificial Sequence
  Description of Artificial Sequence: Synthetic oligonucleotide
  Antisense strand to SEQ ID NO: 1049248
cuauuucuacggaagcuuu

SEQ ID NO: 1049250 - RNA, 19 nt, Artificial Sequence
  Description of Artificial Sequence: Synthetic oligonucleotide
  Sense strand starting at position 497 of SEQ ID NO: 915042
acaggucuaguagguuaua

SEQ ID NO: 1049251 - RNA, 19 nt, Artificial Sequence
  Description of Artificial Sequence: Synthetic oligonucleotide
  Antisense strand to SEQ ID NO: 1049250
uauaaccuacuagaccugu

SEQ ID NO: 1049252 - RNA, 19 nt, Artificial Sequence
  Description of Artificial Sequence: Synthetic oligonucleotide
  Sense strand starting at position 500 of SEQ ID NO: 915042
ggucuaguagguuauacac

SEQ ID NO: 1049253 - RNA, 19 nt, Artificial Sequence
  Description of Artificial Sequence: Synthetic oligonucleotide
  Antisense strand to SEQ ID NO: 1049252
guguauaaccuacuagacc

SEQ ID NO: 1049254 - RNA, 19 nt, Artificial Sequence
  Description of Artificial Sequence: Synthetic oligonucleotide
  Sense strand starting at position 548 of SEQ ID NO: 915042
ccacuuaucuagguuccca

SEQ ID NO: 1049255 - RNA, 19 nt, Artificial Sequence
  Description of Artificial Sequence: Synthetic oligonucleotide
  Antisense strand to SEQ ID NO: 1049254
ugggaaccuagauaagugg

SEQ ID NO: 1049256 - RNA, 19 nt, Artificial Sequence
  Description of Artificial Sequence: Synthetic oligonucleotide
  Sense strand starting at position 552 of SEQ ID NO: 915042
uuaucuagguucccaagau

SEQ ID NO: 1049257 - RNA, 19 nt, Artificial Sequence
  Description of Artificial Sequence: Synthetic oligonucleotide
  Antisense strand to SEQ ID NO: 1049256
aucuugggaaccuagauaa

SEQ ID NO: 1049258 - RNA, 19 nt, Artificial Sequence
  Description of Artificial Sequence: Synthetic oligonucleotide
  Sense strand starting at position 587 of SEQ ID NO: 915042
aaauuauagcgacagcagu

SEQ ID NO: 1049259 - RNA, 19 nt, Artificial Sequence
  Description of Artificial Sequence: Synthetic oligonucleotide
  Antisense strand to SEQ ID NO: 1049258
acugcugucgcuauaauuu

SEQ ID NO: 1049260 - RNA, 19 nt, Artificial Sequence
  Description of Artificial Sequence: Synthetic oligonucleotide
  Sense strand starting at position 826 of SEQ ID NO: 915042
aagagucaaucuuugagac

SEQ ID NO: 1049261 - RNA, 19 nt, Artificial Sequence
  Description of Artificial Sequence: Synthetic oligonucleotide
  Antisense strand to SEQ ID NO: 1049260
gucucaaagauugacucuu

SEQ ID NO: 1049262 - RNA, 19 nt, Artificial Sequence
  Description of Artificial Sequence: Synthetic oligonucleotide
  Sense strand starting at position 827 of SEQ ID NO: 915042
agagucaaucuuugagacu

SEQ ID NO: 1049263 - RNA, 19 nt, Artificial Sequence
  Description of Artificial Sequence: Synthetic oligonucleotide
  Antisense strand to SEQ ID NO: 1049262
agucucaaagauugacucu

SEQ ID NO: 1049264 - RNA, 19 nt, Artificial Sequence
  Description of Artificial Sequence: Synthetic oligonucleotide
  Sense strand starting at position 1393 of SEQ ID NO: 915042
agaaacucauauuggauuu

SEQ ID NO: 1049265 - RNA, 19 nt, Artificial Sequence
  Description of Artificial Sequence: Synthetic oligonucleotide
  Antisense strand to SEQ ID NO: 1049264
aaauccaauaugaguuucu

SEQ ID NO: 1049266 - RNA, 19 nt, Artificial Sequence
  Description of Artificial Sequence: Synthetic oligonucleotide
  Sense strand starting at position 1431 of SEQ ID NO: 915042
uguuaacucccucaguuaa

SEQ ID NO: 1049267 - RNA, 19 nt, Artificial Sequence
  Description of Artificial Sequence: Synthetic oligonucleotide
  Antisense strand to SEQ ID NO: 1049266
uuaacugagggaguuaaca

SEQ ID NO: 1049268 - RNA, 19 nt, Artificial Sequence
  Description of Artificial Sequence: Synthetic oligonucleotide
  Sense strand starting at position 1442 of SEQ ID NO: 915042
ucaguuaacgcuuauaaau

SEQ ID NO: 1049269 - RNA, 19 nt, Artificial Sequence
  Description of Artificial Sequence: Synthetic oligonucleotide
  Antisense strand to SEQ ID NO: 1049268
auuuauaagcguuaacuga

SEQ ID NO: 1049270 - RNA, 19 nt, Artificial Sequence
  Description of Artificial Sequence: Synthetic oligonucleotide
  Sense strand starting at position 1544 of SEQ ID NO: 915042
agcaucgagacauagcaaa

SEQ ID NO: 1049271 - RNA, 19 nt, Artificial Sequence
  Description of Artificial Sequence: Synthetic oligonucleotide
  Antisense strand to SEQ ID NO: 1049270
uuugcuaugucucgaugcu

SEQ ID NO: 1049272 - RNA, 19 nt, Artificial Sequence
  Description of Artificial Sequence: Synthetic oligonucleotide
  Sense strand starting at position 2018 of SEQ ID NO: 915042
uuacuuuaggucugagacu

SEQ ID NO: 1049273 - RNA, 19 nt, Artificial Sequence
  Description of Artificial Sequence: Synthetic oligonucleotide
  Antisense strand to SEQ ID NO: 1049272
agucucagaccuaaaguaa

SEQ ID NO: 1049274 - RNA, 19 nt, Artificial Sequence
  Description of Artificial Sequence: Synthetic oligonucleotide
  Sense strand starting at position 2133 of SEQ ID NO: 915042
gucuccuuggcacagauaa

SEQ ID NO: 1049275 - RNA, 19 nt, Artificial Sequence
  Description of Artificial Sequence: Synthetic oligonucleotide
  Antisense strand to SEQ ID NO: 1049274
uuaucugugccaaggagac

SEQ ID NO: 1049276 - RNA, 19 nt, Artificial Sequence
  Description of Artificial Sequence: Synthetic oligonucleotide
  Sense strand starting at position 2338 of SEQ ID NO: 915042
guguaagacccauaccuga

SEQ ID NO: 1049277 - RNA, 19 nt, Artificial Sequence
  Description of Artificial Sequence: Synthetic oligonucleotide
  Antisense strand to SEQ ID NO: 1049276
ucagguaugggucuuacac

SEQ ID NO: 1049278 - RNA, 19 nt, Artificial Sequence
  Description of Artificial Sequence: Synthetic oligonucleotide
  Sense strand starting at position 2436 of SEQ ID NO: 915042
cauagugaggccugaacca

SEQ ID NO: 1049279 - RNA, 19 nt, Artificial Sequence
  Description of Artificial Sequence: Synthetic oligonucleotide
  Antisense strand to SEQ ID NO: 1049278
ugguucaggccucacuaug

SEQ ID NO: 1049280 - RNA, 19 nt, Artificial Sequence
  Description of Artificial Sequence: Synthetic oligonucleotide
  Sense strand starting at position 2488 of SEQ ID NO: 915042
ugagcacauccauggacaa

SEQ ID NO: 1049281 - RNA, 19 nt, Artificial Sequence
  Description of Artificial Sequence: Synthetic oligonucleotide
  Antisense strand to SEQ ID NO: 1049280
uuguccauggaugugcuca

SEQ ID NO: 1049282 - RNA, 19 nt, Artificial Sequence
  Description of Artificial Sequence: Synthetic oligonucleotide
  Sense strand starting at position 2539 of SEQ ID NO: 915042
ucucacguucuggaaauaa

SEQ ID NO: 1049283 - RNA, 19 nt, Artificial Sequence
  Description of Artificial Sequence: Synthetic oligonucleotide
  Antisense strand to SEQ ID NO: 1049282
uuauuuccagaacgugaga

SEQ ID NO: 1049284 - RNA, 19 nt, Artificial Sequence
  Description of Artificial Sequence: Synthetic oligonucleotide
  Sense strand starting at position 2564 of SEQ ID NO: 915042
cggagcuggaaaugaguua

SEQ ID NO: 1049285 - RNA, 19 nt, Artificial Sequence
  Description of Artificial Sequence: Synthetic oligonucleotide
  Antisense strand to SEQ ID NO: 1049284
uaacucauuuccagcuccg

SEQ ID NO: 1049286 - RNA, 19 nt, Artificial Sequence
  Description of Artificial Sequence: Synthetic oligonucleotide
  Sense strand starting at position 2601 of SEQ ID NO: 915042
ggugcaugaucaucaucau

SEQ ID NO: 1049287 - RNA, 19 nt, Artificial Sequence
  Description of Artificial Sequence: Synthetic oligonucleotide
  Antisense strand to SEQ ID NO: 1049286
augaugaugaucaugcacc

SEQ ID NO: 1049288 - RNA, 19 nt, Artificial Sequence
  Description of Artificial Sequence: Synthetic oligonucleotide
  Sense strand starting at position 2641 of SEQ ID NO: 915042
aggaauaaggcacgauagu

SEQ ID NO: 1049289 - RNA, 19 nt, Artificial Sequence
  Description of Artificial Sequence: Synthetic oligonucleotide
  Antisense strand to SEQ ID NO: 1049288
acuaucgugccuuauuccu

SEQ ID NO: 1049290 - RNA, 19 nt, Artificial Sequence
  Description of Artificial Sequence: Synthetic oligonucleotide
  Sense strand starting at position 2673 of SEQ ID NO: 915042
gaagcaauggucugugaag

SEQ ID NO: 1049291 - RNA, 19 nt, Artificial Sequence
  Description of Artificial Sequence: Synthetic oligonucleotide
  Antisense strand to SEQ ID NO: 1049290
cuucacagaccauugcuuc

SEQ ID NO: 1049292 - RNA, 19 nt, Artificial Sequence
  Description of Artificial Sequence: Synthetic oligonucleotide
  Sense strand starting at position 3406 of SEQ ID NO: 915042
cuagcagaugcuugggaga

SEQ ID NO: 1049293 - RNA, 19 nt, Artificial Sequence
  Description of Artificial Sequence: Synthetic oligonucleotide
  Antisense strand to SEQ ID NO: 1049292
ucucccaagcaucugcuag

SEQ ID NO: 1049294 - RNA, 19 nt, Artificial Sequence
  Description of Artificial Sequence: Synthetic oligonucleotide
  Sense strand starting at position 3490 of SEQ ID NO: 915042
gugaaacacucggccagaa

SEQ ID NO: 1049295 - RNA, 19 nt, Artificial Sequence
  Description of Artificial Sequence: Synthetic oligonucleotide
  Antisense strand to SEQ ID NO: 1049294
uucuggccgaguguuucac

SEQ ID NO: 1049296 - RNA, 19 nt, Artificial Sequence
  Description of Artificial Sequence: Synthetic oligonucleotide
  Sense strand starting at position 3533 of SEQ ID NO: 915042
agucacagauguucugaau

SEQ ID NO: 1049297 - RNA, 19 nt, Artificial Sequence
  Description of Artificial Sequence: Synthetic oligonucleotide
  Antisense strand to SEQ ID NO: 1049296
auucagaacaucugugacu

SEQ ID NO: 1049298 - RNA, 19 nt, Artificial Sequence
  Description of Artificial Sequence: Synthetic oligonucleotide
  Sense strand starting at position 3536 of SEQ ID NO: 915042
cacagauguucugaauuug

SEQ ID NO: 1049299 - RNA, 19 nt, Artificial Sequence
  Description of Artificial Sequence: Synthetic oligonucleotide
  Antisense strand to SEQ ID NO: 1049298
caaauucagaacaucugug

SEQ ID NO: 1049300 - RNA, 19 nt, Artificial Sequence
  Description of Artificial Sequence: Synthetic oligonucleotide
  Sense strand starting at position 3547 of SEQ ID NO: 915042
ugaauuugguaagaaucag

SEQ ID NO: 1049301 - RNA, 19 nt, Artificial Sequence
  Description of Artificial Sequence: Synthetic oligonucleotide
  Antisense strand to SEQ ID NO: 1049300
cugauucuuaccaaauuca

SEQ ID NO: 1049302 - RNA, 19 nt, Artificial Sequence
  Description of Artificial Sequence: Synthetic oligonucleotide
  Sense strand starting at position 3569 of SEQ ID NO: 915042
ggagcagaauguucagaag

SEQ ID NO: 1049303 - RNA, 19 nt, Artificial Sequence
  Description of Artificial Sequence: Synthetic oligonucleotide
  Antisense strand to SEQ ID NO: 1049302
cuucugaacauucugcucc

SEQ ID NO: 1049304 - RNA, 19 nt, Artificial Sequence
  Description of Artificial Sequence: Synthetic oligonucleotide
  Sense strand starting at position 3581 of SEQ ID NO: 915042
ucagaagguuaucuuguau

SEQ ID NO: 1049305 - RNA, 19 nt, Artificial Sequence
  Description of Artificial Sequence: Synthetic oligonucleotide
  Antisense strand to SEQ ID NO: 1049304
auacaagauaaccuucuga

SEQ ID NO: 1049306 - RNA, 19 nt, Artificial Sequence
  Description of Artificial Sequence: Synthetic oligonucleotide
  Sense strand starting at position 3587 of SEQ ID NO: 915042
gguuaucuuguauacccaa

SEQ ID NO: 1049307 - RNA, 19 nt, Artificial Sequence
  Description of Artificial Sequence: Synthetic oligonucleotide
  Antisense strand to SEQ ID NO: 1049306
uuggguauacaagauaacc

SEQ ID NO: 1049308 - RNA, 19 nt, Artificial Sequence
  Description of Artificial Sequence: Synthetic oligonucleotide
  Sense strand starting at position 3787 of SEQ ID NO: 915042
gcaagugaacucugacaaa

SEQ ID NO: 1049309 - RNA, 19 nt, Artificial Sequence
  Description of Artificial Sequence: Synthetic oligonucleotide
  Antisense strand to SEQ ID NO: 1049308
uuugucagaguucacuugc

SEQ ID NO: 1049310 - RNA, 19 nt, Artificial Sequence
  Description of Artificial Sequence: Synthetic oligonucleotide
  Sense strand starting at position 3959 of SEQ ID NO: 915042
ggagaaugauaccacacaa

SEQ ID NO: 1049311 - RNA, 19 nt, Artificial Sequence
  Description of Artificial Sequence: Synthetic oligonucleotide
  Antisense strand to SEQ ID NO: 1049310
uugugugguaucauucucc

SEQ ID NO: 1049312 - RNA, 19 nt, Artificial Sequence
  Description of Artificial Sequence: Synthetic oligonucleotide
  Sense strand starting at position 20 of SEQ ID NO: 915043
gcgccaauagcuuugguca

SEQ ID NO: 1049313 - RNA, 19 nt, Artificial Sequence
  Description of Artificial Sequence: Synthetic oligonucleotide
  Antisense strand to SEQ ID NO: 1049312
ugaccaaagcuauuggcgc

SEQ ID NO: 1049314 - RNA, 19 nt, Artificial Sequence
  Description of Artificial Sequence: Synthetic oligonucleotide
  Sense strand starting at position 31 of SEQ ID NO: 915043
uuuggucagcauuaauaug

SEQ ID NO: 1049315 - RNA, 19 nt, Artificial Sequence
  Description of Artificial Sequence: Synthetic oligonucleotide
  Antisense strand to SEQ ID NO: 1049314
cauauuaaugcugaccaaa

SEQ ID NO: 1049316 - RNA, 19 nt, Artificial Sequence
  Description of Artificial Sequence: Synthetic oligonucleotide
  Sense strand starting at position 186 of SEQ ID NO: 915043
gggaucaagucuuccugaa

SEQ ID NO: 1049317 - RNA, 19 nt, Artificial Sequence
  Description of Artificial Sequence: Synthetic oligonucleotide
  Antisense strand to SEQ ID NO: 1049316
uucaggaagacuugauccc

SEQ ID NO: 1049318 - RNA, 19 nt, Artificial Sequence
  Description of Artificial Sequence: Synthetic oligonucleotide
  Sense strand starting at position 382 of SEQ ID NO: 915043
guguauuucggugaguccu

SEQ ID NO: 1049319 - RNA, 19 nt, Artificial Sequence
  Description of Artificial Sequence: Synthetic oligonucleotide
  Antisense strand to SEQ ID NO: 1049318
aggacucaccgaaauacac

SEQ ID NO: 1049320 - RNA, 19 nt, Artificial Sequence
  Description of Artificial Sequence: Synthetic oligonucleotide
  Sense strand starting at position 390 of SEQ ID NO: 915043
cggugaguccuccacaaca

SEQ ID NO: 1049321 - RNA, 19 nt, Artificial Sequence
  Description of Artificial Sequence: Synthetic oligonucleotide
  Antisense strand to SEQ ID NO: 1049320
uguuguggaggacucaccg

SEQ ID NO: 1049322 - RNA, 19 nt, Artificial Sequence
  Description of Artificial Sequence: Synthetic oligonucleotide
  Sense strand starting at position 392 of SEQ ID NO: 915043
gugaguccuccacaacaaa

SEQ ID NO: 1049323 - RNA, 19 nt, Artificial Sequence
  Description of Artificial Sequence: Synthetic oligonucleotide
  Antisense strand to SEQ ID NO: 1049322
uuuguuguggaggacucac

SEQ ID NO: 1049324 - RNA, 19 nt, Artificial Sequence
  Description of Artificial Sequence: Synthetic oligonucleotide
  Sense strand starting at position 506 of SEQ ID NO: 915043
gagugaaccuggguuccaa

SEQ ID NO: 1049325 - RNA, 19 nt, Artificial Sequence
  Description of Artificial Sequence: Synthetic oligonucleotide
  Antisense strand to SEQ ID NO: 1049324
uuggaacccagguucacuc

SEQ ID NO: 1049326 - RNA, 19 nt, Artificial Sequence
  Description of Artificial Sequence: Synthetic oligonucleotide
  Sense strand starting at position 535 of SEQ ID NO: 915043
gccucuuaucagcugugua

SEQ ID NO: 1049327 - RNA, 19 nt, Artificial Sequence
  Description of Artificial Sequence: Synthetic oligonucleotide
  Antisense strand to SEQ ID NO: 1049326
uacacagcugauaagaggc

SEQ ID NO: 1049328 - RNA, 19 nt, Artificial Sequence
  Description of Artificial Sequence: Synthetic oligonucleotide
  Sense strand starting at position 675 of SEQ ID NO: 915043
guagguggucaugaacauu

SEQ ID NO: 1049329 - RNA, 19 nt, Artificial Sequence
  Description of Artificial Sequence: Synthetic oligonucleotide
  Antisense strand to SEQ ID NO: 1049328
aauguucaugaccaccuac

SEQ ID NO: 1049330 - RNA, 19 nt, Artificial Sequence
  Description of Artificial Sequence: Synthetic oligonucleotide
  Sense strand starting at position 857 of SEQ ID NO: 915043
cccagcaauuugcuguaua

SEQ ID NO: 1049331 - RNA, 19 nt, Artificial Sequence
  Description of Artificial Sequence: Synthetic oligonucleotide
  Antisense strand to SEQ ID NO: 1049330
uauacagcaaauugcuggg

SEQ ID NO: 1049332 - RNA, 19 nt, Artificial Sequence
  Description of Artificial Sequence: Synthetic oligonucleotide
  Sense strand starting at position 1054 of SEQ ID NO: 915043
acagcuaggugaucaauac

SEQ ID NO: 1049333 - RNA, 19 nt, Artificial Sequence
  Description of Artificial Sequence: Synthetic oligonucleotide
  Antisense strand to SEQ ID NO: 1049332
guauugaucaccuagcugu

SEQ ID NO: 1049334 - RNA, 19 nt, Artificial Sequence
  Description of Artificial Sequence: Synthetic oligonucleotide
  Sense strand starting at position 1061 of SEQ ID NO: 915043
ggugaucaauacccagauu

SEQ ID NO: 1049335 - RNA, 19 nt, Artificial Sequence
  Description of Artificial Sequence: Synthetic oligonucleotide
  Antisense strand to SEQ ID NO: 1049334
aaucuggguauugaucacc

SEQ ID NO: 1049336 - RNA, 19 nt, Artificial Sequence
  Description of Artificial Sequence: Synthetic oligonucleotide
  Sense strand starting at position 1655 of SEQ ID NO: 915043
cucugaagugcugaaggau

SEQ ID NO: 1049337 - RNA, 19 nt, Artificial Sequence
  Description of Artificial Sequence: Synthetic oligonucleotide
  Antisense strand to SEQ ID NO: 1049336
auccuucagcacuucagag

SEQ ID NO: 1049338 - RNA, 19 nt, Artificial Sequence
  Description of Artificial Sequence: Synthetic oligonucleotide
  Sense strand starting at position 1747 of SEQ ID NO: 915043
cucugaaaccauuaccgua

SEQ ID NO: 1049339 - RNA, 19 nt, Artificial Sequence
  Description of Artificial Sequence: Synthetic oligonucleotide
  Antisense strand to SEQ ID NO: 1049338
uacgguaaugguuucagag

SEQ ID NO: 1049340 - RNA, 19 nt, Artificial Sequence
  Description of Artificial Sequence: Synthetic oligonucleotide
  Sense strand starting at position 2074 of SEQ ID NO: 915043
cauuauuuccggugauguc

SEQ ID NO: 1049341 - RNA, 19 nt, Artificial Sequence
  Description of Artificial Sequence: Synthetic oligonucleotide
  Antisense strand to SEQ ID NO: 1049340
gacaucaccggaaauaaug

SEQ ID NO: 1049342 - RNA, 19 nt, Artificial Sequence
  Description of Artificial Sequence: Synthetic oligonucleotide
  Sense strand starting at position 2404 of SEQ ID NO: 915043
ggauuaagauguucuccaa

SEQ ID NO: 1049343 - RNA, 19 nt, Artificial Sequence
  Description of Artificial Sequence: Synthetic oligonucleotide
  Antisense strand to SEQ ID NO: 1049342
uuggagaacaucuuaaucc

SEQ ID NO: 1049344 - RNA, 19 nt, Artificial Sequence
  Description of Artificial Sequence: Synthetic oligonucleotide
  Sense strand starting at position 2611 of SEQ ID NO: 915043
agcauuugcucagcaaaca

SEQ ID NO: 1049345 - RNA, 19 nt, Artificial Sequence
  Description of Artificial Sequence: Synthetic oligonucleotide
  Antisense strand to SEQ ID NO: 1049344
uguuugcugagcaaaugcu

SEQ ID NO: 1049346 - RNA, 19 nt, Artificial Sequence
  Description of Artificial Sequence: Synthetic oligonucleotide
  Sense strand starting at position 2722 of SEQ ID NO: 915043
gugauucccaggugaauga

SEQ ID NO: 1049347 - RNA, 19 nt, Artificial Sequence
  Description of Artificial Sequence: Synthetic oligonucleotide
  Antisense strand to SEQ ID NO: 1049346
ucauucaccugggaaucac

SEQ ID NO: 1049348 - RNA, 19 nt, Artificial Sequence
  Description of Artificial Sequence: Synthetic oligonucleotide
  Sense strand starting at position 2818 of SEQ ID NO: 915043
ugaaauacugcugaggcau

SEQ ID NO: 1049349 - RNA, 19 nt, Artificial Sequence
  Description of Artificial Sequence: Synthetic oligonucleotide
  Antisense strand to SEQ ID NO: 1049348
augccucagcaguauuuca

SEQ ID NO: 1049350 - RNA, 19 nt, Artificial Sequence
  Description of Artificial Sequence: Synthetic oligonucleotide
  Sense strand starting at position 2878 of SEQ ID NO: 915043
ggugaguuugagggaagga

SEQ ID NO: 1049351 - RNA, 19 nt, Artificial Sequence
  Description of Artificial Sequence: Synthetic oligonucleotide
  Antisense strand to SEQ ID NO: 1049350
uccuucccucaaacucacc

SEQ ID NO: 1049352 - RNA, 19 nt, Artificial Sequence
  Description of Artificial Sequence: Synthetic oligonucleotide
  Sense strand starting at position 2893 of SEQ ID NO: 915043
aggaguaguguccagauau

SEQ ID NO: 1049353 - RNA, 19 nt, Artificial Sequence
  Description of Artificial Sequence: Synthetic oligonucleotide
  Antisense strand to SEQ ID NO: 1049352
auaucuggacacuacuccu

SEQ ID NO: 1049354 - RNA, 19 nt, Artificial Sequence
  Description of Artificial Sequence: Synthetic oligonucleotide
  Sense strand starting at position 3005 of SEQ ID NO: 915043
guaucuuuacgauauuacu

SEQ ID NO: 1049355 - RNA, 19 nt, Artificial Sequence
  Description of Artificial Sequence: Synthetic oligonucleotide
  Antisense strand to SEQ ID NO: 1049354
aguaauaucguaaagauac

SEQ ID NO: 1049356 - RNA, 19 nt, Artificial Sequence
  Description of Artificial Sequence: Synthetic oligonucleotide
  Sense strand starting at position 3014 of SEQ ID NO: 915043
cgauauuacuucuuugaga

SEQ ID NO: 1049357 - RNA, 19 nt, Artificial Sequence
  Description of Artificial Sequence: Synthetic oligonucleotide
  Antisense strand to SEQ ID NO: 1049356
ucucaaagaaguaauaucg

SEQ ID NO: 1049358 - RNA, 19 nt, Artificial Sequence
  Description of Artificial Sequence: Synthetic oligonucleotide
  Sense strand starting at position 3025 of SEQ ID NO: 915043
cuuugagaaucuguccaac

SEQ ID NO: 1049359 - RNA, 19 nt, Artificial Sequence
  Description of Artificial Sequence: Synthetic oligonucleotide
  Antisense strand to SEQ ID NO: 1049358
guuggacagauucucaaag

SEQ ID NO: 1049360 - RNA, 19 nt, Artificial Sequence
  Description of Artificial Sequence: Synthetic oligonucleotide
  Sense strand starting at position 3027 of SEQ ID NO: 915043
uugagaaucuguccaacau

SEQ ID NO: 1049361 - RNA, 19 nt, Artificial Sequence
  Description of Artificial Sequence: Synthetic oligonucleotide
  Antisense strand to SEQ ID NO: 1049360
auguuggacagauucucaa

SEQ ID NO: 1049362 - RNA, 19 nt, Artificial Sequence
  Description of Artificial Sequence: Synthetic oligonucleotide
  Sense strand starting at position 3031 of SEQ ID NO: 915043
gaaucuguccaacauccga

SEQ ID NO: 1049363 - RNA, 19 nt, Artificial Sequence
  Description of Artificial Sequence: Synthetic oligonucleotide
  Antisense strand to SEQ ID NO: 1049362
ucggauguuggacagauuc

SEQ ID NO: 1049364 - RNA, 19 nt, Artificial Sequence
  Description of Artificial Sequence: Synthetic oligonucleotide
  Sense strand starting at position 3046 of SEQ ID NO: 915043
ccgaguuaacuugggaaug

SEQ ID NO: 1049365 - RNA, 19 nt, Artificial Sequence
  Description of Artificial Sequence: Synthetic oligonucleotide
  Antisense strand to SEQ ID NO: 1049364
cauucccaaguuaacucgg

SEQ ID NO: 1049366 - RNA, 19 nt, Artificial Sequence
  Description of Artificial Sequence: Synthetic oligonucleotide
  Sense strand starting at position 3276 of SEQ ID NO: 915043
guucuaagugcagaagaua

SEQ ID NO: 1049367 - RNA, 19 nt, Artificial Sequence
  Description of Artificial Sequence: Synthetic oligonucleotide
  Antisense strand to SEQ ID NO: 1049366
uaucuucugcacuuagaac

SEQ ID NO: 1049368 - RNA, 19 nt, Artificial Sequence
  Description of Artificial Sequence: Synthetic oligonucleotide
  Sense strand starting at position 3402 of SEQ ID NO: 915043
caauaaaugcucgggagaa

SEQ ID NO: 1049369 - RNA, 19 nt, Artificial Sequence
  Description of Artificial Sequence: Synthetic oligonucleotide
  Antisense strand to SEQ ID NO: 1049368
uucucccgagcauuuauug

SEQ ID NO: 1049370 - RNA, 19 nt, Artificial Sequence
  Description of Artificial Sequence: Synthetic oligonucleotide
  Sense strand starting at position 3414 of SEQ ID NO: 915043
gggagaacaacguauugua

SEQ ID NO: 1049371 - RNA, 19 nt, Artificial Sequence
  Description of Artificial Sequence: Synthetic oligonucleotide
  Antisense strand to SEQ ID NO: 1049370
uacaauacguuguucuccc

SEQ ID NO: 1049372 - RNA, 19 nt, Artificial Sequence
  Description of Artificial Sequence: Synthetic oligonucleotide
  Sense strand starting at position 3434 of SEQ ID NO: 915043
agaagaagaugugauuugu

SEQ ID NO: 1049373 - RNA, 19 nt, Artificial Sequence
  Description of Artificial Sequence: Synthetic oligonucleotide
  Antisense strand to SEQ ID NO: 1049372
acaaaucacaucuucuucu

SEQ ID NO: 1049374 - RNA, 19 nt, Artificial Sequence
  Description of Artificial Sequence: Synthetic oligonucleotide
  Sense strand starting at position 3541 of SEQ ID NO: 915043
ggagcuggguaucugaaua

SEQ ID NO: 1049375 - RNA, 19 nt, Artificial Sequence
  Description of Artificial Sequence: Synthetic oligonucleotide
  Antisense strand to SEQ ID NO: 1049374
uauucagauacccagcucc

SEQ ID NO: 1049376 - RNA, 19 nt, Artificial Sequence
  Description of Artificial Sequence: Synthetic oligonucleotide
  Sense strand starting at position 3583 of SEQ ID NO: 915043
agaggaaauggucagugca

SEQ ID NO: 1049377 - RNA, 19 nt, Artificial Sequence
  Description of Artificial Sequence: Synthetic oligonucleotide
  Antisense strand to SEQ ID NO: 1049376
ugcacugaccauuuccucu

SEQ ID NO: 1049378 - RNA, 19 nt, Artificial Sequence
  Description of Artificial Sequence: Synthetic oligonucleotide
  Sense strand starting at position 3585 of SEQ ID NO: 915043
aggaaauggucagugcaaa

SEQ ID NO: 1049379 - RNA, 19 nt, Artificial Sequence
  Description of Artificial Sequence: Synthetic oligonucleotide
  Antisense strand to SEQ ID NO: 1049378
uuugcacugaccauuuccu

SEQ ID NO: 1049380 - RNA, 19 nt, Artificial Sequence
  Description of Artificial Sequence: Synthetic oligonucleotide
  Sense strand starting at position 3586 of SEQ ID NO: 915043
ggaaauggucagugcaaag

SEQ ID NO: 1049381 - RNA, 19 nt, Artificial Sequence
  Description of Artificial Sequence: Synthetic oligonucleotide
  Antisense strand to SEQ ID NO: 1049380
cuuugcacugaccauuucc

SEQ ID NO: 1049382 - RNA, 19 nt, Artificial Sequence
  Description of Artificial Sequence: Synthetic oligonucleotide
  Sense strand starting at position 3803 of SEQ ID NO: 915043
agguuuaauagauggaguu

SEQ ID NO: 1049383 - RNA, 19 nt, Artificial Sequence
  Description of Artificial Sequence: Synthetic oligonucleotide
  Antisense strand to SEQ ID NO: 1049382
aacuccaucuauuaaaccu

SEQ ID NO: 1049384 - RNA, 19 nt, Artificial Sequence
  Description of Artificial Sequence: Synthetic oligonucleotide
  Sense strand starting at position 3804 of SEQ ID NO: 915043
gguuuaauagauggaguuu

SEQ ID NO: 1049385 - RNA, 19 nt, Artificial Sequence
  Description of Artificial Sequence: Synthetic oligonucleotide
  Antisense strand to SEQ ID NO: 1049384
aaacuccaucuauuaaacc

SEQ ID NO: 1049386 - RNA, 19 nt, Artificial Sequence
  Description of Artificial Sequence: Synthetic oligonucleotide
  Sense strand starting at position 3805 of SEQ ID NO: 915043
guuuaauagauggaguuuc

SEQ ID NO: 1049387 - RNA, 19 nt, Artificial Sequence
  Description of Artificial Sequence: Synthetic oligonucleotide
  Antisense strand to SEQ ID NO: 1049386
gaaacuccaucuauuaaac

SEQ ID NO: 1049388 - RNA, 19 nt, Artificial Sequence
  Description of Artificial Sequence: Synthetic oligonucleotide
  Sense strand starting at position 3899 of SEQ ID NO: 915043
gaguuuauuguaggagaca

SEQ ID NO: 1049389 - RNA, 19 nt, Artificial Sequence
  Description of Artificial Sequence: Synthetic oligonucleotide
  Antisense strand to SEQ ID NO: 1049388
ugucuccuacaauaaacuc

SEQ ID NO: 1049390 - RNA, 19 nt, Artificial Sequence
  Description of Artificial Sequence: Synthetic oligonucleotide
  Sense strand starting at position 3912 of SEQ ID NO: 915043
gagacauagugcuuuaagg

SEQ ID NO: 1049391 - RNA, 19 nt, Artificial Sequence
  Description of Artificial Sequence: Synthetic oligonucleotide
  Antisense strand to SEQ ID NO: 1049390
ccuuaaagcacuaugucuc

SEQ ID NO: 1049392 - RNA, 19 nt, Artificial Sequence
  Description of Artificial Sequence: Synthetic oligonucleotide
  Sense strand starting at position 131 of SEQ ID NO: 915044
gugggagcuuaaucugcuu

SEQ ID NO: 1049393 - RNA, 19 nt, Artificial Sequence
  Description of Artificial Sequence: Synthetic oligonucleotide
  Antisense strand to SEQ ID NO: 1049392
aagcagauuaagcucccac

SEQ ID NO: 1049394 - RNA, 19 nt, Artificial Sequence
  Description of Artificial Sequence: Synthetic oligonucleotide
  Sense strand starting at position 134 of SEQ ID NO: 915044
ggagcuuaaucugcuuuga

SEQ ID NO: 1049395 - RNA, 19 nt, Artificial Sequence
  Description of Artificial Sequence: Synthetic oligonucleotide
  Antisense strand to SEQ ID NO: 1049394
ucaaagcagauuaagcucc

SEQ ID NO: 1049396 - RNA, 19 nt, Artificial Sequence
  Description of Artificial Sequence: Synthetic oligonucleotide
  Sense strand starting at position 243 of SEQ ID NO: 915044
ucuagccucugaucagaga

SEQ ID NO: 1049397 - RNA, 19 nt, Artificial Sequence
  Description of Artificial Sequence: Synthetic oligonucleotide
  Antisense strand to SEQ ID NO: 1049396
ucucugaucagaggcuaga

SEQ ID NO: 1049398 - RNA, 19 nt, Artificial Sequence
  Description of Artificial Sequence: Synthetic oligonucleotide
  Sense strand starting at position 284 of SEQ ID NO: 915044
uggugucagcagggaagua

SEQ ID NO: 1049399 - RNA, 19 nt, Artificial Sequence
  Description of Artificial Sequence: Synthetic oligonucleotide
  Antisense strand to SEQ ID NO: 1049398
uacuucccugcugacacca

SEQ ID NO: 1049400 - RNA, 19 nt, Artificial Sequence
  Description of Artificial Sequence: Synthetic oligonucleotide
  Sense strand starting at position 285 of SEQ ID NO: 915044
ggugucagcagggaaguau

SEQ ID NO: 1049401 - RNA, 19 nt, Artificial Sequence
  Description of Artificial Sequence: Synthetic oligonucleotide
  Antisense strand to SEQ ID NO: 1049400
auacuucccugcugacacc

SEQ ID NO: 1049402 - RNA, 19 nt, Artificial Sequence
  Description of Artificial Sequence: Synthetic oligonucleotide
  Sense strand starting at position 510 of SEQ ID NO: 915044
cugauuggcccuugcuaau

SEQ ID NO: 1049403 - RNA, 19 nt, Artificial Sequence
  Description of Artificial Sequence: Synthetic oligonucleotide
  Antisense strand to SEQ ID NO: 1049402
auuagcaagggccaaucag

SEQ ID NO: 1049404 - RNA, 19 nt, Artificial Sequence
  Description of Artificial Sequence: Synthetic oligonucleotide
  Sense strand starting at position 570 of SEQ ID NO: 915044
aggcucugucuggaaaggu

SEQ ID NO: 1049405 - RNA, 19 nt, Artificial Sequence
  Description of Artificial Sequence: Synthetic oligonucleotide
  Antisense strand to SEQ ID NO: 1049404
accuuuccagacagagccu

SEQ ID NO: 1049406 - RNA, 19 nt, Artificial Sequence
  Description of Artificial Sequence: Synthetic oligonucleotide
  Sense strand starting at position 910 of SEQ ID NO: 915044
ggaucuuacagccaggcua

SEQ ID NO: 1049407 - RNA, 19 nt, Artificial Sequence
  Description of Artificial Sequence: Synthetic oligonucleotide
  Antisense strand to SEQ ID NO: 1049406
uagccuggcuguaagaucc

SEQ ID NO: 1049408 - RNA, 19 nt, Artificial Sequence
  Description of Artificial Sequence: Synthetic oligonucleotide
  Sense strand starting at position 956 of SEQ ID NO: 915044
gaucauuccuuguccggaa

SEQ ID NO: 1049409 - RNA, 19 nt, Artificial Sequence
  Description of Artificial Sequence: Synthetic oligonucleotide
  Antisense strand to SEQ ID NO: 1049408
uuccggacaaggaaugauc

SEQ ID NO: 1049410 - RNA, 19 nt, Artificial Sequence
  Description of Artificial Sequence: Synthetic oligonucleotide
  Sense strand starting at position 960 of SEQ ID NO: 915044
auuccuuguccggaacaga

SEQ ID NO: 1049411 - RNA, 19 nt, Artificial Sequence
  Description of Artificial Sequence: Synthetic oligonucleotide
  Antisense strand to SEQ ID NO: 1049410
ucuguuccggacaaggaau

SEQ ID NO: 1049412 - RNA, 19 nt, Artificial Sequence
  Description of Artificial Sequence: Synthetic oligonucleotide
  Sense strand starting at position 1062 of SEQ ID NO: 915044
ucacauuuccagcgaugca

SEQ ID NO: 1049413 - RNA, 19 nt, Artificial Sequence
  Description of Artificial Sequence: Synthetic oligonucleotide
  Antisense strand to SEQ ID NO: 1049412
ugcaucgcuggaaauguga

SEQ ID NO: 1049414 - RNA, 19 nt, Artificial Sequence
  Description of Artificial Sequence: Synthetic oligonucleotide
  Sense strand starting at position 1090 of SEQ ID NO: 915044
ugagaacaucccgaccuuu

SEQ ID NO: 1049415 - RNA, 19 nt, Artificial Sequence
  Description of Artificial Sequence: Synthetic oligonucleotide
  Antisense strand to SEQ ID NO: 1049414
aaaggucgggauguucuca

SEQ ID NO: 1049416 - RNA, 19 nt, Artificial Sequence
  Description of Artificial Sequence: Synthetic oligonucleotide
  Sense strand starting at position 2811 of SEQ ID NO: 915044
gagggaaguuuguuuccuu

SEQ ID NO: 1049417 - RNA, 19 nt, Artificial Sequence
  Description of Artificial Sequence: Synthetic oligonucleotide
  Antisense strand to SEQ ID NO: 1049416
aaggaaacaaacuucccuc

SEQ ID NO: 1049418 - RNA, 19 nt, Artificial Sequence
  Description of Artificial Sequence: Synthetic oligonucleotide
  Sense strand starting at position 2812 of SEQ ID NO: 915044
agggaaguuuguuuccuuu

SEQ ID NO: 1049419 - RNA, 19 nt, Artificial Sequence
  Description of Artificial Sequence: Synthetic oligonucleotide
  Antisense strand to SEQ ID NO: 1049418
aaaggaaacaaacuucccu

SEQ ID NO: 1049420 - RNA, 19 nt, Artificial Sequence
  Description of Artificial Sequence: Synthetic oligonucleotide
  Sense strand starting at position 2848 of SEQ ID NO: 915044
accuuaacgguuugagucu

SEQ ID NO: 1049421 - RNA, 19 nt, Artificial Sequence
  Description of Artificial Sequence: Synthetic oligonucleotide
  Antisense strand to SEQ ID NO: 1049420
agacucaaaccguuaaggu

SEQ ID NO: 1049422 - RNA, 19 nt, Artificial Sequence
  Description of Artificial Sequence: Synthetic oligonucleotide
  Sense strand starting at position 3120 of SEQ ID NO: 915044
cagacucuguaauuagagu

SEQ ID NO: 1049423 - RNA, 19 nt, Artificial Sequence
  Description of Artificial Sequence: Synthetic oligonucleotide
  Antisense strand to SEQ ID NO: 1049422
acucuaauuacagagucug

SEQ ID NO: 1049424 - RNA, 19 nt, Artificial Sequence
  Description of Artificial Sequence: Synthetic oligonucleotide
  Sense strand starting at position 3127 of SEQ ID NO: 915044
uguaauuagaguggccuga

SEQ ID NO: 1049425 - RNA, 19 nt, Artificial Sequence
  Description of Artificial Sequence: Synthetic oligonucleotide
  Antisense strand to SEQ ID NO: 1049424
ucaggccacucuaauuaca

SEQ ID NO: 1049426 - RNA, 19 nt, Artificial Sequence
  Description of Artificial Sequence: Synthetic oligonucleotide
  Sense strand starting at position 3131 of SEQ ID NO: 915044
auuagaguggccugaagaa

SEQ ID NO: 1049427 - RNA, 19 nt, Artificial Sequence
  Description of Artificial Sequence: Synthetic oligonucleotide
  Antisense strand to SEQ ID NO: 1049426
uucuucaggccacucuaau

SEQ ID NO: 1049428 - RNA, 19 nt, Artificial Sequence
  Description of Artificial Sequence: Synthetic oligonucleotide
  Sense strand starting at position 3284 of SEQ ID NO: 915044
ugugguuuccucgcugacu

SEQ ID NO: 1049429 - RNA, 19 nt, Artificial Sequence
  Description of Artificial Sequence: Synthetic oligonucleotide
  Antisense strand to SEQ ID NO: 1049428
agucagcgaggaaaccaca

SEQ ID NO: 1049430 - RNA, 19 nt, Artificial Sequence
  Description of Artificial Sequence: Synthetic oligonucleotide
  Sense strand starting at position 3287 of SEQ ID NO: 915044
gguuuccucgcugacugaa

SEQ ID NO: 1049431 - RNA, 19 nt, Artificial Sequence
  Description of Artificial Sequence: Synthetic oligonucleotide
  Antisense strand to SEQ ID NO: 1049430
uucagucagcgaggaaacc

SEQ ID NO: 1049432 - RNA, 19 nt, Artificial Sequence
  Description of Artificial Sequence: Synthetic oligonucleotide
  Sense strand starting at position 3348 of SEQ ID NO: 915044
gccagccuucgcgauuuau

SEQ ID NO: 1049433 - RNA, 19 nt, Artificial Sequence
  Description of Artificial Sequence: Synthetic oligonucleotide
  Antisense strand to SEQ ID NO: 1049432
auaaaucgcgaaggcuggc

SEQ ID NO: 1049434 - RNA, 19 nt, Artificial Sequence
  Description of Artificial Sequence: Synthetic oligonucleotide
  Sense strand starting at position 3352 of SEQ ID NO: 915044
gccuucgcgauuuaugaau

SEQ ID NO: 1049435 - RNA, 19 nt, Artificial Sequence
  Description of Artificial Sequence: Synthetic oligonucleotide
  Antisense strand to SEQ ID NO: 1049434
auucauaaaucgcgaaggc

SEQ ID NO: 1049436 - RNA, 19 nt, Artificial Sequence
  Description of Artificial Sequence: Synthetic oligonucleotide
  Sense strand starting at position 3387 of SEQ ID NO: 915044
uguagaacugcuuggauua

SEQ ID NO: 1049437 - RNA, 19 nt, Artificial Sequence
  Description of Artificial Sequence: Synthetic oligonucleotide
  Antisense strand to SEQ ID NO: 1049436
uaauccaagcaguucuaca

SEQ ID NO: 1049438 - RNA, 19 nt, Artificial Sequence
  Description of Artificial Sequence: Synthetic oligonucleotide
  Sense strand starting at position 3388 of SEQ ID NO: 915044
guagaacugcuuggauuag

SEQ ID NO: 1049439 - RNA, 19 nt, Artificial Sequence
  Description of Artificial Sequence: Synthetic oligonucleotide
  Antisense strand to SEQ ID NO: 1049438
cuaauccaagcaguucuac

SEQ ID NO: 1049440 - RNA, 19 nt, Artificial Sequence
  Description of Artificial Sequence: Synthetic oligonucleotide
  Sense strand starting at position 3392 of SEQ ID NO: 915044
aacugcuuggauuagaagu

SEQ ID NO: 1049441 - RNA, 19 nt, Artificial Sequence
  Description of Artificial Sequence: Synthetic oligonucleotide
  Antisense strand to SEQ ID NO: 1049440
acuucuaauccaagcaguu

SEQ ID NO: 1049442 - RNA, 19 nt, Artificial Sequence
  Description of Artificial Sequence: Synthetic oligonucleotide
  Sense strand starting at position 3398 of SEQ ID NO: 915044
uuggauuagaagugggcaa

SEQ ID NO: 1049443 - RNA, 19 nt, Artificial Sequence
  Description of Artificial Sequence: Synthetic oligonucleotide
  Antisense strand to SEQ ID NO: 1049442
uugcccacuucuaauccaa

SEQ ID NO: 1049444 - RNA, 19 nt, Artificial Sequence
  Description of Artificial Sequence: Synthetic oligonucleotide
  Sense strand starting at position 3400 of SEQ ID NO: 915044
ggauuagaagugggcaagu

SEQ ID NO: 1049445 - RNA, 19 nt, Artificial Sequence
  Description of Artificial Sequence: Synthetic oligonucleotide
  Antisense strand to SEQ ID NO: 1049444
acuugcccacuucuaaucc

SEQ ID NO: 1049446 - RNA, 19 nt, Artificial Sequence
  Description of Artificial Sequence: Synthetic oligonucleotide
  Sense strand starting at position 3402 of SEQ ID NO: 915044
auuagaagugggcaaguua

SEQ ID NO: 1049447 - RNA, 19 nt, Artificial Sequence
  Description of Artificial Sequence: Synthetic oligonucleotide
  Antisense strand to SEQ ID NO: 1049446
uaacuugcccacuucuaau

SEQ ID NO: 1049448 - RNA, 19 nt, Artificial Sequence
  Description of Artificial Sequence: Synthetic oligonucleotide
  Sense strand starting at position 3496 of SEQ ID NO: 915044
augagcuguuguuuggauu

SEQ ID NO: 1049449 - RNA, 19 nt, Artificial Sequence
  Description of Artificial Sequence: Synthetic oligonucleotide
  Antisense strand to SEQ ID NO: 1049448
aauccaaacaacagcucau

SEQ ID NO: 1049450 - RNA, 19 nt, Artificial Sequence
  Description of Artificial Sequence: Synthetic oligonucleotide
  Sense strand starting at position 3497 of SEQ ID NO: 915044
ugagcuguuguuuggauua

SEQ ID NO: 1049451 - RNA, 19 nt, Artificial Sequence
  Description of Artificial Sequence: Synthetic oligonucleotide
  Antisense strand to SEQ ID NO: 1049450
uaauccaaacaacagcuca

SEQ ID NO: 1049452 - RNA, 19 nt, Artificial Sequence
  Description of Artificial Sequence: Synthetic oligonucleotide
  Sense strand starting at position 3515 of SEQ ID NO: 915044
aaaugagaugguuggugca

SEQ ID NO: 1049453 - RNA, 19 nt, Artificial Sequence
  Description of Artificial Sequence: Synthetic oligonucleotide
  Antisense strand to SEQ ID NO: 1049452
ugcaccaaccaucucauuu

SEQ ID NO: 1049454 - RNA, 19 nt, Artificial Sequence
  Description of Artificial Sequence: Synthetic oligonucleotide
  Sense strand starting at position 3552 of SEQ ID NO: 915044
aguaccuggcaauguaaga

SEQ ID NO: 1049455 - RNA, 19 nt, Artificial Sequence
  Description of Artificial Sequence: Synthetic oligonucleotide
  Antisense strand to SEQ ID NO: 1049454
ucuuacauugccagguacu

SEQ ID NO: 1049456 - RNA, 19 nt, Artificial Sequence
  Description of Artificial Sequence: Synthetic oligonucleotide
  Sense strand starting at position 3630 of SEQ ID NO: 915044
agucaucucuguuuauaaa

SEQ ID NO: 1049457 - RNA, 19 nt, Artificial Sequence
  Description of Artificial Sequence: Synthetic oligonucleotide
  Antisense strand to SEQ ID NO: 1049456
uuuauaaacagagaugacu

SEQ ID NO: 1049458 - RNA, 19 nt, Artificial Sequence
  Description of Artificial Sequence: Synthetic oligonucleotide
  Sense strand starting at position 3631 of SEQ ID NO: 915044
gucaucucuguuuauaaac

SEQ ID NO: 1049459 - RNA, 19 nt, Artificial Sequence
  Description of Artificial Sequence: Synthetic oligonucleotide
  Antisense strand to SEQ ID NO: 1049458
guuuauaaacagagaugac

SEQ ID NO: 1049460 - RNA, 19 nt, Artificial Sequence
  Description of Artificial Sequence: Synthetic oligonucleotide
  Sense strand starting at position 3664 of SEQ ID NO: 915044
cuuuguuuccaggacacuu

SEQ ID NO: 1049461 - RNA, 19 nt, Artificial Sequence
  Description of Artificial Sequence: Synthetic oligonucleotide
  Antisense strand to SEQ ID NO: 1049460
aaguguccuggaaacaaag

SEQ ID NO: 1049462 - RNA, 19 nt, Artificial Sequence
  Description of Artificial Sequence: Synthetic oligonucleotide
  Sense strand starting at position 3718 of SEQ ID NO: 915044
agcauugauuuagaauaac

SEQ ID NO: 1049463 - RNA, 19 nt, Artificial Sequence
  Description of Artificial Sequence: Synthetic oligonucleotide
  Antisense strand to SEQ ID NO: 1049462
guuauucuaaaucaaugcu

SEQ ID NO: 1049464 - RNA, 19 nt, Artificial Sequence
  Description of Artificial Sequence: Synthetic oligonucleotide
  Sense strand starting at position 3863 of SEQ ID NO: 915044
uuagcacucuuauuagaag

SEQ ID NO: 1049465 - RNA, 19 nt, Artificial Sequence
  Description of Artificial Sequence: Synthetic oligonucleotide
  Antisense strand to SEQ ID NO: 1049464
cuucuaauaagagugcuaa

SEQ ID NO: 1049466 - RNA, 19 nt, Artificial Sequence
  Description of Artificial Sequence: Synthetic oligonucleotide
  Sense strand starting at position 3890 of SEQ ID NO: 915044
gagagaugcuuucuuacug

SEQ ID NO: 1049467 - RNA, 19 nt, Artificial Sequence
  Description of Artificial Sequence: Synthetic oligonucleotide
  Antisense strand to SEQ ID NO: 1049466
caguaagaaagcaucucuc

SEQ ID NO: 1049468 - RNA, 19 nt, Artificial Sequence
  Description of Artificial Sequence: Synthetic oligonucleotide
  Sense strand starting at position 3927 of SEQ ID NO: 915044
ggcagucuucuguggacca

SEQ ID NO: 1049469 - RNA, 19 nt, Artificial Sequence
  Description of Artificial Sequence: Synthetic oligonucleotide
  Antisense strand to SEQ ID NO: 1049468
ugguccacagaagacugcc

SEQ ID NO: 1049470 - RNA, 19 nt, Artificial Sequence
  Description of Artificial Sequence: Synthetic oligonucleotide
  Sense strand starting at position 3980 of SEQ ID NO: 915044
uuggcauccuagucucaga

SEQ ID NO: 1049471 - RNA, 19 nt, Artificial Sequence
  Description of Artificial Sequence: Synthetic oligonucleotide
  Antisense strand to SEQ ID NO: 1049470
ucugagacuaggaugccaa

SEQ ID NO: 1049472 - RNA, 19 nt, Artificial Sequence
  Description of Artificial Sequence: Synthetic oligonucleotide
  Sense strand starting at position 711 of SEQ ID NO: 915045
gagguguuucgggcggcua

SEQ ID NO: 1049473 - RNA, 19 nt, Artificial Sequence
  Description of Artificial Sequence: Synthetic oligonucleotide
  Antisense strand to SEQ ID NO: 1049472
uagccgcccgaaacaccuc

SEQ ID NO: 1049474 - RNA, 19 nt, Artificial Sequence
  Description of Artificial Sequence: Synthetic oligonucleotide
  Sense strand starting at position 912 of SEQ ID NO: 915045
gaggguaggcuuugcaacu

SEQ ID NO: 1049475 - RNA, 19 nt, Artificial Sequence
  Description of Artificial Sequence: Synthetic oligonucleotide
  Antisense strand to SEQ ID NO: 1049474
aguugcaaagccuacccuc

SEQ ID NO: 1049476 - RNA, 19 nt, Artificial Sequence
  Description of Artificial Sequence: Synthetic oligonucleotide
  Sense strand starting at position 933 of SEQ ID NO: 915045
ccagcaauuuggcaaauga

SEQ ID NO: 1049477 - RNA, 19 nt, Artificial Sequence
  Description of Artificial Sequence: Synthetic oligonucleotide
  Antisense strand to SEQ ID NO: 1049476
ucauuugccaaauugcugg

SEQ ID NO: 1049478 - RNA, 19 nt, Artificial Sequence
  Description of Artificial Sequence: Synthetic oligonucleotide
  Sense strand starting at position 1034 of SEQ ID NO: 915045
uuugcaaaccguuauucuu

SEQ ID NO: 1049479 - RNA, 19 nt, Artificial Sequence
  Description of Artificial Sequence: Synthetic oligonucleotide
  Antisense strand to SEQ ID NO: 1049478
aagaauaacgguuugcaaa

SEQ ID NO: 1049480 - RNA, 19 nt, Artificial Sequence
  Description of Artificial Sequence: Synthetic oligonucleotide
  Sense strand starting at position 1071 of SEQ ID NO: 915045
agcagcgauccugacuuua

SEQ ID NO: 1049481 - RNA, 19 nt, Artificial Sequence
  Description of Artificial Sequence: Synthetic oligonucleotide
  Antisense strand to SEQ ID NO: 1049480
uaaagucaggaucgcugcu

SEQ ID NO: 1049482 - RNA, 19 nt, Artificial Sequence
  Description of Artificial Sequence: Synthetic oligonucleotide
  Sense strand starting at position 1073 of SEQ ID NO: 915045
cagcgauccugacuuuauu

SEQ ID NO: 1049483 - RNA, 19 nt, Artificial Sequence
  Description of Artificial Sequence: Synthetic oligonucleotide
  Antisense strand to SEQ ID NO: 1049482
aauaaagucaggaucgcug

SEQ ID NO: 1049484 - RNA, 19 nt, Artificial Sequence
  Description of Artificial Sequence: Synthetic oligonucleotide
  Sense strand starting at position 1076 of SEQ ID NO: 915045
cgauccugacuuuauuaga

SEQ ID NO: 1049485 - RNA, 19 nt, Artificial Sequence
  Description of Artificial Sequence: Synthetic oligonucleotide
  Antisense strand to SEQ ID NO: 1049484
ucuaauaaagucaggaucg

SEQ ID NO: 1049486 - RNA, 19 nt, Artificial Sequence
  Description of Artificial Sequence: Synthetic oligonucleotide
  Sense strand starting at position 2214 of SEQ ID NO: 915045
uagguaaaguugucaaauc

SEQ ID NO: 1049487 - RNA, 19 nt, Artificial Sequence
  Description of Artificial Sequence: Synthetic oligonucleotide
  Antisense strand to SEQ ID NO: 1049486
gauuugacaacuuuaccua

SEQ ID NO: 1049488 - RNA, 19 nt, Artificial Sequence
  Description of Artificial Sequence: Synthetic oligonucleotide
  Sense strand starting at position 2222 of SEQ ID NO: 915045
guugucaaaucccuccauu

SEQ ID NO: 1049489 - RNA, 19 nt, Artificial Sequence
  Description of Artificial Sequence: Synthetic oligonucleotide
  Antisense strand to SEQ ID NO: 1049488
aauggagggauuugacaac

SEQ ID NO: 1049490 - RNA, 19 nt, Artificial Sequence
  Description of Artificial Sequence: Synthetic oligonucleotide
  Sense strand starting at position 2236 of SEQ ID NO: 915045
ccauuucgauucuaagauc

SEQ ID NO: 1049491 - RNA, 19 nt, Artificial Sequence
  Description of Artificial Sequence: Synthetic oligonucleotide
  Antisense strand to SEQ ID NO: 1049490
gaucuuagaaucgaaaugg

SEQ ID NO: 1049492 - RNA, 19 nt, Artificial Sequence
  Description of Artificial Sequence: Synthetic oligonucleotide
  Sense strand starting at position 2277 of SEQ ID NO: 915045
ggacuuuaagugcgggaaa

SEQ ID NO: 1049493 - RNA, 19 nt, Artificial Sequence
  Description of Artificial Sequence: Synthetic oligonucleotide
  Antisense strand to SEQ ID NO: 1049492
uuucccgcacuuaaagucc

SEQ ID NO: 1049494 - RNA, 19 nt, Artificial Sequence
  Description of Artificial Sequence: Synthetic oligonucleotide
  Sense strand starting at position 2279 of SEQ ID NO: 915045
acuuuaagugcgggaaauu

SEQ ID NO: 1049495 - RNA, 19 nt, Artificial Sequence
  Description of Artificial Sequence: Synthetic oligonucleotide
  Antisense strand to SEQ ID NO: 1049494
aauuucccgcacuuaaagu

SEQ ID NO: 1049496 - RNA, 19 nt, Artificial Sequence
  Description of Artificial Sequence: Synthetic oligonucleotide
  Sense strand starting at position 2280 of SEQ ID NO: 915045
cuuuaagugcgggaaauua

SEQ ID NO: 1049497 - RNA, 19 nt, Artificial Sequence
  Description of Artificial Sequence: Synthetic oligonucleotide
  Antisense strand to SEQ ID NO: 1049496
uaauuucccgcacuuaaag

SEQ ID NO: 1049498 - RNA, 19 nt, Artificial Sequence
  Description of Artificial Sequence: Synthetic oligonucleotide
  Sense strand starting at position 2333 of SEQ ID NO: 915045
gguguuguuuggauauugu

SEQ ID NO: 1049499 - RNA, 19 nt, Artificial Sequence
  Description of Artificial Sequence: Synthetic oligonucleotide
  Antisense strand to SEQ ID NO: 1049498
acaauauccaaacaacacc

SEQ ID NO: 1049500 - RNA, 19 nt, Artificial Sequence
  Description of Artificial Sequence: Synthetic oligonucleotide
  Sense strand starting at position 2365 of SEQ ID NO: 915045
uuauccuaacugugaaguu

SEQ ID NO: 1049501 - RNA, 19 nt, Artificial Sequence
  Description of Artificial Sequence: Synthetic oligonucleotide
  Antisense strand to SEQ ID NO: 1049500
aacuucacaguuaggauaa

SEQ ID NO: 1049502 - RNA, 19 nt, Artificial Sequence
  Description of Artificial Sequence: Synthetic oligonucleotide
  Sense strand starting at position 2446 of SEQ ID NO: 915045
agacuuaaguuagaagaaa

SEQ ID NO: 1049503 - RNA, 19 nt, Artificial Sequence
  Description of Artificial Sequence: Synthetic oligonucleotide
  Antisense strand to SEQ ID NO: 1049502
uuucuucuaacuuaagucu

SEQ ID NO: 1049504 - RNA, 19 nt, Artificial Sequence
  Description of Artificial Sequence: Synthetic oligonucleotide
  Sense strand starting at position 2464 of SEQ ID NO: 915045
aacuccgauguuuggaaga

SEQ ID NO: 1049505 - RNA, 19 nt, Artificial Sequence
  Description of Artificial Sequence: Synthetic oligonucleotide
  Antisense strand to SEQ ID NO: 1049504
ucuuccaaacaucggaguu

SEQ ID NO: 1049506 - RNA, 19 nt, Artificial Sequence
  Description of Artificial Sequence: Synthetic oligonucleotide
  Sense strand starting at position 2527 of SEQ ID NO: 915045
uucugaaaucuguggucuc

SEQ ID NO: 1049507 - RNA, 19 nt, Artificial Sequence
  Description of Artificial Sequence: Synthetic oligonucleotide
  Antisense strand to SEQ ID NO: 1049506
gagaccacagauuucagaa

SEQ ID NO: 1049508 - RNA, 19 nt, Artificial Sequence
  Description of Artificial Sequence: Synthetic oligonucleotide
  Sense strand starting at position 2530 of SEQ ID NO: 915045
ugaaaucuguggucucuuu

SEQ ID NO: 1049509 - RNA, 19 nt, Artificial Sequence
  Description of Artificial Sequence: Synthetic oligonucleotide
  Antisense strand to SEQ ID NO: 1049508
aaagagaccacagauuuca

SEQ ID NO: 1049510 - RNA, 19 nt, Artificial Sequence
  Description of Artificial Sequence: Synthetic oligonucleotide
  Sense strand starting at position 2580 of SEQ ID NO: 915045
augauauagaagcgucauu

SEQ ID NO: 1049511 - RNA, 19 nt, Artificial Sequence
  Description of Artificial Sequence: Synthetic oligonucleotide
  Antisense strand to SEQ ID NO: 1049510
aaugacgcuucuauaucau

SEQ ID NO: 1049512 - RNA, 19 nt, Artificial Sequence
  Description of Artificial Sequence: Synthetic oligonucleotide
  Sense strand starting at position 2585 of SEQ ID NO: 915045
auagaagcgucauuaaaua

SEQ ID NO: 1049513 - RNA, 19 nt, Artificial Sequence
  Description of Artificial Sequence: Synthetic oligonucleotide
  Antisense strand to SEQ ID NO: 1049512
uauuuaaugacgcuucuau

SEQ ID NO: 1049514 - RNA, 19 nt, Artificial Sequence
  Description of Artificial Sequence: Synthetic oligonucleotide
  Sense strand starting at position 2622 of SEQ ID NO: 915045
acgugaccuuaauucuuaa

SEQ ID NO: 1049515 - RNA, 19 nt, Artificial Sequence
  Description of Artificial Sequence: Synthetic oligonucleotide
  Antisense strand to SEQ ID NO: 1049514
uuaagaauuaaggucacgu

SEQ ID NO: 1049516 - RNA, 19 nt, Artificial Sequence
  Description of Artificial Sequence: Synthetic oligonucleotide
  Sense strand starting at position 2650 of SEQ ID NO: 915045
uguauaauauuacugaggu

SEQ ID NO: 1049517 - RNA, 19 nt, Artificial Sequence
  Description of Artificial Sequence: Synthetic oligonucleotide
  Antisense strand to SEQ ID NO: 1049516
accucaguaauauuauaca

SEQ ID NO: 1049518 - RNA, 19 nt, Artificial Sequence
  Description of Artificial Sequence: Synthetic oligonucleotide
  Sense strand starting at position 2787 of SEQ ID NO: 915045
augugagaaagguguucua

SEQ ID NO: 1049519 - RNA, 19 nt, Artificial Sequence
  Description of Artificial Sequence: Synthetic oligonucleotide
  Antisense strand to SEQ ID NO: 1049518
uagaacaccuuucucacau

SEQ ID NO: 1049520 - RNA, 19 nt, Artificial Sequence
  Description of Artificial Sequence: Synthetic oligonucleotide
  Sense strand starting at position 2790 of SEQ ID NO: 915045
ugagaaagguguucuagau

SEQ ID NO: 1049521 - RNA, 19 nt, Artificial Sequence
  Description of Artificial Sequence: Synthetic oligonucleotide
  Antisense strand to SEQ ID NO: 1049520
aucuagaacaccuuucuca

SEQ ID NO: 1049522 - RNA, 19 nt, Artificial Sequence
  Description of Artificial Sequence: Synthetic oligonucleotide
  Sense strand starting at position 2794 of SEQ ID NO: 915045
aaagguguucuagauguca

SEQ ID NO: 1049523 - RNA, 19 nt, Artificial Sequence
  Description of Artificial Sequence: Synthetic oligonucleotide
  Antisense strand to SEQ ID NO: 1049522
ugacaucuagaacaccuuu

SEQ ID NO: 1049524 - RNA, 19 nt, Artificial Sequence
  Description of Artificial Sequence: Synthetic oligonucleotide
  Sense strand starting at position 2812 of SEQ ID NO: 915045
agguuaacccauuagccua

SEQ ID NO: 1049525 - RNA, 19 nt, Artificial Sequence
  Description of Artificial Sequence: Synthetic oligonucleotide
  Antisense strand to SEQ ID NO: 1049524
uaggcuaauggguuaaccu

SEQ ID NO: 1049526 - RNA, 19 nt, Artificial Sequence
  Description of Artificial Sequence: Synthetic oligonucleotide
  Sense strand starting at position 2851 of SEQ ID NO: 915045
agaggaagucugcauaagu

SEQ ID NO: 1049527 - RNA, 19 nt, Artificial Sequence
  Description of Artificial Sequence: Synthetic oligonucleotide
  Antisense strand to SEQ ID NO: 1049526
acuuaugcagacuuccucu

SEQ ID NO: 1049528 - RNA, 19 nt, Artificial Sequence
  Description of Artificial Sequence: Synthetic oligonucleotide
  Sense strand starting at position 2876 of SEQ ID NO: 915045
gcauuaaagcacuaauguu

SEQ ID NO: 1049529 - RNA, 19 nt, Artificial Sequence
  Description of Artificial Sequence: Synthetic oligonucleotide
  Antisense strand to SEQ ID NO: 1049528
aacauuagugcuuuaaugc

SEQ ID NO: 1049530 - RNA, 19 nt, Artificial Sequence
  Description of Artificial Sequence: Synthetic oligonucleotide
  Sense strand starting at position 2886 of SEQ ID NO: 915045
acuaauguuaccggguacu

SEQ ID NO: 1049531 - RNA, 19 nt, Artificial Sequence
  Description of Artificial Sequence: Synthetic oligonucleotide
  Antisense strand to SEQ ID NO: 1049530
aguacccgguaacauuagu

SEQ ID NO: 1049532 - RNA, 19 nt, Artificial Sequence
  Description of Artificial Sequence: Synthetic oligonucleotide
  Sense strand starting at position 3378 of SEQ ID NO: 915045
acaccaguacaguguaauu

SEQ ID NO: 1049533 - RNA, 19 nt, Artificial Sequence
  Description of Artificial Sequence: Synthetic oligonucleotide
  Antisense strand to SEQ ID NO: 1049532
aauuacacuguacuggugu

SEQ ID NO: 1049534 - RNA, 19 nt, Artificial Sequence
  Description of Artificial Sequence: Synthetic oligonucleotide
  Sense strand starting at position 3431 of SEQ ID NO: 915045
guaaaucuuccacaacguu

SEQ ID NO: 1049535 - RNA, 19 nt, Artificial Sequence
  Description of Artificial Sequence: Synthetic oligonucleotide
  Antisense strand to SEQ ID NO: 1049534
aacguuguggaagauuuac

SEQ ID NO: 1049536 - RNA, 19 nt, Artificial Sequence
  Description of Artificial Sequence: Synthetic oligonucleotide
  Sense strand starting at position 3454 of SEQ ID NO: 915045
uugggcuauuucucucauu

SEQ ID NO: 1049537 - RNA, 19 nt, Artificial Sequence
  Description of Artificial Sequence: Synthetic oligonucleotide
  Antisense strand to SEQ ID NO: 1049536
aaugagagaaauagcccaa

SEQ ID NO: 1049538 - RNA, 19 nt, Artificial Sequence
  Description of Artificial Sequence: Synthetic oligonucleotide
  Sense strand starting at position 3567 of SEQ ID NO: 915045
ucuguaugugcauaugauu

SEQ ID NO: 1049539 - RNA, 19 nt, Artificial Sequence
  Description of Artificial Sequence: Synthetic oligonucleotide
  Antisense strand to SEQ ID NO: 1049538
aaucauaugcacauacaga

SEQ ID NO: 1049540 - RNA, 19 nt, Artificial Sequence
  Description of Artificial Sequence: Synthetic oligonucleotide
  Sense strand starting at position 3631 of SEQ ID NO: 915045
ugccuaacaucaguauaag

SEQ ID NO: 1049541 - RNA, 19 nt, Artificial Sequence
  Description of Artificial Sequence: Synthetic oligonucleotide
  Antisense strand to SEQ ID NO: 1049540
cuuauacugauguuaggca

SEQ ID NO: 1049542 - RNA, 19 nt, Artificial Sequence
  Description of Artificial Sequence: Synthetic oligonucleotide
  Sense strand starting at position 3762 of SEQ ID NO: 915045
guuuguggaguuugauaau

SEQ ID NO: 1049543 - RNA, 19 nt, Artificial Sequence
  Description of Artificial Sequence: Synthetic oligonucleotide
  Antisense strand to SEQ ID NO: 1049542
auuaucaaacuccacaaac

SEQ ID NO: 1049544 - RNA, 19 nt, Artificial Sequence
  Description of Artificial Sequence: Synthetic oligonucleotide
  Sense strand starting at position 3848 of SEQ ID NO: 915045
gcuagaugcagugaauuau

SEQ ID NO: 1049545 - RNA, 19 nt, Artificial Sequence
  Description of Artificial Sequence: Synthetic oligonucleotide
  Antisense strand to SEQ ID NO: 1049544
auaauucacugcaucuagc

SEQ ID NO: 1049546 - RNA, 19 nt, Artificial Sequence
  Description of Artificial Sequence: Synthetic oligonucleotide
  Sense strand starting at position 3884 of SEQ ID NO: 915045
gguugcuguauuuaagugu

SEQ ID NO: 1049547 - RNA, 19 nt, Artificial Sequence
  Description of Artificial Sequence: Synthetic oligonucleotide
  Antisense strand to SEQ ID NO: 1049546
acacuuaaauacagcaacc

SEQ ID NO: 1049548 - RNA, 19 nt, Artificial Sequence
  Description of Artificial Sequence: Synthetic oligonucleotide
  Sense strand starting at position 3888 of SEQ ID NO: 915045
gcuguauuuaagugucuuu

SEQ ID NO: 1049549 - RNA, 19 nt, Artificial Sequence
  Description of Artificial Sequence: Synthetic oligonucleotide
  Antisense strand to SEQ ID NO: 1049548
aaagacacuuaaauacagc

SEQ ID NO: 1049550 - RNA, 19 nt, Artificial Sequence
  Description of Artificial Sequence: Synthetic oligonucleotide
  Sense strand starting at position 3891 of SEQ ID NO: 915045
guauuuaagugucuuugau

SEQ ID NO: 1049551 - RNA, 19 nt, Artificial Sequence
  Description of Artificial Sequence: Synthetic oligonucleotide
  Antisense strand to SEQ ID NO: 1049550
aucaaagacacuuaaauac

SEQ ID NO: 1049552 - RNA, 19 nt, Artificial Sequence
  Description of Artificial Sequence: Synthetic oligonucleotide
  Sense strand starting at position 10 of SEQ ID NO: 915046
guauaaaggcccuaacaau

SEQ ID NO: 1049553 - RNA, 19 nt, Artificial Sequence
  Description of Artificial Sequence: Synthetic oligonucleotide
  Antisense strand to SEQ ID NO: 1049552
auuguuagggccuuuauac

SEQ ID NO: 1049554 - RNA, 19 nt, Artificial Sequence
  Description of Artificial Sequence: Synthetic oligonucleotide
  Sense strand starting at position 50 of SEQ ID NO: 915046
gucaauagaugguauuuau

SEQ ID NO: 1049555 - RNA, 19 nt, Artificial Sequence
  Description of Artificial Sequence: Synthetic oligonucleotide
  Antisense strand to SEQ ID NO: 1049554
auaaauaccaucuauugac

SEQ ID NO: 1049556 - RNA, 19 nt, Artificial Sequence
  Description of Artificial Sequence: Synthetic oligonucleotide
  Sense strand starting at position 75 of SEQ ID NO: 915046
ugcuauggaugaguguuaa

SEQ ID NO: 1049557 - RNA, 19 nt, Artificial Sequence
  Description of Artificial Sequence: Synthetic oligonucleotide
  Antisense strand to SEQ ID NO: 1049556
uuaacacucauccauagca

SEQ ID NO: 1049558 - RNA, 19 nt, Artificial Sequence
  Description of Artificial Sequence: Synthetic oligonucleotide
  Sense strand starting at position 122 of SEQ ID NO: 915046
uacagagcuuaauagggaa

SEQ ID NO: 1049559 - RNA, 19 nt, Artificial Sequence
  Description of Artificial Sequence: Synthetic oligonucleotide
  Antisense strand to SEQ ID NO: 1049558
uucccuauuaagcucugua

SEQ ID NO: 1049560 - RNA, 19 nt, Artificial Sequence
  Description of Artificial Sequence: Synthetic oligonucleotide
  Sense strand starting at position 308 of SEQ ID NO: 915046
caguguuugcuugugggua

SEQ ID NO: 1049561 - RNA, 19 nt, Artificial Sequence
  Description of Artificial Sequence: Synthetic oligonucleotide
  Antisense strand to SEQ ID NO: 1049560
uacccacaagcaaacacug

SEQ ID NO: 1049562 - RNA, 19 nt, Artificial Sequence
  Description of Artificial Sequence: Synthetic oligonucleotide
  Sense strand starting at position 313 of SEQ ID NO: 915046
uuugcuuguggguauuagu

SEQ ID NO: 1049563 - RNA, 19 nt, Artificial Sequence
  Description of Artificial Sequence: Synthetic oligonucleotide
  Antisense strand to SEQ ID NO: 1049562
acuaauacccacaagcaaa

SEQ ID NO: 1049564 - RNA, 19 nt, Artificial Sequence
  Description of Artificial Sequence: Synthetic oligonucleotide
  Sense strand starting at position 340 of SEQ ID NO: 915046
agcaguuauuauguggcaa

SEQ ID NO: 1049565 - RNA, 19 nt, Artificial Sequence
  Description of Artificial Sequence: Synthetic oligonucleotide
  Antisense strand to SEQ ID NO: 1049564
uugccacauaauaacugcu

SEQ ID NO: 1049566 - RNA, 19 nt, Artificial Sequence
  Description of Artificial Sequence: Synthetic oligonucleotide
  Sense strand starting at position 385 of SEQ ID NO: 915046
cugugagguagauauugua

SEQ ID NO: 1049567 - RNA, 19 nt, Artificial Sequence
  Description of Artificial Sequence: Synthetic oligonucleotide
  Antisense strand to SEQ ID NO: 1049566
uacaauaucuaccucacag

SEQ ID NO: 1049568 - RNA, 19 nt, Artificial Sequence
  Description of Artificial Sequence: Synthetic oligonucleotide
  Sense strand starting at position 458 of SEQ ID NO: 915046
cgguaauacauggaugcua

SEQ ID NO: 1049569 - RNA, 19 nt, Artificial Sequence
  Description of Artificial Sequence: Synthetic oligonucleotide
  Antisense strand to SEQ ID NO: 1049568
uagcauccauguauuaccg

SEQ ID NO: 1049570 - RNA, 19 nt, Artificial Sequence
  Description of Artificial Sequence: Synthetic oligonucleotide
  Sense strand starting at position 621 of SEQ ID NO: 915046
gguguacaggcuugacaca

SEQ ID NO: 1049571 - RNA, 19 nt, Artificial Sequence
  Description of Artificial Sequence: Synthetic oligonucleotide
  Antisense strand to SEQ ID NO: 1049570
ugugucaagccuguacacc

SEQ ID NO: 1049572 - RNA, 19 nt, Artificial Sequence
  Description of Artificial Sequence: Synthetic oligonucleotide
  Sense strand starting at position 726 of SEQ ID NO: 915046
cugcaauugcucgaggcua

SEQ ID NO: 1049573 - RNA, 19 nt, Artificial Sequence
  Description of Artificial Sequence: Synthetic oligonucleotide
  Antisense strand to SEQ ID NO: 1049572
uagccucgagcaauugcag

SEQ ID NO: 1049574 - RNA, 19 nt, Artificial Sequence
  Description of Artificial Sequence: Synthetic oligonucleotide
  Sense strand starting at position 807 of SEQ ID NO: 915046
agugguagugggcaugaaa

SEQ ID NO: 1049575 - RNA, 19 nt, Artificial Sequence
  Description of Artificial Sequence: Synthetic oligonucleotide
  Antisense strand to SEQ ID NO: 1049574
uuucaugcccacuaccacu

SEQ ID NO: 1049576 - RNA, 19 nt, Artificial Sequence
  Description of Artificial Sequence: Synthetic oligonucleotide
  Sense strand starting at position 905 of SEQ ID NO: 915046
ucaugugacguuugaugau

SEQ ID NO: 1049577 - RNA, 19 nt, Artificial Sequence
  Description of Artificial Sequence: Synthetic oligonucleotide
  Antisense strand to SEQ ID NO: 1049576
aucaucaaacgucacauga

SEQ ID NO: 1049578 - RNA, 19 nt, Artificial Sequence
  Description of Artificial Sequence: Synthetic oligonucleotide
  Sense strand starting at position 914 of SEQ ID NO: 915046
guuugaugaugucugcaug

SEQ ID NO: 1049579 - RNA, 19 nt, Artificial Sequence
  Description of Artificial Sequence: Synthetic oligonucleotide
  Antisense strand to SEQ ID NO: 1049578
caugcagacaucaucaaac

SEQ ID NO: 1049580 - RNA, 19 nt, Artificial Sequence
  Description of Artificial Sequence: Synthetic oligonucleotide
  Sense strand starting at position 917 of SEQ ID NO: 915046
ugaugaugucugcauguga

SEQ ID NO: 1049581 - RNA, 19 nt, Artificial Sequence
  Description of Artificial Sequence: Synthetic oligonucleotide
  Antisense strand to SEQ ID NO: 1049580
ucacaugcagacaucauca

SEQ ID NO: 1049582 - RNA, 19 nt, Artificial Sequence
  Description of Artificial Sequence: Synthetic oligonucleotide
  Sense strand starting at position 921 of SEQ ID NO: 915046
gaugucugcaugugagaca

SEQ ID NO: 1049583 - RNA, 19 nt, Artificial Sequence
  Description of Artificial Sequence: Synthetic oligonucleotide
  Antisense strand to SEQ ID NO: 1049582
ugucucacaugcagacauc

SEQ ID NO: 1049584 - RNA, 19 nt, Artificial Sequence
  Description of Artificial Sequence: Synthetic oligonucleotide
  Sense strand starting at position 968 of SEQ ID NO: 915046
aagaaauaagucuggcgga

SEQ ID NO: 1049585 - RNA, 19 nt, Artificial Sequence
  Description of Artificial Sequence: Synthetic oligonucleotide
  Antisense strand to SEQ ID NO: 1049584
uccgccagacuuauuucuu

SEQ ID NO: 1049586 - RNA, 19 nt, Artificial Sequence
  Description of Artificial Sequence: Synthetic oligonucleotide
  Sense strand starting at position 1014 of SEQ ID NO: 915046
cuuaauagguaagaauaga

SEQ ID NO: 1049587 - RNA, 19 nt, Artificial Sequence
  Description of Artificial Sequence: Synthetic oligonucleotide
  Antisense strand to SEQ ID NO: 1049586
ucuauucuuaccuauuaag

SEQ ID NO: 1049588 - RNA, 19 nt, Artificial Sequence
  Description of Artificial Sequence: Synthetic oligonucleotide
  Sense strand starting at position 1615 of SEQ ID NO: 915046
gcggguguuccgcuaauuc

SEQ ID NO: 1049589 - RNA, 19 nt, Artificial Sequence
  Description of Artificial Sequence: Synthetic oligonucleotide
  Antisense strand to SEQ ID NO: 1049588
gaauuagcggaacacccgc

SEQ ID NO: 1049590 - RNA, 19 nt, Artificial Sequence
  Description of Artificial Sequence: Synthetic oligonucleotide
  Sense strand starting at position 1617 of SEQ ID NO: 915046
ggguguuccgcuaauucgu

SEQ ID NO: 1049591 - RNA, 19 nt, Artificial Sequence
  Description of Artificial Sequence: Synthetic oligonucleotide
  Antisense strand to SEQ ID NO: 1049590
acgaauuagcggaacaccc

SEQ ID NO: 1049592 - RNA, 19 nt, Artificial Sequence
  Description of Artificial Sequence: Synthetic oligonucleotide
  Sense strand starting at position 1628 of SEQ ID NO: 915046
uaauucguucgagaaggag

SEQ ID NO: 1049593 - RNA, 19 nt, Artificial Sequence
  Description of Artificial Sequence: Synthetic oligonucleotide
  Antisense strand to SEQ ID NO: 1049592
cuccuucucgaacgaauua

SEQ ID NO: 1049594 - RNA, 19 nt, Artificial Sequence
  Description of Artificial Sequence: Synthetic oligonucleotide
  Sense strand starting at position 1644 of SEQ ID NO: 915046
gagccagggccugaguuaa

SEQ ID NO: 1049595 - RNA, 19 nt, Artificial Sequence
  Description of Artificial Sequence: Synthetic oligonucleotide
  Antisense strand to SEQ ID NO: 1049594
uuaacucaggcccuggcuc

SEQ ID NO: 1049596 - RNA, 19 nt, Artificial Sequence
  Description of Artificial Sequence: Synthetic oligonucleotide
  Sense strand starting at position 1710 of SEQ ID NO: 915046
ucuaaaggguaucugagau

SEQ ID NO: 1049597 - RNA, 19 nt, Artificial Sequence
  Description of Artificial Sequence: Synthetic oligonucleotide
  Antisense strand to SEQ ID NO: 1049596
aucucagauacccuuuaga

SEQ ID NO: 1049598 - RNA, 19 nt, Artificial Sequence
  Description of Artificial Sequence: Synthetic oligonucleotide
  Sense strand starting at position 1730 of SEQ ID NO: 915046
ggguacuuccgguaguaac

SEQ ID NO: 1049599 - RNA, 19 nt, Artificial Sequence
  Description of Artificial Sequence: Synthetic oligonucleotide
  Antisense strand to SEQ ID NO: 1049598
guuacuaccggaaguaccc

SEQ ID NO: 1049600 - RNA, 19 nt, Artificial Sequence
  Description of Artificial Sequence: Synthetic oligonucleotide
  Sense strand starting at position 1814 of SEQ ID NO: 915046
acucgaacagcguaauauc

SEQ ID NO: 1049601 - RNA, 19 nt, Artificial Sequence
  Description of Artificial Sequence: Synthetic oligonucleotide
  Antisense strand to SEQ ID NO: 1049600
gauauuacgcuguucgagu

SEQ ID NO: 1049602 - RNA, 19 nt, Artificial Sequence
  Description of Artificial Sequence: Synthetic oligonucleotide
  Sense strand starting at position 1825 of SEQ ID NO: 915046
guaauauccgaaugugaaa

SEQ ID NO: 1049603 - RNA, 19 nt, Artificial Sequence
  Description of Artificial Sequence: Synthetic oligonucleotide
  Antisense strand to SEQ ID NO: 1049602
uuucacauucggauauuac

SEQ ID NO: 1049604 - RNA, 19 nt, Artificial Sequence
  Description of Artificial Sequence: Synthetic oligonucleotide
  Sense strand starting at position 1862 of SEQ ID NO: 915046
gagcuaaaguaauaaggga

SEQ ID NO: 1049605 - RNA, 19 nt, Artificial Sequence
  Description of Artificial Sequence: Synthetic oligonucleotide
  Antisense strand to SEQ ID NO: 1049604
ucccuuauuacuuuagcuc

SEQ ID NO: 1049606 - RNA, 19 nt, Artificial Sequence
  Description of Artificial Sequence: Synthetic oligonucleotide
  Sense strand starting at position 3189 of SEQ ID NO: 915046
gggagaccgcucugccaau

SEQ ID NO: 1049607 - RNA, 19 nt, Artificial Sequence
  Description of Artificial Sequence: Synthetic oligonucleotide
  Antisense strand to SEQ ID NO: 1049606
auuggcagagcggucuccc

SEQ ID NO: 1049608 - RNA, 19 nt, Artificial Sequence
  Description of Artificial Sequence: Synthetic oligonucleotide
  Sense strand starting at position 3310 of SEQ ID NO: 915046
uuagauguggugugagaga

SEQ ID NO: 1049609 - RNA, 19 nt, Artificial Sequence
  Description of Artificial Sequence: Synthetic oligonucleotide
  Antisense strand to SEQ ID NO: 1049608
ucucucacaccacaucuaa

SEQ ID NO: 1049610 - RNA, 19 nt, Artificial Sequence
  Description of Artificial Sequence: Synthetic oligonucleotide
  Sense strand starting at position 3315 of SEQ ID NO: 915046
uguggugugagagagcuaa

SEQ ID NO: 1049611 - RNA, 19 nt, Artificial Sequence
  Description of Artificial Sequence: Synthetic oligonucleotide
  Antisense strand to SEQ ID NO: 1049610
uuagcucucucacaccaca

SEQ ID NO: 1049612 - RNA, 19 nt, Artificial Sequence
  Description of Artificial Sequence: Synthetic oligonucleotide
  Sense strand starting at position 3362 of SEQ ID NO: 915046
ugaacuaccuaugcuugua

SEQ ID NO: 1049613 - RNA, 19 nt, Artificial Sequence
  Description of Artificial Sequence: Synthetic oligonucleotide
  Antisense strand to SEQ ID NO: 1049612
uacaagcauagguaguuca

SEQ ID NO: 1049614 - RNA, 19 nt, Artificial Sequence
  Description of Artificial Sequence: Synthetic oligonucleotide
  Sense strand starting at position 3365 of SEQ ID NO: 915046
acuaccuaugcuuguacau

SEQ ID NO: 1049615 - RNA, 19 nt, Artificial Sequence
  Description of Artificial Sequence: Synthetic oligonucleotide
  Antisense strand to SEQ ID NO: 1049614
auguacaagcauagguagu

SEQ ID NO: 1049616 - RNA, 19 nt, Artificial Sequence
  Description of Artificial Sequence: Synthetic oligonucleotide
  Sense strand starting at position 3374 of SEQ ID NO: 915046
gcuuguacauguuuccaga

SEQ ID NO: 1049617 - RNA, 19 nt, Artificial Sequence
  Description of Artificial Sequence: Synthetic oligonucleotide
  Antisense strand to SEQ ID NO: 1049616
ucuggaaacauguacaagc

SEQ ID NO: 1049618 - RNA, 19 nt, Artificial Sequence
  Description of Artificial Sequence: Synthetic oligonucleotide
  Sense strand starting at position 3376 of SEQ ID NO: 915046
uuguacauguuuccagaaa

SEQ ID NO: 1049619 - RNA, 19 nt, Artificial Sequence
  Description of Artificial Sequence: Synthetic oligonucleotide
  Antisense strand to SEQ ID NO: 1049618
uuucuggaaacauguacaa

SEQ ID NO: 1049620 - RNA, 19 nt, Artificial Sequence
  Description of Artificial Sequence: Synthetic oligonucleotide
  Sense strand starting at position 3450 of SEQ ID NO: 915046
ucuuuauuagaaugcaagu

SEQ ID NO: 1049621 - RNA, 19 nt, Artificial Sequence
  Description of Artificial Sequence: Synthetic oligonucleotide
  Antisense strand to SEQ ID NO: 1049620
acuugcauucuaauaaaga

SEQ ID NO: 1049622 - RNA, 19 nt, Artificial Sequence
  Description of Artificial Sequence: Synthetic oligonucleotide
  Sense strand starting at position 3500 of SEQ ID NO: 915046
aagaaaugguguuucuaaa

SEQ ID NO: 1049623 - RNA, 19 nt, Artificial Sequence
  Description of Artificial Sequence: Synthetic oligonucleotide
  Antisense strand to SEQ ID NO: 1049622
uuuagaaacaccauuucuu

SEQ ID NO: 1049624 - RNA, 19 nt, Artificial Sequence
  Description of Artificial Sequence: Synthetic oligonucleotide
  Sense strand starting at position 3523 of SEQ ID NO: 915046
acaauuaagugaucagagu

SEQ ID NO: 1049625 - RNA, 19 nt, Artificial Sequence
  Description of Artificial Sequence: Synthetic oligonucleotide
  Antisense strand to SEQ ID NO: 1049624
acucugaucacuuaauugu

SEQ ID NO: 1049626 - RNA, 19 nt, Artificial Sequence
  Description of Artificial Sequence: Synthetic oligonucleotide
  Sense strand starting at position 3532 of SEQ ID NO: 915046
ugaucagaguuucucaaug

SEQ ID NO: 1049627 - RNA, 19 nt, Artificial Sequence
  Description of Artificial Sequence: Synthetic oligonucleotide
  Antisense strand to SEQ ID NO: 1049626
cauugagaaacucugauca

SEQ ID NO: 1049628 - RNA, 19 nt, Artificial Sequence
  Description of Artificial Sequence: Synthetic oligonucleotide
  Sense strand starting at position 3537 of SEQ ID NO: 915046
agaguuucucaaugcuuua

SEQ ID NO: 1049629 - RNA, 19 nt, Artificial Sequence
  Description of Artificial Sequence: Synthetic oligonucleotide
  Antisense strand to SEQ ID NO: 1049628
uaaagcauugagaaacucu

SEQ ID NO: 1049630 - RNA, 19 nt, Artificial Sequence
  Description of Artificial Sequence: Synthetic oligonucleotide
  Sense strand starting at position 3955 of SEQ ID NO: 915046
aagacugggucgucuccaa

SEQ ID NO: 1049631 - RNA, 19 nt, Artificial Sequence
  Description of Artificial Sequence: Synthetic oligonucleotide
  Antisense strand to SEQ ID NO: 1049630
uuggagacgacccagucuu

SEQ ID NO: 1049632 - RNA, 19 nt, Artificial Sequence
  Description of Artificial Sequence: Synthetic oligonucleotide
  Sense strand starting at position 512 of SEQ ID NO: 915047
auucuaagguguuuaacau

SEQ ID NO: 1049633 - RNA, 19 nt, Artificial Sequence
  Description of Artificial Sequence: Synthetic oligonucleotide
  Antisense strand to SEQ ID NO: 1049632
auguuaaacaccuuagaau

SEQ ID NO: 1049634 - RNA, 19 nt, Artificial Sequence
  Description of Artificial Sequence: Synthetic oligonucleotide
  Sense strand starting at position 513 of SEQ ID NO: 915047
uucuaagguguuuaacaug

SEQ ID NO: 1049635 - RNA, 19 nt, Artificial Sequence
  Description of Artificial Sequence: Synthetic oligonucleotide
  Antisense strand to SEQ ID NO: 1049634
cauguuaaacaccuuagaa

SEQ ID NO: 1049636 - RNA, 19 nt, Artificial Sequence
  Description of Artificial Sequence: Synthetic oligonucleotide
  Sense strand starting at position 565 of SEQ ID NO: 915047
uuucucaaacuguggaaau

SEQ ID NO: 1049637 - RNA, 19 nt, Artificial Sequence
  Description of Artificial Sequence: Synthetic oligonucleotide
  Antisense strand to SEQ ID NO: 1049636
auuuccacaguuugagaaa

SEQ ID NO: 1049638 - RNA, 19 nt, Artificial Sequence
  Description of Artificial Sequence: Synthetic oligonucleotide
  Sense strand starting at position 755 of SEQ ID NO: 915047
ccgggauuccuacauucca

SEQ ID NO: 1049639 - RNA, 19 nt, Artificial Sequence
  Description of Artificial Sequence: Synthetic oligonucleotide
  Antisense strand to SEQ ID NO: 1049638
uggaauguaggaaucccgg

SEQ ID NO: 1049640 - RNA, 19 nt, Artificial Sequence
  Description of Artificial Sequence: Synthetic oligonucleotide
  Sense strand starting at position 1045 of SEQ ID NO: 915047
cacugauaugcggaugaau

SEQ ID NO: 1049641 - RNA, 19 nt, Artificial Sequence
  Description of Artificial Sequence: Synthetic oligonucleotide
  Antisense strand to SEQ ID NO: 1049640
auucauccgcauaucagug

SEQ ID NO: 1049642 - RNA, 19 nt, Artificial Sequence
  Description of Artificial Sequence: Synthetic oligonucleotide
  Sense strand starting at position 1047 of SEQ ID NO: 915047
cugauaugcggaugaauga

SEQ ID NO: 1049643 - RNA, 19 nt, Artificial Sequence
  Description of Artificial Sequence: Synthetic oligonucleotide
  Antisense strand to SEQ ID NO: 1049642
ucauucauccgcauaucag

SEQ ID NO: 1049644 - RNA, 19 nt, Artificial Sequence
  Description of Artificial Sequence: Synthetic oligonucleotide
  Sense strand starting at position 1173 of SEQ ID NO: 915047
caccguuuccgcucucaca

SEQ ID NO: 1049645 - RNA, 19 nt, Artificial Sequence
  Description of Artificial Sequence: Synthetic oligonucleotide
  Antisense strand to SEQ ID NO: 1049644
ugugagagcggaaacggug

SEQ ID NO: 1049646 - RNA, 19 nt, Artificial Sequence
  Description of Artificial Sequence: Synthetic oligonucleotide
  Sense strand starting at position 1208 of SEQ ID NO: 915047
agggcaggccuucaaugua

SEQ ID NO: 1049647 - RNA, 19 nt, Artificial Sequence
  Description of Artificial Sequence: Synthetic oligonucleotide
  Antisense strand to SEQ ID NO: 1049646
uacauugaaggccugcccu

SEQ ID NO: 1049648 - RNA, 19 nt, Artificial Sequence
  Description of Artificial Sequence: Synthetic oligonucleotide
  Sense strand starting at position 1242 of SEQ ID NO: 915047
ggacuccgcuucucacaaa

SEQ ID NO: 1049649 - RNA, 19 nt, Artificial Sequence
  Description of Artificial Sequence: Synthetic oligonucleotide
  Antisense strand to SEQ ID NO: 1049648
uuugugagaagcggagucc

SEQ ID NO: 1049650 - RNA, 19 nt, Artificial Sequence
  Description of Artificial Sequence: Synthetic oligonucleotide
  Sense strand starting at position 2261 of SEQ ID NO: 915047
cguccagagcgacaucuua

SEQ ID NO: 1049651 - RNA, 19 nt, Artificial Sequence
  Description of Artificial Sequence: Synthetic oligonucleotide
  Antisense strand to SEQ ID NO: 1049650
uaagaugucgcucuggacg

SEQ ID NO: 1049652 - RNA, 19 nt, Artificial Sequence
  Description of Artificial Sequence: Synthetic oligonucleotide
  Sense strand starting at position 2286 of SEQ ID NO: 915047
gcgcgauaaacuuacauua

SEQ ID NO: 1049653 - RNA, 19 nt, Artificial Sequence
  Description of Artificial Sequence: Synthetic oligonucleotide
  Antisense strand to SEQ ID NO: 1049652
uaauguaaguuuaucgcgc

SEQ ID NO: 1049654 - RNA, 19 nt, Artificial Sequence
  Description of Artificial Sequence: Synthetic oligonucleotide
  Sense strand starting at position 2430 of SEQ ID NO: 915047
uugcgaccuccugaagcaa

SEQ ID NO: 1049655 - RNA, 19 nt, Artificial Sequence
  Description of Artificial Sequence: Synthetic oligonucleotide
  Antisense strand to SEQ ID NO: 1049654
uugcuucaggaggucgcaa

SEQ ID NO: 1049656 - RNA, 19 nt, Artificial Sequence
  Description of Artificial Sequence: Synthetic oligonucleotide
  Sense strand starting at position 2452 of SEQ ID NO: 915047
caaauauucucauucggug

SEQ ID NO: 1049657 - RNA, 19 nt, Artificial Sequence
  Description of Artificial Sequence: Synthetic oligonucleotide
  Antisense strand to SEQ ID NO: 1049656
caccgaaugagaauauuug

SEQ ID NO: 1049658 - RNA, 19 nt, Artificial Sequence
  Description of Artificial Sequence: Synthetic oligonucleotide
  Sense strand starting at position 2456 of SEQ ID NO: 915047
uauucucauucggugauua

SEQ ID NO: 1049659 - RNA, 19 nt, Artificial Sequence
  Description of Artificial Sequence: Synthetic oligonucleotide
  Antisense strand to SEQ ID NO: 1049658
uaaucaccgaaugagaaua

SEQ ID NO: 1049660 - RNA, 19 nt, Artificial Sequence
  Description of Artificial Sequence: Synthetic oligonucleotide
  Sense strand starting at position 2457 of SEQ ID NO: 915047
auucucauucggugauuaa

SEQ ID NO: 1049661 - RNA, 19 nt, Artificial Sequence
  Description of Artificial Sequence: Synthetic oligonucleotide
  Antisense strand to SEQ ID NO: 1049660
uuaaucaccgaaugagaau

SEQ ID NO: 1049662 - RNA, 19 nt, Artificial Sequence
  Description of Artificial Sequence: Synthetic oligonucleotide
  Sense strand starting at position 2458 of SEQ ID NO: 915047
uucucauucggugauuaag

SEQ ID NO: 1049663 - RNA, 19 nt, Artificial Sequence
  Description of Artificial Sequence: Synthetic oligonucleotide
  Antisense strand to SEQ ID NO: 1049662
cuuaaucaccgaaugagaa

SEQ ID NO: 1049664 - RNA, 19 nt, Artificial Sequence
  Description of Artificial Sequence: Synthetic oligonucleotide
  Sense strand starting at position 2460 of SEQ ID NO: 915047
cucauucggugauuaaguu

SEQ ID NO: 1049665 - RNA, 19 nt, Artificial Sequence
  Description of Artificial Sequence: Synthetic oligonucleotide
  Antisense strand to SEQ ID NO: 1049664
aacuuaaucaccgaaugag

SEQ ID NO: 1049666 - RNA, 19 nt, Artificial Sequence
  Description of Artificial Sequence: Synthetic oligonucleotide
  Sense strand starting at position 2461 of SEQ ID NO: 915047
ucauucggugauuaaguuu

SEQ ID NO: 1049667 - RNA, 19 nt, Artificial Sequence
  Description of Artificial Sequence: Synthetic oligonucleotide
  Antisense strand to SEQ ID NO: 1049666
aaacuuaaucaccgaauga

SEQ ID NO: 1049668 - RNA, 19 nt, Artificial Sequence
  Description of Artificial Sequence: Synthetic oligonucleotide
  Sense strand starting at position 2595 of SEQ ID NO: 915047
gcauuccauuugucucauu

SEQ ID NO: 1049669 - RNA, 19 nt, Artificial Sequence
  Description of Artificial Sequence: Synthetic oligonucleotide
  Antisense strand to SEQ ID NO: 1049668
aaugagacaaauggaaugc

SEQ ID NO: 1049670 - RNA, 19 nt, Artificial Sequence
  Description of Artificial Sequence: Synthetic oligonucleotide
  Sense strand starting at position 2699 of SEQ ID NO: 915047
augccaucugcugauuaua

SEQ ID NO: 1049671 - RNA, 19 nt, Artificial Sequence
  Description of Artificial Sequence: Synthetic oligonucleotide
  Antisense strand to SEQ ID NO: 1049670
uauaaucagcagauggcau

SEQ ID NO: 1049672 - RNA, 19 nt, Artificial Sequence
  Description of Artificial Sequence: Synthetic oligonucleotide
  Sense strand starting at position 2701 of SEQ ID NO: 915047
gccaucugcugauuauaag

SEQ ID NO: 1049673 - RNA, 19 nt, Artificial Sequence
  Description of Artificial Sequence: Synthetic oligonucleotide
  Antisense strand to SEQ ID NO: 1049672
cuuauaaucagcagauggc

SEQ ID NO: 1049674 - RNA, 19 nt, Artificial Sequence
  Description of Artificial Sequence: Synthetic oligonucleotide
  Sense strand starting at position 2702 of SEQ ID NO: 915047
ccaucugcugauuauaaga

SEQ ID NO: 1049675 - RNA, 19 nt, Artificial Sequence
  Description of Artificial Sequence: Synthetic oligonucleotide
  Antisense strand to SEQ ID NO: 1049674
ucuuauaaucagcagaugg

SEQ ID NO: 1049676 - RNA, 19 nt, Artificial Sequence
  Description of Artificial Sequence: Synthetic oligonucleotide
  Sense strand starting at position 2712 of SEQ ID NO: 915047
auuauaagacaguggguaa

SEQ ID NO: 1049677 - RNA, 19 nt, Artificial Sequence
  Description of Artificial Sequence: Synthetic oligonucleotide
  Antisense strand to SEQ ID NO: 1049676
uuacccacugucuuauaau

SEQ ID NO: 1049678 - RNA, 19 nt, Artificial Sequence
  Description of Artificial Sequence: Synthetic oligonucleotide
  Sense strand starting at position 2723 of SEQ ID NO: 915047
guggguaagugaccucaua

SEQ ID NO: 1049679 - RNA, 19 nt, Artificial Sequence
  Description of Artificial Sequence: Synthetic oligonucleotide
  Antisense strand to SEQ ID NO: 1049678
uaugaggucacuuacccac

SEQ ID NO: 1049680 - RNA, 19 nt, Artificial Sequence
  Description of Artificial Sequence: Synthetic oligonucleotide
  Sense strand starting at position 2785 of SEQ ID NO: 915047
cuuccuuuccaggguuaga

SEQ ID NO: 1049681 - RNA, 19 nt, Artificial Sequence
  Description of Artificial Sequence: Synthetic oligonucleotide
  Antisense strand to SEQ ID NO: 1049680
ucuaacccuggaaaggaag

SEQ ID NO: 1049682 - RNA, 19 nt, Artificial Sequence
  Description of Artificial Sequence: Synthetic oligonucleotide
  Sense strand starting at position 2802 of SEQ ID NO: 915047
gagacacugucacugacua

SEQ ID NO: 1049683 - RNA, 19 nt, Artificial Sequence
  Description of Artificial Sequence: Synthetic oligonucleotide
  Antisense strand to SEQ ID NO: 1049682
uagucagugacagugucuc

SEQ ID NO: 1049684 - RNA, 19 nt, Artificial Sequence
  Description of Artificial Sequence: Synthetic oligonucleotide
  Sense strand starting at position 2803 of SEQ ID NO: 915047
agacacugucacugacuaa

SEQ ID NO: 1049685 - RNA, 19 nt, Artificial Sequence
  Description of Artificial Sequence: Synthetic oligonucleotide
  Antisense strand to SEQ ID NO: 1049684
uuagucagugacagugucu

SEQ ID NO: 1049686 - RNA, 19 nt, Artificial Sequence
  Description of Artificial Sequence: Synthetic oligonucleotide
  Sense strand starting at position 2810 of SEQ ID NO: 915047
gucacugacuaagcaaaua

SEQ ID NO: 1049687 - RNA, 19 nt, Artificial Sequence
  Description of Artificial Sequence: Synthetic oligonucleotide
  Antisense strand to SEQ ID NO: 1049686
uauuugcuuagucagugac

SEQ ID NO: 1049688 - RNA, 19 nt, Artificial Sequence
  Description of Artificial Sequence: Synthetic oligonucleotide
  Sense strand starting at position 2955 of SEQ ID NO: 915047
cguuauaacagguagagau

SEQ ID NO: 1049689 - RNA, 19 nt, Artificial Sequence
  Description of Artificial Sequence: Synthetic oligonucleotide
  Antisense strand to SEQ ID NO: 1049688
aucucuaccuguuauaacg

SEQ ID NO: 1049690 - RNA, 19 nt, Artificial Sequence
  Description of Artificial Sequence: Synthetic oligonucleotide
  Sense strand starting at position 2965 of SEQ ID NO: 915047
gguagagauaugcaagguu

SEQ ID NO: 1049691 - RNA, 19 nt, Artificial Sequence
  Description of Artificial Sequence: Synthetic oligonucleotide
  Antisense strand to SEQ ID NO: 1049690
aaccuugcauaucucuacc

SEQ ID NO: 1049692 - RNA, 19 nt, Artificial Sequence
  Description of Artificial Sequence: Synthetic oligonucleotide
  Sense strand starting at position 2968 of SEQ ID NO: 915047
agagauaugcaagguuaag

SEQ ID NO: 1049693 - RNA, 19 nt, Artificial Sequence
  Description of Artificial Sequence: Synthetic oligonucleotide
  Antisense strand to SEQ ID NO: 1049692
cuuaaccuugcauaucucu

SEQ ID NO: 1049694 - RNA, 19 nt, Artificial Sequence
  Description of Artificial Sequence: Synthetic oligonucleotide
  Sense strand starting at position 2977 of SEQ ID NO: 915047
caagguuaaguccagcuau

SEQ ID NO: 1049695 - RNA, 19 nt, Artificial Sequence
  Description of Artificial Sequence: Synthetic oligonucleotide
  Antisense strand to SEQ ID NO: 1049694
auagcuggacuuaaccuug

SEQ ID NO: 1049696 - RNA, 19 nt, Artificial Sequence
  Description of Artificial Sequence: Synthetic oligonucleotide
  Sense strand starting at position 3062 of SEQ ID NO: 915047
gagacauccuugucuggua

SEQ ID NO: 1049697 - RNA, 19 nt, Artificial Sequence
  Description of Artificial Sequence: Synthetic oligonucleotide
  Antisense strand to SEQ ID NO: 1049696
uaccagacaaggaugucuc

SEQ ID NO: 1049698 - RNA, 19 nt, Artificial Sequence
  Description of Artificial Sequence: Synthetic oligonucleotide
  Sense strand starting at position 3063 of SEQ ID NO: 915047
agacauccuugucugguau

SEQ ID NO: 1049699 - RNA, 19 nt, Artificial Sequence
  Description of Artificial Sequence: Synthetic oligonucleotide
  Antisense strand to SEQ ID NO: 1049698
auaccagacaaggaugucu

SEQ ID NO: 1049700 - RNA, 19 nt, Artificial Sequence
  Description of Artificial Sequence: Synthetic oligonucleotide
  Sense strand starting at position 3064 of SEQ ID NO: 915047
gacauccuugucugguauu

SEQ ID NO: 1049701 - RNA, 19 nt, Artificial Sequence
  Description of Artificial Sequence: Synthetic oligonucleotide
  Antisense strand to SEQ ID NO: 1049700
aauaccagacaaggauguc

SEQ ID NO: 1049702 - RNA, 19 nt, Artificial Sequence
  Description of Artificial Sequence: Synthetic oligonucleotide
  Sense strand starting at position 3112 of SEQ ID NO: 915047
gagguauaugacgacuucu

SEQ ID NO: 1049703 - RNA, 19 nt, Artificial Sequence
  Description of Artificial Sequence: Synthetic oligonucleotide
  Antisense strand to SEQ ID NO: 1049702
agaagucgucauauaccuc

SEQ ID NO: 1049704 - RNA, 19 nt, Artificial Sequence
  Description of Artificial Sequence: Synthetic oligonucleotide
  Sense strand starting at position 3266 of SEQ ID NO: 915047
ccggcagguuucucuauuu

SEQ ID NO: 1049705 - RNA, 19 nt, Artificial Sequence
  Description of Artificial Sequence: Synthetic oligonucleotide
  Antisense strand to SEQ ID NO: 1049704
aaauagagaaaccugccgg

SEQ ID NO: 1049706 - RNA, 19 nt, Artificial Sequence
  Description of Artificial Sequence: Synthetic oligonucleotide
  Sense strand starting at position 3741 of SEQ ID NO: 915047
ucacgaugcuucucaaaca

SEQ ID NO: 1049707 - RNA, 19 nt, Artificial Sequence
  Description of Artificial Sequence: Synthetic oligonucleotide
  Antisense strand to SEQ ID NO: 1049706
uguuugagaagcaucguga

SEQ ID NO: 1049708 - RNA, 19 nt, Artificial Sequence
  Description of Artificial Sequence: Synthetic oligonucleotide
  Sense strand starting at position 3828 of SEQ ID NO: 915047
agcauugagacacgguauu

SEQ ID NO: 1049709 - RNA, 19 nt, Artificial Sequence
  Description of Artificial Sequence: Synthetic oligonucleotide
  Antisense strand to SEQ ID NO: 1049708
aauaccgugucucaaugcu

SEQ ID NO: 1049710 - RNA, 19 nt, Artificial Sequence
  Description of Artificial Sequence: Synthetic oligonucleotide
  Sense strand starting at position 3892 of SEQ ID NO: 915047
caacuugcuguuggaauau

SEQ ID NO: 1049711 - RNA, 19 nt, Artificial Sequence
  Description of Artificial Sequence: Synthetic oligonucleotide
  Antisense strand to SEQ ID NO: 1049710
auauuccaacagcaaguug

SEQ ID NO: 1049712 - RNA, 19 nt, Artificial Sequence
  Description of Artificial Sequence: Synthetic oligonucleotide
  Sense strand starting at position 63 of SEQ ID NO: 915048
guuccugacugccuagaaa

SEQ ID NO: 1049713 - RNA, 19 nt, Artificial Sequence
  Description of Artificial Sequence: Synthetic oligonucleotide
  Antisense strand to SEQ ID NO: 1049712
uuucuaggcagucaggaac

SEQ ID NO: 1049714 - RNA, 19 nt, Artificial Sequence
  Description of Artificial Sequence: Synthetic oligonucleotide
  Sense strand starting at position 86 of SEQ ID NO: 915048
auugccaugcucugcuaaa

SEQ ID NO: 1049715 - RNA, 19 nt, Artificial Sequence
  Description of Artificial Sequence: Synthetic oligonucleotide
  Antisense strand to SEQ ID NO: 1049714
uuuagcagagcauggcaau

SEQ ID NO: 1049716 - RNA, 19 nt, Artificial Sequence
  Description of Artificial Sequence: Synthetic oligonucleotide
  Sense strand starting at position 225 of SEQ ID NO: 915048
cucaguccugccugauaau

SEQ ID NO: 1049717 - RNA, 19 nt, Artificial Sequence
  Description of Artificial Sequence: Synthetic oligonucleotide
  Antisense strand to SEQ ID NO: 1049716
auuaucaggcaggacugag

SEQ ID NO: 1049718 - RNA, 19 nt, Artificial Sequence
  Description of Artificial Sequence: Synthetic oligonucleotide
  Sense strand starting at position 226 of SEQ ID NO: 915048
ucaguccugccugauaauc

SEQ ID NO: 1049719 - RNA, 19 nt, Artificial Sequence
  Description of Artificial Sequence: Synthetic oligonucleotide
  Antisense strand to SEQ ID NO: 1049718
gauuaucaggcaggacuga

SEQ ID NO: 1049720 - RNA, 19 nt, Artificial Sequence
  Description of Artificial Sequence: Synthetic oligonucleotide
  Sense strand starting at position 231 of SEQ ID NO: 915048
ccugccugauaaucaaagu

SEQ ID NO: 1049721 - RNA, 19 nt, Artificial Sequence
  Description of Artificial Sequence: Synthetic oligonucleotide
  Antisense strand to SEQ ID NO: 1049720
acuuugauuaucaggcagg

SEQ ID NO: 1049722 - RNA, 19 nt, Artificial Sequence
  Description of Artificial Sequence: Synthetic oligonucleotide
  Sense strand starting at position 301 of SEQ ID NO: 915048
auccauagagcuuagcaaa

SEQ ID NO: 1049723 - RNA, 19 nt, Artificial Sequence
  Description of Artificial Sequence: Synthetic oligonucleotide
  Antisense strand to SEQ ID NO: 1049722
uuugcuaagcucuauggau

SEQ ID NO: 1049724 - RNA, 19 nt, Artificial Sequence
  Description of Artificial Sequence: Synthetic oligonucleotide
  Sense strand starting at position 336 of SEQ ID NO: 915048
uuaucagaauagucagugu

SEQ ID NO: 1049725 - RNA, 19 nt, Artificial Sequence
  Description of Artificial Sequence: Synthetic oligonucleotide
  Antisense strand to SEQ ID NO: 1049724
acacugacuauucugauaa

SEQ ID NO: 1049726 - RNA, 19 nt, Artificial Sequence
  Description of Artificial Sequence: Synthetic oligonucleotide
  Sense strand starting at position 340 of SEQ ID NO: 915048
cagaauagucagugucucu

SEQ ID NO: 1049727 - RNA, 19 nt, Artificial Sequence
  Description of Artificial Sequence: Synthetic oligonucleotide
  Antisense strand to SEQ ID NO: 1049726
agagacacugacuauucug

SEQ ID NO: 1049728 - RNA, 19 nt, Artificial Sequence
  Description of Artificial Sequence: Synthetic oligonucleotide
  Sense strand starting at position 345 of SEQ ID NO: 915048
uagucagugucucugauag

SEQ ID NO: 1049729 - RNA, 19 nt, Artificial Sequence
  Description of Artificial Sequence: Synthetic oligonucleotide
  Antisense strand to SEQ ID NO: 1049728
cuaucagagacacugacua

SEQ ID NO: 1049730 - RNA, 19 nt, Artificial Sequence
  Description of Artificial Sequence: Synthetic oligonucleotide
  Sense strand starting at position 360 of SEQ ID NO: 915048
auaggaagccagugacaua

SEQ ID NO: 1049731 - RNA, 19 nt, Artificial Sequence
  Description of Artificial Sequence: Synthetic oligonucleotide
  Antisense strand to SEQ ID NO: 1049730
uaugucacuggcuuccuau

SEQ ID NO: 1049732 - RNA, 19 nt, Artificial Sequence
  Description of Artificial Sequence: Synthetic oligonucleotide
  Sense strand starting at position 372 of SEQ ID NO: 915048
ugacauacuacugggaagu

SEQ ID NO: 1049733 - RNA, 19 nt, Artificial Sequence
  Description of Artificial Sequence: Synthetic oligonucleotide
  Antisense strand to SEQ ID NO: 1049732
acuucccaguaguauguca

SEQ ID NO: 1049734 - RNA, 19 nt, Artificial Sequence
  Description of Artificial Sequence: Synthetic oligonucleotide
  Sense strand starting at position 447 of SEQ ID NO: 915048
caguguuugagcgcuuguu

SEQ ID NO: 1049735 - RNA, 19 nt, Artificial Sequence
  Description of Artificial Sequence: Synthetic oligonucleotide
  Antisense strand to SEQ ID NO: 1049734
aacaagcgcucaaacacug

SEQ ID NO: 1049736 - RNA, 19 nt, Artificial Sequence
  Description of Artificial Sequence: Synthetic oligonucleotide
  Sense strand starting at position 449 of SEQ ID NO: 915048
guguuugagcgcuuguugu

SEQ ID NO: 1049737 - RNA, 19 nt, Artificial Sequence
  Description of Artificial Sequence: Synthetic oligonucleotide
  Antisense strand to SEQ ID NO: 1049736
acaacaagcgcucaaacac

SEQ ID NO: 1049738 - RNA, 19 nt, Artificial Sequence
  Description of Artificial Sequence: Synthetic oligonucleotide
  Sense strand starting at position 451 of SEQ ID NO: 915048
guuugagcgcuuguuguua

SEQ ID NO: 1049739 - RNA, 19 nt, Artificial Sequence
  Description of Artificial Sequence: Synthetic oligonucleotide
  Antisense strand to SEQ ID NO: 1049738
uaacaacaagcgcucaaac

SEQ ID NO: 1049740 - RNA, 19 nt, Artificial Sequence
  Description of Artificial Sequence: Synthetic oligonucleotide
  Sense strand starting at position 834 of SEQ ID NO: 915048
augcuauucguaugcacau

SEQ ID NO: 1049741 - RNA, 19 nt, Artificial Sequence
  Description of Artificial Sequence: Synthetic oligonucleotide
  Antisense strand to SEQ ID NO: 1049740
augugcauacgaauagcau

SEQ ID NO: 1049742 - RNA, 19 nt, Artificial Sequence
  Description of Artificial Sequence: Synthetic oligonucleotide
  Sense strand starting at position 835 of SEQ ID NO: 915048
ugcuauucguaugcacauu

SEQ ID NO: 1049743 - RNA, 19 nt, Artificial Sequence
  Description of Artificial Sequence: Synthetic oligonucleotide
  Antisense strand to SEQ ID NO: 1049742
aaugugcauacgaauagca

SEQ ID NO: 1049744 - RNA, 19 nt, Artificial Sequence
  Description of Artificial Sequence: Synthetic oligonucleotide
  Sense strand starting at position 841 of SEQ ID NO: 915048
ucguaugcacauuaaguuu

SEQ ID NO: 1049745 - RNA, 19 nt, Artificial Sequence
  Description of Artificial Sequence: Synthetic oligonucleotide
  Antisense strand to SEQ ID NO: 1049744
aaacuuaaugugcauacga

SEQ ID NO: 1049746 - RNA, 19 nt, Artificial Sequence
  Description of Artificial Sequence: Synthetic oligonucleotide
  Sense strand starting at position 863 of SEQ ID NO: 915048
aagcacugguguccaauau

SEQ ID NO: 1049747 - RNA, 19 nt, Artificial Sequence
  Description of Artificial Sequence: Synthetic oligonucleotide
  Antisense strand to SEQ ID NO: 1049746
auauuggacaccagugcuu

SEQ ID NO: 1049748 - RNA, 19 nt, Artificial Sequence
  Description of Artificial Sequence: Synthetic oligonucleotide
  Sense strand starting at position 867 of SEQ ID NO: 915048
acugguguccaauauccau

SEQ ID NO: 1049749 - RNA, 19 nt, Artificial Sequence
  Description of Artificial Sequence: Synthetic oligonucleotide
  Antisense strand to SEQ ID NO: 1049748
auggauauuggacaccagu

SEQ ID NO: 1049750 - RNA, 19 nt, Artificial Sequence
  Description of Artificial Sequence: Synthetic oligonucleotide
  Sense strand starting at position 947 of SEQ ID NO: 915048
agcugcuguuaaucuguua

SEQ ID NO: 1049751 - RNA, 19 nt, Artificial Sequence
  Description of Artificial Sequence: Synthetic oligonucleotide
  Antisense strand to SEQ ID NO: 1049750
uaacagauuaacagcagcu

SEQ ID NO: 1049752 - RNA, 19 nt, Artificial Sequence
  Description of Artificial Sequence: Synthetic oligonucleotide
  Sense strand starting at position 968 of SEQ ID NO: 915048
cucgguuuccucguuguga

SEQ ID NO: 1049753 - RNA, 19 nt, Artificial Sequence
  Description of Artificial Sequence: Synthetic oligonucleotide
  Antisense strand to SEQ ID NO: 1049752
ucacaacgaggaaaccgag

SEQ ID NO: 1049754 - RNA, 19 nt, Artificial Sequence
  Description of Artificial Sequence: Synthetic oligonucleotide
  Sense strand starting at position 976 of SEQ ID NO: 915048
ccucguugugaauaauaca

SEQ ID NO: 1049755 - RNA, 19 nt, Artificial Sequence
  Description of Artificial Sequence: Synthetic oligonucleotide
  Antisense strand to SEQ ID NO: 1049754
uguauuauucacaacgagg

SEQ ID NO: 1049756 - RNA, 19 nt, Artificial Sequence
  Description of Artificial Sequence: Synthetic oligonucleotide
  Sense strand starting at position 1181 of SEQ ID NO: 915048
cuggcucugcuugauucua

SEQ ID NO: 1049757 - RNA, 19 nt, Artificial Sequence
  Description of Artificial Sequence: Synthetic oligonucleotide
  Antisense strand to SEQ ID NO: 1049756
uagaaucaagcagagccag

SEQ ID NO: 1049758 - RNA, 19 nt, Artificial Sequence
  Description of Artificial Sequence: Synthetic oligonucleotide
  Sense strand starting at position 1183 of SEQ ID NO: 915048
ggcucugcuugauucuaaa

SEQ ID NO: 1049759 - RNA, 19 nt, Artificial Sequence
  Description of Artificial Sequence: Synthetic oligonucleotide
  Antisense strand to SEQ ID NO: 1049758
uuuagaaucaagcagagcc

SEQ ID NO: 1049760 - RNA, 19 nt, Artificial Sequence
  Description of Artificial Sequence: Synthetic oligonucleotide
  Sense strand starting at position 1381 of SEQ ID NO: 915048
gccggauuagguuaucaau

SEQ ID NO: 1049761 - RNA, 19 nt, Artificial Sequence
  Description of Artificial Sequence: Synthetic oligonucleotide
  Antisense strand to SEQ ID NO: 1049760
auugauaaccuaauccggc

SEQ ID NO: 1049762 - RNA, 19 nt, Artificial Sequence
  Description of Artificial Sequence: Synthetic oligonucleotide
  Sense strand starting at position 1383 of SEQ ID NO: 915048
cggauuagguuaucaauca

SEQ ID NO: 1049763 - RNA, 19 nt, Artificial Sequence
  Description of Artificial Sequence: Synthetic oligonucleotide
  Antisense strand to SEQ ID NO: 1049762
ugauugauaaccuaauccg

SEQ ID NO: 1049764 - RNA, 19 nt, Artificial Sequence
  Description of Artificial Sequence: Synthetic oligonucleotide
  Sense strand starting at position 1384 of SEQ ID NO: 915048
ggauuagguuaucaaucag

SEQ ID NO: 1049765 - RNA, 19 nt, Artificial Sequence
  Description of Artificial Sequence: Synthetic oligonucleotide
  Antisense strand to SEQ ID NO: 1049764
cugauugauaaccuaaucc

SEQ ID NO: 1049766 - RNA, 19 nt, Artificial Sequence
  Description of Artificial Sequence: Synthetic oligonucleotide
  Sense strand starting at position 1686 of SEQ ID NO: 915048
guacguguugcugcgggaa

SEQ ID NO: 1049767 - RNA, 19 nt, Artificial Sequence
  Description of Artificial Sequence: Synthetic oligonucleotide
  Antisense strand to SEQ ID NO: 1049766
uucccgcagcaacacguac

SEQ ID NO: 1049768 - RNA, 19 nt, Artificial Sequence
  Description of Artificial Sequence: Synthetic oligonucleotide
  Sense strand starting at position 1832 of SEQ ID NO: 915048
gggcgaagacuaggagaua

SEQ ID NO: 1049769 - RNA, 19 nt, Artificial Sequence
  Description of Artificial Sequence: Synthetic oligonucleotide
  Antisense strand to SEQ ID NO: 1049768
uaucuccuagucuucgccc

SEQ ID NO: 1049770 - RNA, 19 nt, Artificial Sequence
  Description of Artificial Sequence: Synthetic oligonucleotide
  Sense strand starting at position 2022 of SEQ ID NO: 915048
agucguucauucgcauaga

SEQ ID NO: 1049771 - RNA, 19 nt, Artificial Sequence
  Description of Artificial Sequence: Synthetic oligonucleotide
  Antisense strand to SEQ ID NO: 1049770
ucuaugcgaaugaacgacu

SEQ ID NO: 1049772 - RNA, 19 nt, Artificial Sequence
  Description of Artificial Sequence: Synthetic oligonucleotide
  Sense strand starting at position 2203 of SEQ ID NO: 915048
ggagguguucccuaaaggu

SEQ ID NO: 1049773 - RNA, 19 nt, Artificial Sequence
  Description of Artificial Sequence: Synthetic oligonucleotide
  Antisense strand to SEQ ID NO: 1049772
accuuuagggaacaccucc

SEQ ID NO: 1049774 - RNA, 19 nt, Artificial Sequence
  Description of Artificial Sequence: Synthetic oligonucleotide
  Sense strand starting at position 2211 of SEQ ID NO: 915048
ucccuaaagguuugaguaa

SEQ ID NO: 1049775 - RNA, 19 nt, Artificial Sequence
  Description of Artificial Sequence: Synthetic oligonucleotide
  Antisense strand to SEQ ID NO: 1049774
uuacucaaaccuuuaggga

SEQ ID NO: 1049776 - RNA, 19 nt, Artificial Sequence
  Description of Artificial Sequence: Synthetic oligonucleotide
  Sense strand starting at position 2243 of SEQ ID NO: 915048
cgucacucacgccuguaau

SEQ ID NO: 1049777 - RNA, 19 nt, Artificial Sequence
  Description of Artificial Sequence: Synthetic oligonucleotide
  Antisense strand to SEQ ID NO: 1049776
auuacaggcgugagugacg

SEQ ID NO: 1049778 - RNA, 19 nt, Artificial Sequence
  Description of Artificial Sequence: Synthetic oligonucleotide
  Sense strand starting at position 2287 of SEQ ID NO: 915048
agcggaucacuucaggagu

SEQ ID NO: 1049779 - RNA, 19 nt, Artificial Sequence
  Description of Artificial Sequence: Synthetic oligonucleotide
  Antisense strand to SEQ ID NO: 1049778
acuccugaagugauccgcu

SEQ ID NO: 1049780 - RNA, 19 nt, Artificial Sequence
  Description of Artificial Sequence: Synthetic oligonucleotide
  Sense strand starting at position 3412 of SEQ ID NO: 915048
ggaagacugucuucccuug

SEQ ID NO: 1049781 - RNA, 19 nt, Artificial Sequence
  Description of Artificial Sequence: Synthetic oligonucleotide
  Antisense strand to SEQ ID NO: 1049780
caagggaagacagucuucc

SEQ ID NO: 1049782 - RNA, 19 nt, Artificial Sequence
  Description of Artificial Sequence: Synthetic oligonucleotide
  Sense strand starting at position 3417 of SEQ ID NO: 915048
acugucuucccuuguguuu

SEQ ID NO: 1049783 - RNA, 19 nt, Artificial Sequence
  Description of Artificial Sequence: Synthetic oligonucleotide
  Antisense strand to SEQ ID NO: 1049782
aaacacaagggaagacagu

SEQ ID NO: 1049784 - RNA, 19 nt, Artificial Sequence
  Description of Artificial Sequence: Synthetic oligonucleotide
  Sense strand starting at position 3422 of SEQ ID NO: 915048
cuucccuuguguuuaguca

SEQ ID NO: 1049785 - RNA, 19 nt, Artificial Sequence
  Description of Artificial Sequence: Synthetic oligonucleotide
  Antisense strand to SEQ ID NO: 1049784
ugacuaaacacaagggaag

SEQ ID NO: 1049786 - RNA, 19 nt, Artificial Sequence
  Description of Artificial Sequence: Synthetic oligonucleotide
  Sense strand starting at position 3860 of SEQ ID NO: 915048
gcccuacauccaggcauuu

SEQ ID NO: 1049787 - RNA, 19 nt, Artificial Sequence
  Description of Artificial Sequence: Synthetic oligonucleotide
  Antisense strand to SEQ ID NO: 1049786
aaaugccuggauguagggc

SEQ ID NO: 1049788 - RNA, 19 nt, Artificial Sequence
  Description of Artificial Sequence: Synthetic oligonucleotide
  Sense strand starting at position 3914 of SEQ ID NO: 915048
gugcgacuugccgcaaauc

SEQ ID NO: 1049789 - RNA, 19 nt, Artificial Sequence
  Description of Artificial Sequence: Synthetic oligonucleotide
  Antisense strand to SEQ ID NO: 1049788
gauuugcggcaagucgcac

SEQ ID NO: 1049790 - RNA, 19 nt, Artificial Sequence
  Description of Artificial Sequence: Synthetic oligonucleotide
  Sense strand starting at position 3915 of SEQ ID NO: 915048
ugcgacuugccgcaaaucu

SEQ ID NO: 1049791 - RNA, 19 nt, Artificial Sequence
  Description of Artificial Sequence: Synthetic oligonucleotide
  Antisense strand to SEQ ID NO: 1049790
agauuugcggcaagucgca

SEQ ID NO: 1049792 - RNA, 19 nt, Artificial Sequence
  Description of Artificial Sequence: Synthetic oligonucleotide
  Sense strand starting at position 63 of SEQ ID NO: 915049
guuccugacugccuagaaa

SEQ ID NO: 1049793 - RNA, 19 nt, Artificial Sequence
  Description of Artificial Sequence: Synthetic oligonucleotide
  Antisense strand to SEQ ID NO: 1049792
uuucuaggcagucaggaac

SEQ ID NO: 1049794 - RNA, 19 nt, Artificial Sequence
  Description of Artificial Sequence: Synthetic oligonucleotide
  Sense strand starting at position 86 of SEQ ID NO: 915049
auugccaugcucugcuaaa

SEQ ID NO: 1049795 - RNA, 19 nt, Artificial Sequence
  Description of Artificial Sequence: Synthetic oligonucleotide
  Antisense strand to SEQ ID NO: 1049794
uuuagcagagcauggcaau

SEQ ID NO: 1049796 - RNA, 19 nt, Artificial Sequence
  Description of Artificial Sequence: Synthetic oligonucleotide
  Sense strand starting at position 225 of SEQ ID NO: 915049
cucaguccugccugauaau

SEQ ID NO: 1049797 - RNA, 19 nt, Artificial Sequence
  Description of Artificial Sequence: Synthetic oligonucleotide
  Antisense strand to SEQ ID NO: 1049796
auuaucaggcaggacugag

SEQ ID NO: 1049798 - RNA, 19 nt, Artificial Sequence
  Description of Artificial Sequence: Synthetic oligonucleotide
  Sense strand starting at position 226 of SEQ ID NO: 915049
ucaguccugccugauaauc

SEQ ID NO: 1049799 - RNA, 19 nt, Artificial Sequence
  Description of Artificial Sequence: Synthetic oligonucleotide
  Antisense strand to SEQ ID NO: 1049798
gauuaucaggcaggacuga

SEQ ID NO: 1049800 - RNA, 19 nt, Artificial Sequence
  Description of Artificial Sequence: Synthetic oligonucleotide
  Sense strand starting at position 231 of SEQ ID NO: 915049
ccugccugauaaucaaagu

SEQ ID NO: 1049801 - RNA, 19 nt, Artificial Sequence
  Description of Artificial Sequence: Synthetic oligonucleotide
  Antisense strand to SEQ ID NO: 1049800
acuuugauuaucaggcagg

SEQ ID NO: 1049802 - RNA, 19 nt, Artificial Sequence
  Description of Artificial Sequence: Synthetic oligonucleotide
  Sense strand starting at position 301 of SEQ ID NO: 915049
auccauagagcuuagcaaa

SEQ ID NO: 1049803 - RNA, 19 nt, Artificial Sequence
  Description of Artificial Sequence: Synthetic oligonucleotide
  Antisense strand to SEQ ID NO: 1049802
uuugcuaagcucuauggau

SEQ ID NO: 1049804 - RNA, 19 nt, Artificial Sequence
  Description of Artificial Sequence: Synthetic oligonucleotide
  Sense strand starting at position 336 of SEQ ID NO: 915049
uuaucagaauagucagugu

SEQ ID NO: 1049805 - RNA, 19 nt, Artificial Sequence
  Description of Artificial Sequence: Synthetic oligonucleotide
  Antisense strand to SEQ ID NO: 1049804
acacugacuauucugauaa

SEQ ID NO: 1049806 - RNA, 19 nt, Artificial Sequence
  Description of Artificial Sequence: Synthetic oligonucleotide
  Sense strand starting at position 340 of SEQ ID NO: 915049
cagaauagucagugucucu

SEQ ID NO: 1049807 - RNA, 19 nt, Artificial Sequence
  Description of Artificial Sequence: Synthetic oligonucleotide
  Antisense strand to SEQ ID NO: 1049806
agagacacugacuauucug

SEQ ID NO: 1049808 - RNA, 19 nt, Artificial Sequence
  Description of Artificial Sequence: Synthetic oligonucleotide
  Sense strand starting at position 345 of SEQ ID NO: 915049
uagucagugucucugauag

SEQ ID NO: 1049809 - RNA, 19 nt, Artificial Sequence
  Description of Artificial Sequence: Synthetic oligonucleotide
  Antisense strand to SEQ ID NO: 1049808
cuaucagagacacugacua

SEQ ID NO: 1049810 - RNA, 19 nt, Artificial Sequence
  Description of Artificial Sequence: Synthetic oligonucleotide
  Sense strand starting at position 360 of SEQ ID NO: 915049
auaggaagccagugacaua

SEQ ID NO: 1049811 - RNA, 19 nt, Artificial Sequence
  Description of Artificial Sequence: Synthetic oligonucleotide
  Antisense strand to SEQ ID NO: 1049810
uaugucacuggcuuccuau

SEQ ID NO: 1049812 - RNA, 19 nt, Artificial Sequence
  Description of Artificial Sequence: Synthetic oligonucleotide
  Sense strand starting at position 372 of SEQ ID NO: 915049
ugacauacuacugggaagu

SEQ ID NO: 1049813 - RNA, 19 nt, Artificial Sequence
  Description of Artificial Sequence: Synthetic oligonucleotide
  Antisense strand to SEQ ID NO: 1049812
acuucccaguaguauguca

SEQ ID NO: 1049814 - RNA, 19 nt, Artificial Sequence
  Description of Artificial Sequence: Synthetic oligonucleotide
  Sense strand starting at position 447 of SEQ ID NO: 915049
caguguuugagcgcuuguu

SEQ ID NO: 1049815 - RNA, 19 nt, Artificial Sequence
  Description of Artificial Sequence: Synthetic oligonucleotide
  Antisense strand to SEQ ID NO: 1049814
aacaagcgcucaaacacug

SEQ ID NO: 1049816 - RNA, 19 nt, Artificial Sequence
  Description of Artificial Sequence: Synthetic oligonucleotide
  Sense strand starting at position 449 of SEQ ID NO: 915049
guguuugagcgcuuguugu

SEQ ID NO: 1049817 - RNA, 19 nt, Artificial Sequence
  Description of Artificial Sequence: Synthetic oligonucleotide
  Antisense strand to SEQ ID NO: 1049816
acaacaagcgcucaaacac

SEQ ID NO: 1049818 - RNA, 19 nt, Artificial Sequence
  Description of Artificial Sequence: Synthetic oligonucleotide
  Sense strand starting at position 451 of SEQ ID NO: 915049
guuugagcgcuuguuguua

SEQ ID NO: 1049819 - RNA, 19 nt, Artificial Sequence
  Description of Artificial Sequence: Synthetic oligonucleotide
  Antisense strand to SEQ ID NO: 1049818
uaacaacaagcgcucaaac

SEQ ID NO: 1049820 - RNA, 19 nt, Artificial Sequence
  Description of Artificial Sequence: Synthetic oligonucleotide
  Sense strand starting at position 834 of SEQ ID NO: 915049
augcuauucguaugcacau

SEQ ID NO: 1049821 - RNA, 19 nt, Artificial Sequence
  Description of Artificial Sequence: Synthetic oligonucleotide
  Antisense strand to SEQ ID NO: 1049820
augugcauacgaauagcau

SEQ ID NO: 1049822 - RNA, 19 nt, Artificial Sequence
  Description of Artificial Sequence: Synthetic oligonucleotide
  Sense strand starting at position 835 of SEQ ID NO: 915049
ugcuauucguaugcacauu

SEQ ID NO: 1049823 - RNA, 19 nt, Artificial Sequence
  Description of Artificial Sequence: Synthetic oligonucleotide
  Antisense strand to SEQ ID NO: 1049822
aaugugcauacgaauagca

SEQ ID NO: 1049824 - RNA, 19 nt, Artificial Sequence
  Description of Artificial Sequence: Synthetic oligonucleotide
  Sense strand starting at position 841 of SEQ ID NO: 915049
ucguaugcacauuaaguuu

SEQ ID NO: 1049825 - RNA, 19 nt, Artificial Sequence
  Description of Artificial Sequence: Synthetic oligonucleotide
  Antisense strand to SEQ ID NO: 1049824
aaacuuaaugugcauacga

SEQ ID NO: 1049826 - RNA, 19 nt, Artificial Sequence
  Description of Artificial Sequence: Synthetic oligonucleotide
  Sense strand starting at position 863 of SEQ ID NO: 915049
aagcacugguguccaauau

SEQ ID NO: 1049827 - RNA, 19 nt, Artificial Sequence
  Description of Artificial Sequence: Synthetic oligonucleotide
  Antisense strand to SEQ ID NO: 1049826
auauuggacaccagugcuu

SEQ ID NO: 1049828 - RNA, 19 nt, Artificial Sequence
  Description of Artificial Sequence: Synthetic oligonucleotide
  Sense strand starting at position 867 of SEQ ID NO: 915049
acugguguccaauauccau

SEQ ID NO: 1049829 - RNA, 19 nt, Artificial Sequence
  Description of Artificial Sequence: Synthetic oligonucleotide
  Antisense strand to SEQ ID NO: 1049828
auggauauuggacaccagu

SEQ ID NO: 1049830 - RNA, 19 nt, Artificial Sequence
  Description of Artificial Sequence: Synthetic oligonucleotide
  Sense strand starting at position 947 of SEQ ID NO: 915049
agcugcuguuaaucuguua

SEQ ID NO: 1049831 - RNA, 19 nt, Artificial Sequence
  Description of Artificial Sequence: Synthetic oligonucleotide
  Antisense strand to SEQ ID NO: 1049830
uaacagauuaacagcagcu

SEQ ID NO: 1049832 - RNA, 19 nt, Artificial Sequence
  Description of Artificial Sequence: Synthetic oligonucleotide
  Sense strand starting at position 968 of SEQ ID NO: 915049
cucgguuuccucguuguga

SEQ ID NO: 1049833 - RNA, 19 nt, Artificial Sequence
  Description of Artificial Sequence: Synthetic oligonucleotide
  Antisense strand to SEQ ID NO: 1049832
ucacaacgaggaaaccgag

SEQ ID NO: 1049834 - RNA, 19 nt, Artificial Sequence
  Description of Artificial Sequence: Synthetic oligonucleotide
  Sense strand starting at position 976 of SEQ ID NO: 915049
ccucguugugaauaauaca

SEQ ID NO: 1049835 - RNA, 19 nt, Artificial Sequence
  Description of Artificial Sequence: Synthetic oligonucleotide
  Antisense strand to SEQ ID NO: 1049834
uguauuauucacaacgagg

SEQ ID NO: 1049836 - RNA, 19 nt, Artificial Sequence
  Description of Artificial Sequence: Synthetic oligonucleotide
  Sense strand starting at position 1181 of SEQ ID NO: 915049
cuggcucugcuugauucua

SEQ ID NO: 1049837 - RNA, 19 nt, Artificial Sequence
  Description of Artificial Sequence: Synthetic oligonucleotide
  Antisense strand to SEQ ID NO: 1049836
uagaaucaagcagagccag

SEQ ID NO: 1049838 - RNA, 19 nt, Artificial Sequence
  Description of Artificial Sequence: Synthetic oligonucleotide
  Sense strand starting at position 1183 of SEQ ID NO: 915049
ggcucugcuugauucuaaa

SEQ ID NO: 1049839 - RNA, 19 nt, Artificial Sequence
  Description of Artificial Sequence: Synthetic oligonucleotide
  Antisense strand to SEQ ID NO: 1049838
uuuagaaucaagcagagcc

SEQ ID NO: 1049840 - RNA, 19 nt, Artificial Sequence
  Description of Artificial Sequence: Synthetic oligonucleotide
  Sense strand starting at position 1381 of SEQ ID NO: 915049
gccggauuagguuaucaau

SEQ ID NO: 1049841 - RNA, 19 nt, Artificial Sequence
  Description of Artificial Sequence: Synthetic oligonucleotide
  Antisense strand to SEQ ID NO: 1049840
auugauaaccuaauccggc

SEQ ID NO: 1049842 - RNA, 19 nt, Artificial Sequence
  Description of Artificial Sequence: Synthetic oligonucleotide
  Sense strand starting at position 1383 of SEQ ID NO: 915049
cggauuagguuaucaauca

SEQ ID NO: 1049843 - RNA, 19 nt, Artificial Sequence
  Description of Artificial Sequence: Synthetic oligonucleotide
  Antisense strand to SEQ ID NO: 1049842
ugauugauaaccuaauccg

SEQ ID NO: 1049844 - RNA, 19 nt, Artificial Sequence
  Description of Artificial Sequence: Synthetic oligonucleotide
  Sense strand starting at position 1384 of SEQ ID NO: 915049
ggauuagguuaucaaucag

SEQ ID NO: 1049845 - RNA, 19 nt, Artificial Sequence
  Description of Artificial Sequence: Synthetic oligonucleotide
  Antisense strand to SEQ ID NO: 1049844
cugauugauaaccuaaucc

SEQ ID NO: 1049846 - RNA, 19 nt, Artificial Sequence
  Description of Artificial Sequence: Synthetic oligonucleotide
  Sense strand starting at position 1686 of SEQ ID NO: 915049
guacguguugcugcgggaa

SEQ ID NO: 1049847 - RNA, 19 nt, Artificial Sequence
  Description of Artificial Sequence: Synthetic oligonucleotide
  Antisense strand to SEQ ID NO: 1049846
uucccgcagcaacacguac

SEQ ID NO: 1049848 - RNA, 19 nt, Artificial Sequence
  Description of Artificial Sequence: Synthetic oligonucleotide
  Sense strand starting at position 1832 of SEQ ID NO: 915049
gggcgaagacuaggagaua

SEQ ID NO: 1049849 - RNA, 19 nt, Artificial Sequence
  Description of Artificial Sequence: Synthetic oligonucleotide
  Antisense strand to SEQ ID NO: 1049848
uaucuccuagucuucgccc

SEQ ID NO: 1049850 - RNA, 19 nt, Artificial Sequence
  Description of Artificial Sequence: Synthetic oligonucleotide
  Sense strand starting at position 2022 of SEQ ID NO: 915049
agucguucauucgcauaga

SEQ ID NO: 1049851 - RNA, 19 nt, Artificial Sequence
  Description of Artificial Sequence: Synthetic oligonucleotide
  Antisense strand to SEQ ID NO: 1049850
ucuaugcgaaugaacgacu

SEQ ID NO: 1049852 - RNA, 19 nt, Artificial Sequence
  Description of Artificial Sequence: Synthetic oligonucleotide
  Sense strand starting at position 2203 of SEQ ID NO: 915049
ggagguguucccuaaaggu

SEQ ID NO: 1049853 - RNA, 19 nt, Artificial Sequence
  Description of Artificial Sequence: Synthetic oligonucleotide
  Antisense strand to SEQ ID NO: 1049852
accuuuagggaacaccucc

SEQ ID NO: 1049854 - RNA, 19 nt, Artificial Sequence
  Description of Artificial Sequence: Synthetic oligonucleotide
  Sense strand starting at position 2211 of SEQ ID NO: 915049
ucccuaaagguuugaguaa

SEQ ID NO: 1049855 - RNA, 19 nt, Artificial Sequence
  Description of Artificial Sequence: Synthetic oligonucleotide
  Antisense strand to SEQ ID NO: 1049854
uuacucaaaccuuuaggga

SEQ ID NO: 1049856 - RNA, 19 nt, Artificial Sequence
  Description of Artificial Sequence: Synthetic oligonucleotide
  Sense strand starting at position 2243 of SEQ ID NO: 915049
cgucacucacgccuguaau

SEQ ID NO: 1049857 - RNA, 19 nt, Artificial Sequence
  Description of Artificial Sequence: Synthetic oligonucleotide
  Antisense strand to SEQ ID NO: 1049856
auuacaggcgugagugacg

SEQ ID NO: 1049858 - RNA, 19 nt, Artificial Sequence
  Description of Artificial Sequence: Synthetic oligonucleotide
  Sense strand starting at position 2287 of SEQ ID NO: 915049
agcggaucacuucaggagu

SEQ ID NO: 1049859 - RNA, 19 nt, Artificial Sequence
  Description of Artificial Sequence: Synthetic oligonucleotide
  Antisense strand to SEQ ID NO: 1049858
acuccugaagugauccgcu

SEQ ID NO: 1049860 - RNA, 19 nt, Artificial Sequence
  Description of Artificial Sequence: Synthetic oligonucleotide
  Sense strand starting at position 3412 of SEQ ID NO: 915049
ggaagacugucuucccuug

SEQ ID NO: 1049861 - RNA, 19 nt, Artificial Sequence
  Description of Artificial Sequence: Synthetic oligonucleotide
  Antisense strand to SEQ ID NO: 1049860
caagggaagacagucuucc

SEQ ID NO: 1049862 - RNA, 19 nt, Artificial Sequence
  Description of Artificial Sequence: Synthetic oligonucleotide
  Sense strand starting at position 3417 of SEQ ID NO: 915049
acugucuucccuuguguuu

SEQ ID NO: 1049863 - RNA, 19 nt, Artificial Sequence
  Description of Artificial Sequence: Synthetic oligonucleotide
  Antisense strand to SEQ ID NO: 1049862
aaacacaagggaagacagu

SEQ ID NO: 1049864 - RNA, 19 nt, Artificial Sequence
  Description of Artificial Sequence: Synthetic oligonucleotide
  Sense strand starting at position 3422 of SEQ ID NO: 915049
cuucccuuguguuuaguca

SEQ ID NO: 1049865 - RNA, 19 nt, Artificial Sequence
  Description of Artificial Sequence: Synthetic oligonucleotide
  Antisense strand to SEQ ID NO: 1049864
ugacuaaacacaagggaag

SEQ ID NO: 1049866 - RNA, 19 nt, Artificial Sequence
  Description of Artificial Sequence: Synthetic oligonucleotide
  Sense strand starting at position 3860 of SEQ ID NO: 915049
gcccuacauccaggcauuu

SEQ ID NO: 1049867 - RNA, 19 nt, Artificial Sequence
  Description of Artificial Sequence: Synthetic oligonucleotide
  Antisense strand to SEQ ID NO: 1049866
aaaugccuggauguagggc

SEQ ID NO: 1049868 - RNA, 19 nt, Artificial Sequence
  Description of Artificial Sequence: Synthetic oligonucleotide
  Sense strand starting at position 3914 of SEQ ID NO: 915049
gugcgacuugccgcaaauc

SEQ ID NO: 1049869 - RNA, 19 nt, Artificial Sequence
  Description of Artificial Sequence: Synthetic oligonucleotide
  Antisense strand to SEQ ID NO: 1049868
gauuugcggcaagucgcac

SEQ ID NO: 1049870 - RNA, 19 nt, Artificial Sequence
  Description of Artificial Sequence: Synthetic oligonucleotide
  Sense strand starting at position 3915 of SEQ ID NO: 915049
ugcgacuugccgcaaaucu

SEQ ID NO: 1049871 - RNA, 19 nt, Artificial Sequence
  Description of Artificial Sequence: Synthetic oligonucleotide
  Antisense strand to SEQ ID NO: 1049870
agauuugcggcaagucgca

SEQ ID NO: 1049872 - RNA, 19 nt, Artificial Sequence
  Description of Artificial Sequence: Synthetic oligonucleotide
  Sense strand starting at position 283 of SEQ ID NO: 915050
gauggaggaaucuguaguu

SEQ ID NO: 1049873 - RNA, 19 nt, Artificial Sequence
  Description of Artificial Sequence: Synthetic oligonucleotide
  Antisense strand to SEQ ID NO: 1049872
aacuacagauuccuccauc

SEQ ID NO: 1049874 - RNA, 19 nt, Artificial Sequence
  Description of Artificial Sequence: Synthetic oligonucleotide
  Sense strand starting at position 339 of SEQ ID NO: 915050
gaacaugguucuuucuuga

SEQ ID NO: 1049875 - RNA, 19 nt, Artificial Sequence
  Description of Artificial Sequence: Synthetic oligonucleotide
  Antisense strand to SEQ ID NO: 1049874
ucaagaaagaaccauguuc

SEQ ID NO: 1049876 - RNA, 19 nt, Artificial Sequence
  Description of Artificial Sequence: Synthetic oligonucleotide
  Sense strand starting at position 590 of SEQ ID NO: 915050
ccugaagcaccuugagaaa

SEQ ID NO: 1049877 - RNA, 19 nt, Artificial Sequence
  Description of Artificial Sequence: Synthetic oligonucleotide
  Antisense strand to SEQ ID NO: 1049876
uuucucaaggugcuucagg

SEQ ID NO: 1049878 - RNA, 19 nt, Artificial Sequence
  Description of Artificial Sequence: Synthetic oligonucleotide
  Sense strand starting at position 601 of SEQ ID NO: 915050
uugagaaaggugcauguga

SEQ ID NO: 1049879 - RNA, 19 nt, Artificial Sequence
  Description of Artificial Sequence: Synthetic oligonucleotide
  Antisense strand to SEQ ID NO: 1049878
ucacaugcaccuuucucaa

SEQ ID NO: 1049880 - RNA, 19 nt, Artificial Sequence
  Description of Artificial Sequence: Synthetic oligonucleotide
  Sense strand starting at position 623 of SEQ ID NO: 915050
guuucccuucuagggaaua

SEQ ID NO: 1049881 - RNA, 19 nt, Artificial Sequence
  Description of Artificial Sequence: Synthetic oligonucleotide
  Antisense strand to SEQ ID NO: 1049880
uauucccuagaagggaaac

SEQ ID NO: 1049882 - RNA, 19 nt, Artificial Sequence
  Description of Artificial Sequence: Synthetic oligonucleotide
  Sense strand starting at position 675 of SEQ ID NO: 915050
acuacacgguccucagaaa

SEQ ID NO: 1049883 - RNA, 19 nt, Artificial Sequence
  Description of Artificial Sequence: Synthetic oligonucleotide
  Antisense strand to SEQ ID NO: 1049882
uuucugaggaccguguagu

SEQ ID NO: 1049884 - RNA, 19 nt, Artificial Sequence
  Description of Artificial Sequence: Synthetic oligonucleotide
  Sense strand starting at position 762 of SEQ ID NO: 915050
gccugcauuucugcuaaag

SEQ ID NO: 1049885 - RNA, 19 nt, Artificial Sequence
  Description of Artificial Sequence: Synthetic oligonucleotide
  Antisense strand to SEQ ID NO: 1049884
cuuuagcagaaaugcaggc

SEQ ID NO: 1049886 - RNA, 19 nt, Artificial Sequence
  Description of Artificial Sequence: Synthetic oligonucleotide
  Sense strand starting at position 1069 of SEQ ID NO: 915050
cucccaguccguguaucuu

SEQ ID NO: 1049887 - RNA, 19 nt, Artificial Sequence
  Description of Artificial Sequence: Synthetic oligonucleotide
  Antisense strand to SEQ ID NO: 1049886
aagauacacggacugggag

SEQ ID NO: 1049888 - RNA, 19 nt, Artificial Sequence
  Description of Artificial Sequence: Synthetic oligonucleotide
  Sense strand starting at position 1081 of SEQ ID NO: 915050
guaucuugacuguaacaua

SEQ ID NO: 1049889 - RNA, 19 nt, Artificial Sequence
  Description of Artificial Sequence: Synthetic oligonucleotide
  Antisense strand to SEQ ID NO: 1049888
uauguuacagucaagauac

SEQ ID NO: 1049890 - RNA, 19 nt, Artificial Sequence
  Description of Artificial Sequence: Synthetic oligonucleotide
  Sense strand starting at position 1159 of SEQ ID NO: 915050
cagaauaaugguuaggugu

SEQ ID NO: 1049891 - RNA, 19 nt, Artificial Sequence
  Description of Artificial Sequence: Synthetic oligonucleotide
  Antisense strand to SEQ ID NO: 1049890
acaccuaaccauuauucug

SEQ ID NO: 1049892 - RNA, 19 nt, Artificial Sequence
  Description of Artificial Sequence: Synthetic oligonucleotide
  Sense strand starting at position 1237 of SEQ ID NO: 915050
aguuuaauucuuuggacug

SEQ ID NO: 1049893 - RNA, 19 nt, Artificial Sequence
  Description of Artificial Sequence: Synthetic oligonucleotide
  Antisense strand to SEQ ID NO: 1049892
caguccaaagaauuaaacu

SEQ ID NO: 1049894 - RNA, 19 nt, Artificial Sequence
  Description of Artificial Sequence: Synthetic oligonucleotide
  Sense strand starting at position 1256 of SEQ ID NO: 915050
uuuccugaucuauaguaag

SEQ ID NO: 1049895 - RNA, 19 nt, Artificial Sequence
  Description of Artificial Sequence: Synthetic oligonucleotide
  Antisense strand to SEQ ID NO: 1049894
cuuacuauagaucaggaaa

SEQ ID NO: 1049896 - RNA, 19 nt, Artificial Sequence
  Description of Artificial Sequence: Synthetic oligonucleotide
  Sense strand starting at position 1273 of SEQ ID NO: 915050
agaagaguaagaugcuauc

SEQ ID NO: 1049897 - RNA, 19 nt, Artificial Sequence
  Description of Artificial Sequence: Synthetic oligonucleotide
  Antisense strand to SEQ ID NO: 1049896
gauagcaucuuacucuucu

SEQ ID NO: 1049898 - RNA, 19 nt, Artificial Sequence
  Description of Artificial Sequence: Synthetic oligonucleotide
  Sense strand starting at position 1302 of SEQ ID NO: 915050
ggcuguugugaggacgaaa

SEQ ID NO: 1049899 - RNA, 19 nt, Artificial Sequence
  Description of Artificial Sequence: Synthetic oligonucleotide
  Antisense strand to SEQ ID NO: 1049898
uuucguccucacaacagcc

SEQ ID NO: 1049900 - RNA, 19 nt, Artificial Sequence
  Description of Artificial Sequence: Synthetic oligonucleotide
  Sense strand starting at position 1305 of SEQ ID NO: 915050
uguugugaggacgaaauaa

SEQ ID NO: 1049901 - RNA, 19 nt, Artificial Sequence
  Description of Artificial Sequence: Synthetic oligonucleotide
  Antisense strand to SEQ ID NO: 1049900
uuauuucguccucacaaca

SEQ ID NO: 1049902 - RNA, 19 nt, Artificial Sequence
  Description of Artificial Sequence: Synthetic oligonucleotide
  Sense strand starting at position 1442 of SEQ ID NO: 915050
cugacaguuuaaucagaca

SEQ ID NO: 1049903 - RNA, 19 nt, Artificial Sequence
  Description of Artificial Sequence: Synthetic oligonucleotide
  Antisense strand to SEQ ID NO: 1049902
ugucugauuaaacugucag

SEQ ID NO: 1049904 - RNA, 19 nt, Artificial Sequence
  Description of Artificial Sequence: Synthetic oligonucleotide
  Sense strand starting at position 2304 of SEQ ID NO: 915050
gaccguuuccaagacgacu

SEQ ID NO: 1049905 - RNA, 19 nt, Artificial Sequence
  Description of Artificial Sequence: Synthetic oligonucleotide
  Antisense strand to SEQ ID NO: 1049904
agucgucuuggaaacgguc

SEQ ID NO: 1049906 - RNA, 19 nt, Artificial Sequence
  Description of Artificial Sequence: Synthetic oligonucleotide
  Sense strand starting at position 2336 of SEQ ID NO: 915050
ggacauugcacagggugau

SEQ ID NO: 1049907 - RNA, 19 nt, Artificial Sequence
  Description of Artificial Sequence: Synthetic oligonucleotide
  Antisense strand to SEQ ID NO: 1049906
aucacccugugcaaugucc

SEQ ID NO: 1049908 - RNA, 19 nt, Artificial Sequence
  Description of Artificial Sequence: Synthetic oligonucleotide
  Sense strand starting at position 2469 of SEQ ID NO: 915050
auguaagacccacggauau

SEQ ID NO: 1049909 - RNA, 19 nt, Artificial Sequence
  Description of Artificial Sequence: Synthetic oligonucleotide
  Antisense strand to SEQ ID NO: 1049908
auauccgugggucuuacau

SEQ ID NO: 1049910 - RNA, 19 nt, Artificial Sequence
  Description of Artificial Sequence: Synthetic oligonucleotide
  Sense strand starting at position 2616 of SEQ ID NO: 915050
cccaguuauuugguuagua

SEQ ID NO: 1049911 - RNA, 19 nt, Artificial Sequence
  Description of Artificial Sequence: Synthetic oligonucleotide
  Antisense strand to SEQ ID NO: 1049910
uacuaaccaaauaacuggg

SEQ ID NO: 1049912 - RNA, 19 nt, Artificial Sequence
  Description of Artificial Sequence: Synthetic oligonucleotide
  Sense strand starting at position 2930 of SEQ ID NO: 915050
acagacuauggcugugaau

SEQ ID NO: 1049913 - RNA, 19 nt, Artificial Sequence
  Description of Artificial Sequence: Synthetic oligonucleotide
  Antisense strand to SEQ ID NO: 1049912
auucacagccauagucugu

SEQ ID NO: 1049914 - RNA, 19 nt, Artificial Sequence
  Description of Artificial Sequence: Synthetic oligonucleotide
  Sense strand starting at position 2941 of SEQ ID NO: 915050
cugugaauuccucagguua

SEQ ID NO: 1049915 - RNA, 19 nt, Artificial Sequence
  Description of Artificial Sequence: Synthetic oligonucleotide
  Antisense strand to SEQ ID NO: 1049914
uaaccugaggaauucacag

SEQ ID NO: 1049916 - RNA, 19 nt, Artificial Sequence
  Description of Artificial Sequence: Synthetic oligonucleotide
  Sense strand starting at position 2949 of SEQ ID NO: 915050
uccucagguuacucaagau

SEQ ID NO: 1049917 - RNA, 19 nt, Artificial Sequence
  Description of Artificial Sequence: Synthetic oligonucleotide
  Antisense strand to SEQ ID NO: 1049916
aucuugaguaaccugagga

SEQ ID NO: 1049918 - RNA, 19 nt, Artificial Sequence
  Description of Artificial Sequence: Synthetic oligonucleotide
  Sense strand starting at position 2996 of SEQ ID NO: 915050
agagaaguuggcuagcaug

SEQ ID NO: 1049919 - RNA, 19 nt, Artificial Sequence
  Description of Artificial Sequence: Synthetic oligonucleotide
  Antisense strand to SEQ ID NO: 1049918
caugcuagccaacuucucu

SEQ ID NO: 1049920 - RNA, 19 nt, Artificial Sequence
  Description of Artificial Sequence: Synthetic oligonucleotide
  Sense strand starting at position 3047 of SEQ ID NO: 915050
ugagaacuacuuugugaac

SEQ ID NO: 1049921 - RNA, 19 nt, Artificial Sequence
  Description of Artificial Sequence: Synthetic oligonucleotide
  Antisense strand to SEQ ID NO: 1049920
guucacaaaguaguucuca

SEQ ID NO: 1049922 - RNA, 19 nt, Artificial Sequence
  Description of Artificial Sequence: Synthetic oligonucleotide
  Sense strand starting at position 3048 of SEQ ID NO: 915050
gagaacuacuuugugaacu

SEQ ID NO: 1049923 - RNA, 19 nt, Artificial Sequence
  Description of Artificial Sequence: Synthetic oligonucleotide
  Antisense strand to SEQ ID NO: 1049922
aguucacaaaguaguucuc

SEQ ID NO: 1049924 - RNA, 19 nt, Artificial Sequence
  Description of Artificial Sequence: Synthetic oligonucleotide
  Sense strand starting at position 3101 of SEQ ID NO: 915050
ggcucaaggcaucaugaaa

SEQ ID NO: 1049925 - RNA, 19 nt, Artificial Sequence
  Description of Artificial Sequence: Synthetic oligonucleotide
  Antisense strand to SEQ ID NO: 1049924
uuucaugaugccuugagcc

SEQ ID NO: 1049926 - RNA, 19 nt, Artificial Sequence
  Description of Artificial Sequence: Synthetic oligonucleotide
  Sense strand starting at position 3112 of SEQ ID NO: 915050
ucaugaaacugugucuaga

SEQ ID NO: 1049927 - RNA, 19 nt, Artificial Sequence
  Description of Artificial Sequence: Synthetic oligonucleotide
  Antisense strand to SEQ ID NO: 1049926
ucuagacacaguuucauga

SEQ ID NO: 1049928 - RNA, 19 nt, Artificial Sequence
  Description of Artificial Sequence: Synthetic oligonucleotide
  Sense strand starting at position 3300 of SEQ ID NO: 915050
cagcuccugguugauuaua

SEQ ID NO: 1049929 - RNA, 19 nt, Artificial Sequence
  Description of Artificial Sequence: Synthetic oligonucleotide
  Antisense strand to SEQ ID NO: 1049928
uauaaucaaccaggagcug

SEQ ID NO: 1049930 - RNA, 19 nt, Artificial Sequence
  Description of Artificial Sequence: Synthetic oligonucleotide
  Sense strand starting at position 3308 of SEQ ID NO: 915050
gguugauuauaucuaccau

SEQ ID NO: 1049931 - RNA, 19 nt, Artificial Sequence
  Description of Artificial Sequence: Synthetic oligonucleotide
  Antisense strand to SEQ ID NO: 1049930
augguagauauaaucaacc

SEQ ID NO: 1049932 - RNA, 19 nt, Artificial Sequence
  Description of Artificial Sequence: Synthetic oligonucleotide
  Sense strand starting at position 3314 of SEQ ID NO: 915050
uuauaucuaccaugggacu

SEQ ID NO: 1049933 - RNA, 19 nt, Artificial Sequence
  Description of Artificial Sequence: Synthetic oligonucleotide
  Antisense strand to SEQ ID NO: 1049932
agucccaugguagauauaa

SEQ ID NO: 1049934 - RNA, 19 nt, Artificial Sequence
  Description of Artificial Sequence: Synthetic oligonucleotide
  Sense strand starting at position 3320 of SEQ ID NO: 915050
cuaccaugggacugugaaa

SEQ ID NO: 1049935 - RNA, 19 nt, Artificial Sequence
  Description of Artificial Sequence: Synthetic oligonucleotide
  Antisense strand to SEQ ID NO: 1049934
uuucacagucccaugguag

SEQ ID NO: 1049936 - RNA, 19 nt, Artificial Sequence
  Description of Artificial Sequence: Synthetic oligonucleotide
  Sense strand starting at position 3347 of SEQ ID NO: 915050
ugaggaguugcaggaaauu

SEQ ID NO: 1049937 - RNA, 19 nt, Artificial Sequence
  Description of Artificial Sequence: Synthetic oligonucleotide
  Antisense strand to SEQ ID NO: 1049936
aauuuccugcaacuccuca

SEQ ID NO: 1049938 - RNA, 19 nt, Artificial Sequence
  Description of Artificial Sequence: Synthetic oligonucleotide
  Sense strand starting at position 3368 of SEQ ID NO: 915050
ugaggugucagacauguau

SEQ ID NO: 1049939 - RNA, 19 nt, Artificial Sequence
  Description of Artificial Sequence: Synthetic oligonucleotide
  Antisense strand to SEQ ID NO: 1049938
auacaugucugacaccuca

SEQ ID NO: 1049940 - RNA, 19 nt, Artificial Sequence
  Description of Artificial Sequence: Synthetic oligonucleotide
  Sense strand starting at position 3377 of SEQ ID NO: 915050
agacauguaucagcugaca

SEQ ID NO: 1049941 - RNA, 19 nt, Artificial Sequence
  Description of Artificial Sequence: Synthetic oligonucleotide
  Antisense strand to SEQ ID NO: 1049940
ugucagcugauacaugucu

SEQ ID NO: 1049942 - RNA, 19 nt, Artificial Sequence
  Description of Artificial Sequence: Synthetic oligonucleotide
  Sense strand starting at position 3391 of SEQ ID NO: 915050
ugacaucucucuuugagga

SEQ ID NO: 1049943 - RNA, 19 nt, Artificial Sequence
  Description of Artificial Sequence: Synthetic oligonucleotide
  Antisense strand to SEQ ID NO: 1049942
uccucaaagagagauguca

SEQ ID NO: 1049944 - RNA, 19 nt, Artificial Sequence
  Description of Artificial Sequence: Synthetic oligonucleotide
  Sense strand starting at position 3480 of SEQ ID NO: 915050
cacagugauccugagcucu

SEQ ID NO: 1049945 - RNA, 19 nt, Artificial Sequence
  Description of Artificial Sequence: Synthetic oligonucleotide
  Antisense strand to SEQ ID NO: 1049944
agagcucaggaucacugug

SEQ ID NO: 1049946 - RNA, 19 nt, Artificial Sequence
  Description of Artificial Sequence: Synthetic oligonucleotide
  Sense strand starting at position 3587 of SEQ ID NO: 915050
agauaucaucucggguaag

SEQ ID NO: 1049947 - RNA, 19 nt, Artificial Sequence
  Description of Artificial Sequence: Synthetic oligonucleotide
  Antisense strand to SEQ ID NO: 1049946
cuuacccgagaugauaucu

SEQ ID NO: 1049948 - RNA, 19 nt, Artificial Sequence
  Description of Artificial Sequence: Synthetic oligonucleotide
  Sense strand starting at position 3630 of SEQ ID NO: 915050
caguuacuuggcuaugaug

SEQ ID NO: 1049949 - RNA, 19 nt, Artificial Sequence
  Description of Artificial Sequence: Synthetic oligonucleotide
  Antisense strand to SEQ ID NO: 1049948
caucauagccaaguaacug

SEQ ID NO: 1049950 - RNA, 19 nt, Artificial Sequence
  Description of Artificial Sequence: Synthetic oligonucleotide
  Sense strand starting at position 3755 of SEQ ID NO: 915050
aggugagauucaguguaau

SEQ ID NO: 1049951 - RNA, 19 nt, Artificial Sequence
  Description of Artificial Sequence: Synthetic oligonucleotide
  Antisense strand to SEQ ID NO: 1049950
auuacacugaaucucaccu

SEQ ID NO: 1049952 - RNA, 19 nt, Artificial Sequence
  Description of Artificial Sequence: Synthetic oligonucleotide
  Sense strand starting at position 87 of SEQ ID NO: 915051
augcuaaccucggcaauga

SEQ ID NO: 1049953 - RNA, 19 nt, Artificial Sequence
  Description of Artificial Sequence: Synthetic oligonucleotide
  Antisense strand to SEQ ID NO: 1049952
ucauugccgagguuagcau

SEQ ID NO: 1049954 - RNA, 19 nt, Artificial Sequence
  Description of Artificial Sequence: Synthetic oligonucleotide
  Sense strand starting at position 88 of SEQ ID NO: 915051
ugcuaaccucggcaaugau

SEQ ID NO: 1049955 - RNA, 19 nt, Artificial Sequence
  Description of Artificial Sequence: Synthetic oligonucleotide
  Antisense strand to SEQ ID NO: 1049954
aucauugccgagguuagca

SEQ ID NO: 1049956 - RNA, 19 nt, Artificial Sequence
  Description of Artificial Sequence: Synthetic oligonucleotide
  Sense strand starting at position 130 of SEQ ID NO: 915051
gucagucuccaucaccaua

SEQ ID NO: 1049957 - RNA, 19 nt, Artificial Sequence
  Description of Artificial Sequence: Synthetic oligonucleotide
  Antisense strand to SEQ ID NO: 1049956
uauggugauggagacugac

SEQ ID NO: 1049958 - RNA, 19 nt, Artificial Sequence
  Description of Artificial Sequence: Synthetic oligonucleotide
  Sense strand starting at position 495 of SEQ ID NO: 915051
gggugugcccaagaaccau

SEQ ID NO: 1049959 - RNA, 19 nt, Artificial Sequence
  Description of Artificial Sequence: Synthetic oligonucleotide
  Antisense strand to SEQ ID NO: 1049958
augguucuugggcacaccc

SEQ ID NO: 1049960 - RNA, 19 nt, Artificial Sequence
  Description of Artificial Sequence: Synthetic oligonucleotide
  Sense strand starting at position 543 of SEQ ID NO: 915051
ccaagucuccacugacaug

SEQ ID NO: 1049961 - RNA, 19 nt, Artificial Sequence
  Description of Artificial Sequence: Synthetic oligonucleotide
  Antisense strand to SEQ ID NO: 1049960
caugucaguggagacuugg

SEQ ID NO: 1049962 - RNA, 19 nt, Artificial Sequence
  Description of Artificial Sequence: Synthetic oligonucleotide
  Sense strand starting at position 690 of SEQ ID NO: 915051
aguucugccucaccuaaga

SEQ ID NO: 1049963 - RNA, 19 nt, Artificial Sequence
  Description of Artificial Sequence: Synthetic oligonucleotide
  Antisense strand to SEQ ID NO: 1049962
ucuuaggugaggcagaacu

SEQ ID NO: 1049964 - RNA, 19 nt, Artificial Sequence
  Description of Artificial Sequence: Synthetic oligonucleotide
  Sense strand starting at position 835 of SEQ ID NO: 915051
gagcgaacuuuguuagcuc

SEQ ID NO: 1049965 - RNA, 19 nt, Artificial Sequence
  Description of Artificial Sequence: Synthetic oligonucleotide
  Antisense strand to SEQ ID NO: 1049964
gagcuaacaaaguucgcuc

SEQ ID NO: 1049966 - RNA, 19 nt, Artificial Sequence
  Description of Artificial Sequence: Synthetic oligonucleotide
  Sense strand starting at position 944 of SEQ ID NO: 915051
gacucaguuuguugaguga

SEQ ID NO: 1049967 - RNA, 19 nt, Artificial Sequence
  Description of Artificial Sequence: Synthetic oligonucleotide
  Antisense strand to SEQ ID NO: 1049966
ucacucaacaaacugaguc

SEQ ID NO: 1049968 - RNA, 19 nt, Artificial Sequence
  Description of Artificial Sequence: Synthetic oligonucleotide
  Sense strand starting at position 1269 of SEQ ID NO: 915051
aagugacuugucggaaguc

SEQ ID NO: 1049969 - RNA, 19 nt, Artificial Sequence
  Description of Artificial Sequence: Synthetic oligonucleotide
  Antisense strand to SEQ ID NO: 1049968
gacuuccgacaagucacuu

SEQ ID NO: 1049970 - RNA, 19 nt, Artificial Sequence
  Description of Artificial Sequence: Synthetic oligonucleotide
  Sense strand starting at position 1270 of SEQ ID NO: 915051
agugacuugucggaaguca

SEQ ID NO: 1049971 - RNA, 19 nt, Artificial Sequence
  Description of Artificial Sequence: Synthetic oligonucleotide
  Antisense strand to SEQ ID NO: 1049970
ugacuuccgacaagucacu

SEQ ID NO: 1049972 - RNA, 19 nt, Artificial Sequence
  Description of Artificial Sequence: Synthetic oligonucleotide
  Sense strand starting at position 1279 of SEQ ID NO: 915051
ucggaagucacacgauaag

SEQ ID NO: 1049973 - RNA, 19 nt, Artificial Sequence
  Description of Artificial Sequence: Synthetic oligonucleotide
  Antisense strand to SEQ ID NO: 1049972
cuuaucgugugacuuccga

SEQ ID NO: 1049974 - RNA, 19 nt, Artificial Sequence
  Description of Artificial Sequence: Synthetic oligonucleotide
  Sense strand starting at position 1455 of SEQ ID NO: 915051
uccgucuucucaccuauga

SEQ ID NO: 1049975 - RNA, 19 nt, Artificial Sequence
  Description of Artificial Sequence: Synthetic oligonucleotide
  Antisense strand to SEQ ID NO: 1049974
ucauaggugagaagacgga

SEQ ID NO: 1049976 - RNA, 19 nt, Artificial Sequence
  Description of Artificial Sequence: Synthetic oligonucleotide
  Sense strand starting at position 1485 of SEQ ID NO: 915051
ggcgguuggucuugggaau

SEQ ID NO: 1049977 - RNA, 19 nt, Artificial Sequence
  Description of Artificial Sequence: Synthetic oligonucleotide
  Antisense strand to SEQ ID NO: 1049976
auucccaagaccaaccgcc

SEQ ID NO: 1049978 - RNA, 19 nt, Artificial Sequence
  Description of Artificial Sequence: Synthetic oligonucleotide
  Sense strand starting at position 1486 of SEQ ID NO: 915051
gcgguuggucuugggaauu

SEQ ID NO: 1049979 - RNA, 19 nt, Artificial Sequence
  Description of Artificial Sequence: Synthetic oligonucleotide
  Antisense strand to SEQ ID NO: 1049978
aauucccaagaccaaccgc

SEQ ID NO: 1049980 - RNA, 19 nt, Artificial Sequence
  Description of Artificial Sequence: Synthetic oligonucleotide
  Sense strand starting at position 1998 of SEQ ID NO: 915051
gcuucaugguguggucuga

SEQ ID NO: 1049981 - RNA, 19 nt, Artificial Sequence
  Description of Artificial Sequence: Synthetic oligonucleotide
  Antisense strand to SEQ ID NO: 1049980
ucagaccacaccaugaagc

SEQ ID NO: 1049982 - RNA, 19 nt, Artificial Sequence
  Description of Artificial Sequence: Synthetic oligonucleotide
  Sense strand starting at position 2009 of SEQ ID NO: 915051
uggucugauuggccagcaa

SEQ ID NO: 1049983 - RNA, 19 nt, Artificial Sequence
  Description of Artificial Sequence: Synthetic oligonucleotide
  Antisense strand to SEQ ID NO: 1049982
uugcuggccaaucagacca

SEQ ID NO: 1049984 - RNA, 19 nt, Artificial Sequence
  Description of Artificial Sequence: Synthetic oligonucleotide
  Sense strand starting at position 2065 of SEQ ID NO: 915051
uuugauuggcuaggagaga

SEQ ID NO: 1049985 - RNA, 19 nt, Artificial Sequence
  Description of Artificial Sequence: Synthetic oligonucleotide
  Antisense strand to SEQ ID NO: 1049984
ucucuccuagccaaucaaa

SEQ ID NO: 1049986 - RNA, 19 nt, Artificial Sequence
  Description of Artificial Sequence: Synthetic oligonucleotide
  Sense strand starting at position 2185 of SEQ ID NO: 915051
gaaagagugcuuucgccgu

SEQ ID NO: 1049987 - RNA, 19 nt, Artificial Sequence
  Description of Artificial Sequence: Synthetic oligonucleotide
  Antisense strand to SEQ ID NO: 1049986
acggcgaaagcacucuuuc

SEQ ID NO: 1049988 - RNA, 19 nt, Artificial Sequence
  Description of Artificial Sequence: Synthetic oligonucleotide
  Sense strand starting at position 2189 of SEQ ID NO: 915051
gagugcuuucgccgugggu

SEQ ID NO: 1049989 - RNA, 19 nt, Artificial Sequence
  Description of Artificial Sequence: Synthetic oligonucleotide
  Antisense strand to SEQ ID NO: 1049988
acccacggcgaaagcacuc

SEQ ID NO: 1049990 - RNA, 19 nt, Artificial Sequence
  Description of Artificial Sequence: Synthetic oligonucleotide
  Sense strand starting at position 2239 of SEQ ID NO: 915051
ggcgugugaugacgguaau

SEQ ID NO: 1049991 - RNA, 19 nt, Artificial Sequence
  Description of Artificial Sequence: Synthetic oligonucleotide
  Antisense strand to SEQ ID NO: 1049990
auuaccgucaucacacgcc

SEQ ID NO: 1049992 - RNA, 19 nt, Artificial Sequence
  Description of Artificial Sequence: Synthetic oligonucleotide
  Sense strand starting at position 2240 of SEQ ID NO: 915051
gcgugugaugacgguaaug

SEQ ID NO: 1049993 - RNA, 19 nt, Artificial Sequence
  Description of Artificial Sequence: Synthetic oligonucleotide
  Antisense strand to SEQ ID NO: 1049992
cauuaccgucaucacacgc

SEQ ID NO: 1049994 - RNA, 19 nt, Artificial Sequence
  Description of Artificial Sequence: Synthetic oligonucleotide
  Sense strand starting at position 2251 of SEQ ID NO: 915051
cgguaauggcgacgagaug

SEQ ID NO: 1049995 - RNA, 19 nt, Artificial Sequence
  Description of Artificial Sequence: Synthetic oligonucleotide
  Antisense strand to SEQ ID NO: 1049994
caucucgucgccauuaccg

SEQ ID NO: 1049996 - RNA, 19 nt, Artificial Sequence
  Description of Artificial Sequence: Synthetic oligonucleotide
  Sense strand starting at position 2260 of SEQ ID NO: 915051
cgacgagaugcucaacuca

SEQ ID NO: 1049997 - RNA, 19 nt, Artificial Sequence
  Description of Artificial Sequence: Synthetic oligonucleotide
  Antisense strand to SEQ ID NO: 1049996
ugaguugagcaucucgucg

SEQ ID NO: 1049998 - RNA, 19 nt, Artificial Sequence
  Description of Artificial Sequence: Synthetic oligonucleotide
  Sense strand starting at position 2301 of SEQ ID NO: 915051
agcagcucugcguggagaa

SEQ ID NO: 1049999 - RNA, 19 nt, Artificial Sequence
  Description of Artificial Sequence: Synthetic oligonucleotide
  Antisense strand to SEQ ID NO: 1049998
uucuccacgcagagcugcu

SEQ ID NO: 1050000 - RNA, 19 nt, Artificial Sequence
  Description of Artificial Sequence: Synthetic oligonucleotide
  Sense strand starting at position 2302 of SEQ ID NO: 915051
gcagcucugcguggagaaa

SEQ ID NO: 1050001 - RNA, 19 nt, Artificial Sequence
  Description of Artificial Sequence: Synthetic oligonucleotide
  Antisense strand to SEQ ID NO: 1050000
uuucuccacgcagagcugc

SEQ ID NO: 1050002 - RNA, 19 nt, Artificial Sequence
  Description of Artificial Sequence: Synthetic oligonucleotide
  Sense strand starting at position 2364 of SEQ ID NO: 915051
gggaguauuuaguaacguu

SEQ ID NO: 1050003 - RNA, 19 nt, Artificial Sequence
  Description of Artificial Sequence: Synthetic oligonucleotide
  Antisense strand to SEQ ID NO: 1050002
aacguuacuaaauacuccc

SEQ ID NO: 1050004 - RNA, 19 nt, Artificial Sequence
  Description of Artificial Sequence: Synthetic oligonucleotide
  Sense strand starting at position 2415 of SEQ ID NO: 915051
ugauccaccugaucuguau

SEQ ID NO: 1050005 - RNA, 19 nt, Artificial Sequence
  Description of Artificial Sequence: Synthetic oligonucleotide
  Antisense strand to SEQ ID NO: 1050004
auacagaucagguggauca

SEQ ID NO: 1050006 - RNA, 19 nt, Artificial Sequence
  Description of Artificial Sequence: Synthetic oligonucleotide
  Sense strand starting at position 2419 of SEQ ID NO: 915051
ccaccugaucuguaugacu

SEQ ID NO: 1050007 - RNA, 19 nt, Artificial Sequence
  Description of Artificial Sequence: Synthetic oligonucleotide
  Antisense strand to SEQ ID NO: 1050006
agucauacagaucaggugg

SEQ ID NO: 1050008 - RNA, 19 nt, Artificial Sequence
  Description of Artificial Sequence: Synthetic oligonucleotide
  Sense strand starting at position 2430 of SEQ ID NO: 915051
guaugacucccguacucaa

SEQ ID NO: 1050009 - RNA, 19 nt, Artificial Sequence
  Description of Artificial Sequence: Synthetic oligonucleotide
  Antisense strand to SEQ ID NO: 1050008
uugaguacgggagucauac

SEQ ID NO: 1050010 - RNA, 19 nt, Artificial Sequence
  Description of Artificial Sequence: Synthetic oligonucleotide
  Sense strand starting at position 2455 of SEQ ID NO: 915051
uauguuuccuaccagcgaa

SEQ ID NO: 1050011 - RNA, 19 nt, Artificial Sequence
  Description of Artificial Sequence: Synthetic oligonucleotide
  Antisense strand to SEQ ID NO: 1050010
uucgcugguaggaaacaua

SEQ ID NO: 1050012 - RNA, 19 nt, Artificial Sequence
  Description of Artificial Sequence: Synthetic oligonucleotide
  Sense strand starting at position 2458 of SEQ ID NO: 915051
guuuccuaccagcgaauuu

SEQ ID NO: 1050013 - RNA, 19 nt, Artificial Sequence
  Description of Artificial Sequence: Synthetic oligonucleotide
  Antisense strand to SEQ ID NO: 1050012
aaauucgcugguaggaaac

SEQ ID NO: 1050014 - RNA, 19 nt, Artificial Sequence
  Description of Artificial Sequence: Synthetic oligonucleotide
  Sense strand starting at position 2584 of SEQ ID NO: 915051
ucgggugauccucacuucu

SEQ ID NO: 1050015 - RNA, 19 nt, Artificial Sequence
  Description of Artificial Sequence: Synthetic oligonucleotide
  Antisense strand to SEQ ID NO: 1050014
agaagugaggaucacccga

SEQ ID NO: 1050016 - RNA, 19 nt, Artificial Sequence
  Description of Artificial Sequence: Synthetic oligonucleotide
  Sense strand starting at position 2586 of SEQ ID NO: 915051
gggugauccucacuucuca

SEQ ID NO: 1050017 - RNA, 19 nt, Artificial Sequence
  Description of Artificial Sequence: Synthetic oligonucleotide
  Antisense strand to SEQ ID NO: 1050016
ugagaagugaggaucaccc

SEQ ID NO: 1050018 - RNA, 19 nt, Artificial Sequence
  Description of Artificial Sequence: Synthetic oligonucleotide
  Sense strand starting at position 2795 of SEQ ID NO: 915051
ccgggaaugcugugguaga

SEQ ID NO: 1050019 - RNA, 19 nt, Artificial Sequence
  Description of Artificial Sequence: Synthetic oligonucleotide
  Antisense strand to SEQ ID NO: 1050018
ucuaccacagcauucccgg

SEQ ID NO: 1050020 - RNA, 19 nt, Artificial Sequence
  Description of Artificial Sequence: Synthetic oligonucleotide
  Sense strand starting at position 2997 of SEQ ID NO: 915051
gggacagugguuugggauu

SEQ ID NO: 1050021 - RNA, 19 nt, Artificial Sequence
  Description of Artificial Sequence: Synthetic oligonucleotide
  Antisense strand to SEQ ID NO: 1050020
aaucccaaaccacuguccc

SEQ ID NO: 1050022 - RNA, 19 nt, Artificial Sequence
  Description of Artificial Sequence: Synthetic oligonucleotide
  Sense strand starting at position 3071 of SEQ ID NO: 915051
ggaguucaagcugaggagu

SEQ ID NO: 1050023 - RNA, 19 nt, Artificial Sequence
  Description of Artificial Sequence: Synthetic oligonucleotide
  Antisense strand to SEQ ID NO: 1050022
acuccucagcuugaacucc

SEQ ID NO: 1050024 - RNA, 19 nt, Artificial Sequence
  Description of Artificial Sequence: Synthetic oligonucleotide
  Sense strand starting at position 3196 of SEQ ID NO: 915051
aggugauuccugcguggau

SEQ ID NO: 1050025 - RNA, 19 nt, Artificial Sequence
  Description of Artificial Sequence: Synthetic oligonucleotide
  Antisense strand to SEQ ID NO: 1050024
auccacgcaggaaucaccu

SEQ ID NO: 1050026 - RNA, 19 nt, Artificial Sequence
  Description of Artificial Sequence: Synthetic oligonucleotide
  Sense strand starting at position 3197 of SEQ ID NO: 915051
ggugauuccugcguggaug

SEQ ID NO: 1050027 - RNA, 19 nt, Artificial Sequence
  Description of Artificial Sequence: Synthetic oligonucleotide
  Antisense strand to SEQ ID NO: 1050026
cauccacgcaggaaucacc

SEQ ID NO: 1050028 - RNA, 19 nt, Artificial Sequence
  Description of Artificial Sequence: Synthetic oligonucleotide
  Sense strand starting at position 3222 of SEQ ID NO: 915051
gggauuccugcguggauug

SEQ ID NO: 1050029 - RNA, 19 nt, Artificial Sequence
  Description of Artificial Sequence: Synthetic oligonucleotide
  Antisense strand to SEQ ID NO: 1050028
caauccacgcaggaauccc

SEQ ID NO: 1050030 - RNA, 19 nt, Artificial Sequence
  Description of Artificial Sequence: Synthetic oligonucleotide
  Sense strand starting at position 3320 of SEQ ID NO: 915051
gcaaaucacugagauguaa

SEQ ID NO: 1050031 - RNA, 19 nt, Artificial Sequence
  Description of Artificial Sequence: Synthetic oligonucleotide
  Antisense strand to SEQ ID NO: 1050030
uuacaucucagugauuugc

SEQ ID NO: 1050032 - RNA, 19 nt, Artificial Sequence
  Description of Artificial Sequence: Synthetic oligonucleotide
  Sense strand starting at position 30 of SEQ ID NO: 915052
caugcuaaguuucuaagga

SEQ ID NO: 1050033 - RNA, 19 nt, Artificial Sequence
  Description of Artificial Sequence: Synthetic oligonucleotide
  Antisense strand to SEQ ID NO: 1050032
uccuuagaaacuuagcaug

SEQ ID NO: 1050034 - RNA, 19 nt, Artificial Sequence
  Description of Artificial Sequence: Synthetic oligonucleotide
  Sense strand starting at position 31 of SEQ ID NO: 915052
augcuaaguuucuaaggaa

SEQ ID NO: 1050035 - RNA, 19 nt, Artificial Sequence
  Description of Artificial Sequence: Synthetic oligonucleotide
  Antisense strand to SEQ ID NO: 1050034
uuccuuagaaacuuagcau

SEQ ID NO: 1050036 - RNA, 19 nt, Artificial Sequence
  Description of Artificial Sequence: Synthetic oligonucleotide
  Sense strand starting at position 34 of SEQ ID NO: 915052
cuaaguuucuaaggaaaga

SEQ ID NO: 1050037 - RNA, 19 nt, Artificial Sequence
  Description of Artificial Sequence: Synthetic oligonucleotide
  Antisense strand to SEQ ID NO: 1050036
ucuuuccuuagaaacuuag

SEQ ID NO: 1050038 - RNA, 19 nt, Artificial Sequence
  Description of Artificial Sequence: Synthetic oligonucleotide
  Sense strand starting at position 505 of SEQ ID NO: 915052
gggauugggccagaagcua

SEQ ID NO: 1050039 - RNA, 19 nt, Artificial Sequence
  Description of Artificial Sequence: Synthetic oligonucleotide
  Antisense strand to SEQ ID NO: 1050038
uagcuucuggcccaauccc

SEQ ID NO: 1050040 - RNA, 19 nt, Artificial Sequence
  Description of Artificial Sequence: Synthetic oligonucleotide
  Sense strand starting at position 982 of SEQ ID NO: 915052
gaacucugauaggaacgau

SEQ ID NO: 1050041 - RNA, 19 nt, Artificial Sequence
  Description of Artificial Sequence: Synthetic oligonucleotide
  Antisense strand to SEQ ID NO: 1050040
aucguuccuaucagaguuc

SEQ ID NO: 1050042 - RNA, 19 nt, Artificial Sequence
  Description of Artificial Sequence: Synthetic oligonucleotide
  Sense strand starting at position 1045 of SEQ ID NO: 915052
gagcuuauggaaggucuca

SEQ ID NO: 1050043 - RNA, 19 nt, Artificial Sequence
  Description of Artificial Sequence: Synthetic oligonucleotide
  Antisense strand to SEQ ID NO: 1050042
ugagaccuuccauaagcuc

SEQ ID NO: 1050044 - RNA, 19 nt, Artificial Sequence
  Description of Artificial Sequence: Synthetic oligonucleotide
  Sense strand starting at position 1249 of SEQ ID NO: 915052
ggcgaaauguguuuacuga

SEQ ID NO: 1050045 - RNA, 19 nt, Artificial Sequence
  Description of Artificial Sequence: Synthetic oligonucleotide
  Antisense strand to SEQ ID NO: 1050044
ucaguaaacacauuucgcc

SEQ ID NO: 1050046 - RNA, 19 nt, Artificial Sequence
  Description of Artificial Sequence: Synthetic oligonucleotide
  Sense strand starting at position 1250 of SEQ ID NO: 915052
gcgaaauguguuuacugau

SEQ ID NO: 1050047 - RNA, 19 nt, Artificial Sequence
  Description of Artificial Sequence: Synthetic oligonucleotide
  Antisense strand to SEQ ID NO: 1050046
aucaguaaacacauuucgc

SEQ ID NO: 1050048 - RNA, 19 nt, Artificial Sequence
  Description of Artificial Sequence: Synthetic oligonucleotide
  Sense strand starting at position 1306 of SEQ ID NO: 915052
gggcucacuuaggaugaaa

SEQ ID NO: 1050049 - RNA, 19 nt, Artificial Sequence
  Description of Artificial Sequence: Synthetic oligonucleotide
  Antisense strand to SEQ ID NO: 1050048
uuucauccuaagugagccc

SEQ ID NO: 1050050 - RNA, 19 nt, Artificial Sequence
  Description of Artificial Sequence: Synthetic oligonucleotide
  Sense strand starting at position 1308 of SEQ ID NO: 915052
gcucacuuaggaugaaaug

SEQ ID NO: 1050051 - RNA, 19 nt, Artificial Sequence
  Description of Artificial Sequence: Synthetic oligonucleotide
  Antisense strand to SEQ ID NO: 1050050
cauuucauccuaagugagc

SEQ ID NO: 1050052 - RNA, 19 nt, Artificial Sequence
  Description of Artificial Sequence: Synthetic oligonucleotide
  Sense strand starting at position 1774 of SEQ ID NO: 915052
caccgugucgccgcugaaa

SEQ ID NO: 1050053 - RNA, 19 nt, Artificial Sequence
  Description of Artificial Sequence: Synthetic oligonucleotide
  Antisense strand to SEQ ID NO: 1050052
uuucagcggcgacacggug

SEQ ID NO: 1050054 - RNA, 19 nt, Artificial Sequence
  Description of Artificial Sequence: Synthetic oligonucleotide
  Sense strand starting at position 2237 of SEQ ID NO: 915052
guguuccacuuucuauaga

SEQ ID NO: 1050055 - RNA, 19 nt, Artificial Sequence
  Description of Artificial Sequence: Synthetic oligonucleotide
  Antisense strand to SEQ ID NO: 1050054
ucuauagaaaguggaacac

SEQ ID NO: 1050056 - RNA, 19 nt, Artificial Sequence
  Description of Artificial Sequence: Synthetic oligonucleotide
  Sense strand starting at position 2248 of SEQ ID NO: 915052
ucuauagauucggcguuua

SEQ ID NO: 1050057 - RNA, 19 nt, Artificial Sequence
  Description of Artificial Sequence: Synthetic oligonucleotide
  Antisense strand to SEQ ID NO: 1050056
uaaacgccgaaucuauaga

SEQ ID NO: 1050058 - RNA, 19 nt, Artificial Sequence
  Description of Artificial Sequence: Synthetic oligonucleotide
  Sense strand starting at position 2287 of SEQ ID NO: 915052
ucgguguaucaugggagga

SEQ ID NO: 1050059 - RNA, 19 nt, Artificial Sequence
  Description of Artificial Sequence: Synthetic oligonucleotide
  Antisense strand to SEQ ID NO: 1050058
uccucccaugauacaccga

SEQ ID NO: 1050060 - RNA, 19 nt, Artificial Sequence
  Description of Artificial Sequence: Synthetic oligonucleotide
  Sense strand starting at position 2289 of SEQ ID NO: 915052
gguguaucaugggaggagu

SEQ ID NO: 1050061 - RNA, 19 nt, Artificial Sequence
  Description of Artificial Sequence: Synthetic oligonucleotide
  Antisense strand to SEQ ID NO: 1050060
acuccucccaugauacacc

SEQ ID NO: 1050062 - RNA, 19 nt, Artificial Sequence
  Description of Artificial Sequence: Synthetic oligonucleotide
  Sense strand starting at position 2337 of SEQ ID NO: 915052
ucaugacuacguugcaauu

SEQ ID NO: 1050063 - RNA, 19 nt, Artificial Sequence
  Description of Artificial Sequence: Synthetic oligonucleotide
  Antisense strand to SEQ ID NO: 1050062
aauugcaacguagucauga

SEQ ID NO: 1050064 - RNA, 19 nt, Artificial Sequence
  Description of Artificial Sequence: Synthetic oligonucleotide
  Sense strand starting at position 2349 of SEQ ID NO: 915052
ugcaauuauucugcccagu

SEQ ID NO: 1050065 - RNA, 19 nt, Artificial Sequence
  Description of Artificial Sequence: Synthetic oligonucleotide
  Antisense strand to SEQ ID NO: 1050064
acugggcagaauaauugca

SEQ ID NO: 1050066 - RNA, 19 nt, Artificial Sequence
  Description of Artificial Sequence: Synthetic oligonucleotide
  Sense strand starting at position 2406 of SEQ ID NO: 915052
guccgugugcucgaggaag

SEQ ID NO: 1050067 - RNA, 19 nt, Artificial Sequence
  Description of Artificial Sequence: Synthetic oligonucleotide
  Antisense strand to SEQ ID NO: 1050066
cuuccucgagcacacggac

SEQ ID NO: 1050068 - RNA, 19 nt, Artificial Sequence
  Description of Artificial Sequence: Synthetic oligonucleotide
  Sense strand starting at position 2408 of SEQ ID NO: 915052
ccgugugcucgaggaagga

SEQ ID NO: 1050069 - RNA, 19 nt, Artificial Sequence
  Description of Artificial Sequence: Synthetic oligonucleotide
  Antisense strand to SEQ ID NO: 1050068
uccuuccucgagcacacgg

SEQ ID NO: 1050070 - RNA, 19 nt, Artificial Sequence
  Description of Artificial Sequence: Synthetic oligonucleotide
  Sense strand starting at position 2409 of SEQ ID NO: 915052
cgugugcucgaggaaggau

SEQ ID NO: 1050071 - RNA, 19 nt, Artificial Sequence
  Description of Artificial Sequence: Synthetic oligonucleotide
  Antisense strand to SEQ ID NO: 1050070
auccuuccucgagcacacg

SEQ ID NO: 1050072 - RNA, 19 nt, Artificial Sequence
  Description of Artificial Sequence: Synthetic oligonucleotide
  Sense strand starting at position 2446 of SEQ ID NO: 915052
ggguuguucgcggaguucu

SEQ ID NO: 1050073 - RNA, 19 nt, Artificial Sequence
  Description of Artificial Sequence: Synthetic oligonucleotide
  Antisense strand to SEQ ID NO: 1050072
agaacuccgcgaacaaccc

SEQ ID NO: 1050074 - RNA, 19 nt, Artificial Sequence
  Description of Artificial Sequence: Synthetic oligonucleotide
  Sense strand starting at position 2447 of SEQ ID NO: 915052
gguuguucgcggaguucuu

SEQ ID NO: 1050075 - RNA, 19 nt, Artificial Sequence
  Description of Artificial Sequence: Synthetic oligonucleotide
  Antisense strand to SEQ ID NO: 1050074
aagaacuccgcgaacaacc

SEQ ID NO: 1050076 - RNA, 19 nt, Artificial Sequence
  Description of Artificial Sequence: Synthetic oligonucleotide
  Sense strand starting at position 2553 of SEQ ID NO: 915052
cgcugaguucucucagcuc

SEQ ID NO: 1050077 - RNA, 19 nt, Artificial Sequence
  Description of Artificial Sequence: Synthetic oligonucleotide
  Antisense strand to SEQ ID NO: 1050076
gagcugagagaacucagcg

SEQ ID NO: 1050078 - RNA, 19 nt, Artificial Sequence
  Description of Artificial Sequence: Synthetic oligonucleotide
  Sense strand starting at position 2742 of SEQ ID NO: 915052
ccuuucugccgucauuaga

SEQ ID NO: 1050079 - RNA, 19 nt, Artificial Sequence
  Description of Artificial Sequence: Synthetic oligonucleotide
  Antisense strand to SEQ ID NO: 1050078
ucuaaugacggcagaaagg

SEQ ID NO: 1050080 - RNA, 19 nt, Artificial Sequence
  Description of Artificial Sequence: Synthetic oligonucleotide
  Sense strand starting at position 2854 of SEQ ID NO: 915052
gccugaugaacucgucuuu

SEQ ID NO: 1050081 - RNA, 19 nt, Artificial Sequence
  Description of Artificial Sequence: Synthetic oligonucleotide
  Antisense strand to SEQ ID NO: 1050080
aaagacgaguucaucaggc

SEQ ID NO: 1050082 - RNA, 19 nt, Artificial Sequence
  Description of Artificial Sequence: Synthetic oligonucleotide
  Sense strand starting at position 2896 of SEQ ID NO: 915052
ugugguccucgugauaaga

SEQ ID NO: 1050083 - RNA, 19 nt, Artificial Sequence
  Description of Artificial Sequence: Synthetic oligonucleotide
  Antisense strand to SEQ ID NO: 1050082
ucuuaucacgaggaccaca

SEQ ID NO: 1050084 - RNA, 19 nt, Artificial Sequence
  Description of Artificial Sequence: Synthetic oligonucleotide
  Sense strand starting at position 2904 of SEQ ID NO: 915052
ucgugauaagagugaccuu

SEQ ID NO: 1050085 - RNA, 19 nt, Artificial Sequence
  Description of Artificial Sequence: Synthetic oligonucleotide
  Antisense strand to SEQ ID NO: 1050084
aaggucacucuuaucacga

SEQ ID NO: 1050086 - RNA, 19 nt, Artificial Sequence
  Description of Artificial Sequence: Synthetic oligonucleotide
  Sense strand starting at position 2905 of SEQ ID NO: 915052
cgugauaagagugaccuuu

SEQ ID NO: 1050087 - RNA, 19 nt, Artificial Sequence
  Description of Artificial Sequence: Synthetic oligonucleotide
  Antisense strand to SEQ ID NO: 1050086
aaaggucacucuuaucacg

SEQ ID NO: 1050088 - RNA, 19 nt, Artificial Sequence
  Description of Artificial Sequence: Synthetic oligonucleotide
  Sense strand starting at position 2965 of SEQ ID NO: 915052
ggaaccaucucuguucuuu

SEQ ID NO: 1050089 - RNA, 19 nt, Artificial Sequence
  Description of Artificial Sequence: Synthetic oligonucleotide
  Antisense strand to SEQ ID NO: 1050088
aaagaacagagaugguucc

SEQ ID NO: 1050090 - RNA, 19 nt, Artificial Sequence
  Description of Artificial Sequence: Synthetic oligonucleotide
  Sense strand starting at position 3129 of SEQ ID NO: 915052
guccuuugucugugggcau

SEQ ID NO: 1050091 - RNA, 19 nt, Artificial Sequence
  Description of Artificial Sequence: Synthetic oligonucleotide
  Antisense strand to SEQ ID NO: 1050090
augcccacagacaaaggac

SEQ ID NO: 1050092 - RNA, 19 nt, Artificial Sequence
  Description of Artificial Sequence: Synthetic oligonucleotide
  Sense strand starting at position 3132 of SEQ ID NO: 915052
cuuugucugugggcaugaa

SEQ ID NO: 1050093 - RNA, 19 nt, Artificial Sequence
  Description of Artificial Sequence: Synthetic oligonucleotide
  Antisense strand to SEQ ID NO: 1050092
uucaugcccacagacaaag

SEQ ID NO: 1050094 - RNA, 19 nt, Artificial Sequence
  Description of Artificial Sequence: Synthetic oligonucleotide
  Sense strand starting at position 3256 of SEQ ID NO: 915052
uguggacgucagugacauu

SEQ ID NO: 1050095 - RNA, 19 nt, Artificial Sequence
  Description of Artificial Sequence: Synthetic oligonucleotide
  Antisense strand to SEQ ID NO: 1050094
aaugucacugacguccaca

SEQ ID NO: 1050096 - RNA, 19 nt, Artificial Sequence
  Description of Artificial Sequence: Synthetic oligonucleotide
  Sense strand starting at position 3265 of SEQ ID NO: 915052
cagugacauucccaagaga

SEQ ID NO: 1050097 - RNA, 19 nt, Artificial Sequence
  Description of Artificial Sequence: Synthetic oligonucleotide
  Antisense strand to SEQ ID NO: 1050096
ucucuugggaaugucacug

SEQ ID NO: 1050098 - RNA, 19 nt, Artificial Sequence
  Description of Artificial Sequence: Synthetic oligonucleotide
  Sense strand starting at position 3306 of SEQ ID NO: 915052
gucugagguuucccagaca

SEQ ID NO: 1050099 - RNA, 19 nt, Artificial Sequence
  Description of Artificial Sequence: Synthetic oligonucleotide
  Antisense strand to SEQ ID NO: 1050098
ugucugggaaaccucagac

SEQ ID NO: 1050100 - RNA, 19 nt, Artificial Sequence
  Description of Artificial Sequence: Synthetic oligonucleotide
  Sense strand starting at position 3382 of SEQ ID NO: 915052
ucucuuggucagggaaaga

SEQ ID NO: 1050101 - RNA, 19 nt, Artificial Sequence
  Description of Artificial Sequence: Synthetic oligonucleotide
  Antisense strand to SEQ ID NO: 1050100
ucuuucccugaccaagaga

SEQ ID NO: 1050102 - RNA, 19 nt, Artificial Sequence
  Description of Artificial Sequence: Synthetic oligonucleotide
  Sense strand starting at position 3531 of SEQ ID NO: 915052
ugucucuaacugggucaaa

SEQ ID NO: 1050103 - RNA, 19 nt, Artificial Sequence
  Description of Artificial Sequence: Synthetic oligonucleotide
  Antisense strand to SEQ ID NO: 1050102
uuugacccaguuagagaca

SEQ ID NO: 1050104 - RNA, 19 nt, Artificial Sequence
  Description of Artificial Sequence: Synthetic oligonucleotide
  Sense strand starting at position 3675 of SEQ ID NO: 915052
aagcacuugccauguguua

SEQ ID NO: 1050105 - RNA, 19 nt, Artificial Sequence
  Description of Artificial Sequence: Synthetic oligonucleotide
  Antisense strand to SEQ ID NO: 1050104
uaacacauggcaagugcuu

SEQ ID NO: 1050106 - RNA, 19 nt, Artificial Sequence
  Description of Artificial Sequence: Synthetic oligonucleotide
  Sense strand starting at position 3688 of SEQ ID NO: 915052
guguuaccuccuuaauccu

SEQ ID NO: 1050107 - RNA, 19 nt, Artificial Sequence
  Description of Artificial Sequence: Synthetic oligonucleotide
  Antisense strand to SEQ ID NO: 1050106
aggauuaaggagguaacac

SEQ ID NO: 1050108 - RNA, 19 nt, Artificial Sequence
  Description of Artificial Sequence: Synthetic oligonucleotide
  Sense strand starting at position 3868 of SEQ ID NO: 915052
aggcuucucaagcgaagaa

SEQ ID NO: 1050109 - RNA, 19 nt, Artificial Sequence
  Description of Artificial Sequence: Synthetic oligonucleotide
  Antisense strand to SEQ ID NO: 1050108
uucuucgcuugagaagccu

SEQ ID NO: 1050110 - RNA, 19 nt, Artificial Sequence
  Description of Artificial Sequence: Synthetic oligonucleotide
  Sense strand starting at position 3914 of SEQ ID NO: 915052
ggagccuucucugcagcau

SEQ ID NO: 1050111 - RNA, 19 nt, Artificial Sequence
  Description of Artificial Sequence: Synthetic oligonucleotide
  Antisense strand to SEQ ID NO: 1050110
augcugcagagaaggcucc

SEQ ID NO: 1050112 - RNA, 19 nt, Artificial Sequence
  Description of Artificial Sequence: Synthetic oligonucleotide
  Sense strand starting at position 45 of SEQ ID NO: 915053
guuccauuccgugauaagg

SEQ ID NO: 1050113 - RNA, 19 nt, Artificial Sequence
  Description of Artificial Sequence: Synthetic oligonucleotide
  Antisense strand to SEQ ID NO: 1050112
ccuuaucacggaauggaac

SEQ ID NO: 1050114 - RNA, 19 nt, Artificial Sequence
  Description of Artificial Sequence: Synthetic oligonucleotide
  Sense strand starting at position 107 of SEQ ID NO: 915053
uaggcauauuccguaguga

SEQ ID NO: 1050115 - RNA, 19 nt, Artificial Sequence
  Description of Artificial Sequence: Synthetic oligonucleotide
  Antisense strand to SEQ ID NO: 1050114
ucacuacggaauaugccua

SEQ ID NO: 1050116 - RNA, 19 nt, Artificial Sequence
  Description of Artificial Sequence: Synthetic oligonucleotide
  Sense strand starting at position 108 of SEQ ID NO: 915053
aggcauauuccguagugau

SEQ ID NO: 1050117 - RNA, 19 nt, Artificial Sequence
  Description of Artificial Sequence: Synthetic oligonucleotide
  Antisense strand to SEQ ID NO: 1050116
aucacuacggaauaugccu

SEQ ID NO: 1050118 - RNA, 19 nt, Artificial Sequence
  Description of Artificial Sequence: Synthetic oligonucleotide
  Sense strand starting at position 128 of SEQ ID NO: 915053
ugcacuuagggaugugaac

SEQ ID NO: 1050119 - RNA, 19 nt, Artificial Sequence
  Description of Artificial Sequence: Synthetic oligonucleotide
  Antisense strand to SEQ ID NO: 1050118
guucacaucccuaagugca

SEQ ID NO: 1050120 - RNA, 19 nt, Artificial Sequence
  Description of Artificial Sequence: Synthetic oligonucleotide
  Sense strand starting at position 190 of SEQ ID NO: 915053
gcgguuccucuguaagaug

SEQ ID NO: 1050121 - RNA, 19 nt, Artificial Sequence
  Description of Artificial Sequence: Synthetic oligonucleotide
  Antisense strand to SEQ ID NO: 1050120
caucuuacagaggaaccgc

SEQ ID NO: 1050122 - RNA, 19 nt, Artificial Sequence
  Description of Artificial Sequence: Synthetic oligonucleotide
  Sense strand starting at position 201 of SEQ ID NO: 915053
guaagauguccacgagcac

SEQ ID NO: 1050123 - RNA, 19 nt, Artificial Sequence
  Description of Artificial Sequence: Synthetic oligonucleotide
  Antisense strand to SEQ ID NO: 1050122
gugcucguggacaucuuac

SEQ ID NO: 1050124 - RNA, 19 nt, Artificial Sequence
  Description of Artificial Sequence: Synthetic oligonucleotide
  Sense strand starting at position 343 of SEQ ID NO: 915053
gccugaacucaagaagcaa

SEQ ID NO: 1050125 - RNA, 19 nt, Artificial Sequence
  Description of Artificial Sequence: Synthetic oligonucleotide
  Antisense strand to SEQ ID NO: 1050124
uugcuucuugaguucaggc

SEQ ID NO: 1050126 - RNA, 19 nt, Artificial Sequence
  Description of Artificial Sequence: Synthetic oligonucleotide
  Sense strand starting at position 549 of SEQ ID NO: 915053
agaucuuccagcgggcuaa

SEQ ID NO: 1050127 - RNA, 19 nt, Artificial Sequence
  Description of Artificial Sequence: Synthetic oligonucleotide
  Antisense strand to SEQ ID NO: 1050126
uuagcccgcuggaagaucu

SEQ ID NO: 1050128 - RNA, 19 nt, Artificial Sequence
  Description of Artificial Sequence: Synthetic oligonucleotide
  Sense strand starting at position 658 of SEQ ID NO: 915053
ugcucuuuggccuagagag

SEQ ID NO: 1050129 - RNA, 19 nt, Artificial Sequence
  Description of Artificial Sequence: Synthetic oligonucleotide
  Antisense strand to SEQ ID NO: 1050128
cucucuaggccaaagagca

SEQ ID NO: 1050130 - RNA, 19 nt, Artificial Sequence
  Description of Artificial Sequence: Synthetic oligonucleotide
  Sense strand starting at position 678 of SEQ ID NO: 915053
aggccacgccucuaaagaa

SEQ ID NO: 1050131 - RNA, 19 nt, Artificial Sequence
  Description of Artificial Sequence: Synthetic oligonucleotide
  Antisense strand to SEQ ID NO: 1050130
uucuuuagaggcguggccu

SEQ ID NO: 1050132 - RNA, 19 nt, Artificial Sequence
  Description of Artificial Sequence: Synthetic oligonucleotide
  Sense strand starting at position 888 of SEQ ID NO: 915053
acuacuagcucuuugaaga

SEQ ID NO: 1050133 - RNA, 19 nt, Artificial Sequence
  Description of Artificial Sequence: Synthetic oligonucleotide
  Antisense strand to SEQ ID NO: 1050132
ucuucaaagagcuaguagu

SEQ ID NO: 1050134 - RNA, 19 nt, Artificial Sequence
  Description of Artificial Sequence: Synthetic oligonucleotide
  Sense strand starting at position 889 of SEQ ID NO: 915053
cuacuagcucuuugaagaa

SEQ ID NO: 1050135 - RNA, 19 nt, Artificial Sequence
  Description of Artificial Sequence: Synthetic oligonucleotide
  Antisense strand to SEQ ID NO: 1050134
uucuucaaagagcuaguag

SEQ ID NO: 1050136 - RNA, 19 nt, Artificial Sequence
  Description of Artificial Sequence: Synthetic oligonucleotide
  Sense strand starting at position 984 of SEQ ID NO: 915053
cgcugagaguccucacaac

SEQ ID NO: 1050137 - RNA, 19 nt, Artificial Sequence
  Description of Artificial Sequence: Synthetic oligonucleotide
  Antisense strand to SEQ ID NO: 1050136
guugugaggacucucagcg

SEQ ID NO: 1050138 - RNA, 19 nt, Artificial Sequence
  Description of Artificial Sequence: Synthetic oligonucleotide
  Sense strand starting at position 1073 of SEQ ID NO: 915053
cacggaacccugcgauuau

SEQ ID NO: 1050139 - RNA, 19 nt, Artificial Sequence
  Description of Artificial Sequence: Synthetic oligonucleotide
  Antisense strand to SEQ ID NO: 1050138
auaaucgcaggguuccgug

SEQ ID NO: 1050140 - RNA, 19 nt, Artificial Sequence
  Description of Artificial Sequence: Synthetic oligonucleotide
  Sense strand starting at position 1104 of SEQ ID NO: 915053
cugguuugagcuugagaaa

SEQ ID NO: 1050141 - RNA, 19 nt, Artificial Sequence
  Description of Artificial Sequence: Synthetic oligonucleotide
  Antisense strand to SEQ ID NO: 1050140
uuucucaagcucaaaccag

SEQ ID NO: 1050142 - RNA, 19 nt, Artificial Sequence
  Description of Artificial Sequence: Synthetic oligonucleotide
  Sense strand starting at position 1157 of SEQ ID NO: 915053
ucagauaauuguucgccca

SEQ ID NO: 1050143 - RNA, 19 nt, Artificial Sequence
  Description of Artificial Sequence: Synthetic oligonucleotide
  Antisense strand to SEQ ID NO: 1050142
ugggcgaacaauuaucuga

SEQ ID NO: 1050144 - RNA, 19 nt, Artificial Sequence
  Description of Artificial Sequence: Synthetic oligonucleotide
  Sense strand starting at position 1202 of SEQ ID NO: 915053
gagaauacuccuggaguuc

SEQ ID NO: 1050145 - RNA, 19 nt, Artificial Sequence
  Description of Artificial Sequence: Synthetic oligonucleotide
  Antisense strand to SEQ ID NO: 1050144
gaacuccaggaguauucuc

SEQ ID NO: 1050146 - RNA, 19 nt, Artificial Sequence
  Description of Artificial Sequence: Synthetic oligonucleotide
  Sense strand starting at position 1213 of SEQ ID NO: 915053
uggaguucuccuggguagu

SEQ ID NO: 1050147 - RNA, 19 nt, Artificial Sequence
  Description of Artificial Sequence: Synthetic oligonucleotide
  Antisense strand to SEQ ID NO: 1050146
acuacccaggagaacucca

SEQ ID NO: 1050148 - RNA, 19 nt, Artificial Sequence
  Description of Artificial Sequence: Synthetic oligonucleotide
  Sense strand starting at position 1214 of SEQ ID NO: 915053
ggaguucuccuggguaguc

SEQ ID NO: 1050149 - RNA, 19 nt, Artificial Sequence
  Description of Artificial Sequence: Synthetic oligonucleotide
  Antisense strand to SEQ ID NO: 1050148
gacuacccaggagaacucc

SEQ ID NO: 1050150 - RNA, 19 nt, Artificial Sequence
  Description of Artificial Sequence: Synthetic oligonucleotide
  Sense strand starting at position 1215 of SEQ ID NO: 915053
gaguucuccuggguaguca

SEQ ID NO: 1050151 - RNA, 19 nt, Artificial Sequence
  Description of Artificial Sequence: Synthetic oligonucleotide
  Antisense strand to SEQ ID NO: 1050150
ugacuacccaggagaacuc

SEQ ID NO: 1050152 - RNA, 19 nt, Artificial Sequence
  Description of Artificial Sequence: Synthetic oligonucleotide
  Sense strand starting at position 2615 of SEQ ID NO: 915053
augacugaguacucucuuu

SEQ ID NO: 1050153 - RNA, 19 nt, Artificial Sequence
  Description of Artificial Sequence: Synthetic oligonucleotide
  Antisense strand to SEQ ID NO: 1050152
aaagagaguacucagucau

SEQ ID NO: 1050154 - RNA, 19 nt, Artificial Sequence
  Description of Artificial Sequence: Synthetic oligonucleotide
  Sense strand starting at position 2621 of SEQ ID NO: 915053
gaguacucucuuugugggu

SEQ ID NO: 1050155 - RNA, 19 nt, Artificial Sequence
  Description of Artificial Sequence: Synthetic oligonucleotide
  Antisense strand to SEQ ID NO: 1050154
acccacaaagagaguacuc

SEQ ID NO: 1050156 - RNA, 19 nt, Artificial Sequence
  Description of Artificial Sequence: Synthetic oligonucleotide
  Sense strand starting at position 2733 of SEQ ID NO: 915053
ucucauucugcagggcaga

SEQ ID NO: 1050157 - RNA, 19 nt, Artificial Sequence
  Description of Artificial Sequence: Synthetic oligonucleotide
  Antisense strand to SEQ ID NO: 1050156
ucugcccugcagaaugaga

SEQ ID NO: 1050158 - RNA, 19 nt, Artificial Sequence
  Description of Artificial Sequence: Synthetic oligonucleotide
  Sense strand starting at position 3006 of SEQ ID NO: 915053
ugaccuucccuaugaagau

SEQ ID NO: 1050159 - RNA, 19 nt, Artificial Sequence
  Description of Artificial Sequence: Synthetic oligonucleotide
  Antisense strand to SEQ ID NO: 1050158
aucuucauagggaagguca

SEQ ID NO: 1050160 - RNA, 19 nt, Artificial Sequence
  Description of Artificial Sequence: Synthetic oligonucleotide
  Sense strand starting at position 3121 of SEQ ID NO: 915053
augacagccucugauuuau

SEQ ID NO: 1050161 - RNA, 19 nt, Artificial Sequence
  Description of Artificial Sequence: Synthetic oligonucleotide
  Antisense strand to SEQ ID NO: 1050160
auaaaucagaggcugucau

SEQ ID NO: 1050162 - RNA, 19 nt, Artificial Sequence
  Description of Artificial Sequence: Synthetic oligonucleotide
  Sense strand starting at position 3208 of SEQ ID NO: 915053
gcaguacuccuuugauauu

SEQ ID NO: 1050163 - RNA, 19 nt, Artificial Sequence
  Description of Artificial Sequence: Synthetic oligonucleotide
  Antisense strand to SEQ ID NO: 1050162
aauaucaaaggaguacugc

SEQ ID NO: 1050164 - RNA, 19 nt, Artificial Sequence
  Description of Artificial Sequence: Synthetic oligonucleotide
  Sense strand starting at position 3272 of SEQ ID NO: 915053
gucccucguuuccuggaaa

SEQ ID NO: 1050165 - RNA, 19 nt, Artificial Sequence
  Description of Artificial Sequence: Synthetic oligonucleotide
  Antisense strand to SEQ ID NO: 1050164
uuuccaggaaacgagggac

SEQ ID NO: 1050166 - RNA, 19 nt, Artificial Sequence
  Description of Artificial Sequence: Synthetic oligonucleotide
  Sense strand starting at position 3275 of SEQ ID NO: 915053
ccucguuuccuggaaacca

SEQ ID NO: 1050167 - RNA, 19 nt, Artificial Sequence
  Description of Artificial Sequence: Synthetic oligonucleotide
  Antisense strand to SEQ ID NO: 1050166
ugguuuccaggaaacgagg

SEQ ID NO: 1050168 - RNA, 19 nt, Artificial Sequence
  Description of Artificial Sequence: Synthetic oligonucleotide
  Sense strand starting at position 3485 of SEQ ID NO: 915053
cuggauauuucugugugca

SEQ ID NO: 1050169 - RNA, 19 nt, Artificial Sequence
  Description of Artificial Sequence: Synthetic oligonucleotide
  Antisense strand to SEQ ID NO: 1050168
ugcacacagaaauauccag

SEQ ID NO: 1050170 - RNA, 19 nt, Artificial Sequence
  Description of Artificial Sequence: Synthetic oligonucleotide
  Sense strand starting at position 3486 of SEQ ID NO: 915053
uggauauuucugugugcaa

SEQ ID NO: 1050171 - RNA, 19 nt, Artificial Sequence
  Description of Artificial Sequence: Synthetic oligonucleotide
  Antisense strand to SEQ ID NO: 1050170
uugcacacagaaauaucca

SEQ ID NO: 1050172 - RNA, 19 nt, Artificial Sequence
  Description of Artificial Sequence: Synthetic oligonucleotide
  Sense strand starting at position 3488 of SEQ ID NO: 915053
gauauuucugugugcaagc

SEQ ID NO: 1050173 - RNA, 19 nt, Artificial Sequence
  Description of Artificial Sequence: Synthetic oligonucleotide
  Antisense strand to SEQ ID NO: 1050172
gcuugcacacagaaauauc

SEQ ID NO: 1050174 - RNA, 19 nt, Artificial Sequence
  Description of Artificial Sequence: Synthetic oligonucleotide
  Sense strand starting at position 3535 of SEQ ID NO: 915053
gguccuuuggcagaugaaa

SEQ ID NO: 1050175 - RNA, 19 nt, Artificial Sequence
  Description of Artificial Sequence: Synthetic oligonucleotide
  Antisense strand to SEQ ID NO: 1050174
uuucaucugccaaaggacc

SEQ ID NO: 1050176 - RNA, 19 nt, Artificial Sequence
  Description of Artificial Sequence: Synthetic oligonucleotide
  Sense strand starting at position 3604 of SEQ ID NO: 915053
uccagaaguugagcugaau

SEQ ID NO: 1050177 - RNA, 19 nt, Artificial Sequence
  Description of Artificial Sequence: Synthetic oligonucleotide
  Antisense strand to SEQ ID NO: 1050176
auucagcucaacuucugga

SEQ ID NO: 1050178 - RNA, 19 nt, Artificial Sequence
  Description of Artificial Sequence: Synthetic oligonucleotide
  Sense strand starting at position 3655 of SEQ ID NO: 915053
aacucagauucggcuaaga

SEQ ID NO: 1050179 - RNA, 19 nt, Artificial Sequence
  Description of Artificial Sequence: Synthetic oligonucleotide
  Antisense strand to SEQ ID NO: 1050178
ucuuagccgaaucugaguu

SEQ ID NO: 1050180 - RNA, 19 nt, Artificial Sequence
  Description of Artificial Sequence: Synthetic oligonucleotide
  Sense strand starting at position 3678 of SEQ ID NO: 915053
aaggaaaucugucugccuu

SEQ ID NO: 1050181 - RNA, 19 nt, Artificial Sequence
  Description of Artificial Sequence: Synthetic oligonucleotide
  Antisense strand to SEQ ID NO: 1050180
aaggcagacagauuuccuu

SEQ ID NO: 1050182 - RNA, 19 nt, Artificial Sequence
  Description of Artificial Sequence: Synthetic oligonucleotide
  Sense strand starting at position 3679 of SEQ ID NO: 915053
aggaaaucugucugccuug

SEQ ID NO: 1050183 - RNA, 19 nt, Artificial Sequence
  Description of Artificial Sequence: Synthetic oligonucleotide
  Antisense strand to SEQ ID NO: 1050182
caaggcagacagauuuccu

SEQ ID NO: 1050184 - RNA, 19 nt, Artificial Sequence
  Description of Artificial Sequence: Synthetic oligonucleotide
  Sense strand starting at position 3680 of SEQ ID NO: 915053
ggaaaucugucugccuuga

SEQ ID NO: 1050185 - RNA, 19 nt, Artificial Sequence
  Description of Artificial Sequence: Synthetic oligonucleotide
  Antisense strand to SEQ ID NO: 1050184
ucaaggcagacagauuucc

SEQ ID NO: 1050186 - RNA, 19 nt, Artificial Sequence
  Description of Artificial Sequence: Synthetic oligonucleotide
  Sense strand starting at position 3690 of SEQ ID NO: 915053
cugccuugacucuguauuu

SEQ ID NO: 1050187 - RNA, 19 nt, Artificial Sequence
  Description of Artificial Sequence: Synthetic oligonucleotide
  Antisense strand to SEQ ID NO: 1050186
aaauacagagucaaggcag

SEQ ID NO: 1050188 - RNA, 19 nt, Artificial Sequence
  Description of Artificial Sequence: Synthetic oligonucleotide
  Sense strand starting at position 3747 of SEQ ID NO: 915053
gcguguugcauuuaaagcu

SEQ ID NO: 1050189 - RNA, 19 nt, Artificial Sequence
  Description of Artificial Sequence: Synthetic oligonucleotide
  Antisense strand to SEQ ID NO: 1050188
agcuuuaaaugcaacacgc

SEQ ID NO: 1050190 - RNA, 19 nt, Artificial Sequence
  Description of Artificial Sequence: Synthetic oligonucleotide
  Sense strand starting at position 3924 of SEQ ID NO: 915053
uuuggacuguuguuuccaa

SEQ ID NO: 1050191 - RNA, 19 nt, Artificial Sequence
  Description of Artificial Sequence: Synthetic oligonucleotide
  Antisense strand to SEQ ID NO: 1050190
uuggaaacaacaguccaaa

SEQ ID NO: 1050192 - RNA, 19 nt, Artificial Sequence
  Description of Artificial Sequence: Synthetic oligonucleotide
  Sense strand starting at position 60 of SEQ ID NO: 915054
cccuuuauugcugaaagag

SEQ ID NO: 1050193 - RNA, 19 nt, Artificial Sequence
  Description of Artificial Sequence: Synthetic oligonucleotide
  Antisense strand to SEQ ID NO: 1050192
cucuuucagcaauaaaggg

SEQ ID NO: 1050194 - RNA, 19 nt, Artificial Sequence
  Description of Artificial Sequence: Synthetic oligonucleotide
  Sense strand starting at position 138 of SEQ ID NO: 915054
ucaacaugugacuauuagu

SEQ ID NO: 1050195 - RNA, 19 nt, Artificial Sequence
  Description of Artificial Sequence: Synthetic oligonucleotide
  Antisense strand to SEQ ID NO: 1050194
acuaauagucacauguuga

SEQ ID NO: 1050196 - RNA, 19 nt, Artificial Sequence
  Description of Artificial Sequence: Synthetic oligonucleotide
  Sense strand starting at position 144 of SEQ ID NO: 915054
ugugacuauuaguuaaauc

SEQ ID NO: 1050197 - RNA, 19 nt, Artificial Sequence
  Description of Artificial Sequence: Synthetic oligonucleotide
  Antisense strand to SEQ ID NO: 1050196
gauuuaacuaauagucaca

SEQ ID NO: 1050198 - RNA, 19 nt, Artificial Sequence
  Description of Artificial Sequence: Synthetic oligonucleotide
  Sense strand starting at position 168 of SEQ ID NO: 915054
aggaauucuccaggugaua

SEQ ID NO: 1050199 - RNA, 19 nt, Artificial Sequence
  Description of Artificial Sequence: Synthetic oligonucleotide
  Antisense strand to SEQ ID NO: 1050198
uaucaccuggagaauuccu

SEQ ID NO: 1050200 - RNA, 19 nt, Artificial Sequence
  Description of Artificial Sequence: Synthetic oligonucleotide
  Sense strand starting at position 217 of SEQ ID NO: 915054
cggguuagggcucagaaca

SEQ ID NO: 1050201 - RNA, 19 nt, Artificial Sequence
  Description of Artificial Sequence: Synthetic oligonucleotide
  Antisense strand to SEQ ID NO: 1050200
uguucugagcccuaacccg

SEQ ID NO: 1050202 - RNA, 19 nt, Artificial Sequence
  Description of Artificial Sequence: Synthetic oligonucleotide
  Sense strand starting at position 669 of SEQ ID NO: 915054
uggauuccuugcuuguaaa

SEQ ID NO: 1050203 - RNA, 19 nt, Artificial Sequence
  Description of Artificial Sequence: Synthetic oligonucleotide
  Antisense strand to SEQ ID NO: 1050202
uuuacaagcaaggaaucca

SEQ ID NO: 1050204 - RNA, 19 nt, Artificial Sequence
  Description of Artificial Sequence: Synthetic oligonucleotide
  Sense strand starting at position 679 of SEQ ID NO: 915054
gcuuguaaacuauggauaa

SEQ ID NO: 1050205 - RNA, 19 nt, Artificial Sequence
  Description of Artificial Sequence: Synthetic oligonucleotide
  Antisense strand to SEQ ID NO: 1050204
uuauccauaguuuacaagc

SEQ ID NO: 1050206 - RNA, 19 nt, Artificial Sequence
  Description of Artificial Sequence: Synthetic oligonucleotide
  Sense strand starting at position 865 of SEQ ID NO: 915054
gcugaucguguugaugaca

SEQ ID NO: 1050207 - RNA, 19 nt, Artificial Sequence
  Description of Artificial Sequence: Synthetic oligonucleotide
  Antisense strand to SEQ ID NO: 1050206
ugucaucaacacgaucagc

SEQ ID NO: 1050208 - RNA, 19 nt, Artificial Sequence
  Description of Artificial Sequence: Synthetic oligonucleotide
  Sense strand starting at position 868 of SEQ ID NO: 915054
gaucguguugaugacagaa

SEQ ID NO: 1050209 - RNA, 19 nt, Artificial Sequence
  Description of Artificial Sequence: Synthetic oligonucleotide
  Antisense strand to SEQ ID NO: 1050208
uucugucaucaacacgauc

SEQ ID NO: 1050210 - RNA, 19 nt, Artificial Sequence
  Description of Artificial Sequence: Synthetic oligonucleotide
  Sense strand starting at position 886 of SEQ ID NO: 915054
aguaauauagauggugauu

SEQ ID NO: 1050211 - RNA, 19 nt, Artificial Sequence
  Description of Artificial Sequence: Synthetic oligonucleotide
  Antisense strand to SEQ ID NO: 1050210
aaucaccaucuauauuacu

SEQ ID NO: 1050212 - RNA, 19 nt, Artificial Sequence
  Description of Artificial Sequence: Synthetic oligonucleotide
  Sense strand starting at position 1059 of SEQ ID NO: 915054
gcuuucuuacugggagaga

SEQ ID NO: 1050213 - RNA, 19 nt, Artificial Sequence
  Description of Artificial Sequence: Synthetic oligonucleotide
  Antisense strand to SEQ ID NO: 1050212
ucucucccaguaagaaagc

SEQ ID NO: 1050214 - RNA, 19 nt, Artificial Sequence
  Description of Artificial Sequence: Synthetic oligonucleotide
  Sense strand starting at position 1074 of SEQ ID NO: 915054
gagaguauagccuagcaug

SEQ ID NO: 1050215 - RNA, 19 nt, Artificial Sequence
  Description of Artificial Sequence: Synthetic oligonucleotide
  Antisense strand to SEQ ID NO: 1050214
caugcuaggcuauacucuc

SEQ ID NO: 1050216 - RNA, 19 nt, Artificial Sequence
  Description of Artificial Sequence: Synthetic oligonucleotide
  Sense strand starting at position 1096 of SEQ ID NO: 915054
ucugaagucugacuuaucu

SEQ ID NO: 1050217 - RNA, 19 nt, Artificial Sequence
  Description of Artificial Sequence: Synthetic oligonucleotide
  Antisense strand to SEQ ID NO: 1050216
agauaagucagacuucaga

SEQ ID NO: 1050218 - RNA, 19 nt, Artificial Sequence
  Description of Artificial Sequence: Synthetic oligonucleotide
  Sense strand starting at position 1318 of SEQ ID NO: 915054
gugccagaccuuugaagau

SEQ ID NO: 1050219 - RNA, 19 nt, Artificial Sequence
  Description of Artificial Sequence: Synthetic oligonucleotide
  Antisense strand to SEQ ID NO: 1050218
aucuucaaaggucuggcac

SEQ ID NO: 1050220 - RNA, 19 nt, Artificial Sequence
  Description of Artificial Sequence: Synthetic oligonucleotide
  Sense strand starting at position 1327 of SEQ ID NO: 915054
cuuugaagaucuguagucu

SEQ ID NO: 1050221 - RNA, 19 nt, Artificial Sequence
  Description of Artificial Sequence: Synthetic oligonucleotide
  Antisense strand to SEQ ID NO: 1050220
agacuacagaucuucaaag

SEQ ID NO: 1050222 - RNA, 19 nt, Artificial Sequence
  Description of Artificial Sequence: Synthetic oligonucleotide
  Sense strand starting at position 1328 of SEQ ID NO: 915054
uuugaagaucuguagucua

SEQ ID NO: 1050223 - RNA, 19 nt, Artificial Sequence
  Description of Artificial Sequence: Synthetic oligonucleotide
  Antisense strand to SEQ ID NO: 1050222
uagacuacagaucuucaaa

SEQ ID NO: 1050224 - RNA, 19 nt, Artificial Sequence
  Description of Artificial Sequence: Synthetic oligonucleotide
  Sense strand starting at position 1331 of SEQ ID NO: 915054
gaagaucuguagucuaaac

SEQ ID NO: 1050225 - RNA, 19 nt, Artificial Sequence
  Description of Artificial Sequence: Synthetic oligonucleotide
  Antisense strand to SEQ ID NO: 1050224
guuuagacuacagaucuuc

SEQ ID NO: 1050226 - RNA, 19 nt, Artificial Sequence
  Description of Artificial Sequence: Synthetic oligonucleotide
  Sense strand starting at position 1439 of SEQ ID NO: 915054
caggucuccuaaguugaaa

SEQ ID NO: 1050227 - RNA, 19 nt, Artificial Sequence
  Description of Artificial Sequence: Synthetic oligonucleotide
  Antisense strand to SEQ ID NO: 1050226
uuucaacuuaggagaccug

SEQ ID NO: 1050228 - RNA, 19 nt, Artificial Sequence
  Description of Artificial Sequence: Synthetic oligonucleotide
  Sense strand starting at position 1483 of SEQ ID NO: 915054
cccagagaccuuugguaag

SEQ ID NO: 1050229 - RNA, 19 nt, Artificial Sequence
  Description of Artificial Sequence: Synthetic oligonucleotide
  Antisense strand to SEQ ID NO: 1050228
cuuaccaaaggucucuggg

SEQ ID NO: 1050230 - RNA, 19 nt, Artificial Sequence
  Description of Artificial Sequence: Synthetic oligonucleotide
  Sense strand starting at position 1529 of SEQ ID NO: 915054
ucaucucuggagugauaau

SEQ ID NO: 1050231 - RNA, 19 nt, Artificial Sequence
  Description of Artificial Sequence: Synthetic oligonucleotide
  Antisense strand to SEQ ID NO: 1050230
auuaucacuccagagauga

SEQ ID NO: 1050232 - RNA, 19 nt, Artificial Sequence
  Description of Artificial Sequence: Synthetic oligonucleotide
  Sense strand starting at position 1562 of SEQ ID NO: 915054
ucggcuucugugagaacga

SEQ ID NO: 1050233 - RNA, 19 nt, Artificial Sequence
  Description of Artificial Sequence: Synthetic oligonucleotide
  Antisense strand to SEQ ID NO: 1050232
ucguucucacagaagccga

SEQ ID NO: 1050234 - RNA, 19 nt, Artificial Sequence
  Description of Artificial Sequence: Synthetic oligonucleotide
  Sense strand starting at position 1597 of SEQ ID NO: 915054
ccaagaauucucuggccag

SEQ ID NO: 1050235 - RNA, 19 nt, Artificial Sequence
  Description of Artificial Sequence: Synthetic oligonucleotide
  Antisense strand to SEQ ID NO: 1050234
cuggccagagaauucuugg

SEQ ID NO: 1050236 - RNA, 19 nt, Artificial Sequence
  Description of Artificial Sequence: Synthetic oligonucleotide
  Sense strand starting at position 1647 of SEQ ID NO: 915054
ucaauaauccaaggcugga

SEQ ID NO: 1050237 - RNA, 19 nt, Artificial Sequence
  Description of Artificial Sequence: Synthetic oligonucleotide
  Antisense strand to SEQ ID NO: 1050236
uccagccuuggauuauuga

SEQ ID NO: 1050238 - RNA, 19 nt, Artificial Sequence
  Description of Artificial Sequence: Synthetic oligonucleotide
  Sense strand starting at position 2260 of SEQ ID NO: 915054
ccuaaagcuucccuggaca

SEQ ID NO: 1050239 - RNA, 19 nt, Artificial Sequence
  Description of Artificial Sequence: Synthetic oligonucleotide
  Antisense strand to SEQ ID NO: 1050238
uguccagggaagcuuuagg

SEQ ID NO: 1050240 - RNA, 19 nt, Artificial Sequence
  Description of Artificial Sequence: Synthetic oligonucleotide
  Sense strand starting at position 2281 of SEQ ID NO: 915054
cugagaguugagcaaaggu

SEQ ID NO: 1050241 - RNA, 19 nt, Artificial Sequence
  Description of Artificial Sequence: Synthetic oligonucleotide
  Antisense strand to SEQ ID NO: 1050240
accuuugcucaacucucag

SEQ ID NO: 1050242 - RNA, 19 nt, Artificial Sequence
  Description of Artificial Sequence: Synthetic oligonucleotide
  Sense strand starting at position 2331 of SEQ ID NO: 915054
accagagguccagagcauu

SEQ ID NO: 1050243 - RNA, 19 nt, Artificial Sequence
  Description of Artificial Sequence: Synthetic oligonucleotide
  Antisense strand to SEQ ID NO: 1050242
aaugcucuggaccucuggu

SEQ ID NO: 1050244 - RNA, 19 nt, Artificial Sequence
  Description of Artificial Sequence: Synthetic oligonucleotide
  Sense strand starting at position 2553 of SEQ ID NO: 915054
guacaacguaaagguaaua

SEQ ID NO: 1050245 - RNA, 19 nt, Artificial Sequence
  Description of Artificial Sequence: Synthetic oligonucleotide
  Antisense strand to SEQ ID NO: 1050244
uauuaccuuuacguuguac

SEQ ID NO: 1050246 - RNA, 19 nt, Artificial Sequence
  Description of Artificial Sequence: Synthetic oligonucleotide
  Sense strand starting at position 2927 of SEQ ID NO: 915054
ugaugaggguucuuugaaa

SEQ ID NO: 1050247 - RNA, 19 nt, Artificial Sequence
  Description of Artificial Sequence: Synthetic oligonucleotide
  Antisense strand to SEQ ID NO: 1050246
uuucaaagaacccucauca

SEQ ID NO: 1050248 - RNA, 19 nt, Artificial Sequence
  Description of Artificial Sequence: Synthetic oligonucleotide
  Sense strand starting at position 3032 of SEQ ID NO: 915054
gagaccaacucaucguaau

SEQ ID NO: 1050249 - RNA, 19 nt, Artificial Sequence
  Description of Artificial Sequence: Synthetic oligonucleotide
  Antisense strand to SEQ ID NO: 1050248
auuacgaugaguuggucuc

SEQ ID NO: 1050250 - RNA, 19 nt, Artificial Sequence
  Description of Artificial Sequence: Synthetic oligonucleotide
  Sense strand starting at position 3033 of SEQ ID NO: 915054
agaccaacucaucguaaua

SEQ ID NO: 1050251 - RNA, 19 nt, Artificial Sequence
  Description of Artificial Sequence: Synthetic oligonucleotide
  Antisense strand to SEQ ID NO: 1050250
uauuacgaugaguuggucu

SEQ ID NO: 1050252 - RNA, 19 nt, Artificial Sequence
  Description of Artificial Sequence: Synthetic oligonucleotide
  Sense strand starting at position 3044 of SEQ ID NO: 915054
ucguaauaagcccaaauaa

SEQ ID NO: 1050253 - RNA, 19 nt, Artificial Sequence
  Description of Artificial Sequence: Synthetic oligonucleotide
  Antisense strand to SEQ ID NO: 1050252
uuauuugggcuuauuacga

SEQ ID NO: 1050254 - RNA, 19 nt, Artificial Sequence
  Description of Artificial Sequence: Synthetic oligonucleotide
  Sense strand starting at position 3369 of SEQ ID NO: 915054
cuggcaauaaugggucuua

SEQ ID NO: 1050255 - RNA, 19 nt, Artificial Sequence
  Description of Artificial Sequence: Synthetic oligonucleotide
  Antisense strand to SEQ ID NO: 1050254
uaagacccauuauugccag

SEQ ID NO: 1050256 - RNA, 19 nt, Artificial Sequence
  Description of Artificial Sequence: Synthetic oligonucleotide
  Sense strand starting at position 3370 of SEQ ID NO: 915054
uggcaauaaugggucuuaa

SEQ ID NO: 1050257 - RNA, 19 nt, Artificial Sequence
  Description of Artificial Sequence: Synthetic oligonucleotide
  Antisense strand to SEQ ID NO: 1050256
uuaagacccauuauugcca

SEQ ID NO: 1050258 - RNA, 19 nt, Artificial Sequence
  Description of Artificial Sequence: Synthetic oligonucleotide
  Sense strand starting at position 3462 of SEQ ID NO: 915054
uuauaagauuagccuagaa

SEQ ID NO: 1050259 - RNA, 19 nt, Artificial Sequence
  Description of Artificial Sequence: Synthetic oligonucleotide
  Antisense strand to SEQ ID NO: 1050258
uucuaggcuaaucuuauaa

SEQ ID NO: 1050260 - RNA, 19 nt, Artificial Sequence
  Description of Artificial Sequence: Synthetic oligonucleotide
  Sense strand starting at position 3555 of SEQ ID NO: 915054
aggugauuccacuggccaa

SEQ ID NO: 1050261 - RNA, 19 nt, Artificial Sequence
  Description of Artificial Sequence: Synthetic oligonucleotide
  Antisense strand to SEQ ID NO: 1050260
uuggccaguggaaucaccu

SEQ ID NO: 1050262 - RNA, 19 nt, Artificial Sequence
  Description of Artificial Sequence: Synthetic oligonucleotide
  Sense strand starting at position 3556 of SEQ ID NO: 915054
ggugauuccacuggccaaa

SEQ ID NO: 1050263 - RNA, 19 nt, Artificial Sequence
  Description of Artificial Sequence: Synthetic oligonucleotide
  Antisense strand to SEQ ID NO: 1050262
uuuggccaguggaaucacc

SEQ ID NO: 1050264 - RNA, 19 nt, Artificial Sequence
  Description of Artificial Sequence: Synthetic oligonucleotide
  Sense strand starting at position 3558 of SEQ ID NO: 915054
ugauuccacuggccaaaua

SEQ ID NO: 1050265 - RNA, 19 nt, Artificial Sequence
  Description of Artificial Sequence: Synthetic oligonucleotide
  Antisense strand to SEQ ID NO: 1050264
uauuuggccaguggaauca

SEQ ID NO: 1050266 - RNA, 19 nt, Artificial Sequence
  Description of Artificial Sequence: Synthetic oligonucleotide
  Sense strand starting at position 3647 of SEQ ID NO: 915054
ucacuuuggucaccucaga

SEQ ID NO: 1050267 - RNA, 19 nt, Artificial Sequence
  Description of Artificial Sequence: Synthetic oligonucleotide
  Antisense strand to SEQ ID NO: 1050266
ucugaggugaccaaaguga

SEQ ID NO: 1050268 - RNA, 19 nt, Artificial Sequence
  Description of Artificial Sequence: Synthetic oligonucleotide
  Sense strand starting at position 3781 of SEQ ID NO: 915054
ccaaaugaaugauagaauu

SEQ ID NO: 1050269 - RNA, 19 nt, Artificial Sequence
  Description of Artificial Sequence: Synthetic oligonucleotide
  Antisense strand to SEQ ID NO: 1050268
aauucuaucauucauuugg

SEQ ID NO: 1050270 - RNA, 19 nt, Artificial Sequence
  Description of Artificial Sequence: Synthetic oligonucleotide
  Sense strand starting at position 3975 of SEQ ID NO: 915054
agaacuugccucugggaga

SEQ ID NO: 1050271 - RNA, 19 nt, Artificial Sequence
  Description of Artificial Sequence: Synthetic oligonucleotide
  Antisense strand to SEQ ID NO: 1050270
ucucccagaggcaaguucu

SEQ ID NO: 1050272 - RNA, 19 nt, Artificial Sequence
  Description of Artificial Sequence: Synthetic oligonucleotide
  Sense strand starting at position 125 of SEQ ID NO: 915055
ccuacaacugugcaaagua

SEQ ID NO: 1050273 - RNA, 19 nt, Artificial Sequence
  Description of Artificial Sequence: Synthetic oligonucleotide
  Antisense strand to SEQ ID NO: 1050272
uacuuugcacaguuguagg

SEQ ID NO: 1050274 - RNA, 19 nt, Artificial Sequence
  Description of Artificial Sequence: Synthetic oligonucleotide
  Sense strand starting at position 139 of SEQ ID NO: 915055
aaguaaggucauggguuau

SEQ ID NO: 1050275 - RNA, 19 nt, Artificial Sequence
  Description of Artificial Sequence: Synthetic oligonucleotide
  Antisense strand to SEQ ID NO: 1050274
auaacccaugaccuuacuu

SEQ ID NO: 1050276 - RNA, 19 nt, Artificial Sequence
  Description of Artificial Sequence: Synthetic oligonucleotide
  Sense strand starting at position 145 of SEQ ID NO: 915055
ggucauggguuauuacauc

SEQ ID NO: 1050277 - RNA, 19 nt, Artificial Sequence
  Description of Artificial Sequence: Synthetic oligonucleotide
  Antisense strand to SEQ ID NO: 1050276
gauguaauaacccaugacc

SEQ ID NO: 1050278 - RNA, 19 nt, Artificial Sequence
  Description of Artificial Sequence: Synthetic oligonucleotide
  Sense strand starting at position 151 of SEQ ID NO: 915055
ggguuauuacaucggaauu

SEQ ID NO: 1050279 - RNA, 19 nt, Artificial Sequence
  Description of Artificial Sequence: Synthetic oligonucleotide
  Antisense strand to SEQ ID NO: 1050278
aauuccgauguaauaaccc

SEQ ID NO: 1050280 - RNA, 19 nt, Artificial Sequence
  Description of Artificial Sequence: Synthetic oligonucleotide
  Sense strand starting at position 152 of SEQ ID NO: 915055
gguuauuacaucggaauua

SEQ ID NO: 1050281 - RNA, 19 nt, Artificial Sequence
  Description of Artificial Sequence: Synthetic oligonucleotide
  Antisense strand to SEQ ID NO: 1050280
uaauuccgauguaauaacc

SEQ ID NO: 1050282 - RNA, 19 nt, Artificial Sequence
  Description of Artificial Sequence: Synthetic oligonucleotide
  Sense strand starting at position 182 of SEQ ID NO: 915055
cagaguaggucaguaacuu

SEQ ID NO: 1050283 - RNA, 19 nt, Artificial Sequence
  Description of Artificial Sequence: Synthetic oligonucleotide
  Antisense strand to SEQ ID NO: 1050282
aaguuacugaccuacucug

SEQ ID NO: 1050284 - RNA, 19 nt, Artificial Sequence
  Description of Artificial Sequence: Synthetic oligonucleotide
  Sense strand starting at position 183 of SEQ ID NO: 915055
agaguaggucaguaacuug

SEQ ID NO: 1050285 - RNA, 19 nt, Artificial Sequence
  Description of Artificial Sequence: Synthetic oligonucleotide
  Antisense strand to SEQ ID NO: 1050284
caaguuacugaccuacucu

SEQ ID NO: 1050286 - RNA, 19 nt, Artificial Sequence
  Description of Artificial Sequence: Synthetic oligonucleotide
  Sense strand starting at position 322 of SEQ ID NO: 915055
cugauaugacuuuauuagu

SEQ ID NO: 1050287 - RNA, 19 nt, Artificial Sequence
  Description of Artificial Sequence: Synthetic oligonucleotide
  Antisense strand to SEQ ID NO: 1050286
acuaauaaagucauaucag

SEQ ID NO: 1050288 - RNA, 19 nt, Artificial Sequence
  Description of Artificial Sequence: Synthetic oligonucleotide
  Sense strand starting at position 327 of SEQ ID NO: 915055
augacuuuauuaguccaua

SEQ ID NO: 1050289 - RNA, 19 nt, Artificial Sequence
  Description of Artificial Sequence: Synthetic oligonucleotide
  Antisense strand to SEQ ID NO: 1050288
uauggacuaauaaagucau

SEQ ID NO: 1050290 - RNA, 19 nt, Artificial Sequence
  Description of Artificial Sequence: Synthetic oligonucleotide
  Sense strand starting at position 328 of SEQ ID NO: 915055
ugacuuuauuaguccauau

SEQ ID NO: 1050291 - RNA, 19 nt, Artificial Sequence
  Description of Artificial Sequence: Synthetic oligonucleotide
  Antisense strand to SEQ ID NO: 1050290
auauggacuaauaaaguca

SEQ ID NO: 1050292 - RNA, 19 nt, Artificial Sequence
  Description of Artificial Sequence: Synthetic oligonucleotide
  Sense strand starting at position 341 of SEQ ID NO: 915055
ccauauaaauuccugaggu

SEQ ID NO: 1050293 - RNA, 19 nt, Artificial Sequence
  Description of Artificial Sequence: Synthetic oligonucleotide
  Antisense strand to SEQ ID NO: 1050292
accucaggaauuuauaugg

SEQ ID NO: 1050294 - RNA, 19 nt, Artificial Sequence
  Description of Artificial Sequence: Synthetic oligonucleotide
  Sense strand starting at position 383 of SEQ ID NO: 915055
caguaaagucaauggccaa

SEQ ID NO: 1050295 - RNA, 19 nt, Artificial Sequence
  Description of Artificial Sequence: Synthetic oligonucleotide
  Antisense strand to SEQ ID NO: 1050294
uuggccauugacuuuacug

SEQ ID NO: 1050296 - RNA, 19 nt, Artificial Sequence
  Description of Artificial Sequence: Synthetic oligonucleotide
  Sense strand starting at position 414 of SEQ ID NO: 915055
ugguccauuugauccguau

SEQ ID NO: 1050297 - RNA, 19 nt, Artificial Sequence
  Description of Artificial Sequence: Synthetic oligonucleotide
  Antisense strand to SEQ ID NO: 1050296
auacggaucaaauggacca

SEQ ID NO: 1050298 - RNA, 19 nt, Artificial Sequence
  Description of Artificial Sequence: Synthetic oligonucleotide
  Sense strand starting at position 521 of SEQ ID NO: 915055
cagacugauggcugggauu

SEQ ID NO: 1050299 - RNA, 19 nt, Artificial Sequence
  Description of Artificial Sequence: Synthetic oligonucleotide
  Antisense strand to SEQ ID NO: 1050298
aaucccagccaucagucug

SEQ ID NO: 1050300 - RNA, 19 nt, Artificial Sequence
  Description of Artificial Sequence: Synthetic oligonucleotide
  Sense strand starting at position 523 of SEQ ID NO: 915055
gacugauggcugggauuag

SEQ ID NO: 1050301 - RNA, 19 nt, Artificial Sequence
  Description of Artificial Sequence: Synthetic oligonucleotide
  Antisense strand to SEQ ID NO: 1050300
cuaaucccagccaucaguc

SEQ ID NO: 1050302 - RNA, 19 nt, Artificial Sequence
  Description of Artificial Sequence: Synthetic oligonucleotide
  Sense strand starting at position 838 of SEQ ID NO: 915055
ggaauccugcaaugaauaa

SEQ ID NO: 1050303 - RNA, 19 nt, Artificial Sequence
  Description of Artificial Sequence: Synthetic oligonucleotide
  Antisense strand to SEQ ID NO: 1050302
uuauucauugcaggauucc

SEQ ID NO: 1050304 - RNA, 19 nt, Artificial Sequence
  Description of Artificial Sequence: Synthetic oligonucleotide
  Sense strand starting at position 857 of SEQ ID NO: 915055
ucucuagaugagugacagu

SEQ ID NO: 1050305 - RNA, 19 nt, Artificial Sequence
  Description of Artificial Sequence: Synthetic oligonucleotide
  Antisense strand to SEQ ID NO: 1050304
acugucacucaucuagaga

SEQ ID NO: 1050306 - RNA, 19 nt, Artificial Sequence
  Description of Artificial Sequence: Synthetic oligonucleotide
  Sense strand starting at position 870 of SEQ ID NO: 915055
gacagugugaauuacguaa

SEQ ID NO: 1050307 - RNA, 19 nt, Artificial Sequence
  Description of Artificial Sequence: Synthetic oligonucleotide
  Antisense strand to SEQ ID NO: 1050306
uuacguaauucacacuguc

SEQ ID NO: 1050308 - RNA, 19 nt, Artificial Sequence
  Description of Artificial Sequence: Synthetic oligonucleotide
  Sense strand starting at position 874 of SEQ ID NO: 915055
gugugaauuacguaauaca

SEQ ID NO: 1050309 - RNA, 19 nt, Artificial Sequence
  Description of Artificial Sequence: Synthetic oligonucleotide
  Antisense strand to SEQ ID NO: 1050308
uguauuacguaauucacac

SEQ ID NO: 1050310 - RNA, 19 nt, Artificial Sequence
  Description of Artificial Sequence: Synthetic oligonucleotide
  Sense strand starting at position 933 of SEQ ID NO: 915055
guucuagaauaacuauaug

SEQ ID NO: 1050311 - RNA, 19 nt, Artificial Sequence
  Description of Artificial Sequence: Synthetic oligonucleotide
  Antisense strand to SEQ ID NO: 1050310
cauauaguuauucuagaac

SEQ ID NO: 1050312 - RNA, 19 nt, Artificial Sequence
  Description of Artificial Sequence: Synthetic oligonucleotide
  Sense strand starting at position 1028 of SEQ ID NO: 915055
aacuuaagcguugagucaa

SEQ ID NO: 1050313 - RNA, 19 nt, Artificial Sequence
  Description of Artificial Sequence: Synthetic oligonucleotide
  Antisense strand to SEQ ID NO: 1050312
uugacucaacgcuuaaguu

SEQ ID NO: 1050314 - RNA, 19 nt, Artificial Sequence
  Description of Artificial Sequence: Synthetic oligonucleotide
  Sense strand starting at position 1213 of SEQ ID NO: 915055
gcaaccugaugcucagaau

SEQ ID NO: 1050315 - RNA, 19 nt, Artificial Sequence
  Description of Artificial Sequence: Synthetic oligonucleotide
  Antisense strand to SEQ ID NO: 1050314
auucugagcaucagguugc

SEQ ID NO: 1050316 - RNA, 19 nt, Artificial Sequence
  Description of Artificial Sequence: Synthetic oligonucleotide
  Sense strand starting at position 2270 of SEQ ID NO: 915055
gacguuugcagagagcaua

SEQ ID NO: 1050317 - RNA, 19 nt, Artificial Sequence
  Description of Artificial Sequence: Synthetic oligonucleotide
  Antisense strand to SEQ ID NO: 1050316
uaugcucucugcaaacguc

SEQ ID NO: 1050318 - RNA, 19 nt, Artificial Sequence
  Description of Artificial Sequence: Synthetic oligonucleotide
  Sense strand starting at position 2348 of SEQ ID NO: 915055
ugagcuaugcacuauuagu

SEQ ID NO: 1050319 - RNA, 19 nt, Artificial Sequence
  Description of Artificial Sequence: Synthetic oligonucleotide
  Antisense strand to SEQ ID NO: 1050318
acuaauagugcauagcuca

SEQ ID NO: 1050320 - RNA, 19 nt, Artificial Sequence
  Description of Artificial Sequence: Synthetic oligonucleotide
  Sense strand starting at position 2585 of SEQ ID NO: 915055
cuacuuauuccagguacuc

SEQ ID NO: 1050321 - RNA, 19 nt, Artificial Sequence
  Description of Artificial Sequence: Synthetic oligonucleotide
  Antisense strand to SEQ ID NO: 1050320
gaguaccuggaauaaguag

SEQ ID NO: 1050322 - RNA, 19 nt, Artificial Sequence
  Description of Artificial Sequence: Synthetic oligonucleotide
  Sense strand starting at position 2691 of SEQ ID NO: 915055
ggaagagaguaguuuccaa

SEQ ID NO: 1050323 - RNA, 19 nt, Artificial Sequence
  Description of Artificial Sequence: Synthetic oligonucleotide
  Antisense strand to SEQ ID NO: 1050322
uuggaaacuacucucuucc

SEQ ID NO: 1050324 - RNA, 19 nt, Artificial Sequence
  Description of Artificial Sequence: Synthetic oligonucleotide
  Sense strand starting at position 2800 of SEQ ID NO: 915055
uauaaauggcaguggaaua

SEQ ID NO: 1050325 - RNA, 19 nt, Artificial Sequence
  Description of Artificial Sequence: Synthetic oligonucleotide
  Antisense strand to SEQ ID NO: 1050324
uauuccacugccauuuaua

SEQ ID NO: 1050326 - RNA, 19 nt, Artificial Sequence
  Description of Artificial Sequence: Synthetic oligonucleotide
  Sense strand starting at position 2801 of SEQ ID NO: 915055
auaaauggcaguggaauau

SEQ ID NO: 1050327 - RNA, 19 nt, Artificial Sequence
  Description of Artificial Sequence: Synthetic oligonucleotide
  Antisense strand to SEQ ID NO: 1050326
auauuccacugccauuuau

SEQ ID NO: 1050328 - RNA, 19 nt, Artificial Sequence
  Description of Artificial Sequence: Synthetic oligonucleotide
  Sense strand starting at position 2810 of SEQ ID NO: 915055
aguggaauaucacucuaua

SEQ ID NO: 1050329 - RNA, 19 nt, Artificial Sequence
  Description of Artificial Sequence: Synthetic oligonucleotide
  Antisense strand to SEQ ID NO: 1050328
uauagagugauauuccacu

SEQ ID NO: 1050330 - RNA, 19 nt, Artificial Sequence
  Description of Artificial Sequence: Synthetic oligonucleotide
  Sense strand starting at position 2848 of SEQ ID NO: 915055
uuaccuugagauugugaca

SEQ ID NO: 1050331 - RNA, 19 nt, Artificial Sequence
  Description of Artificial Sequence: Synthetic oligonucleotide
  Antisense strand to SEQ ID NO: 1050330
ugucacaaucucaagguaa

SEQ ID NO: 1050332 - RNA, 19 nt, Artificial Sequence
  Description of Artificial Sequence: Synthetic oligonucleotide
  Sense strand starting at position 3040 of SEQ ID NO: 915055
ugguacauuucuuagaacu

SEQ ID NO: 1050333 - RNA, 19 nt, Artificial Sequence
  Description of Artificial Sequence: Synthetic oligonucleotide
  Antisense strand to SEQ ID NO: 1050332
aguucuaagaaauguacca

SEQ ID NO: 1050334 - RNA, 19 nt, Artificial Sequence
  Description of Artificial Sequence: Synthetic oligonucleotide
  Sense strand starting at position 3042 of SEQ ID NO: 915055
guacauuucuuagaacuga

SEQ ID NO: 1050335 - RNA, 19 nt, Artificial Sequence
  Description of Artificial Sequence: Synthetic oligonucleotide
  Antisense strand to SEQ ID NO: 1050334
ucaguucuaagaaauguac

SEQ ID NO: 1050336 - RNA, 19 nt, Artificial Sequence
  Description of Artificial Sequence: Synthetic oligonucleotide
  Sense strand starting at position 3405 of SEQ ID NO: 915055
caguauaaugcagaguaau

SEQ ID NO: 1050337 - RNA, 19 nt, Artificial Sequence
  Description of Artificial Sequence: Synthetic oligonucleotide
  Antisense strand to SEQ ID NO: 1050336
auuacucugcauuauacug

SEQ ID NO: 1050338 - RNA, 19 nt, Artificial Sequence
  Description of Artificial Sequence: Synthetic oligonucleotide
  Sense strand starting at position 3529 of SEQ ID NO: 915055
agugucaucuaguuggaau

SEQ ID NO: 1050339 - RNA, 19 nt, Artificial Sequence
  Description of Artificial Sequence: Synthetic oligonucleotide
  Antisense strand to SEQ ID NO: 1050338
auuccaacuagaugacacu

SEQ ID NO: 1050340 - RNA, 19 nt, Artificial Sequence
  Description of Artificial Sequence: Synthetic oligonucleotide
  Sense strand starting at position 3531 of SEQ ID NO: 915055
ugucaucuaguuggaauua

SEQ ID NO: 1050341 - RNA, 19 nt, Artificial Sequence
  Description of Artificial Sequence: Synthetic oligonucleotide
  Antisense strand to SEQ ID NO: 1050340
uaauuccaacuagaugaca

SEQ ID NO: 1050342 - RNA, 19 nt, Artificial Sequence
  Description of Artificial Sequence: Synthetic oligonucleotide
  Sense strand starting at position 3585 of SEQ ID NO: 915055
cguaguaacaggcauugaa

SEQ ID NO: 1050343 - RNA, 19 nt, Artificial Sequence
  Description of Artificial Sequence: Synthetic oligonucleotide
  Antisense strand to SEQ ID NO: 1050342
uucaaugccuguuacuacg

SEQ ID NO: 1050344 - RNA, 19 nt, Artificial Sequence
  Description of Artificial Sequence: Synthetic oligonucleotide
  Sense strand starting at position 3588 of SEQ ID NO: 915055
aguaacaggcauugaaguu

SEQ ID NO: 1050345 - RNA, 19 nt, Artificial Sequence
  Description of Artificial Sequence: Synthetic oligonucleotide
  Antisense strand to SEQ ID NO: 1050344
aacuucaaugccuguuacu

SEQ ID NO: 1050346 - RNA, 19 nt, Artificial Sequence
  Description of Artificial Sequence: Synthetic oligonucleotide
  Sense strand starting at position 3589 of SEQ ID NO: 915055
guaacaggcauugaaguuu

SEQ ID NO: 1050347 - RNA, 19 nt, Artificial Sequence
  Description of Artificial Sequence: Synthetic oligonucleotide
  Antisense strand to SEQ ID NO: 1050346
aaacuucaaugccuguuac

SEQ ID NO: 1050348 - RNA, 19 nt, Artificial Sequence
  Description of Artificial Sequence: Synthetic oligonucleotide
  Sense strand starting at position 3664 of SEQ ID NO: 915055
uuccauugugucgauauau

SEQ ID NO: 1050349 - RNA, 19 nt, Artificial Sequence
  Description of Artificial Sequence: Synthetic oligonucleotide
  Antisense strand to SEQ ID NO: 1050348
auauaucgacacaauggaa

SEQ ID NO: 1050350 - RNA, 19 nt, Artificial Sequence
  Description of Artificial Sequence: Synthetic oligonucleotide
  Sense strand starting at position 3693 of SEQ ID NO: 915055
ucuauucgcuuacugaaag

SEQ ID NO: 1050351 - RNA, 19 nt, Artificial Sequence
  Description of Artificial Sequence: Synthetic oligonucleotide
  Antisense strand to SEQ ID NO: 1050350
cuuucaguaagcgaauaga

SEQ ID NO: 1050352 - RNA, 19 nt, Artificial Sequence
  Description of Artificial Sequence: Synthetic oligonucleotide
  Sense strand starting at position 8 of SEQ ID NO: 915056
aagacuucccaguggaacu

SEQ ID NO: 1050353 - RNA, 19 nt, Artificial Sequence
  Description of Artificial Sequence: Synthetic oligonucleotide
  Antisense strand to SEQ ID NO: 1050352
aguuccacugggaagucuu

SEQ ID NO: 1050354 - RNA, 19 nt, Artificial Sequence
  Description of Artificial Sequence: Synthetic oligonucleotide
  Sense strand starting at position 56 of SEQ ID NO: 915056
aagcauuuccagugauguu

SEQ ID NO: 1050355 - RNA, 19 nt, Artificial Sequence
  Description of Artificial Sequence: Synthetic oligonucleotide
  Antisense strand to SEQ ID NO: 1050354
aacaucacuggaaaugcuu

SEQ ID NO: 1050356 - RNA, 19 nt, Artificial Sequence
  Description of Artificial Sequence: Synthetic oligonucleotide
  Sense strand starting at position 125 of SEQ ID NO: 915056
ugcagugggacucaauauu

SEQ ID NO: 1050357 - RNA, 19 nt, Artificial Sequence
  Description of Artificial Sequence: Synthetic oligonucleotide
  Antisense strand to SEQ ID NO: 1050356
aauauugagucccacugca

SEQ ID NO: 1050358 - RNA, 19 nt, Artificial Sequence
  Description of Artificial Sequence: Synthetic oligonucleotide
  Sense strand starting at position 324 of SEQ ID NO: 915056
gucuauuuccuaugguuua

SEQ ID NO: 1050359 - RNA, 19 nt, Artificial Sequence
  Description of Artificial Sequence: Synthetic oligonucleotide
  Antisense strand to SEQ ID NO: 1050358
uaaaccauaggaaauagac

SEQ ID NO: 1050360 - RNA, 19 nt, Artificial Sequence
  Description of Artificial Sequence: Synthetic oligonucleotide
  Sense strand starting at position 389 of SEQ ID NO: 915056
guuuaacuggucuggacau

SEQ ID NO: 1050361 - RNA, 19 nt, Artificial Sequence
  Description of Artificial Sequence: Synthetic oligonucleotide
  Antisense strand to SEQ ID NO: 1050360
auguccagaccaguuaaac

SEQ ID NO: 1050362 - RNA, 19 nt, Artificial Sequence
  Description of Artificial Sequence: Synthetic oligonucleotide
  Sense strand starting at position 442 of SEQ ID NO: 915056
ucagauuccugggucccua

SEQ ID NO: 1050363 - RNA, 19 nt, Artificial Sequence
  Description of Artificial Sequence: Synthetic oligonucleotide
  Antisense strand to SEQ ID NO: 1050362
uagggacccaggaaucuga

SEQ ID NO: 1050364 - RNA, 19 nt, Artificial Sequence
  Description of Artificial Sequence: Synthetic oligonucleotide
  Sense strand starting at position 459 of SEQ ID NO: 915056
uacucaguuguugggauga

SEQ ID NO: 1050365 - RNA, 19 nt, Artificial Sequence
  Description of Artificial Sequence: Synthetic oligonucleotide
  Antisense strand to SEQ ID NO: 1050364
ucaucccaacaacugagua

SEQ ID NO: 1050366 - RNA, 19 nt, Artificial Sequence
  Description of Artificial Sequence: Synthetic oligonucleotide
  Sense strand starting at position 679 of SEQ ID NO: 915056
ccucuuagugacugcauuu

SEQ ID NO: 1050367 - RNA, 19 nt, Artificial Sequence
  Description of Artificial Sequence: Synthetic oligonucleotide
  Antisense strand to SEQ ID NO: 1050366
aaaugcagucacuaagagg

SEQ ID NO: 1050368 - RNA, 19 nt, Artificial Sequence
  Description of Artificial Sequence: Synthetic oligonucleotide
  Sense strand starting at position 772 of SEQ ID NO: 915056
agggaaugaaagugucuca

SEQ ID NO: 1050369 - RNA, 19 nt, Artificial Sequence
  Description of Artificial Sequence: Synthetic oligonucleotide
  Antisense strand to SEQ ID NO: 1050368
ugagacacuuucauucccu

SEQ ID NO: 1050370 - RNA, 19 nt, Artificial Sequence
  Description of Artificial Sequence: Synthetic oligonucleotide
  Sense strand starting at position 819 of SEQ ID NO: 915056
ggagccuaccuuuaaguuu

SEQ ID NO: 1050371 - RNA, 19 nt, Artificial Sequence
  Description of Artificial Sequence: Synthetic oligonucleotide
  Antisense strand to SEQ ID NO: 1050370
aaacuuaaagguaggcucc

SEQ ID NO: 1050372 - RNA, 19 nt, Artificial Sequence
  Description of Artificial Sequence: Synthetic oligonucleotide
  Sense strand starting at position 1220 of SEQ ID NO: 915056
cccagaguccauuaucauu

SEQ ID NO: 1050373 - RNA, 19 nt, Artificial Sequence
  Description of Artificial Sequence: Synthetic oligonucleotide
  Antisense strand to SEQ ID NO: 1050372
aaugauaauggacucuggg

SEQ ID NO: 1050374 - RNA, 19 nt, Artificial Sequence
  Description of Artificial Sequence: Synthetic oligonucleotide
  Sense strand starting at position 1281 of SEQ ID NO: 915056
ugagaaugauguuugguuu

SEQ ID NO: 1050375 - RNA, 19 nt, Artificial Sequence
  Description of Artificial Sequence: Synthetic oligonucleotide
  Antisense strand to SEQ ID NO: 1050374
aaaccaaacaucauucuca

SEQ ID NO: 1050376 - RNA, 19 nt, Artificial Sequence
  Description of Artificial Sequence: Synthetic oligonucleotide
  Sense strand starting at position 1481 of SEQ ID NO: 915056
ucuggcauguuauuaaaca

SEQ ID NO: 1050377 - RNA, 19 nt, Artificial Sequence
  Description of Artificial Sequence: Synthetic oligonucleotide
  Antisense strand to SEQ ID NO: 1050376
uguuuaauaacaugccaga

SEQ ID NO: 1050378 - RNA, 19 nt, Artificial Sequence
  Description of Artificial Sequence: Synthetic oligonucleotide
  Sense strand starting at position 1517 of SEQ ID NO: 915056
uuucuuccuuaaucggaua

SEQ ID NO: 1050379 - RNA, 19 nt, Artificial Sequence
  Description of Artificial Sequence: Synthetic oligonucleotide
  Antisense strand to SEQ ID NO: 1050378
uauccgauuaaggaagaaa

SEQ ID NO: 1050380 - RNA, 19 nt, Artificial Sequence
  Description of Artificial Sequence: Synthetic oligonucleotide
  Sense strand starting at position 1894 of SEQ ID NO: 915056
gcagaaauuccagggaucu

SEQ ID NO: 1050381 - RNA, 19 nt, Artificial Sequence
  Description of Artificial Sequence: Synthetic oligonucleotide
  Antisense strand to SEQ ID NO: 1050380
agaucccuggaauuucugc

SEQ ID NO: 1050382 - RNA, 19 nt, Artificial Sequence
  Description of Artificial Sequence: Synthetic oligonucleotide
  Sense strand starting at position 1905 of SEQ ID NO: 915056
agggaucuaguugaugcua

SEQ ID NO: 1050383 - RNA, 19 nt, Artificial Sequence
  Description of Artificial Sequence: Synthetic oligonucleotide
  Antisense strand to SEQ ID NO: 1050382
uagcaucaacuagaucccu

SEQ ID NO: 1050384 - RNA, 19 nt, Artificial Sequence
  Description of Artificial Sequence: Synthetic oligonucleotide
  Sense strand starting at position 2043 of SEQ ID NO: 915056
caagucuuaccuggaagag

SEQ ID NO: 1050385 - RNA, 19 nt, Artificial Sequence
  Description of Artificial Sequence: Synthetic oligonucleotide
  Antisense strand to SEQ ID NO: 1050384
cucuuccagguaagacuug

SEQ ID NO: 1050386 - RNA, 19 nt, Artificial Sequence
  Description of Artificial Sequence: Synthetic oligonucleotide
  Sense strand starting at position 2576 of SEQ ID NO: 915056
gaaagaauauuguuuguug

SEQ ID NO: 1050387 - RNA, 19 nt, Artificial Sequence
  Description of Artificial Sequence: Synthetic oligonucleotide
  Antisense strand to SEQ ID NO: 1050386
caacaaacaauauucuuuc

SEQ ID NO: 1050388 - RNA, 19 nt, Artificial Sequence
  Description of Artificial Sequence: Synthetic oligonucleotide
  Sense strand starting at position 2711 of SEQ ID NO: 915056
ccuacaacugugcaaagua

SEQ ID NO: 1050389 - RNA, 19 nt, Artificial Sequence
  Description of Artificial Sequence: Synthetic oligonucleotide
  Antisense strand to SEQ ID NO: 1050388
uacuuugcacaguuguagg

SEQ ID NO: 1050390 - RNA, 19 nt, Artificial Sequence
  Description of Artificial Sequence: Synthetic oligonucleotide
  Sense strand starting at position 2725 of SEQ ID NO: 915056
aaguaaggucauggguuau

SEQ ID NO: 1050391 - RNA, 19 nt, Artificial Sequence
  Description of Artificial Sequence: Synthetic oligonucleotide
  Antisense strand to SEQ ID NO: 1050390
auaacccaugaccuuacuu

SEQ ID NO: 1050392 - RNA, 19 nt, Artificial Sequence
  Description of Artificial Sequence: Synthetic oligonucleotide
  Sense strand starting at position 2731 of SEQ ID NO: 915056
ggucauggguuauuacauc

SEQ ID NO: 1050393 - RNA, 19 nt, Artificial Sequence
  Description of Artificial Sequence: Synthetic oligonucleotide
  Antisense strand to SEQ ID NO: 1050392
gauguaauaacccaugacc

SEQ ID NO: 1050394 - RNA, 19 nt, Artificial Sequence
  Description of Artificial Sequence: Synthetic oligonucleotide
  Sense strand starting at position 2737 of SEQ ID NO: 915056
ggguuauuacaucggaauu

SEQ ID NO: 1050395 - RNA, 19 nt, Artificial Sequence
  Description of Artificial Sequence: Synthetic oligonucleotide
  Antisense strand to SEQ ID NO: 1050394
aauuccgauguaauaaccc

SEQ ID NO: 1050396 - RNA, 19 nt, Artificial Sequence
  Description of Artificial Sequence: Synthetic oligonucleotide
  Sense strand starting at position 2738 of SEQ ID NO: 915056
gguuauuacaucggaauua

SEQ ID NO: 1050397 - RNA, 19 nt, Artificial Sequence
  Description of Artificial Sequence: Synthetic oligonucleotide
  Antisense strand to SEQ ID NO: 1050396
uaauuccgauguaauaacc

SEQ ID NO: 1050398 - RNA, 19 nt, Artificial Sequence
  Description of Artificial Sequence: Synthetic oligonucleotide
  Sense strand starting at position 2768 of SEQ ID NO: 915056
cagaguaggucaguaacuu

SEQ ID NO: 1050399 - RNA, 19 nt, Artificial Sequence
  Description of Artificial Sequence: Synthetic oligonucleotide
  Antisense strand to SEQ ID NO: 1050398
aaguuacugaccuacucug

SEQ ID NO: 1050400 - RNA, 19 nt, Artificial Sequence
  Description of Artificial Sequence: Synthetic oligonucleotide
  Sense strand starting at position 2769 of SEQ ID NO: 915056
agaguaggucaguaacuug

SEQ ID NO: 1050401 - RNA, 19 nt, Artificial Sequence
  Description of Artificial Sequence: Synthetic oligonucleotide
  Antisense strand to SEQ ID NO: 1050400
caaguuacugaccuacucu

SEQ ID NO: 1050402 - RNA, 19 nt, Artificial Sequence
  Description of Artificial Sequence: Synthetic oligonucleotide
  Sense strand starting at position 2908 of SEQ ID NO: 915056
cugauaugacuuuauuagu

SEQ ID NO: 1050403 - RNA, 19 nt, Artificial Sequence
  Description of Artificial Sequence: Synthetic oligonucleotide
  Antisense strand to SEQ ID NO: 1050402
acuaauaaagucauaucag

SEQ ID NO: 1050404 - RNA, 19 nt, Artificial Sequence
  Description of Artificial Sequence: Synthetic oligonucleotide
  Sense strand starting at position 2913 of SEQ ID NO: 915056
augacuuuauuaguccaua

SEQ ID NO: 1050405 - RNA, 19 nt, Artificial Sequence
  Description of Artificial Sequence: Synthetic oligonucleotide
  Antisense strand to SEQ ID NO: 1050404
uauggacuaauaaagucau

SEQ ID NO: 1050406 - RNA, 19 nt, Artificial Sequence
  Description of Artificial Sequence: Synthetic oligonucleotide
  Sense strand starting at position 2914 of SEQ ID NO: 915056
ugacuuuauuaguccauau

SEQ ID NO: 1050407 - RNA, 19 nt, Artificial Sequence
  Description of Artificial Sequence: Synthetic oligonucleotide
  Antisense strand to SEQ ID NO: 1050406
auauggacuaauaaaguca

SEQ ID NO: 1050408 - RNA, 19 nt, Artificial Sequence
  Description of Artificial Sequence: Synthetic oligonucleotide
  Sense strand starting at position 2927 of SEQ ID NO: 915056
ccauauaaauuccugaggu

SEQ ID NO: 1050409 - RNA, 19 nt, Artificial Sequence
  Description of Artificial Sequence: Synthetic oligonucleotide
  Antisense strand to SEQ ID NO: 1050408
accucaggaauuuauaugg

SEQ ID NO: 1050410 - RNA, 19 nt, Artificial Sequence
  Description of Artificial Sequence: Synthetic oligonucleotide
  Sense strand starting at position 2969 of SEQ ID NO: 915056
caguaaagucaauggccaa

SEQ ID NO: 1050411 - RNA, 19 nt, Artificial Sequence
  Description of Artificial Sequence: Synthetic oligonucleotide
  Antisense strand to SEQ ID NO: 1050410
uuggccauugacuuuacug

SEQ ID NO: 1050412 - RNA, 19 nt, Artificial Sequence
  Description of Artificial Sequence: Synthetic oligonucleotide
  Sense strand starting at position 3000 of SEQ ID NO: 915056
ugguccauuugauccguau

SEQ ID NO: 1050413 - RNA, 19 nt, Artificial Sequence
  Description of Artificial Sequence: Synthetic oligonucleotide
  Antisense strand to SEQ ID NO: 1050412
auacggaucaaauggacca

SEQ ID NO: 1050414 - RNA, 19 nt, Artificial Sequence
  Description of Artificial Sequence: Synthetic oligonucleotide
  Sense strand starting at position 3107 of SEQ ID NO: 915056
cagacugauggcugggauu

SEQ ID NO: 1050415 - RNA, 19 nt, Artificial Sequence
  Description of Artificial Sequence: Synthetic oligonucleotide
  Antisense strand to SEQ ID NO: 1050414
aaucccagccaucagucug

SEQ ID NO: 1050416 - RNA, 19 nt, Artificial Sequence
  Description of Artificial Sequence: Synthetic oligonucleotide
  Sense strand starting at position 3109 of SEQ ID NO: 915056
gacugauggcugggauuag

SEQ ID NO: 1050417 - RNA, 19 nt, Artificial Sequence
  Description of Artificial Sequence: Synthetic oligonucleotide
  Antisense strand to SEQ ID NO: 1050416
cuaaucccagccaucaguc

SEQ ID NO: 1050418 - RNA, 19 nt, Artificial Sequence
  Description of Artificial Sequence: Synthetic oligonucleotide
  Sense strand starting at position 3424 of SEQ ID NO: 915056
ggaauccugcaaugaauaa

SEQ ID NO: 1050419 - RNA, 19 nt, Artificial Sequence
  Description of Artificial Sequence: Synthetic oligonucleotide
  Antisense strand to SEQ ID NO: 1050418
uuauucauugcaggauucc

SEQ ID NO: 1050420 - RNA, 19 nt, Artificial Sequence
  Description of Artificial Sequence: Synthetic oligonucleotide
  Sense strand starting at position 3443 of SEQ ID NO: 915056
ucucuagaugagugacagu

SEQ ID NO: 1050421 - RNA, 19 nt, Artificial Sequence
  Description of Artificial Sequence: Synthetic oligonucleotide
  Antisense strand to SEQ ID NO: 1050420
acugucacucaucuagaga

SEQ ID NO: 1050422 - RNA, 19 nt, Artificial Sequence
  Description of Artificial Sequence: Synthetic oligonucleotide
  Sense strand starting at position 3456 of SEQ ID NO: 915056
gacagugugaauuacguaa

SEQ ID NO: 1050423 - RNA, 19 nt, Artificial Sequence
  Description of Artificial Sequence: Synthetic oligonucleotide
  Antisense strand to SEQ ID NO: 1050422
uuacguaauucacacuguc

SEQ ID NO: 1050424 - RNA, 19 nt, Artificial Sequence
  Description of Artificial Sequence: Synthetic oligonucleotide
  Sense strand starting at position 3460 of SEQ ID NO: 915056
gugugaauuacguaauaca

SEQ ID NO: 1050425 - RNA, 19 nt, Artificial Sequence
  Description of Artificial Sequence: Synthetic oligonucleotide
  Antisense strand to SEQ ID NO: 1050424
uguauuacguaauucacac

SEQ ID NO: 1050426 - RNA, 19 nt, Artificial Sequence
  Description of Artificial Sequence: Synthetic oligonucleotide
  Sense strand starting at position 3519 of SEQ ID NO: 915056
guucuagaauaacuauaug

SEQ ID NO: 1050427 - RNA, 19 nt, Artificial Sequence
  Description of Artificial Sequence: Synthetic oligonucleotide
  Antisense strand to SEQ ID NO: 1050426
cauauaguuauucuagaac

SEQ ID NO: 1050428 - RNA, 19 nt, Artificial Sequence
  Description of Artificial Sequence: Synthetic oligonucleotide
  Sense strand starting at position 3614 of SEQ ID NO: 915056
aacuuaagcguugagucaa

SEQ ID NO: 1050429 - RNA, 19 nt, Artificial Sequence
  Description of Artificial Sequence: Synthetic oligonucleotide
  Antisense strand to SEQ ID NO: 1050428
uugacucaacgcuuaaguu

SEQ ID NO: 1050430 - RNA, 19 nt, Artificial Sequence
  Description of Artificial Sequence: Synthetic oligonucleotide
  Sense strand starting at position 3799 of SEQ ID NO: 915056
gcaaccugaugcucagaau

SEQ ID NO: 1050431 - RNA, 19 nt, Artificial Sequence
  Description of Artificial Sequence: Synthetic oligonucleotide
  Antisense strand to SEQ ID NO: 1050430
auucugagcaucagguugc

SEQ ID NO: 1050432 - RNA, 19 nt, Artificial Sequence
  Description of Artificial Sequence: Synthetic oligonucleotide
  Sense strand starting at position 4 of SEQ ID NO: 915057
uaugcacaucuguaugagu

SEQ ID NO: 1050433 - RNA, 19 nt, Artificial Sequence
  Description of Artificial Sequence: Synthetic oligonucleotide
  Antisense strand to SEQ ID NO: 1050432
acucauacagaugugcaua

SEQ ID NO: 1050434 - RNA, 19 nt, Artificial Sequence
  Description of Artificial Sequence: Synthetic oligonucleotide
  Sense strand starting at position 46 of SEQ ID NO: 915057
guggauaguugugcaugaa

SEQ ID NO: 1050435 - RNA, 19 nt, Artificial Sequence
  Description of Artificial Sequence: Synthetic oligonucleotide
  Antisense strand to SEQ ID NO: 1050434
uucaugcacaacuauccac

SEQ ID NO: 1050436 - RNA, 19 nt, Artificial Sequence
  Description of Artificial Sequence: Synthetic oligonucleotide
  Sense strand starting at position 47 of SEQ ID NO: 915057
uggauaguugugcaugaau

SEQ ID NO: 1050437 - RNA, 19 nt, Artificial Sequence
  Description of Artificial Sequence: Synthetic oligonucleotide
  Antisense strand to SEQ ID NO: 1050436
auucaugcacaacuaucca

SEQ ID NO: 1050438 - RNA, 19 nt, Artificial Sequence
  Description of Artificial Sequence: Synthetic oligonucleotide
  Sense strand starting at position 97 of SEQ ID NO: 915057
uguacuguuguggagggaa

SEQ ID NO: 1050439 - RNA, 19 nt, Artificial Sequence
  Description of Artificial Sequence: Synthetic oligonucleotide
  Antisense strand to SEQ ID NO: 1050438
uucccuccacaacaguaca

SEQ ID NO: 1050440 - RNA, 19 nt, Artificial Sequence
  Description of Artificial Sequence: Synthetic oligonucleotide
  Sense strand starting at position 153 of SEQ ID NO: 915057
gaauacauguaagugcaaa

SEQ ID NO: 1050441 - RNA, 19 nt, Artificial Sequence
  Description of Artificial Sequence: Synthetic oligonucleotide
  Antisense strand to SEQ ID NO: 1050440
uuugcacuuacauguauuc

SEQ ID NO: 1050442 - RNA, 19 nt, Artificial Sequence
  Description of Artificial Sequence: Synthetic oligonucleotide
  Sense strand starting at position 180 of SEQ ID NO: 915057
gugagaaugcaugaauguc

SEQ ID NO: 1050443 - RNA, 19 nt, Artificial Sequence
  Description of Artificial Sequence: Synthetic oligonucleotide
  Antisense strand to SEQ ID NO: 1050442
gacauucaugcauucucac

SEQ ID NO: 1050444 - RNA, 19 nt, Artificial Sequence
  Description of Artificial Sequence: Synthetic oligonucleotide
  Sense strand starting at position 209 of SEQ ID NO: 915057
ugugaaaugucuccaugug

SEQ ID NO: 1050445 - RNA, 19 nt, Artificial Sequence
  Description of Artificial Sequence: Synthetic oligonucleotide
  Antisense strand to SEQ ID NO: 1050444
cacauggagacauuucaca

SEQ ID NO: 1050446 - RNA, 19 nt, Artificial Sequence
  Description of Artificial Sequence: Synthetic oligonucleotide
  Sense strand starting at position 210 of SEQ ID NO: 915057
gugaaaugucuccauguga

SEQ ID NO: 1050447 - RNA, 19 nt, Artificial Sequence
  Description of Artificial Sequence: Synthetic oligonucleotide
  Antisense strand to SEQ ID NO: 1050446
ucacauggagacauuucac

SEQ ID NO: 1050448 - RNA, 19 nt, Artificial Sequence
  Description of Artificial Sequence: Synthetic oligonucleotide
  Sense strand starting at position 295 of SEQ ID NO: 915057
gauauaguuuggguguuua

SEQ ID NO: 1050449 - RNA, 19 nt, Artificial Sequence
  Description of Artificial Sequence: Synthetic oligonucleotide
  Antisense strand to SEQ ID NO: 1050448
uaaacacccaaacuauauc

SEQ ID NO: 1050450 - RNA, 19 nt, Artificial Sequence
  Description of Artificial Sequence: Synthetic oligonucleotide
  Sense strand starting at position 582 of SEQ ID NO: 915057
gccagaagucaauguugac

SEQ ID NO: 1050451 - RNA, 19 nt, Artificial Sequence
  Description of Artificial Sequence: Synthetic oligonucleotide
  Antisense strand to SEQ ID NO: 1050450
gucaacauugacuucuggc

SEQ ID NO: 1050452 - RNA, 19 nt, Artificial Sequence
  Description of Artificial Sequence: Synthetic oligonucleotide
  Sense strand starting at position 703 of SEQ ID NO: 915057
cuaagauaagccuguucuu

SEQ ID NO: 1050453 - RNA, 19 nt, Artificial Sequence
  Description of Artificial Sequence: Synthetic oligonucleotide
  Antisense strand to SEQ ID NO: 1050452
aagaacaggcuuaucuuag

SEQ ID NO: 1050454 - RNA, 19 nt, Artificial Sequence
  Description of Artificial Sequence: Synthetic oligonucleotide
  Sense strand starting at position 1027 of SEQ ID NO: 915057
aagccuguucuugggaaag

SEQ ID NO: 1050455 - RNA, 19 nt, Artificial Sequence
  Description of Artificial Sequence: Synthetic oligonucleotide
  Antisense strand to SEQ ID NO: 1050454
cuuucccaagaacaggcuu

SEQ ID NO: 1050456 - RNA, 19 nt, Artificial Sequence
  Description of Artificial Sequence: Synthetic oligonucleotide
  Sense strand starting at position 1254 of SEQ ID NO: 915057
uagugugguuccuugagag

SEQ ID NO: 1050457 - RNA, 19 nt, Artificial Sequence
  Description of Artificial Sequence: Synthetic oligonucleotide
  Antisense strand to SEQ ID NO: 1050456
cucucaaggaaccacacua

SEQ ID NO: 1050458 - RNA, 19 nt, Artificial Sequence
  Description of Artificial Sequence: Synthetic oligonucleotide
  Sense strand starting at position 1352 of SEQ ID NO: 915057
gaugcuauuucuucugguu

SEQ ID NO: 1050459 - RNA, 19 nt, Artificial Sequence
  Description of Artificial Sequence: Synthetic oligonucleotide
  Antisense strand to SEQ ID NO: 1050458
aaccagaagaaauagcauc

SEQ ID NO: 1050460 - RNA, 19 nt, Artificial Sequence
  Description of Artificial Sequence: Synthetic oligonucleotide
  Sense strand starting at position 1360 of SEQ ID NO: 915057
uucuucugguuaguggaaa

SEQ ID NO: 1050461 - RNA, 19 nt, Artificial Sequence
  Description of Artificial Sequence: Synthetic oligonucleotide
  Antisense strand to SEQ ID NO: 1050460
uuuccacuaaccagaagaa

SEQ ID NO: 1050462 - RNA, 19 nt, Artificial Sequence
  Description of Artificial Sequence: Synthetic oligonucleotide
  Sense strand starting at position 1799 of SEQ ID NO: 915057
aucaguaauucugccaggu

SEQ ID NO: 1050463 - RNA, 19 nt, Artificial Sequence
  Description of Artificial Sequence: Synthetic oligonucleotide
  Antisense strand to SEQ ID NO: 1050462
accuggcagaauuacugau

SEQ ID NO: 1050464 - RNA, 19 nt, Artificial Sequence
  Description of Artificial Sequence: Synthetic oligonucleotide
  Sense strand starting at position 1864 of SEQ ID NO: 915057
gcccucagacagggucaua

SEQ ID NO: 1050465 - RNA, 19 nt, Artificial Sequence
  Description of Artificial Sequence: Synthetic oligonucleotide
  Antisense strand to SEQ ID NO: 1050464
uaugacccugucugagggc

SEQ ID NO: 1050466 - RNA, 19 nt, Artificial Sequence
  Description of Artificial Sequence: Synthetic oligonucleotide
  Sense strand starting at position 1876 of SEQ ID NO: 915057
ggucauaucccguaaguag

SEQ ID NO: 1050467 - RNA, 19 nt, Artificial Sequence
  Description of Artificial Sequence: Synthetic oligonucleotide
  Antisense strand to SEQ ID NO: 1050466
cuacuuacgggauaugacc

SEQ ID NO: 1050468 - RNA, 19 nt, Artificial Sequence
  Description of Artificial Sequence: Synthetic oligonucleotide
  Sense strand starting at position 1907 of SEQ ID NO: 915057
uugaaaucguucuccucaa

SEQ ID NO: 1050469 - RNA, 19 nt, Artificial Sequence
  Description of Artificial Sequence: Synthetic oligonucleotide
  Antisense strand to SEQ ID NO: 1050468
uugaggagaacgauuucaa

SEQ ID NO: 1050470 - RNA, 19 nt, Artificial Sequence
  Description of Artificial Sequence: Synthetic oligonucleotide
  Sense strand starting at position 1908 of SEQ ID NO: 915057
ugaaaucguucuccucaag

SEQ ID NO: 1050471 - RNA, 19 nt, Artificial Sequence
  Description of Artificial Sequence: Synthetic oligonucleotide
  Antisense strand to SEQ ID NO: 1050470
cuugaggagaacgauuuca

SEQ ID NO: 1050472 - RNA, 19 nt, Artificial Sequence
  Description of Artificial Sequence: Synthetic oligonucleotide
  Sense strand starting at position 2121 of SEQ ID NO: 915057
agacgagauacaugugcaa

SEQ ID NO: 1050473 - RNA, 19 nt, Artificial Sequence
  Description of Artificial Sequence: Synthetic oligonucleotide
  Antisense strand to SEQ ID NO: 1050472
uugcacauguaucucgucu

SEQ ID NO: 1050474 - RNA, 19 nt, Artificial Sequence
  Description of Artificial Sequence: Synthetic oligonucleotide
  Sense strand starting at position 2123 of SEQ ID NO: 915057
acgagauacaugugcaaag

SEQ ID NO: 1050475 - RNA, 19 nt, Artificial Sequence
  Description of Artificial Sequence: Synthetic oligonucleotide
  Antisense strand to SEQ ID NO: 1050474
cuuugcacauguaucucgu

SEQ ID NO: 1050476 - RNA, 19 nt, Artificial Sequence
  Description of Artificial Sequence: Synthetic oligonucleotide
  Sense strand starting at position 2133 of SEQ ID NO: 915057
ugugcaaagcuccaagaaa

SEQ ID NO: 1050477 - RNA, 19 nt, Artificial Sequence
  Description of Artificial Sequence: Synthetic oligonucleotide
  Antisense strand to SEQ ID NO: 1050476
uuucuuggagcuuugcaca

SEQ ID NO: 1050478 - RNA, 19 nt, Artificial Sequence
  Description of Artificial Sequence: Synthetic oligonucleotide
  Sense strand starting at position 2371 of SEQ ID NO: 915057
uccuuagacggauggauua

SEQ ID NO: 1050479 - RNA, 19 nt, Artificial Sequence
  Description of Artificial Sequence: Synthetic oligonucleotide
  Antisense strand to SEQ ID NO: 1050478
uaauccauccgucuaagga

SEQ ID NO: 1050480 - RNA, 19 nt, Artificial Sequence
  Description of Artificial Sequence: Synthetic oligonucleotide
  Sense strand starting at position 2789 of SEQ ID NO: 915057
gugguauggcaagaaggua

SEQ ID NO: 1050481 - RNA, 19 nt, Artificial Sequence
  Description of Artificial Sequence: Synthetic oligonucleotide
  Antisense strand to SEQ ID NO: 1050480
uaccuucuugccauaccac

SEQ ID NO: 1050482 - RNA, 19 nt, Artificial Sequence
  Description of Artificial Sequence: Synthetic oligonucleotide
  Sense strand starting at position 2854 of SEQ ID NO: 915057
gccucagucacacagggau

SEQ ID NO: 1050483 - RNA, 19 nt, Artificial Sequence
  Description of Artificial Sequence: Synthetic oligonucleotide
  Antisense strand to SEQ ID NO: 1050482
aucccugugugacugaggc

SEQ ID NO: 1050484 - RNA, 19 nt, Artificial Sequence
  Description of Artificial Sequence: Synthetic oligonucleotide
  Sense strand starting at position 2913 of SEQ ID NO: 915057
uccagauaaugauaggaag

SEQ ID NO: 1050485 - RNA, 19 nt, Artificial Sequence
  Description of Artificial Sequence: Synthetic oligonucleotide
  Antisense strand to SEQ ID NO: 1050484
cuuccuaucauuaucugga

SEQ ID NO: 1050486 - RNA, 19 nt, Artificial Sequence
  Description of Artificial Sequence: Synthetic oligonucleotide
  Sense strand starting at position 2957 of SEQ ID NO: 915057
cuuugugccaggugauuua

SEQ ID NO: 1050487 - RNA, 19 nt, Artificial Sequence
  Description of Artificial Sequence: Synthetic oligonucleotide
  Antisense strand to SEQ ID NO: 1050486
uaaaucaccuggcacaaag

SEQ ID NO: 1050488 - RNA, 19 nt, Artificial Sequence
  Description of Artificial Sequence: Synthetic oligonucleotide
  Sense strand starting at position 2960 of SEQ ID NO: 915057
ugugccaggugauuuacau

SEQ ID NO: 1050489 - RNA, 19 nt, Artificial Sequence
  Description of Artificial Sequence: Synthetic oligonucleotide
  Antisense strand to SEQ ID NO: 1050488
auguaaaucaccuggcaca

SEQ ID NO: 1050490 - RNA, 19 nt, Artificial Sequence
  Description of Artificial Sequence: Synthetic oligonucleotide
  Sense strand starting at position 3015 of SEQ ID NO: 915057
uguuccacaugagaaauuu

SEQ ID NO: 1050491 - RNA, 19 nt, Artificial Sequence
  Description of Artificial Sequence: Synthetic oligonucleotide
  Antisense strand to SEQ ID NO: 1050490
aaauuucucauguggaaca

SEQ ID NO: 1050492 - RNA, 19 nt, Artificial Sequence
  Description of Artificial Sequence: Synthetic oligonucleotide
  Sense strand starting at position 3024 of SEQ ID NO: 915057
ugagaaauuuggcagucag

SEQ ID NO: 1050493 - RNA, 19 nt, Artificial Sequence
  Description of Artificial Sequence: Synthetic oligonucleotide
  Antisense strand to SEQ ID NO: 1050492
cugacugccaaauuucuca

SEQ ID NO: 1050494 - RNA, 19 nt, Artificial Sequence
  Description of Artificial Sequence: Synthetic oligonucleotide
  Sense strand starting at position 3180 of SEQ ID NO: 915057
ccagaaaguuaggcuaaau

SEQ ID NO: 1050495 - RNA, 19 nt, Artificial Sequence
  Description of Artificial Sequence: Synthetic oligonucleotide
  Antisense strand to SEQ ID NO: 1050494
auuuagccuaacuuucugg

SEQ ID NO: 1050496 - RNA, 19 nt, Artificial Sequence
  Description of Artificial Sequence: Synthetic oligonucleotide
  Sense strand starting at position 3191 of SEQ ID NO: 915057
ggcuaaauguugccagaag

SEQ ID NO: 1050497 - RNA, 19 nt, Artificial Sequence
  Description of Artificial Sequence: Synthetic oligonucleotide
  Antisense strand to SEQ ID NO: 1050496
cuucuggcaacauuuagcc

SEQ ID NO: 1050498 - RNA, 19 nt, Artificial Sequence
  Description of Artificial Sequence: Synthetic oligonucleotide
  Sense strand starting at position 3267 of SEQ ID NO: 915057
guuucuaauguagaaccaa

SEQ ID NO: 1050499 - RNA, 19 nt, Artificial Sequence
  Description of Artificial Sequence: Synthetic oligonucleotide
  Antisense strand to SEQ ID NO: 1050498
uugguucuacauuagaaac

SEQ ID NO: 1050500 - RNA, 19 nt, Artificial Sequence
  Description of Artificial Sequence: Synthetic oligonucleotide
  Sense strand starting at position 3391 of SEQ ID NO: 915057
ucaguaguacaaugucaca

SEQ ID NO: 1050501 - RNA, 19 nt, Artificial Sequence
  Description of Artificial Sequence: Synthetic oligonucleotide
  Antisense strand to SEQ ID NO: 1050500
ugugacauuguacuacuga

SEQ ID NO: 1050502 - RNA, 19 nt, Artificial Sequence
  Description of Artificial Sequence: Synthetic oligonucleotide
  Sense strand starting at position 3446 of SEQ ID NO: 915057
cacagagaguuguugccau

SEQ ID NO: 1050503 - RNA, 19 nt, Artificial Sequence
  Description of Artificial Sequence: Synthetic oligonucleotide
  Antisense strand to SEQ ID NO: 1050502
auggcaacaacucucugug

SEQ ID NO: 1050504 - RNA, 19 nt, Artificial Sequence
  Description of Artificial Sequence: Synthetic oligonucleotide
  Sense strand starting at position 3483 of SEQ ID NO: 915057
acuacauacugacagagaa

SEQ ID NO: 1050505 - RNA, 19 nt, Artificial Sequence
  Description of Artificial Sequence: Synthetic oligonucleotide
  Antisense strand to SEQ ID NO: 1050504
uucucugucaguauguagu

SEQ ID NO: 1050506 - RNA, 19 nt, Artificial Sequence
  Description of Artificial Sequence: Synthetic oligonucleotide
  Sense strand starting at position 3853 of SEQ ID NO: 915057
gcucuacagguccaaguuu

SEQ ID NO: 1050507 - RNA, 19 nt, Artificial Sequence
  Description of Artificial Sequence: Synthetic oligonucleotide
  Antisense strand to SEQ ID NO: 1050506
aaacuuggaccuguagagc

SEQ ID NO: 1050508 - RNA, 19 nt, Artificial Sequence
  Description of Artificial Sequence: Synthetic oligonucleotide
  Sense strand starting at position 3944 of SEQ ID NO: 915057
accuaacaguuccuaguau

SEQ ID NO: 1050509 - RNA, 19 nt, Artificial Sequence
  Description of Artificial Sequence: Synthetic oligonucleotide
  Antisense strand to SEQ ID NO: 1050508
auacuaggaacuguuaggu

SEQ ID NO: 1050510 - RNA, 19 nt, Artificial Sequence
  Description of Artificial Sequence: Synthetic oligonucleotide
  Sense strand starting at position 3958 of SEQ ID NO: 915057
aguauauaggccuggaaca

SEQ ID NO: 1050511 - RNA, 19 nt, Artificial Sequence
  Description of Artificial Sequence: Synthetic oligonucleotide
  Antisense strand to SEQ ID NO: 1050510
uguuccaggccuauauacu

SEQ ID NO: 1050512 - RNA, 19 nt, Artificial Sequence
  Description of Artificial Sequence: Synthetic oligonucleotide
  Sense strand starting at position 41 of SEQ ID NO: 915058
acagucauauucuuagauu

SEQ ID NO: 1050513 - RNA, 19 nt, Artificial Sequence
  Description of Artificial Sequence: Synthetic oligonucleotide
  Antisense strand to SEQ ID NO: 1050512
aaucuaagaauaugacugu

SEQ ID NO: 1050514 - RNA, 19 nt, Artificial Sequence
  Description of Artificial Sequence: Synthetic oligonucleotide
  Sense strand starting at position 62 of SEQ ID NO: 915058
ucaauuauuugcuaugaag

SEQ ID NO: 1050515 - RNA, 19 nt, Artificial Sequence
  Description of Artificial Sequence: Synthetic oligonucleotide
  Antisense strand to SEQ ID NO: 1050514
cuucauagcaaauaauuga

SEQ ID NO: 1050516 - RNA, 19 nt, Artificial Sequence
  Description of Artificial Sequence: Synthetic oligonucleotide
  Sense strand starting at position 156 of SEQ ID NO: 915058
uggguacaucucuaggcau

SEQ ID NO: 1050517 - RNA, 19 nt, Artificial Sequence
  Description of Artificial Sequence: Synthetic oligonucleotide
  Antisense strand to SEQ ID NO: 1050516
augccuagagauguaccca

SEQ ID NO: 1050518 - RNA, 19 nt, Artificial Sequence
  Description of Artificial Sequence: Synthetic oligonucleotide
  Sense strand starting at position 158 of SEQ ID NO: 915058
gguacaucucuaggcaucu

SEQ ID NO: 1050519 - RNA, 19 nt, Artificial Sequence
  Description of Artificial Sequence: Synthetic oligonucleotide
  Antisense strand to SEQ ID NO: 1050518
agaugccuagagauguacc

SEQ ID NO: 1050520 - RNA, 19 nt, Artificial Sequence
  Description of Artificial Sequence: Synthetic oligonucleotide
  Sense strand starting at position 360 of SEQ ID NO: 915058
aacuguaacuggguagaau

SEQ ID NO: 1050521 - RNA, 19 nt, Artificial Sequence
  Description of Artificial Sequence: Synthetic oligonucleotide
  Antisense strand to SEQ ID NO: 1050520
auucuacccaguuacaguu

SEQ ID NO: 1050522 - RNA, 19 nt, Artificial Sequence
  Description of Artificial Sequence: Synthetic oligonucleotide
  Sense strand starting at position 526 of SEQ ID NO: 915058
ugguuaguucaaugagguu

SEQ ID NO: 1050523 - RNA, 19 nt, Artificial Sequence
  Description of Artificial Sequence: Synthetic oligonucleotide
  Antisense strand to SEQ ID NO: 1050522
aaccucauugaacuaacca

SEQ ID NO: 1050524 - RNA, 19 nt, Artificial Sequence
  Description of Artificial Sequence: Synthetic oligonucleotide
  Sense strand starting at position 545 of SEQ ID NO: 915058
cagguaauauucucagguu

SEQ ID NO: 1050525 - RNA, 19 nt, Artificial Sequence
  Description of Artificial Sequence: Synthetic oligonucleotide
  Antisense strand to SEQ ID NO: 1050524
aaccugagaauauuaccug

SEQ ID NO: 1050526 - RNA, 19 nt, Artificial Sequence
  Description of Artificial Sequence: Synthetic oligonucleotide
  Sense strand starting at position 600 of SEQ ID NO: 915058
cguucuuaccggucaaugu

SEQ ID NO: 1050527 - RNA, 19 nt, Artificial Sequence
  Description of Artificial Sequence: Synthetic oligonucleotide
  Antisense strand to SEQ ID NO: 1050526
acauugaccgguaagaacg

SEQ ID NO: 1050528 - RNA, 19 nt, Artificial Sequence
  Description of Artificial Sequence: Synthetic oligonucleotide
  Sense strand starting at position 677 of SEQ ID NO: 915058
guauuuaaauagccgcaau

SEQ ID NO: 1050529 - RNA, 19 nt, Artificial Sequence
  Description of Artificial Sequence: Synthetic oligonucleotide
  Antisense strand to SEQ ID NO: 1050528
auugcggcuauuuaaauac

SEQ ID NO: 1050530 - RNA, 19 nt, Artificial Sequence
  Description of Artificial Sequence: Synthetic oligonucleotide
  Sense strand starting at position 680 of SEQ ID NO: 915058
uuuaaauagccgcaauuga

SEQ ID NO: 1050531 - RNA, 19 nt, Artificial Sequence
  Description of Artificial Sequence: Synthetic oligonucleotide
  Antisense strand to SEQ ID NO: 1050530
ucaauugcggcuauuuaaa

SEQ ID NO: 1050532 - RNA, 19 nt, Artificial Sequence
  Description of Artificial Sequence: Synthetic oligonucleotide
  Sense strand starting at position 690 of SEQ ID NO: 915058
cgcaauugauaguugaauu

SEQ ID NO: 1050533 - RNA, 19 nt, Artificial Sequence
  Description of Artificial Sequence: Synthetic oligonucleotide
  Antisense strand to SEQ ID NO: 1050532
aauucaacuaucaauugcg

SEQ ID NO: 1050534 - RNA, 19 nt, Artificial Sequence
  Description of Artificial Sequence: Synthetic oligonucleotide
  Sense strand starting at position 1212 of SEQ ID NO: 915058
aucuaacaagucuguuaca

SEQ ID NO: 1050535 - RNA, 19 nt, Artificial Sequence
  Description of Artificial Sequence: Synthetic oligonucleotide
  Antisense strand to SEQ ID NO: 1050534
uguaacagacuuguuagau

SEQ ID NO: 1050536 - RNA, 19 nt, Artificial Sequence
  Description of Artificial Sequence: Synthetic oligonucleotide
  Sense strand starting at position 1213 of SEQ ID NO: 915058
ucuaacaagucuguuacau

SEQ ID NO: 1050537 - RNA, 19 nt, Artificial Sequence
  Description of Artificial Sequence: Synthetic oligonucleotide
  Antisense strand to SEQ ID NO: 1050536
auguaacagacuuguuaga

SEQ ID NO: 1050538 - RNA, 19 nt, Artificial Sequence
  Description of Artificial Sequence: Synthetic oligonucleotide
  Sense strand starting at position 1222 of SEQ ID NO: 915058
ucuguuacauaguuacuau

SEQ ID NO: 1050539 - RNA, 19 nt, Artificial Sequence
  Description of Artificial Sequence: Synthetic oligonucleotide
  Antisense strand to SEQ ID NO: 1050538
auaguaacuauguaacaga

SEQ ID NO: 1050540 - RNA, 19 nt, Artificial Sequence
  Description of Artificial Sequence: Synthetic oligonucleotide
  Sense strand starting at position 1276 of SEQ ID NO: 915058
augcuuaaagguuagguaa

SEQ ID NO: 1050541 - RNA, 19 nt, Artificial Sequence
  Description of Artificial Sequence: Synthetic oligonucleotide
  Antisense strand to SEQ ID NO: 1050540
uuaccuaaccuuuaagcau

SEQ ID NO: 1050542 - RNA, 19 nt, Artificial Sequence
  Description of Artificial Sequence: Synthetic oligonucleotide
  Sense strand starting at position 1349 of SEQ ID NO: 915058
gcuuguaaugacuauccua

SEQ ID NO: 1050543 - RNA, 19 nt, Artificial Sequence
  Description of Artificial Sequence: Synthetic oligonucleotide
  Antisense strand to SEQ ID NO: 1050542
uaggauagucauuacaagc

SEQ ID NO: 1050544 - RNA, 19 nt, Artificial Sequence
  Description of Artificial Sequence: Synthetic oligonucleotide
  Sense strand starting at position 1693 of SEQ ID NO: 915058
cucuaaccuugaguuuaga

SEQ ID NO: 1050545 - RNA, 19 nt, Artificial Sequence
  Description of Artificial Sequence: Synthetic oligonucleotide
  Antisense strand to SEQ ID NO: 1050544
ucuaaacucaagguuagag

SEQ ID NO: 1050546 - RNA, 19 nt, Artificial Sequence
  Description of Artificial Sequence: Synthetic oligonucleotide
  Sense strand starting at position 2019 of SEQ ID NO: 915058
ggauacuucuggccaauca

SEQ ID NO: 1050547 - RNA, 19 nt, Artificial Sequence
  Description of Artificial Sequence: Synthetic oligonucleotide
  Antisense strand to SEQ ID NO: 1050546
ugauuggccagaaguaucc

SEQ ID NO: 1050548 - RNA, 19 nt, Artificial Sequence
  Description of Artificial Sequence: Synthetic oligonucleotide
  Sense strand starting at position 2079 of SEQ ID NO: 915058
ucccguauccauggaaaca

SEQ ID NO: 1050549 - RNA, 19 nt, Artificial Sequence
  Description of Artificial Sequence: Synthetic oligonucleotide
  Antisense strand to SEQ ID NO: 1050548
uguuuccauggauacggga

SEQ ID NO: 1050550 - RNA, 19 nt, Artificial Sequence
  Description of Artificial Sequence: Synthetic oligonucleotide
  Sense strand starting at position 2157 of SEQ ID NO: 915058
uuguuuguguggacugagu

SEQ ID NO: 1050551 - RNA, 19 nt, Artificial Sequence
  Description of Artificial Sequence: Synthetic oligonucleotide
  Antisense strand to SEQ ID NO: 1050550
acucaguccacacaaacaa

SEQ ID NO: 1050552 - RNA, 19 nt, Artificial Sequence
  Description of Artificial Sequence: Synthetic oligonucleotide
  Sense strand starting at position 2161 of SEQ ID NO: 915058
uuguguggacugaguguuu

SEQ ID NO: 1050553 - RNA, 19 nt, Artificial Sequence
  Description of Artificial Sequence: Synthetic oligonucleotide
  Antisense strand to SEQ ID NO: 1050552
aaacacucaguccacacaa

SEQ ID NO: 1050554 - RNA, 19 nt, Artificial Sequence
  Description of Artificial Sequence: Synthetic oligonucleotide
  Sense strand starting at position 2209 of SEQ ID NO: 915058
cguuaagugacaugaacuc

SEQ ID NO: 1050555 - RNA, 19 nt, Artificial Sequence
  Description of Artificial Sequence: Synthetic oligonucleotide
  Antisense strand to SEQ ID NO: 1050554
gaguucaugucacuuaacg

SEQ ID NO: 1050556 - RNA, 19 nt, Artificial Sequence
  Description of Artificial Sequence: Synthetic oligonucleotide
  Sense strand starting at position 2263 of SEQ ID NO: 915058
cgagcugugcuugaaggaa

SEQ ID NO: 1050557 - RNA, 19 nt, Artificial Sequence
  Description of Artificial Sequence: Synthetic oligonucleotide
  Antisense strand to SEQ ID NO: 1050556
uuccuucaagcacagcucg

SEQ ID NO: 1050558 - RNA, 19 nt, Artificial Sequence
  Description of Artificial Sequence: Synthetic oligonucleotide
  Sense strand starting at position 2337 of SEQ ID NO: 915058
cagagacacccguguagau

SEQ ID NO: 1050559 - RNA, 19 nt, Artificial Sequence
  Description of Artificial Sequence: Synthetic oligonucleotide
  Antisense strand to SEQ ID NO: 1050558
aucuacacgggugucucug

SEQ ID NO: 1050560 - RNA, 19 nt, Artificial Sequence
  Description of Artificial Sequence: Synthetic oligonucleotide
  Sense strand starting at position 2693 of SEQ ID NO: 915058
aggguuaacuaauugcuua

SEQ ID NO: 1050561 - RNA, 19 nt, Artificial Sequence
  Description of Artificial Sequence: Synthetic oligonucleotide
  Antisense strand to SEQ ID NO: 1050560
uaagcaauuaguuaacccu

SEQ ID NO: 1050562 - RNA, 19 nt, Artificial Sequence
  Description of Artificial Sequence: Synthetic oligonucleotide
  Sense strand starting at position 2709 of SEQ ID NO: 915058
uuauuacuuugcccaggaa

SEQ ID NO: 1050563 - RNA, 19 nt, Artificial Sequence
  Description of Artificial Sequence: Synthetic oligonucleotide
  Antisense strand to SEQ ID NO: 1050562
uuccugggcaaaguaauaa

SEQ ID NO: 1050564 - RNA, 19 nt, Artificial Sequence
  Description of Artificial Sequence: Synthetic oligonucleotide
  Sense strand starting at position 2721 of SEQ ID NO: 915058
ccaggaaccuaccuuugau

SEQ ID NO: 1050565 - RNA, 19 nt, Artificial Sequence
  Description of Artificial Sequence: Synthetic oligonucleotide
  Antisense strand to SEQ ID NO: 1050564
aucaaagguagguuccugg

SEQ ID NO: 1050566 - RNA, 19 nt, Artificial Sequence
  Description of Artificial Sequence: Synthetic oligonucleotide
  Sense strand starting at position 2895 of SEQ ID NO: 915058
cugggauacuucucuaaga

SEQ ID NO: 1050567 - RNA, 19 nt, Artificial Sequence
  Description of Artificial Sequence: Synthetic oligonucleotide
  Antisense strand to SEQ ID NO: 1050566
ucuuagagaaguaucccag

SEQ ID NO: 1050568 - RNA, 19 nt, Artificial Sequence
  Description of Artificial Sequence: Synthetic oligonucleotide
  Sense strand starting at position 2896 of SEQ ID NO: 915058
ugggauacuucucuaagac

SEQ ID NO: 1050569 - RNA, 19 nt, Artificial Sequence
  Description of Artificial Sequence: Synthetic oligonucleotide
  Antisense strand to SEQ ID NO: 1050568
gucuuagagaaguauccca

SEQ ID NO: 1050570 - RNA, 19 nt, Artificial Sequence
  Description of Artificial Sequence: Synthetic oligonucleotide
  Sense strand starting at position 3052 of SEQ ID NO: 915058
uuccuauuauuguuaguag

SEQ ID NO: 1050571 - RNA, 19 nt, Artificial Sequence
  Description of Artificial Sequence: Synthetic oligonucleotide
  Antisense strand to SEQ ID NO: 1050570
cuacuaacaauaauaggaa

SEQ ID NO: 1050572 - RNA, 19 nt, Artificial Sequence
  Description of Artificial Sequence: Synthetic oligonucleotide
  Sense strand starting at position 3113 of SEQ ID NO: 915058
uuucuagaggguuggaaau

SEQ ID NO: 1050573 - RNA, 19 nt, Artificial Sequence
  Description of Artificial Sequence: Synthetic oligonucleotide
  Antisense strand to SEQ ID NO: 1050572
auuuccaacccucuagaaa

SEQ ID NO: 1050574 - RNA, 19 nt, Artificial Sequence
  Description of Artificial Sequence: Synthetic oligonucleotide
  Sense strand starting at position 3241 of SEQ ID NO: 915058
ccaguuaguauaugggaaa

SEQ ID NO: 1050575 - RNA, 19 nt, Artificial Sequence
  Description of Artificial Sequence: Synthetic oligonucleotide
  Antisense strand to SEQ ID NO: 1050574
uuucccauauacuaacugg

SEQ ID NO: 1050576 - RNA, 19 nt, Artificial Sequence
  Description of Artificial Sequence: Synthetic oligonucleotide
  Sense strand starting at position 3244 of SEQ ID NO: 915058
guuaguauaugggaaauuu

SEQ ID NO: 1050577 - RNA, 19 nt, Artificial Sequence
  Description of Artificial Sequence: Synthetic oligonucleotide
  Antisense strand to SEQ ID NO: 1050576
aaauuucccauauacuaac

SEQ ID NO: 1050578 - RNA, 19 nt, Artificial Sequence
  Description of Artificial Sequence: Synthetic oligonucleotide
  Sense strand starting at position 3390 of SEQ ID NO: 915058
cucauagucugaucccaag

SEQ ID NO: 1050579 - RNA, 19 nt, Artificial Sequence
  Description of Artificial Sequence: Synthetic oligonucleotide
  Antisense strand to SEQ ID NO: 1050578
cuugggaucagacuaugag

SEQ ID NO: 1050580 - RNA, 19 nt, Artificial Sequence
  Description of Artificial Sequence: Synthetic oligonucleotide
  Sense strand starting at position 3397 of SEQ ID NO: 915058
ucugaucccaagugaggau

SEQ ID NO: 1050581 - RNA, 19 nt, Artificial Sequence
  Description of Artificial Sequence: Synthetic oligonucleotide
  Antisense strand to SEQ ID NO: 1050580
auccucacuugggaucaga

SEQ ID NO: 1050582 - RNA, 19 nt, Artificial Sequence
  Description of Artificial Sequence: Synthetic oligonucleotide
  Sense strand starting at position 3406 of SEQ ID NO: 915058
aagugaggaugauugucuu

SEQ ID NO: 1050583 - RNA, 19 nt, Artificial Sequence
  Description of Artificial Sequence: Synthetic oligonucleotide
  Antisense strand to SEQ ID NO: 1050582
aagacaaucauccucacuu

SEQ ID NO: 1050584 - RNA, 19 nt, Artificial Sequence
  Description of Artificial Sequence: Synthetic oligonucleotide
  Sense strand starting at position 3509 of SEQ ID NO: 915058
ccucgcuugccugugaaau

SEQ ID NO: 1050585 - RNA, 19 nt, Artificial Sequence
  Description of Artificial Sequence: Synthetic oligonucleotide
  Antisense strand to SEQ ID NO: 1050584
auuucacaggcaagcgagg

SEQ ID NO: 1050586 - RNA, 19 nt, Artificial Sequence
  Description of Artificial Sequence: Synthetic oligonucleotide
  Sense strand starting at position 3599 of SEQ ID NO: 915058
gucacucaagucuagugua

SEQ ID NO: 1050587 - RNA, 19 nt, Artificial Sequence
  Description of Artificial Sequence: Synthetic oligonucleotide
  Antisense strand to SEQ ID NO: 1050586
uacacuagacuugagugac

SEQ ID NO: 1050588 - RNA, 19 nt, Artificial Sequence
  Description of Artificial Sequence: Synthetic oligonucleotide
  Sense strand starting at position 3604 of SEQ ID NO: 915058
ucaagucuaguguauaauu

SEQ ID NO: 1050589 - RNA, 19 nt, Artificial Sequence
  Description of Artificial Sequence: Synthetic oligonucleotide
  Antisense strand to SEQ ID NO: 1050588
aauuauacacuagacuuga

SEQ ID NO: 1050590 - RNA, 19 nt, Artificial Sequence
  Description of Artificial Sequence: Synthetic oligonucleotide
  Sense strand starting at position 3656 of SEQ ID NO: 915058
auaagaaugucaucgccag

SEQ ID NO: 1050591 - RNA, 19 nt, Artificial Sequence
  Description of Artificial Sequence: Synthetic oligonucleotide
  Antisense strand to SEQ ID NO: 1050590
cuggcgaugacauucuuau

SEQ ID NO: 1050592 - RNA, 19 nt, Artificial Sequence
  Description of Artificial Sequence: Synthetic oligonucleotide
  Sense strand starting at position 582 of SEQ ID NO: 915059
cucaguuuccucuacggga

SEQ ID NO: 1050593 - RNA, 19 nt, Artificial Sequence
  Description of Artificial Sequence: Synthetic oligonucleotide
  Antisense strand to SEQ ID NO: 1050592
ucccguagaggaaacugag

SEQ ID NO: 1050594 - RNA, 19 nt, Artificial Sequence
  Description of Artificial Sequence: Synthetic oligonucleotide
  Sense strand starting at position 841 of SEQ ID NO: 915059
gcccgcgaauuuguggaua

SEQ ID NO: 1050595 - RNA, 19 nt, Artificial Sequence
  Description of Artificial Sequence: Synthetic oligonucleotide
  Antisense strand to SEQ ID NO: 1050594
uauccacaaauucgcgggc

SEQ ID NO: 1050596 - RNA, 19 nt, Artificial Sequence
  Description of Artificial Sequence: Synthetic oligonucleotide
  Sense strand starting at position 843 of SEQ ID NO: 915059
ccgcgaauuuguggauaaa

SEQ ID NO: 1050597 - RNA, 19 nt, Artificial Sequence
  Description of Artificial Sequence: Synthetic oligonucleotide
  Antisense strand to SEQ ID NO: 1050596
uuuauccacaaauucgcgg

SEQ ID NO: 1050598 - RNA, 19 nt, Artificial Sequence
  Description of Artificial Sequence: Synthetic oligonucleotide
  Sense strand starting at position 1355 of SEQ ID NO: 915059
ggccaagcaucgucuggau

SEQ ID NO: 1050599 - RNA, 19 nt, Artificial Sequence
  Description of Artificial Sequence: Synthetic oligonucleotide
  Antisense strand to SEQ ID NO: 1050598
auccagacgaugcuuggcc

SEQ ID NO: 1050600 - RNA, 19 nt, Artificial Sequence
  Description of Artificial Sequence: Synthetic oligonucleotide
  Sense strand starting at position 1456 of SEQ ID NO: 915059
gguguucuucgcccucuga

SEQ ID NO: 1050601 - RNA, 19 nt, Artificial Sequence
  Description of Artificial Sequence: Synthetic oligonucleotide
  Antisense strand to SEQ ID NO: 1050600
ucagagggcgaagaacacc

SEQ ID NO: 1050602 - RNA, 19 nt, Artificial Sequence
  Description of Artificial Sequence: Synthetic oligonucleotide
  Sense strand starting at position 2080 of SEQ ID NO: 915059
ggagccaagucuuagaggu

SEQ ID NO: 1050603 - RNA, 19 nt, Artificial Sequence
  Description of Artificial Sequence: Synthetic oligonucleotide
  Antisense strand to SEQ ID NO: 1050602
accucuaagacuuggcucc

SEQ ID NO: 1050604 - RNA, 19 nt, Artificial Sequence
  Description of Artificial Sequence: Synthetic oligonucleotide
  Sense strand starting at position 2442 of SEQ ID NO: 915059
caccauauaugggagggaa

SEQ ID NO: 1050605 - RNA, 19 nt, Artificial Sequence
  Description of Artificial Sequence: Synthetic oligonucleotide
  Antisense strand to SEQ ID NO: 1050604
uucccucccauauauggug

SEQ ID NO: 1050606 - RNA, 19 nt, Artificial Sequence
  Description of Artificial Sequence: Synthetic oligonucleotide
  Sense strand starting at position 2614 of SEQ ID NO: 915059
augagaggugcuggguaaa

SEQ ID NO: 1050607 - RNA, 19 nt, Artificial Sequence
  Description of Artificial Sequence: Synthetic oligonucleotide
  Antisense strand to SEQ ID NO: 1050606
uuuacccagcaccucucau

SEQ ID NO: 1050608 - RNA, 19 nt, Artificial Sequence
  Description of Artificial Sequence: Synthetic oligonucleotide
  Sense strand starting at position 2733 of SEQ ID NO: 915059
ugcugauaaugguguaaag

SEQ ID NO: 1050609 - RNA, 19 nt, Artificial Sequence
  Description of Artificial Sequence: Synthetic oligonucleotide
  Antisense strand to SEQ ID NO: 1050608
cuuuacaccauuaucagca

SEQ ID NO: 1050610 - RNA, 19 nt, Artificial Sequence
  Description of Artificial Sequence: Synthetic oligonucleotide
  Sense strand starting at position 2813 of SEQ ID NO: 915059
agcucauuacucuaguuac

SEQ ID NO: 1050611 - RNA, 19 nt, Artificial Sequence
  Description of Artificial Sequence: Synthetic oligonucleotide
  Antisense strand to SEQ ID NO: 1050610
guaacuagaguaaugagcu

SEQ ID NO: 1050612 - RNA, 19 nt, Artificial Sequence
  Description of Artificial Sequence: Synthetic oligonucleotide
  Sense strand starting at position 2816 of SEQ ID NO: 915059
ucauuacucuaguuacagu

SEQ ID NO: 1050613 - RNA, 19 nt, Artificial Sequence
  Description of Artificial Sequence: Synthetic oligonucleotide
  Antisense strand to SEQ ID NO: 1050612
acuguaacuagaguaauga

SEQ ID NO: 1050614 - RNA, 19 nt, Artificial Sequence
  Description of Artificial Sequence: Synthetic oligonucleotide
  Sense strand starting at position 2944 of SEQ ID NO: 915059
cugagaauugcccaccacu

SEQ ID NO: 1050615 - RNA, 19 nt, Artificial Sequence
  Description of Artificial Sequence: Synthetic oligonucleotide
  Antisense strand to SEQ ID NO: 1050614
aguggugggcaauucucag

SEQ ID NO: 1050616 - RNA, 19 nt, Artificial Sequence
  Description of Artificial Sequence: Synthetic oligonucleotide
  Sense strand starting at position 2988 of SEQ ID NO: 915059
acuccucguuuagcauaua

SEQ ID NO: 1050617 - RNA, 19 nt, Artificial Sequence
  Description of Artificial Sequence: Synthetic oligonucleotide
  Antisense strand to SEQ ID NO: 1050616
uauaugcuaaacgaggagu

SEQ ID NO: 1050618 - RNA, 19 nt, Artificial Sequence
  Description of Artificial Sequence: Synthetic oligonucleotide
  Sense strand starting at position 2989 of SEQ ID NO: 915059
cuccucguuuagcauauaa

SEQ ID NO: 1050619 - RNA, 19 nt, Artificial Sequence
  Description of Artificial Sequence: Synthetic oligonucleotide
  Antisense strand to SEQ ID NO: 1050618
uuauaugcuaaacgaggag

SEQ ID NO: 1050620 - RNA, 19 nt, Artificial Sequence
  Description of Artificial Sequence: Synthetic oligonucleotide
  Sense strand starting at position 3417 of SEQ ID NO: 915059
gcacuuuacucuuuaugga

SEQ ID NO: 1050621 - RNA, 19 nt, Artificial Sequence
  Description of Artificial Sequence: Synthetic oligonucleotide
  Antisense strand to SEQ ID NO: 1050620
uccauaaagaguaaagugc

SEQ ID NO: 1050622 - RNA, 19 nt, Artificial Sequence
  Description of Artificial Sequence: Synthetic oligonucleotide
  Sense strand starting at position 3427 of SEQ ID NO: 915059
cuuuauggauuugacucaa

SEQ ID NO: 1050623 - RNA, 19 nt, Artificial Sequence
  Description of Artificial Sequence: Synthetic oligonucleotide
  Antisense strand to SEQ ID NO: 1050622
uugagucaaauccauaaag

SEQ ID NO: 1050624 - RNA, 19 nt, Artificial Sequence
  Description of Artificial Sequence: Synthetic oligonucleotide
  Sense strand starting at position 3469 of SEQ ID NO: 915059
gaaccaugaugucuggauc

SEQ ID NO: 1050625 - RNA, 19 nt, Artificial Sequence
  Description of Artificial Sequence: Synthetic oligonucleotide
  Antisense strand to SEQ ID NO: 1050624
gauccagacaucaugguuc

SEQ ID NO: 1050626 - RNA, 19 nt, Artificial Sequence
  Description of Artificial Sequence: Synthetic oligonucleotide
  Sense strand starting at position 3470 of SEQ ID NO: 915059
aaccaugaugucuggauca

SEQ ID NO: 1050627 - RNA, 19 nt, Artificial Sequence
  Description of Artificial Sequence: Synthetic oligonucleotide
  Antisense strand to SEQ ID NO: 1050626
ugauccagacaucaugguu

SEQ ID NO: 1050628 - RNA, 19 nt, Artificial Sequence
  Description of Artificial Sequence: Synthetic oligonucleotide
  Sense strand starting at position 3609 of SEQ ID NO: 915059
guccuugcuguucuuguaa

SEQ ID NO: 1050629 - RNA, 19 nt, Artificial Sequence
  Description of Artificial Sequence: Synthetic oligonucleotide
  Antisense strand to SEQ ID NO: 1050628
uuacaagaacagcaaggac

SEQ ID NO: 1050630 - RNA, 19 nt, Artificial Sequence
  Description of Artificial Sequence: Synthetic oligonucleotide
  Sense strand starting at position 3869 of SEQ ID NO: 915059
agaauagacuaagacaaau

SEQ ID NO: 1050631 - RNA, 19 nt, Artificial Sequence
  Description of Artificial Sequence: Synthetic oligonucleotide
  Antisense strand to SEQ ID NO: 1050630
auuugucuuagucuauucu

SEQ ID NO: 1050632 - RNA, 19 nt, Artificial Sequence
  Description of Artificial Sequence: Synthetic oligonucleotide
  Sense strand starting at position 3977 of SEQ ID NO: 915059
uucucugaggccugugaca

SEQ ID NO: 1050633 - RNA, 19 nt, Artificial Sequence
  Description of Artificial Sequence: Synthetic oligonucleotide
  Antisense strand to SEQ ID NO: 1050632
ugucacaggccucagagaa

SEQ ID NO: 1050634 - RNA, 19 nt, Artificial Sequence
  Description of Artificial Sequence: Synthetic oligonucleotide
  Sense strand starting at position 42 of SEQ ID NO: 915060
cugccuuucuuccgcagau

SEQ ID NO: 1050635 - RNA, 19 nt, Artificial Sequence
  Description of Artificial Sequence: Synthetic oligonucleotide
  Antisense strand to SEQ ID NO: 1050634
aucugcggaagaaaggcag

SEQ ID NO: 1050636 - RNA, 19 nt, Artificial Sequence
  Description of Artificial Sequence: Synthetic oligonucleotide
  Sense strand starting at position 43 of SEQ ID NO: 915060
ugccuuucuuccgcagaua

SEQ ID NO: 1050637 - RNA, 19 nt, Artificial Sequence
  Description of Artificial Sequence: Synthetic oligonucleotide
  Antisense strand to SEQ ID NO: 1050636
uaucugcggaagaaaggca

SEQ ID NO: 1050638 - RNA, 19 nt, Artificial Sequence
  Description of Artificial Sequence: Synthetic oligonucleotide
  Sense strand starting at position 44 of SEQ ID NO: 915060
gccuuucuuccgcagauau

SEQ ID NO: 1050639 - RNA, 19 nt, Artificial Sequence
  Description of Artificial Sequence: Synthetic oligonucleotide
  Antisense strand to SEQ ID NO: 1050638
auaucugcggaagaaaggc

SEQ ID NO: 1050640 - RNA, 19 nt, Artificial Sequence
  Description of Artificial Sequence: Synthetic oligonucleotide
  Sense strand starting at position 46 of SEQ ID NO: 915060
cuuucuuccgcagauauca

SEQ ID NO: 1050641 - RNA, 19 nt, Artificial Sequence
  Description of Artificial Sequence: Synthetic oligonucleotide
  Antisense strand to SEQ ID NO: 1050640
ugauaucugcggaagaaag

SEQ ID NO: 1050642 - RNA, 19 nt, Artificial Sequence
  Description of Artificial Sequence: Synthetic oligonucleotide
  Sense strand starting at position 100 of SEQ ID NO: 915060
uuauguucucugugacuuu

SEQ ID NO: 1050643 - RNA, 19 nt, Artificial Sequence
  Description of Artificial Sequence: Synthetic oligonucleotide
  Antisense strand to SEQ ID NO: 1050642
aaagucacagagaacauaa

SEQ ID NO: 1050644 - RNA, 19 nt, Artificial Sequence
  Description of Artificial Sequence: Synthetic oligonucleotide
  Sense strand starting at position 128 of SEQ ID NO: 915060
agccuuugaggcugacaua

SEQ ID NO: 1050645 - RNA, 19 nt, Artificial Sequence
  Description of Artificial Sequence: Synthetic oligonucleotide
  Antisense strand to SEQ ID NO: 1050644
uaugucagccucaaaggcu

SEQ ID NO: 1050646 - RNA, 19 nt, Artificial Sequence
  Description of Artificial Sequence: Synthetic oligonucleotide
  Sense strand starting at position 129 of SEQ ID NO: 915060
gccuuugaggcugacauaa

SEQ ID NO: 1050647 - RNA, 19 nt, Artificial Sequence
  Description of Artificial Sequence: Synthetic oligonucleotide
  Antisense strand to SEQ ID NO: 1050646
uuaugucagccucaaaggc

SEQ ID NO: 1050648 - RNA, 19 nt, Artificial Sequence
  Description of Artificial Sequence: Synthetic oligonucleotide
  Sense strand starting at position 131 of SEQ ID NO: 915060
cuuugaggcugacauaaau

SEQ ID NO: 1050649 - RNA, 19 nt, Artificial Sequence
  Description of Artificial Sequence: Synthetic oligonucleotide
  Antisense strand to SEQ ID NO: 1050648
auuuaugucagccucaaag

SEQ ID NO: 1050650 - RNA, 19 nt, Artificial Sequence
  Description of Artificial Sequence: Synthetic oligonucleotide
  Sense strand starting at position 254 of SEQ ID NO: 915060
ugucauuuaccuugcugca

SEQ ID NO: 1050651 - RNA, 19 nt, Artificial Sequence
  Description of Artificial Sequence: Synthetic oligonucleotide
  Antisense strand to SEQ ID NO: 1050650
ugcagcaagguaaaugaca

SEQ ID NO: 1050652 - RNA, 19 nt, Artificial Sequence
  Description of Artificial Sequence: Synthetic oligonucleotide
  Sense strand starting at position 349 of SEQ ID NO: 915060
ugugaagaguccuagcaau

SEQ ID NO: 1050653 - RNA, 19 nt, Artificial Sequence
  Description of Artificial Sequence: Synthetic oligonucleotide
  Antisense strand to SEQ ID NO: 1050652
auugcuaggacucuucaca

SEQ ID NO: 1050654 - RNA, 19 nt, Artificial Sequence
  Description of Artificial Sequence: Synthetic oligonucleotide
  Sense strand starting at position 502 of SEQ ID NO: 915060
guccaagguuacuuauaga

SEQ ID NO: 1050655 - RNA, 19 nt, Artificial Sequence
  Description of Artificial Sequence: Synthetic oligonucleotide
  Antisense strand to SEQ ID NO: 1050654
ucuauaaguaaccuuggac

SEQ ID NO: 1050656 - RNA, 19 nt, Artificial Sequence
  Description of Artificial Sequence: Synthetic oligonucleotide
  Sense strand starting at position 505 of SEQ ID NO: 915060
caagguuacuuauagaguc

SEQ ID NO: 1050657 - RNA, 19 nt, Artificial Sequence
  Description of Artificial Sequence: Synthetic oligonucleotide
  Antisense strand to SEQ ID NO: 1050656
gacucuauaaguaaccuug

SEQ ID NO: 1050658 - RNA, 19 nt, Artificial Sequence
  Description of Artificial Sequence: Synthetic oligonucleotide
  Sense strand starting at position 601 of SEQ ID NO: 915060
ugcucuugcuguccuaaau

SEQ ID NO: 1050659 - RNA, 19 nt, Artificial Sequence
  Description of Artificial Sequence: Synthetic oligonucleotide
  Antisense strand to SEQ ID NO: 1050658
auuuaggacagcaagagca

SEQ ID NO: 1050660 - RNA, 19 nt, Artificial Sequence
  Description of Artificial Sequence: Synthetic oligonucleotide
  Sense strand starting at position 661 of SEQ ID NO: 915060
cuguuagagucccaaccaa

SEQ ID NO: 1050661 - RNA, 19 nt, Artificial Sequence
  Description of Artificial Sequence: Synthetic oligonucleotide
  Antisense strand to SEQ ID NO: 1050660
uugguugggacucuaacag

SEQ ID NO: 1050662 - RNA, 19 nt, Artificial Sequence
  Description of Artificial Sequence: Synthetic oligonucleotide
  Sense strand starting at position 835 of SEQ ID NO: 915060
ggacuaaaguggugugcca

SEQ ID NO: 1050663 - RNA, 19 nt, Artificial Sequence
  Description of Artificial Sequence: Synthetic oligonucleotide
  Antisense strand to SEQ ID NO: 1050662
uggcacaccacuuuagucc

SEQ ID NO: 1050664 - RNA, 19 nt, Artificial Sequence
  Description of Artificial Sequence: Synthetic oligonucleotide
  Sense strand starting at position 1109 of SEQ ID NO: 915060
ggucuccuccacugagauc

SEQ ID NO: 1050665 - RNA, 19 nt, Artificial Sequence
  Description of Artificial Sequence: Synthetic oligonucleotide
  Antisense strand to SEQ ID NO: 1050664
gaucucaguggaggagacc

SEQ ID NO: 1050666 - RNA, 19 nt, Artificial Sequence
  Description of Artificial Sequence: Synthetic oligonucleotide
  Sense strand starting at position 1258 of SEQ ID NO: 915060
gcuccagaagccugagaaa

SEQ ID NO: 1050667 - RNA, 19 nt, Artificial Sequence
  Description of Artificial Sequence: Synthetic oligonucleotide
  Antisense strand to SEQ ID NO: 1050666
uuucucaggcuucuggagc

SEQ ID NO: 1050668 - RNA, 19 nt, Artificial Sequence
  Description of Artificial Sequence: Synthetic oligonucleotide
  Sense strand starting at position 1276 of SEQ ID NO: 915060
agccuagguuccgguuuaa

SEQ ID NO: 1050669 - RNA, 19 nt, Artificial Sequence
  Description of Artificial Sequence: Synthetic oligonucleotide
  Antisense strand to SEQ ID NO: 1050668
uuaaaccggaaccuaggcu

SEQ ID NO: 1050670 - RNA, 19 nt, Artificial Sequence
  Description of Artificial Sequence: Synthetic oligonucleotide
  Sense strand starting at position 1287 of SEQ ID NO: 915060
cgguuuaaccucggaucua

SEQ ID NO: 1050671 - RNA, 19 nt, Artificial Sequence
  Description of Artificial Sequence: Synthetic oligonucleotide
  Antisense strand to SEQ ID NO: 1050670
uagauccgagguuaaaccg

SEQ ID NO: 1050672 - RNA, 19 nt, Artificial Sequence
  Description of Artificial Sequence: Synthetic oligonucleotide
  Sense strand starting at position 1288 of SEQ ID NO: 915060
gguuuaaccucggaucuag

SEQ ID NO: 1050673 - RNA, 19 nt, Artificial Sequence
  Description of Artificial Sequence: Synthetic oligonucleotide
  Antisense strand to SEQ ID NO: 1050672
cuagauccgagguuaaacc

SEQ ID NO: 1050674 - RNA, 19 nt, Artificial Sequence
  Description of Artificial Sequence: Synthetic oligonucleotide
  Sense strand starting at position 1340 of SEQ ID NO: 915060
agggcaguucuccggugau

SEQ ID NO: 1050675 - RNA, 19 nt, Artificial Sequence
  Description of Artificial Sequence: Synthetic oligonucleotide
  Antisense strand to SEQ ID NO: 1050674
aucaccggagaacugcccu

SEQ ID NO: 1050676 - RNA, 19 nt, Artificial Sequence
  Description of Artificial Sequence: Synthetic oligonucleotide
  Sense strand starting at position 1343 of SEQ ID NO: 915060
gcaguucuccggugaucac

SEQ ID NO: 1050677 - RNA, 19 nt, Artificial Sequence
  Description of Artificial Sequence: Synthetic oligonucleotide
  Antisense strand to SEQ ID NO: 1050676
gugaucaccggagaacugc

SEQ ID NO: 1050678 - RNA, 19 nt, Artificial Sequence
  Description of Artificial Sequence: Synthetic oligonucleotide
  Sense strand starting at position 1367 of SEQ ID NO: 915060
ucuccagggcaaugagaaa

SEQ ID NO: 1050679 - RNA, 19 nt, Artificial Sequence
  Description of Artificial Sequence: Synthetic oligonucleotide
  Antisense strand to SEQ ID NO: 1050678
uuucucauugcccuggaga

SEQ ID NO: 1050680 - RNA, 19 nt, Artificial Sequence
  Description of Artificial Sequence: Synthetic oligonucleotide
  Sense strand starting at position 2102 of SEQ ID NO: 915060
gaugcucagaagggugaaa

SEQ ID NO: 1050681 - RNA, 19 nt, Artificial Sequence
  Description of Artificial Sequence: Synthetic oligonucleotide
  Antisense strand to SEQ ID NO: 1050680
uuucacccuucugagcauc

SEQ ID NO: 1050682 - RNA, 19 nt, Artificial Sequence
  Description of Artificial Sequence: Synthetic oligonucleotide
  Sense strand starting at position 2104 of SEQ ID NO: 915060
ugcucagaagggugaaaug

SEQ ID NO: 1050683 - RNA, 19 nt, Artificial Sequence
  Description of Artificial Sequence: Synthetic oligonucleotide
  Antisense strand to SEQ ID NO: 1050682
cauuucacccuucugagca

SEQ ID NO: 1050684 - RNA, 19 nt, Artificial Sequence
  Description of Artificial Sequence: Synthetic oligonucleotide
  Sense strand starting at position 2114 of SEQ ID NO: 915060
ggugaaaugacuugugcag

SEQ ID NO: 1050685 - RNA, 19 nt, Artificial Sequence
  Description of Artificial Sequence: Synthetic oligonucleotide
  Antisense strand to SEQ ID NO: 1050684
cugcacaagucauuucacc

SEQ ID NO: 1050686 - RNA, 19 nt, Artificial Sequence
  Description of Artificial Sequence: Synthetic oligonucleotide
  Sense strand starting at position 2116 of SEQ ID NO: 915060
ugaaaugacuugugcaggu

SEQ ID NO: 1050687 - RNA, 19 nt, Artificial Sequence
  Description of Artificial Sequence: Synthetic oligonucleotide
  Antisense strand to SEQ ID NO: 1050686
accugcacaagucauuuca

SEQ ID NO: 1050688 - RNA, 19 nt, Artificial Sequence
  Description of Artificial Sequence: Synthetic oligonucleotide
  Sense strand starting at position 2120 of SEQ ID NO: 915060
augacuugugcagguugau

SEQ ID NO: 1050689 - RNA, 19 nt, Artificial Sequence
  Description of Artificial Sequence: Synthetic oligonucleotide
  Antisense strand to SEQ ID NO: 1050688
aucaaccugcacaagucau

SEQ ID NO: 1050690 - RNA, 19 nt, Artificial Sequence
  Description of Artificial Sequence: Synthetic oligonucleotide
  Sense strand starting at position 2176 of SEQ ID NO: 915060
gccugagucuuccuaccuu

SEQ ID NO: 1050691 - RNA, 19 nt, Artificial Sequence
  Description of Artificial Sequence: Synthetic oligonucleotide
  Antisense strand to SEQ ID NO: 1050690
aagguaggaagacucaggc

SEQ ID NO: 1050692 - RNA, 19 nt, Artificial Sequence
  Description of Artificial Sequence: Synthetic oligonucleotide
  Sense strand starting at position 2574 of SEQ ID NO: 915060
uucguaugcaagcaugagu

SEQ ID NO: 1050693 - RNA, 19 nt, Artificial Sequence
  Description of Artificial Sequence: Synthetic oligonucleotide
  Antisense strand to SEQ ID NO: 1050692
acucaugcuugcauacgaa

SEQ ID NO: 1050694 - RNA, 19 nt, Artificial Sequence
  Description of Artificial Sequence: Synthetic oligonucleotide
  Sense strand starting at position 2577 of SEQ ID NO: 915060
guaugcaagcaugagugua

SEQ ID NO: 1050695 - RNA, 19 nt, Artificial Sequence
  Description of Artificial Sequence: Synthetic oligonucleotide
  Antisense strand to SEQ ID NO: 1050694
uacacucaugcuugcauac

SEQ ID NO: 1050696 - RNA, 19 nt, Artificial Sequence
  Description of Artificial Sequence: Synthetic oligonucleotide
  Sense strand starting at position 2585 of SEQ ID NO: 915060
gcaugaguguacgauguuc

SEQ ID NO: 1050697 - RNA, 19 nt, Artificial Sequence
  Description of Artificial Sequence: Synthetic oligonucleotide
  Antisense strand to SEQ ID NO: 1050696
gaacaucguacacucaugc

SEQ ID NO: 1050698 - RNA, 19 nt, Artificial Sequence
  Description of Artificial Sequence: Synthetic oligonucleotide
  Sense strand starting at position 2706 of SEQ ID NO: 915060
uguucauucguuguacugu

SEQ ID NO: 1050699 - RNA, 19 nt, Artificial Sequence
  Description of Artificial Sequence: Synthetic oligonucleotide
  Antisense strand to SEQ ID NO: 1050698
acaguacaacgaaugaaca

SEQ ID NO: 1050700 - RNA, 19 nt, Artificial Sequence
  Description of Artificial Sequence: Synthetic oligonucleotide
  Sense strand starting at position 2712 of SEQ ID NO: 915060
uucguuguacugugguauu

SEQ ID NO: 1050701 - RNA, 19 nt, Artificial Sequence
  Description of Artificial Sequence: Synthetic oligonucleotide
  Antisense strand to SEQ ID NO: 1050700
aauaccacaguacaacgaa

SEQ ID NO: 1050702 - RNA, 19 nt, Artificial Sequence
  Description of Artificial Sequence: Synthetic oligonucleotide
  Sense strand starting at position 2802 of SEQ ID NO: 915060
gcaggcaccucacuuuaau

SEQ ID NO: 1050703 - RNA, 19 nt, Artificial Sequence
  Description of Artificial Sequence: Synthetic oligonucleotide
  Antisense strand to SEQ ID NO: 1050702
auuaaagugaggugccugc

SEQ ID NO: 1050704 - RNA, 19 nt, Artificial Sequence
  Description of Artificial Sequence: Synthetic oligonucleotide
  Sense strand starting at position 3167 of SEQ ID NO: 915060
agcucaaacucgucaccau

SEQ ID NO: 1050705 - RNA, 19 nt, Artificial Sequence
  Description of Artificial Sequence: Synthetic oligonucleotide
  Antisense strand to SEQ ID NO: 1050704
auggugacgaguuugagcu

SEQ ID NO: 1050706 - RNA, 19 nt, Artificial Sequence
  Description of Artificial Sequence: Synthetic oligonucleotide
  Sense strand starting at position 3982 of SEQ ID NO: 915060
ccaugaauguagucucaug

SEQ ID NO: 1050707 - RNA, 19 nt, Artificial Sequence
  Description of Artificial Sequence: Synthetic oligonucleotide
  Antisense strand to SEQ ID NO: 1050706
caugagacuacauucaugg

SEQ ID NO: 1050708 - RNA, 19 nt, Artificial Sequence
  Description of Artificial Sequence: Synthetic oligonucleotide
  Sense strand starting at position 123 of SEQ ID NO: 915061
guccaagguuacuuauaga

SEQ ID NO: 1050709 - RNA, 19 nt, Artificial Sequence
  Description of Artificial Sequence: Synthetic oligonucleotide
  Antisense strand to SEQ ID NO: 1050708
ucuauaaguaaccuuggac

SEQ ID NO: 1050710 - RNA, 19 nt, Artificial Sequence
  Description of Artificial Sequence: Synthetic oligonucleotide
  Sense strand starting at position 126 of SEQ ID NO: 915061
caagguuacuuauagaguc

SEQ ID NO: 1050711 - RNA, 19 nt, Artificial Sequence
  Description of Artificial Sequence: Synthetic oligonucleotide
  Antisense strand to SEQ ID NO: 1050710
gacucuauaaguaaccuug

SEQ ID NO: 1050712 - RNA, 19 nt, Artificial Sequence
  Description of Artificial Sequence: Synthetic oligonucleotide
  Sense strand starting at position 222 of SEQ ID NO: 915061
ugcucuugcuguccuaaau

SEQ ID NO: 1050713 - RNA, 19 nt, Artificial Sequence
  Description of Artificial Sequence: Synthetic oligonucleotide
  Antisense strand to SEQ ID NO: 1050712
auuuaggacagcaagagca

SEQ ID NO: 1050714 - RNA, 19 nt, Artificial Sequence
  Description of Artificial Sequence: Synthetic oligonucleotide
  Sense strand starting at position 282 of SEQ ID NO: 915061
cuguuagagucccaaccaa

SEQ ID NO: 1050715 - RNA, 19 nt, Artificial Sequence
  Description of Artificial Sequence: Synthetic oligonucleotide
  Antisense strand to SEQ ID NO: 1050714
uugguugggacucuaacag

SEQ ID NO: 1050716 - RNA, 19 nt, Artificial Sequence
  Description of Artificial Sequence: Synthetic oligonucleotide
  Sense strand starting at position 456 of SEQ ID NO: 915061
ggacuaaaguggugugcca

SEQ ID NO: 1050717 - RNA, 19 nt, Artificial Sequence
  Description of Artificial Sequence: Synthetic oligonucleotide
  Antisense strand to SEQ ID NO: 1050716
uggcacaccacuuuagucc

SEQ ID NO: 1050718 - RNA, 19 nt, Artificial Sequence
  Description of Artificial Sequence: Synthetic oligonucleotide
  Sense strand starting at position 730 of SEQ ID NO: 915061
ggucuccuccacugagauc

SEQ ID NO: 1050719 - RNA, 19 nt, Artificial Sequence
  Description of Artificial Sequence: Synthetic oligonucleotide
  Antisense strand to SEQ ID NO: 1050718
gaucucaguggaggagacc

SEQ ID NO: 1050720 - RNA, 19 nt, Artificial Sequence
  Description of Artificial Sequence: Synthetic oligonucleotide
  Sense strand starting at position 879 of SEQ ID NO: 915061
gcuccagaagccugagaaa

SEQ ID NO: 1050721 - RNA, 19 nt, Artificial Sequence
  Description of Artificial Sequence: Synthetic oligonucleotide
  Antisense strand to SEQ ID NO: 1050720
uuucucaggcuucuggagc

SEQ ID NO: 1050722 - RNA, 19 nt, Artificial Sequence
  Description of Artificial Sequence: Synthetic oligonucleotide
  Sense strand starting at position 908 of SEQ ID NO: 915061
cgguuuaaccucggaucua

SEQ ID NO: 1050723 - RNA, 19 nt, Artificial Sequence
  Description of Artificial Sequence: Synthetic oligonucleotide
  Antisense strand to SEQ ID NO: 1050722
uagauccgagguuaaaccg

SEQ ID NO: 1050724 - RNA, 19 nt, Artificial Sequence
  Description of Artificial Sequence: Synthetic oligonucleotide
  Sense strand starting at position 909 of SEQ ID NO: 915061
gguuuaaccucggaucuag

SEQ ID NO: 1050725 - RNA, 19 nt, Artificial Sequence
  Description of Artificial Sequence: Synthetic oligonucleotide
  Antisense strand to SEQ ID NO: 1050724
cuagauccgagguuaaacc

SEQ ID NO: 1050726 - RNA, 19 nt, Artificial Sequence
  Description of Artificial Sequence: Synthetic oligonucleotide
  Sense strand starting at position 961 of SEQ ID NO: 915061
agggcaguucuccggugau

SEQ ID NO: 1050727 - RNA, 19 nt, Artificial Sequence
  Description of Artificial Sequence: Synthetic oligonucleotide
  Antisense strand to SEQ ID NO: 1050726
aucaccggagaacugcccu

SEQ ID NO: 1050728 - RNA, 19 nt, Artificial Sequence
  Description of Artificial Sequence: Synthetic oligonucleotide
  Sense strand starting at position 964 of SEQ ID NO: 915061
gcaguucuccggugaucac

SEQ ID NO: 1050729 - RNA, 19 nt, Artificial Sequence
  Description of Artificial Sequence: Synthetic oligonucleotide
  Antisense strand to SEQ ID NO: 1050728
gugaucaccggagaacugc

SEQ ID NO: 1050730 - RNA, 19 nt, Artificial Sequence
  Description of Artificial Sequence: Synthetic oligonucleotide
  Sense strand starting at position 988 of SEQ ID NO: 915061
ucuccagggcaaugagaaa

SEQ ID NO: 1050731 - RNA, 19 nt, Artificial Sequence
  Description of Artificial Sequence: Synthetic oligonucleotide
  Antisense strand to SEQ ID NO: 1050730
uuucucauugcccuggaga

SEQ ID NO: 1050732 - RNA, 19 nt, Artificial Sequence
  Description of Artificial Sequence: Synthetic oligonucleotide
  Sense strand starting at position 1723 of SEQ ID NO: 915061
gaugcucagaagggugaaa

SEQ ID NO: 1050733 - RNA, 19 nt, Artificial Sequence
  Description of Artificial Sequence: Synthetic oligonucleotide
  Antisense strand to SEQ ID NO: 1050732
uuucacccuucugagcauc

SEQ ID NO: 1050734 - RNA, 19 nt, Artificial Sequence
  Description of Artificial Sequence: Synthetic oligonucleotide
  Sense strand starting at position 1725 of SEQ ID NO: 915061
ugcucagaagggugaaaug

SEQ ID NO: 1050735 - RNA, 19 nt, Artificial Sequence
  Description of Artificial Sequence: Synthetic oligonucleotide
  Antisense strand to SEQ ID NO: 1050734
cauuucacccuucugagca

SEQ ID NO: 1050736 - RNA, 19 nt, Artificial Sequence
  Description of Artificial Sequence: Synthetic oligonucleotide
  Sense strand starting at position 1735 of SEQ ID NO: 915061
ggugaaaugacuugugcag

SEQ ID NO: 1050737 - RNA, 19 nt, Artificial Sequence
  Description of Artificial Sequence: Synthetic oligonucleotide
  Antisense strand to SEQ ID NO: 1050736
cugcacaagucauuucacc

SEQ ID NO: 1050738 - RNA, 19 nt, Artificial Sequence
  Description of Artificial Sequence: Synthetic oligonucleotide
  Sense strand starting at position 1737 of SEQ ID NO: 915061
ugaaaugacuugugcaggu

SEQ ID NO: 1050739 - RNA, 19 nt, Artificial Sequence
  Description of Artificial Sequence: Synthetic oligonucleotide
  Antisense strand to SEQ ID NO: 1050738
accugcacaagucauuuca

SEQ ID NO: 1050740 - RNA, 19 nt, Artificial Sequence
  Description of Artificial Sequence: Synthetic oligonucleotide
  Sense strand starting at position 1741 of SEQ ID NO: 915061
augacuugugcagguugau

SEQ ID NO: 1050741 - RNA, 19 nt, Artificial Sequence
  Description of Artificial Sequence: Synthetic oligonucleotide
  Antisense strand to SEQ ID NO: 1050740
aucaaccugcacaagucau

SEQ ID NO: 1050742 - RNA, 19 nt, Artificial Sequence
  Description of Artificial Sequence: Synthetic oligonucleotide
  Sense strand starting at position 1797 of SEQ ID NO: 915061
gccugagucuuccuaccuu

SEQ ID NO: 1050743 - RNA, 19 nt, Artificial Sequence
  Description of Artificial Sequence: Synthetic oligonucleotide
  Antisense strand to SEQ ID NO: 1050742
aagguaggaagacucaggc

SEQ ID NO: 1050744 - RNA, 19 nt, Artificial Sequence
  Description of Artificial Sequence: Synthetic oligonucleotide
  Sense strand starting at position 2195 of SEQ ID NO: 915061
uucguaugcaagcaugagu

SEQ ID NO: 1050745 - RNA, 19 nt, Artificial Sequence
  Description of Artificial Sequence: Synthetic oligonucleotide
  Antisense strand to SEQ ID NO: 1050744
acucaugcuugcauacgaa

SEQ ID NO: 1050746 - RNA, 19 nt, Artificial Sequence
  Description of Artificial Sequence: Synthetic oligonucleotide
  Sense strand starting at position 2198 of SEQ ID NO: 915061
guaugcaagcaugagugua

SEQ ID NO: 1050747 - RNA, 19 nt, Artificial Sequence
  Description of Artificial Sequence: Synthetic oligonucleotide
  Antisense strand to SEQ ID NO: 1050746
uacacucaugcuugcauac

SEQ ID NO: 1050748 - RNA, 19 nt, Artificial Sequence
  Description of Artificial Sequence: Synthetic oligonucleotide
  Sense strand starting at position 2327 of SEQ ID NO: 915061
uguucauucguuguacugu

SEQ ID NO: 1050749 - RNA, 19 nt, Artificial Sequence
  Description of Artificial Sequence: Synthetic oligonucleotide
  Antisense strand to SEQ ID NO: 1050748
acaguacaacgaaugaaca

SEQ ID NO: 1050750 - RNA, 19 nt, Artificial Sequence
  Description of Artificial Sequence: Synthetic oligonucleotide
  Sense strand starting at position 2333 of SEQ ID NO: 915061
uucguuguacugugguauu

SEQ ID NO: 1050751 - RNA, 19 nt, Artificial Sequence
  Description of Artificial Sequence: Synthetic oligonucleotide
  Antisense strand to SEQ ID NO: 1050750
aauaccacaguacaacgaa

SEQ ID NO: 1050752 - RNA, 19 nt, Artificial Sequence
  Description of Artificial Sequence: Synthetic oligonucleotide
  Sense strand starting at position 2423 of SEQ ID NO: 915061
gcaggcaccucacuuuaau

SEQ ID NO: 1050753 - RNA, 19 nt, Artificial Sequence
  Description of Artificial Sequence: Synthetic oligonucleotide
  Antisense strand to SEQ ID NO: 1050752
auuaaagugaggugccugc

SEQ ID NO: 1050754 - RNA, 19 nt, Artificial Sequence
  Description of Artificial Sequence: Synthetic oligonucleotide
  Sense strand starting at position 2788 of SEQ ID NO: 915061
agcucaaacucgucaccau

SEQ ID NO: 1050755 - RNA, 19 nt, Artificial Sequence
  Description of Artificial Sequence: Synthetic oligonucleotide
  Antisense strand to SEQ ID NO: 1050754
auggugacgaguuugagcu

SEQ ID NO: 1050756 - RNA, 19 nt, Artificial Sequence
  Description of Artificial Sequence: Synthetic oligonucleotide
  Sense strand starting at position 3603 of SEQ ID NO: 915061
ccaugaauguagucucaug

SEQ ID NO: 1050757 - RNA, 19 nt, Artificial Sequence
  Description of Artificial Sequence: Synthetic oligonucleotide
  Antisense strand to SEQ ID NO: 1050756
caugagacuacauucaugg

SEQ ID NO: 1050758 - RNA, 19 nt, Artificial Sequence
  Description of Artificial Sequence: Synthetic oligonucleotide
  Sense strand starting at position 3608 of SEQ ID NO: 915061
aauguagucucauggguga

SEQ ID NO: 1050759 - RNA, 19 nt, Artificial Sequence
  Description of Artificial Sequence: Synthetic oligonucleotide
  Antisense strand to SEQ ID NO: 1050758
ucacccaugagacuacauu

SEQ ID NO: 1050760 - RNA, 19 nt, Artificial Sequence
  Description of Artificial Sequence: Synthetic oligonucleotide
  Sense strand starting at position 3610 of SEQ ID NO: 915061
uguagucucaugggugaca

SEQ ID NO: 1050761 - RNA, 19 nt, Artificial Sequence
  Description of Artificial Sequence: Synthetic oligonucleotide
  Antisense strand to SEQ ID NO: 1050760
ugucacccaugagacuaca

SEQ ID NO: 1050762 - RNA, 19 nt, Artificial Sequence
  Description of Artificial Sequence: Synthetic oligonucleotide
  Sense strand starting at position 3612 of SEQ ID NO: 915061
uagucucaugggugacagu

SEQ ID NO: 1050763 - RNA, 19 nt, Artificial Sequence
  Description of Artificial Sequence: Synthetic oligonucleotide
  Antisense strand to SEQ ID NO: 1050762
acugucacccaugagacua

SEQ ID NO: 1050764 - RNA, 19 nt, Artificial Sequence
  Description of Artificial Sequence: Synthetic oligonucleotide
  Sense strand starting at position 3626 of SEQ ID NO: 915061
acaguuugggccugguaau

SEQ ID NO: 1050765 - RNA, 19 nt, Artificial Sequence
  Description of Artificial Sequence: Synthetic oligonucleotide
  Antisense strand to SEQ ID NO: 1050764
auuaccaggcccaaacugu

SEQ ID NO: 1050766 - RNA, 19 nt, Artificial Sequence
  Description of Artificial Sequence: Synthetic oligonucleotide
  Sense strand starting at position 3627 of SEQ ID NO: 915061
caguuugggccugguaauc

SEQ ID NO: 1050767 - RNA, 19 nt, Artificial Sequence
  Description of Artificial Sequence: Synthetic oligonucleotide
  Antisense strand to SEQ ID NO: 1050766
gauuaccaggcccaaacug

SEQ ID NO: 1050768 - RNA, 19 nt, Artificial Sequence
  Description of Artificial Sequence: Synthetic oligonucleotide
  Sense strand starting at position 3637 of SEQ ID NO: 915061
cugguaaucuccucuagcu

SEQ ID NO: 1050769 - RNA, 19 nt, Artificial Sequence
  Description of Artificial Sequence: Synthetic oligonucleotide
  Antisense strand to SEQ ID NO: 1050768
agcuagaggagauuaccag

SEQ ID NO: 1050770 - RNA, 19 nt, Artificial Sequence
  Description of Artificial Sequence: Synthetic oligonucleotide
  Sense strand starting at position 3693 of SEQ ID NO: 915061
gcagcaguuccuggacaca

SEQ ID NO: 1050771 - RNA, 19 nt, Artificial Sequence
  Description of Artificial Sequence: Synthetic oligonucleotide
  Antisense strand to SEQ ID NO: 1050770
uguguccaggaacugcugc

SEQ ID NO: 1050772 - RNA, 19 nt, Artificial Sequence
  Description of Artificial Sequence: Synthetic oligonucleotide
  Sense strand starting at position 3705 of SEQ ID NO: 915061
ggacacagcucagagcaau

SEQ ID NO: 1050773 - RNA, 19 nt, Artificial Sequence
  Description of Artificial Sequence: Synthetic oligonucleotide
  Antisense strand to SEQ ID NO: 1050772
auugcucugagcugugucc

SEQ ID NO: 1050774 - RNA, 19 nt, Artificial Sequence
  Description of Artificial Sequence: Synthetic oligonucleotide
  Sense strand starting at position 3798 of SEQ ID NO: 915061
uggccucuugcagacagaa

SEQ ID NO: 1050775 - RNA, 19 nt, Artificial Sequence
  Description of Artificial Sequence: Synthetic oligonucleotide
  Antisense strand to SEQ ID NO: 1050774
uucugucugcaagaggcca

SEQ ID NO: 1050776 - RNA, 19 nt, Artificial Sequence
  Description of Artificial Sequence: Synthetic oligonucleotide
  Sense strand starting at position 3800 of SEQ ID NO: 915061
gccucuugcagacagaagu

SEQ ID NO: 1050777 - RNA, 19 nt, Artificial Sequence
  Description of Artificial Sequence: Synthetic oligonucleotide
  Antisense strand to SEQ ID NO: 1050776
acuucugucugcaagaggc

SEQ ID NO: 1050778 - RNA, 19 nt, Artificial Sequence
  Description of Artificial Sequence: Synthetic oligonucleotide
  Sense strand starting at position 3811 of SEQ ID NO: 915061
acagaaguacugugaguca

SEQ ID NO: 1050779 - RNA, 19 nt, Artificial Sequence
  Description of Artificial Sequence: Synthetic oligonucleotide
  Antisense strand to SEQ ID NO: 1050778
ugacucacaguacuucugu

SEQ ID NO: 1050780 - RNA, 19 nt, Artificial Sequence
  Description of Artificial Sequence: Synthetic oligonucleotide
  Sense strand starting at position 3822 of SEQ ID NO: 915061
gugagucaugccgugggca

SEQ ID NO: 1050781 - RNA, 19 nt, Artificial Sequence
  Description of Artificial Sequence: Synthetic oligonucleotide
  Antisense strand to SEQ ID NO: 1050780
ugcccacggcaugacucac

SEQ ID NO: 1050782 - RNA, 19 nt, Artificial Sequence
  Description of Artificial Sequence: Synthetic oligonucleotide
  Sense strand starting at position 3823 of SEQ ID NO: 915061
ugagucaugccgugggcau

SEQ ID NO: 1050783 - RNA, 19 nt, Artificial Sequence
  Description of Artificial Sequence: Synthetic oligonucleotide
  Antisense strand to SEQ ID NO: 1050782
augcccacggcaugacuca

SEQ ID NO: 1050784 - RNA, 19 nt, Artificial Sequence
  Description of Artificial Sequence: Synthetic oligonucleotide
  Sense strand starting at position 3843 of SEQ ID NO: 915061
uccucuguugucugaccua

SEQ ID NO: 1050785 - RNA, 19 nt, Artificial Sequence
  Description of Artificial Sequence: Synthetic oligonucleotide
  Antisense strand to SEQ ID NO: 1050784
uaggucagacaacagagga

SEQ ID NO: 1050786 - RNA, 19 nt, Artificial Sequence
  Description of Artificial Sequence: Synthetic oligonucleotide
  Sense strand starting at position 3846 of SEQ ID NO: 915061
ucuguugucugaccuagga

SEQ ID NO: 1050787 - RNA, 19 nt, Artificial Sequence
  Description of Artificial Sequence: Synthetic oligonucleotide
  Antisense strand to SEQ ID NO: 1050786
uccuaggucagacaacaga

SEQ ID NO: 1050788 - RNA, 19 nt, Artificial Sequence
  Description of Artificial Sequence: Synthetic oligonucleotide
  Sense strand starting at position 234 of SEQ ID NO: 915062
ccaggaguucgagacuaug

SEQ ID NO: 1050789 - RNA, 19 nt, Artificial Sequence
  Description of Artificial Sequence: Synthetic oligonucleotide
  Antisense strand to SEQ ID NO: 1050788
cauagucucgaacuccugg

SEQ ID NO: 1050790 - RNA, 19 nt, Artificial Sequence
  Description of Artificial Sequence: Synthetic oligonucleotide
  Sense strand starting at position 363 of SEQ ID NO: 915062
acaucauagugacaaagaa

SEQ ID NO: 1050791 - RNA, 19 nt, Artificial Sequence
  Description of Artificial Sequence: Synthetic oligonucleotide
  Antisense strand to SEQ ID NO: 1050790
uucuuugucacuaugaugu

SEQ ID NO: 1050792 - RNA, 19 nt, Artificial Sequence
  Description of Artificial Sequence: Synthetic oligonucleotide
  Sense strand starting at position 525 of SEQ ID NO: 915062
ggaggcauguugccaggaa

SEQ ID NO: 1050793 - RNA, 19 nt, Artificial Sequence
  Description of Artificial Sequence: Synthetic oligonucleotide
  Antisense strand to SEQ ID NO: 1050792
uuccuggcaacaugccucc

SEQ ID NO: 1050794 - RNA, 19 nt, Artificial Sequence
  Description of Artificial Sequence: Synthetic oligonucleotide
  Sense strand starting at position 604 of SEQ ID NO: 915062
uccagaaagucuguuacau

SEQ ID NO: 1050795 - RNA, 19 nt, Artificial Sequence
  Description of Artificial Sequence: Synthetic oligonucleotide
  Antisense strand to SEQ ID NO: 1050794
auguaacagacuuucugga

SEQ ID NO: 1050796 - RNA, 19 nt, Artificial Sequence
  Description of Artificial Sequence: Synthetic oligonucleotide
  Sense strand starting at position 720 of SEQ ID NO: 915062
cauauauugggaggucuuu

SEQ ID NO: 1050797 - RNA, 19 nt, Artificial Sequence
  Description of Artificial Sequence: Synthetic oligonucleotide
  Antisense strand to SEQ ID NO: 1050796
aaagaccucccaauauaug

SEQ ID NO: 1050798 - RNA, 19 nt, Artificial Sequence
  Description of Artificial Sequence: Synthetic oligonucleotide
  Sense strand starting at position 726 of SEQ ID NO: 915062
uugggaggucuuuaucuca

SEQ ID NO: 1050799 - RNA, 19 nt, Artificial Sequence
  Description of Artificial Sequence: Synthetic oligonucleotide
  Antisense strand to SEQ ID NO: 1050798
ugagauaaagaccucccaa

SEQ ID NO: 1050800 - RNA, 19 nt, Artificial Sequence
  Description of Artificial Sequence: Synthetic oligonucleotide
  Sense strand starting at position 754 of SEQ ID NO: 915062
acagcauucccuugaguua

SEQ ID NO: 1050801 - RNA, 19 nt, Artificial Sequence
  Description of Artificial Sequence: Synthetic oligonucleotide
  Antisense strand to SEQ ID NO: 1050800
uaacucaagggaaugcugu

SEQ ID NO: 1050802 - RNA, 19 nt, Artificial Sequence
  Description of Artificial Sequence: Synthetic oligonucleotide
  Sense strand starting at position 755 of SEQ ID NO: 915062
cagcauucccuugaguuag

SEQ ID NO: 1050803 - RNA, 19 nt, Artificial Sequence
  Description of Artificial Sequence: Synthetic oligonucleotide
  Antisense strand to SEQ ID NO: 1050802
cuaacucaagggaaugcug

SEQ ID NO: 1050804 - RNA, 19 nt, Artificial Sequence
  Description of Artificial Sequence: Synthetic oligonucleotide
  Sense strand starting at position 757 of SEQ ID NO: 915062
gcauucccuugaguuagga

SEQ ID NO: 1050805 - RNA, 19 nt, Artificial Sequence
  Description of Artificial Sequence: Synthetic oligonucleotide
  Antisense strand to SEQ ID NO: 1050804
uccuaacucaagggaaugc

SEQ ID NO: 1050806 - RNA, 19 nt, Artificial Sequence
  Description of Artificial Sequence: Synthetic oligonucleotide
  Sense strand starting at position 835 of SEQ ID NO: 915062
ccucaagucgccuagcaaa

SEQ ID NO: 1050807 - RNA, 19 nt, Artificial Sequence
  Description of Artificial Sequence: Synthetic oligonucleotide
  Antisense strand to SEQ ID NO: 1050806
uuugcuaggcgacuugagg

SEQ ID NO: 1050808 - RNA, 19 nt, Artificial Sequence
  Description of Artificial Sequence: Synthetic oligonucleotide
  Sense strand starting at position 932 of SEQ ID NO: 915062
cuuuguaaacuguggaauc

SEQ ID NO: 1050809 - RNA, 19 nt, Artificial Sequence
  Description of Artificial Sequence: Synthetic oligonucleotide
  Antisense strand to SEQ ID NO: 1050808
gauuccacaguuuacaaag

SEQ ID NO: 1050810 - RNA, 19 nt, Artificial Sequence
  Description of Artificial Sequence: Synthetic oligonucleotide
  Sense strand starting at position 943 of SEQ ID NO: 915062
guggaaucgcuauaccaau

SEQ ID NO: 1050811 - RNA, 19 nt, Artificial Sequence
  Description of Artificial Sequence: Synthetic oligonucleotide
  Antisense strand to SEQ ID NO: 1050810
auugguauagcgauuccac

SEQ ID NO: 1050812 - RNA, 19 nt, Artificial Sequence
  Description of Artificial Sequence: Synthetic oligonucleotide
  Sense strand starting at position 949 of SEQ ID NO: 915062
ucgcuauaccaauauucgu

SEQ ID NO: 1050813 - RNA, 19 nt, Artificial Sequence
  Description of Artificial Sequence: Synthetic oligonucleotide
  Antisense strand to SEQ ID NO: 1050812
acgaauauugguauagcga

SEQ ID NO: 1050814 - RNA, 19 nt, Artificial Sequence
  Description of Artificial Sequence: Synthetic oligonucleotide
  Sense strand starting at position 977 of SEQ ID NO: 915062
aguuaaauaaaugggugau

SEQ ID NO: 1050815 - RNA, 19 nt, Artificial Sequence
  Description of Artificial Sequence: Synthetic oligonucleotide
  Antisense strand to SEQ ID NO: 1050814
aucacccauuuauuuaacu

SEQ ID NO: 1050816 - RNA, 19 nt, Artificial Sequence
  Description of Artificial Sequence: Synthetic oligonucleotide
  Sense strand starting at position 978 of SEQ ID NO: 915062
guuaaauaaaugggugaug

SEQ ID NO: 1050817 - RNA, 19 nt, Artificial Sequence
  Description of Artificial Sequence: Synthetic oligonucleotide
  Antisense strand to SEQ ID NO: 1050816
caucacccauuuauuuaac

SEQ ID NO: 1050818 - RNA, 19 nt, Artificial Sequence
  Description of Artificial Sequence: Synthetic oligonucleotide
  Sense strand starting at position 1035 of SEQ ID NO: 915062
ccagucgugcccugagacu

SEQ ID NO: 1050819 - RNA, 19 nt, Artificial Sequence
  Description of Artificial Sequence: Synthetic oligonucleotide
  Antisense strand to SEQ ID NO: 1050818
agucucagggcacgacugg

SEQ ID NO: 1050820 - RNA, 19 nt, Artificial Sequence
  Description of Artificial Sequence: Synthetic oligonucleotide
  Sense strand starting at position 1058 of SEQ ID NO: 915062
cuauaugacucacauuagu

SEQ ID NO: 1050821 - RNA, 19 nt, Artificial Sequence
  Description of Artificial Sequence: Synthetic oligonucleotide
  Antisense strand to SEQ ID NO: 1050820
acuaaugugagucauauag

SEQ ID NO: 1050822 - RNA, 19 nt, Artificial Sequence
  Description of Artificial Sequence: Synthetic oligonucleotide
  Sense strand starting at position 1096 of SEQ ID NO: 915062
agacuuaccuaggcagaau

SEQ ID NO: 1050823 - RNA, 19 nt, Artificial Sequence
  Description of Artificial Sequence: Synthetic oligonucleotide
  Antisense strand to SEQ ID NO: 1050822
auucugccuagguaagucu

SEQ ID NO: 1050824 - RNA, 19 nt, Artificial Sequence
  Description of Artificial Sequence: Synthetic oligonucleotide
  Sense strand starting at position 2416 of SEQ ID NO: 915062
cugaacucacuuugagaca

SEQ ID NO: 1050825 - RNA, 19 nt, Artificial Sequence
  Description of Artificial Sequence: Synthetic oligonucleotide
  Antisense strand to SEQ ID NO: 1050824
ugucucaaagugaguucag

SEQ ID NO: 1050826 - RNA, 19 nt, Artificial Sequence
  Description of Artificial Sequence: Synthetic oligonucleotide
  Sense strand starting at position 2474 of SEQ ID NO: 915062
aagcauucuuucgugcauu

SEQ ID NO: 1050827 - RNA, 19 nt, Artificial Sequence
  Description of Artificial Sequence: Synthetic oligonucleotide
  Antisense strand to SEQ ID NO: 1050826
aaugcacgaaagaaugcuu

SEQ ID NO: 1050828 - RNA, 19 nt, Artificial Sequence
  Description of Artificial Sequence: Synthetic oligonucleotide
  Sense strand starting at position 2527 of SEQ ID NO: 915062
ugacaacauguccauuagu

SEQ ID NO: 1050829 - RNA, 19 nt, Artificial Sequence
  Description of Artificial Sequence: Synthetic oligonucleotide
  Antisense strand to SEQ ID NO: 1050828
acuaauggacauguuguca

SEQ ID NO: 1050830 - RNA, 19 nt, Artificial Sequence
  Description of Artificial Sequence: Synthetic oligonucleotide
  Sense strand starting at position 2536 of SEQ ID NO: 915062
guccauuagucauccuuuc

SEQ ID NO: 1050831 - RNA, 19 nt, Artificial Sequence
  Description of Artificial Sequence: Synthetic oligonucleotide
  Antisense strand to SEQ ID NO: 1050830
gaaaggaugacuaauggac

SEQ ID NO: 1050832 - RNA, 19 nt, Artificial Sequence
  Description of Artificial Sequence: Synthetic oligonucleotide
  Sense strand starting at position 2669 of SEQ ID NO: 915062
uuggcccauuccucaagau

SEQ ID NO: 1050833 - RNA, 19 nt, Artificial Sequence
  Description of Artificial Sequence: Synthetic oligonucleotide
  Antisense strand to SEQ ID NO: 1050832
aucuugaggaaugggccaa

SEQ ID NO: 1050834 - RNA, 19 nt, Artificial Sequence
  Description of Artificial Sequence: Synthetic oligonucleotide
  Sense strand starting at position 2701 of SEQ ID NO: 915062
aaguaaugcugaccugcau

SEQ ID NO: 1050835 - RNA, 19 nt, Artificial Sequence
  Description of Artificial Sequence: Synthetic oligonucleotide
  Antisense strand to SEQ ID NO: 1050834
augcaggucagcauuacuu

SEQ ID NO: 1050836 - RNA, 19 nt, Artificial Sequence
  Description of Artificial Sequence: Synthetic oligonucleotide
  Sense strand starting at position 2773 of SEQ ID NO: 915062
uccugugcuuugccuaaua

SEQ ID NO: 1050837 - RNA, 19 nt, Artificial Sequence
  Description of Artificial Sequence: Synthetic oligonucleotide
  Antisense strand to SEQ ID NO: 1050836
uauuaggcaaagcacagga

SEQ ID NO: 1050838 - RNA, 19 nt, Artificial Sequence
  Description of Artificial Sequence: Synthetic oligonucleotide
  Sense strand starting at position 2821 of SEQ ID NO: 915062
gucagcaagccagagaauu

SEQ ID NO: 1050839 - RNA, 19 nt, Artificial Sequence
  Description of Artificial Sequence: Synthetic oligonucleotide
  Antisense strand to SEQ ID NO: 1050838
aauucucuggcuugcugac

SEQ ID NO: 1050840 - RNA, 19 nt, Artificial Sequence
  Description of Artificial Sequence: Synthetic oligonucleotide
  Sense strand starting at position 2829 of SEQ ID NO: 915062
gccagagaauucgcucucu

SEQ ID NO: 1050841 - RNA, 19 nt, Artificial Sequence
  Description of Artificial Sequence: Synthetic oligonucleotide
  Antisense strand to SEQ ID NO: 1050840
agagagcgaauucucuggc

SEQ ID NO: 1050842 - RNA, 19 nt, Artificial Sequence
  Description of Artificial Sequence: Synthetic oligonucleotide
  Sense strand starting at position 2860 of SEQ ID NO: 915062
cccuuaugccagggcguaa

SEQ ID NO: 1050843 - RNA, 19 nt, Artificial Sequence
  Description of Artificial Sequence: Synthetic oligonucleotide
  Antisense strand to SEQ ID NO: 1050842
uuacgcccuggcauaaggg

SEQ ID NO: 1050844 - RNA, 19 nt, Artificial Sequence
  Description of Artificial Sequence: Synthetic oligonucleotide
  Sense strand starting at position 2873 of SEQ ID NO: 915062
gcguaaguuccaguaaagc

SEQ ID NO: 1050845 - RNA, 19 nt, Artificial Sequence
  Description of Artificial Sequence: Synthetic oligonucleotide
  Antisense strand to SEQ ID NO: 1050844
gcuuuacuggaacuuacgc

SEQ ID NO: 1050846 - RNA, 19 nt, Artificial Sequence
  Description of Artificial Sequence: Synthetic oligonucleotide
  Sense strand starting at position 2884 of SEQ ID NO: 915062
aguaaagcauguuugggaa

SEQ ID NO: 1050847 - RNA, 19 nt, Artificial Sequence
  Description of Artificial Sequence: Synthetic oligonucleotide
  Antisense strand to SEQ ID NO: 1050846
uucccaaacaugcuuuacu

SEQ ID NO: 1050848 - RNA, 19 nt, Artificial Sequence
  Description of Artificial Sequence: Synthetic oligonucleotide
  Sense strand starting at position 2903 of SEQ ID NO: 915062
gacuauuggccuuguguca

SEQ ID NO: 1050849 - RNA, 19 nt, Artificial Sequence
  Description of Artificial Sequence: Synthetic oligonucleotide
  Antisense strand to SEQ ID NO: 1050848
ugacacaaggccaauaguc

SEQ ID NO: 1050850 - RNA, 19 nt, Artificial Sequence
  Description of Artificial Sequence: Synthetic oligonucleotide
  Sense strand starting at position 2947 of SEQ ID NO: 915062
acccauggucaguaacauu

SEQ ID NO: 1050851 - RNA, 19 nt, Artificial Sequence
  Description of Artificial Sequence: Synthetic oligonucleotide
  Antisense strand to SEQ ID NO: 1050850
aauguuacugaccaugggu

SEQ ID NO: 1050852 - RNA, 19 nt, Artificial Sequence
  Description of Artificial Sequence: Synthetic oligonucleotide
  Sense strand starting at position 2958 of SEQ ID NO: 915062
guaacauuguggccuuaga

SEQ ID NO: 1050853 - RNA, 19 nt, Artificial Sequence
  Description of Artificial Sequence: Synthetic oligonucleotide
  Antisense strand to SEQ ID NO: 1050852
ucuaaggccacaauguuac

SEQ ID NO: 1050854 - RNA, 19 nt, Artificial Sequence
  Description of Artificial Sequence: Synthetic oligonucleotide
  Sense strand starting at position 3114 of SEQ ID NO: 915062
augagauauucugauagag

SEQ ID NO: 1050855 - RNA, 19 nt, Artificial Sequence
  Description of Artificial Sequence: Synthetic oligonucleotide
  Antisense strand to SEQ ID NO: 1050854
cucuaucagaauaucucau

SEQ ID NO: 1050856 - RNA, 19 nt, Artificial Sequence
  Description of Artificial Sequence: Synthetic oligonucleotide
  Sense strand starting at position 3124 of SEQ ID NO: 915062
cugauagaggccugcaaua

SEQ ID NO: 1050857 - RNA, 19 nt, Artificial Sequence
  Description of Artificial Sequence: Synthetic oligonucleotide
  Antisense strand to SEQ ID NO: 1050856
uauugcaggccucuaucag

SEQ ID NO: 1050858 - RNA, 19 nt, Artificial Sequence
  Description of Artificial Sequence: Synthetic oligonucleotide
  Sense strand starting at position 3126 of SEQ ID NO: 915062
gauagaggccugcaauaca

SEQ ID NO: 1050859 - RNA, 19 nt, Artificial Sequence
  Description of Artificial Sequence: Synthetic oligonucleotide
  Antisense strand to SEQ ID NO: 1050858
uguauugcaggccucuauc

SEQ ID NO: 1050860 - RNA, 19 nt, Artificial Sequence
  Description of Artificial Sequence: Synthetic oligonucleotide
  Sense strand starting at position 3604 of SEQ ID NO: 915062
gcgccuggccucuaacuau

SEQ ID NO: 1050861 - RNA, 19 nt, Artificial Sequence
  Description of Artificial Sequence: Synthetic oligonucleotide
  Antisense strand to SEQ ID NO: 1050860
auaguuagaggccaggcgc

SEQ ID NO: 1050862 - RNA, 19 nt, Artificial Sequence
  Description of Artificial Sequence: Synthetic oligonucleotide
  Sense strand starting at position 3853 of SEQ ID NO: 915062
cuucuuuaugacugaauag

SEQ ID NO: 1050863 - RNA, 19 nt, Artificial Sequence
  Description of Artificial Sequence: Synthetic oligonucleotide
  Antisense strand to SEQ ID NO: 1050862
cuauucagucauaaagaag

SEQ ID NO: 1050864 - RNA, 19 nt, Artificial Sequence
  Description of Artificial Sequence: Synthetic oligonucleotide
  Sense strand starting at position 3879 of SEQ ID NO: 915062
uuauguguauuaccacauu

SEQ ID NO: 1050865 - RNA, 19 nt, Artificial Sequence
  Description of Artificial Sequence: Synthetic oligonucleotide
  Antisense strand to SEQ ID NO: 1050864
aaugugguaauacacauaa

SEQ ID NO: 1050866 - RNA, 19 nt, Artificial Sequence
  Description of Artificial Sequence: Synthetic oligonucleotide
  Sense strand starting at position 3885 of SEQ ID NO: 915062
guauuaccacauugucuuu

SEQ ID NO: 1050867 - RNA, 19 nt, Artificial Sequence
  Description of Artificial Sequence: Synthetic oligonucleotide
  Antisense strand to SEQ ID NO: 1050866
aaagacaaugugguaauac

SEQ ID NO: 1050868 - RNA, 19 nt, Artificial Sequence
  Description of Artificial Sequence: Synthetic oligonucleotide
  Sense strand starting at position 386 of SEQ ID NO: 915063
acuggaauaucaucagcca

SEQ ID NO: 1050869 - RNA, 19 nt, Artificial Sequence
  Description of Artificial Sequence: Synthetic oligonucleotide
  Antisense strand to SEQ ID NO: 1050868
uggcugaugauauuccagu

SEQ ID NO: 1050870 - RNA, 19 nt, Artificial Sequence
  Description of Artificial Sequence: Synthetic oligonucleotide
  Sense strand starting at position 389 of SEQ ID NO: 915063
ggaauaucaucagccacua

SEQ ID NO: 1050871 - RNA, 19 nt, Artificial Sequence
  Description of Artificial Sequence: Synthetic oligonucleotide
  Antisense strand to SEQ ID NO: 1050870
uaguggcugaugauauucc

SEQ ID NO: 1050872 - RNA, 19 nt, Artificial Sequence
  Description of Artificial Sequence: Synthetic oligonucleotide
  Sense strand starting at position 495 of SEQ ID NO: 915063
gcagaaauccucuggauaa

SEQ ID NO: 1050873 - RNA, 19 nt, Artificial Sequence
  Description of Artificial Sequence: Synthetic oligonucleotide
  Antisense strand to SEQ ID NO: 1050872
uuauccagaggauuucugc

SEQ ID NO: 1050874 - RNA, 19 nt, Artificial Sequence
  Description of Artificial Sequence: Synthetic oligonucleotide
  Sense strand starting at position 678 of SEQ ID NO: 915063
agcagauauuaccuuuggu

SEQ ID NO: 1050875 - RNA, 19 nt, Artificial Sequence
  Description of Artificial Sequence: Synthetic oligonucleotide
  Antisense strand to SEQ ID NO: 1050874
accaaagguaauaucugcu

SEQ ID NO: 1050876 - RNA, 19 nt, Artificial Sequence
  Description of Artificial Sequence: Synthetic oligonucleotide
  Sense strand starting at position 681 of SEQ ID NO: 915063
agauauuaccuuugguucu

SEQ ID NO: 1050877 - RNA, 19 nt, Artificial Sequence
  Description of Artificial Sequence: Synthetic oligonucleotide
  Antisense strand to SEQ ID NO: 1050876
agaaccaaagguaauaucu

SEQ ID NO: 1050878 - RNA, 19 nt, Artificial Sequence
  Description of Artificial Sequence: Synthetic oligonucleotide
  Sense strand starting at position 693 of SEQ ID NO: 915063
ugguucuugagagagucaa

SEQ ID NO: 1050879 - RNA, 19 nt, Artificial Sequence
  Description of Artificial Sequence: Synthetic oligonucleotide
  Antisense strand to SEQ ID NO: 1050878
uugacucucucaagaacca

SEQ ID NO: 1050880 - RNA, 19 nt, Artificial Sequence
  Description of Artificial Sequence: Synthetic oligonucleotide
  Sense strand starting at position 721 of SEQ ID NO: 915063
cuuguacaaguguaaauga

SEQ ID NO: 1050881 - RNA, 19 nt, Artificial Sequence
  Description of Artificial Sequence: Synthetic oligonucleotide
  Antisense strand to SEQ ID NO: 1050880
ucauuuacacuuguacaag

SEQ ID NO: 1050882 - RNA, 19 nt, Artificial Sequence
  Description of Artificial Sequence: Synthetic oligonucleotide
  Sense strand starting at position 803 of SEQ ID NO: 915063
uucuuuaaugaauggaacu

SEQ ID NO: 1050883 - RNA, 19 nt, Artificial Sequence
  Description of Artificial Sequence: Synthetic oligonucleotide
  Antisense strand to SEQ ID NO: 1050882
aguuccauucauuaaagaa

SEQ ID NO: 1050884 - RNA, 19 nt, Artificial Sequence
  Description of Artificial Sequence: Synthetic oligonucleotide
  Sense strand starting at position 821 of SEQ ID NO: 915063
ugaccaaaccuguagcaau

SEQ ID NO: 1050885 - RNA, 19 nt, Artificial Sequence
  Description of Artificial Sequence: Synthetic oligonucleotide
  Antisense strand to SEQ ID NO: 1050884
auugcuacagguuugguca

SEQ ID NO: 1050886 - RNA, 19 nt, Artificial Sequence
  Description of Artificial Sequence: Synthetic oligonucleotide
  Sense strand starting at position 833 of SEQ ID NO: 915063
uagcaaugucugccagugu

SEQ ID NO: 1050887 - RNA, 19 nt, Artificial Sequence
  Description of Artificial Sequence: Synthetic oligonucleotide
  Antisense strand to SEQ ID NO: 1050886
acacuggcagacauugcua

SEQ ID NO: 1050888 - RNA, 19 nt, Artificial Sequence
  Description of Artificial Sequence: Synthetic oligonucleotide
  Sense strand starting at position 895 of SEQ ID NO: 915063
ccaacaucugguggaggua

SEQ ID NO: 1050889 - RNA, 19 nt, Artificial Sequence
  Description of Artificial Sequence: Synthetic oligonucleotide
  Antisense strand to SEQ ID NO: 1050888
uaccuccaccagauguugg

SEQ ID NO: 1050890 - RNA, 19 nt, Artificial Sequence
  Description of Artificial Sequence: Synthetic oligonucleotide
  Sense strand starting at position 932 of SEQ ID NO: 915063
guuauacagcaagaagguu

SEQ ID NO: 1050891 - RNA, 19 nt, Artificial Sequence
  Description of Artificial Sequence: Synthetic oligonucleotide
  Antisense strand to SEQ ID NO: 1050890
aaccuucuugcuguauaac

SEQ ID NO: 1050892 - RNA, 19 nt, Artificial Sequence
  Description of Artificial Sequence: Synthetic oligonucleotide
  Sense strand starting at position 1058 of SEQ ID NO: 915063
acagguaaauucuucgaca

SEQ ID NO: 1050893 - RNA, 19 nt, Artificial Sequence
  Description of Artificial Sequence: Synthetic oligonucleotide
  Antisense strand to SEQ ID NO: 1050892
ugucgaagaauuuaccugu

SEQ ID NO: 1050894 - RNA, 19 nt, Artificial Sequence
  Description of Artificial Sequence: Synthetic oligonucleotide
  Sense strand starting at position 1059 of SEQ ID NO: 915063
cagguaaauucuucgacac

SEQ ID NO: 1050895 - RNA, 19 nt, Artificial Sequence
  Description of Artificial Sequence: Synthetic oligonucleotide
  Antisense strand to SEQ ID NO: 1050894
gugucgaagaauuuaccug

SEQ ID NO: 1050896 - RNA, 19 nt, Artificial Sequence
  Description of Artificial Sequence: Synthetic oligonucleotide
  Sense strand starting at position 1060 of SEQ ID NO: 915063
agguaaauucuucgacaca

SEQ ID NO: 1050897 - RNA, 19 nt, Artificial Sequence
  Description of Artificial Sequence: Synthetic oligonucleotide
  Antisense strand to SEQ ID NO: 1050896
ugugucgaagaauuuaccu

SEQ ID NO: 1050898 - RNA, 19 nt, Artificial Sequence
  Description of Artificial Sequence: Synthetic oligonucleotide
  Sense strand starting at position 1194 of SEQ ID NO: 915063
cuaagcauuuggguugcaa

SEQ ID NO: 1050899 - RNA, 19 nt, Artificial Sequence
  Description of Artificial Sequence: Synthetic oligonucleotide
  Antisense strand to SEQ ID NO: 1050898
uugcaacccaaaugcuuag

SEQ ID NO: 1050900 - RNA, 19 nt, Artificial Sequence
  Description of Artificial Sequence: Synthetic oligonucleotide
  Sense strand starting at position 1209 of SEQ ID NO: 915063
gcaaauagguuuccuaaau

SEQ ID NO: 1050901 - RNA, 19 nt, Artificial Sequence
  Description of Artificial Sequence: Synthetic oligonucleotide
  Antisense strand to SEQ ID NO: 1050900
auuuaggaaaccuauuugc

SEQ ID NO: 1050902 - RNA, 19 nt, Artificial Sequence
  Description of Artificial Sequence: Synthetic oligonucleotide
  Sense strand starting at position 1402 of SEQ ID NO: 915063
ucccaucaaugugcagaaa

SEQ ID NO: 1050903 - RNA, 19 nt, Artificial Sequence
  Description of Artificial Sequence: Synthetic oligonucleotide
  Antisense strand to SEQ ID NO: 1050902
uuucugcacauugauggga

SEQ ID NO: 1050904 - RNA, 19 nt, Artificial Sequence
  Description of Artificial Sequence: Synthetic oligonucleotide
  Sense strand starting at position 1473 of SEQ ID NO: 915063
uguuaucuccagcauaaag

SEQ ID NO: 1050905 - RNA, 19 nt, Artificial Sequence
  Description of Artificial Sequence: Synthetic oligonucleotide
  Antisense strand to SEQ ID NO: 1050904
cuuuaugcuggagauaaca

SEQ ID NO: 1050906 - RNA, 19 nt, Artificial Sequence
  Description of Artificial Sequence: Synthetic oligonucleotide
  Sense strand starting at position 1499 of SEQ ID NO: 915063
aguugagaauguucgaauu

SEQ ID NO: 1050907 - RNA, 19 nt, Artificial Sequence
  Description of Artificial Sequence: Synthetic oligonucleotide
  Antisense strand to SEQ ID NO: 1050906
aauucgaacauucucaacu

SEQ ID NO: 1050908 - RNA, 19 nt, Artificial Sequence
  Description of Artificial Sequence: Synthetic oligonucleotide
  Sense strand starting at position 1554 of SEQ ID NO: 915063
acgcucagagaaugaauca

SEQ ID NO: 1050909 - RNA, 19 nt, Artificial Sequence
  Description of Artificial Sequence: Synthetic oligonucleotide
  Antisense strand to SEQ ID NO: 1050908
ugauucauucucugagcgu

SEQ ID NO: 1050910 - RNA, 19 nt, Artificial Sequence
  Description of Artificial Sequence: Synthetic oligonucleotide
  Sense strand starting at position 2251 of SEQ ID NO: 915063
cucaaagagccuugguaac

SEQ ID NO: 1050911 - RNA, 19 nt, Artificial Sequence
  Description of Artificial Sequence: Synthetic oligonucleotide
  Antisense strand to SEQ ID NO: 1050910
guuaccaaggcucuuugag

SEQ ID NO: 1050912 - RNA, 19 nt, Artificial Sequence
  Description of Artificial Sequence: Synthetic oligonucleotide
  Sense strand starting at position 2473 of SEQ ID NO: 915063
gggaauuaaugguuaaagc

SEQ ID NO: 1050913 - RNA, 19 nt, Artificial Sequence
  Description of Artificial Sequence: Synthetic oligonucleotide
  Antisense strand to SEQ ID NO: 1050912
gcuuuaaccauuaauuccc

SEQ ID NO: 1050914 - RNA, 19 nt, Artificial Sequence
  Description of Artificial Sequence: Synthetic oligonucleotide
  Sense strand starting at position 2481 of SEQ ID NO: 915063
augguuaaagcugauguaa

SEQ ID NO: 1050915 - RNA, 19 nt, Artificial Sequence
  Description of Artificial Sequence: Synthetic oligonucleotide
  Antisense strand to SEQ ID NO: 1050914
uuacaucagcuuuaaccau

SEQ ID NO: 1050916 - RNA, 19 nt, Artificial Sequence
  Description of Artificial Sequence: Synthetic oligonucleotide
  Sense strand starting at position 2520 of SEQ ID NO: 915063
gguucacucuauucgggaa

SEQ ID NO: 1050917 - RNA, 19 nt, Artificial Sequence
  Description of Artificial Sequence: Synthetic oligonucleotide
  Antisense strand to SEQ ID NO: 1050916
uucccgaauagagugaacc

SEQ ID NO: 1050918 - RNA, 19 nt, Artificial Sequence
  Description of Artificial Sequence: Synthetic oligonucleotide
  Sense strand starting at position 2594 of SEQ ID NO: 915063
guaccagagguccagugaa

SEQ ID NO: 1050919 - RNA, 19 nt, Artificial Sequence
  Description of Artificial Sequence: Synthetic oligonucleotide
  Antisense strand to SEQ ID NO: 1050918
uucacuggaccucugguac

SEQ ID NO: 1050920 - RNA, 19 nt, Artificial Sequence
  Description of Artificial Sequence: Synthetic oligonucleotide
  Sense strand starting at position 2733 of SEQ ID NO: 915063
ccaauaaagguuuguuaaa

SEQ ID NO: 1050921 - RNA, 19 nt, Artificial Sequence
  Description of Artificial Sequence: Synthetic oligonucleotide
  Antisense strand to SEQ ID NO: 1050920
uuuaacaaaccuuuauugg

SEQ ID NO: 1050922 - RNA, 19 nt, Artificial Sequence
  Description of Artificial Sequence: Synthetic oligonucleotide
  Sense strand starting at position 2946 of SEQ ID NO: 915063
acugauuaaugauugcagu

SEQ ID NO: 1050923 - RNA, 19 nt, Artificial Sequence
  Description of Artificial Sequence: Synthetic oligonucleotide
  Antisense strand to SEQ ID NO: 1050922
acugcaaucauuaaucagu

SEQ ID NO: 1050924 - RNA, 19 nt, Artificial Sequence
  Description of Artificial Sequence: Synthetic oligonucleotide
  Sense strand starting at position 2993 of SEQ ID NO: 915063
auaucaagucccuguuaga

SEQ ID NO: 1050925 - RNA, 19 nt, Artificial Sequence
  Description of Artificial Sequence: Synthetic oligonucleotide
  Antisense strand to SEQ ID NO: 1050924
ucuaacagggacuugauau

SEQ ID NO: 1050926 - RNA, 19 nt, Artificial Sequence
  Description of Artificial Sequence: Synthetic oligonucleotide
  Sense strand starting at position 3064 of SEQ ID NO: 915063
ccagaaagcuguccuaaau

SEQ ID NO: 1050927 - RNA, 19 nt, Artificial Sequence
  Description of Artificial Sequence: Synthetic oligonucleotide
  Antisense strand to SEQ ID NO: 1050926
auuuaggacagcuuucugg

SEQ ID NO: 1050928 - RNA, 19 nt, Artificial Sequence
  Description of Artificial Sequence: Synthetic oligonucleotide
  Sense strand starting at position 3096 of SEQ ID NO: 915063
gagagcauauuguuuauaa

SEQ ID NO: 1050929 - RNA, 19 nt, Artificial Sequence
  Description of Artificial Sequence: Synthetic oligonucleotide
  Antisense strand to SEQ ID NO: 1050928
uuauaaacaauaugcucuc

SEQ ID NO: 1050930 - RNA, 19 nt, Artificial Sequence
  Description of Artificial Sequence: Synthetic oligonucleotide
  Sense strand starting at position 3125 of SEQ ID NO: 915063
guucuuucugaccauguga

SEQ ID NO: 1050931 - RNA, 19 nt, Artificial Sequence
  Description of Artificial Sequence: Synthetic oligonucleotide
  Antisense strand to SEQ ID NO: 1050930
ucacauggucagaaagaac

SEQ ID NO: 1050932 - RNA, 19 nt, Artificial Sequence
  Description of Artificial Sequence: Synthetic oligonucleotide
  Sense strand starting at position 3204 of SEQ ID NO: 915063
agucaaauucugggaugca

SEQ ID NO: 1050933 - RNA, 19 nt, Artificial Sequence
  Description of Artificial Sequence: Synthetic oligonucleotide
  Antisense strand to SEQ ID NO: 1050932
ugcaucccagaauuugacu

SEQ ID NO: 1050934 - RNA, 19 nt, Artificial Sequence
  Description of Artificial Sequence: Synthetic oligonucleotide
  Sense strand starting at position 3261 of SEQ ID NO: 915063
ggagguucauuggcagaau

SEQ ID NO: 1050935 - RNA, 19 nt, Artificial Sequence
  Description of Artificial Sequence: Synthetic oligonucleotide
  Antisense strand to SEQ ID NO: 1050934
auucugccaaugaaccucc

SEQ ID NO: 1050936 - RNA, 19 nt, Artificial Sequence
  Description of Artificial Sequence: Synthetic oligonucleotide
  Sense strand starting at position 3274 of SEQ ID NO: 915063
cagaauagguucuugucau

SEQ ID NO: 1050937 - RNA, 19 nt, Artificial Sequence
  Description of Artificial Sequence: Synthetic oligonucleotide
  Antisense strand to SEQ ID NO: 1050936
augacaagaaccuauucug

SEQ ID NO: 1050938 - RNA, 19 nt, Artificial Sequence
  Description of Artificial Sequence: Synthetic oligonucleotide
  Sense strand starting at position 3281 of SEQ ID NO: 915063
gguucuugucaugaguuga

SEQ ID NO: 1050939 - RNA, 19 nt, Artificial Sequence
  Description of Artificial Sequence: Synthetic oligonucleotide
  Antisense strand to SEQ ID NO: 1050938
ucaacucaugacaagaacc

SEQ ID NO: 1050940 - RNA, 19 nt, Artificial Sequence
  Description of Artificial Sequence: Synthetic oligonucleotide
  Sense strand starting at position 3285 of SEQ ID NO: 915063
cuugucaugaguugagaag

SEQ ID NO: 1050941 - RNA, 19 nt, Artificial Sequence
  Description of Artificial Sequence: Synthetic oligonucleotide
  Antisense strand to SEQ ID NO: 1050940
cuucucaacucaugacaag

SEQ ID NO: 1050942 - RNA, 19 nt, Artificial Sequence
  Description of Artificial Sequence: Synthetic oligonucleotide
  Sense strand starting at position 3294 of SEQ ID NO: 915063
aguugagaagcgugaaaca

SEQ ID NO: 1050943 - RNA, 19 nt, Artificial Sequence
  Description of Artificial Sequence: Synthetic oligonucleotide
  Antisense strand to SEQ ID NO: 1050942
uguuucacgcuucucaacu

SEQ ID NO: 1050944 - RNA, 19 nt, Artificial Sequence
  Description of Artificial Sequence: Synthetic oligonucleotide
  Sense strand starting at position 3502 of SEQ ID NO: 915063
gcguguuagcacucucacu

SEQ ID NO: 1050945 - RNA, 19 nt, Artificial Sequence
  Description of Artificial Sequence: Synthetic oligonucleotide
  Antisense strand to SEQ ID NO: 1050944
agugagagugcuaacacgc

SEQ ID NO: 1050946 - RNA, 19 nt, Artificial Sequence
  Description of Artificial Sequence: Synthetic oligonucleotide
  Sense strand starting at position 3879 of SEQ ID NO: 915063
agguaaugaaacuggguuu

SEQ ID NO: 1050947 - RNA, 19 nt, Artificial Sequence
  Description of Artificial Sequence: Synthetic oligonucleotide
  Antisense strand to SEQ ID NO: 1050946
aaacccaguuucauuaccu

SEQ ID NO: 1050948 - RNA, 19 nt, Artificial Sequence
  Description of Artificial Sequence: Synthetic oligonucleotide
  Sense strand starting at position 22 of SEQ ID NO: 915064
ggauuaguggcuuagggac

SEQ ID NO: 1050949 - RNA, 19 nt, Artificial Sequence
  Description of Artificial Sequence: Synthetic oligonucleotide
  Antisense strand to SEQ ID NO: 1050948
gucccuaagccacuaaucc

SEQ ID NO: 1050950 - RNA, 19 nt, Artificial Sequence
  Description of Artificial Sequence: Synthetic oligonucleotide
  Sense strand starting at position 214 of SEQ ID NO: 915064
uugggauugggcuauucuu

SEQ ID NO: 1050951 - RNA, 19 nt, Artificial Sequence
  Description of Artificial Sequence: Synthetic oligonucleotide
  Antisense strand to SEQ ID NO: 1050950
aagaauagcccaaucccaa

SEQ ID NO: 1050952 - RNA, 19 nt, Artificial Sequence
  Description of Artificial Sequence: Synthetic oligonucleotide
  Sense strand starting at position 656 of SEQ ID NO: 915064
ccucauugucaauggcaga

SEQ ID NO: 1050953 - RNA, 19 nt, Artificial Sequence
  Description of Artificial Sequence: Synthetic oligonucleotide
  Antisense strand to SEQ ID NO: 1050952
ucugccauugacaaugagg

SEQ ID NO: 1050954 - RNA, 19 nt, Artificial Sequence
  Description of Artificial Sequence: Synthetic oligonucleotide
  Sense strand starting at position 785 of SEQ ID NO: 915064
ugcacuuuagacugaaauu

SEQ ID NO: 1050955 - RNA, 19 nt, Artificial Sequence
  Description of Artificial Sequence: Synthetic oligonucleotide
  Antisense strand to SEQ ID NO: 1050954
aauuucagucuaaagugca

SEQ ID NO: 1050956 - RNA, 19 nt, Artificial Sequence
  Description of Artificial Sequence: Synthetic oligonucleotide
  Sense strand starting at position 853 of SEQ ID NO: 915064
gucuuaacaggucauaagu

SEQ ID NO: 1050957 - RNA, 19 nt, Artificial Sequence
  Description of Artificial Sequence: Synthetic oligonucleotide
  Antisense strand to SEQ ID NO: 1050956
acuuaugaccuguuaagac

SEQ ID NO: 1050958 - RNA, 19 nt, Artificial Sequence
  Description of Artificial Sequence: Synthetic oligonucleotide
  Sense strand starting at position 862 of SEQ ID NO: 915064
ggucauaaguuucccuuga

SEQ ID NO: 1050959 - RNA, 19 nt, Artificial Sequence
  Description of Artificial Sequence: Synthetic oligonucleotide
  Antisense strand to SEQ ID NO: 1050958
ucaagggaaacuuaugacc

SEQ ID NO: 1050960 - RNA, 19 nt, Artificial Sequence
  Description of Artificial Sequence: Synthetic oligonucleotide
  Sense strand starting at position 863 of SEQ ID NO: 915064
gucauaaguuucccuugaa

SEQ ID NO: 1050961 - RNA, 19 nt, Artificial Sequence
  Description of Artificial Sequence: Synthetic oligonucleotide
  Antisense strand to SEQ ID NO: 1050960
uucaagggaaacuuaugac

SEQ ID NO: 1050962 - RNA, 19 nt, Artificial Sequence
  Description of Artificial Sequence: Synthetic oligonucleotide
  Sense strand starting at position 1037 of SEQ ID NO: 915064
ugaaauuacuaggcagcaa

SEQ ID NO: 1050963 - RNA, 19 nt, Artificial Sequence
  Description of Artificial Sequence: Synthetic oligonucleotide
  Antisense strand to SEQ ID NO: 1050962
uugcugccuaguaauuuca

SEQ ID NO: 1050964 - RNA, 19 nt, Artificial Sequence
  Description of Artificial Sequence: Synthetic oligonucleotide
  Sense strand starting at position 1147 of SEQ ID NO: 915064
uuuacaacagucugaauga

SEQ ID NO: 1050965 - RNA, 19 nt, Artificial Sequence
  Description of Artificial Sequence: Synthetic oligonucleotide
  Antisense strand to SEQ ID NO: 1050964
ucauucagacuguuguaaa

SEQ ID NO: 1050966 - RNA, 19 nt, Artificial Sequence
  Description of Artificial Sequence: Synthetic oligonucleotide
  Sense strand starting at position 1242 of SEQ ID NO: 915064
uacugucaauggcugaaua

SEQ ID NO: 1050967 - RNA, 19 nt, Artificial Sequence
  Description of Artificial Sequence: Synthetic oligonucleotide
  Antisense strand to SEQ ID NO: 1050966
uauucagccauugacagua

SEQ ID NO: 1050968 - RNA, 19 nt, Artificial Sequence
  Description of Artificial Sequence: Synthetic oligonucleotide
  Sense strand starting at position 1243 of SEQ ID NO: 915064
acugucaauggcugaauau

SEQ ID NO: 1050969 - RNA, 19 nt, Artificial Sequence
  Description of Artificial Sequence: Synthetic oligonucleotide
  Antisense strand to SEQ ID NO: 1050968
auauucagccauugacagu

SEQ ID NO: 1050970 - RNA, 19 nt, Artificial Sequence
  Description of Artificial Sequence: Synthetic oligonucleotide
  Sense strand starting at position 1244 of SEQ ID NO: 915064
cugucaauggcugaauaua

SEQ ID NO: 1050971 - RNA, 19 nt, Artificial Sequence
  Description of Artificial Sequence: Synthetic oligonucleotide
  Antisense strand to SEQ ID NO: 1050970
uauauucagccauugacag

SEQ ID NO: 1050972 - RNA, 19 nt, Artificial Sequence
  Description of Artificial Sequence: Synthetic oligonucleotide
  Sense strand starting at position 1690 of SEQ ID NO: 915064
ugucauuccuuccuugaga

SEQ ID NO: 1050973 - RNA, 19 nt, Artificial Sequence
  Description of Artificial Sequence: Synthetic oligonucleotide
  Antisense strand to SEQ ID NO: 1050972
ucucaaggaaggaaugaca

SEQ ID NO: 1050974 - RNA, 19 nt, Artificial Sequence
  Description of Artificial Sequence: Synthetic oligonucleotide
  Sense strand starting at position 1692 of SEQ ID NO: 915064
ucauuccuuccuugagaag

SEQ ID NO: 1050975 - RNA, 19 nt, Artificial Sequence
  Description of Artificial Sequence: Synthetic oligonucleotide
  Antisense strand to SEQ ID NO: 1050974
cuucucaaggaaggaauga

SEQ ID NO: 1050976 - RNA, 19 nt, Artificial Sequence
  Description of Artificial Sequence: Synthetic oligonucleotide
  Sense strand starting at position 1699 of SEQ ID NO: 915064
uuccuugagaaguggaauu

SEQ ID NO: 1050977 - RNA, 19 nt, Artificial Sequence
  Description of Artificial Sequence: Synthetic oligonucleotide
  Antisense strand to SEQ ID NO: 1050976
aauuccacuucucaaggaa

SEQ ID NO: 1050978 - RNA, 19 nt, Artificial Sequence
  Description of Artificial Sequence: Synthetic oligonucleotide
  Sense strand starting at position 1733 of SEQ ID NO: 915064
uuaguuugggcugauccaa

SEQ ID NO: 1050979 - RNA, 19 nt, Artificial Sequence
  Description of Artificial Sequence: Synthetic oligonucleotide
  Antisense strand to SEQ ID NO: 1050978
uuggaucagcccaaacuaa

SEQ ID NO: 1050980 - RNA, 19 nt, Artificial Sequence
  Description of Artificial Sequence: Synthetic oligonucleotide
  Sense strand starting at position 1741 of SEQ ID NO: 915064
ggcugauccaaugauuguu

SEQ ID NO: 1050981 - RNA, 19 nt, Artificial Sequence
  Description of Artificial Sequence: Synthetic oligonucleotide
  Antisense strand to SEQ ID NO: 1050980
aacaaucauuggaucagcc

SEQ ID NO: 1050982 - RNA, 19 nt, Artificial Sequence
  Description of Artificial Sequence: Synthetic oligonucleotide
  Sense strand starting at position 1780 of SEQ ID NO: 915064
guagaagcccuauguaaua

SEQ ID NO: 1050983 - RNA, 19 nt, Artificial Sequence
  Description of Artificial Sequence: Synthetic oligonucleotide
  Antisense strand to SEQ ID NO: 1050982
uauuacauagggcuucuac

SEQ ID NO: 1050984 - RNA, 19 nt, Artificial Sequence
  Description of Artificial Sequence: Synthetic oligonucleotide
  Sense strand starting at position 1900 of SEQ ID NO: 915064
agacgauguaaaggaguaa

SEQ ID NO: 1050985 - RNA, 19 nt, Artificial Sequence
  Description of Artificial Sequence: Synthetic oligonucleotide
  Antisense strand to SEQ ID NO: 1050984
uuacuccuuuacaucgucu

SEQ ID NO: 1050986 - RNA, 19 nt, Artificial Sequence
  Description of Artificial Sequence: Synthetic oligonucleotide
  Sense strand starting at position 2084 of SEQ ID NO: 915064
ggaccuaauugauagagaa

SEQ ID NO: 1050987 - RNA, 19 nt, Artificial Sequence
  Description of Artificial Sequence: Synthetic oligonucleotide
  Antisense strand to SEQ ID NO: 1050986
uucucuaucaauuaggucc

SEQ ID NO: 1050988 - RNA, 19 nt, Artificial Sequence
  Description of Artificial Sequence: Synthetic oligonucleotide
  Sense strand starting at position 2138 of SEQ ID NO: 915064
cugugacugacacgaguaa

SEQ ID NO: 1050989 - RNA, 19 nt, Artificial Sequence
  Description of Artificial Sequence: Synthetic oligonucleotide
  Antisense strand to SEQ ID NO: 1050988
uuacucgugucagucacag

SEQ ID NO: 1050990 - RNA, 19 nt, Artificial Sequence
  Description of Artificial Sequence: Synthetic oligonucleotide
  Sense strand starting at position 2139 of SEQ ID NO: 915064
ugugacugacacgaguaau

SEQ ID NO: 1050991 - RNA, 19 nt, Artificial Sequence
  Description of Artificial Sequence: Synthetic oligonucleotide
  Antisense strand to SEQ ID NO: 1050990
auuacucgugucagucaca

SEQ ID NO: 1050992 - RNA, 19 nt, Artificial Sequence
  Description of Artificial Sequence: Synthetic oligonucleotide
  Sense strand starting at position 2150 of SEQ ID NO: 915064
cgaguaauccagcacuuug

SEQ ID NO: 1050993 - RNA, 19 nt, Artificial Sequence
  Description of Artificial Sequence: Synthetic oligonucleotide
  Antisense strand to SEQ ID NO: 1050992
caaagugcuggauuacucg

SEQ ID NO: 1050994 - RNA, 19 nt, Artificial Sequence
  Description of Artificial Sequence: Synthetic oligonucleotide
  Sense strand starting at position 2374 of SEQ ID NO: 915064
gcugucagaggcgaucaaa

SEQ ID NO: 1050995 - RNA, 19 nt, Artificial Sequence
  Description of Artificial Sequence: Synthetic oligonucleotide
  Antisense strand to SEQ ID NO: 1050994
uuugaucgccucugacagc

SEQ ID NO: 1050996 - RNA, 19 nt, Artificial Sequence
  Description of Artificial Sequence: Synthetic oligonucleotide
  Sense strand starting at position 2469 of SEQ ID NO: 915064
uucuuaguugcagaugagu

SEQ ID NO: 1050997 - RNA, 19 nt, Artificial Sequence
  Description of Artificial Sequence: Synthetic oligonucleotide
  Antisense strand to SEQ ID NO: 1050996
acucaucugcaacuaagaa

SEQ ID NO: 1050998 - RNA, 19 nt, Artificial Sequence
  Description of Artificial Sequence: Synthetic oligonucleotide
  Sense strand starting at position 2512 of SEQ ID NO: 915064
gcacaaagaccuugcugau

SEQ ID NO: 1050999 - RNA, 19 nt, Artificial Sequence
  Description of Artificial Sequence: Synthetic oligonucleotide
  Antisense strand to SEQ ID NO: 1050998
aucagcaaggucuuugugc

SEQ ID NO: 1051000 - RNA, 19 nt, Artificial Sequence
  Description of Artificial Sequence: Synthetic oligonucleotide
  Sense strand starting at position 2924 of SEQ ID NO: 915064
ggagucauagaguguguga

SEQ ID NO: 1051001 - RNA, 19 nt, Artificial Sequence
  Description of Artificial Sequence: Synthetic oligonucleotide
  Antisense strand to SEQ ID NO: 1051000
ucacacacucuaugacucc

SEQ ID NO: 1051002 - RNA, 19 nt, Artificial Sequence
  Description of Artificial Sequence: Synthetic oligonucleotide
  Sense strand starting at position 2926 of SEQ ID NO: 915064
agucauagagugugugaga

SEQ ID NO: 1051003 - RNA, 19 nt, Artificial Sequence
  Description of Artificial Sequence: Synthetic oligonucleotide
  Antisense strand to SEQ ID NO: 1051002
ucucacacacucuaugacu

SEQ ID NO: 1051004 - RNA, 19 nt, Artificial Sequence
  Description of Artificial Sequence: Synthetic oligonucleotide
  Sense strand starting at position 3108 of SEQ ID NO: 915064
agaaaugcuugacuuaaau

SEQ ID NO: 1051005 - RNA, 19 nt, Artificial Sequence
  Description of Artificial Sequence: Synthetic oligonucleotide
  Antisense strand to SEQ ID NO: 1051004
auuuaagucaagcauuucu

SEQ ID NO: 1051006 - RNA, 19 nt, Artificial Sequence
  Description of Artificial Sequence: Synthetic oligonucleotide
  Sense strand starting at position 3179 of SEQ ID NO: 915064
cucaguaaauuauuaaggu

SEQ ID NO: 1051007 - RNA, 19 nt, Artificial Sequence
  Description of Artificial Sequence: Synthetic oligonucleotide
  Antisense strand to SEQ ID NO: 1051006
accuuaauaauuuacugag

SEQ ID NO: 1051008 - RNA, 19 nt, Artificial Sequence
  Description of Artificial Sequence: Synthetic oligonucleotide
  Sense strand starting at position 3242 of SEQ ID NO: 915064
cuuugauaucagugagaac

SEQ ID NO: 1051009 - RNA, 19 nt, Artificial Sequence
  Description of Artificial Sequence: Synthetic oligonucleotide
  Antisense strand to SEQ ID NO: 1051008
guucucacugauaucaaag

SEQ ID NO: 1051010 - RNA, 19 nt, Artificial Sequence
  Description of Artificial Sequence: Synthetic oligonucleotide
  Sense strand starting at position 3249 of SEQ ID NO: 915064
aucagugagaacugguuua

SEQ ID NO: 1051011 - RNA, 19 nt, Artificial Sequence
  Description of Artificial Sequence: Synthetic oligonucleotide
  Antisense strand to SEQ ID NO: 1051010
uaaaccaguucucacugau

SEQ ID NO: 1051012 - RNA, 19 nt, Artificial Sequence
  Description of Artificial Sequence: Synthetic oligonucleotide
  Sense strand starting at position 3292 of SEQ ID NO: 915064
augacuuuaggccagguau

SEQ ID NO: 1051013 - RNA, 19 nt, Artificial Sequence
  Description of Artificial Sequence: Synthetic oligonucleotide
  Antisense strand to SEQ ID NO: 1051012
auaccuggccuaaagucau

SEQ ID NO: 1051014 - RNA, 19 nt, Artificial Sequence
  Description of Artificial Sequence: Synthetic oligonucleotide
  Sense strand starting at position 3294 of SEQ ID NO: 915064
gacuuuaggccagguauua

SEQ ID NO: 1051015 - RNA, 19 nt, Artificial Sequence
  Description of Artificial Sequence: Synthetic oligonucleotide
  Antisense strand to SEQ ID NO: 1051014
uaauaccuggccuaaaguc

SEQ ID NO: 1051016 - RNA, 19 nt, Artificial Sequence
  Description of Artificial Sequence: Synthetic oligonucleotide
  Sense strand starting at position 3528 of SEQ ID NO: 915064
ccacauuguaggcgaauuu

SEQ ID NO: 1051017 - RNA, 19 nt, Artificial Sequence
  Description of Artificial Sequence: Synthetic oligonucleotide
  Antisense strand to SEQ ID NO: 1051016
aaauucgccuacaaugugg

SEQ ID NO: 1051018 - RNA, 19 nt, Artificial Sequence
  Description of Artificial Sequence: Synthetic oligonucleotide
  Sense strand starting at position 3569 of SEQ ID NO: 915064
ucaguuauauauguuccca

SEQ ID NO: 1051019 - RNA, 19 nt, Artificial Sequence
  Description of Artificial Sequence: Synthetic oligonucleotide
  Antisense strand to SEQ ID NO: 1051018
ugggaacauauauaacuga

SEQ ID NO: 1051020 - RNA, 19 nt, Artificial Sequence
  Description of Artificial Sequence: Synthetic oligonucleotide
  Sense strand starting at position 3571 of SEQ ID NO: 915064
aguuauauauguucccauc

SEQ ID NO: 1051021 - RNA, 19 nt, Artificial Sequence
  Description of Artificial Sequence: Synthetic oligonucleotide
  Antisense strand to SEQ ID NO: 1051020
gaugggaacauauauaacu

SEQ ID NO: 1051022 - RNA, 19 nt, Artificial Sequence
  Description of Artificial Sequence: Synthetic oligonucleotide
  Sense strand starting at position 3743 of SEQ ID NO: 915064
uguggauaccaaugaauuc

SEQ ID NO: 1051023 - RNA, 19 nt, Artificial Sequence
  Description of Artificial Sequence: Synthetic oligonucleotide
  Antisense strand to SEQ ID NO: 1051022
gaauucauugguauccaca

SEQ ID NO: 1051024 - RNA, 19 nt, Artificial Sequence
  Description of Artificial Sequence: Synthetic oligonucleotide
  Sense strand starting at position 3754 of SEQ ID NO: 915064
augaauuccgcuugaauaa

SEQ ID NO: 1051025 - RNA, 19 nt, Artificial Sequence
  Description of Artificial Sequence: Synthetic oligonucleotide
  Antisense strand to SEQ ID NO: 1051024
uuauucaagcggaauucau

SEQ ID NO: 1051026 - RNA, 19 nt, Artificial Sequence
  Description of Artificial Sequence: Synthetic oligonucleotide
  Sense strand starting at position 3755 of SEQ ID NO: 915064
ugaauuccgcuugaauaaa

SEQ ID NO: 1051027 - RNA, 19 nt, Artificial Sequence
  Description of Artificial Sequence: Synthetic oligonucleotide
  Antisense strand to SEQ ID NO: 1051026
uuuauucaagcggaauuca

SEQ ID NO: 1051028 - RNA, 19 nt, Artificial Sequence
  Description of Artificial Sequence: Synthetic oligonucleotide
  Sense strand starting at position 4 of SEQ ID NO: 915065
ucaagacaguuccuggauu

SEQ ID NO: 1051029 - RNA, 19 nt, Artificial Sequence
  Description of Artificial Sequence: Synthetic oligonucleotide
  Antisense strand to SEQ ID NO: 1051028
aauccaggaacugucuuga

SEQ ID NO: 1051030 - RNA, 19 nt, Artificial Sequence
  Description of Artificial Sequence: Synthetic oligonucleotide
  Sense strand starting at position 42 of SEQ ID NO: 915065
augaaauggguuuagcuuu

SEQ ID NO: 1051031 - RNA, 19 nt, Artificial Sequence
  Description of Artificial Sequence: Synthetic oligonucleotide
  Antisense strand to SEQ ID NO: 1051030
aaagcuaaacccauuucau

SEQ ID NO: 1051032 - RNA, 19 nt, Artificial Sequence
  Description of Artificial Sequence: Synthetic oligonucleotide
  Sense strand starting at position 48 of SEQ ID NO: 915065
uggguuuagcuuuacagac

SEQ ID NO: 1051033 - RNA, 19 nt, Artificial Sequence
  Description of Artificial Sequence: Synthetic oligonucleotide
  Antisense strand to SEQ ID NO: 1051032
gucuguaaagcuaaaccca

SEQ ID NO: 1051034 - RNA, 19 nt, Artificial Sequence
  Description of Artificial Sequence: Synthetic oligonucleotide
  Sense strand starting at position 112 of SEQ ID NO: 915065
uaaagugugugaucaacag

SEQ ID NO: 1051035 - RNA, 19 nt, Artificial Sequence
  Description of Artificial Sequence: Synthetic oligonucleotide
  Antisense strand to SEQ ID NO: 1051034
cuguugaucacacacuuua

SEQ ID NO: 1051036 - RNA, 19 nt, Artificial Sequence
  Description of Artificial Sequence: Synthetic oligonucleotide
  Sense strand starting at position 116 of SEQ ID NO: 915065
gugugugaucaacagauua

SEQ ID NO: 1051037 - RNA, 19 nt, Artificial Sequence
  Description of Artificial Sequence: Synthetic oligonucleotide
  Antisense strand to SEQ ID NO: 1051036
uaaucuguugaucacacac

SEQ ID NO: 1051038 - RNA, 19 nt, Artificial Sequence
  Description of Artificial Sequence: Synthetic oligonucleotide
  Sense strand starting at position 287 of SEQ ID NO: 915065
gaauuugucugagcucguc

SEQ ID NO: 1051039 - RNA, 19 nt, Artificial Sequence
  Description of Artificial Sequence: Synthetic oligonucleotide
  Antisense strand to SEQ ID NO: 1051038
gacgagcucagacaaauuc

SEQ ID NO: 1051040 - RNA, 19 nt, Artificial Sequence
  Description of Artificial Sequence: Synthetic oligonucleotide
  Sense strand starting at position 973 of SEQ ID NO: 915065
acuggaauaucaucagcca

SEQ ID NO: 1051041 - RNA, 19 nt, Artificial Sequence
  Description of Artificial Sequence: Synthetic oligonucleotide
  Antisense strand to SEQ ID NO: 1051040
uggcugaugauauuccagu

SEQ ID NO: 1051042 - RNA, 19 nt, Artificial Sequence
  Description of Artificial Sequence: Synthetic oligonucleotide
  Sense strand starting at position 976 of SEQ ID NO: 915065
ggaauaucaucagccacua

SEQ ID NO: 1051043 - RNA, 19 nt, Artificial Sequence
  Description of Artificial Sequence: Synthetic oligonucleotide
  Antisense strand to SEQ ID NO: 1051042
uaguggcugaugauauucc

SEQ ID NO: 1051044 - RNA, 19 nt, Artificial Sequence
  Description of Artificial Sequence: Synthetic oligonucleotide
  Sense strand starting at position 1082 of SEQ ID NO: 915065
gcagaaauccucuggauaa

SEQ ID NO: 1051045 - RNA, 19 nt, Artificial Sequence
  Description of Artificial Sequence: Synthetic oligonucleotide
  Antisense strand to SEQ ID NO: 1051044
uuauccagaggauuucugc

SEQ ID NO: 1051046 - RNA, 19 nt, Artificial Sequence
  Description of Artificial Sequence: Synthetic oligonucleotide
  Sense strand starting at position 1268 of SEQ ID NO: 915065
agauauuaccuuugguucu

SEQ ID NO: 1051047 - RNA, 19 nt, Artificial Sequence
  Description of Artificial Sequence: Synthetic oligonucleotide
  Antisense strand to SEQ ID NO: 1051046
agaaccaaagguaauaucu

SEQ ID NO: 1051048 - RNA, 19 nt, Artificial Sequence
  Description of Artificial Sequence: Synthetic oligonucleotide
  Sense strand starting at position 1280 of SEQ ID NO: 915065
ugguucuugagagagucaa

SEQ ID NO: 1051049 - RNA, 19 nt, Artificial Sequence
  Description of Artificial Sequence: Synthetic oligonucleotide
  Antisense strand to SEQ ID NO: 1051048
uugacucucucaagaacca

SEQ ID NO: 1051050 - RNA, 19 nt, Artificial Sequence
  Description of Artificial Sequence: Synthetic oligonucleotide
  Sense strand starting at position 1308 of SEQ ID NO: 915065
cuuguacaaguguaaauga

SEQ ID NO: 1051051 - RNA, 19 nt, Artificial Sequence
  Description of Artificial Sequence: Synthetic oligonucleotide
  Antisense strand to SEQ ID NO: 1051050
ucauuuacacuuguacaag

SEQ ID NO: 1051052 - RNA, 19 nt, Artificial Sequence
  Description of Artificial Sequence: Synthetic oligonucleotide
  Sense strand starting at position 1390 of SEQ ID NO: 915065
uucuuuaaugaauggaacu

SEQ ID NO: 1051053 - RNA, 19 nt, Artificial Sequence
  Description of Artificial Sequence: Synthetic oligonucleotide
  Antisense strand to SEQ ID NO: 1051052
aguuccauucauuaaagaa

SEQ ID NO: 1051054 - RNA, 19 nt, Artificial Sequence
  Description of Artificial Sequence: Synthetic oligonucleotide
  Sense strand starting at position 1408 of SEQ ID NO: 915065
ugaccaaaccuguagcaau

SEQ ID NO: 1051055 - RNA, 19 nt, Artificial Sequence
  Description of Artificial Sequence: Synthetic oligonucleotide
  Antisense strand to SEQ ID NO: 1051054
auugcuacagguuugguca

SEQ ID NO: 1051056 - RNA, 19 nt, Artificial Sequence
  Description of Artificial Sequence: Synthetic oligonucleotide
  Sense strand starting at position 1420 of SEQ ID NO: 915065
uagcaaugucugccagugu

SEQ ID NO: 1051057 - RNA, 19 nt, Artificial Sequence
  Description of Artificial Sequence: Synthetic oligonucleotide
  Antisense strand to SEQ ID NO: 1051056
acacuggcagacauugcua

SEQ ID NO: 1051058 - RNA, 19 nt, Artificial Sequence
  Description of Artificial Sequence: Synthetic oligonucleotide
  Sense strand starting at position 1482 of SEQ ID NO: 915065
ccaacaucugguggaggua

SEQ ID NO: 1051059 - RNA, 19 nt, Artificial Sequence
  Description of Artificial Sequence: Synthetic oligonucleotide
  Antisense strand to SEQ ID NO: 1051058
uaccuccaccagauguugg

SEQ ID NO: 1051060 - RNA, 19 nt, Artificial Sequence
  Description of Artificial Sequence: Synthetic oligonucleotide
  Sense strand starting at position 1519 of SEQ ID NO: 915065
guuauacagcaagaagguu

SEQ ID NO: 1051061 - RNA, 19 nt, Artificial Sequence
  Description of Artificial Sequence: Synthetic oligonucleotide
  Antisense strand to SEQ ID NO: 1051060
aaccuucuugcuguauaac

SEQ ID NO: 1051062 - RNA, 19 nt, Artificial Sequence
  Description of Artificial Sequence: Synthetic oligonucleotide
  Sense strand starting at position 1645 of SEQ ID NO: 915065
acagguaaauucuucgaca

SEQ ID NO: 1051063 - RNA, 19 nt, Artificial Sequence
  Description of Artificial Sequence: Synthetic oligonucleotide
  Antisense strand to SEQ ID NO: 1051062
ugucgaagaauuuaccugu

SEQ ID NO: 1051064 - RNA, 19 nt, Artificial Sequence
  Description of Artificial Sequence: Synthetic oligonucleotide
  Sense strand starting at position 1646 of SEQ ID NO: 915065
cagguaaauucuucgacac

SEQ ID NO: 1051065 - RNA, 19 nt, Artificial Sequence
  Description of Artificial Sequence: Synthetic oligonucleotide
  Antisense strand to SEQ ID NO: 1051064
gugucgaagaauuuaccug

SEQ ID NO: 1051066 - RNA, 19 nt, Artificial Sequence
  Description of Artificial Sequence: Synthetic oligonucleotide
  Sense strand starting at position 1647 of SEQ ID NO: 915065
agguaaauucuucgacaca

SEQ ID NO: 1051067 - RNA, 19 nt, Artificial Sequence
  Description of Artificial Sequence: Synthetic oligonucleotide
  Antisense strand to SEQ ID NO: 1051066
ugugucgaagaauuuaccu

SEQ ID NO: 1051068 - RNA, 19 nt, Artificial Sequence
  Description of Artificial Sequence: Synthetic oligonucleotide
  Sense strand starting at position 1781 of SEQ ID NO: 915065
cuaagcauuuggguugcaa

SEQ ID NO: 1051069 - RNA, 19 nt, Artificial Sequence
  Description of Artificial Sequence: Synthetic oligonucleotide
  Antisense strand to SEQ ID NO: 1051068
uugcaacccaaaugcuuag

SEQ ID NO: 1051070 - RNA, 19 nt, Artificial Sequence
  Description of Artificial Sequence: Synthetic oligonucleotide
  Sense strand starting at position 1796 of SEQ ID NO: 915065
gcaaauagguuuccuaaau

SEQ ID NO: 1051071 - RNA, 19 nt, Artificial Sequence
  Description of Artificial Sequence: Synthetic oligonucleotide
  Antisense strand to SEQ ID NO: 1051070
auuuaggaaaccuauuugc

SEQ ID NO: 1051072 - RNA, 19 nt, Artificial Sequence
  Description of Artificial Sequence: Synthetic oligonucleotide
  Sense strand starting at position 1989 of SEQ ID NO: 915065
ucccaucaaugugcagaaa

SEQ ID NO: 1051073 - RNA, 19 nt, Artificial Sequence
  Description of Artificial Sequence: Synthetic oligonucleotide
  Antisense strand to SEQ ID NO: 1051072
uuucugcacauugauggga

SEQ ID NO: 1051074 - RNA, 19 nt, Artificial Sequence
  Description of Artificial Sequence: Synthetic oligonucleotide
  Sense strand starting at position 2060 of SEQ ID NO: 915065
uguuaucuccagcauaaag

SEQ ID NO: 1051075 - RNA, 19 nt, Artificial Sequence
  Description of Artificial Sequence: Synthetic oligonucleotide
  Antisense strand to SEQ ID NO: 1051074
cuuuaugcuggagauaaca

SEQ ID NO: 1051076 - RNA, 19 nt, Artificial Sequence
  Description of Artificial Sequence: Synthetic oligonucleotide
  Sense strand starting at position 2141 of SEQ ID NO: 915065
acgcucagagaaugaauca

SEQ ID NO: 1051077 - RNA, 19 nt, Artificial Sequence
  Description of Artificial Sequence: Synthetic oligonucleotide
  Antisense strand to SEQ ID NO: 1051076
ugauucauucucugagcgu

SEQ ID NO: 1051078 - RNA, 19 nt, Artificial Sequence
  Description of Artificial Sequence: Synthetic oligonucleotide
  Sense strand starting at position 2838 of SEQ ID NO: 915065
cucaaagagccuugguaac

SEQ ID NO: 1051079 - RNA, 19 nt, Artificial Sequence
  Description of Artificial Sequence: Synthetic oligonucleotide
  Antisense strand to SEQ ID NO: 1051078
guuaccaaggcucuuugag

SEQ ID NO: 1051080 - RNA, 19 nt, Artificial Sequence
  Description of Artificial Sequence: Synthetic oligonucleotide
  Sense strand starting at position 3060 of SEQ ID NO: 915065
gggaauuaaugguuaaagc

SEQ ID NO: 1051081 - RNA, 19 nt, Artificial Sequence
  Description of Artificial Sequence: Synthetic oligonucleotide
  Antisense strand to SEQ ID NO: 1051080
gcuuuaaccauuaauuccc

SEQ ID NO: 1051082 - RNA, 19 nt, Artificial Sequence
  Description of Artificial Sequence: Synthetic oligonucleotide
  Sense strand starting at position 3068 of SEQ ID NO: 915065
augguuaaagcugauguaa

SEQ ID NO: 1051083 - RNA, 19 nt, Artificial Sequence
  Description of Artificial Sequence: Synthetic oligonucleotide
  Antisense strand to SEQ ID NO: 1051082
uuacaucagcuuuaaccau

SEQ ID NO: 1051084 - RNA, 19 nt, Artificial Sequence
  Description of Artificial Sequence: Synthetic oligonucleotide
  Sense strand starting at position 3181 of SEQ ID NO: 915065
guaccagagguccagugaa

SEQ ID NO: 1051085 - RNA, 19 nt, Artificial Sequence
  Description of Artificial Sequence: Synthetic oligonucleotide
  Antisense strand to SEQ ID NO: 1051084
uucacuggaccucugguac

SEQ ID NO: 1051086 - RNA, 19 nt, Artificial Sequence
  Description of Artificial Sequence: Synthetic oligonucleotide
  Sense strand starting at position 3320 of SEQ ID NO: 915065
ccaauaaagguuuguuaaa

SEQ ID NO: 1051087 - RNA, 19 nt, Artificial Sequence
  Description of Artificial Sequence: Synthetic oligonucleotide
  Antisense strand to SEQ ID NO: 1051086
uuuaacaaaccuuuauugg

SEQ ID NO: 1051088 - RNA, 19 nt, Artificial Sequence
  Description of Artificial Sequence: Synthetic oligonucleotide
  Sense strand starting at position 3533 of SEQ ID NO: 915065
acugauuaaugauugcagu

SEQ ID NO: 1051089 - RNA, 19 nt, Artificial Sequence
  Description of Artificial Sequence: Synthetic oligonucleotide
  Antisense strand to SEQ ID NO: 1051088
acugcaaucauuaaucagu

SEQ ID NO: 1051090 - RNA, 19 nt, Artificial Sequence
  Description of Artificial Sequence: Synthetic oligonucleotide
  Sense strand starting at position 3580 of SEQ ID NO: 915065
auaucaagucccuguuaga

SEQ ID NO: 1051091 - RNA, 19 nt, Artificial Sequence
  Description of Artificial Sequence: Synthetic oligonucleotide
  Antisense strand to SEQ ID NO: 1051090
ucuaacagggacuugauau

SEQ ID NO: 1051092 - RNA, 19 nt, Artificial Sequence
  Description of Artificial Sequence: Synthetic oligonucleotide
  Sense strand starting at position 3651 of SEQ ID NO: 915065
ccagaaagcuguccuaaau

SEQ ID NO: 1051093 - RNA, 19 nt, Artificial Sequence
  Description of Artificial Sequence: Synthetic oligonucleotide
  Antisense strand to SEQ ID NO: 1051092
auuuaggacagcuuucugg

SEQ ID NO: 1051094 - RNA, 19 nt, Artificial Sequence
  Description of Artificial Sequence: Synthetic oligonucleotide
  Sense strand starting at position 3683 of SEQ ID NO: 915065
gagagcauauuguuuauaa

SEQ ID NO: 1051095 - RNA, 19 nt, Artificial Sequence
  Description of Artificial Sequence: Synthetic oligonucleotide
  Antisense strand to SEQ ID NO: 1051094
uuauaaacaauaugcucuc

SEQ ID NO: 1051096 - RNA, 19 nt, Artificial Sequence
  Description of Artificial Sequence: Synthetic oligonucleotide
  Sense strand starting at position 3712 of SEQ ID NO: 915065
guucuuucugaccauguga

SEQ ID NO: 1051097 - RNA, 19 nt, Artificial Sequence
  Description of Artificial Sequence: Synthetic oligonucleotide
  Antisense strand to SEQ ID NO: 1051096
ucacauggucagaaagaac

SEQ ID NO: 1051098 - RNA, 19 nt, Artificial Sequence
  Description of Artificial Sequence: Synthetic oligonucleotide
  Sense strand starting at position 3791 of SEQ ID NO: 915065
agucaaauucugggaugca

SEQ ID NO: 1051099 - RNA, 19 nt, Artificial Sequence
  Description of Artificial Sequence: Synthetic oligonucleotide
  Antisense strand to SEQ ID NO: 1051098
ugcaucccagaauuugacu

SEQ ID NO: 1051100 - RNA, 19 nt, Artificial Sequence
  Description of Artificial Sequence: Synthetic oligonucleotide
  Sense strand starting at position 3848 of SEQ ID NO: 915065
ggagguucauuggcagaau

SEQ ID NO: 1051101 - RNA, 19 nt, Artificial Sequence
  Description of Artificial Sequence: Synthetic oligonucleotide
  Antisense strand to SEQ ID NO: 1051100
auucugccaaugaaccucc

SEQ ID NO: 1051102 - RNA, 19 nt, Artificial Sequence
  Description of Artificial Sequence: Synthetic oligonucleotide
  Sense strand starting at position 3861 of SEQ ID NO: 915065
cagaauagguucuugucau

SEQ ID NO: 1051103 - RNA, 19 nt, Artificial Sequence
  Description of Artificial Sequence: Synthetic oligonucleotide
  Antisense strand to SEQ ID NO: 1051102
augacaagaaccuauucug

SEQ ID NO: 1051104 - RNA, 19 nt, Artificial Sequence
  Description of Artificial Sequence: Synthetic oligonucleotide
  Sense strand starting at position 3868 of SEQ ID NO: 915065
gguucuugucaugaguuga

SEQ ID NO: 1051105 - RNA, 19 nt, Artificial Sequence
  Description of Artificial Sequence: Synthetic oligonucleotide
  Antisense strand to SEQ ID NO: 1051104
ucaacucaugacaagaacc

SEQ ID NO: 1051106 - RNA, 19 nt, Artificial Sequence
  Description of Artificial Sequence: Synthetic oligonucleotide
  Sense strand starting at position 3872 of SEQ ID NO: 915065
cuugucaugaguugagaag

SEQ ID NO: 1051107 - RNA, 19 nt, Artificial Sequence
  Description of Artificial Sequence: Synthetic oligonucleotide
  Antisense strand to SEQ ID NO: 1051106
cuucucaacucaugacaag

SEQ ID NO: 1051108 - RNA, 19 nt, Artificial Sequence
  Description of Artificial Sequence: Synthetic oligonucleotide
  Sense strand starting at position 223 of SEQ ID NO: 915066
aucugaaauguauagguuu

SEQ ID NO: 1051109 - RNA, 19 nt, Artificial Sequence
  Description of Artificial Sequence: Synthetic oligonucleotide
  Antisense strand to SEQ ID NO: 1051108
aaaccuauacauuucagau

SEQ ID NO: 1051110 - RNA, 19 nt, Artificial Sequence
  Description of Artificial Sequence: Synthetic oligonucleotide
  Sense strand starting at position 241 of SEQ ID NO: 915066
ucaagacaguuccuggauu

SEQ ID NO: 1051111 - RNA, 19 nt, Artificial Sequence
  Description of Artificial Sequence: Synthetic oligonucleotide
  Antisense strand to SEQ ID NO: 1051110
aauccaggaacugucuuga

SEQ ID NO: 1051112 - RNA, 19 nt, Artificial Sequence
  Description of Artificial Sequence: Synthetic oligonucleotide
  Sense strand starting at position 279 of SEQ ID NO: 915066
augaaauggguuuagcuuu

SEQ ID NO: 1051113 - RNA, 19 nt, Artificial Sequence
  Description of Artificial Sequence: Synthetic oligonucleotide
  Antisense strand to SEQ ID NO: 1051112
aaagcuaaacccauuucau

SEQ ID NO: 1051114 - RNA, 19 nt, Artificial Sequence
  Description of Artificial Sequence: Synthetic oligonucleotide
  Sense strand starting at position 285 of SEQ ID NO: 915066
uggguuuagcuuuacagac

SEQ ID NO: 1051115 - RNA, 19 nt, Artificial Sequence
  Description of Artificial Sequence: Synthetic oligonucleotide
  Antisense strand to SEQ ID NO: 1051114
gucuguaaagcuaaaccca

SEQ ID NO: 1051116 - RNA, 19 nt, Artificial Sequence
  Description of Artificial Sequence: Synthetic oligonucleotide
  Sense strand starting at position 346 of SEQ ID NO: 915066
uuauaaagugugugaucaa

SEQ ID NO: 1051117 - RNA, 19 nt, Artificial Sequence
  Description of Artificial Sequence: Synthetic oligonucleotide
  Antisense strand to SEQ ID NO: 1051116
uugaucacacacuuuauaa

SEQ ID NO: 1051118 - RNA, 19 nt, Artificial Sequence
  Description of Artificial Sequence: Synthetic oligonucleotide
  Sense strand starting at position 349 of SEQ ID NO: 915066
uaaagugugugaucaacag

SEQ ID NO: 1051119 - RNA, 19 nt, Artificial Sequence
  Description of Artificial Sequence: Synthetic oligonucleotide
  Antisense strand to SEQ ID NO: 1051118
cuguugaucacacacuuua

SEQ ID NO: 1051120 - RNA, 19 nt, Artificial Sequence
  Description of Artificial Sequence: Synthetic oligonucleotide
  Sense strand starting at position 353 of SEQ ID NO: 915066
gugugugaucaacagauua

SEQ ID NO: 1051121 - RNA, 19 nt, Artificial Sequence
  Description of Artificial Sequence: Synthetic oligonucleotide
  Antisense strand to SEQ ID NO: 1051120
uaaucuguugaucacacac

SEQ ID NO: 1051122 - RNA, 19 nt, Artificial Sequence
  Description of Artificial Sequence: Synthetic oligonucleotide
  Sense strand starting at position 446 of SEQ ID NO: 915066
ucacuagucuggguacuga

SEQ ID NO: 1051123 - RNA, 19 nt, Artificial Sequence
  Description of Artificial Sequence: Synthetic oligonucleotide
  Antisense strand to SEQ ID NO: 1051122
ucaguacccagacuaguga

SEQ ID NO: 1051124 - RNA, 19 nt, Artificial Sequence
  Description of Artificial Sequence: Synthetic oligonucleotide
  Sense strand starting at position 524 of SEQ ID NO: 915066
gaauuugucugagcucguc

SEQ ID NO: 1051125 - RNA, 19 nt, Artificial Sequence
  Description of Artificial Sequence: Synthetic oligonucleotide
  Antisense strand to SEQ ID NO: 1051124
gacgagcucagacaaauuc

SEQ ID NO: 1051126 - RNA, 19 nt, Artificial Sequence
  Description of Artificial Sequence: Synthetic oligonucleotide
  Sense strand starting at position 1210 of SEQ ID NO: 915066
acuggaauaucaucagcca

SEQ ID NO: 1051127 - RNA, 19 nt, Artificial Sequence
  Description of Artificial Sequence: Synthetic oligonucleotide
  Antisense strand to SEQ ID NO: 1051126
uggcugaugauauuccagu

SEQ ID NO: 1051128 - RNA, 19 nt, Artificial Sequence
  Description of Artificial Sequence: Synthetic oligonucleotide
  Sense strand starting at position 1213 of SEQ ID NO: 915066
ggaauaucaucagccacua

SEQ ID NO: 1051129 - RNA, 19 nt, Artificial Sequence
  Description of Artificial Sequence: Synthetic oligonucleotide
  Antisense strand to SEQ ID NO: 1051128
uaguggcugaugauauucc

SEQ ID NO: 1051130 - RNA, 19 nt, Artificial Sequence
  Description of Artificial Sequence: Synthetic oligonucleotide
  Sense strand starting at position 1319 of SEQ ID NO: 915066
gcagaaauccucuggauaa

SEQ ID NO: 1051131 - RNA, 19 nt, Artificial Sequence
  Description of Artificial Sequence: Synthetic oligonucleotide
  Antisense strand to SEQ ID NO: 1051130
uuauccagaggauuucugc

SEQ ID NO: 1051132 - RNA, 19 nt, Artificial Sequence
  Description of Artificial Sequence: Synthetic oligonucleotide
  Sense strand starting at position 1505 of SEQ ID NO: 915066
agauauuaccuuugguucu

SEQ ID NO: 1051133 - RNA, 19 nt, Artificial Sequence
  Description of Artificial Sequence: Synthetic oligonucleotide
  Antisense strand to SEQ ID NO: 1051132
agaaccaaagguaauaucu

SEQ ID NO: 1051134 - RNA, 19 nt, Artificial Sequence
  Description of Artificial Sequence: Synthetic oligonucleotide
  Sense strand starting at position 1517 of SEQ ID NO: 915066
ugguucuugagagagucaa

SEQ ID NO: 1051135 - RNA, 19 nt, Artificial Sequence
  Description of Artificial Sequence: Synthetic oligonucleotide
  Antisense strand to SEQ ID NO: 1051134
uugacucucucaagaacca

SEQ ID NO: 1051136 - RNA, 19 nt, Artificial Sequence
  Description of Artificial Sequence: Synthetic oligonucleotide
  Sense strand starting at position 1545 of SEQ ID NO: 915066
cuuguacaaguguaaauga

SEQ ID NO: 1051137 - RNA, 19 nt, Artificial Sequence
  Description of Artificial Sequence: Synthetic oligonucleotide
  Antisense strand to SEQ ID NO: 1051136
ucauuuacacuuguacaag

SEQ ID NO: 1051138 - RNA, 19 nt, Artificial Sequence
  Description of Artificial Sequence: Synthetic oligonucleotide
  Sense strand starting at position 1627 of SEQ ID NO: 915066
uucuuuaaugaauggaacu

SEQ ID NO: 1051139 - RNA, 19 nt, Artificial Sequence
  Description of Artificial Sequence: Synthetic oligonucleotide
  Antisense strand to SEQ ID NO: 1051138
aguuccauucauuaaagaa

SEQ ID NO: 1051140 - RNA, 19 nt, Artificial Sequence
  Description of Artificial Sequence: Synthetic oligonucleotide
  Sense strand starting at position 1645 of SEQ ID NO: 915066
ugaccaaaccuguagcaau

SEQ ID NO: 1051141 - RNA, 19 nt, Artificial Sequence
  Description of Artificial Sequence: Synthetic oligonucleotide
  Antisense strand to SEQ ID NO: 1051140
auugcuacagguuugguca

SEQ ID NO: 1051142 - RNA, 19 nt, Artificial Sequence
  Description of Artificial Sequence: Synthetic oligonucleotide
  Sense strand starting at position 1657 of SEQ ID NO: 915066
uagcaaugucugccagugu

SEQ ID NO: 1051143 - RNA, 19 nt, Artificial Sequence
  Description of Artificial Sequence: Synthetic oligonucleotide
  Antisense strand to SEQ ID NO: 1051142
acacuggcagacauugcua

SEQ ID NO: 1051144 - RNA, 19 nt, Artificial Sequence
  Description of Artificial Sequence: Synthetic oligonucleotide
  Sense strand starting at position 1719 of SEQ ID NO: 915066
ccaacaucugguggaggua

SEQ ID NO: 1051145 - RNA, 19 nt, Artificial Sequence
  Description of Artificial Sequence: Synthetic oligonucleotide
  Antisense strand to SEQ ID NO: 1051144
uaccuccaccagauguugg

SEQ ID NO: 1051146 - RNA, 19 nt, Artificial Sequence
  Description of Artificial Sequence: Synthetic oligonucleotide
  Sense strand starting at position 1756 of SEQ ID NO: 915066
guuauacagcaagaagguu

SEQ ID NO: 1051147 - RNA, 19 nt, Artificial Sequence
  Description of Artificial Sequence: Synthetic oligonucleotide
  Antisense strand to SEQ ID NO: 1051146
aaccuucuugcuguauaac

SEQ ID NO: 1051148 - RNA, 19 nt, Artificial Sequence
  Description of Artificial Sequence: Synthetic oligonucleotide
  Sense strand starting at position 1882 of SEQ ID NO: 915066
acagguaaauucuucgaca

SEQ ID NO: 1051149 - RNA, 19 nt, Artificial Sequence
  Description of Artificial Sequence: Synthetic oligonucleotide
  Antisense strand to SEQ ID NO: 1051148
ugucgaagaauuuaccugu

SEQ ID NO: 1051150 - RNA, 19 nt, Artificial Sequence
  Description of Artificial Sequence: Synthetic oligonucleotide
  Sense strand starting at position 1883 of SEQ ID NO: 915066
cagguaaauucuucgacac

SEQ ID NO: 1051151 - RNA, 19 nt, Artificial Sequence
  Description of Artificial Sequence: Synthetic oligonucleotide
  Antisense strand to SEQ ID NO: 1051150
gugucgaagaauuuaccug

SEQ ID NO: 1051152 - RNA, 19 nt, Artificial Sequence
  Description of Artificial Sequence: Synthetic oligonucleotide
  Sense strand starting at position 1884 of SEQ ID NO: 915066
agguaaauucuucgacaca

SEQ ID NO: 1051153 - RNA, 19 nt, Artificial Sequence
  Description of Artificial Sequence: Synthetic oligonucleotide
  Antisense strand to SEQ ID NO: 1051152
ugugucgaagaauuuaccu

SEQ ID NO: 1051154 - RNA, 19 nt, Artificial Sequence
  Description of Artificial Sequence: Synthetic oligonucleotide
  Sense strand starting at position 2018 of SEQ ID NO: 915066
cuaagcauuuggguugcaa

SEQ ID NO: 1051155 - RNA, 19 nt, Artificial Sequence
  Description of Artificial Sequence: Synthetic oligonucleotide
  Antisense strand to SEQ ID NO: 1051154
uugcaacccaaaugcuuag

SEQ ID NO: 1051156 - RNA, 19 nt, Artificial Sequence
  Description of Artificial Sequence: Synthetic oligonucleotide
  Sense strand starting at position 2033 of SEQ ID NO: 915066
gcaaauagguuuccuaaau

SEQ ID NO: 1051157 - RNA, 19 nt, Artificial Sequence
  Description of Artificial Sequence: Synthetic oligonucleotide
  Antisense strand to SEQ ID NO: 1051156
auuuaggaaaccuauuugc

SEQ ID NO: 1051158 - RNA, 19 nt, Artificial Sequence
  Description of Artificial Sequence: Synthetic oligonucleotide
  Sense strand starting at position 2226 of SEQ ID NO: 915066
ucccaucaaugugcagaaa

SEQ ID NO: 1051159 - RNA, 19 nt, Artificial Sequence
  Description of Artificial Sequence: Synthetic oligonucleotide
  Antisense strand to SEQ ID NO: 1051158
uuucugcacauugauggga

SEQ ID NO: 1051160 - RNA, 19 nt, Artificial Sequence
  Description of Artificial Sequence: Synthetic oligonucleotide
  Sense strand starting at position 2297 of SEQ ID NO: 915066
uguuaucuccagcauaaag

SEQ ID NO: 1051161 - RNA, 19 nt, Artificial Sequence
  Description of Artificial Sequence: Synthetic oligonucleotide
  Antisense strand to SEQ ID NO: 1051160
cuuuaugcuggagauaaca

SEQ ID NO: 1051162 - RNA, 19 nt, Artificial Sequence
  Description of Artificial Sequence: Synthetic oligonucleotide
  Sense strand starting at position 2323 of SEQ ID NO: 915066
aguugagaauguucgaauu

SEQ ID NO: 1051163 - RNA, 19 nt, Artificial Sequence
  Description of Artificial Sequence: Synthetic oligonucleotide
  Antisense strand to SEQ ID NO: 1051162
aauucgaacauucucaacu

SEQ ID NO: 1051164 - RNA, 19 nt, Artificial Sequence
  Description of Artificial Sequence: Synthetic oligonucleotide
  Sense strand starting at position 2378 of SEQ ID NO: 915066
acgcucagagaaugaauca

SEQ ID NO: 1051165 - RNA, 19 nt, Artificial Sequence
  Description of Artificial Sequence: Synthetic oligonucleotide
  Antisense strand to SEQ ID NO: 1051164
ugauucauucucugagcgu

SEQ ID NO: 1051166 - RNA, 19 nt, Artificial Sequence
  Description of Artificial Sequence: Synthetic oligonucleotide
  Sense strand starting at position 3075 of SEQ ID NO: 915066
cucaaagagccuugguaac

SEQ ID NO: 1051167 - RNA, 19 nt, Artificial Sequence
  Description of Artificial Sequence: Synthetic oligonucleotide
  Antisense strand to SEQ ID NO: 1051166
guuaccaaggcucuuugag

SEQ ID NO: 1051168 - RNA, 19 nt, Artificial Sequence
  Description of Artificial Sequence: Synthetic oligonucleotide
  Sense strand starting at position 3297 of SEQ ID NO: 915066
gggaauuaaugguuaaagc

SEQ ID NO: 1051169 - RNA, 19 nt, Artificial Sequence
  Description of Artificial Sequence: Synthetic oligonucleotide
  Antisense strand to SEQ ID NO: 1051168
gcuuuaaccauuaauuccc

SEQ ID NO: 1051170 - RNA, 19 nt, Artificial Sequence
  Description of Artificial Sequence: Synthetic oligonucleotide
  Sense strand starting at position 3305 of SEQ ID NO: 915066
augguuaaagcugauguaa

SEQ ID NO: 1051171 - RNA, 19 nt, Artificial Sequence
  Description of Artificial Sequence: Synthetic oligonucleotide
  Antisense strand to SEQ ID NO: 1051170
uuacaucagcuuuaaccau

SEQ ID NO: 1051172 - RNA, 19 nt, Artificial Sequence
  Description of Artificial Sequence: Synthetic oligonucleotide
  Sense strand starting at position 3344 of SEQ ID NO: 915066
gguucacucuauucgggaa

SEQ ID NO: 1051173 - RNA, 19 nt, Artificial Sequence
  Description of Artificial Sequence: Synthetic oligonucleotide
  Antisense strand to SEQ ID NO: 1051172
uucccgaauagagugaacc

SEQ ID NO: 1051174 - RNA, 19 nt, Artificial Sequence
  Description of Artificial Sequence: Synthetic oligonucleotide
  Sense strand starting at position 3418 of SEQ ID NO: 915066
guaccagagguccagugaa

SEQ ID NO: 1051175 - RNA, 19 nt, Artificial Sequence
  Description of Artificial Sequence: Synthetic oligonucleotide
  Antisense strand to SEQ ID NO: 1051174
uucacuggaccucugguac

SEQ ID NO: 1051176 - RNA, 19 nt, Artificial Sequence
  Description of Artificial Sequence: Synthetic oligonucleotide
  Sense strand starting at position 3557 of SEQ ID NO: 915066
ccaauaaagguuuguuaaa

SEQ ID NO: 1051177 - RNA, 19 nt, Artificial Sequence
  Description of Artificial Sequence: Synthetic oligonucleotide
  Antisense strand to SEQ ID NO: 1051176
uuuaacaaaccuuuauugg

SEQ ID NO: 1051178 - RNA, 19 nt, Artificial Sequence
  Description of Artificial Sequence: Synthetic oligonucleotide
  Sense strand starting at position 3770 of SEQ ID NO: 915066
acugauuaaugauugcagu

SEQ ID NO: 1051179 - RNA, 19 nt, Artificial Sequence
  Description of Artificial Sequence: Synthetic oligonucleotide
  Antisense strand to SEQ ID NO: 1051178
acugcaaucauuaaucagu

SEQ ID NO: 1051180 - RNA, 19 nt, Artificial Sequence
  Description of Artificial Sequence: Synthetic oligonucleotide
  Sense strand starting at position 3817 of SEQ ID NO: 915066
auaucaagucccuguuaga

SEQ ID NO: 1051181 - RNA, 19 nt, Artificial Sequence
  Description of Artificial Sequence: Synthetic oligonucleotide
  Antisense strand to SEQ ID NO: 1051180
ucuaacagggacuugauau

SEQ ID NO: 1051182 - RNA, 19 nt, Artificial Sequence
  Description of Artificial Sequence: Synthetic oligonucleotide
  Sense strand starting at position 3888 of SEQ ID NO: 915066
ccagaaagcuguccuaaau

SEQ ID NO: 1051183 - RNA, 19 nt, Artificial Sequence
  Description of Artificial Sequence: Synthetic oligonucleotide
  Antisense strand to SEQ ID NO: 1051182
auuuaggacagcuuucugg

SEQ ID NO: 1051184 - RNA, 19 nt, Artificial Sequence
  Description of Artificial Sequence: Synthetic oligonucleotide
  Sense strand starting at position 3920 of SEQ ID NO: 915066
gagagcauauuguuuauaa

SEQ ID NO: 1051185 - RNA, 19 nt, Artificial Sequence
  Description of Artificial Sequence: Synthetic oligonucleotide
  Antisense strand to SEQ ID NO: 1051184
uuauaaacaauaugcucuc

SEQ ID NO: 1051186 - RNA, 19 nt, Artificial Sequence
  Description of Artificial Sequence: Synthetic oligonucleotide
  Sense strand starting at position 3949 of SEQ ID NO: 915066
guucuuucugaccauguga

SEQ ID NO: 1051187 - RNA, 19 nt, Artificial Sequence
  Description of Artificial Sequence: Synthetic oligonucleotide
  Antisense strand to SEQ ID NO: 1051186
ucacauggucagaaagaac

SEQ ID NO: 1051188 - RNA, 19 nt, Artificial Sequence
  Description of Artificial Sequence: Synthetic oligonucleotide
  Sense strand starting at position 27 of SEQ ID NO: 915067
agauauuaccuuugguucu

SEQ ID NO: 1051189 - RNA, 19 nt, Artificial Sequence
  Description of Artificial Sequence: Synthetic oligonucleotide
  Antisense strand to SEQ ID NO: 1051188
agaaccaaagguaauaucu

SEQ ID NO: 1051190 - RNA, 19 nt, Artificial Sequence
  Description of Artificial Sequence: Synthetic oligonucleotide
  Sense strand starting at position 39 of SEQ ID NO: 915067
ugguucuugagagagucaa

SEQ ID NO: 1051191 - RNA, 19 nt, Artificial Sequence
  Description of Artificial Sequence: Synthetic oligonucleotide
  Antisense strand to SEQ ID NO: 1051190
uugacucucucaagaacca

SEQ ID NO: 1051192 - RNA, 19 nt, Artificial Sequence
  Description of Artificial Sequence: Synthetic oligonucleotide
  Sense strand starting at position 67 of SEQ ID NO: 915067
cuuguacaaguguaaauga

SEQ ID NO: 1051193 - RNA, 19 nt, Artificial Sequence
  Description of Artificial Sequence: Synthetic oligonucleotide
  Antisense strand to SEQ ID NO: 1051192
ucauuuacacuuguacaag

SEQ ID NO: 1051194 - RNA, 19 nt, Artificial Sequence
  Description of Artificial Sequence: Synthetic oligonucleotide
  Sense strand starting at position 149 of SEQ ID NO: 915067
uucuuuaaugaauggaacu

SEQ ID NO: 1051195 - RNA, 19 nt, Artificial Sequence
  Description of Artificial Sequence: Synthetic oligonucleotide
  Antisense strand to SEQ ID NO: 1051194
aguuccauucauuaaagaa

SEQ ID NO: 1051196 - RNA, 19 nt, Artificial Sequence
  Description of Artificial Sequence: Synthetic oligonucleotide
  Sense strand starting at position 167 of SEQ ID NO: 915067
ugaccaaaccuguagcaau

SEQ ID NO: 1051197 - RNA, 19 nt, Artificial Sequence
  Description of Artificial Sequence: Synthetic oligonucleotide
  Antisense strand to SEQ ID NO: 1051196
auugcuacagguuugguca

SEQ ID NO: 1051198 - RNA, 19 nt, Artificial Sequence
  Description of Artificial Sequence: Synthetic oligonucleotide
  Sense strand starting at position 179 of SEQ ID NO: 915067
uagcaaugucugccagugu

SEQ ID NO: 1051199 - RNA, 19 nt, Artificial Sequence
  Description of Artificial Sequence: Synthetic oligonucleotide
  Antisense strand to SEQ ID NO: 1051198
acacuggcagacauugcua

SEQ ID NO: 1051200 - RNA, 19 nt, Artificial Sequence
  Description of Artificial Sequence: Synthetic oligonucleotide
  Sense strand starting at position 241 of SEQ ID NO: 915067
ccaacaucugguggaggua

SEQ ID NO: 1051201 - RNA, 19 nt, Artificial Sequence
  Description of Artificial Sequence: Synthetic oligonucleotide
  Antisense strand to SEQ ID NO: 1051200
uaccuccaccagauguugg

SEQ ID NO: 1051202 - RNA, 19 nt, Artificial Sequence
  Description of Artificial Sequence: Synthetic oligonucleotide
  Sense strand starting at position 278 of SEQ ID NO: 915067
guuauacagcaagaagguu

SEQ ID NO: 1051203 - RNA, 19 nt, Artificial Sequence
  Description of Artificial Sequence: Synthetic oligonucleotide
  Antisense strand to SEQ ID NO: 1051202
aaccuucuugcuguauaac

SEQ ID NO: 1051204 - RNA, 19 nt, Artificial Sequence
  Description of Artificial Sequence: Synthetic oligonucleotide
  Sense strand starting at position 404 of SEQ ID NO: 915067
acagguaaauucuucgaca

SEQ ID NO: 1051205 - RNA, 19 nt, Artificial Sequence
  Description of Artificial Sequence: Synthetic oligonucleotide
  Antisense strand to SEQ ID NO: 1051204
ugucgaagaauuuaccugu

SEQ ID NO: 1051206 - RNA, 19 nt, Artificial Sequence
  Description of Artificial Sequence: Synthetic oligonucleotide
  Sense strand starting at position 405 of SEQ ID NO: 915067
cagguaaauucuucgacac

SEQ ID NO: 1051207 - RNA, 19 nt, Artificial Sequence
  Description of Artificial Sequence: Synthetic oligonucleotide
  Antisense strand to SEQ ID NO: 1051206
gugucgaagaauuuaccug

SEQ ID NO: 1051208 - RNA, 19 nt, Artificial Sequence
  Description of Artificial Sequence: Synthetic oligonucleotide
  Sense strand starting at position 406 of SEQ ID NO: 915067
agguaaauucuucgacaca

SEQ ID NO: 1051209 - RNA, 19 nt, Artificial Sequence
  Description of Artificial Sequence: Synthetic oligonucleotide
  Antisense strand to SEQ ID NO: 1051208
ugugucgaagaauuuaccu

SEQ ID NO: 1051210 - RNA, 19 nt, Artificial Sequence
  Description of Artificial Sequence: Synthetic oligonucleotide
  Sense strand starting at position 540 of SEQ ID NO: 915067
cuaagcauuuggguugcaa

SEQ ID NO: 1051211 - RNA, 19 nt, Artificial Sequence
  Description of Artificial Sequence: Synthetic oligonucleotide
  Antisense strand to SEQ ID NO: 1051210
uugcaacccaaaugcuuag

SEQ ID NO: 1051212 - RNA, 19 nt, Artificial Sequence
  Description of Artificial Sequence: Synthetic oligonucleotide
  Sense strand starting at position 555 of SEQ ID NO: 915067
gcaaauagguuuccuaaau

SEQ ID NO: 1051213 - RNA, 19 nt, Artificial Sequence
  Description of Artificial Sequence: Synthetic oligonucleotide
  Antisense strand to SEQ ID NO: 1051212
auuuaggaaaccuauuugc

SEQ ID NO: 1051214 - RNA, 19 nt, Artificial Sequence
  Description of Artificial Sequence: Synthetic oligonucleotide
  Sense strand starting at position 748 of SEQ ID NO: 915067
ucccaucaaugugcagaaa

SEQ ID NO: 1051215 - RNA, 19 nt, Artificial Sequence
  Description of Artificial Sequence: Synthetic oligonucleotide
  Antisense strand to SEQ ID NO: 1051214
uuucugcacauugauggga

SEQ ID NO: 1051216 - RNA, 19 nt, Artificial Sequence
  Description of Artificial Sequence: Synthetic oligonucleotide
  Sense strand starting at position 819 of SEQ ID NO: 915067
uguuaucuccagcauaaag

SEQ ID NO: 1051217 - RNA, 19 nt, Artificial Sequence
  Description of Artificial Sequence: Synthetic oligonucleotide
  Antisense strand to SEQ ID NO: 1051216
cuuuaugcuggagauaaca

SEQ ID NO: 1051218 - RNA, 19 nt, Artificial Sequence
  Description of Artificial Sequence: Synthetic oligonucleotide
  Sense strand starting at position 900 of SEQ ID NO: 915067
acgcucagagaaugaauca

SEQ ID NO: 1051219 - RNA, 19 nt, Artificial Sequence
  Description of Artificial Sequence: Synthetic oligonucleotide
  Antisense strand to SEQ ID NO: 1051218
ugauucauucucugagcgu

SEQ ID NO: 1051220 - RNA, 19 nt, Artificial Sequence
  Description of Artificial Sequence: Synthetic oligonucleotide
  Sense strand starting at position 1819 of SEQ ID NO: 915067
gggaauuaaugguuaaagc

SEQ ID NO: 1051221 - RNA, 19 nt, Artificial Sequence
  Description of Artificial Sequence: Synthetic oligonucleotide
  Antisense strand to SEQ ID NO: 1051220
gcuuuaaccauuaauuccc

SEQ ID NO: 1051222 - RNA, 19 nt, Artificial Sequence
  Description of Artificial Sequence: Synthetic oligonucleotide
  Sense strand starting at position 1827 of SEQ ID NO: 915067
augguuaaagcugauguaa

SEQ ID NO: 1051223 - RNA, 19 nt, Artificial Sequence
  Description of Artificial Sequence: Synthetic oligonucleotide
  Antisense strand to SEQ ID NO: 1051222
uuacaucagcuuuaaccau

SEQ ID NO: 1051224 - RNA, 19 nt, Artificial Sequence
  Description of Artificial Sequence: Synthetic oligonucleotide
  Sense strand starting at position 1940 of SEQ ID NO: 915067
guaccagagguccagugaa

SEQ ID NO: 1051225 - RNA, 19 nt, Artificial Sequence
  Description of Artificial Sequence: Synthetic oligonucleotide
  Antisense strand to SEQ ID NO: 1051224
uucacuggaccucugguac

SEQ ID NO: 1051226 - RNA, 19 nt, Artificial Sequence
  Description of Artificial Sequence: Synthetic oligonucleotide
  Sense strand starting at position 2079 of SEQ ID NO: 915067
ccaauaaagguuuguuaaa

SEQ ID NO: 1051227 - RNA, 19 nt, Artificial Sequence
  Description of Artificial Sequence: Synthetic oligonucleotide
  Antisense strand to SEQ ID NO: 1051226
uuuaacaaaccuuuauugg

SEQ ID NO: 1051228 - RNA, 19 nt, Artificial Sequence
  Description of Artificial Sequence: Synthetic oligonucleotide
  Sense strand starting at position 2292 of SEQ ID NO: 915067
acugauuaaugauugcagu

SEQ ID NO: 1051229 - RNA, 19 nt, Artificial Sequence
  Description of Artificial Sequence: Synthetic oligonucleotide
  Antisense strand to SEQ ID NO: 1051228
acugcaaucauuaaucagu

SEQ ID NO: 1051230 - RNA, 19 nt, Artificial Sequence
  Description of Artificial Sequence: Synthetic oligonucleotide
  Sense strand starting at position 2339 of SEQ ID NO: 915067
auaucaagucccuguuaga

SEQ ID NO: 1051231 - RNA, 19 nt, Artificial Sequence
  Description of Artificial Sequence: Synthetic oligonucleotide
  Antisense strand to SEQ ID NO: 1051230
ucuaacagggacuugauau

SEQ ID NO: 1051232 - RNA, 19 nt, Artificial Sequence
  Description of Artificial Sequence: Synthetic oligonucleotide
  Sense strand starting at position 2410 of SEQ ID NO: 915067
ccagaaagcuguccuaaau

SEQ ID NO: 1051233 - RNA, 19 nt, Artificial Sequence
  Description of Artificial Sequence: Synthetic oligonucleotide
  Antisense strand to SEQ ID NO: 1051232
auuuaggacagcuuucugg

SEQ ID NO: 1051234 - RNA, 19 nt, Artificial Sequence
  Description of Artificial Sequence: Synthetic oligonucleotide
  Sense strand starting at position 2442 of SEQ ID NO: 915067
gagagcauauuguuuauaa

SEQ ID NO: 1051235 - RNA, 19 nt, Artificial Sequence
  Description of Artificial Sequence: Synthetic oligonucleotide
  Antisense strand to SEQ ID NO: 1051234
uuauaaacaauaugcucuc

SEQ ID NO: 1051236 - RNA, 19 nt, Artificial Sequence
  Description of Artificial Sequence: Synthetic oligonucleotide
  Sense strand starting at position 2471 of SEQ ID NO: 915067
guucuuucugaccauguga

SEQ ID NO: 1051237 - RNA, 19 nt, Artificial Sequence
  Description of Artificial Sequence: Synthetic oligonucleotide
  Antisense strand to SEQ ID NO: 1051236
ucacauggucagaaagaac

SEQ ID NO: 1051238 - RNA, 19 nt, Artificial Sequence
  Description of Artificial Sequence: Synthetic oligonucleotide
  Sense strand starting at position 2550 of SEQ ID NO: 915067
agucaaauucugggaugca

SEQ ID NO: 1051239 - RNA, 19 nt, Artificial Sequence
  Description of Artificial Sequence: Synthetic oligonucleotide
  Antisense strand to SEQ ID NO: 1051238
ugcaucccagaauuugacu

SEQ ID NO: 1051240 - RNA, 19 nt, Artificial Sequence
  Description of Artificial Sequence: Synthetic oligonucleotide
  Sense strand starting at position 2607 of SEQ ID NO: 915067
ggagguucauuggcagaau

SEQ ID NO: 1051241 - RNA, 19 nt, Artificial Sequence
  Description of Artificial Sequence: Synthetic oligonucleotide
  Antisense strand to SEQ ID NO: 1051240
auucugccaaugaaccucc

SEQ ID NO: 1051242 - RNA, 19 nt, Artificial Sequence
  Description of Artificial Sequence: Synthetic oligonucleotide
  Sense strand starting at position 2620 of SEQ ID NO: 915067
cagaauagguucuugucau

SEQ ID NO: 1051243 - RNA, 19 nt, Artificial Sequence
  Description of Artificial Sequence: Synthetic oligonucleotide
  Antisense strand to SEQ ID NO: 1051242
augacaagaaccuauucug

SEQ ID NO: 1051244 - RNA, 19 nt, Artificial Sequence
  Description of Artificial Sequence: Synthetic oligonucleotide
  Sense strand starting at position 2631 of SEQ ID NO: 915067
cuugucaugaguugagaag

SEQ ID NO: 1051245 - RNA, 19 nt, Artificial Sequence
  Description of Artificial Sequence: Synthetic oligonucleotide
  Antisense strand to SEQ ID NO: 1051244
cuucucaacucaugacaag

SEQ ID NO: 1051246 - RNA, 19 nt, Artificial Sequence
  Description of Artificial Sequence: Synthetic oligonucleotide
  Sense strand starting at position 2848 of SEQ ID NO: 915067
gcguguuagcacucucacu

SEQ ID NO: 1051247 - RNA, 19 nt, Artificial Sequence
  Description of Artificial Sequence: Synthetic oligonucleotide
  Antisense strand to SEQ ID NO: 1051246
agugagagugcuaacacgc

SEQ ID NO: 1051248 - RNA, 19 nt, Artificial Sequence
  Description of Artificial Sequence: Synthetic oligonucleotide
  Sense strand starting at position 3225 of SEQ ID NO: 915067
agguaaugaaacuggguuu

SEQ ID NO: 1051249 - RNA, 19 nt, Artificial Sequence
  Description of Artificial Sequence: Synthetic oligonucleotide
  Antisense strand to SEQ ID NO: 1051248
aaacccaguuucauuaccu

SEQ ID NO: 1051250 - RNA, 19 nt, Artificial Sequence
  Description of Artificial Sequence: Synthetic oligonucleotide
  Sense strand starting at position 3363 of SEQ ID NO: 915067
gggacugagaucuguuuau

SEQ ID NO: 1051251 - RNA, 19 nt, Artificial Sequence
  Description of Artificial Sequence: Synthetic oligonucleotide
  Antisense strand to SEQ ID NO: 1051250
auaaacagaucucaguccc

SEQ ID NO: 1051252 - RNA, 19 nt, Artificial Sequence
  Description of Artificial Sequence: Synthetic oligonucleotide
  Sense strand starting at position 3367 of SEQ ID NO: 915067
cugagaucuguuuauguug

SEQ ID NO: 1051253 - RNA, 19 nt, Artificial Sequence
  Description of Artificial Sequence: Synthetic oligonucleotide
  Antisense strand to SEQ ID NO: 1051252
caacauaaacagaucucag

SEQ ID NO: 1051254 - RNA, 19 nt, Artificial Sequence
  Description of Artificial Sequence: Synthetic oligonucleotide
  Sense strand starting at position 3429 of SEQ ID NO: 915067
gcuaguguccuguuacgca

SEQ ID NO: 1051255 - RNA, 19 nt, Artificial Sequence
  Description of Artificial Sequence: Synthetic oligonucleotide
  Antisense strand to SEQ ID NO: 1051254
ugcguaacaggacacuagc

SEQ ID NO: 1051256 - RNA, 19 nt, Artificial Sequence
  Description of Artificial Sequence: Synthetic oligonucleotide
  Sense strand starting at position 3459 of SEQ ID NO: 915067
uaaugagauuguuugcaau

SEQ ID NO: 1051257 - RNA, 19 nt, Artificial Sequence
  Description of Artificial Sequence: Synthetic oligonucleotide
  Antisense strand to SEQ ID NO: 1051256
auugcaaacaaucucauua

SEQ ID NO: 1051258 - RNA, 19 nt, Artificial Sequence
  Description of Artificial Sequence: Synthetic oligonucleotide
  Sense strand starting at position 3461 of SEQ ID NO: 915067
augagauuguuugcaauac

SEQ ID NO: 1051259 - RNA, 19 nt, Artificial Sequence
  Description of Artificial Sequence: Synthetic oligonucleotide
  Antisense strand to SEQ ID NO: 1051258
guauugcaaacaaucucau

SEQ ID NO: 1051260 - RNA, 19 nt, Artificial Sequence
  Description of Artificial Sequence: Synthetic oligonucleotide
  Sense strand starting at position 3484 of SEQ ID NO: 915067
uucucuaagccagauuguu

SEQ ID NO: 1051261 - RNA, 19 nt, Artificial Sequence
  Description of Artificial Sequence: Synthetic oligonucleotide
  Antisense strand to SEQ ID NO: 1051260
aacaaucuggcuuagagaa

SEQ ID NO: 1051262 - RNA, 19 nt, Artificial Sequence
  Description of Artificial Sequence: Synthetic oligonucleotide
  Sense strand starting at position 3832 of SEQ ID NO: 915067
ggccaaccagauuguuuaa

SEQ ID NO: 1051263 - RNA, 19 nt, Artificial Sequence
  Description of Artificial Sequence: Synthetic oligonucleotide
  Antisense strand to SEQ ID NO: 1051262
uuaaacaaucugguuggcc

SEQ ID NO: 1051264 - RNA, 19 nt, Artificial Sequence
  Description of Artificial Sequence: Synthetic oligonucleotide
  Sense strand starting at position 3882 of SEQ ID NO: 915067
aaggccauucuugaaagua

SEQ ID NO: 1051265 - RNA, 19 nt, Artificial Sequence
  Description of Artificial Sequence: Synthetic oligonucleotide
  Antisense strand to SEQ ID NO: 1051264
uacuuucaagaauggccuu

SEQ ID NO: 1051266 - RNA, 19 nt, Artificial Sequence
  Description of Artificial Sequence: Synthetic oligonucleotide
  Sense strand starting at position 3906 of SEQ ID NO: 915067
gagagaguucuguagcuac

SEQ ID NO: 1051267 - RNA, 19 nt, Artificial Sequence
  Description of Artificial Sequence: Synthetic oligonucleotide
  Antisense strand to SEQ ID NO: 1051266
guagcuacagaacucucuc

SEQ ID NO: 1051268 - RNA, 19 nt, Artificial Sequence
  Description of Artificial Sequence: Synthetic oligonucleotide
  Sense strand starting at position 25 of SEQ ID NO: 915068
gccugccuuucucuuggaa

SEQ ID NO: 1051269 - RNA, 19 nt, Artificial Sequence
  Description of Artificial Sequence: Synthetic oligonucleotide
  Antisense strand to SEQ ID NO: 1051268
uuccaagagaaaggcaggc

SEQ ID NO: 1051270 - RNA, 19 nt, Artificial Sequence
  Description of Artificial Sequence: Synthetic oligonucleotide
  Sense strand starting at position 28 of SEQ ID NO: 915068
ugccuuucucuuggaaucu

SEQ ID NO: 1051271 - RNA, 19 nt, Artificial Sequence
  Description of Artificial Sequence: Synthetic oligonucleotide
  Antisense strand to SEQ ID NO: 1051270
agauuccaagagaaaggca

SEQ ID NO: 1051272 - RNA, 19 nt, Artificial Sequence
  Description of Artificial Sequence: Synthetic oligonucleotide
  Sense strand starting at position 57 of SEQ ID NO: 915068
ggcuuaccucucggagaug

SEQ ID NO: 1051273 - RNA, 19 nt, Artificial Sequence
  Description of Artificial Sequence: Synthetic oligonucleotide
  Antisense strand to SEQ ID NO: 1051272
caucuccgagagguaagcc

SEQ ID NO: 1051274 - RNA, 19 nt, Artificial Sequence
  Description of Artificial Sequence: Synthetic oligonucleotide
  Sense strand starting at position 598 of SEQ ID NO: 915068
ggagccaaucuuugaucua

SEQ ID NO: 1051275 - RNA, 19 nt, Artificial Sequence
  Description of Artificial Sequence: Synthetic oligonucleotide
  Antisense strand to SEQ ID NO: 1051274
uagaucaaagauuggcucc

SEQ ID NO: 1051276 - RNA, 19 nt, Artificial Sequence
  Description of Artificial Sequence: Synthetic oligonucleotide
  Sense strand starting at position 601 of SEQ ID NO: 915068
gccaaucuuugaucuacag

SEQ ID NO: 1051277 - RNA, 19 nt, Artificial Sequence
  Description of Artificial Sequence: Synthetic oligonucleotide
  Antisense strand to SEQ ID NO: 1051276
cuguagaucaaagauuggc

SEQ ID NO: 1051278 - RNA, 19 nt, Artificial Sequence
  Description of Artificial Sequence: Synthetic oligonucleotide
  Sense strand starting at position 605 of SEQ ID NO: 915068
aucuuugaucuacaguauc

SEQ ID NO: 1051279 - RNA, 19 nt, Artificial Sequence
  Description of Artificial Sequence: Synthetic oligonucleotide
  Antisense strand to SEQ ID NO: 1051278
gauacuguagaucaaagau

SEQ ID NO: 1051280 - RNA, 19 nt, Artificial Sequence
  Description of Artificial Sequence: Synthetic oligonucleotide
  Sense strand starting at position 617 of SEQ ID NO: 915068
caguaucuuguaggguaua

SEQ ID NO: 1051281 - RNA, 19 nt, Artificial Sequence
  Description of Artificial Sequence: Synthetic oligonucleotide
  Antisense strand to SEQ ID NO: 1051280
uauacccuacaagauacug

SEQ ID NO: 1051282 - RNA, 19 nt, Artificial Sequence
  Description of Artificial Sequence: Synthetic oligonucleotide
  Sense strand starting at position 906 of SEQ ID NO: 915068
gugcgucaggaguaagacu

SEQ ID NO: 1051283 - RNA, 19 nt, Artificial Sequence
  Description of Artificial Sequence: Synthetic oligonucleotide
  Antisense strand to SEQ ID NO: 1051282
agucuuacuccugacgcac

SEQ ID NO: 1051284 - RNA, 19 nt, Artificial Sequence
  Description of Artificial Sequence: Synthetic oligonucleotide
  Sense strand starting at position 946 of SEQ ID NO: 915068
gaaggcauggucugaguuu

SEQ ID NO: 1051285 - RNA, 19 nt, Artificial Sequence
  Description of Artificial Sequence: Synthetic oligonucleotide
  Antisense strand to SEQ ID NO: 1051284
aaacucagaccaugccuuc

SEQ ID NO: 1051286 - RNA, 19 nt, Artificial Sequence
  Description of Artificial Sequence: Synthetic oligonucleotide
  Sense strand starting at position 953 of SEQ ID NO: 915068
uggucugaguuucagagaa

SEQ ID NO: 1051287 - RNA, 19 nt, Artificial Sequence
  Description of Artificial Sequence: Synthetic oligonucleotide
  Antisense strand to SEQ ID NO: 1051286
uucucugaaacucagacca

SEQ ID NO: 1051288 - RNA, 19 nt, Artificial Sequence
  Description of Artificial Sequence: Synthetic oligonucleotide
  Sense strand starting at position 975 of SEQ ID NO: 915068
agaggaauuucucauggac

SEQ ID NO: 1051289 - RNA, 19 nt, Artificial Sequence
  Description of Artificial Sequence: Synthetic oligonucleotide
  Antisense strand to SEQ ID NO: 1051288
guccaugagaaauuccucu

SEQ ID NO: 1051290 - RNA, 19 nt, Artificial Sequence
  Description of Artificial Sequence: Synthetic oligonucleotide
  Sense strand starting at position 977 of SEQ ID NO: 915068
aggaauuucucauggaccu

SEQ ID NO: 1051291 - RNA, 19 nt, Artificial Sequence
  Description of Artificial Sequence: Synthetic oligonucleotide
  Antisense strand to SEQ ID NO: 1051290
agguccaugagaaauuccu

SEQ ID NO: 1051292 - RNA, 19 nt, Artificial Sequence
  Description of Artificial Sequence: Synthetic oligonucleotide
  Sense strand starting at position 1027 of SEQ ID NO: 915068
gcagcucuuggccagggaa

SEQ ID NO: 1051293 - RNA, 19 nt, Artificial Sequence
  Description of Artificial Sequence: Synthetic oligonucleotide
  Antisense strand to SEQ ID NO: 1051292
uucccuggccaagagcugc

SEQ ID NO: 1051294 - RNA, 19 nt, Artificial Sequence
  Description of Artificial Sequence: Synthetic oligonucleotide
  Sense strand starting at position 1052 of SEQ ID NO: 915068
gcuguaucuccauagccca

SEQ ID NO: 1051295 - RNA, 19 nt, Artificial Sequence
  Description of Artificial Sequence: Synthetic oligonucleotide
  Antisense strand to SEQ ID NO: 1051294
ugggcuauggagauacagc

SEQ ID NO: 1051296 - RNA, 19 nt, Artificial Sequence
  Description of Artificial Sequence: Synthetic oligonucleotide
  Sense strand starting at position 2274 of SEQ ID NO: 915068
ucugaaugcguucaguuga

SEQ ID NO: 1051297 - RNA, 19 nt, Artificial Sequence
  Description of Artificial Sequence: Synthetic oligonucleotide
  Antisense strand to SEQ ID NO: 1051296
ucaacugaacgcauucaga

SEQ ID NO: 1051298 - RNA, 19 nt, Artificial Sequence
  Description of Artificial Sequence: Synthetic oligonucleotide
  Sense strand starting at position 2279 of SEQ ID NO: 915068
augcguucaguugagggaa

SEQ ID NO: 1051299 - RNA, 19 nt, Artificial Sequence
  Description of Artificial Sequence: Synthetic oligonucleotide
  Antisense strand to SEQ ID NO: 1051298
uucccucaacugaacgcau

SEQ ID NO: 1051300 - RNA, 19 nt, Artificial Sequence
  Description of Artificial Sequence: Synthetic oligonucleotide
  Sense strand starting at position 2407 of SEQ ID NO: 915068
agaacaggguugucuacaa

SEQ ID NO: 1051301 - RNA, 19 nt, Artificial Sequence
  Description of Artificial Sequence: Synthetic oligonucleotide
  Antisense strand to SEQ ID NO: 1051300
uuguagacaacccuguucu

SEQ ID NO: 1051302 - RNA, 19 nt, Artificial Sequence
  Description of Artificial Sequence: Synthetic oligonucleotide
  Sense strand starting at position 2473 of SEQ ID NO: 915068
ggaggacuuuccuuggccu

SEQ ID NO: 1051303 - RNA, 19 nt, Artificial Sequence
  Description of Artificial Sequence: Synthetic oligonucleotide
  Antisense strand to SEQ ID NO: 1051302
aggccaaggaaaguccucc

SEQ ID NO: 1051304 - RNA, 19 nt, Artificial Sequence
  Description of Artificial Sequence: Synthetic oligonucleotide
  Sense strand starting at position 2539 of SEQ ID NO: 915068
cugggauucccuuggccau

SEQ ID NO: 1051305 - RNA, 19 nt, Artificial Sequence
  Description of Artificial Sequence: Synthetic oligonucleotide
  Antisense strand to SEQ ID NO: 1051304
auggccaagggaaucccag

SEQ ID NO: 1051306 - RNA, 19 nt, Artificial Sequence
  Description of Artificial Sequence: Synthetic oligonucleotide
  Sense strand starting at position 2540 of SEQ ID NO: 915068
ugggauucccuuggccauu

SEQ ID NO: 1051307 - RNA, 19 nt, Artificial Sequence
  Description of Artificial Sequence: Synthetic oligonucleotide
  Antisense strand to SEQ ID NO: 1051306
aauggccaagggaauccca

SEQ ID NO: 1051308 - RNA, 19 nt, Artificial Sequence
  Description of Artificial Sequence: Synthetic oligonucleotide
  Sense strand starting at position 2629 of SEQ ID NO: 915068
ggucuaagucccgaggaug

SEQ ID NO: 1051309 - RNA, 19 nt, Artificial Sequence
  Description of Artificial Sequence: Synthetic oligonucleotide
  Antisense strand to SEQ ID NO: 1051308
cauccucgggacuuagacc

SEQ ID NO: 1051310 - RNA, 19 nt, Artificial Sequence
  Description of Artificial Sequence: Synthetic oligonucleotide
  Sense strand starting at position 2654 of SEQ ID NO: 915068
aagggaguccggugggaaa

SEQ ID NO: 1051311 - RNA, 19 nt, Artificial Sequence
  Description of Artificial Sequence: Synthetic oligonucleotide
  Antisense strand to SEQ ID NO: 1051310
uuucccaccggacucccuu

SEQ ID NO: 1051312 - RNA, 19 nt, Artificial Sequence
  Description of Artificial Sequence: Synthetic oligonucleotide
  Sense strand starting at position 2682 of SEQ ID NO: 915068
ugaauuuggcguugauccu

SEQ ID NO: 1051313 - RNA, 19 nt, Artificial Sequence
  Description of Artificial Sequence: Synthetic oligonucleotide
  Antisense strand to SEQ ID NO: 1051312
aggaucaacgccaaauuca

SEQ ID NO: 1051314 - RNA, 19 nt, Artificial Sequence
  Description of Artificial Sequence: Synthetic oligonucleotide
  Sense strand starting at position 2736 of SEQ ID NO: 915068
cgcuguagucugcagugau

SEQ ID NO: 1051315 - RNA, 19 nt, Artificial Sequence
  Description of Artificial Sequence: Synthetic oligonucleotide
  Antisense strand to SEQ ID NO: 1051314
aucacugcagacuacagcg

SEQ ID NO: 1051316 - RNA, 19 nt, Artificial Sequence
  Description of Artificial Sequence: Synthetic oligonucleotide
  Sense strand starting at position 3336 of SEQ ID NO: 915068
acagaugauugcucucuac

SEQ ID NO: 1051317 - RNA, 19 nt, Artificial Sequence
  Description of Artificial Sequence: Synthetic oligonucleotide
  Antisense strand to SEQ ID NO: 1051316
guagagagcaaucaucugu

SEQ ID NO: 1051318 - RNA, 19 nt, Artificial Sequence
  Description of Artificial Sequence: Synthetic oligonucleotide
  Sense strand starting at position 3371 of SEQ ID NO: 915068
cguucuuauccugggauuc

SEQ ID NO: 1051319 - RNA, 19 nt, Artificial Sequence
  Description of Artificial Sequence: Synthetic oligonucleotide
  Antisense strand to SEQ ID NO: 1051318
gaaucccaggauaagaacg

SEQ ID NO: 1051320 - RNA, 19 nt, Artificial Sequence
  Description of Artificial Sequence: Synthetic oligonucleotide
  Sense strand starting at position 3413 of SEQ ID NO: 915068
uagggaauguucuuaucug

SEQ ID NO: 1051321 - RNA, 19 nt, Artificial Sequence
  Description of Artificial Sequence: Synthetic oligonucleotide
  Antisense strand to SEQ ID NO: 1051320
cagauaagaacauucccua

SEQ ID NO: 1051322 - RNA, 19 nt, Artificial Sequence
  Description of Artificial Sequence: Synthetic oligonucleotide
  Sense strand starting at position 3414 of SEQ ID NO: 915068
agggaauguucuuaucuga

SEQ ID NO: 1051323 - RNA, 19 nt, Artificial Sequence
  Description of Artificial Sequence: Synthetic oligonucleotide
  Antisense strand to SEQ ID NO: 1051322
ucagauaagaacauucccu

SEQ ID NO: 1051324 - RNA, 19 nt, Artificial Sequence
  Description of Artificial Sequence: Synthetic oligonucleotide
  Sense strand starting at position 3428 of SEQ ID NO: 915068
ucugaaaucucguuugaug

SEQ ID NO: 1051325 - RNA, 19 nt, Artificial Sequence
  Description of Artificial Sequence: Synthetic oligonucleotide
  Antisense strand to SEQ ID NO: 1051324
caucaaacgagauuucaga

SEQ ID NO: 1051326 - RNA, 19 nt, Artificial Sequence
  Description of Artificial Sequence: Synthetic oligonucleotide
  Sense strand starting at position 3430 of SEQ ID NO: 915068
ugaaaucucguuugaugga

SEQ ID NO: 1051327 - RNA, 19 nt, Artificial Sequence
  Description of Artificial Sequence: Synthetic oligonucleotide
  Antisense strand to SEQ ID NO: 1051326
uccaucaaacgagauuuca

SEQ ID NO: 1051328 - RNA, 19 nt, Artificial Sequence
  Description of Artificial Sequence: Synthetic oligonucleotide
  Sense strand starting at position 3469 of SEQ ID NO: 915068
ucacuuaaguggcuggaaa

SEQ ID NO: 1051329 - RNA, 19 nt, Artificial Sequence
  Description of Artificial Sequence: Synthetic oligonucleotide
  Antisense strand to SEQ ID NO: 1051328
uuuccagccacuuaaguga

SEQ ID NO: 1051330 - RNA, 19 nt, Artificial Sequence
  Description of Artificial Sequence: Synthetic oligonucleotide
  Sense strand starting at position 3470 of SEQ ID NO: 915068
cacuuaaguggcuggaaau

SEQ ID NO: 1051331 - RNA, 19 nt, Artificial Sequence
  Description of Artificial Sequence: Synthetic oligonucleotide
  Antisense strand to SEQ ID NO: 1051330
auuuccagccacuuaagug

SEQ ID NO: 1051332 - RNA, 19 nt, Artificial Sequence
  Description of Artificial Sequence: Synthetic oligonucleotide
  Sense strand starting at position 3471 of SEQ ID NO: 915068
acuuaaguggcuggaaaug

SEQ ID NO: 1051333 - RNA, 19 nt, Artificial Sequence
  Description of Artificial Sequence: Synthetic oligonucleotide
  Antisense strand to SEQ ID NO: 1051332
cauuuccagccacuuaagu

SEQ ID NO: 1051334 - RNA, 19 nt, Artificial Sequence
  Description of Artificial Sequence: Synthetic oligonucleotide
  Sense strand starting at position 3651 of SEQ ID NO: 915068
ugaggagaaguaugucuua

SEQ ID NO: 1051335 - RNA, 19 nt, Artificial Sequence
  Description of Artificial Sequence: Synthetic oligonucleotide
  Antisense strand to SEQ ID NO: 1051334
uaagacauacuucuccuca

SEQ ID NO: 1051336 - RNA, 19 nt, Artificial Sequence
  Description of Artificial Sequence: Synthetic oligonucleotide
  Sense strand starting at position 3654 of SEQ ID NO: 915068
ggagaaguaugucuuagaa

SEQ ID NO: 1051337 - RNA, 19 nt, Artificial Sequence
  Description of Artificial Sequence: Synthetic oligonucleotide
  Antisense strand to SEQ ID NO: 1051336
uucuaagacauacuucucc

SEQ ID NO: 1051338 - RNA, 19 nt, Artificial Sequence
  Description of Artificial Sequence: Synthetic oligonucleotide
  Sense strand starting at position 3656 of SEQ ID NO: 915068
agaaguaugucuuagaaga

SEQ ID NO: 1051339 - RNA, 19 nt, Artificial Sequence
  Description of Artificial Sequence: Synthetic oligonucleotide
  Antisense strand to SEQ ID NO: 1051338
ucuucuaagacauacuucu

SEQ ID NO: 1051340 - RNA, 19 nt, Artificial Sequence
  Description of Artificial Sequence: Synthetic oligonucleotide
  Sense strand starting at position 3658 of SEQ ID NO: 915068
aaguaugucuuagaagagg

SEQ ID NO: 1051341 - RNA, 19 nt, Artificial Sequence
  Description of Artificial Sequence: Synthetic oligonucleotide
  Antisense strand to SEQ ID NO: 1051340
ccucuucuaagacauacuu

SEQ ID NO: 1051342 - RNA, 19 nt, Artificial Sequence
  Description of Artificial Sequence: Synthetic oligonucleotide
  Sense strand starting at position 3737 of SEQ ID NO: 915068
uccuguggucagugucaca

SEQ ID NO: 1051343 - RNA, 19 nt, Artificial Sequence
  Description of Artificial Sequence: Synthetic oligonucleotide
  Antisense strand to SEQ ID NO: 1051342
ugugacacugaccacagga

SEQ ID NO: 1051344 - RNA, 19 nt, Artificial Sequence
  Description of Artificial Sequence: Synthetic oligonucleotide
  Sense strand starting at position 3767 of SEQ ID NO: 915068
gggaacgauguccgcuuau

SEQ ID NO: 1051345 - RNA, 19 nt, Artificial Sequence
  Description of Artificial Sequence: Synthetic oligonucleotide
  Antisense strand to SEQ ID NO: 1051344
auaagcggacaucguuccc

SEQ ID NO: 1051346 - RNA, 19 nt, Artificial Sequence
  Description of Artificial Sequence: Synthetic oligonucleotide
  Sense strand starting at position 3831 of SEQ ID NO: 915068
augauuccuccuggacaug

SEQ ID NO: 1051347 - RNA, 19 nt, Artificial Sequence
  Description of Artificial Sequence: Synthetic oligonucleotide
  Antisense strand to SEQ ID NO: 1051346
cauguccaggaggaaucau

SEQ ID NO: 1051348 - RNA, 19 nt, Artificial Sequence
  Description of Artificial Sequence: Synthetic oligonucleotide
  Sense strand starting at position 62 of SEQ ID NO: 915069
aaguaagagcauuaggcau

SEQ ID NO: 1051349 - RNA, 19 nt, Artificial Sequence
  Description of Artificial Sequence: Synthetic oligonucleotide
  Antisense strand to SEQ ID NO: 1051348
augccuaaugcucuuacuu

SEQ ID NO: 1051350 - RNA, 19 nt, Artificial Sequence
  Description of Artificial Sequence: Synthetic oligonucleotide
  Sense strand starting at position 181 of SEQ ID NO: 915069
cagggagauuuguaacaac

SEQ ID NO: 1051351 - RNA, 19 nt, Artificial Sequence
  Description of Artificial Sequence: Synthetic oligonucleotide
  Antisense strand to SEQ ID NO: 1051350
guuguuacaaaucucccug

SEQ ID NO: 1051352 - RNA, 19 nt, Artificial Sequence
  Description of Artificial Sequence: Synthetic oligonucleotide
  Sense strand starting at position 184 of SEQ ID NO: 915069
ggagauuuguaacaacagu

SEQ ID NO: 1051353 - RNA, 19 nt, Artificial Sequence
  Description of Artificial Sequence: Synthetic oligonucleotide
  Antisense strand to SEQ ID NO: 1051352
acuguuguuacaaaucucc

SEQ ID NO: 1051354 - RNA, 19 nt, Artificial Sequence
  Description of Artificial Sequence: Synthetic oligonucleotide
  Sense strand starting at position 209 of SEQ ID NO: 915069
aaugaauugcgaggacaac

SEQ ID NO: 1051355 - RNA, 19 nt, Artificial Sequence
  Description of Artificial Sequence: Synthetic oligonucleotide
  Antisense strand to SEQ ID NO: 1051354
guuguccucgcaauucauu

SEQ ID NO: 1051356 - RNA, 19 nt, Artificial Sequence
  Description of Artificial Sequence: Synthetic oligonucleotide
  Sense strand starting at position 260 of SEQ ID NO: 915069
gaaguaauggcaggcacau

SEQ ID NO: 1051357 - RNA, 19 nt, Artificial Sequence
  Description of Artificial Sequence: Synthetic oligonucleotide
  Antisense strand to SEQ ID NO: 1051356
augugccugccauuacuuc

SEQ ID NO: 1051358 - RNA, 19 nt, Artificial Sequence
  Description of Artificial Sequence: Synthetic oligonucleotide
  Sense strand starting at position 373 of SEQ ID NO: 915069
gcaggaagucagcagagua

SEQ ID NO: 1051359 - RNA, 19 nt, Artificial Sequence
  Description of Artificial Sequence: Synthetic oligonucleotide
  Antisense strand to SEQ ID NO: 1051358
uacucugcugacuuccugc

SEQ ID NO: 1051360 - RNA, 19 nt, Artificial Sequence
  Description of Artificial Sequence: Synthetic oligonucleotide
  Sense strand starting at position 414 of SEQ ID NO: 915069
cucacacaucgaugugaau

SEQ ID NO: 1051361 - RNA, 19 nt, Artificial Sequence
  Description of Artificial Sequence: Synthetic oligonucleotide
  Antisense strand to SEQ ID NO: 1051360
auucacaucgaugugugag

SEQ ID NO: 1051362 - RNA, 19 nt, Artificial Sequence
  Description of Artificial Sequence: Synthetic oligonucleotide
  Sense strand starting at position 568 of SEQ ID NO: 915069
gguguccuacuguaaucua

SEQ ID NO: 1051363 - RNA, 19 nt, Artificial Sequence
  Description of Artificial Sequence: Synthetic oligonucleotide
  Antisense strand to SEQ ID NO: 1051362
uagauuacaguaggacacc

SEQ ID NO: 1051364 - RNA, 19 nt, Artificial Sequence
  Description of Artificial Sequence: Synthetic oligonucleotide
  Sense strand starting at position 681 of SEQ ID NO: 915069
caguacugaggcugagaaa

SEQ ID NO: 1051365 - RNA, 19 nt, Artificial Sequence
  Description of Artificial Sequence: Synthetic oligonucleotide
  Antisense strand to SEQ ID NO: 1051364
uuucucagccucaguacug

SEQ ID NO: 1051366 - RNA, 19 nt, Artificial Sequence
  Description of Artificial Sequence: Synthetic oligonucleotide
  Sense strand starting at position 703 of SEQ ID NO: 915069
uguuuaagacuauaguuac

SEQ ID NO: 1051367 - RNA, 19 nt, Artificial Sequence
  Description of Artificial Sequence: Synthetic oligonucleotide
  Antisense strand to SEQ ID NO: 1051366
guaacuauagucuuaaaca

SEQ ID NO: 1051368 - RNA, 19 nt, Artificial Sequence
  Description of Artificial Sequence: Synthetic oligonucleotide
  Sense strand starting at position 709 of SEQ ID NO: 915069
agacuauaguuaccgaaac

SEQ ID NO: 1051369 - RNA, 19 nt, Artificial Sequence
  Description of Artificial Sequence: Synthetic oligonucleotide
  Antisense strand to SEQ ID NO: 1051368
guuucgguaacuauagucu

SEQ ID NO: 1051370 - RNA, 19 nt, Artificial Sequence
  Description of Artificial Sequence: Synthetic oligonucleotide
  Sense strand starting at position 833 of SEQ ID NO: 915069
guggaaccauuuccguuua

SEQ ID NO: 1051371 - RNA, 19 nt, Artificial Sequence
  Description of Artificial Sequence: Synthetic oligonucleotide
  Antisense strand to SEQ ID NO: 1051370
uaaacggaaaugguuccac

SEQ ID NO: 1051372 - RNA, 19 nt, Artificial Sequence
  Description of Artificial Sequence: Synthetic oligonucleotide
  Sense strand starting at position 838 of SEQ ID NO: 915069
accauuuccguuuaacguu

SEQ ID NO: 1051373 - RNA, 19 nt, Artificial Sequence
  Description of Artificial Sequence: Synthetic oligonucleotide
  Antisense strand to SEQ ID NO: 1051372
aacguuaaacggaaauggu

SEQ ID NO: 1051374 - RNA, 19 nt, Artificial Sequence
  Description of Artificial Sequence: Synthetic oligonucleotide
  Sense strand starting at position 845 of SEQ ID NO: 915069
ccguuuaacguuuccugca

SEQ ID NO: 1051375 - RNA, 19 nt, Artificial Sequence
  Description of Artificial Sequence: Synthetic oligonucleotide
  Antisense strand to SEQ ID NO: 1051374
ugcaggaaacguuaaacgg

SEQ ID NO: 1051376 - RNA, 19 nt, Artificial Sequence
  Description of Artificial Sequence: Synthetic oligonucleotide
  Sense strand starting at position 930 of SEQ ID NO: 915069
gcacaagacaaauggguuu

SEQ ID NO: 1051377 - RNA, 19 nt, Artificial Sequence
  Description of Artificial Sequence: Synthetic oligonucleotide
  Antisense strand to SEQ ID NO: 1051376
aaacccauuugucuugugc

SEQ ID NO: 1051378 - RNA, 19 nt, Artificial Sequence
  Description of Artificial Sequence: Synthetic oligonucleotide
  Sense strand starting at position 980 of SEQ ID NO: 915069
gugaauacuaugggagguu

SEQ ID NO: 1051379 - RNA, 19 nt, Artificial Sequence
  Description of Artificial Sequence: Synthetic oligonucleotide
  Antisense strand to SEQ ID NO: 1051378
aaccucccauaguauucac

SEQ ID NO: 1051380 - RNA, 19 nt, Artificial Sequence
  Description of Artificial Sequence: Synthetic oligonucleotide
  Sense strand starting at position 1383 of SEQ ID NO: 915069
ccaaauucguaguuauaag

SEQ ID NO: 1051381 - RNA, 19 nt, Artificial Sequence
  Description of Artificial Sequence: Synthetic oligonucleotide
  Antisense strand to SEQ ID NO: 1051380
cuuauaacuacgaauuugg

SEQ ID NO: 1051382 - RNA, 19 nt, Artificial Sequence
  Description of Artificial Sequence: Synthetic oligonucleotide
  Sense strand starting at position 1422 of SEQ ID NO: 915069
ccaggaaggucucucuaca

SEQ ID NO: 1051383 - RNA, 19 nt, Artificial Sequence
  Description of Artificial Sequence: Synthetic oligonucleotide
  Antisense strand to SEQ ID NO: 1051382
uguagagagaccuuccugg

SEQ ID NO: 1051384 - RNA, 19 nt, Artificial Sequence
  Description of Artificial Sequence: Synthetic oligonucleotide
  Sense strand starting at position 1788 of SEQ ID NO: 915069
aaccuuuggccucaaaggu

SEQ ID NO: 1051385 - RNA, 19 nt, Artificial Sequence
  Description of Artificial Sequence: Synthetic oligonucleotide
  Antisense strand to SEQ ID NO: 1051384
accuuugaggccaaagguu

SEQ ID NO: 1051386 - RNA, 19 nt, Artificial Sequence
  Description of Artificial Sequence: Synthetic oligonucleotide
  Sense strand starting at position 1874 of SEQ ID NO: 915069
gggcuacguccgaggguaa

SEQ ID NO: 1051387 - RNA, 19 nt, Artificial Sequence
  Description of Artificial Sequence: Synthetic oligonucleotide
  Antisense strand to SEQ ID NO: 1051386
uuacccucggacguagccc

SEQ ID NO: 1051388 - RNA, 19 nt, Artificial Sequence
  Description of Artificial Sequence: Synthetic oligonucleotide
  Sense strand starting at position 2571 of SEQ ID NO: 915069
gcggcuucugcgcugggaa

SEQ ID NO: 1051389 - RNA, 19 nt, Artificial Sequence
  Description of Artificial Sequence: Synthetic oligonucleotide
  Antisense strand to SEQ ID NO: 1051388
uucccagcgcagaagccgc

SEQ ID NO: 1051390 - RNA, 19 nt, Artificial Sequence
  Description of Artificial Sequence: Synthetic oligonucleotide
  Sense strand starting at position 2802 of SEQ ID NO: 915069
cagauuuaacuacgcgacu

SEQ ID NO: 1051391 - RNA, 19 nt, Artificial Sequence
  Description of Artificial Sequence: Synthetic oligonucleotide
  Antisense strand to SEQ ID NO: 1051390
agucgcguaguuaaaucug

SEQ ID NO: 1051392 - RNA, 19 nt, Artificial Sequence
  Description of Artificial Sequence: Synthetic oligonucleotide
  Sense strand starting at position 2862 of SEQ ID NO: 915069
uuagucagcgagcauuuau

SEQ ID NO: 1051393 - RNA, 19 nt, Artificial Sequence
  Description of Artificial Sequence: Synthetic oligonucleotide
  Antisense strand to SEQ ID NO: 1051392
auaaaugcucgcugacuaa

SEQ ID NO: 1051394 - RNA, 19 nt, Artificial Sequence
  Description of Artificial Sequence: Synthetic oligonucleotide
  Sense strand starting at position 2924 of SEQ ID NO: 915069
gaaucauacggcuggaauu

SEQ ID NO: 1051395 - RNA, 19 nt, Artificial Sequence
  Description of Artificial Sequence: Synthetic oligonucleotide
  Antisense strand to SEQ ID NO: 1051394
aauuccagccguaugauuc

SEQ ID NO: 1051396 - RNA, 19 nt, Artificial Sequence
  Description of Artificial Sequence: Synthetic oligonucleotide
  Sense strand starting at position 2974 of SEQ ID NO: 915069
cugucuugugaagauaagu

SEQ ID NO: 1051397 - RNA, 19 nt, Artificial Sequence
  Description of Artificial Sequence: Synthetic oligonucleotide
  Antisense strand to SEQ ID NO: 1051396
acuuaucuucacaagacag

SEQ ID NO: 1051398 - RNA, 19 nt, Artificial Sequence
  Description of Artificial Sequence: Synthetic oligonucleotide
  Sense strand starting at position 2979 of SEQ ID NO: 915069
uugugaagauaagugagau

SEQ ID NO: 1051399 - RNA, 19 nt, Artificial Sequence
  Description of Artificial Sequence: Synthetic oligonucleotide
  Antisense strand to SEQ ID NO: 1051398
aucucacuuaucuucacaa

SEQ ID NO: 1051400 - RNA, 19 nt, Artificial Sequence
  Description of Artificial Sequence: Synthetic oligonucleotide
  Sense strand starting at position 3024 of SEQ ID NO: 915069
gagcguuagcugcuguauu

SEQ ID NO: 1051401 - RNA, 19 nt, Artificial Sequence
  Description of Artificial Sequence: Synthetic oligonucleotide
  Antisense strand to SEQ ID NO: 1051400
aauacagcagcuaacgcuc

SEQ ID NO: 1051402 - RNA, 19 nt, Artificial Sequence
  Description of Artificial Sequence: Synthetic oligonucleotide
  Sense strand starting at position 3140 of SEQ ID NO: 915069
ucagccugagacuaucaau

SEQ ID NO: 1051403 - RNA, 19 nt, Artificial Sequence
  Description of Artificial Sequence: Synthetic oligonucleotide
  Antisense strand to SEQ ID NO: 1051402
auugauagucucaggcuga

SEQ ID NO: 1051404 - RNA, 19 nt, Artificial Sequence
  Description of Artificial Sequence: Synthetic oligonucleotide
  Sense strand starting at position 3270 of SEQ ID NO: 915069
gcgugaggccuggcauuga

SEQ ID NO: 1051405 - RNA, 19 nt, Artificial Sequence
  Description of Artificial Sequence: Synthetic oligonucleotide
  Antisense strand to SEQ ID NO: 1051404
ucaaugccaggccucacgc

SEQ ID NO: 1051406 - RNA, 19 nt, Artificial Sequence
  Description of Artificial Sequence: Synthetic oligonucleotide
  Sense strand starting at position 3274 of SEQ ID NO: 915069
gaggccuggcauugaauga

SEQ ID NO: 1051407 - RNA, 19 nt, Artificial Sequence
  Description of Artificial Sequence: Synthetic oligonucleotide
  Antisense strand to SEQ ID NO: 1051406
ucauucaaugccaggccuc

SEQ ID NO: 1051408 - RNA, 19 nt, Artificial Sequence
  Description of Artificial Sequence: Synthetic oligonucleotide
  Sense strand starting at position 3363 of SEQ ID NO: 915069
ugagguaugagcggaagaa

SEQ ID NO: 1051409 - RNA, 19 nt, Artificial Sequence
  Description of Artificial Sequence: Synthetic oligonucleotide
  Antisense strand to SEQ ID NO: 1051408
uucuuccgcucauaccuca

SEQ ID NO: 1051410 - RNA, 19 nt, Artificial Sequence
  Description of Artificial Sequence: Synthetic oligonucleotide
  Sense strand starting at position 3404 of SEQ ID NO: 915069
acagucauaacggaaguua

SEQ ID NO: 1051411 - RNA, 19 nt, Artificial Sequence
  Description of Artificial Sequence: Synthetic oligonucleotide
  Antisense strand to SEQ ID NO: 1051410
uaacuuccguuaugacugu

SEQ ID NO: 1051412 - RNA, 19 nt, Artificial Sequence
  Description of Artificial Sequence: Synthetic oligonucleotide
  Sense strand starting at position 3418 of SEQ ID NO: 915069
aguuaauaugaucauugcu

SEQ ID NO: 1051413 - RNA, 19 nt, Artificial Sequence
  Description of Artificial Sequence: Synthetic oligonucleotide
  Antisense strand to SEQ ID NO: 1051412
agcaaugaucauauuaacu

SEQ ID NO: 1051414 - RNA, 19 nt, Artificial Sequence
  Description of Artificial Sequence: Synthetic oligonucleotide
  Sense strand starting at position 3469 of SEQ ID NO: 915069
guauauggguccuuaaagg

SEQ ID NO: 1051415 - RNA, 19 nt, Artificial Sequence
  Description of Artificial Sequence: Synthetic oligonucleotide
  Antisense strand to SEQ ID NO: 1051414
ccuuuaaggacccauauac

SEQ ID NO: 1051416 - RNA, 19 nt, Artificial Sequence
  Description of Artificial Sequence: Synthetic oligonucleotide
  Sense strand starting at position 3557 of SEQ ID NO: 915069
gugaacuugcucuagauua

SEQ ID NO: 1051417 - RNA, 19 nt, Artificial Sequence
  Description of Artificial Sequence: Synthetic oligonucleotide
  Antisense strand to SEQ ID NO: 1051416
uaaucuagagcaaguucac

SEQ ID NO: 1051418 - RNA, 19 nt, Artificial Sequence
  Description of Artificial Sequence: Synthetic oligonucleotide
  Sense strand starting at position 3675 of SEQ ID NO: 915069
aguuauuucuaggaagaug

SEQ ID NO: 1051419 - RNA, 19 nt, Artificial Sequence
  Description of Artificial Sequence: Synthetic oligonucleotide
  Antisense strand to SEQ ID NO: 1051418
caucuuccuagaaauaacu

SEQ ID NO: 1051420 - RNA, 19 nt, Artificial Sequence
  Description of Artificial Sequence: Synthetic oligonucleotide
  Sense strand starting at position 3726 of SEQ ID NO: 915069
gggucaacuugguugagau

SEQ ID NO: 1051421 - RNA, 19 nt, Artificial Sequence
  Description of Artificial Sequence: Synthetic oligonucleotide
  Antisense strand to SEQ ID NO: 1051420
aucucaaccaaguugaccc

SEQ ID NO: 1051422 - RNA, 19 nt, Artificial Sequence
  Description of Artificial Sequence: Synthetic oligonucleotide
  Sense strand starting at position 3727 of SEQ ID NO: 915069
ggucaacuugguugagauc

SEQ ID NO: 1051423 - RNA, 19 nt, Artificial Sequence
  Description of Artificial Sequence: Synthetic oligonucleotide
  Antisense strand to SEQ ID NO: 1051422
gaucucaaccaaguugacc

SEQ ID NO: 1051424 - RNA, 19 nt, Artificial Sequence
  Description of Artificial Sequence: Synthetic oligonucleotide
  Sense strand starting at position 3881 of SEQ ID NO: 915069
cucauacucuaguugacua

SEQ ID NO: 1051425 - RNA, 19 nt, Artificial Sequence
  Description of Artificial Sequence: Synthetic oligonucleotide
  Antisense strand to SEQ ID NO: 1051424
uagucaacuagaguaugag

SEQ ID NO: 1051426 - RNA, 19 nt, Artificial Sequence
  Description of Artificial Sequence: Synthetic oligonucleotide
  Sense strand starting at position 3944 of SEQ ID NO: 915069
guucuuuaacauuguagaa

SEQ ID NO: 1051427 - RNA, 19 nt, Artificial Sequence
  Description of Artificial Sequence: Synthetic oligonucleotide
  Antisense strand to SEQ ID NO: 1051426
uucuacaauguuaaagaac

SEQ ID NO: 1051428 - RNA, 19 nt, Artificial Sequence
  Description of Artificial Sequence: Synthetic oligonucleotide
  Sense strand starting at position 185 of SEQ ID NO: 915070
cagcguccuagcugggaaa

SEQ ID NO: 1051429 - RNA, 19 nt, Artificial Sequence
  Description of Artificial Sequence: Synthetic oligonucleotide
  Antisense strand to SEQ ID NO: 1051428
uuucccagcuaggacgcug

SEQ ID NO: 1051430 - RNA, 19 nt, Artificial Sequence
  Description of Artificial Sequence: Synthetic oligonucleotide
  Sense strand starting at position 187 of SEQ ID NO: 915070
gcguccuagcugggaaacu

SEQ ID NO: 1051431 - RNA, 19 nt, Artificial Sequence
  Description of Artificial Sequence: Synthetic oligonucleotide
  Antisense strand to SEQ ID NO: 1051430
aguuucccagcuaggacgc

SEQ ID NO: 1051432 - RNA, 19 nt, Artificial Sequence
  Description of Artificial Sequence: Synthetic oligonucleotide
  Sense strand starting at position 287 of SEQ ID NO: 915070
ggacuagucacuuguaguu

SEQ ID NO: 1051433 - RNA, 19 nt, Artificial Sequence
  Description of Artificial Sequence: Synthetic oligonucleotide
  Antisense strand to SEQ ID NO: 1051432
aacuacaagugacuagucc

SEQ ID NO: 1051434 - RNA, 19 nt, Artificial Sequence
  Description of Artificial Sequence: Synthetic oligonucleotide
  Sense strand starting at position 292 of SEQ ID NO: 915070
agucacuuguaguuucuua

SEQ ID NO: 1051435 - RNA, 19 nt, Artificial Sequence
  Description of Artificial Sequence: Synthetic oligonucleotide
  Antisense strand to SEQ ID NO: 1051434
uaagaaacuacaagugacu

SEQ ID NO: 1051436 - RNA, 19 nt, Artificial Sequence
  Description of Artificial Sequence: Synthetic oligonucleotide
  Sense strand starting at position 296 of SEQ ID NO: 915070
acuuguaguuucuuacauc

SEQ ID NO: 1051437 - RNA, 19 nt, Artificial Sequence
  Description of Artificial Sequence: Synthetic oligonucleotide
  Antisense strand to SEQ ID NO: 1051436
gauguaagaaacuacaagu

SEQ ID NO: 1051438 - RNA, 19 nt, Artificial Sequence
  Description of Artificial Sequence: Synthetic oligonucleotide
  Sense strand starting at position 328 of SEQ ID NO: 915070
ugaagauguuaauccuugu

SEQ ID NO: 1051439 - RNA, 19 nt, Artificial Sequence
  Description of Artificial Sequence: Synthetic oligonucleotide
  Antisense strand to SEQ ID NO: 1051438
acaaggauuaacaucuuca

SEQ ID NO: 1051440 - RNA, 19 nt, Artificial Sequence
  Description of Artificial Sequence: Synthetic oligonucleotide
  Sense strand starting at position 334 of SEQ ID NO: 915070
uguuaauccuugucccuuu

SEQ ID NO: 1051441 - RNA, 19 nt, Artificial Sequence
  Description of Artificial Sequence: Synthetic oligonucleotide
  Antisense strand to SEQ ID NO: 1051440
aaagggacaaggauuaaca

SEQ ID NO: 1051442 - RNA, 19 nt, Artificial Sequence
  Description of Artificial Sequence: Synthetic oligonucleotide
  Sense strand starting at position 547 of SEQ ID NO: 915070
uggacugcucucuggagga

SEQ ID NO: 1051443 - RNA, 19 nt, Artificial Sequence
  Description of Artificial Sequence: Synthetic oligonucleotide
  Antisense strand to SEQ ID NO: 1051442
uccuccagagagcagucca

SEQ ID NO: 1051444 - RNA, 19 nt, Artificial Sequence
  Description of Artificial Sequence: Synthetic oligonucleotide
  Sense strand starting at position 871 of SEQ ID NO: 915070
guacuaaggcuuuauuaua

SEQ ID NO: 1051445 - RNA, 19 nt, Artificial Sequence
  Description of Artificial Sequence: Synthetic oligonucleotide
  Antisense strand to SEQ ID NO: 1051444
uauaauaaagccuuaguac

SEQ ID NO: 1051446 - RNA, 19 nt, Artificial Sequence
  Description of Artificial Sequence: Synthetic oligonucleotide
  Sense strand starting at position 1052 of SEQ ID NO: 915070
auaauaucccucugagguc

SEQ ID NO: 1051447 - RNA, 19 nt, Artificial Sequence
  Description of Artificial Sequence: Synthetic oligonucleotide
  Antisense strand to SEQ ID NO: 1051446
gaccucagagggauauuau

SEQ ID NO: 1051448 - RNA, 19 nt, Artificial Sequence
  Description of Artificial Sequence: Synthetic oligonucleotide
  Sense strand starting at position 1119 of SEQ ID NO: 915070
gcuggaacucagugcuauu

SEQ ID NO: 1051449 - RNA, 19 nt, Artificial Sequence
  Description of Artificial Sequence: Synthetic oligonucleotide
  Antisense strand to SEQ ID NO: 1051448
aauagcacugaguuccagc

SEQ ID NO: 1051450 - RNA, 19 nt, Artificial Sequence
  Description of Artificial Sequence: Synthetic oligonucleotide
  Sense strand starting at position 1153 of SEQ ID NO: 915070
aggacacuaucgccucaaa

SEQ ID NO: 1051451 - RNA, 19 nt, Artificial Sequence
  Description of Artificial Sequence: Synthetic oligonucleotide
  Antisense strand to SEQ ID NO: 1051450
uuugaggcgauaguguccu

SEQ ID NO: 1051452 - RNA, 19 nt, Artificial Sequence
  Description of Artificial Sequence: Synthetic oligonucleotide
  Sense strand starting at position 1178 of SEQ ID NO: 915070
ggcugaagcaaucagguuu

SEQ ID NO: 1051453 - RNA, 19 nt, Artificial Sequence
  Description of Artificial Sequence: Synthetic oligonucleotide
  Antisense strand to SEQ ID NO: 1051452
aaaccugauugcuucagcc

SEQ ID NO: 1051454 - RNA, 19 nt, Artificial Sequence
  Description of Artificial Sequence: Synthetic oligonucleotide
  Sense strand starting at position 1200 of SEQ ID NO: 915070
cuuccugaguaucugagau

SEQ ID NO: 1051455 - RNA, 19 nt, Artificial Sequence
  Description of Artificial Sequence: Synthetic oligonucleotide
  Antisense strand to SEQ ID NO: 1051454
aucucagauacucaggaag

SEQ ID NO: 1051456 - RNA, 19 nt, Artificial Sequence
  Description of Artificial Sequence: Synthetic oligonucleotide
  Sense strand starting at position 1295 of SEQ ID NO: 915070
gagauuaaguaacuauggu

SEQ ID NO: 1051457 - RNA, 19 nt, Artificial Sequence
  Description of Artificial Sequence: Synthetic oligonucleotide
  Antisense strand to SEQ ID NO: 1051456
accauaguuacuuaaucuc

SEQ ID NO: 1051458 - RNA, 19 nt, Artificial Sequence
  Description of Artificial Sequence: Synthetic oligonucleotide
  Sense strand starting at position 1507 of SEQ ID NO: 915070
agugaaacacgcugcuuau

SEQ ID NO: 1051459 - RNA, 19 nt, Artificial Sequence
  Description of Artificial Sequence: Synthetic oligonucleotide
  Antisense strand to SEQ ID NO: 1051458
auaagcagcguguuucacu

SEQ ID NO: 1051460 - RNA, 19 nt, Artificial Sequence
  Description of Artificial Sequence: Synthetic oligonucleotide
  Sense strand starting at position 1513 of SEQ ID NO: 915070
acacgcugcuuauuagaga

SEQ ID NO: 1051461 - RNA, 19 nt, Artificial Sequence
  Description of Artificial Sequence: Synthetic oligonucleotide
  Antisense strand to SEQ ID NO: 1051460
ucucuaauaagcagcgugu

SEQ ID NO: 1051462 - RNA, 19 nt, Artificial Sequence
  Description of Artificial Sequence: Synthetic oligonucleotide
  Sense strand starting at position 1626 of SEQ ID NO: 915070
ugaguuauucugggaccca

SEQ ID NO: 1051463 - RNA, 19 nt, Artificial Sequence
  Description of Artificial Sequence: Synthetic oligonucleotide
  Antisense strand to SEQ ID NO: 1051462
ugggucccagaauaacuca

SEQ ID NO: 1051464 - RNA, 19 nt, Artificial Sequence
  Description of Artificial Sequence: Synthetic oligonucleotide
  Sense strand starting at position 2127 of SEQ ID NO: 915070
guggcauuucccugcagac

SEQ ID NO: 1051465 - RNA, 19 nt, Artificial Sequence
  Description of Artificial Sequence: Synthetic oligonucleotide
  Antisense strand to SEQ ID NO: 1051464
gucugcagggaaaugccac

SEQ ID NO: 1051466 - RNA, 19 nt, Artificial Sequence
  Description of Artificial Sequence: Synthetic oligonucleotide
  Sense strand starting at position 2518 of SEQ ID NO: 915070
aggagagccuuugauagga

SEQ ID NO: 1051467 - RNA, 19 nt, Artificial Sequence
  Description of Artificial Sequence: Synthetic oligonucleotide
  Antisense strand to SEQ ID NO: 1051466
uccuaucaaaggcucuccu

SEQ ID NO: 1051468 - RNA, 19 nt, Artificial Sequence
  Description of Artificial Sequence: Synthetic oligonucleotide
  Sense strand starting at position 2520 of SEQ ID NO: 915070
gagagccuuugauaggaaa

SEQ ID NO: 1051469 - RNA, 19 nt, Artificial Sequence
  Description of Artificial Sequence: Synthetic oligonucleotide
  Antisense strand to SEQ ID NO: 1051468
uuuccuaucaaaggcucuc

SEQ ID NO: 1051470 - RNA, 19 nt, Artificial Sequence
  Description of Artificial Sequence: Synthetic oligonucleotide
  Sense strand starting at position 2534 of SEQ ID NO: 915070
ggaaaucugcuaugagcag

SEQ ID NO: 1051471 - RNA, 19 nt, Artificial Sequence
  Description of Artificial Sequence: Synthetic oligonucleotide
  Antisense strand to SEQ ID NO: 1051470
cugcucauagcagauuucc

SEQ ID NO: 1051472 - RNA, 19 nt, Artificial Sequence
  Description of Artificial Sequence: Synthetic oligonucleotide
  Sense strand starting at position 2699 of SEQ ID NO: 915070
cugagacuauagucauucu

SEQ ID NO: 1051473 - RNA, 19 nt, Artificial Sequence
  Description of Artificial Sequence: Synthetic oligonucleotide
  Antisense strand to SEQ ID NO: 1051472
agaaugacuauagucucag

SEQ ID NO: 1051474 - RNA, 19 nt, Artificial Sequence
  Description of Artificial Sequence: Synthetic oligonucleotide
  Sense strand starting at position 2833 of SEQ ID NO: 915070
uagguacuguguuccuauu

SEQ ID NO: 1051475 - RNA, 19 nt, Artificial Sequence
  Description of Artificial Sequence: Synthetic oligonucleotide
  Antisense strand to SEQ ID NO: 1051474
aauaggaacacaguaccua

SEQ ID NO: 1051476 - RNA, 19 nt, Artificial Sequence
  Description of Artificial Sequence: Synthetic oligonucleotide
  Sense strand starting at position 2839 of SEQ ID NO: 915070
cuguguuccuauuuguuga

SEQ ID NO: 1051477 - RNA, 19 nt, Artificial Sequence
  Description of Artificial Sequence: Synthetic oligonucleotide
  Antisense strand to SEQ ID NO: 1051476
ucaacaaauaggaacacag

SEQ ID NO: 1051478 - RNA, 19 nt, Artificial Sequence
  Description of Artificial Sequence: Synthetic oligonucleotide
  Sense strand starting at position 2840 of SEQ ID NO: 915070
uguguuccuauuuguugaa

SEQ ID NO: 1051479 - RNA, 19 nt, Artificial Sequence
  Description of Artificial Sequence: Synthetic oligonucleotide
  Antisense strand to SEQ ID NO: 1051478
uucaacaaauaggaacaca

SEQ ID NO: 1051480 - RNA, 19 nt, Artificial Sequence
  Description of Artificial Sequence: Synthetic oligonucleotide
  Sense strand starting at position 2841 of SEQ ID NO: 915070
guguuccuauuuguugaau

SEQ ID NO: 1051481 - RNA, 19 nt, Artificial Sequence
  Description of Artificial Sequence: Synthetic oligonucleotide
  Antisense strand to SEQ ID NO: 1051480
auucaacaaauaggaacac

SEQ ID NO: 1051482 - RNA, 19 nt, Artificial Sequence
  Description of Artificial Sequence: Synthetic oligonucleotide
  Sense strand starting at position 2843 of SEQ ID NO: 915070
guuccuauuuguugaauga

SEQ ID NO: 1051483 - RNA, 19 nt, Artificial Sequence
  Description of Artificial Sequence: Synthetic oligonucleotide
  Antisense strand to SEQ ID NO: 1051482
ucauucaacaaauaggaac

SEQ ID NO: 1051484 - RNA, 19 nt, Artificial Sequence
  Description of Artificial Sequence: Synthetic oligonucleotide
  Sense strand starting at position 3199 of SEQ ID NO: 915070
ucgucuaucccguacuuau

SEQ ID NO: 1051485 - RNA, 19 nt, Artificial Sequence
  Description of Artificial Sequence: Synthetic oligonucleotide
  Antisense strand to SEQ ID NO: 1051484
auaaguacgggauagacga

SEQ ID NO: 1051486 - RNA, 19 nt, Artificial Sequence
  Description of Artificial Sequence: Synthetic oligonucleotide
  Sense strand starting at position 3377 of SEQ ID NO: 915070
ucacaacugcuguagucaa

SEQ ID NO: 1051487 - RNA, 19 nt, Artificial Sequence
  Description of Artificial Sequence: Synthetic oligonucleotide
  Antisense strand to SEQ ID NO: 1051486
uugacuacagcaguuguga

SEQ ID NO: 1051488 - RNA, 19 nt, Artificial Sequence
  Description of Artificial Sequence: Synthetic oligonucleotide
  Sense strand starting at position 3463 of SEQ ID NO: 915070
ucuuauuaccuaugugauc

SEQ ID NO: 1051489 - RNA, 19 nt, Artificial Sequence
  Description of Artificial Sequence: Synthetic oligonucleotide
  Antisense strand to SEQ ID NO: 1051488
gaucacauagguaauaaga

SEQ ID NO: 1051490 - RNA, 19 nt, Artificial Sequence
  Description of Artificial Sequence: Synthetic oligonucleotide
  Sense strand starting at position 3464 of SEQ ID NO: 915070
cuuauuaccuaugugaucu

SEQ ID NO: 1051491 - RNA, 19 nt, Artificial Sequence
  Description of Artificial Sequence: Synthetic oligonucleotide
  Antisense strand to SEQ ID NO: 1051490
agaucacauagguaauaag

SEQ ID NO: 1051492 - RNA, 19 nt, Artificial Sequence
  Description of Artificial Sequence: Synthetic oligonucleotide
  Sense strand starting at position 3468 of SEQ ID NO: 915070
uuaccuaugugaucuugau

SEQ ID NO: 1051493 - RNA, 19 nt, Artificial Sequence
  Description of Artificial Sequence: Synthetic oligonucleotide
  Antisense strand to SEQ ID NO: 1051492
aucaagaucacauagguaa

SEQ ID NO: 1051494 - RNA, 19 nt, Artificial Sequence
  Description of Artificial Sequence: Synthetic oligonucleotide
  Sense strand starting at position 3474 of SEQ ID NO: 915070
augugaucuugauugagca

SEQ ID NO: 1051495 - RNA, 19 nt, Artificial Sequence
  Description of Artificial Sequence: Synthetic oligonucleotide
  Antisense strand to SEQ ID NO: 1051494
ugcucaaucaagaucacau

SEQ ID NO: 1051496 - RNA, 19 nt, Artificial Sequence
  Description of Artificial Sequence: Synthetic oligonucleotide
  Sense strand starting at position 3475 of SEQ ID NO: 915070
ugugaucuugauugagcaa

SEQ ID NO: 1051497 - RNA, 19 nt, Artificial Sequence
  Description of Artificial Sequence: Synthetic oligonucleotide
  Antisense strand to SEQ ID NO: 1051496
uugcucaaucaagaucaca

SEQ ID NO: 1051498 - RNA, 19 nt, Artificial Sequence
  Description of Artificial Sequence: Synthetic oligonucleotide
  Sense strand starting at position 3476 of SEQ ID NO: 915070
gugaucuugauugagcaag

SEQ ID NO: 1051499 - RNA, 19 nt, Artificial Sequence
  Description of Artificial Sequence: Synthetic oligonucleotide
  Antisense strand to SEQ ID NO: 1051498
cuugcucaaucaagaucac

SEQ ID NO: 1051500 - RNA, 19 nt, Artificial Sequence
  Description of Artificial Sequence: Synthetic oligonucleotide
  Sense strand starting at position 3478 of SEQ ID NO: 915070
gaucuugauugagcaaguu

SEQ ID NO: 1051501 - RNA, 19 nt, Artificial Sequence
  Description of Artificial Sequence: Synthetic oligonucleotide
  Antisense strand to SEQ ID NO: 1051500
aacuugcucaaucaagauc

SEQ ID NO: 1051502 - RNA, 19 nt, Artificial Sequence
  Description of Artificial Sequence: Synthetic oligonucleotide
  Sense strand starting at position 3497 of SEQ ID NO: 915070
acuuaacgucucugaaucu

SEQ ID NO: 1051503 - RNA, 19 nt, Artificial Sequence
  Description of Artificial Sequence: Synthetic oligonucleotide
  Antisense strand to SEQ ID NO: 1051502
agauucagagacguuaagu

SEQ ID NO: 1051504 - RNA, 19 nt, Artificial Sequence
  Description of Artificial Sequence: Synthetic oligonucleotide
  Sense strand starting at position 3919 of SEQ ID NO: 915070
aagguuguugugggauuga

SEQ ID NO: 1051505 - RNA, 19 nt, Artificial Sequence
  Description of Artificial Sequence: Synthetic oligonucleotide
  Antisense strand to SEQ ID NO: 1051504
ucaaucccacaacaaccuu

SEQ ID NO: 1051506 - RNA, 19 nt, Artificial Sequence
  Description of Artificial Sequence: Synthetic oligonucleotide
  Sense strand starting at position 3924 of SEQ ID NO: 915070
uguugugggauugaaacua

SEQ ID NO: 1051507 - RNA, 19 nt, Artificial Sequence
  Description of Artificial Sequence: Synthetic oligonucleotide
  Antisense strand to SEQ ID NO: 1051506
uaguuucaaucccacaaca

SEQ ID NO: 1051508 - RNA, 19 nt, Artificial Sequence
  Description of Artificial Sequence: Synthetic oligonucleotide
  Sense strand starting at position 104 of SEQ ID NO: 915071
uuuccuaagcuguaaagua

SEQ ID NO: 1051509 - RNA, 19 nt, Artificial Sequence
  Description of Artificial Sequence: Synthetic oligonucleotide
  Antisense strand to SEQ ID NO: 1051508
uacuuuacagcuuaggaaa

SEQ ID NO: 1051510 - RNA, 19 nt, Artificial Sequence
  Description of Artificial Sequence: Synthetic oligonucleotide
  Sense strand starting at position 171 of SEQ ID NO: 915071
uguaauaaauggucuuugu

SEQ ID NO: 1051511 - RNA, 19 nt, Artificial Sequence
  Description of Artificial Sequence: Synthetic oligonucleotide
  Antisense strand to SEQ ID NO: 1051510
acaaagaccauuuauuaca

SEQ ID NO: 1051512 - RNA, 19 nt, Artificial Sequence
  Description of Artificial Sequence: Synthetic oligonucleotide
  Sense strand starting at position 174 of SEQ ID NO: 915071
aauaaauggucuuugugaa

SEQ ID NO: 1051513 - RNA, 19 nt, Artificial Sequence
  Description of Artificial Sequence: Synthetic oligonucleotide
  Antisense strand to SEQ ID NO: 1051512
uucacaaagaccauuuauu

SEQ ID NO: 1051514 - RNA, 19 nt, Artificial Sequence
  Description of Artificial Sequence: Synthetic oligonucleotide
  Sense strand starting at position 175 of SEQ ID NO: 915071
auaaauggucuuugugaac

SEQ ID NO: 1051515 - RNA, 19 nt, Artificial Sequence
  Description of Artificial Sequence: Synthetic oligonucleotide
  Antisense strand to SEQ ID NO: 1051514
guucacaaagaccauuuau

SEQ ID NO: 1051516 - RNA, 19 nt, Artificial Sequence
  Description of Artificial Sequence: Synthetic oligonucleotide
  Sense strand starting at position 187 of SEQ ID NO: 915071
ugugaaccauuugggauua

SEQ ID NO: 1051517 - RNA, 19 nt, Artificial Sequence
  Description of Artificial Sequence: Synthetic oligonucleotide
  Antisense strand to SEQ ID NO: 1051516
uaaucccaaaugguucaca

SEQ ID NO: 1051518 - RNA, 19 nt, Artificial Sequence
  Description of Artificial Sequence: Synthetic oligonucleotide
  Sense strand starting at position 189 of SEQ ID NO: 915071
ugaaccauuugggauuaua

SEQ ID NO: 1051519 - RNA, 19 nt, Artificial Sequence
  Description of Artificial Sequence: Synthetic oligonucleotide
  Antisense strand to SEQ ID NO: 1051518
uauaaucccaaaugguuca

SEQ ID NO: 1051520 - RNA, 19 nt, Artificial Sequence
  Description of Artificial Sequence: Synthetic oligonucleotide
  Sense strand starting at position 226 of SEQ ID NO: 915071
uguuuauaugugugaacau

SEQ ID NO: 1051521 - RNA, 19 nt, Artificial Sequence
  Description of Artificial Sequence: Synthetic oligonucleotide
  Antisense strand to SEQ ID NO: 1051520
auguucacacauauaaaca

SEQ ID NO: 1051522 - RNA, 19 nt, Artificial Sequence
  Description of Artificial Sequence: Synthetic oligonucleotide
  Sense strand starting at position 391 of SEQ ID NO: 915071
aguuuaaauccugaaguau

SEQ ID NO: 1051523 - RNA, 19 nt, Artificial Sequence
  Description of Artificial Sequence: Synthetic oligonucleotide
  Antisense strand to SEQ ID NO: 1051522
auacuucaggauuuaaacu

SEQ ID NO: 1051524 - RNA, 19 nt, Artificial Sequence
  Description of Artificial Sequence: Synthetic oligonucleotide
  Sense strand starting at position 425 of SEQ ID NO: 915071
ucuggaguccuaggacaaa

SEQ ID NO: 1051525 - RNA, 19 nt, Artificial Sequence
  Description of Artificial Sequence: Synthetic oligonucleotide
  Antisense strand to SEQ ID NO: 1051524
uuuguccuaggacuccaga

SEQ ID NO: 1051526 - RNA, 19 nt, Artificial Sequence
  Description of Artificial Sequence: Synthetic oligonucleotide
  Sense strand starting at position 1108 of SEQ ID NO: 915071
ucccaaagaucugaggaga

SEQ ID NO: 1051527 - RNA, 19 nt, Artificial Sequence
  Description of Artificial Sequence: Synthetic oligonucleotide
  Antisense strand to SEQ ID NO: 1051526
ucuccucagaucuuuggga

SEQ ID NO: 1051528 - RNA, 19 nt, Artificial Sequence
  Description of Artificial Sequence: Synthetic oligonucleotide
  Sense strand starting at position 1259 of SEQ ID NO: 915071
gccauugauucuguggaaa

SEQ ID NO: 1051529 - RNA, 19 nt, Artificial Sequence
  Description of Artificial Sequence: Synthetic oligonucleotide
  Antisense strand to SEQ ID NO: 1051528
uuuccacagaaucaauggc

SEQ ID NO: 1051530 - RNA, 19 nt, Artificial Sequence
  Description of Artificial Sequence: Synthetic oligonucleotide
  Sense strand starting at position 1428 of SEQ ID NO: 915071
acaugacgucuugacucua

SEQ ID NO: 1051531 - RNA, 19 nt, Artificial Sequence
  Description of Artificial Sequence: Synthetic oligonucleotide
  Antisense strand to SEQ ID NO: 1051530
uagagucaagacgucaugu

SEQ ID NO: 1051532 - RNA, 19 nt, Artificial Sequence
  Description of Artificial Sequence: Synthetic oligonucleotide
  Sense strand starting at position 1433 of SEQ ID NO: 915071
acgucuugacucuaauuaa

SEQ ID NO: 1051533 - RNA, 19 nt, Artificial Sequence
  Description of Artificial Sequence: Synthetic oligonucleotide
  Antisense strand to SEQ ID NO: 1051532
uuaauuagagucaagacgu

SEQ ID NO: 1051534 - RNA, 19 nt, Artificial Sequence
  Description of Artificial Sequence: Synthetic oligonucleotide
  Sense strand starting at position 1580 of SEQ ID NO: 915071
uccaaaggguuguuuacau

SEQ ID NO: 1051535 - RNA, 19 nt, Artificial Sequence
  Description of Artificial Sequence: Synthetic oligonucleotide
  Antisense strand to SEQ ID NO: 1051534
auguaaacaacccuuugga

SEQ ID NO: 1051536 - RNA, 19 nt, Artificial Sequence
  Description of Artificial Sequence: Synthetic oligonucleotide
  Sense strand starting at position 1806 of SEQ ID NO: 915071
agggauuucuccgagcaga

SEQ ID NO: 1051537 - RNA, 19 nt, Artificial Sequence
  Description of Artificial Sequence: Synthetic oligonucleotide
  Antisense strand to SEQ ID NO: 1051536
ucugcucggagaaaucccu

SEQ ID NO: 1051538 - RNA, 19 nt, Artificial Sequence
  Description of Artificial Sequence: Synthetic oligonucleotide
  Sense strand starting at position 1832 of SEQ ID NO: 915071
gcgaauuuguggccuucuu

SEQ ID NO: 1051539 - RNA, 19 nt, Artificial Sequence
  Description of Artificial Sequence: Synthetic oligonucleotide
  Antisense strand to SEQ ID NO: 1051538
aagaaggccacaaauucgc

SEQ ID NO: 1051540 - RNA, 19 nt, Artificial Sequence
  Description of Artificial Sequence: Synthetic oligonucleotide
  Sense strand starting at position 1841 of SEQ ID NO: 915071
uggccuucuuaaucaagau

SEQ ID NO: 1051541 - RNA, 19 nt, Artificial Sequence
  Description of Artificial Sequence: Synthetic oligonucleotide
  Antisense strand to SEQ ID NO: 1051540
aucuugauuaagaaggcca

SEQ ID NO: 1051542 - RNA, 19 nt, Artificial Sequence
  Description of Artificial Sequence: Synthetic oligonucleotide
  Sense strand starting at position 1889 of SEQ ID NO: 915071
ggucgcguuaccuucuuau

SEQ ID NO: 1051543 - RNA, 19 nt, Artificial Sequence
  Description of Artificial Sequence: Synthetic oligonucleotide
  Antisense strand to SEQ ID NO: 1051542
auaagaagguaacgcgacc

SEQ ID NO: 1051544 - RNA, 19 nt, Artificial Sequence
  Description of Artificial Sequence: Synthetic oligonucleotide
  Sense strand starting at position 2413 of SEQ ID NO: 915071
gggugagucugccuugaga

SEQ ID NO: 1051545 - RNA, 19 nt, Artificial Sequence
  Description of Artificial Sequence: Synthetic oligonucleotide
  Antisense strand to SEQ ID NO: 1051544
ucucaaggcagacucaccc

SEQ ID NO: 1051546 - RNA, 19 nt, Artificial Sequence
  Description of Artificial Sequence: Synthetic oligonucleotide
  Sense strand starting at position 2439 of SEQ ID NO: 915071
gugguugaaugguuaagac

SEQ ID NO: 1051547 - RNA, 19 nt, Artificial Sequence
  Description of Artificial Sequence: Synthetic oligonucleotide
  Antisense strand to SEQ ID NO: 1051546
gucuuaaccauucaaccac

SEQ ID NO: 1051548 - RNA, 19 nt, Artificial Sequence
  Description of Artificial Sequence: Synthetic oligonucleotide
  Sense strand starting at position 2449 of SEQ ID NO: 915071
gguuaagacucaucccuaa

SEQ ID NO: 1051549 - RNA, 19 nt, Artificial Sequence
  Description of Artificial Sequence: Synthetic oligonucleotide
  Antisense strand to SEQ ID NO: 1051548
uuagggaugagucuuaacc

SEQ ID NO: 1051550 - RNA, 19 nt, Artificial Sequence
  Description of Artificial Sequence: Synthetic oligonucleotide
  Sense strand starting at position 2465 of SEQ ID NO: 915071
uaaagaagccuuugguuau

SEQ ID NO: 1051551 - RNA, 19 nt, Artificial Sequence
  Description of Artificial Sequence: Synthetic oligonucleotide
  Antisense strand to SEQ ID NO: 1051550
auaaccaaaggcuucuuua

SEQ ID NO: 1051552 - RNA, 19 nt, Artificial Sequence
  Description of Artificial Sequence: Synthetic oligonucleotide
  Sense strand starting at position 2469 of SEQ ID NO: 915071
gaagccuuugguuaucuuu

SEQ ID NO: 1051553 - RNA, 19 nt, Artificial Sequence
  Description of Artificial Sequence: Synthetic oligonucleotide
  Antisense strand to SEQ ID NO: 1051552
aaagauaaccaaaggcuuc

SEQ ID NO: 1051554 - RNA, 19 nt, Artificial Sequence
  Description of Artificial Sequence: Synthetic oligonucleotide
  Sense strand starting at position 2651 of SEQ ID NO: 915071
guaggcuucccagagggaa

SEQ ID NO: 1051555 - RNA, 19 nt, Artificial Sequence
  Description of Artificial Sequence: Synthetic oligonucleotide
  Antisense strand to SEQ ID NO: 1051554
uucccucugggaagccuac

SEQ ID NO: 1051556 - RNA, 19 nt, Artificial Sequence
  Description of Artificial Sequence: Synthetic oligonucleotide
  Sense strand starting at position 2704 of SEQ ID NO: 915071
ggcucugggucccuaucaa

SEQ ID NO: 1051557 - RNA, 19 nt, Artificial Sequence
  Description of Artificial Sequence: Synthetic oligonucleotide
  Antisense strand to SEQ ID NO: 1051556
uugauagggacccagagcc

SEQ ID NO: 1051558 - RNA, 19 nt, Artificial Sequence
  Description of Artificial Sequence: Synthetic oligonucleotide
  Sense strand starting at position 2725 of SEQ ID NO: 915071
ggaugcuucugaccuauag

SEQ ID NO: 1051559 - RNA, 19 nt, Artificial Sequence
  Description of Artificial Sequence: Synthetic oligonucleotide
  Antisense strand to SEQ ID NO: 1051558
cuauaggucagaagcaucc

SEQ ID NO: 1051560 - RNA, 19 nt, Artificial Sequence
  Description of Artificial Sequence: Synthetic oligonucleotide
  Sense strand starting at position 2729 of SEQ ID NO: 915071
gcuucugaccuauaggcaa

SEQ ID NO: 1051561 - RNA, 19 nt, Artificial Sequence
  Description of Artificial Sequence: Synthetic oligonucleotide
  Antisense strand to SEQ ID NO: 1051560
uugccuauaggucagaagc

SEQ ID NO: 1051562 - RNA, 19 nt, Artificial Sequence
  Description of Artificial Sequence: Synthetic oligonucleotide
  Sense strand starting at position 2967 of SEQ ID NO: 915071
ugcugacuuugaccagauu

SEQ ID NO: 1051563 - RNA, 19 nt, Artificial Sequence
  Description of Artificial Sequence: Synthetic oligonucleotide
  Antisense strand to SEQ ID NO: 1051562
aaucuggucaaagucagca

SEQ ID NO: 1051564 - RNA, 19 nt, Artificial Sequence
  Description of Artificial Sequence: Synthetic oligonucleotide
  Sense strand starting at position 3011 of SEQ ID NO: 915071
gauauugcugugcaugacu

SEQ ID NO: 1051565 - RNA, 19 nt, Artificial Sequence
  Description of Artificial Sequence: Synthetic oligonucleotide
  Antisense strand to SEQ ID NO: 1051564
agucaugcacagcaauauc

SEQ ID NO: 1051566 - RNA, 19 nt, Artificial Sequence
  Description of Artificial Sequence: Synthetic oligonucleotide
  Sense strand starting at position 3216 of SEQ ID NO: 915071
gcgcuaucacggcuuccua

SEQ ID NO: 1051567 - RNA, 19 nt, Artificial Sequence
  Description of Artificial Sequence: Synthetic oligonucleotide
  Antisense strand to SEQ ID NO: 1051566
uaggaagccgugauagcgc

SEQ ID NO: 1051568 - RNA, 19 nt, Artificial Sequence
  Description of Artificial Sequence: Synthetic oligonucleotide
  Sense strand starting at position 3394 of SEQ ID NO: 915071
cugagagcugucuggaaca

SEQ ID NO: 1051569 - RNA, 19 nt, Artificial Sequence
  Description of Artificial Sequence: Synthetic oligonucleotide
  Antisense strand to SEQ ID NO: 1051568
uguuccagacagcucucag

SEQ ID NO: 1051570 - RNA, 19 nt, Artificial Sequence
  Description of Artificial Sequence: Synthetic oligonucleotide
  Sense strand starting at position 3503 of SEQ ID NO: 915071
agugguuucugacugugaa

SEQ ID NO: 1051571 - RNA, 19 nt, Artificial Sequence
  Description of Artificial Sequence: Synthetic oligonucleotide
  Antisense strand to SEQ ID NO: 1051570
uucacagucagaaaccacu

SEQ ID NO: 1051572 - RNA, 19 nt, Artificial Sequence
  Description of Artificial Sequence: Synthetic oligonucleotide
  Sense strand starting at position 3504 of SEQ ID NO: 915071
gugguuucugacugugaaa

SEQ ID NO: 1051573 - RNA, 19 nt, Artificial Sequence
  Description of Artificial Sequence: Synthetic oligonucleotide
  Antisense strand to SEQ ID NO: 1051572
uuucacagucagaaaccac

SEQ ID NO: 1051574 - RNA, 19 nt, Artificial Sequence
  Description of Artificial Sequence: Synthetic oligonucleotide
  Sense strand starting at position 3506 of SEQ ID NO: 915071
gguuucugacugugaaauc

SEQ ID NO: 1051575 - RNA, 19 nt, Artificial Sequence
  Description of Artificial Sequence: Synthetic oligonucleotide
  Antisense strand to SEQ ID NO: 1051574
gauuucacagucagaaacc

SEQ ID NO: 1051576 - RNA, 19 nt, Artificial Sequence
  Description of Artificial Sequence: Synthetic oligonucleotide
  Sense strand starting at position 3538 of SEQ ID NO: 915071
ccaagacauugaguaccua

SEQ ID NO: 1051577 - RNA, 19 nt, Artificial Sequence
  Description of Artificial Sequence: Synthetic oligonucleotide
  Antisense strand to SEQ ID NO: 1051576
uagguacucaaugucuugg

SEQ ID NO: 1051578 - RNA, 19 nt, Artificial Sequence
  Description of Artificial Sequence: Synthetic oligonucleotide
  Sense strand starting at position 3592 of SEQ ID NO: 915071
aguugugcaccauacagau

SEQ ID NO: 1051579 - RNA, 19 nt, Artificial Sequence
  Description of Artificial Sequence: Synthetic oligonucleotide
  Antisense strand to SEQ ID NO: 1051578
aucuguauggugcacaacu

SEQ ID NO: 1051580 - RNA, 19 nt, Artificial Sequence
  Description of Artificial Sequence: Synthetic oligonucleotide
  Sense strand starting at position 3759 of SEQ ID NO: 915071
gcgccaggucgugcuauau

SEQ ID NO: 1051581 - RNA, 19 nt, Artificial Sequence
  Description of Artificial Sequence: Synthetic oligonucleotide
  Antisense strand to SEQ ID NO: 1051580
auauagcacgaccuggcgc

SEQ ID NO: 1051582 - RNA, 19 nt, Artificial Sequence
  Description of Artificial Sequence: Synthetic oligonucleotide
  Sense strand starting at position 3771 of SEQ ID NO: 915071
gcuauauuccuagggcaca

SEQ ID NO: 1051583 - RNA, 19 nt, Artificial Sequence
  Description of Artificial Sequence: Synthetic oligonucleotide
  Antisense strand to SEQ ID NO: 1051582
ugugcccuaggaauauagc

SEQ ID NO: 1051584 - RNA, 19 nt, Artificial Sequence
  Description of Artificial Sequence: Synthetic oligonucleotide
  Sense strand starting at position 3849 of SEQ ID NO: 915071
ggaagcuguuccucugauu

SEQ ID NO: 1051585 - RNA, 19 nt, Artificial Sequence
  Description of Artificial Sequence: Synthetic oligonucleotide
  Antisense strand to SEQ ID NO: 1051584
aaucagaggaacagcuucc

SEQ ID NO: 1051586 - RNA, 19 nt, Artificial Sequence
  Description of Artificial Sequence: Synthetic oligonucleotide
  Sense strand starting at position 3896 of SEQ ID NO: 915071
auccauagacauuguuauu

SEQ ID NO: 1051587 - RNA, 19 nt, Artificial Sequence
  Description of Artificial Sequence: Synthetic oligonucleotide
  Antisense strand to SEQ ID NO: 1051586
aauaacaaugucuauggau

SEQ ID NO: 1051588 - RNA, 19 nt, Artificial Sequence
  Description of Artificial Sequence: Synthetic oligonucleotide
  Sense strand starting at position 487 of SEQ ID NO: 915072
ggccaagccugaucaguuu

SEQ ID NO: 1051589 - RNA, 19 nt, Artificial Sequence
  Description of Artificial Sequence: Synthetic oligonucleotide
  Antisense strand to SEQ ID NO: 1051588
aaacugaucaggcuuggcc

SEQ ID NO: 1051590 - RNA, 19 nt, Artificial Sequence
  Description of Artificial Sequence: Synthetic oligonucleotide
  Sense strand starting at position 510 of SEQ ID NO: 915072
ucccaaagaucugaggaga

SEQ ID NO: 1051591 - RNA, 19 nt, Artificial Sequence
  Description of Artificial Sequence: Synthetic oligonucleotide
  Antisense strand to SEQ ID NO: 1051590
ucuccucagaucuuuggga

SEQ ID NO: 1051592 - RNA, 19 nt, Artificial Sequence
  Description of Artificial Sequence: Synthetic oligonucleotide
  Sense strand starting at position 661 of SEQ ID NO: 915072
gccauugauucuguggaaa

SEQ ID NO: 1051593 - RNA, 19 nt, Artificial Sequence
  Description of Artificial Sequence: Synthetic oligonucleotide
  Antisense strand to SEQ ID NO: 1051592
uuuccacagaaucaauggc

SEQ ID NO: 1051594 - RNA, 19 nt, Artificial Sequence
  Description of Artificial Sequence: Synthetic oligonucleotide
  Sense strand starting at position 830 of SEQ ID NO: 915072
acaugacgucuugacucua

SEQ ID NO: 1051595 - RNA, 19 nt, Artificial Sequence
  Description of Artificial Sequence: Synthetic oligonucleotide
  Antisense strand to SEQ ID NO: 1051594
uagagucaagacgucaugu

SEQ ID NO: 1051596 - RNA, 19 nt, Artificial Sequence
  Description of Artificial Sequence: Synthetic oligonucleotide
  Sense strand starting at position 835 of SEQ ID NO: 915072
acgucuugacucuaauuaa

SEQ ID NO: 1051597 - RNA, 19 nt, Artificial Sequence
  Description of Artificial Sequence: Synthetic oligonucleotide
  Antisense strand to SEQ ID NO: 1051596
uuaauuagagucaagacgu

SEQ ID NO: 1051598 - RNA, 19 nt, Artificial Sequence
  Description of Artificial Sequence: Synthetic oligonucleotide
  Sense strand starting at position 982 of SEQ ID NO: 915072
uccaaaggguuguuuacau

SEQ ID NO: 1051599 - RNA, 19 nt, Artificial Sequence
  Description of Artificial Sequence: Synthetic oligonucleotide
  Antisense strand to SEQ ID NO: 1051598
auguaaacaacccuuugga

SEQ ID NO: 1051600 - RNA, 19 nt, Artificial Sequence
  Description of Artificial Sequence: Synthetic oligonucleotide
  Sense strand starting at position 1208 of SEQ ID NO: 915072
agggauuucuccgagcaga

SEQ ID NO: 1051601 - RNA, 19 nt, Artificial Sequence
  Description of Artificial Sequence: Synthetic oligonucleotide
  Antisense strand to SEQ ID NO: 1051600
ucugcucggagaaaucccu

SEQ ID NO: 1051602 - RNA, 19 nt, Artificial Sequence
  Description of Artificial Sequence: Synthetic oligonucleotide
  Sense strand starting at position 1234 of SEQ ID NO: 915072
gcgaauuuguggccuucuu

SEQ ID NO: 1051603 - RNA, 19 nt, Artificial Sequence
  Description of Artificial Sequence: Synthetic oligonucleotide
  Antisense strand to SEQ ID NO: 1051602
aagaaggccacaaauucgc

SEQ ID NO: 1051604 - RNA, 19 nt, Artificial Sequence
  Description of Artificial Sequence: Synthetic oligonucleotide
  Sense strand starting at position 1243 of SEQ ID NO: 915072
uggccuucuuaaucaagau

SEQ ID NO: 1051605 - RNA, 19 nt, Artificial Sequence
  Description of Artificial Sequence: Synthetic oligonucleotide
  Antisense strand to SEQ ID NO: 1051604
aucuugauuaagaaggcca

SEQ ID NO: 1051606 - RNA, 19 nt, Artificial Sequence
  Description of Artificial Sequence: Synthetic oligonucleotide
  Sense strand starting at position 1291 of SEQ ID NO: 915072
ggucgcguuaccuucuuau

SEQ ID NO: 1051607 - RNA, 19 nt, Artificial Sequence
  Description of Artificial Sequence: Synthetic oligonucleotide
  Antisense strand to SEQ ID NO: 1051606
auaagaagguaacgcgacc

SEQ ID NO: 1051608 - RNA, 19 nt, Artificial Sequence
  Description of Artificial Sequence: Synthetic oligonucleotide
  Sense strand starting at position 1815 of SEQ ID NO: 915072
gggugagucugccuugaga

SEQ ID NO: 1051609 - RNA, 19 nt, Artificial Sequence
  Description of Artificial Sequence: Synthetic oligonucleotide
  Antisense strand to SEQ ID NO: 1051608
ucucaaggcagacucaccc

SEQ ID NO: 1051610 - RNA, 19 nt, Artificial Sequence
  Description of Artificial Sequence: Synthetic oligonucleotide
  Sense strand starting at position 1817 of SEQ ID NO: 915072
gugagucugccuugagaca

SEQ ID NO: 1051611 - RNA, 19 nt, Artificial Sequence
  Description of Artificial Sequence: Synthetic oligonucleotide
  Antisense strand to SEQ ID NO: 1051610
ugucucaaggcagacucac

SEQ ID NO: 1051612 - RNA, 19 nt, Artificial Sequence
  Description of Artificial Sequence: Synthetic oligonucleotide
  Sense strand starting at position 1841 of SEQ ID NO: 915072
gugguugaaugguuaagac

SEQ ID NO: 1051613 - RNA, 19 nt, Artificial Sequence
  Description of Artificial Sequence: Synthetic oligonucleotide
  Antisense strand to SEQ ID NO: 1051612
gucuuaaccauucaaccac

SEQ ID NO: 1051614 - RNA, 19 nt, Artificial Sequence
  Description of Artificial Sequence: Synthetic oligonucleotide
  Sense strand starting at position 1851 of SEQ ID NO: 915072
gguuaagacucaucccuaa

SEQ ID NO: 1051615 - RNA, 19 nt, Artificial Sequence
  Description of Artificial Sequence: Synthetic oligonucleotide
  Antisense strand to SEQ ID NO: 1051614
uuagggaugagucuuaacc

SEQ ID NO: 1051616 - RNA, 19 nt, Artificial Sequence
  Description of Artificial Sequence: Synthetic oligonucleotide
  Sense strand starting at position 1867 of SEQ ID NO: 915072
uaaagaagccuuugguuau

SEQ ID NO: 1051617 - RNA, 19 nt, Artificial Sequence
  Description of Artificial Sequence: Synthetic oligonucleotide
  Antisense strand to SEQ ID NO: 1051616
auaaccaaaggcuucuuua

SEQ ID NO: 1051618 - RNA, 19 nt, Artificial Sequence
  Description of Artificial Sequence: Synthetic oligonucleotide
  Sense strand starting at position 1871 of SEQ ID NO: 915072
gaagccuuugguuaucuuu

SEQ ID NO: 1051619 - RNA, 19 nt, Artificial Sequence
  Description of Artificial Sequence: Synthetic oligonucleotide
  Antisense strand to SEQ ID NO: 1051618
aaagauaaccaaaggcuuc

SEQ ID NO: 1051620 - RNA, 19 nt, Artificial Sequence
  Description of Artificial Sequence: Synthetic oligonucleotide
  Sense strand starting at position 2053 of SEQ ID NO: 915072
guaggcuucccagagggaa

SEQ ID NO: 1051621 - RNA, 19 nt, Artificial Sequence
  Description of Artificial Sequence: Synthetic oligonucleotide
  Antisense strand to SEQ ID NO: 1051620
uucccucugggaagccuac

SEQ ID NO: 1051622 - RNA, 19 nt, Artificial Sequence
  Description of Artificial Sequence: Synthetic oligonucleotide
  Sense strand starting at position 2106 of SEQ ID NO: 915072
ggcucugggucccuaucaa

SEQ ID NO: 1051623 - RNA, 19 nt, Artificial Sequence
  Description of Artificial Sequence: Synthetic oligonucleotide
  Antisense strand to SEQ ID NO: 1051622
uugauagggacccagagcc

SEQ ID NO: 1051624 - RNA, 19 nt, Artificial Sequence
  Description of Artificial Sequence: Synthetic oligonucleotide
  Sense strand starting at position 2127 of SEQ ID NO: 915072
ggaugcuucugaccuauag

SEQ ID NO: 1051625 - RNA, 19 nt, Artificial Sequence
  Description of Artificial Sequence: Synthetic oligonucleotide
  Antisense strand to SEQ ID NO: 1051624
cuauaggucagaagcaucc

SEQ ID NO: 1051626 - RNA, 19 nt, Artificial Sequence
  Description of Artificial Sequence: Synthetic oligonucleotide
  Sense strand starting at position 2131 of SEQ ID NO: 915072
gcuucugaccuauaggcaa

SEQ ID NO: 1051627 - RNA, 19 nt, Artificial Sequence
  Description of Artificial Sequence: Synthetic oligonucleotide
  Antisense strand to SEQ ID NO: 1051626
uugccuauaggucagaagc

SEQ ID NO: 1051628 - RNA, 19 nt, Artificial Sequence
  Description of Artificial Sequence: Synthetic oligonucleotide
  Sense strand starting at position 2369 of SEQ ID NO: 915072
ugcugacuuugaccagauu

SEQ ID NO: 1051629 - RNA, 19 nt, Artificial Sequence
  Description of Artificial Sequence: Synthetic oligonucleotide
  Antisense strand to SEQ ID NO: 1051628
aaucuggucaaagucagca

SEQ ID NO: 1051630 - RNA, 19 nt, Artificial Sequence
  Description of Artificial Sequence: Synthetic oligonucleotide
  Sense strand starting at position 2411 of SEQ ID NO: 915072
augauauugcugugcauga

SEQ ID NO: 1051631 - RNA, 19 nt, Artificial Sequence
  Description of Artificial Sequence: Synthetic oligonucleotide
  Antisense strand to SEQ ID NO: 1051630
ucaugcacagcaauaucau

SEQ ID NO: 1051632 - RNA, 19 nt, Artificial Sequence
  Description of Artificial Sequence: Synthetic oligonucleotide
  Sense strand starting at position 2413 of SEQ ID NO: 915072
gauauugcugugcaugacu

SEQ ID NO: 1051633 - RNA, 19 nt, Artificial Sequence
  Description of Artificial Sequence: Synthetic oligonucleotide
  Antisense strand to SEQ ID NO: 1051632
agucaugcacagcaauauc

SEQ ID NO: 1051634 - RNA, 19 nt, Artificial Sequence
  Description of Artificial Sequence: Synthetic oligonucleotide
  Sense strand starting at position 2422 of SEQ ID NO: 915072
gugcaugacuggccacuua

SEQ ID NO: 1051635 - RNA, 19 nt, Artificial Sequence
  Description of Artificial Sequence: Synthetic oligonucleotide
  Antisense strand to SEQ ID NO: 1051634
uaaguggccagucaugcac

SEQ ID NO: 1051636 - RNA, 19 nt, Artificial Sequence
  Description of Artificial Sequence: Synthetic oligonucleotide
  Sense strand starting at position 2618 of SEQ ID NO: 915072
gcgcuaucacggcuuccua

SEQ ID NO: 1051637 - RNA, 19 nt, Artificial Sequence
  Description of Artificial Sequence: Synthetic oligonucleotide
  Antisense strand to SEQ ID NO: 1051636
uaggaagccgugauagcgc

SEQ ID NO: 1051638 - RNA, 19 nt, Artificial Sequence
  Description of Artificial Sequence: Synthetic oligonucleotide
  Sense strand starting at position 2696 of SEQ ID NO: 915072
guaugcugcccucaucuuu

SEQ ID NO: 1051639 - RNA, 19 nt, Artificial Sequence
  Description of Artificial Sequence: Synthetic oligonucleotide
  Antisense strand to SEQ ID NO: 1051638
aaagaugagggcagcauac

SEQ ID NO: 1051640 - RNA, 19 nt, Artificial Sequence
  Description of Artificial Sequence: Synthetic oligonucleotide
  Sense strand starting at position 2796 of SEQ ID NO: 915072
cugagagcugucuggaaca

SEQ ID NO: 1051641 - RNA, 19 nt, Artificial Sequence
  Description of Artificial Sequence: Synthetic oligonucleotide
  Antisense strand to SEQ ID NO: 1051640
uguuccagacagcucucag

SEQ ID NO: 1051642 - RNA, 19 nt, Artificial Sequence
  Description of Artificial Sequence: Synthetic oligonucleotide
  Sense strand starting at position 2905 of SEQ ID NO: 915072
agugguuucugacugugaa

SEQ ID NO: 1051643 - RNA, 19 nt, Artificial Sequence
  Description of Artificial Sequence: Synthetic oligonucleotide
  Antisense strand to SEQ ID NO: 1051642
uucacagucagaaaccacu

SEQ ID NO: 1051644 - RNA, 19 nt, Artificial Sequence
  Description of Artificial Sequence: Synthetic oligonucleotide
  Sense strand starting at position 2906 of SEQ ID NO: 915072
gugguuucugacugugaaa

SEQ ID NO: 1051645 - RNA, 19 nt, Artificial Sequence
  Description of Artificial Sequence: Synthetic oligonucleotide
  Antisense strand to SEQ ID NO: 1051644
uuucacagucagaaaccac

SEQ ID NO: 1051646 - RNA, 19 nt, Artificial Sequence
  Description of Artificial Sequence: Synthetic oligonucleotide
  Sense strand starting at position 2908 of SEQ ID NO: 915072
gguuucugacugugaaauc

SEQ ID NO: 1051647 - RNA, 19 nt, Artificial Sequence
  Description of Artificial Sequence: Synthetic oligonucleotide
  Antisense strand to SEQ ID NO: 1051646
gauuucacagucagaaacc

SEQ ID NO: 1051648 - RNA, 19 nt, Artificial Sequence
  Description of Artificial Sequence: Synthetic oligonucleotide
  Sense strand starting at position 2940 of SEQ ID NO: 915072
ccaagacauugaguaccua

SEQ ID NO: 1051649 - RNA, 19 nt, Artificial Sequence
  Description of Artificial Sequence: Synthetic oligonucleotide
  Antisense strand to SEQ ID NO: 1051648
uagguacucaaugucuugg

SEQ ID NO: 1051650 - RNA, 19 nt, Artificial Sequence
  Description of Artificial Sequence: Synthetic oligonucleotide
  Sense strand starting at position 2994 of SEQ ID NO: 915072
aguugugcaccauacagau

SEQ ID NO: 1051651 - RNA, 19 nt, Artificial Sequence
  Description of Artificial Sequence: Synthetic oligonucleotide
  Antisense strand to SEQ ID NO: 1051650
aucuguauggugcacaacu

SEQ ID NO: 1051652 - RNA, 19 nt, Artificial Sequence
  Description of Artificial Sequence: Synthetic oligonucleotide
  Sense strand starting at position 3050 of SEQ ID NO: 915072
gguaucuaaugauaaacca

SEQ ID NO: 1051653 - RNA, 19 nt, Artificial Sequence
  Description of Artificial Sequence: Synthetic oligonucleotide
  Antisense strand to SEQ ID NO: 1051652
ugguuuaucauuagauacc

SEQ ID NO: 1051654 - RNA, 19 nt, Artificial Sequence
  Description of Artificial Sequence: Synthetic oligonucleotide
  Sense strand starting at position 3161 of SEQ ID NO: 915072
gcgccaggucgugcuauau

SEQ ID NO: 1051655 - RNA, 19 nt, Artificial Sequence
  Description of Artificial Sequence: Synthetic oligonucleotide
  Antisense strand to SEQ ID NO: 1051654
auauagcacgaccuggcgc

SEQ ID NO: 1051656 - RNA, 19 nt, Artificial Sequence
  Description of Artificial Sequence: Synthetic oligonucleotide
  Sense strand starting at position 3173 of SEQ ID NO: 915072
gcuauauuccuagggcaca

SEQ ID NO: 1051657 - RNA, 19 nt, Artificial Sequence
  Description of Artificial Sequence: Synthetic oligonucleotide
  Antisense strand to SEQ ID NO: 1051656
ugugcccuaggaauauagc

SEQ ID NO: 1051658 - RNA, 19 nt, Artificial Sequence
  Description of Artificial Sequence: Synthetic oligonucleotide
  Sense strand starting at position 3251 of SEQ ID NO: 915072
ggaagcuguuccucugauu

SEQ ID NO: 1051659 - RNA, 19 nt, Artificial Sequence
  Description of Artificial Sequence: Synthetic oligonucleotide
  Antisense strand to SEQ ID NO: 1051658
aaucagaggaacagcuucc

SEQ ID NO: 1051660 - RNA, 19 nt, Artificial Sequence
  Description of Artificial Sequence: Synthetic oligonucleotide
  Sense strand starting at position 3298 of SEQ ID NO: 915072
auccauagacauuguuauu

SEQ ID NO: 1051661 - RNA, 19 nt, Artificial Sequence
  Description of Artificial Sequence: Synthetic oligonucleotide
  Antisense strand to SEQ ID NO: 1051660
aauaacaaugucuauggau

SEQ ID NO: 1051662 - RNA, 19 nt, Artificial Sequence
  Description of Artificial Sequence: Synthetic oligonucleotide
  Sense strand starting at position 3760 of SEQ ID NO: 915072
gcacaugccucagucauag

SEQ ID NO: 1051663 - RNA, 19 nt, Artificial Sequence
  Description of Artificial Sequence: Synthetic oligonucleotide
  Antisense strand to SEQ ID NO: 1051662
cuaugacugaggcaugugc

SEQ ID NO: 1051664 - RNA, 19 nt, Artificial Sequence
  Description of Artificial Sequence: Synthetic oligonucleotide
  Sense strand starting at position 3856 of SEQ ID NO: 915072
cgccacacuuggguaauua

SEQ ID NO: 1051665 - RNA, 19 nt, Artificial Sequence
  Description of Artificial Sequence: Synthetic oligonucleotide
  Antisense strand to SEQ ID NO: 1051664
uaauuacccaaguguggcg

SEQ ID NO: 1051666 - RNA, 19 nt, Artificial Sequence
  Description of Artificial Sequence: Synthetic oligonucleotide
  Sense strand starting at position 3857 of SEQ ID NO: 915072
gccacacuuggguaauuaa

SEQ ID NO: 1051667 - RNA, 19 nt, Artificial Sequence
  Description of Artificial Sequence: Synthetic oligonucleotide
  Antisense strand to SEQ ID NO: 1051666
uuaauuacccaaguguggc

SEQ ID NO: 1051668 - RNA, 19 nt, Artificial Sequence
  Description of Artificial Sequence: Synthetic oligonucleotide
  Sense strand starting at position 25 of SEQ ID NO: 915073
gucuacuaaucccucagua

SEQ ID NO: 1051669 - RNA, 19 nt, Artificial Sequence
  Description of Artificial Sequence: Synthetic oligonucleotide
  Antisense strand to SEQ ID NO: 1051668
uacugagggauuaguagac

SEQ ID NO: 1051670 - RNA, 19 nt, Artificial Sequence
  Description of Artificial Sequence: Synthetic oligonucleotide
  Sense strand starting at position 152 of SEQ ID NO: 915073
cuuggauucuuuguuuacu

SEQ ID NO: 1051671 - RNA, 19 nt, Artificial Sequence
  Description of Artificial Sequence: Synthetic oligonucleotide
  Antisense strand to SEQ ID NO: 1051670
aguaaacaaagaauccaag

SEQ ID NO: 1051672 - RNA, 19 nt, Artificial Sequence
  Description of Artificial Sequence: Synthetic oligonucleotide
  Sense strand starting at position 154 of SEQ ID NO: 915073
uggauucuuuguuuacuca

SEQ ID NO: 1051673 - RNA, 19 nt, Artificial Sequence
  Description of Artificial Sequence: Synthetic oligonucleotide
  Antisense strand to SEQ ID NO: 1051672
ugaguaaacaaagaaucca

SEQ ID NO: 1051674 - RNA, 19 nt, Artificial Sequence
  Description of Artificial Sequence: Synthetic oligonucleotide
  Sense strand starting at position 384 of SEQ ID NO: 915073
uugcuuccuguagaauaac

SEQ ID NO: 1051675 - RNA, 19 nt, Artificial Sequence
  Description of Artificial Sequence: Synthetic oligonucleotide
  Antisense strand to SEQ ID NO: 1051674
guuauucuacaggaagcaa

SEQ ID NO: 1051676 - RNA, 19 nt, Artificial Sequence
  Description of Artificial Sequence: Synthetic oligonucleotide
  Sense strand starting at position 466 of SEQ ID NO: 915073
aggugacugacauguuugu

SEQ ID NO: 1051677 - RNA, 19 nt, Artificial Sequence
  Description of Artificial Sequence: Synthetic oligonucleotide
  Antisense strand to SEQ ID NO: 1051676
acaaacaugucagucaccu

SEQ ID NO: 1051678 - RNA, 19 nt, Artificial Sequence
  Description of Artificial Sequence: Synthetic oligonucleotide
  Sense strand starting at position 513 of SEQ ID NO: 915073
uuucuauuaugagcagauu

SEQ ID NO: 1051679 - RNA, 19 nt, Artificial Sequence
  Description of Artificial Sequence: Synthetic oligonucleotide
  Antisense strand to SEQ ID NO: 1051678
aaucugcucauaauagaaa

SEQ ID NO: 1051680 - RNA, 19 nt, Artificial Sequence
  Description of Artificial Sequence: Synthetic oligonucleotide
  Sense strand starting at position 514 of SEQ ID NO: 915073
uucuauuaugagcagauua

SEQ ID NO: 1051681 - RNA, 19 nt, Artificial Sequence
  Description of Artificial Sequence: Synthetic oligonucleotide
  Antisense strand to SEQ ID NO: 1051680
uaaucugcucauaauagaa

SEQ ID NO: 1051682 - RNA, 19 nt, Artificial Sequence
  Description of Artificial Sequence: Synthetic oligonucleotide
  Sense strand starting at position 516 of SEQ ID NO: 915073
cuauuaugagcagauuacu

SEQ ID NO: 1051683 - RNA, 19 nt, Artificial Sequence
  Description of Artificial Sequence: Synthetic oligonucleotide
  Antisense strand to SEQ ID NO: 1051682
aguaaucugcucauaauag

SEQ ID NO: 1051684 - RNA, 19 nt, Artificial Sequence
  Description of Artificial Sequence: Synthetic oligonucleotide
  Sense strand starting at position 569 of SEQ ID NO: 915073
accacagcucuucgaagaa

SEQ ID NO: 1051685 - RNA, 19 nt, Artificial Sequence
  Description of Artificial Sequence: Synthetic oligonucleotide
  Antisense strand to SEQ ID NO: 1051684
uucuucgaagagcuguggu

SEQ ID NO: 1051686 - RNA, 19 nt, Artificial Sequence
  Description of Artificial Sequence: Synthetic oligonucleotide
  Sense strand starting at position 573 of SEQ ID NO: 915073
cagcucuucgaagaagaca

SEQ ID NO: 1051687 - RNA, 19 nt, Artificial Sequence
  Description of Artificial Sequence: Synthetic oligonucleotide
  Antisense strand to SEQ ID NO: 1051686
ugucuucuucgaagagcug

SEQ ID NO: 1051688 - RNA, 19 nt, Artificial Sequence
  Description of Artificial Sequence: Synthetic oligonucleotide
  Sense strand starting at position 616 of SEQ ID NO: 915073
acaguuaggagucaugcuu

SEQ ID NO: 1051689 - RNA, 19 nt, Artificial Sequence
  Description of Artificial Sequence: Synthetic oligonucleotide
  Antisense strand to SEQ ID NO: 1051688
aagcaugacuccuaacugu

SEQ ID NO: 1051690 - RNA, 19 nt, Artificial Sequence
  Description of Artificial Sequence: Synthetic oligonucleotide
  Sense strand starting at position 624 of SEQ ID NO: 915073
gagucaugcuuccuuggaa

SEQ ID NO: 1051691 - RNA, 19 nt, Artificial Sequence
  Description of Artificial Sequence: Synthetic oligonucleotide
  Antisense strand to SEQ ID NO: 1051690
uuccaaggaagcaugacuc

SEQ ID NO: 1051692 - RNA, 19 nt, Artificial Sequence
  Description of Artificial Sequence: Synthetic oligonucleotide
  Sense strand starting at position 625 of SEQ ID NO: 915073
agucaugcuuccuuggaaa

SEQ ID NO: 1051693 - RNA, 19 nt, Artificial Sequence
  Description of Artificial Sequence: Synthetic oligonucleotide
  Antisense strand to SEQ ID NO: 1051692
uuuccaaggaagcaugacu

SEQ ID NO: 1051694 - RNA, 19 nt, Artificial Sequence
  Description of Artificial Sequence: Synthetic oligonucleotide
  Sense strand starting at position 665 of SEQ ID NO: 915073
guuggcacaucugugaaau

SEQ ID NO: 1051695 - RNA, 19 nt, Artificial Sequence
  Description of Artificial Sequence: Synthetic oligonucleotide
  Antisense strand to SEQ ID NO: 1051694
auuucacagaugugccaac

SEQ ID NO: 1051696 - RNA, 19 nt, Artificial Sequence
  Description of Artificial Sequence: Synthetic oligonucleotide
  Sense strand starting at position 844 of SEQ ID NO: 915073
gggaaagucucaccuauua

SEQ ID NO: 1051697 - RNA, 19 nt, Artificial Sequence
  Description of Artificial Sequence: Synthetic oligonucleotide
  Antisense strand to SEQ ID NO: 1051696
uaauaggugagacuuuccc

SEQ ID NO: 1051698 - RNA, 19 nt, Artificial Sequence
  Description of Artificial Sequence: Synthetic oligonucleotide
  Sense strand starting at position 934 of SEQ ID NO: 915073
aguaaccucguguaucauu

SEQ ID NO: 1051699 - RNA, 19 nt, Artificial Sequence
  Description of Artificial Sequence: Synthetic oligonucleotide
  Antisense strand to SEQ ID NO: 1051698
aaugauacacgagguuacu

SEQ ID NO: 1051700 - RNA, 19 nt, Artificial Sequence
  Description of Artificial Sequence: Synthetic oligonucleotide
  Sense strand starting at position 944 of SEQ ID NO: 915073
uguaucauuagcugguuga

SEQ ID NO: 1051701 - RNA, 19 nt, Artificial Sequence
  Description of Artificial Sequence: Synthetic oligonucleotide
  Antisense strand to SEQ ID NO: 1051700
ucaaccagcuaaugauaca

SEQ ID NO: 1051702 - RNA, 19 nt, Artificial Sequence
  Description of Artificial Sequence: Synthetic oligonucleotide
  Sense strand starting at position 990 of SEQ ID NO: 915073
ggaauagucuuucuccaag

SEQ ID NO: 1051703 - RNA, 19 nt, Artificial Sequence
  Description of Artificial Sequence: Synthetic oligonucleotide
  Antisense strand to SEQ ID NO: 1051702
cuuggagaaagacuauucc

SEQ ID NO: 1051704 - RNA, 19 nt, Artificial Sequence
  Description of Artificial Sequence: Synthetic oligonucleotide
  Sense strand starting at position 1051 of SEQ ID NO: 915073
uacguaugaucacuguacu

SEQ ID NO: 1051705 - RNA, 19 nt, Artificial Sequence
  Description of Artificial Sequence: Synthetic oligonucleotide
  Antisense strand to SEQ ID NO: 1051704
aguacagugaucauacgua

SEQ ID NO: 1051706 - RNA, 19 nt, Artificial Sequence
  Description of Artificial Sequence: Synthetic oligonucleotide
  Sense strand starting at position 1052 of SEQ ID NO: 915073
acguaugaucacuguacuc

SEQ ID NO: 1051707 - RNA, 19 nt, Artificial Sequence
  Description of Artificial Sequence: Synthetic oligonucleotide
  Antisense strand to SEQ ID NO: 1051706
gaguacagugaucauacgu

SEQ ID NO: 1051708 - RNA, 19 nt, Artificial Sequence
  Description of Artificial Sequence: Synthetic oligonucleotide
  Sense strand starting at position 1054 of SEQ ID NO: 915073
guaugaucacuguacucuu

SEQ ID NO: 1051709 - RNA, 19 nt, Artificial Sequence
  Description of Artificial Sequence: Synthetic oligonucleotide
  Antisense strand to SEQ ID NO: 1051708
aagaguacagugaucauac

SEQ ID NO: 1051710 - RNA, 19 nt, Artificial Sequence
  Description of Artificial Sequence: Synthetic oligonucleotide
  Sense strand starting at position 1065 of SEQ ID NO: 915073
guacucuuccagugaggca

SEQ ID NO: 1051711 - RNA, 19 nt, Artificial Sequence
  Description of Artificial Sequence: Synthetic oligonucleotide
  Antisense strand to SEQ ID NO: 1051710
ugccucacuggaagaguac

SEQ ID NO: 1051712 - RNA, 19 nt, Artificial Sequence
  Description of Artificial Sequence: Synthetic oligonucleotide
  Sense strand starting at position 1115 of SEQ ID NO: 915073
ccgagucaccuuuacagca

SEQ ID NO: 1051713 - RNA, 19 nt, Artificial Sequence
  Description of Artificial Sequence: Synthetic oligonucleotide
  Antisense strand to SEQ ID NO: 1051712
ugcuguaaaggugacucgg

SEQ ID NO: 1051714 - RNA, 19 nt, Artificial Sequence
  Description of Artificial Sequence: Synthetic oligonucleotide
  Sense strand starting at position 1625 of SEQ ID NO: 915073
ccgcgaguugaggagcauu

SEQ ID NO: 1051715 - RNA, 19 nt, Artificial Sequence
  Description of Artificial Sequence: Synthetic oligonucleotide
  Antisense strand to SEQ ID NO: 1051714
aaugcuccucaacucgcgg

SEQ ID NO: 1051716 - RNA, 19 nt, Artificial Sequence
  Description of Artificial Sequence: Synthetic oligonucleotide
  Sense strand starting at position 2477 of SEQ ID NO: 915073
gagaaaccuguugguacaa

SEQ ID NO: 1051717 - RNA, 19 nt, Artificial Sequence
  Description of Artificial Sequence: Synthetic oligonucleotide
  Antisense strand to SEQ ID NO: 1051716
uuguaccaacagguuucuc

SEQ ID NO: 1051718 - RNA, 19 nt, Artificial Sequence
  Description of Artificial Sequence: Synthetic oligonucleotide
  Sense strand starting at position 2704 of SEQ ID NO: 915073
gucggcaugacguaucuau

SEQ ID NO: 1051719 - RNA, 19 nt, Artificial Sequence
  Description of Artificial Sequence: Synthetic oligonucleotide
  Antisense strand to SEQ ID NO: 1051718
auagauacgucaugccgac

SEQ ID NO: 1051720 - RNA, 19 nt, Artificial Sequence
  Description of Artificial Sequence: Synthetic oligonucleotide
  Sense strand starting at position 2723 of SEQ ID NO: 915073
uaucgaucugucuacauga

SEQ ID NO: 1051721 - RNA, 19 nt, Artificial Sequence
  Description of Artificial Sequence: Synthetic oligonucleotide
  Antisense strand to SEQ ID NO: 1051720
ucauguagacagaucgaua

SEQ ID NO: 1051722 - RNA, 19 nt, Artificial Sequence
  Description of Artificial Sequence: Synthetic oligonucleotide
  Sense strand starting at position 2863 of SEQ ID NO: 915073
gcugccucagaauaagaca

SEQ ID NO: 1051723 - RNA, 19 nt, Artificial Sequence
  Description of Artificial Sequence: Synthetic oligonucleotide
  Antisense strand to SEQ ID NO: 1051722
ugucuuauucugaggcagc

SEQ ID NO: 1051724 - RNA, 19 nt, Artificial Sequence
  Description of Artificial Sequence: Synthetic oligonucleotide
  Sense strand starting at position 2984 of SEQ ID NO: 915073
ggaugugggcuucgugaga

SEQ ID NO: 1051725 - RNA, 19 nt, Artificial Sequence
  Description of Artificial Sequence: Synthetic oligonucleotide
  Antisense strand to SEQ ID NO: 1051724
ucucacgaagcccacaucc

SEQ ID NO: 1051726 - RNA, 19 nt, Artificial Sequence
  Description of Artificial Sequence: Synthetic oligonucleotide
  Sense strand starting at position 3110 of SEQ ID NO: 915073
uuguuauguggguagggua

SEQ ID NO: 1051727 - RNA, 19 nt, Artificial Sequence
  Description of Artificial Sequence: Synthetic oligonucleotide
  Antisense strand to SEQ ID NO: 1051726
uacccuacccacauaacaa

SEQ ID NO: 1051728 - RNA, 19 nt, Artificial Sequence
  Description of Artificial Sequence: Synthetic oligonucleotide
  Sense strand starting at position 3126 of SEQ ID NO: 915073
guaggccuucucugagaaa

SEQ ID NO: 1051729 - RNA, 19 nt, Artificial Sequence
  Description of Artificial Sequence: Synthetic oligonucleotide
  Antisense strand to SEQ ID NO: 1051728
uuucucagagaaggccuac

SEQ ID NO: 1051730 - RNA, 19 nt, Artificial Sequence
  Description of Artificial Sequence: Synthetic oligonucleotide
  Sense strand starting at position 3313 of SEQ ID NO: 915073
gugacaugcuuccuuucca

SEQ ID NO: 1051731 - RNA, 19 nt, Artificial Sequence
  Description of Artificial Sequence: Synthetic oligonucleotide
  Antisense strand to SEQ ID NO: 1051730
uggaaaggaagcaugucac

SEQ ID NO: 1051732 - RNA, 19 nt, Artificial Sequence
  Description of Artificial Sequence: Synthetic oligonucleotide
  Sense strand starting at position 3384 of SEQ ID NO: 915073
agaaaugccugaguccauu

SEQ ID NO: 1051733 - RNA, 19 nt, Artificial Sequence
  Description of Artificial Sequence: Synthetic oligonucleotide
  Antisense strand to SEQ ID NO: 1051732
aauggacucaggcauuucu

SEQ ID NO: 1051734 - RNA, 19 nt, Artificial Sequence
  Description of Artificial Sequence: Synthetic oligonucleotide
  Sense strand starting at position 3411 of SEQ ID NO: 915073
ggauaagguuagccagcuu

SEQ ID NO: 1051735 - RNA, 19 nt, Artificial Sequence
  Description of Artificial Sequence: Synthetic oligonucleotide
  Antisense strand to SEQ ID NO: 1051734
aagcuggcuaaccuuaucc

SEQ ID NO: 1051736 - RNA, 19 nt, Artificial Sequence
  Description of Artificial Sequence: Synthetic oligonucleotide
  Sense strand starting at position 3588 of SEQ ID NO: 915073
gccagauguccugggaacu

SEQ ID NO: 1051737 - RNA, 19 nt, Artificial Sequence
  Description of Artificial Sequence: Synthetic oligonucleotide
  Antisense strand to SEQ ID NO: 1051736
aguucccaggacaucuggc

SEQ ID NO: 1051738 - RNA, 19 nt, Artificial Sequence
  Description of Artificial Sequence: Synthetic oligonucleotide
  Sense strand starting at position 3589 of SEQ ID NO: 915073
ccagauguccugggaacuc

SEQ ID NO: 1051739 - RNA, 19 nt, Artificial Sequence
  Description of Artificial Sequence: Synthetic oligonucleotide
  Antisense strand to SEQ ID NO: 1051738
gaguucccaggacaucugg

SEQ ID NO: 1051740 - RNA, 19 nt, Artificial Sequence
  Description of Artificial Sequence: Synthetic oligonucleotide
  Sense strand starting at position 3765 of SEQ ID NO: 915073
agcugaggaauucgggauu

SEQ ID NO: 1051741 - RNA, 19 nt, Artificial Sequence
  Description of Artificial Sequence: Synthetic oligonucleotide
  Antisense strand to SEQ ID NO: 1051740
aaucccgaauuccucagcu

SEQ ID NO: 1051742 - RNA, 19 nt, Artificial Sequence
  Description of Artificial Sequence: Synthetic oligonucleotide
  Sense strand starting at position 3787 of SEQ ID NO: 915073
ugaguuugcagucaagucu

SEQ ID NO: 1051743 - RNA, 19 nt, Artificial Sequence
  Description of Artificial Sequence: Synthetic oligonucleotide
  Antisense strand to SEQ ID NO: 1051742
agacuugacugcaaacuca

SEQ ID NO: 1051744 - RNA, 19 nt, Artificial Sequence
  Description of Artificial Sequence: Synthetic oligonucleotide
  Sense strand starting at position 3794 of SEQ ID NO: 915073
gcagucaagucucccaagu

SEQ ID NO: 1051745 - RNA, 19 nt, Artificial Sequence
  Description of Artificial Sequence: Synthetic oligonucleotide
  Antisense strand to SEQ ID NO: 1051744
acuugggagacuugacugc

SEQ ID NO: 1051746 - RNA, 19 nt, Artificial Sequence
  Description of Artificial Sequence: Synthetic oligonucleotide
  Sense strand starting at position 3966 of SEQ ID NO: 915073
gggugagggugucucugaa

SEQ ID NO: 1051747 - RNA, 19 nt, Artificial Sequence
  Description of Artificial Sequence: Synthetic oligonucleotide
  Antisense strand to SEQ ID NO: 1051746
uucagagacacccucaccc

SEQ ID NO: 1051748 - RNA, 19 nt, Artificial Sequence
  Description of Artificial Sequence: Synthetic oligonucleotide
  Sense strand starting at position 67 of SEQ ID NO: 915074
agcucucagggcuaggaaa

SEQ ID NO: 1051749 - RNA, 19 nt, Artificial Sequence
  Description of Artificial Sequence: Synthetic oligonucleotide
  Antisense strand to SEQ ID NO: 1051748
uuuccuagcccugagagcu

SEQ ID NO: 1051750 - RNA, 19 nt, Artificial Sequence
  Description of Artificial Sequence: Synthetic oligonucleotide
  Sense strand starting at position 78 of SEQ ID NO: 915074
cuaggaaacuccucgacaa

SEQ ID NO: 1051751 - RNA, 19 nt, Artificial Sequence
  Description of Artificial Sequence: Synthetic oligonucleotide
  Antisense strand to SEQ ID NO: 1051750
uugucgaggaguuuccuag

SEQ ID NO: 1051752 - RNA, 19 nt, Artificial Sequence
  Description of Artificial Sequence: Synthetic oligonucleotide
  Sense strand starting at position 163 of SEQ ID NO: 915074
cuucuuuauugauugcuga

SEQ ID NO: 1051753 - RNA, 19 nt, Artificial Sequence
  Description of Artificial Sequence: Synthetic oligonucleotide
  Antisense strand to SEQ ID NO: 1051752
ucagcaaucaauaaagaag

SEQ ID NO: 1051754 - RNA, 19 nt, Artificial Sequence
  Description of Artificial Sequence: Synthetic oligonucleotide
  Sense strand starting at position 171 of SEQ ID NO: 915074
uugauugcugagcauucua

SEQ ID NO: 1051755 - RNA, 19 nt, Artificial Sequence
  Description of Artificial Sequence: Synthetic oligonucleotide
  Antisense strand to SEQ ID NO: 1051754
uagaaugcucagcaaucaa

SEQ ID NO: 1051756 - RNA, 19 nt, Artificial Sequence
  Description of Artificial Sequence: Synthetic oligonucleotide
  Sense strand starting at position 178 of SEQ ID NO: 915074
cugagcauucuaggaacua

SEQ ID NO: 1051757 - RNA, 19 nt, Artificial Sequence
  Description of Artificial Sequence: Synthetic oligonucleotide
  Antisense strand to SEQ ID NO: 1051756
uaguuccuagaaugcucag

SEQ ID NO: 1051758 - RNA, 19 nt, Artificial Sequence
  Description of Artificial Sequence: Synthetic oligonucleotide
  Sense strand starting at position 191 of SEQ ID NO: 915074
gaacuaggauaggauuauu

SEQ ID NO: 1051759 - RNA, 19 nt, Artificial Sequence
  Description of Artificial Sequence: Synthetic oligonucleotide
  Antisense strand to SEQ ID NO: 1051758
aauaauccuauccuaguuc

SEQ ID NO: 1051760 - RNA, 19 nt, Artificial Sequence
  Description of Artificial Sequence: Synthetic oligonucleotide
  Sense strand starting at position 199 of SEQ ID NO: 915074
auaggauuauuuggccuga

SEQ ID NO: 1051761 - RNA, 19 nt, Artificial Sequence
  Description of Artificial Sequence: Synthetic oligonucleotide
  Antisense strand to SEQ ID NO: 1051760
ucaggccaaauaauccuau

SEQ ID NO: 1051762 - RNA, 19 nt, Artificial Sequence
  Description of Artificial Sequence: Synthetic oligonucleotide
  Sense strand starting at position 245 of SEQ ID NO: 915074
uguuaaaugaaucgagauu

SEQ ID NO: 1051763 - RNA, 19 nt, Artificial Sequence
  Description of Artificial Sequence: Synthetic oligonucleotide
  Antisense strand to SEQ ID NO: 1051762
aaucucgauucauuuaaca

SEQ ID NO: 1051764 - RNA, 19 nt, Artificial Sequence
  Description of Artificial Sequence: Synthetic oligonucleotide
  Sense strand starting at position 251 of SEQ ID NO: 915074
augaaucgagauugcuuua

SEQ ID NO: 1051765 - RNA, 19 nt, Artificial Sequence
  Description of Artificial Sequence: Synthetic oligonucleotide
  Antisense strand to SEQ ID NO: 1051764
uaaagcaaucucgauucau

SEQ ID NO: 1051766 - RNA, 19 nt, Artificial Sequence
  Description of Artificial Sequence: Synthetic oligonucleotide
  Sense strand starting at position 254 of SEQ ID NO: 915074
aaucgagauugcuuuaaag

SEQ ID NO: 1051767 - RNA, 19 nt, Artificial Sequence
  Description of Artificial Sequence: Synthetic oligonucleotide
  Antisense strand to SEQ ID NO: 1051766
cuuuaaagcaaucucgauu

SEQ ID NO: 1051768 - RNA, 19 nt, Artificial Sequence
  Description of Artificial Sequence: Synthetic oligonucleotide
  Sense strand starting at position 256 of SEQ ID NO: 915074
ucgagauugcuuuaaagug

SEQ ID NO: 1051769 - RNA, 19 nt, Artificial Sequence
  Description of Artificial Sequence: Synthetic oligonucleotide
  Antisense strand to SEQ ID NO: 1051768
cacuuuaaagcaaucucga

SEQ ID NO: 1051770 - RNA, 19 nt, Artificial Sequence
  Description of Artificial Sequence: Synthetic oligonucleotide
  Sense strand starting at position 327 of SEQ ID NO: 915074
aucacucuggguuagcaua

SEQ ID NO: 1051771 - RNA, 19 nt, Artificial Sequence
  Description of Artificial Sequence: Synthetic oligonucleotide
  Antisense strand to SEQ ID NO: 1051770
uaugcuaacccagagugau

SEQ ID NO: 1051772 - RNA, 19 nt, Artificial Sequence
  Description of Artificial Sequence: Synthetic oligonucleotide
  Sense strand starting at position 329 of SEQ ID NO: 915074
cacucuggguuagcauaaa

SEQ ID NO: 1051773 - RNA, 19 nt, Artificial Sequence
  Description of Artificial Sequence: Synthetic oligonucleotide
  Antisense strand to SEQ ID NO: 1051772
uuuaugcuaacccagagug

SEQ ID NO: 1051774 - RNA, 19 nt, Artificial Sequence
  Description of Artificial Sequence: Synthetic oligonucleotide
  Sense strand starting at position 760 of SEQ ID NO: 915074
gaauaaagcgauugugaaa

SEQ ID NO: 1051775 - RNA, 19 nt, Artificial Sequence
  Description of Artificial Sequence: Synthetic oligonucleotide
  Antisense strand to SEQ ID NO: 1051774
uuucacaaucgcuuuauuc

SEQ ID NO: 1051776 - RNA, 19 nt, Artificial Sequence
  Description of Artificial Sequence: Synthetic oligonucleotide
  Sense strand starting at position 859 of SEQ ID NO: 915074
guggcugagggaugacaaa

SEQ ID NO: 1051777 - RNA, 19 nt, Artificial Sequence
  Description of Artificial Sequence: Synthetic oligonucleotide
  Antisense strand to SEQ ID NO: 1051776
uuugucaucccucagccac

SEQ ID NO: 1051778 - RNA, 19 nt, Artificial Sequence
  Description of Artificial Sequence: Synthetic oligonucleotide
  Sense strand starting at position 891 of SEQ ID NO: 915074
auugguaacccuuagccau

SEQ ID NO: 1051779 - RNA, 19 nt, Artificial Sequence
  Description of Artificial Sequence: Synthetic oligonucleotide
  Antisense strand to SEQ ID NO: 1051778
auggcuaaggguuaccaau

SEQ ID NO: 1051780 - RNA, 19 nt, Artificial Sequence
  Description of Artificial Sequence: Synthetic oligonucleotide
  Sense strand starting at position 988 of SEQ ID NO: 915074
aggaacaacugugcuagaa

SEQ ID NO: 1051781 - RNA, 19 nt, Artificial Sequence
  Description of Artificial Sequence: Synthetic oligonucleotide
  Antisense strand to SEQ ID NO: 1051780
uucuagcacaguuguuccu

SEQ ID NO: 1051782 - RNA, 19 nt, Artificial Sequence
  Description of Artificial Sequence: Synthetic oligonucleotide
  Sense strand starting at position 1253 of SEQ ID NO: 915074
acagaaguccucuggaucu

SEQ ID NO: 1051783 - RNA, 19 nt, Artificial Sequence
  Description of Artificial Sequence: Synthetic oligonucleotide
  Antisense strand to SEQ ID NO: 1051782
agauccagaggacuucugu

SEQ ID NO: 1051784 - RNA, 19 nt, Artificial Sequence
  Description of Artificial Sequence: Synthetic oligonucleotide
  Sense strand starting at position 1266 of SEQ ID NO: 915074
ggaucuggcaacugucaaa

SEQ ID NO: 1051785 - RNA, 19 nt, Artificial Sequence
  Description of Artificial Sequence: Synthetic oligonucleotide
  Antisense strand to SEQ ID NO: 1051784
uuugacaguugccagaucc

SEQ ID NO: 1051786 - RNA, 19 nt, Artificial Sequence
  Description of Artificial Sequence: Synthetic oligonucleotide
  Sense strand starting at position 1332 of SEQ ID NO: 915074
caccucugucugggucaua

SEQ ID NO: 1051787 - RNA, 19 nt, Artificial Sequence
  Description of Artificial Sequence: Synthetic oligonucleotide
  Antisense strand to SEQ ID NO: 1051786
uaugacccagacagaggug

SEQ ID NO: 1051788 - RNA, 19 nt, Artificial Sequence
  Description of Artificial Sequence: Synthetic oligonucleotide
  Sense strand starting at position 2464 of SEQ ID NO: 915074
uugggagcgcuccggauuu

SEQ ID NO: 1051789 - RNA, 19 nt, Artificial Sequence
  Description of Artificial Sequence: Synthetic oligonucleotide
  Antisense strand to SEQ ID NO: 1051788
aaauccggagcgcucccaa

SEQ ID NO: 1051790 - RNA, 19 nt, Artificial Sequence
  Description of Artificial Sequence: Synthetic oligonucleotide
  Sense strand starting at position 2763 of SEQ ID NO: 915074
caauaagugcuagggcuua

SEQ ID NO: 1051791 - RNA, 19 nt, Artificial Sequence
  Description of Artificial Sequence: Synthetic oligonucleotide
  Antisense strand to SEQ ID NO: 1051790
uaagcccuagcacuuauug

SEQ ID NO: 1051792 - RNA, 19 nt, Artificial Sequence
  Description of Artificial Sequence: Synthetic oligonucleotide
  Sense strand starting at position 2909 of SEQ ID NO: 915074
ucucgacauugugauuuga

SEQ ID NO: 1051793 - RNA, 19 nt, Artificial Sequence
  Description of Artificial Sequence: Synthetic oligonucleotide
  Antisense strand to SEQ ID NO: 1051792
ucaaaucacaaugucgaga

SEQ ID NO: 1051794 - RNA, 19 nt, Artificial Sequence
  Description of Artificial Sequence: Synthetic oligonucleotide
  Sense strand starting at position 2989 of SEQ ID NO: 915074
agaccuggauaagaaauau

SEQ ID NO: 1051795 - RNA, 19 nt, Artificial Sequence
  Description of Artificial Sequence: Synthetic oligonucleotide
  Antisense strand to SEQ ID NO: 1051794
auauuucuuauccaggucu

SEQ ID NO: 1051796 - RNA, 19 nt, Artificial Sequence
  Description of Artificial Sequence: Synthetic oligonucleotide
  Sense strand starting at position 3006 of SEQ ID NO: 915074
augugcacucugcaaagaa

SEQ ID NO: 1051797 - RNA, 19 nt, Artificial Sequence
  Description of Artificial Sequence: Synthetic oligonucleotide
  Antisense strand to SEQ ID NO: 1051796
uucuuugcagagugcacau

SEQ ID NO: 1051798 - RNA, 19 nt, Artificial Sequence
  Description of Artificial Sequence: Synthetic oligonucleotide
  Sense strand starting at position 3100 of SEQ ID NO: 915074
ugcaguaucucauuggauc

SEQ ID NO: 1051799 - RNA, 19 nt, Artificial Sequence
  Description of Artificial Sequence: Synthetic oligonucleotide
  Antisense strand to SEQ ID NO: 1051798
gauccaaugagauacugca

SEQ ID NO: 1051800 - RNA, 19 nt, Artificial Sequence
  Description of Artificial Sequence: Synthetic oligonucleotide
  Sense strand starting at position 3119 of SEQ ID NO: 915074
cuggcaacagcuuguaaga

SEQ ID NO: 1051801 - RNA, 19 nt, Artificial Sequence
  Description of Artificial Sequence: Synthetic oligonucleotide
  Antisense strand to SEQ ID NO: 1051800
ucuuacaagcuguugccag

SEQ ID NO: 1051802 - RNA, 19 nt, Artificial Sequence
  Description of Artificial Sequence: Synthetic oligonucleotide
  Sense strand starting at position 3132 of SEQ ID NO: 915074
guaagauaguauucucauc

SEQ ID NO: 1051803 - RNA, 19 nt, Artificial Sequence
  Description of Artificial Sequence: Synthetic oligonucleotide
  Antisense strand to SEQ ID NO: 1051802
gaugagaauacuaucuuac

SEQ ID NO: 1051804 - RNA, 19 nt, Artificial Sequence
  Description of Artificial Sequence: Synthetic oligonucleotide
  Sense strand starting at position 3198 of SEQ ID NO: 915074
gaaugcuccuugguuccau

SEQ ID NO: 1051805 - RNA, 19 nt, Artificial Sequence
  Description of Artificial Sequence: Synthetic oligonucleotide
  Antisense strand to SEQ ID NO: 1051804
auggaaccaaggagcauuc

SEQ ID NO: 1051806 - RNA, 19 nt, Artificial Sequence
  Description of Artificial Sequence: Synthetic oligonucleotide
  Sense strand starting at position 3243 of SEQ ID NO: 915074
agaguaaucuucucaaacg

SEQ ID NO: 1051807 - RNA, 19 nt, Artificial Sequence
  Description of Artificial Sequence: Synthetic oligonucleotide
  Antisense strand to SEQ ID NO: 1051806
cguuugagaagauuacucu

SEQ ID NO: 1051808 - RNA, 19 nt, Artificial Sequence
  Description of Artificial Sequence: Synthetic oligonucleotide
  Sense strand starting at position 3251 of SEQ ID NO: 915074
cuucucaaacgauaagugu

SEQ ID NO: 1051809 - RNA, 19 nt, Artificial Sequence
  Description of Artificial Sequence: Synthetic oligonucleotide
  Antisense strand to SEQ ID NO: 1051808
acacuuaucguuugagaag

SEQ ID NO: 1051810 - RNA, 19 nt, Artificial Sequence
  Description of Artificial Sequence: Synthetic oligonucleotide
  Sense strand starting at position 3257 of SEQ ID NO: 915074
aaacgauaagugugaucau

SEQ ID NO: 1051811 - RNA, 19 nt, Artificial Sequence
  Description of Artificial Sequence: Synthetic oligonucleotide
  Antisense strand to SEQ ID NO: 1051810
augaucacacuuaucguuu

SEQ ID NO: 1051812 - RNA, 19 nt, Artificial Sequence
  Description of Artificial Sequence: Synthetic oligonucleotide
  Sense strand starting at position 3260 of SEQ ID NO: 915074
cgauaagugugaucaucuc

SEQ ID NO: 1051813 - RNA, 19 nt, Artificial Sequence
  Description of Artificial Sequence: Synthetic oligonucleotide
  Antisense strand to SEQ ID NO: 1051812
gagaugaucacacuuaucg

SEQ ID NO: 1051814 - RNA, 19 nt, Artificial Sequence
  Description of Artificial Sequence: Synthetic oligonucleotide
  Sense strand starting at position 3564 of SEQ ID NO: 915074
agugaagucucucuaauua

SEQ ID NO: 1051815 - RNA, 19 nt, Artificial Sequence
  Description of Artificial Sequence: Synthetic oligonucleotide
  Antisense strand to SEQ ID NO: 1051814
uaauuagagagacuucacu

SEQ ID NO: 1051816 - RNA, 19 nt, Artificial Sequence
  Description of Artificial Sequence: Synthetic oligonucleotide
  Sense strand starting at position 3636 of SEQ ID NO: 915074
ggguacugguuguuggauu

SEQ ID NO: 1051817 - RNA, 19 nt, Artificial Sequence
  Description of Artificial Sequence: Synthetic oligonucleotide
  Antisense strand to SEQ ID NO: 1051816
aauccaacaaccaguaccc

SEQ ID NO: 1051818 - RNA, 19 nt, Artificial Sequence
  Description of Artificial Sequence: Synthetic oligonucleotide
  Sense strand starting at position 3726 of SEQ ID NO: 915074
cccuaauaugcagaggguu

SEQ ID NO: 1051819 - RNA, 19 nt, Artificial Sequence
  Description of Artificial Sequence: Synthetic oligonucleotide
  Antisense strand to SEQ ID NO: 1051818
aacccucugcauauuaggg

SEQ ID NO: 1051820 - RNA, 19 nt, Artificial Sequence
  Description of Artificial Sequence: Synthetic oligonucleotide
  Sense strand starting at position 3779 of SEQ ID NO: 915074
ggucguaccaaagaaauca

SEQ ID NO: 1051821 - RNA, 19 nt, Artificial Sequence
  Description of Artificial Sequence: Synthetic oligonucleotide
  Antisense strand to SEQ ID NO: 1051820
ugauuucuuugguacgacc

SEQ ID NO: 1051822 - RNA, 19 nt, Artificial Sequence
  Description of Artificial Sequence: Synthetic oligonucleotide
  Sense strand starting at position 3798 of SEQ ID NO: 915074
agugguaaagcuggcauuu

SEQ ID NO: 1051823 - RNA, 19 nt, Artificial Sequence
  Description of Artificial Sequence: Synthetic oligonucleotide
  Antisense strand to SEQ ID NO: 1051822
aaaugccagcuuuaccacu

SEQ ID NO: 1051824 - RNA, 19 nt, Artificial Sequence
  Description of Artificial Sequence: Synthetic oligonucleotide
  Sense strand starting at position 3858 of SEQ ID NO: 915074
uggguuuggccucaugaag

SEQ ID NO: 1051825 - RNA, 19 nt, Artificial Sequence
  Description of Artificial Sequence: Synthetic oligonucleotide
  Antisense strand to SEQ ID NO: 1051824
cuucaugaggccaaaccca

SEQ ID NO: 1051826 - RNA, 19 nt, Artificial Sequence
  Description of Artificial Sequence: Synthetic oligonucleotide
  Sense strand starting at position 3921 of SEQ ID NO: 915074
caaagacuguuugugggaa

SEQ ID NO: 1051827 - RNA, 19 nt, Artificial Sequence
  Description of Artificial Sequence: Synthetic oligonucleotide
  Antisense strand to SEQ ID NO: 1051826
uucccacaaacagucuuug

SEQ ID NO: 1051828 - RNA, 19 nt, Artificial Sequence
  Description of Artificial Sequence: Synthetic oligonucleotide
  Sense strand starting at position 1 of SEQ ID NO: 915075
guaucauugucagaguguc

SEQ ID NO: 1051829 - RNA, 19 nt, Artificial Sequence
  Description of Artificial Sequence: Synthetic oligonucleotide
  Antisense strand to SEQ ID NO: 1051828
gacacucugacaaugauac

SEQ ID NO: 1051830 - RNA, 19 nt, Artificial Sequence
  Description of Artificial Sequence: Synthetic oligonucleotide
  Sense strand starting at position 134 of SEQ ID NO: 915075
acuccaaugucauauggau

SEQ ID NO: 1051831 - RNA, 19 nt, Artificial Sequence
  Description of Artificial Sequence: Synthetic oligonucleotide
  Antisense strand to SEQ ID NO: 1051830
auccauaugacauuggagu

SEQ ID NO: 1051832 - RNA, 19 nt, Artificial Sequence
  Description of Artificial Sequence: Synthetic oligonucleotide
  Sense strand starting at position 218 of SEQ ID NO: 915075
cccuguggaucugaggaua

SEQ ID NO: 1051833 - RNA, 19 nt, Artificial Sequence
  Description of Artificial Sequence: Synthetic oligonucleotide
  Antisense strand to SEQ ID NO: 1051832
uauccucagauccacaggg

SEQ ID NO: 1051834 - RNA, 19 nt, Artificial Sequence
  Description of Artificial Sequence: Synthetic oligonucleotide
  Sense strand starting at position 235 of SEQ ID NO: 915075
uaggaugggucugagaaca

SEQ ID NO: 1051835 - RNA, 19 nt, Artificial Sequence
  Description of Artificial Sequence: Synthetic oligonucleotide
  Antisense strand to SEQ ID NO: 1051834
uguucucagacccauccua

SEQ ID NO: 1051836 - RNA, 19 nt, Artificial Sequence
  Description of Artificial Sequence: Synthetic oligonucleotide
  Sense strand starting at position 254 of SEQ ID NO: 915075
cuuccucuagcaugaauga

SEQ ID NO: 1051837 - RNA, 19 nt, Artificial Sequence
  Description of Artificial Sequence: Synthetic oligonucleotide
  Antisense strand to SEQ ID NO: 1051836
ucauucaugcuagaggaag

SEQ ID NO: 1051838 - RNA, 19 nt, Artificial Sequence
  Description of Artificial Sequence: Synthetic oligonucleotide
  Sense strand starting at position 255 of SEQ ID NO: 915075
uuccucuagcaugaaugaa

SEQ ID NO: 1051839 - RNA, 19 nt, Artificial Sequence
  Description of Artificial Sequence: Synthetic oligonucleotide
  Antisense strand to SEQ ID NO: 1051838
uucauucaugcuagaggaa

SEQ ID NO: 1051840 - RNA, 19 nt, Artificial Sequence
  Description of Artificial Sequence: Synthetic oligonucleotide
  Sense strand starting at position 345 of SEQ ID NO: 915075
gagccaucccuggaagcaa

SEQ ID NO: 1051841 - RNA, 19 nt, Artificial Sequence
  Description of Artificial Sequence: Synthetic oligonucleotide
  Antisense strand to SEQ ID NO: 1051840
uugcuuccagggauggcuc

SEQ ID NO: 1051842 - RNA, 19 nt, Artificial Sequence
  Description of Artificial Sequence: Synthetic oligonucleotide
  Sense strand starting at position 400 of SEQ ID NO: 915075
aacagaaggccucacaguu

SEQ ID NO: 1051843 - RNA, 19 nt, Artificial Sequence
  Description of Artificial Sequence: Synthetic oligonucleotide
  Antisense strand to SEQ ID NO: 1051842
aacugugaggccuucuguu

SEQ ID NO: 1051844 - RNA, 19 nt, Artificial Sequence
  Description of Artificial Sequence: Synthetic oligonucleotide
  Sense strand starting at position 468 of SEQ ID NO: 915075
uucuccuucucuggcagaa

SEQ ID NO: 1051845 - RNA, 19 nt, Artificial Sequence
  Description of Artificial Sequence: Synthetic oligonucleotide
  Antisense strand to SEQ ID NO: 1051844
uucugccagagaaggagaa

SEQ ID NO: 1051846 - RNA, 19 nt, Artificial Sequence
  Description of Artificial Sequence: Synthetic oligonucleotide
  Sense strand starting at position 470 of SEQ ID NO: 915075
cuccuucucuggcagaaga

SEQ ID NO: 1051847 - RNA, 19 nt, Artificial Sequence
  Description of Artificial Sequence: Synthetic oligonucleotide
  Antisense strand to SEQ ID NO: 1051846
ucuucugccagagaaggag

SEQ ID NO: 1051848 - RNA, 19 nt, Artificial Sequence
  Description of Artificial Sequence: Synthetic oligonucleotide
  Sense strand starting at position 760 of SEQ ID NO: 915075
agcucaaugaggcaucgaa

SEQ ID NO: 1051849 - RNA, 19 nt, Artificial Sequence
  Description of Artificial Sequence: Synthetic oligonucleotide
  Antisense strand to SEQ ID NO: 1051848
uucgaugccucauugagcu

SEQ ID NO: 1051850 - RNA, 19 nt, Artificial Sequence
  Description of Artificial Sequence: Synthetic oligonucleotide
  Sense strand starting at position 941 of SEQ ID NO: 915075
gagaaauggucccuuccuc

SEQ ID NO: 1051851 - RNA, 19 nt, Artificial Sequence
  Description of Artificial Sequence: Synthetic oligonucleotide
  Antisense strand to SEQ ID NO: 1051850
gaggaagggaccauuucuc

SEQ ID NO: 1051852 - RNA, 19 nt, Artificial Sequence
  Description of Artificial Sequence: Synthetic oligonucleotide
  Sense strand starting at position 1375 of SEQ ID NO: 915075
cccaguuucucgcugguua

SEQ ID NO: 1051853 - RNA, 19 nt, Artificial Sequence
  Description of Artificial Sequence: Synthetic oligonucleotide
  Antisense strand to SEQ ID NO: 1051852
uaaccagcgagaaacuggg

SEQ ID NO: 1051854 - RNA, 19 nt, Artificial Sequence
  Description of Artificial Sequence: Synthetic oligonucleotide
  Sense strand starting at position 1377 of SEQ ID NO: 915075
caguuucucgcugguuaga

SEQ ID NO: 1051855 - RNA, 19 nt, Artificial Sequence
  Description of Artificial Sequence: Synthetic oligonucleotide
  Antisense strand to SEQ ID NO: 1051854
ucuaaccagcgagaaacug

SEQ ID NO: 1051856 - RNA, 19 nt, Artificial Sequence
  Description of Artificial Sequence: Synthetic oligonucleotide
  Sense strand starting at position 1482 of SEQ ID NO: 915075
cccucuaaguccucuggau

SEQ ID NO: 1051857 - RNA, 19 nt, Artificial Sequence
  Description of Artificial Sequence: Synthetic oligonucleotide
  Antisense strand to SEQ ID NO: 1051856
auccagaggacuuagaggg

SEQ ID NO: 1051858 - RNA, 19 nt, Artificial Sequence
  Description of Artificial Sequence: Synthetic oligonucleotide
  Sense strand starting at position 1951 of SEQ ID NO: 915075
gaggaugcuccgcgaguca

SEQ ID NO: 1051859 - RNA, 19 nt, Artificial Sequence
  Description of Artificial Sequence: Synthetic oligonucleotide
  Antisense strand to SEQ ID NO: 1051858
ugacucgcggagcauccuc

SEQ ID NO: 1051860 - RNA, 19 nt, Artificial Sequence
  Description of Artificial Sequence: Synthetic oligonucleotide
  Sense strand starting at position 2615 of SEQ ID NO: 915075
gggcuuugcugggauaaag

SEQ ID NO: 1051861 - RNA, 19 nt, Artificial Sequence
  Description of Artificial Sequence: Synthetic oligonucleotide
  Antisense strand to SEQ ID NO: 1051860
cuuuaucccagcaaagccc

SEQ ID NO: 1051862 - RNA, 19 nt, Artificial Sequence
  Description of Artificial Sequence: Synthetic oligonucleotide
  Sense strand starting at position 2702 of SEQ ID NO: 915075
aguccugccucaugggaau

SEQ ID NO: 1051863 - RNA, 19 nt, Artificial Sequence
  Description of Artificial Sequence: Synthetic oligonucleotide
  Antisense strand to SEQ ID NO: 1051862
auucccaugaggcaggacu

SEQ ID NO: 1051864 - RNA, 19 nt, Artificial Sequence
  Description of Artificial Sequence: Synthetic oligonucleotide
  Sense strand starting at position 2721 of SEQ ID NO: 915075
cccagaguuugaggccaaa

SEQ ID NO: 1051865 - RNA, 19 nt, Artificial Sequence
  Description of Artificial Sequence: Synthetic oligonucleotide
  Antisense strand to SEQ ID NO: 1051864
uuuggccucaaacucuggg

SEQ ID NO: 1051866 - RNA, 19 nt, Artificial Sequence
  Description of Artificial Sequence: Synthetic oligonucleotide
  Sense strand starting at position 2900 of SEQ ID NO: 915075
aggucucuccuguaagggu

SEQ ID NO: 1051867 - RNA, 19 nt, Artificial Sequence
  Description of Artificial Sequence: Synthetic oligonucleotide
  Antisense strand to SEQ ID NO: 1051866
acccuuacaggagagaccu

SEQ ID NO: 1051868 - RNA, 19 nt, Artificial Sequence
  Description of Artificial Sequence: Synthetic oligonucleotide
  Sense strand starting at position 3075 of SEQ ID NO: 915075
guguaugugugccagacca

SEQ ID NO: 1051869 - RNA, 19 nt, Artificial Sequence
  Description of Artificial Sequence: Synthetic oligonucleotide
  Antisense strand to SEQ ID NO: 1051868
uggucuggcacacauacac

SEQ ID NO: 1051870 - RNA, 19 nt, Artificial Sequence
  Description of Artificial Sequence: Synthetic oligonucleotide
  Sense strand starting at position 3077 of SEQ ID NO: 915075
guaugugugccagaccauu

SEQ ID NO: 1051871 - RNA, 19 nt, Artificial Sequence
  Description of Artificial Sequence: Synthetic oligonucleotide
  Antisense strand to SEQ ID NO: 1051870
aauggucuggcacacauac

SEQ ID NO: 1051872 - RNA, 19 nt, Artificial Sequence
  Description of Artificial Sequence: Synthetic oligonucleotide
  Sense strand starting at position 3134 of SEQ ID NO: 915075
gucugugaucugcacagcu

SEQ ID NO: 1051873 - RNA, 19 nt, Artificial Sequence
  Description of Artificial Sequence: Synthetic oligonucleotide
  Antisense strand to SEQ ID NO: 1051872
agcugugcagaucacagac

SEQ ID NO: 1051874 - RNA, 19 nt, Artificial Sequence
  Description of Artificial Sequence: Synthetic oligonucleotide
  Sense strand starting at position 3209 of SEQ ID NO: 915075
ccaccaaugcauggacauu

SEQ ID NO: 1051875 - RNA, 19 nt, Artificial Sequence
  Description of Artificial Sequence: Synthetic oligonucleotide
  Antisense strand to SEQ ID NO: 1051874
aauguccaugcauuggugg

SEQ ID NO: 1051876 - RNA, 19 nt, Artificial Sequence
  Description of Artificial Sequence: Synthetic oligonucleotide
  Sense strand starting at position 3245 of SEQ ID NO: 915075
gcacacauaucugugaaca

SEQ ID NO: 1051877 - RNA, 19 nt, Artificial Sequence
  Description of Artificial Sequence: Synthetic oligonucleotide
  Antisense strand to SEQ ID NO: 1051876
uguucacagauaugugugc

SEQ ID NO: 1051878 - RNA, 19 nt, Artificial Sequence
  Description of Artificial Sequence: Synthetic oligonucleotide
  Sense strand starting at position 3332 of SEQ ID NO: 915075
agcauauacugcccaagaa

SEQ ID NO: 1051879 - RNA, 19 nt, Artificial Sequence
  Description of Artificial Sequence: Synthetic oligonucleotide
  Antisense strand to SEQ ID NO: 1051878
uucuugggcaguauaugcu

SEQ ID NO: 1051880 - RNA, 19 nt, Artificial Sequence
  Description of Artificial Sequence: Synthetic oligonucleotide
  Sense strand starting at position 3461 of SEQ ID NO: 915075
caaagagaguggucaauua

SEQ ID NO: 1051881 - RNA, 19 nt, Artificial Sequence
  Description of Artificial Sequence: Synthetic oligonucleotide
  Antisense strand to SEQ ID NO: 1051880
uaauugaccacucucuuug

SEQ ID NO: 1051882 - RNA, 19 nt, Artificial Sequence
  Description of Artificial Sequence: Synthetic oligonucleotide
  Sense strand starting at position 3473 of SEQ ID NO: 915075
ucaauuacugaguggcuua

SEQ ID NO: 1051883 - RNA, 19 nt, Artificial Sequence
  Description of Artificial Sequence: Synthetic oligonucleotide
  Antisense strand to SEQ ID NO: 1051882
uaagccacucaguaauuga

SEQ ID NO: 1051884 - RNA, 19 nt, Artificial Sequence
  Description of Artificial Sequence: Synthetic oligonucleotide
  Sense strand starting at position 3586 of SEQ ID NO: 915075
cgagaagggugaucccuaa

SEQ ID NO: 1051885 - RNA, 19 nt, Artificial Sequence
  Description of Artificial Sequence: Synthetic oligonucleotide
  Antisense strand to SEQ ID NO: 1051884
uuagggaucacccuucucg

SEQ ID NO: 1051886 - RNA, 19 nt, Artificial Sequence
  Description of Artificial Sequence: Synthetic oligonucleotide
  Sense strand starting at position 3590 of SEQ ID NO: 915075
aagggugaucccuaagcca

SEQ ID NO: 1051887 - RNA, 19 nt, Artificial Sequence
  Description of Artificial Sequence: Synthetic oligonucleotide
  Antisense strand to SEQ ID NO: 1051886
uggcuuagggaucacccuu

SEQ ID NO: 1051888 - RNA, 19 nt, Artificial Sequence
  Description of Artificial Sequence: Synthetic oligonucleotide
  Sense strand starting at position 3698 of SEQ ID NO: 915075
ugcgucagggccuaugaau

SEQ ID NO: 1051889 - RNA, 19 nt, Artificial Sequence
  Description of Artificial Sequence: Synthetic oligonucleotide
  Antisense strand to SEQ ID NO: 1051888
auucauaggcccugacgca

SEQ ID NO: 1051890 - RNA, 19 nt, Artificial Sequence
  Description of Artificial Sequence: Synthetic oligonucleotide
  Sense strand starting at position 3704 of SEQ ID NO: 915075
agggccuaugaaugcgaaa

SEQ ID NO: 1051891 - RNA, 19 nt, Artificial Sequence
  Description of Artificial Sequence: Synthetic oligonucleotide
  Antisense strand to SEQ ID NO: 1051890
uuucgcauucauaggcccu

SEQ ID NO: 1051892 - RNA, 19 nt, Artificial Sequence
  Description of Artificial Sequence: Synthetic oligonucleotide
  Sense strand starting at position 3706 of SEQ ID NO: 915075
ggccuaugaaugcgaaauc

SEQ ID NO: 1051893 - RNA, 19 nt, Artificial Sequence
  Description of Artificial Sequence: Synthetic oligonucleotide
  Antisense strand to SEQ ID NO: 1051892
gauuucgcauucauaggcc

SEQ ID NO: 1051894 - RNA, 19 nt, Artificial Sequence
  Description of Artificial Sequence: Synthetic oligonucleotide
  Sense strand starting at position 193 of SEQ ID NO: 915076
gacagagcuugggagugau

SEQ ID NO: 1051895 - RNA, 19 nt, Artificial Sequence
  Description of Artificial Sequence: Synthetic oligonucleotide
  Antisense strand to SEQ ID NO: 1051894
aucacucccaagcucuguc

SEQ ID NO: 1051896 - RNA, 19 nt, Artificial Sequence
  Description of Artificial Sequence: Synthetic oligonucleotide
  Sense strand starting at position 291 of SEQ ID NO: 915076
gggucuaagauaugaagug

SEQ ID NO: 1051897 - RNA, 19 nt, Artificial Sequence
  Description of Artificial Sequence: Synthetic oligonucleotide
  Antisense strand to SEQ ID NO: 1051896
cacuucauaucuuagaccc

SEQ ID NO: 1051898 - RNA, 19 nt, Artificial Sequence
  Description of Artificial Sequence: Synthetic oligonucleotide
  Sense strand starting at position 292 of SEQ ID NO: 915076
ggucuaagauaugaaguga

SEQ ID NO: 1051899 - RNA, 19 nt, Artificial Sequence
  Description of Artificial Sequence: Synthetic oligonucleotide
  Antisense strand to SEQ ID NO: 1051898
ucacuucauaucuuagacc

SEQ ID NO: 1051900 - RNA, 19 nt, Artificial Sequence
  Description of Artificial Sequence: Synthetic oligonucleotide
  Sense strand starting at position 408 of SEQ ID NO: 915076
agagauaggaggugauugu

SEQ ID NO: 1051901 - RNA, 19 nt, Artificial Sequence
  Description of Artificial Sequence: Synthetic oligonucleotide
  Antisense strand to SEQ ID NO: 1051900
acaaucaccuccuaucucu

SEQ ID NO: 1051902 - RNA, 19 nt, Artificial Sequence
  Description of Artificial Sequence: Synthetic oligonucleotide
  Sense strand starting at position 412 of SEQ ID NO: 915076
auaggaggugauuguaagu

SEQ ID NO: 1051903 - RNA, 19 nt, Artificial Sequence
  Description of Artificial Sequence: Synthetic oligonucleotide
  Antisense strand to SEQ ID NO: 1051902
acuuacaaucaccuccuau

SEQ ID NO: 1051904 - RNA, 19 nt, Artificial Sequence
  Description of Artificial Sequence: Synthetic oligonucleotide
  Sense strand starting at position 415 of SEQ ID NO: 915076
ggaggugauuguaagugga

SEQ ID NO: 1051905 - RNA, 19 nt, Artificial Sequence
  Description of Artificial Sequence: Synthetic oligonucleotide
  Antisense strand to SEQ ID NO: 1051904
uccacuuacaaucaccucc

SEQ ID NO: 1051906 - RNA, 19 nt, Artificial Sequence
  Description of Artificial Sequence: Synthetic oligonucleotide
  Sense strand starting at position 417 of SEQ ID NO: 915076
aggugauuguaaguggaca

SEQ ID NO: 1051907 - RNA, 19 nt, Artificial Sequence
  Description of Artificial Sequence: Synthetic oligonucleotide
  Antisense strand to SEQ ID NO: 1051906
uguccacuuacaaucaccu

SEQ ID NO: 1051908 - RNA, 19 nt, Artificial Sequence
  Description of Artificial Sequence: Synthetic oligonucleotide
  Sense strand starting at position 425 of SEQ ID NO: 915076
guaaguggacagcgauaga

SEQ ID NO: 1051909 - RNA, 19 nt, Artificial Sequence
  Description of Artificial Sequence: Synthetic oligonucleotide
  Antisense strand to SEQ ID NO: 1051908
ucuaucgcuguccacuuac

SEQ ID NO: 1051910 - RNA, 19 nt, Artificial Sequence
  Description of Artificial Sequence: Synthetic oligonucleotide
  Sense strand starting at position 621 of SEQ ID NO: 915076
gaaggccagucaugggaaa

SEQ ID NO: 1051911 - RNA, 19 nt, Artificial Sequence
  Description of Artificial Sequence: Synthetic oligonucleotide
  Antisense strand to SEQ ID NO: 1051910
uuucccaugacuggccuuc

SEQ ID NO: 1051912 - RNA, 19 nt, Artificial Sequence
  Description of Artificial Sequence: Synthetic oligonucleotide
  Sense strand starting at position 706 of SEQ ID NO: 915076
agacaugucagaggcagaa

SEQ ID NO: 1051913 - RNA, 19 nt, Artificial Sequence
  Description of Artificial Sequence: Synthetic oligonucleotide
  Antisense strand to SEQ ID NO: 1051912
uucugccucugacaugucu

SEQ ID NO: 1051914 - RNA, 19 nt, Artificial Sequence
  Description of Artificial Sequence: Synthetic oligonucleotide
  Sense strand starting at position 851 of SEQ ID NO: 915076
gaaggugaugcgcaagaga

SEQ ID NO: 1051915 - RNA, 19 nt, Artificial Sequence
  Description of Artificial Sequence: Synthetic oligonucleotide
  Antisense strand to SEQ ID NO: 1051914
ucucuugcgcaucaccuuc

SEQ ID NO: 1051916 - RNA, 19 nt, Artificial Sequence
  Description of Artificial Sequence: Synthetic oligonucleotide
  Sense strand starting at position 854 of SEQ ID NO: 915076
ggugaugcgcaagagaaau

SEQ ID NO: 1051917 - RNA, 19 nt, Artificial Sequence
  Description of Artificial Sequence: Synthetic oligonucleotide
  Antisense strand to SEQ ID NO: 1051916
auuucucuugcgcaucacc

SEQ ID NO: 1051918 - RNA, 19 nt, Artificial Sequence
  Description of Artificial Sequence: Synthetic oligonucleotide
  Sense strand starting at position 1277 of SEQ ID NO: 915076
ccgugcuugcuguggaagu

SEQ ID NO: 1051919 - RNA, 19 nt, Artificial Sequence
  Description of Artificial Sequence: Synthetic oligonucleotide
  Antisense strand to SEQ ID NO: 1051918
acuuccacagcaagcacgg

SEQ ID NO: 1051920 - RNA, 19 nt, Artificial Sequence
  Description of Artificial Sequence: Synthetic oligonucleotide
  Sense strand starting at position 1653 of SEQ ID NO: 915076
cuggaucccgccgggaaau

SEQ ID NO: 1051921 - RNA, 19 nt, Artificial Sequence
  Description of Artificial Sequence: Synthetic oligonucleotide
  Antisense strand to SEQ ID NO: 1051920
auuucccggcgggauccag

SEQ ID NO: 1051922 - RNA, 19 nt, Artificial Sequence
  Description of Artificial Sequence: Synthetic oligonucleotide
  Sense strand starting at position 2167 of SEQ ID NO: 915076
gcgagauuccggcggagag

SEQ ID NO: 1051923 - RNA, 19 nt, Artificial Sequence
  Description of Artificial Sequence: Synthetic oligonucleotide
  Antisense strand to SEQ ID NO: 1051922
cucuccgccggaaucucgc

SEQ ID NO: 1051924 - RNA, 19 nt, Artificial Sequence
  Description of Artificial Sequence: Synthetic oligonucleotide
  Sense strand starting at position 2168 of SEQ ID NO: 915076
cgagauuccggcggagaga

SEQ ID NO: 1051925 - RNA, 19 nt, Artificial Sequence
  Description of Artificial Sequence: Synthetic oligonucleotide
  Antisense strand to SEQ ID NO: 1051924
ucucuccgccggaaucucg

SEQ ID NO: 1051926 - RNA, 19 nt, Artificial Sequence
  Description of Artificial Sequence: Synthetic oligonucleotide
  Sense strand starting at position 2169 of SEQ ID NO: 915076
gagauuccggcggagagau

SEQ ID NO: 1051927 - RNA, 19 nt, Artificial Sequence
  Description of Artificial Sequence: Synthetic oligonucleotide
  Antisense strand to SEQ ID NO: 1051926
aucucuccgccggaaucuc

SEQ ID NO: 1051928 - RNA, 19 nt, Artificial Sequence
  Description of Artificial Sequence: Synthetic oligonucleotide
  Sense strand starting at position 2194 of SEQ ID NO: 915076
agcgaaguguugcugcaga

SEQ ID NO: 1051929 - RNA, 19 nt, Artificial Sequence
  Description of Artificial Sequence: Synthetic oligonucleotide
  Antisense strand to SEQ ID NO: 1051928
ucugcagcaacacuucgcu

SEQ ID NO: 1051930 - RNA, 19 nt, Artificial Sequence
  Description of Artificial Sequence: Synthetic oligonucleotide
  Sense strand starting at position 2652 of SEQ ID NO: 915076
ugcacacugagauguguau

SEQ ID NO: 1051931 - RNA, 19 nt, Artificial Sequence
  Description of Artificial Sequence: Synthetic oligonucleotide
  Antisense strand to SEQ ID NO: 1051930
auacacaucucagugugca

SEQ ID NO: 1051932 - RNA, 19 nt, Artificial Sequence
  Description of Artificial Sequence: Synthetic oligonucleotide
  Sense strand starting at position 2664 of SEQ ID NO: 915076
uguguaucggcuuggguau

SEQ ID NO: 1051933 - RNA, 19 nt, Artificial Sequence
  Description of Artificial Sequence: Synthetic oligonucleotide
  Antisense strand to SEQ ID NO: 1051932
auacccaagccgauacaca

SEQ ID NO: 1051934 - RNA, 19 nt, Artificial Sequence
  Description of Artificial Sequence: Synthetic oligonucleotide
  Sense strand starting at position 2748 of SEQ ID NO: 915076
gcaugcaugugcucacaga

SEQ ID NO: 1051935 - RNA, 19 nt, Artificial Sequence
  Description of Artificial Sequence: Synthetic oligonucleotide
  Antisense strand to SEQ ID NO: 1051934
ucugugagcacaugcaugc

SEQ ID NO: 1051936 - RNA, 19 nt, Artificial Sequence
  Description of Artificial Sequence: Synthetic oligonucleotide
  Sense strand starting at position 2815 of SEQ ID NO: 915076
gggcauacauccgugcaca

SEQ ID NO: 1051937 - RNA, 19 nt, Artificial Sequence
  Description of Artificial Sequence: Synthetic oligonucleotide
  Antisense strand to SEQ ID NO: 1051936
ugugcacggauguaugccc

SEQ ID NO: 1051938 - RNA, 19 nt, Artificial Sequence
  Description of Artificial Sequence: Synthetic oligonucleotide
  Sense strand starting at position 2836 of SEQ ID NO: 915076
cacguuugaucacaggaca

SEQ ID NO: 1051939 - RNA, 19 nt, Artificial Sequence
  Description of Artificial Sequence: Synthetic oligonucleotide
  Antisense strand to SEQ ID NO: 1051938
uguccugugaucaaacgug

SEQ ID NO: 1051940 - RNA, 19 nt, Artificial Sequence
  Description of Artificial Sequence: Synthetic oligonucleotide
  Sense strand starting at position 2850 of SEQ ID NO: 915076
ggacaugaauggccaacau

SEQ ID NO: 1051941 - RNA, 19 nt, Artificial Sequence
  Description of Artificial Sequence: Synthetic oligonucleotide
  Antisense strand to SEQ ID NO: 1051940
auguuggccauucaugucc

SEQ ID NO: 1051942 - RNA, 19 nt, Artificial Sequence
  Description of Artificial Sequence: Synthetic oligonucleotide
  Sense strand starting at position 2940 of SEQ ID NO: 915076
cuucgagguacucaggaau

SEQ ID NO: 1051943 - RNA, 19 nt, Artificial Sequence
  Description of Artificial Sequence: Synthetic oligonucleotide
  Antisense strand to SEQ ID NO: 1051942
auuccugaguaccucgaag

SEQ ID NO: 1051944 - RNA, 19 nt, Artificial Sequence
  Description of Artificial Sequence: Synthetic oligonucleotide
  Sense strand starting at position 3125 of SEQ ID NO: 915076
cacugagugucccauuuag

SEQ ID NO: 1051945 - RNA, 19 nt, Artificial Sequence
  Description of Artificial Sequence: Synthetic oligonucleotide
  Antisense strand to SEQ ID NO: 1051944
cuaaaugggacacucagug

SEQ ID NO: 1051946 - RNA, 19 nt, Artificial Sequence
  Description of Artificial Sequence: Synthetic oligonucleotide
  Sense strand starting at position 3166 of SEQ ID NO: 915076
guaugucaagcugaggaaa

SEQ ID NO: 1051947 - RNA, 19 nt, Artificial Sequence
  Description of Artificial Sequence: Synthetic oligonucleotide
  Antisense strand to SEQ ID NO: 1051946
uuuccucagcuugacauac

SEQ ID NO: 1051948 - RNA, 19 nt, Artificial Sequence
  Description of Artificial Sequence: Synthetic oligonucleotide
  Sense strand starting at position 3519 of SEQ ID NO: 915076
agagcuggcuccuauuuau

SEQ ID NO: 1051949 - RNA, 19 nt, Artificial Sequence
  Description of Artificial Sequence: Synthetic oligonucleotide
  Antisense strand to SEQ ID NO: 1051948
auaaauaggagccagcucu

SEQ ID NO: 1051950 - RNA, 19 nt, Artificial Sequence
  Description of Artificial Sequence: Synthetic oligonucleotide
  Sense strand starting at position 3522 of SEQ ID NO: 915076
gcuggcuccuauuuauuga

SEQ ID NO: 1051951 - RNA, 19 nt, Artificial Sequence
  Description of Artificial Sequence: Synthetic oligonucleotide
  Antisense strand to SEQ ID NO: 1051950
ucaauaaauaggagccagc

SEQ ID NO: 1051952 - RNA, 19 nt, Artificial Sequence
  Description of Artificial Sequence: Synthetic oligonucleotide
  Sense strand starting at position 3690 of SEQ ID NO: 915076
ggucuuuagaagugaagaa

SEQ ID NO: 1051953 - RNA, 19 nt, Artificial Sequence
  Description of Artificial Sequence: Synthetic oligonucleotide
  Antisense strand to SEQ ID NO: 1051952
uucuucacuucuaaagacc

SEQ ID NO: 1051954 - RNA, 19 nt, Artificial Sequence
  Description of Artificial Sequence: Synthetic oligonucleotide
  Sense strand starting at position 56 of SEQ ID NO: 915077
agaggagucaaucgaggau

SEQ ID NO: 1051955 - RNA, 19 nt, Artificial Sequence
  Description of Artificial Sequence: Synthetic oligonucleotide
  Antisense strand to SEQ ID NO: 1051954
auccucgauugacuccucu

SEQ ID NO: 1051956 - RNA, 19 nt, Artificial Sequence
  Description of Artificial Sequence: Synthetic oligonucleotide
  Sense strand starting at position 182 of SEQ ID NO: 915077
uggacaucccugcaagauu

SEQ ID NO: 1051957 - RNA, 19 nt, Artificial Sequence
  Description of Artificial Sequence: Synthetic oligonucleotide
  Antisense strand to SEQ ID NO: 1051956
aaucuugcagggaugucca

SEQ ID NO: 1051958 - RNA, 19 nt, Artificial Sequence
  Description of Artificial Sequence: Synthetic oligonucleotide
  Sense strand starting at position 348 of SEQ ID NO: 915077
acugcaaccuaugucaaga

SEQ ID NO: 1051959 - RNA, 19 nt, Artificial Sequence
  Description of Artificial Sequence: Synthetic oligonucleotide
  Antisense strand to SEQ ID NO: 1051958
ucuugacauagguugcagu

SEQ ID NO: 1051960 - RNA, 19 nt, Artificial Sequence
  Description of Artificial Sequence: Synthetic oligonucleotide
  Sense strand starting at position 515 of SEQ ID NO: 915077
ggaacuuuccucugggaau

SEQ ID NO: 1051961 - RNA, 19 nt, Artificial Sequence
  Description of Artificial Sequence: Synthetic oligonucleotide
  Antisense strand to SEQ ID NO: 1051960
auucccagaggaaaguucc

SEQ ID NO: 1051962 - RNA, 19 nt, Artificial Sequence
  Description of Artificial Sequence: Synthetic oligonucleotide
  Sense strand starting at position 603 of SEQ ID NO: 915077
cugggaaaguuucucagcu

SEQ ID NO: 1051963 - RNA, 19 nt, Artificial Sequence
  Description of Artificial Sequence: Synthetic oligonucleotide
  Antisense strand to SEQ ID NO: 1051962
agcugagaaacuuucccag

SEQ ID NO: 1051964 - RNA, 19 nt, Artificial Sequence
  Description of Artificial Sequence: Synthetic oligonucleotide
  Sense strand starting at position 604 of SEQ ID NO: 915077
ugggaaaguuucucagcuu

SEQ ID NO: 1051965 - RNA, 19 nt, Artificial Sequence
  Description of Artificial Sequence: Synthetic oligonucleotide
  Antisense strand to SEQ ID NO: 1051964
aagcugagaaacuuuccca

SEQ ID NO: 1051966 - RNA, 19 nt, Artificial Sequence
  Description of Artificial Sequence: Synthetic oligonucleotide
  Sense strand starting at position 702 of SEQ ID NO: 915077
gcaagaagauuaguggaua

SEQ ID NO: 1051967 - RNA, 19 nt, Artificial Sequence
  Description of Artificial Sequence: Synthetic oligonucleotide
  Antisense strand to SEQ ID NO: 1051966
uauccacuaaucuucuugc

SEQ ID NO: 1051968 - RNA, 19 nt, Artificial Sequence
  Description of Artificial Sequence: Synthetic oligonucleotide
  Sense strand starting at position 876 of SEQ ID NO: 915077
cggcucagccgauaaauaa

SEQ ID NO: 1051969 - RNA, 19 nt, Artificial Sequence
  Description of Artificial Sequence: Synthetic oligonucleotide
  Antisense strand to SEQ ID NO: 1051968
uuauuuaucggcugagccg

SEQ ID NO: 1051970 - RNA, 19 nt, Artificial Sequence
  Description of Artificial Sequence: Synthetic oligonucleotide
  Sense strand starting at position 1161 of SEQ ID NO: 915077
gcaaguucgcuggccgaua

SEQ ID NO: 1051971 - RNA, 19 nt, Artificial Sequence
  Description of Artificial Sequence: Synthetic oligonucleotide
  Antisense strand to SEQ ID NO: 1051970
uaucggccagcgaacuugc

SEQ ID NO: 1051972 - RNA, 19 nt, Artificial Sequence
  Description of Artificial Sequence: Synthetic oligonucleotide
  Sense strand starting at position 1166 of SEQ ID NO: 915077
uucgcuggccgauauuuaa

SEQ ID NO: 1051973 - RNA, 19 nt, Artificial Sequence
  Description of Artificial Sequence: Synthetic oligonucleotide
  Antisense strand to SEQ ID NO: 1051972
uuaaauaucggccagcgaa

SEQ ID NO: 1051974 - RNA, 19 nt, Artificial Sequence
  Description of Artificial Sequence: Synthetic oligonucleotide
  Sense strand starting at position 1193 of SEQ ID NO: 915077
cuuguaauuucuucccagu

SEQ ID NO: 1051975 - RNA, 19 nt, Artificial Sequence
  Description of Artificial Sequence: Synthetic oligonucleotide
  Antisense strand to SEQ ID NO: 1051974
acugggaagaaauuacaag

SEQ ID NO: 1051976 - RNA, 19 nt, Artificial Sequence
  Description of Artificial Sequence: Synthetic oligonucleotide
  Sense strand starting at position 1273 of SEQ ID NO: 915077
augugugcuccguugugua

SEQ ID NO: 1051977 - RNA, 19 nt, Artificial Sequence
  Description of Artificial Sequence: Synthetic oligonucleotide
  Antisense strand to SEQ ID NO: 1051976
uacacaacggagcacacau

SEQ ID NO: 1051978 - RNA, 19 nt, Artificial Sequence
  Description of Artificial Sequence: Synthetic oligonucleotide
  Sense strand starting at position 1541 of SEQ ID NO: 915077
uguacaauuccugggucua

SEQ ID NO: 1051979 - RNA, 19 nt, Artificial Sequence
  Description of Artificial Sequence: Synthetic oligonucleotide
  Antisense strand to SEQ ID NO: 1051978
uagacccaggaauuguaca

SEQ ID NO: 1051980 - RNA, 19 nt, Artificial Sequence
  Description of Artificial Sequence: Synthetic oligonucleotide
  Sense strand starting at position 1542 of SEQ ID NO: 915077
guacaauuccugggucuac

SEQ ID NO: 1051981 - RNA, 19 nt, Artificial Sequence
  Description of Artificial Sequence: Synthetic oligonucleotide
  Antisense strand to SEQ ID NO: 1051980
guagacccaggaauuguac

SEQ ID NO: 1051982 - RNA, 19 nt, Artificial Sequence
  Description of Artificial Sequence: Synthetic oligonucleotide
  Sense strand starting at position 1580 of SEQ ID NO: 915077
agcucuuaccuuggaagag

SEQ ID NO: 1051983 - RNA, 19 nt, Artificial Sequence
  Description of Artificial Sequence: Synthetic oligonucleotide
  Antisense strand to SEQ ID NO: 1051982
cucuuccaagguaagagcu

SEQ ID NO: 1051984 - RNA, 19 nt, Artificial Sequence
  Description of Artificial Sequence: Synthetic oligonucleotide
  Sense strand starting at position 2023 of SEQ ID NO: 915077
caggcuagcugauuaaaga

SEQ ID NO: 1051985 - RNA, 19 nt, Artificial Sequence
  Description of Artificial Sequence: Synthetic oligonucleotide
  Antisense strand to SEQ ID NO: 1051984
ucuuuaaucagcuagccug

SEQ ID NO: 1051986 - RNA, 19 nt, Artificial Sequence
  Description of Artificial Sequence: Synthetic oligonucleotide
  Sense strand starting at position 2122 of SEQ ID NO: 915077
ugagucuucugaguaucag

SEQ ID NO: 1051987 - RNA, 19 nt, Artificial Sequence
  Description of Artificial Sequence: Synthetic oligonucleotide
  Antisense strand to SEQ ID NO: 1051986
cugauacucagaagacuca

SEQ ID NO: 1051988 - RNA, 19 nt, Artificial Sequence
  Description of Artificial Sequence: Synthetic oligonucleotide
  Sense strand starting at position 2123 of SEQ ID NO: 915077
gagucuucugaguaucaga

SEQ ID NO: 1051989 - RNA, 19 nt, Artificial Sequence
  Description of Artificial Sequence: Synthetic oligonucleotide
  Antisense strand to SEQ ID NO: 1051988
ucugauacucagaagacuc

SEQ ID NO: 1051990 - RNA, 19 nt, Artificial Sequence
  Description of Artificial Sequence: Synthetic oligonucleotide
  Sense strand starting at position 2218 of SEQ ID NO: 915077
cauggcuuaugggaaauuu

SEQ ID NO: 1051991 - RNA, 19 nt, Artificial Sequence
  Description of Artificial Sequence: Synthetic oligonucleotide
  Antisense strand to SEQ ID NO: 1051990
aaauuucccauaagccaug

SEQ ID NO: 1051992 - RNA, 19 nt, Artificial Sequence
  Description of Artificial Sequence: Synthetic oligonucleotide
  Sense strand starting at position 2516 of SEQ ID NO: 915077
guacaaaguaccugguauu

SEQ ID NO: 1051993 - RNA, 19 nt, Artificial Sequence
  Description of Artificial Sequence: Synthetic oligonucleotide
  Antisense strand to SEQ ID NO: 1051992
aauaccagguacuuuguac

SEQ ID NO: 1051994 - RNA, 19 nt, Artificial Sequence
  Description of Artificial Sequence: Synthetic oligonucleotide
  Sense strand starting at position 2526 of SEQ ID NO: 915077
ccugguauuugagaagaag

SEQ ID NO: 1051995 - RNA, 19 nt, Artificial Sequence
  Description of Artificial Sequence: Synthetic oligonucleotide
  Antisense strand to SEQ ID NO: 1051994
cuucuucucaaauaccagg

SEQ ID NO: 1051996 - RNA, 19 nt, Artificial Sequence
  Description of Artificial Sequence: Synthetic oligonucleotide
  Sense strand starting at position 2543 of SEQ ID NO: 915077
agcucuauagucugaagau

SEQ ID NO: 1051997 - RNA, 19 nt, Artificial Sequence
  Description of Artificial Sequence: Synthetic oligonucleotide
  Antisense strand to SEQ ID NO: 1051996
aucuucagacuauagagcu

SEQ ID NO: 1051998 - RNA, 19 nt, Artificial Sequence
  Description of Artificial Sequence: Synthetic oligonucleotide
  Sense strand starting at position 2604 of SEQ ID NO: 915077
ccaugacuuggucaaucca

SEQ ID NO: 1051999 - RNA, 19 nt, Artificial Sequence
  Description of Artificial Sequence: Synthetic oligonucleotide
  Antisense strand to SEQ ID NO: 1051998
uggauugaccaagucaugg

SEQ ID NO: 1052000 - RNA, 19 nt, Artificial Sequence
  Description of Artificial Sequence: Synthetic oligonucleotide
  Sense strand starting at position 2642 of SEQ ID NO: 915077
agaagcaucugugauuuaa

SEQ ID NO: 1052001 - RNA, 19 nt, Artificial Sequence
  Description of Artificial Sequence: Synthetic oligonucleotide
  Antisense strand to SEQ ID NO: 1052000
uuaaaucacagaugcuucu

SEQ ID NO: 1052002 - RNA, 19 nt, Artificial Sequence
  Description of Artificial Sequence: Synthetic oligonucleotide
  Sense strand starting at position 2699 of SEQ ID NO: 915077
gcuuucugaguguaaacuu

SEQ ID NO: 1052003 - RNA, 19 nt, Artificial Sequence
  Description of Artificial Sequence: Synthetic oligonucleotide
  Antisense strand to SEQ ID NO: 1052002
aaguuuacacucagaaagc

SEQ ID NO: 1052004 - RNA, 19 nt, Artificial Sequence
  Description of Artificial Sequence: Synthetic oligonucleotide
  Sense strand starting at position 2718 of SEQ ID NO: 915077
uguguaguuccucagacag

SEQ ID NO: 1052005 - RNA, 19 nt, Artificial Sequence
  Description of Artificial Sequence: Synthetic oligonucleotide
  Antisense strand to SEQ ID NO: 1052004
cugucugaggaacuacaca

SEQ ID NO: 1052006 - RNA, 19 nt, Artificial Sequence
  Description of Artificial Sequence: Synthetic oligonucleotide
  Sense strand starting at position 2743 of SEQ ID NO: 915077
acauuaaccuccuugguga

SEQ ID NO: 1052007 - RNA, 19 nt, Artificial Sequence
  Description of Artificial Sequence: Synthetic oligonucleotide
  Antisense strand to SEQ ID NO: 1052006
ucaccaaggagguuaaugu

SEQ ID NO: 1052008 - RNA, 19 nt, Artificial Sequence
  Description of Artificial Sequence: Synthetic oligonucleotide
  Sense strand starting at position 2745 of SEQ ID NO: 915077
auuaaccuccuuggugaua

SEQ ID NO: 1052009 - RNA, 19 nt, Artificial Sequence
  Description of Artificial Sequence: Synthetic oligonucleotide
  Antisense strand to SEQ ID NO: 1052008
uaucaccaaggagguuaau

SEQ ID NO: 1052010 - RNA, 19 nt, Artificial Sequence
  Description of Artificial Sequence: Synthetic oligonucleotide
  Sense strand starting at position 2806 of SEQ ID NO: 915077
augauuucuuaagaggucu

SEQ ID NO: 1052011 - RNA, 19 nt, Artificial Sequence
  Description of Artificial Sequence: Synthetic oligonucleotide
  Antisense strand to SEQ ID NO: 1052010
agaccucuuaagaaaucau

SEQ ID NO: 1052012 - RNA, 19 nt, Artificial Sequence
  Description of Artificial Sequence: Synthetic oligonucleotide
  Sense strand starting at position 2812 of SEQ ID NO: 915077
ucuuaagaggucuaauucu

SEQ ID NO: 1052013 - RNA, 19 nt, Artificial Sequence
  Description of Artificial Sequence: Synthetic oligonucleotide
  Antisense strand to SEQ ID NO: 1052012
agaauuagaccucuuaaga

SEQ ID NO: 1052014 - RNA, 19 nt, Artificial Sequence
  Description of Artificial Sequence: Synthetic oligonucleotide
  Sense strand starting at position 2835 of SEQ ID NO: 915077
ccuggaaguuuauucuaau

SEQ ID NO: 1052015 - RNA, 19 nt, Artificial Sequence
  Description of Artificial Sequence: Synthetic oligonucleotide
  Antisense strand to SEQ ID NO: 1052014
auuagaauaaacuuccagg

SEQ ID NO: 1052016 - RNA, 19 nt, Artificial Sequence
  Description of Artificial Sequence: Synthetic oligonucleotide
  Sense strand starting at position 2836 of SEQ ID NO: 915077
cuggaaguuuauucuaauc

SEQ ID NO: 1052017 - RNA, 19 nt, Artificial Sequence
  Description of Artificial Sequence: Synthetic oligonucleotide
  Antisense strand to SEQ ID NO: 1052016
gauuagaauaaacuuccag

SEQ ID NO: 1052018 - RNA, 19 nt, Artificial Sequence
  Description of Artificial Sequence: Synthetic oligonucleotide
  Sense strand starting at position 2980 of SEQ ID NO: 915077
guagccugagcucaggaau

SEQ ID NO: 1052019 - RNA, 19 nt, Artificial Sequence
  Description of Artificial Sequence: Synthetic oligonucleotide
  Antisense strand to SEQ ID NO: 1052018
auuccugagcucaggcuac

SEQ ID NO: 1052020 - RNA, 19 nt, Artificial Sequence
  Description of Artificial Sequence: Synthetic oligonucleotide
  Sense strand starting at position 3329 of SEQ ID NO: 915077
cuagaacuccaccgcuaau

SEQ ID NO: 1052021 - RNA, 19 nt, Artificial Sequence
  Description of Artificial Sequence: Synthetic oligonucleotide
  Antisense strand to SEQ ID NO: 1052020
auuagcgguggaguucuag

SEQ ID NO: 1052022 - RNA, 19 nt, Artificial Sequence
  Description of Artificial Sequence: Synthetic oligonucleotide
  Sense strand starting at position 3476 of SEQ ID NO: 915077
augucuaagacguacgauu

SEQ ID NO: 1052023 - RNA, 19 nt, Artificial Sequence
  Description of Artificial Sequence: Synthetic oligonucleotide
  Antisense strand to SEQ ID NO: 1052022
aaucguacgucuuagacau

SEQ ID NO: 1052024 - RNA, 19 nt, Artificial Sequence
  Description of Artificial Sequence: Synthetic oligonucleotide
  Sense strand starting at position 3478 of SEQ ID NO: 915077
gucuaagacguacgauuua

SEQ ID NO: 1052025 - RNA, 19 nt, Artificial Sequence
  Description of Artificial Sequence: Synthetic oligonucleotide
  Antisense strand to SEQ ID NO: 1052024
uaaaucguacgucuuagac

SEQ ID NO: 1052026 - RNA, 19 nt, Artificial Sequence
  Description of Artificial Sequence: Synthetic oligonucleotide
  Sense strand starting at position 3488 of SEQ ID NO: 915077
uacgauuuaccuuggcuuu

SEQ ID NO: 1052027 - RNA, 19 nt, Artificial Sequence
  Description of Artificial Sequence: Synthetic oligonucleotide
  Antisense strand to SEQ ID NO: 1052026
aaagccaagguaaaucgua

SEQ ID NO: 1052028 - RNA, 19 nt, Artificial Sequence
  Description of Artificial Sequence: Synthetic oligonucleotide
  Sense strand starting at position 3771 of SEQ ID NO: 915077
guuuaccuuguguugugua

SEQ ID NO: 1052029 - RNA, 19 nt, Artificial Sequence
  Description of Artificial Sequence: Synthetic oligonucleotide
  Antisense strand to SEQ ID NO: 1052028
uacacaacacaagguaaac

SEQ ID NO: 1052030 - RNA, 19 nt, Artificial Sequence
  Description of Artificial Sequence: Synthetic oligonucleotide
  Sense strand starting at position 3784 of SEQ ID NO: 915077
uguguaugaauagggacaa

SEQ ID NO: 1052031 - RNA, 19 nt, Artificial Sequence
  Description of Artificial Sequence: Synthetic oligonucleotide
  Antisense strand to SEQ ID NO: 1052030
uugucccuauucauacaca

SEQ ID NO: 1052032 - RNA, 19 nt, Artificial Sequence
  Description of Artificial Sequence: Synthetic oligonucleotide
  Sense strand starting at position 3797 of SEQ ID NO: 915077
ggacaacacugccuggaau

SEQ ID NO: 1052033 - RNA, 19 nt, Artificial Sequence
  Description of Artificial Sequence: Synthetic oligonucleotide
  Antisense strand to SEQ ID NO: 1052032
auuccaggcaguguugucc

SEQ ID NO: 1052034 - RNA, 19 nt, Artificial Sequence
  Description of Artificial Sequence: Synthetic oligonucleotide
  Sense strand starting at position 75 of SEQ ID NO: 915078
gugcaaaggacaggaauau

SEQ ID NO: 1052035 - RNA, 19 nt, Artificial Sequence
  Description of Artificial Sequence: Synthetic oligonucleotide
  Antisense strand to SEQ ID NO: 1052034
auauuccuguccuuugcac

SEQ ID NO: 1052036 - RNA, 19 nt, Artificial Sequence
  Description of Artificial Sequence: Synthetic oligonucleotide
  Sense strand starting at position 84 of SEQ ID NO: 915078
acaggaauauugccauguu

SEQ ID NO: 1052037 - RNA, 19 nt, Artificial Sequence
  Description of Artificial Sequence: Synthetic oligonucleotide
  Antisense strand to SEQ ID NO: 1052036
aacauggcaauauuccugu

SEQ ID NO: 1052038 - RNA, 19 nt, Artificial Sequence
  Description of Artificial Sequence: Synthetic oligonucleotide
  Sense strand starting at position 109 of SEQ ID NO: 915078
ugguuaguucugucgcuua

SEQ ID NO: 1052039 - RNA, 19 nt, Artificial Sequence
  Description of Artificial Sequence: Synthetic oligonucleotide
  Antisense strand to SEQ ID NO: 1052038
uaagcgacagaacuaacca

SEQ ID NO: 1052040 - RNA, 19 nt, Artificial Sequence
  Description of Artificial Sequence: Synthetic oligonucleotide
  Sense strand starting at position 111 of SEQ ID NO: 915078
guuaguucugucgcuuagu

SEQ ID NO: 1052041 - RNA, 19 nt, Artificial Sequence
  Description of Artificial Sequence: Synthetic oligonucleotide
  Antisense strand to SEQ ID NO: 1052040
acuaagcgacagaacuaac

SEQ ID NO: 1052042 - RNA, 19 nt, Artificial Sequence
  Description of Artificial Sequence: Synthetic oligonucleotide
  Sense strand starting at position 113 of SEQ ID NO: 915078
uaguucugucgcuuaguuu

SEQ ID NO: 1052043 - RNA, 19 nt, Artificial Sequence
  Description of Artificial Sequence: Synthetic oligonucleotide
  Antisense strand to SEQ ID NO: 1052042
aaacuaagcgacagaacua

SEQ ID NO: 1052044 - RNA, 19 nt, Artificial Sequence
  Description of Artificial Sequence: Synthetic oligonucleotide
  Sense strand starting at position 175 of SEQ ID NO: 915078
gggaaaucguucccaugaa

SEQ ID NO: 1052045 - RNA, 19 nt, Artificial Sequence
  Description of Artificial Sequence: Synthetic oligonucleotide
  Antisense strand to SEQ ID NO: 1052044
uucaugggaacgauuuccc

SEQ ID NO: 1052046 - RNA, 19 nt, Artificial Sequence
  Description of Artificial Sequence: Synthetic oligonucleotide
  Sense strand starting at position 187 of SEQ ID NO: 915078
ccaugaaccuucuuaacgu

SEQ ID NO: 1052047 - RNA, 19 nt, Artificial Sequence
  Description of Artificial Sequence: Synthetic oligonucleotide
  Antisense strand to SEQ ID NO: 1052046
acguuaagaagguucaugg

SEQ ID NO: 1052048 - RNA, 19 nt, Artificial Sequence
  Description of Artificial Sequence: Synthetic oligonucleotide
  Sense strand starting at position 253 of SEQ ID NO: 915078
caucgcaaucauuaagugu

SEQ ID NO: 1052049 - RNA, 19 nt, Artificial Sequence
  Description of Artificial Sequence: Synthetic oligonucleotide
  Antisense strand to SEQ ID NO: 1052048
acacuuaaugauugcgaug

SEQ ID NO: 1052050 - RNA, 19 nt, Artificial Sequence
  Description of Artificial Sequence: Synthetic oligonucleotide
  Sense strand starting at position 279 of SEQ ID NO: 915078
gcauaugagaggugugguu

SEQ ID NO: 1052051 - RNA, 19 nt, Artificial Sequence
  Description of Artificial Sequence: Synthetic oligonucleotide
  Antisense strand to SEQ ID NO: 1052050
aaccacaccucucauaugc

SEQ ID NO: 1052052 - RNA, 19 nt, Artificial Sequence
  Description of Artificial Sequence: Synthetic oligonucleotide
  Sense strand starting at position 281 of SEQ ID NO: 915078
auaugagaggugugguuua

SEQ ID NO: 1052053 - RNA, 19 nt, Artificial Sequence
  Description of Artificial Sequence: Synthetic oligonucleotide
  Antisense strand to SEQ ID NO: 1052052
uaaaccacaccucucauau

SEQ ID NO: 1052054 - RNA, 19 nt, Artificial Sequence
  Description of Artificial Sequence: Synthetic oligonucleotide
  Sense strand starting at position 286 of SEQ ID NO: 915078
agaggugugguuuaucaac

SEQ ID NO: 1052055 - RNA, 19 nt, Artificial Sequence
  Description of Artificial Sequence: Synthetic oligonucleotide
  Antisense strand to SEQ ID NO: 1052054
guugauaaaccacaccucu

SEQ ID NO: 1052056 - RNA, 19 nt, Artificial Sequence
  Description of Artificial Sequence: Synthetic oligonucleotide
  Sense strand starting at position 292 of SEQ ID NO: 915078
gugguuuaucaacacugga

SEQ ID NO: 1052057 - RNA, 19 nt, Artificial Sequence
  Description of Artificial Sequence: Synthetic oligonucleotide
  Antisense strand to SEQ ID NO: 1052056
uccaguguugauaaaccac

SEQ ID NO: 1052058 - RNA, 19 nt, Artificial Sequence
  Description of Artificial Sequence: Synthetic oligonucleotide
  Sense strand starting at position 295 of SEQ ID NO: 915078
guuuaucaacacuggaaau

SEQ ID NO: 1052059 - RNA, 19 nt, Artificial Sequence
  Description of Artificial Sequence: Synthetic oligonucleotide
  Antisense strand to SEQ ID NO: 1052058
auuuccaguguugauaaac

SEQ ID NO: 1052060 - RNA, 19 nt, Artificial Sequence
  Description of Artificial Sequence: Synthetic oligonucleotide
  Sense strand starting at position 985 of SEQ ID NO: 915078
ugagccuuucccuacgacu

SEQ ID NO: 1052061 - RNA, 19 nt, Artificial Sequence
  Description of Artificial Sequence: Synthetic oligonucleotide
  Antisense strand to SEQ ID NO: 1052060
agucguagggaaaggcuca

SEQ ID NO: 1052062 - RNA, 19 nt, Artificial Sequence
  Description of Artificial Sequence: Synthetic oligonucleotide
  Sense strand starting at position 1135 of SEQ ID NO: 915078
aaaccaucaguucgcagaa

SEQ ID NO: 1052063 - RNA, 19 nt, Artificial Sequence
  Description of Artificial Sequence: Synthetic oligonucleotide
  Antisense strand to SEQ ID NO: 1052062
uucugcgaacugaugguuu

SEQ ID NO: 1052064 - RNA, 19 nt, Artificial Sequence
  Description of Artificial Sequence: Synthetic oligonucleotide
  Sense strand starting at position 2520 of SEQ ID NO: 915078
cuaauuaacugggaaagga

SEQ ID NO: 1052065 - RNA, 19 nt, Artificial Sequence
  Description of Artificial Sequence: Synthetic oligonucleotide
  Antisense strand to SEQ ID NO: 1052064
uccuuucccaguuaauuag

SEQ ID NO: 1052066 - RNA, 19 nt, Artificial Sequence
  Description of Artificial Sequence: Synthetic oligonucleotide
  Sense strand starting at position 2610 of SEQ ID NO: 915078
agaguguucggaggauguu

SEQ ID NO: 1052067 - RNA, 19 nt, Artificial Sequence
  Description of Artificial Sequence: Synthetic oligonucleotide
  Antisense strand to SEQ ID NO: 1052066
aacauccuccgaacacucu

SEQ ID NO: 1052068 - RNA, 19 nt, Artificial Sequence
  Description of Artificial Sequence: Synthetic oligonucleotide
  Sense strand starting at position 2611 of SEQ ID NO: 915078
gaguguucggaggauguuu

SEQ ID NO: 1052069 - RNA, 19 nt, Artificial Sequence
  Description of Artificial Sequence: Synthetic oligonucleotide
  Antisense strand to SEQ ID NO: 1052068
aaacauccuccgaacacuc

SEQ ID NO: 1052070 - RNA, 19 nt, Artificial Sequence
  Description of Artificial Sequence: Synthetic oligonucleotide
  Sense strand starting at position 2896 of SEQ ID NO: 915078
ggaugagugugagccacuu

SEQ ID NO: 1052071 - RNA, 19 nt, Artificial Sequence
  Description of Artificial Sequence: Synthetic oligonucleotide
  Antisense strand to SEQ ID NO: 1052070
aaguggcucacacucaucc

SEQ ID NO: 1052072 - RNA, 19 nt, Artificial Sequence
  Description of Artificial Sequence: Synthetic oligonucleotide
  Sense strand starting at position 2907 of SEQ ID NO: 915078
agccacuugcuguauuuau

SEQ ID NO: 1052073 - RNA, 19 nt, Artificial Sequence
  Description of Artificial Sequence: Synthetic oligonucleotide
  Antisense strand to SEQ ID NO: 1052072
auaaauacagcaaguggcu

SEQ ID NO: 1052074 - RNA, 19 nt, Artificial Sequence
  Description of Artificial Sequence: Synthetic oligonucleotide
  Sense strand starting at position 2975 of SEQ ID NO: 915078
ucaucuuuaagaggugugu

SEQ ID NO: 1052075 - RNA, 19 nt, Artificial Sequence
  Description of Artificial Sequence: Synthetic oligonucleotide
  Antisense strand to SEQ ID NO: 1052074
acacaccucuuaaagauga

SEQ ID NO: 1052076 - RNA, 19 nt, Artificial Sequence
  Description of Artificial Sequence: Synthetic oligonucleotide
  Sense strand starting at position 2977 of SEQ ID NO: 915078
aucuuuaagagguguguuu

SEQ ID NO: 1052077 - RNA, 19 nt, Artificial Sequence
  Description of Artificial Sequence: Synthetic oligonucleotide
  Antisense strand to SEQ ID NO: 1052076
aaacacaccucuuaaagau

SEQ ID NO: 1052078 - RNA, 19 nt, Artificial Sequence
  Description of Artificial Sequence: Synthetic oligonucleotide
  Sense strand starting at position 2979 of SEQ ID NO: 915078
cuuuaagagguguguuucu

SEQ ID NO: 1052079 - RNA, 19 nt, Artificial Sequence
  Description of Artificial Sequence: Synthetic oligonucleotide
  Antisense strand to SEQ ID NO: 1052078
agaaacacaccucuuaaag

SEQ ID NO: 1052080 - RNA, 19 nt, Artificial Sequence
  Description of Artificial Sequence: Synthetic oligonucleotide
  Sense strand starting at position 2984 of SEQ ID NO: 915078
agagguguguuucucaaau

SEQ ID NO: 1052081 - RNA, 19 nt, Artificial Sequence
  Description of Artificial Sequence: Synthetic oligonucleotide
  Antisense strand to SEQ ID NO: 1052080
auuugagaaacacaccucu

SEQ ID NO: 1052082 - RNA, 19 nt, Artificial Sequence
  Description of Artificial Sequence: Synthetic oligonucleotide
  Sense strand starting at position 3193 of SEQ ID NO: 915078
cacagugguggugacauua

SEQ ID NO: 1052083 - RNA, 19 nt, Artificial Sequence
  Description of Artificial Sequence: Synthetic oligonucleotide
  Antisense strand to SEQ ID NO: 1052082
uaaugucaccaccacugug

SEQ ID NO: 1052084 - RNA, 19 nt, Artificial Sequence
  Description of Artificial Sequence: Synthetic oligonucleotide
  Sense strand starting at position 3395 of SEQ ID NO: 915078
aaagccauccgguaucaaa

SEQ ID NO: 1052085 - RNA, 19 nt, Artificial Sequence
  Description of Artificial Sequence: Synthetic oligonucleotide
  Antisense strand to SEQ ID NO: 1052084
uuugauaccggauggcuuu

SEQ ID NO: 1052086 - RNA, 19 nt, Artificial Sequence
  Description of Artificial Sequence: Synthetic oligonucleotide
  Sense strand starting at position 3581 of SEQ ID NO: 915078
agaaguaggcuuuggagaa

SEQ ID NO: 1052087 - RNA, 19 nt, Artificial Sequence
  Description of Artificial Sequence: Synthetic oligonucleotide
  Antisense strand to SEQ ID NO: 1052086
uucuccaaagccuacuucu

SEQ ID NO: 1052088 - RNA, 19 nt, Artificial Sequence
  Description of Artificial Sequence: Synthetic oligonucleotide
  Sense strand starting at position 3607 of SEQ ID NO: 915078
ccacacuccuggguaacaa

SEQ ID NO: 1052089 - RNA, 19 nt, Artificial Sequence
  Description of Artificial Sequence: Synthetic oligonucleotide
  Antisense strand to SEQ ID NO: 1052088
uuguuacccaggagugugg

SEQ ID NO: 1052090 - RNA, 19 nt, Artificial Sequence
  Description of Artificial Sequence: Synthetic oligonucleotide
  Sense strand starting at position 3685 of SEQ ID NO: 915078
gcaagagugaagcgacuuu

SEQ ID NO: 1052091 - RNA, 19 nt, Artificial Sequence
  Description of Artificial Sequence: Synthetic oligonucleotide
  Antisense strand to SEQ ID NO: 1052090
aaagucgcuucacucuugc

SEQ ID NO: 1052092 - RNA, 19 nt, Artificial Sequence
  Description of Artificial Sequence: Synthetic oligonucleotide
  Sense strand starting at position 3696 of SEQ ID NO: 915078
gcgacuuuacagugaauau

SEQ ID NO: 1052093 - RNA, 19 nt, Artificial Sequence
  Description of Artificial Sequence: Synthetic oligonucleotide
  Antisense strand to SEQ ID NO: 1052092
auauucacuguaaagucgc

SEQ ID NO: 1052094 - RNA, 19 nt, Artificial Sequence
  Description of Artificial Sequence: Synthetic oligonucleotide
  Sense strand starting at position 3734 of SEQ ID NO: 915078
acucaucauugggccaauu

SEQ ID NO: 1052095 - RNA, 19 nt, Artificial Sequence
  Description of Artificial Sequence: Synthetic oligonucleotide
  Antisense strand to SEQ ID NO: 1052094
aauuggcccaaugaugagu

SEQ ID NO: 1052096 - RNA, 19 nt, Artificial Sequence
  Description of Artificial Sequence: Synthetic oligonucleotide
  Sense strand starting at position 3736 of SEQ ID NO: 915078
ucaucauugggccaauugu

SEQ ID NO: 1052097 - RNA, 19 nt, Artificial Sequence
  Description of Artificial Sequence: Synthetic oligonucleotide
  Antisense strand to SEQ ID NO: 1052096
acaauuggcccaaugauga

SEQ ID NO: 1052098 - RNA, 19 nt, Artificial Sequence
  Description of Artificial Sequence: Synthetic oligonucleotide
  Sense strand starting at position 3783 of SEQ ID NO: 915078
auauuaaauucucagggaa

SEQ ID NO: 1052099 - RNA, 19 nt, Artificial Sequence
  Description of Artificial Sequence: Synthetic oligonucleotide
  Antisense strand to SEQ ID NO: 1052098
uucccugagaauuuaauau

SEQ ID NO: 1052100 - RNA, 19 nt, Artificial Sequence
  Description of Artificial Sequence: Synthetic oligonucleotide
  Sense strand starting at position 3798 of SEQ ID NO: 915078
ggaaacucaucugcuacuu

SEQ ID NO: 1052101 - RNA, 19 nt, Artificial Sequence
  Description of Artificial Sequence: Synthetic oligonucleotide
  Antisense strand to SEQ ID NO: 1052100
aaguagcagaugaguuucc

SEQ ID NO: 1052102 - RNA, 19 nt, Artificial Sequence
  Description of Artificial Sequence: Synthetic oligonucleotide
  Sense strand starting at position 3827 of SEQ ID NO: 915078
gggaucauuugauauauaa

SEQ ID NO: 1052103 - RNA, 19 nt, Artificial Sequence
  Description of Artificial Sequence: Synthetic oligonucleotide
  Antisense strand to SEQ ID NO: 1052102
uuauauaucaaaugauccc

SEQ ID NO: 1052104 - RNA, 19 nt, Artificial Sequence
  Description of Artificial Sequence: Synthetic oligonucleotide
  Sense strand starting at position 3864 of SEQ ID NO: 915078
ucaacuuauggcugcaaca

SEQ ID NO: 1052105 - RNA, 19 nt, Artificial Sequence
  Description of Artificial Sequence: Synthetic oligonucleotide
  Antisense strand to SEQ ID NO: 1052104
uguugcagccauaaguuga

SEQ ID NO: 1052106 - RNA, 19 nt, Artificial Sequence
  Description of Artificial Sequence: Synthetic oligonucleotide
  Sense strand starting at position 3924 of SEQ ID NO: 915078
agcagaagaucuuuguuug

SEQ ID NO: 1052107 - RNA, 19 nt, Artificial Sequence
  Description of Artificial Sequence: Synthetic oligonucleotide
  Antisense strand to SEQ ID NO: 1052106
caaacaaagaucuucugcu

SEQ ID NO: 1052108 - RNA, 19 nt, Artificial Sequence
  Description of Artificial Sequence: Synthetic oligonucleotide
  Sense strand starting at position 3925 of SEQ ID NO: 915078
gcagaagaucuuuguuugu

SEQ ID NO: 1052109 - RNA, 19 nt, Artificial Sequence
  Description of Artificial Sequence: Synthetic oligonucleotide
  Antisense strand to SEQ ID NO: 1052108
acaaacaaagaucuucugc

SEQ ID NO: 1052110 - RNA, 19 nt, Artificial Sequence
  Description of Artificial Sequence: Synthetic oligonucleotide
  Sense strand starting at position 3927 of SEQ ID NO: 915078
agaagaucuuuguuuguau

SEQ ID NO: 1052111 - RNA, 19 nt, Artificial Sequence
  Description of Artificial Sequence: Synthetic oligonucleotide
  Antisense strand to SEQ ID NO: 1052110
auacaaacaaagaucuucu

SEQ ID NO: 1052112 - RNA, 19 nt, Artificial Sequence
  Description of Artificial Sequence: Synthetic oligonucleotide
  Sense strand starting at position 3928 of SEQ ID NO: 915078
gaagaucuuuguuuguauu

SEQ ID NO: 1052113 - RNA, 19 nt, Artificial Sequence
  Description of Artificial Sequence: Synthetic oligonucleotide
  Antisense strand to SEQ ID NO: 1052112
aauacaaacaaagaucuuc

SEQ ID NO: 1052114 - RNA, 19 nt, Artificial Sequence
  Description of Artificial Sequence: Synthetic oligonucleotide
  Sense strand starting at position 32 of SEQ ID NO: 915079
cugaauugauguuauugau

SEQ ID NO: 1052115 - RNA, 19 nt, Artificial Sequence
  Description of Artificial Sequence: Synthetic oligonucleotide
  Antisense strand to SEQ ID NO: 1052114
aucaauaacaucaauucag

SEQ ID NO: 1052116 - RNA, 19 nt, Artificial Sequence
  Description of Artificial Sequence: Synthetic oligonucleotide
  Sense strand starting at position 47 of SEQ ID NO: 915079
ugauauuagugcccauaau

SEQ ID NO: 1052117 - RNA, 19 nt, Artificial Sequence
  Description of Artificial Sequence: Synthetic oligonucleotide
  Antisense strand to SEQ ID NO: 1052116
auuaugggcacuaauauca

SEQ ID NO: 1052118 - RNA, 19 nt, Artificial Sequence
  Description of Artificial Sequence: Synthetic oligonucleotide
  Sense strand starting at position 61 of SEQ ID NO: 915079
auaauuaguugugucuuga

SEQ ID NO: 1052119 - RNA, 19 nt, Artificial Sequence
  Description of Artificial Sequence: Synthetic oligonucleotide
  Antisense strand to SEQ ID NO: 1052118
ucaagacacaacuaauuau

SEQ ID NO: 1052120 - RNA, 19 nt, Artificial Sequence
  Description of Artificial Sequence: Synthetic oligonucleotide
  Sense strand starting at position 83 of SEQ ID NO: 915079
guaccuuaauugucuuaau

SEQ ID NO: 1052121 - RNA, 19 nt, Artificial Sequence
  Description of Artificial Sequence: Synthetic oligonucleotide
  Antisense strand to SEQ ID NO: 1052120
auuaagacaauuaagguac

SEQ ID NO: 1052122 - RNA, 19 nt, Artificial Sequence
  Description of Artificial Sequence: Synthetic oligonucleotide
  Sense strand starting at position 193 of SEQ ID NO: 915079
caauauguaccuugggaga

SEQ ID NO: 1052123 - RNA, 19 nt, Artificial Sequence
  Description of Artificial Sequence: Synthetic oligonucleotide
  Antisense strand to SEQ ID NO: 1052122
ucucccaagguacauauug

SEQ ID NO: 1052124 - RNA, 19 nt, Artificial Sequence
  Description of Artificial Sequence: Synthetic oligonucleotide
  Sense strand starting at position 239 of SEQ ID NO: 915079
agauucgacucuuagaaca

SEQ ID NO: 1052125 - RNA, 19 nt, Artificial Sequence
  Description of Artificial Sequence: Synthetic oligonucleotide
  Antisense strand to SEQ ID NO: 1052124
uguucuaagagucgaaucu

SEQ ID NO: 1052126 - RNA, 19 nt, Artificial Sequence
  Description of Artificial Sequence: Synthetic oligonucleotide
  Sense strand starting at position 241 of SEQ ID NO: 915079
auucgacucuuagaacaug

SEQ ID NO: 1052127 - RNA, 19 nt, Artificial Sequence
  Description of Artificial Sequence: Synthetic oligonucleotide
  Antisense strand to SEQ ID NO: 1052126
cauguucuaagagucgaau

SEQ ID NO: 1052128 - RNA, 19 nt, Artificial Sequence
  Description of Artificial Sequence: Synthetic oligonucleotide
  Sense strand starting at position 758 of SEQ ID NO: 915079
uuaggagagugacauuauu

SEQ ID NO: 1052129 - RNA, 19 nt, Artificial Sequence
  Description of Artificial Sequence: Synthetic oligonucleotide
  Antisense strand to SEQ ID NO: 1052128
aauaaugucacucuccuaa

SEQ ID NO: 1052130 - RNA, 19 nt, Artificial Sequence
  Description of Artificial Sequence: Synthetic oligonucleotide
  Sense strand starting at position 1042 of SEQ ID NO: 915079
cauauucguccacggauuu

SEQ ID NO: 1052131 - RNA, 19 nt, Artificial Sequence
  Description of Artificial Sequence: Synthetic oligonucleotide
  Antisense strand to SEQ ID NO: 1052130
aaauccguggacgaauaug

SEQ ID NO: 1052132 - RNA, 19 nt, Artificial Sequence
  Description of Artificial Sequence: Synthetic oligonucleotide
  Sense strand starting at position 1043 of SEQ ID NO: 915079
auauucguccacggauuua

SEQ ID NO: 1052133 - RNA, 19 nt, Artificial Sequence
  Description of Artificial Sequence: Synthetic oligonucleotide
  Antisense strand to SEQ ID NO: 1052132
uaaauccguggacgaauau

SEQ ID NO: 1052134 - RNA, 19 nt, Artificial Sequence
  Description of Artificial Sequence: Synthetic oligonucleotide
  Sense strand starting at position 1067 of SEQ ID NO: 915079
gccuuaguagcaggcuuaa

SEQ ID NO: 1052135 - RNA, 19 nt, Artificial Sequence
  Description of Artificial Sequence: Synthetic oligonucleotide
  Antisense strand to SEQ ID NO: 1052134
uuaagccugcuacuaaggc

SEQ ID NO: 1052136 - RNA, 19 nt, Artificial Sequence
  Description of Artificial Sequence: Synthetic oligonucleotide
  Sense strand starting at position 1132 of SEQ ID NO: 915079
uuuagaaguuuagcagaca

SEQ ID NO: 1052137 - RNA, 19 nt, Artificial Sequence
  Description of Artificial Sequence: Synthetic oligonucleotide
  Antisense strand to SEQ ID NO: 1052136
ugucugcuaaacuucuaaa

SEQ ID NO: 1052138 - RNA, 19 nt, Artificial Sequence
  Description of Artificial Sequence: Synthetic oligonucleotide
  Sense strand starting at position 1133 of SEQ ID NO: 915079
uuagaaguuuagcagacau

SEQ ID NO: 1052139 - RNA, 19 nt, Artificial Sequence
  Description of Artificial Sequence: Synthetic oligonucleotide
  Antisense strand to SEQ ID NO: 1052138
augucugcuaaacuucuaa

SEQ ID NO: 1052140 - RNA, 19 nt, Artificial Sequence
  Description of Artificial Sequence: Synthetic oligonucleotide
  Sense strand starting at position 1252 of SEQ ID NO: 915079
ccagccauuugauacugua

SEQ ID NO: 1052141 - RNA, 19 nt, Artificial Sequence
  Description of Artificial Sequence: Synthetic oligonucleotide
  Antisense strand to SEQ ID NO: 1052140
uacaguaucaaauggcugg

SEQ ID NO: 1052142 - RNA, 19 nt, Artificial Sequence
  Description of Artificial Sequence: Synthetic oligonucleotide
  Sense strand starting at position 1355 of SEQ ID NO: 915079
aggaaauacuguuucucau

SEQ ID NO: 1052143 - RNA, 19 nt, Artificial Sequence
  Description of Artificial Sequence: Synthetic oligonucleotide
  Antisense strand to SEQ ID NO: 1052142
augagaaacaguauuuccu

SEQ ID NO: 1052144 - RNA, 19 nt, Artificial Sequence
  Description of Artificial Sequence: Synthetic oligonucleotide
  Sense strand starting at position 1396 of SEQ ID NO: 915079
ucucguaccuaauuuguca

SEQ ID NO: 1052145 - RNA, 19 nt, Artificial Sequence
  Description of Artificial Sequence: Synthetic oligonucleotide
  Antisense strand to SEQ ID NO: 1052144
ugacaaauuagguacgaga

SEQ ID NO: 1052146 - RNA, 19 nt, Artificial Sequence
  Description of Artificial Sequence: Synthetic oligonucleotide
  Sense strand starting at position 1533 of SEQ ID NO: 915079
gggagcaucgccuggaauu

SEQ ID NO: 1052147 - RNA, 19 nt, Artificial Sequence
  Description of Artificial Sequence: Synthetic oligonucleotide
  Antisense strand to SEQ ID NO: 1052146
aauuccaggcgaugcuccc

SEQ ID NO: 1052148 - RNA, 19 nt, Artificial Sequence
  Description of Artificial Sequence: Synthetic oligonucleotide
  Sense strand starting at position 1534 of SEQ ID NO: 915079
ggagcaucgccuggaauug

SEQ ID NO: 1052149 - RNA, 19 nt, Artificial Sequence
  Description of Artificial Sequence: Synthetic oligonucleotide
  Antisense strand to SEQ ID NO: 1052148
caauuccaggcgaugcucc

SEQ ID NO: 1052150 - RNA, 19 nt, Artificial Sequence
  Description of Artificial Sequence: Synthetic oligonucleotide
  Sense strand starting at position 2078 of SEQ ID NO: 915079
uccgguucgcgauugcuga

SEQ ID NO: 1052151 - RNA, 19 nt, Artificial Sequence
  Description of Artificial Sequence: Synthetic oligonucleotide
  Antisense strand to SEQ ID NO: 1052150
ucagcaaucgcgaaccgga

SEQ ID NO: 1052152 - RNA, 19 nt, Artificial Sequence
  Description of Artificial Sequence: Synthetic oligonucleotide
  Sense strand starting at position 2251 of SEQ ID NO: 915079
ccuagcuuacccggagaau

SEQ ID NO: 1052153 - RNA, 19 nt, Artificial Sequence
  Description of Artificial Sequence: Synthetic oligonucleotide
  Antisense strand to SEQ ID NO: 1052152
auucuccggguaagcuagg

SEQ ID NO: 1052154 - RNA, 19 nt, Artificial Sequence
  Description of Artificial Sequence: Synthetic oligonucleotide
  Sense strand starting at position 2252 of SEQ ID NO: 915079
cuagcuuacccggagaauc

SEQ ID NO: 1052155 - RNA, 19 nt, Artificial Sequence
  Description of Artificial Sequence: Synthetic oligonucleotide
  Antisense strand to SEQ ID NO: 1052154
gauucuccggguaagcuag

SEQ ID NO: 1052156 - RNA, 19 nt, Artificial Sequence
  Description of Artificial Sequence: Synthetic oligonucleotide
  Sense strand starting at position 2262 of SEQ ID NO: 915079
cggagaauccuguggagca

SEQ ID NO: 1052157 - RNA, 19 nt, Artificial Sequence
  Description of Artificial Sequence: Synthetic oligonucleotide
  Antisense strand to SEQ ID NO: 1052156
ugcuccacaggauucuccg

SEQ ID NO: 1052158 - RNA, 19 nt, Artificial Sequence
  Description of Artificial Sequence: Synthetic oligonucleotide
  Sense strand starting at position 2263 of SEQ ID NO: 915079
ggagaauccuguggagcag

SEQ ID NO: 1052159 - RNA, 19 nt, Artificial Sequence
  Description of Artificial Sequence: Synthetic oligonucleotide
  Antisense strand to SEQ ID NO: 1052158
cugcuccacaggauucucc

SEQ ID NO: 1052160 - RNA, 19 nt, Artificial Sequence
  Description of Artificial Sequence: Synthetic oligonucleotide
  Sense strand starting at position 2506 of SEQ ID NO: 915079
cggucacugugguuuaacu

SEQ ID NO: 1052161 - RNA, 19 nt, Artificial Sequence
  Description of Artificial Sequence: Synthetic oligonucleotide
  Antisense strand to SEQ ID NO: 1052160
aguuaaaccacagugaccg

SEQ ID NO: 1052162 - RNA, 19 nt, Artificial Sequence
  Description of Artificial Sequence: Synthetic oligonucleotide
  Sense strand starting at position 2747 of SEQ ID NO: 915079
ucauaucuaccuuaggguu

SEQ ID NO: 1052163 - RNA, 19 nt, Artificial Sequence
  Description of Artificial Sequence: Synthetic oligonucleotide
  Antisense strand to SEQ ID NO: 1052162
aacccuaagguagauauga

SEQ ID NO: 1052164 - RNA, 19 nt, Artificial Sequence
  Description of Artificial Sequence: Synthetic oligonucleotide
  Sense strand starting at position 2784 of SEQ ID NO: 915079
agauaacauugccaggaaa

SEQ ID NO: 1052165 - RNA, 19 nt, Artificial Sequence
  Description of Artificial Sequence: Synthetic oligonucleotide
  Antisense strand to SEQ ID NO: 1052164
uuuccuggcaauguuaucu

SEQ ID NO: 1052166 - RNA, 19 nt, Artificial Sequence
  Description of Artificial Sequence: Synthetic oligonucleotide
  Sense strand starting at position 2901 of SEQ ID NO: 915079
ggacaacagugagauccua

SEQ ID NO: 1052167 - RNA, 19 nt, Artificial Sequence
  Description of Artificial Sequence: Synthetic oligonucleotide
  Antisense strand to SEQ ID NO: 1052166
uaggaucucacuguugucc

SEQ ID NO: 1052168 - RNA, 19 nt, Artificial Sequence
  Description of Artificial Sequence: Synthetic oligonucleotide
  Sense strand starting at position 3098 of SEQ ID NO: 915079
ugaucauugugccacagag

SEQ ID NO: 1052169 - RNA, 19 nt, Artificial Sequence
  Description of Artificial Sequence: Synthetic oligonucleotide
  Antisense strand to SEQ ID NO: 1052168
cucuguggcacaaugauca

SEQ ID NO: 1052170 - RNA, 19 nt, Artificial Sequence
  Description of Artificial Sequence: Synthetic oligonucleotide
  Sense strand starting at position 3173 of SEQ ID NO: 915079
cauaguauguuagcaauga

SEQ ID NO: 1052171 - RNA, 19 nt, Artificial Sequence
  Description of Artificial Sequence: Synthetic oligonucleotide
  Antisense strand to SEQ ID NO: 1052170
ucauugcuaacauacuaug

SEQ ID NO: 1052172 - RNA, 19 nt, Artificial Sequence
  Description of Artificial Sequence: Synthetic oligonucleotide
  Sense strand starting at position 3174 of SEQ ID NO: 915079
auaguauguuagcaaugaa

SEQ ID NO: 1052173 - RNA, 19 nt, Artificial Sequence
  Description of Artificial Sequence: Synthetic oligonucleotide
  Antisense strand to SEQ ID NO: 1052172
uucauugcuaacauacuau

SEQ ID NO: 1052174 - RNA, 19 nt, Artificial Sequence
  Description of Artificial Sequence: Synthetic oligonucleotide
  Sense strand starting at position 3177 of SEQ ID NO: 915079
guauguuagcaaugaaagc

SEQ ID NO: 1052175 - RNA, 19 nt, Artificial Sequence
  Description of Artificial Sequence: Synthetic oligonucleotide
  Antisense strand to SEQ ID NO: 1052174
gcuuucauugcuaacauac

SEQ ID NO: 1052176 - RNA, 19 nt, Artificial Sequence
  Description of Artificial Sequence: Synthetic oligonucleotide
  Sense strand starting at position 3188 of SEQ ID NO: 915079
augaaagcuucuguuauca

SEQ ID NO: 1052177 - RNA, 19 nt, Artificial Sequence
  Description of Artificial Sequence: Synthetic oligonucleotide
  Antisense strand to SEQ ID NO: 1052176
ugauaacagaagcuuucau

SEQ ID NO: 1052178 - RNA, 19 nt, Artificial Sequence
  Description of Artificial Sequence: Synthetic oligonucleotide
  Sense strand starting at position 3190 of SEQ ID NO: 915079
gaaagcuucuguuaucagg

SEQ ID NO: 1052179 - RNA, 19 nt, Artificial Sequence
  Description of Artificial Sequence: Synthetic oligonucleotide
  Antisense strand to SEQ ID NO: 1052178
ccugauaacagaagcuuuc

SEQ ID NO: 1052180 - RNA, 19 nt, Artificial Sequence
  Description of Artificial Sequence: Synthetic oligonucleotide
  Sense strand starting at position 3192 of SEQ ID NO: 915079
aagcuucuguuaucaggaa

SEQ ID NO: 1052181 - RNA, 19 nt, Artificial Sequence
  Description of Artificial Sequence: Synthetic oligonucleotide
  Antisense strand to SEQ ID NO: 1052180
uuccugauaacagaagcuu

SEQ ID NO: 1052182 - RNA, 19 nt, Artificial Sequence
  Description of Artificial Sequence: Synthetic oligonucleotide
  Sense strand starting at position 3196 of SEQ ID NO: 915079
uucuguuaucaggaaguac

SEQ ID NO: 1052183 - RNA, 19 nt, Artificial Sequence
  Description of Artificial Sequence: Synthetic oligonucleotide
  Antisense strand to SEQ ID NO: 1052182
guacuuccugauaacagaa

SEQ ID NO: 1052184 - RNA, 19 nt, Artificial Sequence
  Description of Artificial Sequence: Synthetic oligonucleotide
  Sense strand starting at position 3221 of SEQ ID NO: 915079
ccagauugccucuguugca

SEQ ID NO: 1052185 - RNA, 19 nt, Artificial Sequence
  Description of Artificial Sequence: Synthetic oligonucleotide
  Antisense strand to SEQ ID NO: 1052184
ugcaacagaggcaaucugg

SEQ ID NO: 1052186 - RNA, 19 nt, Artificial Sequence
  Description of Artificial Sequence: Synthetic oligonucleotide
  Sense strand starting at position 3264 of SEQ ID NO: 915079
ccguguaauuugccaguua

SEQ ID NO: 1052187 - RNA, 19 nt, Artificial Sequence
  Description of Artificial Sequence: Synthetic oligonucleotide
  Antisense strand to SEQ ID NO: 1052186
uaacuggcaaauuacacgg

SEQ ID NO: 1052188 - RNA, 19 nt, Artificial Sequence
  Description of Artificial Sequence: Synthetic oligonucleotide
  Sense strand starting at position 3738 of SEQ ID NO: 915079
agauuagaagcgugaacca

SEQ ID NO: 1052189 - RNA, 19 nt, Artificial Sequence
  Description of Artificial Sequence: Synthetic oligonucleotide
  Antisense strand to SEQ ID NO: 1052188
ugguucacgcuucuaaucu

SEQ ID NO: 1052190 - RNA, 19 nt, Artificial Sequence
  Description of Artificial Sequence: Synthetic oligonucleotide
  Sense strand starting at position 3806 of SEQ ID NO: 915079
agaucaguaccucaagguu

SEQ ID NO: 1052191 - RNA, 19 nt, Artificial Sequence
  Description of Artificial Sequence: Synthetic oligonucleotide
  Antisense strand to SEQ ID NO: 1052190
aaccuugagguacugaucu

SEQ ID NO: 1052192 - RNA, 19 nt, Artificial Sequence
  Description of Artificial Sequence: Synthetic oligonucleotide
  Sense strand starting at position 3961 of SEQ ID NO: 915079
aauugaggauucuuggcuu

SEQ ID NO: 1052193 - RNA, 19 nt, Artificial Sequence
  Description of Artificial Sequence: Synthetic oligonucleotide
  Antisense strand to SEQ ID NO: 1052192
aagccaagaauccucaauu

SEQ ID NO: 1052194 - RNA, 19 nt, Artificial Sequence
  Description of Artificial Sequence: Synthetic oligonucleotide
  Sense strand starting at position 421 of SEQ ID NO: 915080
gguacugagggcuagaauu

SEQ ID NO: 1052195 - RNA, 19 nt, Artificial Sequence
  Description of Artificial Sequence: Synthetic oligonucleotide
  Antisense strand to SEQ ID NO: 1052194
aauucuagcccucaguacc

SEQ ID NO: 1052196 - RNA, 19 nt, Artificial Sequence
  Description of Artificial Sequence: Synthetic oligonucleotide
  Sense strand starting at position 447 of SEQ ID NO: 915080
aaguauguauagcugcaaa

SEQ ID NO: 1052197 - RNA, 19 nt, Artificial Sequence
  Description of Artificial Sequence: Synthetic oligonucleotide
  Antisense strand to SEQ ID NO: 1052196
uuugcagcuauacauacuu

SEQ ID NO: 1052198 - RNA, 19 nt, Artificial Sequence
  Description of Artificial Sequence: Synthetic oligonucleotide
  Sense strand starting at position 514 of SEQ ID NO: 915080
agcccagaccuguagaauu

SEQ ID NO: 1052199 - RNA, 19 nt, Artificial Sequence
  Description of Artificial Sequence: Synthetic oligonucleotide
  Antisense strand to SEQ ID NO: 1052198
aauucuacaggucugggcu

SEQ ID NO: 1052200 - RNA, 19 nt, Artificial Sequence
  Description of Artificial Sequence: Synthetic oligonucleotide
  Sense strand starting at position 522 of SEQ ID NO: 915080
ccuguagaauucuggcaag

SEQ ID NO: 1052201 - RNA, 19 nt, Artificial Sequence
  Description of Artificial Sequence: Synthetic oligonucleotide
  Antisense strand to SEQ ID NO: 1052200
cuugccagaauucuacagg

SEQ ID NO: 1052202 - RNA, 19 nt, Artificial Sequence
  Description of Artificial Sequence: Synthetic oligonucleotide
  Sense strand starting at position 790 of SEQ ID NO: 915080
ggcacaguguaagagaguu

SEQ ID NO: 1052203 - RNA, 19 nt, Artificial Sequence
  Description of Artificial Sequence: Synthetic oligonucleotide
  Antisense strand to SEQ ID NO: 1052202
aacucucuuacacugugcc

SEQ ID NO: 1052204 - RNA, 19 nt, Artificial Sequence
  Description of Artificial Sequence: Synthetic oligonucleotide
  Sense strand starting at position 796 of SEQ ID NO: 915080
guguaagagaguuagugau

SEQ ID NO: 1052205 - RNA, 19 nt, Artificial Sequence
  Description of Artificial Sequence: Synthetic oligonucleotide
  Antisense strand to SEQ ID NO: 1052204
aucacuaacucucuuacac

SEQ ID NO: 1052206 - RNA, 19 nt, Artificial Sequence
  Description of Artificial Sequence: Synthetic oligonucleotide
  Sense strand starting at position 802 of SEQ ID NO: 915080
gagaguuagugauccugag

SEQ ID NO: 1052207 - RNA, 19 nt, Artificial Sequence
  Description of Artificial Sequence: Synthetic oligonucleotide
  Antisense strand to SEQ ID NO: 1052206
cucaggaucacuaacucuc

SEQ ID NO: 1052208 - RNA, 19 nt, Artificial Sequence
  Description of Artificial Sequence: Synthetic oligonucleotide
  Sense strand starting at position 806 of SEQ ID NO: 915080
guuagugauccugagucug

SEQ ID NO: 1052209 - RNA, 19 nt, Artificial Sequence
  Description of Artificial Sequence: Synthetic oligonucleotide
  Antisense strand to SEQ ID NO: 1052208
cagacucaggaucacuaac

SEQ ID NO: 1052210 - RNA, 19 nt, Artificial Sequence
  Description of Artificial Sequence: Synthetic oligonucleotide
  Sense strand starting at position 808 of SEQ ID NO: 915080
uagugauccugagucuggu

SEQ ID NO: 1052211 - RNA, 19 nt, Artificial Sequence
  Description of Artificial Sequence: Synthetic oligonucleotide
  Antisense strand to SEQ ID NO: 1052210
accagacucaggaucacua

SEQ ID NO: 1052212 - RNA, 19 nt, Artificial Sequence
  Description of Artificial Sequence: Synthetic oligonucleotide
  Sense strand starting at position 823 of SEQ ID NO: 915080
ugguguccuuucccugaca

SEQ ID NO: 1052213 - RNA, 19 nt, Artificial Sequence
  Description of Artificial Sequence: Synthetic oligonucleotide
  Antisense strand to SEQ ID NO: 1052212
ugucagggaaaggacacca

SEQ ID NO: 1052214 - RNA, 19 nt, Artificial Sequence
  Description of Artificial Sequence: Synthetic oligonucleotide
  Sense strand starting at position 825 of SEQ ID NO: 915080
guguccuuucccugacaga

SEQ ID NO: 1052215 - RNA, 19 nt, Artificial Sequence
  Description of Artificial Sequence: Synthetic oligonucleotide
  Antisense strand to SEQ ID NO: 1052214
ucugucagggaaaggacac

SEQ ID NO: 1052216 - RNA, 19 nt, Artificial Sequence
  Description of Artificial Sequence: Synthetic oligonucleotide
  Sense strand starting at position 826 of SEQ ID NO: 915080
uguccuuucccugacagac

SEQ ID NO: 1052217 - RNA, 19 nt, Artificial Sequence
  Description of Artificial Sequence: Synthetic oligonucleotide
  Antisense strand to SEQ ID NO: 1052216
gucugucagggaaaggaca

SEQ ID NO: 1052218 - RNA, 19 nt, Artificial Sequence
  Description of Artificial Sequence: Synthetic oligonucleotide
  Sense strand starting at position 933 of SEQ ID NO: 915080
uuucuaguuucucacagga

SEQ ID NO: 1052219 - RNA, 19 nt, Artificial Sequence
  Description of Artificial Sequence: Synthetic oligonucleotide
  Antisense strand to SEQ ID NO: 1052218
uccugugagaaacuagaaa

SEQ ID NO: 1052220 - RNA, 19 nt, Artificial Sequence
  Description of Artificial Sequence: Synthetic oligonucleotide
  Sense strand starting at position 935 of SEQ ID NO: 915080
ucuaguuucucacaggacu

SEQ ID NO: 1052221 - RNA, 19 nt, Artificial Sequence
  Description of Artificial Sequence: Synthetic oligonucleotide
  Antisense strand to SEQ ID NO: 1052220
aguccugugagaaacuaga

SEQ ID NO: 1052222 - RNA, 19 nt, Artificial Sequence
  Description of Artificial Sequence: Synthetic oligonucleotide
  Sense strand starting at position 978 of SEQ ID NO: 915080
gguggacugcccugagcaa

SEQ ID NO: 1052223 - RNA, 19 nt, Artificial Sequence
  Description of Artificial Sequence: Synthetic oligonucleotide
  Antisense strand to SEQ ID NO: 1052222
uugcucagggcaguccacc

SEQ ID NO: 1052224 - RNA, 19 nt, Artificial Sequence
  Description of Artificial Sequence: Synthetic oligonucleotide
  Sense strand starting at position 979 of SEQ ID NO: 915080
guggacugcccugagcaaa

SEQ ID NO: 1052225 - RNA, 19 nt, Artificial Sequence
  Description of Artificial Sequence: Synthetic oligonucleotide
  Antisense strand to SEQ ID NO: 1052224
uuugcucagggcaguccac

SEQ ID NO: 1052226 - RNA, 19 nt, Artificial Sequence
  Description of Artificial Sequence: Synthetic oligonucleotide
  Sense strand starting at position 990 of SEQ ID NO: 915080
ugagcaaacuuccagagaa

SEQ ID NO: 1052227 - RNA, 19 nt, Artificial Sequence
  Description of Artificial Sequence: Synthetic oligonucleotide
  Antisense strand to SEQ ID NO: 1052226
uucucuggaaguuugcuca

SEQ ID NO: 1052228 - RNA, 19 nt, Artificial Sequence
  Description of Artificial Sequence: Synthetic oligonucleotide
  Sense strand starting at position 1747 of SEQ ID NO: 915080
ccacuccuugggcaguaaa

SEQ ID NO: 1052229 - RNA, 19 nt, Artificial Sequence
  Description of Artificial Sequence: Synthetic oligonucleotide
  Antisense strand to SEQ ID NO: 1052228
uuuacugcccaaggagugg

SEQ ID NO: 1052230 - RNA, 19 nt, Artificial Sequence
  Description of Artificial Sequence: Synthetic oligonucleotide
  Sense strand starting at position 2271 of SEQ ID NO: 915080
cuuaaugagccguauacuc

SEQ ID NO: 1052231 - RNA, 19 nt, Artificial Sequence
  Description of Artificial Sequence: Synthetic oligonucleotide
  Antisense strand to SEQ ID NO: 1052230
gaguauacggcucauuaag

SEQ ID NO: 1052232 - RNA, 19 nt, Artificial Sequence
  Description of Artificial Sequence: Synthetic oligonucleotide
  Sense strand starting at position 2306 of SEQ ID NO: 915080
uccugaggcuuugugacuu

SEQ ID NO: 1052233 - RNA, 19 nt, Artificial Sequence
  Description of Artificial Sequence: Synthetic oligonucleotide
  Antisense strand to SEQ ID NO: 1052232
aagucacaaagccucagga

SEQ ID NO: 1052234 - RNA, 19 nt, Artificial Sequence
  Description of Artificial Sequence: Synthetic oligonucleotide
  Sense strand starting at position 2318 of SEQ ID NO: 915080
gugacuuucugggagggau

SEQ ID NO: 1052235 - RNA, 19 nt, Artificial Sequence
  Description of Artificial Sequence: Synthetic oligonucleotide
  Antisense strand to SEQ ID NO: 1052234
aucccucccagaaagucac

SEQ ID NO: 1052236 - RNA, 19 nt, Artificial Sequence
  Description of Artificial Sequence: Synthetic oligonucleotide
  Sense strand starting at position 2388 of SEQ ID NO: 915080
aggucuuaaccaugaacuu

SEQ ID NO: 1052237 - RNA, 19 nt, Artificial Sequence
  Description of Artificial Sequence: Synthetic oligonucleotide
  Antisense strand to SEQ ID NO: 1052236
aaguucaugguuaagaccu

SEQ ID NO: 1052238 - RNA, 19 nt, Artificial Sequence
  Description of Artificial Sequence: Synthetic oligonucleotide
  Sense strand starting at position 2538 of SEQ ID NO: 915080
gcugaaggguccuacuauu

SEQ ID NO: 1052239 - RNA, 19 nt, Artificial Sequence
  Description of Artificial Sequence: Synthetic oligonucleotide
  Antisense strand to SEQ ID NO: 1052238
aauaguaggacccuucagc

SEQ ID NO: 1052240 - RNA, 19 nt, Artificial Sequence
  Description of Artificial Sequence: Synthetic oligonucleotide
  Sense strand starting at position 2546 of SEQ ID NO: 915080
guccuacuauuccuggaga

SEQ ID NO: 1052241 - RNA, 19 nt, Artificial Sequence
  Description of Artificial Sequence: Synthetic oligonucleotide
  Antisense strand to SEQ ID NO: 1052240
ucuccaggaauaguaggac

SEQ ID NO: 1052242 - RNA, 19 nt, Artificial Sequence
  Description of Artificial Sequence: Synthetic oligonucleotide
  Sense strand starting at position 2913 of SEQ ID NO: 915080
cugucauguccacagcaga

SEQ ID NO: 1052243 - RNA, 19 nt, Artificial Sequence
  Description of Artificial Sequence: Synthetic oligonucleotide
  Antisense strand to SEQ ID NO: 1052242
ucugcuguggacaugacag

SEQ ID NO: 1052244 - RNA, 19 nt, Artificial Sequence
  Description of Artificial Sequence: Synthetic oligonucleotide
  Sense strand starting at position 3217 of SEQ ID NO: 915080
gccuguggcucccuguuaa

SEQ ID NO: 1052245 - RNA, 19 nt, Artificial Sequence
  Description of Artificial Sequence: Synthetic oligonucleotide
  Antisense strand to SEQ ID NO: 1052244
uuaacagggagccacaggc

SEQ ID NO: 1052246 - RNA, 19 nt, Artificial Sequence
  Description of Artificial Sequence: Synthetic oligonucleotide
  Sense strand starting at position 3592 of SEQ ID NO: 915080
gaugcuaguccaugguaca

SEQ ID NO: 1052247 - RNA, 19 nt, Artificial Sequence
  Description of Artificial Sequence: Synthetic oligonucleotide
  Antisense strand to SEQ ID NO: 1052246
uguaccauggacuagcauc

SEQ ID NO: 1052248 - RNA, 19 nt, Artificial Sequence
  Description of Artificial Sequence: Synthetic oligonucleotide
  Sense strand starting at position 3593 of SEQ ID NO: 915080
augcuaguccaugguacau

SEQ ID NO: 1052249 - RNA, 19 nt, Artificial Sequence
  Description of Artificial Sequence: Synthetic oligonucleotide
  Antisense strand to SEQ ID NO: 1052248
auguaccauggacuagcau

SEQ ID NO: 1052250 - RNA, 19 nt, Artificial Sequence
  Description of Artificial Sequence: Synthetic oligonucleotide
  Sense strand starting at position 3702 of SEQ ID NO: 915080
ccgguaucaucagugguca

SEQ ID NO: 1052251 - RNA, 19 nt, Artificial Sequence
  Description of Artificial Sequence: Synthetic oligonucleotide
  Antisense strand to SEQ ID NO: 1052250
ugaccacugaugauaccgg

SEQ ID NO: 1052252 - RNA, 19 nt, Artificial Sequence
  Description of Artificial Sequence: Synthetic oligonucleotide
  Sense strand starting at position 3704 of SEQ ID NO: 915080
gguaucaucaguggucagu

SEQ ID NO: 1052253 - RNA, 19 nt, Artificial Sequence
  Description of Artificial Sequence: Synthetic oligonucleotide
  Antisense strand to SEQ ID NO: 1052252
acugaccacugaugauacc

SEQ ID NO: 1052254 - RNA, 19 nt, Artificial Sequence
  Description of Artificial Sequence: Synthetic oligonucleotide
  Sense strand starting at position 3922 of SEQ ID NO: 915080
gcggucccauugugaaaua

SEQ ID NO: 1052255 - RNA, 19 nt, Artificial Sequence
  Description of Artificial Sequence: Synthetic oligonucleotide
  Antisense strand to SEQ ID NO: 1052254
uauuucacaaugggaccgc

SEQ ID NO: 1052256 - RNA, 19 nt, Artificial Sequence
  Description of Artificial Sequence: Synthetic oligonucleotide
  Sense strand starting at position 3931 of SEQ ID NO: 915080
uugugaaauagcuguguuc

SEQ ID NO: 1052257 - RNA, 19 nt, Artificial Sequence
  Description of Artificial Sequence: Synthetic oligonucleotide
  Antisense strand to SEQ ID NO: 1052256
gaacacagcuauuucacaa

SEQ ID NO: 1052258 - RNA, 19 nt, Artificial Sequence
  Description of Artificial Sequence: Synthetic oligonucleotide
  Sense strand starting at position 3940 of SEQ ID NO: 915080
agcuguguucaucgaugga

SEQ ID NO: 1052259 - RNA, 19 nt, Artificial Sequence
  Description of Artificial Sequence: Synthetic oligonucleotide
  Antisense strand to SEQ ID NO: 1052258
uccaucgaugaacacagcu

SEQ ID NO: 1052260 - RNA, 19 nt, Artificial Sequence
  Description of Artificial Sequence: Synthetic oligonucleotide
  Sense strand starting at position 3971 of SEQ ID NO: 915080
gcaggugagucuggacaaa

SEQ ID NO: 1052261 - RNA, 19 nt, Artificial Sequence
  Description of Artificial Sequence: Synthetic oligonucleotide
  Antisense strand to SEQ ID NO: 1052260
uuuguccagacucaccugc

SEQ ID NO: 1052262 - RNA, 19 nt, Artificial Sequence
  Description of Artificial Sequence: Synthetic oligonucleotide
  Sense strand starting at position 437 of SEQ ID NO: 915081
gguacugagggcuagaauu

SEQ ID NO: 1052263 - RNA, 19 nt, Artificial Sequence
  Description of Artificial Sequence: Synthetic oligonucleotide
  Antisense strand to SEQ ID NO: 1052262
aauucuagcccucaguacc

SEQ ID NO: 1052264 - RNA, 19 nt, Artificial Sequence
  Description of Artificial Sequence: Synthetic oligonucleotide
  Sense strand starting at position 463 of SEQ ID NO: 915081
aaguauguauagcugcaaa

SEQ ID NO: 1052265 - RNA, 19 nt, Artificial Sequence
  Description of Artificial Sequence: Synthetic oligonucleotide
  Antisense strand to SEQ ID NO: 1052264
uuugcagcuauacauacuu

SEQ ID NO: 1052266 - RNA, 19 nt, Artificial Sequence
  Description of Artificial Sequence: Synthetic oligonucleotide
  Sense strand starting at position 530 of SEQ ID NO: 915081
agcccagaccuguagaauu

SEQ ID NO: 1052267 - RNA, 19 nt, Artificial Sequence
  Description of Artificial Sequence: Synthetic oligonucleotide
  Antisense strand to SEQ ID NO: 1052266
aauucuacaggucugggcu

SEQ ID NO: 1052268 - RNA, 19 nt, Artificial Sequence
  Description of Artificial Sequence: Synthetic oligonucleotide
  Sense strand starting at position 538 of SEQ ID NO: 915081
ccuguagaauucuggcaag

SEQ ID NO: 1052269 - RNA, 19 nt, Artificial Sequence
  Description of Artificial Sequence: Synthetic oligonucleotide
  Antisense strand to SEQ ID NO: 1052268
cuugccagaauucuacagg

SEQ ID NO: 1052270 - RNA, 19 nt, Artificial Sequence
  Description of Artificial Sequence: Synthetic oligonucleotide
  Sense strand starting at position 806 of SEQ ID NO: 915081
ggcacaguguaagagaguu

SEQ ID NO: 1052271 - RNA, 19 nt, Artificial Sequence
  Description of Artificial Sequence: Synthetic oligonucleotide
  Antisense strand to SEQ ID NO: 1052270
aacucucuuacacugugcc

SEQ ID NO: 1052272 - RNA, 19 nt, Artificial Sequence
  Description of Artificial Sequence: Synthetic oligonucleotide
  Sense strand starting at position 812 of SEQ ID NO: 915081
guguaagagaguuagugau

SEQ ID NO: 1052273 - RNA, 19 nt, Artificial Sequence
  Description of Artificial Sequence: Synthetic oligonucleotide
  Antisense strand to SEQ ID NO: 1052272
aucacuaacucucuuacac

SEQ ID NO: 1052274 - RNA, 19 nt, Artificial Sequence
  Description of Artificial Sequence: Synthetic oligonucleotide
  Sense strand starting at position 818 of SEQ ID NO: 915081
gagaguuagugauccugag

SEQ ID NO: 1052275 - RNA, 19 nt, Artificial Sequence
  Description of Artificial Sequence: Synthetic oligonucleotide
  Antisense strand to SEQ ID NO: 1052274
cucaggaucacuaacucuc

SEQ ID NO: 1052276 - RNA, 19 nt, Artificial Sequence
  Description of Artificial Sequence: Synthetic oligonucleotide
  Sense strand starting at position 822 of SEQ ID NO: 915081
guuagugauccugagucug

SEQ ID NO: 1052277 - RNA, 19 nt, Artificial Sequence
  Description of Artificial Sequence: Synthetic oligonucleotide
  Antisense strand to SEQ ID NO: 1052276
cagacucaggaucacuaac

SEQ ID NO: 1052278 - RNA, 19 nt, Artificial Sequence
  Description of Artificial Sequence: Synthetic oligonucleotide
  Sense strand starting at position 824 of SEQ ID NO: 915081
uagugauccugagucuggu

SEQ ID NO: 1052279 - RNA, 19 nt, Artificial Sequence
  Description of Artificial Sequence: Synthetic oligonucleotide
  Antisense strand to SEQ ID NO: 1052278
accagacucaggaucacua

SEQ ID NO: 1052280 - RNA, 19 nt, Artificial Sequence
  Description of Artificial Sequence: Synthetic oligonucleotide
  Sense strand starting at position 839 of SEQ ID NO: 915081
ugguguccuuucccugaca

SEQ ID NO: 1052281 - RNA, 19 nt, Artificial Sequence
  Description of Artificial Sequence: Synthetic oligonucleotide
  Antisense strand to SEQ ID NO: 1052280
ugucagggaaaggacacca

SEQ ID NO: 1052282 - RNA, 19 nt, Artificial Sequence
  Description of Artificial Sequence: Synthetic oligonucleotide
  Sense strand starting at position 841 of SEQ ID NO: 915081
guguccuuucccugacaga

SEQ ID NO: 1052283 - RNA, 19 nt, Artificial Sequence
  Description of Artificial Sequence: Synthetic oligonucleotide
  Antisense strand to SEQ ID NO: 1052282
ucugucagggaaaggacac

SEQ ID NO: 1052284 - RNA, 19 nt, Artificial Sequence
  Description of Artificial Sequence: Synthetic oligonucleotide
  Sense strand starting at position 842 of SEQ ID NO: 915081
uguccuuucccugacagac

SEQ ID NO: 1052285 - RNA, 19 nt, Artificial Sequence
  Description of Artificial Sequence: Synthetic oligonucleotide
  Antisense strand to SEQ ID NO: 1052284
gucugucagggaaaggaca

SEQ ID NO: 1052286 - RNA, 19 nt, Artificial Sequence
  Description of Artificial Sequence: Synthetic oligonucleotide
  Sense strand starting at position 949 of SEQ ID NO: 915081
uuucuaguuucucacagga

SEQ ID NO: 1052287 - RNA, 19 nt, Artificial Sequence
  Description of Artificial Sequence: Synthetic oligonucleotide
  Antisense strand to SEQ ID NO: 1052286
uccugugagaaacuagaaa

SEQ ID NO: 1052288 - RNA, 19 nt, Artificial Sequence
  Description of Artificial Sequence: Synthetic oligonucleotide
  Sense strand starting at position 951 of SEQ ID NO: 915081
ucuaguuucucacaggacu

SEQ ID NO: 1052289 - RNA, 19 nt, Artificial Sequence
  Description of Artificial Sequence: Synthetic oligonucleotide
  Antisense strand to SEQ ID NO: 1052288
aguccugugagaaacuaga

SEQ ID NO: 1052290 - RNA, 19 nt, Artificial Sequence
  Description of Artificial Sequence: Synthetic oligonucleotide
  Sense strand starting at position 994 of SEQ ID NO: 915081
gguggacugcccugagcaa

SEQ ID NO: 1052291 - RNA, 19 nt, Artificial Sequence
  Description of Artificial Sequence: Synthetic oligonucleotide
  Antisense strand to SEQ ID NO: 1052290
uugcucagggcaguccacc

SEQ ID NO: 1052292 - RNA, 19 nt, Artificial Sequence
  Description of Artificial Sequence: Synthetic oligonucleotide
  Sense strand starting at position 995 of SEQ ID NO: 915081
guggacugcccugagcaaa

SEQ ID NO: 1052293 - RNA, 19 nt, Artificial Sequence
  Description of Artificial Sequence: Synthetic oligonucleotide
  Antisense strand to SEQ ID NO: 1052292
uuugcucagggcaguccac

SEQ ID NO: 1052294 - RNA, 19 nt, Artificial Sequence
  Description of Artificial Sequence: Synthetic oligonucleotide
  Sense strand starting at position 1006 of SEQ ID NO: 915081
ugagcaaacuuccagagaa

SEQ ID NO: 1052295 - RNA, 19 nt, Artificial Sequence
  Description of Artificial Sequence: Synthetic oligonucleotide
  Antisense strand to SEQ ID NO: 1052294
uucucuggaaguuugcuca

SEQ ID NO: 1052296 - RNA, 19 nt, Artificial Sequence
  Description of Artificial Sequence: Synthetic oligonucleotide
  Sense strand starting at position 1763 of SEQ ID NO: 915081
ccacuccuugggcaguaaa

SEQ ID NO: 1052297 - RNA, 19 nt, Artificial Sequence
  Description of Artificial Sequence: Synthetic oligonucleotide
  Antisense strand to SEQ ID NO: 1052296
uuuacugcccaaggagugg

SEQ ID NO: 1052298 - RNA, 19 nt, Artificial Sequence
  Description of Artificial Sequence: Synthetic oligonucleotide
  Sense strand starting at position 2287 of SEQ ID NO: 915081
cuuaaugagccguauacuc

SEQ ID NO: 1052299 - RNA, 19 nt, Artificial Sequence
  Description of Artificial Sequence: Synthetic oligonucleotide
  Antisense strand to SEQ ID NO: 1052298
gaguauacggcucauuaag

SEQ ID NO: 1052300 - RNA, 19 nt, Artificial Sequence
  Description of Artificial Sequence: Synthetic oligonucleotide
  Sense strand starting at position 2322 of SEQ ID NO: 915081
uccugaggcuuugugacuu

SEQ ID NO: 1052301 - RNA, 19 nt, Artificial Sequence
  Description of Artificial Sequence: Synthetic oligonucleotide
  Antisense strand to SEQ ID NO: 1052300
aagucacaaagccucagga

SEQ ID NO: 1052302 - RNA, 19 nt, Artificial Sequence
  Description of Artificial Sequence: Synthetic oligonucleotide
  Sense strand starting at position 2334 of SEQ ID NO: 915081
gugacuuucugggagggau

SEQ ID NO: 1052303 - RNA, 19 nt, Artificial Sequence
  Description of Artificial Sequence: Synthetic oligonucleotide
  Antisense strand to SEQ ID NO: 1052302
aucccucccagaaagucac

SEQ ID NO: 1052304 - RNA, 19 nt, Artificial Sequence
  Description of Artificial Sequence: Synthetic oligonucleotide
  Sense strand starting at position 2404 of SEQ ID NO: 915081
aggucuuaaccaugaacuu

SEQ ID NO: 1052305 - RNA, 19 nt, Artificial Sequence
  Description of Artificial Sequence: Synthetic oligonucleotide
  Antisense strand to SEQ ID NO: 1052304
aaguucaugguuaagaccu

SEQ ID NO: 1052306 - RNA, 19 nt, Artificial Sequence
  Description of Artificial Sequence: Synthetic oligonucleotide
  Sense strand starting at position 2554 of SEQ ID NO: 915081
gcugaaggguccuacuauu

SEQ ID NO: 1052307 - RNA, 19 nt, Artificial Sequence
  Description of Artificial Sequence: Synthetic oligonucleotide
  Antisense strand to SEQ ID NO: 1052306
aauaguaggacccuucagc

SEQ ID NO: 1052308 - RNA, 19 nt, Artificial Sequence
  Description of Artificial Sequence: Synthetic oligonucleotide
  Sense strand starting at position 2562 of SEQ ID NO: 915081
guccuacuauuccuggaga

SEQ ID NO: 1052309 - RNA, 19 nt, Artificial Sequence
  Description of Artificial Sequence: Synthetic oligonucleotide
  Antisense strand to SEQ ID NO: 1052308
ucuccaggaauaguaggac

SEQ ID NO: 1052310 - RNA, 19 nt, Artificial Sequence
  Description of Artificial Sequence: Synthetic oligonucleotide
  Sense strand starting at position 2929 of SEQ ID NO: 915081
cugucauguccacagcaga

SEQ ID NO: 1052311 - RNA, 19 nt, Artificial Sequence
  Description of Artificial Sequence: Synthetic oligonucleotide
  Antisense strand to SEQ ID NO: 1052310
ucugcuguggacaugacag

SEQ ID NO: 1052312 - RNA, 19 nt, Artificial Sequence
  Description of Artificial Sequence: Synthetic oligonucleotide
  Sense strand starting at position 3233 of SEQ ID NO: 915081
gccuguggcucccuguuaa

SEQ ID NO: 1052313 - RNA, 19 nt, Artificial Sequence
  Description of Artificial Sequence: Synthetic oligonucleotide
  Antisense strand to SEQ ID NO: 1052312
uuaacagggagccacaggc

SEQ ID NO: 1052314 - RNA, 19 nt, Artificial Sequence
  Description of Artificial Sequence: Synthetic oligonucleotide
  Sense strand starting at position 3608 of SEQ ID NO: 915081
gaugcuaguccaugguaca

SEQ ID NO: 1052315 - RNA, 19 nt, Artificial Sequence
  Description of Artificial Sequence: Synthetic oligonucleotide
  Antisense strand to SEQ ID NO: 1052314
uguaccauggacuagcauc

SEQ ID NO: 1052316 - RNA, 19 nt, Artificial Sequence
  Description of Artificial Sequence: Synthetic oligonucleotide
  Sense strand starting at position 3609 of SEQ ID NO: 915081
augcuaguccaugguacau

SEQ ID NO: 1052317 - RNA, 19 nt, Artificial Sequence
  Description of Artificial Sequence: Synthetic oligonucleotide
  Antisense strand to SEQ ID NO: 1052316
auguaccauggacuagcau

SEQ ID NO: 1052318 - RNA, 19 nt, Artificial Sequence
  Description of Artificial Sequence: Synthetic oligonucleotide
  Sense strand starting at position 3718 of SEQ ID NO: 915081
ccgguaucaucagugguca

SEQ ID NO: 1052319 - RNA, 19 nt, Artificial Sequence
  Description of Artificial Sequence: Synthetic oligonucleotide
  Antisense strand to SEQ ID NO: 1052318
ugaccacugaugauaccgg

SEQ ID NO: 1052320 - RNA, 19 nt, Artificial Sequence
  Description of Artificial Sequence: Synthetic oligonucleotide
  Sense strand starting at position 3720 of SEQ ID NO: 915081
gguaucaucaguggucagu

SEQ ID NO: 1052321 - RNA, 19 nt, Artificial Sequence
  Description of Artificial Sequence: Synthetic oligonucleotide
  Antisense strand to SEQ ID NO: 1052320
acugaccacugaugauacc

SEQ ID NO: 1052322 - RNA, 19 nt, Artificial Sequence
  Description of Artificial Sequence: Synthetic oligonucleotide
  Sense strand starting at position 3938 of SEQ ID NO: 915081
gcggucccauugugaaaua

SEQ ID NO: 1052323 - RNA, 19 nt, Artificial Sequence
  Description of Artificial Sequence: Synthetic oligonucleotide
  Antisense strand to SEQ ID NO: 1052322
uauuucacaaugggaccgc

SEQ ID NO: 1052324 - RNA, 19 nt, Artificial Sequence
  Description of Artificial Sequence: Synthetic oligonucleotide
  Sense strand starting at position 3947 of SEQ ID NO: 915081
uugugaaauagcuguguuc

SEQ ID NO: 1052325 - RNA, 19 nt, Artificial Sequence
  Description of Artificial Sequence: Synthetic oligonucleotide
  Antisense strand to SEQ ID NO: 1052324
gaacacagcuauuucacaa

SEQ ID NO: 1052326 - RNA, 19 nt, Artificial Sequence
  Description of Artificial Sequence: Synthetic oligonucleotide
  Sense strand starting at position 3956 of SEQ ID NO: 915081
agcuguguucaucgaugga

SEQ ID NO: 1052327 - RNA, 19 nt, Artificial Sequence
  Description of Artificial Sequence: Synthetic oligonucleotide
  Antisense strand to SEQ ID NO: 1052326
uccaucgaugaacacagcu

SEQ ID NO: 1052328 - RNA, 19 nt, Artificial Sequence
  Description of Artificial Sequence: Synthetic oligonucleotide
  Sense strand starting at position 151 of SEQ ID NO: 915082
agggcaaacucagugauga

SEQ ID NO: 1052329 - RNA, 19 nt, Artificial Sequence
  Description of Artificial Sequence: Synthetic oligonucleotide
  Antisense strand to SEQ ID NO: 1052328
ucaucacugaguuugcccu

SEQ ID NO: 1052330 - RNA, 19 nt, Artificial Sequence
  Description of Artificial Sequence: Synthetic oligonucleotide
  Sense strand starting at position 152 of SEQ ID NO: 915082
gggcaaacucagugaugac

SEQ ID NO: 1052331 - RNA, 19 nt, Artificial Sequence
  Description of Artificial Sequence: Synthetic oligonucleotide
  Antisense strand to SEQ ID NO: 1052330
gucaucacugaguuugccc

SEQ ID NO: 1052332 - RNA, 19 nt, Artificial Sequence
  Description of Artificial Sequence: Synthetic oligonucleotide
  Sense strand starting at position 190 of SEQ ID NO: 915082
cggugugguccaugcagga

SEQ ID NO: 1052333 - RNA, 19 nt, Artificial Sequence
  Description of Artificial Sequence: Synthetic oligonucleotide
  Antisense strand to SEQ ID NO: 1052332
uccugcauggaccacaccg

SEQ ID NO: 1052334 - RNA, 19 nt, Artificial Sequence
  Description of Artificial Sequence: Synthetic oligonucleotide
  Sense strand starting at position 250 of SEQ ID NO: 915082
uggguauagcccugauucu

SEQ ID NO: 1052335 - RNA, 19 nt, Artificial Sequence
  Description of Artificial Sequence: Synthetic oligonucleotide
  Antisense strand to SEQ ID NO: 1052334
agaaucagggcuauaccca

SEQ ID NO: 1052336 - RNA, 19 nt, Artificial Sequence
  Description of Artificial Sequence: Synthetic oligonucleotide
  Sense strand starting at position 259 of SEQ ID NO: 915082
cccugauucugcgucugca

SEQ ID NO: 1052337 - RNA, 19 nt, Artificial Sequence
  Description of Artificial Sequence: Synthetic oligonucleotide
  Antisense strand to SEQ ID NO: 1052336
ugcagacgcagaaucaggg

SEQ ID NO: 1052338 - RNA, 19 nt, Artificial Sequence
  Description of Artificial Sequence: Synthetic oligonucleotide
  Sense strand starting at position 496 of SEQ ID NO: 915082
ggccuucgcuggguuugaa

SEQ ID NO: 1052339 - RNA, 19 nt, Artificial Sequence
  Description of Artificial Sequence: Synthetic oligonucleotide
  Antisense strand to SEQ ID NO: 1052338
uucaaacccagcgaaggcc

SEQ ID NO: 1052340 - RNA, 19 nt, Artificial Sequence
  Description of Artificial Sequence: Synthetic oligonucleotide
  Sense strand starting at position 560 of SEQ ID NO: 915082
ggccuuugguagucauguu

SEQ ID NO: 1052341 - RNA, 19 nt, Artificial Sequence
  Description of Artificial Sequence: Synthetic oligonucleotide
  Antisense strand to SEQ ID NO: 1052340
aacaugacuaccaaaggcc

SEQ ID NO: 1052342 - RNA, 19 nt, Artificial Sequence
  Description of Artificial Sequence: Synthetic oligonucleotide
  Sense strand starting at position 590 of SEQ ID NO: 915082
gccuguguccuccagccau

SEQ ID NO: 1052343 - RNA, 19 nt, Artificial Sequence
  Description of Artificial Sequence: Synthetic oligonucleotide
  Antisense strand to SEQ ID NO: 1052342
auggcuggaggacacaggc

SEQ ID NO: 1052344 - RNA, 19 nt, Artificial Sequence
  Description of Artificial Sequence: Synthetic oligonucleotide
  Sense strand starting at position 648 of SEQ ID NO: 915082
ucccucugcuuaggacaau

SEQ ID NO: 1052345 - RNA, 19 nt, Artificial Sequence
  Description of Artificial Sequence: Synthetic oligonucleotide
  Antisense strand to SEQ ID NO: 1052344
auuguccuaagcagaggga

SEQ ID NO: 1052346 - RNA, 19 nt, Artificial Sequence
  Description of Artificial Sequence: Synthetic oligonucleotide
  Sense strand starting at position 712 of SEQ ID NO: 915082
ugaagcuucccugacccua

SEQ ID NO: 1052347 - RNA, 19 nt, Artificial Sequence
  Description of Artificial Sequence: Synthetic oligonucleotide
  Antisense strand to SEQ ID NO: 1052346
uagggucagggaagcuuca

SEQ ID NO: 1052348 - RNA, 19 nt, Artificial Sequence
  Description of Artificial Sequence: Synthetic oligonucleotide
  Sense strand starting at position 972 of SEQ ID NO: 915082
aguggcuuaccggaucaua

SEQ ID NO: 1052349 - RNA, 19 nt, Artificial Sequence
  Description of Artificial Sequence: Synthetic oligonucleotide
  Antisense strand to SEQ ID NO: 1052348
uaugauccgguaagccacu

SEQ ID NO: 1052350 - RNA, 19 nt, Artificial Sequence
  Description of Artificial Sequence: Synthetic oligonucleotide
  Sense strand starting at position 1096 of SEQ ID NO: 915082
gcacuugccgccugggaaa

SEQ ID NO: 1052351 - RNA, 19 nt, Artificial Sequence
  Description of Artificial Sequence: Synthetic oligonucleotide
  Antisense strand to SEQ ID NO: 1052350
uuucccaggcggcaagugc

SEQ ID NO: 1052352 - RNA, 19 nt, Artificial Sequence
  Description of Artificial Sequence: Synthetic oligonucleotide
  Sense strand starting at position 1129 of SEQ ID NO: 915082
ggagucugguccuuggacu

SEQ ID NO: 1052353 - RNA, 19 nt, Artificial Sequence
  Description of Artificial Sequence: Synthetic oligonucleotide
  Antisense strand to SEQ ID NO: 1052352
aguccaaggaccagacucc

SEQ ID NO: 1052354 - RNA, 19 nt, Artificial Sequence
  Description of Artificial Sequence: Synthetic oligonucleotide
  Sense strand starting at position 1274 of SEQ ID NO: 915082
aguuuaccucccugagcaa

SEQ ID NO: 1052355 - RNA, 19 nt, Artificial Sequence
  Description of Artificial Sequence: Synthetic oligonucleotide
  Antisense strand to SEQ ID NO: 1052354
uugcucagggagguaaacu

SEQ ID NO: 1052356 - RNA, 19 nt, Artificial Sequence
  Description of Artificial Sequence: Synthetic oligonucleotide
  Sense strand starting at position 1275 of SEQ ID NO: 915082
guuuaccucccugagcaau

SEQ ID NO: 1052357 - RNA, 19 nt, Artificial Sequence
  Description of Artificial Sequence: Synthetic oligonucleotide
  Antisense strand to SEQ ID NO: 1052356
auugcucagggagguaaac

SEQ ID NO: 1052358 - RNA, 19 nt, Artificial Sequence
  Description of Artificial Sequence: Synthetic oligonucleotide
  Sense strand starting at position 1406 of SEQ ID NO: 915082
cugacauuguccucaggau

SEQ ID NO: 1052359 - RNA, 19 nt, Artificial Sequence
  Description of Artificial Sequence: Synthetic oligonucleotide
  Antisense strand to SEQ ID NO: 1052358
auccugaggacaaugucag

SEQ ID NO: 1052360 - RNA, 19 nt, Artificial Sequence
  Description of Artificial Sequence: Synthetic oligonucleotide
  Sense strand starting at position 1415 of SEQ ID NO: 915082
uccucaggauguucuuaau

SEQ ID NO: 1052361 - RNA, 19 nt, Artificial Sequence
  Description of Artificial Sequence: Synthetic oligonucleotide
  Antisense strand to SEQ ID NO: 1052360
auuaagaacauccugagga

SEQ ID NO: 1052362 - RNA, 19 nt, Artificial Sequence
  Description of Artificial Sequence: Synthetic oligonucleotide
  Sense strand starting at position 1697 of SEQ ID NO: 915082
ggcuaagugcccugccaga

SEQ ID NO: 1052363 - RNA, 19 nt, Artificial Sequence
  Description of Artificial Sequence: Synthetic oligonucleotide
  Antisense strand to SEQ ID NO: 1052362
ucuggcagggcacuuagcc

SEQ ID NO: 1052364 - RNA, 19 nt, Artificial Sequence
  Description of Artificial Sequence: Synthetic oligonucleotide
  Sense strand starting at position 2581 of SEQ ID NO: 915082
ccgguuguguucuccgaga

SEQ ID NO: 1052365 - RNA, 19 nt, Artificial Sequence
  Description of Artificial Sequence: Synthetic oligonucleotide
  Antisense strand to SEQ ID NO: 1052364
ucucggagaacacaaccgg

SEQ ID NO: 1052366 - RNA, 19 nt, Artificial Sequence
  Description of Artificial Sequence: Synthetic oligonucleotide
  Sense strand starting at position 2583 of SEQ ID NO: 915082
gguuguguucuccgagauc

SEQ ID NO: 1052367 - RNA, 19 nt, Artificial Sequence
  Description of Artificial Sequence: Synthetic oligonucleotide
  Antisense strand to SEQ ID NO: 1052366
gaucucggagaacacaacc

SEQ ID NO: 1052368 - RNA, 19 nt, Artificial Sequence
  Description of Artificial Sequence: Synthetic oligonucleotide
  Sense strand starting at position 3218 of SEQ ID NO: 915082
uuaauauuacugugugcuc

SEQ ID NO: 1052369 - RNA, 19 nt, Artificial Sequence
  Description of Artificial Sequence: Synthetic oligonucleotide
  Antisense strand to SEQ ID NO: 1052368
gagcacacaguaauauuaa

SEQ ID NO: 1052370 - RNA, 19 nt, Artificial Sequence
  Description of Artificial Sequence: Synthetic oligonucleotide
  Sense strand starting at position 3296 of SEQ ID NO: 915082
cuaugaugggucugggagu

SEQ ID NO: 1052371 - RNA, 19 nt, Artificial Sequence
  Description of Artificial Sequence: Synthetic oligonucleotide
  Antisense strand to SEQ ID NO: 1052370
acucccagacccaucauag

SEQ ID NO: 1052372 - RNA, 19 nt, Artificial Sequence
  Description of Artificial Sequence: Synthetic oligonucleotide
  Sense strand starting at position 3297 of SEQ ID NO: 915082
uaugaugggucugggaguu

SEQ ID NO: 1052373 - RNA, 19 nt, Artificial Sequence
  Description of Artificial Sequence: Synthetic oligonucleotide
  Antisense strand to SEQ ID NO: 1052372
aacucccagacccaucaua

SEQ ID NO: 1052374 - RNA, 19 nt, Artificial Sequence
  Description of Artificial Sequence: Synthetic oligonucleotide
  Sense strand starting at position 3347 of SEQ ID NO: 915082
acagaagugcucugaccac

SEQ ID NO: 1052375 - RNA, 19 nt, Artificial Sequence
  Description of Artificial Sequence: Synthetic oligonucleotide
  Antisense strand to SEQ ID NO: 1052374
guggucagagcacuucugu

SEQ ID NO: 1052376 - RNA, 19 nt, Artificial Sequence
  Description of Artificial Sequence: Synthetic oligonucleotide
  Sense strand starting at position 3369 of SEQ ID NO: 915082
ugccaaauaguuuaauguu

SEQ ID NO: 1052377 - RNA, 19 nt, Artificial Sequence
  Description of Artificial Sequence: Synthetic oligonucleotide
  Antisense strand to SEQ ID NO: 1052376
aacauuaaacuauuuggca

SEQ ID NO: 1052378 - RNA, 19 nt, Artificial Sequence
  Description of Artificial Sequence: Synthetic oligonucleotide
  Sense strand starting at position 3472 of SEQ ID NO: 915082
gauagaaguccugguucca

SEQ ID NO: 1052379 - RNA, 19 nt, Artificial Sequence
  Description of Artificial Sequence: Synthetic oligonucleotide
  Antisense strand to SEQ ID NO: 1052378
uggaaccaggacuucuauc

SEQ ID NO: 1052380 - RNA, 19 nt, Artificial Sequence
  Description of Artificial Sequence: Synthetic oligonucleotide
  Sense strand starting at position 3558 of SEQ ID NO: 915082
cccugcucuccuugagaca

SEQ ID NO: 1052381 - RNA, 19 nt, Artificial Sequence
  Description of Artificial Sequence: Synthetic oligonucleotide
  Antisense strand to SEQ ID NO: 1052380
ugucucaaggagagcaggg

SEQ ID NO: 1052382 - RNA, 19 nt, Artificial Sequence
  Description of Artificial Sequence: Synthetic oligonucleotide
  Sense strand starting at position 3621 of SEQ ID NO: 915082
cgguguaagguccagggua

SEQ ID NO: 1052383 - RNA, 19 nt, Artificial Sequence
  Description of Artificial Sequence: Synthetic oligonucleotide
  Antisense strand to SEQ ID NO: 1052382
uacccuggaccuuacaccg

SEQ ID NO: 1052384 - RNA, 19 nt, Artificial Sequence
  Description of Artificial Sequence: Synthetic oligonucleotide
  Sense strand starting at position 44 of SEQ ID NO: 915083
ugugguucuuccucuaaag

SEQ ID NO: 1052385 - RNA, 19 nt, Artificial Sequence
  Description of Artificial Sequence: Synthetic oligonucleotide
  Antisense strand to SEQ ID NO: 1052384
cuuuagaggaagaaccaca

SEQ ID NO: 1052386 - RNA, 19 nt, Artificial Sequence
  Description of Artificial Sequence: Synthetic oligonucleotide
  Sense strand starting at position 46 of SEQ ID NO: 915083
ugguucuuccucuaaagaa

SEQ ID NO: 1052387 - RNA, 19 nt, Artificial Sequence
  Description of Artificial Sequence: Synthetic oligonucleotide
  Antisense strand to SEQ ID NO: 1052386
uucuuuagaggaagaacca

SEQ ID NO: 1052388 - RNA, 19 nt, Artificial Sequence
  Description of Artificial Sequence: Synthetic oligonucleotide
  Sense strand starting at position 104 of SEQ ID NO: 915083
cccaucugugcugacagaa

SEQ ID NO: 1052389 - RNA, 19 nt, Artificial Sequence
  Description of Artificial Sequence: Synthetic oligonucleotide
  Antisense strand to SEQ ID NO: 1052388
uucugucagcacagauggg

SEQ ID NO: 1052390 - RNA, 19 nt, Artificial Sequence
  Description of Artificial Sequence: Synthetic oligonucleotide
  Sense strand starting at position 129 of SEQ ID NO: 915083
cuuacaugauccucauguu

SEQ ID NO: 1052391 - RNA, 19 nt, Artificial Sequence
  Description of Artificial Sequence: Synthetic oligonucleotide
  Antisense strand to SEQ ID NO: 1052390
aacaugaggaucauguaag

SEQ ID NO: 1052392 - RNA, 19 nt, Artificial Sequence
  Description of Artificial Sequence: Synthetic oligonucleotide
  Sense strand starting at position 215 of SEQ ID NO: 915083
ccauuaaagcuuuaacgac

SEQ ID NO: 1052393 - RNA, 19 nt, Artificial Sequence
  Description of Artificial Sequence: Synthetic oligonucleotide
  Antisense strand to SEQ ID NO: 1052392
gucguuaaagcuuuaaugg

SEQ ID NO: 1052394 - RNA, 19 nt, Artificial Sequence
  Description of Artificial Sequence: Synthetic oligonucleotide
  Sense strand starting at position 222 of SEQ ID NO: 915083
agcuuuaacgaccagacaa

SEQ ID NO: 1052395 - RNA, 19 nt, Artificial Sequence
  Description of Artificial Sequence: Synthetic oligonucleotide
  Antisense strand to SEQ ID NO: 1052394
uugucuggucguuaaagcu

SEQ ID NO: 1052396 - RNA, 19 nt, Artificial Sequence
  Description of Artificial Sequence: Synthetic oligonucleotide
  Sense strand starting at position 336 of SEQ ID NO: 915083
gugccauuccaguaaagag

SEQ ID NO: 1052397 - RNA, 19 nt, Artificial Sequence
  Description of Artificial Sequence: Synthetic oligonucleotide
  Antisense strand to SEQ ID NO: 1052396
cucuuuacuggaauggcac

SEQ ID NO: 1052398 - RNA, 19 nt, Artificial Sequence
  Description of Artificial Sequence: Synthetic oligonucleotide
  Sense strand starting at position 477 of SEQ ID NO: 915083
cugccuagccauuaggaua

SEQ ID NO: 1052399 - RNA, 19 nt, Artificial Sequence
  Description of Artificial Sequence: Synthetic oligonucleotide
  Antisense strand to SEQ ID NO: 1052398
uauccuaauggcuaggcag

SEQ ID NO: 1052400 - RNA, 19 nt, Artificial Sequence
  Description of Artificial Sequence: Synthetic oligonucleotide
  Sense strand starting at position 508 of SEQ ID NO: 915083
agucucucguuaucuagaa

SEQ ID NO: 1052401 - RNA, 19 nt, Artificial Sequence
  Description of Artificial Sequence: Synthetic oligonucleotide
  Antisense strand to SEQ ID NO: 1052400
uucuagauaacgagagacu

SEQ ID NO: 1052402 - RNA, 19 nt, Artificial Sequence
  Description of Artificial Sequence: Synthetic oligonucleotide
  Sense strand starting at position 509 of SEQ ID NO: 915083
gucucucguuaucuagaag

SEQ ID NO: 1052403 - RNA, 19 nt, Artificial Sequence
  Description of Artificial Sequence: Synthetic oligonucleotide
  Antisense strand to SEQ ID NO: 1052402
cuucuagauaacgagagac

SEQ ID NO: 1052404 - RNA, 19 nt, Artificial Sequence
  Description of Artificial Sequence: Synthetic oligonucleotide
  Sense strand starting at position 995 of SEQ ID NO: 915083
gcguguaugaaacauguua

SEQ ID NO: 1052405 - RNA, 19 nt, Artificial Sequence
  Description of Artificial Sequence: Synthetic oligonucleotide
  Antisense strand to SEQ ID NO: 1052404
uaacauguuucauacacgc

SEQ ID NO: 1052406 - RNA, 19 nt, Artificial Sequence
  Description of Artificial Sequence: Synthetic oligonucleotide
  Sense strand starting at position 997 of SEQ ID NO: 915083
guguaugaaacauguuauc

SEQ ID NO: 1052407 - RNA, 19 nt, Artificial Sequence
  Description of Artificial Sequence: Synthetic oligonucleotide
  Antisense strand to SEQ ID NO: 1052406
gauaacauguuucauacac

SEQ ID NO: 1052408 - RNA, 19 nt, Artificial Sequence
  Description of Artificial Sequence: Synthetic oligonucleotide
  Sense strand starting at position 1002 of SEQ ID NO: 915083
ugaaacauguuaucuguga

SEQ ID NO: 1052409 - RNA, 19 nt, Artificial Sequence
  Description of Artificial Sequence: Synthetic oligonucleotide
  Antisense strand to SEQ ID NO: 1052408
ucacagauaacauguuuca

SEQ ID NO: 1052410 - RNA, 19 nt, Artificial Sequence
  Description of Artificial Sequence: Synthetic oligonucleotide
  Sense strand starting at position 1003 of SEQ ID NO: 915083
gaaacauguuaucugugag

SEQ ID NO: 1052411 - RNA, 19 nt, Artificial Sequence
  Description of Artificial Sequence: Synthetic oligonucleotide
  Antisense strand to SEQ ID NO: 1052410
cucacagauaacauguuuc

SEQ ID NO: 1052412 - RNA, 19 nt, Artificial Sequence
  Description of Artificial Sequence: Synthetic oligonucleotide
  Sense strand starting at position 1006 of SEQ ID NO: 915083
acauguuaucugugagagu

SEQ ID NO: 1052413 - RNA, 19 nt, Artificial Sequence
  Description of Artificial Sequence: Synthetic oligonucleotide
  Antisense strand to SEQ ID NO: 1052412
acucucacagauaacaugu

SEQ ID NO: 1052414 - RNA, 19 nt, Artificial Sequence
  Description of Artificial Sequence: Synthetic oligonucleotide
  Sense strand starting at position 1017 of SEQ ID NO: 915083
gugagaguccauggaugaa

SEQ ID NO: 1052415 - RNA, 19 nt, Artificial Sequence
  Description of Artificial Sequence: Synthetic oligonucleotide
  Antisense strand to SEQ ID NO: 1052414
uucauccauggacucucac

SEQ ID NO: 1052416 - RNA, 19 nt, Artificial Sequence
  Description of Artificial Sequence: Synthetic oligonucleotide
  Sense strand starting at position 1123 of SEQ ID NO: 915083
cagguaaggucauuguuua

SEQ ID NO: 1052417 - RNA, 19 nt, Artificial Sequence
  Description of Artificial Sequence: Synthetic oligonucleotide
  Antisense strand to SEQ ID NO: 1052416
uaaacaaugaccuuaccug

SEQ ID NO: 1052418 - RNA, 19 nt, Artificial Sequence
  Description of Artificial Sequence: Synthetic oligonucleotide
  Sense strand starting at position 1124 of SEQ ID NO: 915083
agguaaggucauuguuuac

SEQ ID NO: 1052419 - RNA, 19 nt, Artificial Sequence
  Description of Artificial Sequence: Synthetic oligonucleotide
  Antisense strand to SEQ ID NO: 1052418
guaaacaaugaccuuaccu

SEQ ID NO: 1052420 - RNA, 19 nt, Artificial Sequence
  Description of Artificial Sequence: Synthetic oligonucleotide
  Sense strand starting at position 1323 of SEQ ID NO: 915083
aguauaacaggugguuaga

SEQ ID NO: 1052421 - RNA, 19 nt, Artificial Sequence
  Description of Artificial Sequence: Synthetic oligonucleotide
  Antisense strand to SEQ ID NO: 1052420
ucuaaccaccuguuauacu

SEQ ID NO: 1052422 - RNA, 19 nt, Artificial Sequence
  Description of Artificial Sequence: Synthetic oligonucleotide
  Sense strand starting at position 2387 of SEQ ID NO: 915083
agggauaggcguugagaua

SEQ ID NO: 1052423 - RNA, 19 nt, Artificial Sequence
  Description of Artificial Sequence: Synthetic oligonucleotide
  Antisense strand to SEQ ID NO: 1052422
uaucucaacgccuaucccu

SEQ ID NO: 1052424 - RNA, 19 nt, Artificial Sequence
  Description of Artificial Sequence: Synthetic oligonucleotide
  Sense strand starting at position 2388 of SEQ ID NO: 915083
gggauaggcguugagauau

SEQ ID NO: 1052425 - RNA, 19 nt, Artificial Sequence
  Description of Artificial Sequence: Synthetic oligonucleotide
  Antisense strand to SEQ ID NO: 1052424
auaucucaacgccuauccc

SEQ ID NO: 1052426 - RNA, 19 nt, Artificial Sequence
  Description of Artificial Sequence: Synthetic oligonucleotide
  Sense strand starting at position 2711 of SEQ ID NO: 915083
gagcgauaccuccaucuca

SEQ ID NO: 1052427 - RNA, 19 nt, Artificial Sequence
  Description of Artificial Sequence: Synthetic oligonucleotide
  Antisense strand to SEQ ID NO: 1052426
ugagauggagguaucgcuc

SEQ ID NO: 1052428 - RNA, 19 nt, Artificial Sequence
  Description of Artificial Sequence: Synthetic oligonucleotide
  Sense strand starting at position 2827 of SEQ ID NO: 915083
caggcauaaccugggagau

SEQ ID NO: 1052429 - RNA, 19 nt, Artificial Sequence
  Description of Artificial Sequence: Synthetic oligonucleotide
  Antisense strand to SEQ ID NO: 1052428
aucucccagguuaugccug

SEQ ID NO: 1052430 - RNA, 19 nt, Artificial Sequence
  Description of Artificial Sequence: Synthetic oligonucleotide
  Sense strand starting at position 2828 of SEQ ID NO: 915083
aggcauaaccugggagauc

SEQ ID NO: 1052431 - RNA, 19 nt, Artificial Sequence
  Description of Artificial Sequence: Synthetic oligonucleotide
  Antisense strand to SEQ ID NO: 1052430
gaucucccagguuaugccu

SEQ ID NO: 1052432 - RNA, 19 nt, Artificial Sequence
  Description of Artificial Sequence: Synthetic oligonucleotide
  Sense strand starting at position 2888 of SEQ ID NO: 915083
cugagacccucuuccaaga

SEQ ID NO: 1052433 - RNA, 19 nt, Artificial Sequence
  Description of Artificial Sequence: Synthetic oligonucleotide
  Antisense strand to SEQ ID NO: 1052432
ucuuggaagagggucucag

SEQ ID NO: 1052434 - RNA, 19 nt, Artificial Sequence
  Description of Artificial Sequence: Synthetic oligonucleotide
  Sense strand starting at position 2903 of SEQ ID NO: 915083
aagacaugcgguuagcauu

SEQ ID NO: 1052435 - RNA, 19 nt, Artificial Sequence
  Description of Artificial Sequence: Synthetic oligonucleotide
  Antisense strand to SEQ ID NO: 1052434
aaugcuaaccgcaugucuu

SEQ ID NO: 1052436 - RNA, 19 nt, Artificial Sequence
  Description of Artificial Sequence: Synthetic oligonucleotide
  Sense strand starting at position 2909 of SEQ ID NO: 915083
ugcgguuagcauuagauug

SEQ ID NO: 1052437 - RNA, 19 nt, Artificial Sequence
  Description of Artificial Sequence: Synthetic oligonucleotide
  Antisense strand to SEQ ID NO: 1052436
caaucuaaugcuaaccgca

SEQ ID NO: 1052438 - RNA, 19 nt, Artificial Sequence
  Description of Artificial Sequence: Synthetic oligonucleotide
  Sense strand starting at position 2914 of SEQ ID NO: 915083
uuagcauuagauugaguaa

SEQ ID NO: 1052439 - RNA, 19 nt, Artificial Sequence
  Description of Artificial Sequence: Synthetic oligonucleotide
  Antisense strand to SEQ ID NO: 1052438
uuacucaaucuaaugcuaa

SEQ ID NO: 1052440 - RNA, 19 nt, Artificial Sequence
  Description of Artificial Sequence: Synthetic oligonucleotide
  Sense strand starting at position 2917 of SEQ ID NO: 915083
gcauuagauugaguaaauc

SEQ ID NO: 1052441 - RNA, 19 nt, Artificial Sequence
  Description of Artificial Sequence: Synthetic oligonucleotide
  Antisense strand to SEQ ID NO: 1052440
gauuuacucaaucuaaugc

SEQ ID NO: 1052442 - RNA, 19 nt, Artificial Sequence
  Description of Artificial Sequence: Synthetic oligonucleotide
  Sense strand starting at position 2927 of SEQ ID NO: 915083
gaguaaaucgcagucgcua

SEQ ID NO: 1052443 - RNA, 19 nt, Artificial Sequence
  Description of Artificial Sequence: Synthetic oligonucleotide
  Antisense strand to SEQ ID NO: 1052442
uagcgacugcgauuuacuc

SEQ ID NO: 1052444 - RNA, 19 nt, Artificial Sequence
  Description of Artificial Sequence: Synthetic oligonucleotide
  Sense strand starting at position 2940 of SEQ ID NO: 915083
ucgcuacccuaauucuaga

SEQ ID NO: 1052445 - RNA, 19 nt, Artificial Sequence
  Description of Artificial Sequence: Synthetic oligonucleotide
  Antisense strand to SEQ ID NO: 1052444
ucuagaauuaggguagcga

SEQ ID NO: 1052446 - RNA, 19 nt, Artificial Sequence
  Description of Artificial Sequence: Synthetic oligonucleotide
  Sense strand starting at position 2998 of SEQ ID NO: 915083
uucuucuuccaaggaguaa

SEQ ID NO: 1052447 - RNA, 19 nt, Artificial Sequence
  Description of Artificial Sequence: Synthetic oligonucleotide
  Antisense strand to SEQ ID NO: 1052446
uuacuccuuggaagaagaa

SEQ ID NO: 1052448 - RNA, 19 nt, Artificial Sequence
  Description of Artificial Sequence: Synthetic oligonucleotide
  Sense strand starting at position 3110 of SEQ ID NO: 915083
uuuaguacucacgacagau

SEQ ID NO: 1052449 - RNA, 19 nt, Artificial Sequence
  Description of Artificial Sequence: Synthetic oligonucleotide
  Antisense strand to SEQ ID NO: 1052448
aucugucgugaguacuaaa

SEQ ID NO: 1052450 - RNA, 19 nt, Artificial Sequence
  Description of Artificial Sequence: Synthetic oligonucleotide
  Sense strand starting at position 3180 of SEQ ID NO: 915083
ucuuaacagcucugugagu

SEQ ID NO: 1052451 - RNA, 19 nt, Artificial Sequence
  Description of Artificial Sequence: Synthetic oligonucleotide
  Antisense strand to SEQ ID NO: 1052450
acucacagagcuguuaaga

SEQ ID NO: 1052452 - RNA, 19 nt, Artificial Sequence
  Description of Artificial Sequence: Synthetic oligonucleotide
  Sense strand starting at position 3182 of SEQ ID NO: 915083
uuaacagcucugugaguca

SEQ ID NO: 1052453 - RNA, 19 nt, Artificial Sequence
  Description of Artificial Sequence: Synthetic oligonucleotide
  Antisense strand to SEQ ID NO: 1052452
ugacucacagagcuguuaa

SEQ ID NO: 1052454 - RNA, 19 nt, Artificial Sequence
  Description of Artificial Sequence: Synthetic oligonucleotide
  Sense strand starting at position 3187 of SEQ ID NO: 915083
agcucugugagucaaggau

SEQ ID NO: 1052455 - RNA, 19 nt, Artificial Sequence
  Description of Artificial Sequence: Synthetic oligonucleotide
  Antisense strand to SEQ ID NO: 1052454
auccuugacucacagagcu

SEQ ID NO: 1052456 - RNA, 19 nt, Artificial Sequence
  Description of Artificial Sequence: Synthetic oligonucleotide
  Sense strand starting at position 3578 of SEQ ID NO: 915083
ccaugauuagcugguuucu

SEQ ID NO: 1052457 - RNA, 19 nt, Artificial Sequence
  Description of Artificial Sequence: Synthetic oligonucleotide
  Antisense strand to SEQ ID NO: 1052456
agaaaccagcuaaucaugg

SEQ ID NO: 1052458 - RNA, 19 nt, Artificial Sequence
  Description of Artificial Sequence: Synthetic oligonucleotide
  Sense strand starting at position 3865 of SEQ ID NO: 915083
uugaaacaaucucugugua

SEQ ID NO: 1052459 - RNA, 19 nt, Artificial Sequence
  Description of Artificial Sequence: Synthetic oligonucleotide
  Antisense strand to SEQ ID NO: 1052458
uacacagagauuguuucaa

SEQ ID NO: 1052460 - RNA, 19 nt, Artificial Sequence
  Description of Artificial Sequence: Synthetic oligonucleotide
  Sense strand starting at position 3866 of SEQ ID NO: 915083
ugaaacaaucucuguguau

SEQ ID NO: 1052461 - RNA, 19 nt, Artificial Sequence
  Description of Artificial Sequence: Synthetic oligonucleotide
  Antisense strand to SEQ ID NO: 1052460
auacacagagauuguuuca

SEQ ID NO: 1052462 - RNA, 19 nt, Artificial Sequence
  Description of Artificial Sequence: Synthetic oligonucleotide
  Sense strand starting at position 3963 of SEQ ID NO: 915083
guuaguaccucuuccauuu

SEQ ID NO: 1052463 - RNA, 19 nt, Artificial Sequence
  Description of Artificial Sequence: Synthetic oligonucleotide
  Antisense strand to SEQ ID NO: 1052462
aaauggaagagguacuaac

SEQ ID NO: 1052464 - RNA, 19 nt, Artificial Sequence
  Description of Artificial Sequence: Synthetic oligonucleotide
  Sense strand starting at position 81 of SEQ ID NO: 915084
uuccaaagguaucuugaau

SEQ ID NO: 1052465 - RNA, 19 nt, Artificial Sequence
  Description of Artificial Sequence: Synthetic oligonucleotide
  Antisense strand to SEQ ID NO: 1052464
auucaagauaccuuuggaa

SEQ ID NO: 1052466 - RNA, 19 nt, Artificial Sequence
  Description of Artificial Sequence: Synthetic oligonucleotide
  Sense strand starting at position 150 of SEQ ID NO: 915084
ccuuacuugggccaugaua

SEQ ID NO: 1052467 - RNA, 19 nt, Artificial Sequence
  Description of Artificial Sequence: Synthetic oligonucleotide
  Antisense strand to SEQ ID NO: 1052466
uaucauggcccaaguaagg

SEQ ID NO: 1052468 - RNA, 19 nt, Artificial Sequence
  Description of Artificial Sequence: Synthetic oligonucleotide
  Sense strand starting at position 152 of SEQ ID NO: 915084
uuacuugggccaugauaaa

SEQ ID NO: 1052469 - RNA, 19 nt, Artificial Sequence
  Description of Artificial Sequence: Synthetic oligonucleotide
  Antisense strand to SEQ ID NO: 1052468
uuuaucauggcccaaguaa

SEQ ID NO: 1052470 - RNA, 19 nt, Artificial Sequence
  Description of Artificial Sequence: Synthetic oligonucleotide
  Sense strand starting at position 315 of SEQ ID NO: 915084
uccuauauacaugagguuu

SEQ ID NO: 1052471 - RNA, 19 nt, Artificial Sequence
  Description of Artificial Sequence: Synthetic oligonucleotide
  Antisense strand to SEQ ID NO: 1052470
aaaccucauguauauagga

SEQ ID NO: 1052472 - RNA, 19 nt, Artificial Sequence
  Description of Artificial Sequence: Synthetic oligonucleotide
  Sense strand starting at position 356 of SEQ ID NO: 915084
ccaaguugugaacacagua

SEQ ID NO: 1052473 - RNA, 19 nt, Artificial Sequence
  Description of Artificial Sequence: Synthetic oligonucleotide
  Antisense strand to SEQ ID NO: 1052472
uacuguguucacaacuugg

SEQ ID NO: 1052474 - RNA, 19 nt, Artificial Sequence
  Description of Artificial Sequence: Synthetic oligonucleotide
  Sense strand starting at position 368 of SEQ ID NO: 915084
cacaguauccgauagguuu

SEQ ID NO: 1052475 - RNA, 19 nt, Artificial Sequence
  Description of Artificial Sequence: Synthetic oligonucleotide
  Antisense strand to SEQ ID NO: 1052474
aaaccuaucggauacugug

SEQ ID NO: 1052476 - RNA, 19 nt, Artificial Sequence
  Description of Artificial Sequence: Synthetic oligonucleotide
  Sense strand starting at position 618 of SEQ ID NO: 915084
gcacuuaagccacacagau

SEQ ID NO: 1052477 - RNA, 19 nt, Artificial Sequence
  Description of Artificial Sequence: Synthetic oligonucleotide
  Antisense strand to SEQ ID NO: 1052476
aucuguguggcuuaagugc

SEQ ID NO: 1052478 - RNA, 19 nt, Artificial Sequence
  Description of Artificial Sequence: Synthetic oligonucleotide
  Sense strand starting at position 630 of SEQ ID NO: 915084
cacagaucuuuggucaguu

SEQ ID NO: 1052479 - RNA, 19 nt, Artificial Sequence
  Description of Artificial Sequence: Synthetic oligonucleotide
  Antisense strand to SEQ ID NO: 1052478
aacugaccaaagaucugug

SEQ ID NO: 1052480 - RNA, 19 nt, Artificial Sequence
  Description of Artificial Sequence: Synthetic oligonucleotide
  Sense strand starting at position 634 of SEQ ID NO: 915084
gaucuuuggucaguuccaa

SEQ ID NO: 1052481 - RNA, 19 nt, Artificial Sequence
  Description of Artificial Sequence: Synthetic oligonucleotide
  Antisense strand to SEQ ID NO: 1052480
uuggaacugaccaaagauc

SEQ ID NO: 1052482 - RNA, 19 nt, Artificial Sequence
  Description of Artificial Sequence: Synthetic oligonucleotide
  Sense strand starting at position 684 of SEQ ID NO: 915084
ugcauauggugauccuacu

SEQ ID NO: 1052483 - RNA, 19 nt, Artificial Sequence
  Description of Artificial Sequence: Synthetic oligonucleotide
  Antisense strand to SEQ ID NO: 1052482
aguaggaucaccauaugca

SEQ ID NO: 1052484 - RNA, 19 nt, Artificial Sequence
  Description of Artificial Sequence: Synthetic oligonucleotide
  Sense strand starting at position 752 of SEQ ID NO: 915084
uuuagaucucaggguaacu

SEQ ID NO: 1052485 - RNA, 19 nt, Artificial Sequence
  Description of Artificial Sequence: Synthetic oligonucleotide
  Antisense strand to SEQ ID NO: 1052484
aguuacccugagaucuaaa

SEQ ID NO: 1052486 - RNA, 19 nt, Artificial Sequence
  Description of Artificial Sequence: Synthetic oligonucleotide
  Sense strand starting at position 896 of SEQ ID NO: 915084
gucuacaucuauucugaca

SEQ ID NO: 1052487 - RNA, 19 nt, Artificial Sequence
  Description of Artificial Sequence: Synthetic oligonucleotide
  Antisense strand to SEQ ID NO: 1052486
ugucagaauagauguagac

SEQ ID NO: 1052488 - RNA, 19 nt, Artificial Sequence
  Description of Artificial Sequence: Synthetic oligonucleotide
  Sense strand starting at position 921 of SEQ ID NO: 915084
caacgucuugcaugaugaa

SEQ ID NO: 1052489 - RNA, 19 nt, Artificial Sequence
  Description of Artificial Sequence: Synthetic oligonucleotide
  Antisense strand to SEQ ID NO: 1052488
uucaucaugcaagacguug

SEQ ID NO: 1052490 - RNA, 19 nt, Artificial Sequence
  Description of Artificial Sequence: Synthetic oligonucleotide
  Sense strand starting at position 922 of SEQ ID NO: 915084
aacgucuugcaugaugaaa

SEQ ID NO: 1052491 - RNA, 19 nt, Artificial Sequence
  Description of Artificial Sequence: Synthetic oligonucleotide
  Antisense strand to SEQ ID NO: 1052490
uuucaucaugcaagacguu

SEQ ID NO: 1052492 - RNA, 19 nt, Artificial Sequence
  Description of Artificial Sequence: Synthetic oligonucleotide
  Sense strand starting at position 996 of SEQ ID NO: 915084
gcucgaacguauuuguaca

SEQ ID NO: 1052493 - RNA, 19 nt, Artificial Sequence
  Description of Artificial Sequence: Synthetic oligonucleotide
  Antisense strand to SEQ ID NO: 1052492
uguacaaauacguucgagc

SEQ ID NO: 1052494 - RNA, 19 nt, Artificial Sequence
  Description of Artificial Sequence: Synthetic oligonucleotide
  Sense strand starting at position 997 of SEQ ID NO: 915084
cucgaacguauuuguacaa

SEQ ID NO: 1052495 - RNA, 19 nt, Artificial Sequence
  Description of Artificial Sequence: Synthetic oligonucleotide
  Antisense strand to SEQ ID NO: 1052494
uuguacaaauacguucgag

SEQ ID NO: 1052496 - RNA, 19 nt, Artificial Sequence
  Description of Artificial Sequence: Synthetic oligonucleotide
  Sense strand starting at position 998 of SEQ ID NO: 915084
ucgaacguauuuguacaau

SEQ ID NO: 1052497 - RNA, 19 nt, Artificial Sequence
  Description of Artificial Sequence: Synthetic oligonucleotide
  Antisense strand to SEQ ID NO: 1052496
auuguacaaauacguucga

SEQ ID NO: 1052498 - RNA, 19 nt, Artificial Sequence
  Description of Artificial Sequence: Synthetic oligonucleotide
  Sense strand starting at position 1160 of SEQ ID NO: 915084
agagguaucucuucuagaa

SEQ ID NO: 1052499 - RNA, 19 nt, Artificial Sequence
  Description of Artificial Sequence: Synthetic oligonucleotide
  Antisense strand to SEQ ID NO: 1052498
uucuagaagagauaccucu

SEQ ID NO: 1052500 - RNA, 19 nt, Artificial Sequence
  Description of Artificial Sequence: Synthetic oligonucleotide
  Sense strand starting at position 1172 of SEQ ID NO: 915084
ucuagaacucugugucuca

SEQ ID NO: 1052501 - RNA, 19 nt, Artificial Sequence
  Description of Artificial Sequence: Synthetic oligonucleotide
  Antisense strand to SEQ ID NO: 1052500
ugagacacagaguucuaga

SEQ ID NO: 1052502 - RNA, 19 nt, Artificial Sequence
  Description of Artificial Sequence: Synthetic oligonucleotide
  Sense strand starting at position 1347 of SEQ ID NO: 915084
gaaugaaccuguuucuggu

SEQ ID NO: 1052503 - RNA, 19 nt, Artificial Sequence
  Description of Artificial Sequence: Synthetic oligonucleotide
  Antisense strand to SEQ ID NO: 1052502
accagaaacagguucauuc

SEQ ID NO: 1052504 - RNA, 19 nt, Artificial Sequence
  Description of Artificial Sequence: Synthetic oligonucleotide
  Sense strand starting at position 1724 of SEQ ID NO: 915084
gacugugaauucccgaaag

SEQ ID NO: 1052505 - RNA, 19 nt, Artificial Sequence
  Description of Artificial Sequence: Synthetic oligonucleotide
  Antisense strand to SEQ ID NO: 1052504
cuuucgggaauucacaguc

SEQ ID NO: 1052506 - RNA, 19 nt, Artificial Sequence
  Description of Artificial Sequence: Synthetic oligonucleotide
  Sense strand starting at position 1726 of SEQ ID NO: 915084
cugugaauucccgaaagug

SEQ ID NO: 1052507 - RNA, 19 nt, Artificial Sequence
  Description of Artificial Sequence: Synthetic oligonucleotide
  Antisense strand to SEQ ID NO: 1052506
cacuuucgggaauucacag

SEQ ID NO: 1052508 - RNA, 19 nt, Artificial Sequence
  Description of Artificial Sequence: Synthetic oligonucleotide
  Sense strand starting at position 1909 of SEQ ID NO: 915084
gaagcauuccgggagcaga

SEQ ID NO: 1052509 - RNA, 19 nt, Artificial Sequence
  Description of Artificial Sequence: Synthetic oligonucleotide
  Antisense strand to SEQ ID NO: 1052508
ucugcucccggaaugcuuc

SEQ ID NO: 1052510 - RNA, 19 nt, Artificial Sequence
  Description of Artificial Sequence: Synthetic oligonucleotide
  Sense strand starting at position 1952 of SEQ ID NO: 915084
gaggcuuccaccgggagaa

SEQ ID NO: 1052511 - RNA, 19 nt, Artificial Sequence
  Description of Artificial Sequence: Synthetic oligonucleotide
  Antisense strand to SEQ ID NO: 1052510
uucucccgguggaagccuc

SEQ ID NO: 1052512 - RNA, 19 nt, Artificial Sequence
  Description of Artificial Sequence: Synthetic oligonucleotide
  Sense strand starting at position 1953 of SEQ ID NO: 915084
aggcuuccaccgggagaau

SEQ ID NO: 1052513 - RNA, 19 nt, Artificial Sequence
  Description of Artificial Sequence: Synthetic oligonucleotide
  Antisense strand to SEQ ID NO: 1052512
auucucccgguggaagccu

SEQ ID NO: 1052514 - RNA, 19 nt, Artificial Sequence
  Description of Artificial Sequence: Synthetic oligonucleotide
  Sense strand starting at position 2355 of SEQ ID NO: 915084
aagagacuguauucgugua

SEQ ID NO: 1052515 - RNA, 19 nt, Artificial Sequence
  Description of Artificial Sequence: Synthetic oligonucleotide
  Antisense strand to SEQ ID NO: 1052514
uacacgaauacagucucuu

SEQ ID NO: 1052516 - RNA, 19 nt, Artificial Sequence
  Description of Artificial Sequence: Synthetic oligonucleotide
  Sense strand starting at position 2370 of SEQ ID NO: 915084
uguauuccuguauaaugaa

SEQ ID NO: 1052517 - RNA, 19 nt, Artificial Sequence
  Description of Artificial Sequence: Synthetic oligonucleotide
  Antisense strand to SEQ ID NO: 1052516
uucauuauacaggaauaca

SEQ ID NO: 1052518 - RNA, 19 nt, Artificial Sequence
  Description of Artificial Sequence: Synthetic oligonucleotide
  Sense strand starting at position 2378 of SEQ ID NO: 915084
uguauaaugaaacguaaug

SEQ ID NO: 1052519 - RNA, 19 nt, Artificial Sequence
  Description of Artificial Sequence: Synthetic oligonucleotide
  Antisense strand to SEQ ID NO: 1052518
cauuacguuucauuauaca

SEQ ID NO: 1052520 - RNA, 19 nt, Artificial Sequence
  Description of Artificial Sequence: Synthetic oligonucleotide
  Sense strand starting at position 2385 of SEQ ID NO: 915084
ugaaacguaaugugguaaa

SEQ ID NO: 1052521 - RNA, 19 nt, Artificial Sequence
  Description of Artificial Sequence: Synthetic oligonucleotide
  Antisense strand to SEQ ID NO: 1052520
uuuaccacauuacguuuca

SEQ ID NO: 1052522 - RNA, 19 nt, Artificial Sequence
  Description of Artificial Sequence: Synthetic oligonucleotide
  Sense strand starting at position 2434 of SEQ ID NO: 915084
gagugcuacucacuuggau

SEQ ID NO: 1052523 - RNA, 19 nt, Artificial Sequence
  Description of Artificial Sequence: Synthetic oligonucleotide
  Antisense strand to SEQ ID NO: 1052522
auccaagugaguagcacuc

SEQ ID NO: 1052524 - RNA, 19 nt, Artificial Sequence
  Description of Artificial Sequence: Synthetic oligonucleotide
  Sense strand starting at position 2442 of SEQ ID NO: 915084
cucacuuggauacgugaaa

SEQ ID NO: 1052525 - RNA, 19 nt, Artificial Sequence
  Description of Artificial Sequence: Synthetic oligonucleotide
  Antisense strand to SEQ ID NO: 1052524
uuucacguauccaagugag

SEQ ID NO: 1052526 - RNA, 19 nt, Artificial Sequence
  Description of Artificial Sequence: Synthetic oligonucleotide
  Sense strand starting at position 2607 of SEQ ID NO: 915084
agugauagccaauagaagu

SEQ ID NO: 1052527 - RNA, 19 nt, Artificial Sequence
  Description of Artificial Sequence: Synthetic oligonucleotide
  Antisense strand to SEQ ID NO: 1052526
acuucuauuggcuaucacu

SEQ ID NO: 1052528 - RNA, 19 nt, Artificial Sequence
  Description of Artificial Sequence: Synthetic oligonucleotide
  Sense strand starting at position 2630 of SEQ ID NO: 915084
gcacuucuauuaccaguga

SEQ ID NO: 1052529 - RNA, 19 nt, Artificial Sequence
  Description of Artificial Sequence: Synthetic oligonucleotide
  Antisense strand to SEQ ID NO: 1052528
ucacugguaauagaagugc

SEQ ID NO: 1052530 - RNA, 19 nt, Artificial Sequence
  Description of Artificial Sequence: Synthetic oligonucleotide
  Sense strand starting at position 2677 of SEQ ID NO: 915084
ucauuuaucugguuccgac

SEQ ID NO: 1052531 - RNA, 19 nt, Artificial Sequence
  Description of Artificial Sequence: Synthetic oligonucleotide
  Antisense strand to SEQ ID NO: 1052530
gucggaaccagauaaauga

SEQ ID NO: 1052532 - RNA, 19 nt, Artificial Sequence
  Description of Artificial Sequence: Synthetic oligonucleotide
  Sense strand starting at position 2684 of SEQ ID NO: 915084
ucugguuccgaccaucauu

SEQ ID NO: 1052533 - RNA, 19 nt, Artificial Sequence
  Description of Artificial Sequence: Synthetic oligonucleotide
  Antisense strand to SEQ ID NO: 1052532
aaugauggucggaaccaga

SEQ ID NO: 1052534 - RNA, 19 nt, Artificial Sequence
  Description of Artificial Sequence: Synthetic oligonucleotide
  Sense strand starting at position 2766 of SEQ ID NO: 915084
ccuggaauccauuguucua

SEQ ID NO: 1052535 - RNA, 19 nt, Artificial Sequence
  Description of Artificial Sequence: Synthetic oligonucleotide
  Antisense strand to SEQ ID NO: 1052534
uagaacaauggauuccagg

SEQ ID NO: 1052536 - RNA, 19 nt, Artificial Sequence
  Description of Artificial Sequence: Synthetic oligonucleotide
  Sense strand starting at position 2768 of SEQ ID NO: 915084
uggaauccauuguucuaca

SEQ ID NO: 1052537 - RNA, 19 nt, Artificial Sequence
  Description of Artificial Sequence: Synthetic oligonucleotide
  Antisense strand to SEQ ID NO: 1052536
uguagaacaauggauucca

SEQ ID NO: 1052538 - RNA, 19 nt, Artificial Sequence
  Description of Artificial Sequence: Synthetic oligonucleotide
  Sense strand starting at position 2769 of SEQ ID NO: 915084
ggaauccauuguucuacaa

SEQ ID NO: 1052539 - RNA, 19 nt, Artificial Sequence
  Description of Artificial Sequence: Synthetic oligonucleotide
  Antisense strand to SEQ ID NO: 1052538
uuguagaacaauggauucc

SEQ ID NO: 1052540 - RNA, 19 nt, Artificial Sequence
  Description of Artificial Sequence: Synthetic oligonucleotide
  Sense strand starting at position 2896 of SEQ ID NO: 915084
ucaaaucuguagcugaaca

SEQ ID NO: 1052541 - RNA, 19 nt, Artificial Sequence
  Description of Artificial Sequence: Synthetic oligonucleotide
  Antisense strand to SEQ ID NO: 1052540
uguucagcuacagauuuga

SEQ ID NO: 1052542 - RNA, 19 nt, Artificial Sequence
  Description of Artificial Sequence: Synthetic oligonucleotide
  Sense strand starting at position 3859 of SEQ ID NO: 915084
aguugugugccucuguagu

SEQ ID NO: 1052543 - RNA, 19 nt, Artificial Sequence
  Description of Artificial Sequence: Synthetic oligonucleotide
  Antisense strand to SEQ ID NO: 1052542
acuacagaggcacacaacu

SEQ ID NO: 1052544 - RNA, 19 nt, Artificial Sequence
  Description of Artificial Sequence: Synthetic oligonucleotide
  Sense strand starting at position 116 of SEQ ID NO: 915085
guaacaaucuuacugaugu

SEQ ID NO: 1052545 - RNA, 19 nt, Artificial Sequence
  Description of Artificial Sequence: Synthetic oligonucleotide
  Antisense strand to SEQ ID NO: 1052544
acaucaguaagauuguuac

SEQ ID NO: 1052546 - RNA, 19 nt, Artificial Sequence
  Description of Artificial Sequence: Synthetic oligonucleotide
  Sense strand starting at position 123 of SEQ ID NO: 915085
ucuuacugauguguacaga

SEQ ID NO: 1052547 - RNA, 19 nt, Artificial Sequence
  Description of Artificial Sequence: Synthetic oligonucleotide
  Antisense strand to SEQ ID NO: 1052546
ucuguacacaucaguaaga

SEQ ID NO: 1052548 - RNA, 19 nt, Artificial Sequence
  Description of Artificial Sequence: Synthetic oligonucleotide
  Sense strand starting at position 124 of SEQ ID NO: 915085
cuuacugauguguacagaa

SEQ ID NO: 1052549 - RNA, 19 nt, Artificial Sequence
  Description of Artificial Sequence: Synthetic oligonucleotide
  Antisense strand to SEQ ID NO: 1052548
uucuguacacaucaguaag

SEQ ID NO: 1052550 - RNA, 19 nt, Artificial Sequence
  Description of Artificial Sequence: Synthetic oligonucleotide
  Sense strand starting at position 334 of SEQ ID NO: 915085
agggaaugaucacugcucu

SEQ ID NO: 1052551 - RNA, 19 nt, Artificial Sequence
  Description of Artificial Sequence: Synthetic oligonucleotide
  Antisense strand to SEQ ID NO: 1052550
agagcagugaucauucccu

SEQ ID NO: 1052552 - RNA, 19 nt, Artificial Sequence
  Description of Artificial Sequence: Synthetic oligonucleotide
  Sense strand starting at position 433 of SEQ ID NO: 915085
cuuugaauucuguaccuga

SEQ ID NO: 1052553 - RNA, 19 nt, Artificial Sequence
  Description of Artificial Sequence: Synthetic oligonucleotide
  Antisense strand to SEQ ID NO: 1052552
ucagguacagaauucaaag

SEQ ID NO: 1052554 - RNA, 19 nt, Artificial Sequence
  Description of Artificial Sequence: Synthetic oligonucleotide
  Sense strand starting at position 436 of SEQ ID NO: 915085
ugaauucuguaccugaaag

SEQ ID NO: 1052555 - RNA, 19 nt, Artificial Sequence
  Description of Artificial Sequence: Synthetic oligonucleotide
  Antisense strand to SEQ ID NO: 1052554
cuuucagguacagaauuca

SEQ ID NO: 1052556 - RNA, 19 nt, Artificial Sequence
  Description of Artificial Sequence: Synthetic oligonucleotide
  Sense strand starting at position 499 of SEQ ID NO: 915085
cuggcuuucuaagucuuau

SEQ ID NO: 1052557 - RNA, 19 nt, Artificial Sequence
  Description of Artificial Sequence: Synthetic oligonucleotide
  Antisense strand to SEQ ID NO: 1052556
auaagacuuagaaagccag

SEQ ID NO: 1052558 - RNA, 19 nt, Artificial Sequence
  Description of Artificial Sequence: Synthetic oligonucleotide
  Sense strand starting at position 526 of SEQ ID NO: 915085
ccugcuuucuauuccagua

SEQ ID NO: 1052559 - RNA, 19 nt, Artificial Sequence
  Description of Artificial Sequence: Synthetic oligonucleotide
  Antisense strand to SEQ ID NO: 1052558
uacuggaauagaaagcagg

SEQ ID NO: 1052560 - RNA, 19 nt, Artificial Sequence
  Description of Artificial Sequence: Synthetic oligonucleotide
  Sense strand starting at position 531 of SEQ ID NO: 915085
uuucuauuccaguacuguu

SEQ ID NO: 1052561 - RNA, 19 nt, Artificial Sequence
  Description of Artificial Sequence: Synthetic oligonucleotide
  Antisense strand to SEQ ID NO: 1052560
aacaguacuggaauagaaa

SEQ ID NO: 1052562 - RNA, 19 nt, Artificial Sequence
  Description of Artificial Sequence: Synthetic oligonucleotide
  Sense strand starting at position 570 of SEQ ID NO: 915085
gaguccucaucagcugaca

SEQ ID NO: 1052563 - RNA, 19 nt, Artificial Sequence
  Description of Artificial Sequence: Synthetic oligonucleotide
  Antisense strand to SEQ ID NO: 1052562
ugucagcugaugaggacuc

SEQ ID NO: 1052564 - RNA, 19 nt, Artificial Sequence
  Description of Artificial Sequence: Synthetic oligonucleotide
  Sense strand starting at position 638 of SEQ ID NO: 915085
accgauuuguuuccgauac

SEQ ID NO: 1052565 - RNA, 19 nt, Artificial Sequence
  Description of Artificial Sequence: Synthetic oligonucleotide
  Antisense strand to SEQ ID NO: 1052564
guaucggaaacaaaucggu

SEQ ID NO: 1052566 - RNA, 19 nt, Artificial Sequence
  Description of Artificial Sequence: Synthetic oligonucleotide
  Sense strand starting at position 665 of SEQ ID NO: 915085
gcugacguucuuuaaccau

SEQ ID NO: 1052567 - RNA, 19 nt, Artificial Sequence
  Description of Artificial Sequence: Synthetic oligonucleotide
  Antisense strand to SEQ ID NO: 1052566
augguuaaagaacgucagc

SEQ ID NO: 1052568 - RNA, 19 nt, Artificial Sequence
  Description of Artificial Sequence: Synthetic oligonucleotide
  Sense strand starting at position 679 of SEQ ID NO: 915085
accaucuucuaaguuuagu

SEQ ID NO: 1052569 - RNA, 19 nt, Artificial Sequence
  Description of Artificial Sequence: Synthetic oligonucleotide
  Antisense strand to SEQ ID NO: 1052568
acuaaacuuagaagauggu

SEQ ID NO: 1052570 - RNA, 19 nt, Artificial Sequence
  Description of Artificial Sequence: Synthetic oligonucleotide
  Sense strand starting at position 685 of SEQ ID NO: 915085
uucuaaguuuaguucucaa

SEQ ID NO: 1052571 - RNA, 19 nt, Artificial Sequence
  Description of Artificial Sequence: Synthetic oligonucleotide
  Antisense strand to SEQ ID NO: 1052570
uugagaacuaaacuuagaa

SEQ ID NO: 1052572 - RNA, 19 nt, Artificial Sequence
  Description of Artificial Sequence: Synthetic oligonucleotide
  Sense strand starting at position 696 of SEQ ID NO: 915085
guucucaagcucuagguua

SEQ ID NO: 1052573 - RNA, 19 nt, Artificial Sequence
  Description of Artificial Sequence: Synthetic oligonucleotide
  Antisense strand to SEQ ID NO: 1052572
uaaccuagagcuugagaac

SEQ ID NO: 1052574 - RNA, 19 nt, Artificial Sequence
  Description of Artificial Sequence: Synthetic oligonucleotide
  Sense strand starting at position 736 of SEQ ID NO: 915085
caccuuacccgugaacaga

SEQ ID NO: 1052575 - RNA, 19 nt, Artificial Sequence
  Description of Artificial Sequence: Synthetic oligonucleotide
  Antisense strand to SEQ ID NO: 1052574
ucuguucacggguaaggug

SEQ ID NO: 1052576 - RNA, 19 nt, Artificial Sequence
  Description of Artificial Sequence: Synthetic oligonucleotide
  Sense strand starting at position 1004 of SEQ ID NO: 915085
uucuaaaguccuuauggcu

SEQ ID NO: 1052577 - RNA, 19 nt, Artificial Sequence
  Description of Artificial Sequence: Synthetic oligonucleotide
  Antisense strand to SEQ ID NO: 1052576
agccauaaggacuuuagaa

SEQ ID NO: 1052578 - RNA, 19 nt, Artificial Sequence
  Description of Artificial Sequence: Synthetic oligonucleotide
  Sense strand starting at position 1010 of SEQ ID NO: 915085
aguccuuauggcuauagua

SEQ ID NO: 1052579 - RNA, 19 nt, Artificial Sequence
  Description of Artificial Sequence: Synthetic oligonucleotide
  Antisense strand to SEQ ID NO: 1052578
uacuauagccauaaggacu

SEQ ID NO: 1052580 - RNA, 19 nt, Artificial Sequence
  Description of Artificial Sequence: Synthetic oligonucleotide
  Sense strand starting at position 1018 of SEQ ID NO: 915085
uggcuauaguaauccagaa

SEQ ID NO: 1052581 - RNA, 19 nt, Artificial Sequence
  Description of Artificial Sequence: Synthetic oligonucleotide
  Antisense strand to SEQ ID NO: 1052580
uucuggauuacuauagcca

SEQ ID NO: 1052582 - RNA, 19 nt, Artificial Sequence
  Description of Artificial Sequence: Synthetic oligonucleotide
  Sense strand starting at position 1110 of SEQ ID NO: 915085
accgacuccuauucucaga

SEQ ID NO: 1052583 - RNA, 19 nt, Artificial Sequence
  Description of Artificial Sequence: Synthetic oligonucleotide
  Antisense strand to SEQ ID NO: 1052582
ucugagaauaggagucggu

SEQ ID NO: 1052584 - RNA, 19 nt, Artificial Sequence
  Description of Artificial Sequence: Synthetic oligonucleotide
  Sense strand starting at position 1112 of SEQ ID NO: 915085
cgacuccuauucucagaua

SEQ ID NO: 1052585 - RNA, 19 nt, Artificial Sequence
  Description of Artificial Sequence: Synthetic oligonucleotide
  Antisense strand to SEQ ID NO: 1052584
uaucugagaauaggagucg

SEQ ID NO: 1052586 - RNA, 19 nt, Artificial Sequence
  Description of Artificial Sequence: Synthetic oligonucleotide
  Sense strand starting at position 1844 of SEQ ID NO: 915085
cugggucgacccuguuauu

SEQ ID NO: 1052587 - RNA, 19 nt, Artificial Sequence
  Description of Artificial Sequence: Synthetic oligonucleotide
  Antisense strand to SEQ ID NO: 1052586
aauaacagggucgacccag

SEQ ID NO: 1052588 - RNA, 19 nt, Artificial Sequence
  Description of Artificial Sequence: Synthetic oligonucleotide
  Sense strand starting at position 2305 of SEQ ID NO: 915085
gaaggucugucuguccaaa

SEQ ID NO: 1052589 - RNA, 19 nt, Artificial Sequence
  Description of Artificial Sequence: Synthetic oligonucleotide
  Antisense strand to SEQ ID NO: 1052588
uuuggacagacagaccuuc

SEQ ID NO: 1052590 - RNA, 19 nt, Artificial Sequence
  Description of Artificial Sequence: Synthetic oligonucleotide
  Sense strand starting at position 2322 of SEQ ID NO: 915085
aagaguuugcccgaggcuu

SEQ ID NO: 1052591 - RNA, 19 nt, Artificial Sequence
  Description of Artificial Sequence: Synthetic oligonucleotide
  Antisense strand to SEQ ID NO: 1052590
aagccucgggcaaacucuu

SEQ ID NO: 1052592 - RNA, 19 nt, Artificial Sequence
  Description of Artificial Sequence: Synthetic oligonucleotide
  Sense strand starting at position 3189 of SEQ ID NO: 915085
guucccaucuucucaguga

SEQ ID NO: 1052593 - RNA, 19 nt, Artificial Sequence
  Description of Artificial Sequence: Synthetic oligonucleotide
  Antisense strand to SEQ ID NO: 1052592
ucacugagaagaugggaac

SEQ ID NO: 1052594 - RNA, 19 nt, Artificial Sequence
  Description of Artificial Sequence: Synthetic oligonucleotide
  Sense strand starting at position 3192 of SEQ ID NO: 915085
cccaucuucucagugauac

SEQ ID NO: 1052595 - RNA, 19 nt, Artificial Sequence
  Description of Artificial Sequence: Synthetic oligonucleotide
  Antisense strand to SEQ ID NO: 1052594
guaucacugagaagauggg

SEQ ID NO: 1052596 - RNA, 19 nt, Artificial Sequence
  Description of Artificial Sequence: Synthetic oligonucleotide
  Sense strand starting at position 3193 of SEQ ID NO: 915085
ccaucuucucagugauaca

SEQ ID NO: 1052597 - RNA, 19 nt, Artificial Sequence
  Description of Artificial Sequence: Synthetic oligonucleotide
  Antisense strand to SEQ ID NO: 1052596
uguaucacugagaagaugg

SEQ ID NO: 1052598 - RNA, 19 nt, Artificial Sequence
  Description of Artificial Sequence: Synthetic oligonucleotide
  Sense strand starting at position 3196 of SEQ ID NO: 915085
ucuucucagugauacauuu

SEQ ID NO: 1052599 - RNA, 19 nt, Artificial Sequence
  Description of Artificial Sequence: Synthetic oligonucleotide
  Antisense strand to SEQ ID NO: 1052598
aaauguaucacugagaaga

SEQ ID NO: 1052600 - RNA, 19 nt, Artificial Sequence
  Description of Artificial Sequence: Synthetic oligonucleotide
  Sense strand starting at position 3204 of SEQ ID NO: 915085
gugauacauuugccaagcu

SEQ ID NO: 1052601 - RNA, 19 nt, Artificial Sequence
  Description of Artificial Sequence: Synthetic oligonucleotide
  Antisense strand to SEQ ID NO: 1052600
agcuuggcaaauguaucac

SEQ ID NO: 1052602 - RNA, 19 nt, Artificial Sequence
  Description of Artificial Sequence: Synthetic oligonucleotide
  Sense strand starting at position 3247 of SEQ ID NO: 915085
ugggcaggccucuguuaaa

SEQ ID NO: 1052603 - RNA, 19 nt, Artificial Sequence
  Description of Artificial Sequence: Synthetic oligonucleotide
  Antisense strand to SEQ ID NO: 1052602
uuuaacagaggccugccca

SEQ ID NO: 1052604 - RNA, 19 nt, Artificial Sequence
  Description of Artificial Sequence: Synthetic oligonucleotide
  Sense strand starting at position 3258 of SEQ ID NO: 915085
cuguuaaagccuugucacu

SEQ ID NO: 1052605 - RNA, 19 nt, Artificial Sequence
  Description of Artificial Sequence: Synthetic oligonucleotide
  Antisense strand to SEQ ID NO: 1052604
agugacaaggcuuuaacag

SEQ ID NO: 1052606 - RNA, 19 nt, Artificial Sequence
  Description of Artificial Sequence: Synthetic oligonucleotide
  Sense strand starting at position 3260 of SEQ ID NO: 915085
guuaaagccuugucacuuu

SEQ ID NO: 1052607 - RNA, 19 nt, Artificial Sequence
  Description of Artificial Sequence: Synthetic oligonucleotide
  Antisense strand to SEQ ID NO: 1052606
aaagugacaaggcuuuaac

SEQ ID NO: 1052608 - RNA, 19 nt, Artificial Sequence
  Description of Artificial Sequence: Synthetic oligonucleotide
  Sense strand starting at position 3271 of SEQ ID NO: 915085
gucacuuuguauccuauua

SEQ ID NO: 1052609 - RNA, 19 nt, Artificial Sequence
  Description of Artificial Sequence: Synthetic oligonucleotide
  Antisense strand to SEQ ID NO: 1052608
uaauaggauacaaagugac

SEQ ID NO: 1052610 - RNA, 19 nt, Artificial Sequence
  Description of Artificial Sequence: Synthetic oligonucleotide
  Sense strand starting at position 3406 of SEQ ID NO: 915085
cuguuuagugacugagagu

SEQ ID NO: 1052611 - RNA, 19 nt, Artificial Sequence
  Description of Artificial Sequence: Synthetic oligonucleotide
  Antisense strand to SEQ ID NO: 1052610
acucucagucacuaaacag

SEQ ID NO: 1052612 - RNA, 19 nt, Artificial Sequence
  Description of Artificial Sequence: Synthetic oligonucleotide
  Sense strand starting at position 3407 of SEQ ID NO: 915085
uguuuagugacugagaguc

SEQ ID NO: 1052613 - RNA, 19 nt, Artificial Sequence
  Description of Artificial Sequence: Synthetic oligonucleotide
  Antisense strand to SEQ ID NO: 1052612
gacucucagucacuaaaca

SEQ ID NO: 1052614 - RNA, 19 nt, Artificial Sequence
  Description of Artificial Sequence: Synthetic oligonucleotide
  Sense strand starting at position 3644 of SEQ ID NO: 915085
uuugcugaggcacgagaau

SEQ ID NO: 1052615 - RNA, 19 nt, Artificial Sequence
  Description of Artificial Sequence: Synthetic oligonucleotide
  Antisense strand to SEQ ID NO: 1052614
auucucgugccucagcaaa

SEQ ID NO: 1052616 - RNA, 19 nt, Artificial Sequence
  Description of Artificial Sequence: Synthetic oligonucleotide
  Sense strand starting at position 3655 of SEQ ID NO: 915085
acgagaauggcuugaacca

SEQ ID NO: 1052617 - RNA, 19 nt, Artificial Sequence
  Description of Artificial Sequence: Synthetic oligonucleotide
  Antisense strand to SEQ ID NO: 1052616
ugguucaagccauucucgu

SEQ ID NO: 1052618 - RNA, 19 nt, Artificial Sequence
  Description of Artificial Sequence: Synthetic oligonucleotide
  Sense strand starting at position 3714 of SEQ ID NO: 915085
gcuccagagugaucucaaa

SEQ ID NO: 1052619 - RNA, 19 nt, Artificial Sequence
  Description of Artificial Sequence: Synthetic oligonucleotide
  Antisense strand to SEQ ID NO: 1052618
uuugagaucacucuggagc

SEQ ID NO: 1052620 - RNA, 19 nt, Artificial Sequence
  Description of Artificial Sequence: Synthetic oligonucleotide
  Sense strand starting at position 3755 of SEQ ID NO: 915085
ccacuacuccuuugugaga

SEQ ID NO: 1052621 - RNA, 19 nt, Artificial Sequence
  Description of Artificial Sequence: Synthetic oligonucleotide
  Antisense strand to SEQ ID NO: 1052620
ucucacaaaggaguagugg

SEQ ID NO: 1052622 - RNA, 19 nt, Artificial Sequence
  Description of Artificial Sequence: Synthetic oligonucleotide
  Sense strand starting at position 3840 of SEQ ID NO: 915085
cggugauggcaagggauua

SEQ ID NO: 1052623 - RNA, 19 nt, Artificial Sequence
  Description of Artificial Sequence: Synthetic oligonucleotide
  Antisense strand to SEQ ID NO: 1052622
uaaucccuugccaucaccg

SEQ ID NO: 1052624 - RNA, 19 nt, Artificial Sequence
  Description of Artificial Sequence: Synthetic oligonucleotide
  Sense strand starting at position 19 of SEQ ID NO: 915086
gaaugcgaucucgaucaug

SEQ ID NO: 1052625 - RNA, 19 nt, Artificial Sequence
  Description of Artificial Sequence: Synthetic oligonucleotide
  Antisense strand to SEQ ID NO: 1052624
caugaucgagaucgcauuc

SEQ ID NO: 1052626 - RNA, 19 nt, Artificial Sequence
  Description of Artificial Sequence: Synthetic oligonucleotide
  Sense strand starting at position 107 of SEQ ID NO: 915086
ccacaaaugcuaggaaagu

SEQ ID NO: 1052627 - RNA, 19 nt, Artificial Sequence
  Description of Artificial Sequence: Synthetic oligonucleotide
  Antisense strand to SEQ ID NO: 1052626
acuuuccuagcauuugugg

SEQ ID NO: 1052628 - RNA, 19 nt, Artificial Sequence
  Description of Artificial Sequence: Synthetic oligonucleotide
  Sense strand starting at position 116 of SEQ ID NO: 915086
cuaggaaagucuucucaaa

SEQ ID NO: 1052629 - RNA, 19 nt, Artificial Sequence
  Description of Artificial Sequence: Synthetic oligonucleotide
  Antisense strand to SEQ ID NO: 1052628
uuugagaagacuuuccuag

SEQ ID NO: 1052630 - RNA, 19 nt, Artificial Sequence
  Description of Artificial Sequence: Synthetic oligonucleotide
  Sense strand starting at position 183 of SEQ ID NO: 915086
uaagcuaguccuggcauuu

SEQ ID NO: 1052631 - RNA, 19 nt, Artificial Sequence
  Description of Artificial Sequence: Synthetic oligonucleotide
  Antisense strand to SEQ ID NO: 1052630
aaaugccaggacuagcuua

SEQ ID NO: 1052632 - RNA, 19 nt, Artificial Sequence
  Description of Artificial Sequence: Synthetic oligonucleotide
  Sense strand starting at position 444 of SEQ ID NO: 915086
uucuucuuucuuugaggga

SEQ ID NO: 1052633 - RNA, 19 nt, Artificial Sequence
  Description of Artificial Sequence: Synthetic oligonucleotide
  Antisense strand to SEQ ID NO: 1052632
ucccucaaagaaagaagaa

SEQ ID NO: 1052634 - RNA, 19 nt, Artificial Sequence
  Description of Artificial Sequence: Synthetic oligonucleotide
  Sense strand starting at position 448 of SEQ ID NO: 915086
ucuuucuuugagggaaauu

SEQ ID NO: 1052635 - RNA, 19 nt, Artificial Sequence
  Description of Artificial Sequence: Synthetic oligonucleotide
  Antisense strand to SEQ ID NO: 1052634
aauuucccucaaagaaaga

SEQ ID NO: 1052636 - RNA, 19 nt, Artificial Sequence
  Description of Artificial Sequence: Synthetic oligonucleotide
  Sense strand starting at position 482 of SEQ ID NO: 915086
guguucuagaguuagaaac

SEQ ID NO: 1052637 - RNA, 19 nt, Artificial Sequence
  Description of Artificial Sequence: Synthetic oligonucleotide
  Antisense strand to SEQ ID NO: 1052636
guuucuaacucuagaacac

SEQ ID NO: 1052638 - RNA, 19 nt, Artificial Sequence
  Description of Artificial Sequence: Synthetic oligonucleotide
  Sense strand starting at position 621 of SEQ ID NO: 915086
gcucccuauccacaggaaa

SEQ ID NO: 1052639 - RNA, 19 nt, Artificial Sequence
  Description of Artificial Sequence: Synthetic oligonucleotide
  Antisense strand to SEQ ID NO: 1052638
uuuccuguggauagggagc

SEQ ID NO: 1052640 - RNA, 19 nt, Artificial Sequence
  Description of Artificial Sequence: Synthetic oligonucleotide
  Sense strand starting at position 834 of SEQ ID NO: 915086
gcagacgccaguuacaaau

SEQ ID NO: 1052641 - RNA, 19 nt, Artificial Sequence
  Description of Artificial Sequence: Synthetic oligonucleotide
  Antisense strand to SEQ ID NO: 1052640
auuuguaacuggcgucugc

SEQ ID NO: 1052642 - RNA, 19 nt, Artificial Sequence
  Description of Artificial Sequence: Synthetic oligonucleotide
  Sense strand starting at position 928 of SEQ ID NO: 915086
cguuuccauggccagaaau

SEQ ID NO: 1052643 - RNA, 19 nt, Artificial Sequence
  Description of Artificial Sequence: Synthetic oligonucleotide
  Antisense strand to SEQ ID NO: 1052642
auuucuggccauggaaacg

SEQ ID NO: 1052644 - RNA, 19 nt, Artificial Sequence
  Description of Artificial Sequence: Synthetic oligonucleotide
  Sense strand starting at position 930 of SEQ ID NO: 915086
uuuccauggccagaaaugu

SEQ ID NO: 1052645 - RNA, 19 nt, Artificial Sequence
  Description of Artificial Sequence: Synthetic oligonucleotide
  Antisense strand to SEQ ID NO: 1052644
acauuucuggccauggaaa

SEQ ID NO: 1052646 - RNA, 19 nt, Artificial Sequence
  Description of Artificial Sequence: Synthetic oligonucleotide
  Sense strand starting at position 1023 of SEQ ID NO: 915086
cuggaaugcucuccaggaa

SEQ ID NO: 1052647 - RNA, 19 nt, Artificial Sequence
  Description of Artificial Sequence: Synthetic oligonucleotide
  Antisense strand to SEQ ID NO: 1052646
uuccuggagagcauuccag

SEQ ID NO: 1052648 - RNA, 19 nt, Artificial Sequence
  Description of Artificial Sequence: Synthetic oligonucleotide
  Sense strand starting at position 1026 of SEQ ID NO: 915086
gaaugcucuccaggaagau

SEQ ID NO: 1052649 - RNA, 19 nt, Artificial Sequence
  Description of Artificial Sequence: Synthetic oligonucleotide
  Antisense strand to SEQ ID NO: 1052648
aucuuccuggagagcauuc

SEQ ID NO: 1052650 - RNA, 19 nt, Artificial Sequence
  Description of Artificial Sequence: Synthetic oligonucleotide
  Sense strand starting at position 1196 of SEQ ID NO: 915086
cugagaacuuucuccagug

SEQ ID NO: 1052651 - RNA, 19 nt, Artificial Sequence
  Description of Artificial Sequence: Synthetic oligonucleotide
  Antisense strand to SEQ ID NO: 1052650
cacuggagaaaguucucag

SEQ ID NO: 1052652 - RNA, 19 nt, Artificial Sequence
  Description of Artificial Sequence: Synthetic oligonucleotide
  Sense strand starting at position 1289 of SEQ ID NO: 915086
guuguuauuccacauuaag

SEQ ID NO: 1052653 - RNA, 19 nt, Artificial Sequence
  Description of Artificial Sequence: Synthetic oligonucleotide
  Antisense strand to SEQ ID NO: 1052652
cuuaauguggaauaacaac

SEQ ID NO: 1052654 - RNA, 19 nt, Artificial Sequence
  Description of Artificial Sequence: Synthetic oligonucleotide
  Sense strand starting at position 1405 of SEQ ID NO: 915086
agaauauccaguugaugug

SEQ ID NO: 1052655 - RNA, 19 nt, Artificial Sequence
  Description of Artificial Sequence: Synthetic oligonucleotide
  Antisense strand to SEQ ID NO: 1052654
cacaucaacuggauauucu

SEQ ID NO: 1052656 - RNA, 19 nt, Artificial Sequence
  Description of Artificial Sequence: Synthetic oligonucleotide
  Sense strand starting at position 1423 of SEQ ID NO: 915086
guaagucucgaauauuaag

SEQ ID NO: 1052657 - RNA, 19 nt, Artificial Sequence
  Description of Artificial Sequence: Synthetic oligonucleotide
  Antisense strand to SEQ ID NO: 1052656
cuuaauauucgagacuuac

SEQ ID NO: 1052658 - RNA, 19 nt, Artificial Sequence
  Description of Artificial Sequence: Synthetic oligonucleotide
  Sense strand starting at position 1649 of SEQ ID NO: 915086
ccaggaugccagcaggaau

SEQ ID NO: 1052659 - RNA, 19 nt, Artificial Sequence
  Description of Artificial Sequence: Synthetic oligonucleotide
  Antisense strand to SEQ ID NO: 1052658
auuccugcuggcauccugg

SEQ ID NO: 1052660 - RNA, 19 nt, Artificial Sequence
  Description of Artificial Sequence: Synthetic oligonucleotide
  Sense strand starting at position 2203 of SEQ ID NO: 915086
gaguuagugcuagagcaca

SEQ ID NO: 1052661 - RNA, 19 nt, Artificial Sequence
  Description of Artificial Sequence: Synthetic oligonucleotide
  Antisense strand to SEQ ID NO: 1052660
ugugcucuagcacuaacuc

SEQ ID NO: 1052662 - RNA, 19 nt, Artificial Sequence
  Description of Artificial Sequence: Synthetic oligonucleotide
  Sense strand starting at position 2371 of SEQ ID NO: 915086
cgcuuucuucgccuauaag

SEQ ID NO: 1052663 - RNA, 19 nt, Artificial Sequence
  Description of Artificial Sequence: Synthetic oligonucleotide
  Antisense strand to SEQ ID NO: 1052662
cuuauaggcgaagaaagcg

SEQ ID NO: 1052664 - RNA, 19 nt, Artificial Sequence
  Description of Artificial Sequence: Synthetic oligonucleotide
  Sense strand starting at position 2374 of SEQ ID NO: 915086
uuucuucgccuauaagaug

SEQ ID NO: 1052665 - RNA, 19 nt, Artificial Sequence
  Description of Artificial Sequence: Synthetic oligonucleotide
  Antisense strand to SEQ ID NO: 1052664
caucuuauaggcgaagaaa

SEQ ID NO: 1052666 - RNA, 19 nt, Artificial Sequence
  Description of Artificial Sequence: Synthetic oligonucleotide
  Sense strand starting at position 2379 of SEQ ID NO: 915086
ucgccuauaagauggauua

SEQ ID NO: 1052667 - RNA, 19 nt, Artificial Sequence
  Description of Artificial Sequence: Synthetic oligonucleotide
  Antisense strand to SEQ ID NO: 1052666
uaauccaucuuauaggcga

SEQ ID NO: 1052668 - RNA, 19 nt, Artificial Sequence
  Description of Artificial Sequence: Synthetic oligonucleotide
  Sense strand starting at position 2380 of SEQ ID NO: 915086
cgccuauaagauggauuaa

SEQ ID NO: 1052669 - RNA, 19 nt, Artificial Sequence
  Description of Artificial Sequence: Synthetic oligonucleotide
  Antisense strand to SEQ ID NO: 1052668
uuaauccaucuuauaggcg

SEQ ID NO: 1052670 - RNA, 19 nt, Artificial Sequence
  Description of Artificial Sequence: Synthetic oligonucleotide
  Sense strand starting at position 2417 of SEQ ID NO: 915086
auuagaaugugagcucgaa

SEQ ID NO: 1052671 - RNA, 19 nt, Artificial Sequence
  Description of Artificial Sequence: Synthetic oligonucleotide
  Antisense strand to SEQ ID NO: 1052670
uucgagcucacauucuaau

SEQ ID NO: 1052672 - RNA, 19 nt, Artificial Sequence
  Description of Artificial Sequence: Synthetic oligonucleotide
  Sense strand starting at position 2431 of SEQ ID NO: 915086
ucgaacguugacuaauuaa

SEQ ID NO: 1052673 - RNA, 19 nt, Artificial Sequence
  Description of Artificial Sequence: Synthetic oligonucleotide
  Antisense strand to SEQ ID NO: 1052672
uuaauuagucaacguucga

SEQ ID NO: 1052674 - RNA, 19 nt, Artificial Sequence
  Description of Artificial Sequence: Synthetic oligonucleotide
  Sense strand starting at position 2569 of SEQ ID NO: 915086
cccugaguugcugagucaa

SEQ ID NO: 1052675 - RNA, 19 nt, Artificial Sequence
  Description of Artificial Sequence: Synthetic oligonucleotide
  Antisense strand to SEQ ID NO: 1052674
uugacucagcaacucaggg

SEQ ID NO: 1052676 - RNA, 19 nt, Artificial Sequence
  Description of Artificial Sequence: Synthetic oligonucleotide
  Sense strand starting at position 2819 of SEQ ID NO: 915086
cuuccuuuggaauguauga

SEQ ID NO: 1052677 - RNA, 19 nt, Artificial Sequence
  Description of Artificial Sequence: Synthetic oligonucleotide
  Antisense strand to SEQ ID NO: 1052676
ucauacauuccaaaggaag

SEQ ID NO: 1052678 - RNA, 19 nt, Artificial Sequence
  Description of Artificial Sequence: Synthetic oligonucleotide
  Sense strand starting at position 2956 of SEQ ID NO: 915086
ggcuuugauuuggugaagu

SEQ ID NO: 1052679 - RNA, 19 nt, Artificial Sequence
  Description of Artificial Sequence: Synthetic oligonucleotide
  Antisense strand to SEQ ID NO: 1052678
acuucaccaaaucaaagcc

SEQ ID NO: 1052680 - RNA, 19 nt, Artificial Sequence
  Description of Artificial Sequence: Synthetic oligonucleotide
  Sense strand starting at position 3046 of SEQ ID NO: 915086
agagcuucugccucgcuua

SEQ ID NO: 1052681 - RNA, 19 nt, Artificial Sequence
  Description of Artificial Sequence: Synthetic oligonucleotide
  Antisense strand to SEQ ID NO: 1052680
uaagcgaggcagaagcucu

SEQ ID NO: 1052682 - RNA, 19 nt, Artificial Sequence
  Description of Artificial Sequence: Synthetic oligonucleotide
  Sense strand starting at position 3059 of SEQ ID NO: 915086
cgcuuagcucaaggaagaa

SEQ ID NO: 1052683 - RNA, 19 nt, Artificial Sequence
  Description of Artificial Sequence: Synthetic oligonucleotide
  Antisense strand to SEQ ID NO: 1052682
uucuuccuugagcuaagcg

SEQ ID NO: 1052684 - RNA, 19 nt, Artificial Sequence
  Description of Artificial Sequence: Synthetic oligonucleotide
  Sense strand starting at position 3082 of SEQ ID NO: 915086
ggccaaauaguuggaggau

SEQ ID NO: 1052685 - RNA, 19 nt, Artificial Sequence
  Description of Artificial Sequence: Synthetic oligonucleotide
  Antisense strand to SEQ ID NO: 1052684
auccuccaacuauuuggcc

SEQ ID NO: 1052686 - RNA, 19 nt, Artificial Sequence
  Description of Artificial Sequence: Synthetic oligonucleotide
  Sense strand starting at position 3115 of SEQ ID NO: 915086
uccaaacacugcuugagau

SEQ ID NO: 1052687 - RNA, 19 nt, Artificial Sequence
  Description of Artificial Sequence: Synthetic oligonucleotide
  Antisense strand to SEQ ID NO: 1052686
aucucaagcaguguuugga

SEQ ID NO: 1052688 - RNA, 19 nt, Artificial Sequence
  Description of Artificial Sequence: Synthetic oligonucleotide
  Sense strand starting at position 3116 of SEQ ID NO: 915086
ccaaacacugcuugagaua

SEQ ID NO: 1052689 - RNA, 19 nt, Artificial Sequence
  Description of Artificial Sequence: Synthetic oligonucleotide
  Antisense strand to SEQ ID NO: 1052688
uaucucaagcaguguuugg

SEQ ID NO: 1052690 - RNA, 19 nt, Artificial Sequence
  Description of Artificial Sequence: Synthetic oligonucleotide
  Sense strand starting at position 3128 of SEQ ID NO: 915086
ugagauaguccuggaaguu

SEQ ID NO: 1052691 - RNA, 19 nt, Artificial Sequence
  Description of Artificial Sequence: Synthetic oligonucleotide
  Antisense strand to SEQ ID NO: 1052690
aacuuccaggacuaucuca

SEQ ID NO: 1052692 - RNA, 19 nt, Artificial Sequence
  Description of Artificial Sequence: Synthetic oligonucleotide
  Sense strand starting at position 3387 of SEQ ID NO: 915086
aaaugaugacauggcuagu

SEQ ID NO: 1052693 - RNA, 19 nt, Artificial Sequence
  Description of Artificial Sequence: Synthetic oligonucleotide
  Antisense strand to SEQ ID NO: 1052692
acuagccaugucaucauuu

SEQ ID NO: 1052694 - RNA, 19 nt, Artificial Sequence
  Description of Artificial Sequence: Synthetic oligonucleotide
  Sense strand starting at position 3417 of SEQ ID NO: 915086
ucuugcuguaauugggaga

SEQ ID NO: 1052695 - RNA, 19 nt, Artificial Sequence
  Description of Artificial Sequence: Synthetic oligonucleotide
  Antisense strand to SEQ ID NO: 1052694
ucucccaauuacagcaaga

SEQ ID NO: 1052696 - RNA, 19 nt, Artificial Sequence
  Description of Artificial Sequence: Synthetic oligonucleotide
  Sense strand starting at position 3418 of SEQ ID NO: 915086
cuugcuguaauugggagaa

SEQ ID NO: 1052697 - RNA, 19 nt, Artificial Sequence
  Description of Artificial Sequence: Synthetic oligonucleotide
  Antisense strand to SEQ ID NO: 1052696
uucucccaauuacagcaag

SEQ ID NO: 1052698 - RNA, 19 nt, Artificial Sequence
  Description of Artificial Sequence: Synthetic oligonucleotide
  Sense strand starting at position 3445 of SEQ ID NO: 915086
gcagcacauuuggcagauu

SEQ ID NO: 1052699 - RNA, 19 nt, Artificial Sequence
  Description of Artificial Sequence: Synthetic oligonucleotide
  Antisense strand to SEQ ID NO: 1052698
aaucugccaaaugugcugc

SEQ ID NO: 1052700 - RNA, 19 nt, Artificial Sequence
  Description of Artificial Sequence: Synthetic oligonucleotide
  Sense strand starting at position 3520 of SEQ ID NO: 915086
ccugccucacauggugaaa

SEQ ID NO: 1052701 - RNA, 19 nt, Artificial Sequence
  Description of Artificial Sequence: Synthetic oligonucleotide
  Antisense strand to SEQ ID NO: 1052700
uuucaccaugugaggcagg

SEQ ID NO: 1052702 - RNA, 19 nt, Artificial Sequence
  Description of Artificial Sequence: Synthetic oligonucleotide
  Sense strand starting at position 3950 of SEQ ID NO: 915086
aacagagugccucagagua

SEQ ID NO: 1052703 - RNA, 19 nt, Artificial Sequence
  Description of Artificial Sequence: Synthetic oligonucleotide
  Antisense strand to SEQ ID NO: 1052702
uacucugaggcacucuguu

SEQ ID NO: 1052704 - RNA, 19 nt, Artificial Sequence
  Description of Artificial Sequence: Synthetic oligonucleotide
  Sense strand starting at position 157 of SEQ ID NO: 915087
cucucugacgcuuaacaga

SEQ ID NO: 1052705 - RNA, 19 nt, Artificial Sequence
  Description of Artificial Sequence: Synthetic oligonucleotide
  Antisense strand to SEQ ID NO: 1052704
ucuguuaagcgucagagag

SEQ ID NO: 1052706 - RNA, 19 nt, Artificial Sequence
  Description of Artificial Sequence: Synthetic oligonucleotide
  Sense strand starting at position 165 of SEQ ID NO: 915087
cgcuuaacagaucaaauau

SEQ ID NO: 1052707 - RNA, 19 nt, Artificial Sequence
  Description of Artificial Sequence: Synthetic oligonucleotide
  Antisense strand to SEQ ID NO: 1052706
auauuugaucuguuaagcg

SEQ ID NO: 1052708 - RNA, 19 nt, Artificial Sequence
  Description of Artificial Sequence: Synthetic oligonucleotide
  Sense strand starting at position 379 of SEQ ID NO: 915087
aacaaauaucuguggcuga

SEQ ID NO: 1052709 - RNA, 19 nt, Artificial Sequence
  Description of Artificial Sequence: Synthetic oligonucleotide
  Antisense strand to SEQ ID NO: 1052708
ucagccacagauauuuguu

SEQ ID NO: 1052710 - RNA, 19 nt, Artificial Sequence
  Description of Artificial Sequence: Synthetic oligonucleotide
  Sense strand starting at position 462 of SEQ ID NO: 915087
augauuagaaguggccaua

SEQ ID NO: 1052711 - RNA, 19 nt, Artificial Sequence
  Description of Artificial Sequence: Synthetic oligonucleotide
  Antisense strand to SEQ ID NO: 1052710
uauggccacuucuaaucau

SEQ ID NO: 1052712 - RNA, 19 nt, Artificial Sequence
  Description of Artificial Sequence: Synthetic oligonucleotide
  Sense strand starting at position 607 of SEQ ID NO: 915087
uuaagaaaguuugugaagu

SEQ ID NO: 1052713 - RNA, 19 nt, Artificial Sequence
  Description of Artificial Sequence: Synthetic oligonucleotide
  Antisense strand to SEQ ID NO: 1052712
acuucacaaacuuucuuaa

SEQ ID NO: 1052714 - RNA, 19 nt, Artificial Sequence
  Description of Artificial Sequence: Synthetic oligonucleotide
  Sense strand starting at position 635 of SEQ ID NO: 915087
acuaauggaaguugaguua

SEQ ID NO: 1052715 - RNA, 19 nt, Artificial Sequence
  Description of Artificial Sequence: Synthetic oligonucleotide
  Antisense strand to SEQ ID NO: 1052714
uaacucaacuuccauuagu

SEQ ID NO: 1052716 - RNA, 19 nt, Artificial Sequence
  Description of Artificial Sequence: Synthetic oligonucleotide
  Sense strand starting at position 642 of SEQ ID NO: 915087
gaaguugaguuauugacaa

SEQ ID NO: 1052717 - RNA, 19 nt, Artificial Sequence
  Description of Artificial Sequence: Synthetic oligonucleotide
  Antisense strand to SEQ ID NO: 1052716
uugucaauaacucaacuuc

SEQ ID NO: 1052718 - RNA, 19 nt, Artificial Sequence
  Description of Artificial Sequence: Synthetic oligonucleotide
  Sense strand starting at position 778 of SEQ ID NO: 915087
gcugaacuaggucacaaua

SEQ ID NO: 1052719 - RNA, 19 nt, Artificial Sequence
  Description of Artificial Sequence: Synthetic oligonucleotide
  Antisense strand to SEQ ID NO: 1052718
uauugugaccuaguucagc

SEQ ID NO: 1052720 - RNA, 19 nt, Artificial Sequence
  Description of Artificial Sequence: Synthetic oligonucleotide
  Sense strand starting at position 1059 of SEQ ID NO: 915087
gguuaagaaacauguagug

SEQ ID NO: 1052721 - RNA, 19 nt, Artificial Sequence
  Description of Artificial Sequence: Synthetic oligonucleotide
  Antisense strand to SEQ ID NO: 1052720
cacuacauguuucuuaacc

SEQ ID NO: 1052722 - RNA, 19 nt, Artificial Sequence
  Description of Artificial Sequence: Synthetic oligonucleotide
  Sense strand starting at position 1082 of SEQ ID NO: 915087
uguauugugggauacuauc

SEQ ID NO: 1052723 - RNA, 19 nt, Artificial Sequence
  Description of Artificial Sequence: Synthetic oligonucleotide
  Antisense strand to SEQ ID NO: 1052722
gauaguaucccacaauaca

SEQ ID NO: 1052724 - RNA, 19 nt, Artificial Sequence
  Description of Artificial Sequence: Synthetic oligonucleotide
  Sense strand starting at position 1088 of SEQ ID NO: 915087
gugggauacuauccaacag

SEQ ID NO: 1052725 - RNA, 19 nt, Artificial Sequence
  Description of Artificial Sequence: Synthetic oligonucleotide
  Antisense strand to SEQ ID NO: 1052724
cuguuggauaguaucccac

SEQ ID NO: 1052726 - RNA, 19 nt, Artificial Sequence
  Description of Artificial Sequence: Synthetic oligonucleotide
  Sense strand starting at position 1396 of SEQ ID NO: 915087
acaggaaacuuuccagcau

SEQ ID NO: 1052727 - RNA, 19 nt, Artificial Sequence
  Description of Artificial Sequence: Synthetic oligonucleotide
  Antisense strand to SEQ ID NO: 1052726
augcuggaaaguuuccugu

SEQ ID NO: 1052728 - RNA, 19 nt, Artificial Sequence
  Description of Artificial Sequence: Synthetic oligonucleotide
  Sense strand starting at position 1445 of SEQ ID NO: 915087
uuugaauuccugugacaua

SEQ ID NO: 1052729 - RNA, 19 nt, Artificial Sequence
  Description of Artificial Sequence: Synthetic oligonucleotide
  Antisense strand to SEQ ID NO: 1052728
uaugucacaggaauucaaa

SEQ ID NO: 1052730 - RNA, 19 nt, Artificial Sequence
  Description of Artificial Sequence: Synthetic oligonucleotide
  Sense strand starting at position 1516 of SEQ ID NO: 915087
aucaguuguaaacagguau

SEQ ID NO: 1052731 - RNA, 19 nt, Artificial Sequence
  Description of Artificial Sequence: Synthetic oligonucleotide
  Antisense strand to SEQ ID NO: 1052730
auaccuguuuacaacugau

SEQ ID NO: 1052732 - RNA, 19 nt, Artificial Sequence
  Description of Artificial Sequence: Synthetic oligonucleotide
  Sense strand starting at position 1682 of SEQ ID NO: 915087
uauccuugucaguaagaga

SEQ ID NO: 1052733 - RNA, 19 nt, Artificial Sequence
  Description of Artificial Sequence: Synthetic oligonucleotide
  Antisense strand to SEQ ID NO: 1052732
ucucuuacugacaaggaua

SEQ ID NO: 1052734 - RNA, 19 nt, Artificial Sequence
  Description of Artificial Sequence: Synthetic oligonucleotide
  Sense strand starting at position 1765 of SEQ ID NO: 915087
aucuuucucugacuugaga

SEQ ID NO: 1052735 - RNA, 19 nt, Artificial Sequence
  Description of Artificial Sequence: Synthetic oligonucleotide
  Antisense strand to SEQ ID NO: 1052734
ucucaagucagagaaagau

SEQ ID NO: 1052736 - RNA, 19 nt, Artificial Sequence
  Description of Artificial Sequence: Synthetic oligonucleotide
  Sense strand starting at position 1962 of SEQ ID NO: 915087
gcucuuguggcuguguaaa

SEQ ID NO: 1052737 - RNA, 19 nt, Artificial Sequence
  Description of Artificial Sequence: Synthetic oligonucleotide
  Antisense strand to SEQ ID NO: 1052736
uuuacacagccacaagagc

SEQ ID NO: 1052738 - RNA, 19 nt, Artificial Sequence
  Description of Artificial Sequence: Synthetic oligonucleotide
  Sense strand starting at position 2070 of SEQ ID NO: 915087
ggcaauaaacaguaguaca

SEQ ID NO: 1052739 - RNA, 19 nt, Artificial Sequence
  Description of Artificial Sequence: Synthetic oligonucleotide
  Antisense strand to SEQ ID NO: 1052738
uguacuacuguuuauugcc

SEQ ID NO: 1052740 - RNA, 19 nt, Artificial Sequence
  Description of Artificial Sequence: Synthetic oligonucleotide
  Sense strand starting at position 2174 of SEQ ID NO: 915087
acuggugacccuugggaau

SEQ ID NO: 1052741 - RNA, 19 nt, Artificial Sequence
  Description of Artificial Sequence: Synthetic oligonucleotide
  Antisense strand to SEQ ID NO: 1052740
auucccaagggucaccagu

SEQ ID NO: 1052742 - RNA, 19 nt, Artificial Sequence
  Description of Artificial Sequence: Synthetic oligonucleotide
  Sense strand starting at position 2264 of SEQ ID NO: 915087
uggauaggcuuuccucaga

SEQ ID NO: 1052743 - RNA, 19 nt, Artificial Sequence
  Description of Artificial Sequence: Synthetic oligonucleotide
  Antisense strand to SEQ ID NO: 1052742
ucugaggaaagccuaucca

SEQ ID NO: 1052744 - RNA, 19 nt, Artificial Sequence
  Description of Artificial Sequence: Synthetic oligonucleotide
  Sense strand starting at position 2317 of SEQ ID NO: 915087
aacaaauugucaguggaca

SEQ ID NO: 1052745 - RNA, 19 nt, Artificial Sequence
  Description of Artificial Sequence: Synthetic oligonucleotide
  Antisense strand to SEQ ID NO: 1052744
uguccacugacaauuuguu

SEQ ID NO: 1052746 - RNA, 19 nt, Artificial Sequence
  Description of Artificial Sequence: Synthetic oligonucleotide
  Sense strand starting at position 2318 of SEQ ID NO: 915087
acaaauugucaguggacac

SEQ ID NO: 1052747 - RNA, 19 nt, Artificial Sequence
  Description of Artificial Sequence: Synthetic oligonucleotide
  Antisense strand to SEQ ID NO: 1052746
guguccacugacaauuugu

SEQ ID NO: 1052748 - RNA, 19 nt, Artificial Sequence
  Description of Artificial Sequence: Synthetic oligonucleotide
  Sense strand starting at position 2341 of SEQ ID NO: 915087
cagagaacuggugggugau

SEQ ID NO: 1052749 - RNA, 19 nt, Artificial Sequence
  Description of Artificial Sequence: Synthetic oligonucleotide
  Antisense strand to SEQ ID NO: 1052748
aucacccaccaguucucug

SEQ ID NO: 1052750 - RNA, 19 nt, Artificial Sequence
  Description of Artificial Sequence: Synthetic oligonucleotide
  Sense strand starting at position 2342 of SEQ ID NO: 915087
agagaacuggugggugauu

SEQ ID NO: 1052751 - RNA, 19 nt, Artificial Sequence
  Description of Artificial Sequence: Synthetic oligonucleotide
  Antisense strand to SEQ ID NO: 1052750
aaucacccaccaguucucu

SEQ ID NO: 1052752 - RNA, 19 nt, Artificial Sequence
  Description of Artificial Sequence: Synthetic oligonucleotide
  Sense strand starting at position 2344 of SEQ ID NO: 915087
agaacuggugggugauuga

SEQ ID NO: 1052753 - RNA, 19 nt, Artificial Sequence
  Description of Artificial Sequence: Synthetic oligonucleotide
  Antisense strand to SEQ ID NO: 1052752
ucaaucacccaccaguucu

SEQ ID NO: 1052754 - RNA, 19 nt, Artificial Sequence
  Description of Artificial Sequence: Synthetic oligonucleotide
  Sense strand starting at position 2347 of SEQ ID NO: 915087
acuggugggugauugagaa

SEQ ID NO: 1052755 - RNA, 19 nt, Artificial Sequence
  Description of Artificial Sequence: Synthetic oligonucleotide
  Antisense strand to SEQ ID NO: 1052754
uucucaaucacccaccagu

SEQ ID NO: 1052756 - RNA, 19 nt, Artificial Sequence
  Description of Artificial Sequence: Synthetic oligonucleotide
  Sense strand starting at position 2721 of SEQ ID NO: 915087
uuugcucugaguuagggaa

SEQ ID NO: 1052757 - RNA, 19 nt, Artificial Sequence
  Description of Artificial Sequence: Synthetic oligonucleotide
  Antisense strand to SEQ ID NO: 1052756
uucccuaacucagagcaaa

SEQ ID NO: 1052758 - RNA, 19 nt, Artificial Sequence
  Description of Artificial Sequence: Synthetic oligonucleotide
  Sense strand starting at position 2845 of SEQ ID NO: 915087
agggaauauauggguguau

SEQ ID NO: 1052759 - RNA, 19 nt, Artificial Sequence
  Description of Artificial Sequence: Synthetic oligonucleotide
  Antisense strand to SEQ ID NO: 1052758
auacacccauauauucccu

SEQ ID NO: 1052760 - RNA, 19 nt, Artificial Sequence
  Description of Artificial Sequence: Synthetic oligonucleotide
  Sense strand starting at position 2846 of SEQ ID NO: 915087
gggaauauauggguguaua

SEQ ID NO: 1052761 - RNA, 19 nt, Artificial Sequence
  Description of Artificial Sequence: Synthetic oligonucleotide
  Antisense strand to SEQ ID NO: 1052760
uauacacccauauauuccc

SEQ ID NO: 1052762 - RNA, 19 nt, Artificial Sequence
  Description of Artificial Sequence: Synthetic oligonucleotide
  Sense strand starting at position 2847 of SEQ ID NO: 915087
ggaauauauggguguauau

SEQ ID NO: 1052763 - RNA, 19 nt, Artificial Sequence
  Description of Artificial Sequence: Synthetic oligonucleotide
  Antisense strand to SEQ ID NO: 1052762
auauacacccauauauucc

SEQ ID NO: 1052764 - RNA, 19 nt, Artificial Sequence
  Description of Artificial Sequence: Synthetic oligonucleotide
  Sense strand starting at position 2864 of SEQ ID NO: 915087
augaauaauuaggccuauu

SEQ ID NO: 1052765 - RNA, 19 nt, Artificial Sequence
  Description of Artificial Sequence: Synthetic oligonucleotide
  Antisense strand to SEQ ID NO: 1052764
aauaggccuaauuauucau

SEQ ID NO: 1052766 - RNA, 19 nt, Artificial Sequence
  Description of Artificial Sequence: Synthetic oligonucleotide
  Sense strand starting at position 3007 of SEQ ID NO: 915087
cucuuagcgauacggauuu

SEQ ID NO: 1052767 - RNA, 19 nt, Artificial Sequence
  Description of Artificial Sequence: Synthetic oligonucleotide
  Antisense strand to SEQ ID NO: 1052766
aaauccguaucgcuaagag

SEQ ID NO: 1052768 - RNA, 19 nt, Artificial Sequence
  Description of Artificial Sequence: Synthetic oligonucleotide
  Sense strand starting at position 3054 of SEQ ID NO: 915087
agcuuauuucuuuagugcu

SEQ ID NO: 1052769 - RNA, 19 nt, Artificial Sequence
  Description of Artificial Sequence: Synthetic oligonucleotide
  Antisense strand to SEQ ID NO: 1052768
agcacuaaagaaauaagcu

SEQ ID NO: 1052770 - RNA, 19 nt, Artificial Sequence
  Description of Artificial Sequence: Synthetic oligonucleotide
  Sense strand starting at position 3056 of SEQ ID NO: 915087
cuuauuucuuuagugcuga

SEQ ID NO: 1052771 - RNA, 19 nt, Artificial Sequence
  Description of Artificial Sequence: Synthetic oligonucleotide
  Antisense strand to SEQ ID NO: 1052770
ucagcacuaaagaaauaag

SEQ ID NO: 1052772 - RNA, 19 nt, Artificial Sequence
  Description of Artificial Sequence: Synthetic oligonucleotide
  Sense strand starting at position 3061 of SEQ ID NO: 915087
uucuuuagugcugaauaau

SEQ ID NO: 1052773 - RNA, 19 nt, Artificial Sequence
  Description of Artificial Sequence: Synthetic oligonucleotide
  Antisense strand to SEQ ID NO: 1052772
auuauucagcacuaaagaa

SEQ ID NO: 1052774 - RNA, 19 nt, Artificial Sequence
  Description of Artificial Sequence: Synthetic oligonucleotide
  Sense strand starting at position 3144 of SEQ ID NO: 915087
auauuugucaugugacugu

SEQ ID NO: 1052775 - RNA, 19 nt, Artificial Sequence
  Description of Artificial Sequence: Synthetic oligonucleotide
  Antisense strand to SEQ ID NO: 1052774
acagucacaugacaaauau

SEQ ID NO: 1052776 - RNA, 19 nt, Artificial Sequence
  Description of Artificial Sequence: Synthetic oligonucleotide
  Sense strand starting at position 3277 of SEQ ID NO: 915087
gugcuaaguacucauagga

SEQ ID NO: 1052777 - RNA, 19 nt, Artificial Sequence
  Description of Artificial Sequence: Synthetic oligonucleotide
  Antisense strand to SEQ ID NO: 1052776
uccuaugaguacuuagcac

SEQ ID NO: 1052778 - RNA, 19 nt, Artificial Sequence
  Description of Artificial Sequence: Synthetic oligonucleotide
  Sense strand starting at position 3643 of SEQ ID NO: 915087
guauuagacugaguacaua

SEQ ID NO: 1052779 - RNA, 19 nt, Artificial Sequence
  Description of Artificial Sequence: Synthetic oligonucleotide
  Antisense strand to SEQ ID NO: 1052778
uauguacucagucuaauac

SEQ ID NO: 1052780 - RNA, 19 nt, Artificial Sequence
  Description of Artificial Sequence: Synthetic oligonucleotide
  Sense strand starting at position 3970 of SEQ ID NO: 915087
uguauucugcaagaauucu

SEQ ID NO: 1052781 - RNA, 19 nt, Artificial Sequence
  Description of Artificial Sequence: Synthetic oligonucleotide
  Antisense strand to SEQ ID NO: 1052780
agaauucuugcagaauaca

SEQ ID NO: 1052782 - RNA, 19 nt, Artificial Sequence
  Description of Artificial Sequence: Synthetic oligonucleotide
  Sense strand starting at position 3978 of SEQ ID NO: 915087
gcaagaauucuugaguuaa

SEQ ID NO: 1052783 - RNA, 19 nt, Artificial Sequence
  Description of Artificial Sequence: Synthetic oligonucleotide
  Antisense strand to SEQ ID NO: 1052782
uuaacucaagaauucuugc

SEQ ID NO: 1052784 - RNA, 19 nt, Artificial Sequence
  Description of Artificial Sequence: Synthetic oligonucleotide
  Sense strand starting at position 84 of SEQ ID NO: 915088
gucuguguuagacaaaggu

SEQ ID NO: 1052785 - RNA, 19 nt, Artificial Sequence
  Description of Artificial Sequence: Synthetic oligonucleotide
  Antisense strand to SEQ ID NO: 1052784
accuuugucuaacacagac

SEQ ID NO: 1052786 - RNA, 19 nt, Artificial Sequence
  Description of Artificial Sequence: Synthetic oligonucleotide
  Sense strand starting at position 88 of SEQ ID NO: 915088
guguuagacaaagguuaga

SEQ ID NO: 1052787 - RNA, 19 nt, Artificial Sequence
  Description of Artificial Sequence: Synthetic oligonucleotide
  Antisense strand to SEQ ID NO: 1052786
ucuaaccuuugucuaacac

SEQ ID NO: 1052788 - RNA, 19 nt, Artificial Sequence
  Description of Artificial Sequence: Synthetic oligonucleotide
  Sense strand starting at position 121 of SEQ ID NO: 915088
gguaguuggguucaaaugu

SEQ ID NO: 1052789 - RNA, 19 nt, Artificial Sequence
  Description of Artificial Sequence: Synthetic oligonucleotide
  Antisense strand to SEQ ID NO: 1052788
acauuugaacccaacuacc

SEQ ID NO: 1052790 - RNA, 19 nt, Artificial Sequence
  Description of Artificial Sequence: Synthetic oligonucleotide
  Sense strand starting at position 182 of SEQ ID NO: 915088
acugucaguggugaaagua

SEQ ID NO: 1052791 - RNA, 19 nt, Artificial Sequence
  Description of Artificial Sequence: Synthetic oligonucleotide
  Antisense strand to SEQ ID NO: 1052790
uacuuucaccacugacagu

SEQ ID NO: 1052792 - RNA, 19 nt, Artificial Sequence
  Description of Artificial Sequence: Synthetic oligonucleotide
  Sense strand starting at position 237 of SEQ ID NO: 915088
cugaaagauuauguuugua

SEQ ID NO: 1052793 - RNA, 19 nt, Artificial Sequence
  Description of Artificial Sequence: Synthetic oligonucleotide
  Antisense strand to SEQ ID NO: 1052792
uacaaacauaaucuuucag

SEQ ID NO: 1052794 - RNA, 19 nt, Artificial Sequence
  Description of Artificial Sequence: Synthetic oligonucleotide
  Sense strand starting at position 239 of SEQ ID NO: 915088
gaaagauuauguuuguacu

SEQ ID NO: 1052795 - RNA, 19 nt, Artificial Sequence
  Description of Artificial Sequence: Synthetic oligonucleotide
  Antisense strand to SEQ ID NO: 1052794
aguacaaacauaaucuuuc

SEQ ID NO: 1052796 - RNA, 19 nt, Artificial Sequence
  Description of Artificial Sequence: Synthetic oligonucleotide
  Sense strand starting at position 252 of SEQ ID NO: 915088
uguacuaaaugguugggaa

SEQ ID NO: 1052797 - RNA, 19 nt, Artificial Sequence
  Description of Artificial Sequence: Synthetic oligonucleotide
  Antisense strand to SEQ ID NO: 1052796
uucccaaccauuuaguaca

SEQ ID NO: 1052798 - RNA, 19 nt, Artificial Sequence
  Description of Artificial Sequence: Synthetic oligonucleotide
  Sense strand starting at position 253 of SEQ ID NO: 915088
guacuaaaugguugggaag

SEQ ID NO: 1052799 - RNA, 19 nt, Artificial Sequence
  Description of Artificial Sequence: Synthetic oligonucleotide
  Antisense strand to SEQ ID NO: 1052798
cuucccaaccauuuaguac

SEQ ID NO: 1052800 - RNA, 19 nt, Artificial Sequence
  Description of Artificial Sequence: Synthetic oligonucleotide
  Sense strand starting at position 283 of SEQ ID NO: 915088
gaagcaaggugaguuaaga

SEQ ID NO: 1052801 - RNA, 19 nt, Artificial Sequence
  Description of Artificial Sequence: Synthetic oligonucleotide
  Antisense strand to SEQ ID NO: 1052800
ucuuaacucaccuugcuuc

SEQ ID NO: 1052802 - RNA, 19 nt, Artificial Sequence
  Description of Artificial Sequence: Synthetic oligonucleotide
  Sense strand starting at position 979 of SEQ ID NO: 915088
aaguguuucccugaggcag

SEQ ID NO: 1052803 - RNA, 19 nt, Artificial Sequence
  Description of Artificial Sequence: Synthetic oligonucleotide
  Antisense strand to SEQ ID NO: 1052802
cugccucagggaaacacuu

SEQ ID NO: 1052804 - RNA, 19 nt, Artificial Sequence
  Description of Artificial Sequence: Synthetic oligonucleotide
  Sense strand starting at position 1014 of SEQ ID NO: 915088
aaggacuccugguuucuga

SEQ ID NO: 1052805 - RNA, 19 nt, Artificial Sequence
  Description of Artificial Sequence: Synthetic oligonucleotide
  Antisense strand to SEQ ID NO: 1052804
ucagaaaccaggaguccuu

SEQ ID NO: 1052806 - RNA, 19 nt, Artificial Sequence
  Description of Artificial Sequence: Synthetic oligonucleotide
  Sense strand starting at position 1050 of SEQ ID NO: 915088
uggguuucgaaucauauca

SEQ ID NO: 1052807 - RNA, 19 nt, Artificial Sequence
  Description of Artificial Sequence: Synthetic oligonucleotide
  Antisense strand to SEQ ID NO: 1052806
ugauaugauucgaaaccca

SEQ ID NO: 1052808 - RNA, 19 nt, Artificial Sequence
  Description of Artificial Sequence: Synthetic oligonucleotide
  Sense strand starting at position 1093 of SEQ ID NO: 915088
gaggucucagcauggacaa

SEQ ID NO: 1052809 - RNA, 19 nt, Artificial Sequence
  Description of Artificial Sequence: Synthetic oligonucleotide
  Antisense strand to SEQ ID NO: 1052808
uuguccaugcugagaccuc

SEQ ID NO: 1052810 - RNA, 19 nt, Artificial Sequence
  Description of Artificial Sequence: Synthetic oligonucleotide
  Sense strand starting at position 1180 of SEQ ID NO: 915088
agugaauccuggucucuaa

SEQ ID NO: 1052811 - RNA, 19 nt, Artificial Sequence
  Description of Artificial Sequence: Synthetic oligonucleotide
  Antisense strand to SEQ ID NO: 1052810
uuagagaccaggauucacu

SEQ ID NO: 1052812 - RNA, 19 nt, Artificial Sequence
  Description of Artificial Sequence: Synthetic oligonucleotide
  Sense strand starting at position 1359 of SEQ ID NO: 915088
guugauaaacacugccaaa

SEQ ID NO: 1052813 - RNA, 19 nt, Artificial Sequence
  Description of Artificial Sequence: Synthetic oligonucleotide
  Antisense strand to SEQ ID NO: 1052812
uuuggcaguguuuaucaac

SEQ ID NO: 1052814 - RNA, 19 nt, Artificial Sequence
  Description of Artificial Sequence: Synthetic oligonucleotide
  Sense strand starting at position 1467 of SEQ ID NO: 915088
guggcaaagagcuaaauua

SEQ ID NO: 1052815 - RNA, 19 nt, Artificial Sequence
  Description of Artificial Sequence: Synthetic oligonucleotide
  Antisense strand to SEQ ID NO: 1052814
uaauuuagcucuuugccac

SEQ ID NO: 1052816 - RNA, 19 nt, Artificial Sequence
  Description of Artificial Sequence: Synthetic oligonucleotide
  Sense strand starting at position 1772 of SEQ ID NO: 915088
ccucuaaaggguugcauca

SEQ ID NO: 1052817 - RNA, 19 nt, Artificial Sequence
  Description of Artificial Sequence: Synthetic oligonucleotide
  Antisense strand to SEQ ID NO: 1052816
ugaugcaacccuuuagagg

SEQ ID NO: 1052818 - RNA, 19 nt, Artificial Sequence
  Description of Artificial Sequence: Synthetic oligonucleotide
  Sense strand starting at position 1851 of SEQ ID NO: 915088
ggcaguaagaguuggaaag

SEQ ID NO: 1052819 - RNA, 19 nt, Artificial Sequence
  Description of Artificial Sequence: Synthetic oligonucleotide
  Antisense strand to SEQ ID NO: 1052818
cuuuccaacucuuacugcc

SEQ ID NO: 1052820 - RNA, 19 nt, Artificial Sequence
  Description of Artificial Sequence: Synthetic oligonucleotide
  Sense strand starting at position 1852 of SEQ ID NO: 915088
gcaguaagaguuggaaagu

SEQ ID NO: 1052821 - RNA, 19 nt, Artificial Sequence
  Description of Artificial Sequence: Synthetic oligonucleotide
  Antisense strand to SEQ ID NO: 1052820
acuuuccaacucuuacugc

SEQ ID NO: 1052822 - RNA, 19 nt, Artificial Sequence
  Description of Artificial Sequence: Synthetic oligonucleotide
  Sense strand starting at position 1873 of SEQ ID NO: 915088
cacaccuauggaugaguau

SEQ ID NO: 1052823 - RNA, 19 nt, Artificial Sequence
  Description of Artificial Sequence: Synthetic oligonucleotide
  Antisense strand to SEQ ID NO: 1052822
auacucauccauaggugug

SEQ ID NO: 1052824 - RNA, 19 nt, Artificial Sequence
  Description of Artificial Sequence: Synthetic oligonucleotide
  Sense strand starting at position 2255 of SEQ ID NO: 915088
auuagucaccuccacagua

SEQ ID NO: 1052825 - RNA, 19 nt, Artificial Sequence
  Description of Artificial Sequence: Synthetic oligonucleotide
  Antisense strand to SEQ ID NO: 1052824
uacuguggaggugacuaau

SEQ ID NO: 1052826 - RNA, 19 nt, Artificial Sequence
  Description of Artificial Sequence: Synthetic oligonucleotide
  Sense strand starting at position 2432 of SEQ ID NO: 915088
gucccacagcgaugauuua

SEQ ID NO: 1052827 - RNA, 19 nt, Artificial Sequence
  Description of Artificial Sequence: Synthetic oligonucleotide
  Antisense strand to SEQ ID NO: 1052826
uaaaucaucgcugugggac

SEQ ID NO: 1052828 - RNA, 19 nt, Artificial Sequence
  Description of Artificial Sequence: Synthetic oligonucleotide
  Sense strand starting at position 2498 of SEQ ID NO: 915088
cugcaacuugaauauguaa

SEQ ID NO: 1052829 - RNA, 19 nt, Artificial Sequence
  Description of Artificial Sequence: Synthetic oligonucleotide
  Antisense strand to SEQ ID NO: 1052828
uuacauauucaaguugcag

SEQ ID NO: 1052830 - RNA, 19 nt, Artificial Sequence
  Description of Artificial Sequence: Synthetic oligonucleotide
  Sense strand starting at position 2660 of SEQ ID NO: 915088
gcaugagagugucuagaua

SEQ ID NO: 1052831 - RNA, 19 nt, Artificial Sequence
  Description of Artificial Sequence: Synthetic oligonucleotide
  Antisense strand to SEQ ID NO: 1052830
uaucuagacacucucaugc

SEQ ID NO: 1052832 - RNA, 19 nt, Artificial Sequence
  Description of Artificial Sequence: Synthetic oligonucleotide
  Sense strand starting at position 2701 of SEQ ID NO: 915088
gauagaugauagcuaucua

SEQ ID NO: 1052833 - RNA, 19 nt, Artificial Sequence
  Description of Artificial Sequence: Synthetic oligonucleotide
  Antisense strand to SEQ ID NO: 1052832
uagauagcuaucaucuauc

SEQ ID NO: 1052834 - RNA, 19 nt, Artificial Sequence
  Description of Artificial Sequence: Synthetic oligonucleotide
  Sense strand starting at position 2705 of SEQ ID NO: 915088
gaugauagcuaucuagaua

SEQ ID NO: 1052835 - RNA, 19 nt, Artificial Sequence
  Description of Artificial Sequence: Synthetic oligonucleotide
  Antisense strand to SEQ ID NO: 1052834
uaucuagauagcuaucauc

SEQ ID NO: 1052836 - RNA, 19 nt, Artificial Sequence
  Description of Artificial Sequence: Synthetic oligonucleotide
  Sense strand starting at position 2782 of SEQ ID NO: 915088
agcauuuguuuguuugcau

SEQ ID NO: 1052837 - RNA, 19 nt, Artificial Sequence
  Description of Artificial Sequence: Synthetic oligonucleotide
  Antisense strand to SEQ ID NO: 1052836
augcaaacaaacaaaugcu

SEQ ID NO: 1052838 - RNA, 19 nt, Artificial Sequence
  Description of Artificial Sequence: Synthetic oligonucleotide
  Sense strand starting at position 2890 of SEQ ID NO: 915088
ggcacagagauucgguaga

SEQ ID NO: 1052839 - RNA, 19 nt, Artificial Sequence
  Description of Artificial Sequence: Synthetic oligonucleotide
  Antisense strand to SEQ ID NO: 1052838
ucuaccgaaucucugugcc

SEQ ID NO: 1052840 - RNA, 19 nt, Artificial Sequence
  Description of Artificial Sequence: Synthetic oligonucleotide
  Sense strand starting at position 2892 of SEQ ID NO: 915088
cacagagauucgguagaua

SEQ ID NO: 1052841 - RNA, 19 nt, Artificial Sequence
  Description of Artificial Sequence: Synthetic oligonucleotide
  Antisense strand to SEQ ID NO: 1052840
uaucuaccgaaucucugug

SEQ ID NO: 1052842 - RNA, 19 nt, Artificial Sequence
  Description of Artificial Sequence: Synthetic oligonucleotide
  Sense strand starting at position 2997 of SEQ ID NO: 915088
ccuugugcugcaguguuau

SEQ ID NO: 1052843 - RNA, 19 nt, Artificial Sequence
  Description of Artificial Sequence: Synthetic oligonucleotide
  Antisense strand to SEQ ID NO: 1052842
auaacacugcagcacaagg

SEQ ID NO: 1052844 - RNA, 19 nt, Artificial Sequence
  Description of Artificial Sequence: Synthetic oligonucleotide
  Sense strand starting at position 3021 of SEQ ID NO: 915088
uuauaauaguguccagaau

SEQ ID NO: 1052845 - RNA, 19 nt, Artificial Sequence
  Description of Artificial Sequence: Synthetic oligonucleotide
  Antisense strand to SEQ ID NO: 1052844
auucuggacacuauuauaa

SEQ ID NO: 1052846 - RNA, 19 nt, Artificial Sequence
  Description of Artificial Sequence: Synthetic oligonucleotide
  Sense strand starting at position 3086 of SEQ ID NO: 915088
guguuuacaguguauaaug

SEQ ID NO: 1052847 - RNA, 19 nt, Artificial Sequence
  Description of Artificial Sequence: Synthetic oligonucleotide
  Antisense strand to SEQ ID NO: 1052846
cauuauacacuguaaacac

SEQ ID NO: 1052848 - RNA, 19 nt, Artificial Sequence
  Description of Artificial Sequence: Synthetic oligonucleotide
  Sense strand starting at position 3234 of SEQ ID NO: 915088
ucaaguaugcaauaaagua

SEQ ID NO: 1052849 - RNA, 19 nt, Artificial Sequence
  Description of Artificial Sequence: Synthetic oligonucleotide
  Antisense strand to SEQ ID NO: 1052848
uacuuuauugcauacuuga

SEQ ID NO: 1052850 - RNA, 19 nt, Artificial Sequence
  Description of Artificial Sequence: Synthetic oligonucleotide
  Sense strand starting at position 3323 of SEQ ID NO: 915088
ugagucuucugaccaacau

SEQ ID NO: 1052851 - RNA, 19 nt, Artificial Sequence
  Description of Artificial Sequence: Synthetic oligonucleotide
  Antisense strand to SEQ ID NO: 1052850
auguuggucagaagacuca

SEQ ID NO: 1052852 - RNA, 19 nt, Artificial Sequence
  Description of Artificial Sequence: Synthetic oligonucleotide
  Sense strand starting at position 3450 of SEQ ID NO: 915088
uuaucuuuccguguucugu

SEQ ID NO: 1052853 - RNA, 19 nt, Artificial Sequence
  Description of Artificial Sequence: Synthetic oligonucleotide
  Antisense strand to SEQ ID NO: 1052852
acagaacacggaaagauaa

SEQ ID NO: 1052854 - RNA, 19 nt, Artificial Sequence
  Description of Artificial Sequence: Synthetic oligonucleotide
  Sense strand starting at position 3463 of SEQ ID NO: 915088
uucugugauuggcccauuu

SEQ ID NO: 1052855 - RNA, 19 nt, Artificial Sequence
  Description of Artificial Sequence: Synthetic oligonucleotide
  Antisense strand to SEQ ID NO: 1052854
aaaugggccaaucacagaa

SEQ ID NO: 1052856 - RNA, 19 nt, Artificial Sequence
  Description of Artificial Sequence: Synthetic oligonucleotide
  Sense strand starting at position 3607 of SEQ ID NO: 915088
ucuguugaugcauacuuaa

SEQ ID NO: 1052857 - RNA, 19 nt, Artificial Sequence
  Description of Artificial Sequence: Synthetic oligonucleotide
  Antisense strand to SEQ ID NO: 1052856
uuaaguaugcaucaacaga

SEQ ID NO: 1052858 - RNA, 19 nt, Artificial Sequence
  Description of Artificial Sequence: Synthetic oligonucleotide
  Sense strand starting at position 3675 of SEQ ID NO: 915088
gagugcagauaucuucuua

SEQ ID NO: 1052859 - RNA, 19 nt, Artificial Sequence
  Description of Artificial Sequence: Synthetic oligonucleotide
  Antisense strand to SEQ ID NO: 1052858
uaagaagauaucugcacuc

SEQ ID NO: 1052860 - RNA, 19 nt, Artificial Sequence
  Description of Artificial Sequence: Synthetic oligonucleotide
  Sense strand starting at position 3954 of SEQ ID NO: 915088
auuagugaggcuugacauu

SEQ ID NO: 1052861 - RNA, 19 nt, Artificial Sequence
  Description of Artificial Sequence: Synthetic oligonucleotide
  Antisense strand to SEQ ID NO: 1052860
aaugucaagccucacuaau

SEQ ID NO: 1052862 - RNA, 19 nt, Artificial Sequence
  Description of Artificial Sequence: Synthetic oligonucleotide
  Sense strand starting at position 3981 of SEQ ID NO: 915088
auaccucuuggccauuaga

SEQ ID NO: 1052863 - RNA, 19 nt, Artificial Sequence
  Description of Artificial Sequence: Synthetic oligonucleotide
  Antisense strand to SEQ ID NO: 1052862
ucuaauggccaagagguau

SEQ ID NO: 1052864 - RNA, 19 nt, Artificial Sequence
  Description of Artificial Sequence: Synthetic oligonucleotide
  Sense strand starting at position 351 of SEQ ID NO: 915089
auaguauaacaggguaacu

SEQ ID NO: 1052865 - RNA, 19 nt, Artificial Sequence
  Description of Artificial Sequence: Synthetic oligonucleotide
  Antisense strand to SEQ ID NO: 1052864
aguuacccuguuauacuau

SEQ ID NO: 1052866 - RNA, 19 nt, Artificial Sequence
  Description of Artificial Sequence: Synthetic oligonucleotide
  Sense strand starting at position 425 of SEQ ID NO: 915089
uuguuuguagcacaagaaa

SEQ ID NO: 1052867 - RNA, 19 nt, Artificial Sequence
  Description of Artificial Sequence: Synthetic oligonucleotide
  Antisense strand to SEQ ID NO: 1052866
uuucuugugcuacaaacaa

SEQ ID NO: 1052868 - RNA, 19 nt, Artificial Sequence
  Description of Artificial Sequence: Synthetic oligonucleotide
  Sense strand starting at position 480 of SEQ ID NO: 915089
cugauaugauuacuaugua

SEQ ID NO: 1052869 - RNA, 19 nt, Artificial Sequence
  Description of Artificial Sequence: Synthetic oligonucleotide
  Antisense strand to SEQ ID NO: 1052868
uacauaguaaucauaucag

SEQ ID NO: 1052870 - RNA, 19 nt, Artificial Sequence
  Description of Artificial Sequence: Synthetic oligonucleotide
  Sense strand starting at position 649 of SEQ ID NO: 915089
ugagcuaagcauugaagaa

SEQ ID NO: 1052871 - RNA, 19 nt, Artificial Sequence
  Description of Artificial Sequence: Synthetic oligonucleotide
  Antisense strand to SEQ ID NO: 1052870
uucuucaaugcuuagcuca

SEQ ID NO: 1052872 - RNA, 19 nt, Artificial Sequence
  Description of Artificial Sequence: Synthetic oligonucleotide
  Sense strand starting at position 679 of SEQ ID NO: 915089
ugcauuuauuugugacaaa

SEQ ID NO: 1052873 - RNA, 19 nt, Artificial Sequence
  Description of Artificial Sequence: Synthetic oligonucleotide
  Antisense strand to SEQ ID NO: 1052872
uuugucacaaauaaaugca

SEQ ID NO: 1052874 - RNA, 19 nt, Artificial Sequence
  Description of Artificial Sequence: Synthetic oligonucleotide
  Sense strand starting at position 750 of SEQ ID NO: 915089
gcuuaaugauuaucaggua

SEQ ID NO: 1052875 - RNA, 19 nt, Artificial Sequence
  Description of Artificial Sequence: Synthetic oligonucleotide
  Antisense strand to SEQ ID NO: 1052874
uaccugauaaucauuaagc

SEQ ID NO: 1052876 - RNA, 19 nt, Artificial Sequence
  Description of Artificial Sequence: Synthetic oligonucleotide
  Sense strand starting at position 755 of SEQ ID NO: 915089
augauuaucagguauguug

SEQ ID NO: 1052877 - RNA, 19 nt, Artificial Sequence
  Description of Artificial Sequence: Synthetic oligonucleotide
  Antisense strand to SEQ ID NO: 1052876
caacauaccugauaaucau

SEQ ID NO: 1052878 - RNA, 19 nt, Artificial Sequence
  Description of Artificial Sequence: Synthetic oligonucleotide
  Sense strand starting at position 959 of SEQ ID NO: 915089
ugccaauagugacuuauaa

SEQ ID NO: 1052879 - RNA, 19 nt, Artificial Sequence
  Description of Artificial Sequence: Synthetic oligonucleotide
  Antisense strand to SEQ ID NO: 1052878
uuauaagucacuauuggca

SEQ ID NO: 1052880 - RNA, 19 nt, Artificial Sequence
  Description of Artificial Sequence: Synthetic oligonucleotide
  Sense strand starting at position 1247 of SEQ ID NO: 915089
uaagaaaucgagcagcuua

SEQ ID NO: 1052881 - RNA, 19 nt, Artificial Sequence
  Description of Artificial Sequence: Synthetic oligonucleotide
  Antisense strand to SEQ ID NO: 1052880
uaagcugcucgauuucuua

SEQ ID NO: 1052882 - RNA, 19 nt, Artificial Sequence
  Description of Artificial Sequence: Synthetic oligonucleotide
  Sense strand starting at position 1261 of SEQ ID NO: 915089
gcuuaagggccugaaggau

SEQ ID NO: 1052883 - RNA, 19 nt, Artificial Sequence
  Description of Artificial Sequence: Synthetic oligonucleotide
  Antisense strand to SEQ ID NO: 1052882
auccuucaggcccuuaagc

SEQ ID NO: 1052884 - RNA, 19 nt, Artificial Sequence
  Description of Artificial Sequence: Synthetic oligonucleotide
  Sense strand starting at position 1280 of SEQ ID NO: 915089
gcaagcuugcucgugucua

SEQ ID NO: 1052885 - RNA, 19 nt, Artificial Sequence
  Description of Artificial Sequence: Synthetic oligonucleotide
  Antisense strand to SEQ ID NO: 1052884
uagacacgagcaagcuugc

SEQ ID NO: 1052886 - RNA, 19 nt, Artificial Sequence
  Description of Artificial Sequence: Synthetic oligonucleotide
  Sense strand starting at position 1282 of SEQ ID NO: 915089
aagcuugcucgugucuaga

SEQ ID NO: 1052887 - RNA, 19 nt, Artificial Sequence
  Description of Artificial Sequence: Synthetic oligonucleotide
  Antisense strand to SEQ ID NO: 1052886
ucuagacacgagcaagcuu

SEQ ID NO: 1052888 - RNA, 19 nt, Artificial Sequence
  Description of Artificial Sequence: Synthetic oligonucleotide
  Sense strand starting at position 1648 of SEQ ID NO: 915089
uuaacaucagauugcuuga

SEQ ID NO: 1052889 - RNA, 19 nt, Artificial Sequence
  Description of Artificial Sequence: Synthetic oligonucleotide
  Antisense strand to SEQ ID NO: 1052888
ucaagcaaucugauguuaa

SEQ ID NO: 1052890 - RNA, 19 nt, Artificial Sequence
  Description of Artificial Sequence: Synthetic oligonucleotide
  Sense strand starting at position 1651 of SEQ ID NO: 915089
acaucagauugcuugaaug

SEQ ID NO: 1052891 - RNA, 19 nt, Artificial Sequence
  Description of Artificial Sequence: Synthetic oligonucleotide
  Antisense strand to SEQ ID NO: 1052890
cauucaagcaaucugaugu

SEQ ID NO: 1052892 - RNA, 19 nt, Artificial Sequence
  Description of Artificial Sequence: Synthetic oligonucleotide
  Sense strand starting at position 1653 of SEQ ID NO: 915089
aucagauugcuugaaugcu

SEQ ID NO: 1052893 - RNA, 19 nt, Artificial Sequence
  Description of Artificial Sequence: Synthetic oligonucleotide
  Antisense strand to SEQ ID NO: 1052892
agcauucaagcaaucugau

SEQ ID NO: 1052894 - RNA, 19 nt, Artificial Sequence
  Description of Artificial Sequence: Synthetic oligonucleotide
  Sense strand starting at position 1730 of SEQ ID NO: 915089
ccagaucccuaguuuauac

SEQ ID NO: 1052895 - RNA, 19 nt, Artificial Sequence
  Description of Artificial Sequence: Synthetic oligonucleotide
  Antisense strand to SEQ ID NO: 1052894
guauaaacuagggaucugg

SEQ ID NO: 1052896 - RNA, 19 nt, Artificial Sequence
  Description of Artificial Sequence: Synthetic oligonucleotide
  Sense strand starting at position 1874 of SEQ ID NO: 915089
gagcuagguguugagaauu

SEQ ID NO: 1052897 - RNA, 19 nt, Artificial Sequence
  Description of Artificial Sequence: Synthetic oligonucleotide
  Antisense strand to SEQ ID NO: 1052896
aauucucaacaccuagcuc

SEQ ID NO: 1052898 - RNA, 19 nt, Artificial Sequence
  Description of Artificial Sequence: Synthetic oligonucleotide
  Sense strand starting at position 2073 of SEQ ID NO: 915089
uaguuauuagcucaagcag

SEQ ID NO: 1052899 - RNA, 19 nt, Artificial Sequence
  Description of Artificial Sequence: Synthetic oligonucleotide
  Antisense strand to SEQ ID NO: 1052898
cugcuugagcuaauaacua

SEQ ID NO: 1052900 - RNA, 19 nt, Artificial Sequence
  Description of Artificial Sequence: Synthetic oligonucleotide
  Sense strand starting at position 2118 of SEQ ID NO: 915089
ugcauaguagguuauauga

SEQ ID NO: 1052901 - RNA, 19 nt, Artificial Sequence
  Description of Artificial Sequence: Synthetic oligonucleotide
  Antisense strand to SEQ ID NO: 1052900
ucauauaaccuacuaugca

SEQ ID NO: 1052902 - RNA, 19 nt, Artificial Sequence
  Description of Artificial Sequence: Synthetic oligonucleotide
  Sense strand starting at position 2161 of SEQ ID NO: 915089
gucuaauucuaguuacaau

SEQ ID NO: 1052903 - RNA, 19 nt, Artificial Sequence
  Description of Artificial Sequence: Synthetic oligonucleotide
  Antisense strand to SEQ ID NO: 1052902
auuguaacuagaauuagac

SEQ ID NO: 1052904 - RNA, 19 nt, Artificial Sequence
  Description of Artificial Sequence: Synthetic oligonucleotide
  Sense strand starting at position 2532 of SEQ ID NO: 915089
uuguauucuugaucugaug

SEQ ID NO: 1052905 - RNA, 19 nt, Artificial Sequence
  Description of Artificial Sequence: Synthetic oligonucleotide
  Antisense strand to SEQ ID NO: 1052904
caucagaucaagaauacaa

SEQ ID NO: 1052906 - RNA, 19 nt, Artificial Sequence
  Description of Artificial Sequence: Synthetic oligonucleotide
  Sense strand starting at position 2839 of SEQ ID NO: 915089
ucuuuaugucuuuacuuga

SEQ ID NO: 1052907 - RNA, 19 nt, Artificial Sequence
  Description of Artificial Sequence: Synthetic oligonucleotide
  Antisense strand to SEQ ID NO: 1052906
ucaaguaaagacauaaaga

SEQ ID NO: 1052908 - RNA, 19 nt, Artificial Sequence
  Description of Artificial Sequence: Synthetic oligonucleotide
  Sense strand starting at position 2842 of SEQ ID NO: 915089
uuaugucuuuacuugauga

SEQ ID NO: 1052909 - RNA, 19 nt, Artificial Sequence
  Description of Artificial Sequence: Synthetic oligonucleotide
  Antisense strand to SEQ ID NO: 1052908
ucaucaaguaaagacauaa

SEQ ID NO: 1052910 - RNA, 19 nt, Artificial Sequence
  Description of Artificial Sequence: Synthetic oligonucleotide
  Sense strand starting at position 2942 of SEQ ID NO: 915089
aaguauuugcaguggguuu

SEQ ID NO: 1052911 - RNA, 19 nt, Artificial Sequence
  Description of Artificial Sequence: Synthetic oligonucleotide
  Antisense strand to SEQ ID NO: 1052910
aaacccacugcaaauacuu

SEQ ID NO: 1052912 - RNA, 19 nt, Artificial Sequence
  Description of Artificial Sequence: Synthetic oligonucleotide
  Sense strand starting at position 2964 of SEQ ID NO: 915089
uuggcuguuccuuagagga

SEQ ID NO: 1052913 - RNA, 19 nt, Artificial Sequence
  Description of Artificial Sequence: Synthetic oligonucleotide
  Antisense strand to SEQ ID NO: 1052912
uccucuaaggaacagccaa

SEQ ID NO: 1052914 - RNA, 19 nt, Artificial Sequence
  Description of Artificial Sequence: Synthetic oligonucleotide
  Sense strand starting at position 3075 of SEQ ID NO: 915089
uaauguuaaccuggagucu

SEQ ID NO: 1052915 - RNA, 19 nt, Artificial Sequence
  Description of Artificial Sequence: Synthetic oligonucleotide
  Antisense strand to SEQ ID NO: 1052914
agacuccagguuaacauua

SEQ ID NO: 1052916 - RNA, 19 nt, Artificial Sequence
  Description of Artificial Sequence: Synthetic oligonucleotide
  Sense strand starting at position 3114 of SEQ ID NO: 915089
agauaugcuugacuuaaag

SEQ ID NO: 1052917 - RNA, 19 nt, Artificial Sequence
  Description of Artificial Sequence: Synthetic oligonucleotide
  Antisense strand to SEQ ID NO: 1052916
cuuuaagucaagcauaucu

SEQ ID NO: 1052918 - RNA, 19 nt, Artificial Sequence
  Description of Artificial Sequence: Synthetic oligonucleotide
  Sense strand starting at position 3153 of SEQ ID NO: 915089
guuugaaugauuugugcag

SEQ ID NO: 1052919 - RNA, 19 nt, Artificial Sequence
  Description of Artificial Sequence: Synthetic oligonucleotide
  Antisense strand to SEQ ID NO: 1052918
cugcacaaaucauucaaac

SEQ ID NO: 1052920 - RNA, 19 nt, Artificial Sequence
  Description of Artificial Sequence: Synthetic oligonucleotide
  Sense strand starting at position 3159 of SEQ ID NO: 915089
augauuugugcaggucauc

SEQ ID NO: 1052921 - RNA, 19 nt, Artificial Sequence
  Description of Artificial Sequence: Synthetic oligonucleotide
  Antisense strand to SEQ ID NO: 1052920
gaugaccugcacaaaucau

SEQ ID NO: 1052922 - RNA, 19 nt, Artificial Sequence
  Description of Artificial Sequence: Synthetic oligonucleotide
  Sense strand starting at position 3170 of SEQ ID NO: 915089
aggucaucugaugagcuuu

SEQ ID NO: 1052923 - RNA, 19 nt, Artificial Sequence
  Description of Artificial Sequence: Synthetic oligonucleotide
  Antisense strand to SEQ ID NO: 1052922
aaagcucaucagaugaccu

SEQ ID NO: 1052924 - RNA, 19 nt, Artificial Sequence
  Description of Artificial Sequence: Synthetic oligonucleotide
  Sense strand starting at position 3176 of SEQ ID NO: 915089
ucugaugagcuuugaaaca

SEQ ID NO: 1052925 - RNA, 19 nt, Artificial Sequence
  Description of Artificial Sequence: Synthetic oligonucleotide
  Antisense strand to SEQ ID NO: 1052924
uguuucaaagcucaucaga

SEQ ID NO: 1052926 - RNA, 19 nt, Artificial Sequence
  Description of Artificial Sequence: Synthetic oligonucleotide
  Sense strand starting at position 3196 of SEQ ID NO: 915089
ggcugaauccaagauuccu

SEQ ID NO: 1052927 - RNA, 19 nt, Artificial Sequence
  Description of Artificial Sequence: Synthetic oligonucleotide
  Antisense strand to SEQ ID NO: 1052926
aggaaucuuggauucagcc

SEQ ID NO: 1052928 - RNA, 19 nt, Artificial Sequence
  Description of Artificial Sequence: Synthetic oligonucleotide
  Sense strand starting at position 3246 of SEQ ID NO: 915089
aguguauauguauaacaac

SEQ ID NO: 1052929 - RNA, 19 nt, Artificial Sequence
  Description of Artificial Sequence: Synthetic oligonucleotide
  Antisense strand to SEQ ID NO: 1052928
guuguuauacauauacacu

SEQ ID NO: 1052930 - RNA, 19 nt, Artificial Sequence
  Description of Artificial Sequence: Synthetic oligonucleotide
  Sense strand starting at position 3321 of SEQ ID NO: 915089
ccaugugugaauugggaua

SEQ ID NO: 1052931 - RNA, 19 nt, Artificial Sequence
  Description of Artificial Sequence: Synthetic oligonucleotide
  Antisense strand to SEQ ID NO: 1052930
uaucccaauucacacaugg

SEQ ID NO: 1052932 - RNA, 19 nt, Artificial Sequence
  Description of Artificial Sequence: Synthetic oligonucleotide
  Sense strand starting at position 3472 of SEQ ID NO: 915089
guuugauuagcccaauaga

SEQ ID NO: 1052933 - RNA, 19 nt, Artificial Sequence
  Description of Artificial Sequence: Synthetic oligonucleotide
  Antisense strand to SEQ ID NO: 1052932
ucuauugggcuaaucaaac

SEQ ID NO: 1052934 - RNA, 19 nt, Artificial Sequence
  Description of Artificial Sequence: Synthetic oligonucleotide
  Sense strand starting at position 3709 of SEQ ID NO: 915089
uuagaauaaucaguaugca

SEQ ID NO: 1052935 - RNA, 19 nt, Artificial Sequence
  Description of Artificial Sequence: Synthetic oligonucleotide
  Antisense strand to SEQ ID NO: 1052934
ugcauacugauuauucuaa

SEQ ID NO: 1052936 - RNA, 19 nt, Artificial Sequence
  Description of Artificial Sequence: Synthetic oligonucleotide
  Sense strand starting at position 3798 of SEQ ID NO: 915089
aagcucuguccauagagaa

SEQ ID NO: 1052937 - RNA, 19 nt, Artificial Sequence
  Description of Artificial Sequence: Synthetic oligonucleotide
  Antisense strand to SEQ ID NO: 1052936
uucucuauggacagagcuu

SEQ ID NO: 1052938 - RNA, 19 nt, Artificial Sequence
  Description of Artificial Sequence: Synthetic oligonucleotide
  Sense strand starting at position 3845 of SEQ ID NO: 915089
agaccuugguuucuuaauu

SEQ ID NO: 1052939 - RNA, 19 nt, Artificial Sequence
  Description of Artificial Sequence: Synthetic oligonucleotide
  Antisense strand to SEQ ID NO: 1052938
aauuaagaaaccaaggucu

SEQ ID NO: 1052940 - RNA, 19 nt, Artificial Sequence
  Description of Artificial Sequence: Synthetic oligonucleotide
  Sense strand starting at position 3880 of SEQ ID NO: 915089
cagaauuucuuggagaagu

SEQ ID NO: 1052941 - RNA, 19 nt, Artificial Sequence
  Description of Artificial Sequence: Synthetic oligonucleotide
  Antisense strand to SEQ ID NO: 1052940
acuucuccaagaaauucug

SEQ ID NO: 1052942 - RNA, 19 nt, Artificial Sequence
  Description of Artificial Sequence: Synthetic oligonucleotide
  Sense strand starting at position 3932 of SEQ ID NO: 915089
ugaaaugagccuggagcau

SEQ ID NO: 1052943 - RNA, 19 nt, Artificial Sequence
  Description of Artificial Sequence: Synthetic oligonucleotide
  Antisense strand to SEQ ID NO: 1052942
augcuccaggcucauuuca

SEQ ID NO: 1052944 - RNA, 19 nt, Artificial Sequence
  Description of Artificial Sequence: Synthetic oligonucleotide
  Sense strand starting at position 226 of SEQ ID NO: 915090
uguccaaugucagugccaa

SEQ ID NO: 1052945 - RNA, 19 nt, Artificial Sequence
  Description of Artificial Sequence: Synthetic oligonucleotide
  Antisense strand to SEQ ID NO: 1052944
uuggcacugacauuggaca

SEQ ID NO: 1052946 - RNA, 19 nt, Artificial Sequence
  Description of Artificial Sequence: Synthetic oligonucleotide
  Sense strand starting at position 463 of SEQ ID NO: 915090
ccagcuaucuaaucggcuu

SEQ ID NO: 1052947 - RNA, 19 nt, Artificial Sequence
  Description of Artificial Sequence: Synthetic oligonucleotide
  Antisense strand to SEQ ID NO: 1052946
aagccgauuagauagcugg

SEQ ID NO: 1052948 - RNA, 19 nt, Artificial Sequence
  Description of Artificial Sequence: Synthetic oligonucleotide
  Sense strand starting at position 609 of SEQ ID NO: 915090
ggucacuguuagucacuca

SEQ ID NO: 1052949 - RNA, 19 nt, Artificial Sequence
  Description of Artificial Sequence: Synthetic oligonucleotide
  Antisense strand to SEQ ID NO: 1052948
ugagugacuaacagugacc

SEQ ID NO: 1052950 - RNA, 19 nt, Artificial Sequence
  Description of Artificial Sequence: Synthetic oligonucleotide
  Sense strand starting at position 634 of SEQ ID NO: 915090
aggcccauuuccugauaau

SEQ ID NO: 1052951 - RNA, 19 nt, Artificial Sequence
  Description of Artificial Sequence: Synthetic oligonucleotide
  Antisense strand to SEQ ID NO: 1052950
auuaucaggaaaugggccu

SEQ ID NO: 1052952 - RNA, 19 nt, Artificial Sequence
  Description of Artificial Sequence: Synthetic oligonucleotide
  Sense strand starting at position 739 of SEQ ID NO: 915090
aaccguaaucugggacaca

SEQ ID NO: 1052953 - RNA, 19 nt, Artificial Sequence
  Description of Artificial Sequence: Synthetic oligonucleotide
  Antisense strand to SEQ ID NO: 1052952
ugugucccagauuacgguu

SEQ ID NO: 1052954 - RNA, 19 nt, Artificial Sequence
  Description of Artificial Sequence: Synthetic oligonucleotide
  Sense strand starting at position 1136 of SEQ ID NO: 915090
gaggcuugcuugcucuaga

SEQ ID NO: 1052955 - RNA, 19 nt, Artificial Sequence
  Description of Artificial Sequence: Synthetic oligonucleotide
  Antisense strand to SEQ ID NO: 1052954
ucuagagcaagcaagccuc

SEQ ID NO: 1052956 - RNA, 19 nt, Artificial Sequence
  Description of Artificial Sequence: Synthetic oligonucleotide
  Sense strand starting at position 1139 of SEQ ID NO: 915090
gcuugcuugcucuagauca

SEQ ID NO: 1052957 - RNA, 19 nt, Artificial Sequence
  Description of Artificial Sequence: Synthetic oligonucleotide
  Antisense strand to SEQ ID NO: 1052956
ugaucuagagcaagcaagc

SEQ ID NO: 1052958 - RNA, 19 nt, Artificial Sequence
  Description of Artificial Sequence: Synthetic oligonucleotide
  Sense strand starting at position 1141 of SEQ ID NO: 915090
uugcuugcucuagaucaca

SEQ ID NO: 1052959 - RNA, 19 nt, Artificial Sequence
  Description of Artificial Sequence: Synthetic oligonucleotide
  Antisense strand to SEQ ID NO: 1052958
ugugaucuagagcaagcaa

SEQ ID NO: 1052960 - RNA, 19 nt, Artificial Sequence
  Description of Artificial Sequence: Synthetic oligonucleotide
  Sense strand starting at position 1190 of SEQ ID NO: 915090
gagaacacuucgccuagga

SEQ ID NO: 1052961 - RNA, 19 nt, Artificial Sequence
  Description of Artificial Sequence: Synthetic oligonucleotide
  Antisense strand to SEQ ID NO: 1052960
uccuaggcgaaguguucuc

SEQ ID NO: 1052962 - RNA, 19 nt, Artificial Sequence
  Description of Artificial Sequence: Synthetic oligonucleotide
  Sense strand starting at position 1192 of SEQ ID NO: 915090
gaacacuucgccuaggacu

SEQ ID NO: 1052963 - RNA, 19 nt, Artificial Sequence
  Description of Artificial Sequence: Synthetic oligonucleotide
  Antisense strand to SEQ ID NO: 1052962
aguccuaggcgaaguguuc

SEQ ID NO: 1052964 - RNA, 19 nt, Artificial Sequence
  Description of Artificial Sequence: Synthetic oligonucleotide
  Sense strand starting at position 1206 of SEQ ID NO: 915090
ggacuuucccacuagagca

SEQ ID NO: 1052965 - RNA, 19 nt, Artificial Sequence
  Description of Artificial Sequence: Synthetic oligonucleotide
  Antisense strand to SEQ ID NO: 1052964
ugcucuagugggaaagucc

SEQ ID NO: 1052966 - RNA, 19 nt, Artificial Sequence
  Description of Artificial Sequence: Synthetic oligonucleotide
  Sense strand starting at position 1246 of SEQ ID NO: 915090
ggaguccagucguuaguag

SEQ ID NO: 1052967 - RNA, 19 nt, Artificial Sequence
  Description of Artificial Sequence: Synthetic oligonucleotide
  Antisense strand to SEQ ID NO: 1052966
cuacuaacgacuggacucc

SEQ ID NO: 1052968 - RNA, 19 nt, Artificial Sequence
  Description of Artificial Sequence: Synthetic oligonucleotide
  Sense strand starting at position 1248 of SEQ ID NO: 915090
aguccagucguuaguagga

SEQ ID NO: 1052969 - RNA, 19 nt, Artificial Sequence
  Description of Artificial Sequence: Synthetic oligonucleotide
  Antisense strand to SEQ ID NO: 1052968
uccuacuaacgacuggacu

SEQ ID NO: 1052970 - RNA, 19 nt, Artificial Sequence
  Description of Artificial Sequence: Synthetic oligonucleotide
  Sense strand starting at position 2383 of SEQ ID NO: 915090
gugccacguggaugaaaua

SEQ ID NO: 1052971 - RNA, 19 nt, Artificial Sequence
  Description of Artificial Sequence: Synthetic oligonucleotide
  Antisense strand to SEQ ID NO: 1052970
uauuucauccacguggcac

SEQ ID NO: 1052972 - RNA, 19 nt, Artificial Sequence
  Description of Artificial Sequence: Synthetic oligonucleotide
  Sense strand starting at position 2392 of SEQ ID NO: 915090
ggaugaaauaaucgggcuu

SEQ ID NO: 1052973 - RNA, 19 nt, Artificial Sequence
  Description of Artificial Sequence: Synthetic oligonucleotide
  Antisense strand to SEQ ID NO: 1052972
aagcccgauuauuucaucc

SEQ ID NO: 1052974 - RNA, 19 nt, Artificial Sequence
  Description of Artificial Sequence: Synthetic oligonucleotide
  Sense strand starting at position 2442 of SEQ ID NO: 915090
uuucucugacagcgaauuu

SEQ ID NO: 1052975 - RNA, 19 nt, Artificial Sequence
  Description of Artificial Sequence: Synthetic oligonucleotide
  Antisense strand to SEQ ID NO: 1052974
aaauucgcugucagagaaa

SEQ ID NO: 1052976 - RNA, 19 nt, Artificial Sequence
  Description of Artificial Sequence: Synthetic oligonucleotide
  Sense strand starting at position 2566 of SEQ ID NO: 915090
guguuagaccuugaugggu

SEQ ID NO: 1052977 - RNA, 19 nt, Artificial Sequence
  Description of Artificial Sequence: Synthetic oligonucleotide
  Antisense strand to SEQ ID NO: 1052976
acccaucaaggucuaacac

SEQ ID NO: 1052978 - RNA, 19 nt, Artificial Sequence
  Description of Artificial Sequence: Synthetic oligonucleotide
  Sense strand starting at position 2709 of SEQ ID NO: 915090
ccgguucuuucucucuauu

SEQ ID NO: 1052979 - RNA, 19 nt, Artificial Sequence
  Description of Artificial Sequence: Synthetic oligonucleotide
  Antisense strand to SEQ ID NO: 1052978
aauagagagaaagaaccgg

SEQ ID NO: 1052980 - RNA, 19 nt, Artificial Sequence
  Description of Artificial Sequence: Synthetic oligonucleotide
  Sense strand starting at position 2711 of SEQ ID NO: 915090
gguucuuucucucuauuau

SEQ ID NO: 1052981 - RNA, 19 nt, Artificial Sequence
  Description of Artificial Sequence: Synthetic oligonucleotide
  Antisense strand to SEQ ID NO: 1052980
auaauagagagaaagaacc

SEQ ID NO: 1052982 - RNA, 19 nt, Artificial Sequence
  Description of Artificial Sequence: Synthetic oligonucleotide
  Sense strand starting at position 2745 of SEQ ID NO: 915090
agggaaauguuggauucca

SEQ ID NO: 1052983 - RNA, 19 nt, Artificial Sequence
  Description of Artificial Sequence: Synthetic oligonucleotide
  Antisense strand to SEQ ID NO: 1052982
uggaauccaacauuucccu

SEQ ID NO: 1052984 - RNA, 19 nt, Artificial Sequence
  Description of Artificial Sequence: Synthetic oligonucleotide
  Sense strand starting at position 2810 of SEQ ID NO: 915090
gacaguggcuuucccacaa

SEQ ID NO: 1052985 - RNA, 19 nt, Artificial Sequence
  Description of Artificial Sequence: Synthetic oligonucleotide
  Antisense strand to SEQ ID NO: 1052984
uugugggaaagccacuguc

SEQ ID NO: 1052986 - RNA, 19 nt, Artificial Sequence
  Description of Artificial Sequence: Synthetic oligonucleotide
  Sense strand starting at position 2885 of SEQ ID NO: 915090
ccaggagaucuggauugcu

SEQ ID NO: 1052987 - RNA, 19 nt, Artificial Sequence
  Description of Artificial Sequence: Synthetic oligonucleotide
  Antisense strand to SEQ ID NO: 1052986
agcaauccagaucuccugg

SEQ ID NO: 1052988 - RNA, 19 nt, Artificial Sequence
  Description of Artificial Sequence: Synthetic oligonucleotide
  Sense strand starting at position 2898 of SEQ ID NO: 915090
auugcugccuccucugauu

SEQ ID NO: 1052989 - RNA, 19 nt, Artificial Sequence
  Description of Artificial Sequence: Synthetic oligonucleotide
  Antisense strand to SEQ ID NO: 1052988
aaucagaggaggcagcaau

SEQ ID NO: 1052990 - RNA, 19 nt, Artificial Sequence
  Description of Artificial Sequence: Synthetic oligonucleotide
  Sense strand starting at position 2945 of SEQ ID NO: 915090
auucuuugggcuuaagugu

SEQ ID NO: 1052991 - RNA, 19 nt, Artificial Sequence
  Description of Artificial Sequence: Synthetic oligonucleotide
  Antisense strand to SEQ ID NO: 1052990
acacuuaagcccaaagaau

SEQ ID NO: 1052992 - RNA, 19 nt, Artificial Sequence
  Description of Artificial Sequence: Synthetic oligonucleotide
  Sense strand starting at position 3083 of SEQ ID NO: 915090
uugggaccuugauuacuga

SEQ ID NO: 1052993 - RNA, 19 nt, Artificial Sequence
  Description of Artificial Sequence: Synthetic oligonucleotide
  Antisense strand to SEQ ID NO: 1052992
ucaguaaucaaggucccaa

SEQ ID NO: 1052994 - RNA, 19 nt, Artificial Sequence
  Description of Artificial Sequence: Synthetic oligonucleotide
  Sense strand starting at position 3230 of SEQ ID NO: 915090
cucucugcugccuagauuu

SEQ ID NO: 1052995 - RNA, 19 nt, Artificial Sequence
  Description of Artificial Sequence: Synthetic oligonucleotide
  Antisense strand to SEQ ID NO: 1052994
aaaucuaggcagcagagag

SEQ ID NO: 1052996 - RNA, 19 nt, Artificial Sequence
  Description of Artificial Sequence: Synthetic oligonucleotide
  Sense strand starting at position 3294 of SEQ ID NO: 915090
auuugccuuuccugaagaa

SEQ ID NO: 1052997 - RNA, 19 nt, Artificial Sequence
  Description of Artificial Sequence: Synthetic oligonucleotide
  Antisense strand to SEQ ID NO: 1052996
uucuucaggaaaggcaaau

SEQ ID NO: 1052998 - RNA, 19 nt, Artificial Sequence
  Description of Artificial Sequence: Synthetic oligonucleotide
  Sense strand starting at position 3295 of SEQ ID NO: 915090
uuugccuuuccugaagaau

SEQ ID NO: 1052999 - RNA, 19 nt, Artificial Sequence
  Description of Artificial Sequence: Synthetic oligonucleotide
  Antisense strand to SEQ ID NO: 1052998
auucuucaggaaaggcaaa

SEQ ID NO: 1053000 - RNA, 19 nt, Artificial Sequence
  Description of Artificial Sequence: Synthetic oligonucleotide
  Sense strand starting at position 3307 of SEQ ID NO: 915090
gaagaaucaccuggaugcu

SEQ ID NO: 1053001 - RNA, 19 nt, Artificial Sequence
  Description of Artificial Sequence: Synthetic oligonucleotide
  Antisense strand to SEQ ID NO: 1053000
agcauccaggugauucuuc

SEQ ID NO: 1053002 - RNA, 19 nt, Artificial Sequence
  Description of Artificial Sequence: Synthetic oligonucleotide
  Sense strand starting at position 3316 of SEQ ID NO: 915090
ccuggaugcuuguuagaaa

SEQ ID NO: 1053003 - RNA, 19 nt, Artificial Sequence
  Description of Artificial Sequence: Synthetic oligonucleotide
  Antisense strand to SEQ ID NO: 1053002
uuucuaacaagcauccagg

SEQ ID NO: 1053004 - RNA, 19 nt, Artificial Sequence
  Description of Artificial Sequence: Synthetic oligonucleotide
  Sense strand starting at position 3410 of SEQ ID NO: 915090
cccacaugaugcucgacau

SEQ ID NO: 1053005 - RNA, 19 nt, Artificial Sequence
  Description of Artificial Sequence: Synthetic oligonucleotide
  Antisense strand to SEQ ID NO: 1053004
augucgagcaucauguggg

SEQ ID NO: 1053006 - RNA, 19 nt, Artificial Sequence
  Description of Artificial Sequence: Synthetic oligonucleotide
  Sense strand starting at position 3411 of SEQ ID NO: 915090
ccacaugaugcucgacaua

SEQ ID NO: 1053007 - RNA, 19 nt, Artificial Sequence
  Description of Artificial Sequence: Synthetic oligonucleotide
  Antisense strand to SEQ ID NO: 1053006
uaugucgagcaucaugugg

SEQ ID NO: 1053008 - RNA, 19 nt, Artificial Sequence
  Description of Artificial Sequence: Synthetic oligonucleotide
  Sense strand starting at position 3414 of SEQ ID NO: 915090
caugaugcucgacauaagu

SEQ ID NO: 1053009 - RNA, 19 nt, Artificial Sequence
  Description of Artificial Sequence: Synthetic oligonucleotide
  Antisense strand to SEQ ID NO: 1053008
acuuaugucgagcaucaug

SEQ ID NO: 1053010 - RNA, 19 nt, Artificial Sequence
  Description of Artificial Sequence: Synthetic oligonucleotide
  Sense strand starting at position 3420 of SEQ ID NO: 915090
gcucgacauaagugguuga

SEQ ID NO: 1053011 - RNA, 19 nt, Artificial Sequence
  Description of Artificial Sequence: Synthetic oligonucleotide
  Antisense strand to SEQ ID NO: 1053010
ucaaccacuuaugucgagc

SEQ ID NO: 1053012 - RNA, 19 nt, Artificial Sequence
  Description of Artificial Sequence: Synthetic oligonucleotide
  Sense strand starting at position 3449 of SEQ ID NO: 915090
uuggcagauguuuaagcau

SEQ ID NO: 1053013 - RNA, 19 nt, Artificial Sequence
  Description of Artificial Sequence: Synthetic oligonucleotide
  Antisense strand to SEQ ID NO: 1053012
augcuuaaacaucugccaa

SEQ ID NO: 1053014 - RNA, 19 nt, Artificial Sequence
  Description of Artificial Sequence: Synthetic oligonucleotide
  Sense strand starting at position 3452 of SEQ ID NO: 915090
gcagauguuuaagcauaga

SEQ ID NO: 1053015 - RNA, 19 nt, Artificial Sequence
  Description of Artificial Sequence: Synthetic oligonucleotide
  Antisense strand to SEQ ID NO: 1053014
ucuaugcuuaaacaucugc

SEQ ID NO: 1053016 - RNA, 19 nt, Artificial Sequence
  Description of Artificial Sequence: Synthetic oligonucleotide
  Sense strand starting at position 3814 of SEQ ID NO: 915090
gcagcauccuuccuggaga

SEQ ID NO: 1053017 - RNA, 19 nt, Artificial Sequence
  Description of Artificial Sequence: Synthetic oligonucleotide
  Antisense strand to SEQ ID NO: 1053016
ucuccaggaaggaugcugc

SEQ ID NO: 1053018 - RNA, 19 nt, Artificial Sequence
  Description of Artificial Sequence: Synthetic oligonucleotide
  Sense strand starting at position 3827 of SEQ ID NO: 915090
uggagaaccuggcuccuaa

SEQ ID NO: 1053019 - RNA, 19 nt, Artificial Sequence
  Description of Artificial Sequence: Synthetic oligonucleotide
  Antisense strand to SEQ ID NO: 1053018
uuaggagccagguucucca

SEQ ID NO: 1053020 - RNA, 19 nt, Artificial Sequence
  Description of Artificial Sequence: Synthetic oligonucleotide
  Sense strand starting at position 3939 of SEQ ID NO: 915090
cuggcaaccguuuagacua

SEQ ID NO: 1053021 - RNA, 19 nt, Artificial Sequence
  Description of Artificial Sequence: Synthetic oligonucleotide
  Antisense strand to SEQ ID NO: 1053020
uagucuaaacgguugccag

SEQ ID NO: 1053022 - RNA, 19 nt, Artificial Sequence
  Description of Artificial Sequence: Synthetic oligonucleotide
  Sense strand starting at position 3956 of SEQ ID NO: 915090
uagagaugcccagggucuu

SEQ ID NO: 1053023 - RNA, 19 nt, Artificial Sequence
  Description of Artificial Sequence: Synthetic oligonucleotide
  Antisense strand to SEQ ID NO: 1053022
aagacccugggcaucucua

SEQ ID NO: 1053024 - RNA, 19 nt, Artificial Sequence
  Description of Artificial Sequence: Synthetic oligonucleotide
  Sense strand starting at position 141 of SEQ ID NO: 915091
gggugauucucuguucuca

SEQ ID NO: 1053025 - RNA, 19 nt, Artificial Sequence
  Description of Artificial Sequence: Synthetic oligonucleotide
  Antisense strand to SEQ ID NO: 1053024
ugagaacagagaaucaccc

SEQ ID NO: 1053026 - RNA, 19 nt, Artificial Sequence
  Description of Artificial Sequence: Synthetic oligonucleotide
  Sense strand starting at position 143 of SEQ ID NO: 915091
gugauucucuguucucagu

SEQ ID NO: 1053027 - RNA, 19 nt, Artificial Sequence
  Description of Artificial Sequence: Synthetic oligonucleotide
  Antisense strand to SEQ ID NO: 1053026
acugagaacagagaaucac

SEQ ID NO: 1053028 - RNA, 19 nt, Artificial Sequence
  Description of Artificial Sequence: Synthetic oligonucleotide
  Sense strand starting at position 702 of SEQ ID NO: 915091
ggguguccaggauggaaau

SEQ ID NO: 1053029 - RNA, 19 nt, Artificial Sequence
  Description of Artificial Sequence: Synthetic oligonucleotide
  Antisense strand to SEQ ID NO: 1053028
auuuccauccuggacaccc

SEQ ID NO: 1053030 - RNA, 19 nt, Artificial Sequence
  Description of Artificial Sequence: Synthetic oligonucleotide
  Sense strand starting at position 735 of SEQ ID NO: 915091
uggugagacaaaggcuauu

SEQ ID NO: 1053031 - RNA, 19 nt, Artificial Sequence
  Description of Artificial Sequence: Synthetic oligonucleotide
  Antisense strand to SEQ ID NO: 1053030
aauagccuuugucucacca

SEQ ID NO: 1053032 - RNA, 19 nt, Artificial Sequence
  Description of Artificial Sequence: Synthetic oligonucleotide
  Sense strand starting at position 792 of SEQ ID NO: 915091
gagaaagguccaggucgga

SEQ ID NO: 1053033 - RNA, 19 nt, Artificial Sequence
  Description of Artificial Sequence: Synthetic oligonucleotide
  Antisense strand to SEQ ID NO: 1053032
uccgaccuggaccuuucuc

SEQ ID NO: 1053034 - RNA, 19 nt, Artificial Sequence
  Description of Artificial Sequence: Synthetic oligonucleotide
  Sense strand starting at position 1459 of SEQ ID NO: 915091
gccagcucuguccguaagu

SEQ ID NO: 1053035 - RNA, 19 nt, Artificial Sequence
  Description of Artificial Sequence: Synthetic oligonucleotide
  Antisense strand to SEQ ID NO: 1053034
acuuacggacagagcuggc

SEQ ID NO: 1053036 - RNA, 19 nt, Artificial Sequence
  Description of Artificial Sequence: Synthetic oligonucleotide
  Sense strand starting at position 1461 of SEQ ID NO: 915091
cagcucuguccguaaguga

SEQ ID NO: 1053037 - RNA, 19 nt, Artificial Sequence
  Description of Artificial Sequence: Synthetic oligonucleotide
  Antisense strand to SEQ ID NO: 1053036
ucacuuacggacagagcug

SEQ ID NO: 1053038 - RNA, 19 nt, Artificial Sequence
  Description of Artificial Sequence: Synthetic oligonucleotide
  Sense strand starting at position 1560 of SEQ ID NO: 915091
aaggguaagaccugcggaa

SEQ ID NO: 1053039 - RNA, 19 nt, Artificial Sequence
  Description of Artificial Sequence: Synthetic oligonucleotide
  Antisense strand to SEQ ID NO: 1053038
uuccgcaggucuuacccuu

SEQ ID NO: 1053040 - RNA, 19 nt, Artificial Sequence
  Description of Artificial Sequence: Synthetic oligonucleotide
  Sense strand starting at position 1635 of SEQ ID NO: 915091
gagcuuucugcaugggucu

SEQ ID NO: 1053041 - RNA, 19 nt, Artificial Sequence
  Description of Artificial Sequence: Synthetic oligonucleotide
  Antisense strand to SEQ ID NO: 1053040
agacccaugcagaaagcuc

SEQ ID NO: 1053042 - RNA, 19 nt, Artificial Sequence
  Description of Artificial Sequence: Synthetic oligonucleotide
  Sense strand starting at position 182 of SEQ ID NO: 915092
agaucauauccuugucuuu

SEQ ID NO: 1053043 - RNA, 19 nt, Artificial Sequence
  Description of Artificial Sequence: Synthetic oligonucleotide
  Antisense strand to SEQ ID NO: 1053042
aaagacaaggauaugaucu

SEQ ID NO: 1053044 - RNA, 19 nt, Artificial Sequence
  Description of Artificial Sequence: Synthetic oligonucleotide
  Sense strand starting at position 225 of SEQ ID NO: 915092
aaaggaucagucuguacuu

SEQ ID NO: 1053045 - RNA, 19 nt, Artificial Sequence
  Description of Artificial Sequence: Synthetic oligonucleotide
  Antisense strand to SEQ ID NO: 1053044
aaguacagacugauccuuu

SEQ ID NO: 1053046 - RNA, 19 nt, Artificial Sequence
  Description of Artificial Sequence: Synthetic oligonucleotide
  Sense strand starting at position 250 of SEQ ID NO: 915092
cuugacaaguucuuaaggu

SEQ ID NO: 1053047 - RNA, 19 nt, Artificial Sequence
  Description of Artificial Sequence: Synthetic oligonucleotide
  Antisense strand to SEQ ID NO: 1053046
accuuaagaacuugucaag

SEQ ID NO: 1053048 - RNA, 19 nt, Artificial Sequence
  Description of Artificial Sequence: Synthetic oligonucleotide
  Sense strand starting at position 285 of SEQ ID NO: 915092
cagggauuuggcuggcuuu

SEQ ID NO: 1053049 - RNA, 19 nt, Artificial Sequence
  Description of Artificial Sequence: Synthetic oligonucleotide
  Antisense strand to SEQ ID NO: 1053048
aaagccagccaaaucccug

SEQ ID NO: 1053050 - RNA, 19 nt, Artificial Sequence
  Description of Artificial Sequence: Synthetic oligonucleotide
  Sense strand starting at position 288 of SEQ ID NO: 915092
ggauuuggcuggcuuuacu

SEQ ID NO: 1053051 - RNA, 19 nt, Artificial Sequence
  Description of Artificial Sequence: Synthetic oligonucleotide
  Antisense strand to SEQ ID NO: 1053050
aguaaagccagccaaaucc

SEQ ID NO: 1053052 - RNA, 19 nt, Artificial Sequence
  Description of Artificial Sequence: Synthetic oligonucleotide
  Sense strand starting at position 321 of SEQ ID NO: 915092
gugcuaaaugcagagggau

SEQ ID NO: 1053053 - RNA, 19 nt, Artificial Sequence
  Description of Artificial Sequence: Synthetic oligonucleotide
  Antisense strand to SEQ ID NO: 1053052
aucccucugcauuuagcac

SEQ ID NO: 1053054 - RNA, 19 nt, Artificial Sequence
  Description of Artificial Sequence: Synthetic oligonucleotide
  Sense strand starting at position 333 of SEQ ID NO: 915092
gagggauccugacugagca

SEQ ID NO: 1053055 - RNA, 19 nt, Artificial Sequence
  Description of Artificial Sequence: Synthetic oligonucleotide
  Antisense strand to SEQ ID NO: 1053054
ugcucagucaggaucccuc

SEQ ID NO: 1053056 - RNA, 19 nt, Artificial Sequence
  Description of Artificial Sequence: Synthetic oligonucleotide
  Sense strand starting at position 334 of SEQ ID NO: 915092
agggauccugacugagcau

SEQ ID NO: 1053057 - RNA, 19 nt, Artificial Sequence
  Description of Artificial Sequence: Synthetic oligonucleotide
  Antisense strand to SEQ ID NO: 1053056
augcucagucaggaucccu

SEQ ID NO: 1053058 - RNA, 19 nt, Artificial Sequence
  Description of Artificial Sequence: Synthetic oligonucleotide
  Sense strand starting at position 463 of SEQ ID NO: 915092
gcuggacgcccuuaggaaa

SEQ ID NO: 1053059 - RNA, 19 nt, Artificial Sequence
  Description of Artificial Sequence: Synthetic oligonucleotide
  Antisense strand to SEQ ID NO: 1053058
uuuccuaagggcguccagc

SEQ ID NO: 1053060 - RNA, 19 nt, Artificial Sequence
  Description of Artificial Sequence: Synthetic oligonucleotide
  Sense strand starting at position 533 of SEQ ID NO: 915092
acauauaauuuggacauga

SEQ ID NO: 1053061 - RNA, 19 nt, Artificial Sequence
  Description of Artificial Sequence: Synthetic oligonucleotide
  Antisense strand to SEQ ID NO: 1053060
ucauguccaaauuauaugu

SEQ ID NO: 1053062 - RNA, 19 nt, Artificial Sequence
  Description of Artificial Sequence: Synthetic oligonucleotide
  Sense strand starting at position 584 of SEQ ID NO: 915092
uagcaauaagagggucuuu

SEQ ID NO: 1053063 - RNA, 19 nt, Artificial Sequence
  Description of Artificial Sequence: Synthetic oligonucleotide
  Antisense strand to SEQ ID NO: 1053062
aaagacccucuuauugcua

SEQ ID NO: 1053064 - RNA, 19 nt, Artificial Sequence
  Description of Artificial Sequence: Synthetic oligonucleotide
  Sense strand starting at position 646 of SEQ ID NO: 915092
agccauuaaguaugaauaa

SEQ ID NO: 1053065 - RNA, 19 nt, Artificial Sequence
  Description of Artificial Sequence: Synthetic oligonucleotide
  Antisense strand to SEQ ID NO: 1053064
uuauucauacuuaauggcu

SEQ ID NO: 1053066 - RNA, 19 nt, Artificial Sequence
  Description of Artificial Sequence: Synthetic oligonucleotide
  Sense strand starting at position 788 of SEQ ID NO: 915092
cuguuuaacuuggcugaaa

SEQ ID NO: 1053067 - RNA, 19 nt, Artificial Sequence
  Description of Artificial Sequence: Synthetic oligonucleotide
  Antisense strand to SEQ ID NO: 1053066
uuucagccaaguuaaacag

SEQ ID NO: 1053068 - RNA, 19 nt, Artificial Sequence
  Description of Artificial Sequence: Synthetic oligonucleotide
  Sense strand starting at position 791 of SEQ ID NO: 915092
uuuaacuuggcugaaaucu

SEQ ID NO: 1053069 - RNA, 19 nt, Artificial Sequence
  Description of Artificial Sequence: Synthetic oligonucleotide
  Antisense strand to SEQ ID NO: 1053068
agauuucagccaaguuaaa

SEQ ID NO: 1053070 - RNA, 19 nt, Artificial Sequence
  Description of Artificial Sequence: Synthetic oligonucleotide
  Sense strand starting at position 855 of SEQ ID NO: 915092
uucucaguacauugauauc

SEQ ID NO: 1053071 - RNA, 19 nt, Artificial Sequence
  Description of Artificial Sequence: Synthetic oligonucleotide
  Antisense strand to SEQ ID NO: 1053070
gauaucaauguacugagaa

SEQ ID NO: 1053072 - RNA, 19 nt, Artificial Sequence
  Description of Artificial Sequence: Synthetic oligonucleotide
  Sense strand starting at position 887 of SEQ ID NO: 915092
gugaccuaaugguuuauca

SEQ ID NO: 1053073 - RNA, 19 nt, Artificial Sequence
  Description of Artificial Sequence: Synthetic oligonucleotide
  Antisense strand to SEQ ID NO: 1053072
ugauaaaccauuaggucac

SEQ ID NO: 1053074 - RNA, 19 nt, Artificial Sequence
  Description of Artificial Sequence: Synthetic oligonucleotide
  Sense strand starting at position 924 of SEQ ID NO: 915092
gcugaaauccauuaucagc

SEQ ID NO: 1053075 - RNA, 19 nt, Artificial Sequence
  Description of Artificial Sequence: Synthetic oligonucleotide
  Antisense strand to SEQ ID NO: 1053074
gcugauaauggauuucagc

SEQ ID NO: 1053076 - RNA, 19 nt, Artificial Sequence
  Description of Artificial Sequence: Synthetic oligonucleotide
  Sense strand starting at position 1059 of SEQ ID NO: 915092
uuagcuauggauuaaaucu

SEQ ID NO: 1053077 - RNA, 19 nt, Artificial Sequence
  Description of Artificial Sequence: Synthetic oligonucleotide
  Antisense strand to SEQ ID NO: 1053076
agauuuaauccauagcuaa

SEQ ID NO: 1053078 - RNA, 19 nt, Artificial Sequence
  Description of Artificial Sequence: Synthetic oligonucleotide
  Sense strand starting at position 1166 of SEQ ID NO: 915092
gcuuaaggucuggaaguag

SEQ ID NO: 1053079 - RNA, 19 nt, Artificial Sequence
  Description of Artificial Sequence: Synthetic oligonucleotide
  Antisense strand to SEQ ID NO: 1053078
cuacuuccagaccuuaagc

SEQ ID NO: 1053080 - RNA, 19 nt, Artificial Sequence
  Description of Artificial Sequence: Synthetic oligonucleotide
  Sense strand starting at position 1198 of SEQ ID NO: 915092
ggaguucggcucuaaacug

SEQ ID NO: 1053081 - RNA, 19 nt, Artificial Sequence
  Description of Artificial Sequence: Synthetic oligonucleotide
  Antisense strand to SEQ ID NO: 1053080
caguuuagagccgaacucc

SEQ ID NO: 1053082 - RNA, 19 nt, Artificial Sequence
  Description of Artificial Sequence: Synthetic oligonucleotide
  Sense strand starting at position 1248 of SEQ ID NO: 915092
ggcaaugugucauuugcua

SEQ ID NO: 1053083 - RNA, 19 nt, Artificial Sequence
  Description of Artificial Sequence: Synthetic oligonucleotide
  Antisense strand to SEQ ID NO: 1053082
uagcaaaugacacauugcc

SEQ ID NO: 1053084 - RNA, 19 nt, Artificial Sequence
  Description of Artificial Sequence: Synthetic oligonucleotide
  Sense strand starting at position 2232 of SEQ ID NO: 915092
ucaggauggagcugagaau

SEQ ID NO: 1053085 - RNA, 19 nt, Artificial Sequence
  Description of Artificial Sequence: Synthetic oligonucleotide
  Antisense strand to SEQ ID NO: 1053084
auucucagcuccauccuga

SEQ ID NO: 1053086 - RNA, 19 nt, Artificial Sequence
  Description of Artificial Sequence: Synthetic oligonucleotide
  Sense strand starting at position 2332 of SEQ ID NO: 915092
uaaggaaauccuugaguuu

SEQ ID NO: 1053087 - RNA, 19 nt, Artificial Sequence
  Description of Artificial Sequence: Synthetic oligonucleotide
  Antisense strand to SEQ ID NO: 1053086
aaacucaaggauuuccuua

SEQ ID NO: 1053088 - RNA, 19 nt, Artificial Sequence
  Description of Artificial Sequence: Synthetic oligonucleotide
  Sense strand starting at position 2384 of SEQ ID NO: 915092
agcugcaggccagaaauau

SEQ ID NO: 1053089 - RNA, 19 nt, Artificial Sequence
  Description of Artificial Sequence: Synthetic oligonucleotide
  Antisense strand to SEQ ID NO: 1053088
auauuucuggccugcagcu

SEQ ID NO: 1053090 - RNA, 19 nt, Artificial Sequence
  Description of Artificial Sequence: Synthetic oligonucleotide
  Sense strand starting at position 2474 of SEQ ID NO: 915092
cuuugaauuugucugugca

SEQ ID NO: 1053091 - RNA, 19 nt, Artificial Sequence
  Description of Artificial Sequence: Synthetic oligonucleotide
  Antisense strand to SEQ ID NO: 1053090
ugcacagacaaauucaaag

SEQ ID NO: 1053092 - RNA, 19 nt, Artificial Sequence
  Description of Artificial Sequence: Synthetic oligonucleotide
  Sense strand starting at position 2475 of SEQ ID NO: 915092
uuugaauuugucugugcag

SEQ ID NO: 1053093 - RNA, 19 nt, Artificial Sequence
  Description of Artificial Sequence: Synthetic oligonucleotide
  Antisense strand to SEQ ID NO: 1053092
cugcacagacaaauucaaa

SEQ ID NO: 1053094 - RNA, 19 nt, Artificial Sequence
  Description of Artificial Sequence: Synthetic oligonucleotide
  Sense strand starting at position 2476 of SEQ ID NO: 915092
uugaauuugucugugcagu

SEQ ID NO: 1053095 - RNA, 19 nt, Artificial Sequence
  Description of Artificial Sequence: Synthetic oligonucleotide
  Antisense strand to SEQ ID NO: 1053094
acugcacagacaaauucaa

SEQ ID NO: 1053096 - RNA, 19 nt, Artificial Sequence
  Description of Artificial Sequence: Synthetic oligonucleotide
  Sense strand starting at position 2477 of SEQ ID NO: 915092
ugaauuugucugugcaguc

SEQ ID NO: 1053097 - RNA, 19 nt, Artificial Sequence
  Description of Artificial Sequence: Synthetic oligonucleotide
  Antisense strand to SEQ ID NO: 1053096
gacugcacagacaaauuca

SEQ ID NO: 1053098 - RNA, 19 nt, Artificial Sequence
  Description of Artificial Sequence: Synthetic oligonucleotide
  Sense strand starting at position 2516 of SEQ ID NO: 915092
ccugccuuuccaugggaaa

SEQ ID NO: 1053099 - RNA, 19 nt, Artificial Sequence
  Description of Artificial Sequence: Synthetic oligonucleotide
  Antisense strand to SEQ ID NO: 1053098
uuucccauggaaaggcagg

SEQ ID NO: 1053100 - RNA, 19 nt, Artificial Sequence
  Description of Artificial Sequence: Synthetic oligonucleotide
  Sense strand starting at position 2517 of SEQ ID NO: 915092
cugccuuuccaugggaaag

SEQ ID NO: 1053101 - RNA, 19 nt, Artificial Sequence
  Description of Artificial Sequence: Synthetic oligonucleotide
  Antisense strand to SEQ ID NO: 1053100
cuuucccauggaaaggcag

SEQ ID NO: 1053102 - RNA, 19 nt, Artificial Sequence
  Description of Artificial Sequence: Synthetic oligonucleotide
  Sense strand starting at position 2591 of SEQ ID NO: 915092
gcaucuauggaaugugaaa

SEQ ID NO: 1053103 - RNA, 19 nt, Artificial Sequence
  Description of Artificial Sequence: Synthetic oligonucleotide
  Antisense strand to SEQ ID NO: 1053102
uuucacauuccauagaugc

SEQ ID NO: 1053104 - RNA, 19 nt, Artificial Sequence
  Description of Artificial Sequence: Synthetic oligonucleotide
  Sense strand starting at position 2608 of SEQ ID NO: 915092
aaagaaugcucuccaggag

SEQ ID NO: 1053105 - RNA, 19 nt, Artificial Sequence
  Description of Artificial Sequence: Synthetic oligonucleotide
  Antisense strand to SEQ ID NO: 1053104
cuccuggagagcauucuuu

SEQ ID NO: 1053106 - RNA, 19 nt, Artificial Sequence
  Description of Artificial Sequence: Synthetic oligonucleotide
  Sense strand starting at position 2609 of SEQ ID NO: 915092
aagaaugcucuccaggagu

SEQ ID NO: 1053107 - RNA, 19 nt, Artificial Sequence
  Description of Artificial Sequence: Synthetic oligonucleotide
  Antisense strand to SEQ ID NO: 1053106
acuccuggagagcauucuu

SEQ ID NO: 1053108 - RNA, 19 nt, Artificial Sequence
  Description of Artificial Sequence: Synthetic oligonucleotide
  Sense strand starting at position 2611 of SEQ ID NO: 915092
gaaugcucuccaggaguca

SEQ ID NO: 1053109 - RNA, 19 nt, Artificial Sequence
  Description of Artificial Sequence: Synthetic oligonucleotide
  Antisense strand to SEQ ID NO: 1053108
ugacuccuggagagcauuc

SEQ ID NO: 1053110 - RNA, 19 nt, Artificial Sequence
  Description of Artificial Sequence: Synthetic oligonucleotide
  Sense strand starting at position 2767 of SEQ ID NO: 915092
acuggugguccuuaaacuu

SEQ ID NO: 1053111 - RNA, 19 nt, Artificial Sequence
  Description of Artificial Sequence: Synthetic oligonucleotide
  Antisense strand to SEQ ID NO: 1053110
aaguuuaaggaccaccagu

SEQ ID NO: 1053112 - RNA, 19 nt, Artificial Sequence
  Description of Artificial Sequence: Synthetic oligonucleotide
  Sense strand starting at position 3019 of SEQ ID NO: 915092
gugagaauauucucucuga

SEQ ID NO: 1053113 - RNA, 19 nt, Artificial Sequence
  Description of Artificial Sequence: Synthetic oligonucleotide
  Antisense strand to SEQ ID NO: 1053112
ucagagagaauauucucac

SEQ ID NO: 1053114 - RNA, 19 nt, Artificial Sequence
  Description of Artificial Sequence: Synthetic oligonucleotide
  Sense strand starting at position 3075 of SEQ ID NO: 915092
gggugcucuaguugauuua

SEQ ID NO: 1053115 - RNA, 19 nt, Artificial Sequence
  Description of Artificial Sequence: Synthetic oligonucleotide
  Antisense strand to SEQ ID NO: 1053114
uaaaucaacuagagcaccc

SEQ ID NO: 1053116 - RNA, 19 nt, Artificial Sequence
  Description of Artificial Sequence: Synthetic oligonucleotide
  Sense strand starting at position 3654 of SEQ ID NO: 915092
ucauauucucgugaccaga

SEQ ID NO: 1053117 - RNA, 19 nt, Artificial Sequence
  Description of Artificial Sequence: Synthetic oligonucleotide
  Antisense strand to SEQ ID NO: 1053116
ucuggucacgagaauauga

SEQ ID NO: 1053118 - RNA, 19 nt, Artificial Sequence
  Description of Artificial Sequence: Synthetic oligonucleotide
  Sense strand starting at position 3738 of SEQ ID NO: 915092
ugaagccaucuuuauuaga

SEQ ID NO: 1053119 - RNA, 19 nt, Artificial Sequence
  Description of Artificial Sequence: Synthetic oligonucleotide
  Antisense strand to SEQ ID NO: 1053118
ucuaauaaagauggcuuca

SEQ ID NO: 1053120 - RNA, 19 nt, Artificial Sequence
  Description of Artificial Sequence: Synthetic oligonucleotide
  Sense strand starting at position 3944 of SEQ ID NO: 915092
gugucugauccuuccgcuu

SEQ ID NO: 1053121 - RNA, 19 nt, Artificial Sequence
  Description of Artificial Sequence: Synthetic oligonucleotide
  Antisense strand to SEQ ID NO: 1053120
aagcggaaggaucagacac

SEQ ID NO: 1053122 - RNA, 19 nt, Artificial Sequence
  Description of Artificial Sequence: Synthetic oligonucleotide
  Sense strand starting at position 168 of SEQ ID NO: 915093
cuguacuuggcugauguua

SEQ ID NO: 1053123 - RNA, 19 nt, Artificial Sequence
  Description of Artificial Sequence: Synthetic oligonucleotide
  Antisense strand to SEQ ID NO: 1053122
uaacaucagccaaguacag

SEQ ID NO: 1053124 - RNA, 19 nt, Artificial Sequence
  Description of Artificial Sequence: Synthetic oligonucleotide
  Sense strand starting at position 264 of SEQ ID NO: 915093
agaacugaaucugaugaaa

SEQ ID NO: 1053125 - RNA, 19 nt, Artificial Sequence
  Description of Artificial Sequence: Synthetic oligonucleotide
  Antisense strand to SEQ ID NO: 1053124
uuucaucagauucaguucu

SEQ ID NO: 1053126 - RNA, 19 nt, Artificial Sequence
  Description of Artificial Sequence: Synthetic oligonucleotide
  Sense strand starting at position 302 of SEQ ID NO: 915093
aucuguuuggugagugagu

SEQ ID NO: 1053127 - RNA, 19 nt, Artificial Sequence
  Description of Artificial Sequence: Synthetic oligonucleotide
  Antisense strand to SEQ ID NO: 1053126
acucacucaccaaacagau

SEQ ID NO: 1053128 - RNA, 19 nt, Artificial Sequence
  Description of Artificial Sequence: Synthetic oligonucleotide
  Sense strand starting at position 315 of SEQ ID NO: 915093
gugaguugcauccaaugac

SEQ ID NO: 1053129 - RNA, 19 nt, Artificial Sequence
  Description of Artificial Sequence: Synthetic oligonucleotide
  Antisense strand to SEQ ID NO: 1053128
gucauuggaugcaacucac

SEQ ID NO: 1053130 - RNA, 19 nt, Artificial Sequence
  Description of Artificial Sequence: Synthetic oligonucleotide
  Sense strand starting at position 469 of SEQ ID NO: 915093
augcuaugucaggacgaag

SEQ ID NO: 1053131 - RNA, 19 nt, Artificial Sequence
  Description of Artificial Sequence: Synthetic oligonucleotide
  Antisense strand to SEQ ID NO: 1053130
cuucguccugacauagcau

SEQ ID NO: 1053132 - RNA, 19 nt, Artificial Sequence
  Description of Artificial Sequence: Synthetic oligonucleotide
  Sense strand starting at position 543 of SEQ ID NO: 915093
accugaggcccuggagaau

SEQ ID NO: 1053133 - RNA, 19 nt, Artificial Sequence
  Description of Artificial Sequence: Synthetic oligonucleotide
  Antisense strand to SEQ ID NO: 1053132
auucuccagggccucaggu

SEQ ID NO: 1053134 - RNA, 19 nt, Artificial Sequence
  Description of Artificial Sequence: Synthetic oligonucleotide
  Sense strand starting at position 831 of SEQ ID NO: 915093
agagacagaucucugugua

SEQ ID NO: 1053135 - RNA, 19 nt, Artificial Sequence
  Description of Artificial Sequence: Synthetic oligonucleotide
  Antisense strand to SEQ ID NO: 1053134
uacacagagaucugucucu

SEQ ID NO: 1053136 - RNA, 19 nt, Artificial Sequence
  Description of Artificial Sequence: Synthetic oligonucleotide
  Sense strand starting at position 832 of SEQ ID NO: 915093
gagacagaucucuguguaa

SEQ ID NO: 1053137 - RNA, 19 nt, Artificial Sequence
  Description of Artificial Sequence: Synthetic oligonucleotide
  Antisense strand to SEQ ID NO: 1053136
uuacacagagaucugucuc

SEQ ID NO: 1053138 - RNA, 19 nt, Artificial Sequence
  Description of Artificial Sequence: Synthetic oligonucleotide
  Sense strand starting at position 834 of SEQ ID NO: 915093
gacagaucucuguguaacc

SEQ ID NO: 1053139 - RNA, 19 nt, Artificial Sequence
  Description of Artificial Sequence: Synthetic oligonucleotide
  Antisense strand to SEQ ID NO: 1053138
gguuacacagagaucuguc

SEQ ID NO: 1053140 - RNA, 19 nt, Artificial Sequence
  Description of Artificial Sequence: Synthetic oligonucleotide
  Sense strand starting at position 835 of SEQ ID NO: 915093
acagaucucuguguaaccu

SEQ ID NO: 1053141 - RNA, 19 nt, Artificial Sequence
  Description of Artificial Sequence: Synthetic oligonucleotide
  Antisense strand to SEQ ID NO: 1053140
agguuacacagagaucugu

SEQ ID NO: 1053142 - RNA, 19 nt, Artificial Sequence
  Description of Artificial Sequence: Synthetic oligonucleotide
  Sense strand starting at position 981 of SEQ ID NO: 915093
aggguugucgacguguuau

SEQ ID NO: 1053143 - RNA, 19 nt, Artificial Sequence
  Description of Artificial Sequence: Synthetic oligonucleotide
  Antisense strand to SEQ ID NO: 1053142
auaacacgucgacaacccu

SEQ ID NO: 1053144 - RNA, 19 nt, Artificial Sequence
  Description of Artificial Sequence: Synthetic oligonucleotide
  Sense strand starting at position 1256 of SEQ ID NO: 915093
cucuaucgucuauagcaau

SEQ ID NO: 1053145 - RNA, 19 nt, Artificial Sequence
  Description of Artificial Sequence: Synthetic oligonucleotide
  Antisense strand to SEQ ID NO: 1053144
auugcuauagacgauagag

SEQ ID NO: 1053146 - RNA, 19 nt, Artificial Sequence
  Description of Artificial Sequence: Synthetic oligonucleotide
  Sense strand starting at position 2277 of SEQ ID NO: 915093
cgcugaugucaauugcugu

SEQ ID NO: 1053147 - RNA, 19 nt, Artificial Sequence
  Description of Artificial Sequence: Synthetic oligonucleotide
  Antisense strand to SEQ ID NO: 1053146
acagcaauugacaucagcg

SEQ ID NO: 1053148 - RNA, 19 nt, Artificial Sequence
  Description of Artificial Sequence: Synthetic oligonucleotide
  Sense strand starting at position 2335 of SEQ ID NO: 915093
cuuguuugugaagaugaga

SEQ ID NO: 1053149 - RNA, 19 nt, Artificial Sequence
  Description of Artificial Sequence: Synthetic oligonucleotide
  Antisense strand to SEQ ID NO: 1053148
ucucaucuucacaaacaag

SEQ ID NO: 1053150 - RNA, 19 nt, Artificial Sequence
  Description of Artificial Sequence: Synthetic oligonucleotide
  Sense strand starting at position 2348 of SEQ ID NO: 915093
augagagcacuucguaagu

SEQ ID NO: 1053151 - RNA, 19 nt, Artificial Sequence
  Description of Artificial Sequence: Synthetic oligonucleotide
  Antisense strand to SEQ ID NO: 1053150
acuuacgaagugcucucau

SEQ ID NO: 1053152 - RNA, 19 nt, Artificial Sequence
  Description of Artificial Sequence: Synthetic oligonucleotide
  Sense strand starting at position 2459 of SEQ ID NO: 915093
cagagagggcuuggugauu

SEQ ID NO: 1053153 - RNA, 19 nt, Artificial Sequence
  Description of Artificial Sequence: Synthetic oligonucleotide
  Antisense strand to SEQ ID NO: 1053152
aaucaccaagcccucucug

SEQ ID NO: 1053154 - RNA, 19 nt, Artificial Sequence
  Description of Artificial Sequence: Synthetic oligonucleotide
  Sense strand starting at position 2464 of SEQ ID NO: 915093
agggcuuggugauuggaga

SEQ ID NO: 1053155 - RNA, 19 nt, Artificial Sequence
  Description of Artificial Sequence: Synthetic oligonucleotide
  Antisense strand to SEQ ID NO: 1053154
ucuccaaucaccaagcccu

SEQ ID NO: 1053156 - RNA, 19 nt, Artificial Sequence
  Description of Artificial Sequence: Synthetic oligonucleotide
  Sense strand starting at position 2465 of SEQ ID NO: 915093
gggcuuggugauuggagau

SEQ ID NO: 1053157 - RNA, 19 nt, Artificial Sequence
  Description of Artificial Sequence: Synthetic oligonucleotide
  Antisense strand to SEQ ID NO: 1053156
aucuccaaucaccaagccc

SEQ ID NO: 1053158 - RNA, 19 nt, Artificial Sequence
  Description of Artificial Sequence: Synthetic oligonucleotide
  Sense strand starting at position 2495 of SEQ ID NO: 915093
uaaguuaaaccuuggagcu

SEQ ID NO: 1053159 - RNA, 19 nt, Artificial Sequence
  Description of Artificial Sequence: Synthetic oligonucleotide
  Antisense strand to SEQ ID NO: 1053158
agcuccaagguuuaacuua

SEQ ID NO: 1053160 - RNA, 19 nt, Artificial Sequence
  Description of Artificial Sequence: Synthetic oligonucleotide
  Sense strand starting at position 2496 of SEQ ID NO: 915093
aaguuaaaccuuggagcua

SEQ ID NO: 1053161 - RNA, 19 nt, Artificial Sequence
  Description of Artificial Sequence: Synthetic oligonucleotide
  Antisense strand to SEQ ID NO: 1053160
uagcuccaagguuuaacuu

SEQ ID NO: 1053162 - RNA, 19 nt, Artificial Sequence
  Description of Artificial Sequence: Synthetic oligonucleotide
  Sense strand starting at position 2568 of SEQ ID NO: 915093
cgauucugcuucccaaaca

SEQ ID NO: 1053163 - RNA, 19 nt, Artificial Sequence
  Description of Artificial Sequence: Synthetic oligonucleotide
  Antisense strand to SEQ ID NO: 1053162
uguuugggaagcagaaucg

SEQ ID NO: 1053164 - RNA, 19 nt, Artificial Sequence
  Description of Artificial Sequence: Synthetic oligonucleotide
  Sense strand starting at position 2657 of SEQ ID NO: 915093
cgugguucucaagacuuga

SEQ ID NO: 1053165 - RNA, 19 nt, Artificial Sequence
  Description of Artificial Sequence: Synthetic oligonucleotide
  Antisense strand to SEQ ID NO: 1053164
ucaagucuugagaaccacg

SEQ ID NO: 1053166 - RNA, 19 nt, Artificial Sequence
  Description of Artificial Sequence: Synthetic oligonucleotide
  Sense strand starting at position 2661 of SEQ ID NO: 915093
guucucaagacuugaguga

SEQ ID NO: 1053167 - RNA, 19 nt, Artificial Sequence
  Description of Artificial Sequence: Synthetic oligonucleotide
  Antisense strand to SEQ ID NO: 1053166
ucacucaagucuugagaac

SEQ ID NO: 1053168 - RNA, 19 nt, Artificial Sequence
  Description of Artificial Sequence: Synthetic oligonucleotide
  Sense strand starting at position 2665 of SEQ ID NO: 915093
ucaagacuugagugagcau

SEQ ID NO: 1053169 - RNA, 19 nt, Artificial Sequence
  Description of Artificial Sequence: Synthetic oligonucleotide
  Antisense strand to SEQ ID NO: 1053168
augcucacucaagucuuga

SEQ ID NO: 1053170 - RNA, 19 nt, Artificial Sequence
  Description of Artificial Sequence: Synthetic oligonucleotide
  Sense strand starting at position 2728 of SEQ ID NO: 915093
cccagaacuccugguuuau

SEQ ID NO: 1053171 - RNA, 19 nt, Artificial Sequence
  Description of Artificial Sequence: Synthetic oligonucleotide
  Antisense strand to SEQ ID NO: 1053170
auaaaccaggaguucuggg

SEQ ID NO: 1053172 - RNA, 19 nt, Artificial Sequence
  Description of Artificial Sequence: Synthetic oligonucleotide
  Sense strand starting at position 2825 of SEQ ID NO: 915093
gagcauuacugacccggau

SEQ ID NO: 1053173 - RNA, 19 nt, Artificial Sequence
  Description of Artificial Sequence: Synthetic oligonucleotide
  Antisense strand to SEQ ID NO: 1053172
auccgggucaguaaugcuc

SEQ ID NO: 1053174 - RNA, 19 nt, Artificial Sequence
  Description of Artificial Sequence: Synthetic oligonucleotide
  Sense strand starting at position 2827 of SEQ ID NO: 915093
gcauuacugacccggauga

SEQ ID NO: 1053175 - RNA, 19 nt, Artificial Sequence
  Description of Artificial Sequence: Synthetic oligonucleotide
  Antisense strand to SEQ ID NO: 1053174
ucauccgggucaguaaugc

SEQ ID NO: 1053176 - RNA, 19 nt, Artificial Sequence
  Description of Artificial Sequence: Synthetic oligonucleotide
  Sense strand starting at position 2964 of SEQ ID NO: 915093
cgaggaagaaucuggcaaa

SEQ ID NO: 1053177 - RNA, 19 nt, Artificial Sequence
  Description of Artificial Sequence: Synthetic oligonucleotide
  Antisense strand to SEQ ID NO: 1053176
uuugccagauucuuccucg

SEQ ID NO: 1053178 - RNA, 19 nt, Artificial Sequence
  Description of Artificial Sequence: Synthetic oligonucleotide
  Sense strand starting at position 3211 of SEQ ID NO: 915093
uugugagaugguggcuaau

SEQ ID NO: 1053179 - RNA, 19 nt, Artificial Sequence
  Description of Artificial Sequence: Synthetic oligonucleotide
  Antisense strand to SEQ ID NO: 1053178
auuagccaccaucucacaa

SEQ ID NO: 1053180 - RNA, 19 nt, Artificial Sequence
  Description of Artificial Sequence: Synthetic oligonucleotide
  Sense strand starting at position 3213 of SEQ ID NO: 915093
gugagaugguggcuaauca

SEQ ID NO: 1053181 - RNA, 19 nt, Artificial Sequence
  Description of Artificial Sequence: Synthetic oligonucleotide
  Antisense strand to SEQ ID NO: 1053180
ugauuagccaccaucucac

SEQ ID NO: 1053182 - RNA, 19 nt, Artificial Sequence
  Description of Artificial Sequence: Synthetic oligonucleotide
  Sense strand starting at position 3217 of SEQ ID NO: 915093
gaugguggcuaaucaauca

SEQ ID NO: 1053183 - RNA, 19 nt, Artificial Sequence
  Description of Artificial Sequence: Synthetic oligonucleotide
  Antisense strand to SEQ ID NO: 1053182
ugauugauuagccaccauc

SEQ ID NO: 1053184 - RNA, 19 nt, Artificial Sequence
  Description of Artificial Sequence: Synthetic oligonucleotide
  Sense strand starting at position 3224 of SEQ ID NO: 915093
gcuaaucaaucagugggau

SEQ ID NO: 1053185 - RNA, 19 nt, Artificial Sequence
  Description of Artificial Sequence: Synthetic oligonucleotide
  Antisense strand to SEQ ID NO: 1053184
aucccacugauugauuagc

SEQ ID NO: 1053186 - RNA, 19 nt, Artificial Sequence
  Description of Artificial Sequence: Synthetic oligonucleotide
  Sense strand starting at position 3334 of SEQ ID NO: 915093
gggucauuggcagaaauuc

SEQ ID NO: 1053187 - RNA, 19 nt, Artificial Sequence
  Description of Artificial Sequence: Synthetic oligonucleotide
  Antisense strand to SEQ ID NO: 1053186
gaauuucugccaaugaccc

SEQ ID NO: 1053188 - RNA, 19 nt, Artificial Sequence
  Description of Artificial Sequence: Synthetic oligonucleotide
  Sense strand starting at position 3394 of SEQ ID NO: 915093
cugccugauccucacagaa

SEQ ID NO: 1053189 - RNA, 19 nt, Artificial Sequence
  Description of Artificial Sequence: Synthetic oligonucleotide
  Antisense strand to SEQ ID NO: 1053188
uucugugaggaucaggcag

SEQ ID NO: 1053190 - RNA, 19 nt, Artificial Sequence
  Description of Artificial Sequence: Synthetic oligonucleotide
  Sense strand starting at position 3592 of SEQ ID NO: 915093
uaggaagugugucuuguca

SEQ ID NO: 1053191 - RNA, 19 nt, Artificial Sequence
  Description of Artificial Sequence: Synthetic oligonucleotide
  Antisense strand to SEQ ID NO: 1053190
ugacaagacacacuuccua

SEQ ID NO: 1053192 - RNA, 19 nt, Artificial Sequence
  Description of Artificial Sequence: Synthetic oligonucleotide
  Sense strand starting at position 3600 of SEQ ID NO: 915093
gugucuugucauuacucua

SEQ ID NO: 1053193 - RNA, 19 nt, Artificial Sequence
  Description of Artificial Sequence: Synthetic oligonucleotide
  Antisense strand to SEQ ID NO: 1053192
uagaguaaugacaagacac

SEQ ID NO: 1053194 - RNA, 19 nt, Artificial Sequence
  Description of Artificial Sequence: Synthetic oligonucleotide
  Sense strand starting at position 3605 of SEQ ID NO: 915093
uugucauuacucuaggcca

SEQ ID NO: 1053195 - RNA, 19 nt, Artificial Sequence
  Description of Artificial Sequence: Synthetic oligonucleotide
  Antisense strand to SEQ ID NO: 1053194
uggccuagaguaaugacaa

SEQ ID NO: 1053196 - RNA, 19 nt, Artificial Sequence
  Description of Artificial Sequence: Synthetic oligonucleotide
  Sense strand starting at position 3655 of SEQ ID NO: 915093
cucagaaaugcuuguugaa

SEQ ID NO: 1053197 - RNA, 19 nt, Artificial Sequence
  Description of Artificial Sequence: Synthetic oligonucleotide
  Antisense strand to SEQ ID NO: 1053196
uucaacaagcauuucugag

SEQ ID NO: 1053198 - RNA, 19 nt, Artificial Sequence
  Description of Artificial Sequence: Synthetic oligonucleotide
  Sense strand starting at position 3657 of SEQ ID NO: 915093
cagaaaugcuuguugaaug

SEQ ID NO: 1053199 - RNA, 19 nt, Artificial Sequence
  Description of Artificial Sequence: Synthetic oligonucleotide
  Antisense strand to SEQ ID NO: 1053198
cauucaacaagcauuucug

SEQ ID NO: 1053200 - RNA, 19 nt, Artificial Sequence
  Description of Artificial Sequence: Synthetic oligonucleotide
  Sense strand starting at position 3955 of SEQ ID NO: 915093
gaaggugaaggcugauaga

SEQ ID NO: 1053201 - RNA, 19 nt, Artificial Sequence
  Description of Artificial Sequence: Synthetic oligonucleotide
  Antisense strand to SEQ ID NO: 1053200
ucuaucagccuucaccuuc

SEQ ID NO: 1053202 - RNA, 19 nt, Artificial Sequence
  Description of Artificial Sequence: Synthetic oligonucleotide
  Sense strand starting at position 111 of SEQ ID NO: 915094
acauuagaaagucgaguuu

SEQ ID NO: 1053203 - RNA, 19 nt, Artificial Sequence
  Description of Artificial Sequence: Synthetic oligonucleotide
  Antisense strand to SEQ ID NO: 1053202
aaacucgacuuucuaaugu

SEQ ID NO: 1053204 - RNA, 19 nt, Artificial Sequence
  Description of Artificial Sequence: Synthetic oligonucleotide
  Sense strand starting at position 735 of SEQ ID NO: 915094
ucuaucaaauagcugagaa

SEQ ID NO: 1053205 - RNA, 19 nt, Artificial Sequence
  Description of Artificial Sequence: Synthetic oligonucleotide
  Antisense strand to SEQ ID NO: 1053204
uucucagcuauuugauaga

SEQ ID NO: 1053206 - RNA, 19 nt, Artificial Sequence
  Description of Artificial Sequence: Synthetic oligonucleotide
  Sense strand starting at position 986 of SEQ ID NO: 915094
ucaggagcuauaugugauc

SEQ ID NO: 1053207 - RNA, 19 nt, Artificial Sequence
  Description of Artificial Sequence: Synthetic oligonucleotide
  Antisense strand to SEQ ID NO: 1053206
gaucacauauagcuccuga

SEQ ID NO: 1053208 - RNA, 19 nt, Artificial Sequence
  Description of Artificial Sequence: Synthetic oligonucleotide
  Sense strand starting at position 988 of SEQ ID NO: 915094
aggagcuauaugugaucuu

SEQ ID NO: 1053209 - RNA, 19 nt, Artificial Sequence
  Description of Artificial Sequence: Synthetic oligonucleotide
  Antisense strand to SEQ ID NO: 1053208
aagaucacauauagcuccu

SEQ ID NO: 1053210 - RNA, 19 nt, Artificial Sequence
  Description of Artificial Sequence: Synthetic oligonucleotide
  Sense strand starting at position 1033 of SEQ ID NO: 915094
uggguaagaaauugacgua

SEQ ID NO: 1053211 - RNA, 19 nt, Artificial Sequence
  Description of Artificial Sequence: Synthetic oligonucleotide
  Antisense strand to SEQ ID NO: 1053210
uacgucaauuucuuaccca

SEQ ID NO: 1053212 - RNA, 19 nt, Artificial Sequence
  Description of Artificial Sequence: Synthetic oligonucleotide
  Sense strand starting at position 1034 of SEQ ID NO: 915094
ggguaagaaauugacguau

SEQ ID NO: 1053213 - RNA, 19 nt, Artificial Sequence
  Description of Artificial Sequence: Synthetic oligonucleotide
  Antisense strand to SEQ ID NO: 1053212
auacgucaauuucuuaccc

SEQ ID NO: 1053214 - RNA, 19 nt, Artificial Sequence
  Description of Artificial Sequence: Synthetic oligonucleotide
  Sense strand starting at position 1132 of SEQ ID NO: 915094
uugaaaugcuacuuuacag

SEQ ID NO: 1053215 - RNA, 19 nt, Artificial Sequence
  Description of Artificial Sequence: Synthetic oligonucleotide
  Antisense strand to SEQ ID NO: 1053214
cuguaaaguagcauuucaa

SEQ ID NO: 1053216 - RNA, 19 nt, Artificial Sequence
  Description of Artificial Sequence: Synthetic oligonucleotide
  Sense strand starting at position 1270 of SEQ ID NO: 915094
ugcagaaccguugaugagu

SEQ ID NO: 1053217 - RNA, 19 nt, Artificial Sequence
  Description of Artificial Sequence: Synthetic oligonucleotide
  Antisense strand to SEQ ID NO: 1053216
acucaucaacgguucugca

SEQ ID NO: 1053218 - RNA, 19 nt, Artificial Sequence
  Description of Artificial Sequence: Synthetic oligonucleotide
  Sense strand starting at position 1278 of SEQ ID NO: 915094
cguugaugaguuuaacaug

SEQ ID NO: 1053219 - RNA, 19 nt, Artificial Sequence
  Description of Artificial Sequence: Synthetic oligonucleotide
  Antisense strand to SEQ ID NO: 1053218
cauguuaaacucaucaacg

SEQ ID NO: 1053220 - RNA, 19 nt, Artificial Sequence
  Description of Artificial Sequence: Synthetic oligonucleotide
  Sense strand starting at position 1283 of SEQ ID NO: 915094
augaguuuaacauggguga

SEQ ID NO: 1053221 - RNA, 19 nt, Artificial Sequence
  Description of Artificial Sequence: Synthetic oligonucleotide
  Antisense strand to SEQ ID NO: 1053220
ucacccauguuaaacucau

SEQ ID NO: 1053222 - RNA, 19 nt, Artificial Sequence
  Description of Artificial Sequence: Synthetic oligonucleotide
  Sense strand starting at position 1284 of SEQ ID NO: 915094
ugaguuuaacaugggugaa

SEQ ID NO: 1053223 - RNA, 19 nt, Artificial Sequence
  Description of Artificial Sequence: Synthetic oligonucleotide
  Antisense strand to SEQ ID NO: 1053222
uucacccauguuaaacuca

SEQ ID NO: 1053224 - RNA, 19 nt, Artificial Sequence
  Description of Artificial Sequence: Synthetic oligonucleotide
  Sense strand starting at position 1285 of SEQ ID NO: 915094
gaguuuaacaugggugaag

SEQ ID NO: 1053225 - RNA, 19 nt, Artificial Sequence
  Description of Artificial Sequence: Synthetic oligonucleotide
  Antisense strand to SEQ ID NO: 1053224
cuucacccauguuaaacuc

SEQ ID NO: 1053226 - RNA, 19 nt, Artificial Sequence
  Description of Artificial Sequence: Synthetic oligonucleotide
  Sense strand starting at position 1286 of SEQ ID NO: 915094
aguuuaacaugggugaagu

SEQ ID NO: 1053227 - RNA, 19 nt, Artificial Sequence
  Description of Artificial Sequence: Synthetic oligonucleotide
  Antisense strand to SEQ ID NO: 1053226
acuucacccauguuaaacu

SEQ ID NO: 1053228 - RNA, 19 nt, Artificial Sequence
  Description of Artificial Sequence: Synthetic oligonucleotide
  Sense strand starting at position 1287 of SEQ ID NO: 915094
guuuaacaugggugaaguu

SEQ ID NO: 1053229 - RNA, 19 nt, Artificial Sequence
  Description of Artificial Sequence: Synthetic oligonucleotide
  Antisense strand to SEQ ID NO: 1053228
aacuucacccauguuaaac

SEQ ID NO: 1053230 - RNA, 19 nt, Artificial Sequence
  Description of Artificial Sequence: Synthetic oligonucleotide
  Sense strand starting at position 1374 of SEQ ID NO: 915094
gcaggaagaucagcuaaga

SEQ ID NO: 1053231 - RNA, 19 nt, Artificial Sequence
  Description of Artificial Sequence: Synthetic oligonucleotide
  Antisense strand to SEQ ID NO: 1053230
ucuuagcugaucuuccugc

SEQ ID NO: 1053232 - RNA, 19 nt, Artificial Sequence
  Description of Artificial Sequence: Synthetic oligonucleotide
  Sense strand starting at position 1553 of SEQ ID NO: 915094
gccugagaacugggacauu

SEQ ID NO: 1053233 - RNA, 19 nt, Artificial Sequence
  Description of Artificial Sequence: Synthetic oligonucleotide
  Antisense strand to SEQ ID NO: 1053232
aaugucccaguucucaggc

SEQ ID NO: 1053234 - RNA, 19 nt, Artificial Sequence
  Description of Artificial Sequence: Synthetic oligonucleotide
  Sense strand starting at position 1588 of SEQ ID NO: 915094
auguauccuccguauauug

SEQ ID NO: 1053235 - RNA, 19 nt, Artificial Sequence
  Description of Artificial Sequence: Synthetic oligonucleotide
  Antisense strand to SEQ ID NO: 1053234
caauauacggaggauacau

SEQ ID NO: 1053236 - RNA, 19 nt, Artificial Sequence
  Description of Artificial Sequence: Synthetic oligonucleotide
  Sense strand starting at position 1611 of SEQ ID NO: 915094
aagucuacuuggccugaaa

SEQ ID NO: 1053237 - RNA, 19 nt, Artificial Sequence
  Description of Artificial Sequence: Synthetic oligonucleotide
  Antisense strand to SEQ ID NO: 1053236
uuucaggccaaguagacuu

SEQ ID NO: 1053238 - RNA, 19 nt, Artificial Sequence
  Description of Artificial Sequence: Synthetic oligonucleotide
  Sense strand starting at position 1622 of SEQ ID NO: 915094
gccugaaagcgcuucuucu

SEQ ID NO: 1053239 - RNA, 19 nt, Artificial Sequence
  Description of Artificial Sequence: Synthetic oligonucleotide
  Antisense strand to SEQ ID NO: 1053238
agaagaagcgcuuucaggc

SEQ ID NO: 1053240 - RNA, 19 nt, Artificial Sequence
  Description of Artificial Sequence: Synthetic oligonucleotide
  Sense strand starting at position 1652 of SEQ ID NO: 915094
agaauaagaucagauuucu

SEQ ID NO: 1053241 - RNA, 19 nt, Artificial Sequence
  Description of Artificial Sequence: Synthetic oligonucleotide
  Antisense strand to SEQ ID NO: 1053240
agaaaucugaucuuauucu

SEQ ID NO: 1053242 - RNA, 19 nt, Artificial Sequence
  Description of Artificial Sequence: Synthetic oligonucleotide
  Sense strand starting at position 1694 of SEQ ID NO: 915094
gaaagcgaucauuaugauu

SEQ ID NO: 1053243 - RNA, 19 nt, Artificial Sequence
  Description of Artificial Sequence: Synthetic oligonucleotide
  Antisense strand to SEQ ID NO: 1053242
aaucauaaugaucgcuuuc

SEQ ID NO: 1053244 - RNA, 19 nt, Artificial Sequence
  Description of Artificial Sequence: Synthetic oligonucleotide
  Sense strand starting at position 1699 of SEQ ID NO: 915094
cgaucauuaugauuaacuc

SEQ ID NO: 1053245 - RNA, 19 nt, Artificial Sequence
  Description of Artificial Sequence: Synthetic oligonucleotide
  Antisense strand to SEQ ID NO: 1053244
gaguuaaucauaaugaucg

SEQ ID NO: 1053246 - RNA, 19 nt, Artificial Sequence
  Description of Artificial Sequence: Synthetic oligonucleotide
  Sense strand starting at position 1709 of SEQ ID NO: 915094
gauuaacuccuucgaggaa

SEQ ID NO: 1053247 - RNA, 19 nt, Artificial Sequence
  Description of Artificial Sequence: Synthetic oligonucleotide
  Antisense strand to SEQ ID NO: 1053246
uuccucgaaggaguuaauc

SEQ ID NO: 1053248 - RNA, 19 nt, Artificial Sequence
  Description of Artificial Sequence: Synthetic oligonucleotide
  Sense strand starting at position 1713 of SEQ ID NO: 915094
aacuccuucgaggaagcau

SEQ ID NO: 1053249 - RNA, 19 nt, Artificial Sequence
  Description of Artificial Sequence: Synthetic oligonucleotide
  Antisense strand to SEQ ID NO: 1053248
augcuuccucgaaggaguu

SEQ ID NO: 1053250 - RNA, 19 nt, Artificial Sequence
  Description of Artificial Sequence: Synthetic oligonucleotide
  Sense strand starting at position 2129 of SEQ ID NO: 915094
acaggaaacuguucuuacu

SEQ ID NO: 1053251 - RNA, 19 nt, Artificial Sequence
  Description of Artificial Sequence: Synthetic oligonucleotide
  Antisense strand to SEQ ID NO: 1053250
aguaagaacaguuuccugu

SEQ ID NO: 1053252 - RNA, 19 nt, Artificial Sequence
  Description of Artificial Sequence: Synthetic oligonucleotide
  Sense strand starting at position 2242 of SEQ ID NO: 915094
auggguuuggcuggaagaa

SEQ ID NO: 1053253 - RNA, 19 nt, Artificial Sequence
  Description of Artificial Sequence: Synthetic oligonucleotide
  Antisense strand to SEQ ID NO: 1053252
uucuuccagccaaacccau

SEQ ID NO: 1053254 - RNA, 19 nt, Artificial Sequence
  Description of Artificial Sequence: Synthetic oligonucleotide
  Sense strand starting at position 2329 of SEQ ID NO: 915094
gaaagucaagucuauuggu

SEQ ID NO: 1053255 - RNA, 19 nt, Artificial Sequence
  Description of Artificial Sequence: Synthetic oligonucleotide
  Antisense strand to SEQ ID NO: 1053254
accaauagacuugacuuuc

SEQ ID NO: 1053256 - RNA, 19 nt, Artificial Sequence
  Description of Artificial Sequence: Synthetic oligonucleotide
  Sense strand starting at position 2389 of SEQ ID NO: 915094
aauuaagguguugguaacu

SEQ ID NO: 1053257 - RNA, 19 nt, Artificial Sequence
  Description of Artificial Sequence: Synthetic oligonucleotide
  Antisense strand to SEQ ID NO: 1053256
aguuaccaacaccuuaauu

SEQ ID NO: 1053258 - RNA, 19 nt, Artificial Sequence
  Description of Artificial Sequence: Synthetic oligonucleotide
  Sense strand starting at position 2726 of SEQ ID NO: 915094
agagcuucccuaugcauuu

SEQ ID NO: 1053259 - RNA, 19 nt, Artificial Sequence
  Description of Artificial Sequence: Synthetic oligonucleotide
  Antisense strand to SEQ ID NO: 1053258
aaaugcauagggaagcucu

SEQ ID NO: 1053260 - RNA, 19 nt, Artificial Sequence
  Description of Artificial Sequence: Synthetic oligonucleotide
  Sense strand starting at position 2815 of SEQ ID NO: 915094
agugcucugcaucaggaaa

SEQ ID NO: 1053261 - RNA, 19 nt, Artificial Sequence
  Description of Artificial Sequence: Synthetic oligonucleotide
  Antisense strand to SEQ ID NO: 1053260
uuuccugaugcagagcacu

SEQ ID NO: 1053262 - RNA, 19 nt, Artificial Sequence
  Description of Artificial Sequence: Synthetic oligonucleotide
  Sense strand starting at position 2866 of SEQ ID NO: 915094
gggaaagaguauuagagaa

SEQ ID NO: 1053263 - RNA, 19 nt, Artificial Sequence
  Description of Artificial Sequence: Synthetic oligonucleotide
  Antisense strand to SEQ ID NO: 1053262
uucucuaauacucuuuccc

SEQ ID NO: 1053264 - RNA, 19 nt, Artificial Sequence
  Description of Artificial Sequence: Synthetic oligonucleotide
  Sense strand starting at position 2868 of SEQ ID NO: 915094
gaaagaguauuagagaaag

SEQ ID NO: 1053265 - RNA, 19 nt, Artificial Sequence
  Description of Artificial Sequence: Synthetic oligonucleotide
  Antisense strand to SEQ ID NO: 1053264
cuuucucuaauacucuuuc

SEQ ID NO: 1053266 - RNA, 19 nt, Artificial Sequence
  Description of Artificial Sequence: Synthetic oligonucleotide
  Sense strand starting at position 2890 of SEQ ID NO: 915094
agggcaagucuacauguua

SEQ ID NO: 1053267 - RNA, 19 nt, Artificial Sequence
  Description of Artificial Sequence: Synthetic oligonucleotide
  Antisense strand to SEQ ID NO: 1053266
uaacauguagacuugcccu

SEQ ID NO: 1053268 - RNA, 19 nt, Artificial Sequence
  Description of Artificial Sequence: Synthetic oligonucleotide
  Sense strand starting at position 3033 of SEQ ID NO: 915094
aaggaaucauuggccaguu

SEQ ID NO: 1053269 - RNA, 19 nt, Artificial Sequence
  Description of Artificial Sequence: Synthetic oligonucleotide
  Antisense strand to SEQ ID NO: 1053268
aacuggccaaugauuccuu

SEQ ID NO: 1053270 - RNA, 19 nt, Artificial Sequence
  Description of Artificial Sequence: Synthetic oligonucleotide
  Sense strand starting at position 3034 of SEQ ID NO: 915094
aggaaucauuggccaguuu

SEQ ID NO: 1053271 - RNA, 19 nt, Artificial Sequence
  Description of Artificial Sequence: Synthetic oligonucleotide
  Antisense strand to SEQ ID NO: 1053270
aaacuggccaaugauuccu

SEQ ID NO: 1053272 - RNA, 19 nt, Artificial Sequence
  Description of Artificial Sequence: Synthetic oligonucleotide
  Sense strand starting at position 3238 of SEQ ID NO: 915094
guaacaggacuuuaugcaa

SEQ ID NO: 1053273 - RNA, 19 nt, Artificial Sequence
  Description of Artificial Sequence: Synthetic oligonucleotide
  Antisense strand to SEQ ID NO: 1053272
uugcauaaaguccuguuac

SEQ ID NO: 1053274 - RNA, 19 nt, Artificial Sequence
  Description of Artificial Sequence: Synthetic oligonucleotide
  Sense strand starting at position 3494 of SEQ ID NO: 915094
guaagauguucccuugacu

SEQ ID NO: 1053275 - RNA, 19 nt, Artificial Sequence
  Description of Artificial Sequence: Synthetic oligonucleotide
  Antisense strand to SEQ ID NO: 1053274
agucaagggaacaucuuac

SEQ ID NO: 1053276 - RNA, 19 nt, Artificial Sequence
  Description of Artificial Sequence: Synthetic oligonucleotide
  Sense strand starting at position 3742 of SEQ ID NO: 915094
uuuguuagucaccauugua

SEQ ID NO: 1053277 - RNA, 19 nt, Artificial Sequence
  Description of Artificial Sequence: Synthetic oligonucleotide
  Antisense strand to SEQ ID NO: 1053276
uacaauggugacuaacaaa

SEQ ID NO: 1053278 - RNA, 19 nt, Artificial Sequence
  Description of Artificial Sequence: Synthetic oligonucleotide
  Sense strand starting at position 3920 of SEQ ID NO: 915094
ugcguaucaaaguaugaag

SEQ ID NO: 1053279 - RNA, 19 nt, Artificial Sequence
  Description of Artificial Sequence: Synthetic oligonucleotide
  Antisense strand to SEQ ID NO: 1053278
cuucauacuuugauacgca

SEQ ID NO: 1053280 - RNA, 19 nt, Artificial Sequence
  Description of Artificial Sequence: Synthetic oligonucleotide
  Sense strand starting at position 3929 of SEQ ID NO: 915094
aaguaugaagagugucuca

SEQ ID NO: 1053281 - RNA, 19 nt, Artificial Sequence
  Description of Artificial Sequence: Synthetic oligonucleotide
  Antisense strand to SEQ ID NO: 1053280
ugagacacucuucauacuu

SEQ ID NO: 1053282 - RNA, 19 nt, Artificial Sequence
  Description of Artificial Sequence: Synthetic oligonucleotide
  Sense strand starting at position 2 of SEQ ID NO: 915095
caggaaaguuugucuucuc

SEQ ID NO: 1053283 - RNA, 19 nt, Artificial Sequence
  Description of Artificial Sequence: Synthetic oligonucleotide
  Antisense strand to SEQ ID NO: 1053282
gagaagacaaacuuuccug

SEQ ID NO: 1053284 - RNA, 19 nt, Artificial Sequence
  Description of Artificial Sequence: Synthetic oligonucleotide
  Sense strand starting at position 139 of SEQ ID NO: 915095
gcugcuggaaucuggaaua

SEQ ID NO: 1053285 - RNA, 19 nt, Artificial Sequence
  Description of Artificial Sequence: Synthetic oligonucleotide
  Antisense strand to SEQ ID NO: 1053284
uauuccagauuccagcagc

SEQ ID NO: 1053286 - RNA, 19 nt, Artificial Sequence
  Description of Artificial Sequence: Synthetic oligonucleotide
  Sense strand starting at position 181 of SEQ ID NO: 915095
gaacuucuuggucagccua

SEQ ID NO: 1053287 - RNA, 19 nt, Artificial Sequence
  Description of Artificial Sequence: Synthetic oligonucleotide
  Antisense strand to SEQ ID NO: 1053286
uaggcugaccaagaaguuc

SEQ ID NO: 1053288 - RNA, 19 nt, Artificial Sequence
  Description of Artificial Sequence: Synthetic oligonucleotide
  Sense strand starting at position 500 of SEQ ID NO: 915095
uuagcauuccugucugugu

SEQ ID NO: 1053289 - RNA, 19 nt, Artificial Sequence
  Description of Artificial Sequence: Synthetic oligonucleotide
  Antisense strand to SEQ ID NO: 1053288
acacagacaggaaugcuaa

SEQ ID NO: 1053290 - RNA, 19 nt, Artificial Sequence
  Description of Artificial Sequence: Synthetic oligonucleotide
  Sense strand starting at position 722 of SEQ ID NO: 915095
aaaggacuccugugcaauu

SEQ ID NO: 1053291 - RNA, 19 nt, Artificial Sequence
  Description of Artificial Sequence: Synthetic oligonucleotide
  Antisense strand to SEQ ID NO: 1053290
aauugcacaggaguccuuu

SEQ ID NO: 1053292 - RNA, 19 nt, Artificial Sequence
  Description of Artificial Sequence: Synthetic oligonucleotide
  Sense strand starting at position 723 of SEQ ID NO: 915095
aaggacuccugugcaauua

SEQ ID NO: 1053293 - RNA, 19 nt, Artificial Sequence
  Description of Artificial Sequence: Synthetic oligonucleotide
  Antisense strand to SEQ ID NO: 1053292
uaauugcacaggaguccuu

SEQ ID NO: 1053294 - RNA, 19 nt, Artificial Sequence
  Description of Artificial Sequence: Synthetic oligonucleotide
  Sense strand starting at position 724 of SEQ ID NO: 915095
aggacuccugugcaauuau

SEQ ID NO: 1053295 - RNA, 19 nt, Artificial Sequence
  Description of Artificial Sequence: Synthetic oligonucleotide
  Antisense strand to SEQ ID NO: 1053294
auaauugcacaggaguccu

SEQ ID NO: 1053296 - RNA, 19 nt, Artificial Sequence
  Description of Artificial Sequence: Synthetic oligonucleotide
  Sense strand starting at position 796 of SEQ ID NO: 915095
guaggauugcagcaucuua

SEQ ID NO: 1053297 - RNA, 19 nt, Artificial Sequence
  Description of Artificial Sequence: Synthetic oligonucleotide
  Antisense strand to SEQ ID NO: 1053296
uaagaugcugcaauccuac

SEQ ID NO: 1053298 - RNA, 19 nt, Artificial Sequence
  Description of Artificial Sequence: Synthetic oligonucleotide
  Sense strand starting at position 1006 of SEQ ID NO: 915095
aggagauacugagaggauu

SEQ ID NO: 1053299 - RNA, 19 nt, Artificial Sequence
  Description of Artificial Sequence: Synthetic oligonucleotide
  Antisense strand to SEQ ID NO: 1053298
aauccucucaguaucuccu

SEQ ID NO: 1053300 - RNA, 19 nt, Artificial Sequence
  Description of Artificial Sequence: Synthetic oligonucleotide
  Sense strand starting at position 1037 of SEQ ID NO: 915095
ggcauaaucugcccauuug

SEQ ID NO: 1053301 - RNA, 19 nt, Artificial Sequence
  Description of Artificial Sequence: Synthetic oligonucleotide
  Antisense strand to SEQ ID NO: 1053300
caaaugggcagauuaugcc

SEQ ID NO: 1053302 - RNA, 19 nt, Artificial Sequence
  Description of Artificial Sequence: Synthetic oligonucleotide
  Sense strand starting at position 1119 of SEQ ID NO: 915095
gcagaugagugagcugaga

SEQ ID NO: 1053303 - RNA, 19 nt, Artificial Sequence
  Description of Artificial Sequence: Synthetic oligonucleotide
  Antisense strand to SEQ ID NO: 1053302
ucucagcucacucaucugc

SEQ ID NO: 1053304 - RNA, 19 nt, Artificial Sequence
  Description of Artificial Sequence: Synthetic oligonucleotide
  Sense strand starting at position 1121 of SEQ ID NO: 915095
agaugagugagcugagaag

SEQ ID NO: 1053305 - RNA, 19 nt, Artificial Sequence
  Description of Artificial Sequence: Synthetic oligonucleotide
  Antisense strand to SEQ ID NO: 1053304
cuucucagcucacucaucu

SEQ ID NO: 1053306 - RNA, 19 nt, Artificial Sequence
  Description of Artificial Sequence: Synthetic oligonucleotide
  Sense strand starting at position 1292 of SEQ ID NO: 915095
cgcagagaucuggacugau

SEQ ID NO: 1053307 - RNA, 19 nt, Artificial Sequence
  Description of Artificial Sequence: Synthetic oligonucleotide
  Antisense strand to SEQ ID NO: 1053306
aucaguccagaucucugcg

SEQ ID NO: 1053308 - RNA, 19 nt, Artificial Sequence
  Description of Artificial Sequence: Synthetic oligonucleotide
  Sense strand starting at position 1698 of SEQ ID NO: 915095
ugcucucacgucguacaau

SEQ ID NO: 1053309 - RNA, 19 nt, Artificial Sequence
  Description of Artificial Sequence: Synthetic oligonucleotide
  Antisense strand to SEQ ID NO: 1053308
auuguacgacgugagagca

SEQ ID NO: 1053310 - RNA, 19 nt, Artificial Sequence
  Description of Artificial Sequence: Synthetic oligonucleotide
  Sense strand starting at position 1893 of SEQ ID NO: 915095
cugaauucugagcagguuu

SEQ ID NO: 1053311 - RNA, 19 nt, Artificial Sequence
  Description of Artificial Sequence: Synthetic oligonucleotide
  Antisense strand to SEQ ID NO: 1053310
aaaccugcucagaauucag

SEQ ID NO: 1053312 - RNA, 19 nt, Artificial Sequence
  Description of Artificial Sequence: Synthetic oligonucleotide
  Sense strand starting at position 1895 of SEQ ID NO: 915095
gaauucugagcagguuuaa

SEQ ID NO: 1053313 - RNA, 19 nt, Artificial Sequence
  Description of Artificial Sequence: Synthetic oligonucleotide
  Antisense strand to SEQ ID NO: 1053312
uuaaaccugcucagaauuc

SEQ ID NO: 1053314 - RNA, 19 nt, Artificial Sequence
  Description of Artificial Sequence: Synthetic oligonucleotide
  Sense strand starting at position 1979 of SEQ ID NO: 915095
gcaggcagcgucucugauu

SEQ ID NO: 1053315 - RNA, 19 nt, Artificial Sequence
  Description of Artificial Sequence: Synthetic oligonucleotide
  Antisense strand to SEQ ID NO: 1053314
aaucagagacgcugccugc

SEQ ID NO: 1053316 - RNA, 19 nt, Artificial Sequence
  Description of Artificial Sequence: Synthetic oligonucleotide
  Sense strand starting at position 1980 of SEQ ID NO: 915095
caggcagcgucucugauuu

SEQ ID NO: 1053317 - RNA, 19 nt, Artificial Sequence
  Description of Artificial Sequence: Synthetic oligonucleotide
  Antisense strand to SEQ ID NO: 1053316
aaaucagagacgcugccug

SEQ ID NO: 1053318 - RNA, 19 nt, Artificial Sequence
  Description of Artificial Sequence: Synthetic oligonucleotide
  Sense strand starting at position 1984 of SEQ ID NO: 915095
cagcgucucugauuucuuu

SEQ ID NO: 1053319 - RNA, 19 nt, Artificial Sequence
  Description of Artificial Sequence: Synthetic oligonucleotide
  Antisense strand to SEQ ID NO: 1053318
aaagaaaucagagacgcug

SEQ ID NO: 1053320 - RNA, 19 nt, Artificial Sequence
  Description of Artificial Sequence: Synthetic oligonucleotide
  Sense strand starting at position 2099 of SEQ ID NO: 915095
gaaggagacuuuccugcuu

SEQ ID NO: 1053321 - RNA, 19 nt, Artificial Sequence
  Description of Artificial Sequence: Synthetic oligonucleotide
  Antisense strand to SEQ ID NO: 1053320
aagcaggaaagucuccuuc

SEQ ID NO: 1053322 - RNA, 19 nt, Artificial Sequence
  Description of Artificial Sequence: Synthetic oligonucleotide
  Sense strand starting at position 2312 of SEQ ID NO: 915095
aaagguugcuuggcagaaa

SEQ ID NO: 1053323 - RNA, 19 nt, Artificial Sequence
  Description of Artificial Sequence: Synthetic oligonucleotide
  Antisense strand to SEQ ID NO: 1053322
uuucugccaagcaaccuuu

SEQ ID NO: 1053324 - RNA, 19 nt, Artificial Sequence
  Description of Artificial Sequence: Synthetic oligonucleotide
  Sense strand starting at position 2332 of SEQ ID NO: 915095
gugacuaaugcccaugcca

SEQ ID NO: 1053325 - RNA, 19 nt, Artificial Sequence
  Description of Artificial Sequence: Synthetic oligonucleotide
  Antisense strand to SEQ ID NO: 1053324
uggcaugggcauuagucac

SEQ ID NO: 1053326 - RNA, 19 nt, Artificial Sequence
  Description of Artificial Sequence: Synthetic oligonucleotide
  Sense strand starting at position 2345 of SEQ ID NO: 915095
augccaguuccuuaucauu

SEQ ID NO: 1053327 - RNA, 19 nt, Artificial Sequence
  Description of Artificial Sequence: Synthetic oligonucleotide
  Antisense strand to SEQ ID NO: 1053326
aaugauaaggaacuggcau

SEQ ID NO: 1053328 - RNA, 19 nt, Artificial Sequence
  Description of Artificial Sequence: Synthetic oligonucleotide
  Sense strand starting at position 2667 of SEQ ID NO: 915095
cggaaacuugcugaaguca

SEQ ID NO: 1053329 - RNA, 19 nt, Artificial Sequence
  Description of Artificial Sequence: Synthetic oligonucleotide
  Antisense strand to SEQ ID NO: 1053328
ugacuucagcaaguuuccg

SEQ ID NO: 1053330 - RNA, 19 nt, Artificial Sequence
  Description of Artificial Sequence: Synthetic oligonucleotide
  Sense strand starting at position 2675 of SEQ ID NO: 915095
ugcugaagucaucggaaau

SEQ ID NO: 1053331 - RNA, 19 nt, Artificial Sequence
  Description of Artificial Sequence: Synthetic oligonucleotide
  Antisense strand to SEQ ID NO: 1053330
auuuccgaugacuucagca

SEQ ID NO: 1053332 - RNA, 19 nt, Artificial Sequence
  Description of Artificial Sequence: Synthetic oligonucleotide
  Sense strand starting at position 2676 of SEQ ID NO: 915095
gcugaagucaucggaaauc

SEQ ID NO: 1053333 - RNA, 19 nt, Artificial Sequence
  Description of Artificial Sequence: Synthetic oligonucleotide
  Antisense strand to SEQ ID NO: 1053332
gauuuccgaugacuucagc

SEQ ID NO: 1053334 - RNA, 19 nt, Artificial Sequence
  Description of Artificial Sequence: Synthetic oligonucleotide
  Sense strand starting at position 2715 of SEQ ID NO: 915095
gaaggauaccuguggcuuc

SEQ ID NO: 1053335 - RNA, 19 nt, Artificial Sequence
  Description of Artificial Sequence: Synthetic oligonucleotide
  Antisense strand to SEQ ID NO: 1053334
gaagccacagguauccuuc

SEQ ID NO: 1053336 - RNA, 19 nt, Artificial Sequence
  Description of Artificial Sequence: Synthetic oligonucleotide
  Sense strand starting at position 2829 of SEQ ID NO: 915095
aguaucucuggguguaaga

SEQ ID NO: 1053337 - RNA, 19 nt, Artificial Sequence
  Description of Artificial Sequence: Synthetic oligonucleotide
  Antisense strand to SEQ ID NO: 1053336
ucuuacacccagagauacu

SEQ ID NO: 1053338 - RNA, 19 nt, Artificial Sequence
  Description of Artificial Sequence: Synthetic oligonucleotide
  Sense strand starting at position 3013 of SEQ ID NO: 915095
gacgauuucugucccaggu

SEQ ID NO: 1053339 - RNA, 19 nt, Artificial Sequence
  Description of Artificial Sequence: Synthetic oligonucleotide
  Antisense strand to SEQ ID NO: 1053338
accugggacagaaaucguc

SEQ ID NO: 1053340 - RNA, 19 nt, Artificial Sequence
  Description of Artificial Sequence: Synthetic oligonucleotide
  Sense strand starting at position 3288 of SEQ ID NO: 915095
cacagcuaaugaguuaaga

SEQ ID NO: 1053341 - RNA, 19 nt, Artificial Sequence
  Description of Artificial Sequence: Synthetic oligonucleotide
  Antisense strand to SEQ ID NO: 1053340
ucuuaacucauuagcugug

SEQ ID NO: 1053342 - RNA, 19 nt, Artificial Sequence
  Description of Artificial Sequence: Synthetic oligonucleotide
  Sense strand starting at position 3497 of SEQ ID NO: 915095
acagaugaugauuguauca

SEQ ID NO: 1053343 - RNA, 19 nt, Artificial Sequence
  Description of Artificial Sequence: Synthetic oligonucleotide
  Antisense strand to SEQ ID NO: 1053342
ugauacaaucaucaucugu

SEQ ID NO: 1053344 - RNA, 19 nt, Artificial Sequence
  Description of Artificial Sequence: Synthetic oligonucleotide
  Sense strand starting at position 3563 of SEQ ID NO: 915095
ggaugagaauaugaagaau

SEQ ID NO: 1053345 - RNA, 19 nt, Artificial Sequence
  Description of Artificial Sequence: Synthetic oligonucleotide
  Antisense strand to SEQ ID NO: 1053344
auucuucauauucucaucc

SEQ ID NO: 1053346 - RNA, 19 nt, Artificial Sequence
  Description of Artificial Sequence: Synthetic oligonucleotide
  Sense strand starting at position 3578 of SEQ ID NO: 915095
gaauaugauuuguucucgu

SEQ ID NO: 1053347 - RNA, 19 nt, Artificial Sequence
  Description of Artificial Sequence: Synthetic oligonucleotide
  Antisense strand to SEQ ID NO: 1053346
acgagaacaaaucauauuc

SEQ ID NO: 1053348 - RNA, 19 nt, Artificial Sequence
  Description of Artificial Sequence: Synthetic oligonucleotide
  Sense strand starting at position 3581 of SEQ ID NO: 915095
uaugauuuguucucgucua

SEQ ID NO: 1053349 - RNA, 19 nt, Artificial Sequence
  Description of Artificial Sequence: Synthetic oligonucleotide
  Antisense strand to SEQ ID NO: 1053348
uagacgagaacaaaucaua

SEQ ID NO: 1053350 - RNA, 19 nt, Artificial Sequence
  Description of Artificial Sequence: Synthetic oligonucleotide
  Sense strand starting at position 3586 of SEQ ID NO: 915095
uuuguucucgucuauaaag

SEQ ID NO: 1053351 - RNA, 19 nt, Artificial Sequence
  Description of Artificial Sequence: Synthetic oligonucleotide
  Antisense strand to SEQ ID NO: 1053350
cuuuauagacgagaacaaa

SEQ ID NO: 1053352 - RNA, 19 nt, Artificial Sequence
  Description of Artificial Sequence: Synthetic oligonucleotide
  Sense strand starting at position 3679 of SEQ ID NO: 915095
acacguacacacuguuaga

SEQ ID NO: 1053353 - RNA, 19 nt, Artificial Sequence
  Description of Artificial Sequence: Synthetic oligonucleotide
  Antisense strand to SEQ ID NO: 1053352
ucuaacaguguguacgugu

SEQ ID NO: 1053354 - RNA, 19 nt, Artificial Sequence
  Description of Artificial Sequence: Synthetic oligonucleotide
  Sense strand starting at position 3742 of SEQ ID NO: 915095
gcaaauugauaugugaauc

SEQ ID NO: 1053355 - RNA, 19 nt, Artificial Sequence
  Description of Artificial Sequence: Synthetic oligonucleotide
  Antisense strand to SEQ ID NO: 1053354
gauucacauaucaauuugc

SEQ ID NO: 1053356 - RNA, 19 nt, Artificial Sequence
  Description of Artificial Sequence: Synthetic oligonucleotide
  Sense strand starting at position 3772 of SEQ ID NO: 915095
gcuggaauccugcagaaau

SEQ ID NO: 1053357 - RNA, 19 nt, Artificial Sequence
  Description of Artificial Sequence: Synthetic oligonucleotide
  Antisense strand to SEQ ID NO: 1053356
auuucugcaggauuccagc

SEQ ID NO: 1053358 - RNA, 19 nt, Artificial Sequence
  Description of Artificial Sequence: Synthetic oligonucleotide
  Sense strand starting at position 3808 of SEQ ID NO: 915095
ggcugaauacgcuggagaa

SEQ ID NO: 1053359 - RNA, 19 nt, Artificial Sequence
  Description of Artificial Sequence: Synthetic oligonucleotide
  Antisense strand to SEQ ID NO: 1053358
uucuccagcguauucagcc

SEQ ID NO: 1053360 - RNA, 19 nt, Artificial Sequence
  Description of Artificial Sequence: Synthetic oligonucleotide
  Sense strand starting at position 3969 of SEQ ID NO: 915095
ccuugaguccuagaccagu

SEQ ID NO: 1053361 - RNA, 19 nt, Artificial Sequence
  Description of Artificial Sequence: Synthetic oligonucleotide
  Antisense strand to SEQ ID NO: 1053360
acuggucuaggacucaagg

SEQ ID NO: 1053362 - RNA, 19 nt, Artificial Sequence
  Description of Artificial Sequence: Synthetic oligonucleotide
  Sense strand starting at position 13 of SEQ ID NO: 915096
ccagcugcucaacauuaga

SEQ ID NO: 1053363 - RNA, 19 nt, Artificial Sequence
  Description of Artificial Sequence: Synthetic oligonucleotide
  Antisense strand to SEQ ID NO: 1053362
ucuaauguugagcagcugg

SEQ ID NO: 1053364 - RNA, 19 nt, Artificial Sequence
  Description of Artificial Sequence: Synthetic oligonucleotide
  Sense strand starting at position 16 of SEQ ID NO: 915096
gcugcucaacauuagaauu

SEQ ID NO: 1053365 - RNA, 19 nt, Artificial Sequence
  Description of Artificial Sequence: Synthetic oligonucleotide
  Antisense strand to SEQ ID NO: 1053364
aauucuaauguugagcagc

SEQ ID NO: 1053366 - RNA, 19 nt, Artificial Sequence
  Description of Artificial Sequence: Synthetic oligonucleotide
  Sense strand starting at position 101 of SEQ ID NO: 915096
ggaauagucuuacugcauc

SEQ ID NO: 1053367 - RNA, 19 nt, Artificial Sequence
  Description of Artificial Sequence: Synthetic oligonucleotide
  Antisense strand to SEQ ID NO: 1053366
gaugcaguaagacuauucc

SEQ ID NO: 1053368 - RNA, 19 nt, Artificial Sequence
  Description of Artificial Sequence: Synthetic oligonucleotide
  Sense strand starting at position 144 of SEQ ID NO: 915096
ugaaguuucugguuuaauu

SEQ ID NO: 1053369 - RNA, 19 nt, Artificial Sequence
  Description of Artificial Sequence: Synthetic oligonucleotide
  Antisense strand to SEQ ID NO: 1053368
aauuaaaccagaaacuuca

SEQ ID NO: 1053370 - RNA, 19 nt, Artificial Sequence
  Description of Artificial Sequence: Synthetic oligonucleotide
  Sense strand starting at position 244 of SEQ ID NO: 915096
uggcacauuagaugguaaa

SEQ ID NO: 1053371 - RNA, 19 nt, Artificial Sequence
  Description of Artificial Sequence: Synthetic oligonucleotide
  Antisense strand to SEQ ID NO: 1053370
uuuaccaucuaaugugcca

SEQ ID NO: 1053372 - RNA, 19 nt, Artificial Sequence
  Description of Artificial Sequence: Synthetic oligonucleotide
  Sense strand starting at position 245 of SEQ ID NO: 915096
ggcacauuagaugguaaag

SEQ ID NO: 1053373 - RNA, 19 nt, Artificial Sequence
  Description of Artificial Sequence: Synthetic oligonucleotide
  Antisense strand to SEQ ID NO: 1053372
cuuuaccaucuaaugugcc

SEQ ID NO: 1053374 - RNA, 19 nt, Artificial Sequence
  Description of Artificial Sequence: Synthetic oligonucleotide
  Sense strand starting at position 284 of SEQ ID NO: 915096
aucccugaacacugguaau

SEQ ID NO: 1053375 - RNA, 19 nt, Artificial Sequence
  Description of Artificial Sequence: Synthetic oligonucleotide
  Antisense strand to SEQ ID NO: 1053374
auuaccaguguucagggau

SEQ ID NO: 1053376 - RNA, 19 nt, Artificial Sequence
  Description of Artificial Sequence: Synthetic oligonucleotide
  Sense strand starting at position 330 of SEQ ID NO: 915096
guauuauaacccgugugcu

SEQ ID NO: 1053377 - RNA, 19 nt, Artificial Sequence
  Description of Artificial Sequence: Synthetic oligonucleotide
  Antisense strand to SEQ ID NO: 1053376
agcacacggguuauaauac

SEQ ID NO: 1053378 - RNA, 19 nt, Artificial Sequence
  Description of Artificial Sequence: Synthetic oligonucleotide
  Sense strand starting at position 338 of SEQ ID NO: 915096
acccgugugcugcuuauau

SEQ ID NO: 1053379 - RNA, 19 nt, Artificial Sequence
  Description of Artificial Sequence: Synthetic oligonucleotide
  Antisense strand to SEQ ID NO: 1053378
auauaagcagcacacgggu

SEQ ID NO: 1053380 - RNA, 19 nt, Artificial Sequence
  Description of Artificial Sequence: Synthetic oligonucleotide
  Sense strand starting at position 390 of SEQ ID NO: 915096
ugggaaauguucccugauu

SEQ ID NO: 1053381 - RNA, 19 nt, Artificial Sequence
  Description of Artificial Sequence: Synthetic oligonucleotide
  Antisense strand to SEQ ID NO: 1053380
aaucagggaacauuuccca

SEQ ID NO: 1053382 - RNA, 19 nt, Artificial Sequence
  Description of Artificial Sequence: Synthetic oligonucleotide
  Sense strand starting at position 391 of SEQ ID NO: 915096
gggaaauguucccugauuc

SEQ ID NO: 1053383 - RNA, 19 nt, Artificial Sequence
  Description of Artificial Sequence: Synthetic oligonucleotide
  Antisense strand to SEQ ID NO: 1053382
gaaucagggaacauuuccc

SEQ ID NO: 1053384 - RNA, 19 nt, Artificial Sequence
  Description of Artificial Sequence: Synthetic oligonucleotide
  Sense strand starting at position 392 of SEQ ID NO: 915096
ggaaauguucccugauucc

SEQ ID NO: 1053385 - RNA, 19 nt, Artificial Sequence
  Description of Artificial Sequence: Synthetic oligonucleotide
  Antisense strand to SEQ ID NO: 1053384
ggaaucagggaacauuucc

SEQ ID NO: 1053386 - RNA, 19 nt, Artificial Sequence
  Description of Artificial Sequence: Synthetic oligonucleotide
  Sense strand starting at position 586 of SEQ ID NO: 915096
gggaccuguucucuaacua

SEQ ID NO: 1053387 - RNA, 19 nt, Artificial Sequence
  Description of Artificial Sequence: Synthetic oligonucleotide
  Antisense strand to SEQ ID NO: 1053386
uaguuagagaacagguccc

SEQ ID NO: 1053388 - RNA, 19 nt, Artificial Sequence
  Description of Artificial Sequence: Synthetic oligonucleotide
  Sense strand starting at position 587 of SEQ ID NO: 915096
ggaccuguucucuaacuaa

SEQ ID NO: 1053389 - RNA, 19 nt, Artificial Sequence
  Description of Artificial Sequence: Synthetic oligonucleotide
  Antisense strand to SEQ ID NO: 1053388
uuaguuagagaacaggucc

SEQ ID NO: 1053390 - RNA, 19 nt, Artificial Sequence
  Description of Artificial Sequence: Synthetic oligonucleotide
  Sense strand starting at position 683 of SEQ ID NO: 915096
gucccagagacaggucuuu

SEQ ID NO: 1053391 - RNA, 19 nt, Artificial Sequence
  Description of Artificial Sequence: Synthetic oligonucleotide
  Antisense strand to SEQ ID NO: 1053390
aaagaccugucucugggac

SEQ ID NO: 1053392 - RNA, 19 nt, Artificial Sequence
  Description of Artificial Sequence: Synthetic oligonucleotide
  Sense strand starting at position 711 of SEQ ID NO: 915096
gggagaggcuugucuagau

SEQ ID NO: 1053393 - RNA, 19 nt, Artificial Sequence
  Description of Artificial Sequence: Synthetic oligonucleotide
  Antisense strand to SEQ ID NO: 1053392
aucuagacaagccucuccc

SEQ ID NO: 1053394 - RNA, 19 nt, Artificial Sequence
  Description of Artificial Sequence: Synthetic oligonucleotide
  Sense strand starting at position 719 of SEQ ID NO: 915096
cuugucuagaugcaggaaa

SEQ ID NO: 1053395 - RNA, 19 nt, Artificial Sequence
  Description of Artificial Sequence: Synthetic oligonucleotide
  Antisense strand to SEQ ID NO: 1053394
uuuccugcaucuagacaag

SEQ ID NO: 1053396 - RNA, 19 nt, Artificial Sequence
  Description of Artificial Sequence: Synthetic oligonucleotide
  Sense strand starting at position 818 of SEQ ID NO: 915096
ugcagaaucugggucagga

SEQ ID NO: 1053397 - RNA, 19 nt, Artificial Sequence
  Description of Artificial Sequence: Synthetic oligonucleotide
  Antisense strand to SEQ ID NO: 1053396
uccugacccagauucugca

SEQ ID NO: 1053398 - RNA, 19 nt, Artificial Sequence
  Description of Artificial Sequence: Synthetic oligonucleotide
  Sense strand starting at position 862 of SEQ ID NO: 915096
aagucauaggcagggcaaa

SEQ ID NO: 1053399 - RNA, 19 nt, Artificial Sequence
  Description of Artificial Sequence: Synthetic oligonucleotide
  Antisense strand to SEQ ID NO: 1053398
uuugcccugccuaugacuu

SEQ ID NO: 1053400 - RNA, 19 nt, Artificial Sequence
  Description of Artificial Sequence: Synthetic oligonucleotide
  Sense strand starting at position 863 of SEQ ID NO: 915096
agucauaggcagggcaaau

SEQ ID NO: 1053401 - RNA, 19 nt, Artificial Sequence
  Description of Artificial Sequence: Synthetic oligonucleotide
  Antisense strand to SEQ ID NO: 1053400
auuugcccugccuaugacu

SEQ ID NO: 1053402 - RNA, 19 nt, Artificial Sequence
  Description of Artificial Sequence: Synthetic oligonucleotide
  Sense strand starting at position 879 of SEQ ID NO: 915096
aaugcauucgcccugugua

SEQ ID NO: 1053403 - RNA, 19 nt, Artificial Sequence
  Description of Artificial Sequence: Synthetic oligonucleotide
  Antisense strand to SEQ ID NO: 1053402
uacacagggcgaaugcauu

SEQ ID NO: 1053404 - RNA, 19 nt, Artificial Sequence
  Description of Artificial Sequence: Synthetic oligonucleotide
  Sense strand starting at position 918 of SEQ ID NO: 915096
cugggacgucccugaaucu

SEQ ID NO: 1053405 - RNA, 19 nt, Artificial Sequence
  Description of Artificial Sequence: Synthetic oligonucleotide
  Antisense strand to SEQ ID NO: 1053404
agauucagggacgucccag

SEQ ID NO: 1053406 - RNA, 19 nt, Artificial Sequence
  Description of Artificial Sequence: Synthetic oligonucleotide
  Sense strand starting at position 929 of SEQ ID NO: 915096
cugaaucugucuccuagga

SEQ ID NO: 1053407 - RNA, 19 nt, Artificial Sequence
  Description of Artificial Sequence: Synthetic oligonucleotide
  Antisense strand to SEQ ID NO: 1053406
uccuaggagacagauucag

SEQ ID NO: 1053408 - RNA, 19 nt, Artificial Sequence
  Description of Artificial Sequence: Synthetic oligonucleotide
  Sense strand starting at position 998 of SEQ ID NO: 915096
gaaagugguggcugcauuu

SEQ ID NO: 1053409 - RNA, 19 nt, Artificial Sequence
  Description of Artificial Sequence: Synthetic oligonucleotide
  Antisense strand to SEQ ID NO: 1053408
aaaugcagccaccacuuuc

SEQ ID NO: 1053410 - RNA, 19 nt, Artificial Sequence
  Description of Artificial Sequence: Synthetic oligonucleotide
  Sense strand starting at position 1099 of SEQ ID NO: 915096
agugauucucuguaacuca

SEQ ID NO: 1053411 - RNA, 19 nt, Artificial Sequence
  Description of Artificial Sequence: Synthetic oligonucleotide
  Antisense strand to SEQ ID NO: 1053410
ugaguuacagagaaucacu

SEQ ID NO: 1053412 - RNA, 19 nt, Artificial Sequence
  Description of Artificial Sequence: Synthetic oligonucleotide
  Sense strand starting at position 1106 of SEQ ID NO: 915096
cucuguaacucauuaaggu

SEQ ID NO: 1053413 - RNA, 19 nt, Artificial Sequence
  Description of Artificial Sequence: Synthetic oligonucleotide
  Antisense strand to SEQ ID NO: 1053412
accuuaaugaguuacagag

SEQ ID NO: 1053414 - RNA, 19 nt, Artificial Sequence
  Description of Artificial Sequence: Synthetic oligonucleotide
  Sense strand starting at position 1314 of SEQ ID NO: 915096
ugggcugacacugguaauu

SEQ ID NO: 1053415 - RNA, 19 nt, Artificial Sequence
  Description of Artificial Sequence: Synthetic oligonucleotide
  Antisense strand to SEQ ID NO: 1053414
aauuaccagugucagccca

SEQ ID NO: 1053416 - RNA, 19 nt, Artificial Sequence
  Description of Artificial Sequence: Synthetic oligonucleotide
  Sense strand starting at position 1348 of SEQ ID NO: 915096
ugaggugcaucucugauaa

SEQ ID NO: 1053417 - RNA, 19 nt, Artificial Sequence
  Description of Artificial Sequence: Synthetic oligonucleotide
  Antisense strand to SEQ ID NO: 1053416
uuaucagagaugcaccuca

SEQ ID NO: 1053418 - RNA, 19 nt, Artificial Sequence
  Description of Artificial Sequence: Synthetic oligonucleotide
  Sense strand starting at position 2100 of SEQ ID NO: 915096
cucuccggagucugagaau

SEQ ID NO: 1053419 - RNA, 19 nt, Artificial Sequence
  Description of Artificial Sequence: Synthetic oligonucleotide
  Antisense strand to SEQ ID NO: 1053418
auucucagacuccggagag

SEQ ID NO: 1053420 - RNA, 19 nt, Artificial Sequence
  Description of Artificial Sequence: Synthetic oligonucleotide
  Sense strand starting at position 2109 of SEQ ID NO: 915096
gucugagaauucuuccuca

SEQ ID NO: 1053421 - RNA, 19 nt, Artificial Sequence
  Description of Artificial Sequence: Synthetic oligonucleotide
  Antisense strand to SEQ ID NO: 1053420
ugaggaagaauucucagac

SEQ ID NO: 1053422 - RNA, 19 nt, Artificial Sequence
  Description of Artificial Sequence: Synthetic oligonucleotide
  Sense strand starting at position 2112 of SEQ ID NO: 915096
ugagaauucuuccucagau

SEQ ID NO: 1053423 - RNA, 19 nt, Artificial Sequence
  Description of Artificial Sequence: Synthetic oligonucleotide
  Antisense strand to SEQ ID NO: 1053422
aucugaggaagaauucuca

SEQ ID NO: 1053424 - RNA, 19 nt, Artificial Sequence
  Description of Artificial Sequence: Synthetic oligonucleotide
  Sense strand starting at position 2294 of SEQ ID NO: 915096
ucgagacgcuacuuuaaga

SEQ ID NO: 1053425 - RNA, 19 nt, Artificial Sequence
  Description of Artificial Sequence: Synthetic oligonucleotide
  Antisense strand to SEQ ID NO: 1053424
ucuuaaaguagcgucucga

SEQ ID NO: 1053426 - RNA, 19 nt, Artificial Sequence
  Description of Artificial Sequence: Synthetic oligonucleotide
  Sense strand starting at position 2376 of SEQ ID NO: 915096
gugucucugacauacagga

SEQ ID NO: 1053427 - RNA, 19 nt, Artificial Sequence
  Description of Artificial Sequence: Synthetic oligonucleotide
  Antisense strand to SEQ ID NO: 1053426
uccuguaugucagagacac

SEQ ID NO: 1053428 - RNA, 19 nt, Artificial Sequence
  Description of Artificial Sequence: Synthetic oligonucleotide
  Sense strand starting at position 3588 of SEQ ID NO: 915096
ggauuugucucuuucugcu

SEQ ID NO: 1053429 - RNA, 19 nt, Artificial Sequence
  Description of Artificial Sequence: Synthetic oligonucleotide
  Antisense strand to SEQ ID NO: 1053428
agcagaaagagacaaaucc

SEQ ID NO: 1053430 - RNA, 19 nt, Artificial Sequence
  Description of Artificial Sequence: Synthetic oligonucleotide
  Sense strand starting at position 3823 of SEQ ID NO: 915096
acuuuaguugcugaaggau

SEQ ID NO: 1053431 - RNA, 19 nt, Artificial Sequence
  Description of Artificial Sequence: Synthetic oligonucleotide
  Antisense strand to SEQ ID NO: 1053430
auccuucagcaacuaaagu

SEQ ID NO: 1053432 - RNA, 19 nt, Artificial Sequence
  Description of Artificial Sequence: Synthetic oligonucleotide
  Sense strand starting at position 3826 of SEQ ID NO: 915096
uuaguugcugaaggauaca

SEQ ID NO: 1053433 - RNA, 19 nt, Artificial Sequence
  Description of Artificial Sequence: Synthetic oligonucleotide
  Antisense strand to SEQ ID NO: 1053432
uguauccuucagcaacuaa

SEQ ID NO: 1053434 - RNA, 19 nt, Artificial Sequence
  Description of Artificial Sequence: Synthetic oligonucleotide
  Sense strand starting at position 3916 of SEQ ID NO: 915096
aggguuagcccacauauau

SEQ ID NO: 1053435 - RNA, 19 nt, Artificial Sequence
  Description of Artificial Sequence: Synthetic oligonucleotide
  Antisense strand to SEQ ID NO: 1053434
auauaugugggcuaacccu

SEQ ID NO: 1053436 - RNA, 19 nt, Artificial Sequence
  Description of Artificial Sequence: Synthetic oligonucleotide
  Sense strand starting at position 3928 of SEQ ID NO: 915096
cauauauguguaggucuaa

SEQ ID NO: 1053437 - RNA, 19 nt, Artificial Sequence
  Description of Artificial Sequence: Synthetic oligonucleotide
  Antisense strand to SEQ ID NO: 1053436
uuagaccuacacauauaug

SEQ ID NO: 1053438 - RNA, 19 nt, Artificial Sequence
  Description of Artificial Sequence: Synthetic oligonucleotide
  Sense strand starting at position 3929 of SEQ ID NO: 915096
auauauguguaggucuaaa

SEQ ID NO: 1053439 - RNA, 19 nt, Artificial Sequence
  Description of Artificial Sequence: Synthetic oligonucleotide
  Antisense strand to SEQ ID NO: 1053438
uuuagaccuacacauauau

SEQ ID NO: 1053440 - RNA, 19 nt, Artificial Sequence
  Description of Artificial Sequence: Synthetic oligonucleotide
  Sense strand starting at position 3958 of SEQ ID NO: 915096
agagcaucuuaccuagaag

SEQ ID NO: 1053441 - RNA, 19 nt, Artificial Sequence
  Description of Artificial Sequence: Synthetic oligonucleotide
  Antisense strand to SEQ ID NO: 1053440
cuucuagguaagaugcucu

SEQ ID NO: 1053442 - RNA, 19 nt, Artificial Sequence
  Description of Artificial Sequence: Synthetic oligonucleotide
  Sense strand starting at position 40 of SEQ ID NO: 915097
agacuuauucuggagcuuu

SEQ ID NO: 1053443 - RNA, 19 nt, Artificial Sequence
  Description of Artificial Sequence: Synthetic oligonucleotide
  Antisense strand to SEQ ID NO: 1053442
aaagcuccagaauaagucu

SEQ ID NO: 1053444 - RNA, 19 nt, Artificial Sequence
  Description of Artificial Sequence: Synthetic oligonucleotide
  Sense strand starting at position 202 of SEQ ID NO: 915097
guuauaaaggcauaugcau

SEQ ID NO: 1053445 - RNA, 19 nt, Artificial Sequence
  Description of Artificial Sequence: Synthetic oligonucleotide
  Antisense strand to SEQ ID NO: 1053444
augcauaugccuuuauaac

SEQ ID NO: 1053446 - RNA, 19 nt, Artificial Sequence
  Description of Artificial Sequence: Synthetic oligonucleotide
  Sense strand starting at position 252 of SEQ ID NO: 915097
acugcauaccaguaagcuu

SEQ ID NO: 1053447 - RNA, 19 nt, Artificial Sequence
  Description of Artificial Sequence: Synthetic oligonucleotide
  Antisense strand to SEQ ID NO: 1053446
aagcuuacugguaugcagu

SEQ ID NO: 1053448 - RNA, 19 nt, Artificial Sequence
  Description of Artificial Sequence: Synthetic oligonucleotide
  Sense strand starting at position 285 of SEQ ID NO: 915097
ugcuuaagggcaugagaau

SEQ ID NO: 1053449 - RNA, 19 nt, Artificial Sequence
  Description of Artificial Sequence: Synthetic oligonucleotide
  Antisense strand to SEQ ID NO: 1053448
auucucaugcccuuaagca

SEQ ID NO: 1053450 - RNA, 19 nt, Artificial Sequence
  Description of Artificial Sequence: Synthetic oligonucleotide
  Sense strand starting at position 319 of SEQ ID NO: 915097
ggagaguuauguguuggga

SEQ ID NO: 1053451 - RNA, 19 nt, Artificial Sequence
  Description of Artificial Sequence: Synthetic oligonucleotide
  Antisense strand to SEQ ID NO: 1053450
ucccaacacauaacucucc

SEQ ID NO: 1053452 - RNA, 19 nt, Artificial Sequence
  Description of Artificial Sequence: Synthetic oligonucleotide
  Sense strand starting at position 322 of SEQ ID NO: 915097
gaguuauguguugggaaag

SEQ ID NO: 1053453 - RNA, 19 nt, Artificial Sequence
  Description of Artificial Sequence: Synthetic oligonucleotide
  Antisense strand to SEQ ID NO: 1053452
cuuucccaacacauaacuc

SEQ ID NO: 1053454 - RNA, 19 nt, Artificial Sequence
  Description of Artificial Sequence: Synthetic oligonucleotide
  Sense strand starting at position 370 of SEQ ID NO: 915097
gucagaucugcccagaaga

SEQ ID NO: 1053455 - RNA, 19 nt, Artificial Sequence
  Description of Artificial Sequence: Synthetic oligonucleotide
  Antisense strand to SEQ ID NO: 1053454
ucuucugggcagaucugac

SEQ ID NO: 1053456 - RNA, 19 nt, Artificial Sequence
  Description of Artificial Sequence: Synthetic oligonucleotide
  Sense strand starting at position 448 of SEQ ID NO: 915097
uguuauaaugacuagcagu

SEQ ID NO: 1053457 - RNA, 19 nt, Artificial Sequence
  Description of Artificial Sequence: Synthetic oligonucleotide
  Antisense strand to SEQ ID NO: 1053456
acugcuagucauuauaaca

SEQ ID NO: 1053458 - RNA, 19 nt, Artificial Sequence
  Description of Artificial Sequence: Synthetic oligonucleotide
  Sense strand starting at position 823 of SEQ ID NO: 915097
ggaaauaguuggccacaga

SEQ ID NO: 1053459 - RNA, 19 nt, Artificial Sequence
  Description of Artificial Sequence: Synthetic oligonucleotide
  Antisense strand to SEQ ID NO: 1053458
ucuguggccaacuauuucc

SEQ ID NO: 1053460 - RNA, 19 nt, Artificial Sequence
  Description of Artificial Sequence: Synthetic oligonucleotide
  Sense strand starting at position 826 of SEQ ID NO: 915097
aauaguuggccacagaagu

SEQ ID NO: 1053461 - RNA, 19 nt, Artificial Sequence
  Description of Artificial Sequence: Synthetic oligonucleotide
  Antisense strand to SEQ ID NO: 1053460
acuucuguggccaacuauu

SEQ ID NO: 1053462 - RNA, 19 nt, Artificial Sequence
  Description of Artificial Sequence: Synthetic oligonucleotide
  Sense strand starting at position 997 of SEQ ID NO: 915097
ucuuauuggagauguggaa

SEQ ID NO: 1053463 - RNA, 19 nt, Artificial Sequence
  Description of Artificial Sequence: Synthetic oligonucleotide
  Antisense strand to SEQ ID NO: 1053462
uuccacaucuccaauaaga

SEQ ID NO: 1053464 - RNA, 19 nt, Artificial Sequence
  Description of Artificial Sequence: Synthetic oligonucleotide
  Sense strand starting at position 1041 of SEQ ID NO: 915097
gggacugauuguuucucau

SEQ ID NO: 1053465 - RNA, 19 nt, Artificial Sequence
  Description of Artificial Sequence: Synthetic oligonucleotide
  Antisense strand to SEQ ID NO: 1053464
augagaaacaaucaguccc

SEQ ID NO: 1053466 - RNA, 19 nt, Artificial Sequence
  Description of Artificial Sequence: Synthetic oligonucleotide
  Sense strand starting at position 1044 of SEQ ID NO: 915097
acugauuguuucucaucca

SEQ ID NO: 1053467 - RNA, 19 nt, Artificial Sequence
  Description of Artificial Sequence: Synthetic oligonucleotide
  Antisense strand to SEQ ID NO: 1053466
uggaugagaaacaaucagu

SEQ ID NO: 1053468 - RNA, 19 nt, Artificial Sequence
  Description of Artificial Sequence: Synthetic oligonucleotide
  Sense strand starting at position 2064 of SEQ ID NO: 915097
aacuguggucauggagaaa

SEQ ID NO: 1053469 - RNA, 19 nt, Artificial Sequence
  Description of Artificial Sequence: Synthetic oligonucleotide
  Antisense strand to SEQ ID NO: 1053468
uuucuccaugaccacaguu

SEQ ID NO: 1053470 - RNA, 19 nt, Artificial Sequence
  Description of Artificial Sequence: Synthetic oligonucleotide
  Sense strand starting at position 2082 of SEQ ID NO: 915097
agauuauugauuggaaguc

SEQ ID NO: 1053471 - RNA, 19 nt, Artificial Sequence
  Description of Artificial Sequence: Synthetic oligonucleotide
  Antisense strand to SEQ ID NO: 1053470
gacuuccaaucaauaaucu

SEQ ID NO: 1053472 - RNA, 19 nt, Artificial Sequence
  Description of Artificial Sequence: Synthetic oligonucleotide
  Sense strand starting at position 2129 of SEQ ID NO: 915097
ucuuacugucagggaaaga

SEQ ID NO: 1053473 - RNA, 19 nt, Artificial Sequence
  Description of Artificial Sequence: Synthetic oligonucleotide
  Antisense strand to SEQ ID NO: 1053472
ucuuucccugacaguaaga

SEQ ID NO: 1053474 - RNA, 19 nt, Artificial Sequence
  Description of Artificial Sequence: Synthetic oligonucleotide
  Sense strand starting at position 2219 of SEQ ID NO: 915097
agagccuaaucucugagau

SEQ ID NO: 1053475 - RNA, 19 nt, Artificial Sequence
  Description of Artificial Sequence: Synthetic oligonucleotide
  Antisense strand to SEQ ID NO: 1053474
aucucagagauuaggcucu

SEQ ID NO: 1053476 - RNA, 19 nt, Artificial Sequence
  Description of Artificial Sequence: Synthetic oligonucleotide
  Sense strand starting at position 2220 of SEQ ID NO: 915097
gagccuaaucucugagaug

SEQ ID NO: 1053477 - RNA, 19 nt, Artificial Sequence
  Description of Artificial Sequence: Synthetic oligonucleotide
  Antisense strand to SEQ ID NO: 1053476
caucucagagauuaggcuc

SEQ ID NO: 1053478 - RNA, 19 nt, Artificial Sequence
  Description of Artificial Sequence: Synthetic oligonucleotide
  Sense strand starting at position 2231 of SEQ ID NO: 915097
cugagaugggccugaauca

SEQ ID NO: 1053479 - RNA, 19 nt, Artificial Sequence
  Description of Artificial Sequence: Synthetic oligonucleotide
  Antisense strand to SEQ ID NO: 1053478
ugauucaggcccaucucag

SEQ ID NO: 1053480 - RNA, 19 nt, Artificial Sequence
  Description of Artificial Sequence: Synthetic oligonucleotide
  Sense strand starting at position 2397 of SEQ ID NO: 915097
acaccaaguguuuauaauc

SEQ ID NO: 1053481 - RNA, 19 nt, Artificial Sequence
  Description of Artificial Sequence: Synthetic oligonucleotide
  Antisense strand to SEQ ID NO: 1053480
gauuauaaacacuuggugu

SEQ ID NO: 1053482 - RNA, 19 nt, Artificial Sequence
  Description of Artificial Sequence: Synthetic oligonucleotide
  Sense strand starting at position 2517 of SEQ ID NO: 915097
uuucuugacuggcuagaau

SEQ ID NO: 1053483 - RNA, 19 nt, Artificial Sequence
  Description of Artificial Sequence: Synthetic oligonucleotide
  Antisense strand to SEQ ID NO: 1053482
auucuagccagucaagaaa

SEQ ID NO: 1053484 - RNA, 19 nt, Artificial Sequence
  Description of Artificial Sequence: Synthetic oligonucleotide
  Sense strand starting at position 2558 of SEQ ID NO: 915097
gcauguauugaggaccauu

SEQ ID NO: 1053485 - RNA, 19 nt, Artificial Sequence
  Description of Artificial Sequence: Synthetic oligonucleotide
  Antisense strand to SEQ ID NO: 1053484
aaugguccucaauacaugc

SEQ ID NO: 1053486 - RNA, 19 nt, Artificial Sequence
  Description of Artificial Sequence: Synthetic oligonucleotide
  Sense strand starting at position 2600 of SEQ ID NO: 915097
uuauaucucugguuuauac

SEQ ID NO: 1053487 - RNA, 19 nt, Artificial Sequence
  Description of Artificial Sequence: Synthetic oligonucleotide
  Antisense strand to SEQ ID NO: 1053486
guauaaaccagagauauaa

SEQ ID NO: 1053488 - RNA, 19 nt, Artificial Sequence
  Description of Artificial Sequence: Synthetic oligonucleotide
  Sense strand starting at position 2608 of SEQ ID NO: 915097
cugguuuauacaugaggaa

SEQ ID NO: 1053489 - RNA, 19 nt, Artificial Sequence
  Description of Artificial Sequence: Synthetic oligonucleotide
  Antisense strand to SEQ ID NO: 1053488
uuccucauguauaaaccag

SEQ ID NO: 1053490 - RNA, 19 nt, Artificial Sequence
  Description of Artificial Sequence: Synthetic oligonucleotide
  Sense strand starting at position 2738 of SEQ ID NO: 915097
acugucaugccuuaucuga

SEQ ID NO: 1053491 - RNA, 19 nt, Artificial Sequence
  Description of Artificial Sequence: Synthetic oligonucleotide
  Antisense strand to SEQ ID NO: 1053490
ucagauaaggcaugacagu

SEQ ID NO: 1053492 - RNA, 19 nt, Artificial Sequence
  Description of Artificial Sequence: Synthetic oligonucleotide
  Sense strand starting at position 2746 of SEQ ID NO: 915097
gccuuaucugaugacuaac

SEQ ID NO: 1053493 - RNA, 19 nt, Artificial Sequence
  Description of Artificial Sequence: Synthetic oligonucleotide
  Antisense strand to SEQ ID NO: 1053492
guuagucaucagauaaggc

SEQ ID NO: 1053494 - RNA, 19 nt, Artificial Sequence
  Description of Artificial Sequence: Synthetic oligonucleotide
  Sense strand starting at position 2853 of SEQ ID NO: 915097
gcauuaagauguuuaggag

SEQ ID NO: 1053495 - RNA, 19 nt, Artificial Sequence
  Description of Artificial Sequence: Synthetic oligonucleotide
  Antisense strand to SEQ ID NO: 1053494
cuccuaaacaucuuaaugc

SEQ ID NO: 1053496 - RNA, 19 nt, Artificial Sequence
  Description of Artificial Sequence: Synthetic oligonucleotide
  Sense strand starting at position 2918 of SEQ ID NO: 915097
auuugcaguugguuaucua

SEQ ID NO: 1053497 - RNA, 19 nt, Artificial Sequence
  Description of Artificial Sequence: Synthetic oligonucleotide
  Antisense strand to SEQ ID NO: 1053496
uagauaaccaacugcaaau

SEQ ID NO: 1053498 - RNA, 19 nt, Artificial Sequence
  Description of Artificial Sequence: Synthetic oligonucleotide
  Sense strand starting at position 2990 of SEQ ID NO: 915097
uggugauauuaagcuggaa

SEQ ID NO: 1053499 - RNA, 19 nt, Artificial Sequence
  Description of Artificial Sequence: Synthetic oligonucleotide
  Antisense strand to SEQ ID NO: 1053498
uuccagcuuaauaucacca

SEQ ID NO: 1053500 - RNA, 19 nt, Artificial Sequence
  Description of Artificial Sequence: Synthetic oligonucleotide
  Sense strand starting at position 3043 of SEQ ID NO: 915097
aaaugaaugugguuagcaa

SEQ ID NO: 1053501 - RNA, 19 nt, Artificial Sequence
  Description of Artificial Sequence: Synthetic oligonucleotide
  Antisense strand to SEQ ID NO: 1053500
uugcuaaccacauucauuu

SEQ ID NO: 1053502 - RNA, 19 nt, Artificial Sequence
  Description of Artificial Sequence: Synthetic oligonucleotide
  Sense strand starting at position 3148 of SEQ ID NO: 915097
caaagauauggucaguguu

SEQ ID NO: 1053503 - RNA, 19 nt, Artificial Sequence
  Description of Artificial Sequence: Synthetic oligonucleotide
  Antisense strand to SEQ ID NO: 1053502
aacacugaccauaucuuug

SEQ ID NO: 1053504 - RNA, 19 nt, Artificial Sequence
  Description of Artificial Sequence: Synthetic oligonucleotide
  Sense strand starting at position 3273 of SEQ ID NO: 915097
ucauaaugcuacuuagaag

SEQ ID NO: 1053505 - RNA, 19 nt, Artificial Sequence
  Description of Artificial Sequence: Synthetic oligonucleotide
  Antisense strand to SEQ ID NO: 1053504
cuucuaaguagcauuauga

SEQ ID NO: 1053506 - RNA, 19 nt, Artificial Sequence
  Description of Artificial Sequence: Synthetic oligonucleotide
  Sense strand starting at position 3294 of SEQ ID NO: 915097
ucacucugacauuguugau

SEQ ID NO: 1053507 - RNA, 19 nt, Artificial Sequence
  Description of Artificial Sequence: Synthetic oligonucleotide
  Antisense strand to SEQ ID NO: 1053506
aucaacaaugucagaguga

SEQ ID NO: 1053508 - RNA, 19 nt, Artificial Sequence
  Description of Artificial Sequence: Synthetic oligonucleotide
  Sense strand starting at position 3354 of SEQ ID NO: 915097
ucaagaagacuagguggua

SEQ ID NO: 1053509 - RNA, 19 nt, Artificial Sequence
  Description of Artificial Sequence: Synthetic oligonucleotide
  Antisense strand to SEQ ID NO: 1053508
uaccaccuagucuucuuga

SEQ ID NO: 1053510 - RNA, 19 nt, Artificial Sequence
  Description of Artificial Sequence: Synthetic oligonucleotide
  Sense strand starting at position 3355 of SEQ ID NO: 915097
caagaagacuaggugguau

SEQ ID NO: 1053511 - RNA, 19 nt, Artificial Sequence
  Description of Artificial Sequence: Synthetic oligonucleotide
  Antisense strand to SEQ ID NO: 1053510
auaccaccuagucuucuug

SEQ ID NO: 1053512 - RNA, 19 nt, Artificial Sequence
  Description of Artificial Sequence: Synthetic oligonucleotide
  Sense strand starting at position 3357 of SEQ ID NO: 915097
agaagacuaggugguauau

SEQ ID NO: 1053513 - RNA, 19 nt, Artificial Sequence
  Description of Artificial Sequence: Synthetic oligonucleotide
  Antisense strand to SEQ ID NO: 1053512
auauaccaccuagucuucu

SEQ ID NO: 1053514 - RNA, 19 nt, Artificial Sequence
  Description of Artificial Sequence: Synthetic oligonucleotide
  Sense strand starting at position 3367 of SEQ ID NO: 915097
gugguauaucuauaauuac

SEQ ID NO: 1053515 - RNA, 19 nt, Artificial Sequence
  Description of Artificial Sequence: Synthetic oligonucleotide
  Antisense strand to SEQ ID NO: 1053514
guaauuauagauauaccac

SEQ ID NO: 1053516 - RNA, 19 nt, Artificial Sequence
  Description of Artificial Sequence: Synthetic oligonucleotide
  Sense strand starting at position 3462 of SEQ ID NO: 915097
ggugaauaauuugaacuuc

SEQ ID NO: 1053517 - RNA, 19 nt, Artificial Sequence
  Description of Artificial Sequence: Synthetic oligonucleotide
  Antisense strand to SEQ ID NO: 1053516
gaaguucaaauuauucacc

SEQ ID NO: 1053518 - RNA, 19 nt, Artificial Sequence
  Description of Artificial Sequence: Synthetic oligonucleotide
  Sense strand starting at position 3500 of SEQ ID NO: 915097
cagagaaucuaugaaggaa

SEQ ID NO: 1053519 - RNA, 19 nt, Artificial Sequence
  Description of Artificial Sequence: Synthetic oligonucleotide
  Antisense strand to SEQ ID NO: 1053518
uuccuucauagauucucug

SEQ ID NO: 1053520 - RNA, 19 nt, Artificial Sequence
  Description of Artificial Sequence: Synthetic oligonucleotide
  Sense strand starting at position 3589 of SEQ ID NO: 915097
ugaagcaaugucuacaguu

SEQ ID NO: 1053521 - RNA, 19 nt, Artificial Sequence
  Description of Artificial Sequence: Synthetic oligonucleotide
  Antisense strand to SEQ ID NO: 1053520
aacuguagacauugcuuca

SEQ ID NO: 1053522 - RNA, 19 nt, Artificial Sequence
  Description of Artificial Sequence: Synthetic oligonucleotide
  Sense strand starting at position 5 of SEQ ID NO: 915098
cuaaaucaguggucuguaa

SEQ ID NO: 1053523 - RNA, 19 nt, Artificial Sequence
  Description of Artificial Sequence: Synthetic oligonucleotide
  Antisense strand to SEQ ID NO: 1053522
uuacagaccacugauuuag

SEQ ID NO: 1053524 - RNA, 19 nt, Artificial Sequence
  Description of Artificial Sequence: Synthetic oligonucleotide
  Sense strand starting at position 7 of SEQ ID NO: 915098
aaaucaguggucuguaaau

SEQ ID NO: 1053525 - RNA, 19 nt, Artificial Sequence
  Description of Artificial Sequence: Synthetic oligonucleotide
  Antisense strand to SEQ ID NO: 1053524
auuuacagaccacugauuu

SEQ ID NO: 1053526 - RNA, 19 nt, Artificial Sequence
  Description of Artificial Sequence: Synthetic oligonucleotide
  Sense strand starting at position 9 of SEQ ID NO: 915098
aucaguggucuguaaauga

SEQ ID NO: 1053527 - RNA, 19 nt, Artificial Sequence
  Description of Artificial Sequence: Synthetic oligonucleotide
  Antisense strand to SEQ ID NO: 1053526
ucauuuacagaccacugau

SEQ ID NO: 1053528 - RNA, 19 nt, Artificial Sequence
  Description of Artificial Sequence: Synthetic oligonucleotide
  Sense strand starting at position 57 of SEQ ID NO: 915098
uugagaaacuucccaugua

SEQ ID NO: 1053529 - RNA, 19 nt, Artificial Sequence
  Description of Artificial Sequence: Synthetic oligonucleotide
  Antisense strand to SEQ ID NO: 1053528
uacaugggaaguuucucaa

SEQ ID NO: 1053530 - RNA, 19 nt, Artificial Sequence
  Description of Artificial Sequence: Synthetic oligonucleotide
  Sense strand starting at position 60 of SEQ ID NO: 915098
agaaacuucccauguagcu

SEQ ID NO: 1053531 - RNA, 19 nt, Artificial Sequence
  Description of Artificial Sequence: Synthetic oligonucleotide
  Antisense strand to SEQ ID NO: 1053530
agcuacaugggaaguuucu

SEQ ID NO: 1053532 - RNA, 19 nt, Artificial Sequence
  Description of Artificial Sequence: Synthetic oligonucleotide
  Sense strand starting at position 96 of SEQ ID NO: 915098
ggauaaauauuuggaaaga

SEQ ID NO: 1053533 - RNA, 19 nt, Artificial Sequence
  Description of Artificial Sequence: Synthetic oligonucleotide
  Antisense strand to SEQ ID NO: 1053532
ucuuuccaaauauuuaucc

SEQ ID NO: 1053534 - RNA, 19 nt, Artificial Sequence
  Description of Artificial Sequence: Synthetic oligonucleotide
  Sense strand starting at position 106 of SEQ ID NO: 915098
uuggaaagauaccaagaga

SEQ ID NO: 1053535 - RNA, 19 nt, Artificial Sequence
  Description of Artificial Sequence: Synthetic oligonucleotide
  Antisense strand to SEQ ID NO: 1053534
ucucuugguaucuuuccaa

SEQ ID NO: 1053536 - RNA, 19 nt, Artificial Sequence
  Description of Artificial Sequence: Synthetic oligonucleotide
  Sense strand starting at position 122 of SEQ ID NO: 915098
agaaauccaguuugggauu

SEQ ID NO: 1053537 - RNA, 19 nt, Artificial Sequence
  Description of Artificial Sequence: Synthetic oligonucleotide
  Antisense strand to SEQ ID NO: 1053536
aaucccaaacuggauuucu

SEQ ID NO: 1053538 - RNA, 19 nt, Artificial Sequence
  Description of Artificial Sequence: Synthetic oligonucleotide
  Sense strand starting at position 148 of SEQ ID NO: 915098
guguaaggucaugaaguag

SEQ ID NO: 1053539 - RNA, 19 nt, Artificial Sequence
  Description of Artificial Sequence: Synthetic oligonucleotide
  Antisense strand to SEQ ID NO: 1053538
cuacuucaugaccuuacac

SEQ ID NO: 1053540 - RNA, 19 nt, Artificial Sequence
  Description of Artificial Sequence: Synthetic oligonucleotide
  Sense strand starting at position 204 of SEQ ID NO: 915098
uuuacucauccguggaaca

SEQ ID NO: 1053541 - RNA, 19 nt, Artificial Sequence
  Description of Artificial Sequence: Synthetic oligonucleotide
  Antisense strand to SEQ ID NO: 1053540
uguuccacggaugaguaaa

SEQ ID NO: 1053542 - RNA, 19 nt, Artificial Sequence
  Description of Artificial Sequence: Synthetic oligonucleotide
  Sense strand starting at position 205 of SEQ ID NO: 915098
uuacucauccguggaacaa

SEQ ID NO: 1053543 - RNA, 19 nt, Artificial Sequence
  Description of Artificial Sequence: Synthetic oligonucleotide
  Antisense strand to SEQ ID NO: 1053542
uuguuccacggaugaguaa

SEQ ID NO: 1053544 - RNA, 19 nt, Artificial Sequence
  Description of Artificial Sequence: Synthetic oligonucleotide
  Sense strand starting at position 206 of SEQ ID NO: 915098
uacucauccguggaacaaa

SEQ ID NO: 1053545 - RNA, 19 nt, Artificial Sequence
  Description of Artificial Sequence: Synthetic oligonucleotide
  Antisense strand to SEQ ID NO: 1053544
uuuguuccacggaugagua

SEQ ID NO: 1053546 - RNA, 19 nt, Artificial Sequence
  Description of Artificial Sequence: Synthetic oligonucleotide
  Sense strand starting at position 344 of SEQ ID NO: 915098
guaauucugcaauagcuaa

SEQ ID NO: 1053547 - RNA, 19 nt, Artificial Sequence
  Description of Artificial Sequence: Synthetic oligonucleotide
  Antisense strand to SEQ ID NO: 1053546
uuagcuauugcagaauuac

SEQ ID NO: 1053548 - RNA, 19 nt, Artificial Sequence
  Description of Artificial Sequence: Synthetic oligonucleotide
  Sense strand starting at position 804 of SEQ ID NO: 915098
acaguaauccaguagcuac

SEQ ID NO: 1053549 - RNA, 19 nt, Artificial Sequence
  Description of Artificial Sequence: Synthetic oligonucleotide
  Antisense strand to SEQ ID NO: 1053548
guagcuacuggauuacugu

SEQ ID NO: 1053550 - RNA, 19 nt, Artificial Sequence
  Description of Artificial Sequence: Synthetic oligonucleotide
  Sense strand starting at position 903 of SEQ ID NO: 915098
gacagcaguucuuuauuga

SEQ ID NO: 1053551 - RNA, 19 nt, Artificial Sequence
  Description of Artificial Sequence: Synthetic oligonucleotide
  Antisense strand to SEQ ID NO: 1053550
ucaauaaagaacugcuguc

SEQ ID NO: 1053552 - RNA, 19 nt, Artificial Sequence
  Description of Artificial Sequence: Synthetic oligonucleotide
  Sense strand starting at position 906 of SEQ ID NO: 915098
agcaguucuuuauugagau

SEQ ID NO: 1053553 - RNA, 19 nt, Artificial Sequence
  Description of Artificial Sequence: Synthetic oligonucleotide
  Antisense strand to SEQ ID NO: 1053552
aucucaauaaagaacugcu

SEQ ID NO: 1053554 - RNA, 19 nt, Artificial Sequence
  Description of Artificial Sequence: Synthetic oligonucleotide
  Sense strand starting at position 1053 of SEQ ID NO: 915098
caaucagaauguguguaaa

SEQ ID NO: 1053555 - RNA, 19 nt, Artificial Sequence
  Description of Artificial Sequence: Synthetic oligonucleotide
  Antisense strand to SEQ ID NO: 1053554
uuuacacacauucugauug

SEQ ID NO: 1053556 - RNA, 19 nt, Artificial Sequence
  Description of Artificial Sequence: Synthetic oligonucleotide
  Sense strand starting at position 1120 of SEQ ID NO: 915098
uuucguaagcuauagauga

SEQ ID NO: 1053557 - RNA, 19 nt, Artificial Sequence
  Description of Artificial Sequence: Synthetic oligonucleotide
  Antisense strand to SEQ ID NO: 1053556
ucaucuauagcuuacgaaa

SEQ ID NO: 1053558 - RNA, 19 nt, Artificial Sequence
  Description of Artificial Sequence: Synthetic oligonucleotide
  Sense strand starting at position 1165 of SEQ ID NO: 915098
guguaagccaaugagauca

SEQ ID NO: 1053559 - RNA, 19 nt, Artificial Sequence
  Description of Artificial Sequence: Synthetic oligonucleotide
  Antisense strand to SEQ ID NO: 1053558
ugaucucauuggcuuacac

SEQ ID NO: 1053560 - RNA, 19 nt, Artificial Sequence
  Description of Artificial Sequence: Synthetic oligonucleotide
  Sense strand starting at position 1177 of SEQ ID NO: 915098
gagaucaguuucuugguuu

SEQ ID NO: 1053561 - RNA, 19 nt, Artificial Sequence
  Description of Artificial Sequence: Synthetic oligonucleotide
  Antisense strand to SEQ ID NO: 1053560
aaaccaagaaacugaucuc

SEQ ID NO: 1053562 - RNA, 19 nt, Artificial Sequence
  Description of Artificial Sequence: Synthetic oligonucleotide
  Sense strand starting at position 1216 of SEQ ID NO: 915098
gguuguaaauaagucauau

SEQ ID NO: 1053563 - RNA, 19 nt, Artificial Sequence
  Description of Artificial Sequence: Synthetic oligonucleotide
  Antisense strand to SEQ ID NO: 1053562
auaugacuuauuuacaacc

SEQ ID NO: 1053564 - RNA, 19 nt, Artificial Sequence
  Description of Artificial Sequence: Synthetic oligonucleotide
  Sense strand starting at position 1234 of SEQ ID NO: 915098
uuggcugugccauagaaca

SEQ ID NO: 1053565 - RNA, 19 nt, Artificial Sequence
  Description of Artificial Sequence: Synthetic oligonucleotide
  Antisense strand to SEQ ID NO: 1053564
uguucuauggcacagccaa

SEQ ID NO: 1053566 - RNA, 19 nt, Artificial Sequence
  Description of Artificial Sequence: Synthetic oligonucleotide
  Sense strand starting at position 1535 of SEQ ID NO: 915098
ccaccaugaucccugagau

SEQ ID NO: 1053567 - RNA, 19 nt, Artificial Sequence
  Description of Artificial Sequence: Synthetic oligonucleotide
  Antisense strand to SEQ ID NO: 1053566
aucucagggaucauggugg

SEQ ID NO: 1053568 - RNA, 19 nt, Artificial Sequence
  Description of Artificial Sequence: Synthetic oligonucleotide
  Sense strand starting at position 1592 of SEQ ID NO: 915098
ucauaaucacuggguaguu

SEQ ID NO: 1053569 - RNA, 19 nt, Artificial Sequence
  Description of Artificial Sequence: Synthetic oligonucleotide
  Antisense strand to SEQ ID NO: 1053568
aacuacccagugauuauga

SEQ ID NO: 1053570 - RNA, 19 nt, Artificial Sequence
  Description of Artificial Sequence: Synthetic oligonucleotide
  Sense strand starting at position 1928 of SEQ ID NO: 915098
ccuggagcucaggaaaguu

SEQ ID NO: 1053571 - RNA, 19 nt, Artificial Sequence
  Description of Artificial Sequence: Synthetic oligonucleotide
  Antisense strand to SEQ ID NO: 1053570
aacuuuccugagcuccagg

SEQ ID NO: 1053572 - RNA, 19 nt, Artificial Sequence
  Description of Artificial Sequence: Synthetic oligonucleotide
  Sense strand starting at position 2036 of SEQ ID NO: 915098
ugguauaucgaguaugaag

SEQ ID NO: 1053573 - RNA, 19 nt, Artificial Sequence
  Description of Artificial Sequence: Synthetic oligonucleotide
  Antisense strand to SEQ ID NO: 1053572
cuucauacucgauauacca

SEQ ID NO: 1053574 - RNA, 19 nt, Artificial Sequence
  Description of Artificial Sequence: Synthetic oligonucleotide
  Sense strand starting at position 2082 of SEQ ID NO: 915098
ucuggaauucuugacagca

SEQ ID NO: 1053575 - RNA, 19 nt, Artificial Sequence
  Description of Artificial Sequence: Synthetic oligonucleotide
  Antisense strand to SEQ ID NO: 1053574
ugcugucaagaauuccaga

SEQ ID NO: 1053576 - RNA, 19 nt, Artificial Sequence
  Description of Artificial Sequence: Synthetic oligonucleotide
  Sense strand starting at position 2247 of SEQ ID NO: 915098
aguaaauguuaucuggcaa

SEQ ID NO: 1053577 - RNA, 19 nt, Artificial Sequence
  Description of Artificial Sequence: Synthetic oligonucleotide
  Antisense strand to SEQ ID NO: 1053576
uugccagauaacauuuacu

SEQ ID NO: 1053578 - RNA, 19 nt, Artificial Sequence
  Description of Artificial Sequence: Synthetic oligonucleotide
  Sense strand starting at position 2254 of SEQ ID NO: 915098
guuaucuggcaacaucuuu

SEQ ID NO: 1053579 - RNA, 19 nt, Artificial Sequence
  Description of Artificial Sequence: Synthetic oligonucleotide
  Antisense strand to SEQ ID NO: 1053578
aaagauguugccagauaac

SEQ ID NO: 1053580 - RNA, 19 nt, Artificial Sequence
  Description of Artificial Sequence: Synthetic oligonucleotide
  Sense strand starting at position 2350 of SEQ ID NO: 915098
gaagcaguguccuuaaagg

SEQ ID NO: 1053581 - RNA, 19 nt, Artificial Sequence
  Description of Artificial Sequence: Synthetic oligonucleotide
  Antisense strand to SEQ ID NO: 1053580
ccuuuaaggacacugcuuc

SEQ ID NO: 1053582 - RNA, 19 nt, Artificial Sequence
  Description of Artificial Sequence: Synthetic oligonucleotide
  Sense strand starting at position 2531 of SEQ ID NO: 915098
cccaucuguauggguuaga

SEQ ID NO: 1053583 - RNA, 19 nt, Artificial Sequence
  Description of Artificial Sequence: Synthetic oligonucleotide
  Antisense strand to SEQ ID NO: 1053582
ucuaacccauacagauggg

SEQ ID NO: 1053584 - RNA, 19 nt, Artificial Sequence
  Description of Artificial Sequence: Synthetic oligonucleotide
  Sense strand starting at position 2532 of SEQ ID NO: 915098
ccaucuguauggguuagaa

SEQ ID NO: 1053585 - RNA, 19 nt, Artificial Sequence
  Description of Artificial Sequence: Synthetic oligonucleotide
  Antisense strand to SEQ ID NO: 1053584
uucuaacccauacagaugg

SEQ ID NO: 1053586 - RNA, 19 nt, Artificial Sequence
  Description of Artificial Sequence: Synthetic oligonucleotide
  Sense strand starting at position 2576 of SEQ ID NO: 915098
ugacauagguguuucucua

SEQ ID NO: 1053587 - RNA, 19 nt, Artificial Sequence
  Description of Artificial Sequence: Synthetic oligonucleotide
  Antisense strand to SEQ ID NO: 1053586
uagagaaacaccuauguca

SEQ ID NO: 1053588 - RNA, 19 nt, Artificial Sequence
  Description of Artificial Sequence: Synthetic oligonucleotide
  Sense strand starting at position 2584 of SEQ ID NO: 915098
guguuucucuaauuuguug

SEQ ID NO: 1053589 - RNA, 19 nt, Artificial Sequence
  Description of Artificial Sequence: Synthetic oligonucleotide
  Antisense strand to SEQ ID NO: 1053588
caacaaauuagagaaacac

SEQ ID NO: 1053590 - RNA, 19 nt, Artificial Sequence
  Description of Artificial Sequence: Synthetic oligonucleotide
  Sense strand starting at position 3053 of SEQ ID NO: 915098
ucacccucccuccgagaaa

SEQ ID NO: 1053591 - RNA, 19 nt, Artificial Sequence
  Description of Artificial Sequence: Synthetic oligonucleotide
  Antisense strand to SEQ ID NO: 1053590
uuucucggagggaggguga

SEQ ID NO: 1053592 - RNA, 19 nt, Artificial Sequence
  Description of Artificial Sequence: Synthetic oligonucleotide
  Sense strand starting at position 3151 of SEQ ID NO: 915098
uugcuuuaggaauguaaau

SEQ ID NO: 1053593 - RNA, 19 nt, Artificial Sequence
  Description of Artificial Sequence: Synthetic oligonucleotide
  Antisense strand to SEQ ID NO: 1053592
auuuacauuccuaaagcaa

SEQ ID NO: 1053594 - RNA, 19 nt, Artificial Sequence
  Description of Artificial Sequence: Synthetic oligonucleotide
  Sense strand starting at position 3478 of SEQ ID NO: 915098
uauugagucugaccauagu

SEQ ID NO: 1053595 - RNA, 19 nt, Artificial Sequence
  Description of Artificial Sequence: Synthetic oligonucleotide
  Antisense strand to SEQ ID NO: 1053594
acuauggucagacucaaua

SEQ ID NO: 1053596 - RNA, 19 nt, Artificial Sequence
  Description of Artificial Sequence: Synthetic oligonucleotide
  Sense strand starting at position 3481 of SEQ ID NO: 915098
ugagucugaccauagugau

SEQ ID NO: 1053597 - RNA, 19 nt, Artificial Sequence
  Description of Artificial Sequence: Synthetic oligonucleotide
  Antisense strand to SEQ ID NO: 1053596
aucacuauggucagacuca

SEQ ID NO: 1053598 - RNA, 19 nt, Artificial Sequence
  Description of Artificial Sequence: Synthetic oligonucleotide
  Sense strand starting at position 3925 of SEQ ID NO: 915098
acuuauuucugaccgcuuu

SEQ ID NO: 1053599 - RNA, 19 nt, Artificial Sequence
  Description of Artificial Sequence: Synthetic oligonucleotide
  Antisense strand to SEQ ID NO: 1053598
aaagcggucagaaauaagu

SEQ ID NO: 1053600 - RNA, 19 nt, Artificial Sequence
  Description of Artificial Sequence: Synthetic oligonucleotide
  Sense strand starting at position 3970 of SEQ ID NO: 915098
cuaagaauugaugguuugu

SEQ ID NO: 1053601 - RNA, 19 nt, Artificial Sequence
  Description of Artificial Sequence: Synthetic oligonucleotide
  Antisense strand to SEQ ID NO: 1053600
acaaaccaucaauucuuag

SEQ ID NO: 1053602 - RNA, 19 nt, Artificial Sequence
  Description of Artificial Sequence: Synthetic oligonucleotide
  Sense strand starting at position 852 of SEQ ID NO: 915099
guagcacauuacucauguu

SEQ ID NO: 1053603 - RNA, 19 nt, Artificial Sequence
  Description of Artificial Sequence: Synthetic oligonucleotide
  Antisense strand to SEQ ID NO: 1053602
aacaugaguaaugugcuac

SEQ ID NO: 1053604 - RNA, 19 nt, Artificial Sequence
  Description of Artificial Sequence: Synthetic oligonucleotide
  Sense strand starting at position 885 of SEQ ID NO: 915099
uaggucuuaguagaaagua

SEQ ID NO: 1053605 - RNA, 19 nt, Artificial Sequence
  Description of Artificial Sequence: Synthetic oligonucleotide
  Antisense strand to SEQ ID NO: 1053604
uacuuucuacuaagaccua

SEQ ID NO: 1053606 - RNA, 19 nt, Artificial Sequence
  Description of Artificial Sequence: Synthetic oligonucleotide
  Sense strand starting at position 921 of SEQ ID NO: 915099
uaccgugucaccuggaaag

SEQ ID NO: 1053607 - RNA, 19 nt, Artificial Sequence
  Description of Artificial Sequence: Synthetic oligonucleotide
  Antisense strand to SEQ ID NO: 1053606
cuuuccaggugacacggua

SEQ ID NO: 1053608 - RNA, 19 nt, Artificial Sequence
  Description of Artificial Sequence: Synthetic oligonucleotide
  Sense strand starting at position 2101 of SEQ ID NO: 915099
ccuuguuagaguuguugag

SEQ ID NO: 1053609 - RNA, 19 nt, Artificial Sequence
  Description of Artificial Sequence: Synthetic oligonucleotide
  Antisense strand to SEQ ID NO: 1053608
cucaacaacucuaacaagg

SEQ ID NO: 1053610 - RNA, 19 nt, Artificial Sequence
  Description of Artificial Sequence: Synthetic oligonucleotide
  Sense strand starting at position 2103 of SEQ ID NO: 915099
uuguuagaguuguugagga

SEQ ID NO: 1053611 - RNA, 19 nt, Artificial Sequence
  Description of Artificial Sequence: Synthetic oligonucleotide
  Antisense strand to SEQ ID NO: 1053610
uccucaacaacucuaacaa

SEQ ID NO: 1053612 - RNA, 19 nt, Artificial Sequence
  Description of Artificial Sequence: Synthetic oligonucleotide
  Sense strand starting at position 2105 of SEQ ID NO: 915099
guuagaguuguugaggauc

SEQ ID NO: 1053613 - RNA, 19 nt, Artificial Sequence
  Description of Artificial Sequence: Synthetic oligonucleotide
  Antisense strand to SEQ ID NO: 1053612
gauccucaacaacucuaac

SEQ ID NO: 1053614 - RNA, 19 nt, Artificial Sequence
  Description of Artificial Sequence: Synthetic oligonucleotide
  Sense strand starting at position 2230 of SEQ ID NO: 915099
aucuauacauguccugauu

SEQ ID NO: 1053615 - RNA, 19 nt, Artificial Sequence
  Description of Artificial Sequence: Synthetic oligonucleotide
  Antisense strand to SEQ ID NO: 1053614
aaucaggacauguauagau

SEQ ID NO: 1053616 - RNA, 19 nt, Artificial Sequence
  Description of Artificial Sequence: Synthetic oligonucleotide
  Sense strand starting at position 2250 of SEQ ID NO: 915099
uucuguucucuguagagaa

SEQ ID NO: 1053617 - RNA, 19 nt, Artificial Sequence
  Description of Artificial Sequence: Synthetic oligonucleotide
  Antisense strand to SEQ ID NO: 1053616
uucucuacagagaacagaa

SEQ ID NO: 1053618 - RNA, 19 nt, Artificial Sequence
  Description of Artificial Sequence: Synthetic oligonucleotide
  Sense strand starting at position 2252 of SEQ ID NO: 915099
cuguucucuguagagaaug

SEQ ID NO: 1053619 - RNA, 19 nt, Artificial Sequence
  Description of Artificial Sequence: Synthetic oligonucleotide
  Antisense strand to SEQ ID NO: 1053618
cauucucuacagagaacag

SEQ ID NO: 1053620 - RNA, 19 nt, Artificial Sequence
  Description of Artificial Sequence: Synthetic oligonucleotide
  Sense strand starting at position 2341 of SEQ ID NO: 915099
ccaagcauuuaugaagaga

SEQ ID NO: 1053621 - RNA, 19 nt, Artificial Sequence
  Description of Artificial Sequence: Synthetic oligonucleotide
  Antisense strand to SEQ ID NO: 1053620
ucucuucauaaaugcuugg

SEQ ID NO: 1053622 - RNA, 19 nt, Artificial Sequence
  Description of Artificial Sequence: Synthetic oligonucleotide
  Sense strand starting at position 2356 of SEQ ID NO: 915099
gagagaggucgugacacau

SEQ ID NO: 1053623 - RNA, 19 nt, Artificial Sequence
  Description of Artificial Sequence: Synthetic oligonucleotide
  Antisense strand to SEQ ID NO: 1053622
augugucacgaccucucuc

SEQ ID NO: 1053624 - RNA, 19 nt, Artificial Sequence
  Description of Artificial Sequence: Synthetic oligonucleotide
  Sense strand starting at position 2360 of SEQ ID NO: 915099
gaggucgugacacauaaug

SEQ ID NO: 1053625 - RNA, 19 nt, Artificial Sequence
  Description of Artificial Sequence: Synthetic oligonucleotide
  Antisense strand to SEQ ID NO: 1053624
cauuaugugucacgaccuc

SEQ ID NO: 1053626 - RNA, 19 nt, Artificial Sequence
  Description of Artificial Sequence: Synthetic oligonucleotide
  Sense strand starting at position 2362 of SEQ ID NO: 915099
ggucgugacacauaaugaa

SEQ ID NO: 1053627 - RNA, 19 nt, Artificial Sequence
  Description of Artificial Sequence: Synthetic oligonucleotide
  Antisense strand to SEQ ID NO: 1053626
uucauuaugugucacgacc

SEQ ID NO: 1053628 - RNA, 19 nt, Artificial Sequence
  Description of Artificial Sequence: Synthetic oligonucleotide
  Sense strand starting at position 2387 of SEQ ID NO: 915099
ugaggucaggcagguauau

SEQ ID NO: 1053629 - RNA, 19 nt, Artificial Sequence
  Description of Artificial Sequence: Synthetic oligonucleotide
  Antisense strand to SEQ ID NO: 1053628
auauaccugccugaccuca

SEQ ID NO: 1053630 - RNA, 19 nt, Artificial Sequence
  Description of Artificial Sequence: Synthetic oligonucleotide
  Sense strand starting at position 2466 of SEQ ID NO: 915099
aaugauuccugaggaggag

SEQ ID NO: 1053631 - RNA, 19 nt, Artificial Sequence
  Description of Artificial Sequence: Synthetic oligonucleotide
  Antisense strand to SEQ ID NO: 1053630
cuccuccucaggaaucauu

SEQ ID NO: 1053632 - RNA, 19 nt, Artificial Sequence
  Description of Artificial Sequence: Synthetic oligonucleotide
  Sense strand starting at position 2480 of SEQ ID NO: 915099
aggagauccgaaugugucu

SEQ ID NO: 1053633 - RNA, 19 nt, Artificial Sequence
  Description of Artificial Sequence: Synthetic oligonucleotide
  Antisense strand to SEQ ID NO: 1053632
agacacauucggaucuccu

SEQ ID NO: 1053634 - RNA, 19 nt, Artificial Sequence
  Description of Artificial Sequence: Synthetic oligonucleotide
  Sense strand starting at position 2485 of SEQ ID NO: 915099
auccgaaugugucucaauc

SEQ ID NO: 1053635 - RNA, 19 nt, Artificial Sequence
  Description of Artificial Sequence: Synthetic oligonucleotide
  Antisense strand to SEQ ID NO: 1053634
gauugagacacauucggau

SEQ ID NO: 1053636 - RNA, 19 nt, Artificial Sequence
  Description of Artificial Sequence: Synthetic oligonucleotide
  Sense strand starting at position 2511 of SEQ ID NO: 915099
gcccauacucaggaagguu

SEQ ID NO: 1053637 - RNA, 19 nt, Artificial Sequence
  Description of Artificial Sequence: Synthetic oligonucleotide
  Antisense strand to SEQ ID NO: 1053636
aaccuuccugaguaugggc

SEQ ID NO: 1053638 - RNA, 19 nt, Artificial Sequence
  Description of Artificial Sequence: Synthetic oligonucleotide
  Sense strand starting at position 2538 of SEQ ID NO: 915099
uugugagaaucucaauuuc

SEQ ID NO: 1053639 - RNA, 19 nt, Artificial Sequence
  Description of Artificial Sequence: Synthetic oligonucleotide
  Antisense strand to SEQ ID NO: 1053638
gaaauugagauucucacaa

SEQ ID NO: 1053640 - RNA, 19 nt, Artificial Sequence
  Description of Artificial Sequence: Synthetic oligonucleotide
  Sense strand starting at position 2603 of SEQ ID NO: 915099
caggguggcuuaucuugau

SEQ ID NO: 1053641 - RNA, 19 nt, Artificial Sequence
  Description of Artificial Sequence: Synthetic oligonucleotide
  Antisense strand to SEQ ID NO: 1053640
aucaagauaagccacccug

SEQ ID NO: 1053642 - RNA, 19 nt, Artificial Sequence
  Description of Artificial Sequence: Synthetic oligonucleotide
  Sense strand starting at position 2607 of SEQ ID NO: 915099
guggcuuaucuugauccca

SEQ ID NO: 1053643 - RNA, 19 nt, Artificial Sequence
  Description of Artificial Sequence: Synthetic oligonucleotide
  Antisense strand to SEQ ID NO: 1053642
ugggaucaagauaagccac

SEQ ID NO: 1053644 - RNA, 19 nt, Artificial Sequence
  Description of Artificial Sequence: Synthetic oligonucleotide
  Sense strand starting at position 2691 of SEQ ID NO: 915099
auggguuaagcaugaacuu

SEQ ID NO: 1053645 - RNA, 19 nt, Artificial Sequence
  Description of Artificial Sequence: Synthetic oligonucleotide
  Antisense strand to SEQ ID NO: 1053644
aaguucaugcuuaacccau

SEQ ID NO: 1053646 - RNA, 19 nt, Artificial Sequence
  Description of Artificial Sequence: Synthetic oligonucleotide
  Sense strand starting at position 2692 of SEQ ID NO: 915099
uggguuaagcaugaacuuu

SEQ ID NO: 1053647 - RNA, 19 nt, Artificial Sequence
  Description of Artificial Sequence: Synthetic oligonucleotide
  Antisense strand to SEQ ID NO: 1053646
aaaguucaugcuuaaccca

SEQ ID NO: 1053648 - RNA, 19 nt, Artificial Sequence
  Description of Artificial Sequence: Synthetic oligonucleotide
  Sense strand starting at position 2727 of SEQ ID NO: 915099
guugacuugugucuugacu

SEQ ID NO: 1053649 - RNA, 19 nt, Artificial Sequence
  Description of Artificial Sequence: Synthetic oligonucleotide
  Antisense strand to SEQ ID NO: 1053648
agucaagacacaagucaac

SEQ ID NO: 1053650 - RNA, 19 nt, Artificial Sequence
  Description of Artificial Sequence: Synthetic oligonucleotide
  Sense strand starting at position 2798 of SEQ ID NO: 915099
augcaagugugacuaauau

SEQ ID NO: 1053651 - RNA, 19 nt, Artificial Sequence
  Description of Artificial Sequence: Synthetic oligonucleotide
  Antisense strand to SEQ ID NO: 1053650
auauuagucacacuugcau

SEQ ID NO: 1053652 - RNA, 19 nt, Artificial Sequence
  Description of Artificial Sequence: Synthetic oligonucleotide
  Sense strand starting at position 2883 of SEQ ID NO: 915099
cccugaaauucuuugugau

SEQ ID NO: 1053653 - RNA, 19 nt, Artificial Sequence
  Description of Artificial Sequence: Synthetic oligonucleotide
  Antisense strand to SEQ ID NO: 1053652
aucacaaagaauuucaggg

SEQ ID NO: 1053654 - RNA, 19 nt, Artificial Sequence
  Description of Artificial Sequence: Synthetic oligonucleotide
  Sense strand starting at position 2884 of SEQ ID NO: 915099
ccugaaauucuuugugaug

SEQ ID NO: 1053655 - RNA, 19 nt, Artificial Sequence
  Description of Artificial Sequence: Synthetic oligonucleotide
  Antisense strand to SEQ ID NO: 1053654
caucacaaagaauuucagg

SEQ ID NO: 1053656 - RNA, 19 nt, Artificial Sequence
  Description of Artificial Sequence: Synthetic oligonucleotide
  Sense strand starting at position 2885 of SEQ ID NO: 915099
cugaaauucuuugugauga

SEQ ID NO: 1053657 - RNA, 19 nt, Artificial Sequence
  Description of Artificial Sequence: Synthetic oligonucleotide
  Antisense strand to SEQ ID NO: 1053656
ucaucacaaagaauuucag

SEQ ID NO: 1053658 - RNA, 19 nt, Artificial Sequence
  Description of Artificial Sequence: Synthetic oligonucleotide
  Sense strand starting at position 2890 of SEQ ID NO: 915099
auucuuugugaugacuaua

SEQ ID NO: 1053659 - RNA, 19 nt, Artificial Sequence
  Description of Artificial Sequence: Synthetic oligonucleotide
  Antisense strand to SEQ ID NO: 1053658
uauagucaucacaaagaau

SEQ ID NO: 1053660 - RNA, 19 nt, Artificial Sequence
  Description of Artificial Sequence: Synthetic oligonucleotide
  Sense strand starting at position 2941 of SEQ ID NO: 915099
gcauguugucugcuauacu

SEQ ID NO: 1053661 - RNA, 19 nt, Artificial Sequence
  Description of Artificial Sequence: Synthetic oligonucleotide
  Antisense strand to SEQ ID NO: 1053660
aguauagcagacaacaugc

SEQ ID NO: 1053662 - RNA, 19 nt, Artificial Sequence
  Description of Artificial Sequence: Synthetic oligonucleotide
  Sense strand starting at position 2944 of SEQ ID NO: 915099
uguugucugcuauacugua

SEQ ID NO: 1053663 - RNA, 19 nt, Artificial Sequence
  Description of Artificial Sequence: Synthetic oligonucleotide
  Antisense strand to SEQ ID NO: 1053662
uacaguauagcagacaaca

SEQ ID NO: 1053664 - RNA, 19 nt, Artificial Sequence
  Description of Artificial Sequence: Synthetic oligonucleotide
  Sense strand starting at position 2960 of SEQ ID NO: 915099
guacauguuccaugaaugu

SEQ ID NO: 1053665 - RNA, 19 nt, Artificial Sequence
  Description of Artificial Sequence: Synthetic oligonucleotide
  Antisense strand to SEQ ID NO: 1053664
acauucauggaacauguac

SEQ ID NO: 1053666 - RNA, 19 nt, Artificial Sequence
  Description of Artificial Sequence: Synthetic oligonucleotide
  Sense strand starting at position 3115 of SEQ ID NO: 915099
gaagauaauucuguaugcu

SEQ ID NO: 1053667 - RNA, 19 nt, Artificial Sequence
  Description of Artificial Sequence: Synthetic oligonucleotide
  Antisense strand to SEQ ID NO: 1053666
agcauacagaauuaucuuc

SEQ ID NO: 1053668 - RNA, 19 nt, Artificial Sequence
  Description of Artificial Sequence: Synthetic oligonucleotide
  Sense strand starting at position 3118 of SEQ ID NO: 915099
gauaauucuguaugcuaug

SEQ ID NO: 1053669 - RNA, 19 nt, Artificial Sequence
  Description of Artificial Sequence: Synthetic oligonucleotide
  Antisense strand to SEQ ID NO: 1053668
cauagcauacagaauuauc

SEQ ID NO: 1053670 - RNA, 19 nt, Artificial Sequence
  Description of Artificial Sequence: Synthetic oligonucleotide
  Sense strand starting at position 3295 of SEQ ID NO: 915099
gcuggcugaucaccugaga

SEQ ID NO: 1053671 - RNA, 19 nt, Artificial Sequence
  Description of Artificial Sequence: Synthetic oligonucleotide
  Antisense strand to SEQ ID NO: 1053670
ucucaggugaucagccagc

SEQ ID NO: 1053672 - RNA, 19 nt, Artificial Sequence
  Description of Artificial Sequence: Synthetic oligonucleotide
  Sense strand starting at position 3550 of SEQ ID NO: 915099
guuaguagaaaguauggua

SEQ ID NO: 1053673 - RNA, 19 nt, Artificial Sequence
  Description of Artificial Sequence: Synthetic oligonucleotide
  Antisense strand to SEQ ID NO: 1053672
uaccauacuuucuacuaac

SEQ ID NO: 1053674 - RNA, 19 nt, Artificial Sequence
  Description of Artificial Sequence: Synthetic oligonucleotide
  Sense strand starting at position 3586 of SEQ ID NO: 915099
agaauaaaguaguagagaa

SEQ ID NO: 1053675 - RNA, 19 nt, Artificial Sequence
  Description of Artificial Sequence: Synthetic oligonucleotide
  Antisense strand to SEQ ID NO: 1053674
uucucuacuacuuuauucu

SEQ ID NO: 1053676 - RNA, 19 nt, Artificial Sequence
  Description of Artificial Sequence: Synthetic oligonucleotide
  Sense strand starting at position 3626 of SEQ ID NO: 915099
gaaagugucagggaaagcu

SEQ ID NO: 1053677 - RNA, 19 nt, Artificial Sequence
  Description of Artificial Sequence: Synthetic oligonucleotide
  Antisense strand to SEQ ID NO: 1053676
agcuuucccugacacuuuc

SEQ ID NO: 1053678 - RNA, 19 nt, Artificial Sequence
  Description of Artificial Sequence: Synthetic oligonucleotide
  Sense strand starting at position 3648 of SEQ ID NO: 915099
cugagaauaugauauuuga

SEQ ID NO: 1053679 - RNA, 19 nt, Artificial Sequence
  Description of Artificial Sequence: Synthetic oligonucleotide
  Antisense strand to SEQ ID NO: 1053678
ucaaauaucauauucucag

SEQ ID NO: 1053680 - RNA, 19 nt, Artificial Sequence
  Description of Artificial Sequence: Synthetic oligonucleotide
  Sense strand starting at position 3695 of SEQ ID NO: 915099
aauuuagguuggugaagga

SEQ ID NO: 1053681 - RNA, 19 nt, Artificial Sequence
  Description of Artificial Sequence: Synthetic oligonucleotide
  Antisense strand to SEQ ID NO: 1053680
uccuucaccaaccuaaauu

SEQ ID NO: 1053682 - RNA, 19 nt, Artificial Sequence
  Description of Artificial Sequence: Synthetic oligonucleotide
  Sense strand starting at position 48 of SEQ ID NO: 915100
auugacucaugguucugau

SEQ ID NO: 1053683 - RNA, 19 nt, Artificial Sequence
  Description of Artificial Sequence: Synthetic oligonucleotide
  Antisense strand to SEQ ID NO: 1053682
aucagaaccaugagucaau

SEQ ID NO: 1053684 - RNA, 19 nt, Artificial Sequence
  Description of Artificial Sequence: Synthetic oligonucleotide
  Sense strand starting at position 58 of SEQ ID NO: 915100
gguucugauggcuauuaaa

SEQ ID NO: 1053685 - RNA, 19 nt, Artificial Sequence
  Description of Artificial Sequence: Synthetic oligonucleotide
  Antisense strand to SEQ ID NO: 1053684
uuuaauagccaucagaacc

SEQ ID NO: 1053686 - RNA, 19 nt, Artificial Sequence
  Description of Artificial Sequence: Synthetic oligonucleotide
  Sense strand starting at position 202 of SEQ ID NO: 915100
augauugugcuuuaugaua

SEQ ID NO: 1053687 - RNA, 19 nt, Artificial Sequence
  Description of Artificial Sequence: Synthetic oligonucleotide
  Antisense strand to SEQ ID NO: 1053686
uaucauaaagcacaaucau

SEQ ID NO: 1053688 - RNA, 19 nt, Artificial Sequence
  Description of Artificial Sequence: Synthetic oligonucleotide
  Sense strand starting at position 281 of SEQ ID NO: 915100
uuaggagucagcuaagauc

SEQ ID NO: 1053689 - RNA, 19 nt, Artificial Sequence
  Description of Artificial Sequence: Synthetic oligonucleotide
  Antisense strand to SEQ ID NO: 1053688
gaucuuagcugacuccuaa

SEQ ID NO: 1053690 - RNA, 19 nt, Artificial Sequence
  Description of Artificial Sequence: Synthetic oligonucleotide
  Sense strand starting at position 320 of SEQ ID NO: 915100
gcagcauuaugauugaaau

SEQ ID NO: 1053691 - RNA, 19 nt, Artificial Sequence
  Description of Artificial Sequence: Synthetic oligonucleotide
  Antisense strand to SEQ ID NO: 1053690
auuucaaucauaaugcugc

SEQ ID NO: 1053692 - RNA, 19 nt, Artificial Sequence
  Description of Artificial Sequence: Synthetic oligonucleotide
  Sense strand starting at position 330 of SEQ ID NO: 915100
gauugaaauuauguuugug

SEQ ID NO: 1053693 - RNA, 19 nt, Artificial Sequence
  Description of Artificial Sequence: Synthetic oligonucleotide
  Antisense strand to SEQ ID NO: 1053692
cacaaacauaauuucaauc

SEQ ID NO: 1053694 - RNA, 19 nt, Artificial Sequence
  Description of Artificial Sequence: Synthetic oligonucleotide
  Sense strand starting at position 408 of SEQ ID NO: 915100
uuggaaauagcuuauucua

SEQ ID NO: 1053695 - RNA, 19 nt, Artificial Sequence
  Description of Artificial Sequence: Synthetic oligonucleotide
  Antisense strand to SEQ ID NO: 1053694
uagaauaagcuauuuccaa

SEQ ID NO: 1053696 - RNA, 19 nt, Artificial Sequence
  Description of Artificial Sequence: Synthetic oligonucleotide
  Sense strand starting at position 416 of SEQ ID NO: 915100
agcuuauucuaccuaggaa

SEQ ID NO: 1053697 - RNA, 19 nt, Artificial Sequence
  Description of Artificial Sequence: Synthetic oligonucleotide
  Antisense strand to SEQ ID NO: 1053696
uuccuagguagaauaagcu

SEQ ID NO: 1053698 - RNA, 19 nt, Artificial Sequence
  Description of Artificial Sequence: Synthetic oligonucleotide
  Sense strand starting at position 462 of SEQ ID NO: 915100
ggcuauugggcuuauaaag

SEQ ID NO: 1053699 - RNA, 19 nt, Artificial Sequence
  Description of Artificial Sequence: Synthetic oligonucleotide
  Antisense strand to SEQ ID NO: 1053698
cuuuauaagcccaauagcc

SEQ ID NO: 1053700 - RNA, 19 nt, Artificial Sequence
  Description of Artificial Sequence: Synthetic oligonucleotide
  Sense strand starting at position 647 of SEQ ID NO: 915100
ccaagaugauggccaagau

SEQ ID NO: 1053701 - RNA, 19 nt, Artificial Sequence
  Description of Artificial Sequence: Synthetic oligonucleotide
  Antisense strand to SEQ ID NO: 1053700
aucuuggccaucaucuugg

SEQ ID NO: 1053702 - RNA, 19 nt, Artificial Sequence
  Description of Artificial Sequence: Synthetic oligonucleotide
  Sense strand starting at position 684 of SEQ ID NO: 915100
uugucuugcccauugugua

SEQ ID NO: 1053703 - RNA, 19 nt, Artificial Sequence
  Description of Artificial Sequence: Synthetic oligonucleotide
  Antisense strand to SEQ ID NO: 1053702
uacacaaugggcaagacaa

SEQ ID NO: 1053704 - RNA, 19 nt, Artificial Sequence
  Description of Artificial Sequence: Synthetic oligonucleotide
  Sense strand starting at position 748 of SEQ ID NO: 915100
ugucacauuugugcucauu

SEQ ID NO: 1053705 - RNA, 19 nt, Artificial Sequence
  Description of Artificial Sequence: Synthetic oligonucleotide
  Antisense strand to SEQ ID NO: 1053704
aaugagcacaaaugugaca

SEQ ID NO: 1053706 - RNA, 19 nt, Artificial Sequence
  Description of Artificial Sequence: Synthetic oligonucleotide
  Sense strand starting at position 750 of SEQ ID NO: 915100
ucacauuugugcucauuag

SEQ ID NO: 1053707 - RNA, 19 nt, Artificial Sequence
  Description of Artificial Sequence: Synthetic oligonucleotide
  Antisense strand to SEQ ID NO: 1053706
cuaaugagcacaaauguga

SEQ ID NO: 1053708 - RNA, 19 nt, Artificial Sequence
  Description of Artificial Sequence: Synthetic oligonucleotide
  Sense strand starting at position 772 of SEQ ID NO: 915100
aguaaauaucucgaauggu

SEQ ID NO: 1053709 - RNA, 19 nt, Artificial Sequence
  Description of Artificial Sequence: Synthetic oligonucleotide
  Antisense strand to SEQ ID NO: 1053708
accauucgagauauuuacu

SEQ ID NO: 1053710 - RNA, 19 nt, Artificial Sequence
  Description of Artificial Sequence: Synthetic oligonucleotide
  Sense strand starting at position 786 of SEQ ID NO: 915100
augguuuggccacagaagu

SEQ ID NO: 1053711 - RNA, 19 nt, Artificial Sequence
  Description of Artificial Sequence: Synthetic oligonucleotide
  Antisense strand to SEQ ID NO: 1053710
acuucuguggccaaaccau

SEQ ID NO: 1053712 - RNA, 19 nt, Artificial Sequence
  Description of Artificial Sequence: Synthetic oligonucleotide
  Sense strand starting at position 922 of SEQ ID NO: 915100
agagcuuuccaauagccau

SEQ ID NO: 1053713 - RNA, 19 nt, Artificial Sequence
  Description of Artificial Sequence: Synthetic oligonucleotide
  Antisense strand to SEQ ID NO: 1053712
auggcuauuggaaagcucu

SEQ ID NO: 1053714 - RNA, 19 nt, Artificial Sequence
  Description of Artificial Sequence: Synthetic oligonucleotide
  Sense strand starting at position 1998 of SEQ ID NO: 915100
ccauaaguaugggcauaaa

SEQ ID NO: 1053715 - RNA, 19 nt, Artificial Sequence
  Description of Artificial Sequence: Synthetic oligonucleotide
  Antisense strand to SEQ ID NO: 1053714
uuuaugcccauacuuaugg

SEQ ID NO: 1053716 - RNA, 19 nt, Artificial Sequence
  Description of Artificial Sequence: Synthetic oligonucleotide
  Sense strand starting at position 2039 of SEQ ID NO: 915100
gagauucuugauuggaagu

SEQ ID NO: 1053717 - RNA, 19 nt, Artificial Sequence
  Description of Artificial Sequence: Synthetic oligonucleotide
  Antisense strand to SEQ ID NO: 1053716
acuuccaaucaagaaucuc

SEQ ID NO: 1053718 - RNA, 19 nt, Artificial Sequence
  Description of Artificial Sequence: Synthetic oligonucleotide
  Sense strand starting at position 2087 of SEQ ID NO: 915100
ucuuaaugucagggauaga

SEQ ID NO: 1053719 - RNA, 19 nt, Artificial Sequence
  Description of Artificial Sequence: Synthetic oligonucleotide
  Antisense strand to SEQ ID NO: 1053718
ucuaucccugacauuaaga

SEQ ID NO: 1053720 - RNA, 19 nt, Artificial Sequence
  Description of Artificial Sequence: Synthetic oligonucleotide
  Sense strand starting at position 2182 of SEQ ID NO: 915100
gaaccuaagcagugaaaug

SEQ ID NO: 1053721 - RNA, 19 nt, Artificial Sequence
  Description of Artificial Sequence: Synthetic oligonucleotide
  Antisense strand to SEQ ID NO: 1053720
cauuucacugcuuagguuc

SEQ ID NO: 1053722 - RNA, 19 nt, Artificial Sequence
  Description of Artificial Sequence: Synthetic oligonucleotide
  Sense strand starting at position 2199 of SEQ ID NO: 915100
ugagcaauaggucaccuuu

SEQ ID NO: 1053723 - RNA, 19 nt, Artificial Sequence
  Description of Artificial Sequence: Synthetic oligonucleotide
  Antisense strand to SEQ ID NO: 1053722
aaaggugaccuauugcuca

SEQ ID NO: 1053724 - RNA, 19 nt, Artificial Sequence
  Description of Artificial Sequence: Synthetic oligonucleotide
  Sense strand starting at position 2336 of SEQ ID NO: 915100
gagugagaauguuuauagg

SEQ ID NO: 1053725 - RNA, 19 nt, Artificial Sequence
  Description of Artificial Sequence: Synthetic oligonucleotide
  Antisense strand to SEQ ID NO: 1053724
ccuauaaacauucucacuc

SEQ ID NO: 1053726 - RNA, 19 nt, Artificial Sequence
  Description of Artificial Sequence: Synthetic oligonucleotide
  Sense strand starting at position 2381 of SEQ ID NO: 915100
ccucacucaccguaagaau

SEQ ID NO: 1053727 - RNA, 19 nt, Artificial Sequence
  Description of Artificial Sequence: Synthetic oligonucleotide
  Antisense strand to SEQ ID NO: 1053726
auucuuacggugagugagg

SEQ ID NO: 1053728 - RNA, 19 nt, Artificial Sequence
  Description of Artificial Sequence: Synthetic oligonucleotide
  Sense strand starting at position 2488 of SEQ ID NO: 915100
gcauaucuauaauuggcaa

SEQ ID NO: 1053729 - RNA, 19 nt, Artificial Sequence
  Description of Artificial Sequence: Synthetic oligonucleotide
  Antisense strand to SEQ ID NO: 1053728
uugccaauuauagauaugc

SEQ ID NO: 1053730 - RNA, 19 nt, Artificial Sequence
  Description of Artificial Sequence: Synthetic oligonucleotide
  Sense strand starting at position 2551 of SEQ ID NO: 915100
aucggagaggaguauugua

SEQ ID NO: 1053731 - RNA, 19 nt, Artificial Sequence
  Description of Artificial Sequence: Synthetic oligonucleotide
  Antisense strand to SEQ ID NO: 1053730
uacaauacuccucuccgau

SEQ ID NO: 1053732 - RNA, 19 nt, Artificial Sequence
  Description of Artificial Sequence: Synthetic oligonucleotide
  Sense strand starting at position 2569 of SEQ ID NO: 915100
acuacaauucuguggaaag

SEQ ID NO: 1053733 - RNA, 19 nt, Artificial Sequence
  Description of Artificial Sequence: Synthetic oligonucleotide
  Antisense strand to SEQ ID NO: 1053732
cuuuccacagaauuguagu

SEQ ID NO: 1053734 - RNA, 19 nt, Artificial Sequence
  Description of Artificial Sequence: Synthetic oligonucleotide
  Sense strand starting at position 2589 of SEQ ID NO: 915100
gacuguguccaaggagauu

SEQ ID NO: 1053735 - RNA, 19 nt, Artificial Sequence
  Description of Artificial Sequence: Synthetic oligonucleotide
  Antisense strand to SEQ ID NO: 1053734
aaucuccuuggacacaguc

SEQ ID NO: 1053736 - RNA, 19 nt, Artificial Sequence
  Description of Artificial Sequence: Synthetic oligonucleotide
  Sense strand starting at position 2600 of SEQ ID NO: 915100
aggagauucugacuacuuc

SEQ ID NO: 1053737 - RNA, 19 nt, Artificial Sequence
  Description of Artificial Sequence: Synthetic oligonucleotide
  Antisense strand to SEQ ID NO: 1053736
gaaguagucagaaucuccu

SEQ ID NO: 1053738 - RNA, 19 nt, Artificial Sequence
  Description of Artificial Sequence: Synthetic oligonucleotide
  Sense strand starting at position 2688 of SEQ ID NO: 915100
gaaacauuagagugaaguu

SEQ ID NO: 1053739 - RNA, 19 nt, Artificial Sequence
  Description of Artificial Sequence: Synthetic oligonucleotide
  Antisense strand to SEQ ID NO: 1053738
aacuucacucuaauguuuc

SEQ ID NO: 1053740 - RNA, 19 nt, Artificial Sequence
  Description of Artificial Sequence: Synthetic oligonucleotide
  Sense strand starting at position 2952 of SEQ ID NO: 915100
aggcuuucuaggcaacaga

SEQ ID NO: 1053741 - RNA, 19 nt, Artificial Sequence
  Description of Artificial Sequence: Synthetic oligonucleotide
  Antisense strand to SEQ ID NO: 1053740
ucuguugccuagaaagccu

SEQ ID NO: 1053742 - RNA, 19 nt, Artificial Sequence
  Description of Artificial Sequence: Synthetic oligonucleotide
  Sense strand starting at position 3192 of SEQ ID NO: 915100
uaccgaguuguugaaagug

SEQ ID NO: 1053743 - RNA, 19 nt, Artificial Sequence
  Description of Artificial Sequence: Synthetic oligonucleotide
  Antisense strand to SEQ ID NO: 1053742
cacuuucaacaacucggua

SEQ ID NO: 1053744 - RNA, 19 nt, Artificial Sequence
  Description of Artificial Sequence: Synthetic oligonucleotide
  Sense strand starting at position 3201 of SEQ ID NO: 915100
guugaaaguguggauucaa

SEQ ID NO: 1053745 - RNA, 19 nt, Artificial Sequence
  Description of Artificial Sequence: Synthetic oligonucleotide
  Antisense strand to SEQ ID NO: 1053744
uugaauccacacuuucaac

SEQ ID NO: 1053746 - RNA, 19 nt, Artificial Sequence
  Description of Artificial Sequence: Synthetic oligonucleotide
  Sense strand starting at position 3246 of SEQ ID NO: 915100
gaugauagcugucuuugga

SEQ ID NO: 1053747 - RNA, 19 nt, Artificial Sequence
  Description of Artificial Sequence: Synthetic oligonucleotide
  Antisense strand to SEQ ID NO: 1053746
uccaaagacagcuaucauc

SEQ ID NO: 1053748 - RNA, 19 nt, Artificial Sequence
  Description of Artificial Sequence: Synthetic oligonucleotide
  Sense strand starting at position 3342 of SEQ ID NO: 915100
ccuguuucuggaggaaaga

SEQ ID NO: 1053749 - RNA, 19 nt, Artificial Sequence
  Description of Artificial Sequence: Synthetic oligonucleotide
  Antisense strand to SEQ ID NO: 1053748
ucuuuccuccagaaacagg

SEQ ID NO: 1053750 - RNA, 19 nt, Artificial Sequence
  Description of Artificial Sequence: Synthetic oligonucleotide
  Sense strand starting at position 3445 of SEQ ID NO: 915100
gcacuauugacagaagcag

SEQ ID NO: 1053751 - RNA, 19 nt, Artificial Sequence
  Description of Artificial Sequence: Synthetic oligonucleotide
  Antisense strand to SEQ ID NO: 1053750
cugcuucugucaauagugc

SEQ ID NO: 1053752 - RNA, 19 nt, Artificial Sequence
  Description of Artificial Sequence: Synthetic oligonucleotide
  Sense strand starting at position 3467 of SEQ ID NO: 915100
auccgagaccuaugauugu

SEQ ID NO: 1053753 - RNA, 19 nt, Artificial Sequence
  Description of Artificial Sequence: Synthetic oligonucleotide
  Antisense strand to SEQ ID NO: 1053752
acaaucauaggucucggau

SEQ ID NO: 1053754 - RNA, 19 nt, Artificial Sequence
  Description of Artificial Sequence: Synthetic oligonucleotide
  Sense strand starting at position 3512 of SEQ ID NO: 915100
aucucuagagcauacgaaa

SEQ ID NO: 1053755 - RNA, 19 nt, Artificial Sequence
  Description of Artificial Sequence: Synthetic oligonucleotide
  Antisense strand to SEQ ID NO: 1053754
uuucguaugcucuagagau

SEQ ID NO: 1053756 - RNA, 19 nt, Artificial Sequence
  Description of Artificial Sequence: Synthetic oligonucleotide
  Sense strand starting at position 3769 of SEQ ID NO: 915100
gaaagauccgauggcucaa

SEQ ID NO: 1053757 - RNA, 19 nt, Artificial Sequence
  Description of Artificial Sequence: Synthetic oligonucleotide
  Antisense strand to SEQ ID NO: 1053756
uugagccaucggaucuuuc

SEQ ID NO: 1053758 - RNA, 19 nt, Artificial Sequence
  Description of Artificial Sequence: Synthetic oligonucleotide
  Sense strand starting at position 3781 of SEQ ID NO: 915100
ggcucaagcagugaggauu

SEQ ID NO: 1053759 - RNA, 19 nt, Artificial Sequence
  Description of Artificial Sequence: Synthetic oligonucleotide
  Antisense strand to SEQ ID NO: 1053758
aauccucacugcuugagcc

SEQ ID NO: 1053760 - RNA, 19 nt, Artificial Sequence
  Description of Artificial Sequence: Synthetic oligonucleotide
  Sense strand starting at position 3784 of SEQ ID NO: 915100
ucaagcagugaggauuauu

SEQ ID NO: 1053761 - RNA, 19 nt, Artificial Sequence
  Description of Artificial Sequence: Synthetic oligonucleotide
  Antisense strand to SEQ ID NO: 1053760
aauaauccucacugcuuga

SEQ ID NO: 1053762 - RNA, 19 nt, Artificial Sequence
  Description of Artificial Sequence: Synthetic oligonucleotide
  Sense strand starting at position 85 of SEQ ID NO: 915101
uugcaaugugucuaauuau

SEQ ID NO: 1053763 - RNA, 19 nt, Artificial Sequence
  Description of Artificial Sequence: Synthetic oligonucleotide
  Antisense strand to SEQ ID NO: 1053762
auaauuagacacauugcaa

SEQ ID NO: 1053764 - RNA, 19 nt, Artificial Sequence
  Description of Artificial Sequence: Synthetic oligonucleotide
  Sense strand starting at position 261 of SEQ ID NO: 915101
gccuguaugaggugcauuu

SEQ ID NO: 1053765 - RNA, 19 nt, Artificial Sequence
  Description of Artificial Sequence: Synthetic oligonucleotide
  Antisense strand to SEQ ID NO: 1053764
aaaugcaccucauacaggc

SEQ ID NO: 1053766 - RNA, 19 nt, Artificial Sequence
  Description of Artificial Sequence: Synthetic oligonucleotide
  Sense strand starting at position 318 of SEQ ID NO: 915101
auaguuuauaaguggaaag

SEQ ID NO: 1053767 - RNA, 19 nt, Artificial Sequence
  Description of Artificial Sequence: Synthetic oligonucleotide
  Antisense strand to SEQ ID NO: 1053766
cuuuccacuuauaaacuau

SEQ ID NO: 1053768 - RNA, 19 nt, Artificial Sequence
  Description of Artificial Sequence: Synthetic oligonucleotide
  Sense strand starting at position 333 of SEQ ID NO: 915101
aaaggacagccguacuuua

SEQ ID NO: 1053769 - RNA, 19 nt, Artificial Sequence
  Description of Artificial Sequence: Synthetic oligonucleotide
  Antisense strand to SEQ ID NO: 1053768
uaaaguacggcuguccuuu

SEQ ID NO: 1053770 - RNA, 19 nt, Artificial Sequence
  Description of Artificial Sequence: Synthetic oligonucleotide
  Sense strand starting at position 421 of SEQ ID NO: 915101
accagaagauaucuaguuu

SEQ ID NO: 1053771 - RNA, 19 nt, Artificial Sequence
  Description of Artificial Sequence: Synthetic oligonucleotide
  Antisense strand to SEQ ID NO: 1053770
aaacuagauaucuucuggu

SEQ ID NO: 1053772 - RNA, 19 nt, Artificial Sequence
  Description of Artificial Sequence: Synthetic oligonucleotide
  Sense strand starting at position 455 of SEQ ID NO: 915101
cugggucccugaguagaga

SEQ ID NO: 1053773 - RNA, 19 nt, Artificial Sequence
  Description of Artificial Sequence: Synthetic oligonucleotide
  Antisense strand to SEQ ID NO: 1053772
ucucuacucagggacccag

SEQ ID NO: 1053774 - RNA, 19 nt, Artificial Sequence
  Description of Artificial Sequence: Synthetic oligonucleotide
  Sense strand starting at position 507 of SEQ ID NO: 915101
ccuacuuauguauggaaca

SEQ ID NO: 1053775 - RNA, 19 nt, Artificial Sequence
  Description of Artificial Sequence: Synthetic oligonucleotide
  Antisense strand to SEQ ID NO: 1053774
uguuccauacauaaguagg

SEQ ID NO: 1053776 - RNA, 19 nt, Artificial Sequence
  Description of Artificial Sequence: Synthetic oligonucleotide
  Sense strand starting at position 549 of SEQ ID NO: 915101
aucucaucucguuauugua

SEQ ID NO: 1053777 - RNA, 19 nt, Artificial Sequence
  Description of Artificial Sequence: Synthetic oligonucleotide
  Antisense strand to SEQ ID NO: 1053776
uacaauaacgagaugagau

SEQ ID NO: 1053778 - RNA, 19 nt, Artificial Sequence
  Description of Artificial Sequence: Synthetic oligonucleotide
  Sense strand starting at position 568 of SEQ ID NO: 915101
ggcuucuuggcauacaaca

SEQ ID NO: 1053779 - RNA, 19 nt, Artificial Sequence
  Description of Artificial Sequence: Synthetic oligonucleotide
  Antisense strand to SEQ ID NO: 1053778
uguuguaugccaagaagcc

SEQ ID NO: 1053780 - RNA, 19 nt, Artificial Sequence
  Description of Artificial Sequence: Synthetic oligonucleotide
  Sense strand starting at position 711 of SEQ ID NO: 915101
ugugaaagcuauucuguaa

SEQ ID NO: 1053781 - RNA, 19 nt, Artificial Sequence
  Description of Artificial Sequence: Synthetic oligonucleotide
  Antisense strand to SEQ ID NO: 1053780
uuacagaauagcuuucaca

SEQ ID NO: 1053782 - RNA, 19 nt, Artificial Sequence
  Description of Artificial Sequence: Synthetic oligonucleotide
  Sense strand starting at position 863 of SEQ ID NO: 915101
aauauuaugcacuggugaa

SEQ ID NO: 1053783 - RNA, 19 nt, Artificial Sequence
  Description of Artificial Sequence: Synthetic oligonucleotide
  Antisense strand to SEQ ID NO: 1053782
uucaccagugcauaauauu

SEQ ID NO: 1053784 - RNA, 19 nt, Artificial Sequence
  Description of Artificial Sequence: Synthetic oligonucleotide
  Sense strand starting at position 900 of SEQ ID NO: 915101
auauaaagaugcuccugau

SEQ ID NO: 1053785 - RNA, 19 nt, Artificial Sequence
  Description of Artificial Sequence: Synthetic oligonucleotide
  Antisense strand to SEQ ID NO: 1053784
aucaggagcaucuuuauau

SEQ ID NO: 1053786 - RNA, 19 nt, Artificial Sequence
  Description of Artificial Sequence: Synthetic oligonucleotide
  Sense strand starting at position 1120 of SEQ ID NO: 915101
uuucgcaaacuguagauaa

SEQ ID NO: 1053787 - RNA, 19 nt, Artificial Sequence
  Description of Artificial Sequence: Synthetic oligonucleotide
  Antisense strand to SEQ ID NO: 1053786
uuaucuacaguuugcgaaa

SEQ ID NO: 1053788 - RNA, 19 nt, Artificial Sequence
  Description of Artificial Sequence: Synthetic oligonucleotide
  Sense strand starting at position 1152 of SEQ ID NO: 915101
uggugucagaagugaguaa

SEQ ID NO: 1053789 - RNA, 19 nt, Artificial Sequence
  Description of Artificial Sequence: Synthetic oligonucleotide
  Antisense strand to SEQ ID NO: 1053788
uuacucacuucugacacca

SEQ ID NO: 1053790 - RNA, 19 nt, Artificial Sequence
  Description of Artificial Sequence: Synthetic oligonucleotide
  Sense strand starting at position 1234 of SEQ ID NO: 915101
cuggcugugccauagaaua

SEQ ID NO: 1053791 - RNA, 19 nt, Artificial Sequence
  Description of Artificial Sequence: Synthetic oligonucleotide
  Antisense strand to SEQ ID NO: 1053790
uauucuauggcacagccag

SEQ ID NO: 1053792 - RNA, 19 nt, Artificial Sequence
  Description of Artificial Sequence: Synthetic oligonucleotide
  Sense strand starting at position 1506 of SEQ ID NO: 915101
acuagauacccaugauguu

SEQ ID NO: 1053793 - RNA, 19 nt, Artificial Sequence
  Description of Artificial Sequence: Synthetic oligonucleotide
  Antisense strand to SEQ ID NO: 1053792
aacaucauggguaucuagu

SEQ ID NO: 1053794 - RNA, 19 nt, Artificial Sequence
  Description of Artificial Sequence: Synthetic oligonucleotide
  Sense strand starting at position 1507 of SEQ ID NO: 915101
cuagauacccaugauguuu

SEQ ID NO: 1053795 - RNA, 19 nt, Artificial Sequence
  Description of Artificial Sequence: Synthetic oligonucleotide
  Antisense strand to SEQ ID NO: 1053794
aaacaucauggguaucuag

SEQ ID NO: 1053796 - RNA, 19 nt, Artificial Sequence
  Description of Artificial Sequence: Synthetic oligonucleotide
  Sense strand starting at position 1520 of SEQ ID NO: 915101
auguuugaacaguaccuaa

SEQ ID NO: 1053797 - RNA, 19 nt, Artificial Sequence
  Description of Artificial Sequence: Synthetic oligonucleotide
  Antisense strand to SEQ ID NO: 1053796
uuagguacuguucaaacau

SEQ ID NO: 1053798 - RNA, 19 nt, Artificial Sequence
  Description of Artificial Sequence: Synthetic oligonucleotide
  Sense strand starting at position 1594 of SEQ ID NO: 915101
auaaucauuugguaguuga

SEQ ID NO: 1053799 - RNA, 19 nt, Artificial Sequence
  Description of Artificial Sequence: Synthetic oligonucleotide
  Antisense strand to SEQ ID NO: 1053798
ucaacuaccaaaugauuau

SEQ ID NO: 1053800 - RNA, 19 nt, Artificial Sequence
  Description of Artificial Sequence: Synthetic oligonucleotide
  Sense strand starting at position 1766 of SEQ ID NO: 915101
gcauaauaacugcacugaa

SEQ ID NO: 1053801 - RNA, 19 nt, Artificial Sequence
  Description of Artificial Sequence: Synthetic oligonucleotide
  Antisense strand to SEQ ID NO: 1053800
uucagugcaguuauuaugc

SEQ ID NO: 1053802 - RNA, 19 nt, Artificial Sequence
  Description of Artificial Sequence: Synthetic oligonucleotide
  Sense strand starting at position 1880 of SEQ ID NO: 915101
cuaucagggucaccagaua

SEQ ID NO: 1053803 - RNA, 19 nt, Artificial Sequence
  Description of Artificial Sequence: Synthetic oligonucleotide
  Antisense strand to SEQ ID NO: 1053802
uaucuggugacccugauag

SEQ ID NO: 1053804 - RNA, 19 nt, Artificial Sequence
  Description of Artificial Sequence: Synthetic oligonucleotide
  Sense strand starting at position 1928 of SEQ ID NO: 915101
ccuggagcucaggauaguu

SEQ ID NO: 1053805 - RNA, 19 nt, Artificial Sequence
  Description of Artificial Sequence: Synthetic oligonucleotide
  Antisense strand to SEQ ID NO: 1053804
aacuauccugagcuccagg

SEQ ID NO: 1053806 - RNA, 19 nt, Artificial Sequence
  Description of Artificial Sequence: Synthetic oligonucleotide
  Sense strand starting at position 1933 of SEQ ID NO: 915101
agcucaggauaguuagaaa

SEQ ID NO: 1053807 - RNA, 19 nt, Artificial Sequence
  Description of Artificial Sequence: Synthetic oligonucleotide
  Antisense strand to SEQ ID NO: 1053806
uuucuaacuauccugagcu

SEQ ID NO: 1053808 - RNA, 19 nt, Artificial Sequence
  Description of Artificial Sequence: Synthetic oligonucleotide
  Sense strand starting at position 2008 of SEQ ID NO: 915101
aaugaagucgugcauugau

SEQ ID NO: 1053809 - RNA, 19 nt, Artificial Sequence
  Description of Artificial Sequence: Synthetic oligonucleotide
  Antisense strand to SEQ ID NO: 1053808
aucaaugcacgacuucauu

SEQ ID NO: 1053810 - RNA, 19 nt, Artificial Sequence
  Description of Artificial Sequence: Synthetic oligonucleotide
  Sense strand starting at position 2055 of SEQ ID NO: 915101
gccacaguccauuagcuaa

SEQ ID NO: 1053811 - RNA, 19 nt, Artificial Sequence
  Description of Artificial Sequence: Synthetic oligonucleotide
  Antisense strand to SEQ ID NO: 1053810
uuagcuaauggacuguggc

SEQ ID NO: 1053812 - RNA, 19 nt, Artificial Sequence
  Description of Artificial Sequence: Synthetic oligonucleotide
  Sense strand starting at position 2205 of SEQ ID NO: 915101
gaagaauucuggcucagag

SEQ ID NO: 1053813 - RNA, 19 nt, Artificial Sequence
  Description of Artificial Sequence: Synthetic oligonucleotide
  Antisense strand to SEQ ID NO: 1053812
cucugagccagaauucuuc

SEQ ID NO: 1053814 - RNA, 19 nt, Artificial Sequence
  Description of Artificial Sequence: Synthetic oligonucleotide
  Sense strand starting at position 2322 of SEQ ID NO: 915101
auaacauuggugcaagugu

SEQ ID NO: 1053815 - RNA, 19 nt, Artificial Sequence
  Description of Artificial Sequence: Synthetic oligonucleotide
  Antisense strand to SEQ ID NO: 1053814
acacuugcaccaauguuau

SEQ ID NO: 1053816 - RNA, 19 nt, Artificial Sequence
  Description of Artificial Sequence: Synthetic oligonucleotide
  Sense strand starting at position 2436 of SEQ ID NO: 915101
augugauaauagccuaaua

SEQ ID NO: 1053817 - RNA, 19 nt, Artificial Sequence
  Description of Artificial Sequence: Synthetic oligonucleotide
  Antisense strand to SEQ ID NO: 1053816
uauuaggcuauuaucacau

SEQ ID NO: 1053818 - RNA, 19 nt, Artificial Sequence
  Description of Artificial Sequence: Synthetic oligonucleotide
  Sense strand starting at position 2438 of SEQ ID NO: 915101
gugauaauagccuaauaau

SEQ ID NO: 1053819 - RNA, 19 nt, Artificial Sequence
  Description of Artificial Sequence: Synthetic oligonucleotide
  Antisense strand to SEQ ID NO: 1053818
auuauuaggcuauuaucac

SEQ ID NO: 1053820 - RNA, 19 nt, Artificial Sequence
  Description of Artificial Sequence: Synthetic oligonucleotide
  Sense strand starting at position 2518 of SEQ ID NO: 915101
auauaugacuuggagaaag

SEQ ID NO: 1053821 - RNA, 19 nt, Artificial Sequence
  Description of Artificial Sequence: Synthetic oligonucleotide
  Antisense strand to SEQ ID NO: 1053820
cuuucuccaagucauauau

SEQ ID NO: 1053822 - RNA, 19 nt, Artificial Sequence
  Description of Artificial Sequence: Synthetic oligonucleotide
  Sense strand starting at position 2598 of SEQ ID NO: 915101
accuauagacuaugugaau

SEQ ID NO: 1053823 - RNA, 19 nt, Artificial Sequence
  Description of Artificial Sequence: Synthetic oligonucleotide
  Antisense strand to SEQ ID NO: 1053822
auucacauagucuauaggu

SEQ ID NO: 1053824 - RNA, 19 nt, Artificial Sequence
  Description of Artificial Sequence: Synthetic oligonucleotide
  Sense strand starting at position 2599 of SEQ ID NO: 915101
ccuauagacuaugugaauu

SEQ ID NO: 1053825 - RNA, 19 nt, Artificial Sequence
  Description of Artificial Sequence: Synthetic oligonucleotide
  Antisense strand to SEQ ID NO: 1053824
aauucacauagucuauagg

SEQ ID NO: 1053826 - RNA, 19 nt, Artificial Sequence
  Description of Artificial Sequence: Synthetic oligonucleotide
  Sense strand starting at position 2630 of SEQ ID NO: 915101
gcagauuucugcccauccu

SEQ ID NO: 1053827 - RNA, 19 nt, Artificial Sequence
  Description of Artificial Sequence: Synthetic oligonucleotide
  Antisense strand to SEQ ID NO: 1053826
aggaugggcagaaaucugc

SEQ ID NO: 1053828 - RNA, 19 nt, Artificial Sequence
  Description of Artificial Sequence: Synthetic oligonucleotide
  Sense strand starting at position 2646 of SEQ ID NO: 915101
ccuggaucuggccaauuau

SEQ ID NO: 1053829 - RNA, 19 nt, Artificial Sequence
  Description of Artificial Sequence: Synthetic oligonucleotide
  Antisense strand to SEQ ID NO: 1053828
auaauuggccagauccagg

SEQ ID NO: 1053830 - RNA, 19 nt, Artificial Sequence
  Description of Artificial Sequence: Synthetic oligonucleotide
  Sense strand starting at position 2657 of SEQ ID NO: 915101
ccaauuauauugggauuua

SEQ ID NO: 1053831 - RNA, 19 nt, Artificial Sequence
  Description of Artificial Sequence: Synthetic oligonucleotide
  Antisense strand to SEQ ID NO: 1053830
uaaaucccaauauaauugg

SEQ ID NO: 1053832 - RNA, 19 nt, Artificial Sequence
  Description of Artificial Sequence: Synthetic oligonucleotide
  Sense strand starting at position 2698 of SEQ ID NO: 915101
ccagaucuccaaggucuau

SEQ ID NO: 1053833 - RNA, 19 nt, Artificial Sequence
  Description of Artificial Sequence: Synthetic oligonucleotide
  Antisense strand to SEQ ID NO: 1053832
auagaccuuggagaucugg

SEQ ID NO: 1053834 - RNA, 19 nt, Artificial Sequence
  Description of Artificial Sequence: Synthetic oligonucleotide
  Sense strand starting at position 2977 of SEQ ID NO: 915101
accaguaugcugcauaaac

SEQ ID NO: 1053835 - RNA, 19 nt, Artificial Sequence
  Description of Artificial Sequence: Synthetic oligonucleotide
  Antisense strand to SEQ ID NO: 1053834
guuuaugcagcauacuggu

SEQ ID NO: 1053836 - RNA, 19 nt, Artificial Sequence
  Description of Artificial Sequence: Synthetic oligonucleotide
  Sense strand starting at position 3496 of SEQ ID NO: 915101
uaaggaauagagugccuaa

SEQ ID NO: 1053837 - RNA, 19 nt, Artificial Sequence
  Description of Artificial Sequence: Synthetic oligonucleotide
  Antisense strand to SEQ ID NO: 1053836
uuaggcacucuauuccuua

SEQ ID NO: 1053838 - RNA, 19 nt, Artificial Sequence
  Description of Artificial Sequence: Synthetic oligonucleotide
  Sense strand starting at position 3548 of SEQ ID NO: 915101
uaacacgugcuguagaaau

SEQ ID NO: 1053839 - RNA, 19 nt, Artificial Sequence
  Description of Artificial Sequence: Synthetic oligonucleotide
  Antisense strand to SEQ ID NO: 1053838
auuucuacagcacguguua

SEQ ID NO: 1053840 - RNA, 19 nt, Artificial Sequence
  Description of Artificial Sequence: Synthetic oligonucleotide
  Sense strand starting at position 3901 of SEQ ID NO: 915101
auuuguccauagucaugua

SEQ ID NO: 1053841 - RNA, 19 nt, Artificial Sequence
  Description of Artificial Sequence: Synthetic oligonucleotide
  Antisense strand to SEQ ID NO: 1053840
uacaugacuauggacaaau

SEQ ID NO: 1053842 - RNA, 19 nt, Artificial Sequence
  Description of Artificial Sequence: Synthetic oligonucleotide
  Sense strand starting at position 43 of SEQ ID NO: 915102
aaggcaauagcagauuagu

SEQ ID NO: 1053843 - RNA, 19 nt, Artificial Sequence
  Description of Artificial Sequence: Synthetic oligonucleotide
  Antisense strand to SEQ ID NO: 1053842
acuaaucugcuauugccuu

SEQ ID NO: 1053844 - RNA, 19 nt, Artificial Sequence
  Description of Artificial Sequence: Synthetic oligonucleotide
  Sense strand starting at position 124 of SEQ ID NO: 915102
aggcuuuaaggaugacuca

SEQ ID NO: 1053845 - RNA, 19 nt, Artificial Sequence
  Description of Artificial Sequence: Synthetic oligonucleotide
  Antisense strand to SEQ ID NO: 1053844
ugagucauccuuaaagccu

SEQ ID NO: 1053846 - RNA, 19 nt, Artificial Sequence
  Description of Artificial Sequence: Synthetic oligonucleotide
  Sense strand starting at position 164 of SEQ ID NO: 915102
ggugaaucuugaccaucuu

SEQ ID NO: 1053847 - RNA, 19 nt, Artificial Sequence
  Description of Artificial Sequence: Synthetic oligonucleotide
  Antisense strand to SEQ ID NO: 1053846
aagauggucaagauucacc

SEQ ID NO: 1053848 - RNA, 19 nt, Artificial Sequence
  Description of Artificial Sequence: Synthetic oligonucleotide
  Sense strand starting at position 165 of SEQ ID NO: 915102
gugaaucuugaccaucuuu

SEQ ID NO: 1053849 - RNA, 19 nt, Artificial Sequence
  Description of Artificial Sequence: Synthetic oligonucleotide
  Antisense strand to SEQ ID NO: 1053848
aaagauggucaagauucac

SEQ ID NO: 1053850 - RNA, 19 nt, Artificial Sequence
  Description of Artificial Sequence: Synthetic oligonucleotide
  Sense strand starting at position 406 of SEQ ID NO: 915102
gaagguucuaguuggagau

SEQ ID NO: 1053851 - RNA, 19 nt, Artificial Sequence
  Description of Artificial Sequence: Synthetic oligonucleotide
  Antisense strand to SEQ ID NO: 1053850
aucuccaacuagaaccuuc

SEQ ID NO: 1053852 - RNA, 19 nt, Artificial Sequence
  Description of Artificial Sequence: Synthetic oligonucleotide
  Sense strand starting at position 407 of SEQ ID NO: 915102
aagguucuaguuggagauu

SEQ ID NO: 1053853 - RNA, 19 nt, Artificial Sequence
  Description of Artificial Sequence: Synthetic oligonucleotide
  Antisense strand to SEQ ID NO: 1053852
aaucuccaacuagaaccuu

SEQ ID NO: 1053854 - RNA, 19 nt, Artificial Sequence
  Description of Artificial Sequence: Synthetic oligonucleotide
  Sense strand starting at position 532 of SEQ ID NO: 915102
uauguuaucagagacgagu

SEQ ID NO: 1053855 - RNA, 19 nt, Artificial Sequence
  Description of Artificial Sequence: Synthetic oligonucleotide
  Antisense strand to SEQ ID NO: 1053854
acucgucucugauaacaua

SEQ ID NO: 1053856 - RNA, 19 nt, Artificial Sequence
  Description of Artificial Sequence: Synthetic oligonucleotide
  Sense strand starting at position 720 of SEQ ID NO: 915102
gggucagagaaagguggua

SEQ ID NO: 1053857 - RNA, 19 nt, Artificial Sequence
  Description of Artificial Sequence: Synthetic oligonucleotide
  Antisense strand to SEQ ID NO: 1053856
uaccaccuuucucugaccc

SEQ ID NO: 1053858 - RNA, 19 nt, Artificial Sequence
  Description of Artificial Sequence: Synthetic oligonucleotide
  Sense strand starting at position 722 of SEQ ID NO: 915102
gucagagaaaggugguaaa

SEQ ID NO: 1053859 - RNA, 19 nt, Artificial Sequence
  Description of Artificial Sequence: Synthetic oligonucleotide
  Antisense strand to SEQ ID NO: 1053858
uuuaccaccuuucucugac

SEQ ID NO: 1053860 - RNA, 19 nt, Artificial Sequence
  Description of Artificial Sequence: Synthetic oligonucleotide
  Sense strand starting at position 776 of SEQ ID NO: 915102
auuacagagccugauccua

SEQ ID NO: 1053861 - RNA, 19 nt, Artificial Sequence
  Description of Artificial Sequence: Synthetic oligonucleotide
  Antisense strand to SEQ ID NO: 1053860
uaggaucaggcucuguaau

SEQ ID NO: 1053862 - RNA, 19 nt, Artificial Sequence
  Description of Artificial Sequence: Synthetic oligonucleotide
  Sense strand starting at position 879 of SEQ ID NO: 915102
gaaugagaucuuggcaccu

SEQ ID NO: 1053863 - RNA, 19 nt, Artificial Sequence
  Description of Artificial Sequence: Synthetic oligonucleotide
  Antisense strand to SEQ ID NO: 1053862
aggugccaagaucucauuc

SEQ ID NO: 1053864 - RNA, 19 nt, Artificial Sequence
  Description of Artificial Sequence: Synthetic oligonucleotide
  Sense strand starting at position 1145 of SEQ ID NO: 915102
uguuccucaggguauauau

SEQ ID NO: 1053865 - RNA, 19 nt, Artificial Sequence
  Description of Artificial Sequence: Synthetic oligonucleotide
  Antisense strand to SEQ ID NO: 1053864
auauauacccugaggaaca

SEQ ID NO: 1053866 - RNA, 19 nt, Artificial Sequence
  Description of Artificial Sequence: Synthetic oligonucleotide
  Sense strand starting at position 1178 of SEQ ID NO: 915102
uuggaaucagaauggugua

SEQ ID NO: 1053867 - RNA, 19 nt, Artificial Sequence
  Description of Artificial Sequence: Synthetic oligonucleotide
  Antisense strand to SEQ ID NO: 1053866
uacaccauucugauuccaa

SEQ ID NO: 1053868 - RNA, 19 nt, Artificial Sequence
  Description of Artificial Sequence: Synthetic oligonucleotide
  Sense strand starting at position 1236 of SEQ ID NO: 915102
ugguuugggcuguaaauaa

SEQ ID NO: 1053869 - RNA, 19 nt, Artificial Sequence
  Description of Artificial Sequence: Synthetic oligonucleotide
  Antisense strand to SEQ ID NO: 1053868
uuauuuacagcccaaacca

SEQ ID NO: 1053870 - RNA, 19 nt, Artificial Sequence
  Description of Artificial Sequence: Synthetic oligonucleotide
  Sense strand starting at position 1310 of SEQ ID NO: 915102
uggagaaggcuuuagccuu

SEQ ID NO: 1053871 - RNA, 19 nt, Artificial Sequence
  Description of Artificial Sequence: Synthetic oligonucleotide
  Antisense strand to SEQ ID NO: 1053870
aaggcuaaagccuucucca

SEQ ID NO: 1053872 - RNA, 19 nt, Artificial Sequence
  Description of Artificial Sequence: Synthetic oligonucleotide
  Sense strand starting at position 1589 of SEQ ID NO: 915102
cuauuaucagcugaaugca

SEQ ID NO: 1053873 - RNA, 19 nt, Artificial Sequence
  Description of Artificial Sequence: Synthetic oligonucleotide
  Antisense strand to SEQ ID NO: 1053872
ugcauucagcugauaauag

SEQ ID NO: 1053874 - RNA, 19 nt, Artificial Sequence
  Description of Artificial Sequence: Synthetic oligonucleotide
  Sense strand starting at position 1614 of SEQ ID NO: 915102
gugguucaucacuagagga

SEQ ID NO: 1053875 - RNA, 19 nt, Artificial Sequence
  Description of Artificial Sequence: Synthetic oligonucleotide
  Antisense strand to SEQ ID NO: 1053874
uccucuagugaugaaccac

SEQ ID NO: 1053876 - RNA, 19 nt, Artificial Sequence
  Description of Artificial Sequence: Synthetic oligonucleotide
  Sense strand starting at position 1634 of SEQ ID NO: 915102
acugcaaaggcuuacaaau

SEQ ID NO: 1053877 - RNA, 19 nt, Artificial Sequence
  Description of Artificial Sequence: Synthetic oligonucleotide
  Antisense strand to SEQ ID NO: 1053876
auuuguaagccuuugcagu

SEQ ID NO: 1053878 - RNA, 19 nt, Artificial Sequence
  Description of Artificial Sequence: Synthetic oligonucleotide
  Sense strand starting at position 1700 of SEQ ID NO: 915102
ugccuccaagcauaagaaa

SEQ ID NO: 1053879 - RNA, 19 nt, Artificial Sequence
  Description of Artificial Sequence: Synthetic oligonucleotide
  Antisense strand to SEQ ID NO: 1053878
uuucuuaugcuuggaggca

SEQ ID NO: 1053880 - RNA, 19 nt, Artificial Sequence
  Description of Artificial Sequence: Synthetic oligonucleotide
  Sense strand starting at position 1770 of SEQ ID NO: 915102
ccaaauguccaugagcauu

SEQ ID NO: 1053881 - RNA, 19 nt, Artificial Sequence
  Description of Artificial Sequence: Synthetic oligonucleotide
  Antisense strand to SEQ ID NO: 1053880
aaugcucauggacauuugg

SEQ ID NO: 1053882 - RNA, 19 nt, Artificial Sequence
  Description of Artificial Sequence: Synthetic oligonucleotide
  Sense strand starting at position 1780 of SEQ ID NO: 915102
augagcauucuugggauaa

SEQ ID NO: 1053883 - RNA, 19 nt, Artificial Sequence
  Description of Artificial Sequence: Synthetic oligonucleotide
  Antisense strand to SEQ ID NO: 1053882
uuaucccaagaaugcucau

SEQ ID NO: 1053884 - RNA, 19 nt, Artificial Sequence
  Description of Artificial Sequence: Synthetic oligonucleotide
  Sense strand starting at position 1791 of SEQ ID NO: 915102
ugggauaaugauuguuaca

SEQ ID NO: 1053885 - RNA, 19 nt, Artificial Sequence
  Description of Artificial Sequence: Synthetic oligonucleotide
  Antisense strand to SEQ ID NO: 1053884
uguaacaaucauuauccca

SEQ ID NO: 1053886 - RNA, 19 nt, Artificial Sequence
  Description of Artificial Sequence: Synthetic oligonucleotide
  Sense strand starting at position 1793 of SEQ ID NO: 915102
ggauaaugauuguuacaua

SEQ ID NO: 1053887 - RNA, 19 nt, Artificial Sequence
  Description of Artificial Sequence: Synthetic oligonucleotide
  Antisense strand to SEQ ID NO: 1053886
uauguaacaaucauuaucc

SEQ ID NO: 1053888 - RNA, 19 nt, Artificial Sequence
  Description of Artificial Sequence: Synthetic oligonucleotide
  Sense strand starting at position 2038 of SEQ ID NO: 915102
ucuccaucugcagauauag

SEQ ID NO: 1053889 - RNA, 19 nt, Artificial Sequence
  Description of Artificial Sequence: Synthetic oligonucleotide
  Antisense strand to SEQ ID NO: 1053888
cuauaucugcagauggaga

SEQ ID NO: 1053890 - RNA, 19 nt, Artificial Sequence
  Description of Artificial Sequence: Synthetic oligonucleotide
  Sense strand starting at position 2099 of SEQ ID NO: 915102
uuccucuuggguuaacuaa

SEQ ID NO: 1053891 - RNA, 19 nt, Artificial Sequence
  Description of Artificial Sequence: Synthetic oligonucleotide
  Antisense strand to SEQ ID NO: 1053890
uuaguuaacccaagaggaa

SEQ ID NO: 1053892 - RNA, 19 nt, Artificial Sequence
  Description of Artificial Sequence: Synthetic oligonucleotide
  Sense strand starting at position 2128 of SEQ ID NO: 915102
ggaauauacuuacuuaagc

SEQ ID NO: 1053893 - RNA, 19 nt, Artificial Sequence
  Description of Artificial Sequence: Synthetic oligonucleotide
  Antisense strand to SEQ ID NO: 1053892
gcuuaaguaaguauauucc

SEQ ID NO: 1053894 - RNA, 19 nt, Artificial Sequence
  Description of Artificial Sequence: Synthetic oligonucleotide
  Sense strand starting at position 2645 of SEQ ID NO: 915102
uguuauugcccugaauaca

SEQ ID NO: 1053895 - RNA, 19 nt, Artificial Sequence
  Description of Artificial Sequence: Synthetic oligonucleotide
  Antisense strand to SEQ ID NO: 1053894
uguauucagggcaauaaca

SEQ ID NO: 1053896 - RNA, 19 nt, Artificial Sequence
  Description of Artificial Sequence: Synthetic oligonucleotide
  Sense strand starting at position 2895 of SEQ ID NO: 915102
guggccagagcauauaaau

SEQ ID NO: 1053897 - RNA, 19 nt, Artificial Sequence
  Description of Artificial Sequence: Synthetic oligonucleotide
  Antisense strand to SEQ ID NO: 1053896
auuuauaugcucuggccac

SEQ ID NO: 1053898 - RNA, 19 nt, Artificial Sequence
  Description of Artificial Sequence: Synthetic oligonucleotide
  Sense strand starting at position 3124 of SEQ ID NO: 915102
gacuuaauacguugauaaa

SEQ ID NO: 1053899 - RNA, 19 nt, Artificial Sequence
  Description of Artificial Sequence: Synthetic oligonucleotide
  Antisense strand to SEQ ID NO: 1053898
uuuaucaacguauuaaguc

SEQ ID NO: 1053900 - RNA, 19 nt, Artificial Sequence
  Description of Artificial Sequence: Synthetic oligonucleotide
  Sense strand starting at position 3420 of SEQ ID NO: 915102
auggcuuaccuuuagggau

SEQ ID NO: 1053901 - RNA, 19 nt, Artificial Sequence
  Description of Artificial Sequence: Synthetic oligonucleotide
  Antisense strand to SEQ ID NO: 1053900
aucccuaaagguaagccau

SEQ ID NO: 1053902 - RNA, 19 nt, Artificial Sequence
  Description of Artificial Sequence: Synthetic oligonucleotide
  Sense strand starting at position 3701 of SEQ ID NO: 915102
accauuuaguugucuagua

SEQ ID NO: 1053903 - RNA, 19 nt, Artificial Sequence
  Description of Artificial Sequence: Synthetic oligonucleotide
  Antisense strand to SEQ ID NO: 1053902
uacuagacaacuaaauggu

SEQ ID NO: 1053904 - RNA, 19 nt, Artificial Sequence
  Description of Artificial Sequence: Synthetic oligonucleotide
  Sense strand starting at position 3702 of SEQ ID NO: 915102
ccauuuaguugucuaguau

SEQ ID NO: 1053905 - RNA, 19 nt, Artificial Sequence
  Description of Artificial Sequence: Synthetic oligonucleotide
  Antisense strand to SEQ ID NO: 1053904
auacuagacaacuaaaugg

SEQ ID NO: 1053906 - RNA, 19 nt, Artificial Sequence
  Description of Artificial Sequence: Synthetic oligonucleotide
  Sense strand starting at position 3780 of SEQ ID NO: 915102
uguggauuugucugccuua

SEQ ID NO: 1053907 - RNA, 19 nt, Artificial Sequence
  Description of Artificial Sequence: Synthetic oligonucleotide
  Antisense strand to SEQ ID NO: 1053906
uaaggcagacaaauccaca

SEQ ID NO: 1053908 - RNA, 19 nt, Artificial Sequence
  Description of Artificial Sequence: Synthetic oligonucleotide
  Sense strand starting at position 3781 of SEQ ID NO: 915102
guggauuugucugccuuac

SEQ ID NO: 1053909 - RNA, 19 nt, Artificial Sequence
  Description of Artificial Sequence: Synthetic oligonucleotide
  Antisense strand to SEQ ID NO: 1053908
guaaggcagacaaauccac

SEQ ID NO: 1053910 - RNA, 19 nt, Artificial Sequence
  Description of Artificial Sequence: Synthetic oligonucleotide
  Sense strand starting at position 3783 of SEQ ID NO: 915102
ggauuugucugccuuacuu

SEQ ID NO: 1053911 - RNA, 19 nt, Artificial Sequence
  Description of Artificial Sequence: Synthetic oligonucleotide
  Antisense strand to SEQ ID NO: 1053910
aaguaaggcagacaaaucc

SEQ ID NO: 1053912 - RNA, 19 nt, Artificial Sequence
  Description of Artificial Sequence: Synthetic oligonucleotide
  Sense strand starting at position 3851 of SEQ ID NO: 915102
auaucauguguuuaaucac

SEQ ID NO: 1053913 - RNA, 19 nt, Artificial Sequence
  Description of Artificial Sequence: Synthetic oligonucleotide
  Antisense strand to SEQ ID NO: 1053912
gugauuaaacacaugauau

SEQ ID NO: 1053914 - RNA, 19 nt, Artificial Sequence
  Description of Artificial Sequence: Synthetic oligonucleotide
  Sense strand starting at position 3860 of SEQ ID NO: 915102
guuuaaucacacgaacaug

SEQ ID NO: 1053915 - RNA, 19 nt, Artificial Sequence
  Description of Artificial Sequence: Synthetic oligonucleotide
  Antisense strand to SEQ ID NO: 1053914
cauguucgugugauuaaac

SEQ ID NO: 1053916 - RNA, 19 nt, Artificial Sequence
  Description of Artificial Sequence: Synthetic oligonucleotide
  Sense strand starting at position 3886 of SEQ ID NO: 915102
ugaugucuucgacauauug

SEQ ID NO: 1053917 - RNA, 19 nt, Artificial Sequence
  Description of Artificial Sequence: Synthetic oligonucleotide
  Antisense strand to SEQ ID NO: 1053916
caauaugucgaagacauca

SEQ ID NO: 1053918 - RNA, 19 nt, Artificial Sequence
  Description of Artificial Sequence: Synthetic oligonucleotide
  Sense strand starting at position 3896 of SEQ ID NO: 915102
gacauauugaacggugaga

SEQ ID NO: 1053919 - RNA, 19 nt, Artificial Sequence
  Description of Artificial Sequence: Synthetic oligonucleotide
  Antisense strand to SEQ ID NO: 1053918
ucucaccguucaauauguc

SEQ ID NO: 1053920 - RNA, 19 nt, Artificial Sequence
  Description of Artificial Sequence: Synthetic oligonucleotide
  Sense strand starting at position 3898 of SEQ ID NO: 915102
cauauugaacggugagauu

SEQ ID NO: 1053921 - RNA, 19 nt, Artificial Sequence
  Description of Artificial Sequence: Synthetic oligonucleotide
  Antisense strand to SEQ ID NO: 1053920
aaucucaccguucaauaug

SEQ ID NO: 1053922 - RNA, 19 nt, Artificial Sequence
  Description of Artificial Sequence: Synthetic oligonucleotide
  Sense strand starting at position 71 of SEQ ID NO: 915103
ucggcauuuggccauggua

SEQ ID NO: 1053923 - RNA, 19 nt, Artificial Sequence
  Description of Artificial Sequence: Synthetic oligonucleotide
  Antisense strand to SEQ ID NO: 1053922
uaccauggccaaaugccga

SEQ ID NO: 1053924 - RNA, 19 nt, Artificial Sequence
  Description of Artificial Sequence: Synthetic oligonucleotide
  Sense strand starting at position 73 of SEQ ID NO: 915103
ggcauuuggccaugguaag

SEQ ID NO: 1053925 - RNA, 19 nt, Artificial Sequence
  Description of Artificial Sequence: Synthetic oligonucleotide
  Antisense strand to SEQ ID NO: 1053924
cuuaccauggccaaaugcc

SEQ ID NO: 1053926 - RNA, 19 nt, Artificial Sequence
  Description of Artificial Sequence: Synthetic oligonucleotide
  Sense strand starting at position 165 of SEQ ID NO: 915103
gccugugacaagcaagaau

SEQ ID NO: 1053927 - RNA, 19 nt, Artificial Sequence
  Description of Artificial Sequence: Synthetic oligonucleotide
  Antisense strand to SEQ ID NO: 1053926
auucuugcuugucacaggc

SEQ ID NO: 1053928 - RNA, 19 nt, Artificial Sequence
  Description of Artificial Sequence: Synthetic oligonucleotide
  Sense strand starting at position 299 of SEQ ID NO: 915103
guauaaagugcguaaacaa

SEQ ID NO: 1053929 - RNA, 19 nt, Artificial Sequence
  Description of Artificial Sequence: Synthetic oligonucleotide
  Antisense strand to SEQ ID NO: 1053928
uuguuuacgcacuuuauac

SEQ ID NO: 1053930 - RNA, 19 nt, Artificial Sequence
  Description of Artificial Sequence: Synthetic oligonucleotide
  Sense strand starting at position 365 of SEQ ID NO: 915103
ucuauucugugaguauaca

SEQ ID NO: 1053931 - RNA, 19 nt, Artificial Sequence
  Description of Artificial Sequence: Synthetic oligonucleotide
  Antisense strand to SEQ ID NO: 1053930
uguauacucacagaauaga

SEQ ID NO: 1053932 - RNA, 19 nt, Artificial Sequence
  Description of Artificial Sequence: Synthetic oligonucleotide
  Sense strand starting at position 366 of SEQ ID NO: 915103
cuauucugugaguauacaa

SEQ ID NO: 1053933 - RNA, 19 nt, Artificial Sequence
  Description of Artificial Sequence: Synthetic oligonucleotide
  Antisense strand to SEQ ID NO: 1053932
uuguauacucacagaauag

SEQ ID NO: 1053934 - RNA, 19 nt, Artificial Sequence
  Description of Artificial Sequence: Synthetic oligonucleotide
  Sense strand starting at position 559 of SEQ ID NO: 915103
uuguauacauguuuggaau

SEQ ID NO: 1053935 - RNA, 19 nt, Artificial Sequence
  Description of Artificial Sequence: Synthetic oligonucleotide
  Antisense strand to SEQ ID NO: 1053934
auuccaaacauguauacaa

SEQ ID NO: 1053936 - RNA, 19 nt, Artificial Sequence
  Description of Artificial Sequence: Synthetic oligonucleotide
  Sense strand starting at position 560 of SEQ ID NO: 915103
uguauacauguuuggaaua

SEQ ID NO: 1053937 - RNA, 19 nt, Artificial Sequence
  Description of Artificial Sequence: Synthetic oligonucleotide
  Antisense strand to SEQ ID NO: 1053936
uauuccaaacauguauaca

SEQ ID NO: 1053938 - RNA, 19 nt, Artificial Sequence
  Description of Artificial Sequence: Synthetic oligonucleotide
  Sense strand starting at position 691 of SEQ ID NO: 915103
ugaacuaugucuccaugau

SEQ ID NO: 1053939 - RNA, 19 nt, Artificial Sequence
  Description of Artificial Sequence: Synthetic oligonucleotide
  Antisense strand to SEQ ID NO: 1053938
aucauggagacauaguuca

SEQ ID NO: 1053940 - RNA, 19 nt, Artificial Sequence
  Description of Artificial Sequence: Synthetic oligonucleotide
  Sense strand starting at position 698 of SEQ ID NO: 915103
ugucuccaugaugguaaau

SEQ ID NO: 1053941 - RNA, 19 nt, Artificial Sequence
  Description of Artificial Sequence: Synthetic oligonucleotide
  Antisense strand to SEQ ID NO: 1053940
auuuaccaucauggagaca

SEQ ID NO: 1053942 - RNA, 19 nt, Artificial Sequence
  Description of Artificial Sequence: Synthetic oligonucleotide
  Sense strand starting at position 707 of SEQ ID NO: 915103
gaugguaaauucuuaaguu

SEQ ID NO: 1053943 - RNA, 19 nt, Artificial Sequence
  Description of Artificial Sequence: Synthetic oligonucleotide
  Antisense strand to SEQ ID NO: 1053942
aacuuaagaauuuaccauc

SEQ ID NO: 1053944 - RNA, 19 nt, Artificial Sequence
  Description of Artificial Sequence: Synthetic oligonucleotide
  Sense strand starting at position 790 of SEQ ID NO: 915103
aucuaucccugagauuuga

SEQ ID NO: 1053945 - RNA, 19 nt, Artificial Sequence
  Description of Artificial Sequence: Synthetic oligonucleotide
  Antisense strand to SEQ ID NO: 1053944
ucaaaucucagggauagau

SEQ ID NO: 1053946 - RNA, 19 nt, Artificial Sequence
  Description of Artificial Sequence: Synthetic oligonucleotide
  Sense strand starting at position 1065 of SEQ ID NO: 915103
uuuauuuccucugaggaug

SEQ ID NO: 1053947 - RNA, 19 nt, Artificial Sequence
  Description of Artificial Sequence: Synthetic oligonucleotide
  Antisense strand to SEQ ID NO: 1053946
cauccucagaggaaauaaa

SEQ ID NO: 1053948 - RNA, 19 nt, Artificial Sequence
  Description of Artificial Sequence: Synthetic oligonucleotide
  Sense strand starting at position 2079 of SEQ ID NO: 915103
auccauucucuauguggaa

SEQ ID NO: 1053949 - RNA, 19 nt, Artificial Sequence
  Description of Artificial Sequence: Synthetic oligonucleotide
  Antisense strand to SEQ ID NO: 1053948
uuccacauagagaauggau

SEQ ID NO: 1053950 - RNA, 19 nt, Artificial Sequence
  Description of Artificial Sequence: Synthetic oligonucleotide
  Sense strand starting at position 2080 of SEQ ID NO: 915103
uccauucucuauguggaaa

SEQ ID NO: 1053951 - RNA, 19 nt, Artificial Sequence
  Description of Artificial Sequence: Synthetic oligonucleotide
  Antisense strand to SEQ ID NO: 1053950
uuuccacauagagaaugga

SEQ ID NO: 1053952 - RNA, 19 nt, Artificial Sequence
  Description of Artificial Sequence: Synthetic oligonucleotide
  Sense strand starting at position 2099 of SEQ ID NO: 915103
cugcaucaaccagguagau

SEQ ID NO: 1053953 - RNA, 19 nt, Artificial Sequence
  Description of Artificial Sequence: Synthetic oligonucleotide
  Antisense strand to SEQ ID NO: 1053952
aucuaccugguugaugcag

SEQ ID NO: 1053954 - RNA, 19 nt, Artificial Sequence
  Description of Artificial Sequence: Synthetic oligonucleotide
  Sense strand starting at position 2624 of SEQ ID NO: 915103
agaaucucuguccaguuua

SEQ ID NO: 1053955 - RNA, 19 nt, Artificial Sequence
  Description of Artificial Sequence: Synthetic oligonucleotide
  Antisense strand to SEQ ID NO: 1053954
uaaacuggacagagauucu

SEQ ID NO: 1053956 - RNA, 19 nt, Artificial Sequence
  Description of Artificial Sequence: Synthetic oligonucleotide
  Sense strand starting at position 2634 of SEQ ID NO: 915103
uccaguuuacuguagcaaa

SEQ ID NO: 1053957 - RNA, 19 nt, Artificial Sequence
  Description of Artificial Sequence: Synthetic oligonucleotide
  Antisense strand to SEQ ID NO: 1053956
uuugcuacaguaaacugga

SEQ ID NO: 1053958 - RNA, 19 nt, Artificial Sequence
  Description of Artificial Sequence: Synthetic oligonucleotide
  Sense strand starting at position 2680 of SEQ ID NO: 915103
gugauagcccaucauaguc

SEQ ID NO: 1053959 - RNA, 19 nt, Artificial Sequence
  Description of Artificial Sequence: Synthetic oligonucleotide
  Antisense strand to SEQ ID NO: 1053958
gacuaugaugggcuaucac

SEQ ID NO: 1053960 - RNA, 19 nt, Artificial Sequence
  Description of Artificial Sequence: Synthetic oligonucleotide
  Sense strand starting at position 2880 of SEQ ID NO: 915103
ccacuaguuuccucauaug

SEQ ID NO: 1053961 - RNA, 19 nt, Artificial Sequence
  Description of Artificial Sequence: Synthetic oligonucleotide
  Antisense strand to SEQ ID NO: 1053960
cauaugaggaaacuagugg

SEQ ID NO: 1053962 - RNA, 19 nt, Artificial Sequence
  Description of Artificial Sequence: Synthetic oligonucleotide
  Sense strand starting at position 2925 of SEQ ID NO: 915103
acccaccucgcugauaaau

SEQ ID NO: 1053963 - RNA, 19 nt, Artificial Sequence
  Description of Artificial Sequence: Synthetic oligonucleotide
  Antisense strand to SEQ ID NO: 1053962
auuuaucagcgaggugggu

SEQ ID NO: 1053964 - RNA, 19 nt, Artificial Sequence
  Description of Artificial Sequence: Synthetic oligonucleotide
  Sense strand starting at position 2934 of SEQ ID NO: 915103
gcugauaaauuaucagcau

SEQ ID NO: 1053965 - RNA, 19 nt, Artificial Sequence
  Description of Artificial Sequence: Synthetic oligonucleotide
  Antisense strand to SEQ ID NO: 1053964
augcugauaauuuaucagc

SEQ ID NO: 1053966 - RNA, 19 nt, Artificial Sequence
  Description of Artificial Sequence: Synthetic oligonucleotide
  Sense strand starting at position 3082 of SEQ ID NO: 915103
gggcgaggcaucgcuucau

SEQ ID NO: 1053967 - RNA, 19 nt, Artificial Sequence
  Description of Artificial Sequence: Synthetic oligonucleotide
  Antisense strand to SEQ ID NO: 1053966
augaagcgaugccucgccc

SEQ ID NO: 1053968 - RNA, 19 nt, Artificial Sequence
  Description of Artificial Sequence: Synthetic oligonucleotide
  Sense strand starting at position 3141 of SEQ ID NO: 915103
cuaucccuggcagguaaua

SEQ ID NO: 1053969 - RNA, 19 nt, Artificial Sequence
  Description of Artificial Sequence: Synthetic oligonucleotide
  Antisense strand to SEQ ID NO: 1053968
uauuaccugccagggauag

SEQ ID NO: 1053970 - RNA, 19 nt, Artificial Sequence
  Description of Artificial Sequence: Synthetic oligonucleotide
  Sense strand starting at position 3153 of SEQ ID NO: 915103
gguaauaacugcuugauaa

SEQ ID NO: 1053971 - RNA, 19 nt, Artificial Sequence
  Description of Artificial Sequence: Synthetic oligonucleotide
  Antisense strand to SEQ ID NO: 1053970
uuaucaagcaguuauuacc

SEQ ID NO: 1053972 - RNA, 19 nt, Artificial Sequence
  Description of Artificial Sequence: Synthetic oligonucleotide
  Sense strand starting at position 3154 of SEQ ID NO: 915103
guaauaacugcuugauaaa

SEQ ID NO: 1053973 - RNA, 19 nt, Artificial Sequence
  Description of Artificial Sequence: Synthetic oligonucleotide
  Antisense strand to SEQ ID NO: 1053972
uuuaucaagcaguuauuac

SEQ ID NO: 1053974 - RNA, 19 nt, Artificial Sequence
  Description of Artificial Sequence: Synthetic oligonucleotide
  Sense strand starting at position 3208 of SEQ ID NO: 915103
guguuauggauuugccauu

SEQ ID NO: 1053975 - RNA, 19 nt, Artificial Sequence
  Description of Artificial Sequence: Synthetic oligonucleotide
  Antisense strand to SEQ ID NO: 1053974
aauggcaaauccauaacac

SEQ ID NO: 1053976 - RNA, 19 nt, Artificial Sequence
  Description of Artificial Sequence: Synthetic oligonucleotide
  Sense strand starting at position 3269 of SEQ ID NO: 915103
gagaguccuuaaucuaaga

SEQ ID NO: 1053977 - RNA, 19 nt, Artificial Sequence
  Description of Artificial Sequence: Synthetic oligonucleotide
  Antisense strand to SEQ ID NO: 1053976
ucuuagauuaaggacucuc

SEQ ID NO: 1053978 - RNA, 19 nt, Artificial Sequence
  Description of Artificial Sequence: Synthetic oligonucleotide
  Sense strand starting at position 3290 of SEQ ID NO: 915103
uaugucuuuguggacuauu

SEQ ID NO: 1053979 - RNA, 19 nt, Artificial Sequence
  Description of Artificial Sequence: Synthetic oligonucleotide
  Antisense strand to SEQ ID NO: 1053978
aauaguccacaaagacaua

SEQ ID NO: 1053980 - RNA, 19 nt, Artificial Sequence
  Description of Artificial Sequence: Synthetic oligonucleotide
  Sense strand starting at position 3315 of SEQ ID NO: 915103
ccaauauuguuacugaugu

SEQ ID NO: 1053981 - RNA, 19 nt, Artificial Sequence
  Description of Artificial Sequence: Synthetic oligonucleotide
  Antisense strand to SEQ ID NO: 1053980
acaucaguaacaauauugg

SEQ ID NO: 1053982 - RNA, 19 nt, Artificial Sequence
  Description of Artificial Sequence: Synthetic oligonucleotide
  Sense strand starting at position 3384 of SEQ ID NO: 915103
guaagaaucucagcacaac

SEQ ID NO: 1053983 - RNA, 19 nt, Artificial Sequence
  Description of Artificial Sequence: Synthetic oligonucleotide
  Antisense strand to SEQ ID NO: 1053982
guugugcugagauucuuac

SEQ ID NO: 1053984 - RNA, 19 nt, Artificial Sequence
  Description of Artificial Sequence: Synthetic oligonucleotide
  Sense strand starting at position 3409 of SEQ ID NO: 915103
gugggauuccuacaaccuc

SEQ ID NO: 1053985 - RNA, 19 nt, Artificial Sequence
  Description of Artificial Sequence: Synthetic oligonucleotide
  Antisense strand to SEQ ID NO: 1053984
gagguuguaggaaucccac

SEQ ID NO: 1053986 - RNA, 19 nt, Artificial Sequence
  Description of Artificial Sequence: Synthetic oligonucleotide
  Sense strand starting at position 3566 of SEQ ID NO: 915103
gcuagcuuucuguuguaca

SEQ ID NO: 1053987 - RNA, 19 nt, Artificial Sequence
  Description of Artificial Sequence: Synthetic oligonucleotide
  Antisense strand to SEQ ID NO: 1053986
uguacaacagaaagcuagc

SEQ ID NO: 1053988 - RNA, 19 nt, Artificial Sequence
  Description of Artificial Sequence: Synthetic oligonucleotide
  Sense strand starting at position 3591 of SEQ ID NO: 915103
uauccuagauguguaaaug

SEQ ID NO: 1053989 - RNA, 19 nt, Artificial Sequence
  Description of Artificial Sequence: Synthetic oligonucleotide
  Antisense strand to SEQ ID NO: 1053988
cauuuacacaucuaggaua

SEQ ID NO: 1053990 - RNA, 19 nt, Artificial Sequence
  Description of Artificial Sequence: Synthetic oligonucleotide
  Sense strand starting at position 3592 of SEQ ID NO: 915103
auccuagauguguaaaugu

SEQ ID NO: 1053991 - RNA, 19 nt, Artificial Sequence
  Description of Artificial Sequence: Synthetic oligonucleotide
  Antisense strand to SEQ ID NO: 1053990
acauuuacacaucuaggau

SEQ ID NO: 1053992 - RNA, 19 nt, Artificial Sequence
  Description of Artificial Sequence: Synthetic oligonucleotide
  Sense strand starting at position 3622 of SEQ ID NO: 915103
ggcuucguuagagauaaca

SEQ ID NO: 1053993 - RNA, 19 nt, Artificial Sequence
  Description of Artificial Sequence: Synthetic oligonucleotide
  Antisense strand to SEQ ID NO: 1053992
uguuaucucuaacgaagcc

SEQ ID NO: 1053994 - RNA, 19 nt, Artificial Sequence
  Description of Artificial Sequence: Synthetic oligonucleotide
  Sense strand starting at position 3809 of SEQ ID NO: 915103
agcugagauucuguacaau

SEQ ID NO: 1053995 - RNA, 19 nt, Artificial Sequence
  Description of Artificial Sequence: Synthetic oligonucleotide
  Antisense strand to SEQ ID NO: 1053994
auuguacagaaucucagcu

SEQ ID NO: 1053996 - RNA, 19 nt, Artificial Sequence
  Description of Artificial Sequence: Synthetic oligonucleotide
  Sense strand starting at position 3828 of SEQ ID NO: 915103
ugguauucagguugaaaug

SEQ ID NO: 1053997 - RNA, 19 nt, Artificial Sequence
  Description of Artificial Sequence: Synthetic oligonucleotide
  Antisense strand to SEQ ID NO: 1053996
cauuucaaccugaauacca

SEQ ID NO: 1053998 - RNA, 19 nt, Artificial Sequence
  Description of Artificial Sequence: Synthetic oligonucleotide
  Sense strand starting at position 3945 of SEQ ID NO: 915103
ccaggauaucugcaguuua

SEQ ID NO: 1053999 - RNA, 19 nt, Artificial Sequence
  Description of Artificial Sequence: Synthetic oligonucleotide
  Antisense strand to SEQ ID NO: 1053998
uaaacugcagauauccugg

SEQ ID NO: 1054000 - RNA, 19 nt, Artificial Sequence
  Description of Artificial Sequence: Synthetic oligonucleotide
  Sense strand starting at position 3950 of SEQ ID NO: 915103
auaucugcaguuuacagaa

SEQ ID NO: 1054001 - RNA, 19 nt, Artificial Sequence
  Description of Artificial Sequence: Synthetic oligonucleotide
  Antisense strand to SEQ ID NO: 1054000
uucuguaaacugcagauau

SEQ ID NO: 1054002 - RNA, 19 nt, Artificial Sequence
  Description of Artificial Sequence: Synthetic oligonucleotide
  Sense strand starting at position 16 of SEQ ID NO: 915104
ccaggauaccugugguauu

SEQ ID NO: 1054003 - RNA, 19 nt, Artificial Sequence
  Description of Artificial Sequence: Synthetic oligonucleotide
  Antisense strand to SEQ ID NO: 1054002
aauaccacagguauccugg

SEQ ID NO: 1054004 - RNA, 19 nt, Artificial Sequence
  Description of Artificial Sequence: Synthetic oligonucleotide
  Sense strand starting at position 88 of SEQ ID NO: 915104
uuauuuggaugacagauua

SEQ ID NO: 1054005 - RNA, 19 nt, Artificial Sequence
  Description of Artificial Sequence: Synthetic oligonucleotide
  Antisense strand to SEQ ID NO: 1054004
uaaucugucauccaaauaa

SEQ ID NO: 1054006 - RNA, 19 nt, Artificial Sequence
  Description of Artificial Sequence: Synthetic oligonucleotide
  Sense strand starting at position 193 of SEQ ID NO: 915104
gcagacauagucuaauuac

SEQ ID NO: 1054007 - RNA, 19 nt, Artificial Sequence
  Description of Artificial Sequence: Synthetic oligonucleotide
  Antisense strand to SEQ ID NO: 1054006
guaauuagacuaugucugc

SEQ ID NO: 1054008 - RNA, 19 nt, Artificial Sequence
  Description of Artificial Sequence: Synthetic oligonucleotide
  Sense strand starting at position 202 of SEQ ID NO: 915104
gucuaauuacaugggaaau

SEQ ID NO: 1054009 - RNA, 19 nt, Artificial Sequence
  Description of Artificial Sequence: Synthetic oligonucleotide
  Antisense strand to SEQ ID NO: 1054008
auuucccauguaauuagac

SEQ ID NO: 1054010 - RNA, 19 nt, Artificial Sequence
  Description of Artificial Sequence: Synthetic oligonucleotide
  Sense strand starting at position 213 of SEQ ID NO: 915104
ugggaaauauuaucuagua

SEQ ID NO: 1054011 - RNA, 19 nt, Artificial Sequence
  Description of Artificial Sequence: Synthetic oligonucleotide
  Antisense strand to SEQ ID NO: 1054010
uacuagauaauauuuccca

SEQ ID NO: 1054012 - RNA, 19 nt, Artificial Sequence
  Description of Artificial Sequence: Synthetic oligonucleotide
  Sense strand starting at position 214 of SEQ ID NO: 915104
gggaaauauuaucuaguac

SEQ ID NO: 1054013 - RNA, 19 nt, Artificial Sequence
  Description of Artificial Sequence: Synthetic oligonucleotide
  Antisense strand to SEQ ID NO: 1054012
guacuagauaauauuuccc

SEQ ID NO: 1054014 - RNA, 19 nt, Artificial Sequence
  Description of Artificial Sequence: Synthetic oligonucleotide
  Sense strand starting at position 368 of SEQ ID NO: 915104
gaaacuugccauugaggau

SEQ ID NO: 1054015 - RNA, 19 nt, Artificial Sequence
  Description of Artificial Sequence: Synthetic oligonucleotide
  Antisense strand to SEQ ID NO: 1054014
auccucaauggcaaguuuc

SEQ ID NO: 1054016 - RNA, 19 nt, Artificial Sequence
  Description of Artificial Sequence: Synthetic oligonucleotide
  Sense strand starting at position 419 of SEQ ID NO: 915104
aagucuagauaguugucau

SEQ ID NO: 1054017 - RNA, 19 nt, Artificial Sequence
  Description of Artificial Sequence: Synthetic oligonucleotide
  Antisense strand to SEQ ID NO: 1054016
augacaacuaucuagacuu

SEQ ID NO: 1054018 - RNA, 19 nt, Artificial Sequence
  Description of Artificial Sequence: Synthetic oligonucleotide
  Sense strand starting at position 422 of SEQ ID NO: 915104
ucuagauaguugucaucag

SEQ ID NO: 1054019 - RNA, 19 nt, Artificial Sequence
  Description of Artificial Sequence: Synthetic oligonucleotide
  Antisense strand to SEQ ID NO: 1054018
cugaugacaacuaucuaga

SEQ ID NO: 1054020 - RNA, 19 nt, Artificial Sequence
  Description of Artificial Sequence: Synthetic oligonucleotide
  Sense strand starting at position 461 of SEQ ID NO: 915104
guguauacagugcauaaau

SEQ ID NO: 1054021 - RNA, 19 nt, Artificial Sequence
  Description of Artificial Sequence: Synthetic oligonucleotide
  Antisense strand to SEQ ID NO: 1054020
auuuaugcacuguauacac

SEQ ID NO: 1054022 - RNA, 19 nt, Artificial Sequence
  Description of Artificial Sequence: Synthetic oligonucleotide
  Sense strand starting at position 555 of SEQ ID NO: 915104
ggcccaugaaugugaauaa

SEQ ID NO: 1054023 - RNA, 19 nt, Artificial Sequence
  Description of Artificial Sequence: Synthetic oligonucleotide
  Antisense strand to SEQ ID NO: 1054022
uuauucacauucaugggcc

SEQ ID NO: 1054024 - RNA, 19 nt, Artificial Sequence
  Description of Artificial Sequence: Synthetic oligonucleotide
  Sense strand starting at position 716 of SEQ ID NO: 915104
uuuauaaggcuuugacuua

SEQ ID NO: 1054025 - RNA, 19 nt, Artificial Sequence
  Description of Artificial Sequence: Synthetic oligonucleotide
  Antisense strand to SEQ ID NO: 1054024
uaagucaaagccuuauaaa

SEQ ID NO: 1054026 - RNA, 19 nt, Artificial Sequence
  Description of Artificial Sequence: Synthetic oligonucleotide
  Sense strand starting at position 821 of SEQ ID NO: 915104
uacuuaauggaacgugaaa

SEQ ID NO: 1054027 - RNA, 19 nt, Artificial Sequence
  Description of Artificial Sequence: Synthetic oligonucleotide
  Antisense strand to SEQ ID NO: 1054026
uuucacguuccauuaagua

SEQ ID NO: 1054028 - RNA, 19 nt, Artificial Sequence
  Description of Artificial Sequence: Synthetic oligonucleotide
  Sense strand starting at position 862 of SEQ ID NO: 915104
cuuagauuaucaccgugaa

SEQ ID NO: 1054029 - RNA, 19 nt, Artificial Sequence
  Description of Artificial Sequence: Synthetic oligonucleotide
  Antisense strand to SEQ ID NO: 1054028
uucacggugauaaucuaag

SEQ ID NO: 1054030 - RNA, 19 nt, Artificial Sequence
  Description of Artificial Sequence: Synthetic oligonucleotide
  Sense strand starting at position 863 of SEQ ID NO: 915104
uuagauuaucaccgugaaa

SEQ ID NO: 1054031 - RNA, 19 nt, Artificial Sequence
  Description of Artificial Sequence: Synthetic oligonucleotide
  Antisense strand to SEQ ID NO: 1054030
uuucacggugauaaucuaa

SEQ ID NO: 1054032 - RNA, 19 nt, Artificial Sequence
  Description of Artificial Sequence: Synthetic oligonucleotide
  Sense strand starting at position 865 of SEQ ID NO: 915104
agauuaucaccgugaaaug

SEQ ID NO: 1054033 - RNA, 19 nt, Artificial Sequence
  Description of Artificial Sequence: Synthetic oligonucleotide
  Antisense strand to SEQ ID NO: 1054032
cauuucacggugauaaucu

SEQ ID NO: 1054034 - RNA, 19 nt, Artificial Sequence
  Description of Artificial Sequence: Synthetic oligonucleotide
  Sense strand starting at position 883 of SEQ ID NO: 915104
ggcugcuuuaacuaggauu

SEQ ID NO: 1054035 - RNA, 19 nt, Artificial Sequence
  Description of Artificial Sequence: Synthetic oligonucleotide
  Antisense strand to SEQ ID NO: 1054034
aauccuaguuaaagcagcc

SEQ ID NO: 1054036 - RNA, 19 nt, Artificial Sequence
  Description of Artificial Sequence: Synthetic oligonucleotide
  Sense strand starting at position 1382 of SEQ ID NO: 915104
aggccacuagcccaauauu

SEQ ID NO: 1054037 - RNA, 19 nt, Artificial Sequence
  Description of Artificial Sequence: Synthetic oligonucleotide
  Antisense strand to SEQ ID NO: 1054036
aauauugggcuaguggccu

SEQ ID NO: 1054038 - RNA, 19 nt, Artificial Sequence
  Description of Artificial Sequence: Synthetic oligonucleotide
  Sense strand starting at position 1631 of SEQ ID NO: 915104
ccagguagcgaucauagga

SEQ ID NO: 1054039 - RNA, 19 nt, Artificial Sequence
  Description of Artificial Sequence: Synthetic oligonucleotide
  Antisense strand to SEQ ID NO: 1054038
uccuaugaucgcuaccugg

SEQ ID NO: 1054040 - RNA, 19 nt, Artificial Sequence
  Description of Artificial Sequence: Synthetic oligonucleotide
  Sense strand starting at position 2046 of SEQ ID NO: 915104
uagcauuuacugugagcau

SEQ ID NO: 1054041 - RNA, 19 nt, Artificial Sequence
  Description of Artificial Sequence: Synthetic oligonucleotide
  Antisense strand to SEQ ID NO: 1054040
augcucacaguaaaugcua

SEQ ID NO: 1054042 - RNA, 19 nt, Artificial Sequence
  Description of Artificial Sequence: Synthetic oligonucleotide
  Sense strand starting at position 2049 of SEQ ID NO: 915104
cauuuacugugagcauguu

SEQ ID NO: 1054043 - RNA, 19 nt, Artificial Sequence
  Description of Artificial Sequence: Synthetic oligonucleotide
  Antisense strand to SEQ ID NO: 1054042
aacaugcucacaguaaaug

SEQ ID NO: 1054044 - RNA, 19 nt, Artificial Sequence
  Description of Artificial Sequence: Synthetic oligonucleotide
  Sense strand starting at position 2153 of SEQ ID NO: 915104
caguauaggucuuugaaga

SEQ ID NO: 1054045 - RNA, 19 nt, Artificial Sequence
  Description of Artificial Sequence: Synthetic oligonucleotide
  Antisense strand to SEQ ID NO: 1054044
ucuucaaagaccuauacug

SEQ ID NO: 1054046 - RNA, 19 nt, Artificial Sequence
  Description of Artificial Sequence: Synthetic oligonucleotide
  Sense strand starting at position 2154 of SEQ ID NO: 915104
aguauaggucuuugaagag

SEQ ID NO: 1054047 - RNA, 19 nt, Artificial Sequence
  Description of Artificial Sequence: Synthetic oligonucleotide
  Antisense strand to SEQ ID NO: 1054046
cucuucaaagaccuauacu

SEQ ID NO: 1054048 - RNA, 19 nt, Artificial Sequence
  Description of Artificial Sequence: Synthetic oligonucleotide
  Sense strand starting at position 2183 of SEQ ID NO: 915104
uucuuauuccaguaccaga

SEQ ID NO: 1054049 - RNA, 19 nt, Artificial Sequence
  Description of Artificial Sequence: Synthetic oligonucleotide
  Antisense strand to SEQ ID NO: 1054048
ucugguacuggaauaagaa

SEQ ID NO: 1054050 - RNA, 19 nt, Artificial Sequence
  Description of Artificial Sequence: Synthetic oligonucleotide
  Sense strand starting at position 2473 of SEQ ID NO: 915104
agucucuuugaucauuaga

SEQ ID NO: 1054051 - RNA, 19 nt, Artificial Sequence
  Description of Artificial Sequence: Synthetic oligonucleotide
  Antisense strand to SEQ ID NO: 1054050
ucuaaugaucaaagagacu

SEQ ID NO: 1054052 - RNA, 19 nt, Artificial Sequence
  Description of Artificial Sequence: Synthetic oligonucleotide
  Sense strand starting at position 2475 of SEQ ID NO: 915104
ucucuuugaucauuagaga

SEQ ID NO: 1054053 - RNA, 19 nt, Artificial Sequence
  Description of Artificial Sequence: Synthetic oligonucleotide
  Antisense strand to SEQ ID NO: 1054052
ucucuaaugaucaaagaga

SEQ ID NO: 1054054 - RNA, 19 nt, Artificial Sequence
  Description of Artificial Sequence: Synthetic oligonucleotide
  Sense strand starting at position 2533 of SEQ ID NO: 915104
ucuggauggcugggagaaa

SEQ ID NO: 1054055 - RNA, 19 nt, Artificial Sequence
  Description of Artificial Sequence: Synthetic oligonucleotide
  Antisense strand to SEQ ID NO: 1054054
uuucucccagccauccaga

SEQ ID NO: 1054056 - RNA, 19 nt, Artificial Sequence
  Description of Artificial Sequence: Synthetic oligonucleotide
  Sense strand starting at position 2642 of SEQ ID NO: 915104
uuugucuuacccuagauca

SEQ ID NO: 1054057 - RNA, 19 nt, Artificial Sequence
  Description of Artificial Sequence: Synthetic oligonucleotide
  Antisense strand to SEQ ID NO: 1054056
ugaucuaggguaagacaaa

SEQ ID NO: 1054058 - RNA, 19 nt, Artificial Sequence
  Description of Artificial Sequence: Synthetic oligonucleotide
  Sense strand starting at position 2994 of SEQ ID NO: 915104
ucauaccuuccuggucaua

SEQ ID NO: 1054059 - RNA, 19 nt, Artificial Sequence
  Description of Artificial Sequence: Synthetic oligonucleotide
  Antisense strand to SEQ ID NO: 1054058
uaugaccaggaagguauga

SEQ ID NO: 1054060 - RNA, 19 nt, Artificial Sequence
  Description of Artificial Sequence: Synthetic oligonucleotide
  Sense strand starting at position 2996 of SEQ ID NO: 915104
auaccuuccuggucauaua

SEQ ID NO: 1054061 - RNA, 19 nt, Artificial Sequence
  Description of Artificial Sequence: Synthetic oligonucleotide
  Antisense strand to SEQ ID NO: 1054060
uauaugaccaggaagguau

SEQ ID NO: 1054062 - RNA, 19 nt, Artificial Sequence
  Description of Artificial Sequence: Synthetic oligonucleotide
  Sense strand starting at position 3080 of SEQ ID NO: 915104
cugugucucuuucuauuua

SEQ ID NO: 1054063 - RNA, 19 nt, Artificial Sequence
  Description of Artificial Sequence: Synthetic oligonucleotide
  Antisense strand to SEQ ID NO: 1054062
uaaauagaaagagacacag

SEQ ID NO: 1054064 - RNA, 19 nt, Artificial Sequence
  Description of Artificial Sequence: Synthetic oligonucleotide
  Sense strand starting at position 3203 of SEQ ID NO: 915104
aauggaaccugcuugagua

SEQ ID NO: 1054065 - RNA, 19 nt, Artificial Sequence
  Description of Artificial Sequence: Synthetic oligonucleotide
  Antisense strand to SEQ ID NO: 1054064
uacucaagcagguuccauu

SEQ ID NO: 1054066 - RNA, 19 nt, Artificial Sequence
  Description of Artificial Sequence: Synthetic oligonucleotide
  Sense strand starting at position 3392 of SEQ ID NO: 915104
uucuuuaacguggacacaa

SEQ ID NO: 1054067 - RNA, 19 nt, Artificial Sequence
  Description of Artificial Sequence: Synthetic oligonucleotide
  Antisense strand to SEQ ID NO: 1054066
uuguguccacguuaaagaa

SEQ ID NO: 1054068 - RNA, 19 nt, Artificial Sequence
  Description of Artificial Sequence: Synthetic oligonucleotide
  Sense strand starting at position 3466 of SEQ ID NO: 915104
aaggaaacgugguugaaga

SEQ ID NO: 1054069 - RNA, 19 nt, Artificial Sequence
  Description of Artificial Sequence: Synthetic oligonucleotide
  Antisense strand to SEQ ID NO: 1054068
ucuucaaccacguuuccuu

SEQ ID NO: 1054070 - RNA, 19 nt, Artificial Sequence
  Description of Artificial Sequence: Synthetic oligonucleotide
  Sense strand starting at position 3485 of SEQ ID NO: 915104
ccuggaccucucugauaga

SEQ ID NO: 1054071 - RNA, 19 nt, Artificial Sequence
  Description of Artificial Sequence: Synthetic oligonucleotide
  Antisense strand to SEQ ID NO: 1054070
ucuaucagagagguccagg

SEQ ID NO: 1054072 - RNA, 19 nt, Artificial Sequence
  Description of Artificial Sequence: Synthetic oligonucleotide
  Sense strand starting at position 3724 of SEQ ID NO: 915104
ggcucuguaagucaugacu

SEQ ID NO: 1054073 - RNA, 19 nt, Artificial Sequence
  Description of Artificial Sequence: Synthetic oligonucleotide
  Antisense strand to SEQ ID NO: 1054072
agucaugacuuacagagcc

SEQ ID NO: 1054074 - RNA, 19 nt, Artificial Sequence
  Description of Artificial Sequence: Synthetic oligonucleotide
  Sense strand starting at position 3727 of SEQ ID NO: 915104
ucuguaagucaugacuaag

SEQ ID NO: 1054075 - RNA, 19 nt, Artificial Sequence
  Description of Artificial Sequence: Synthetic oligonucleotide
  Antisense strand to SEQ ID NO: 1054074
cuuagucaugacuuacaga

SEQ ID NO: 1054076 - RNA, 19 nt, Artificial Sequence
  Description of Artificial Sequence: Synthetic oligonucleotide
  Sense strand starting at position 3738 of SEQ ID NO: 915104
ugacuaagauaaucuagcu

SEQ ID NO: 1054077 - RNA, 19 nt, Artificial Sequence
  Description of Artificial Sequence: Synthetic oligonucleotide
  Antisense strand to SEQ ID NO: 1054076
agcuagauuaucuuaguca

SEQ ID NO: 1054078 - RNA, 19 nt, Artificial Sequence
  Description of Artificial Sequence: Synthetic oligonucleotide
  Sense strand starting at position 3855 of SEQ ID NO: 915104
gcugaaguguugccaauuu

SEQ ID NO: 1054079 - RNA, 19 nt, Artificial Sequence
  Description of Artificial Sequence: Synthetic oligonucleotide
  Antisense strand to SEQ ID NO: 1054078
aaauuggcaacacuucagc

SEQ ID NO: 1054080 - RNA, 19 nt, Artificial Sequence
  Description of Artificial Sequence: Synthetic oligonucleotide
  Sense strand starting at position 3938 of SEQ ID NO: 915104
augucaguucuugauaagu

SEQ ID NO: 1054081 - RNA, 19 nt, Artificial Sequence
  Description of Artificial Sequence: Synthetic oligonucleotide
  Antisense strand to SEQ ID NO: 1054080
acuuaucaagaacugacau

SEQ ID NO: 1054082 - RNA, 19 nt, Artificial Sequence
  Description of Artificial Sequence: Synthetic oligonucleotide
  Sense strand starting at position 52 of SEQ ID NO: 915105
ccaacagggcuccaguaaa

SEQ ID NO: 1054083 - RNA, 19 nt, Artificial Sequence
  Description of Artificial Sequence: Synthetic oligonucleotide
  Antisense strand to SEQ ID NO: 1054082
uuuacuggagcccuguugg

SEQ ID NO: 1054084 - RNA, 19 nt, Artificial Sequence
  Description of Artificial Sequence: Synthetic oligonucleotide
  Sense strand starting at position 95 of SEQ ID NO: 915105
agcugaaagaguuacuagu

SEQ ID NO: 1054085 - RNA, 19 nt, Artificial Sequence
  Description of Artificial Sequence: Synthetic oligonucleotide
  Antisense strand to SEQ ID NO: 1054084
acuaguaacucuuucagcu

SEQ ID NO: 1054086 - RNA, 19 nt, Artificial Sequence
  Description of Artificial Sequence: Synthetic oligonucleotide
  Sense strand starting at position 97 of SEQ ID NO: 915105
cugaaagaguuacuaguca

SEQ ID NO: 1054087 - RNA, 19 nt, Artificial Sequence
  Description of Artificial Sequence: Synthetic oligonucleotide
  Antisense strand to SEQ ID NO: 1054086
ugacuaguaacucuuucag

SEQ ID NO: 1054088 - RNA, 19 nt, Artificial Sequence
  Description of Artificial Sequence: Synthetic oligonucleotide
  Sense strand starting at position 101 of SEQ ID NO: 915105
aagaguuacuagucacaga

SEQ ID NO: 1054089 - RNA, 19 nt, Artificial Sequence
  Description of Artificial Sequence: Synthetic oligonucleotide
  Antisense strand to SEQ ID NO: 1054088
ucugugacuaguaacucuu

SEQ ID NO: 1054090 - RNA, 19 nt, Artificial Sequence
  Description of Artificial Sequence: Synthetic oligonucleotide
  Sense strand starting at position 114 of SEQ ID NO: 915105
cacagacucucuuugagga

SEQ ID NO: 1054091 - RNA, 19 nt, Artificial Sequence
  Description of Artificial Sequence: Synthetic oligonucleotide
  Antisense strand to SEQ ID NO: 1054090
uccucaaagagagucugug

SEQ ID NO: 1054092 - RNA, 19 nt, Artificial Sequence
  Description of Artificial Sequence: Synthetic oligonucleotide
  Sense strand starting at position 122 of SEQ ID NO: 915105
cucuuugaggacuaguauu

SEQ ID NO: 1054093 - RNA, 19 nt, Artificial Sequence
  Description of Artificial Sequence: Synthetic oligonucleotide
  Antisense strand to SEQ ID NO: 1054092
aauacuaguccucaaagag

SEQ ID NO: 1054094 - RNA, 19 nt, Artificial Sequence
  Description of Artificial Sequence: Synthetic oligonucleotide
  Sense strand starting at position 195 of SEQ ID NO: 915105
agccuuuggucccuacaaa

SEQ ID NO: 1054095 - RNA, 19 nt, Artificial Sequence
  Description of Artificial Sequence: Synthetic oligonucleotide
  Antisense strand to SEQ ID NO: 1054094
uuuguagggaccaaaggcu

SEQ ID NO: 1054096 - RNA, 19 nt, Artificial Sequence
  Description of Artificial Sequence: Synthetic oligonucleotide
  Sense strand starting at position 196 of SEQ ID NO: 915105
gccuuuggucccuacaaac

SEQ ID NO: 1054097 - RNA, 19 nt, Artificial Sequence
  Description of Artificial Sequence: Synthetic oligonucleotide
  Antisense strand to SEQ ID NO: 1054096
guuuguagggaccaaaggc

SEQ ID NO: 1054098 - RNA, 19 nt, Artificial Sequence
  Description of Artificial Sequence: Synthetic oligonucleotide
  Sense strand starting at position 270 of SEQ ID NO: 915105
cugccuauuugucucaguu

SEQ ID NO: 1054099 - RNA, 19 nt, Artificial Sequence
  Description of Artificial Sequence: Synthetic oligonucleotide
  Antisense strand to SEQ ID NO: 1054098
aacugagacaaauaggcag

SEQ ID NO: 1054100 - RNA, 19 nt, Artificial Sequence
  Description of Artificial Sequence: Synthetic oligonucleotide
  Sense strand starting at position 299 of SEQ ID NO: 915105
gaaacaagaugucuagcuu

SEQ ID NO: 1054101 - RNA, 19 nt, Artificial Sequence
  Description of Artificial Sequence: Synthetic oligonucleotide
  Antisense strand to SEQ ID NO: 1054100
aagcuagacaucuuguuuc

SEQ ID NO: 1054102 - RNA, 19 nt, Artificial Sequence
  Description of Artificial Sequence: Synthetic oligonucleotide
  Sense strand starting at position 1037 of SEQ ID NO: 915105
gagcuaagauauguaaucu

SEQ ID NO: 1054103 - RNA, 19 nt, Artificial Sequence
  Description of Artificial Sequence: Synthetic oligonucleotide
  Antisense strand to SEQ ID NO: 1054102
agauuacauaucuuagcuc

SEQ ID NO: 1054104 - RNA, 19 nt, Artificial Sequence
  Description of Artificial Sequence: Synthetic oligonucleotide
  Sense strand starting at position 1062 of SEQ ID NO: 915105
gugucuauuugcucugaga

SEQ ID NO: 1054105 - RNA, 19 nt, Artificial Sequence
  Description of Artificial Sequence: Synthetic oligonucleotide
  Antisense strand to SEQ ID NO: 1054104
ucucagagcaaauagacac

SEQ ID NO: 1054106 - RNA, 19 nt, Artificial Sequence
  Description of Artificial Sequence: Synthetic oligonucleotide
  Sense strand starting at position 2020 of SEQ ID NO: 915105
ucucucccucugggaauau

SEQ ID NO: 1054107 - RNA, 19 nt, Artificial Sequence
  Description of Artificial Sequence: Synthetic oligonucleotide
  Antisense strand to SEQ ID NO: 1054106
auauucccagagggagaga

SEQ ID NO: 1054108 - RNA, 19 nt, Artificial Sequence
  Description of Artificial Sequence: Synthetic oligonucleotide
  Sense strand starting at position 2075 of SEQ ID NO: 915105
gagaauccauucucugugu

SEQ ID NO: 1054109 - RNA, 19 nt, Artificial Sequence
  Description of Artificial Sequence: Synthetic oligonucleotide
  Antisense strand to SEQ ID NO: 1054108
acacagagaauggauucuc

SEQ ID NO: 1054110 - RNA, 19 nt, Artificial Sequence
  Description of Artificial Sequence: Synthetic oligonucleotide
  Sense strand starting at position 2078 of SEQ ID NO: 915105
aauccauucucugugugga

SEQ ID NO: 1054111 - RNA, 19 nt, Artificial Sequence
  Description of Artificial Sequence: Synthetic oligonucleotide
  Antisense strand to SEQ ID NO: 1054110
uccacacagagaauggauu

SEQ ID NO: 1054112 - RNA, 19 nt, Artificial Sequence
  Description of Artificial Sequence: Synthetic oligonucleotide
  Sense strand starting at position 2079 of SEQ ID NO: 915105
auccauucucuguguggaa

SEQ ID NO: 1054113 - RNA, 19 nt, Artificial Sequence
  Description of Artificial Sequence: Synthetic oligonucleotide
  Antisense strand to SEQ ID NO: 1054112
uuccacacagagaauggau

SEQ ID NO: 1054114 - RNA, 19 nt, Artificial Sequence
  Description of Artificial Sequence: Synthetic oligonucleotide
  Sense strand starting at position 2080 of SEQ ID NO: 915105
uccauucucuguguggaaa

SEQ ID NO: 1054115 - RNA, 19 nt, Artificial Sequence
  Description of Artificial Sequence: Synthetic oligonucleotide
  Antisense strand to SEQ ID NO: 1054114
uuuccacacagagaaugga

SEQ ID NO: 1054116 - RNA, 19 nt, Artificial Sequence
  Description of Artificial Sequence: Synthetic oligonucleotide
  Sense strand starting at position 2081 of SEQ ID NO: 915105
ccauucucuguguggaaac

SEQ ID NO: 1054117 - RNA, 19 nt, Artificial Sequence
  Description of Artificial Sequence: Synthetic oligonucleotide
  Antisense strand to SEQ ID NO: 1054116
guuuccacacagagaaugg

SEQ ID NO: 1054118 - RNA, 19 nt, Artificial Sequence
  Description of Artificial Sequence: Synthetic oligonucleotide
  Sense strand starting at position 2101 of SEQ ID NO: 915105
gcaucaagcagguagauaa

SEQ ID NO: 1054119 - RNA, 19 nt, Artificial Sequence
  Description of Artificial Sequence: Synthetic oligonucleotide
  Antisense strand to SEQ ID NO: 1054118
uuaucuaccugcuugaugc

SEQ ID NO: 1054120 - RNA, 19 nt, Artificial Sequence
  Description of Artificial Sequence: Synthetic oligonucleotide
  Sense strand starting at position 2135 of SEQ ID NO: 915105
ggacuuugcuuguuaacaa

SEQ ID NO: 1054121 - RNA, 19 nt, Artificial Sequence
  Description of Artificial Sequence: Synthetic oligonucleotide
  Antisense strand to SEQ ID NO: 1054120
uuguuaacaagcaaagucc

SEQ ID NO: 1054122 - RNA, 19 nt, Artificial Sequence
  Description of Artificial Sequence: Synthetic oligonucleotide
  Sense strand starting at position 2177 of SEQ ID NO: 915105
gugauuuccuagucuuucu

SEQ ID NO: 1054123 - RNA, 19 nt, Artificial Sequence
  Description of Artificial Sequence: Synthetic oligonucleotide
  Antisense strand to SEQ ID NO: 1054122
agaaagacuaggaaaucac

SEQ ID NO: 1054124 - RNA, 19 nt, Artificial Sequence
  Description of Artificial Sequence: Synthetic oligonucleotide
  Sense strand starting at position 2216 of SEQ ID NO: 915105
cagagacauaugcggaaga

SEQ ID NO: 1054125 - RNA, 19 nt, Artificial Sequence
  Description of Artificial Sequence: Synthetic oligonucleotide
  Antisense strand to SEQ ID NO: 1054124
ucuuccgcauaugucucug

SEQ ID NO: 1054126 - RNA, 19 nt, Artificial Sequence
  Description of Artificial Sequence: Synthetic oligonucleotide
  Sense strand starting at position 2240 of SEQ ID NO: 915105
ggagaaacgcauugucuua

SEQ ID NO: 1054127 - RNA, 19 nt, Artificial Sequence
  Description of Artificial Sequence: Synthetic oligonucleotide
  Antisense strand to SEQ ID NO: 1054126
uaagacaaugcguuucucc

SEQ ID NO: 1054128 - RNA, 19 nt, Artificial Sequence
  Description of Artificial Sequence: Synthetic oligonucleotide
  Sense strand starting at position 2242 of SEQ ID NO: 915105
agaaacgcauugucuuaga

SEQ ID NO: 1054129 - RNA, 19 nt, Artificial Sequence
  Description of Artificial Sequence: Synthetic oligonucleotide
  Antisense strand to SEQ ID NO: 1054128
ucuaagacaaugcguuucu

SEQ ID NO: 1054130 - RNA, 19 nt, Artificial Sequence
  Description of Artificial Sequence: Synthetic oligonucleotide
  Sense strand starting at position 2420 of SEQ ID NO: 915105
gggaucauucuccaagcuu

SEQ ID NO: 1054131 - RNA, 19 nt, Artificial Sequence
  Description of Artificial Sequence: Synthetic oligonucleotide
  Antisense strand to SEQ ID NO: 1054130
aagcuuggagaaugauccc

SEQ ID NO: 1054132 - RNA, 19 nt, Artificial Sequence
  Description of Artificial Sequence: Synthetic oligonucleotide
  Sense strand starting at position 2849 of SEQ ID NO: 915105
aauuguuaguggcugggaa

SEQ ID NO: 1054133 - RNA, 19 nt, Artificial Sequence
  Description of Artificial Sequence: Synthetic oligonucleotide
  Antisense strand to SEQ ID NO: 1054132
uucccagccacuaacaauu

SEQ ID NO: 1054134 - RNA, 19 nt, Artificial Sequence
  Description of Artificial Sequence: Synthetic oligonucleotide
  Sense strand starting at position 2900 of SEQ ID NO: 915105
uuucuaguuuccucauaug

SEQ ID NO: 1054135 - RNA, 19 nt, Artificial Sequence
  Description of Artificial Sequence: Synthetic oligonucleotide
  Antisense strand to SEQ ID NO: 1054134
cauaugaggaaacuagaaa

SEQ ID NO: 1054136 - RNA, 19 nt, Artificial Sequence
  Description of Artificial Sequence: Synthetic oligonucleotide
  Sense strand starting at position 3026 of SEQ ID NO: 915105
aauaaaugacagugagucu

SEQ ID NO: 1054137 - RNA, 19 nt, Artificial Sequence
  Description of Artificial Sequence: Synthetic oligonucleotide
  Antisense strand to SEQ ID NO: 1054136
agacucacugucauuuauu

SEQ ID NO: 1054138 - RNA, 19 nt, Artificial Sequence
  Description of Artificial Sequence: Synthetic oligonucleotide
  Sense strand starting at position 3029 of SEQ ID NO: 915105
aaaugacagugagucuuau

SEQ ID NO: 1054139 - RNA, 19 nt, Artificial Sequence
  Description of Artificial Sequence: Synthetic oligonucleotide
  Antisense strand to SEQ ID NO: 1054138
auaagacucacugucauuu

SEQ ID NO: 1054140 - RNA, 19 nt, Artificial Sequence
  Description of Artificial Sequence: Synthetic oligonucleotide
  Sense strand starting at position 3041 of SEQ ID NO: 915105
gucuuaucacauuaugccu

SEQ ID NO: 1054141 - RNA, 19 nt, Artificial Sequence
  Description of Artificial Sequence: Synthetic oligonucleotide
  Antisense strand to SEQ ID NO: 1054140
aggcauaaugugauaagac

SEQ ID NO: 1054142 - RNA, 19 nt, Artificial Sequence
  Description of Artificial Sequence: Synthetic oligonucleotide
  Sense strand starting at position 3153 of SEQ ID NO: 915105
agagcuaggucuucuugga

SEQ ID NO: 1054143 - RNA, 19 nt, Artificial Sequence
  Description of Artificial Sequence: Synthetic oligonucleotide
  Antisense strand to SEQ ID NO: 1054142
uccaagaagaccuagcucu

SEQ ID NO: 1054144 - RNA, 19 nt, Artificial Sequence
  Description of Artificial Sequence: Synthetic oligonucleotide
  Sense strand starting at position 3304 of SEQ ID NO: 915105
uccagagagcaucaagguu

SEQ ID NO: 1054145 - RNA, 19 nt, Artificial Sequence
  Description of Artificial Sequence: Synthetic oligonucleotide
  Antisense strand to SEQ ID NO: 1054144
aaccuugaugcucucugga

SEQ ID NO: 1054146 - RNA, 19 nt, Artificial Sequence
  Description of Artificial Sequence: Synthetic oligonucleotide
  Sense strand starting at position 3482 of SEQ ID NO: 915105
uaauauuggcuuuguuaga

SEQ ID NO: 1054147 - RNA, 19 nt, Artificial Sequence
  Description of Artificial Sequence: Synthetic oligonucleotide
  Antisense strand to SEQ ID NO: 1054146
ucuaacaaagccaauauua

SEQ ID NO: 1054148 - RNA, 19 nt, Artificial Sequence
  Description of Artificial Sequence: Synthetic oligonucleotide
  Sense strand starting at position 3483 of SEQ ID NO: 915105
aauauuggcuuuguuagau

SEQ ID NO: 1054149 - RNA, 19 nt, Artificial Sequence
  Description of Artificial Sequence: Synthetic oligonucleotide
  Antisense strand to SEQ ID NO: 1054148
aucuaacaaagccaauauu

SEQ ID NO: 1054150 - RNA, 19 nt, Artificial Sequence
  Description of Artificial Sequence: Synthetic oligonucleotide
  Sense strand starting at position 3553 of SEQ ID NO: 915105
gguaaugaaugaucucaca

SEQ ID NO: 1054151 - RNA, 19 nt, Artificial Sequence
  Description of Artificial Sequence: Synthetic oligonucleotide
  Antisense strand to SEQ ID NO: 1054150
ugugagaucauucauuacc

SEQ ID NO: 1054152 - RNA, 19 nt, Artificial Sequence
  Description of Artificial Sequence: Synthetic oligonucleotide
  Sense strand starting at position 3719 of SEQ ID NO: 915105
agguucuuugcuuaauauu

SEQ ID NO: 1054153 - RNA, 19 nt, Artificial Sequence
  Description of Artificial Sequence: Synthetic oligonucleotide
  Antisense strand to SEQ ID NO: 1054152
aauauuaagcaaagaaccu

SEQ ID NO: 1054154 - RNA, 19 nt, Artificial Sequence
  Description of Artificial Sequence: Synthetic oligonucleotide
  Sense strand starting at position 3765 of SEQ ID NO: 915105
ucaggagucuuacuaauug

SEQ ID NO: 1054155 - RNA, 19 nt, Artificial Sequence
  Description of Artificial Sequence: Synthetic oligonucleotide
  Antisense strand to SEQ ID NO: 1054154
caauuaguaagacuccuga

SEQ ID NO: 1054156 - RNA, 19 nt, Artificial Sequence
  Description of Artificial Sequence: Synthetic oligonucleotide
  Sense strand starting at position 3790 of SEQ ID NO: 915105
gggcaaauacuaugaaacu

SEQ ID NO: 1054157 - RNA, 19 nt, Artificial Sequence
  Description of Artificial Sequence: Synthetic oligonucleotide
  Antisense strand to SEQ ID NO: 1054156
aguuucauaguauuugccc

SEQ ID NO: 1054158 - RNA, 19 nt, Artificial Sequence
  Description of Artificial Sequence: Synthetic oligonucleotide
  Sense strand starting at position 3809 of SEQ ID NO: 915105
uguucaccagugugagaga

SEQ ID NO: 1054159 - RNA, 19 nt, Artificial Sequence
  Description of Artificial Sequence: Synthetic oligonucleotide
  Antisense strand to SEQ ID NO: 1054158
ucucucacacuggugaaca

SEQ ID NO: 1054160 - RNA, 19 nt, Artificial Sequence
  Description of Artificial Sequence: Synthetic oligonucleotide
  Sense strand starting at position 3881 of SEQ ID NO: 915105
ggcuuaagcuaguuuaaag

SEQ ID NO: 1054161 - RNA, 19 nt, Artificial Sequence
  Description of Artificial Sequence: Synthetic oligonucleotide
  Antisense strand to SEQ ID NO: 1054160
cuuuaaacuagcuuaagcc

SEQ ID NO: 1054162 - RNA, 19 nt, Artificial Sequence
  Description of Artificial Sequence: Synthetic oligonucleotide
  Sense strand starting at position 177 of SEQ ID NO: 915106
gccugugagaagcaagaau

SEQ ID NO: 1054163 - RNA, 19 nt, Artificial Sequence
  Description of Artificial Sequence: Synthetic oligonucleotide
  Antisense strand to SEQ ID NO: 1054162
auucuugcuucucacaggc

SEQ ID NO: 1054164 - RNA, 19 nt, Artificial Sequence
  Description of Artificial Sequence: Synthetic oligonucleotide
  Sense strand starting at position 308 of SEQ ID NO: 915106
augugauaagugcauaaac

SEQ ID NO: 1054165 - RNA, 19 nt, Artificial Sequence
  Description of Artificial Sequence: Synthetic oligonucleotide
  Antisense strand to SEQ ID NO: 1054164
guuuaugcacuuaucacau

SEQ ID NO: 1054166 - RNA, 19 nt, Artificial Sequence
  Description of Artificial Sequence: Synthetic oligonucleotide
  Sense strand starting at position 310 of SEQ ID NO: 915106
gugauaagugcauaaacua

SEQ ID NO: 1054167 - RNA, 19 nt, Artificial Sequence
  Description of Artificial Sequence: Synthetic oligonucleotide
  Antisense strand to SEQ ID NO: 1054166
uaguuuaugcacuuaucac

SEQ ID NO: 1054168 - RNA, 19 nt, Artificial Sequence
  Description of Artificial Sequence: Synthetic oligonucleotide
  Sense strand starting at position 341 of SEQ ID NO: 915106
cuguaaaucguacauuauc

SEQ ID NO: 1054169 - RNA, 19 nt, Artificial Sequence
  Description of Artificial Sequence: Synthetic oligonucleotide
  Antisense strand to SEQ ID NO: 1054168
gauaauguacgauuuacag

SEQ ID NO: 1054170 - RNA, 19 nt, Artificial Sequence
  Description of Artificial Sequence: Synthetic oligonucleotide
  Sense strand starting at position 350 of SEQ ID NO: 915106
guacauuaucauugcugga

SEQ ID NO: 1054171 - RNA, 19 nt, Artificial Sequence
  Description of Artificial Sequence: Synthetic oligonucleotide
  Antisense strand to SEQ ID NO: 1054170
uccagcaaugauaauguac

SEQ ID NO: 1054172 - RNA, 19 nt, Artificial Sequence
  Description of Artificial Sequence: Synthetic oligonucleotide
  Sense strand starting at position 352 of SEQ ID NO: 915106
acauuaucauugcuggaua

SEQ ID NO: 1054173 - RNA, 19 nt, Artificial Sequence
  Description of Artificial Sequence: Synthetic oligonucleotide
  Antisense strand to SEQ ID NO: 1054172
uauccagcaaugauaaugu

SEQ ID NO: 1054174 - RNA, 19 nt, Artificial Sequence
  Description of Artificial Sequence: Synthetic oligonucleotide
  Sense strand starting at position 371 of SEQ ID NO: 915106
guaaucuauucugugaaua

SEQ ID NO: 1054175 - RNA, 19 nt, Artificial Sequence
  Description of Artificial Sequence: Synthetic oligonucleotide
  Antisense strand to SEQ ID NO: 1054174
uauucacagaauagauuac

SEQ ID NO: 1054176 - RNA, 19 nt, Artificial Sequence
  Description of Artificial Sequence: Synthetic oligonucleotide
  Sense strand starting at position 479 of SEQ ID NO: 915106
ccaauacauguauguaaau

SEQ ID NO: 1054177 - RNA, 19 nt, Artificial Sequence
  Description of Artificial Sequence: Synthetic oligonucleotide
  Antisense strand to SEQ ID NO: 1054176
auuuacauacauguauugg

SEQ ID NO: 1054178 - RNA, 19 nt, Artificial Sequence
  Description of Artificial Sequence: Synthetic oligonucleotide
  Sense strand starting at position 543 of SEQ ID NO: 915106
ugcuaaaugcuacagacuu

SEQ ID NO: 1054179 - RNA, 19 nt, Artificial Sequence
  Description of Artificial Sequence: Synthetic oligonucleotide
  Antisense strand to SEQ ID NO: 1054178
aagucuguagcauuuagca

SEQ ID NO: 1054180 - RNA, 19 nt, Artificial Sequence
  Description of Artificial Sequence: Synthetic oligonucleotide
  Sense strand starting at position 567 of SEQ ID NO: 915106
uguauacacguuuggauuu

SEQ ID NO: 1054181 - RNA, 19 nt, Artificial Sequence
  Description of Artificial Sequence: Synthetic oligonucleotide
  Antisense strand to SEQ ID NO: 1054180
aaauccaaacguguauaca

SEQ ID NO: 1054182 - RNA, 19 nt, Artificial Sequence
  Description of Artificial Sequence: Synthetic oligonucleotide
  Sense strand starting at position 686 of SEQ ID NO: 915106
uuugaacgaugucuccaua

SEQ ID NO: 1054183 - RNA, 19 nt, Artificial Sequence
  Description of Artificial Sequence: Synthetic oligonucleotide
  Antisense strand to SEQ ID NO: 1054182
uauggagacaucguucaaa

SEQ ID NO: 1054184 - RNA, 19 nt, Artificial Sequence
  Description of Artificial Sequence: Synthetic oligonucleotide
  Sense strand starting at position 689 of SEQ ID NO: 915106
gaacgaugucuccauaaug

SEQ ID NO: 1054185 - RNA, 19 nt, Artificial Sequence
  Description of Artificial Sequence: Synthetic oligonucleotide
  Antisense strand to SEQ ID NO: 1054184
cauuauggagacaucguuc

SEQ ID NO: 1054186 - RNA, 19 nt, Artificial Sequence
  Description of Artificial Sequence: Synthetic oligonucleotide
  Sense strand starting at position 787 of SEQ ID NO: 915106
accaucuaucccggagauu

SEQ ID NO: 1054187 - RNA, 19 nt, Artificial Sequence
  Description of Artificial Sequence: Synthetic oligonucleotide
  Antisense strand to SEQ ID NO: 1054186
aaucuccgggauagauggu

SEQ ID NO: 1054188 - RNA, 19 nt, Artificial Sequence
  Description of Artificial Sequence: Synthetic oligonucleotide
  Sense strand starting at position 788 of SEQ ID NO: 915106
ccaucuaucccggagauuc

SEQ ID NO: 1054189 - RNA, 19 nt, Artificial Sequence
  Description of Artificial Sequence: Synthetic oligonucleotide
  Antisense strand to SEQ ID NO: 1054188
gaaucuccgggauagaugg

SEQ ID NO: 1054190 - RNA, 19 nt, Artificial Sequence
  Description of Artificial Sequence: Synthetic oligonucleotide
  Sense strand starting at position 960 of SEQ ID NO: 915106
uuggaauaauguuuaacac

SEQ ID NO: 1054191 - RNA, 19 nt, Artificial Sequence
  Description of Artificial Sequence: Synthetic oligonucleotide
  Antisense strand to SEQ ID NO: 1054190
guguuaaacauuauuccaa

SEQ ID NO: 1054192 - RNA, 19 nt, Artificial Sequence
  Description of Artificial Sequence: Synthetic oligonucleotide
  Sense strand starting at position 1984 of SEQ ID NO: 915106
gaggcuggucuuggacauu

SEQ ID NO: 1054193 - RNA, 19 nt, Artificial Sequence
  Description of Artificial Sequence: Synthetic oligonucleotide
  Antisense strand to SEQ ID NO: 1054192
aauguccaagaccagccuc

SEQ ID NO: 1054194 - RNA, 19 nt, Artificial Sequence
  Description of Artificial Sequence: Synthetic oligonucleotide
  Sense strand starting at position 2077 of SEQ ID NO: 915106
gaagucauucucuauguga

SEQ ID NO: 1054195 - RNA, 19 nt, Artificial Sequence
  Description of Artificial Sequence: Synthetic oligonucleotide
  Antisense strand to SEQ ID NO: 1054194
ucacauagagaaugacuuc

SEQ ID NO: 1054196 - RNA, 19 nt, Artificial Sequence
  Description of Artificial Sequence: Synthetic oligonucleotide
  Sense strand starting at position 2079 of SEQ ID NO: 915106
agucauucucuaugugaaa

SEQ ID NO: 1054197 - RNA, 19 nt, Artificial Sequence
  Description of Artificial Sequence: Synthetic oligonucleotide
  Antisense strand to SEQ ID NO: 1054196
uuucacauagagaaugacu

SEQ ID NO: 1054198 - RNA, 19 nt, Artificial Sequence
  Description of Artificial Sequence: Synthetic oligonucleotide
  Sense strand starting at position 2168 of SEQ ID NO: 915106
gugauuuccuagucucucu

SEQ ID NO: 1054199 - RNA, 19 nt, Artificial Sequence
  Description of Artificial Sequence: Synthetic oligonucleotide
  Antisense strand to SEQ ID NO: 1054198
agagagacuaggaaaucac

SEQ ID NO: 1054200 - RNA, 19 nt, Artificial Sequence
  Description of Artificial Sequence: Synthetic oligonucleotide
  Sense strand starting at position 2274 of SEQ ID NO: 915106
agaauaaauuaggagaaac

SEQ ID NO: 1054201 - RNA, 19 nt, Artificial Sequence
  Description of Artificial Sequence: Synthetic oligonucleotide
  Antisense strand to SEQ ID NO: 1054200
guuucuccuaauuuauucu

SEQ ID NO: 1054202 - RNA, 19 nt, Artificial Sequence
  Description of Artificial Sequence: Synthetic oligonucleotide
  Sense strand starting at position 2288 of SEQ ID NO: 915106
gaaacacauugucucgauu

SEQ ID NO: 1054203 - RNA, 19 nt, Artificial Sequence
  Description of Artificial Sequence: Synthetic oligonucleotide
  Antisense strand to SEQ ID NO: 1054202
aaucgagacaauguguuuc

SEQ ID NO: 1054204 - RNA, 19 nt, Artificial Sequence
  Description of Artificial Sequence: Synthetic oligonucleotide
  Sense strand starting at position 2546 of SEQ ID NO: 915106
guuuguuggcaggacauau

SEQ ID NO: 1054205 - RNA, 19 nt, Artificial Sequence
  Description of Artificial Sequence: Synthetic oligonucleotide
  Antisense strand to SEQ ID NO: 1054204
auauguccugccaacaaac

SEQ ID NO: 1054206 - RNA, 19 nt, Artificial Sequence
  Description of Artificial Sequence: Synthetic oligonucleotide
  Sense strand starting at position 2633 of SEQ ID NO: 915106
acagguuacuucuuugaaa

SEQ ID NO: 1054207 - RNA, 19 nt, Artificial Sequence
  Description of Artificial Sequence: Synthetic oligonucleotide
  Antisense strand to SEQ ID NO: 1054206
uuucaaagaaguaaccugu

SEQ ID NO: 1054208 - RNA, 19 nt, Artificial Sequence
  Description of Artificial Sequence: Synthetic oligonucleotide
  Sense strand starting at position 2635 of SEQ ID NO: 915106
agguuacuucuuugaaacc

SEQ ID NO: 1054209 - RNA, 19 nt, Artificial Sequence
  Description of Artificial Sequence: Synthetic oligonucleotide
  Antisense strand to SEQ ID NO: 1054208
gguuucaaagaaguaaccu

SEQ ID NO: 1054210 - RNA, 19 nt, Artificial Sequence
  Description of Artificial Sequence: Synthetic oligonucleotide
  Sense strand starting at position 2670 of SEQ ID NO: 915106
uccaguuugcuaugacaaa

SEQ ID NO: 1054211 - RNA, 19 nt, Artificial Sequence
  Description of Artificial Sequence: Synthetic oligonucleotide
  Antisense strand to SEQ ID NO: 1054210
uuugucauagcaaacugga

SEQ ID NO: 1054212 - RNA, 19 nt, Artificial Sequence
  Description of Artificial Sequence: Synthetic oligonucleotide
  Sense strand starting at position 2777 of SEQ ID NO: 915106
acagaaaguguauaccagu

SEQ ID NO: 1054213 - RNA, 19 nt, Artificial Sequence
  Description of Artificial Sequence: Synthetic oligonucleotide
  Antisense strand to SEQ ID NO: 1054212
acugguauacacuuucugu

SEQ ID NO: 1054214 - RNA, 19 nt, Artificial Sequence
  Description of Artificial Sequence: Synthetic oligonucleotide
  Sense strand starting at position 2898 of SEQ ID NO: 915106
auuaguagcaaggaguauu

SEQ ID NO: 1054215 - RNA, 19 nt, Artificial Sequence
  Description of Artificial Sequence: Synthetic oligonucleotide
  Antisense strand to SEQ ID NO: 1054214
aauacuccuugcuacuaau

SEQ ID NO: 1054216 - RNA, 19 nt, Artificial Sequence
  Description of Artificial Sequence: Synthetic oligonucleotide
  Sense strand starting at position 2935 of SEQ ID NO: 915106
aguaaaucauucucuaguu

SEQ ID NO: 1054217 - RNA, 19 nt, Artificial Sequence
  Description of Artificial Sequence: Synthetic oligonucleotide
  Antisense strand to SEQ ID NO: 1054216
aacuagagaaugauuuacu

SEQ ID NO: 1054218 - RNA, 19 nt, Artificial Sequence
  Description of Artificial Sequence: Synthetic oligonucleotide
  Sense strand starting at position 2955 of SEQ ID NO: 915106
ccucuuauguuauuuggca

SEQ ID NO: 1054219 - RNA, 19 nt, Artificial Sequence
  Description of Artificial Sequence: Synthetic oligonucleotide
  Antisense strand to SEQ ID NO: 1054218
ugccaaauaacauaagagg

SEQ ID NO: 1054220 - RNA, 19 nt, Artificial Sequence
  Description of Artificial Sequence: Synthetic oligonucleotide
  Sense strand starting at position 2956 of SEQ ID NO: 915106
cucuuauguuauuuggcau

SEQ ID NO: 1054221 - RNA, 19 nt, Artificial Sequence
  Description of Artificial Sequence: Synthetic oligonucleotide
  Antisense strand to SEQ ID NO: 1054220
augccaaauaacauaagag

SEQ ID NO: 1054222 - RNA, 19 nt, Artificial Sequence
  Description of Artificial Sequence: Synthetic oligonucleotide
  Sense strand starting at position 2983 of SEQ ID NO: 915106
ucaccuacucaccgagaaa

SEQ ID NO: 1054223 - RNA, 19 nt, Artificial Sequence
  Description of Artificial Sequence: Synthetic oligonucleotide
  Antisense strand to SEQ ID NO: 1054222
uuucucggugaguagguga

SEQ ID NO: 1054224 - RNA, 19 nt, Artificial Sequence
  Description of Artificial Sequence: Synthetic oligonucleotide
  Sense strand starting at position 3055 of SEQ ID NO: 915106
gguaauaacugcucaauaa

SEQ ID NO: 1054225 - RNA, 19 nt, Artificial Sequence
  Description of Artificial Sequence: Synthetic oligonucleotide
  Antisense strand to SEQ ID NO: 1054224
uuauugagcaguuauuacc

SEQ ID NO: 1054226 - RNA, 19 nt, Artificial Sequence
  Description of Artificial Sequence: Synthetic oligonucleotide
  Sense strand starting at position 3211 of SEQ ID NO: 915106
acuauuguaucccugauac

SEQ ID NO: 1054227 - RNA, 19 nt, Artificial Sequence
  Description of Artificial Sequence: Synthetic oligonucleotide
  Antisense strand to SEQ ID NO: 1054226
guaucagggauacaauagu

SEQ ID NO: 1054228 - RNA, 19 nt, Artificial Sequence
  Description of Artificial Sequence: Synthetic oligonucleotide
  Sense strand starting at position 3292 of SEQ ID NO: 915106
guaagaaucucagcauaac

SEQ ID NO: 1054229 - RNA, 19 nt, Artificial Sequence
  Description of Artificial Sequence: Synthetic oligonucleotide
  Antisense strand to SEQ ID NO: 1054228
guuaugcugagauucuuac

SEQ ID NO: 1054230 - RNA, 19 nt, Artificial Sequence
  Description of Artificial Sequence: Synthetic oligonucleotide
  Sense strand starting at position 3471 of SEQ ID NO: 915106
gugccagcugucuugcauu

SEQ ID NO: 1054231 - RNA, 19 nt, Artificial Sequence
  Description of Artificial Sequence: Synthetic oligonucleotide
  Antisense strand to SEQ ID NO: 1054230
aaugcaagacagcuggcac

SEQ ID NO: 1054232 - RNA, 19 nt, Artificial Sequence
  Description of Artificial Sequence: Synthetic oligonucleotide
  Sense strand starting at position 3594 of SEQ ID NO: 915106
gguaaugaaucaucucaca

SEQ ID NO: 1054233 - RNA, 19 nt, Artificial Sequence
  Description of Artificial Sequence: Synthetic oligonucleotide
  Antisense strand to SEQ ID NO: 1054232
ugugagaugauucauuacc

SEQ ID NO: 1054234 - RNA, 19 nt, Artificial Sequence
  Description of Artificial Sequence: Synthetic oligonucleotide
  Sense strand starting at position 3799 of SEQ ID NO: 915106
ucaggauucuuacuaauug

SEQ ID NO: 1054235 - RNA, 19 nt, Artificial Sequence
  Description of Artificial Sequence: Synthetic oligonucleotide
  Antisense strand to SEQ ID NO: 1054234
caauuaguaagaauccuga

SEQ ID NO: 1054236 - RNA, 19 nt, Artificial Sequence
  Description of Artificial Sequence: Synthetic oligonucleotide
  Sense strand starting at position 3811 of SEQ ID NO: 915106
cuaauuguucagugggaga

SEQ ID NO: 1054237 - RNA, 19 nt, Artificial Sequence
  Description of Artificial Sequence: Synthetic oligonucleotide
  Antisense strand to SEQ ID NO: 1054236
ucucccacugaacaauuag

SEQ ID NO: 1054238 - RNA, 19 nt, Artificial Sequence
  Description of Artificial Sequence: Synthetic oligonucleotide
  Sense strand starting at position 3930 of SEQ ID NO: 915106
aaaggaagguuugucaaau

SEQ ID NO: 1054239 - RNA, 19 nt, Artificial Sequence
  Description of Artificial Sequence: Synthetic oligonucleotide
  Antisense strand to SEQ ID NO: 1054238
auuugacaaaccuuccuuu

SEQ ID NO: 1054240 - RNA, 19 nt, Artificial Sequence
  Description of Artificial Sequence: Synthetic oligonucleotide
  Sense strand starting at position 3931 of SEQ ID NO: 915106
aaggaagguuugucaaaua

SEQ ID NO: 1054241 - RNA, 19 nt, Artificial Sequence
  Description of Artificial Sequence: Synthetic oligonucleotide
  Antisense strand to SEQ ID NO: 1054240
uauuugacaaaccuuccuu

SEQ ID NO: 1054242 - RNA, 19 nt, Artificial Sequence
  Description of Artificial Sequence: Synthetic oligonucleotide
  Sense strand starting at position 44 of SEQ ID NO: 915107
gcucuuaugggagagguaa

SEQ ID NO: 1054243 - RNA, 19 nt, Artificial Sequence
  Description of Artificial Sequence: Synthetic oligonucleotide
  Antisense strand to SEQ ID NO: 1054242
uuaccucucccauaagagc

SEQ ID NO: 1054244 - RNA, 19 nt, Artificial Sequence
  Description of Artificial Sequence: Synthetic oligonucleotide
  Sense strand starting at position 46 of SEQ ID NO: 915107
ucuuaugggagagguaauu

SEQ ID NO: 1054245 - RNA, 19 nt, Artificial Sequence
  Description of Artificial Sequence: Synthetic oligonucleotide
  Antisense strand to SEQ ID NO: 1054244
aauuaccucucccauaaga

SEQ ID NO: 1054246 - RNA, 19 nt, Artificial Sequence
  Description of Artificial Sequence: Synthetic oligonucleotide
  Sense strand starting at position 55 of SEQ ID NO: 915107
agagguaauugcuuguaag

SEQ ID NO: 1054247 - RNA, 19 nt, Artificial Sequence
  Description of Artificial Sequence: Synthetic oligonucleotide
  Antisense strand to SEQ ID NO: 1054246
cuuacaagcaauuaccucu

SEQ ID NO: 1054248 - RNA, 19 nt, Artificial Sequence
  Description of Artificial Sequence: Synthetic oligonucleotide
  Sense strand starting at position 56 of SEQ ID NO: 915107
gagguaauugcuuguaaga

SEQ ID NO: 1054249 - RNA, 19 nt, Artificial Sequence
  Description of Artificial Sequence: Synthetic oligonucleotide
  Antisense strand to SEQ ID NO: 1054248
ucuuacaagcaauuaccuc

SEQ ID NO: 1054250 - RNA, 19 nt, Artificial Sequence
  Description of Artificial Sequence: Synthetic oligonucleotide
  Sense strand starting at position 70 of SEQ ID NO: 915107
uaagaacuaucccuggagu

SEQ ID NO: 1054251 - RNA, 19 nt, Artificial Sequence
  Description of Artificial Sequence: Synthetic oligonucleotide
  Antisense strand to SEQ ID NO: 1054250
acuccagggauaguucuua

SEQ ID NO: 1054252 - RNA, 19 nt, Artificial Sequence
  Description of Artificial Sequence: Synthetic oligonucleotide
  Sense strand starting at position 71 of SEQ ID NO: 915107
aagaacuaucccuggaguc

SEQ ID NO: 1054253 - RNA, 19 nt, Artificial Sequence
  Description of Artificial Sequence: Synthetic oligonucleotide
  Antisense strand to SEQ ID NO: 1054252
gacuccagggauaguucuu

SEQ ID NO: 1054254 - RNA, 19 nt, Artificial Sequence
  Description of Artificial Sequence: Synthetic oligonucleotide
  Sense strand starting at position 73 of SEQ ID NO: 915107
gaacuaucccuggaguccu

SEQ ID NO: 1054255 - RNA, 19 nt, Artificial Sequence
  Description of Artificial Sequence: Synthetic oligonucleotide
  Antisense strand to SEQ ID NO: 1054254
aggacuccagggauaguuc

SEQ ID NO: 1054256 - RNA, 19 nt, Artificial Sequence
  Description of Artificial Sequence: Synthetic oligonucleotide
  Sense strand starting at position 143 of SEQ ID NO: 915107
guccacugugaauaccaua

SEQ ID NO: 1054257 - RNA, 19 nt, Artificial Sequence
  Description of Artificial Sequence: Synthetic oligonucleotide
  Antisense strand to SEQ ID NO: 1054256
uaugguauucacaguggac

SEQ ID NO: 1054258 - RNA, 19 nt, Artificial Sequence
  Description of Artificial Sequence: Synthetic oligonucleotide
  Sense strand starting at position 445 of SEQ ID NO: 915107
gguacauaguaggugauua

SEQ ID NO: 1054259 - RNA, 19 nt, Artificial Sequence
  Description of Artificial Sequence: Synthetic oligonucleotide
  Antisense strand to SEQ ID NO: 1054258
uaaucaccuacuauguacc

SEQ ID NO: 1054260 - RNA, 19 nt, Artificial Sequence
  Description of Artificial Sequence: Synthetic oligonucleotide
  Sense strand starting at position 449 of SEQ ID NO: 915107
cauaguaggugauuaguca

SEQ ID NO: 1054261 - RNA, 19 nt, Artificial Sequence
  Description of Artificial Sequence: Synthetic oligonucleotide
  Antisense strand to SEQ ID NO: 1054260
ugacuaaucaccuacuaug

SEQ ID NO: 1054262 - RNA, 19 nt, Artificial Sequence
  Description of Artificial Sequence: Synthetic oligonucleotide
  Sense strand starting at position 450 of SEQ ID NO: 915107
auaguaggugauuagucaa

SEQ ID NO: 1054263 - RNA, 19 nt, Artificial Sequence
  Description of Artificial Sequence: Synthetic oligonucleotide
  Antisense strand to SEQ ID NO: 1054262
uugacuaaucaccuacuau

SEQ ID NO: 1054264 - RNA, 19 nt, Artificial Sequence
  Description of Artificial Sequence: Synthetic oligonucleotide
  Sense strand starting at position 453 of SEQ ID NO: 915107
guaggugauuagucaauga

SEQ ID NO: 1054265 - RNA, 19 nt, Artificial Sequence
  Description of Artificial Sequence: Synthetic oligonucleotide
  Antisense strand to SEQ ID NO: 1054264
ucauugacuaaucaccuac

SEQ ID NO: 1054266 - RNA, 19 nt, Artificial Sequence
  Description of Artificial Sequence: Synthetic oligonucleotide
  Sense strand starting at position 457 of SEQ ID NO: 915107
gugauuagucaaugaaaga

SEQ ID NO: 1054267 - RNA, 19 nt, Artificial Sequence
  Description of Artificial Sequence: Synthetic oligonucleotide
  Antisense strand to SEQ ID NO: 1054266
ucuuucauugacuaaucac

SEQ ID NO: 1054268 - RNA, 19 nt, Artificial Sequence
  Description of Artificial Sequence: Synthetic oligonucleotide
  Sense strand starting at position 487 of SEQ ID NO: 915107
cccuuucuggcaugaagaa

SEQ ID NO: 1054269 - RNA, 19 nt, Artificial Sequence
  Description of Artificial Sequence: Synthetic oligonucleotide
  Antisense strand to SEQ ID NO: 1054268
uucuucaugccagaaaggg

SEQ ID NO: 1054270 - RNA, 19 nt, Artificial Sequence
  Description of Artificial Sequence: Synthetic oligonucleotide
  Sense strand starting at position 524 of SEQ ID NO: 915107
ggauguauggugcaaagga

SEQ ID NO: 1054271 - RNA, 19 nt, Artificial Sequence
  Description of Artificial Sequence: Synthetic oligonucleotide
  Antisense strand to SEQ ID NO: 1054270
uccuuugcaccauacaucc

SEQ ID NO: 1054272 - RNA, 19 nt, Artificial Sequence
  Description of Artificial Sequence: Synthetic oligonucleotide
  Sense strand starting at position 760 of SEQ ID NO: 915107
gcugcaaauccuuaaagua

SEQ ID NO: 1054273 - RNA, 19 nt, Artificial Sequence
  Description of Artificial Sequence: Synthetic oligonucleotide
  Antisense strand to SEQ ID NO: 1054272
uacuuuaaggauuugcagc

SEQ ID NO: 1054274 - RNA, 19 nt, Artificial Sequence
  Description of Artificial Sequence: Synthetic oligonucleotide
  Sense strand starting at position 942 of SEQ ID NO: 915107
uuuagaguucuuugacaca

SEQ ID NO: 1054275 - RNA, 19 nt, Artificial Sequence
  Description of Artificial Sequence: Synthetic oligonucleotide
  Antisense strand to SEQ ID NO: 1054274
ugugucaaagaacucuaaa

SEQ ID NO: 1054276 - RNA, 19 nt, Artificial Sequence
  Description of Artificial Sequence: Synthetic oligonucleotide
  Sense strand starting at position 1013 of SEQ ID NO: 915107
ggcugcuuuacggauaaug

SEQ ID NO: 1054277 - RNA, 19 nt, Artificial Sequence
  Description of Artificial Sequence: Synthetic oligonucleotide
  Antisense strand to SEQ ID NO: 1054276
cauuauccguaaagcagcc

SEQ ID NO: 1054278 - RNA, 19 nt, Artificial Sequence
  Description of Artificial Sequence: Synthetic oligonucleotide
  Sense strand starting at position 1075 of SEQ ID NO: 915107
aaagcaaaggguugaguaa

SEQ ID NO: 1054279 - RNA, 19 nt, Artificial Sequence
  Description of Artificial Sequence: Synthetic oligonucleotide
  Antisense strand to SEQ ID NO: 1054278
uuacucaacccuuugcuuu

SEQ ID NO: 1054280 - RNA, 19 nt, Artificial Sequence
  Description of Artificial Sequence: Synthetic oligonucleotide
  Sense strand starting at position 1417 of SEQ ID NO: 915107
gguugauuuccugguggug

SEQ ID NO: 1054281 - RNA, 19 nt, Artificial Sequence
  Description of Artificial Sequence: Synthetic oligonucleotide
  Antisense strand to SEQ ID NO: 1054280
caccaccaggaaaucaacc

SEQ ID NO: 1054282 - RNA, 19 nt, Artificial Sequence
  Description of Artificial Sequence: Synthetic oligonucleotide
  Sense strand starting at position 1729 of SEQ ID NO: 915107
agcagaguuccaggaaaga

SEQ ID NO: 1054283 - RNA, 19 nt, Artificial Sequence
  Description of Artificial Sequence: Synthetic oligonucleotide
  Antisense strand to SEQ ID NO: 1054282
ucuuuccuggaacucugcu

SEQ ID NO: 1054284 - RNA, 19 nt, Artificial Sequence
  Description of Artificial Sequence: Synthetic oligonucleotide
  Sense strand starting at position 1918 of SEQ ID NO: 915107
ugggcucagacugguugaa

SEQ ID NO: 1054285 - RNA, 19 nt, Artificial Sequence
  Description of Artificial Sequence: Synthetic oligonucleotide
  Antisense strand to SEQ ID NO: 1054284
uucaaccagucugagccca

SEQ ID NO: 1054286 - RNA, 19 nt, Artificial Sequence
  Description of Artificial Sequence: Synthetic oligonucleotide
  Sense strand starting at position 1920 of SEQ ID NO: 915107
ggcucagacugguugaaga

SEQ ID NO: 1054287 - RNA, 19 nt, Artificial Sequence
  Description of Artificial Sequence: Synthetic oligonucleotide
  Antisense strand to SEQ ID NO: 1054286
ucuucaaccagucugagcc

SEQ ID NO: 1054288 - RNA, 19 nt, Artificial Sequence
  Description of Artificial Sequence: Synthetic oligonucleotide
  Sense strand starting at position 2312 of SEQ ID NO: 915107
ccgcuuuauuucuuuagua

SEQ ID NO: 1054289 - RNA, 19 nt, Artificial Sequence
  Description of Artificial Sequence: Synthetic oligonucleotide
  Antisense strand to SEQ ID NO: 1054288
uacuaaagaaauaaagcgg

SEQ ID NO: 1054290 - RNA, 19 nt, Artificial Sequence
  Description of Artificial Sequence: Synthetic oligonucleotide
  Sense strand starting at position 2313 of SEQ ID NO: 915107
cgcuuuauuucuuuaguaa

SEQ ID NO: 1054291 - RNA, 19 nt, Artificial Sequence
  Description of Artificial Sequence: Synthetic oligonucleotide
  Antisense strand to SEQ ID NO: 1054290
uuacuaaagaaauaaagcg

SEQ ID NO: 1054292 - RNA, 19 nt, Artificial Sequence
  Description of Artificial Sequence: Synthetic oligonucleotide
  Sense strand starting at position 2331 of SEQ ID NO: 915107
aaagcaggaguguacaauu

SEQ ID NO: 1054293 - RNA, 19 nt, Artificial Sequence
  Description of Artificial Sequence: Synthetic oligonucleotide
  Antisense strand to SEQ ID NO: 1054292
aauuguacacuccugcuuu

SEQ ID NO: 1054294 - RNA, 19 nt, Artificial Sequence
  Description of Artificial Sequence: Synthetic oligonucleotide
  Sense strand starting at position 2384 of SEQ ID NO: 915107
aaucacggugcaugagaau

SEQ ID NO: 1054295 - RNA, 19 nt, Artificial Sequence
  Description of Artificial Sequence: Synthetic oligonucleotide
  Antisense strand to SEQ ID NO: 1054294
auucucaugcaccgugauu

SEQ ID NO: 1054296 - RNA, 19 nt, Artificial Sequence
  Description of Artificial Sequence: Synthetic oligonucleotide
  Sense strand starting at position 2390 of SEQ ID NO: 915107
ggugcaugagaaugaauuc

SEQ ID NO: 1054297 - RNA, 19 nt, Artificial Sequence
  Description of Artificial Sequence: Synthetic oligonucleotide
  Antisense strand to SEQ ID NO: 1054296
gaauucauucucaugcacc

SEQ ID NO: 1054298 - RNA, 19 nt, Artificial Sequence
  Description of Artificial Sequence: Synthetic oligonucleotide
  Sense strand starting at position 2410 of SEQ ID NO: 915107
cgauauaggguuugguaua

SEQ ID NO: 1054299 - RNA, 19 nt, Artificial Sequence
  Description of Artificial Sequence: Synthetic oligonucleotide
  Antisense strand to SEQ ID NO: 1054298
uauaccaaacccuauaucg

SEQ ID NO: 1054300 - RNA, 19 nt, Artificial Sequence
  Description of Artificial Sequence: Synthetic oligonucleotide
  Sense strand starting at position 2460 of SEQ ID NO: 915107
gacagucaucugcagaaau

SEQ ID NO: 1054301 - RNA, 19 nt, Artificial Sequence
  Description of Artificial Sequence: Synthetic oligonucleotide
  Antisense strand to SEQ ID NO: 1054300
auuucugcagaugacuguc

SEQ ID NO: 1054302 - RNA, 19 nt, Artificial Sequence
  Description of Artificial Sequence: Synthetic oligonucleotide
  Sense strand starting at position 2506 of SEQ ID NO: 915107
guagauguuccuugugaaa

SEQ ID NO: 1054303 - RNA, 19 nt, Artificial Sequence
  Description of Artificial Sequence: Synthetic oligonucleotide
  Antisense strand to SEQ ID NO: 1054302
uuucacaaggaacaucuac

SEQ ID NO: 1054304 - RNA, 19 nt, Artificial Sequence
  Description of Artificial Sequence: Synthetic oligonucleotide
  Sense strand starting at position 2578 of SEQ ID NO: 915107
gcuuguauuuaauuacagu

SEQ ID NO: 1054305 - RNA, 19 nt, Artificial Sequence
  Description of Artificial Sequence: Synthetic oligonucleotide
  Antisense strand to SEQ ID NO: 1054304
acuguaauuaaauacaagc

SEQ ID NO: 1054306 - RNA, 19 nt, Artificial Sequence
  Description of Artificial Sequence: Synthetic oligonucleotide
  Sense strand starting at position 2716 of SEQ ID NO: 915107
ugugaagcuugauuuguuu

SEQ ID NO: 1054307 - RNA, 19 nt, Artificial Sequence
  Description of Artificial Sequence: Synthetic oligonucleotide
  Antisense strand to SEQ ID NO: 1054306
aaacaaaucaagcuucaca

SEQ ID NO: 1054308 - RNA, 19 nt, Artificial Sequence
  Description of Artificial Sequence: Synthetic oligonucleotide
  Sense strand starting at position 2790 of SEQ ID NO: 915107
gaacgauuccagugaccua

SEQ ID NO: 1054309 - RNA, 19 nt, Artificial Sequence
  Description of Artificial Sequence: Synthetic oligonucleotide
  Antisense strand to SEQ ID NO: 1054308
uaggucacuggaaucguuc

SEQ ID NO: 1054310 - RNA, 19 nt, Artificial Sequence
  Description of Artificial Sequence: Synthetic oligonucleotide
  Sense strand starting at position 2869 of SEQ ID NO: 915107
aucauuacagauugaugua

SEQ ID NO: 1054311 - RNA, 19 nt, Artificial Sequence
  Description of Artificial Sequence: Synthetic oligonucleotide
  Antisense strand to SEQ ID NO: 1054310
uacaucaaucuguaaugau

SEQ ID NO: 1054312 - RNA, 19 nt, Artificial Sequence
  Description of Artificial Sequence: Synthetic oligonucleotide
  Sense strand starting at position 2947 of SEQ ID NO: 915107
acauuaugucugcaaaggu

SEQ ID NO: 1054313 - RNA, 19 nt, Artificial Sequence
  Description of Artificial Sequence: Synthetic oligonucleotide
  Antisense strand to SEQ ID NO: 1054312
accuuugcagacauaaugu

SEQ ID NO: 1054314 - RNA, 19 nt, Artificial Sequence
  Description of Artificial Sequence: Synthetic oligonucleotide
  Sense strand starting at position 3465 of SEQ ID NO: 915107
guaucaaagccuuagugau

SEQ ID NO: 1054315 - RNA, 19 nt, Artificial Sequence
  Description of Artificial Sequence: Synthetic oligonucleotide
  Antisense strand to SEQ ID NO: 1054314
aucacuaaggcuuugauac

SEQ ID NO: 1054316 - RNA, 19 nt, Artificial Sequence
  Description of Artificial Sequence: Synthetic oligonucleotide
  Sense strand starting at position 3471 of SEQ ID NO: 915107
aagccuuagugauuuaugu

SEQ ID NO: 1054317 - RNA, 19 nt, Artificial Sequence
  Description of Artificial Sequence: Synthetic oligonucleotide
  Antisense strand to SEQ ID NO: 1054316
acauaaaucacuaaggcuu

SEQ ID NO: 1054318 - RNA, 19 nt, Artificial Sequence
  Description of Artificial Sequence: Synthetic oligonucleotide
  Sense strand starting at position 3589 of SEQ ID NO: 915107
cugcaugauuaaucagagu

SEQ ID NO: 1054319 - RNA, 19 nt, Artificial Sequence
  Description of Artificial Sequence: Synthetic oligonucleotide
  Antisense strand to SEQ ID NO: 1054318
acucugauuaaucaugcag

SEQ ID NO: 1054320 - RNA, 19 nt, Artificial Sequence
  Description of Artificial Sequence: Synthetic oligonucleotide
  Sense strand starting at position 3901 of SEQ ID NO: 915107
uuauuuagaugugacuaga

SEQ ID NO: 1054321 - RNA, 19 nt, Artificial Sequence
  Description of Artificial Sequence: Synthetic oligonucleotide
  Antisense strand to SEQ ID NO: 1054320
ucuagucacaucuaaauaa

SEQ ID NO: 1054322 - RNA, 19 nt, Artificial Sequence
  Description of Artificial Sequence: Synthetic oligonucleotide
  Sense strand starting at position 14 of SEQ ID NO: 915108
aucugaauucuuuagguug

SEQ ID NO: 1054323 - RNA, 19 nt, Artificial Sequence
  Description of Artificial Sequence: Synthetic oligonucleotide
  Antisense strand to SEQ ID NO: 1054322
caaccuaaagaauucagau

SEQ ID NO: 1054324 - RNA, 19 nt, Artificial Sequence
  Description of Artificial Sequence: Synthetic oligonucleotide
  Sense strand starting at position 445 of SEQ ID NO: 915108
ucaguauuagaauacuggu

SEQ ID NO: 1054325 - RNA, 19 nt, Artificial Sequence
  Description of Artificial Sequence: Synthetic oligonucleotide
  Antisense strand to SEQ ID NO: 1054324
accaguauucuaauacuga

SEQ ID NO: 1054326 - RNA, 19 nt, Artificial Sequence
  Description of Artificial Sequence: Synthetic oligonucleotide
  Sense strand starting at position 502 of SEQ ID NO: 915108
cucaauguggccuaaagua

SEQ ID NO: 1054327 - RNA, 19 nt, Artificial Sequence
  Description of Artificial Sequence: Synthetic oligonucleotide
  Antisense strand to SEQ ID NO: 1054326
uacuuuaggccacauugag

SEQ ID NO: 1054328 - RNA, 19 nt, Artificial Sequence
  Description of Artificial Sequence: Synthetic oligonucleotide
  Sense strand starting at position 509 of SEQ ID NO: 915108
uggccuaaaguauauacua

SEQ ID NO: 1054329 - RNA, 19 nt, Artificial Sequence
  Description of Artificial Sequence: Synthetic oligonucleotide
  Antisense strand to SEQ ID NO: 1054328
uaguauauacuuuaggcca

SEQ ID NO: 1054330 - RNA, 19 nt, Artificial Sequence
  Description of Artificial Sequence: Synthetic oligonucleotide
  Sense strand starting at position 561 of SEQ ID NO: 915108
cuaagucaccuuggacaau

SEQ ID NO: 1054331 - RNA, 19 nt, Artificial Sequence
  Description of Artificial Sequence: Synthetic oligonucleotide
  Antisense strand to SEQ ID NO: 1054330
auuguccaaggugacuuag

SEQ ID NO: 1054332 - RNA, 19 nt, Artificial Sequence
  Description of Artificial Sequence: Synthetic oligonucleotide
  Sense strand starting at position 616 of SEQ ID NO: 915108
ugguuucuaagcugggaaa

SEQ ID NO: 1054333 - RNA, 19 nt, Artificial Sequence
  Description of Artificial Sequence: Synthetic oligonucleotide
  Antisense strand to SEQ ID NO: 1054332
uuucccagcuuagaaacca

SEQ ID NO: 1054334 - RNA, 19 nt, Artificial Sequence
  Description of Artificial Sequence: Synthetic oligonucleotide
  Sense strand starting at position 617 of SEQ ID NO: 915108
gguuucuaagcugggaaau

SEQ ID NO: 1054335 - RNA, 19 nt, Artificial Sequence
  Description of Artificial Sequence: Synthetic oligonucleotide
  Antisense strand to SEQ ID NO: 1054334
auuucccagcuuagaaacc

SEQ ID NO: 1054336 - RNA, 19 nt, Artificial Sequence
  Description of Artificial Sequence: Synthetic oligonucleotide
  Sense strand starting at position 618 of SEQ ID NO: 915108
guuucuaagcugggaaaua

SEQ ID NO: 1054337 - RNA, 19 nt, Artificial Sequence
  Description of Artificial Sequence: Synthetic oligonucleotide
  Antisense strand to SEQ ID NO: 1054336
uauuucccagcuuagaaac

SEQ ID NO: 1054338 - RNA, 19 nt, Artificial Sequence
  Description of Artificial Sequence: Synthetic oligonucleotide
  Sense strand starting at position 677 of SEQ ID NO: 915108
uacaguauucuguauguau

SEQ ID NO: 1054339 - RNA, 19 nt, Artificial Sequence
  Description of Artificial Sequence: Synthetic oligonucleotide
  Antisense strand to SEQ ID NO: 1054338
auacauacagaauacugua

SEQ ID NO: 1054340 - RNA, 19 nt, Artificial Sequence
  Description of Artificial Sequence: Synthetic oligonucleotide
  Sense strand starting at position 679 of SEQ ID NO: 915108
caguauucuguauguauuu

SEQ ID NO: 1054341 - RNA, 19 nt, Artificial Sequence
  Description of Artificial Sequence: Synthetic oligonucleotide
  Antisense strand to SEQ ID NO: 1054340
aaauacauacagaauacug

SEQ ID NO: 1054342 - RNA, 19 nt, Artificial Sequence
  Description of Artificial Sequence: Synthetic oligonucleotide
  Sense strand starting at position 938 of SEQ ID NO: 915108
ccugaaugauuugagaugu

SEQ ID NO: 1054343 - RNA, 19 nt, Artificial Sequence
  Description of Artificial Sequence: Synthetic oligonucleotide
  Antisense strand to SEQ ID NO: 1054342
acaucucaaaucauucagg

SEQ ID NO: 1054344 - RNA, 19 nt, Artificial Sequence
  Description of Artificial Sequence: Synthetic oligonucleotide
  Sense strand starting at position 1093 of SEQ ID NO: 915108
guguaaaugaauggguuga

SEQ ID NO: 1054345 - RNA, 19 nt, Artificial Sequence
  Description of Artificial Sequence: Synthetic oligonucleotide
  Antisense strand to SEQ ID NO: 1054344
ucaacccauucauuuacac

SEQ ID NO: 1054346 - RNA, 19 nt, Artificial Sequence
  Description of Artificial Sequence: Synthetic oligonucleotide
  Sense strand starting at position 1097 of SEQ ID NO: 915108
aaaugaauggguugagcau

SEQ ID NO: 1054347 - RNA, 19 nt, Artificial Sequence
  Description of Artificial Sequence: Synthetic oligonucleotide
  Antisense strand to SEQ ID NO: 1054346
augcucaacccauucauuu

SEQ ID NO: 1054348 - RNA, 19 nt, Artificial Sequence
  Description of Artificial Sequence: Synthetic oligonucleotide
  Sense strand starting at position 1110 of SEQ ID NO: 915108
gagcauuggaguuacgauu

SEQ ID NO: 1054349 - RNA, 19 nt, Artificial Sequence
  Description of Artificial Sequence: Synthetic oligonucleotide
  Antisense strand to SEQ ID NO: 1054348
aaucguaacuccaaugcuc

SEQ ID NO: 1054350 - RNA, 19 nt, Artificial Sequence
  Description of Artificial Sequence: Synthetic oligonucleotide
  Sense strand starting at position 1122 of SEQ ID NO: 915108
uacgauuguguagaagaca

SEQ ID NO: 1054351 - RNA, 19 nt, Artificial Sequence
  Description of Artificial Sequence: Synthetic oligonucleotide
  Antisense strand to SEQ ID NO: 1054350
ugucuucuacacaaucgua

SEQ ID NO: 1054352 - RNA, 19 nt, Artificial Sequence
  Description of Artificial Sequence: Synthetic oligonucleotide
  Sense strand starting at position 1361 of SEQ ID NO: 915108
gcaugacuagcucauuaau

SEQ ID NO: 1054353 - RNA, 19 nt, Artificial Sequence
  Description of Artificial Sequence: Synthetic oligonucleotide
  Antisense strand to SEQ ID NO: 1054352
auuaaugagcuagucaugc

SEQ ID NO: 1054354 - RNA, 19 nt, Artificial Sequence
  Description of Artificial Sequence: Synthetic oligonucleotide
  Sense strand starting at position 1364 of SEQ ID NO: 915108
ugacuagcucauuaauggu

SEQ ID NO: 1054355 - RNA, 19 nt, Artificial Sequence
  Description of Artificial Sequence: Synthetic oligonucleotide
  Antisense strand to SEQ ID NO: 1054354
accauuaaugagcuaguca

SEQ ID NO: 1054356 - RNA, 19 nt, Artificial Sequence
  Description of Artificial Sequence: Synthetic oligonucleotide
  Sense strand starting at position 1413 of SEQ ID NO: 915108
ggguaugucgcagaagaag

SEQ ID NO: 1054357 - RNA, 19 nt, Artificial Sequence
  Description of Artificial Sequence: Synthetic oligonucleotide
  Antisense strand to SEQ ID NO: 1054356
cuucuucugcgacauaccc

SEQ ID NO: 1054358 - RNA, 19 nt, Artificial Sequence
  Description of Artificial Sequence: Synthetic oligonucleotide
  Sense strand starting at position 1574 of SEQ ID NO: 915108
guugacagauagccagaua

SEQ ID NO: 1054359 - RNA, 19 nt, Artificial Sequence
  Description of Artificial Sequence: Synthetic oligonucleotide
  Antisense strand to SEQ ID NO: 1054358
uaucuggcuaucugucaac

SEQ ID NO: 1054360 - RNA, 19 nt, Artificial Sequence
  Description of Artificial Sequence: Synthetic oligonucleotide
  Sense strand starting at position 1775 of SEQ ID NO: 915108
ggaagugguacauggguaa

SEQ ID NO: 1054361 - RNA, 19 nt, Artificial Sequence
  Description of Artificial Sequence: Synthetic oligonucleotide
  Antisense strand to SEQ ID NO: 1054360
uuacccauguaccacuucc

SEQ ID NO: 1054362 - RNA, 19 nt, Artificial Sequence
  Description of Artificial Sequence: Synthetic oligonucleotide
  Sense strand starting at position 1966 of SEQ ID NO: 915108
auggucaucuucucacaca

SEQ ID NO: 1054363 - RNA, 19 nt, Artificial Sequence
  Description of Artificial Sequence: Synthetic oligonucleotide
  Antisense strand to SEQ ID NO: 1054362
ugugugagaagaugaccau

SEQ ID NO: 1054364 - RNA, 19 nt, Artificial Sequence
  Description of Artificial Sequence: Synthetic oligonucleotide
  Sense strand starting at position 2039 of SEQ ID NO: 915108
cuguaucccuuuccugaga

SEQ ID NO: 1054365 - RNA, 19 nt, Artificial Sequence
  Description of Artificial Sequence: Synthetic oligonucleotide
  Antisense strand to SEQ ID NO: 1054364
ucucaggaaagggauacag

SEQ ID NO: 1054366 - RNA, 19 nt, Artificial Sequence
  Description of Artificial Sequence: Synthetic oligonucleotide
  Sense strand starting at position 2052 of SEQ ID NO: 915108
cugagaugucauuauccau

SEQ ID NO: 1054367 - RNA, 19 nt, Artificial Sequence
  Description of Artificial Sequence: Synthetic oligonucleotide
  Antisense strand to SEQ ID NO: 1054366
auggauaaugacaucucag

SEQ ID NO: 1054368 - RNA, 19 nt, Artificial Sequence
  Description of Artificial Sequence: Synthetic oligonucleotide
  Sense strand starting at position 2087 of SEQ ID NO: 915108
ggucuuacccaguaagcaa

SEQ ID NO: 1054369 - RNA, 19 nt, Artificial Sequence
  Description of Artificial Sequence: Synthetic oligonucleotide
  Antisense strand to SEQ ID NO: 1054368
uugcuuacuggguaagacc

SEQ ID NO: 1054370 - RNA, 19 nt, Artificial Sequence
  Description of Artificial Sequence: Synthetic oligonucleotide
  Sense strand starting at position 2318 of SEQ ID NO: 915108
gcaaauauuccagaauugu

SEQ ID NO: 1054371 - RNA, 19 nt, Artificial Sequence
  Description of Artificial Sequence: Synthetic oligonucleotide
  Antisense strand to SEQ ID NO: 1054370
acaauucuggaauauuugc

SEQ ID NO: 1054372 - RNA, 19 nt, Artificial Sequence
  Description of Artificial Sequence: Synthetic oligonucleotide
  Sense strand starting at position 2394 of SEQ ID NO: 915108
guucuuauugcugugucau

SEQ ID NO: 1054373 - RNA, 19 nt, Artificial Sequence
  Description of Artificial Sequence: Synthetic oligonucleotide
  Antisense strand to SEQ ID NO: 1054372
augacacagcaauaagaac

SEQ ID NO: 1054374 - RNA, 19 nt, Artificial Sequence
  Description of Artificial Sequence: Synthetic oligonucleotide
  Sense strand starting at position 2404 of SEQ ID NO: 915108
cugugucaucagggagaug

SEQ ID NO: 1054375 - RNA, 19 nt, Artificial Sequence
  Description of Artificial Sequence: Synthetic oligonucleotide
  Antisense strand to SEQ ID NO: 1054374
caucucccugaugacacag

SEQ ID NO: 1054376 - RNA, 19 nt, Artificial Sequence
  Description of Artificial Sequence: Synthetic oligonucleotide
  Sense strand starting at position 2461 of SEQ ID NO: 915108
gcuauuacaucagccagaa

SEQ ID NO: 1054377 - RNA, 19 nt, Artificial Sequence
  Description of Artificial Sequence: Synthetic oligonucleotide
  Antisense strand to SEQ ID NO: 1054376
uucuggcugauguaauagc

SEQ ID NO: 1054378 - RNA, 19 nt, Artificial Sequence
  Description of Artificial Sequence: Synthetic oligonucleotide
  Sense strand starting at position 2540 of SEQ ID NO: 915108
auccucaaguguguaacaa

SEQ ID NO: 1054379 - RNA, 19 nt, Artificial Sequence
  Description of Artificial Sequence: Synthetic oligonucleotide
  Antisense strand to SEQ ID NO: 1054378
uuguuacacacuugaggau

SEQ ID NO: 1054380 - RNA, 19 nt, Artificial Sequence
  Description of Artificial Sequence: Synthetic oligonucleotide
  Sense strand starting at position 2541 of SEQ ID NO: 915108
uccucaaguguguaacaau

SEQ ID NO: 1054381 - RNA, 19 nt, Artificial Sequence
  Description of Artificial Sequence: Synthetic oligonucleotide
  Antisense strand to SEQ ID NO: 1054380
auuguuacacacuugagga

SEQ ID NO: 1054382 - RNA, 19 nt, Artificial Sequence
  Description of Artificial Sequence: Synthetic oligonucleotide
  Sense strand starting at position 2683 of SEQ ID NO: 915108
uuuccacuggacuguaauu

SEQ ID NO: 1054383 - RNA, 19 nt, Artificial Sequence
  Description of Artificial Sequence: Synthetic oligonucleotide
  Antisense strand to SEQ ID NO: 1054382
aauuacaguccaguggaaa

SEQ ID NO: 1054384 - RNA, 19 nt, Artificial Sequence
  Description of Artificial Sequence: Synthetic oligonucleotide
  Sense strand starting at position 2688 of SEQ ID NO: 915108
acuggacuguaauugagau

SEQ ID NO: 1054385 - RNA, 19 nt, Artificial Sequence
  Description of Artificial Sequence: Synthetic oligonucleotide
  Antisense strand to SEQ ID NO: 1054384
aucucaauuacaguccagu

SEQ ID NO: 1054386 - RNA, 19 nt, Artificial Sequence
  Description of Artificial Sequence: Synthetic oligonucleotide
  Sense strand starting at position 2689 of SEQ ID NO: 915108
cuggacuguaauugagauu

SEQ ID NO: 1054387 - RNA, 19 nt, Artificial Sequence
  Description of Artificial Sequence: Synthetic oligonucleotide
  Antisense strand to SEQ ID NO: 1054386
aaucucaauuacaguccag

SEQ ID NO: 1054388 - RNA, 19 nt, Artificial Sequence
  Description of Artificial Sequence: Synthetic oligonucleotide
  Sense strand starting at position 2692 of SEQ ID NO: 915108
gacuguaauugagauuuaa

SEQ ID NO: 1054389 - RNA, 19 nt, Artificial Sequence
  Description of Artificial Sequence: Synthetic oligonucleotide
  Antisense strand to SEQ ID NO: 1054388
uuaaaucucaauuacaguc

SEQ ID NO: 1054390 - RNA, 19 nt, Artificial Sequence
  Description of Artificial Sequence: Synthetic oligonucleotide
  Sense strand starting at position 2706 of SEQ ID NO: 915108
uuuaaagaguucucuuuga

SEQ ID NO: 1054391 - RNA, 19 nt, Artificial Sequence
  Description of Artificial Sequence: Synthetic oligonucleotide
  Antisense strand to SEQ ID NO: 1054390
ucaaagagaacucuuuaaa

SEQ ID NO: 1054392 - RNA, 19 nt, Artificial Sequence
  Description of Artificial Sequence: Synthetic oligonucleotide
  Sense strand starting at position 2984 of SEQ ID NO: 915108
uccuuagugccugagauau

SEQ ID NO: 1054393 - RNA, 19 nt, Artificial Sequence
  Description of Artificial Sequence: Synthetic oligonucleotide
  Antisense strand to SEQ ID NO: 1054392
auaucucaggcacuaagga

SEQ ID NO: 1054394 - RNA, 19 nt, Artificial Sequence
  Description of Artificial Sequence: Synthetic oligonucleotide
  Sense strand starting at position 2990 of SEQ ID NO: 915108
gugccugagauauaaagug

SEQ ID NO: 1054395 - RNA, 19 nt, Artificial Sequence
  Description of Artificial Sequence: Synthetic oligonucleotide
  Antisense strand to SEQ ID NO: 1054394
cacuuuauaucucaggcac

SEQ ID NO: 1054396 - RNA, 19 nt, Artificial Sequence
  Description of Artificial Sequence: Synthetic oligonucleotide
  Sense strand starting at position 3097 of SEQ ID NO: 915108
cuguuauccagggaugcua

SEQ ID NO: 1054397 - RNA, 19 nt, Artificial Sequence
  Description of Artificial Sequence: Synthetic oligonucleotide
  Antisense strand to SEQ ID NO: 1054396
uagcaucccuggauaacag

SEQ ID NO: 1054398 - RNA, 19 nt, Artificial Sequence
  Description of Artificial Sequence: Synthetic oligonucleotide
  Sense strand starting at position 3165 of SEQ ID NO: 915108
ggauccuuaggaugucacu

SEQ ID NO: 1054399 - RNA, 19 nt, Artificial Sequence
  Description of Artificial Sequence: Synthetic oligonucleotide
  Antisense strand to SEQ ID NO: 1054398
agugacauccuaaggaucc

SEQ ID NO: 1054400 - RNA, 19 nt, Artificial Sequence
  Description of Artificial Sequence: Synthetic oligonucleotide
  Sense strand starting at position 3931 of SEQ ID NO: 915108
gcaaaugagccaggaacau

SEQ ID NO: 1054401 - RNA, 19 nt, Artificial Sequence
  Description of Artificial Sequence: Synthetic oligonucleotide
  Antisense strand to SEQ ID NO: 1054400
auguuccuggcucauuugc

SEQ ID NO: 1054402 - RNA, 19 nt, Artificial Sequence
  Description of Artificial Sequence: Synthetic oligonucleotide
  Sense strand starting at position 42 of SEQ ID NO: 915109
uagcuuacaggucaugaaa

SEQ ID NO: 1054403 - RNA, 19 nt, Artificial Sequence
  Description of Artificial Sequence: Synthetic oligonucleotide
  Antisense strand to SEQ ID NO: 1054402
uuucaugaccuguaagcua

SEQ ID NO: 1054404 - RNA, 19 nt, Artificial Sequence
  Description of Artificial Sequence: Synthetic oligonucleotide
  Sense strand starting at position 91 of SEQ ID NO: 915109
aguguaaugugguuauuug

SEQ ID NO: 1054405 - RNA, 19 nt, Artificial Sequence
  Description of Artificial Sequence: Synthetic oligonucleotide
  Antisense strand to SEQ ID NO: 1054404
caaauaaccacauuacacu

SEQ ID NO: 1054406 - RNA, 19 nt, Artificial Sequence
  Description of Artificial Sequence: Synthetic oligonucleotide
  Sense strand starting at position 148 of SEQ ID NO: 915109
ucuagaaggugacugguau

SEQ ID NO: 1054407 - RNA, 19 nt, Artificial Sequence
  Description of Artificial Sequence: Synthetic oligonucleotide
  Antisense strand to SEQ ID NO: 1054406
auaccagucaccuucuaga

SEQ ID NO: 1054408 - RNA, 19 nt, Artificial Sequence
  Description of Artificial Sequence: Synthetic oligonucleotide
  Sense strand starting at position 149 of SEQ ID NO: 915109
cuagaaggugacugguaua

SEQ ID NO: 1054409 - RNA, 19 nt, Artificial Sequence
  Description of Artificial Sequence: Synthetic oligonucleotide
  Antisense strand to SEQ ID NO: 1054408
uauaccagucaccuucuag

SEQ ID NO: 1054410 - RNA, 19 nt, Artificial Sequence
  Description of Artificial Sequence: Synthetic oligonucleotide
  Sense strand starting at position 262 of SEQ ID NO: 915109
uccuaauacaugugaggag

SEQ ID NO: 1054411 - RNA, 19 nt, Artificial Sequence
  Description of Artificial Sequence: Synthetic oligonucleotide
  Antisense strand to SEQ ID NO: 1054410
cuccucacauguauuagga

SEQ ID NO: 1054412 - RNA, 19 nt, Artificial Sequence
  Description of Artificial Sequence: Synthetic oligonucleotide
  Sense strand starting at position 277 of SEQ ID NO: 915109
ggagcuguuauguauuaau

SEQ ID NO: 1054413 - RNA, 19 nt, Artificial Sequence
  Description of Artificial Sequence: Synthetic oligonucleotide
  Antisense strand to SEQ ID NO: 1054412
auuaauacauaacagcucc

SEQ ID NO: 1054414 - RNA, 19 nt, Artificial Sequence
  Description of Artificial Sequence: Synthetic oligonucleotide
  Sense strand starting at position 329 of SEQ ID NO: 915109
gggagaaaguuguuuguag

SEQ ID NO: 1054415 - RNA, 19 nt, Artificial Sequence
  Description of Artificial Sequence: Synthetic oligonucleotide
  Antisense strand to SEQ ID NO: 1054414
cuacaaacaacuuucuccc

SEQ ID NO: 1054416 - RNA, 19 nt, Artificial Sequence
  Description of Artificial Sequence: Synthetic oligonucleotide
  Sense strand starting at position 330 of SEQ ID NO: 915109
ggagaaaguuguuuguaga

SEQ ID NO: 1054417 - RNA, 19 nt, Artificial Sequence
  Description of Artificial Sequence: Synthetic oligonucleotide
  Antisense strand to SEQ ID NO: 1054416
ucuacaaacaacuuucucc

SEQ ID NO: 1054418 - RNA, 19 nt, Artificial Sequence
  Description of Artificial Sequence: Synthetic oligonucleotide
  Sense strand starting at position 337 of SEQ ID NO: 915109
guuguuuguagauagagac

SEQ ID NO: 1054419 - RNA, 19 nt, Artificial Sequence
  Description of Artificial Sequence: Synthetic oligonucleotide
  Antisense strand to SEQ ID NO: 1054418
gucucuaucuacaaacaac

SEQ ID NO: 1054420 - RNA, 19 nt, Artificial Sequence
  Description of Artificial Sequence: Synthetic oligonucleotide
  Sense strand starting at position 351 of SEQ ID NO: 915109
gagaccuuagcucaaggua

SEQ ID NO: 1054421 - RNA, 19 nt, Artificial Sequence
  Description of Artificial Sequence: Synthetic oligonucleotide
  Antisense strand to SEQ ID NO: 1054420
uaccuugagcuaaggucuc

SEQ ID NO: 1054422 - RNA, 19 nt, Artificial Sequence
  Description of Artificial Sequence: Synthetic oligonucleotide
  Sense strand starting at position 377 of SEQ ID NO: 915109
guacuuaaugacuacaguu

SEQ ID NO: 1054423 - RNA, 19 nt, Artificial Sequence
  Description of Artificial Sequence: Synthetic oligonucleotide
  Antisense strand to SEQ ID NO: 1054422
aacuguagucauuaaguac

SEQ ID NO: 1054424 - RNA, 19 nt, Artificial Sequence
  Description of Artificial Sequence: Synthetic oligonucleotide
  Sense strand starting at position 390 of SEQ ID NO: 915109
acaguuguccaguaaggaa

SEQ ID NO: 1054425 - RNA, 19 nt, Artificial Sequence
  Description of Artificial Sequence: Synthetic oligonucleotide
  Antisense strand to SEQ ID NO: 1054424
uuccuuacuggacaacugu

SEQ ID NO: 1054426 - RNA, 19 nt, Artificial Sequence
  Description of Artificial Sequence: Synthetic oligonucleotide
  Sense strand starting at position 458 of SEQ ID NO: 915109
gucaaugacucuccaagau

SEQ ID NO: 1054427 - RNA, 19 nt, Artificial Sequence
  Description of Artificial Sequence: Synthetic oligonucleotide
  Antisense strand to SEQ ID NO: 1054426
aucuuggagagucauugac

SEQ ID NO: 1054428 - RNA, 19 nt, Artificial Sequence
  Description of Artificial Sequence: Synthetic oligonucleotide
  Sense strand starting at position 607 of SEQ ID NO: 915109
aguuaugaacacugacaug

SEQ ID NO: 1054429 - RNA, 19 nt, Artificial Sequence
  Description of Artificial Sequence: Synthetic oligonucleotide
  Antisense strand to SEQ ID NO: 1054428
caugucaguguucauaacu

SEQ ID NO: 1054430 - RNA, 19 nt, Artificial Sequence
  Description of Artificial Sequence: Synthetic oligonucleotide
  Sense strand starting at position 1149 of SEQ ID NO: 915109
gggagugauaaauguguag

SEQ ID NO: 1054431 - RNA, 19 nt, Artificial Sequence
  Description of Artificial Sequence: Synthetic oligonucleotide
  Antisense strand to SEQ ID NO: 1054430
cuacacauuuaucacuccc

SEQ ID NO: 1054432 - RNA, 19 nt, Artificial Sequence
  Description of Artificial Sequence: Synthetic oligonucleotide
  Sense strand starting at position 1158 of SEQ ID NO: 915109
aaauguguaggccacagau

SEQ ID NO: 1054433 - RNA, 19 nt, Artificial Sequence
  Description of Artificial Sequence: Synthetic oligonucleotide
  Antisense strand to SEQ ID NO: 1054432
aucuguggccuacacauuu

SEQ ID NO: 1054434 - RNA, 19 nt, Artificial Sequence
  Description of Artificial Sequence: Synthetic oligonucleotide
  Sense strand starting at position 1184 of SEQ ID NO: 915109
ggcccaucucaggagagua

SEQ ID NO: 1054435 - RNA, 19 nt, Artificial Sequence
  Description of Artificial Sequence: Synthetic oligonucleotide
  Antisense strand to SEQ ID NO: 1054434
uacucuccugagaugggcc

SEQ ID NO: 1054436 - RNA, 19 nt, Artificial Sequence
  Description of Artificial Sequence: Synthetic oligonucleotide
  Sense strand starting at position 1460 of SEQ ID NO: 915109
cacaguagaagugguagau

SEQ ID NO: 1054437 - RNA, 19 nt, Artificial Sequence
  Description of Artificial Sequence: Synthetic oligonucleotide
  Antisense strand to SEQ ID NO: 1054436
aucuaccacuucuacugug

SEQ ID NO: 1054438 - RNA, 19 nt, Artificial Sequence
  Description of Artificial Sequence: Synthetic oligonucleotide
  Sense strand starting at position 1464 of SEQ ID NO: 915109
guagaagugguagaucuca

SEQ ID NO: 1054439 - RNA, 19 nt, Artificial Sequence
  Description of Artificial Sequence: Synthetic oligonucleotide
  Antisense strand to SEQ ID NO: 1054438
ugagaucuaccacuucuac

SEQ ID NO: 1054440 - RNA, 19 nt, Artificial Sequence
  Description of Artificial Sequence: Synthetic oligonucleotide
  Sense strand starting at position 1472 of SEQ ID NO: 915109
gguagaucucaucauugug

SEQ ID NO: 1054441 - RNA, 19 nt, Artificial Sequence
  Description of Artificial Sequence: Synthetic oligonucleotide
  Antisense strand to SEQ ID NO: 1054440
cacaaugaugagaucuacc

SEQ ID NO: 1054442 - RNA, 19 nt, Artificial Sequence
  Description of Artificial Sequence: Synthetic oligonucleotide
  Sense strand starting at position 1614 of SEQ ID NO: 915109
gugacagaucgcuauaaac

SEQ ID NO: 1054443 - RNA, 19 nt, Artificial Sequence
  Description of Artificial Sequence: Synthetic oligonucleotide
  Antisense strand to SEQ ID NO: 1054442
guuuauagcgaucugucac

SEQ ID NO: 1054444 - RNA, 19 nt, Artificial Sequence
  Description of Artificial Sequence: Synthetic oligonucleotide
  Sense strand starting at position 1616 of SEQ ID NO: 915109
gacagaucgcuauaaacug

SEQ ID NO: 1054445 - RNA, 19 nt, Artificial Sequence
  Description of Artificial Sequence: Synthetic oligonucleotide
  Antisense strand to SEQ ID NO: 1054444
caguuuauagcgaucuguc

SEQ ID NO: 1054446 - RNA, 19 nt, Artificial Sequence
  Description of Artificial Sequence: Synthetic oligonucleotide
  Sense strand starting at position 1624 of SEQ ID NO: 915109
gcuauaaacuggucauaag

SEQ ID NO: 1054447 - RNA, 19 nt, Artificial Sequence
  Description of Artificial Sequence: Synthetic oligonucleotide
  Antisense strand to SEQ ID NO: 1054446
cuuaugaccaguuuauagc

SEQ ID NO: 1054448 - RNA, 19 nt, Artificial Sequence
  Description of Artificial Sequence: Synthetic oligonucleotide
  Sense strand starting at position 1767 of SEQ ID NO: 915109
ggugauggaagauguauag

SEQ ID NO: 1054449 - RNA, 19 nt, Artificial Sequence
  Description of Artificial Sequence: Synthetic oligonucleotide
  Antisense strand to SEQ ID NO: 1054448
cuauacaucuuccaucacc

SEQ ID NO: 1054450 - RNA, 19 nt, Artificial Sequence
  Description of Artificial Sequence: Synthetic oligonucleotide
  Sense strand starting at position 1782 of SEQ ID NO: 915109
auagaagauuucuagaacu

SEQ ID NO: 1054451 - RNA, 19 nt, Artificial Sequence
  Description of Artificial Sequence: Synthetic oligonucleotide
  Antisense strand to SEQ ID NO: 1054450
aguucuagaaaucuucuau

SEQ ID NO: 1054452 - RNA, 19 nt, Artificial Sequence
  Description of Artificial Sequence: Synthetic oligonucleotide
  Sense strand starting at position 1831 of SEQ ID NO: 915109
guguggagggaaugauuga

SEQ ID NO: 1054453 - RNA, 19 nt, Artificial Sequence
  Description of Artificial Sequence: Synthetic oligonucleotide
  Antisense strand to SEQ ID NO: 1054452
ucaaucauucccuccacac

SEQ ID NO: 1054454 - RNA, 19 nt, Artificial Sequence
  Description of Artificial Sequence: Synthetic oligonucleotide
  Sense strand starting at position 1851 of SEQ ID NO: 915109
cugaacaaugacugcaauu

SEQ ID NO: 1054455 - RNA, 19 nt, Artificial Sequence
  Description of Artificial Sequence: Synthetic oligonucleotide
  Antisense strand to SEQ ID NO: 1054454
aauugcagucauuguucag

SEQ ID NO: 1054456 - RNA, 19 nt, Artificial Sequence
  Description of Artificial Sequence: Synthetic oligonucleotide
  Sense strand starting at position 1992 of SEQ ID NO: 915109
uccuuccaugaguagagua

SEQ ID NO: 1054457 - RNA, 19 nt, Artificial Sequence
  Description of Artificial Sequence: Synthetic oligonucleotide
  Antisense strand to SEQ ID NO: 1054456
uacucuacucauggaagga

SEQ ID NO: 1054458 - RNA, 19 nt, Artificial Sequence
  Description of Artificial Sequence: Synthetic oligonucleotide
  Sense strand starting at position 1994 of SEQ ID NO: 915109
cuuccaugaguagaguauu

SEQ ID NO: 1054459 - RNA, 19 nt, Artificial Sequence
  Description of Artificial Sequence: Synthetic oligonucleotide
  Antisense strand to SEQ ID NO: 1054458
aauacucuacucauggaag

SEQ ID NO: 1054460 - RNA, 19 nt, Artificial Sequence
  Description of Artificial Sequence: Synthetic oligonucleotide
  Sense strand starting at position 2116 of SEQ ID NO: 915109
agggaugaugugcauguuu

SEQ ID NO: 1054461 - RNA, 19 nt, Artificial Sequence
  Description of Artificial Sequence: Synthetic oligonucleotide
  Antisense strand to SEQ ID NO: 1054460
aaacaugcacaucaucccu

SEQ ID NO: 1054462 - RNA, 19 nt, Artificial Sequence
  Description of Artificial Sequence: Synthetic oligonucleotide
  Sense strand starting at position 2604 of SEQ ID NO: 915109
uaggguugccaagaagcau

SEQ ID NO: 1054463 - RNA, 19 nt, Artificial Sequence
  Description of Artificial Sequence: Synthetic oligonucleotide
  Antisense strand to SEQ ID NO: 1054462
augcuucuuggcaacccua

SEQ ID NO: 1054464 - RNA, 19 nt, Artificial Sequence
  Description of Artificial Sequence: Synthetic oligonucleotide
  Sense strand starting at position 2729 of SEQ ID NO: 915109
auuguauaggcagauguau

SEQ ID NO: 1054465 - RNA, 19 nt, Artificial Sequence
  Description of Artificial Sequence: Synthetic oligonucleotide
  Antisense strand to SEQ ID NO: 1054464
auacaucugccuauacaau

SEQ ID NO: 1054466 - RNA, 19 nt, Artificial Sequence
  Description of Artificial Sequence: Synthetic oligonucleotide
  Sense strand starting at position 2822 of SEQ ID NO: 915109
ccuagagacuuugauuuac

SEQ ID NO: 1054467 - RNA, 19 nt, Artificial Sequence
  Description of Artificial Sequence: Synthetic oligonucleotide
  Antisense strand to SEQ ID NO: 1054466
guaaaucaaagucucuagg

SEQ ID NO: 1054468 - RNA, 19 nt, Artificial Sequence
  Description of Artificial Sequence: Synthetic oligonucleotide
  Sense strand starting at position 2950 of SEQ ID NO: 915109
uguuaucuuccaugaggau

SEQ ID NO: 1054469 - RNA, 19 nt, Artificial Sequence
  Description of Artificial Sequence: Synthetic oligonucleotide
  Antisense strand to SEQ ID NO: 1054468
auccucauggaagauaaca

SEQ ID NO: 1054470 - RNA, 19 nt, Artificial Sequence
  Description of Artificial Sequence: Synthetic oligonucleotide
  Sense strand starting at position 2951 of SEQ ID NO: 915109
guuaucuuccaugaggauu

SEQ ID NO: 1054471 - RNA, 19 nt, Artificial Sequence
  Description of Artificial Sequence: Synthetic oligonucleotide
  Antisense strand to SEQ ID NO: 1054470
aauccucauggaagauaac

SEQ ID NO: 1054472 - RNA, 19 nt, Artificial Sequence
  Description of Artificial Sequence: Synthetic oligonucleotide
  Sense strand starting at position 2959 of SEQ ID NO: 915109
ccaugaggauuccugugau

SEQ ID NO: 1054473 - RNA, 19 nt, Artificial Sequence
  Description of Artificial Sequence: Synthetic oligonucleotide
  Antisense strand to SEQ ID NO: 1054472
aucacaggaauccucaugg

SEQ ID NO: 1054474 - RNA, 19 nt, Artificial Sequence
  Description of Artificial Sequence: Synthetic oligonucleotide
  Sense strand starting at position 3043 of SEQ ID NO: 915109
ugcuuauaugcuuagaaau

SEQ ID NO: 1054475 - RNA, 19 nt, Artificial Sequence
  Description of Artificial Sequence: Synthetic oligonucleotide
  Antisense strand to SEQ ID NO: 1054474
auuucuaagcauauaagca

SEQ ID NO: 1054476 - RNA, 19 nt, Artificial Sequence
  Description of Artificial Sequence: Synthetic oligonucleotide
  Sense strand starting at position 3807 of SEQ ID NO: 915109
agaacucuagauggucuau

SEQ ID NO: 1054477 - RNA, 19 nt, Artificial Sequence
  Description of Artificial Sequence: Synthetic oligonucleotide
  Antisense strand to SEQ ID NO: 1054476
auagaccaucuagaguucu

SEQ ID NO: 1054478 - RNA, 19 nt, Artificial Sequence
  Description of Artificial Sequence: Synthetic oligonucleotide
  Sense strand starting at position 3916 of SEQ ID NO: 915109
acaugauuacuauggcuau

SEQ ID NO: 1054479 - RNA, 19 nt, Artificial Sequence
  Description of Artificial Sequence: Synthetic oligonucleotide
  Antisense strand to SEQ ID NO: 1054478
auagccauaguaaucaugu

SEQ ID NO: 1054480 - RNA, 19 nt, Artificial Sequence
  Description of Artificial Sequence: Synthetic oligonucleotide
  Sense strand starting at position 3919 of SEQ ID NO: 915109
ugauuacuauggcuaucua

SEQ ID NO: 1054481 - RNA, 19 nt, Artificial Sequence
  Description of Artificial Sequence: Synthetic oligonucleotide
  Antisense strand to SEQ ID NO: 1054480
uagauagccauaguaauca

SEQ ID NO: 1054482 - RNA, 19 nt, Artificial Sequence
  Description of Artificial Sequence: Synthetic oligonucleotide
  Sense strand starting at position 9 of SEQ ID NO: 915110
gacugacuucuguggacug

SEQ ID NO: 1054483 - RNA, 19 nt, Artificial Sequence
  Description of Artificial Sequence: Synthetic oligonucleotide
  Antisense strand to SEQ ID NO: 1054482
caguccacagaagucaguc

SEQ ID NO: 1054484 - RNA, 19 nt, Artificial Sequence
  Description of Artificial Sequence: Synthetic oligonucleotide
  Sense strand starting at position 11 of SEQ ID NO: 915110
cugacuucuguggacugau

SEQ ID NO: 1054485 - RNA, 19 nt, Artificial Sequence
  Description of Artificial Sequence: Synthetic oligonucleotide
  Antisense strand to SEQ ID NO: 1054484
aucaguccacagaagucag

SEQ ID NO: 1054486 - RNA, 19 nt, Artificial Sequence
  Description of Artificial Sequence: Synthetic oligonucleotide
  Sense strand starting at position 64 of SEQ ID NO: 915110
gaguuugguccauggagac

SEQ ID NO: 1054487 - RNA, 19 nt, Artificial Sequence
  Description of Artificial Sequence: Synthetic oligonucleotide
  Antisense strand to SEQ ID NO: 1054486
gucuccauggaccaaacuc

SEQ ID NO: 1054488 - RNA, 19 nt, Artificial Sequence
  Description of Artificial Sequence: Synthetic oligonucleotide
  Sense strand starting at position 279 of SEQ ID NO: 915110
uaagucuagggcugagaaa

SEQ ID NO: 1054489 - RNA, 19 nt, Artificial Sequence
  Description of Artificial Sequence: Synthetic oligonucleotide
  Antisense strand to SEQ ID NO: 1054488
uuucucagcccuagacuua

SEQ ID NO: 1054490 - RNA, 19 nt, Artificial Sequence
  Description of Artificial Sequence: Synthetic oligonucleotide
  Sense strand starting at position 319 of SEQ ID NO: 915110
guuagugcucugccacauu

SEQ ID NO: 1054491 - RNA, 19 nt, Artificial Sequence
  Description of Artificial Sequence: Synthetic oligonucleotide
  Antisense strand to SEQ ID NO: 1054490
aauguggcagagcacuaac

SEQ ID NO: 1054492 - RNA, 19 nt, Artificial Sequence
  Description of Artificial Sequence: Synthetic oligonucleotide
  Sense strand starting at position 644 of SEQ ID NO: 915110
ccaaauacuugccugauag

SEQ ID NO: 1054493 - RNA, 19 nt, Artificial Sequence
  Description of Artificial Sequence: Synthetic oligonucleotide
  Antisense strand to SEQ ID NO: 1054492
cuaucaggcaaguauuugg

SEQ ID NO: 1054494 - RNA, 19 nt, Artificial Sequence
  Description of Artificial Sequence: Synthetic oligonucleotide
  Sense strand starting at position 800 of SEQ ID NO: 915110
gugagaugaaccgaucuug

SEQ ID NO: 1054495 - RNA, 19 nt, Artificial Sequence
  Description of Artificial Sequence: Synthetic oligonucleotide
  Antisense strand to SEQ ID NO: 1054494
caagaucgguucaucucac

SEQ ID NO: 1054496 - RNA, 19 nt, Artificial Sequence
  Description of Artificial Sequence: Synthetic oligonucleotide
  Sense strand starting at position 1045 of SEQ ID NO: 915110
augugacucugagcacaaa

SEQ ID NO: 1054497 - RNA, 19 nt, Artificial Sequence
  Description of Artificial Sequence: Synthetic oligonucleotide
  Antisense strand to SEQ ID NO: 1054496
uuugugcucagagucacau

SEQ ID NO: 1054498 - RNA, 19 nt, Artificial Sequence
  Description of Artificial Sequence: Synthetic oligonucleotide
  Sense strand starting at position 1368 of SEQ ID NO: 915110
uaggguguuggccaggaua

SEQ ID NO: 1054499 - RNA, 19 nt, Artificial Sequence
  Description of Artificial Sequence: Synthetic oligonucleotide
  Antisense strand to SEQ ID NO: 1054498
uauccuggccaacacccua

SEQ ID NO: 1054500 - RNA, 19 nt, Artificial Sequence
  Description of Artificial Sequence: Synthetic oligonucleotide
  Sense strand starting at position 1427 of SEQ ID NO: 915110
aaaggcugcccaggaaaua

SEQ ID NO: 1054501 - RNA, 19 nt, Artificial Sequence
  Description of Artificial Sequence: Synthetic oligonucleotide
  Antisense strand to SEQ ID NO: 1054500
uauuuccugggcagccuuu

SEQ ID NO: 1054502 - RNA, 19 nt, Artificial Sequence
  Description of Artificial Sequence: Synthetic oligonucleotide
  Sense strand starting at position 1439 of SEQ ID NO: 915110
ggaaauaguacauggaugu

SEQ ID NO: 1054503 - RNA, 19 nt, Artificial Sequence
  Description of Artificial Sequence: Synthetic oligonucleotide
  Antisense strand to SEQ ID NO: 1054502
acauccauguacuauuucc

SEQ ID NO: 1054504 - RNA, 19 nt, Artificial Sequence
  Description of Artificial Sequence: Synthetic oligonucleotide
  Sense strand starting at position 1490 of SEQ ID NO: 915110
caaugagaauguucccagu

SEQ ID NO: 1054505 - RNA, 19 nt, Artificial Sequence
  Description of Artificial Sequence: Synthetic oligonucleotide
  Antisense strand to SEQ ID NO: 1054504
acugggaacauucucauug

SEQ ID NO: 1054506 - RNA, 19 nt, Artificial Sequence
  Description of Artificial Sequence: Synthetic oligonucleotide
  Sense strand starting at position 1492 of SEQ ID NO: 915110
augagaauguucccaguga

SEQ ID NO: 1054507 - RNA, 19 nt, Artificial Sequence
  Description of Artificial Sequence: Synthetic oligonucleotide
  Antisense strand to SEQ ID NO: 1054506
ucacugggaacauucucau

SEQ ID NO: 1054508 - RNA, 19 nt, Artificial Sequence
  Description of Artificial Sequence: Synthetic oligonucleotide
  Sense strand starting at position 1496 of SEQ ID NO: 915110
gaauguucccagugaugau

SEQ ID NO: 1054509 - RNA, 19 nt, Artificial Sequence
  Description of Artificial Sequence: Synthetic oligonucleotide
  Antisense strand to SEQ ID NO: 1054508
aucaucacugggaacauuc

SEQ ID NO: 1054510 - RNA, 19 nt, Artificial Sequence
  Description of Artificial Sequence: Synthetic oligonucleotide
  Sense strand starting at position 1500 of SEQ ID NO: 915110
guucccagugaugaucaaa

SEQ ID NO: 1054511 - RNA, 19 nt, Artificial Sequence
  Description of Artificial Sequence: Synthetic oligonucleotide
  Antisense strand to SEQ ID NO: 1054510
uuugaucaucacugggaac

SEQ ID NO: 1054512 - RNA, 19 nt, Artificial Sequence
  Description of Artificial Sequence: Synthetic oligonucleotide
  Sense strand starting at position 1617 of SEQ ID NO: 915110
ccagguaauugagcuaaca

SEQ ID NO: 1054513 - RNA, 19 nt, Artificial Sequence
  Description of Artificial Sequence: Synthetic oligonucleotide
  Antisense strand to SEQ ID NO: 1054512
uguuagcucaauuaccugg

SEQ ID NO: 1054514 - RNA, 19 nt, Artificial Sequence
  Description of Artificial Sequence: Synthetic oligonucleotide
  Sense strand starting at position 1619 of SEQ ID NO: 915110
agguaauugagcuaacagu

SEQ ID NO: 1054515 - RNA, 19 nt, Artificial Sequence
  Description of Artificial Sequence: Synthetic oligonucleotide
  Antisense strand to SEQ ID NO: 1054514
acuguuagcucaauuaccu

SEQ ID NO: 1054516 - RNA, 19 nt, Artificial Sequence
  Description of Artificial Sequence: Synthetic oligonucleotide
  Sense strand starting at position 1666 of SEQ ID NO: 915110
aaggaagaaucagacugaa

SEQ ID NO: 1054517 - RNA, 19 nt, Artificial Sequence
  Description of Artificial Sequence: Synthetic oligonucleotide
  Antisense strand to SEQ ID NO: 1054516
uucagucugauucuuccuu

SEQ ID NO: 1054518 - RNA, 19 nt, Artificial Sequence
  Description of Artificial Sequence: Synthetic oligonucleotide
  Sense strand starting at position 1717 of SEQ ID NO: 915110
uaauguaaucagcacugga

SEQ ID NO: 1054519 - RNA, 19 nt, Artificial Sequence
  Description of Artificial Sequence: Synthetic oligonucleotide
  Antisense strand to SEQ ID NO: 1054518
uccagugcugauuacauua

SEQ ID NO: 1054520 - RNA, 19 nt, Artificial Sequence
  Description of Artificial Sequence: Synthetic oligonucleotide
  Sense strand starting at position 1838 of SEQ ID NO: 915110
ugggccaaacuauguaaga

SEQ ID NO: 1054521 - RNA, 19 nt, Artificial Sequence
  Description of Artificial Sequence: Synthetic oligonucleotide
  Antisense strand to SEQ ID NO: 1054520
ucuuacauaguuuggccca

SEQ ID NO: 1054522 - RNA, 19 nt, Artificial Sequence
  Description of Artificial Sequence: Synthetic oligonucleotide
  Sense strand starting at position 1839 of SEQ ID NO: 915110
gggccaaacuauguaagau

SEQ ID NO: 1054523 - RNA, 19 nt, Artificial Sequence
  Description of Artificial Sequence: Synthetic oligonucleotide
  Antisense strand to SEQ ID NO: 1054522
aucuuacauaguuuggccc

SEQ ID NO: 1054524 - RNA, 19 nt, Artificial Sequence
  Description of Artificial Sequence: Synthetic oligonucleotide
  Sense strand starting at position 2140 of SEQ ID NO: 915110
gguauugaauaagugauau

SEQ ID NO: 1054525 - RNA, 19 nt, Artificial Sequence
  Description of Artificial Sequence: Synthetic oligonucleotide
  Antisense strand to SEQ ID NO: 1054524
auaucacuuauucaauacc

SEQ ID NO: 1054526 - RNA, 19 nt, Artificial Sequence
  Description of Artificial Sequence: Synthetic oligonucleotide
  Sense strand starting at position 2228 of SEQ ID NO: 915110
cuaacagaggccugaguau

SEQ ID NO: 1054527 - RNA, 19 nt, Artificial Sequence
  Description of Artificial Sequence: Synthetic oligonucleotide
  Antisense strand to SEQ ID NO: 1054526
auacucaggccucuguuag

SEQ ID NO: 1054528 - RNA, 19 nt, Artificial Sequence
  Description of Artificial Sequence: Synthetic oligonucleotide
  Sense strand starting at position 2304 of SEQ ID NO: 915110
uccuuaucugaccagaagu

SEQ ID NO: 1054529 - RNA, 19 nt, Artificial Sequence
  Description of Artificial Sequence: Synthetic oligonucleotide
  Antisense strand to SEQ ID NO: 1054528
acuucuggucagauaagga

SEQ ID NO: 1054530 - RNA, 19 nt, Artificial Sequence
  Description of Artificial Sequence: Synthetic oligonucleotide
  Sense strand starting at position 2319 of SEQ ID NO: 915110
aaguauaaggcuugaagga

SEQ ID NO: 1054531 - RNA, 19 nt, Artificial Sequence
  Description of Artificial Sequence: Synthetic oligonucleotide
  Antisense strand to SEQ ID NO: 1054530
uccuucaagccuuauacuu

SEQ ID NO: 1054532 - RNA, 19 nt, Artificial Sequence
  Description of Artificial Sequence: Synthetic oligonucleotide
  Sense strand starting at position 2370 of SEQ ID NO: 915110
cguggguggagguaugaga

SEQ ID NO: 1054533 - RNA, 19 nt, Artificial Sequence
  Description of Artificial Sequence: Synthetic oligonucleotide
  Antisense strand to SEQ ID NO: 1054532
ucucauaccuccacccacg

SEQ ID NO: 1054534 - RNA, 19 nt, Artificial Sequence
  Description of Artificial Sequence: Synthetic oligonucleotide
  Sense strand starting at position 2393 of SEQ ID NO: 915110
augugaucccaagauguug

SEQ ID NO: 1054535 - RNA, 19 nt, Artificial Sequence
  Description of Artificial Sequence: Synthetic oligonucleotide
  Antisense strand to SEQ ID NO: 1054534
caacaucuugggaucacau

SEQ ID NO: 1054536 - RNA, 19 nt, Artificial Sequence
  Description of Artificial Sequence: Synthetic oligonucleotide
  Sense strand starting at position 2399 of SEQ ID NO: 915110
ucccaagauguuggaaauc

SEQ ID NO: 1054537 - RNA, 19 nt, Artificial Sequence
  Description of Artificial Sequence: Synthetic oligonucleotide
  Antisense strand to SEQ ID NO: 1054536
gauuuccaacaucuuggga

SEQ ID NO: 1054538 - RNA, 19 nt, Artificial Sequence
  Description of Artificial Sequence: Synthetic oligonucleotide
  Sense strand starting at position 2665 of SEQ ID NO: 915110
gucauugaauaugagauuu

SEQ ID NO: 1054539 - RNA, 19 nt, Artificial Sequence
  Description of Artificial Sequence: Synthetic oligonucleotide
  Antisense strand to SEQ ID NO: 1054538
aaaucucauauucaaugac

SEQ ID NO: 1054540 - RNA, 19 nt, Artificial Sequence
  Description of Artificial Sequence: Synthetic oligonucleotide
  Sense strand starting at position 2771 of SEQ ID NO: 915110
ugaguaggcagcuacaaau

SEQ ID NO: 1054541 - RNA, 19 nt, Artificial Sequence
  Description of Artificial Sequence: Synthetic oligonucleotide
  Antisense strand to SEQ ID NO: 1054540
auuuguagcugccuacuca

SEQ ID NO: 1054542 - RNA, 19 nt, Artificial Sequence
  Description of Artificial Sequence: Synthetic oligonucleotide
  Sense strand starting at position 2969 of SEQ ID NO: 915110
augugaaaucagcagugaa

SEQ ID NO: 1054543 - RNA, 19 nt, Artificial Sequence
  Description of Artificial Sequence: Synthetic oligonucleotide
  Antisense strand to SEQ ID NO: 1054542
uucacugcugauuucacau

SEQ ID NO: 1054544 - RNA, 19 nt, Artificial Sequence
  Description of Artificial Sequence: Synthetic oligonucleotide
  Sense strand starting at position 2992 of SEQ ID NO: 915110
agugaugugguuugaauaa

SEQ ID NO: 1054545 - RNA, 19 nt, Artificial Sequence
  Description of Artificial Sequence: Synthetic oligonucleotide
  Antisense strand to SEQ ID NO: 1054544
uuauucaaaccacaucacu

SEQ ID NO: 1054546 - RNA, 19 nt, Artificial Sequence
  Description of Artificial Sequence: Synthetic oligonucleotide
  Sense strand starting at position 3026 of SEQ ID NO: 915110
ucaugauguuagguaauau

SEQ ID NO: 1054547 - RNA, 19 nt, Artificial Sequence
  Description of Artificial Sequence: Synthetic oligonucleotide
  Antisense strand to SEQ ID NO: 1054546
auauuaccuaacaucauga

SEQ ID NO: 1054548 - RNA, 19 nt, Artificial Sequence
  Description of Artificial Sequence: Synthetic oligonucleotide
  Sense strand starting at position 3154 of SEQ ID NO: 915110
augaacuguccauaguaau

SEQ ID NO: 1054549 - RNA, 19 nt, Artificial Sequence
  Description of Artificial Sequence: Synthetic oligonucleotide
  Antisense strand to SEQ ID NO: 1054548
auuacuauggacaguucau

SEQ ID NO: 1054550 - RNA, 19 nt, Artificial Sequence
  Description of Artificial Sequence: Synthetic oligonucleotide
  Sense strand starting at position 3300 of SEQ ID NO: 915110
uuauaugucgaauggauaa

SEQ ID NO: 1054551 - RNA, 19 nt, Artificial Sequence
  Description of Artificial Sequence: Synthetic oligonucleotide
  Antisense strand to SEQ ID NO: 1054550
uuauccauucgacauauaa

SEQ ID NO: 1054552 - RNA, 19 nt, Artificial Sequence
  Description of Artificial Sequence: Synthetic oligonucleotide
  Sense strand starting at position 3404 of SEQ ID NO: 915110
ucaaaucacuuguuuagga

SEQ ID NO: 1054553 - RNA, 19 nt, Artificial Sequence
  Description of Artificial Sequence: Synthetic oligonucleotide
  Antisense strand to SEQ ID NO: 1054552
uccuaaacaagugauuuga

SEQ ID NO: 1054554 - RNA, 19 nt, Artificial Sequence
  Description of Artificial Sequence: Synthetic oligonucleotide
  Sense strand starting at position 3406 of SEQ ID NO: 915110
aaaucacuuguuuaggagu

SEQ ID NO: 1054555 - RNA, 19 nt, Artificial Sequence
  Description of Artificial Sequence: Synthetic oligonucleotide
  Antisense strand to SEQ ID NO: 1054554
acuccuaaacaagugauuu

SEQ ID NO: 1054556 - RNA, 19 nt, Artificial Sequence
  Description of Artificial Sequence: Synthetic oligonucleotide
  Sense strand starting at position 3436 of SEQ ID NO: 915110
acaacuucguaucuaagau

SEQ ID NO: 1054557 - RNA, 19 nt, Artificial Sequence
  Description of Artificial Sequence: Synthetic oligonucleotide
  Antisense strand to SEQ ID NO: 1054556
aucuuagauacgaaguugu

SEQ ID NO: 1054558 - RNA, 19 nt, Artificial Sequence
  Description of Artificial Sequence: Synthetic oligonucleotide
  Sense strand starting at position 3567 of SEQ ID NO: 915110
uuugaaaucugugucacaa

SEQ ID NO: 1054559 - RNA, 19 nt, Artificial Sequence
  Description of Artificial Sequence: Synthetic oligonucleotide
  Antisense strand to SEQ ID NO: 1054558
uugugacacagauuucaaa

SEQ ID NO: 1054560 - RNA, 19 nt, Artificial Sequence
  Description of Artificial Sequence: Synthetic oligonucleotide
  Sense strand starting at position 3670 of SEQ ID NO: 915110
auaauuguacaaugugaug

SEQ ID NO: 1054561 - RNA, 19 nt, Artificial Sequence
  Description of Artificial Sequence: Synthetic oligonucleotide
  Antisense strand to SEQ ID NO: 1054560
caucacauuguacaauuau

SEQ ID NO: 1054562 - RNA, 19 nt, Artificial Sequence
  Description of Artificial Sequence: Synthetic oligonucleotide
  Sense strand starting at position 396 of SEQ ID NO: 915111
uuguaauuaagaugugaga

SEQ ID NO: 1054563 - RNA, 19 nt, Artificial Sequence
  Description of Artificial Sequence: Synthetic oligonucleotide
  Antisense strand to SEQ ID NO: 1054562
ucucacaucuuaauuacaa

SEQ ID NO: 1054564 - RNA, 19 nt, Artificial Sequence
  Description of Artificial Sequence: Synthetic oligonucleotide
  Sense strand starting at position 398 of SEQ ID NO: 915111
guaauuaagaugugagaug

SEQ ID NO: 1054565 - RNA, 19 nt, Artificial Sequence
  Description of Artificial Sequence: Synthetic oligonucleotide
  Antisense strand to SEQ ID NO: 1054564
caucucacaucuuaauuac

SEQ ID NO: 1054566 - RNA, 19 nt, Artificial Sequence
  Description of Artificial Sequence: Synthetic oligonucleotide
  Sense strand starting at position 405 of SEQ ID NO: 915111
agaugugagauguggguuu

SEQ ID NO: 1054567 - RNA, 19 nt, Artificial Sequence
  Description of Artificial Sequence: Synthetic oligonucleotide
  Antisense strand to SEQ ID NO: 1054566
aaacccacaucucacaucu

SEQ ID NO: 1054568 - RNA, 19 nt, Artificial Sequence
  Description of Artificial Sequence: Synthetic oligonucleotide
  Sense strand starting at position 654 of SEQ ID NO: 915111
gauuaugguuuacuauagu

SEQ ID NO: 1054569 - RNA, 19 nt, Artificial Sequence
  Description of Artificial Sequence: Synthetic oligonucleotide
  Antisense strand to SEQ ID NO: 1054568
acuauaguaaaccauaauc

SEQ ID NO: 1054570 - RNA, 19 nt, Artificial Sequence
  Description of Artificial Sequence: Synthetic oligonucleotide
  Sense strand starting at position 811 of SEQ ID NO: 915111
augcguguuauucuuguga

SEQ ID NO: 1054571 - RNA, 19 nt, Artificial Sequence
  Description of Artificial Sequence: Synthetic oligonucleotide
  Antisense strand to SEQ ID NO: 1054570
ucacaagaauaacacgcau

SEQ ID NO: 1054572 - RNA, 19 nt, Artificial Sequence
  Description of Artificial Sequence: Synthetic oligonucleotide
  Sense strand starting at position 818 of SEQ ID NO: 915111
uuauucuugugacuuacca

SEQ ID NO: 1054573 - RNA, 19 nt, Artificial Sequence
  Description of Artificial Sequence: Synthetic oligonucleotide
  Antisense strand to SEQ ID NO: 1054572
ugguaagucacaagaauaa

SEQ ID NO: 1054574 - RNA, 19 nt, Artificial Sequence
  Description of Artificial Sequence: Synthetic oligonucleotide
  Sense strand starting at position 912 of SEQ ID NO: 915111
gacagauaccugcaaguuc

SEQ ID NO: 1054575 - RNA, 19 nt, Artificial Sequence
  Description of Artificial Sequence: Synthetic oligonucleotide
  Antisense strand to SEQ ID NO: 1054574
gaacuugcagguaucuguc

SEQ ID NO: 1054576 - RNA, 19 nt, Artificial Sequence
  Description of Artificial Sequence: Synthetic oligonucleotide
  Sense strand starting at position 2047 of SEQ ID NO: 915111
ugcaguaagucacuugaau

SEQ ID NO: 1054577 - RNA, 19 nt, Artificial Sequence
  Description of Artificial Sequence: Synthetic oligonucleotide
  Antisense strand to SEQ ID NO: 1054576
auucaagugacuuacugca

SEQ ID NO: 1054578 - RNA, 19 nt, Artificial Sequence
  Description of Artificial Sequence: Synthetic oligonucleotide
  Sense strand starting at position 2069 of SEQ ID NO: 915111
guuucuucugcuuauuaag

SEQ ID NO: 1054579 - RNA, 19 nt, Artificial Sequence
  Description of Artificial Sequence: Synthetic oligonucleotide
  Antisense strand to SEQ ID NO: 1054578
cuuaauaagcagaagaaac

SEQ ID NO: 1054580 - RNA, 19 nt, Artificial Sequence
  Description of Artificial Sequence: Synthetic oligonucleotide
  Sense strand starting at position 2200 of SEQ ID NO: 915111
caggauucugaaugugauu

SEQ ID NO: 1054581 - RNA, 19 nt, Artificial Sequence
  Description of Artificial Sequence: Synthetic oligonucleotide
  Antisense strand to SEQ ID NO: 1054580
aaucacauucagaauccug

SEQ ID NO: 1054582 - RNA, 19 nt, Artificial Sequence
  Description of Artificial Sequence: Synthetic oligonucleotide
  Sense strand starting at position 2227 of SEQ ID NO: 915111
ugguucuaaauguaguuua

SEQ ID NO: 1054583 - RNA, 19 nt, Artificial Sequence
  Description of Artificial Sequence: Synthetic oligonucleotide
  Antisense strand to SEQ ID NO: 1054582
uaaacuacauuuagaacca

SEQ ID NO: 1054584 - RNA, 19 nt, Artificial Sequence
  Description of Artificial Sequence: Synthetic oligonucleotide
  Sense strand starting at position 2241 of SEQ ID NO: 915111
guuuaaaucccgcaaacug

SEQ ID NO: 1054585 - RNA, 19 nt, Artificial Sequence
  Description of Artificial Sequence: Synthetic oligonucleotide
  Antisense strand to SEQ ID NO: 1054584
caguuugcgggauuuaaac

SEQ ID NO: 1054586 - RNA, 19 nt, Artificial Sequence
  Description of Artificial Sequence: Synthetic oligonucleotide
  Sense strand starting at position 2250 of SEQ ID NO: 915111
ccgcaaacugagggucaua

SEQ ID NO: 1054587 - RNA, 19 nt, Artificial Sequence
  Description of Artificial Sequence: Synthetic oligonucleotide
  Antisense strand to SEQ ID NO: 1054586
uaugacccucaguuugcgg

SEQ ID NO: 1054588 - RNA, 19 nt, Artificial Sequence
  Description of Artificial Sequence: Synthetic oligonucleotide
  Sense strand starting at position 2259 of SEQ ID NO: 915111
gagggucauagaugaggca

SEQ ID NO: 1054589 - RNA, 19 nt, Artificial Sequence
  Description of Artificial Sequence: Synthetic oligonucleotide
  Antisense strand to SEQ ID NO: 1054588
ugccucaucuaugacccuc

SEQ ID NO: 1054590 - RNA, 19 nt, Artificial Sequence
  Description of Artificial Sequence: Synthetic oligonucleotide
  Sense strand starting at position 2329 of SEQ ID NO: 915111
gaccaaacugguugccaaa

SEQ ID NO: 1054591 - RNA, 19 nt, Artificial Sequence
  Description of Artificial Sequence: Synthetic oligonucleotide
  Antisense strand to SEQ ID NO: 1054590
uuuggcaaccaguuugguc

SEQ ID NO: 1054592 - RNA, 19 nt, Artificial Sequence
  Description of Artificial Sequence: Synthetic oligonucleotide
  Sense strand starting at position 2434 of SEQ ID NO: 915111
uaggaaucacuauggcagu

SEQ ID NO: 1054593 - RNA, 19 nt, Artificial Sequence
  Description of Artificial Sequence: Synthetic oligonucleotide
  Antisense strand to SEQ ID NO: 1054592
acugccauagugauuccua

SEQ ID NO: 1054594 - RNA, 19 nt, Artificial Sequence
  Description of Artificial Sequence: Synthetic oligonucleotide
  Sense strand starting at position 2747 of SEQ ID NO: 915111
uggcauaaauaugugaauu

SEQ ID NO: 1054595 - RNA, 19 nt, Artificial Sequence
  Description of Artificial Sequence: Synthetic oligonucleotide
  Antisense strand to SEQ ID NO: 1054594
aauucacauauuuaugcca

SEQ ID NO: 1054596 - RNA, 19 nt, Artificial Sequence
  Description of Artificial Sequence: Synthetic oligonucleotide
  Sense strand starting at position 2757 of SEQ ID NO: 915111
augugaauuucccauagga

SEQ ID NO: 1054597 - RNA, 19 nt, Artificial Sequence
  Description of Artificial Sequence: Synthetic oligonucleotide
  Antisense strand to SEQ ID NO: 1054596
uccuaugggaaauucacau

SEQ ID NO: 1054598 - RNA, 19 nt, Artificial Sequence
  Description of Artificial Sequence: Synthetic oligonucleotide
  Sense strand starting at position 2781 of SEQ ID NO: 915111
gaugcuauaggaggucauu

SEQ ID NO: 1054599 - RNA, 19 nt, Artificial Sequence
  Description of Artificial Sequence: Synthetic oligonucleotide
  Antisense strand to SEQ ID NO: 1054598
aaugaccuccuauagcauc

SEQ ID NO: 1054600 - RNA, 19 nt, Artificial Sequence
  Description of Artificial Sequence: Synthetic oligonucleotide
  Sense strand starting at position 2790 of SEQ ID NO: 915111
ggaggucauuggagucaag

SEQ ID NO: 1054601 - RNA, 19 nt, Artificial Sequence
  Description of Artificial Sequence: Synthetic oligonucleotide
  Antisense strand to SEQ ID NO: 1054600
cuugacuccaaugaccucc

SEQ ID NO: 1054602 - RNA, 19 nt, Artificial Sequence
  Description of Artificial Sequence: Synthetic oligonucleotide
  Sense strand starting at position 2793 of SEQ ID NO: 915111
ggucauuggagucaaguca

SEQ ID NO: 1054603 - RNA, 19 nt, Artificial Sequence
  Description of Artificial Sequence: Synthetic oligonucleotide
  Antisense strand to SEQ ID NO: 1054602
ugacuugacuccaaugacc

SEQ ID NO: 1054604 - RNA, 19 nt, Artificial Sequence
  Description of Artificial Sequence: Synthetic oligonucleotide
  Sense strand starting at position 2805 of SEQ ID NO: 915111
caagucaccuuguugagau

SEQ ID NO: 1054605 - RNA, 19 nt, Artificial Sequence
  Description of Artificial Sequence: Synthetic oligonucleotide
  Antisense strand to SEQ ID NO: 1054604
aucucaacaaggugacuug

SEQ ID NO: 1054606 - RNA, 19 nt, Artificial Sequence
  Description of Artificial Sequence: Synthetic oligonucleotide
  Sense strand starting at position 2878 of SEQ ID NO: 915111
ugaggugggucucuuauga

SEQ ID NO: 1054607 - RNA, 19 nt, Artificial Sequence
  Description of Artificial Sequence: Synthetic oligonucleotide
  Antisense strand to SEQ ID NO: 1054606
ucauaagagacccaccuca

SEQ ID NO: 1054608 - RNA, 19 nt, Artificial Sequence
  Description of Artificial Sequence: Synthetic oligonucleotide
  Sense strand starting at position 3223 of SEQ ID NO: 915111
ccaccuuuccacuguauga

SEQ ID NO: 1054609 - RNA, 19 nt, Artificial Sequence
  Description of Artificial Sequence: Synthetic oligonucleotide
  Antisense strand to SEQ ID NO: 1054608
ucauacaguggaaaggugg

SEQ ID NO: 1054610 - RNA, 19 nt, Artificial Sequence
  Description of Artificial Sequence: Synthetic oligonucleotide
  Sense strand starting at position 3275 of SEQ ID NO: 915111
gaggacccaugcuuugaau

SEQ ID NO: 1054611 - RNA, 19 nt, Artificial Sequence
  Description of Artificial Sequence: Synthetic oligonucleotide
  Antisense strand to SEQ ID NO: 1054610
auucaaagcauggguccuc

SEQ ID NO: 1054612 - RNA, 19 nt, Artificial Sequence
  Description of Artificial Sequence: Synthetic oligonucleotide
  Sense strand starting at position 3295 of SEQ ID NO: 915111
gauagugaagcugaaguuu

SEQ ID NO: 1054613 - RNA, 19 nt, Artificial Sequence
  Description of Artificial Sequence: Synthetic oligonucleotide
  Antisense strand to SEQ ID NO: 1054612
aaacuucagcuucacuauc

SEQ ID NO: 1054614 - RNA, 19 nt, Artificial Sequence
  Description of Artificial Sequence: Synthetic oligonucleotide
  Sense strand starting at position 3418 of SEQ ID NO: 915111
aggugucauccaggagaag

SEQ ID NO: 1054615 - RNA, 19 nt, Artificial Sequence
  Description of Artificial Sequence: Synthetic oligonucleotide
  Antisense strand to SEQ ID NO: 1054614
cuucuccuggaugacaccu

SEQ ID NO: 1054616 - RNA, 19 nt, Artificial Sequence
  Description of Artificial Sequence: Synthetic oligonucleotide
  Sense strand starting at position 3484 of SEQ ID NO: 915111
auaauaucagcuugggaac

SEQ ID NO: 1054617 - RNA, 19 nt, Artificial Sequence
  Description of Artificial Sequence: Synthetic oligonucleotide
  Antisense strand to SEQ ID NO: 1054616
guucccaagcugauauuau

SEQ ID NO: 1054618 - RNA, 19 nt, Artificial Sequence
  Description of Artificial Sequence: Synthetic oligonucleotide
  Sense strand starting at position 3604 of SEQ ID NO: 915111
agacaaucuucgucucuga

SEQ ID NO: 1054619 - RNA, 19 nt, Artificial Sequence
  Description of Artificial Sequence: Synthetic oligonucleotide
  Antisense strand to SEQ ID NO: 1054618
ucagagacgaagauugucu

SEQ ID NO: 1054620 - RNA, 19 nt, Artificial Sequence
  Description of Artificial Sequence: Synthetic oligonucleotide
  Sense strand starting at position 3641 of SEQ ID NO: 915111
ggcauuagagauugaagca

SEQ ID NO: 1054621 - RNA, 19 nt, Artificial Sequence
  Description of Artificial Sequence: Synthetic oligonucleotide
  Antisense strand to SEQ ID NO: 1054620
ugcuucaaucucuaaugcc

SEQ ID NO: 1054622 - RNA, 19 nt, Artificial Sequence
  Description of Artificial Sequence: Synthetic oligonucleotide
  Sense strand starting at position 3682 of SEQ ID NO: 915111
cugaaaugcuuggcuuaca

SEQ ID NO: 1054623 - RNA, 19 nt, Artificial Sequence
  Description of Artificial Sequence: Synthetic oligonucleotide
  Antisense strand to SEQ ID NO: 1054622
uguaagccaagcauuucag

SEQ ID NO: 1054624 - RNA, 19 nt, Artificial Sequence
  Description of Artificial Sequence: Synthetic oligonucleotide
  Sense strand starting at position 3683 of SEQ ID NO: 915111
ugaaaugcuuggcuuacaa

SEQ ID NO: 1054625 - RNA, 19 nt, Artificial Sequence
  Description of Artificial Sequence: Synthetic oligonucleotide
  Antisense strand to SEQ ID NO: 1054624
uuguaagccaagcauuuca

SEQ ID NO: 1054626 - RNA, 19 nt, Artificial Sequence
  Description of Artificial Sequence: Synthetic oligonucleotide
  Sense strand starting at position 3824 of SEQ ID NO: 915111
ugguuugggcuugacuaga

SEQ ID NO: 1054627 - RNA, 19 nt, Artificial Sequence
  Description of Artificial Sequence: Synthetic oligonucleotide
  Antisense strand to SEQ ID NO: 1054626
ucuagucaagcccaaacca

SEQ ID NO: 1054628 - RNA, 19 nt, Artificial Sequence
  Description of Artificial Sequence: Synthetic oligonucleotide
  Sense strand starting at position 3843 of SEQ ID NO: 915111
gagggaacuguauguuucu

SEQ ID NO: 1054629 - RNA, 19 nt, Artificial Sequence
  Description of Artificial Sequence: Synthetic oligonucleotide
  Antisense strand to SEQ ID NO: 1054628
agaaacauacaguucccuc

SEQ ID NO: 1054630 - RNA, 19 nt, Artificial Sequence
  Description of Artificial Sequence: Synthetic oligonucleotide
  Sense strand starting at position 3852 of SEQ ID NO: 915111
guauguuucugagugacaa

SEQ ID NO: 1054631 - RNA, 19 nt, Artificial Sequence
  Description of Artificial Sequence: Synthetic oligonucleotide
  Antisense strand to SEQ ID NO: 1054630
uugucacucagaaacauac

SEQ ID NO: 1054632 - RNA, 19 nt, Artificial Sequence
  Description of Artificial Sequence: Synthetic oligonucleotide
  Sense strand starting at position 3853 of SEQ ID NO: 915111
uauguuucugagugacaau

SEQ ID NO: 1054633 - RNA, 19 nt, Artificial Sequence
  Description of Artificial Sequence: Synthetic oligonucleotide
  Antisense strand to SEQ ID NO: 1054632
auugucacucagaaacaua

SEQ ID NO: 1054634 - RNA, 19 nt, Artificial Sequence
  Description of Artificial Sequence: Synthetic oligonucleotide
  Sense strand starting at position 3862 of SEQ ID NO: 915111
gagugacaaucucugaucu

SEQ ID NO: 1054635 - RNA, 19 nt, Artificial Sequence
  Description of Artificial Sequence: Synthetic oligonucleotide
  Antisense strand to SEQ ID NO: 1054634
agaucagagauugucacuc

SEQ ID NO: 1054636 - RNA, 19 nt, Artificial Sequence
  Description of Artificial Sequence: Synthetic oligonucleotide
  Sense strand starting at position 3908 of SEQ ID NO: 915111
ccaguaguccugcacaaau

SEQ ID NO: 1054637 - RNA, 19 nt, Artificial Sequence
  Description of Artificial Sequence: Synthetic oligonucleotide
  Antisense strand to SEQ ID NO: 1054636
auuugugcaggacuacugg

SEQ ID NO: 1054638 - RNA, 19 nt, Artificial Sequence
  Description of Artificial Sequence: Synthetic oligonucleotide
  Sense strand starting at position 3918 of SEQ ID NO: 915111
ugcacaaauuguucugaau

SEQ ID NO: 1054639 - RNA, 19 nt, Artificial Sequence
  Description of Artificial Sequence: Synthetic oligonucleotide
  Antisense strand to SEQ ID NO: 1054638
auucagaacaauuugugca

SEQ ID NO: 1054640 - RNA, 19 nt, Artificial Sequence
  Description of Artificial Sequence: Synthetic oligonucleotide
  Sense strand starting at position 3927 of SEQ ID NO: 915111
uguucugaauucuuaaggu

SEQ ID NO: 1054641 - RNA, 19 nt, Artificial Sequence
  Description of Artificial Sequence: Synthetic oligonucleotide
  Antisense strand to SEQ ID NO: 1054640
accuuaagaauucagaaca

SEQ ID NO: 1054642 - RNA, 19 nt, Artificial Sequence
  Description of Artificial Sequence: Synthetic oligonucleotide
  Sense strand starting at position 15 of SEQ ID NO: 915112
uuggguucuguaugaugga

SEQ ID NO: 1054643 - RNA, 19 nt, Artificial Sequence
  Description of Artificial Sequence: Synthetic oligonucleotide
  Antisense strand to SEQ ID NO: 1054642
uccaucauacagaacccaa

SEQ ID NO: 1054644 - RNA, 19 nt, Artificial Sequence
  Description of Artificial Sequence: Synthetic oligonucleotide
  Sense strand starting at position 87 of SEQ ID NO: 915112
ucuuacccucuuggagauu

SEQ ID NO: 1054645 - RNA, 19 nt, Artificial Sequence
  Description of Artificial Sequence: Synthetic oligonucleotide
  Antisense strand to SEQ ID NO: 1054644
aaucuccaagaggguaaga

SEQ ID NO: 1054646 - RNA, 19 nt, Artificial Sequence
  Description of Artificial Sequence: Synthetic oligonucleotide
  Sense strand starting at position 96 of SEQ ID NO: 915112
cuuggagauuuacaugaca

SEQ ID NO: 1054647 - RNA, 19 nt, Artificial Sequence
  Description of Artificial Sequence: Synthetic oligonucleotide
  Antisense strand to SEQ ID NO: 1054646
ugucauguaaaucuccaag

SEQ ID NO: 1054648 - RNA, 19 nt, Artificial Sequence
  Description of Artificial Sequence: Synthetic oligonucleotide
  Sense strand starting at position 649 of SEQ ID NO: 915112
auagauuacuguuuaccau

SEQ ID NO: 1054649 - RNA, 19 nt, Artificial Sequence
  Description of Artificial Sequence: Synthetic oligonucleotide
  Antisense strand to SEQ ID NO: 1054648
augguaaacaguaaucuau

SEQ ID NO: 1054650 - RNA, 19 nt, Artificial Sequence
  Description of Artificial Sequence: Synthetic oligonucleotide
  Sense strand starting at position 810 of SEQ ID NO: 915112
augcguguuauucuuguga

SEQ ID NO: 1054651 - RNA, 19 nt, Artificial Sequence
  Description of Artificial Sequence: Synthetic oligonucleotide
  Antisense strand to SEQ ID NO: 1054650
ucacaagaauaacacgcau

SEQ ID NO: 1054652 - RNA, 19 nt, Artificial Sequence
  Description of Artificial Sequence: Synthetic oligonucleotide
  Sense strand starting at position 911 of SEQ ID NO: 915112
gacagacaucugcaaguuc

SEQ ID NO: 1054653 - RNA, 19 nt, Artificial Sequence
  Description of Artificial Sequence: Synthetic oligonucleotide
  Antisense strand to SEQ ID NO: 1054652
gaacuugcagaugucuguc

SEQ ID NO: 1054654 - RNA, 19 nt, Artificial Sequence
  Description of Artificial Sequence: Synthetic oligonucleotide
  Sense strand starting at position 1200 of SEQ ID NO: 915112
gguuccguagaacaguaau

SEQ ID NO: 1054655 - RNA, 19 nt, Artificial Sequence
  Description of Artificial Sequence: Synthetic oligonucleotide
  Antisense strand to SEQ ID NO: 1054654
auuacuguucuacggaacc

SEQ ID NO: 1054656 - RNA, 19 nt, Artificial Sequence
  Description of Artificial Sequence: Synthetic oligonucleotide
  Sense strand starting at position 1245 of SEQ ID NO: 915112
ggagaaggcuuuccacuuu

SEQ ID NO: 1054657 - RNA, 19 nt, Artificial Sequence
  Description of Artificial Sequence: Synthetic oligonucleotide
  Antisense strand to SEQ ID NO: 1054656
aaaguggaaagccuucucc

SEQ ID NO: 1054658 - RNA, 19 nt, Artificial Sequence
  Description of Artificial Sequence: Synthetic oligonucleotide
  Sense strand starting at position 1261 of SEQ ID NO: 915112
uuucccuguguggaugaua

SEQ ID NO: 1054659 - RNA, 19 nt, Artificial Sequence
  Description of Artificial Sequence: Synthetic oligonucleotide
  Antisense strand to SEQ ID NO: 1054658
uaucauccacacagggaaa

SEQ ID NO: 1054660 - RNA, 19 nt, Artificial Sequence
  Description of Artificial Sequence: Synthetic oligonucleotide
  Sense strand starting at position 1379 of SEQ ID NO: 915112
ugaucauuguaucugaaca

SEQ ID NO: 1054661 - RNA, 19 nt, Artificial Sequence
  Description of Artificial Sequence: Synthetic oligonucleotide
  Antisense strand to SEQ ID NO: 1054660
uguucagauacaaugauca

SEQ ID NO: 1054662 - RNA, 19 nt, Artificial Sequence
  Description of Artificial Sequence: Synthetic oligonucleotide
  Sense strand starting at position 1427 of SEQ ID NO: 915112
agaagaagugugggagagu

SEQ ID NO: 1054663 - RNA, 19 nt, Artificial Sequence
  Description of Artificial Sequence: Synthetic oligonucleotide
  Antisense strand to SEQ ID NO: 1054662
acucucccacacuucuucu

SEQ ID NO: 1054664 - RNA, 19 nt, Artificial Sequence
  Description of Artificial Sequence: Synthetic oligonucleotide
  Sense strand starting at position 1442 of SEQ ID NO: 915112
gaguguuguggucacagaa

SEQ ID NO: 1054665 - RNA, 19 nt, Artificial Sequence
  Description of Artificial Sequence: Synthetic oligonucleotide
  Antisense strand to SEQ ID NO: 1054664
uucugugaccacaacacuc

SEQ ID NO: 1054666 - RNA, 19 nt, Artificial Sequence
  Description of Artificial Sequence: Synthetic oligonucleotide
  Sense strand starting at position 1487 of SEQ ID NO: 915112
guguaagagcaauaauauu

SEQ ID NO: 1054667 - RNA, 19 nt, Artificial Sequence
  Description of Artificial Sequence: Synthetic oligonucleotide
  Antisense strand to SEQ ID NO: 1054666
aauauuauugcucuuacac

SEQ ID NO: 1054668 - RNA, 19 nt, Artificial Sequence
  Description of Artificial Sequence: Synthetic oligonucleotide
  Sense strand starting at position 1517 of SEQ ID NO: 915112
acgagaugacugugagcaa

SEQ ID NO: 1054669 - RNA, 19 nt, Artificial Sequence
  Description of Artificial Sequence: Synthetic oligonucleotide
  Antisense strand to SEQ ID NO: 1054668
uugcucacagucaucucgu

SEQ ID NO: 1054670 - RNA, 19 nt, Artificial Sequence
  Description of Artificial Sequence: Synthetic oligonucleotide
  Sense strand starting at position 1520 of SEQ ID NO: 915112
agaugacugugagcaaagu

SEQ ID NO: 1054671 - RNA, 19 nt, Artificial Sequence
  Description of Artificial Sequence: Synthetic oligonucleotide
  Antisense strand to SEQ ID NO: 1054670
acuuugcucacagucaucu

SEQ ID NO: 1054672 - RNA, 19 nt, Artificial Sequence
  Description of Artificial Sequence: Synthetic oligonucleotide
  Sense strand starting at position 1542 of SEQ ID NO: 915112
gaaccuggcccgcaugaaa

SEQ ID NO: 1054673 - RNA, 19 nt, Artificial Sequence
  Description of Artificial Sequence: Synthetic oligonucleotide
  Antisense strand to SEQ ID NO: 1054672
uuucaugcgggccagguuc

SEQ ID NO: 1054674 - RNA, 19 nt, Artificial Sequence
  Description of Artificial Sequence: Synthetic oligonucleotide
  Sense strand starting at position 1811 of SEQ ID NO: 915112
agcugauagccacaaugau

SEQ ID NO: 1054675 - RNA, 19 nt, Artificial Sequence
  Description of Artificial Sequence: Synthetic oligonucleotide
  Antisense strand to SEQ ID NO: 1054674
aucauuguggcuaucagcu

SEQ ID NO: 1054676 - RNA, 19 nt, Artificial Sequence
  Description of Artificial Sequence: Synthetic oligonucleotide
  Sense strand starting at position 1956 of SEQ ID NO: 915112
augcauauuucugcugauc

SEQ ID NO: 1054677 - RNA, 19 nt, Artificial Sequence
  Description of Artificial Sequence: Synthetic oligonucleotide
  Antisense strand to SEQ ID NO: 1054676
gaucagcagaaauaugcau

SEQ ID NO: 1054678 - RNA, 19 nt, Artificial Sequence
  Description of Artificial Sequence: Synthetic oligonucleotide
  Sense strand starting at position 2062 of SEQ ID NO: 915112
cuuuaagcugaugagcaau

SEQ ID NO: 1054679 - RNA, 19 nt, Artificial Sequence
  Description of Artificial Sequence: Synthetic oligonucleotide
  Antisense strand to SEQ ID NO: 1054678
auugcucaucagcuuaaag

SEQ ID NO: 1054680 - RNA, 19 nt, Artificial Sequence
  Description of Artificial Sequence: Synthetic oligonucleotide
  Sense strand starting at position 2068 of SEQ ID NO: 915112
gcugaugagcaauaaagcu

SEQ ID NO: 1054681 - RNA, 19 nt, Artificial Sequence
  Description of Artificial Sequence: Synthetic oligonucleotide
  Antisense strand to SEQ ID NO: 1054680
agcuuuauugcucaucagc

SEQ ID NO: 1054682 - RNA, 19 nt, Artificial Sequence
  Description of Artificial Sequence: Synthetic oligonucleotide
  Sense strand starting at position 2176 of SEQ ID NO: 915112
auggcagauucuucucaau

SEQ ID NO: 1054683 - RNA, 19 nt, Artificial Sequence
  Description of Artificial Sequence: Synthetic oligonucleotide
  Antisense strand to SEQ ID NO: 1054682
auugagaagaaucugccau

SEQ ID NO: 1054684 - RNA, 19 nt, Artificial Sequence
  Description of Artificial Sequence: Synthetic oligonucleotide
  Sense strand starting at position 2178 of SEQ ID NO: 915112
ggcagauucuucucaauga

SEQ ID NO: 1054685 - RNA, 19 nt, Artificial Sequence
  Description of Artificial Sequence: Synthetic oligonucleotide
  Antisense strand to SEQ ID NO: 1054684
ucauugagaagaaucugcc

SEQ ID NO: 1054686 - RNA, 19 nt, Artificial Sequence
  Description of Artificial Sequence: Synthetic oligonucleotide
  Sense strand starting at position 2215 of SEQ ID NO: 915112
cagaauucugaaugugauu

SEQ ID NO: 1054687 - RNA, 19 nt, Artificial Sequence
  Description of Artificial Sequence: Synthetic oligonucleotide
  Antisense strand to SEQ ID NO: 1054686
aaucacauucagaauucug

SEQ ID NO: 1054688 - RNA, 19 nt, Artificial Sequence
  Description of Artificial Sequence: Synthetic oligonucleotide
  Sense strand starting at position 2242 of SEQ ID NO: 915112
ugguucuaaauguagguua

SEQ ID NO: 1054689 - RNA, 19 nt, Artificial Sequence
  Description of Artificial Sequence: Synthetic oligonucleotide
  Antisense strand to SEQ ID NO: 1054688
uaaccuacauuuagaacca

SEQ ID NO: 1054690 - RNA, 19 nt, Artificial Sequence
  Description of Artificial Sequence: Synthetic oligonucleotide
  Sense strand starting at position 2244 of SEQ ID NO: 915112
guucuaaauguagguuaaa

SEQ ID NO: 1054691 - RNA, 19 nt, Artificial Sequence
  Description of Artificial Sequence: Synthetic oligonucleotide
  Antisense strand to SEQ ID NO: 1054690
uuuaaccuacauuuagaac

SEQ ID NO: 1054692 - RNA, 19 nt, Artificial Sequence
  Description of Artificial Sequence: Synthetic oligonucleotide
  Sense strand starting at position 2305 of SEQ ID NO: 915112
uagagauguuagguacaug

SEQ ID NO: 1054693 - RNA, 19 nt, Artificial Sequence
  Description of Artificial Sequence: Synthetic oligonucleotide
  Antisense strand to SEQ ID NO: 1054692
cauguaccuaacaucucua

SEQ ID NO: 1054694 - RNA, 19 nt, Artificial Sequence
  Description of Artificial Sequence: Synthetic oligonucleotide
  Sense strand starting at position 2306 of SEQ ID NO: 915112
agagauguuagguacaugu

SEQ ID NO: 1054695 - RNA, 19 nt, Artificial Sequence
  Description of Artificial Sequence: Synthetic oligonucleotide
  Antisense strand to SEQ ID NO: 1054694
acauguaccuaacaucucu

SEQ ID NO: 1054696 - RNA, 19 nt, Artificial Sequence
  Description of Artificial Sequence: Synthetic oligonucleotide
  Sense strand starting at position 2462 of SEQ ID NO: 915112
uaggaauggcuaugggagu

SEQ ID NO: 1054697 - RNA, 19 nt, Artificial Sequence
  Description of Artificial Sequence: Synthetic oligonucleotide
  Antisense strand to SEQ ID NO: 1054696
acucccauagccauuccua

SEQ ID NO: 1054698 - RNA, 19 nt, Artificial Sequence
  Description of Artificial Sequence: Synthetic oligonucleotide
  Sense strand starting at position 2757 of SEQ ID NO: 915112
uggcauaaauaugugaauu

SEQ ID NO: 1054699 - RNA, 19 nt, Artificial Sequence
  Description of Artificial Sequence: Synthetic oligonucleotide
  Antisense strand to SEQ ID NO: 1054698
aauucacauauuuaugcca

SEQ ID NO: 1054700 - RNA, 19 nt, Artificial Sequence
  Description of Artificial Sequence: Synthetic oligonucleotide
  Sense strand starting at position 2791 of SEQ ID NO: 915112
gaugcuauaggaggucauu

SEQ ID NO: 1054701 - RNA, 19 nt, Artificial Sequence
  Description of Artificial Sequence: Synthetic oligonucleotide
  Antisense strand to SEQ ID NO: 1054700
aaugaccuccuauagcauc

SEQ ID NO: 1054702 - RNA, 19 nt, Artificial Sequence
  Description of Artificial Sequence: Synthetic oligonucleotide
  Sense strand starting at position 2803 of SEQ ID NO: 915112
ggucauuggagucaaguca

SEQ ID NO: 1054703 - RNA, 19 nt, Artificial Sequence
  Description of Artificial Sequence: Synthetic oligonucleotide
  Antisense strand to SEQ ID NO: 1054702
ugacuugacuccaaugacc

SEQ ID NO: 1054704 - RNA, 19 nt, Artificial Sequence
  Description of Artificial Sequence: Synthetic oligonucleotide
  Sense strand starting at position 2815 of SEQ ID NO: 915112
caagucaccuuguugagau

SEQ ID NO: 1054705 - RNA, 19 nt, Artificial Sequence
  Description of Artificial Sequence: Synthetic oligonucleotide
  Antisense strand to SEQ ID NO: 1054704
aucucaacaaggugacuug

SEQ ID NO: 1054706 - RNA, 19 nt, Artificial Sequence
  Description of Artificial Sequence: Synthetic oligonucleotide
  Sense strand starting at position 3357 of SEQ ID NO: 915112
ggaaaugggucuucaguau

SEQ ID NO: 1054707 - RNA, 19 nt, Artificial Sequence
  Description of Artificial Sequence: Synthetic oligonucleotide
  Antisense strand to SEQ ID NO: 1054706
auacugaagacccauuucc

SEQ ID NO: 1054708 - RNA, 19 nt, Artificial Sequence
  Description of Artificial Sequence: Synthetic oligonucleotide
  Sense strand starting at position 3431 of SEQ ID NO: 915112
aggugucauccaggagaag

SEQ ID NO: 1054709 - RNA, 19 nt, Artificial Sequence
  Description of Artificial Sequence: Synthetic oligonucleotide
  Antisense strand to SEQ ID NO: 1054708
cuucuccuggaugacaccu

SEQ ID NO: 1054710 - RNA, 19 nt, Artificial Sequence
  Description of Artificial Sequence: Synthetic oligonucleotide
  Sense strand starting at position 3671 of SEQ ID NO: 915112
cugaaaggcauuggagauu

SEQ ID NO: 1054711 - RNA, 19 nt, Artificial Sequence
  Description of Artificial Sequence: Synthetic oligonucleotide
  Antisense strand to SEQ ID NO: 1054710
aaucuccaaugccuuucag

SEQ ID NO: 1054712 - RNA, 19 nt, Artificial Sequence
  Description of Artificial Sequence: Synthetic oligonucleotide
  Sense strand starting at position 3690 of SEQ ID NO: 915112
gaggcagagaucugaaguu

SEQ ID NO: 1054713 - RNA, 19 nt, Artificial Sequence
  Description of Artificial Sequence: Synthetic oligonucleotide
  Antisense strand to SEQ ID NO: 1054712
aacuucagaucucugccuc

SEQ ID NO: 1054714 - RNA, 19 nt, Artificial Sequence
  Description of Artificial Sequence: Synthetic oligonucleotide
  Sense strand starting at position 3860 of SEQ ID NO: 915112
ugguuugcacuugacuaga

SEQ ID NO: 1054715 - RNA, 19 nt, Artificial Sequence
  Description of Artificial Sequence: Synthetic oligonucleotide
  Antisense strand to SEQ ID NO: 1054714
ucuagucaagugcaaacca

SEQ ID NO: 1054716 - RNA, 19 nt, Artificial Sequence
  Description of Artificial Sequence: Synthetic oligonucleotide
  Sense strand starting at position 3880 of SEQ ID NO: 915112
gggagaauuguauguuucu

SEQ ID NO: 1054717 - RNA, 19 nt, Artificial Sequence
  Description of Artificial Sequence: Synthetic oligonucleotide
  Antisense strand to SEQ ID NO: 1054716
agaaacauacaauucuccc

SEQ ID NO: 1054718 - RNA, 19 nt, Artificial Sequence
  Description of Artificial Sequence: Synthetic oligonucleotide
  Sense strand starting at position 3881 of SEQ ID NO: 915112
ggagaauuguauguuucug

SEQ ID NO: 1054719 - RNA, 19 nt, Artificial Sequence
  Description of Artificial Sequence: Synthetic oligonucleotide
  Antisense strand to SEQ ID NO: 1054718
cagaaacauacaauucucc

SEQ ID NO: 1054720 - RNA, 19 nt, Artificial Sequence
  Description of Artificial Sequence: Synthetic oligonucleotide
  Sense strand starting at position 3946 of SEQ ID NO: 915112
ccaguaguccugcauaaac

SEQ ID NO: 1054721 - RNA, 19 nt, Artificial Sequence
  Description of Artificial Sequence: Synthetic oligonucleotide
  Antisense strand to SEQ ID NO: 1054720
guuuaugcaggacuacugg

SEQ ID NO: 1054722 - RNA, 19 nt, Artificial Sequence
  Description of Artificial Sequence: Synthetic oligonucleotide
  Sense strand starting at position 133 of SEQ ID NO: 915113
cuaauaguagugcagcaua

SEQ ID NO: 1054723 - RNA, 19 nt, Artificial Sequence
  Description of Artificial Sequence: Synthetic oligonucleotide
  Antisense strand to SEQ ID NO: 1054722
uaugcugcacuacuauuag

SEQ ID NO: 1054724 - RNA, 19 nt, Artificial Sequence
  Description of Artificial Sequence: Synthetic oligonucleotide
  Sense strand starting at position 136 of SEQ ID NO: 915113
auaguagugcagcauaauu

SEQ ID NO: 1054725 - RNA, 19 nt, Artificial Sequence
  Description of Artificial Sequence: Synthetic oligonucleotide
  Antisense strand to SEQ ID NO: 1054724
aauuaugcugcacuacuau

SEQ ID NO: 1054726 - RNA, 19 nt, Artificial Sequence
  Description of Artificial Sequence: Synthetic oligonucleotide
  Sense strand starting at position 138 of SEQ ID NO: 915113
aguagugcagcauaauuaa

SEQ ID NO: 1054727 - RNA, 19 nt, Artificial Sequence
  Description of Artificial Sequence: Synthetic oligonucleotide
  Antisense strand to SEQ ID NO: 1054726
uuaauuaugcugcacuacu

SEQ ID NO: 1054728 - RNA, 19 nt, Artificial Sequence
  Description of Artificial Sequence: Synthetic oligonucleotide
  Sense strand starting at position 148 of SEQ ID NO: 915113
cauaauuaagcuggugaga

SEQ ID NO: 1054729 - RNA, 19 nt, Artificial Sequence
  Description of Artificial Sequence: Synthetic oligonucleotide
  Antisense strand to SEQ ID NO: 1054728
ucucaccagcuuaauuaug

SEQ ID NO: 1054730 - RNA, 19 nt, Artificial Sequence
  Description of Artificial Sequence: Synthetic oligonucleotide
  Sense strand starting at position 272 of SEQ ID NO: 915113
acaagauagccuuggauaa

SEQ ID NO: 1054731 - RNA, 19 nt, Artificial Sequence
  Description of Artificial Sequence: Synthetic oligonucleotide
  Antisense strand to SEQ ID NO: 1054730
uuauccaaggcuaucuugu

SEQ ID NO: 1054732 - RNA, 19 nt, Artificial Sequence
  Description of Artificial Sequence: Synthetic oligonucleotide
  Sense strand starting at position 338 of SEQ ID NO: 915113
agcaaaguuguuuaucaug

SEQ ID NO: 1054733 - RNA, 19 nt, Artificial Sequence
  Description of Artificial Sequence: Synthetic oligonucleotide
  Antisense strand to SEQ ID NO: 1054732
caugauaaacaacuuugcu

SEQ ID NO: 1054734 - RNA, 19 nt, Artificial Sequence
  Description of Artificial Sequence: Synthetic oligonucleotide
  Sense strand starting at position 344 of SEQ ID NO: 915113
guuguuuaucaugaaccuu

SEQ ID NO: 1054735 - RNA, 19 nt, Artificial Sequence
  Description of Artificial Sequence: Synthetic oligonucleotide
  Antisense strand to SEQ ID NO: 1054734
aagguucaugauaaacaac

SEQ ID NO: 1054736 - RNA, 19 nt, Artificial Sequence
  Description of Artificial Sequence: Synthetic oligonucleotide
  Sense strand starting at position 470 of SEQ ID NO: 915113
caaagacacuuguuagagu

SEQ ID NO: 1054737 - RNA, 19 nt, Artificial Sequence
  Description of Artificial Sequence: Synthetic oligonucleotide
  Antisense strand to SEQ ID NO: 1054736
acucuaacaagugucuuug

SEQ ID NO: 1054738 - RNA, 19 nt, Artificial Sequence
  Description of Artificial Sequence: Synthetic oligonucleotide
  Sense strand starting at position 495 of SEQ ID NO: 915113
uauggcugauguuuagaaa

SEQ ID NO: 1054739 - RNA, 19 nt, Artificial Sequence
  Description of Artificial Sequence: Synthetic oligonucleotide
  Antisense strand to SEQ ID NO: 1054738
uuucuaaacaucagccaua

SEQ ID NO: 1054740 - RNA, 19 nt, Artificial Sequence
  Description of Artificial Sequence: Synthetic oligonucleotide
  Sense strand starting at position 598 of SEQ ID NO: 915113
uaaggucaguuggucuaaa

SEQ ID NO: 1054741 - RNA, 19 nt, Artificial Sequence
  Description of Artificial Sequence: Synthetic oligonucleotide
  Antisense strand to SEQ ID NO: 1054740
uuuagaccaacugaccuua

SEQ ID NO: 1054742 - RNA, 19 nt, Artificial Sequence
  Description of Artificial Sequence: Synthetic oligonucleotide
  Sense strand starting at position 599 of SEQ ID NO: 915113
aaggucaguuggucuaaau

SEQ ID NO: 1054743 - RNA, 19 nt, Artificial Sequence
  Description of Artificial Sequence: Synthetic oligonucleotide
  Antisense strand to SEQ ID NO: 1054742
auuuagaccaacugaccuu

SEQ ID NO: 1054744 - RNA, 19 nt, Artificial Sequence
  Description of Artificial Sequence: Synthetic oligonucleotide
  Sense strand starting at position 2133 of SEQ ID NO: 915113
cugaaugucugacuucuca

SEQ ID NO: 1054745 - RNA, 19 nt, Artificial Sequence
  Description of Artificial Sequence: Synthetic oligonucleotide
  Antisense strand to SEQ ID NO: 1054744
ugagaagucagacauucag

SEQ ID NO: 1054746 - RNA, 19 nt, Artificial Sequence
  Description of Artificial Sequence: Synthetic oligonucleotide
  Sense strand starting at position 2140 of SEQ ID NO: 915113
ucugacuucucacuguauu

SEQ ID NO: 1054747 - RNA, 19 nt, Artificial Sequence
  Description of Artificial Sequence: Synthetic oligonucleotide
  Antisense strand to SEQ ID NO: 1054746
aauacagugagaagucaga

SEQ ID NO: 1054748 - RNA, 19 nt, Artificial Sequence
  Description of Artificial Sequence: Synthetic oligonucleotide
  Sense strand starting at position 2323 of SEQ ID NO: 915113
auccuugauuauccuugua

SEQ ID NO: 1054749 - RNA, 19 nt, Artificial Sequence
  Description of Artificial Sequence: Synthetic oligonucleotide
  Antisense strand to SEQ ID NO: 1054748
uacaaggauaaucaaggau

SEQ ID NO: 1054750 - RNA, 19 nt, Artificial Sequence
  Description of Artificial Sequence: Synthetic oligonucleotide
  Sense strand starting at position 2335 of SEQ ID NO: 915113
ccuuguaacuauccaguua

SEQ ID NO: 1054751 - RNA, 19 nt, Artificial Sequence
  Description of Artificial Sequence: Synthetic oligonucleotide
  Antisense strand to SEQ ID NO: 1054750
uaacuggauaguuacaagg

SEQ ID NO: 1054752 - RNA, 19 nt, Artificial Sequence
  Description of Artificial Sequence: Synthetic oligonucleotide
  Sense strand starting at position 2451 of SEQ ID NO: 915113
gccacauuuguuugcagua

SEQ ID NO: 1054753 - RNA, 19 nt, Artificial Sequence
  Description of Artificial Sequence: Synthetic oligonucleotide
  Antisense strand to SEQ ID NO: 1054752
uacugcaaacaaauguggc

SEQ ID NO: 1054754 - RNA, 19 nt, Artificial Sequence
  Description of Artificial Sequence: Synthetic oligonucleotide
  Sense strand starting at position 2481 of SEQ ID NO: 915113
agaugaaagccucauuagu

SEQ ID NO: 1054755 - RNA, 19 nt, Artificial Sequence
  Description of Artificial Sequence: Synthetic oligonucleotide
  Antisense strand to SEQ ID NO: 1054754
acuaaugaggcuuucaucu

SEQ ID NO: 1054756 - RNA, 19 nt, Artificial Sequence
  Description of Artificial Sequence: Synthetic oligonucleotide
  Sense strand starting at position 2483 of SEQ ID NO: 915113
augaaagccucauuaguag

SEQ ID NO: 1054757 - RNA, 19 nt, Artificial Sequence
  Description of Artificial Sequence: Synthetic oligonucleotide
  Antisense strand to SEQ ID NO: 1054756
cuacuaaugaggcuuucau

SEQ ID NO: 1054758 - RNA, 19 nt, Artificial Sequence
  Description of Artificial Sequence: Synthetic oligonucleotide
  Sense strand starting at position 2550 of SEQ ID NO: 915113
ucuacagaagcuugagaga

SEQ ID NO: 1054759 - RNA, 19 nt, Artificial Sequence
  Description of Artificial Sequence: Synthetic oligonucleotide
  Antisense strand to SEQ ID NO: 1054758
ucucucaagcuucuguaga

SEQ ID NO: 1054760 - RNA, 19 nt, Artificial Sequence
  Description of Artificial Sequence: Synthetic oligonucleotide
  Sense strand starting at position 2572 of SEQ ID NO: 915113
gggauaauggacugccuga

SEQ ID NO: 1054761 - RNA, 19 nt, Artificial Sequence
  Description of Artificial Sequence: Synthetic oligonucleotide
  Antisense strand to SEQ ID NO: 1054760
ucaggcaguccauuauccc

SEQ ID NO: 1054762 - RNA, 19 nt, Artificial Sequence
  Description of Artificial Sequence: Synthetic oligonucleotide
  Sense strand starting at position 2595 of SEQ ID NO: 915113
agagaauguuguguuugag

SEQ ID NO: 1054763 - RNA, 19 nt, Artificial Sequence
  Description of Artificial Sequence: Synthetic oligonucleotide
  Antisense strand to SEQ ID NO: 1054762
cucaaacacaacauucucu

SEQ ID NO: 1054764 - RNA, 19 nt, Artificial Sequence
  Description of Artificial Sequence: Synthetic oligonucleotide
  Sense strand starting at position 2598 of SEQ ID NO: 915113
gaauguuguguuugagaag

SEQ ID NO: 1054765 - RNA, 19 nt, Artificial Sequence
  Description of Artificial Sequence: Synthetic oligonucleotide
  Antisense strand to SEQ ID NO: 1054764
cuucucaaacacaacauuc

SEQ ID NO: 1054766 - RNA, 19 nt, Artificial Sequence
  Description of Artificial Sequence: Synthetic oligonucleotide
  Sense strand starting at position 2675 of SEQ ID NO: 915113
guuauauuaagaugugagc

SEQ ID NO: 1054767 - RNA, 19 nt, Artificial Sequence
  Description of Artificial Sequence: Synthetic oligonucleotide
  Antisense strand to SEQ ID NO: 1054766
gcucacaucuuaauauaac

SEQ ID NO: 1054768 - RNA, 19 nt, Artificial Sequence
  Description of Artificial Sequence: Synthetic oligonucleotide
  Sense strand starting at position 2694 of SEQ ID NO: 915113
uuggaagggcucugaaaua

SEQ ID NO: 1054769 - RNA, 19 nt, Artificial Sequence
  Description of Artificial Sequence: Synthetic oligonucleotide
  Antisense strand to SEQ ID NO: 1054768
uauuucagagcccuuccaa

SEQ ID NO: 1054770 - RNA, 19 nt, Artificial Sequence
  Description of Artificial Sequence: Synthetic oligonucleotide
  Sense strand starting at position 2734 of SEQ ID NO: 915113
ggaagaucaggauguuugu

SEQ ID NO: 1054771 - RNA, 19 nt, Artificial Sequence
  Description of Artificial Sequence: Synthetic oligonucleotide
  Antisense strand to SEQ ID NO: 1054770
acaaacauccugaucuucc

SEQ ID NO: 1054772 - RNA, 19 nt, Artificial Sequence
  Description of Artificial Sequence: Synthetic oligonucleotide
  Sense strand starting at position 2875 of SEQ ID NO: 915113
accuuuaaacuugguagaa

SEQ ID NO: 1054773 - RNA, 19 nt, Artificial Sequence
  Description of Artificial Sequence: Synthetic oligonucleotide
  Antisense strand to SEQ ID NO: 1054772
uucuaccaaguuuaaaggu

SEQ ID NO: 1054774 - RNA, 19 nt, Artificial Sequence
  Description of Artificial Sequence: Synthetic oligonucleotide
  Sense strand starting at position 2876 of SEQ ID NO: 915113
ccuuuaaacuugguagaag

SEQ ID NO: 1054775 - RNA, 19 nt, Artificial Sequence
  Description of Artificial Sequence: Synthetic oligonucleotide
  Antisense strand to SEQ ID NO: 1054774
cuucuaccaaguuuaaagg

SEQ ID NO: 1054776 - RNA, 19 nt, Artificial Sequence
  Description of Artificial Sequence: Synthetic oligonucleotide
  Sense strand starting at position 2990 of SEQ ID NO: 915113
cuaagauugacaggagucu

SEQ ID NO: 1054777 - RNA, 19 nt, Artificial Sequence
  Description of Artificial Sequence: Synthetic oligonucleotide
  Antisense strand to SEQ ID NO: 1054776
agacuccugucaaucuuag

SEQ ID NO: 1054778 - RNA, 19 nt, Artificial Sequence
  Description of Artificial Sequence: Synthetic oligonucleotide
  Sense strand starting at position 3152 of SEQ ID NO: 915113
ggccauuaguaccuuaaug

SEQ ID NO: 1054779 - RNA, 19 nt, Artificial Sequence
  Description of Artificial Sequence: Synthetic oligonucleotide
  Antisense strand to SEQ ID NO: 1054778
cauuaagguacuaauggcc

SEQ ID NO: 1054780 - RNA, 19 nt, Artificial Sequence
  Description of Artificial Sequence: Synthetic oligonucleotide
  Sense strand starting at position 3154 of SEQ ID NO: 915113
ccauuaguaccuuaauggu

SEQ ID NO: 1054781 - RNA, 19 nt, Artificial Sequence
  Description of Artificial Sequence: Synthetic oligonucleotide
  Antisense strand to SEQ ID NO: 1054780
accauuaagguacuaaugg

SEQ ID NO: 1054782 - RNA, 19 nt, Artificial Sequence
  Description of Artificial Sequence: Synthetic oligonucleotide
  Sense strand starting at position 3178 of SEQ ID NO: 915113
gguauaagaacaugcaaug

SEQ ID NO: 1054783 - RNA, 19 nt, Artificial Sequence
  Description of Artificial Sequence: Synthetic oligonucleotide
  Antisense strand to SEQ ID NO: 1054782
cauugcauguucuuauacc

SEQ ID NO: 1054784 - RNA, 19 nt, Artificial Sequence
  Description of Artificial Sequence: Synthetic oligonucleotide
  Sense strand starting at position 3407 of SEQ ID NO: 915113
ggcuaugaagcccaaacau

SEQ ID NO: 1054785 - RNA, 19 nt, Artificial Sequence
  Description of Artificial Sequence: Synthetic oligonucleotide
  Antisense strand to SEQ ID NO: 1054784
auguuugggcuucauagcc

SEQ ID NO: 1054786 - RNA, 19 nt, Artificial Sequence
  Description of Artificial Sequence: Synthetic oligonucleotide
  Sense strand starting at position 3581 of SEQ ID NO: 915113
cagacuuuccuagggauug

SEQ ID NO: 1054787 - RNA, 19 nt, Artificial Sequence
  Description of Artificial Sequence: Synthetic oligonucleotide
  Antisense strand to SEQ ID NO: 1054786
caaucccuaggaaagucug

SEQ ID NO: 1054788 - RNA, 19 nt, Artificial Sequence
  Description of Artificial Sequence: Synthetic oligonucleotide
  Sense strand starting at position 3586 of SEQ ID NO: 915113
uuuccuagggauuguuuga

SEQ ID NO: 1054789 - RNA, 19 nt, Artificial Sequence
  Description of Artificial Sequence: Synthetic oligonucleotide
  Antisense strand to SEQ ID NO: 1054788
ucaaacaaucccuaggaaa

SEQ ID NO: 1054790 - RNA, 19 nt, Artificial Sequence
  Description of Artificial Sequence: Synthetic oligonucleotide
  Sense strand starting at position 3612 of SEQ ID NO: 915113
ggauguuccagucgaaaug

SEQ ID NO: 1054791 - RNA, 19 nt, Artificial Sequence
  Description of Artificial Sequence: Synthetic oligonucleotide
  Antisense strand to SEQ ID NO: 1054790
cauuucgacuggaacaucc

SEQ ID NO: 1054792 - RNA, 19 nt, Artificial Sequence
  Description of Artificial Sequence: Synthetic oligonucleotide
  Sense strand starting at position 3755 of SEQ ID NO: 915113
gcaggucuacccuagagau

SEQ ID NO: 1054793 - RNA, 19 nt, Artificial Sequence
  Description of Artificial Sequence: Synthetic oligonucleotide
  Antisense strand to SEQ ID NO: 1054792
aucucuaggguagaccugc

SEQ ID NO: 1054794 - RNA, 19 nt, Artificial Sequence
  Description of Artificial Sequence: Synthetic oligonucleotide
  Sense strand starting at position 3808 of SEQ ID NO: 915113
uuggguaguuuccuauaua

SEQ ID NO: 1054795 - RNA, 19 nt, Artificial Sequence
  Description of Artificial Sequence: Synthetic oligonucleotide
  Antisense strand to SEQ ID NO: 1054794
uauauaggaaacuacccaa

SEQ ID NO: 1054796 - RNA, 19 nt, Artificial Sequence
  Description of Artificial Sequence: Synthetic oligonucleotide
  Sense strand starting at position 3811 of SEQ ID NO: 915113
gguaguuuccuauauagga

SEQ ID NO: 1054797 - RNA, 19 nt, Artificial Sequence
  Description of Artificial Sequence: Synthetic oligonucleotide
  Antisense strand to SEQ ID NO: 1054796
uccuauauaggaaacuacc

SEQ ID NO: 1054798 - RNA, 19 nt, Artificial Sequence
  Description of Artificial Sequence: Synthetic oligonucleotide
  Sense strand starting at position 3886 of SEQ ID NO: 915113
acagguugccagggagaga

SEQ ID NO: 1054799 - RNA, 19 nt, Artificial Sequence
  Description of Artificial Sequence: Synthetic oligonucleotide
  Antisense strand to SEQ ID NO: 1054798
ucucucccuggcaaccugu

SEQ ID NO: 1054800 - RNA, 19 nt, Artificial Sequence
  Description of Artificial Sequence: Synthetic oligonucleotide
  Sense strand starting at position 3930 of SEQ ID NO: 915113
cagacugaguucuuggguu

SEQ ID NO: 1054801 - RNA, 19 nt, Artificial Sequence
  Description of Artificial Sequence: Synthetic oligonucleotide
  Antisense strand to SEQ ID NO: 1054800
aacccaagaacucagucug

SEQ ID NO: 1054802 - RNA, 19 nt, Artificial Sequence
  Description of Artificial Sequence: Synthetic oligonucleotide
  Sense strand starting at position 450 of SEQ ID NO: 915114
ucaaguaaccaaugugaag

SEQ ID NO: 1054803 - RNA, 19 nt, Artificial Sequence
  Description of Artificial Sequence: Synthetic oligonucleotide
  Antisense strand to SEQ ID NO: 1054802
cuucacauugguuacuuga

SEQ ID NO: 1054804 - RNA, 19 nt, Artificial Sequence
  Description of Artificial Sequence: Synthetic oligonucleotide
  Sense strand starting at position 469 of SEQ ID NO: 915114
gucccuuaggucuagagua

SEQ ID NO: 1054805 - RNA, 19 nt, Artificial Sequence
  Description of Artificial Sequence: Synthetic oligonucleotide
  Antisense strand to SEQ ID NO: 1054804
uacucuagaccuaagggac

SEQ ID NO: 1054806 - RNA, 19 nt, Artificial Sequence
  Description of Artificial Sequence: Synthetic oligonucleotide
  Sense strand starting at position 471 of SEQ ID NO: 915114
cccuuaggucuagaguaca

SEQ ID NO: 1054807 - RNA, 19 nt, Artificial Sequence
  Description of Artificial Sequence: Synthetic oligonucleotide
  Antisense strand to SEQ ID NO: 1054806
uguacucuagaccuaaggg

SEQ ID NO: 1054808 - RNA, 19 nt, Artificial Sequence
  Description of Artificial Sequence: Synthetic oligonucleotide
  Sense strand starting at position 587 of SEQ ID NO: 915114
cucuauuaguaguuuaaga

SEQ ID NO: 1054809 - RNA, 19 nt, Artificial Sequence
  Description of Artificial Sequence: Synthetic oligonucleotide
  Antisense strand to SEQ ID NO: 1054808
ucuuaaacuacuaauagag

SEQ ID NO: 1054810 - RNA, 19 nt, Artificial Sequence
  Description of Artificial Sequence: Synthetic oligonucleotide
  Sense strand starting at position 818 of SEQ ID NO: 915114
uaacauggguuuccaaagu

SEQ ID NO: 1054811 - RNA, 19 nt, Artificial Sequence
  Description of Artificial Sequence: Synthetic oligonucleotide
  Antisense strand to SEQ ID NO: 1054810
acuuuggaaacccauguua

SEQ ID NO: 1054812 - RNA, 19 nt, Artificial Sequence
  Description of Artificial Sequence: Synthetic oligonucleotide
  Sense strand starting at position 850 of SEQ ID NO: 915114
gccaaaugaguuuaacuca

SEQ ID NO: 1054813 - RNA, 19 nt, Artificial Sequence
  Description of Artificial Sequence: Synthetic oligonucleotide
  Antisense strand to SEQ ID NO: 1054812
ugaguuaaacucauuuggc

SEQ ID NO: 1054814 - RNA, 19 nt, Artificial Sequence
  Description of Artificial Sequence: Synthetic oligonucleotide
  Sense strand starting at position 922 of SEQ ID NO: 915114
auguaucuaucaucucaga

SEQ ID NO: 1054815 - RNA, 19 nt, Artificial Sequence
  Description of Artificial Sequence: Synthetic oligonucleotide
  Antisense strand to SEQ ID NO: 1054814
ucugagaugauagauacau

SEQ ID NO: 1054816 - RNA, 19 nt, Artificial Sequence
  Description of Artificial Sequence: Synthetic oligonucleotide
  Sense strand starting at position 930 of SEQ ID NO: 915114
aucaucucagaguacagua

SEQ ID NO: 1054817 - RNA, 19 nt, Artificial Sequence
  Description of Artificial Sequence: Synthetic oligonucleotide
  Antisense strand to SEQ ID NO: 1054816
uacuguacucugagaugau

SEQ ID NO: 1054818 - RNA, 19 nt, Artificial Sequence
  Description of Artificial Sequence: Synthetic oligonucleotide
  Sense strand starting at position 1037 of SEQ ID NO: 915114
ccaugauccuucccuagag

SEQ ID NO: 1054819 - RNA, 19 nt, Artificial Sequence
  Description of Artificial Sequence: Synthetic oligonucleotide
  Antisense strand to SEQ ID NO: 1054818
cucuagggaaggaucaugg

SEQ ID NO: 1054820 - RNA, 19 nt, Artificial Sequence
  Description of Artificial Sequence: Synthetic oligonucleotide
  Sense strand starting at position 1155 of SEQ ID NO: 915114
agugacaauuguguagaaa

SEQ ID NO: 1054821 - RNA, 19 nt, Artificial Sequence
  Description of Artificial Sequence: Synthetic oligonucleotide
  Antisense strand to SEQ ID NO: 1054820
uuucuacacaauugucacu

SEQ ID NO: 1054822 - RNA, 19 nt, Artificial Sequence
  Description of Artificial Sequence: Synthetic oligonucleotide
  Sense strand starting at position 1234 of SEQ ID NO: 915114
guggcagcuccauagaaca

SEQ ID NO: 1054823 - RNA, 19 nt, Artificial Sequence
  Description of Artificial Sequence: Synthetic oligonucleotide
  Antisense strand to SEQ ID NO: 1054822
uguucuauggagcugccac

SEQ ID NO: 1054824 - RNA, 19 nt, Artificial Sequence
  Description of Artificial Sequence: Synthetic oligonucleotide
  Sense strand starting at position 1392 of SEQ ID NO: 915114
accugucacguauauuaua

SEQ ID NO: 1054825 - RNA, 19 nt, Artificial Sequence
  Description of Artificial Sequence: Synthetic oligonucleotide
  Antisense strand to SEQ ID NO: 1054824
uauaauauacgugacaggu

SEQ ID NO: 1054826 - RNA, 19 nt, Artificial Sequence
  Description of Artificial Sequence: Synthetic oligonucleotide
  Sense strand starting at position 1410 of SEQ ID NO: 915114
aagcucauaccuggaggua

SEQ ID NO: 1054827 - RNA, 19 nt, Artificial Sequence
  Description of Artificial Sequence: Synthetic oligonucleotide
  Antisense strand to SEQ ID NO: 1054826
uaccuccagguaugagcuu

SEQ ID NO: 1054828 - RNA, 19 nt, Artificial Sequence
  Description of Artificial Sequence: Synthetic oligonucleotide
  Sense strand starting at position 1411 of SEQ ID NO: 915114
agcucauaccuggagguau

SEQ ID NO: 1054829 - RNA, 19 nt, Artificial Sequence
  Description of Artificial Sequence: Synthetic oligonucleotide
  Antisense strand to SEQ ID NO: 1054828
auaccuccagguaugagcu

SEQ ID NO: 1054830 - RNA, 19 nt, Artificial Sequence
  Description of Artificial Sequence: Synthetic oligonucleotide
  Sense strand starting at position 1469 of SEQ ID NO: 915114
gcagaugccugauuuccca

SEQ ID NO: 1054831 - RNA, 19 nt, Artificial Sequence
  Description of Artificial Sequence: Synthetic oligonucleotide
  Antisense strand to SEQ ID NO: 1054830
ugggaaaucaggcaucugc

SEQ ID NO: 1054832 - RNA, 19 nt, Artificial Sequence
  Description of Artificial Sequence: Synthetic oligonucleotide
  Sense strand starting at position 1590 of SEQ ID NO: 915114
gcucaugagggucauguau

SEQ ID NO: 1054833 - RNA, 19 nt, Artificial Sequence
  Description of Artificial Sequence: Synthetic oligonucleotide
  Antisense strand to SEQ ID NO: 1054832
auacaugacccucaugagc

SEQ ID NO: 1054834 - RNA, 19 nt, Artificial Sequence
  Description of Artificial Sequence: Synthetic oligonucleotide
  Sense strand starting at position 1887 of SEQ ID NO: 915114
ugccaacauguauaggauu

SEQ ID NO: 1054835 - RNA, 19 nt, Artificial Sequence
  Description of Artificial Sequence: Synthetic oligonucleotide
  Antisense strand to SEQ ID NO: 1054834
aauccuauacauguuggca

SEQ ID NO: 1054836 - RNA, 19 nt, Artificial Sequence
  Description of Artificial Sequence: Synthetic oligonucleotide
  Sense strand starting at position 1893 of SEQ ID NO: 915114
cauguauaggauuguaaau

SEQ ID NO: 1054837 - RNA, 19 nt, Artificial Sequence
  Description of Artificial Sequence: Synthetic oligonucleotide
  Antisense strand to SEQ ID NO: 1054836
auuuacaauccuauacaug

SEQ ID NO: 1054838 - RNA, 19 nt, Artificial Sequence
  Description of Artificial Sequence: Synthetic oligonucleotide
  Sense strand starting at position 1906 of SEQ ID NO: 915114
guaaauguagcauagagca

SEQ ID NO: 1054839 - RNA, 19 nt, Artificial Sequence
  Description of Artificial Sequence: Synthetic oligonucleotide
  Antisense strand to SEQ ID NO: 1054838
ugcucuaugcuacauuuac

SEQ ID NO: 1054840 - RNA, 19 nt, Artificial Sequence
  Description of Artificial Sequence: Synthetic oligonucleotide
  Sense strand starting at position 2011 of SEQ ID NO: 915114
uuuaguugccuagaaccaa

SEQ ID NO: 1054841 - RNA, 19 nt, Artificial Sequence
  Description of Artificial Sequence: Synthetic oligonucleotide
  Antisense strand to SEQ ID NO: 1054840
uugguucuaggcaacuaaa

SEQ ID NO: 1054842 - RNA, 19 nt, Artificial Sequence
  Description of Artificial Sequence: Synthetic oligonucleotide
  Sense strand starting at position 2030 of SEQ ID NO: 915114
auauauuaucaguggaagc

SEQ ID NO: 1054843 - RNA, 19 nt, Artificial Sequence
  Description of Artificial Sequence: Synthetic oligonucleotide
  Antisense strand to SEQ ID NO: 1054842
gcuuccacugauaauauau

SEQ ID NO: 1054844 - RNA, 19 nt, Artificial Sequence
  Description of Artificial Sequence: Synthetic oligonucleotide
  Sense strand starting at position 2032 of SEQ ID NO: 915114
auauuaucaguggaagcuu

SEQ ID NO: 1054845 - RNA, 19 nt, Artificial Sequence
  Description of Artificial Sequence: Synthetic oligonucleotide
  Antisense strand to SEQ ID NO: 1054844
aagcuuccacugauaauau

SEQ ID NO: 1054846 - RNA, 19 nt, Artificial Sequence
  Description of Artificial Sequence: Synthetic oligonucleotide
  Sense strand starting at position 2095 of SEQ ID NO: 915114
ugcauuggccaauaggaau

SEQ ID NO: 1054847 - RNA, 19 nt, Artificial Sequence
  Description of Artificial Sequence: Synthetic oligonucleotide
  Antisense strand to SEQ ID NO: 1054846
auuccuauuggccaaugca

SEQ ID NO: 1054848 - RNA, 19 nt, Artificial Sequence
  Description of Artificial Sequence: Synthetic oligonucleotide
  Sense strand starting at position 2141 of SEQ ID NO: 915114
uuaguaugccucugauuuc

SEQ ID NO: 1054849 - RNA, 19 nt, Artificial Sequence
  Description of Artificial Sequence: Synthetic oligonucleotide
  Antisense strand to SEQ ID NO: 1054848
gaaaucagaggcauacuaa

SEQ ID NO: 1054850 - RNA, 19 nt, Artificial Sequence
  Description of Artificial Sequence: Synthetic oligonucleotide
  Sense strand starting at position 2144 of SEQ ID NO: 915114
guaugccucugauuucuga

SEQ ID NO: 1054851 - RNA, 19 nt, Artificial Sequence
  Description of Artificial Sequence: Synthetic oligonucleotide
  Antisense strand to SEQ ID NO: 1054850
ucagaaaucagaggcauac

SEQ ID NO: 1054852 - RNA, 19 nt, Artificial Sequence
  Description of Artificial Sequence: Synthetic oligonucleotide
  Sense strand starting at position 2276 of SEQ ID NO: 915114
agcaaacaucuuuguagau

SEQ ID NO: 1054853 - RNA, 19 nt, Artificial Sequence
  Description of Artificial Sequence: Synthetic oligonucleotide
  Antisense strand to SEQ ID NO: 1054852
aucuacaaagauguuugcu

SEQ ID NO: 1054854 - RNA, 19 nt, Artificial Sequence
  Description of Artificial Sequence: Synthetic oligonucleotide
  Sense strand starting at position 2277 of SEQ ID NO: 915114
gcaaacaucuuuguagaua

SEQ ID NO: 1054855 - RNA, 19 nt, Artificial Sequence
  Description of Artificial Sequence: Synthetic oligonucleotide
  Antisense strand to SEQ ID NO: 1054854
uaucuacaaagauguuugc

SEQ ID NO: 1054856 - RNA, 19 nt, Artificial Sequence
  Description of Artificial Sequence: Synthetic oligonucleotide
  Sense strand starting at position 2462 of SEQ ID NO: 915114
ugauuacuuuccucaguag

SEQ ID NO: 1054857 - RNA, 19 nt, Artificial Sequence
  Description of Artificial Sequence: Synthetic oligonucleotide
  Antisense strand to SEQ ID NO: 1054856
cuacugaggaaaguaauca

SEQ ID NO: 1054858 - RNA, 19 nt, Artificial Sequence
  Description of Artificial Sequence: Synthetic oligonucleotide
  Sense strand starting at position 2468 of SEQ ID NO: 915114
cuuuccucaguaggagaau

SEQ ID NO: 1054859 - RNA, 19 nt, Artificial Sequence
  Description of Artificial Sequence: Synthetic oligonucleotide
  Antisense strand to SEQ ID NO: 1054858
auucuccuacugaggaaag

SEQ ID NO: 1054860 - RNA, 19 nt, Artificial Sequence
  Description of Artificial Sequence: Synthetic oligonucleotide
  Sense strand starting at position 2477 of SEQ ID NO: 915114
guaggagaaucucuggguu

SEQ ID NO: 1054861 - RNA, 19 nt, Artificial Sequence
  Description of Artificial Sequence: Synthetic oligonucleotide
  Antisense strand to SEQ ID NO: 1054860
aacccagagauucuccuac

SEQ ID NO: 1054862 - RNA, 19 nt, Artificial Sequence
  Description of Artificial Sequence: Synthetic oligonucleotide
  Sense strand starting at position 2480 of SEQ ID NO: 915114
ggagaaucucuggguucuu

SEQ ID NO: 1054863 - RNA, 19 nt, Artificial Sequence
  Description of Artificial Sequence: Synthetic oligonucleotide
  Antisense strand to SEQ ID NO: 1054862
aagaacccagagauucucc

SEQ ID NO: 1054864 - RNA, 19 nt, Artificial Sequence
  Description of Artificial Sequence: Synthetic oligonucleotide
  Sense strand starting at position 2548 of SEQ ID NO: 915114
agagaauucugggcugaau

SEQ ID NO: 1054865 - RNA, 19 nt, Artificial Sequence
  Description of Artificial Sequence: Synthetic oligonucleotide
  Antisense strand to SEQ ID NO: 1054864
auucagcccagaauucucu

SEQ ID NO: 1054866 - RNA, 19 nt, Artificial Sequence
  Description of Artificial Sequence: Synthetic oligonucleotide
  Sense strand starting at position 2584 of SEQ ID NO: 915114
aucgauucuagagguaaau

SEQ ID NO: 1054867 - RNA, 19 nt, Artificial Sequence
  Description of Artificial Sequence: Synthetic oligonucleotide
  Antisense strand to SEQ ID NO: 1054866
auuuaccucuagaaucgau

SEQ ID NO: 1054868 - RNA, 19 nt, Artificial Sequence
  Description of Artificial Sequence: Synthetic oligonucleotide
  Sense strand starting at position 2586 of SEQ ID NO: 915114
cgauucuagagguaaaucu

SEQ ID NO: 1054869 - RNA, 19 nt, Artificial Sequence
  Description of Artificial Sequence: Synthetic oligonucleotide
  Antisense strand to SEQ ID NO: 1054868
agauuuaccucuagaaucg

SEQ ID NO: 1054870 - RNA, 19 nt, Artificial Sequence
  Description of Artificial Sequence: Synthetic oligonucleotide
  Sense strand starting at position 2710 of SEQ ID NO: 915114
guguuuagggcacaugaua

SEQ ID NO: 1054871 - RNA, 19 nt, Artificial Sequence
  Description of Artificial Sequence: Synthetic oligonucleotide
  Antisense strand to SEQ ID NO: 1054870
uaucaugugcccuaaacac

SEQ ID NO: 1054872 - RNA, 19 nt, Artificial Sequence
  Description of Artificial Sequence: Synthetic oligonucleotide
  Sense strand starting at position 3334 of SEQ ID NO: 915114
gagaacauauaagugaguu

SEQ ID NO: 1054873 - RNA, 19 nt, Artificial Sequence
  Description of Artificial Sequence: Synthetic oligonucleotide
  Antisense strand to SEQ ID NO: 1054872
aacucacuuauauguucuc

SEQ ID NO: 1054874 - RNA, 19 nt, Artificial Sequence
  Description of Artificial Sequence: Synthetic oligonucleotide
  Sense strand starting at position 3366 of SEQ ID NO: 915114
ucaccaaggaagugguaua

SEQ ID NO: 1054875 - RNA, 19 nt, Artificial Sequence
  Description of Artificial Sequence: Synthetic oligonucleotide
  Antisense strand to SEQ ID NO: 1054874
uauaccacuuccuugguga

SEQ ID NO: 1054876 - RNA, 19 nt, Artificial Sequence
  Description of Artificial Sequence: Synthetic oligonucleotide
  Sense strand starting at position 3525 of SEQ ID NO: 915114
cccagugaagucuggacaa

SEQ ID NO: 1054877 - RNA, 19 nt, Artificial Sequence
  Description of Artificial Sequence: Synthetic oligonucleotide
  Antisense strand to SEQ ID NO: 1054876
uuguccagacuucacuggg

SEQ ID NO: 1054878 - RNA, 19 nt, Artificial Sequence
  Description of Artificial Sequence: Synthetic oligonucleotide
  Sense strand starting at position 3674 of SEQ ID NO: 915114
ccuuauuugucuguugaca

SEQ ID NO: 1054879 - RNA, 19 nt, Artificial Sequence
  Description of Artificial Sequence: Synthetic oligonucleotide
  Antisense strand to SEQ ID NO: 1054878
ugucaacagacaaauaagg

SEQ ID NO: 1054880 - RNA, 19 nt, Artificial Sequence
  Description of Artificial Sequence: Synthetic oligonucleotide
  Sense strand starting at position 3808 of SEQ ID NO: 915114
acauaauuagcugggcaca

SEQ ID NO: 1054881 - RNA, 19 nt, Artificial Sequence
  Description of Artificial Sequence: Synthetic oligonucleotide
  Antisense strand to SEQ ID NO: 1054880
ugugcccagcuaauuaugu

SEQ ID NO: 1054882 - RNA, 19 nt, Artificial Sequence
  Description of Artificial Sequence: Synthetic oligonucleotide
  Sense strand starting at position 399 of SEQ ID NO: 915115
uauagugaugaauacguaa

SEQ ID NO: 1054883 - RNA, 19 nt, Artificial Sequence
  Description of Artificial Sequence: Synthetic oligonucleotide
  Antisense strand to SEQ ID NO: 1054882
uuacguauucaucacuaua

SEQ ID NO: 1054884 - RNA, 19 nt, Artificial Sequence
  Description of Artificial Sequence: Synthetic oligonucleotide
  Sense strand starting at position 432 of SEQ ID NO: 915115
gauggugacuccucgggau

SEQ ID NO: 1054885 - RNA, 19 nt, Artificial Sequence
  Description of Artificial Sequence: Synthetic oligonucleotide
  Antisense strand to SEQ ID NO: 1054884
aucccgaggagucaccauc

SEQ ID NO: 1054886 - RNA, 19 nt, Artificial Sequence
  Description of Artificial Sequence: Synthetic oligonucleotide
  Sense strand starting at position 434 of SEQ ID NO: 915115
uggugacuccucgggauag

SEQ ID NO: 1054887 - RNA, 19 nt, Artificial Sequence
  Description of Artificial Sequence: Synthetic oligonucleotide
  Antisense strand to SEQ ID NO: 1054886
cuaucccgaggagucacca

SEQ ID NO: 1054888 - RNA, 19 nt, Artificial Sequence
  Description of Artificial Sequence: Synthetic oligonucleotide
  Sense strand starting at position 436 of SEQ ID NO: 915115
gugacuccucgggauagau

SEQ ID NO: 1054889 - RNA, 19 nt, Artificial Sequence
  Description of Artificial Sequence: Synthetic oligonucleotide
  Antisense strand to SEQ ID NO: 1054888
aucuaucccgaggagucac

SEQ ID NO: 1054890 - RNA, 19 nt, Artificial Sequence
  Description of Artificial Sequence: Synthetic oligonucleotide
  Sense strand starting at position 462 of SEQ ID NO: 915115
agugauacugcugagucaa

SEQ ID NO: 1054891 - RNA, 19 nt, Artificial Sequence
  Description of Artificial Sequence: Synthetic oligonucleotide
  Antisense strand to SEQ ID NO: 1054890
uugacucagcaguaucacu

SEQ ID NO: 1054892 - RNA, 19 nt, Artificial Sequence
  Description of Artificial Sequence: Synthetic oligonucleotide
  Sense strand starting at position 505 of SEQ ID NO: 915115
guagguauugcgguagugu

SEQ ID NO: 1054893 - RNA, 19 nt, Artificial Sequence
  Description of Artificial Sequence: Synthetic oligonucleotide
  Antisense strand to SEQ ID NO: 1054892
acacuaccgcaauaccuac

SEQ ID NO: 1054894 - RNA, 19 nt, Artificial Sequence
  Description of Artificial Sequence: Synthetic oligonucleotide
  Sense strand starting at position 507 of SEQ ID NO: 915115
agguauugcgguaguguua

SEQ ID NO: 1054895 - RNA, 19 nt, Artificial Sequence
  Description of Artificial Sequence: Synthetic oligonucleotide
  Antisense strand to SEQ ID NO: 1054894
uaacacuaccgcaauaccu

SEQ ID NO: 1054896 - RNA, 19 nt, Artificial Sequence
  Description of Artificial Sequence: Synthetic oligonucleotide
  Sense strand starting at position 508 of SEQ ID NO: 915115
gguauugcgguaguguuau

SEQ ID NO: 1054897 - RNA, 19 nt, Artificial Sequence
  Description of Artificial Sequence: Synthetic oligonucleotide
  Antisense strand to SEQ ID NO: 1054896
auaacacuaccgcaauacc

SEQ ID NO: 1054898 - RNA, 19 nt, Artificial Sequence
  Description of Artificial Sequence: Synthetic oligonucleotide
  Sense strand starting at position 610 of SEQ ID NO: 915115
ugcuaaucugauuaaguga

SEQ ID NO: 1054899 - RNA, 19 nt, Artificial Sequence
  Description of Artificial Sequence: Synthetic oligonucleotide
  Antisense strand to SEQ ID NO: 1054898
ucacuuaaucagauuagca

SEQ ID NO: 1054900 - RNA, 19 nt, Artificial Sequence
  Description of Artificial Sequence: Synthetic oligonucleotide
  Sense strand starting at position 996 of SEQ ID NO: 915115
guuauuugguguccuggaa

SEQ ID NO: 1054901 - RNA, 19 nt, Artificial Sequence
  Description of Artificial Sequence: Synthetic oligonucleotide
  Antisense strand to SEQ ID NO: 1054900
uuccaggacaccaaauaac

SEQ ID NO: 1054902 - RNA, 19 nt, Artificial Sequence
  Description of Artificial Sequence: Synthetic oligonucleotide
  Sense strand starting at position 1014 of SEQ ID NO: 915115
agcagaguuagcugcauuu

SEQ ID NO: 1054903 - RNA, 19 nt, Artificial Sequence
  Description of Artificial Sequence: Synthetic oligonucleotide
  Antisense strand to SEQ ID NO: 1054902
aaaugcagcuaacucugcu

SEQ ID NO: 1054904 - RNA, 19 nt, Artificial Sequence
  Description of Artificial Sequence: Synthetic oligonucleotide
  Sense strand starting at position 1102 of SEQ ID NO: 915115
cuguuucucagcguguaaa

SEQ ID NO: 1054905 - RNA, 19 nt, Artificial Sequence
  Description of Artificial Sequence: Synthetic oligonucleotide
  Antisense strand to SEQ ID NO: 1054904
uuuacacgcugagaaacag

SEQ ID NO: 1054906 - RNA, 19 nt, Artificial Sequence
  Description of Artificial Sequence: Synthetic oligonucleotide
  Sense strand starting at position 1157 of SEQ ID NO: 915115
ccacauugcccaugauaug

SEQ ID NO: 1054907 - RNA, 19 nt, Artificial Sequence
  Description of Artificial Sequence: Synthetic oligonucleotide
  Antisense strand to SEQ ID NO: 1054906
cauaucaugggcaaugugg

SEQ ID NO: 1054908 - RNA, 19 nt, Artificial Sequence
  Description of Artificial Sequence: Synthetic oligonucleotide
  Sense strand starting at position 1164 of SEQ ID NO: 915115
gcccaugauauggaaguca

SEQ ID NO: 1054909 - RNA, 19 nt, Artificial Sequence
  Description of Artificial Sequence: Synthetic oligonucleotide
  Antisense strand to SEQ ID NO: 1054908
ugacuuccauaucaugggc

SEQ ID NO: 1054910 - RNA, 19 nt, Artificial Sequence
  Description of Artificial Sequence: Synthetic oligonucleotide
  Sense strand starting at position 1285 of SEQ ID NO: 915115
cguccuucuagggaacuga

SEQ ID NO: 1054911 - RNA, 19 nt, Artificial Sequence
  Description of Artificial Sequence: Synthetic oligonucleotide
  Antisense strand to SEQ ID NO: 1054910
ucaguucccuagaaggacg

SEQ ID NO: 1054912 - RNA, 19 nt, Artificial Sequence
  Description of Artificial Sequence: Synthetic oligonucleotide
  Sense strand starting at position 1491 of SEQ ID NO: 915115
cugggagguccuuacuacu

SEQ ID NO: 1054913 - RNA, 19 nt, Artificial Sequence
  Description of Artificial Sequence: Synthetic oligonucleotide
  Antisense strand to SEQ ID NO: 1054912
aguaguaaggaccucccag

SEQ ID NO: 1054914 - RNA, 19 nt, Artificial Sequence
  Description of Artificial Sequence: Synthetic oligonucleotide
  Sense strand starting at position 1676 of SEQ ID NO: 915115
agagguacaucugcaguaa

SEQ ID NO: 1054915 - RNA, 19 nt, Artificial Sequence
  Description of Artificial Sequence: Synthetic oligonucleotide
  Antisense strand to SEQ ID NO: 1054914
uuacugcagauguaccucu

SEQ ID NO: 1054916 - RNA, 19 nt, Artificial Sequence
  Description of Artificial Sequence: Synthetic oligonucleotide
  Sense strand starting at position 1677 of SEQ ID NO: 915115
gagguacaucugcaguaag

SEQ ID NO: 1054917 - RNA, 19 nt, Artificial Sequence
  Description of Artificial Sequence: Synthetic oligonucleotide
  Antisense strand to SEQ ID NO: 1054916
cuuacugcagauguaccuc

SEQ ID NO: 1054918 - RNA, 19 nt, Artificial Sequence
  Description of Artificial Sequence: Synthetic oligonucleotide
  Sense strand starting at position 1914 of SEQ ID NO: 915115
gaagaaggucucuggcaga

SEQ ID NO: 1054919 - RNA, 19 nt, Artificial Sequence
  Description of Artificial Sequence: Synthetic oligonucleotide
  Antisense strand to SEQ ID NO: 1054918
ucugccagagaccuucuuc

SEQ ID NO: 1054920 - RNA, 19 nt, Artificial Sequence
  Description of Artificial Sequence: Synthetic oligonucleotide
  Sense strand starting at position 1959 of SEQ ID NO: 915115
gggugagccauccacugau

SEQ ID NO: 1054921 - RNA, 19 nt, Artificial Sequence
  Description of Artificial Sequence: Synthetic oligonucleotide
  Antisense strand to SEQ ID NO: 1054920
aucaguggauggcucaccc

SEQ ID NO: 1054922 - RNA, 19 nt, Artificial Sequence
  Description of Artificial Sequence: Synthetic oligonucleotide
  Sense strand starting at position 2013 of SEQ ID NO: 915115
cuggauuucucagagaugg

SEQ ID NO: 1054923 - RNA, 19 nt, Artificial Sequence
  Description of Artificial Sequence: Synthetic oligonucleotide
  Antisense strand to SEQ ID NO: 1054922
ccaucucugagaaauccag

SEQ ID NO: 1054924 - RNA, 19 nt, Artificial Sequence
  Description of Artificial Sequence: Synthetic oligonucleotide
  Sense strand starting at position 2106 of SEQ ID NO: 915115
auguuuacucuguagguaa

SEQ ID NO: 1054925 - RNA, 19 nt, Artificial Sequence
  Description of Artificial Sequence: Synthetic oligonucleotide
  Antisense strand to SEQ ID NO: 1054924
uuaccuacagaguaaacau

SEQ ID NO: 1054926 - RNA, 19 nt, Artificial Sequence
  Description of Artificial Sequence: Synthetic oligonucleotide
  Sense strand starting at position 2245 of SEQ ID NO: 915115
aauagaagucuguaugcuu

SEQ ID NO: 1054927 - RNA, 19 nt, Artificial Sequence
  Description of Artificial Sequence: Synthetic oligonucleotide
  Antisense strand to SEQ ID NO: 1054926
aagcauacagacuucuauu

SEQ ID NO: 1054928 - RNA, 19 nt, Artificial Sequence
  Description of Artificial Sequence: Synthetic oligonucleotide
  Sense strand starting at position 2261 of SEQ ID NO: 915115
cuuuguuuaggugaugaag

SEQ ID NO: 1054929 - RNA, 19 nt, Artificial Sequence
  Description of Artificial Sequence: Synthetic oligonucleotide
  Antisense strand to SEQ ID NO: 1054928
cuucaucaccuaaacaaag

SEQ ID NO: 1054930 - RNA, 19 nt, Artificial Sequence
  Description of Artificial Sequence: Synthetic oligonucleotide
  Sense strand starting at position 2353 of SEQ ID NO: 915115
aacaguugauuguugaauu

SEQ ID NO: 1054931 - RNA, 19 nt, Artificial Sequence
  Description of Artificial Sequence: Synthetic oligonucleotide
  Antisense strand to SEQ ID NO: 1054930
aauucaacaaucaacuguu

SEQ ID NO: 1054932 - RNA, 19 nt, Artificial Sequence
  Description of Artificial Sequence: Synthetic oligonucleotide
  Sense strand starting at position 2748 of SEQ ID NO: 915115
ugaggaauaugggugccau

SEQ ID NO: 1054933 - RNA, 19 nt, Artificial Sequence
  Description of Artificial Sequence: Synthetic oligonucleotide
  Antisense strand to SEQ ID NO: 1054932
auggcacccauauuccuca

SEQ ID NO: 1054934 - RNA, 19 nt, Artificial Sequence
  Description of Artificial Sequence: Synthetic oligonucleotide
  Sense strand starting at position 2749 of SEQ ID NO: 915115
gaggaauaugggugccaua

SEQ ID NO: 1054935 - RNA, 19 nt, Artificial Sequence
  Description of Artificial Sequence: Synthetic oligonucleotide
  Antisense strand to SEQ ID NO: 1054934
uauggcacccauauuccuc

SEQ ID NO: 1054936 - RNA, 19 nt, Artificial Sequence
  Description of Artificial Sequence: Synthetic oligonucleotide
  Sense strand starting at position 2760 of SEQ ID NO: 915115
gugccauaaggaugagaug

SEQ ID NO: 1054937 - RNA, 19 nt, Artificial Sequence
  Description of Artificial Sequence: Synthetic oligonucleotide
  Antisense strand to SEQ ID NO: 1054936
caucucauccuuauggcac

SEQ ID NO: 1054938 - RNA, 19 nt, Artificial Sequence
  Description of Artificial Sequence: Synthetic oligonucleotide
  Sense strand starting at position 2866 of SEQ ID NO: 915115
caugauguggcuuagacuu

SEQ ID NO: 1054939 - RNA, 19 nt, Artificial Sequence
  Description of Artificial Sequence: Synthetic oligonucleotide
  Antisense strand to SEQ ID NO: 1054938
aagucuaagccacaucaug

SEQ ID NO: 1054940 - RNA, 19 nt, Artificial Sequence
  Description of Artificial Sequence: Synthetic oligonucleotide
  Sense strand starting at position 3018 of SEQ ID NO: 915115
cugaauucuggcuaugcaa

SEQ ID NO: 1054941 - RNA, 19 nt, Artificial Sequence
  Description of Artificial Sequence: Synthetic oligonucleotide
  Antisense strand to SEQ ID NO: 1054940
uugcauagccagaauucag

SEQ ID NO: 1054942 - RNA, 19 nt, Artificial Sequence
  Description of Artificial Sequence: Synthetic oligonucleotide
  Sense strand starting at position 3088 of SEQ ID NO: 915115
ccaugaucccaugaugcuu

SEQ ID NO: 1054943 - RNA, 19 nt, Artificial Sequence
  Description of Artificial Sequence: Synthetic oligonucleotide
  Antisense strand to SEQ ID NO: 1054942
aagcaucaugggaucaugg

SEQ ID NO: 1054944 - RNA, 19 nt, Artificial Sequence
  Description of Artificial Sequence: Synthetic oligonucleotide
  Sense strand starting at position 3167 of SEQ ID NO: 915115
uuacaaagauuugaagcua

SEQ ID NO: 1054945 - RNA, 19 nt, Artificial Sequence
  Description of Artificial Sequence: Synthetic oligonucleotide
  Antisense strand to SEQ ID NO: 1054944
uagcuucaaaucuuuguaa

SEQ ID NO: 1054946 - RNA, 19 nt, Artificial Sequence
  Description of Artificial Sequence: Synthetic oligonucleotide
  Sense strand starting at position 3175 of SEQ ID NO: 915115
auuugaagcuaugugugua

SEQ ID NO: 1054947 - RNA, 19 nt, Artificial Sequence
  Description of Artificial Sequence: Synthetic oligonucleotide
  Antisense strand to SEQ ID NO: 1054946
uacacacauagcuucaaau

SEQ ID NO: 1054948 - RNA, 19 nt, Artificial Sequence
  Description of Artificial Sequence: Synthetic oligonucleotide
  Sense strand starting at position 3236 of SEQ ID NO: 915115
cgaauuaagcuccaaacca

SEQ ID NO: 1054949 - RNA, 19 nt, Artificial Sequence
  Description of Artificial Sequence: Synthetic oligonucleotide
  Antisense strand to SEQ ID NO: 1054948
ugguuuggagcuuaauucg

SEQ ID NO: 1054950 - RNA, 19 nt, Artificial Sequence
  Description of Artificial Sequence: Synthetic oligonucleotide
  Sense strand starting at position 3478 of SEQ ID NO: 915115
gaggaaucugucugaugag

SEQ ID NO: 1054951 - RNA, 19 nt, Artificial Sequence
  Description of Artificial Sequence: Synthetic oligonucleotide
  Antisense strand to SEQ ID NO: 1054950
cucaucagacagauuccuc

SEQ ID NO: 1054952 - RNA, 19 nt, Artificial Sequence
  Description of Artificial Sequence: Synthetic oligonucleotide
  Sense strand starting at position 3533 of SEQ ID NO: 915115
uaauauucggugcacaaca

SEQ ID NO: 1054953 - RNA, 19 nt, Artificial Sequence
  Description of Artificial Sequence: Synthetic oligonucleotide
  Antisense strand to SEQ ID NO: 1054952
uguugugcaccgaauauua

SEQ ID NO: 1054954 - RNA, 19 nt, Artificial Sequence
  Description of Artificial Sequence: Synthetic oligonucleotide
  Sense strand starting at position 3635 of SEQ ID NO: 915115
uuaccugaguuagcaaaca

SEQ ID NO: 1054955 - RNA, 19 nt, Artificial Sequence
  Description of Artificial Sequence: Synthetic oligonucleotide
  Antisense strand to SEQ ID NO: 1054954
uguuugcuaacucagguaa

SEQ ID NO: 1054956 - RNA, 19 nt, Artificial Sequence
  Description of Artificial Sequence: Synthetic oligonucleotide
  Sense strand starting at position 3814 of SEQ ID NO: 915115
cucacuggauagguauaau

SEQ ID NO: 1054957 - RNA, 19 nt, Artificial Sequence
  Description of Artificial Sequence: Synthetic oligonucleotide
  Antisense strand to SEQ ID NO: 1054956
auuauaccuauccagugag

SEQ ID NO: 1054958 - RNA, 19 nt, Artificial Sequence
  Description of Artificial Sequence: Synthetic oligonucleotide
  Sense strand starting at position 3921 of SEQ ID NO: 915115
guauaucuucuguauacuu

SEQ ID NO: 1054959 - RNA, 19 nt, Artificial Sequence
  Description of Artificial Sequence: Synthetic oligonucleotide
  Antisense strand to SEQ ID NO: 1054958
aaguauacagaagauauac

SEQ ID NO: 1054960 - RNA, 19 nt, Artificial Sequence
  Description of Artificial Sequence: Synthetic oligonucleotide
  Sense strand starting at position 3948 of SEQ ID NO: 915115
uuugauacgguaugacuua

SEQ ID NO: 1054961 - RNA, 19 nt, Artificial Sequence
  Description of Artificial Sequence: Synthetic oligonucleotide
  Antisense strand to SEQ ID NO: 1054960
uaagucauaccguaucaaa

SEQ ID NO: 1054962 - RNA, 19 nt, Artificial Sequence
  Description of Artificial Sequence: Synthetic oligonucleotide
  Sense strand starting at position 177 of SEQ ID NO: 915116
uugggaauacagugugaug

SEQ ID NO: 1054963 - RNA, 19 nt, Artificial Sequence
  Description of Artificial Sequence: Synthetic oligonucleotide
  Antisense strand to SEQ ID NO: 1054962
caucacacuguauucccaa

SEQ ID NO: 1054964 - RNA, 19 nt, Artificial Sequence
  Description of Artificial Sequence: Synthetic oligonucleotide
  Sense strand starting at position 179 of SEQ ID NO: 915116
gggaauacagugugauguu

SEQ ID NO: 1054965 - RNA, 19 nt, Artificial Sequence
  Description of Artificial Sequence: Synthetic oligonucleotide
  Antisense strand to SEQ ID NO: 1054964
aacaucacacuguauuccc

SEQ ID NO: 1054966 - RNA, 19 nt, Artificial Sequence
  Description of Artificial Sequence: Synthetic oligonucleotide
  Sense strand starting at position 512 of SEQ ID NO: 915116
ucaugugaugcugagauac

SEQ ID NO: 1054967 - RNA, 19 nt, Artificial Sequence
  Description of Artificial Sequence: Synthetic oligonucleotide
  Antisense strand to SEQ ID NO: 1054966
guaucucagcaucacauga

SEQ ID NO: 1054968 - RNA, 19 nt, Artificial Sequence
  Description of Artificial Sequence: Synthetic oligonucleotide
  Sense strand starting at position 553 of SEQ ID NO: 915116
ccagguagugaguagguaa

SEQ ID NO: 1054969 - RNA, 19 nt, Artificial Sequence
  Description of Artificial Sequence: Synthetic oligonucleotide
  Antisense strand to SEQ ID NO: 1054968
uuaccuacucacuaccugg

SEQ ID NO: 1054970 - RNA, 19 nt, Artificial Sequence
  Description of Artificial Sequence: Synthetic oligonucleotide
  Sense strand starting at position 1147 of SEQ ID NO: 915116
ggauuaagcaugggaguca

SEQ ID NO: 1054971 - RNA, 19 nt, Artificial Sequence
  Description of Artificial Sequence: Synthetic oligonucleotide
  Antisense strand to SEQ ID NO: 1054970
ugacucccaugcuuaaucc

SEQ ID NO: 1054972 - RNA, 19 nt, Artificial Sequence
  Description of Artificial Sequence: Synthetic oligonucleotide
  Sense strand starting at position 1206 of SEQ ID NO: 915116
ggaagacuugggugucaug

SEQ ID NO: 1054973 - RNA, 19 nt, Artificial Sequence
  Description of Artificial Sequence: Synthetic oligonucleotide
  Antisense strand to SEQ ID NO: 1054972
caugacacccaagucuucc

SEQ ID NO: 1054974 - RNA, 19 nt, Artificial Sequence
  Description of Artificial Sequence: Synthetic oligonucleotide
  Sense strand starting at position 1213 of SEQ ID NO: 915116
uugggugucauguaaguga

SEQ ID NO: 1054975 - RNA, 19 nt, Artificial Sequence
  Description of Artificial Sequence: Synthetic oligonucleotide
  Antisense strand to SEQ ID NO: 1054974
ucacuuacaugacacccaa

SEQ ID NO: 1054976 - RNA, 19 nt, Artificial Sequence
  Description of Artificial Sequence: Synthetic oligonucleotide
  Sense strand starting at position 1228 of SEQ ID NO: 915116
gugauaauugcugauccau

SEQ ID NO: 1054977 - RNA, 19 nt, Artificial Sequence
  Description of Artificial Sequence: Synthetic oligonucleotide
  Antisense strand to SEQ ID NO: 1054976
auggaucagcaauuaucac

SEQ ID NO: 1054978 - RNA, 19 nt, Artificial Sequence
  Description of Artificial Sequence: Synthetic oligonucleotide
  Sense strand starting at position 1334 of SEQ ID NO: 915116
cuaugauacggccauagga

SEQ ID NO: 1054979 - RNA, 19 nt, Artificial Sequence
  Description of Artificial Sequence: Synthetic oligonucleotide
  Antisense strand to SEQ ID NO: 1054978
uccuauggccguaucauag

SEQ ID NO: 1054980 - RNA, 19 nt, Artificial Sequence
  Description of Artificial Sequence: Synthetic oligonucleotide
  Sense strand starting at position 1437 of SEQ ID NO: 915116
ugcuaagaucaauagugca

SEQ ID NO: 1054981 - RNA, 19 nt, Artificial Sequence
  Description of Artificial Sequence: Synthetic oligonucleotide
  Antisense strand to SEQ ID NO: 1054980
ugcacuauugaucuuagca

SEQ ID NO: 1054982 - RNA, 19 nt, Artificial Sequence
  Description of Artificial Sequence: Synthetic oligonucleotide
  Sense strand starting at position 1469 of SEQ ID NO: 915116
agaaaugagcaaugcuguu

SEQ ID NO: 1054983 - RNA, 19 nt, Artificial Sequence
  Description of Artificial Sequence: Synthetic oligonucleotide
  Antisense strand to SEQ ID NO: 1054982
aacagcauugcucauuucu

SEQ ID NO: 1054984 - RNA, 19 nt, Artificial Sequence
  Description of Artificial Sequence: Synthetic oligonucleotide
  Sense strand starting at position 1499 of SEQ ID NO: 915116
aggguagccucaguaugaa

SEQ ID NO: 1054985 - RNA, 19 nt, Artificial Sequence
  Description of Artificial Sequence: Synthetic oligonucleotide
  Antisense strand to SEQ ID NO: 1054984
uucauacugaggcuacccu

SEQ ID NO: 1054986 - RNA, 19 nt, Artificial Sequence
  Description of Artificial Sequence: Synthetic oligonucleotide
  Sense strand starting at position 1515 of SEQ ID NO: 915116
gaagguggugucuaccaca

SEQ ID NO: 1054987 - RNA, 19 nt, Artificial Sequence
  Description of Artificial Sequence: Synthetic oligonucleotide
  Antisense strand to SEQ ID NO: 1054986
ugugguagacaccaccuuc

SEQ ID NO: 1054988 - RNA, 19 nt, Artificial Sequence
  Description of Artificial Sequence: Synthetic oligonucleotide
  Sense strand starting at position 1584 of SEQ ID NO: 915116
uuuccaggucaugauguua

SEQ ID NO: 1054989 - RNA, 19 nt, Artificial Sequence
  Description of Artificial Sequence: Synthetic oligonucleotide
  Antisense strand to SEQ ID NO: 1054988
uaacaucaugaccuggaaa

SEQ ID NO: 1054990 - RNA, 19 nt, Artificial Sequence
  Description of Artificial Sequence: Synthetic oligonucleotide
  Sense strand starting at position 1601 of SEQ ID NO: 915116
uaggguaacgcagaggauu

SEQ ID NO: 1054991 - RNA, 19 nt, Artificial Sequence
  Description of Artificial Sequence: Synthetic oligonucleotide
  Antisense strand to SEQ ID NO: 1054990
aauccucugcguuacccua

SEQ ID NO: 1054992 - RNA, 19 nt, Artificial Sequence
  Description of Artificial Sequence: Synthetic oligonucleotide
  Sense strand starting at position 1641 of SEQ ID NO: 915116
auaggacaucacugcaaga

SEQ ID NO: 1054993 - RNA, 19 nt, Artificial Sequence
  Description of Artificial Sequence: Synthetic oligonucleotide
  Antisense strand to SEQ ID NO: 1054992
ucuugcagugauguccuau

SEQ ID NO: 1054994 - RNA, 19 nt, Artificial Sequence
  Description of Artificial Sequence: Synthetic oligonucleotide
  Sense strand starting at position 1729 of SEQ ID NO: 915116
accuucuuucuggaaagca

SEQ ID NO: 1054995 - RNA, 19 nt, Artificial Sequence
  Description of Artificial Sequence: Synthetic oligonucleotide
  Antisense strand to SEQ ID NO: 1054994
ugcuuuccagaaagaaggu

SEQ ID NO: 1054996 - RNA, 19 nt, Artificial Sequence
  Description of Artificial Sequence: Synthetic oligonucleotide
  Sense strand starting at position 1750 of SEQ ID NO: 915116
uggacuagugccugaggaa

SEQ ID NO: 1054997 - RNA, 19 nt, Artificial Sequence
  Description of Artificial Sequence: Synthetic oligonucleotide
  Antisense strand to SEQ ID NO: 1054996
uuccucaggcacuagucca

SEQ ID NO: 1054998 - RNA, 19 nt, Artificial Sequence
  Description of Artificial Sequence: Synthetic oligonucleotide
  Sense strand starting at position 1751 of SEQ ID NO: 915116
ggacuagugccugaggaac

SEQ ID NO: 1054999 - RNA, 19 nt, Artificial Sequence
  Description of Artificial Sequence: Synthetic oligonucleotide
  Antisense strand to SEQ ID NO: 1054998
guuccucaggcacuagucc

SEQ ID NO: 1055000 - RNA, 19 nt, Artificial Sequence
  Description of Artificial Sequence: Synthetic oligonucleotide
  Sense strand starting at position 1765 of SEQ ID NO: 915116
ggaacuauguugguagaga

SEQ ID NO: 1055001 - RNA, 19 nt, Artificial Sequence
  Description of Artificial Sequence: Synthetic oligonucleotide
  Antisense strand to SEQ ID NO: 1055000
ucucuaccaacauaguucc

SEQ ID NO: 1055002 - RNA, 19 nt, Artificial Sequence
  Description of Artificial Sequence: Synthetic oligonucleotide
  Sense strand starting at position 1971 of SEQ ID NO: 915116
ugucacuugugucugauuu

SEQ ID NO: 1055003 - RNA, 19 nt, Artificial Sequence
  Description of Artificial Sequence: Synthetic oligonucleotide
  Antisense strand to SEQ ID NO: 1055002
aaaucagacacaagugaca

SEQ ID NO: 1055004 - RNA, 19 nt, Artificial Sequence
  Description of Artificial Sequence: Synthetic oligonucleotide
  Sense strand starting at position 1972 of SEQ ID NO: 915116
gucacuugugucugauuua

SEQ ID NO: 1055005 - RNA, 19 nt, Artificial Sequence
  Description of Artificial Sequence: Synthetic oligonucleotide
  Antisense strand to SEQ ID NO: 1055004
uaaaucagacacaagugac

SEQ ID NO: 1055006 - RNA, 19 nt, Artificial Sequence
  Description of Artificial Sequence: Synthetic oligonucleotide
  Sense strand starting at position 1975 of SEQ ID NO: 915116
acuugugucugauuuaucu

SEQ ID NO: 1055007 - RNA, 19 nt, Artificial Sequence
  Description of Artificial Sequence: Synthetic oligonucleotide
  Antisense strand to SEQ ID NO: 1055006
agauaaaucagacacaagu

SEQ ID NO: 1055008 - RNA, 19 nt, Artificial Sequence
  Description of Artificial Sequence: Synthetic oligonucleotide
  Sense strand starting at position 1977 of SEQ ID NO: 915116
uugugucugauuuaucugu

SEQ ID NO: 1055009 - RNA, 19 nt, Artificial Sequence
  Description of Artificial Sequence: Synthetic oligonucleotide
  Antisense strand to SEQ ID NO: 1055008
acagauaaaucagacacaa

SEQ ID NO: 1055010 - RNA, 19 nt, Artificial Sequence
  Description of Artificial Sequence: Synthetic oligonucleotide
  Sense strand starting at position 2022 of SEQ ID NO: 915116
agaagucacuaugugcuaa

SEQ ID NO: 1055011 - RNA, 19 nt, Artificial Sequence
  Description of Artificial Sequence: Synthetic oligonucleotide
  Antisense strand to SEQ ID NO: 1055010
uuagcacauagugacuucu

SEQ ID NO: 1055012 - RNA, 19 nt, Artificial Sequence
  Description of Artificial Sequence: Synthetic oligonucleotide
  Sense strand starting at position 2358 of SEQ ID NO: 915116
gucguaagugcucuuguca

SEQ ID NO: 1055013 - RNA, 19 nt, Artificial Sequence
  Description of Artificial Sequence: Synthetic oligonucleotide
  Antisense strand to SEQ ID NO: 1055012
ugacaagagcacuuacgac

SEQ ID NO: 1055014 - RNA, 19 nt, Artificial Sequence
  Description of Artificial Sequence: Synthetic oligonucleotide
  Sense strand starting at position 2359 of SEQ ID NO: 915116
ucguaagugcucuugucac

SEQ ID NO: 1055015 - RNA, 19 nt, Artificial Sequence
  Description of Artificial Sequence: Synthetic oligonucleotide
  Antisense strand to SEQ ID NO: 1055014
gugacaagagcacuuacga

SEQ ID NO: 1055016 - RNA, 19 nt, Artificial Sequence
  Description of Artificial Sequence: Synthetic oligonucleotide
  Sense strand starting at position 2584 of SEQ ID NO: 915116
cagucucaacugugaauga

SEQ ID NO: 1055017 - RNA, 19 nt, Artificial Sequence
  Description of Artificial Sequence: Synthetic oligonucleotide
  Antisense strand to SEQ ID NO: 1055016
ucauucacaguugagacug

SEQ ID NO: 1055018 - RNA, 19 nt, Artificial Sequence
  Description of Artificial Sequence: Synthetic oligonucleotide
  Sense strand starting at position 2805 of SEQ ID NO: 915116
cgagucauagcagagaacu

SEQ ID NO: 1055019 - RNA, 19 nt, Artificial Sequence
  Description of Artificial Sequence: Synthetic oligonucleotide
  Antisense strand to SEQ ID NO: 1055018
aguucucugcuaugacucg

SEQ ID NO: 1055020 - RNA, 19 nt, Artificial Sequence
  Description of Artificial Sequence: Synthetic oligonucleotide
  Sense strand starting at position 2872 of SEQ ID NO: 915116
cauaguuaagcagagucau

SEQ ID NO: 1055021 - RNA, 19 nt, Artificial Sequence
  Description of Artificial Sequence: Synthetic oligonucleotide
  Antisense strand to SEQ ID NO: 1055020
augacucugcuuaacuaug

SEQ ID NO: 1055022 - RNA, 19 nt, Artificial Sequence
  Description of Artificial Sequence: Synthetic oligonucleotide
  Sense strand starting at position 2900 of SEQ ID NO: 915116
uugccaauaucccuagaga

SEQ ID NO: 1055023 - RNA, 19 nt, Artificial Sequence
  Description of Artificial Sequence: Synthetic oligonucleotide
  Antisense strand to SEQ ID NO: 1055022
ucucuagggauauuggcaa

SEQ ID NO: 1055024 - RNA, 19 nt, Artificial Sequence
  Description of Artificial Sequence: Synthetic oligonucleotide
  Sense strand starting at position 2983 of SEQ ID NO: 915116
aaguguaaaguuuaagauc

SEQ ID NO: 1055025 - RNA, 19 nt, Artificial Sequence
  Description of Artificial Sequence: Synthetic oligonucleotide
  Antisense strand to SEQ ID NO: 1055024
gaucuuaaacuuuacacuu

SEQ ID NO: 1055026 - RNA, 19 nt, Artificial Sequence
  Description of Artificial Sequence: Synthetic oligonucleotide
  Sense strand starting at position 3038 of SEQ ID NO: 915116
uggugaaaguaucucagaa

SEQ ID NO: 1055027 - RNA, 19 nt, Artificial Sequence
  Description of Artificial Sequence: Synthetic oligonucleotide
  Antisense strand to SEQ ID NO: 1055026
uucugagauacuuucacca

SEQ ID NO: 1055028 - RNA, 19 nt, Artificial Sequence
  Description of Artificial Sequence: Synthetic oligonucleotide
  Sense strand starting at position 3045 of SEQ ID NO: 915116
aguaucucagaauaacguu

SEQ ID NO: 1055029 - RNA, 19 nt, Artificial Sequence
  Description of Artificial Sequence: Synthetic oligonucleotide
  Antisense strand to SEQ ID NO: 1055028
aacguuauucugagauacu

SEQ ID NO: 1055030 - RNA, 19 nt, Artificial Sequence
  Description of Artificial Sequence: Synthetic oligonucleotide
  Sense strand starting at position 3438 of SEQ ID NO: 915116
gcagaacucacuuggguua

SEQ ID NO: 1055031 - RNA, 19 nt, Artificial Sequence
  Description of Artificial Sequence: Synthetic oligonucleotide
  Antisense strand to SEQ ID NO: 1055030
uaacccaagugaguucugc

SEQ ID NO: 1055032 - RNA, 19 nt, Artificial Sequence
  Description of Artificial Sequence: Synthetic oligonucleotide
  Sense strand starting at position 3542 of SEQ ID NO: 915116
auuggucugugagucaaag

SEQ ID NO: 1055033 - RNA, 19 nt, Artificial Sequence
  Description of Artificial Sequence: Synthetic oligonucleotide
  Antisense strand to SEQ ID NO: 1055032
cuuugacucacagaccaau

SEQ ID NO: 1055034 - RNA, 19 nt, Artificial Sequence
  Description of Artificial Sequence: Synthetic oligonucleotide
  Sense strand starting at position 3618 of SEQ ID NO: 915116
ggaggaaggucccuuugca

SEQ ID NO: 1055035 - RNA, 19 nt, Artificial Sequence
  Description of Artificial Sequence: Synthetic oligonucleotide
  Antisense strand to SEQ ID NO: 1055034
ugcaaagggaccuuccucc

SEQ ID NO: 1055036 - RNA, 19 nt, Artificial Sequence
  Description of Artificial Sequence: Synthetic oligonucleotide
  Sense strand starting at position 3695 of SEQ ID NO: 915116
ggcagaaggccuuaagcaa

SEQ ID NO: 1055037 - RNA, 19 nt, Artificial Sequence
  Description of Artificial Sequence: Synthetic oligonucleotide
  Antisense strand to SEQ ID NO: 1055036
uugcuuaaggccuucugcc

SEQ ID NO: 1055038 - RNA, 19 nt, Artificial Sequence
  Description of Artificial Sequence: Synthetic oligonucleotide
  Sense strand starting at position 3729 of SEQ ID NO: 915116
augcaucaccuguaugaca

SEQ ID NO: 1055039 - RNA, 19 nt, Artificial Sequence
  Description of Artificial Sequence: Synthetic oligonucleotide
  Antisense strand to SEQ ID NO: 1055038
ugucauacaggugaugcau

SEQ ID NO: 1055040 - RNA, 19 nt, Artificial Sequence
  Description of Artificial Sequence: Synthetic oligonucleotide
  Sense strand starting at position 3731 of SEQ ID NO: 915116
gcaucaccuguaugacaaa

SEQ ID NO: 1055041 - RNA, 19 nt, Artificial Sequence
  Description of Artificial Sequence: Synthetic oligonucleotide
  Antisense strand to SEQ ID NO: 1055040
uuugucauacaggugaugc

SEQ ID NO: 1055042 - RNA, 19 nt, Artificial Sequence
  Description of Artificial Sequence: Synthetic oligonucleotide
  Sense strand starting at position 18 of SEQ ID NO: 915117
uagguaaauugggcucauu

SEQ ID NO: 1055043 - RNA, 19 nt, Artificial Sequence
  Description of Artificial Sequence: Synthetic oligonucleotide
  Antisense strand to SEQ ID NO: 1055042
aaugagcccaauuuaccua

SEQ ID NO: 1055044 - RNA, 19 nt, Artificial Sequence
  Description of Artificial Sequence: Synthetic oligonucleotide
  Sense strand starting at position 109 of SEQ ID NO: 915117
gcaguuggcagagacaauu

SEQ ID NO: 1055045 - RNA, 19 nt, Artificial Sequence
  Description of Artificial Sequence: Synthetic oligonucleotide
  Antisense strand to SEQ ID NO: 1055044
aauugucucugccaacugc

SEQ ID NO: 1055046 - RNA, 19 nt, Artificial Sequence
  Description of Artificial Sequence: Synthetic oligonucleotide
  Sense strand starting at position 122 of SEQ ID NO: 915117
acaauugaauuugggcaaa

SEQ ID NO: 1055047 - RNA, 19 nt, Artificial Sequence
  Description of Artificial Sequence: Synthetic oligonucleotide
  Antisense strand to SEQ ID NO: 1055046
uuugcccaaauucaauugu

SEQ ID NO: 1055048 - RNA, 19 nt, Artificial Sequence
  Description of Artificial Sequence: Synthetic oligonucleotide
  Sense strand starting at position 182 of SEQ ID NO: 915117
ugacaauugcucuaggacu

SEQ ID NO: 1055049 - RNA, 19 nt, Artificial Sequence
  Description of Artificial Sequence: Synthetic oligonucleotide
  Antisense strand to SEQ ID NO: 1055048
aguccuagagcaauuguca

SEQ ID NO: 1055050 - RNA, 19 nt, Artificial Sequence
  Description of Artificial Sequence: Synthetic oligonucleotide
  Sense strand starting at position 184 of SEQ ID NO: 915117
acaauugcucuaggacuaa

SEQ ID NO: 1055051 - RNA, 19 nt, Artificial Sequence
  Description of Artificial Sequence: Synthetic oligonucleotide
  Antisense strand to SEQ ID NO: 1055050
uuaguccuagagcaauugu

SEQ ID NO: 1055052 - RNA, 19 nt, Artificial Sequence
  Description of Artificial Sequence: Synthetic oligonucleotide
  Sense strand starting at position 294 of SEQ ID NO: 915117
aagagaguggcccgaguaa

SEQ ID NO: 1055053 - RNA, 19 nt, Artificial Sequence
  Description of Artificial Sequence: Synthetic oligonucleotide
  Antisense strand to SEQ ID NO: 1055052
uuacucgggccacucucuu

SEQ ID NO: 1055054 - RNA, 19 nt, Artificial Sequence
  Description of Artificial Sequence: Synthetic oligonucleotide
  Sense strand starting at position 321 of SEQ ID NO: 915117
gucauuccugguuaggcaa

SEQ ID NO: 1055055 - RNA, 19 nt, Artificial Sequence
  Description of Artificial Sequence: Synthetic oligonucleotide
  Antisense strand to SEQ ID NO: 1055054
uugccuaaccaggaaugac

SEQ ID NO: 1055056 - RNA, 19 nt, Artificial Sequence
  Description of Artificial Sequence: Synthetic oligonucleotide
  Sense strand starting at position 336 of SEQ ID NO: 915117
gcaaaugcugaacaauuau

SEQ ID NO: 1055057 - RNA, 19 nt, Artificial Sequence
  Description of Artificial Sequence: Synthetic oligonucleotide
  Antisense strand to SEQ ID NO: 1055056
auaauuguucagcauuugc

SEQ ID NO: 1055058 - RNA, 19 nt, Artificial Sequence
  Description of Artificial Sequence: Synthetic oligonucleotide
  Sense strand starting at position 385 of SEQ ID NO: 915117
ucagauaugugguuggauu

SEQ ID NO: 1055059 - RNA, 19 nt, Artificial Sequence
  Description of Artificial Sequence: Synthetic oligonucleotide
  Antisense strand to SEQ ID NO: 1055058
aauccaaccacauaucuga

SEQ ID NO: 1055060 - RNA, 19 nt, Artificial Sequence
  Description of Artificial Sequence: Synthetic oligonucleotide
  Sense strand starting at position 386 of SEQ ID NO: 915117
cagauaugugguuggauua

SEQ ID NO: 1055061 - RNA, 19 nt, Artificial Sequence
  Description of Artificial Sequence: Synthetic oligonucleotide
  Antisense strand to SEQ ID NO: 1055060
uaauccaaccacauaucug

SEQ ID NO: 1055062 - RNA, 19 nt, Artificial Sequence
  Description of Artificial Sequence: Synthetic oligonucleotide
  Sense strand starting at position 387 of SEQ ID NO: 915117
agauaugugguuggauuau

SEQ ID NO: 1055063 - RNA, 19 nt, Artificial Sequence
  Description of Artificial Sequence: Synthetic oligonucleotide
  Antisense strand to SEQ ID NO: 1055062
auaauccaaccacauaucu

SEQ ID NO: 1055064 - RNA, 19 nt, Artificial Sequence
  Description of Artificial Sequence: Synthetic oligonucleotide
  Sense strand starting at position 431 of SEQ ID NO: 915117
cugauagucuaugcuuaca

SEQ ID NO: 1055065 - RNA, 19 nt, Artificial Sequence
  Description of Artificial Sequence: Synthetic oligonucleotide
  Antisense strand to SEQ ID NO: 1055064
uguaagcauagacuaucag

SEQ ID NO: 1055066 - RNA, 19 nt, Artificial Sequence
  Description of Artificial Sequence: Synthetic oligonucleotide
  Sense strand starting at position 544 of SEQ ID NO: 915117
gcugaagugcucuaggauc

SEQ ID NO: 1055067 - RNA, 19 nt, Artificial Sequence
  Description of Artificial Sequence: Synthetic oligonucleotide
  Antisense strand to SEQ ID NO: 1055066
gauccuagagcacuucagc

SEQ ID NO: 1055068 - RNA, 19 nt, Artificial Sequence
  Description of Artificial Sequence: Synthetic oligonucleotide
  Sense strand starting at position 546 of SEQ ID NO: 915117
ugaagugcucuaggaucua

SEQ ID NO: 1055069 - RNA, 19 nt, Artificial Sequence
  Description of Artificial Sequence: Synthetic oligonucleotide
  Antisense strand to SEQ ID NO: 1055068
uagauccuagagcacuuca

SEQ ID NO: 1055070 - RNA, 19 nt, Artificial Sequence
  Description of Artificial Sequence: Synthetic oligonucleotide
  Sense strand starting at position 653 of SEQ ID NO: 915117
uugagauaucuuugauguu

SEQ ID NO: 1055071 - RNA, 19 nt, Artificial Sequence
  Description of Artificial Sequence: Synthetic oligonucleotide
  Antisense strand to SEQ ID NO: 1055070
aacaucaaagauaucucaa

SEQ ID NO: 1055072 - RNA, 19 nt, Artificial Sequence
  Description of Artificial Sequence: Synthetic oligonucleotide
  Sense strand starting at position 670 of SEQ ID NO: 915117
uuagaauuaugcuugcaau

SEQ ID NO: 1055073 - RNA, 19 nt, Artificial Sequence
  Description of Artificial Sequence: Synthetic oligonucleotide
  Antisense strand to SEQ ID NO: 1055072
auugcaagcauaauucuaa

SEQ ID NO: 1055074 - RNA, 19 nt, Artificial Sequence
  Description of Artificial Sequence: Synthetic oligonucleotide
  Sense strand starting at position 738 of SEQ ID NO: 915117
aauugugacugugcuuaaa

SEQ ID NO: 1055075 - RNA, 19 nt, Artificial Sequence
  Description of Artificial Sequence: Synthetic oligonucleotide
  Antisense strand to SEQ ID NO: 1055074
uuuaagcacagucacaauu

SEQ ID NO: 1055076 - RNA, 19 nt, Artificial Sequence
  Description of Artificial Sequence: Synthetic oligonucleotide
  Sense strand starting at position 1001 of SEQ ID NO: 915117
cucagaggucacugccuau

SEQ ID NO: 1055077 - RNA, 19 nt, Artificial Sequence
  Description of Artificial Sequence: Synthetic oligonucleotide
  Antisense strand to SEQ ID NO: 1055076
auaggcagugaccucugag

SEQ ID NO: 1055078 - RNA, 19 nt, Artificial Sequence
  Description of Artificial Sequence: Synthetic oligonucleotide
  Sense strand starting at position 1005 of SEQ ID NO: 915117
gaggucacugccuaugaga

SEQ ID NO: 1055079 - RNA, 19 nt, Artificial Sequence
  Description of Artificial Sequence: Synthetic oligonucleotide
  Antisense strand to SEQ ID NO: 1055078
ucucauaggcagugaccuc

SEQ ID NO: 1055080 - RNA, 19 nt, Artificial Sequence
  Description of Artificial Sequence: Synthetic oligonucleotide
  Sense strand starting at position 1007 of SEQ ID NO: 915117
ggucacugccuaugagaga

SEQ ID NO: 1055081 - RNA, 19 nt, Artificial Sequence
  Description of Artificial Sequence: Synthetic oligonucleotide
  Antisense strand to SEQ ID NO: 1055080
ucucucauaggcagugacc

SEQ ID NO: 1055082 - RNA, 19 nt, Artificial Sequence
  Description of Artificial Sequence: Synthetic oligonucleotide
  Sense strand starting at position 2029 of SEQ ID NO: 915117
guagaagagggucauguua

SEQ ID NO: 1055083 - RNA, 19 nt, Artificial Sequence
  Description of Artificial Sequence: Synthetic oligonucleotide
  Antisense strand to SEQ ID NO: 1055082
uaacaugacccucuucuac

SEQ ID NO: 1055084 - RNA, 19 nt, Artificial Sequence
  Description of Artificial Sequence: Synthetic oligonucleotide
  Sense strand starting at position 2050 of SEQ ID NO: 915117
acugacaccuaguugagua

SEQ ID NO: 1055085 - RNA, 19 nt, Artificial Sequence
  Description of Artificial Sequence: Synthetic oligonucleotide
  Antisense strand to SEQ ID NO: 1055084
uacucaacuaggugucagu

SEQ ID NO: 1055086 - RNA, 19 nt, Artificial Sequence
  Description of Artificial Sequence: Synthetic oligonucleotide
  Sense strand starting at position 2064 of SEQ ID NO: 915117
gaguauuucuagcucuuug

SEQ ID NO: 1055087 - RNA, 19 nt, Artificial Sequence
  Description of Artificial Sequence: Synthetic oligonucleotide
  Antisense strand to SEQ ID NO: 1055086
caaagagcuagaaauacuc

SEQ ID NO: 1055088 - RNA, 19 nt, Artificial Sequence
  Description of Artificial Sequence: Synthetic oligonucleotide
  Sense strand starting at position 2232 of SEQ ID NO: 915117
cuaguucugauguaaggau

SEQ ID NO: 1055089 - RNA, 19 nt, Artificial Sequence
  Description of Artificial Sequence: Synthetic oligonucleotide
  Antisense strand to SEQ ID NO: 1055088
auccuuacaucagaacuag

SEQ ID NO: 1055090 - RNA, 19 nt, Artificial Sequence
  Description of Artificial Sequence: Synthetic oligonucleotide
  Sense strand starting at position 2236 of SEQ ID NO: 915117
uucugauguaaggauguua

SEQ ID NO: 1055091 - RNA, 19 nt, Artificial Sequence
  Description of Artificial Sequence: Synthetic oligonucleotide
  Antisense strand to SEQ ID NO: 1055090
uaacauccuuacaucagaa

SEQ ID NO: 1055092 - RNA, 19 nt, Artificial Sequence
  Description of Artificial Sequence: Synthetic oligonucleotide
  Sense strand starting at position 2295 of SEQ ID NO: 915117
uuaggaaaugacuguauau

SEQ ID NO: 1055093 - RNA, 19 nt, Artificial Sequence
  Description of Artificial Sequence: Synthetic oligonucleotide
  Antisense strand to SEQ ID NO: 1055092
auauacagucauuuccuaa

SEQ ID NO: 1055094 - RNA, 19 nt, Artificial Sequence
  Description of Artificial Sequence: Synthetic oligonucleotide
  Sense strand starting at position 2318 of SEQ ID NO: 915117
uuaggacuauccuuaugca

SEQ ID NO: 1055095 - RNA, 19 nt, Artificial Sequence
  Description of Artificial Sequence: Synthetic oligonucleotide
  Antisense strand to SEQ ID NO: 1055094
ugcauaaggauaguccuaa

SEQ ID NO: 1055096 - RNA, 19 nt, Artificial Sequence
  Description of Artificial Sequence: Synthetic oligonucleotide
  Sense strand starting at position 2570 of SEQ ID NO: 915117
uguugugauacuuggauag

SEQ ID NO: 1055097 - RNA, 19 nt, Artificial Sequence
  Description of Artificial Sequence: Synthetic oligonucleotide
  Antisense strand to SEQ ID NO: 1055096
cuauccaaguaucacaaca

SEQ ID NO: 1055098 - RNA, 19 nt, Artificial Sequence
  Description of Artificial Sequence: Synthetic oligonucleotide
  Sense strand starting at position 2804 of SEQ ID NO: 915117
uguuacaaaguuuggagua

SEQ ID NO: 1055099 - RNA, 19 nt, Artificial Sequence
  Description of Artificial Sequence: Synthetic oligonucleotide
  Antisense strand to SEQ ID NO: 1055098
uacuccaaacuuuguaaca

SEQ ID NO: 1055100 - RNA, 19 nt, Artificial Sequence
  Description of Artificial Sequence: Synthetic oligonucleotide
  Sense strand starting at position 2832 of SEQ ID NO: 915117
agguuugguguacaaauca

SEQ ID NO: 1055101 - RNA, 19 nt, Artificial Sequence
  Description of Artificial Sequence: Synthetic oligonucleotide
  Antisense strand to SEQ ID NO: 1055100
ugauuuguacaccaaaccu

SEQ ID NO: 1055102 - RNA, 19 nt, Artificial Sequence
  Description of Artificial Sequence: Synthetic oligonucleotide
  Sense strand starting at position 3045 of SEQ ID NO: 915117
ggauaauggcuuugagcug

SEQ ID NO: 1055103 - RNA, 19 nt, Artificial Sequence
  Description of Artificial Sequence: Synthetic oligonucleotide
  Antisense strand to SEQ ID NO: 1055102
cagcucaaagccauuaucc

SEQ ID NO: 1055104 - RNA, 19 nt, Artificial Sequence
  Description of Artificial Sequence: Synthetic oligonucleotide
  Sense strand starting at position 3311 of SEQ ID NO: 915117
auucuuaguuccuugagaa

SEQ ID NO: 1055105 - RNA, 19 nt, Artificial Sequence
  Description of Artificial Sequence: Synthetic oligonucleotide
  Antisense strand to SEQ ID NO: 1055104
uucucaaggaacuaagaau

SEQ ID NO: 1055106 - RNA, 19 nt, Artificial Sequence
  Description of Artificial Sequence: Synthetic oligonucleotide
  Sense strand starting at position 3312 of SEQ ID NO: 915117
uucuuaguuccuugagaag

SEQ ID NO: 1055107 - RNA, 19 nt, Artificial Sequence
  Description of Artificial Sequence: Synthetic oligonucleotide
  Antisense strand to SEQ ID NO: 1055106
cuucucaaggaacuaagaa

SEQ ID NO: 1055108 - RNA, 19 nt, Artificial Sequence
  Description of Artificial Sequence: Synthetic oligonucleotide
  Sense strand starting at position 3372 of SEQ ID NO: 915117
cuacuaacagcguauuagu

SEQ ID NO: 1055109 - RNA, 19 nt, Artificial Sequence
  Description of Artificial Sequence: Synthetic oligonucleotide
  Antisense strand to SEQ ID NO: 1055108
acuaauacgcuguuaguag

SEQ ID NO: 1055110 - RNA, 19 nt, Artificial Sequence
  Description of Artificial Sequence: Synthetic oligonucleotide
  Sense strand starting at position 3380 of SEQ ID NO: 915117
agcguauuaguguucccuu

SEQ ID NO: 1055111 - RNA, 19 nt, Artificial Sequence
  Description of Artificial Sequence: Synthetic oligonucleotide
  Antisense strand to SEQ ID NO: 1055110
aagggaacacuaauacgcu

SEQ ID NO: 1055112 - RNA, 19 nt, Artificial Sequence
  Description of Artificial Sequence: Synthetic oligonucleotide
  Sense strand starting at position 3446 of SEQ ID NO: 915117
aagccauucugauugguga

SEQ ID NO: 1055113 - RNA, 19 nt, Artificial Sequence
  Description of Artificial Sequence: Synthetic oligonucleotide
  Antisense strand to SEQ ID NO: 1055112
ucaccaaucagaauggcuu

SEQ ID NO: 1055114 - RNA, 19 nt, Artificial Sequence
  Description of Artificial Sequence: Synthetic oligonucleotide
  Sense strand starting at position 3457 of SEQ ID NO: 915117
auuggugaaagaugguaua

SEQ ID NO: 1055115 - RNA, 19 nt, Artificial Sequence
  Description of Artificial Sequence: Synthetic oligonucleotide
  Antisense strand to SEQ ID NO: 1055114
uauaccaucuuucaccaau

SEQ ID NO: 1055116 - RNA, 19 nt, Artificial Sequence
  Description of Artificial Sequence: Synthetic oligonucleotide
  Sense strand starting at position 3467 of SEQ ID NO: 915117
gaugguauaucaguaacag

SEQ ID NO: 1055117 - RNA, 19 nt, Artificial Sequence
  Description of Artificial Sequence: Synthetic oligonucleotide
  Antisense strand to SEQ ID NO: 1055116
cuguuacugauauaccauc

SEQ ID NO: 1055118 - RNA, 19 nt, Artificial Sequence
  Description of Artificial Sequence: Synthetic oligonucleotide
  Sense strand starting at position 3655 of SEQ ID NO: 915117
acauuaagaguuuguagaa

SEQ ID NO: 1055119 - RNA, 19 nt, Artificial Sequence
  Description of Artificial Sequence: Synthetic oligonucleotide
  Antisense strand to SEQ ID NO: 1055118
uucuacaaacucuuaaugu

SEQ ID NO: 1055120 - RNA, 19 nt, Artificial Sequence
  Description of Artificial Sequence: Synthetic oligonucleotide
  Sense strand starting at position 3656 of SEQ ID NO: 915117
cauuaagaguuuguagaaa

SEQ ID NO: 1055121 - RNA, 19 nt, Artificial Sequence
  Description of Artificial Sequence: Synthetic oligonucleotide
  Antisense strand to SEQ ID NO: 1055120
uuucuacaaacucuuaaug

SEQ ID NO: 1055122 - RNA, 19 nt, Artificial Sequence
  Description of Artificial Sequence: Synthetic oligonucleotide
  Sense strand starting at position 6 of SEQ ID NO: 915118
cuacuuauuguguaaagca

SEQ ID NO: 1055123 - RNA, 19 nt, Artificial Sequence
  Description of Artificial Sequence: Synthetic oligonucleotide
  Antisense strand to SEQ ID NO: 1055122
ugcuuuacacaauaaguag

SEQ ID NO: 1055124 - RNA, 19 nt, Artificial Sequence
  Description of Artificial Sequence: Synthetic oligonucleotide
  Sense strand starting at position 89 of SEQ ID NO: 915118
gagaguuuaauguggguag

SEQ ID NO: 1055125 - RNA, 19 nt, Artificial Sequence
  Description of Artificial Sequence: Synthetic oligonucleotide
  Antisense strand to SEQ ID NO: 1055124
cuacccacauuaaacucuc

SEQ ID NO: 1055126 - RNA, 19 nt, Artificial Sequence
  Description of Artificial Sequence: Synthetic oligonucleotide
  Sense strand starting at position 91 of SEQ ID NO: 915118
gaguuuaauguggguagau

SEQ ID NO: 1055127 - RNA, 19 nt, Artificial Sequence
  Description of Artificial Sequence: Synthetic oligonucleotide
  Antisense strand to SEQ ID NO: 1055126
aucuacccacauuaaacuc

SEQ ID NO: 1055128 - RNA, 19 nt, Artificial Sequence
  Description of Artificial Sequence: Synthetic oligonucleotide
  Sense strand starting at position 93 of SEQ ID NO: 915118
guuuaauguggguagauuc

SEQ ID NO: 1055129 - RNA, 19 nt, Artificial Sequence
  Description of Artificial Sequence: Synthetic oligonucleotide
  Antisense strand to SEQ ID NO: 1055128
gaaucuacccacauuaaac

SEQ ID NO: 1055130 - RNA, 19 nt, Artificial Sequence
  Description of Artificial Sequence: Synthetic oligonucleotide
  Sense strand starting at position 101 of SEQ ID NO: 915118
uggguagauucuguggaau

SEQ ID NO: 1055131 - RNA, 19 nt, Artificial Sequence
  Description of Artificial Sequence: Synthetic oligonucleotide
  Antisense strand to SEQ ID NO: 1055130
auuccacagaaucuaccca

SEQ ID NO: 1055132 - RNA, 19 nt, Artificial Sequence
  Description of Artificial Sequence: Synthetic oligonucleotide
  Sense strand starting at position 104 of SEQ ID NO: 915118
guagauucuguggaaucua

SEQ ID NO: 1055133 - RNA, 19 nt, Artificial Sequence
  Description of Artificial Sequence: Synthetic oligonucleotide
  Antisense strand to SEQ ID NO: 1055132
uagauuccacagaaucuac

SEQ ID NO: 1055134 - RNA, 19 nt, Artificial Sequence
  Description of Artificial Sequence: Synthetic oligonucleotide
  Sense strand starting at position 167 of SEQ ID NO: 915118
gaggucaauugaucuaggu

SEQ ID NO: 1055135 - RNA, 19 nt, Artificial Sequence
  Description of Artificial Sequence: Synthetic oligonucleotide
  Antisense strand to SEQ ID NO: 1055134
accuagaucaauugaccuc

SEQ ID NO: 1055136 - RNA, 19 nt, Artificial Sequence
  Description of Artificial Sequence: Synthetic oligonucleotide
  Sense strand starting at position 169 of SEQ ID NO: 915118
ggucaauugaucuagguau

SEQ ID NO: 1055137 - RNA, 19 nt, Artificial Sequence
  Description of Artificial Sequence: Synthetic oligonucleotide
  Antisense strand to SEQ ID NO: 1055136
auaccuagaucaauugacc

SEQ ID NO: 1055138 - RNA, 19 nt, Artificial Sequence
  Description of Artificial Sequence: Synthetic oligonucleotide
  Sense strand starting at position 171 of SEQ ID NO: 915118
ucaauugaucuagguauac

SEQ ID NO: 1055139 - RNA, 19 nt, Artificial Sequence
  Description of Artificial Sequence: Synthetic oligonucleotide
  Antisense strand to SEQ ID NO: 1055138
guauaccuagaucaauuga

SEQ ID NO: 1055140 - RNA, 19 nt, Artificial Sequence
  Description of Artificial Sequence: Synthetic oligonucleotide
  Sense strand starting at position 245 of SEQ ID NO: 915118
acuauaugcuaucuggaca

SEQ ID NO: 1055141 - RNA, 19 nt, Artificial Sequence
  Description of Artificial Sequence: Synthetic oligonucleotide
  Antisense strand to SEQ ID NO: 1055140
uguccagauagcauauagu

SEQ ID NO: 1055142 - RNA, 19 nt, Artificial Sequence
  Description of Artificial Sequence: Synthetic oligonucleotide
  Sense strand starting at position 250 of SEQ ID NO: 915118
augcuaucuggacauccua

SEQ ID NO: 1055143 - RNA, 19 nt, Artificial Sequence
  Description of Artificial Sequence: Synthetic oligonucleotide
  Antisense strand to SEQ ID NO: 1055142
uaggauguccagauagcau

SEQ ID NO: 1055144 - RNA, 19 nt, Artificial Sequence
  Description of Artificial Sequence: Synthetic oligonucleotide
  Sense strand starting at position 473 of SEQ ID NO: 915118
uuauaugugccaggaagau

SEQ ID NO: 1055145 - RNA, 19 nt, Artificial Sequence
  Description of Artificial Sequence: Synthetic oligonucleotide
  Antisense strand to SEQ ID NO: 1055144
aucuuccuggcacauauaa

SEQ ID NO: 1055146 - RNA, 19 nt, Artificial Sequence
  Description of Artificial Sequence: Synthetic oligonucleotide
  Sense strand starting at position 807 of SEQ ID NO: 915118
cuguaauggguguaacaua

SEQ ID NO: 1055147 - RNA, 19 nt, Artificial Sequence
  Description of Artificial Sequence: Synthetic oligonucleotide
  Antisense strand to SEQ ID NO: 1055146
uauguuacacccauuacag

SEQ ID NO: 1055148 - RNA, 19 nt, Artificial Sequence
  Description of Artificial Sequence: Synthetic oligonucleotide
  Sense strand starting at position 959 of SEQ ID NO: 915118
ucacauucucaugagugau

SEQ ID NO: 1055149 - RNA, 19 nt, Artificial Sequence
  Description of Artificial Sequence: Synthetic oligonucleotide
  Antisense strand to SEQ ID NO: 1055148
aucacucaugagaauguga

SEQ ID NO: 1055150 - RNA, 19 nt, Artificial Sequence
  Description of Artificial Sequence: Synthetic oligonucleotide
  Sense strand starting at position 2305 of SEQ ID NO: 915118
ggagaaauacgcuaugcag

SEQ ID NO: 1055151 - RNA, 19 nt, Artificial Sequence
  Description of Artificial Sequence: Synthetic oligonucleotide
  Antisense strand to SEQ ID NO: 1055150
cugcauagcguauuucucc

SEQ ID NO: 1055152 - RNA, 19 nt, Artificial Sequence
  Description of Artificial Sequence: Synthetic oligonucleotide
  Sense strand starting at position 2456 of SEQ ID NO: 915118
uugcuuuaacugcaaugau

SEQ ID NO: 1055153 - RNA, 19 nt, Artificial Sequence
  Description of Artificial Sequence: Synthetic oligonucleotide
  Antisense strand to SEQ ID NO: 1055152
aucauugcaguuaaagcaa

SEQ ID NO: 1055154 - RNA, 19 nt, Artificial Sequence
  Description of Artificial Sequence: Synthetic oligonucleotide
  Sense strand starting at position 2493 of SEQ ID NO: 915118
cuggaagguauaugugagu

SEQ ID NO: 1055155 - RNA, 19 nt, Artificial Sequence
  Description of Artificial Sequence: Synthetic oligonucleotide
  Antisense strand to SEQ ID NO: 1055154
acucacauauaccuuccag

SEQ ID NO: 1055156 - RNA, 19 nt, Artificial Sequence
  Description of Artificial Sequence: Synthetic oligonucleotide
  Sense strand starting at position 2498 of SEQ ID NO: 915118
agguauaugugagugaaua

SEQ ID NO: 1055157 - RNA, 19 nt, Artificial Sequence
  Description of Artificial Sequence: Synthetic oligonucleotide
  Antisense strand to SEQ ID NO: 1055156
uauucacucacauauaccu

SEQ ID NO: 1055158 - RNA, 19 nt, Artificial Sequence
  Description of Artificial Sequence: Synthetic oligonucleotide
  Sense strand starting at position 2499 of SEQ ID NO: 915118
gguauaugugagugaauau

SEQ ID NO: 1055159 - RNA, 19 nt, Artificial Sequence
  Description of Artificial Sequence: Synthetic oligonucleotide
  Antisense strand to SEQ ID NO: 1055158
auauucacucacauauacc

SEQ ID NO: 1055160 - RNA, 19 nt, Artificial Sequence
  Description of Artificial Sequence: Synthetic oligonucleotide
  Sense strand starting at position 2500 of SEQ ID NO: 915118
guauaugugagugaauaua

SEQ ID NO: 1055161 - RNA, 19 nt, Artificial Sequence
  Description of Artificial Sequence: Synthetic oligonucleotide
  Antisense strand to SEQ ID NO: 1055160
uauauucacucacauauac

SEQ ID NO: 1055162 - RNA, 19 nt, Artificial Sequence
  Description of Artificial Sequence: Synthetic oligonucleotide
  Sense strand starting at position 2551 of SEQ ID NO: 915118
agcugcuuucuugagaaca

SEQ ID NO: 1055163 - RNA, 19 nt, Artificial Sequence
  Description of Artificial Sequence: Synthetic oligonucleotide
  Antisense strand to SEQ ID NO: 1055162
uguucucaagaaagcagcu

SEQ ID NO: 1055164 - RNA, 19 nt, Artificial Sequence
  Description of Artificial Sequence: Synthetic oligonucleotide
  Sense strand starting at position 2630 of SEQ ID NO: 915118
uuguccuuccaugaucuau

SEQ ID NO: 1055165 - RNA, 19 nt, Artificial Sequence
  Description of Artificial Sequence: Synthetic oligonucleotide
  Antisense strand to SEQ ID NO: 1055164
auagaucauggaaggacaa

SEQ ID NO: 1055166 - RNA, 19 nt, Artificial Sequence
  Description of Artificial Sequence: Synthetic oligonucleotide
  Sense strand starting at position 2632 of SEQ ID NO: 915118
guccuuccaugaucuauca

SEQ ID NO: 1055167 - RNA, 19 nt, Artificial Sequence
  Description of Artificial Sequence: Synthetic oligonucleotide
  Antisense strand to SEQ ID NO: 1055166
ugauagaucauggaaggac

SEQ ID NO: 1055168 - RNA, 19 nt, Artificial Sequence
  Description of Artificial Sequence: Synthetic oligonucleotide
  Sense strand starting at position 2661 of SEQ ID NO: 915118
cucauauguguugacuuua

SEQ ID NO: 1055169 - RNA, 19 nt, Artificial Sequence
  Description of Artificial Sequence: Synthetic oligonucleotide
  Antisense strand to SEQ ID NO: 1055168
uaaagucaacacauaugag

SEQ ID NO: 1055170 - RNA, 19 nt, Artificial Sequence
  Description of Artificial Sequence: Synthetic oligonucleotide
  Sense strand starting at position 2666 of SEQ ID NO: 915118
auguguugacuuuacuuau

SEQ ID NO: 1055171 - RNA, 19 nt, Artificial Sequence
  Description of Artificial Sequence: Synthetic oligonucleotide
  Antisense strand to SEQ ID NO: 1055170
auaaguaaagucaacacau

SEQ ID NO: 1055172 - RNA, 19 nt, Artificial Sequence
  Description of Artificial Sequence: Synthetic oligonucleotide
  Sense strand starting at position 2727 of SEQ ID NO: 915118
acaggcuaauguuuagaua

SEQ ID NO: 1055173 - RNA, 19 nt, Artificial Sequence
  Description of Artificial Sequence: Synthetic oligonucleotide
  Antisense strand to SEQ ID NO: 1055172
uaucuaaacauuagccugu

SEQ ID NO: 1055174 - RNA, 19 nt, Artificial Sequence
  Description of Artificial Sequence: Synthetic oligonucleotide
  Sense strand starting at position 2728 of SEQ ID NO: 915118
caggcuaauguuuagauau

SEQ ID NO: 1055175 - RNA, 19 nt, Artificial Sequence
  Description of Artificial Sequence: Synthetic oligonucleotide
  Antisense strand to SEQ ID NO: 1055174
auaucuaaacauuagccug

SEQ ID NO: 1055176 - RNA, 19 nt, Artificial Sequence
  Description of Artificial Sequence: Synthetic oligonucleotide
  Sense strand starting at position 2787 of SEQ ID NO: 915118
aggaauaacucgcucaaag

SEQ ID NO: 1055177 - RNA, 19 nt, Artificial Sequence
  Description of Artificial Sequence: Synthetic oligonucleotide
  Antisense strand to SEQ ID NO: 1055176
cuuugagcgaguuauuccu

SEQ ID NO: 1055178 - RNA, 19 nt, Artificial Sequence
  Description of Artificial Sequence: Synthetic oligonucleotide
  Sense strand starting at position 2873 of SEQ ID NO: 915118
gagagcaaguauguggaaa

SEQ ID NO: 1055179 - RNA, 19 nt, Artificial Sequence
  Description of Artificial Sequence: Synthetic oligonucleotide
  Antisense strand to SEQ ID NO: 1055178
uuuccacauacuugcucuc

SEQ ID NO: 1055180 - RNA, 19 nt, Artificial Sequence
  Description of Artificial Sequence: Synthetic oligonucleotide
  Sense strand starting at position 2874 of SEQ ID NO: 915118
agagcaaguauguggaaau

SEQ ID NO: 1055181 - RNA, 19 nt, Artificial Sequence
  Description of Artificial Sequence: Synthetic oligonucleotide
  Antisense strand to SEQ ID NO: 1055180
auuuccacauacuugcucu

SEQ ID NO: 1055182 - RNA, 19 nt, Artificial Sequence
  Description of Artificial Sequence: Synthetic oligonucleotide
  Sense strand starting at position 3013 of SEQ ID NO: 915118
aacguaggucauuagagga

SEQ ID NO: 1055183 - RNA, 19 nt, Artificial Sequence
  Description of Artificial Sequence: Synthetic oligonucleotide
  Antisense strand to SEQ ID NO: 1055182
uccucuaaugaccuacguu

SEQ ID NO: 1055184 - RNA, 19 nt, Artificial Sequence
  Description of Artificial Sequence: Synthetic oligonucleotide
  Sense strand starting at position 3096 of SEQ ID NO: 915118
uuuguuuaagacugaucau

SEQ ID NO: 1055185 - RNA, 19 nt, Artificial Sequence
  Description of Artificial Sequence: Synthetic oligonucleotide
  Antisense strand to SEQ ID NO: 1055184
augaucagucuuaaacaaa

SEQ ID NO: 1055186 - RNA, 19 nt, Artificial Sequence
  Description of Artificial Sequence: Synthetic oligonucleotide
  Sense strand starting at position 3275 of SEQ ID NO: 915118
auguaaugauccuuccaga

SEQ ID NO: 1055187 - RNA, 19 nt, Artificial Sequence
  Description of Artificial Sequence: Synthetic oligonucleotide
  Antisense strand to SEQ ID NO: 1055186
ucuggaaggaucauuacau

SEQ ID NO: 1055188 - RNA, 19 nt, Artificial Sequence
  Description of Artificial Sequence: Synthetic oligonucleotide
  Sense strand starting at position 3465 of SEQ ID NO: 915118
uggaauuuaugucaaauac

SEQ ID NO: 1055189 - RNA, 19 nt, Artificial Sequence
  Description of Artificial Sequence: Synthetic oligonucleotide
  Antisense strand to SEQ ID NO: 1055188
guauuugacauaaauucca

SEQ ID NO: 1055190 - RNA, 19 nt, Artificial Sequence
  Description of Artificial Sequence: Synthetic oligonucleotide
  Sense strand starting at position 3580 of SEQ ID NO: 915118
uuguauuagcaggauuauu

SEQ ID NO: 1055191 - RNA, 19 nt, Artificial Sequence
  Description of Artificial Sequence: Synthetic oligonucleotide
  Antisense strand to SEQ ID NO: 1055190
aauaauccugcuaauacaa

SEQ ID NO: 1055192 - RNA, 19 nt, Artificial Sequence
  Description of Artificial Sequence: Synthetic oligonucleotide
  Sense strand starting at position 3638 of SEQ ID NO: 915118
ucaggagauuauucuaucu

SEQ ID NO: 1055193 - RNA, 19 nt, Artificial Sequence
  Description of Artificial Sequence: Synthetic oligonucleotide
  Antisense strand to SEQ ID NO: 1055192
agauagaauaaucuccuga

SEQ ID NO: 1055194 - RNA, 19 nt, Artificial Sequence
  Description of Artificial Sequence: Synthetic oligonucleotide
  Sense strand starting at position 3835 of SEQ ID NO: 915118
aucagauucccagagcugu

SEQ ID NO: 1055195 - RNA, 19 nt, Artificial Sequence
  Description of Artificial Sequence: Synthetic oligonucleotide
  Antisense strand to SEQ ID NO: 1055194
acagcucugggaaucugau

SEQ ID NO: 1055196 - RNA, 19 nt, Artificial Sequence
  Description of Artificial Sequence: Synthetic oligonucleotide
  Sense strand starting at position 3873 of SEQ ID NO: 915118
aagguaacucagcaucagu

SEQ ID NO: 1055197 - RNA, 19 nt, Artificial Sequence
  Description of Artificial Sequence: Synthetic oligonucleotide
  Antisense strand to SEQ ID NO: 1055196
acugaugcugaguuaccuu

SEQ ID NO: 1055198 - RNA, 19 nt, Artificial Sequence
  Description of Artificial Sequence: Synthetic oligonucleotide
  Sense strand starting at position 3964 of SEQ ID NO: 915118
aggguaggucaguagguaa

SEQ ID NO: 1055199 - RNA, 19 nt, Artificial Sequence
  Description of Artificial Sequence: Synthetic oligonucleotide
  Antisense strand to SEQ ID NO: 1055198
uuaccuacugaccuacccu

SEQ ID NO: 1055200 - RNA, 19 nt, Artificial Sequence
  Description of Artificial Sequence: Synthetic oligonucleotide
  Sense strand starting at position 3982 of SEQ ID NO: 915118
agauuagcuuccuuggaag

SEQ ID NO: 1055201 - RNA, 19 nt, Artificial Sequence
  Description of Artificial Sequence: Synthetic oligonucleotide
  Antisense strand to SEQ ID NO: 1055200
cuuccaaggaagcuaaucu

SEQ ID NO: 1055202 - RNA, 19 nt, Artificial Sequence
  Description of Artificial Sequence: Synthetic oligonucleotide
  Sense strand starting at position 567 of SEQ ID NO: 915119
auagacaugacuugcggaa

SEQ ID NO: 1055203 - RNA, 19 nt, Artificial Sequence
  Description of Artificial Sequence: Synthetic oligonucleotide
  Antisense strand to SEQ ID NO: 1055202
uuccgcaagucaugucuau

SEQ ID NO: 1055204 - RNA, 19 nt, Artificial Sequence
  Description of Artificial Sequence: Synthetic oligonucleotide
  Sense strand starting at position 616 of SEQ ID NO: 915119
acagaaagcugcuuuacua

SEQ ID NO: 1055205 - RNA, 19 nt, Artificial Sequence
  Description of Artificial Sequence: Synthetic oligonucleotide
  Antisense strand to SEQ ID NO: 1055204
uaguaaagcagcuuucugu

SEQ ID NO: 1055206 - RNA, 19 nt, Artificial Sequence
  Description of Artificial Sequence: Synthetic oligonucleotide
  Sense strand starting at position 714 of SEQ ID NO: 915119
ucucaugaauuuggguaaa

SEQ ID NO: 1055207 - RNA, 19 nt, Artificial Sequence
  Description of Artificial Sequence: Synthetic oligonucleotide
  Antisense strand to SEQ ID NO: 1055206
uuuacccaaauucaugaga

SEQ ID NO: 1055208 - RNA, 19 nt, Artificial Sequence
  Description of Artificial Sequence: Synthetic oligonucleotide
  Sense strand starting at position 909 of SEQ ID NO: 915119
uuagauuuauucuagucuc

SEQ ID NO: 1055209 - RNA, 19 nt, Artificial Sequence
  Description of Artificial Sequence: Synthetic oligonucleotide
  Antisense strand to SEQ ID NO: 1055208
gagacuagaauaaaucuaa

SEQ ID NO: 1055210 - RNA, 19 nt, Artificial Sequence
  Description of Artificial Sequence: Synthetic oligonucleotide
  Sense strand starting at position 917 of SEQ ID NO: 915119
auucuagucucaguggaua

SEQ ID NO: 1055211 - RNA, 19 nt, Artificial Sequence
  Description of Artificial Sequence: Synthetic oligonucleotide
  Antisense strand to SEQ ID NO: 1055210
uauccacugagacuagaau

SEQ ID NO: 1055212 - RNA, 19 nt, Artificial Sequence
  Description of Artificial Sequence: Synthetic oligonucleotide
  Sense strand starting at position 920 of SEQ ID NO: 915119
cuagucucaguggauaauu

SEQ ID NO: 1055213 - RNA, 19 nt, Artificial Sequence
  Description of Artificial Sequence: Synthetic oligonucleotide
  Antisense strand to SEQ ID NO: 1055212
aauuauccacugagacuag

SEQ ID NO: 1055214 - RNA, 19 nt, Artificial Sequence
  Description of Artificial Sequence: Synthetic oligonucleotide
  Sense strand starting at position 929 of SEQ ID NO: 915119
guggauaauuuauacuacu

SEQ ID NO: 1055215 - RNA, 19 nt, Artificial Sequence
  Description of Artificial Sequence: Synthetic oligonucleotide
  Antisense strand to SEQ ID NO: 1055214
aguaguauaaauuauccac

SEQ ID NO: 1055216 - RNA, 19 nt, Artificial Sequence
  Description of Artificial Sequence: Synthetic oligonucleotide
  Sense strand starting at position 949 of SEQ ID NO: 915119
uucugauggcuuuauguag

SEQ ID NO: 1055217 - RNA, 19 nt, Artificial Sequence
  Description of Artificial Sequence: Synthetic oligonucleotide
  Antisense strand to SEQ ID NO: 1055216
cuacauaaagccaucagaa

SEQ ID NO: 1055218 - RNA, 19 nt, Artificial Sequence
  Description of Artificial Sequence: Synthetic oligonucleotide
  Sense strand starting at position 955 of SEQ ID NO: 915119
uggcuuuauguagauagag

SEQ ID NO: 1055219 - RNA, 19 nt, Artificial Sequence
  Description of Artificial Sequence: Synthetic oligonucleotide
  Antisense strand to SEQ ID NO: 1055218
cucuaucuacauaaagcca

SEQ ID NO: 1055220 - RNA, 19 nt, Artificial Sequence
  Description of Artificial Sequence: Synthetic oligonucleotide
  Sense strand starting at position 983 of SEQ ID NO: 915119
ccuacagaaucuguugaau

SEQ ID NO: 1055221 - RNA, 19 nt, Artificial Sequence
  Description of Artificial Sequence: Synthetic oligonucleotide
  Antisense strand to SEQ ID NO: 1055220
auucaacagauucuguagg

SEQ ID NO: 1055222 - RNA, 19 nt, Artificial Sequence
  Description of Artificial Sequence: Synthetic oligonucleotide
  Sense strand starting at position 994 of SEQ ID NO: 915119
uguugaauugacugcagua

SEQ ID NO: 1055223 - RNA, 19 nt, Artificial Sequence
  Description of Artificial Sequence: Synthetic oligonucleotide
  Antisense strand to SEQ ID NO: 1055222
uacugcagucaauucaaca

SEQ ID NO: 1055224 - RNA, 19 nt, Artificial Sequence
  Description of Artificial Sequence: Synthetic oligonucleotide
  Sense strand starting at position 996 of SEQ ID NO: 915119
uugaauugacugcaguauu

SEQ ID NO: 1055225 - RNA, 19 nt, Artificial Sequence
  Description of Artificial Sequence: Synthetic oligonucleotide
  Antisense strand to SEQ ID NO: 1055224
aauacugcagucaauucaa

SEQ ID NO: 1055226 - RNA, 19 nt, Artificial Sequence
  Description of Artificial Sequence: Synthetic oligonucleotide
  Sense strand starting at position 2103 of SEQ ID NO: 915119
gcacaucuacaucguuaua

SEQ ID NO: 1055227 - RNA, 19 nt, Artificial Sequence
  Description of Artificial Sequence: Synthetic oligonucleotide
  Antisense strand to SEQ ID NO: 1055226
uauaacgauguagaugugc

SEQ ID NO: 1055228 - RNA, 19 nt, Artificial Sequence
  Description of Artificial Sequence: Synthetic oligonucleotide
  Sense strand starting at position 2105 of SEQ ID NO: 915119
acaucuacaucguuauauc

SEQ ID NO: 1055229 - RNA, 19 nt, Artificial Sequence
  Description of Artificial Sequence: Synthetic oligonucleotide
  Antisense strand to SEQ ID NO: 1055228
gauauaacgauguagaugu

SEQ ID NO: 1055230 - RNA, 19 nt, Artificial Sequence
  Description of Artificial Sequence: Synthetic oligonucleotide
  Sense strand starting at position 2262 of SEQ ID NO: 915119
cucuaagucuuagugggua

SEQ ID NO: 1055231 - RNA, 19 nt, Artificial Sequence
  Description of Artificial Sequence: Synthetic oligonucleotide
  Antisense strand to SEQ ID NO: 1055230
uacccacuaagacuuagag

SEQ ID NO: 1055232 - RNA, 19 nt, Artificial Sequence
  Description of Artificial Sequence: Synthetic oligonucleotide
  Sense strand starting at position 2264 of SEQ ID NO: 915119
cuaagucuuaguggguauu

SEQ ID NO: 1055233 - RNA, 19 nt, Artificial Sequence
  Description of Artificial Sequence: Synthetic oligonucleotide
  Antisense strand to SEQ ID NO: 1055232
aauacccacuaagacuuag

SEQ ID NO: 1055234 - RNA, 19 nt, Artificial Sequence
  Description of Artificial Sequence: Synthetic oligonucleotide
  Sense strand starting at position 2274 of SEQ ID NO: 915119
guggguauucuguacagga

SEQ ID NO: 1055235 - RNA, 19 nt, Artificial Sequence
  Description of Artificial Sequence: Synthetic oligonucleotide
  Antisense strand to SEQ ID NO: 1055234
uccuguacagaauacccac

SEQ ID NO: 1055236 - RNA, 19 nt, Artificial Sequence
  Description of Artificial Sequence: Synthetic oligonucleotide
  Sense strand starting at position 2364 of SEQ ID NO: 915119
cccaaucagcuuugaugga

SEQ ID NO: 1055237 - RNA, 19 nt, Artificial Sequence
  Description of Artificial Sequence: Synthetic oligonucleotide
  Antisense strand to SEQ ID NO: 1055236
uccaucaaagcugauuggg

SEQ ID NO: 1055238 - RNA, 19 nt, Artificial Sequence
  Description of Artificial Sequence: Synthetic oligonucleotide
  Sense strand starting at position 2425 of SEQ ID NO: 915119
cuuguuaugaguuaaugag

SEQ ID NO: 1055239 - RNA, 19 nt, Artificial Sequence
  Description of Artificial Sequence: Synthetic oligonucleotide
  Antisense strand to SEQ ID NO: 1055238
cucauuaacucauaacaag

SEQ ID NO: 1055240 - RNA, 19 nt, Artificial Sequence
  Description of Artificial Sequence: Synthetic oligonucleotide
  Sense strand starting at position 2586 of SEQ ID NO: 915119
aguaguugcagggacuuua

SEQ ID NO: 1055241 - RNA, 19 nt, Artificial Sequence
  Description of Artificial Sequence: Synthetic oligonucleotide
  Antisense strand to SEQ ID NO: 1055240
uaaagucccugcaacuacu

SEQ ID NO: 1055242 - RNA, 19 nt, Artificial Sequence
  Description of Artificial Sequence: Synthetic oligonucleotide
  Sense strand starting at position 2605 of SEQ ID NO: 915119
caauaugaccuguguagca

SEQ ID NO: 1055243 - RNA, 19 nt, Artificial Sequence
  Description of Artificial Sequence: Synthetic oligonucleotide
  Antisense strand to SEQ ID NO: 1055242
ugcuacacaggucauauug

SEQ ID NO: 1055244 - RNA, 19 nt, Artificial Sequence
  Description of Artificial Sequence: Synthetic oligonucleotide
  Sense strand starting at position 2801 of SEQ ID NO: 915119
gggaguuuccauuacaucc

SEQ ID NO: 1055245 - RNA, 19 nt, Artificial Sequence
  Description of Artificial Sequence: Synthetic oligonucleotide
  Antisense strand to SEQ ID NO: 1055244
ggauguaauggaaacuccc

SEQ ID NO: 1055246 - RNA, 19 nt, Artificial Sequence
  Description of Artificial Sequence: Synthetic oligonucleotide
  Sense strand starting at position 3052 of SEQ ID NO: 915119
agguacuaagagugcucaa

SEQ ID NO: 1055247 - RNA, 19 nt, Artificial Sequence
  Description of Artificial Sequence: Synthetic oligonucleotide
  Antisense strand to SEQ ID NO: 1055246
uugagcacucuuaguaccu

SEQ ID NO: 1055248 - RNA, 19 nt, Artificial Sequence
  Description of Artificial Sequence: Synthetic oligonucleotide
  Sense strand starting at position 3135 of SEQ ID NO: 915119
guaagaaagcauggguuga

SEQ ID NO: 1055249 - RNA, 19 nt, Artificial Sequence
  Description of Artificial Sequence: Synthetic oligonucleotide
  Antisense strand to SEQ ID NO: 1055248
ucaacccaugcuuucuuac

SEQ ID NO: 1055250 - RNA, 19 nt, Artificial Sequence
  Description of Artificial Sequence: Synthetic oligonucleotide
  Sense strand starting at position 3139 of SEQ ID NO: 915119
gaaagcauggguugaguca

SEQ ID NO: 1055251 - RNA, 19 nt, Artificial Sequence
  Description of Artificial Sequence: Synthetic oligonucleotide
  Antisense strand to SEQ ID NO: 1055250
ugacucaacccaugcuuuc

SEQ ID NO: 1055252 - RNA, 19 nt, Artificial Sequence
  Description of Artificial Sequence: Synthetic oligonucleotide
  Sense strand starting at position 3388 of SEQ ID NO: 915119
gaccuugugauaugggagu

SEQ ID NO: 1055253 - RNA, 19 nt, Artificial Sequence
  Description of Artificial Sequence: Synthetic oligonucleotide
  Antisense strand to SEQ ID NO: 1055252
acucccauaucacaagguc

SEQ ID NO: 1055254 - RNA, 19 nt, Artificial Sequence
  Description of Artificial Sequence: Synthetic oligonucleotide
  Sense strand starting at position 3390 of SEQ ID NO: 915119
ccuugugauaugggaguga

SEQ ID NO: 1055255 - RNA, 19 nt, Artificial Sequence
  Description of Artificial Sequence: Synthetic oligonucleotide
  Antisense strand to SEQ ID NO: 1055254
ucacucccauaucacaagg

SEQ ID NO: 1055256 - RNA, 19 nt, Artificial Sequence
  Description of Artificial Sequence: Synthetic oligonucleotide
  Sense strand starting at position 3394 of SEQ ID NO: 915119
gugauaugggagugacagu

SEQ ID NO: 1055257 - RNA, 19 nt, Artificial Sequence
  Description of Artificial Sequence: Synthetic oligonucleotide
  Antisense strand to SEQ ID NO: 1055256
acugucacucccauaucac

SEQ ID NO: 1055258 - RNA, 19 nt, Artificial Sequence
  Description of Artificial Sequence: Synthetic oligonucleotide
  Sense strand starting at position 3410 of SEQ ID NO: 915119
aguaaauaucagugucuag

SEQ ID NO: 1055259 - RNA, 19 nt, Artificial Sequence
  Description of Artificial Sequence: Synthetic oligonucleotide
  Antisense strand to SEQ ID NO: 1055258
cuagacacugauauuuacu

SEQ ID NO: 1055260 - RNA, 19 nt, Artificial Sequence
  Description of Artificial Sequence: Synthetic oligonucleotide
  Sense strand starting at position 3450 of SEQ ID NO: 915119
aaauacagaguuugaagua

SEQ ID NO: 1055261 - RNA, 19 nt, Artificial Sequence
  Description of Artificial Sequence: Synthetic oligonucleotide
  Antisense strand to SEQ ID NO: 1055260
uacuucaaacucuguauuu

SEQ ID NO: 1055262 - RNA, 19 nt, Artificial Sequence
  Description of Artificial Sequence: Synthetic oligonucleotide
  Sense strand starting at position 3661 of SEQ ID NO: 915119
gugucuacuaugggaaguu

SEQ ID NO: 1055263 - RNA, 19 nt, Artificial Sequence
  Description of Artificial Sequence: Synthetic oligonucleotide
  Antisense strand to SEQ ID NO: 1055262
aacuucccauaguagacac

SEQ ID NO: 1055264 - RNA, 19 nt, Artificial Sequence
  Description of Artificial Sequence: Synthetic oligonucleotide
  Sense strand starting at position 3797 of SEQ ID NO: 915119
cugagaagugcuugaacuu

SEQ ID NO: 1055265 - RNA, 19 nt, Artificial Sequence
  Description of Artificial Sequence: Synthetic oligonucleotide
  Antisense strand to SEQ ID NO: 1055264
aaguucaagcacuucucag

SEQ ID NO: 1055266 - RNA, 19 nt, Artificial Sequence
  Description of Artificial Sequence: Synthetic oligonucleotide
  Sense strand starting at position 3798 of SEQ ID NO: 915119
ugagaagugcuugaacuuu

SEQ ID NO: 1055267 - RNA, 19 nt, Artificial Sequence
  Description of Artificial Sequence: Synthetic oligonucleotide
  Antisense strand to SEQ ID NO: 1055266
aaaguucaagcacuucuca

SEQ ID NO: 1055268 - RNA, 19 nt, Artificial Sequence
  Description of Artificial Sequence: Synthetic oligonucleotide
  Sense strand starting at position 3837 of SEQ ID NO: 915119
cauuaugaguguccucgau

SEQ ID NO: 1055269 - RNA, 19 nt, Artificial Sequence
  Description of Artificial Sequence: Synthetic oligonucleotide
  Antisense strand to SEQ ID NO: 1055268
aucgaggacacucauaaug

SEQ ID NO: 1055270 - RNA, 19 nt, Artificial Sequence
  Description of Artificial Sequence: Synthetic oligonucleotide
  Sense strand starting at position 3841 of SEQ ID NO: 915119
augaguguccucgauguca

SEQ ID NO: 1055271 - RNA, 19 nt, Artificial Sequence
  Description of Artificial Sequence: Synthetic oligonucleotide
  Antisense strand to SEQ ID NO: 1055270
ugacaucgaggacacucau

SEQ ID NO: 1055272 - RNA, 19 nt, Artificial Sequence
  Description of Artificial Sequence: Synthetic oligonucleotide
  Sense strand starting at position 3849 of SEQ ID NO: 915119
ccucgaugucauggugaca

SEQ ID NO: 1055273 - RNA, 19 nt, Artificial Sequence
  Description of Artificial Sequence: Synthetic oligonucleotide
  Antisense strand to SEQ ID NO: 1055272
ugucaccaugacaucgagg

SEQ ID NO: 1055274 - RNA, 19 nt, Artificial Sequence
  Description of Artificial Sequence: Synthetic oligonucleotide
  Sense strand starting at position 3852 of SEQ ID NO: 915119
cgaugucauggugacauua

SEQ ID NO: 1055275 - RNA, 19 nt, Artificial Sequence
  Description of Artificial Sequence: Synthetic oligonucleotide
  Antisense strand to SEQ ID NO: 1055274
uaaugucaccaugacaucg

SEQ ID NO: 1055276 - RNA, 19 nt, Artificial Sequence
  Description of Artificial Sequence: Synthetic oligonucleotide
  Sense strand starting at position 3900 of SEQ ID NO: 915119
augacaacguuucuuaaua

SEQ ID NO: 1055277 - RNA, 19 nt, Artificial Sequence
  Description of Artificial Sequence: Synthetic oligonucleotide
  Antisense strand to SEQ ID NO: 1055276
uauuaagaaacguugucau

SEQ ID NO: 1055278 - RNA, 19 nt, Artificial Sequence
  Description of Artificial Sequence: Synthetic oligonucleotide
  Sense strand starting at position 3901 of SEQ ID NO: 915119
ugacaacguuucuuaauaa

SEQ ID NO: 1055279 - RNA, 19 nt, Artificial Sequence
  Description of Artificial Sequence: Synthetic oligonucleotide
  Antisense strand to SEQ ID NO: 1055278
uuauuaagaaacguuguca

SEQ ID NO: 1055280 - RNA, 19 nt, Artificial Sequence
  Description of Artificial Sequence: Synthetic oligonucleotide
  Sense strand starting at position 3927 of SEQ ID NO: 915119
agagcauauguagaaaugu

SEQ ID NO: 1055281 - RNA, 19 nt, Artificial Sequence
  Description of Artificial Sequence: Synthetic oligonucleotide
  Antisense strand to SEQ ID NO: 1055280
acauuucuacauaugcucu

SEQ ID NO: 1055282 - RNA, 19 nt, Artificial Sequence
  Description of Artificial Sequence: Synthetic oligonucleotide
  Sense strand starting at position 442 of SEQ ID NO: 915120
ggauaauagugacuuucuc

SEQ ID NO: 1055283 - RNA, 19 nt, Artificial Sequence
  Description of Artificial Sequence: Synthetic oligonucleotide
  Antisense strand to SEQ ID NO: 1055282
gagaaagucacuauuaucc

SEQ ID NO: 1055284 - RNA, 19 nt, Artificial Sequence
  Description of Artificial Sequence: Synthetic oligonucleotide
  Sense strand starting at position 448 of SEQ ID NO: 915120
uagugacuuucucuguuga

SEQ ID NO: 1055285 - RNA, 19 nt, Artificial Sequence
  Description of Artificial Sequence: Synthetic oligonucleotide
  Antisense strand to SEQ ID NO: 1055284
ucaacagagaaagucacua

SEQ ID NO: 1055286 - RNA, 19 nt, Artificial Sequence
  Description of Artificial Sequence: Synthetic oligonucleotide
  Sense strand starting at position 449 of SEQ ID NO: 915120
agugacuuucucuguugaa

SEQ ID NO: 1055287 - RNA, 19 nt, Artificial Sequence
  Description of Artificial Sequence: Synthetic oligonucleotide
  Antisense strand to SEQ ID NO: 1055286
uucaacagagaaagucacu

SEQ ID NO: 1055288 - RNA, 19 nt, Artificial Sequence
  Description of Artificial Sequence: Synthetic oligonucleotide
  Sense strand starting at position 450 of SEQ ID NO: 915120
gugacuuucucuguugaag

SEQ ID NO: 1055289 - RNA, 19 nt, Artificial Sequence
  Description of Artificial Sequence: Synthetic oligonucleotide
  Antisense strand to SEQ ID NO: 1055288
cuucaacagagaaagucac

SEQ ID NO: 1055290 - RNA, 19 nt, Artificial Sequence
  Description of Artificial Sequence: Synthetic oligonucleotide
  Sense strand starting at position 452 of SEQ ID NO: 915120
gacuuucucuguugaagag

SEQ ID NO: 1055291 - RNA, 19 nt, Artificial Sequence
  Description of Artificial Sequence: Synthetic oligonucleotide
  Antisense strand to SEQ ID NO: 1055290
cucuucaacagagaaaguc

SEQ ID NO: 1055292 - RNA, 19 nt, Artificial Sequence
  Description of Artificial Sequence: Synthetic oligonucleotide
  Sense strand starting at position 834 of SEQ ID NO: 915120
gccuccuugcuuuaugcau

SEQ ID NO: 1055293 - RNA, 19 nt, Artificial Sequence
  Description of Artificial Sequence: Synthetic oligonucleotide
  Antisense strand to SEQ ID NO: 1055292
augcauaaagcaaggaggc

SEQ ID NO: 1055294 - RNA, 19 nt, Artificial Sequence
  Description of Artificial Sequence: Synthetic oligonucleotide
  Sense strand starting at position 1023 of SEQ ID NO: 915120
ggagaaaggcuguaaaguc

SEQ ID NO: 1055295 - RNA, 19 nt, Artificial Sequence
  Description of Artificial Sequence: Synthetic oligonucleotide
  Antisense strand to SEQ ID NO: 1055294
gacuuuacagccuuucucc

SEQ ID NO: 1055296 - RNA, 19 nt, Artificial Sequence
  Description of Artificial Sequence: Synthetic oligonucleotide
  Sense strand starting at position 1998 of SEQ ID NO: 915120
ccauguauucuuuacagcu

SEQ ID NO: 1055297 - RNA, 19 nt, Artificial Sequence
  Description of Artificial Sequence: Synthetic oligonucleotide
  Antisense strand to SEQ ID NO: 1055296
agcuguaaagaauacaugg

SEQ ID NO: 1055298 - RNA, 19 nt, Artificial Sequence
  Description of Artificial Sequence: Synthetic oligonucleotide
  Sense strand starting at position 2116 of SEQ ID NO: 915120
auguguaugcagcaucuau

SEQ ID NO: 1055299 - RNA, 19 nt, Artificial Sequence
  Description of Artificial Sequence: Synthetic oligonucleotide
  Antisense strand to SEQ ID NO: 1055298
auagaugcugcauacacau

SEQ ID NO: 1055300 - RNA, 19 nt, Artificial Sequence
  Description of Artificial Sequence: Synthetic oligonucleotide
  Sense strand starting at position 2123 of SEQ ID NO: 915120
ugcagcaucuaugucaaau

SEQ ID NO: 1055301 - RNA, 19 nt, Artificial Sequence
  Description of Artificial Sequence: Synthetic oligonucleotide
  Antisense strand to SEQ ID NO: 1055300
auuugacauagaugcugca

SEQ ID NO: 1055302 - RNA, 19 nt, Artificial Sequence
  Description of Artificial Sequence: Synthetic oligonucleotide
  Sense strand starting at position 2332 of SEQ ID NO: 915120
cagagaaagcaaugucuua

SEQ ID NO: 1055303 - RNA, 19 nt, Artificial Sequence
  Description of Artificial Sequence: Synthetic oligonucleotide
  Antisense strand to SEQ ID NO: 1055302
uaagacauugcuuucucug

SEQ ID NO: 1055304 - RNA, 19 nt, Artificial Sequence
  Description of Artificial Sequence: Synthetic oligonucleotide
  Sense strand starting at position 2337 of SEQ ID NO: 915120
aaagcaaugucuuagcuga

SEQ ID NO: 1055305 - RNA, 19 nt, Artificial Sequence
  Description of Artificial Sequence: Synthetic oligonucleotide
  Antisense strand to SEQ ID NO: 1055304
ucagcuaagacauugcuuu

SEQ ID NO: 1055306 - RNA, 19 nt, Artificial Sequence
  Description of Artificial Sequence: Synthetic oligonucleotide
  Sense strand starting at position 2415 of SEQ ID NO: 915120
agaugcauccuguauaaau

SEQ ID NO: 1055307 - RNA, 19 nt, Artificial Sequence
  Description of Artificial Sequence: Synthetic oligonucleotide
  Antisense strand to SEQ ID NO: 1055306
auuuauacaggaugcaucu

SEQ ID NO: 1055308 - RNA, 19 nt, Artificial Sequence
  Description of Artificial Sequence: Synthetic oligonucleotide
  Sense strand starting at position 2614 of SEQ ID NO: 915120
cuaccacguuauuguuuaa

SEQ ID NO: 1055309 - RNA, 19 nt, Artificial Sequence
  Description of Artificial Sequence: Synthetic oligonucleotide
  Antisense strand to SEQ ID NO: 1055308
uuaaacaauaacgugguag

SEQ ID NO: 1055310 - RNA, 19 nt, Artificial Sequence
  Description of Artificial Sequence: Synthetic oligonucleotide
  Sense strand starting at position 2617 of SEQ ID NO: 915120
ccacguuauuguuuaaacu

SEQ ID NO: 1055311 - RNA, 19 nt, Artificial Sequence
  Description of Artificial Sequence: Synthetic oligonucleotide
  Antisense strand to SEQ ID NO: 1055310
aguuuaaacaauaacgugg

SEQ ID NO: 1055312 - RNA, 19 nt, Artificial Sequence
  Description of Artificial Sequence: Synthetic oligonucleotide
  Sense strand starting at position 2843 of SEQ ID NO: 915120
cccaaaugaucuuucgaaa

SEQ ID NO: 1055313 - RNA, 19 nt, Artificial Sequence
  Description of Artificial Sequence: Synthetic oligonucleotide
  Antisense strand to SEQ ID NO: 1055312
uuucgaaagaucauuuggg

SEQ ID NO: 1055314 - RNA, 19 nt, Artificial Sequence
  Description of Artificial Sequence: Synthetic oligonucleotide
  Sense strand starting at position 3163 of SEQ ID NO: 915120
guguauuguaaguauaauc

SEQ ID NO: 1055315 - RNA, 19 nt, Artificial Sequence
  Description of Artificial Sequence: Synthetic oligonucleotide
  Antisense strand to SEQ ID NO: 1055314
gauuauacuuacaauacac

SEQ ID NO: 1055316 - RNA, 19 nt, Artificial Sequence
  Description of Artificial Sequence: Synthetic oligonucleotide
  Sense strand starting at position 3295 of SEQ ID NO: 915120
uaggguuuaggccagaagu

SEQ ID NO: 1055317 - RNA, 19 nt, Artificial Sequence
  Description of Artificial Sequence: Synthetic oligonucleotide
  Antisense strand to SEQ ID NO: 1055316
acuucuggccuaaacccua

SEQ ID NO: 1055318 - RNA, 19 nt, Artificial Sequence
  Description of Artificial Sequence: Synthetic oligonucleotide
  Sense strand starting at position 3297 of SEQ ID NO: 915120
ggguuuaggccagaaguga

SEQ ID NO: 1055319 - RNA, 19 nt, Artificial Sequence
  Description of Artificial Sequence: Synthetic oligonucleotide
  Antisense strand to SEQ ID NO: 1055318
ucacuucuggccuaaaccc

SEQ ID NO: 1055320 - RNA, 19 nt, Artificial Sequence
  Description of Artificial Sequence: Synthetic oligonucleotide
  Sense strand starting at position 3308 of SEQ ID NO: 915120
agaagugauuaucagagga

SEQ ID NO: 1055321 - RNA, 19 nt, Artificial Sequence
  Description of Artificial Sequence: Synthetic oligonucleotide
  Antisense strand to SEQ ID NO: 1055320
uccucugauaaucacuucu

SEQ ID NO: 1055322 - RNA, 19 nt, Artificial Sequence
  Description of Artificial Sequence: Synthetic oligonucleotide
  Sense strand starting at position 3526 of SEQ ID NO: 915120
ugagcuaguugacuuaucu

SEQ ID NO: 1055323 - RNA, 19 nt, Artificial Sequence
  Description of Artificial Sequence: Synthetic oligonucleotide
  Antisense strand to SEQ ID NO: 1055322
agauaagucaacuagcuca

SEQ ID NO: 1055324 - RNA, 19 nt, Artificial Sequence
  Description of Artificial Sequence: Synthetic oligonucleotide
  Sense strand starting at position 3692 of SEQ ID NO: 915120
gguagaaagugauagauga

SEQ ID NO: 1055325 - RNA, 19 nt, Artificial Sequence
  Description of Artificial Sequence: Synthetic oligonucleotide
  Antisense strand to SEQ ID NO: 1055324
ucaucuaucacuuucuacc

SEQ ID NO: 1055326 - RNA, 19 nt, Artificial Sequence
  Description of Artificial Sequence: Synthetic oligonucleotide
  Sense strand starting at position 3870 of SEQ ID NO: 915120
uugaguaccuaaugaguua

SEQ ID NO: 1055327 - RNA, 19 nt, Artificial Sequence
  Description of Artificial Sequence: Synthetic oligonucleotide
  Antisense strand to SEQ ID NO: 1055326
uaacucauuagguacucaa

SEQ ID NO: 1055328 - RNA, 19 nt, Artificial Sequence
  Description of Artificial Sequence: Synthetic oligonucleotide
  Sense strand starting at position 3873 of SEQ ID NO: 915120
aguaccuaaugaguuaaua

SEQ ID NO: 1055329 - RNA, 19 nt, Artificial Sequence
  Description of Artificial Sequence: Synthetic oligonucleotide
  Antisense strand to SEQ ID NO: 1055328
uauuaacucauuagguacu

SEQ ID NO: 1055330 - RNA, 19 nt, Artificial Sequence
  Description of Artificial Sequence: Synthetic oligonucleotide
  Sense strand starting at position 3917 of SEQ ID NO: 915120
ccaugcuuguaucaauaug

SEQ ID NO: 1055331 - RNA, 19 nt, Artificial Sequence
  Description of Artificial Sequence: Synthetic oligonucleotide
  Antisense strand to SEQ ID NO: 1055330
cauauugauacaagcaugg

SEQ ID NO: 1055332 - RNA, 19 nt, Artificial Sequence
  Description of Artificial Sequence: Synthetic oligonucleotide
  Sense strand starting at position 3969 of SEQ ID NO: 915120
uuuggugcugcugagauua

SEQ ID NO: 1055333 - RNA, 19 nt, Artificial Sequence
  Description of Artificial Sequence: Synthetic oligonucleotide
  Antisense strand to SEQ ID NO: 1055332
uaaucucagcagcaccaaa

SEQ ID NO: 1055334 - RNA, 19 nt, Artificial Sequence
  Description of Artificial Sequence: Synthetic oligonucleotide
  Sense strand starting at position 3971 of SEQ ID NO: 915120
uggugcugcugagauuauu

SEQ ID NO: 1055335 - RNA, 19 nt, Artificial Sequence
  Description of Artificial Sequence: Synthetic oligonucleotide
  Antisense strand to SEQ ID NO: 1055334
aauaaucucagcagcacca

SEQ ID NO: 1055336 - RNA, 19 nt, Artificial Sequence
  Description of Artificial Sequence: Synthetic oligonucleotide
  Sense strand starting at position 371 of SEQ ID NO: 915121
cacugucugcaagagcuaa

SEQ ID NO: 1055337 - RNA, 19 nt, Artificial Sequence
  Description of Artificial Sequence: Synthetic oligonucleotide
  Antisense strand to SEQ ID NO: 1055336
uuagcucuugcagacagug

SEQ ID NO: 1055338 - RNA, 19 nt, Artificial Sequence
  Description of Artificial Sequence: Synthetic oligonucleotide
  Sense strand starting at position 428 of SEQ ID NO: 915121
auuugaaaguuauggaugu

SEQ ID NO: 1055339 - RNA, 19 nt, Artificial Sequence
  Description of Artificial Sequence: Synthetic oligonucleotide
  Antisense strand to SEQ ID NO: 1055338
acauccauaacuuucaaau

SEQ ID NO: 1055340 - RNA, 19 nt, Artificial Sequence
  Description of Artificial Sequence: Synthetic oligonucleotide
  Sense strand starting at position 432 of SEQ ID NO: 915121
gaaaguuauggauguuaug

SEQ ID NO: 1055341 - RNA, 19 nt, Artificial Sequence
  Description of Artificial Sequence: Synthetic oligonucleotide
  Antisense strand to SEQ ID NO: 1055340
cauaacauccauaacuuuc

SEQ ID NO: 1055342 - RNA, 19 nt, Artificial Sequence
  Description of Artificial Sequence: Synthetic oligonucleotide
  Sense strand starting at position 435 of SEQ ID NO: 915121
aguuauggauguuaugaca

SEQ ID NO: 1055343 - RNA, 19 nt, Artificial Sequence
  Description of Artificial Sequence: Synthetic oligonucleotide
  Antisense strand to SEQ ID NO: 1055342
ugucauaacauccauaacu

SEQ ID NO: 1055344 - RNA, 19 nt, Artificial Sequence
  Description of Artificial Sequence: Synthetic oligonucleotide
  Sense strand starting at position 473 of SEQ ID NO: 915121
aauuuaacggugugucuca

SEQ ID NO: 1055345 - RNA, 19 nt, Artificial Sequence
  Description of Artificial Sequence: Synthetic oligonucleotide
  Antisense strand to SEQ ID NO: 1055344
ugagacacaccguuaaauu

SEQ ID NO: 1055346 - RNA, 19 nt, Artificial Sequence
  Description of Artificial Sequence: Synthetic oligonucleotide
  Sense strand starting at position 529 of SEQ ID NO: 915121
cuuaaaguguuauaugacu

SEQ ID NO: 1055347 - RNA, 19 nt, Artificial Sequence
  Description of Artificial Sequence: Synthetic oligonucleotide
  Antisense strand to SEQ ID NO: 1055346
agucauauaacacuuuaag

SEQ ID NO: 1055348 - RNA, 19 nt, Artificial Sequence
  Description of Artificial Sequence: Synthetic oligonucleotide
  Sense strand starting at position 534 of SEQ ID NO: 915121
aguguuauaugacugcaua

SEQ ID NO: 1055349 - RNA, 19 nt, Artificial Sequence
  Description of Artificial Sequence: Synthetic oligonucleotide
  Antisense strand to SEQ ID NO: 1055348
uaugcagucauauaacacu

SEQ ID NO: 1055350 - RNA, 19 nt, Artificial Sequence
  Description of Artificial Sequence: Synthetic oligonucleotide
  Sense strand starting at position 537 of SEQ ID NO: 915121
guuauaugacugcauauag

SEQ ID NO: 1055351 - RNA, 19 nt, Artificial Sequence
  Description of Artificial Sequence: Synthetic oligonucleotide
  Antisense strand to SEQ ID NO: 1055350
cuauaugcagucauauaac

SEQ ID NO: 1055352 - RNA, 19 nt, Artificial Sequence
  Description of Artificial Sequence: Synthetic oligonucleotide
  Sense strand starting at position 829 of SEQ ID NO: 915121
ucagucucgauguagaagu

SEQ ID NO: 1055353 - RNA, 19 nt, Artificial Sequence
  Description of Artificial Sequence: Synthetic oligonucleotide
  Antisense strand to SEQ ID NO: 1055352
acuucuacaucgagacuga

SEQ ID NO: 1055354 - RNA, 19 nt, Artificial Sequence
  Description of Artificial Sequence: Synthetic oligonucleotide
  Sense strand starting at position 836 of SEQ ID NO: 915121
cgauguagaaguugagauc

SEQ ID NO: 1055355 - RNA, 19 nt, Artificial Sequence
  Description of Artificial Sequence: Synthetic oligonucleotide
  Antisense strand to SEQ ID NO: 1055354
gaucucaacuucuacaucg

SEQ ID NO: 1055356 - RNA, 19 nt, Artificial Sequence
  Description of Artificial Sequence: Synthetic oligonucleotide
  Sense strand starting at position 870 of SEQ ID NO: 915121
augucaugaugggaugacu

SEQ ID NO: 1055357 - RNA, 19 nt, Artificial Sequence
  Description of Artificial Sequence: Synthetic oligonucleotide
  Antisense strand to SEQ ID NO: 1055356
agucaucccaucaugacau

SEQ ID NO: 1055358 - RNA, 19 nt, Artificial Sequence
  Description of Artificial Sequence: Synthetic oligonucleotide
  Sense strand starting at position 878 of SEQ ID NO: 915121
augggaugacuuuguaauu

SEQ ID NO: 1055359 - RNA, 19 nt, Artificial Sequence
  Description of Artificial Sequence: Synthetic oligonucleotide
  Antisense strand to SEQ ID NO: 1055358
aauuacaaagucaucccau

SEQ ID NO: 1055360 - RNA, 19 nt, Artificial Sequence
  Description of Artificial Sequence: Synthetic oligonucleotide
  Sense strand starting at position 879 of SEQ ID NO: 915121
ugggaugacuuuguaauug

SEQ ID NO: 1055361 - RNA, 19 nt, Artificial Sequence
  Description of Artificial Sequence: Synthetic oligonucleotide
  Antisense strand to SEQ ID NO: 1055360
caauuacaaagucauccca

SEQ ID NO: 1055362 - RNA, 19 nt, Artificial Sequence
  Description of Artificial Sequence: Synthetic oligonucleotide
  Sense strand starting at position 1999 of SEQ ID NO: 915121
ccuguaacgaaauagugau

SEQ ID NO: 1055363 - RNA, 19 nt, Artificial Sequence
  Description of Artificial Sequence: Synthetic oligonucleotide
  Antisense strand to SEQ ID NO: 1055362
aucacuauuucguuacagg

SEQ ID NO: 1055364 - RNA, 19 nt, Artificial Sequence
  Description of Artificial Sequence: Synthetic oligonucleotide
  Sense strand starting at position 2064 of SEQ ID NO: 915121
cuguauccugaauagugau

SEQ ID NO: 1055365 - RNA, 19 nt, Artificial Sequence
  Description of Artificial Sequence: Synthetic oligonucleotide
  Antisense strand to SEQ ID NO: 1055364
aucacuauucaggauacag

SEQ ID NO: 1055366 - RNA, 19 nt, Artificial Sequence
  Description of Artificial Sequence: Synthetic oligonucleotide
  Sense strand starting at position 2136 of SEQ ID NO: 915121
ccaucuugcccugaugauu

SEQ ID NO: 1055367 - RNA, 19 nt, Artificial Sequence
  Description of Artificial Sequence: Synthetic oligonucleotide
  Antisense strand to SEQ ID NO: 1055366
aaucaucagggcaagaugg

SEQ ID NO: 1055368 - RNA, 19 nt, Artificial Sequence
  Description of Artificial Sequence: Synthetic oligonucleotide
  Sense strand starting at position 2405 of SEQ ID NO: 915121
guccuuuauguuuguacuu

SEQ ID NO: 1055369 - RNA, 19 nt, Artificial Sequence
  Description of Artificial Sequence: Synthetic oligonucleotide
  Antisense strand to SEQ ID NO: 1055368
aaguacaaacauaaaggac

SEQ ID NO: 1055370 - RNA, 19 nt, Artificial Sequence
  Description of Artificial Sequence: Synthetic oligonucleotide
  Sense strand starting at position 2485 of SEQ ID NO: 915121
ucaguacucugaccuucua

SEQ ID NO: 1055371 - RNA, 19 nt, Artificial Sequence
  Description of Artificial Sequence: Synthetic oligonucleotide
  Antisense strand to SEQ ID NO: 1055370
uagaaggucagaguacuga

SEQ ID NO: 1055372 - RNA, 19 nt, Artificial Sequence
  Description of Artificial Sequence: Synthetic oligonucleotide
  Sense strand starting at position 2567 of SEQ ID NO: 915121
agacaagacucugaacugu

SEQ ID NO: 1055373 - RNA, 19 nt, Artificial Sequence
  Description of Artificial Sequence: Synthetic oligonucleotide
  Antisense strand to SEQ ID NO: 1055372
acaguucagagucuugucu

SEQ ID NO: 1055374 - RNA, 19 nt, Artificial Sequence
  Description of Artificial Sequence: Synthetic oligonucleotide
  Sense strand starting at position 2646 of SEQ ID NO: 915121
cuguucucuuuauaaggau

SEQ ID NO: 1055375 - RNA, 19 nt, Artificial Sequence
  Description of Artificial Sequence: Synthetic oligonucleotide
  Antisense strand to SEQ ID NO: 1055374
auccuuauaaagagaacag

SEQ ID NO: 1055376 - RNA, 19 nt, Artificial Sequence
  Description of Artificial Sequence: Synthetic oligonucleotide
  Sense strand starting at position 2789 of SEQ ID NO: 915121
cgaauaagcaguuaguacu

SEQ ID NO: 1055377 - RNA, 19 nt, Artificial Sequence
  Description of Artificial Sequence: Synthetic oligonucleotide
  Antisense strand to SEQ ID NO: 1055376
aguacuaacugcuuauucg

SEQ ID NO: 1055378 - RNA, 19 nt, Artificial Sequence
  Description of Artificial Sequence: Synthetic oligonucleotide
  Sense strand starting at position 2823 of SEQ ID NO: 915121
gggaggagcuaguuaguga

SEQ ID NO: 1055379 - RNA, 19 nt, Artificial Sequence
  Description of Artificial Sequence: Synthetic oligonucleotide
  Antisense strand to SEQ ID NO: 1055378
ucacuaacuagcuccuccc

SEQ ID NO: 1055380 - RNA, 19 nt, Artificial Sequence
  Description of Artificial Sequence: Synthetic oligonucleotide
  Sense strand starting at position 2826 of SEQ ID NO: 915121
aggagcuaguuagugagau

SEQ ID NO: 1055381 - RNA, 19 nt, Artificial Sequence
  Description of Artificial Sequence: Synthetic oligonucleotide
  Antisense strand to SEQ ID NO: 1055380
aucucacuaacuagcuccu

SEQ ID NO: 1055382 - RNA, 19 nt, Artificial Sequence
  Description of Artificial Sequence: Synthetic oligonucleotide
  Sense strand starting at position 2828 of SEQ ID NO: 915121
gagcuaguuagugagauag

SEQ ID NO: 1055383 - RNA, 19 nt, Artificial Sequence
  Description of Artificial Sequence: Synthetic oligonucleotide
  Antisense strand to SEQ ID NO: 1055382
cuaucucacuaacuagcuc

SEQ ID NO: 1055384 - RNA, 19 nt, Artificial Sequence
  Description of Artificial Sequence: Synthetic oligonucleotide
  Sense strand starting at position 2830 of SEQ ID NO: 915121
gcuaguuagugagauagaa

SEQ ID NO: 1055385 - RNA, 19 nt, Artificial Sequence
  Description of Artificial Sequence: Synthetic oligonucleotide
  Antisense strand to SEQ ID NO: 1055384
uucuaucucacuaacuagc

SEQ ID NO: 1055386 - RNA, 19 nt, Artificial Sequence
  Description of Artificial Sequence: Synthetic oligonucleotide
  Sense strand starting at position 2994 of SEQ ID NO: 915121
cggauuugauucugaauac

SEQ ID NO: 1055387 - RNA, 19 nt, Artificial Sequence
  Description of Artificial Sequence: Synthetic oligonucleotide
  Antisense strand to SEQ ID NO: 1055386
guauucagaaucaaauccg

SEQ ID NO: 1055388 - RNA, 19 nt, Artificial Sequence
  Description of Artificial Sequence: Synthetic oligonucleotide
  Sense strand starting at position 2995 of SEQ ID NO: 915121
ggauuugauucugaauaca

SEQ ID NO: 1055389 - RNA, 19 nt, Artificial Sequence
  Description of Artificial Sequence: Synthetic oligonucleotide
  Antisense strand to SEQ ID NO: 1055388
uguauucagaaucaaaucc

SEQ ID NO: 1055390 - RNA, 19 nt, Artificial Sequence
  Description of Artificial Sequence: Synthetic oligonucleotide
  Sense strand starting at position 3015 of SEQ ID NO: 915121
uuacaagucugccucaguu

SEQ ID NO: 1055391 - RNA, 19 nt, Artificial Sequence
  Description of Artificial Sequence: Synthetic oligonucleotide
  Antisense strand to SEQ ID NO: 1055390
aacugaggcagacuuguaa

SEQ ID NO: 1055392 - RNA, 19 nt, Artificial Sequence
  Description of Artificial Sequence: Synthetic oligonucleotide
  Sense strand starting at position 3122 of SEQ ID NO: 915121
uuaugauauucugcugaca

SEQ ID NO: 1055393 - RNA, 19 nt, Artificial Sequence
  Description of Artificial Sequence: Synthetic oligonucleotide
  Antisense strand to SEQ ID NO: 1055392
ugucagcagaauaucauaa

SEQ ID NO: 1055394 - RNA, 19 nt, Artificial Sequence
  Description of Artificial Sequence: Synthetic oligonucleotide
  Sense strand starting at position 3125 of SEQ ID NO: 915121
ugauauucugcugacaauu

SEQ ID NO: 1055395 - RNA, 19 nt, Artificial Sequence
  Description of Artificial Sequence: Synthetic oligonucleotide
  Antisense strand to SEQ ID NO: 1055394
aauugucagcagaauauca

SEQ ID NO: 1055396 - RNA, 19 nt, Artificial Sequence
  Description of Artificial Sequence: Synthetic oligonucleotide
  Sense strand starting at position 3189 of SEQ ID NO: 915121
gcucaugacguuuacauga

SEQ ID NO: 1055397 - RNA, 19 nt, Artificial Sequence
  Description of Artificial Sequence: Synthetic oligonucleotide
  Antisense strand to SEQ ID NO: 1055396
ucauguaaacgucaugagc

SEQ ID NO: 1055398 - RNA, 19 nt, Artificial Sequence
  Description of Artificial Sequence: Synthetic oligonucleotide
  Sense strand starting at position 3191 of SEQ ID NO: 915121
ucaugacguuuacaugaaa

SEQ ID NO: 1055399 - RNA, 19 nt, Artificial Sequence
  Description of Artificial Sequence: Synthetic oligonucleotide
  Antisense strand to SEQ ID NO: 1055398
uuucauguaaacgucauga

SEQ ID NO: 1055400 - RNA, 19 nt, Artificial Sequence
  Description of Artificial Sequence: Synthetic oligonucleotide
  Sense strand starting at position 3257 of SEQ ID NO: 915121
agugacuauacgugucuca

SEQ ID NO: 1055401 - RNA, 19 nt, Artificial Sequence
  Description of Artificial Sequence: Synthetic oligonucleotide
  Antisense strand to SEQ ID NO: 1055400
ugagacacguauagucacu

SEQ ID NO: 1055402 - RNA, 19 nt, Artificial Sequence
  Description of Artificial Sequence: Synthetic oligonucleotide
  Sense strand starting at position 3300 of SEQ ID NO: 915121
caagacaucuuuggagaga

SEQ ID NO: 1055403 - RNA, 19 nt, Artificial Sequence
  Description of Artificial Sequence: Synthetic oligonucleotide
  Antisense strand to SEQ ID NO: 1055402
ucucuccaaagaugucuug

SEQ ID NO: 1055404 - RNA, 19 nt, Artificial Sequence
  Description of Artificial Sequence: Synthetic oligonucleotide
  Sense strand starting at position 3301 of SEQ ID NO: 915121
aagacaucuuuggagagaa

SEQ ID NO: 1055405 - RNA, 19 nt, Artificial Sequence
  Description of Artificial Sequence: Synthetic oligonucleotide
  Antisense strand to SEQ ID NO: 1055404
uucucuccaaagaugucuu

SEQ ID NO: 1055406 - RNA, 19 nt, Artificial Sequence
  Description of Artificial Sequence: Synthetic oligonucleotide
  Sense strand starting at position 3467 of SEQ ID NO: 915121
acccuuaccuauuagaguu

SEQ ID NO: 1055407 - RNA, 19 nt, Artificial Sequence
  Description of Artificial Sequence: Synthetic oligonucleotide
  Antisense strand to SEQ ID NO: 1055406
aacucuaauagguaagggu

SEQ ID NO: 1055408 - RNA, 19 nt, Artificial Sequence
  Description of Artificial Sequence: Synthetic oligonucleotide
  Sense strand starting at position 3473 of SEQ ID NO: 915121
accuauuagaguugucguu

SEQ ID NO: 1055409 - RNA, 19 nt, Artificial Sequence
  Description of Artificial Sequence: Synthetic oligonucleotide
  Antisense strand to SEQ ID NO: 1055408
aacgacaacucuaauaggu

SEQ ID NO: 1055410 - RNA, 19 nt, Artificial Sequence
  Description of Artificial Sequence: Synthetic oligonucleotide
  Sense strand starting at position 3692 of SEQ ID NO: 915121
gccuguuauggccaaacaa

SEQ ID NO: 1055411 - RNA, 19 nt, Artificial Sequence
  Description of Artificial Sequence: Synthetic oligonucleotide
  Antisense strand to SEQ ID NO: 1055410
uuguuuggccauaacaggc

SEQ ID NO: 1055412 - RNA, 19 nt, Artificial Sequence
  Description of Artificial Sequence: Synthetic oligonucleotide
  Sense strand starting at position 3761 of SEQ ID NO: 915121
uuaccugugauggaacgua

SEQ ID NO: 1055413 - RNA, 19 nt, Artificial Sequence
  Description of Artificial Sequence: Synthetic oligonucleotide
  Antisense strand to SEQ ID NO: 1055412
uacguuccaucacagguaa

SEQ ID NO: 1055414 - RNA, 19 nt, Artificial Sequence
  Description of Artificial Sequence: Synthetic oligonucleotide
  Sense strand starting at position 3766 of SEQ ID NO: 915121
ugugauggaacguaucuua

SEQ ID NO: 1055415 - RNA, 19 nt, Artificial Sequence
  Description of Artificial Sequence: Synthetic oligonucleotide
  Antisense strand to SEQ ID NO: 1055414
uaagauacguuccaucaca

SEQ ID NO: 1055416 - RNA, 19 nt, Artificial Sequence
  Description of Artificial Sequence: Synthetic oligonucleotide
  Sense strand starting at position 88 of SEQ ID NO: 915122
cuugcauggucacuuagaa

SEQ ID NO: 1055417 - RNA, 19 nt, Artificial Sequence
  Description of Artificial Sequence: Synthetic oligonucleotide
  Antisense strand to SEQ ID NO: 1055416
uucuaagugaccaugcaag

SEQ ID NO: 1055418 - RNA, 19 nt, Artificial Sequence
  Description of Artificial Sequence: Synthetic oligonucleotide
  Sense strand starting at position 116 of SEQ ID NO: 915122
gggucuggaguagaaguau

SEQ ID NO: 1055419 - RNA, 19 nt, Artificial Sequence
  Description of Artificial Sequence: Synthetic oligonucleotide
  Antisense strand to SEQ ID NO: 1055418
auacuucuacuccagaccc

SEQ ID NO: 1055420 - RNA, 19 nt, Artificial Sequence
  Description of Artificial Sequence: Synthetic oligonucleotide
  Sense strand starting at position 125 of SEQ ID NO: 915122
guagaaguaugcuuggaca

SEQ ID NO: 1055421 - RNA, 19 nt, Artificial Sequence
  Description of Artificial Sequence: Synthetic oligonucleotide
  Antisense strand to SEQ ID NO: 1055420
uguccaagcauacuucuac

SEQ ID NO: 1055422 - RNA, 19 nt, Artificial Sequence
  Description of Artificial Sequence: Synthetic oligonucleotide
  Sense strand starting at position 127 of SEQ ID NO: 915122
agaaguaugcuuggacagu

SEQ ID NO: 1055423 - RNA, 19 nt, Artificial Sequence
  Description of Artificial Sequence: Synthetic oligonucleotide
  Antisense strand to SEQ ID NO: 1055422
acuguccaagcauacuucu

SEQ ID NO: 1055424 - RNA, 19 nt, Artificial Sequence
  Description of Artificial Sequence: Synthetic oligonucleotide
  Sense strand starting at position 166 of SEQ ID NO: 915122
uuaaguuaggccuaauaag

SEQ ID NO: 1055425 - RNA, 19 nt, Artificial Sequence
  Description of Artificial Sequence: Synthetic oligonucleotide
  Antisense strand to SEQ ID NO: 1055424
cuuauuaggccuaacuuaa

SEQ ID NO: 1055426 - RNA, 19 nt, Artificial Sequence
  Description of Artificial Sequence: Synthetic oligonucleotide
  Sense strand starting at position 326 of SEQ ID NO: 915122
aauguuggacauugugaga

SEQ ID NO: 1055427 - RNA, 19 nt, Artificial Sequence
  Description of Artificial Sequence: Synthetic oligonucleotide
  Antisense strand to SEQ ID NO: 1055426
ucucacaauguccaacauu

SEQ ID NO: 1055428 - RNA, 19 nt, Artificial Sequence
  Description of Artificial Sequence: Synthetic oligonucleotide
  Sense strand starting at position 479 of SEQ ID NO: 915122
aaagucccuggauguaauu

SEQ ID NO: 1055429 - RNA, 19 nt, Artificial Sequence
  Description of Artificial Sequence: Synthetic oligonucleotide
  Antisense strand to SEQ ID NO: 1055428
aauuacauccagggacuuu

SEQ ID NO: 1055430 - RNA, 19 nt, Artificial Sequence
  Description of Artificial Sequence: Synthetic oligonucleotide
  Sense strand starting at position 557 of SEQ ID NO: 915122
ccugauaauuccucugguu

SEQ ID NO: 1055431 - RNA, 19 nt, Artificial Sequence
  Description of Artificial Sequence: Synthetic oligonucleotide
  Antisense strand to SEQ ID NO: 1055430
aaccagaggaauuaucagg

SEQ ID NO: 1055432 - RNA, 19 nt, Artificial Sequence
  Description of Artificial Sequence: Synthetic oligonucleotide
  Sense strand starting at position 596 of SEQ ID NO: 915122
uagaguuuguuaucaugag

SEQ ID NO: 1055433 - RNA, 19 nt, Artificial Sequence
  Description of Artificial Sequence: Synthetic oligonucleotide
  Antisense strand to SEQ ID NO: 1055432
cucaugauaacaaacucua

SEQ ID NO: 1055434 - RNA, 19 nt, Artificial Sequence
  Description of Artificial Sequence: Synthetic oligonucleotide
  Sense strand starting at position 600 of SEQ ID NO: 915122
guuuguuaucaugagggag

SEQ ID NO: 1055435 - RNA, 19 nt, Artificial Sequence
  Description of Artificial Sequence: Synthetic oligonucleotide
  Antisense strand to SEQ ID NO: 1055434
cucccucaugauaacaaac

SEQ ID NO: 1055436 - RNA, 19 nt, Artificial Sequence
  Description of Artificial Sequence: Synthetic oligonucleotide
  Sense strand starting at position 603 of SEQ ID NO: 915122
uguuaucaugagggaguuu

SEQ ID NO: 1055437 - RNA, 19 nt, Artificial Sequence
  Description of Artificial Sequence: Synthetic oligonucleotide
  Antisense strand to SEQ ID NO: 1055436
aaacucccucaugauaaca

SEQ ID NO: 1055438 - RNA, 19 nt, Artificial Sequence
  Description of Artificial Sequence: Synthetic oligonucleotide
  Sense strand starting at position 815 of SEQ ID NO: 915122
caugauauuguuggauauc

SEQ ID NO: 1055439 - RNA, 19 nt, Artificial Sequence
  Description of Artificial Sequence: Synthetic oligonucleotide
  Antisense strand to SEQ ID NO: 1055438
gauauccaacaauaucaug

SEQ ID NO: 1055440 - RNA, 19 nt, Artificial Sequence
  Description of Artificial Sequence: Synthetic oligonucleotide
  Sense strand starting at position 824 of SEQ ID NO: 915122
guuggauaucaugaagcca

SEQ ID NO: 1055441 - RNA, 19 nt, Artificial Sequence
  Description of Artificial Sequence: Synthetic oligonucleotide
  Antisense strand to SEQ ID NO: 1055440
uggcuucaugauauccaac

SEQ ID NO: 1055442 - RNA, 19 nt, Artificial Sequence
  Description of Artificial Sequence: Synthetic oligonucleotide
  Sense strand starting at position 961 of SEQ ID NO: 915122
auauuuguuucugucauuc

SEQ ID NO: 1055443 - RNA, 19 nt, Artificial Sequence
  Description of Artificial Sequence: Synthetic oligonucleotide
  Antisense strand to SEQ ID NO: 1055442
gaaugacagaaacaaauau

SEQ ID NO: 1055444 - RNA, 19 nt, Artificial Sequence
  Description of Artificial Sequence: Synthetic oligonucleotide
  Sense strand starting at position 2016 of SEQ ID NO: 915122
gaagacagaucucagagaa

SEQ ID NO: 1055445 - RNA, 19 nt, Artificial Sequence
  Description of Artificial Sequence: Synthetic oligonucleotide
  Antisense strand to SEQ ID NO: 1055444
uucucugagaucugucuuc

SEQ ID NO: 1055446 - RNA, 19 nt, Artificial Sequence
  Description of Artificial Sequence: Synthetic oligonucleotide
  Sense strand starting at position 2029 of SEQ ID NO: 915122
agagaagagcccugugaca

SEQ ID NO: 1055447 - RNA, 19 nt, Artificial Sequence
  Description of Artificial Sequence: Synthetic oligonucleotide
  Antisense strand to SEQ ID NO: 1055446
ugucacagggcucuucucu

SEQ ID NO: 1055448 - RNA, 19 nt, Artificial Sequence
  Description of Artificial Sequence: Synthetic oligonucleotide
  Sense strand starting at position 2031 of SEQ ID NO: 915122
agaagagcccugugacaaa

SEQ ID NO: 1055449 - RNA, 19 nt, Artificial Sequence
  Description of Artificial Sequence: Synthetic oligonucleotide
  Antisense strand to SEQ ID NO: 1055448
uuugucacagggcucuucu

SEQ ID NO: 1055450 - RNA, 19 nt, Artificial Sequence
  Description of Artificial Sequence: Synthetic oligonucleotide
  Sense strand starting at position 2265 of SEQ ID NO: 915122
cagagaauuugugaauuag

SEQ ID NO: 1055451 - RNA, 19 nt, Artificial Sequence
  Description of Artificial Sequence: Synthetic oligonucleotide
  Antisense strand to SEQ ID NO: 1055450
cuaauucacaaauucucug

SEQ ID NO: 1055452 - RNA, 19 nt, Artificial Sequence
  Description of Artificial Sequence: Synthetic oligonucleotide
  Sense strand starting at position 2414 of SEQ ID NO: 915122
cuuuguguuagagauugua

SEQ ID NO: 1055453 - RNA, 19 nt, Artificial Sequence
  Description of Artificial Sequence: Synthetic oligonucleotide
  Antisense strand to SEQ ID NO: 1055452
uacaaucucuaacacaaag

SEQ ID NO: 1055454 - RNA, 19 nt, Artificial Sequence
  Description of Artificial Sequence: Synthetic oligonucleotide
  Sense strand starting at position 2417 of SEQ ID NO: 915122
uguguuagagauuguauag

SEQ ID NO: 1055455 - RNA, 19 nt, Artificial Sequence
  Description of Artificial Sequence: Synthetic oligonucleotide
  Antisense strand to SEQ ID NO: 1055454
cuauacaaucucuaacaca

SEQ ID NO: 1055456 - RNA, 19 nt, Artificial Sequence
  Description of Artificial Sequence: Synthetic oligonucleotide
  Sense strand starting at position 2517 of SEQ ID NO: 915122
uagggaauaucuuugaugu

SEQ ID NO: 1055457 - RNA, 19 nt, Artificial Sequence
  Description of Artificial Sequence: Synthetic oligonucleotide
  Antisense strand to SEQ ID NO: 1055456
acaucaaagauauucccua

SEQ ID NO: 1055458 - RNA, 19 nt, Artificial Sequence
  Description of Artificial Sequence: Synthetic oligonucleotide
  Sense strand starting at position 2518 of SEQ ID NO: 915122
agggaauaucuuugauguu

SEQ ID NO: 1055459 - RNA, 19 nt, Artificial Sequence
  Description of Artificial Sequence: Synthetic oligonucleotide
  Antisense strand to SEQ ID NO: 1055458
aacaucaaagauauucccu

SEQ ID NO: 1055460 - RNA, 19 nt, Artificial Sequence
  Description of Artificial Sequence: Synthetic oligonucleotide
  Sense strand starting at position 2541 of SEQ ID NO: 915122
uuacaugaacuauguaagu

SEQ ID NO: 1055461 - RNA, 19 nt, Artificial Sequence
  Description of Artificial Sequence: Synthetic oligonucleotide
  Antisense strand to SEQ ID NO: 1055460
acuuacauaguucauguaa

SEQ ID NO: 1055462 - RNA, 19 nt, Artificial Sequence
  Description of Artificial Sequence: Synthetic oligonucleotide
  Sense strand starting at position 2550 of SEQ ID NO: 915122
cuauguaaguuucugaauu

SEQ ID NO: 1055463 - RNA, 19 nt, Artificial Sequence
  Description of Artificial Sequence: Synthetic oligonucleotide
  Antisense strand to SEQ ID NO: 1055462
aauucagaaacuuacauag

SEQ ID NO: 1055464 - RNA, 19 nt, Artificial Sequence
  Description of Artificial Sequence: Synthetic oligonucleotide
  Sense strand starting at position 2640 of SEQ ID NO: 915122
gcagcugagagcuaaguga

SEQ ID NO: 1055465 - RNA, 19 nt, Artificial Sequence
  Description of Artificial Sequence: Synthetic oligonucleotide
  Antisense strand to SEQ ID NO: 1055464
ucacuuagcucucagcugc

SEQ ID NO: 1055466 - RNA, 19 nt, Artificial Sequence
  Description of Artificial Sequence: Synthetic oligonucleotide
  Sense strand starting at position 2644 of SEQ ID NO: 915122
cugagagcuaagugaacau

SEQ ID NO: 1055467 - RNA, 19 nt, Artificial Sequence
  Description of Artificial Sequence: Synthetic oligonucleotide
  Antisense strand to SEQ ID NO: 1055466
auguucacuuagcucucag

SEQ ID NO: 1055468 - RNA, 19 nt, Artificial Sequence
  Description of Artificial Sequence: Synthetic oligonucleotide
  Sense strand starting at position 2662 of SEQ ID NO: 915122
uccagaaguuguuuggaga

SEQ ID NO: 1055469 - RNA, 19 nt, Artificial Sequence
  Description of Artificial Sequence: Synthetic oligonucleotide
  Antisense strand to SEQ ID NO: 1055468
ucuccaaacaacuucugga

SEQ ID NO: 1055470 - RNA, 19 nt, Artificial Sequence
  Description of Artificial Sequence: Synthetic oligonucleotide
  Sense strand starting at position 2663 of SEQ ID NO: 915122
ccagaaguuguuuggagaa

SEQ ID NO: 1055471 - RNA, 19 nt, Artificial Sequence
  Description of Artificial Sequence: Synthetic oligonucleotide
  Antisense strand to SEQ ID NO: 1055470
uucuccaaacaacuucugg

SEQ ID NO: 1055472 - RNA, 19 nt, Artificial Sequence
  Description of Artificial Sequence: Synthetic oligonucleotide
  Sense strand starting at position 2889 of SEQ ID NO: 915122
augguucuagccugaagag

SEQ ID NO: 1055473 - RNA, 19 nt, Artificial Sequence
  Description of Artificial Sequence: Synthetic oligonucleotide
  Antisense strand to SEQ ID NO: 1055472
cucuucaggcuagaaccau

SEQ ID NO: 1055474 - RNA, 19 nt, Artificial Sequence
  Description of Artificial Sequence: Synthetic oligonucleotide
  Sense strand starting at position 2899 of SEQ ID NO: 915122
ccugaagaggcuuguaacu

SEQ ID NO: 1055475 - RNA, 19 nt, Artificial Sequence
  Description of Artificial Sequence: Synthetic oligonucleotide
  Antisense strand to SEQ ID NO: 1055474
aguuacaagccucuucagg

SEQ ID NO: 1055476 - RNA, 19 nt, Artificial Sequence
  Description of Artificial Sequence: Synthetic oligonucleotide
  Sense strand starting at position 3446 of SEQ ID NO: 915122
gcugaaagaugcucaguaa

SEQ ID NO: 1055477 - RNA, 19 nt, Artificial Sequence
  Description of Artificial Sequence: Synthetic oligonucleotide
  Antisense strand to SEQ ID NO: 1055476
uuacugagcaucuuucagc

SEQ ID NO: 1055478 - RNA, 19 nt, Artificial Sequence
  Description of Artificial Sequence: Synthetic oligonucleotide
  Sense strand starting at position 3449 of SEQ ID NO: 915122
gaaagaugcucaguaagga

SEQ ID NO: 1055479 - RNA, 19 nt, Artificial Sequence
  Description of Artificial Sequence: Synthetic oligonucleotide
  Antisense strand to SEQ ID NO: 1055478
uccuuacugagcaucuuuc

SEQ ID NO: 1055480 - RNA, 19 nt, Artificial Sequence
  Description of Artificial Sequence: Synthetic oligonucleotide
  Sense strand starting at position 3492 of SEQ ID NO: 915122
uggaguauuaauuggugaa

SEQ ID NO: 1055481 - RNA, 19 nt, Artificial Sequence
  Description of Artificial Sequence: Synthetic oligonucleotide
  Antisense strand to SEQ ID NO: 1055480
uucaccaauuaauacucca

SEQ ID NO: 1055482 - RNA, 19 nt, Artificial Sequence
  Description of Artificial Sequence: Synthetic oligonucleotide
  Sense strand starting at position 3493 of SEQ ID NO: 915122
ggaguauuaauuggugaag

SEQ ID NO: 1055483 - RNA, 19 nt, Artificial Sequence
  Description of Artificial Sequence: Synthetic oligonucleotide
  Antisense strand to SEQ ID NO: 1055482
cuucaccaauuaauacucc

SEQ ID NO: 1055484 - RNA, 19 nt, Artificial Sequence
  Description of Artificial Sequence: Synthetic oligonucleotide
  Sense strand starting at position 3494 of SEQ ID NO: 915122
gaguauuaauuggugaaga

SEQ ID NO: 1055485 - RNA, 19 nt, Artificial Sequence
  Description of Artificial Sequence: Synthetic oligonucleotide
  Antisense strand to SEQ ID NO: 1055484
ucuucaccaauuaauacuc

SEQ ID NO: 1055486 - RNA, 19 nt, Artificial Sequence
  Description of Artificial Sequence: Synthetic oligonucleotide
  Sense strand starting at position 3731 of SEQ ID NO: 915122
guuaccagauguuuaccau

SEQ ID NO: 1055487 - RNA, 19 nt, Artificial Sequence
  Description of Artificial Sequence: Synthetic oligonucleotide
  Antisense strand to SEQ ID NO: 1055486
augguaaacaucugguaac

SEQ ID NO: 1055488 - RNA, 19 nt, Artificial Sequence
  Description of Artificial Sequence: Synthetic oligonucleotide
  Sense strand starting at position 3734 of SEQ ID NO: 915122
accagauguuuaccaucuu

SEQ ID NO: 1055489 - RNA, 19 nt, Artificial Sequence
  Description of Artificial Sequence: Synthetic oligonucleotide
  Antisense strand to SEQ ID NO: 1055488
aagaugguaaacaucuggu

SEQ ID NO: 1055490 - RNA, 19 nt, Artificial Sequence
  Description of Artificial Sequence: Synthetic oligonucleotide
  Sense strand starting at position 3883 of SEQ ID NO: 915122
ugagguagcuaauuauuag

SEQ ID NO: 1055491 - RNA, 19 nt, Artificial Sequence
  Description of Artificial Sequence: Synthetic oligonucleotide
  Antisense strand to SEQ ID NO: 1055490
cuaauaauuagcuaccuca

SEQ ID NO: 1055492 - RNA, 19 nt, Artificial Sequence
  Description of Artificial Sequence: Synthetic oligonucleotide
  Sense strand starting at position 3928 of SEQ ID NO: 915122
uuaguaacuuguccaaaga

SEQ ID NO: 1055493 - RNA, 19 nt, Artificial Sequence
  Description of Artificial Sequence: Synthetic oligonucleotide
  Antisense strand to SEQ ID NO: 1055492
ucuuuggacaaguuacuaa

SEQ ID NO: 1055494 - RNA, 19 nt, Artificial Sequence
  Description of Artificial Sequence: Synthetic oligonucleotide
  Sense strand starting at position 3980 of SEQ ID NO: 915122
aaccgagccuauguaaaua

SEQ ID NO: 1055495 - RNA, 19 nt, Artificial Sequence
  Description of Artificial Sequence: Synthetic oligonucleotide
  Antisense strand to SEQ ID NO: 1055494
uauuuacauaggcucgguu

SEQ ID NO: 1055496 - RNA, 19 nt, Artificial Sequence
  Description of Artificial Sequence: Synthetic oligonucleotide
  Sense strand starting at position 64 of SEQ ID NO: 915123
ccucacucugggcaugaaa

SEQ ID NO: 1055497 - RNA, 19 nt, Artificial Sequence
  Description of Artificial Sequence: Synthetic oligonucleotide
  Antisense strand to SEQ ID NO: 1055496
uuucaugcccagagugagg

SEQ ID NO: 1055498 - RNA, 19 nt, Artificial Sequence
  Description of Artificial Sequence: Synthetic oligonucleotide
  Sense strand starting at position 90 of SEQ ID NO: 915123
ugccaauucuaacuuguga

SEQ ID NO: 1055499 - RNA, 19 nt, Artificial Sequence
  Description of Artificial Sequence: Synthetic oligonucleotide
  Antisense strand to SEQ ID NO: 1055498
ucacaaguuagaauuggca

SEQ ID NO: 1055500 - RNA, 19 nt, Artificial Sequence
  Description of Artificial Sequence: Synthetic oligonucleotide
  Sense strand starting at position 149 of SEQ ID NO: 915123
uguaacuuccuauagcagu

SEQ ID NO: 1055501 - RNA, 19 nt, Artificial Sequence
  Description of Artificial Sequence: Synthetic oligonucleotide
  Antisense strand to SEQ ID NO: 1055500
acugcuauaggaaguuaca

SEQ ID NO: 1055502 - RNA, 19 nt, Artificial Sequence
  Description of Artificial Sequence: Synthetic oligonucleotide
  Sense strand starting at position 198 of SEQ ID NO: 915123
agagacaaguguccugagu

SEQ ID NO: 1055503 - RNA, 19 nt, Artificial Sequence
  Description of Artificial Sequence: Synthetic oligonucleotide
  Antisense strand to SEQ ID NO: 1055502
acucaggacacuugucucu

SEQ ID NO: 1055504 - RNA, 19 nt, Artificial Sequence
  Description of Artificial Sequence: Synthetic oligonucleotide
  Sense strand starting at position 344 of SEQ ID NO: 915123
uuguaucuccaguauauua

SEQ ID NO: 1055505 - RNA, 19 nt, Artificial Sequence
  Description of Artificial Sequence: Synthetic oligonucleotide
  Antisense strand to SEQ ID NO: 1055504
uaauauacuggagauacaa

SEQ ID NO: 1055506 - RNA, 19 nt, Artificial Sequence
  Description of Artificial Sequence: Synthetic oligonucleotide
  Sense strand starting at position 352 of SEQ ID NO: 915123
ccaguauauuagccucuga

SEQ ID NO: 1055507 - RNA, 19 nt, Artificial Sequence
  Description of Artificial Sequence: Synthetic oligonucleotide
  Antisense strand to SEQ ID NO: 1055506
ucagaggcuaauauacugg

SEQ ID NO: 1055508 - RNA, 19 nt, Artificial Sequence
  Description of Artificial Sequence: Synthetic oligonucleotide
  Sense strand starting at position 427 of SEQ ID NO: 915123
uugauauacugaguuaguu

SEQ ID NO: 1055509 - RNA, 19 nt, Artificial Sequence
  Description of Artificial Sequence: Synthetic oligonucleotide
  Antisense strand to SEQ ID NO: 1055508
aacuaacucaguauaucaa

SEQ ID NO: 1055510 - RNA, 19 nt, Artificial Sequence
  Description of Artificial Sequence: Synthetic oligonucleotide
  Sense strand starting at position 511 of SEQ ID NO: 915123
uugacauuucuuuguuggu

SEQ ID NO: 1055511 - RNA, 19 nt, Artificial Sequence
  Description of Artificial Sequence: Synthetic oligonucleotide
  Antisense strand to SEQ ID NO: 1055510
accaacaaagaaaugucaa

SEQ ID NO: 1055512 - RNA, 19 nt, Artificial Sequence
  Description of Artificial Sequence: Synthetic oligonucleotide
  Sense strand starting at position 521 of SEQ ID NO: 915123
uuuguuggugcucacaaau

SEQ ID NO: 1055513 - RNA, 19 nt, Artificial Sequence
  Description of Artificial Sequence: Synthetic oligonucleotide
  Antisense strand to SEQ ID NO: 1055512
auuugugagcaccaacaaa

SEQ ID NO: 1055514 - RNA, 19 nt, Artificial Sequence
  Description of Artificial Sequence: Synthetic oligonucleotide
  Sense strand starting at position 542 of SEQ ID NO: 915123
gaacacuugugauuguaua

SEQ ID NO: 1055515 - RNA, 19 nt, Artificial Sequence
  Description of Artificial Sequence: Synthetic oligonucleotide
  Antisense strand to SEQ ID NO: 1055514
uauacaaucacaaguguuc

SEQ ID NO: 1055516 - RNA, 19 nt, Artificial Sequence
  Description of Artificial Sequence: Synthetic oligonucleotide
  Sense strand starting at position 573 of SEQ ID NO: 915123
uuuauuaaaccagagugua

SEQ ID NO: 1055517 - RNA, 19 nt, Artificial Sequence
  Description of Artificial Sequence: Synthetic oligonucleotide
  Antisense strand to SEQ ID NO: 1055516
uacacucugguuuaauaaa

SEQ ID NO: 1055518 - RNA, 19 nt, Artificial Sequence
  Description of Artificial Sequence: Synthetic oligonucleotide
  Sense strand starting at position 588 of SEQ ID NO: 915123
uguagacagaguugugaug

SEQ ID NO: 1055519 - RNA, 19 nt, Artificial Sequence
  Description of Artificial Sequence: Synthetic oligonucleotide
  Antisense strand to SEQ ID NO: 1055518
caucacaacucugucuaca

SEQ ID NO: 1055520 - RNA, 19 nt, Artificial Sequence
  Description of Artificial Sequence: Synthetic oligonucleotide
  Sense strand starting at position 751 of SEQ ID NO: 915123
gauagucaggcuuacacuu

SEQ ID NO: 1055521 - RNA, 19 nt, Artificial Sequence
  Description of Artificial Sequence: Synthetic oligonucleotide
  Antisense strand to SEQ ID NO: 1055520
aaguguaagccugacuauc

SEQ ID NO: 1055522 - RNA, 19 nt, Artificial Sequence
  Description of Artificial Sequence: Synthetic oligonucleotide
  Sense strand starting at position 871 of SEQ ID NO: 915123
gacaaugucuugguaguca

SEQ ID NO: 1055523 - RNA, 19 nt, Artificial Sequence
  Description of Artificial Sequence: Synthetic oligonucleotide
  Antisense strand to SEQ ID NO: 1055522
ugacuaccaagacauuguc

SEQ ID NO: 1055524 - RNA, 19 nt, Artificial Sequence
  Description of Artificial Sequence: Synthetic oligonucleotide
  Sense strand starting at position 971 of SEQ ID NO: 915123
ccuauuugcugucuauacu

SEQ ID NO: 1055525 - RNA, 19 nt, Artificial Sequence
  Description of Artificial Sequence: Synthetic oligonucleotide
  Antisense strand to SEQ ID NO: 1055524
aguauagacagcaaauagg

SEQ ID NO: 1055526 - RNA, 19 nt, Artificial Sequence
  Description of Artificial Sequence: Synthetic oligonucleotide
  Sense strand starting at position 1136 of SEQ ID NO: 915123
gagaaaggguguuccaaua

SEQ ID NO: 1055527 - RNA, 19 nt, Artificial Sequence
  Description of Artificial Sequence: Synthetic oligonucleotide
  Antisense strand to SEQ ID NO: 1055526
uauuggaacacccuuucuc

SEQ ID NO: 1055528 - RNA, 19 nt, Artificial Sequence
  Description of Artificial Sequence: Synthetic oligonucleotide
  Sense strand starting at position 1299 of SEQ ID NO: 915123
ugguuucucagugaaugca

SEQ ID NO: 1055529 - RNA, 19 nt, Artificial Sequence
  Description of Artificial Sequence: Synthetic oligonucleotide
  Antisense strand to SEQ ID NO: 1055528
ugcauucacugagaaacca

SEQ ID NO: 1055530 - RNA, 19 nt, Artificial Sequence
  Description of Artificial Sequence: Synthetic oligonucleotide
  Sense strand starting at position 1302 of SEQ ID NO: 915123
uuucucagugaaugcaaga

SEQ ID NO: 1055531 - RNA, 19 nt, Artificial Sequence
  Description of Artificial Sequence: Synthetic oligonucleotide
  Antisense strand to SEQ ID NO: 1055530
ucuugcauucacugagaaa

SEQ ID NO: 1055532 - RNA, 19 nt, Artificial Sequence
  Description of Artificial Sequence: Synthetic oligonucleotide
  Sense strand starting at position 1309 of SEQ ID NO: 915123
gugaaugcaagaugacaau

SEQ ID NO: 1055533 - RNA, 19 nt, Artificial Sequence
  Description of Artificial Sequence: Synthetic oligonucleotide
  Antisense strand to SEQ ID NO: 1055532
auugucaucuugcauucac

SEQ ID NO: 1055534 - RNA, 19 nt, Artificial Sequence
  Description of Artificial Sequence: Synthetic oligonucleotide
  Sense strand starting at position 1345 of SEQ ID NO: 915123
ucaugaaacuacuugagca

SEQ ID NO: 1055535 - RNA, 19 nt, Artificial Sequence
  Description of Artificial Sequence: Synthetic oligonucleotide
  Antisense strand to SEQ ID NO: 1055534
ugcucaaguaguuucauga

SEQ ID NO: 1055536 - RNA, 19 nt, Artificial Sequence
  Description of Artificial Sequence: Synthetic oligonucleotide
  Sense strand starting at position 1486 of SEQ ID NO: 915123
aucuuaaggccaggauaau

SEQ ID NO: 1055537 - RNA, 19 nt, Artificial Sequence
  Description of Artificial Sequence: Synthetic oligonucleotide
  Antisense strand to SEQ ID NO: 1055536
auuauccuggccuuaagau

SEQ ID NO: 1055538 - RNA, 19 nt, Artificial Sequence
  Description of Artificial Sequence: Synthetic oligonucleotide
  Sense strand starting at position 1497 of SEQ ID NO: 915123
aggauaaucugagcuguag

SEQ ID NO: 1055539 - RNA, 19 nt, Artificial Sequence
  Description of Artificial Sequence: Synthetic oligonucleotide
  Antisense strand to SEQ ID NO: 1055538
cuacagcucagauuauccu

SEQ ID NO: 1055540 - RNA, 19 nt, Artificial Sequence
  Description of Artificial Sequence: Synthetic oligonucleotide
  Sense strand starting at position 1508 of SEQ ID NO: 915123
agcuguagaguguauuaaa

SEQ ID NO: 1055541 - RNA, 19 nt, Artificial Sequence
  Description of Artificial Sequence: Synthetic oligonucleotide
  Antisense strand to SEQ ID NO: 1055540
uuuaauacacucuacagcu

SEQ ID NO: 1055542 - RNA, 19 nt, Artificial Sequence
  Description of Artificial Sequence: Synthetic oligonucleotide
  Sense strand starting at position 1588 of SEQ ID NO: 915123
aacgcaagggcuuacagau

SEQ ID NO: 1055543 - RNA, 19 nt, Artificial Sequence
  Description of Artificial Sequence: Synthetic oligonucleotide
  Antisense strand to SEQ ID NO: 1055542
aucuguaagcccuugcguu

SEQ ID NO: 1055544 - RNA, 19 nt, Artificial Sequence
  Description of Artificial Sequence: Synthetic oligonucleotide
  Sense strand starting at position 1616 of SEQ ID NO: 915123
gcgaucaacagccaugaga

SEQ ID NO: 1055545 - RNA, 19 nt, Artificial Sequence
  Description of Artificial Sequence: Synthetic oligonucleotide
  Antisense strand to SEQ ID NO: 1055544
ucucauggcuguugaucgc

SEQ ID NO: 1055546 - RNA, 19 nt, Artificial Sequence
  Description of Artificial Sequence: Synthetic oligonucleotide
  Sense strand starting at position 1694 of SEQ ID NO: 915123
cucauuguagguuauaauu

SEQ ID NO: 1055547 - RNA, 19 nt, Artificial Sequence
  Description of Artificial Sequence: Synthetic oligonucleotide
  Antisense strand to SEQ ID NO: 1055546
aauuauaaccuacaaugag

SEQ ID NO: 1055548 - RNA, 19 nt, Artificial Sequence
  Description of Artificial Sequence: Synthetic oligonucleotide
  Sense strand starting at position 1828 of SEQ ID NO: 915123
uggacuugauggucacaau

SEQ ID NO: 1055549 - RNA, 19 nt, Artificial Sequence
  Description of Artificial Sequence: Synthetic oligonucleotide
  Antisense strand to SEQ ID NO: 1055548
auugugaccaucaagucca

SEQ ID NO: 1055550 - RNA, 19 nt, Artificial Sequence
  Description of Artificial Sequence: Synthetic oligonucleotide
  Sense strand starting at position 2007 of SEQ ID NO: 915123
agaacuaguuaaucugcaa

SEQ ID NO: 1055551 - RNA, 19 nt, Artificial Sequence
  Description of Artificial Sequence: Synthetic oligonucleotide
  Antisense strand to SEQ ID NO: 1055550
uugcagauuaacuaguucu

SEQ ID NO: 1055552 - RNA, 19 nt, Artificial Sequence
  Description of Artificial Sequence: Synthetic oligonucleotide
  Sense strand starting at position 2043 of SEQ ID NO: 915123
auucuaaauuuagagguca

SEQ ID NO: 1055553 - RNA, 19 nt, Artificial Sequence
  Description of Artificial Sequence: Synthetic oligonucleotide
  Antisense strand to SEQ ID NO: 1055552
ugaccucuaaauuuagaau

SEQ ID NO: 1055554 - RNA, 19 nt, Artificial Sequence
  Description of Artificial Sequence: Synthetic oligonucleotide
  Sense strand starting at position 2093 of SEQ ID NO: 915123
uccaauggcuuauuauuga

SEQ ID NO: 1055555 - RNA, 19 nt, Artificial Sequence
  Description of Artificial Sequence: Synthetic oligonucleotide
  Antisense strand to SEQ ID NO: 1055554
ucaauaauaagccauugga

SEQ ID NO: 1055556 - RNA, 19 nt, Artificial Sequence
  Description of Artificial Sequence: Synthetic oligonucleotide
  Sense strand starting at position 2129 of SEQ ID NO: 915123
uucugagugaaauggaauu

SEQ ID NO: 1055557 - RNA, 19 nt, Artificial Sequence
  Description of Artificial Sequence: Synthetic oligonucleotide
  Antisense strand to SEQ ID NO: 1055556
aauuccauuucacucagaa

SEQ ID NO: 1055558 - RNA, 19 nt, Artificial Sequence
  Description of Artificial Sequence: Synthetic oligonucleotide
  Sense strand starting at position 2229 of SEQ ID NO: 915123
acugcaguggcaugacaaa

SEQ ID NO: 1055559 - RNA, 19 nt, Artificial Sequence
  Description of Artificial Sequence: Synthetic oligonucleotide
  Antisense strand to SEQ ID NO: 1055558
uuugucaugccacugcagu

SEQ ID NO: 1055560 - RNA, 19 nt, Artificial Sequence
  Description of Artificial Sequence: Synthetic oligonucleotide
  Sense strand starting at position 2374 of SEQ ID NO: 915123
uuuagcuuauagccaagaa

SEQ ID NO: 1055561 - RNA, 19 nt, Artificial Sequence
  Description of Artificial Sequence: Synthetic oligonucleotide
  Antisense strand to SEQ ID NO: 1055560
uucuuggcuauaagcuaaa

SEQ ID NO: 1055562 - RNA, 19 nt, Artificial Sequence
  Description of Artificial Sequence: Synthetic oligonucleotide
  Sense strand starting at position 2378 of SEQ ID NO: 915123
gcuuauagccaagaauaau

SEQ ID NO: 1055563 - RNA, 19 nt, Artificial Sequence
  Description of Artificial Sequence: Synthetic oligonucleotide
  Antisense strand to SEQ ID NO: 1055562
auuauucuuggcuauaagc

SEQ ID NO: 1055564 - RNA, 19 nt, Artificial Sequence
  Description of Artificial Sequence: Synthetic oligonucleotide
  Sense strand starting at position 2823 of SEQ ID NO: 915123
cguccaucuuuccuuauuu

SEQ ID NO: 1055565 - RNA, 19 nt, Artificial Sequence
  Description of Artificial Sequence: Synthetic oligonucleotide
  Antisense strand to SEQ ID NO: 1055564
aaauaaggaaagauggacg

SEQ ID NO: 1055566 - RNA, 19 nt, Artificial Sequence
  Description of Artificial Sequence: Synthetic oligonucleotide
  Sense strand starting at position 2959 of SEQ ID NO: 915123
gcagguaagcaucagugau

SEQ ID NO: 1055567 - RNA, 19 nt, Artificial Sequence
  Description of Artificial Sequence: Synthetic oligonucleotide
  Antisense strand to SEQ ID NO: 1055566
aucacugaugcuuaccugc

SEQ ID NO: 1055568 - RNA, 19 nt, Artificial Sequence
  Description of Artificial Sequence: Synthetic oligonucleotide
  Sense strand starting at position 3001 of SEQ ID NO: 915123
ccaagucaggacugaaacu

SEQ ID NO: 1055569 - RNA, 19 nt, Artificial Sequence
  Description of Artificial Sequence: Synthetic oligonucleotide
  Antisense strand to SEQ ID NO: 1055568
aguuucaguccugacuugg

SEQ ID NO: 1055570 - RNA, 19 nt, Artificial Sequence
  Description of Artificial Sequence: Synthetic oligonucleotide
  Sense strand starting at position 3338 of SEQ ID NO: 915123
agagacuguucuccuuauu

SEQ ID NO: 1055571 - RNA, 19 nt, Artificial Sequence
  Description of Artificial Sequence: Synthetic oligonucleotide
  Antisense strand to SEQ ID NO: 1055570
aauaaggagaacagucucu

SEQ ID NO: 1055572 - RNA, 19 nt, Artificial Sequence
  Description of Artificial Sequence: Synthetic oligonucleotide
  Sense strand starting at position 3361 of SEQ ID NO: 915123
agauuaugccucuggaaag

SEQ ID NO: 1055573 - RNA, 19 nt, Artificial Sequence
  Description of Artificial Sequence: Synthetic oligonucleotide
  Antisense strand to SEQ ID NO: 1055572
cuuuccagaggcauaaucu

SEQ ID NO: 1055574 - RNA, 19 nt, Artificial Sequence
  Description of Artificial Sequence: Synthetic oligonucleotide
  Sense strand starting at position 3492 of SEQ ID NO: 915123
uugacaaaggugugggaaa

SEQ ID NO: 1055575 - RNA, 19 nt, Artificial Sequence
  Description of Artificial Sequence: Synthetic oligonucleotide
  Antisense strand to SEQ ID NO: 1055574
uuucccacaccuuugucaa

SEQ ID NO: 1055576 - RNA, 19 nt, Artificial Sequence
  Description of Artificial Sequence: Synthetic oligonucleotide
  Sense strand starting at position 164 of SEQ ID NO: 915124
ggcuacaguuccucauuua

SEQ ID NO: 1055577 - RNA, 19 nt, Artificial Sequence
  Description of Artificial Sequence: Synthetic oligonucleotide
  Antisense strand to SEQ ID NO: 1055576
uaaaugaggaacuguagcc

SEQ ID NO: 1055578 - RNA, 19 nt, Artificial Sequence
  Description of Artificial Sequence: Synthetic oligonucleotide
  Sense strand starting at position 355 of SEQ ID NO: 915124
gaaucucagccuugggaag

SEQ ID NO: 1055579 - RNA, 19 nt, Artificial Sequence
  Description of Artificial Sequence: Synthetic oligonucleotide
  Antisense strand to SEQ ID NO: 1055578
cuucccaaggcugagauuc

SEQ ID NO: 1055580 - RNA, 19 nt, Artificial Sequence
  Description of Artificial Sequence: Synthetic oligonucleotide
  Sense strand starting at position 448 of SEQ ID NO: 915124
aguuaaucccucgauauaa

SEQ ID NO: 1055581 - RNA, 19 nt, Artificial Sequence
  Description of Artificial Sequence: Synthetic oligonucleotide
  Antisense strand to SEQ ID NO: 1055580
uuauaucgagggauuaacu

SEQ ID NO: 1055582 - RNA, 19 nt, Artificial Sequence
  Description of Artificial Sequence: Synthetic oligonucleotide
  Sense strand starting at position 480 of SEQ ID NO: 915124
guaaauuugcaaugcucaa

SEQ ID NO: 1055583 - RNA, 19 nt, Artificial Sequence
  Description of Artificial Sequence: Synthetic oligonucleotide
  Antisense strand to SEQ ID NO: 1055582
uugagcauugcaaauuuac

SEQ ID NO: 1055584 - RNA, 19 nt, Artificial Sequence
  Description of Artificial Sequence: Synthetic oligonucleotide
  Sense strand starting at position 525 of SEQ ID NO: 915124
cugauugaacccuagcuga

SEQ ID NO: 1055585 - RNA, 19 nt, Artificial Sequence
  Description of Artificial Sequence: Synthetic oligonucleotide
  Antisense strand to SEQ ID NO: 1055584
ucagcuaggguucaaucag

SEQ ID NO: 1055586 - RNA, 19 nt, Artificial Sequence
  Description of Artificial Sequence: Synthetic oligonucleotide
  Sense strand starting at position 579 of SEQ ID NO: 915124
gcggcauuagaugaacaga

SEQ ID NO: 1055587 - RNA, 19 nt, Artificial Sequence
  Description of Artificial Sequence: Synthetic oligonucleotide
  Antisense strand to SEQ ID NO: 1055586
ucuguucaucuaaugccgc

SEQ ID NO: 1055588 - RNA, 19 nt, Artificial Sequence
  Description of Artificial Sequence: Synthetic oligonucleotide
  Sense strand starting at position 661 of SEQ ID NO: 915124
auauuaagccaggguccaa

SEQ ID NO: 1055589 - RNA, 19 nt, Artificial Sequence
  Description of Artificial Sequence: Synthetic oligonucleotide
  Antisense strand to SEQ ID NO: 1055588
uuggacccuggcuuaauau

SEQ ID NO: 1055590 - RNA, 19 nt, Artificial Sequence
  Description of Artificial Sequence: Synthetic oligonucleotide
  Sense strand starting at position 823 of SEQ ID NO: 915124
gcaauugaugaauauguau

SEQ ID NO: 1055591 - RNA, 19 nt, Artificial Sequence
  Description of Artificial Sequence: Synthetic oligonucleotide
  Antisense strand to SEQ ID NO: 1055590
auacauauucaucaauugc

SEQ ID NO: 1055592 - RNA, 19 nt, Artificial Sequence
  Description of Artificial Sequence: Synthetic oligonucleotide
  Sense strand starting at position 851 of SEQ ID NO: 915124
agcaauaguggugaugaca

SEQ ID NO: 1055593 - RNA, 19 nt, Artificial Sequence
  Description of Artificial Sequence: Synthetic oligonucleotide
  Antisense strand to SEQ ID NO: 1055592
ugucaucaccacuauugcu

SEQ ID NO: 1055594 - RNA, 19 nt, Artificial Sequence
  Description of Artificial Sequence: Synthetic oligonucleotide
  Sense strand starting at position 864 of SEQ ID NO: 915124
augacaagagugugggaua

SEQ ID NO: 1055595 - RNA, 19 nt, Artificial Sequence
  Description of Artificial Sequence: Synthetic oligonucleotide
  Antisense strand to SEQ ID NO: 1055594
uaucccacacucuugucau

SEQ ID NO: 1055596 - RNA, 19 nt, Artificial Sequence
  Description of Artificial Sequence: Synthetic oligonucleotide
  Sense strand starting at position 926 of SEQ ID NO: 915124
acugacuaucugcaagcau

SEQ ID NO: 1055597 - RNA, 19 nt, Artificial Sequence
  Description of Artificial Sequence: Synthetic oligonucleotide
  Antisense strand to SEQ ID NO: 1055596
augcuugcagauagucagu

SEQ ID NO: 1055598 - RNA, 19 nt, Artificial Sequence
  Description of Artificial Sequence: Synthetic oligonucleotide
  Sense strand starting at position 955 of SEQ ID NO: 915124
cuuguuagaguugacauau

SEQ ID NO: 1055599 - RNA, 19 nt, Artificial Sequence
  Description of Artificial Sequence: Synthetic oligonucleotide
  Antisense strand to SEQ ID NO: 1055598
auaugucaacucuaacaag

SEQ ID NO: 1055600 - RNA, 19 nt, Artificial Sequence
  Description of Artificial Sequence: Synthetic oligonucleotide
  Sense strand starting at position 1096 of SEQ ID NO: 915124
cagcauuucugagugugua

SEQ ID NO: 1055601 - RNA, 19 nt, Artificial Sequence
  Description of Artificial Sequence: Synthetic oligonucleotide
  Antisense strand to SEQ ID NO: 1055600
uacacacucagaaaugcug

SEQ ID NO: 1055602 - RNA, 19 nt, Artificial Sequence
  Description of Artificial Sequence: Synthetic oligonucleotide
  Sense strand starting at position 1097 of SEQ ID NO: 915124
agcauuucugaguguguag

SEQ ID NO: 1055603 - RNA, 19 nt, Artificial Sequence
  Description of Artificial Sequence: Synthetic oligonucleotide
  Antisense strand to SEQ ID NO: 1055602
cuacacacucagaaaugcu

SEQ ID NO: 1055604 - RNA, 19 nt, Artificial Sequence
  Description of Artificial Sequence: Synthetic oligonucleotide
  Sense strand starting at position 1286 of SEQ ID NO: 915124
gcuauuguucuuuaaagau

SEQ ID NO: 1055605 - RNA, 19 nt, Artificial Sequence
  Description of Artificial Sequence: Synthetic oligonucleotide
  Antisense strand to SEQ ID NO: 1055604
aucuuuaaagaacaauagc

SEQ ID NO: 1055606 - RNA, 19 nt, Artificial Sequence
  Description of Artificial Sequence: Synthetic oligonucleotide
  Sense strand starting at position 1439 of SEQ ID NO: 915124
caugaaguggccuaugaca

SEQ ID NO: 1055607 - RNA, 19 nt, Artificial Sequence
  Description of Artificial Sequence: Synthetic oligonucleotide
  Antisense strand to SEQ ID NO: 1055606
ugucauaggccacuucaug

SEQ ID NO: 1055608 - RNA, 19 nt, Artificial Sequence
  Description of Artificial Sequence: Synthetic oligonucleotide
  Sense strand starting at position 1497 of SEQ ID NO: 915124
ugaauaguugcaugaagaa

SEQ ID NO: 1055609 - RNA, 19 nt, Artificial Sequence
  Description of Artificial Sequence: Synthetic oligonucleotide
  Antisense strand to SEQ ID NO: 1055608
uucuucaugcaacuauuca

SEQ ID NO: 1055610 - RNA, 19 nt, Artificial Sequence
  Description of Artificial Sequence: Synthetic oligonucleotide
  Sense strand starting at position 1751 of SEQ ID NO: 915124
agaauaaacugugucuauc

SEQ ID NO: 1055611 - RNA, 19 nt, Artificial Sequence
  Description of Artificial Sequence: Synthetic oligonucleotide
  Antisense strand to SEQ ID NO: 1055610
gauagacacaguuuauucu

SEQ ID NO: 1055612 - RNA, 19 nt, Artificial Sequence
  Description of Artificial Sequence: Synthetic oligonucleotide
  Sense strand starting at position 1761 of SEQ ID NO: 915124
gugucuaucaaagaaaggu

SEQ ID NO: 1055613 - RNA, 19 nt, Artificial Sequence
  Description of Artificial Sequence: Synthetic oligonucleotide
  Antisense strand to SEQ ID NO: 1055612
accuuucuuugauagacac

SEQ ID NO: 1055614 - RNA, 19 nt, Artificial Sequence
  Description of Artificial Sequence: Synthetic oligonucleotide
  Sense strand starting at position 1822 of SEQ ID NO: 915124
ugguaaugguaaccacaau

SEQ ID NO: 1055615 - RNA, 19 nt, Artificial Sequence
  Description of Artificial Sequence: Synthetic oligonucleotide
  Antisense strand to SEQ ID NO: 1055614
auugugguuaccauuacca

SEQ ID NO: 1055616 - RNA, 19 nt, Artificial Sequence
  Description of Artificial Sequence: Synthetic oligonucleotide
  Sense strand starting at position 2126 of SEQ ID NO: 915124
aggaauagguacccguaaa

SEQ ID NO: 1055617 - RNA, 19 nt, Artificial Sequence
  Description of Artificial Sequence: Synthetic oligonucleotide
  Antisense strand to SEQ ID NO: 1055616
uuuacggguaccuauuccu

SEQ ID NO: 1055618 - RNA, 19 nt, Artificial Sequence
  Description of Artificial Sequence: Synthetic oligonucleotide
  Sense strand starting at position 2424 of SEQ ID NO: 915124
uagugauaauaguuaugga

SEQ ID NO: 1055619 - RNA, 19 nt, Artificial Sequence
  Description of Artificial Sequence: Synthetic oligonucleotide
  Antisense strand to SEQ ID NO: 1055618
uccauaacuauuaucacua

SEQ ID NO: 1055620 - RNA, 19 nt, Artificial Sequence
  Description of Artificial Sequence: Synthetic oligonucleotide
  Sense strand starting at position 2598 of SEQ ID NO: 915124
uuuacuucuggaugugaaa

SEQ ID NO: 1055621 - RNA, 19 nt, Artificial Sequence
  Description of Artificial Sequence: Synthetic oligonucleotide
  Antisense strand to SEQ ID NO: 1055620
uuucacauccagaaguaaa

SEQ ID NO: 1055622 - RNA, 19 nt, Artificial Sequence
  Description of Artificial Sequence: Synthetic oligonucleotide
  Sense strand starting at position 2610 of SEQ ID NO: 915124
ugugaaacuaugggugauu

SEQ ID NO: 1055623 - RNA, 19 nt, Artificial Sequence
  Description of Artificial Sequence: Synthetic oligonucleotide
  Antisense strand to SEQ ID NO: 1055622
aaucacccauaguuucaca

SEQ ID NO: 1055624 - RNA, 19 nt, Artificial Sequence
  Description of Artificial Sequence: Synthetic oligonucleotide
  Sense strand starting at position 2658 of SEQ ID NO: 915124
cuaccuguauaguuaggaa

SEQ ID NO: 1055625 - RNA, 19 nt, Artificial Sequence
  Description of Artificial Sequence: Synthetic oligonucleotide
  Antisense strand to SEQ ID NO: 1055624
uuccuaacuauacagguag

SEQ ID NO: 1055626 - RNA, 19 nt, Artificial Sequence
  Description of Artificial Sequence: Synthetic oligonucleotide
  Sense strand starting at position 2730 of SEQ ID NO: 915124
guuuacauugagcagaaua

SEQ ID NO: 1055627 - RNA, 19 nt, Artificial Sequence
  Description of Artificial Sequence: Synthetic oligonucleotide
  Antisense strand to SEQ ID NO: 1055626
uauucugcucaauguaaac

SEQ ID NO: 1055628 - RNA, 19 nt, Artificial Sequence
  Description of Artificial Sequence: Synthetic oligonucleotide
  Sense strand starting at position 2768 of SEQ ID NO: 915124
ggaauuguacauugguaca

SEQ ID NO: 1055629 - RNA, 19 nt, Artificial Sequence
  Description of Artificial Sequence: Synthetic oligonucleotide
  Antisense strand to SEQ ID NO: 1055628
uguaccaauguacaauucc

SEQ ID NO: 1055630 - RNA, 19 nt, Artificial Sequence
  Description of Artificial Sequence: Synthetic oligonucleotide
  Sense strand starting at position 2773 of SEQ ID NO: 915124
uguacauugguacaugaua

SEQ ID NO: 1055631 - RNA, 19 nt, Artificial Sequence
  Description of Artificial Sequence: Synthetic oligonucleotide
  Antisense strand to SEQ ID NO: 1055630
uaucauguaccaauguaca

SEQ ID NO: 1055632 - RNA, 19 nt, Artificial Sequence
  Description of Artificial Sequence: Synthetic oligonucleotide
  Sense strand starting at position 2797 of SEQ ID NO: 915124
ccaggaaauagcuggguau

SEQ ID NO: 1055633 - RNA, 19 nt, Artificial Sequence
  Description of Artificial Sequence: Synthetic oligonucleotide
  Antisense strand to SEQ ID NO: 1055632
auacccagcuauuuccugg

SEQ ID NO: 1055634 - RNA, 19 nt, Artificial Sequence
  Description of Artificial Sequence: Synthetic oligonucleotide
  Sense strand starting at position 2798 of SEQ ID NO: 915124
caggaaauagcuggguaua

SEQ ID NO: 1055635 - RNA, 19 nt, Artificial Sequence
  Description of Artificial Sequence: Synthetic oligonucleotide
  Antisense strand to SEQ ID NO: 1055634
uauacccagcuauuuccug

SEQ ID NO: 1055636 - RNA, 19 nt, Artificial Sequence
  Description of Artificial Sequence: Synthetic oligonucleotide
  Sense strand starting at position 2799 of SEQ ID NO: 915124
aggaaauagcuggguauag

SEQ ID NO: 1055637 - RNA, 19 nt, Artificial Sequence
  Description of Artificial Sequence: Synthetic oligonucleotide
  Antisense strand to SEQ ID NO: 1055636
cuauacccagcuauuuccu

SEQ ID NO: 1055638 - RNA, 19 nt, Artificial Sequence
  Description of Artificial Sequence: Synthetic oligonucleotide
  Sense strand starting at position 2801 of SEQ ID NO: 915124
gaaauagcuggguauaguu

SEQ ID NO: 1055639 - RNA, 19 nt, Artificial Sequence
  Description of Artificial Sequence: Synthetic oligonucleotide
  Antisense strand to SEQ ID NO: 1055638
aacuauacccagcuauuuc

SEQ ID NO: 1055640 - RNA, 19 nt, Artificial Sequence
  Description of Artificial Sequence: Synthetic oligonucleotide
  Sense strand starting at position 2808 of SEQ ID NO: 915124
cuggguauaguugaaguaa

SEQ ID NO: 1055641 - RNA, 19 nt, Artificial Sequence
  Description of Artificial Sequence: Synthetic oligonucleotide
  Antisense strand to SEQ ID NO: 1055640
uuacuucaacuauacccag

SEQ ID NO: 1055642 - RNA, 19 nt, Artificial Sequence
  Description of Artificial Sequence: Synthetic oligonucleotide
  Sense strand starting at position 2976 of SEQ ID NO: 915124
aucuaugacugcucaugga

SEQ ID NO: 1055643 - RNA, 19 nt, Artificial Sequence
  Description of Artificial Sequence: Synthetic oligonucleotide
  Antisense strand to SEQ ID NO: 1055642
uccaugagcagucauagau

SEQ ID NO: 1055644 - RNA, 19 nt, Artificial Sequence
  Description of Artificial Sequence: Synthetic oligonucleotide
  Sense strand starting at position 3032 of SEQ ID NO: 915124
agucaaagauuguugaucu

SEQ ID NO: 1055645 - RNA, 19 nt, Artificial Sequence
  Description of Artificial Sequence: Synthetic oligonucleotide
  Antisense strand to SEQ ID NO: 1055644
agaucaacaaucuuugacu

SEQ ID NO: 1055646 - RNA, 19 nt, Artificial Sequence
  Description of Artificial Sequence: Synthetic oligonucleotide
  Sense strand starting at position 3302 of SEQ ID NO: 915124
cuguuacauggagguauga

SEQ ID NO: 1055647 - RNA, 19 nt, Artificial Sequence
  Description of Artificial Sequence: Synthetic oligonucleotide
  Antisense strand to SEQ ID NO: 1055646
ucauaccuccauguaacag

SEQ ID NO: 1055648 - RNA, 19 nt, Artificial Sequence
  Description of Artificial Sequence: Synthetic oligonucleotide
  Sense strand starting at position 3312 of SEQ ID NO: 915124
gagguaugauaccugacga

SEQ ID NO: 1055649 - RNA, 19 nt, Artificial Sequence
  Description of Artificial Sequence: Synthetic oligonucleotide
  Antisense strand to SEQ ID NO: 1055648
ucgucagguaucauaccuc

SEQ ID NO: 1055650 - RNA, 19 nt, Artificial Sequence
  Description of Artificial Sequence: Synthetic oligonucleotide
  Sense strand starting at position 3313 of SEQ ID NO: 915124
agguaugauaccugacgag

SEQ ID NO: 1055651 - RNA, 19 nt, Artificial Sequence
  Description of Artificial Sequence: Synthetic oligonucleotide
  Antisense strand to SEQ ID NO: 1055650
cucgucagguaucauaccu

SEQ ID NO: 1055652 - RNA, 19 nt, Artificial Sequence
  Description of Artificial Sequence: Synthetic oligonucleotide
  Sense strand starting at position 3520 of SEQ ID NO: 915124
ggagauggccuuugagaga

SEQ ID NO: 1055653 - RNA, 19 nt, Artificial Sequence
  Description of Artificial Sequence: Synthetic oligonucleotide
  Antisense strand to SEQ ID NO: 1055652
ucucucaaaggccaucucc

SEQ ID NO: 1055654 - RNA, 19 nt, Artificial Sequence
  Description of Artificial Sequence: Synthetic oligonucleotide
  Sense strand starting at position 3948 of SEQ ID NO: 915124
gcagaaagaccuugauauu

SEQ ID NO: 1055655 - RNA, 19 nt, Artificial Sequence
  Description of Artificial Sequence: Synthetic oligonucleotide
  Antisense strand to SEQ ID NO: 1055654
aauaucaaggucuuucugc

SEQ ID NO: 1055656 - RNA, 19 nt, Artificial Sequence
  Description of Artificial Sequence: Synthetic oligonucleotide
  Sense strand starting at position 94 of SEQ ID NO: 915125
auugauucuguuuauggua

SEQ ID NO: 1055657 - RNA, 19 nt, Artificial Sequence
  Description of Artificial Sequence: Synthetic oligonucleotide
  Antisense strand to SEQ ID NO: 1055656
uaccauaaacagaaucaau

SEQ ID NO: 1055658 - RNA, 19 nt, Artificial Sequence
  Description of Artificial Sequence: Synthetic oligonucleotide
  Sense strand starting at position 101 of SEQ ID NO: 915125
cuguuuaugguauaccaga

SEQ ID NO: 1055659 - RNA, 19 nt, Artificial Sequence
  Description of Artificial Sequence: Synthetic oligonucleotide
  Antisense strand to SEQ ID NO: 1055658
ucugguauaccauaaacag

SEQ ID NO: 1055660 - RNA, 19 nt, Artificial Sequence
  Description of Artificial Sequence: Synthetic oligonucleotide
  Sense strand starting at position 153 of SEQ ID NO: 915125
gggcaaguacuuuauggau

SEQ ID NO: 1055661 - RNA, 19 nt, Artificial Sequence
  Description of Artificial Sequence: Synthetic oligonucleotide
  Antisense strand to SEQ ID NO: 1055660
auccauaaaguacuugccc

SEQ ID NO: 1055662 - RNA, 19 nt, Artificial Sequence
  Description of Artificial Sequence: Synthetic oligonucleotide
  Sense strand starting at position 246 of SEQ ID NO: 915125
ggucgauuaucaguauaaa

SEQ ID NO: 1055663 - RNA, 19 nt, Artificial Sequence
  Description of Artificial Sequence: Synthetic oligonucleotide
  Antisense strand to SEQ ID NO: 1055662
uuuauacugauaaucgacc

SEQ ID NO: 1055664 - RNA, 19 nt, Artificial Sequence
  Description of Artificial Sequence: Synthetic oligonucleotide
  Sense strand starting at position 528 of SEQ ID NO: 915125
agcuguuaucaugaucuga

SEQ ID NO: 1055665 - RNA, 19 nt, Artificial Sequence
  Description of Artificial Sequence: Synthetic oligonucleotide
  Antisense strand to SEQ ID NO: 1055664
ucagaucaugauaacagcu

SEQ ID NO: 1055666 - RNA, 19 nt, Artificial Sequence
  Description of Artificial Sequence: Synthetic oligonucleotide
  Sense strand starting at position 530 of SEQ ID NO: 915125
cuguuaucaugaucugaua

SEQ ID NO: 1055667 - RNA, 19 nt, Artificial Sequence
  Description of Artificial Sequence: Synthetic oligonucleotide
  Antisense strand to SEQ ID NO: 1055666
uaucagaucaugauaacag

SEQ ID NO: 1055668 - RNA, 19 nt, Artificial Sequence
  Description of Artificial Sequence: Synthetic oligonucleotide
  Sense strand starting at position 587 of SEQ ID NO: 915125
aagcauaugguuugggaaa

SEQ ID NO: 1055669 - RNA, 19 nt, Artificial Sequence
  Description of Artificial Sequence: Synthetic oligonucleotide
  Antisense strand to SEQ ID NO: 1055668
uuucccaaaccauaugcuu

SEQ ID NO: 1055670 - RNA, 19 nt, Artificial Sequence
  Description of Artificial Sequence: Synthetic oligonucleotide
  Sense strand starting at position 711 of SEQ ID NO: 915125
guuuguuauggacauuauu

SEQ ID NO: 1055671 - RNA, 19 nt, Artificial Sequence
  Description of Artificial Sequence: Synthetic oligonucleotide
  Antisense strand to SEQ ID NO: 1055670
aauaauguccauaacaaac

SEQ ID NO: 1055672 - RNA, 19 nt, Artificial Sequence
  Description of Artificial Sequence: Synthetic oligonucleotide
  Sense strand starting at position 714 of SEQ ID NO: 915125
uguuauggacauuauuacu

SEQ ID NO: 1055673 - RNA, 19 nt, Artificial Sequence
  Description of Artificial Sequence: Synthetic oligonucleotide
  Antisense strand to SEQ ID NO: 1055672
aguaauaauguccauaaca

SEQ ID NO: 1055674 - RNA, 19 nt, Artificial Sequence
  Description of Artificial Sequence: Synthetic oligonucleotide
  Sense strand starting at position 777 of SEQ ID NO: 915125
aaggaaggccuaugaguuu

SEQ ID NO: 1055675 - RNA, 19 nt, Artificial Sequence
  Description of Artificial Sequence: Synthetic oligonucleotide
  Antisense strand to SEQ ID NO: 1055674
aaacucauaggccuuccuu

SEQ ID NO: 1055676 - RNA, 19 nt, Artificial Sequence
  Description of Artificial Sequence: Synthetic oligonucleotide
  Sense strand starting at position 861 of SEQ ID NO: 915125
augauacaugguuagguuu

SEQ ID NO: 1055677 - RNA, 19 nt, Artificial Sequence
  Description of Artificial Sequence: Synthetic oligonucleotide
  Antisense strand to SEQ ID NO: 1055676
aaaccuaaccauguaucau

SEQ ID NO: 1055678 - RNA, 19 nt, Artificial Sequence
  Description of Artificial Sequence: Synthetic oligonucleotide
  Sense strand starting at position 915 of SEQ ID NO: 915125
aggcaucaucuauggauca

SEQ ID NO: 1055679 - RNA, 19 nt, Artificial Sequence
  Description of Artificial Sequence: Synthetic oligonucleotide
  Antisense strand to SEQ ID NO: 1055678
ugauccauagaugaugccu

SEQ ID NO: 1055680 - RNA, 19 nt, Artificial Sequence
  Description of Artificial Sequence: Synthetic oligonucleotide
  Sense strand starting at position 925 of SEQ ID NO: 915125
uauggaucacagugguuaa

SEQ ID NO: 1055681 - RNA, 19 nt, Artificial Sequence
  Description of Artificial Sequence: Synthetic oligonucleotide
  Antisense strand to SEQ ID NO: 1055680
uuaaccacugugauccaua

SEQ ID NO: 1055682 - RNA, 19 nt, Artificial Sequence
  Description of Artificial Sequence: Synthetic oligonucleotide
  Sense strand starting at position 926 of SEQ ID NO: 915125
auggaucacagugguuaau

SEQ ID NO: 1055683 - RNA, 19 nt, Artificial Sequence
  Description of Artificial Sequence: Synthetic oligonucleotide
  Antisense strand to SEQ ID NO: 1055682
auuaaccacugugauccau

SEQ ID NO: 1055684 - RNA, 19 nt, Artificial Sequence
  Description of Artificial Sequence: Synthetic oligonucleotide
  Sense strand starting at position 928 of SEQ ID NO: 915125
ggaucacagugguuaauua

SEQ ID NO: 1055685 - RNA, 19 nt, Artificial Sequence
  Description of Artificial Sequence: Synthetic oligonucleotide
  Antisense strand to SEQ ID NO: 1055684
uaauuaaccacugugaucc

SEQ ID NO: 1055686 - RNA, 19 nt, Artificial Sequence
  Description of Artificial Sequence: Synthetic oligonucleotide
  Sense strand starting at position 929 of SEQ ID NO: 915125
gaucacagugguuaauuau

SEQ ID NO: 1055687 - RNA, 19 nt, Artificial Sequence
  Description of Artificial Sequence: Synthetic oligonucleotide
  Antisense strand to SEQ ID NO: 1055686
auaauuaaccacugugauc

SEQ ID NO: 1055688 - RNA, 19 nt, Artificial Sequence
  Description of Artificial Sequence: Synthetic oligonucleotide
  Sense strand starting at position 2039 of SEQ ID NO: 915125
guuaaacuucuccacugua

SEQ ID NO: 1055689 - RNA, 19 nt, Artificial Sequence
  Description of Artificial Sequence: Synthetic oligonucleotide
  Antisense strand to SEQ ID NO: 1055688
uacaguggagaaguuuaac

SEQ ID NO: 1055690 - RNA, 19 nt, Artificial Sequence
  Description of Artificial Sequence: Synthetic oligonucleotide
  Sense strand starting at position 2080 of SEQ ID NO: 915125
ggauucuacuggguuguga

SEQ ID NO: 1055691 - RNA, 19 nt, Artificial Sequence
  Description of Artificial Sequence: Synthetic oligonucleotide
  Antisense strand to SEQ ID NO: 1055690
ucacaacccaguagaaucc

SEQ ID NO: 1055692 - RNA, 19 nt, Artificial Sequence
  Description of Artificial Sequence: Synthetic oligonucleotide
  Sense strand starting at position 2137 of SEQ ID NO: 915125
uuuggagguuuacucaaau

SEQ ID NO: 1055693 - RNA, 19 nt, Artificial Sequence
  Description of Artificial Sequence: Synthetic oligonucleotide
  Antisense strand to SEQ ID NO: 1055692
auuugaguaaaccuccaaa

SEQ ID NO: 1055694 - RNA, 19 nt, Artificial Sequence
  Description of Artificial Sequence: Synthetic oligonucleotide
  Sense strand starting at position 2165 of SEQ ID NO: 915125
ggugaagacugugcugaga

SEQ ID NO: 1055695 - RNA, 19 nt, Artificial Sequence
  Description of Artificial Sequence: Synthetic oligonucleotide
  Antisense strand to SEQ ID NO: 1055694
ucucagcacagucuucacc

SEQ ID NO: 1055696 - RNA, 19 nt, Artificial Sequence
  Description of Artificial Sequence: Synthetic oligonucleotide
  Sense strand starting at position 2380 of SEQ ID NO: 915125
ugaaaugugaaaugucaug

SEQ ID NO: 1055697 - RNA, 19 nt, Artificial Sequence
  Description of Artificial Sequence: Synthetic oligonucleotide
  Antisense strand to SEQ ID NO: 1055696
caugacauuucacauuuca

SEQ ID NO: 1055698 - RNA, 19 nt, Artificial Sequence
  Description of Artificial Sequence: Synthetic oligonucleotide
  Sense strand starting at position 2392 of SEQ ID NO: 915125
ugucaugcacaauaugagu

SEQ ID NO: 1055699 - RNA, 19 nt, Artificial Sequence
  Description of Artificial Sequence: Synthetic oligonucleotide
  Antisense strand to SEQ ID NO: 1055698
acucauauugugcaugaca

SEQ ID NO: 1055700 - RNA, 19 nt, Artificial Sequence
  Description of Artificial Sequence: Synthetic oligonucleotide
  Sense strand starting at position 2397 of SEQ ID NO: 915125
ugcacaauaugagugaaau

SEQ ID NO: 1055701 - RNA, 19 nt, Artificial Sequence
  Description of Artificial Sequence: Synthetic oligonucleotide
  Antisense strand to SEQ ID NO: 1055700
auuucacucauauugugca

SEQ ID NO: 1055702 - RNA, 19 nt, Artificial Sequence
  Description of Artificial Sequence: Synthetic oligonucleotide
  Sense strand starting at position 2398 of SEQ ID NO: 915125
gcacaauaugagugaaaug

SEQ ID NO: 1055703 - RNA, 19 nt, Artificial Sequence
  Description of Artificial Sequence: Synthetic oligonucleotide
  Antisense strand to SEQ ID NO: 1055702
cauuucacucauauugugc

SEQ ID NO: 1055704 - RNA, 19 nt, Artificial Sequence
  Description of Artificial Sequence: Synthetic oligonucleotide
  Sense strand starting at position 2695 of SEQ ID NO: 915125
ugagcaugacauuguagau

SEQ ID NO: 1055705 - RNA, 19 nt, Artificial Sequence
  Description of Artificial Sequence: Synthetic oligonucleotide
  Antisense strand to SEQ ID NO: 1055704
aucuacaaugucaugcuca

SEQ ID NO: 1055706 - RNA, 19 nt, Artificial Sequence
  Description of Artificial Sequence: Synthetic oligonucleotide
  Sense strand starting at position 2876 of SEQ ID NO: 915125
accuauguauuaguuacua

SEQ ID NO: 1055707 - RNA, 19 nt, Artificial Sequence
  Description of Artificial Sequence: Synthetic oligonucleotide
  Antisense strand to SEQ ID NO: 1055706
uaguaacuaauacauaggu

SEQ ID NO: 1055708 - RNA, 19 nt, Artificial Sequence
  Description of Artificial Sequence: Synthetic oligonucleotide
  Sense strand starting at position 3087 of SEQ ID NO: 915125
cuuugauauggccauaauu

SEQ ID NO: 1055709 - RNA, 19 nt, Artificial Sequence
  Description of Artificial Sequence: Synthetic oligonucleotide
  Antisense strand to SEQ ID NO: 1055708
aauuauggccauaucaaag

SEQ ID NO: 1055710 - RNA, 19 nt, Artificial Sequence
  Description of Artificial Sequence: Synthetic oligonucleotide
  Sense strand starting at position 3138 of SEQ ID NO: 915125
aguuuauaugaguaacuuc

SEQ ID NO: 1055711 - RNA, 19 nt, Artificial Sequence
  Description of Artificial Sequence: Synthetic oligonucleotide
  Antisense strand to SEQ ID NO: 1055710
gaaguuacucauauaaacu

SEQ ID NO: 1055712 - RNA, 19 nt, Artificial Sequence
  Description of Artificial Sequence: Synthetic oligonucleotide
  Sense strand starting at position 3430 of SEQ ID NO: 915125
gguauauuucuuggcaccu

SEQ ID NO: 1055713 - RNA, 19 nt, Artificial Sequence
  Description of Artificial Sequence: Synthetic oligonucleotide
  Antisense strand to SEQ ID NO: 1055712
aggugccaagaaauauacc

SEQ ID NO: 1055714 - RNA, 19 nt, Artificial Sequence
  Description of Artificial Sequence: Synthetic oligonucleotide
  Sense strand starting at position 3431 of SEQ ID NO: 915125
guauauuucuuggcaccuu

SEQ ID NO: 1055715 - RNA, 19 nt, Artificial Sequence
  Description of Artificial Sequence: Synthetic oligonucleotide
  Antisense strand to SEQ ID NO: 1055714
aaggugccaagaaauauac

SEQ ID NO: 1055716 - RNA, 19 nt, Artificial Sequence
  Description of Artificial Sequence: Synthetic oligonucleotide
  Sense strand starting at position 3502 of SEQ ID NO: 915125
augcgaauuaauugggaga

SEQ ID NO: 1055717 - RNA, 19 nt, Artificial Sequence
  Description of Artificial Sequence: Synthetic oligonucleotide
  Antisense strand to SEQ ID NO: 1055716
ucucccaauuaauucgcau

SEQ ID NO: 1055718 - RNA, 19 nt, Artificial Sequence
  Description of Artificial Sequence: Synthetic oligonucleotide
  Sense strand starting at position 3503 of SEQ ID NO: 915125
ugcgaauuaauugggagaa

SEQ ID NO: 1055719 - RNA, 19 nt, Artificial Sequence
  Description of Artificial Sequence: Synthetic oligonucleotide
  Antisense strand to SEQ ID NO: 1055718
uucucccaauuaauucgca

SEQ ID NO: 1055720 - RNA, 19 nt, Artificial Sequence
  Description of Artificial Sequence: Synthetic oligonucleotide
  Sense strand starting at position 3583 of SEQ ID NO: 915125
gcuguauaagccuaggaga

SEQ ID NO: 1055721 - RNA, 19 nt, Artificial Sequence
  Description of Artificial Sequence: Synthetic oligonucleotide
  Antisense strand to SEQ ID NO: 1055720
ucuccuaggcuuauacagc

SEQ ID NO: 1055722 - RNA, 19 nt, Artificial Sequence
  Description of Artificial Sequence: Synthetic oligonucleotide
  Sense strand starting at position 3585 of SEQ ID NO: 915125
uguauaagccuaggagaca

SEQ ID NO: 1055723 - RNA, 19 nt, Artificial Sequence
  Description of Artificial Sequence: Synthetic oligonucleotide
  Antisense strand to SEQ ID NO: 1055722
ugucuccuaggcuuauaca

SEQ ID NO: 1055724 - RNA, 19 nt, Artificial Sequence
  Description of Artificial Sequence: Synthetic oligonucleotide
  Sense strand starting at position 3611 of SEQ ID NO: 915125
uugacaaugugaucaauau

SEQ ID NO: 1055725 - RNA, 19 nt, Artificial Sequence
  Description of Artificial Sequence: Synthetic oligonucleotide
  Antisense strand to SEQ ID NO: 1055724
auauugaucacauugucaa

SEQ ID NO: 1055726 - RNA, 19 nt, Artificial Sequence
  Description of Artificial Sequence: Synthetic oligonucleotide
  Sense strand starting at position 3689 of SEQ ID NO: 915125
uuuacagggcuuuauauua

SEQ ID NO: 1055727 - RNA, 19 nt, Artificial Sequence
  Description of Artificial Sequence: Synthetic oligonucleotide
  Antisense strand to SEQ ID NO: 1055726
uaauauaaagcccuguaaa

SEQ ID NO: 1055728 - RNA, 19 nt, Artificial Sequence
  Description of Artificial Sequence: Synthetic oligonucleotide
  Sense strand starting at position 3716 of SEQ ID NO: 915125
aagugaucccaguaaagcu

SEQ ID NO: 1055729 - RNA, 19 nt, Artificial Sequence
  Description of Artificial Sequence: Synthetic oligonucleotide
  Antisense strand to SEQ ID NO: 1055728
agcuuuacugggaucacuu

SEQ ID NO: 1055730 - RNA, 19 nt, Artificial Sequence
  Description of Artificial Sequence: Synthetic oligonucleotide
  Sense strand starting at position 3752 of SEQ ID NO: 915125
ggacuaaucagcugaugau

SEQ ID NO: 1055731 - RNA, 19 nt, Artificial Sequence
  Description of Artificial Sequence: Synthetic oligonucleotide
  Antisense strand to SEQ ID NO: 1055730
aucaucagcugauuagucc

SEQ ID NO: 1055732 - RNA, 19 nt, Artificial Sequence
  Description of Artificial Sequence: Synthetic oligonucleotide
  Sense strand starting at position 3854 of SEQ ID NO: 915125
ucacuaaggaggugucuca

SEQ ID NO: 1055733 - RNA, 19 nt, Artificial Sequence
  Description of Artificial Sequence: Synthetic oligonucleotide
  Antisense strand to SEQ ID NO: 1055732
ugagacaccuccuuaguga

SEQ ID NO: 1055734 - RNA, 19 nt, Artificial Sequence
  Description of Artificial Sequence: Synthetic oligonucleotide
  Sense strand starting at position 3881 of SEQ ID NO: 915125
caugguacccgauaucaga

SEQ ID NO: 1055735 - RNA, 19 nt, Artificial Sequence
  Description of Artificial Sequence: Synthetic oligonucleotide
  Antisense strand to SEQ ID NO: 1055734
ucugauaucggguaccaug

SEQ ID NO: 1055736 - RNA, 19 nt, Artificial Sequence
  Description of Artificial Sequence: Synthetic oligonucleotide
  Sense strand starting at position 125 of SEQ ID NO: 915126
agagcauacaguuggaaga

SEQ ID NO: 1055737 - RNA, 19 nt, Artificial Sequence
  Description of Artificial Sequence: Synthetic oligonucleotide
  Antisense strand to SEQ ID NO: 1055736
ucuuccaacuguaugcucu

SEQ ID NO: 1055738 - RNA, 19 nt, Artificial Sequence
  Description of Artificial Sequence: Synthetic oligonucleotide
  Sense strand starting at position 313 of SEQ ID NO: 915126
gcuuuaagcugauuagaga

SEQ ID NO: 1055739 - RNA, 19 nt, Artificial Sequence
  Description of Artificial Sequence: Synthetic oligonucleotide
  Antisense strand to SEQ ID NO: 1055738
ucucuaaucagcuuaaagc

SEQ ID NO: 1055740 - RNA, 19 nt, Artificial Sequence
  Description of Artificial Sequence: Synthetic oligonucleotide
  Sense strand starting at position 348 of SEQ ID NO: 915126
gaagaugggucccuuagac

SEQ ID NO: 1055741 - RNA, 19 nt, Artificial Sequence
  Description of Artificial Sequence: Synthetic oligonucleotide
  Antisense strand to SEQ ID NO: 1055740
gucuaagggacccaucuuc

SEQ ID NO: 1055742 - RNA, 19 nt, Artificial Sequence
  Description of Artificial Sequence: Synthetic oligonucleotide
  Sense strand starting at position 402 of SEQ ID NO: 915126
agcgguauagagggagaaa

SEQ ID NO: 1055743 - RNA, 19 nt, Artificial Sequence
  Description of Artificial Sequence: Synthetic oligonucleotide
  Antisense strand to SEQ ID NO: 1055742
uuucucccucuauaccgcu

SEQ ID NO: 1055744 - RNA, 19 nt, Artificial Sequence
  Description of Artificial Sequence: Synthetic oligonucleotide
  Sense strand starting at position 431 of SEQ ID NO: 915126
ggucugggagagugagaau

SEQ ID NO: 1055745 - RNA, 19 nt, Artificial Sequence
  Description of Artificial Sequence: Synthetic oligonucleotide
  Antisense strand to SEQ ID NO: 1055744
auucucacucucccagacc

SEQ ID NO: 1055746 - RNA, 19 nt, Artificial Sequence
  Description of Artificial Sequence: Synthetic oligonucleotide
  Sense strand starting at position 464 of SEQ ID NO: 915126
gagccuucuggaggaugga

SEQ ID NO: 1055747 - RNA, 19 nt, Artificial Sequence
  Description of Artificial Sequence: Synthetic oligonucleotide
  Antisense strand to SEQ ID NO: 1055746
uccauccuccagaaggcuc

SEQ ID NO: 1055748 - RNA, 19 nt, Artificial Sequence
  Description of Artificial Sequence: Synthetic oligonucleotide
  Sense strand starting at position 477 of SEQ ID NO: 915126
gauggaaauguuggguaau

SEQ ID NO: 1055749 - RNA, 19 nt, Artificial Sequence
  Description of Artificial Sequence: Synthetic oligonucleotide
  Antisense strand to SEQ ID NO: 1055748
auuacccaacauuuccauc

SEQ ID NO: 1055750 - RNA, 19 nt, Artificial Sequence
  Description of Artificial Sequence: Synthetic oligonucleotide
  Sense strand starting at position 479 of SEQ ID NO: 915126
uggaaauguuggguaauag

SEQ ID NO: 1055751 - RNA, 19 nt, Artificial Sequence
  Description of Artificial Sequence: Synthetic oligonucleotide
  Antisense strand to SEQ ID NO: 1055750
cuauuacccaacauuucca

SEQ ID NO: 1055752 - RNA, 19 nt, Artificial Sequence
  Description of Artificial Sequence: Synthetic oligonucleotide
  Sense strand starting at position 612 of SEQ ID NO: 915126
aagagagaaugucuugcuu

SEQ ID NO: 1055753 - RNA, 19 nt, Artificial Sequence
  Description of Artificial Sequence: Synthetic oligonucleotide
  Antisense strand to SEQ ID NO: 1055752
aagcaagacauucucucuu

SEQ ID NO: 1055754 - RNA, 19 nt, Artificial Sequence
  Description of Artificial Sequence: Synthetic oligonucleotide
  Sense strand starting at position 696 of SEQ ID NO: 915126
ggguaagacuaggccuaua

SEQ ID NO: 1055755 - RNA, 19 nt, Artificial Sequence
  Description of Artificial Sequence: Synthetic oligonucleotide
  Antisense strand to SEQ ID NO: 1055754
uauaggccuagucuuaccc

SEQ ID NO: 1055756 - RNA, 19 nt, Artificial Sequence
  Description of Artificial Sequence: Synthetic oligonucleotide
  Sense strand starting at position 701 of SEQ ID NO: 915126
agacuaggccuauauaggu

SEQ ID NO: 1055757 - RNA, 19 nt, Artificial Sequence
  Description of Artificial Sequence: Synthetic oligonucleotide
  Antisense strand to SEQ ID NO: 1055756
accuauauaggccuagucu

SEQ ID NO: 1055758 - RNA, 19 nt, Artificial Sequence
  Description of Artificial Sequence: Synthetic oligonucleotide
  Sense strand starting at position 707 of SEQ ID NO: 915126
ggccuauauaggugacuga

SEQ ID NO: 1055759 - RNA, 19 nt, Artificial Sequence
  Description of Artificial Sequence: Synthetic oligonucleotide
  Antisense strand to SEQ ID NO: 1055758
ucagucaccuauauaggcc

SEQ ID NO: 1055760 - RNA, 19 nt, Artificial Sequence
  Description of Artificial Sequence: Synthetic oligonucleotide
  Sense strand starting at position 732 of SEQ ID NO: 915126
gcauauuugugcuuucuga

SEQ ID NO: 1055761 - RNA, 19 nt, Artificial Sequence
  Description of Artificial Sequence: Synthetic oligonucleotide
  Antisense strand to SEQ ID NO: 1055760
ucagaaagcacaaauaugc

SEQ ID NO: 1055762 - RNA, 19 nt, Artificial Sequence
  Description of Artificial Sequence: Synthetic oligonucleotide
  Sense strand starting at position 808 of SEQ ID NO: 915126
aucucuugccaugaaagau

SEQ ID NO: 1055763 - RNA, 19 nt, Artificial Sequence
  Description of Artificial Sequence: Synthetic oligonucleotide
  Antisense strand to SEQ ID NO: 1055762
aucuuucauggcaagagau

SEQ ID NO: 1055764 - RNA, 19 nt, Artificial Sequence
  Description of Artificial Sequence: Synthetic oligonucleotide
  Sense strand starting at position 823 of SEQ ID NO: 915126
agauguaucucauuaaguu

SEQ ID NO: 1055765 - RNA, 19 nt, Artificial Sequence
  Description of Artificial Sequence: Synthetic oligonucleotide
  Antisense strand to SEQ ID NO: 1055764
aacuuaaugagauacaucu

SEQ ID NO: 1055766 - RNA, 19 nt, Artificial Sequence
  Description of Artificial Sequence: Synthetic oligonucleotide
  Sense strand starting at position 2008 of SEQ ID NO: 915126
gaaauuauugaagguagua

SEQ ID NO: 1055767 - RNA, 19 nt, Artificial Sequence
  Description of Artificial Sequence: Synthetic oligonucleotide
  Antisense strand to SEQ ID NO: 1055766
uacuaccuucaauaauuuc

SEQ ID NO: 1055768 - RNA, 19 nt, Artificial Sequence
  Description of Artificial Sequence: Synthetic oligonucleotide
  Sense strand starting at position 2164 of SEQ ID NO: 915126
aguggcuuccuggagugaa

SEQ ID NO: 1055769 - RNA, 19 nt, Artificial Sequence
  Description of Artificial Sequence: Synthetic oligonucleotide
  Antisense strand to SEQ ID NO: 1055768
uucacuccaggaagccacu

SEQ ID NO: 1055770 - RNA, 19 nt, Artificial Sequence
  Description of Artificial Sequence: Synthetic oligonucleotide
  Sense strand starting at position 2168 of SEQ ID NO: 915126
gcuuccuggagugaauuau

SEQ ID NO: 1055771 - RNA, 19 nt, Artificial Sequence
  Description of Artificial Sequence: Synthetic oligonucleotide
  Antisense strand to SEQ ID NO: 1055770
auaauucacuccaggaagc

SEQ ID NO: 1055772 - RNA, 19 nt, Artificial Sequence
  Description of Artificial Sequence: Synthetic oligonucleotide
  Sense strand starting at position 2226 of SEQ ID NO: 915126
ggagcauuguaacuuauua

SEQ ID NO: 1055773 - RNA, 19 nt, Artificial Sequence
  Description of Artificial Sequence: Synthetic oligonucleotide
  Antisense strand to SEQ ID NO: 1055772
uaauaaguuacaaugcucc

SEQ ID NO: 1055774 - RNA, 19 nt, Artificial Sequence
  Description of Artificial Sequence: Synthetic oligonucleotide
  Sense strand starting at position 2253 of SEQ ID NO: 915126
ugccauuggcaucaaauga

SEQ ID NO: 1055775 - RNA, 19 nt, Artificial Sequence
  Description of Artificial Sequence: Synthetic oligonucleotide
  Antisense strand to SEQ ID NO: 1055774
ucauuugaugccaauggca

SEQ ID NO: 1055776 - RNA, 19 nt, Artificial Sequence
  Description of Artificial Sequence: Synthetic oligonucleotide
  Sense strand starting at position 2291 of SEQ ID NO: 915126
cccauuccuaaucgggaga

SEQ ID NO: 1055777 - RNA, 19 nt, Artificial Sequence
  Description of Artificial Sequence: Synthetic oligonucleotide
  Antisense strand to SEQ ID NO: 1055776
ucucccgauuaggaauggg

SEQ ID NO: 1055778 - RNA, 19 nt, Artificial Sequence
  Description of Artificial Sequence: Synthetic oligonucleotide
  Sense strand starting at position 2563 of SEQ ID NO: 915126
aacagaauguuguuaugau

SEQ ID NO: 1055779 - RNA, 19 nt, Artificial Sequence
  Description of Artificial Sequence: Synthetic oligonucleotide
  Antisense strand to SEQ ID NO: 1055778
aucauaacaacauucuguu

SEQ ID NO: 1055780 - RNA, 19 nt, Artificial Sequence
  Description of Artificial Sequence: Synthetic oligonucleotide
  Sense strand starting at position 2572 of SEQ ID NO: 915126
uuguuaugauaacugguga

SEQ ID NO: 1055781 - RNA, 19 nt, Artificial Sequence
  Description of Artificial Sequence: Synthetic oligonucleotide
  Antisense strand to SEQ ID NO: 1055780
ucaccaguuaucauaacaa

SEQ ID NO: 1055782 - RNA, 19 nt, Artificial Sequence
  Description of Artificial Sequence: Synthetic oligonucleotide
  Sense strand starting at position 2573 of SEQ ID NO: 915126
uguuaugauaacuggugaa

SEQ ID NO: 1055783 - RNA, 19 nt, Artificial Sequence
  Description of Artificial Sequence: Synthetic oligonucleotide
  Antisense strand to SEQ ID NO: 1055782
uucaccaguuaucauaaca

SEQ ID NO: 1055784 - RNA, 19 nt, Artificial Sequence
  Description of Artificial Sequence: Synthetic oligonucleotide
  Sense strand starting at position 2620 of SEQ ID NO: 915126
uagggaauggucugcauua

SEQ ID NO: 1055785 - RNA, 19 nt, Artificial Sequence
  Description of Artificial Sequence: Synthetic oligonucleotide
  Antisense strand to SEQ ID NO: 1055784
uaaugcagaccauucccua

SEQ ID NO: 1055786 - RNA, 19 nt, Artificial Sequence
  Description of Artificial Sequence: Synthetic oligonucleotide
  Sense strand starting at position 2621 of SEQ ID NO: 915126
agggaauggucugcauuag

SEQ ID NO: 1055787 - RNA, 19 nt, Artificial Sequence
  Description of Artificial Sequence: Synthetic oligonucleotide
  Antisense strand to SEQ ID NO: 1055786
cuaaugcagaccauucccu

SEQ ID NO: 1055788 - RNA, 19 nt, Artificial Sequence
  Description of Artificial Sequence: Synthetic oligonucleotide
  Sense strand starting at position 2682 of SEQ ID NO: 915126
agaaguuaaguuuaagcaa

SEQ ID NO: 1055789 - RNA, 19 nt, Artificial Sequence
  Description of Artificial Sequence: Synthetic oligonucleotide
  Antisense strand to SEQ ID NO: 1055788
uugcuuaaacuuaacuucu

SEQ ID NO: 1055790 - RNA, 19 nt, Artificial Sequence
  Description of Artificial Sequence: Synthetic oligonucleotide
  Sense strand starting at position 2855 of SEQ ID NO: 915126
uggcaucaaccacauaagu

SEQ ID NO: 1055791 - RNA, 19 nt, Artificial Sequence
  Description of Artificial Sequence: Synthetic oligonucleotide
  Antisense strand to SEQ ID NO: 1055790
acuuaugugguugaugcca

SEQ ID NO: 1055792 - RNA, 19 nt, Artificial Sequence
  Description of Artificial Sequence: Synthetic oligonucleotide
  Sense strand starting at position 3020 of SEQ ID NO: 915126
agcagagguguuuauauau

SEQ ID NO: 1055793 - RNA, 19 nt, Artificial Sequence
  Description of Artificial Sequence: Synthetic oligonucleotide
  Antisense strand to SEQ ID NO: 1055792
auauauaaacaccucugcu

SEQ ID NO: 1055794 - RNA, 19 nt, Artificial Sequence
  Description of Artificial Sequence: Synthetic oligonucleotide
  Sense strand starting at position 3063 of SEQ ID NO: 915126
uuaugaugauggucagauu

SEQ ID NO: 1055795 - RNA, 19 nt, Artificial Sequence
  Description of Artificial Sequence: Synthetic oligonucleotide
  Antisense strand to SEQ ID NO: 1055794
aaucugaccaucaucauaa

SEQ ID NO: 1055796 - RNA, 19 nt, Artificial Sequence
  Description of Artificial Sequence: Synthetic oligonucleotide
  Sense strand starting at position 3422 of SEQ ID NO: 915126
uuaugaaugucacuuggag

SEQ ID NO: 1055797 - RNA, 19 nt, Artificial Sequence
  Description of Artificial Sequence: Synthetic oligonucleotide
  Antisense strand to SEQ ID NO: 1055796
cuccaagugacauucauaa

SEQ ID NO: 1055798 - RNA, 19 nt, Artificial Sequence
  Description of Artificial Sequence: Synthetic oligonucleotide
  Sense strand starting at position 3424 of SEQ ID NO: 915126
augaaugucacuuggaguu

SEQ ID NO: 1055799 - RNA, 19 nt, Artificial Sequence
  Description of Artificial Sequence: Synthetic oligonucleotide
  Antisense strand to SEQ ID NO: 1055798
aacuccaagugacauucau

SEQ ID NO: 1055800 - RNA, 19 nt, Artificial Sequence
  Description of Artificial Sequence: Synthetic oligonucleotide
  Sense strand starting at position 3563 of SEQ ID NO: 915126
cagugucugcacuaggaau

SEQ ID NO: 1055801 - RNA, 19 nt, Artificial Sequence
  Description of Artificial Sequence: Synthetic oligonucleotide
  Antisense strand to SEQ ID NO: 1055800
auuccuagugcagacacug

SEQ ID NO: 1055802 - RNA, 19 nt, Artificial Sequence
  Description of Artificial Sequence: Synthetic oligonucleotide
  Sense strand starting at position 3591 of SEQ ID NO: 915126
aguuauaaguuaucaucag

SEQ ID NO: 1055803 - RNA, 19 nt, Artificial Sequence
  Description of Artificial Sequence: Synthetic oligonucleotide
  Antisense strand to SEQ ID NO: 1055802
cugaugauaacuuauaacu

SEQ ID NO: 1055804 - RNA, 19 nt, Artificial Sequence
  Description of Artificial Sequence: Synthetic oligonucleotide
  Sense strand starting at position 3675 of SEQ ID NO: 915126
gaaagcauguuaguaaaug

SEQ ID NO: 1055805 - RNA, 19 nt, Artificial Sequence
  Description of Artificial Sequence: Synthetic oligonucleotide
  Antisense strand to SEQ ID NO: 1055804
cauuuacuaacaugcuuuc

SEQ ID NO: 1055806 - RNA, 19 nt, Artificial Sequence
  Description of Artificial Sequence: Synthetic oligonucleotide
  Sense strand starting at position 3683 of SEQ ID NO: 915126
guuaguaaaugauccaaca

SEQ ID NO: 1055807 - RNA, 19 nt, Artificial Sequence
  Description of Artificial Sequence: Synthetic oligonucleotide
  Antisense strand to SEQ ID NO: 1055806
uguuggaucauuuacuaac

SEQ ID NO: 1055808 - RNA, 19 nt, Artificial Sequence
  Description of Artificial Sequence: Synthetic oligonucleotide
  Sense strand starting at position 3771 of SEQ ID NO: 915126
gacucauauagacguaggu

SEQ ID NO: 1055809 - RNA, 19 nt, Artificial Sequence
  Description of Artificial Sequence: Synthetic oligonucleotide
  Antisense strand to SEQ ID NO: 1055808
accuacgucuauaugaguc

SEQ ID NO: 1055810 - RNA, 19 nt, Artificial Sequence
  Description of Artificial Sequence: Synthetic oligonucleotide
  Sense strand starting at position 3885 of SEQ ID NO: 915126
uggauaugaugucuaucua

SEQ ID NO: 1055811 - RNA, 19 nt, Artificial Sequence
  Description of Artificial Sequence: Synthetic oligonucleotide
  Antisense strand to SEQ ID NO: 1055810
uagauagacaucauaucca

SEQ ID NO: 1055812 - RNA, 19 nt, Artificial Sequence
  Description of Artificial Sequence: Synthetic oligonucleotide
  Sense strand starting at position 3906 of SEQ ID NO: 915126
cauaucuugugaguauaag

SEQ ID NO: 1055813 - RNA, 19 nt, Artificial Sequence
  Description of Artificial Sequence: Synthetic oligonucleotide
  Antisense strand to SEQ ID NO: 1055812
cuuauacucacaagauaug

SEQ ID NO: 1055814 - RNA, 19 nt, Artificial Sequence
  Description of Artificial Sequence: Synthetic oligonucleotide
  Sense strand starting at position 3950 of SEQ ID NO: 915126
ugcaguaagaagcauagaa

SEQ ID NO: 1055815 - RNA, 19 nt, Artificial Sequence
  Description of Artificial Sequence: Synthetic oligonucleotide
  Antisense strand to SEQ ID NO: 1055814
uucuaugcuucuuacugca

SEQ ID NO: 1055816 - RNA, 19 nt, Artificial Sequence
  Description of Artificial Sequence: Synthetic oligonucleotide
  Sense strand starting at position 8 of SEQ ID NO: 915127
uugggaaacuggccuuaua

SEQ ID NO: 1055817 - RNA, 19 nt, Artificial Sequence
  Description of Artificial Sequence: Synthetic oligonucleotide
  Antisense strand to SEQ ID NO: 1055816
uauaaggccaguuucccaa

SEQ ID NO: 1055818 - RNA, 19 nt, Artificial Sequence
  Description of Artificial Sequence: Synthetic oligonucleotide
  Sense strand starting at position 18 of SEQ ID NO: 915127
ggccuuauaucaccuuugu

SEQ ID NO: 1055819 - RNA, 19 nt, Artificial Sequence
  Description of Artificial Sequence: Synthetic oligonucleotide
  Antisense strand to SEQ ID NO: 1055818
acaaaggugauauaaggcc

SEQ ID NO: 1055820 - RNA, 19 nt, Artificial Sequence
  Description of Artificial Sequence: Synthetic oligonucleotide
  Sense strand starting at position 55 of SEQ ID NO: 915127
ggguucuuaacauguggua

SEQ ID NO: 1055821 - RNA, 19 nt, Artificial Sequence
  Description of Artificial Sequence: Synthetic oligonucleotide
  Antisense strand to SEQ ID NO: 1055820
uaccacauguuaagaaccc

SEQ ID NO: 1055822 - RNA, 19 nt, Artificial Sequence
  Description of Artificial Sequence: Synthetic oligonucleotide
  Sense strand starting at position 57 of SEQ ID NO: 915127
guucuuaacaugugguaag

SEQ ID NO: 1055823 - RNA, 19 nt, Artificial Sequence
  Description of Artificial Sequence: Synthetic oligonucleotide
  Antisense strand to SEQ ID NO: 1055822
cuuaccacauguuaagaac

SEQ ID NO: 1055824 - RNA, 19 nt, Artificial Sequence
  Description of Artificial Sequence: Synthetic oligonucleotide
  Sense strand starting at position 220 of SEQ ID NO: 915127
ggaacuaaguuccaucaaa

SEQ ID NO: 1055825 - RNA, 19 nt, Artificial Sequence
  Description of Artificial Sequence: Synthetic oligonucleotide
  Antisense strand to SEQ ID NO: 1055824
uuugauggaacuuaguucc

SEQ ID NO: 1055826 - RNA, 19 nt, Artificial Sequence
  Description of Artificial Sequence: Synthetic oligonucleotide
  Sense strand starting at position 340 of SEQ ID NO: 915127
gggaucaauuaggaccaua

SEQ ID NO: 1055827 - RNA, 19 nt, Artificial Sequence
  Description of Artificial Sequence: Synthetic oligonucleotide
  Antisense strand to SEQ ID NO: 1055826
uaugguccuaauugauccc

SEQ ID NO: 1055828 - RNA, 19 nt, Artificial Sequence
  Description of Artificial Sequence: Synthetic oligonucleotide
  Sense strand starting at position 402 of SEQ ID NO: 915127
cugugagagucuuccuaag

SEQ ID NO: 1055829 - RNA, 19 nt, Artificial Sequence
  Description of Artificial Sequence: Synthetic oligonucleotide
  Antisense strand to SEQ ID NO: 1055828
cuuaggaagacucucacag

SEQ ID NO: 1055830 - RNA, 19 nt, Artificial Sequence
  Description of Artificial Sequence: Synthetic oligonucleotide
  Sense strand starting at position 404 of SEQ ID NO: 915127
gugagagucuuccuaagau

SEQ ID NO: 1055831 - RNA, 19 nt, Artificial Sequence
  Description of Artificial Sequence: Synthetic oligonucleotide
  Antisense strand to SEQ ID NO: 1055830
aucuuaggaagacucucac

SEQ ID NO: 1055832 - RNA, 19 nt, Artificial Sequence
  Description of Artificial Sequence: Synthetic oligonucleotide
  Sense strand starting at position 475 of SEQ ID NO: 915127
agaaguaucuagguaaacu

SEQ ID NO: 1055833 - RNA, 19 nt, Artificial Sequence
  Description of Artificial Sequence: Synthetic oligonucleotide
  Antisense strand to SEQ ID NO: 1055832
aguuuaccuagauacuucu

SEQ ID NO: 1055834 - RNA, 19 nt, Artificial Sequence
  Description of Artificial Sequence: Synthetic oligonucleotide
  Sense strand starting at position 484 of SEQ ID NO: 915127
uagguaaacuuauagaaag

SEQ ID NO: 1055835 - RNA, 19 nt, Artificial Sequence
  Description of Artificial Sequence: Synthetic oligonucleotide
  Antisense strand to SEQ ID NO: 1055834
cuuucuauaaguuuaccua

SEQ ID NO: 1055836 - RNA, 19 nt, Artificial Sequence
  Description of Artificial Sequence: Synthetic oligonucleotide
  Sense strand starting at position 590 of SEQ ID NO: 915127
gaaauaugguacuuccugu

SEQ ID NO: 1055837 - RNA, 19 nt, Artificial Sequence
  Description of Artificial Sequence: Synthetic oligonucleotide
  Antisense strand to SEQ ID NO: 1055836
acaggaaguaccauauuuc

SEQ ID NO: 1055838 - RNA, 19 nt, Artificial Sequence
  Description of Artificial Sequence: Synthetic oligonucleotide
  Sense strand starting at position 645 of SEQ ID NO: 915127
ugaagaauccaaugugucu

SEQ ID NO: 1055839 - RNA, 19 nt, Artificial Sequence
  Description of Artificial Sequence: Synthetic oligonucleotide
  Antisense strand to SEQ ID NO: 1055838
agacacauuggauucuuca

SEQ ID NO: 1055840 - RNA, 19 nt, Artificial Sequence
  Description of Artificial Sequence: Synthetic oligonucleotide
  Sense strand starting at position 648 of SEQ ID NO: 915127
agaauccaaugugucuaau

SEQ ID NO: 1055841 - RNA, 19 nt, Artificial Sequence
  Description of Artificial Sequence: Synthetic oligonucleotide
  Antisense strand to SEQ ID NO: 1055840
auuagacacauuggauucu

SEQ ID NO: 1055842 - RNA, 19 nt, Artificial Sequence
  Description of Artificial Sequence: Synthetic oligonucleotide
  Sense strand starting at position 693 of SEQ ID NO: 915127
auccuauuggacuguuuau

SEQ ID NO: 1055843 - RNA, 19 nt, Artificial Sequence
  Description of Artificial Sequence: Synthetic oligonucleotide
  Antisense strand to SEQ ID NO: 1055842
auaaacaguccaauaggau

SEQ ID NO: 1055844 - RNA, 19 nt, Artificial Sequence
  Description of Artificial Sequence: Synthetic oligonucleotide
  Sense strand starting at position 705 of SEQ ID NO: 915127
uguuuauauuuagaugggu

SEQ ID NO: 1055845 - RNA, 19 nt, Artificial Sequence
  Description of Artificial Sequence: Synthetic oligonucleotide
  Antisense strand to SEQ ID NO: 1055844
acccaucuaaauauaaaca

SEQ ID NO: 1055846 - RNA, 19 nt, Artificial Sequence
  Description of Artificial Sequence: Synthetic oligonucleotide
  Sense strand starting at position 844 of SEQ ID NO: 915127
ggcaaugagcuuuacauac

SEQ ID NO: 1055847 - RNA, 19 nt, Artificial Sequence
  Description of Artificial Sequence: Synthetic oligonucleotide
  Antisense strand to SEQ ID NO: 1055846
guauguaaagcucauugcc

SEQ ID NO: 1055848 - RNA, 19 nt, Artificial Sequence
  Description of Artificial Sequence: Synthetic oligonucleotide
  Sense strand starting at position 951 of SEQ ID NO: 915127
aggaacuaauccucaugua

SEQ ID NO: 1055849 - RNA, 19 nt, Artificial Sequence
  Description of Artificial Sequence: Synthetic oligonucleotide
  Antisense strand to SEQ ID NO: 1055848
uacaugaggauuaguuccu

SEQ ID NO: 1055850 - RNA, 19 nt, Artificial Sequence
  Description of Artificial Sequence: Synthetic oligonucleotide
  Sense strand starting at position 1016 of SEQ ID NO: 915127
auugauuucuucuagguca

SEQ ID NO: 1055851 - RNA, 19 nt, Artificial Sequence
  Description of Artificial Sequence: Synthetic oligonucleotide
  Antisense strand to SEQ ID NO: 1055850
ugaccuagaagaaaucaau

SEQ ID NO: 1055852 - RNA, 19 nt, Artificial Sequence
  Description of Artificial Sequence: Synthetic oligonucleotide
  Sense strand starting at position 2026 of SEQ ID NO: 915127
gcaagugugaaauggucua

SEQ ID NO: 1055853 - RNA, 19 nt, Artificial Sequence
  Description of Artificial Sequence: Synthetic oligonucleotide
  Antisense strand to SEQ ID NO: 1055852
uagaccauuucacacuugc

SEQ ID NO: 1055854 - RNA, 19 nt, Artificial Sequence
  Description of Artificial Sequence: Synthetic oligonucleotide
  Sense strand starting at position 2065 of SEQ ID NO: 915127
uaauuuaugcugugcuaug

SEQ ID NO: 1055855 - RNA, 19 nt, Artificial Sequence
  Description of Artificial Sequence: Synthetic oligonucleotide
  Antisense strand to SEQ ID NO: 1055854
cauagcacagcauaaauua

SEQ ID NO: 1055856 - RNA, 19 nt, Artificial Sequence
  Description of Artificial Sequence: Synthetic oligonucleotide
  Sense strand starting at position 2082 of SEQ ID NO: 915127
ugugauguuauggaauauu

SEQ ID NO: 1055857 - RNA, 19 nt, Artificial Sequence
  Description of Artificial Sequence: Synthetic oligonucleotide
  Antisense strand to SEQ ID NO: 1055856
aauauuccauaacaucaca

SEQ ID NO: 1055858 - RNA, 19 nt, Artificial Sequence
  Description of Artificial Sequence: Synthetic oligonucleotide
  Sense strand starting at position 2138 of SEQ ID NO: 915127
gguggcgguuucuuaauaa

SEQ ID NO: 1055859 - RNA, 19 nt, Artificial Sequence
  Description of Artificial Sequence: Synthetic oligonucleotide
  Antisense strand to SEQ ID NO: 1055858
uuauuaagaaaccgccacc

SEQ ID NO: 1055860 - RNA, 19 nt, Artificial Sequence
  Description of Artificial Sequence: Synthetic oligonucleotide
  Sense strand starting at position 2200 of SEQ ID NO: 915127
ggguuauuaugauucucaa

SEQ ID NO: 1055861 - RNA, 19 nt, Artificial Sequence
  Description of Artificial Sequence: Synthetic oligonucleotide
  Antisense strand to SEQ ID NO: 1055860
uugagaaucauaauaaccc

SEQ ID NO: 1055862 - RNA, 19 nt, Artificial Sequence
  Description of Artificial Sequence: Synthetic oligonucleotide
  Sense strand starting at position 2270 of SEQ ID NO: 915127
ugguuagcuuuggcaucau

SEQ ID NO: 1055863 - RNA, 19 nt, Artificial Sequence
  Description of Artificial Sequence: Synthetic oligonucleotide
  Antisense strand to SEQ ID NO: 1055862
augaugccaaagcuaacca

SEQ ID NO: 1055864 - RNA, 19 nt, Artificial Sequence
  Description of Artificial Sequence: Synthetic oligonucleotide
  Sense strand starting at position 2317 of SEQ ID NO: 915127
guaaauguaagagguaaug

SEQ ID NO: 1055865 - RNA, 19 nt, Artificial Sequence
  Description of Artificial Sequence: Synthetic oligonucleotide
  Antisense strand to SEQ ID NO: 1055864
cauuaccucuuacauuuac

SEQ ID NO: 1055866 - RNA, 19 nt, Artificial Sequence
  Description of Artificial Sequence: Synthetic oligonucleotide
  Sense strand starting at position 2397 of SEQ ID NO: 915127
uguuguguaucacucaaca

SEQ ID NO: 1055867 - RNA, 19 nt, Artificial Sequence
  Description of Artificial Sequence: Synthetic oligonucleotide
  Antisense strand to SEQ ID NO: 1055866
uguugagugauacacaaca

SEQ ID NO: 1055868 - RNA, 19 nt, Artificial Sequence
  Description of Artificial Sequence: Synthetic oligonucleotide
  Sense strand starting at position 2652 of SEQ ID NO: 915127
cuaccuugauguguccuua

SEQ ID NO: 1055869 - RNA, 19 nt, Artificial Sequence
  Description of Artificial Sequence: Synthetic oligonucleotide
  Antisense strand to SEQ ID NO: 1055868
uaaggacacaucaagguag

SEQ ID NO: 1055870 - RNA, 19 nt, Artificial Sequence
  Description of Artificial Sequence: Synthetic oligonucleotide
  Sense strand starting at position 2656 of SEQ ID NO: 915127
cuugauguguccuuauaac

SEQ ID NO: 1055871 - RNA, 19 nt, Artificial Sequence
  Description of Artificial Sequence: Synthetic oligonucleotide
  Antisense strand to SEQ ID NO: 1055870
guuauaaggacacaucaag

SEQ ID NO: 1055872 - RNA, 19 nt, Artificial Sequence
  Description of Artificial Sequence: Synthetic oligonucleotide
  Sense strand starting at position 2920 of SEQ ID NO: 915127
ggugguuugaaguguuauc

SEQ ID NO: 1055873 - RNA, 19 nt, Artificial Sequence
  Description of Artificial Sequence: Synthetic oligonucleotide
  Antisense strand to SEQ ID NO: 1055872
gauaacacuucaaaccacc

SEQ ID NO: 1055874 - RNA, 19 nt, Artificial Sequence
  Description of Artificial Sequence: Synthetic oligonucleotide
  Sense strand starting at position 2925 of SEQ ID NO: 915127
uuugaaguguuaucauuga

SEQ ID NO: 1055875 - RNA, 19 nt, Artificial Sequence
  Description of Artificial Sequence: Synthetic oligonucleotide
  Antisense strand to SEQ ID NO: 1055874
ucaaugauaacacuucaaa

SEQ ID NO: 1055876 - RNA, 19 nt, Artificial Sequence
  Description of Artificial Sequence: Synthetic oligonucleotide
  Sense strand starting at position 2944 of SEQ ID NO: 915127
accagaucauguuuguaau

SEQ ID NO: 1055877 - RNA, 19 nt, Artificial Sequence
  Description of Artificial Sequence: Synthetic oligonucleotide
  Antisense strand to SEQ ID NO: 1055876
auuacaaacaugaucuggu

SEQ ID NO: 1055878 - RNA, 19 nt, Artificial Sequence
  Description of Artificial Sequence: Synthetic oligonucleotide
  Sense strand starting at position 2945 of SEQ ID NO: 915127
ccagaucauguuuguaauc

SEQ ID NO: 1055879 - RNA, 19 nt, Artificial Sequence
  Description of Artificial Sequence: Synthetic oligonucleotide
  Antisense strand to SEQ ID NO: 1055878
gauuacaaacaugaucugg

SEQ ID NO: 1055880 - RNA, 19 nt, Artificial Sequence
  Description of Artificial Sequence: Synthetic oligonucleotide
  Sense strand starting at position 3018 of SEQ ID NO: 915127
agcagagauuuggaggaaa

SEQ ID NO: 1055881 - RNA, 19 nt, Artificial Sequence
  Description of Artificial Sequence: Synthetic oligonucleotide
  Antisense strand to SEQ ID NO: 1055880
uuuccuccaaaucucugcu

SEQ ID NO: 1055882 - RNA, 19 nt, Artificial Sequence
  Description of Artificial Sequence: Synthetic oligonucleotide
  Sense strand starting at position 3062 of SEQ ID NO: 915127
gagaguagauacuaaauac

SEQ ID NO: 1055883 - RNA, 19 nt, Artificial Sequence
  Description of Artificial Sequence: Synthetic oligonucleotide
  Antisense strand to SEQ ID NO: 1055882
guauuuaguaucuacucuc

SEQ ID NO: 1055884 - RNA, 19 nt, Artificial Sequence
  Description of Artificial Sequence: Synthetic oligonucleotide
  Sense strand starting at position 3311 of SEQ ID NO: 915127
cuggaagcccauuguguuu

SEQ ID NO: 1055885 - RNA, 19 nt, Artificial Sequence
  Description of Artificial Sequence: Synthetic oligonucleotide
  Antisense strand to SEQ ID NO: 1055884
aaacacaaugggcuuccag

SEQ ID NO: 1055886 - RNA, 19 nt, Artificial Sequence
  Description of Artificial Sequence: Synthetic oligonucleotide
  Sense strand starting at position 3346 of SEQ ID NO: 915127
gcuuguucccugguguuau

SEQ ID NO: 1055887 - RNA, 19 nt, Artificial Sequence
  Description of Artificial Sequence: Synthetic oligonucleotide
  Antisense strand to SEQ ID NO: 1055886
auaacaccagggaacaagc

SEQ ID NO: 1055888 - RNA, 19 nt, Artificial Sequence
  Description of Artificial Sequence: Synthetic oligonucleotide
  Sense strand starting at position 3553 of SEQ ID NO: 915127
uguccauauuggcuagcaa

SEQ ID NO: 1055889 - RNA, 19 nt, Artificial Sequence
  Description of Artificial Sequence: Synthetic oligonucleotide
  Antisense strand to SEQ ID NO: 1055888
uugcuagccaauauggaca

SEQ ID NO: 1055890 - RNA, 19 nt, Artificial Sequence
  Description of Artificial Sequence: Synthetic oligonucleotide
  Sense strand starting at position 3723 of SEQ ID NO: 915127
gcaaauauuuaggagugca

SEQ ID NO: 1055891 - RNA, 19 nt, Artificial Sequence
  Description of Artificial Sequence: Synthetic oligonucleotide
  Antisense strand to SEQ ID NO: 1055890
ugcacuccuaaauauuugc

SEQ ID NO: 1055892 - RNA, 19 nt, Artificial Sequence
  Description of Artificial Sequence: Synthetic oligonucleotide
  Sense strand starting at position 3735 of SEQ ID NO: 915127
gagugcaggucuuuaaaca

SEQ ID NO: 1055893 - RNA, 19 nt, Artificial Sequence
  Description of Artificial Sequence: Synthetic oligonucleotide
  Antisense strand to SEQ ID NO: 1055892
uguuuaaagaccugcacuc

SEQ ID NO: 1055894 - RNA, 19 nt, Artificial Sequence
  Description of Artificial Sequence: Synthetic oligonucleotide
  Sense strand starting at position 3736 of SEQ ID NO: 915127
agugcaggucuuuaaacaa

SEQ ID NO: 1055895 - RNA, 19 nt, Artificial Sequence
  Description of Artificial Sequence: Synthetic oligonucleotide
  Antisense strand to SEQ ID NO: 1055894
uuguuuaaagaccugcacu

SEQ ID NO: 1055896 - RNA, 19 nt, Artificial Sequence
  Description of Artificial Sequence: Synthetic oligonucleotide
  Sense strand starting at position 137 of SEQ ID NO: 915128
gcucuaucuccagagccaa

SEQ ID NO: 1055897 - RNA, 19 nt, Artificial Sequence
  Description of Artificial Sequence: Synthetic oligonucleotide
  Antisense strand to SEQ ID NO: 1055896
uuggcucuggagauagagc

SEQ ID NO: 1055898 - RNA, 19 nt, Artificial Sequence
  Description of Artificial Sequence: Synthetic oligonucleotide
  Sense strand starting at position 163 of SEQ ID NO: 915128
accucucugcuauagugua

SEQ ID NO: 1055899 - RNA, 19 nt, Artificial Sequence
  Description of Artificial Sequence: Synthetic oligonucleotide
  Antisense strand to SEQ ID NO: 1055898
uacacuauagcagagaggu

SEQ ID NO: 1055900 - RNA, 19 nt, Artificial Sequence
  Description of Artificial Sequence: Synthetic oligonucleotide
  Sense strand starting at position 253 of SEQ ID NO: 915128
gcuauauauggcuaagugu

SEQ ID NO: 1055901 - RNA, 19 nt, Artificial Sequence
  Description of Artificial Sequence: Synthetic oligonucleotide
  Antisense strand to SEQ ID NO: 1055900
acacuuagccauauauagc

SEQ ID NO: 1055902 - RNA, 19 nt, Artificial Sequence
  Description of Artificial Sequence: Synthetic oligonucleotide
  Sense strand starting at position 256 of SEQ ID NO: 915128
auauauggcuaaguguuaa

SEQ ID NO: 1055903 - RNA, 19 nt, Artificial Sequence
  Description of Artificial Sequence: Synthetic oligonucleotide
  Antisense strand to SEQ ID NO: 1055902
uuaacacuuagccauauau

SEQ ID NO: 1055904 - RNA, 19 nt, Artificial Sequence
  Description of Artificial Sequence: Synthetic oligonucleotide
  Sense strand starting at position 339 of SEQ ID NO: 915128
auggauugcuacuuaaaga

SEQ ID NO: 1055905 - RNA, 19 nt, Artificial Sequence
  Description of Artificial Sequence: Synthetic oligonucleotide
  Antisense strand to SEQ ID NO: 1055904
ucuuuaaguagcaauccau

SEQ ID NO: 1055906 - RNA, 19 nt, Artificial Sequence
  Description of Artificial Sequence: Synthetic oligonucleotide
  Sense strand starting at position 2105 of SEQ ID NO: 915128
gucuguuaacuuuagcauc

SEQ ID NO: 1055907 - RNA, 19 nt, Artificial Sequence
  Description of Artificial Sequence: Synthetic oligonucleotide
  Antisense strand to SEQ ID NO: 1055906
gaugcuaaaguuaacagac

SEQ ID NO: 1055908 - RNA, 19 nt, Artificial Sequence
  Description of Artificial Sequence: Synthetic oligonucleotide
  Sense strand starting at position 2136 of SEQ ID NO: 915128
auaucucaguuauuagaug

SEQ ID NO: 1055909 - RNA, 19 nt, Artificial Sequence
  Description of Artificial Sequence: Synthetic oligonucleotide
  Antisense strand to SEQ ID NO: 1055908
caucuaauaacugagauau

SEQ ID NO: 1055910 - RNA, 19 nt, Artificial Sequence
  Description of Artificial Sequence: Synthetic oligonucleotide
  Sense strand starting at position 2192 of SEQ ID NO: 915128
ggcugcugggauugaacau

SEQ ID NO: 1055911 - RNA, 19 nt, Artificial Sequence
  Description of Artificial Sequence: Synthetic oligonucleotide
  Antisense strand to SEQ ID NO: 1055910
auguucaaucccagcagcc

SEQ ID NO: 1055912 - RNA, 19 nt, Artificial Sequence
  Description of Artificial Sequence: Synthetic oligonucleotide
  Sense strand starting at position 2193 of SEQ ID NO: 915128
gcugcugggauugaacauu

SEQ ID NO: 1055913 - RNA, 19 nt, Artificial Sequence
  Description of Artificial Sequence: Synthetic oligonucleotide
  Antisense strand to SEQ ID NO: 1055912
aauguucaaucccagcagc

SEQ ID NO: 1055914 - RNA, 19 nt, Artificial Sequence
  Description of Artificial Sequence: Synthetic oligonucleotide
  Sense strand starting at position 2240 of SEQ ID NO: 915128
uggaguaaaucucugauca

SEQ ID NO: 1055915 - RNA, 19 nt, Artificial Sequence
  Description of Artificial Sequence: Synthetic oligonucleotide
  Antisense strand to SEQ ID NO: 1055914
ugaucagagauuuacucca

SEQ ID NO: 1055916 - RNA, 19 nt, Artificial Sequence
  Description of Artificial Sequence: Synthetic oligonucleotide
  Sense strand starting at position 2241 of SEQ ID NO: 915128
ggaguaaaucucugaucac

SEQ ID NO: 1055917 - RNA, 19 nt, Artificial Sequence
  Description of Artificial Sequence: Synthetic oligonucleotide
  Antisense strand to SEQ ID NO: 1055916
gugaucagagauuuacucc

SEQ ID NO: 1055918 - RNA, 19 nt, Artificial Sequence
  Description of Artificial Sequence: Synthetic oligonucleotide
  Sense strand starting at position 2320 of SEQ ID NO: 915128
uccugaaaucucugcaugu

SEQ ID NO: 1055919 - RNA, 19 nt, Artificial Sequence
  Description of Artificial Sequence: Synthetic oligonucleotide
  Antisense strand to SEQ ID NO: 1055918
acaugcagagauuucagga

SEQ ID NO: 1055920 - RNA, 19 nt, Artificial Sequence
  Description of Artificial Sequence: Synthetic oligonucleotide
  Sense strand starting at position 2321 of SEQ ID NO: 915128
ccugaaaucucugcaugua

SEQ ID NO: 1055921 - RNA, 19 nt, Artificial Sequence
  Description of Artificial Sequence: Synthetic oligonucleotide
  Antisense strand to SEQ ID NO: 1055920
uacaugcagagauuucagg

SEQ ID NO: 1055922 - RNA, 19 nt, Artificial Sequence
  Description of Artificial Sequence: Synthetic oligonucleotide
  Sense strand starting at position 2322 of SEQ ID NO: 915128
cugaaaucucugcauguau

SEQ ID NO: 1055923 - RNA, 19 nt, Artificial Sequence
  Description of Artificial Sequence: Synthetic oligonucleotide
  Antisense strand to SEQ ID NO: 1055922
auacaugcagagauuucag

SEQ ID NO: 1055924 - RNA, 19 nt, Artificial Sequence
  Description of Artificial Sequence: Synthetic oligonucleotide
  Sense strand starting at position 2333 of SEQ ID NO: 915128
gcauguaugguccauacuu

SEQ ID NO: 1055925 - RNA, 19 nt, Artificial Sequence
  Description of Artificial Sequence: Synthetic oligonucleotide
  Antisense strand to SEQ ID NO: 1055924
aaguauggaccauacaugc

SEQ ID NO: 1055926 - RNA, 19 nt, Artificial Sequence
  Description of Artificial Sequence: Synthetic oligonucleotide
  Sense strand starting at position 2340 of SEQ ID NO: 915128
ugguccauacuuugaauua

SEQ ID NO: 1055927 - RNA, 19 nt, Artificial Sequence
  Description of Artificial Sequence: Synthetic oligonucleotide
  Antisense strand to SEQ ID NO: 1055926
uaauucaaaguauggacca

SEQ ID NO: 1055928 - RNA, 19 nt, Artificial Sequence
  Description of Artificial Sequence: Synthetic oligonucleotide
  Sense strand starting at position 2377 of SEQ ID NO: 915128
ugcaaugagguugguuaca

SEQ ID NO: 1055929 - RNA, 19 nt, Artificial Sequence
  Description of Artificial Sequence: Synthetic oligonucleotide
  Antisense strand to SEQ ID NO: 1055928
uguaaccaaccucauugca

SEQ ID NO: 1055930 - RNA, 19 nt, Artificial Sequence
  Description of Artificial Sequence: Synthetic oligonucleotide
  Sense strand starting at position 2379 of SEQ ID NO: 915128
caaugagguugguuacacu

SEQ ID NO: 1055931 - RNA, 19 nt, Artificial Sequence
  Description of Artificial Sequence: Synthetic oligonucleotide
  Antisense strand to SEQ ID NO: 1055930
aguguaaccaaccucauug

SEQ ID NO: 1055932 - RNA, 19 nt, Artificial Sequence
  Description of Artificial Sequence: Synthetic oligonucleotide
  Sense strand starting at position 2468 of SEQ ID NO: 915128
cuugguuguggcuagaaac

SEQ ID NO: 1055933 - RNA, 19 nt, Artificial Sequence
  Description of Artificial Sequence: Synthetic oligonucleotide
  Antisense strand to SEQ ID NO: 1055932
guuucuagccacaaccaag

SEQ ID NO: 1055934 - RNA, 19 nt, Artificial Sequence
  Description of Artificial Sequence: Synthetic oligonucleotide
  Sense strand starting at position 2541 of SEQ ID NO: 915128
auagcaucaugccuaggaa

SEQ ID NO: 1055935 - RNA, 19 nt, Artificial Sequence
  Description of Artificial Sequence: Synthetic oligonucleotide
  Antisense strand to SEQ ID NO: 1055934
uuccuaggcaugaugcuau

SEQ ID NO: 1055936 - RNA, 19 nt, Artificial Sequence
  Description of Artificial Sequence: Synthetic oligonucleotide
  Sense strand starting at position 2544 of SEQ ID NO: 915128
gcaucaugccuaggaagac

SEQ ID NO: 1055937 - RNA, 19 nt, Artificial Sequence
  Description of Artificial Sequence: Synthetic oligonucleotide
  Antisense strand to SEQ ID NO: 1055936
gucuuccuaggcaugaugc

SEQ ID NO: 1055938 - RNA, 19 nt, Artificial Sequence
  Description of Artificial Sequence: Synthetic oligonucleotide
  Sense strand starting at position 2621 of SEQ ID NO: 915128
uucucugaccuugguguaa

SEQ ID NO: 1055939 - RNA, 19 nt, Artificial Sequence
  Description of Artificial Sequence: Synthetic oligonucleotide
  Antisense strand to SEQ ID NO: 1055938
uuacaccaaggucagagaa

SEQ ID NO: 1055940 - RNA, 19 nt, Artificial Sequence
  Description of Artificial Sequence: Synthetic oligonucleotide
  Sense strand starting at position 2645 of SEQ ID NO: 915128
cuaguuaaggacuacuagu

SEQ ID NO: 1055941 - RNA, 19 nt, Artificial Sequence
  Description of Artificial Sequence: Synthetic oligonucleotide
  Antisense strand to SEQ ID NO: 1055940
acuaguaguccuuaacuag

SEQ ID NO: 1055942 - RNA, 19 nt, Artificial Sequence
  Description of Artificial Sequence: Synthetic oligonucleotide
  Sense strand starting at position 2733 of SEQ ID NO: 915128
gguacuaguagaugauuau

SEQ ID NO: 1055943 - RNA, 19 nt, Artificial Sequence
  Description of Artificial Sequence: Synthetic oligonucleotide
  Antisense strand to SEQ ID NO: 1055942
auaaucaucuacuaguacc

SEQ ID NO: 1055944 - RNA, 19 nt, Artificial Sequence
  Description of Artificial Sequence: Synthetic oligonucleotide
  Sense strand starting at position 2740 of SEQ ID NO: 915128
guagaugauuaucugccua

SEQ ID NO: 1055945 - RNA, 19 nt, Artificial Sequence
  Description of Artificial Sequence: Synthetic oligonucleotide
  Antisense strand to SEQ ID NO: 1055944
uaggcagauaaucaucuac

SEQ ID NO: 1055946 - RNA, 19 nt, Artificial Sequence
  Description of Artificial Sequence: Synthetic oligonucleotide
  Sense strand starting at position 2742 of SEQ ID NO: 915128
agaugauuaucugccuaua

SEQ ID NO: 1055947 - RNA, 19 nt, Artificial Sequence
  Description of Artificial Sequence: Synthetic oligonucleotide
  Antisense strand to SEQ ID NO: 1055946
uauaggcagauaaucaucu

SEQ ID NO: 1055948 - RNA, 19 nt, Artificial Sequence
  Description of Artificial Sequence: Synthetic oligonucleotide
  Sense strand starting at position 2828 of SEQ ID NO: 915128
ccuuauguggcagaauauu

SEQ ID NO: 1055949 - RNA, 19 nt, Artificial Sequence
  Description of Artificial Sequence: Synthetic oligonucleotide
  Antisense strand to SEQ ID NO: 1055948
aauauucugccacauaagg

SEQ ID NO: 1055950 - RNA, 19 nt, Artificial Sequence
  Description of Artificial Sequence: Synthetic oligonucleotide
  Sense strand starting at position 2834 of SEQ ID NO: 915128
guggcagaauauuccuacu

SEQ ID NO: 1055951 - RNA, 19 nt, Artificial Sequence
  Description of Artificial Sequence: Synthetic oligonucleotide
  Antisense strand to SEQ ID NO: 1055950
aguaggaauauucugccac

SEQ ID NO: 1055952 - RNA, 19 nt, Artificial Sequence
  Description of Artificial Sequence: Synthetic oligonucleotide
  Sense strand starting at position 2836 of SEQ ID NO: 915128
ggcagaauauuccuacuca

SEQ ID NO: 1055953 - RNA, 19 nt, Artificial Sequence
  Description of Artificial Sequence: Synthetic oligonucleotide
  Antisense strand to SEQ ID NO: 1055952
ugaguaggaauauucugcc

SEQ ID NO: 1055954 - RNA, 19 nt, Artificial Sequence
  Description of Artificial Sequence: Synthetic oligonucleotide
  Sense strand starting at position 2865 of SEQ ID NO: 915128
cccuaaugauacuaaggaa

SEQ ID NO: 1055955 - RNA, 19 nt, Artificial Sequence
  Description of Artificial Sequence: Synthetic oligonucleotide
  Antisense strand to SEQ ID NO: 1055954
uuccuuaguaucauuaggg

SEQ ID NO: 1055956 - RNA, 19 nt, Artificial Sequence
  Description of Artificial Sequence: Synthetic oligonucleotide
  Sense strand starting at position 2925 of SEQ ID NO: 915128
ggguuuguuggagggacuu

SEQ ID NO: 1055957 - RNA, 19 nt, Artificial Sequence
  Description of Artificial Sequence: Synthetic oligonucleotide
  Antisense strand to SEQ ID NO: 1055956
aagucccuccaacaaaccc

SEQ ID NO: 1055958 - RNA, 19 nt, Artificial Sequence
  Description of Artificial Sequence: Synthetic oligonucleotide
  Sense strand starting at position 2927 of SEQ ID NO: 915128
guuuguuggagggacuuaa

SEQ ID NO: 1055959 - RNA, 19 nt, Artificial Sequence
  Description of Artificial Sequence: Synthetic oligonucleotide
  Antisense strand to SEQ ID NO: 1055958
uuaagucccuccaacaaac

SEQ ID NO: 1055960 - RNA, 19 nt, Artificial Sequence
  Description of Artificial Sequence: Synthetic oligonucleotide
  Sense strand starting at position 3243 of SEQ ID NO: 915128
ggagacugauuugagacua

SEQ ID NO: 1055961 - RNA, 19 nt, Artificial Sequence
  Description of Artificial Sequence: Synthetic oligonucleotide
  Antisense strand to SEQ ID NO: 1055960
uagucucaaaucagucucc

SEQ ID NO: 1055962 - RNA, 19 nt, Artificial Sequence
  Description of Artificial Sequence: Synthetic oligonucleotide
  Sense strand starting at position 3456 of SEQ ID NO: 915128
gucuucuuaaaguaguuga

SEQ ID NO: 1055963 - RNA, 19 nt, Artificial Sequence
  Description of Artificial Sequence: Synthetic oligonucleotide
  Antisense strand to SEQ ID NO: 1055962
ucaacuacuuuaagaagac

SEQ ID NO: 1055964 - RNA, 19 nt, Artificial Sequence
  Description of Artificial Sequence: Synthetic oligonucleotide
  Sense strand starting at position 3459 of SEQ ID NO: 915128
uucuuaaaguaguugaauc

SEQ ID NO: 1055965 - RNA, 19 nt, Artificial Sequence
  Description of Artificial Sequence: Synthetic oligonucleotide
  Antisense strand to SEQ ID NO: 1055964
gauucaacuacuuuaagaa

SEQ ID NO: 1055966 - RNA, 19 nt, Artificial Sequence
  Description of Artificial Sequence: Synthetic oligonucleotide
  Sense strand starting at position 3467 of SEQ ID NO: 915128
guaguugaauccuccaacu

SEQ ID NO: 1055967 - RNA, 19 nt, Artificial Sequence
  Description of Artificial Sequence: Synthetic oligonucleotide
  Antisense strand to SEQ ID NO: 1055966
aguuggaggauucaacuac

SEQ ID NO: 1055968 - RNA, 19 nt, Artificial Sequence
  Description of Artificial Sequence: Synthetic oligonucleotide
  Sense strand starting at position 3469 of SEQ ID NO: 915128
aguugaauccuccaacuug

SEQ ID NO: 1055969 - RNA, 19 nt, Artificial Sequence
  Description of Artificial Sequence: Synthetic oligonucleotide
  Antisense strand to SEQ ID NO: 1055968
caaguuggaggauucaacu

SEQ ID NO: 1055970 - RNA, 19 nt, Artificial Sequence
  Description of Artificial Sequence: Synthetic oligonucleotide
  Sense strand starting at position 3495 of SEQ ID NO: 915128
uuuaaugcucaguaugaca

SEQ ID NO: 1055971 - RNA, 19 nt, Artificial Sequence
  Description of Artificial Sequence: Synthetic oligonucleotide
  Antisense strand to SEQ ID NO: 1055970
ugucauacugagcauuaaa

SEQ ID NO: 1055972 - RNA, 19 nt, Artificial Sequence
  Description of Artificial Sequence: Synthetic oligonucleotide
  Sense strand starting at position 3873 of SEQ ID NO: 915128
augcuuaacuaaucaguga

SEQ ID NO: 1055973 - RNA, 19 nt, Artificial Sequence
  Description of Artificial Sequence: Synthetic oligonucleotide
  Antisense strand to SEQ ID NO: 1055972
ucacugauuaguuaagcau

SEQ ID NO: 1055974 - RNA, 19 nt, Artificial Sequence
  Description of Artificial Sequence: Synthetic oligonucleotide
  Sense strand starting at position 3911 of SEQ ID NO: 915128
gaggcagucuugccacaga

SEQ ID NO: 1055975 - RNA, 19 nt, Artificial Sequence
  Description of Artificial Sequence: Synthetic oligonucleotide
  Antisense strand to SEQ ID NO: 1055974
ucuguggcaagacugccuc

SEQ ID NO: 1055976 - RNA, 19 nt, Artificial Sequence
  Description of Artificial Sequence: Synthetic oligonucleotide
  Sense strand starting at position 630 of SEQ ID NO: 915129
uguagugcugaguaugaaa

SEQ ID NO: 1055977 - RNA, 19 nt, Artificial Sequence
  Description of Artificial Sequence: Synthetic oligonucleotide
  Antisense strand to SEQ ID NO: 1055976
uuucauacucagcacuaca

SEQ ID NO: 1055978 - RNA, 19 nt, Artificial Sequence
  Description of Artificial Sequence: Synthetic oligonucleotide
  Sense strand starting at position 637 of SEQ ID NO: 915129
cugaguaugaaagguguca

SEQ ID NO: 1055979 - RNA, 19 nt, Artificial Sequence
  Description of Artificial Sequence: Synthetic oligonucleotide
  Antisense strand to SEQ ID NO: 1055978
ugacaccuuucauacucag

SEQ ID NO: 1055980 - RNA, 19 nt, Artificial Sequence
  Description of Artificial Sequence: Synthetic oligonucleotide
  Sense strand starting at position 639 of SEQ ID NO: 915129
gaguaugaaaggugucaag

SEQ ID NO: 1055981 - RNA, 19 nt, Artificial Sequence
  Description of Artificial Sequence: Synthetic oligonucleotide
  Antisense strand to SEQ ID NO: 1055980
cuugacaccuuucauacuc

SEQ ID NO: 1055982 - RNA, 19 nt, Artificial Sequence
  Description of Artificial Sequence: Synthetic oligonucleotide
  Sense strand starting at position 709 of SEQ ID NO: 915129
uugugagcccuugaaacuu

SEQ ID NO: 1055983 - RNA, 19 nt, Artificial Sequence
  Description of Artificial Sequence: Synthetic oligonucleotide
  Antisense strand to SEQ ID NO: 1055982
aaguuucaagggcucacaa

SEQ ID NO: 1055984 - RNA, 19 nt, Artificial Sequence
  Description of Artificial Sequence: Synthetic oligonucleotide
  Sense strand starting at position 778 of SEQ ID NO: 915129
augaguguauuggcauaaa

SEQ ID NO: 1055985 - RNA, 19 nt, Artificial Sequence
  Description of Artificial Sequence: Synthetic oligonucleotide
  Antisense strand to SEQ ID NO: 1055984
uuuaugccaauacacucau

SEQ ID NO: 1055986 - RNA, 19 nt, Artificial Sequence
  Description of Artificial Sequence: Synthetic oligonucleotide
  Sense strand starting at position 781 of SEQ ID NO: 915129
aguguauuggcauaaagau

SEQ ID NO: 1055987 - RNA, 19 nt, Artificial Sequence
  Description of Artificial Sequence: Synthetic oligonucleotide
  Antisense strand to SEQ ID NO: 1055986
aucuuuaugccaauacacu

SEQ ID NO: 1055988 - RNA, 19 nt, Artificial Sequence
  Description of Artificial Sequence: Synthetic oligonucleotide
  Sense strand starting at position 930 of SEQ ID NO: 915129
gucagccuagccuaauaua

SEQ ID NO: 1055989 - RNA, 19 nt, Artificial Sequence
  Description of Artificial Sequence: Synthetic oligonucleotide
  Antisense strand to SEQ ID NO: 1055988
uauauuaggcuaggcugac

SEQ ID NO: 1055990 - RNA, 19 nt, Artificial Sequence
  Description of Artificial Sequence: Synthetic oligonucleotide
  Sense strand starting at position 972 of SEQ ID NO: 915129
gagacaggauaagauaauu

SEQ ID NO: 1055991 - RNA, 19 nt, Artificial Sequence
  Description of Artificial Sequence: Synthetic oligonucleotide
  Antisense strand to SEQ ID NO: 1055990
aauuaucuuauccugucuc

SEQ ID NO: 1055992 - RNA, 19 nt, Artificial Sequence
  Description of Artificial Sequence: Synthetic oligonucleotide
  Sense strand starting at position 985 of SEQ ID NO: 915129
auaauugacugucccaagu

SEQ ID NO: 1055993 - RNA, 19 nt, Artificial Sequence
  Description of Artificial Sequence: Synthetic oligonucleotide
  Antisense strand to SEQ ID NO: 1055992
acuugggacagucaauuau

SEQ ID NO: 1055994 - RNA, 19 nt, Artificial Sequence
  Description of Artificial Sequence: Synthetic oligonucleotide
  Sense strand starting at position 1047 of SEQ ID NO: 915129
agauauucuugccuaaaug

SEQ ID NO: 1055995 - RNA, 19 nt, Artificial Sequence
  Description of Artificial Sequence: Synthetic oligonucleotide
  Antisense strand to SEQ ID NO: 1055994
cauuuaggcaagaauaucu

SEQ ID NO: 1055996 - RNA, 19 nt, Artificial Sequence
  Description of Artificial Sequence: Synthetic oligonucleotide
  Sense strand starting at position 2406 of SEQ ID NO: 915129
auaugaacccaguaugugu

SEQ ID NO: 1055997 - RNA, 19 nt, Artificial Sequence
  Description of Artificial Sequence: Synthetic oligonucleotide
  Antisense strand to SEQ ID NO: 1055996
acacauacuggguucauau

SEQ ID NO: 1055998 - RNA, 19 nt, Artificial Sequence
  Description of Artificial Sequence: Synthetic oligonucleotide
  Sense strand starting at position 2456 of SEQ ID NO: 915129
agugcaaagccuuacuaau

SEQ ID NO: 1055999 - RNA, 19 nt, Artificial Sequence
  Description of Artificial Sequence: Synthetic oligonucleotide
  Antisense strand to SEQ ID NO: 1055998
auuaguaaggcuuugcacu

SEQ ID NO: 1056000 - RNA, 19 nt, Artificial Sequence
  Description of Artificial Sequence: Synthetic oligonucleotide
  Sense strand starting at position 2480 of SEQ ID NO: 915129
gccagcuguguucugugau

SEQ ID NO: 1056001 - RNA, 19 nt, Artificial Sequence
  Description of Artificial Sequence: Synthetic oligonucleotide
  Antisense strand to SEQ ID NO: 1056000
aucacagaacacagcuggc

SEQ ID NO: 1056002 - RNA, 19 nt, Artificial Sequence
  Description of Artificial Sequence: Synthetic oligonucleotide
  Sense strand starting at position 2540 of SEQ ID NO: 915129
uugagacagagcugcaaau

SEQ ID NO: 1056003 - RNA, 19 nt, Artificial Sequence
  Description of Artificial Sequence: Synthetic oligonucleotide
  Antisense strand to SEQ ID NO: 1056002
auuugcagcucugucucaa

SEQ ID NO: 1056004 - RNA, 19 nt, Artificial Sequence
  Description of Artificial Sequence: Synthetic oligonucleotide
  Sense strand starting at position 2574 of SEQ ID NO: 915129
ucagaaugcuggguaacua

SEQ ID NO: 1056005 - RNA, 19 nt, Artificial Sequence
  Description of Artificial Sequence: Synthetic oligonucleotide
  Antisense strand to SEQ ID NO: 1056004
uaguuacccagcauucuga

SEQ ID NO: 1056006 - RNA, 19 nt, Artificial Sequence
  Description of Artificial Sequence: Synthetic oligonucleotide
  Sense strand starting at position 2575 of SEQ ID NO: 915129
cagaaugcuggguaacuau

SEQ ID NO: 1056007 - RNA, 19 nt, Artificial Sequence
  Description of Artificial Sequence: Synthetic oligonucleotide
  Antisense strand to SEQ ID NO: 1056006
auaguuacccagcauucug

SEQ ID NO: 1056008 - RNA, 19 nt, Artificial Sequence
  Description of Artificial Sequence: Synthetic oligonucleotide
  Sense strand starting at position 2598 of SEQ ID NO: 915129
auaacagcucauugaggau

SEQ ID NO: 1056009 - RNA, 19 nt, Artificial Sequence
  Description of Artificial Sequence: Synthetic oligonucleotide
  Antisense strand to SEQ ID NO: 1056008
auccucaaugagcuguuau

SEQ ID NO: 1056010 - RNA, 19 nt, Artificial Sequence
  Description of Artificial Sequence: Synthetic oligonucleotide
  Sense strand starting at position 2704 of SEQ ID NO: 915129
auauaaauggugcaaaguu

SEQ ID NO: 1056011 - RNA, 19 nt, Artificial Sequence
  Description of Artificial Sequence: Synthetic oligonucleotide
  Antisense strand to SEQ ID NO: 1056010
aacuuugcaccauuuauau

SEQ ID NO: 1056012 - RNA, 19 nt, Artificial Sequence
  Description of Artificial Sequence: Synthetic oligonucleotide
  Sense strand starting at position 2878 of SEQ ID NO: 915129
gacagaaaugucuggguca

SEQ ID NO: 1056013 - RNA, 19 nt, Artificial Sequence
  Description of Artificial Sequence: Synthetic oligonucleotide
  Antisense strand to SEQ ID NO: 1056012
ugacccagacauuucuguc

SEQ ID NO: 1056014 - RNA, 19 nt, Artificial Sequence
  Description of Artificial Sequence: Synthetic oligonucleotide
  Sense strand starting at position 2881 of SEQ ID NO: 915129
agaaaugucugggucaccu

SEQ ID NO: 1056015 - RNA, 19 nt, Artificial Sequence
  Description of Artificial Sequence: Synthetic oligonucleotide
  Antisense strand to SEQ ID NO: 1056014
aggugacccagacauuucu

SEQ ID NO: 1056016 - RNA, 19 nt, Artificial Sequence
  Description of Artificial Sequence: Synthetic oligonucleotide
  Sense strand starting at position 3063 of SEQ ID NO: 915129
agaguaaguacauauuguu

SEQ ID NO: 1056017 - RNA, 19 nt, Artificial Sequence
  Description of Artificial Sequence: Synthetic oligonucleotide
  Antisense strand to SEQ ID NO: 1056016
aacaauauguacuuacucu

SEQ ID NO: 1056018 - RNA, 19 nt, Artificial Sequence
  Description of Artificial Sequence: Synthetic oligonucleotide
  Sense strand starting at position 3299 of SEQ ID NO: 915129
ucuguagauggugauuaua

SEQ ID NO: 1056019 - RNA, 19 nt, Artificial Sequence
  Description of Artificial Sequence: Synthetic oligonucleotide
  Antisense strand to SEQ ID NO: 1056018
uauaaucaccaucuacaga

SEQ ID NO: 1056020 - RNA, 19 nt, Artificial Sequence
  Description of Artificial Sequence: Synthetic oligonucleotide
  Sense strand starting at position 3301 of SEQ ID NO: 915129
uguagauggugauuauaug

SEQ ID NO: 1056021 - RNA, 19 nt, Artificial Sequence
  Description of Artificial Sequence: Synthetic oligonucleotide
  Antisense strand to SEQ ID NO: 1056020
cauauaaucaccaucuaca

SEQ ID NO: 1056022 - RNA, 19 nt, Artificial Sequence
  Description of Artificial Sequence: Synthetic oligonucleotide
  Sense strand starting at position 3309 of SEQ ID NO: 915129
gugauuauaugguuaauca

SEQ ID NO: 1056023 - RNA, 19 nt, Artificial Sequence
  Description of Artificial Sequence: Synthetic oligonucleotide
  Antisense strand to SEQ ID NO: 1056022
ugauuaaccauauaaucac

SEQ ID NO: 1056024 - RNA, 19 nt, Artificial Sequence
  Description of Artificial Sequence: Synthetic oligonucleotide
  Sense strand starting at position 3319 of SEQ ID NO: 915129
gguuaaucauccuuaaugg

SEQ ID NO: 1056025 - RNA, 19 nt, Artificial Sequence
  Description of Artificial Sequence: Synthetic oligonucleotide
  Antisense strand to SEQ ID NO: 1056024
ccauuaaggaugauuaacc

SEQ ID NO: 1056026 - RNA, 19 nt, Artificial Sequence
  Description of Artificial Sequence: Synthetic oligonucleotide
  Sense strand starting at position 3423 of SEQ ID NO: 915129
ucuacagaaucaguguauu

SEQ ID NO: 1056027 - RNA, 19 nt, Artificial Sequence
  Description of Artificial Sequence: Synthetic oligonucleotide
  Antisense strand to SEQ ID NO: 1056026
aauacacugauucuguaga

SEQ ID NO: 1056028 - RNA, 19 nt, Artificial Sequence
  Description of Artificial Sequence: Synthetic oligonucleotide
  Sense strand starting at position 3591 of SEQ ID NO: 915129
cuuuaagucaaguacggaa

SEQ ID NO: 1056029 - RNA, 19 nt, Artificial Sequence
  Description of Artificial Sequence: Synthetic oligonucleotide
  Antisense strand to SEQ ID NO: 1056028
uuccguacuugacuuaaag

SEQ ID NO: 1056030 - RNA, 19 nt, Artificial Sequence
  Description of Artificial Sequence: Synthetic oligonucleotide
  Sense strand starting at position 3598 of SEQ ID NO: 915129
ucaaguacggaaugacaaa

SEQ ID NO: 1056031 - RNA, 19 nt, Artificial Sequence
  Description of Artificial Sequence: Synthetic oligonucleotide
  Antisense strand to SEQ ID NO: 1056030
uuugucauuccguacuuga

SEQ ID NO: 1056032 - RNA, 19 nt, Artificial Sequence
  Description of Artificial Sequence: Synthetic oligonucleotide
  Sense strand starting at position 3699 of SEQ ID NO: 915129
ggaucuaguugauugugga

SEQ ID NO: 1056033 - RNA, 19 nt, Artificial Sequence
  Description of Artificial Sequence: Synthetic oligonucleotide
  Antisense strand to SEQ ID NO: 1056032
uccacaaucaacuagaucc

SEQ ID NO: 1056034 - RNA, 19 nt, Artificial Sequence
  Description of Artificial Sequence: Synthetic oligonucleotide
  Sense strand starting at position 3700 of SEQ ID NO: 915129
gaucuaguugauuguggau

SEQ ID NO: 1056035 - RNA, 19 nt, Artificial Sequence
  Description of Artificial Sequence: Synthetic oligonucleotide
  Antisense strand to SEQ ID NO: 1056034
auccacaaucaacuagauc

SEQ ID NO: 1056036 - RNA, 19 nt, Artificial Sequence
  Description of Artificial Sequence: Synthetic oligonucleotide
  Sense strand starting at position 3709 of SEQ ID NO: 915129
gauuguggauuccuccaau

SEQ ID NO: 1056037 - RNA, 19 nt, Artificial Sequence
  Description of Artificial Sequence: Synthetic oligonucleotide
  Antisense strand to SEQ ID NO: 1056036
auuggaggaauccacaauc

SEQ ID NO: 1056038 - RNA, 19 nt, Artificial Sequence
  Description of Artificial Sequence: Synthetic oligonucleotide
  Sense strand starting at position 3786 of SEQ ID NO: 915129
uagauucuaugagcugaca

SEQ ID NO: 1056039 - RNA, 19 nt, Artificial Sequence
  Description of Artificial Sequence: Synthetic oligonucleotide
  Antisense strand to SEQ ID NO: 1056038
ugucagcucauagaaucua

SEQ ID NO: 1056040 - RNA, 19 nt, Artificial Sequence
  Description of Artificial Sequence: Synthetic oligonucleotide
  Sense strand starting at position 3789 of SEQ ID NO: 915129
auucuaugagcugacaagu

SEQ ID NO: 1056041 - RNA, 19 nt, Artificial Sequence
  Description of Artificial Sequence: Synthetic oligonucleotide
  Antisense strand to SEQ ID NO: 1056040
acuugucagcucauagaau

SEQ ID NO: 1056042 - RNA, 19 nt, Artificial Sequence
  Description of Artificial Sequence: Synthetic oligonucleotide
  Sense strand starting at position 3795 of SEQ ID NO: 915129
ugagcugacaagugggaua

SEQ ID NO: 1056043 - RNA, 19 nt, Artificial Sequence
  Description of Artificial Sequence: Synthetic oligonucleotide
  Antisense strand to SEQ ID NO: 1056042
uaucccacuugucagcuca

SEQ ID NO: 1056044 - RNA, 19 nt, Artificial Sequence
  Description of Artificial Sequence: Synthetic oligonucleotide
  Sense strand starting at position 3797 of SEQ ID NO: 915129
agcugacaagugggauauu

SEQ ID NO: 1056045 - RNA, 19 nt, Artificial Sequence
  Description of Artificial Sequence: Synthetic oligonucleotide
  Antisense strand to SEQ ID NO: 1056044
aauaucccacuugucagcu

SEQ ID NO: 1056046 - RNA, 19 nt, Artificial Sequence
  Description of Artificial Sequence: Synthetic oligonucleotide
  Sense strand starting at position 3824 of SEQ ID NO: 915129
cuagauggcucucccaauu

SEQ ID NO: 1056047 - RNA, 19 nt, Artificial Sequence
  Description of Artificial Sequence: Synthetic oligonucleotide
  Antisense strand to SEQ ID NO: 1056046
aauugggagagccaucuag

SEQ ID NO: 1056048 - RNA, 19 nt, Artificial Sequence
  Description of Artificial Sequence: Synthetic oligonucleotide
  Sense strand starting at position 3877 of SEQ ID NO: 915129
gucugaauuuacuaagaaa

SEQ ID NO: 1056049 - RNA, 19 nt, Artificial Sequence
  Description of Artificial Sequence: Synthetic oligonucleotide
  Antisense strand to SEQ ID NO: 1056048
uuucuuaguaaauucagac

SEQ ID NO: 1056050 - RNA, 19 nt, Artificial Sequence
  Description of Artificial Sequence: Synthetic oligonucleotide
  Sense strand starting at position 3920 of SEQ ID NO: 915129
ucaguaucucuaggauuga

SEQ ID NO: 1056051 - RNA, 19 nt, Artificial Sequence
  Description of Artificial Sequence: Synthetic oligonucleotide
  Antisense strand to SEQ ID NO: 1056050
ucaauccuagagauacuga

SEQ ID NO: 1056052 - RNA, 19 nt, Artificial Sequence
  Description of Artificial Sequence: Synthetic oligonucleotide
  Sense strand starting at position 3931 of SEQ ID NO: 915129
aggauugagugucuacuca

SEQ ID NO: 1056053 - RNA, 19 nt, Artificial Sequence
  Description of Artificial Sequence: Synthetic oligonucleotide
  Antisense strand to SEQ ID NO: 1056052
ugaguagacacucaauccu

SEQ ID NO: 1056054 - RNA, 19 nt, Artificial Sequence
  Description of Artificial Sequence: Synthetic oligonucleotide
  Sense strand starting at position 3958 of SEQ ID NO: 915129
guuuccuaugaauguauaa

SEQ ID NO: 1056055 - RNA, 19 nt, Artificial Sequence
  Description of Artificial Sequence: Synthetic oligonucleotide
  Antisense strand to SEQ ID NO: 1056054
uuauacauucauaggaaac

SEQ ID NO: 1056056 - RNA, 19 nt, Artificial Sequence
  Description of Artificial Sequence: Synthetic oligonucleotide
  Sense strand starting at position 60 of SEQ ID NO: 915130
gagguuauggccuauuguu

SEQ ID NO: 1056057 - RNA, 19 nt, Artificial Sequence
  Description of Artificial Sequence: Synthetic oligonucleotide
  Antisense strand to SEQ ID NO: 1056056
aacaauaggccauaaccuc

SEQ ID NO: 1056058 - RNA, 19 nt, Artificial Sequence
  Description of Artificial Sequence: Synthetic oligonucleotide
  Sense strand starting at position 68 of SEQ ID NO: 915130
ggccuauuguuauuacagu

SEQ ID NO: 1056059 - RNA, 19 nt, Artificial Sequence
  Description of Artificial Sequence: Synthetic oligonucleotide
  Antisense strand to SEQ ID NO: 1056058
acuguaauaacaauaggcc

SEQ ID NO: 1056060 - RNA, 19 nt, Artificial Sequence
  Description of Artificial Sequence: Synthetic oligonucleotide
  Sense strand starting at position 269 of SEQ ID NO: 915130
ucauuaucacucuguggca

SEQ ID NO: 1056061 - RNA, 19 nt, Artificial Sequence
  Description of Artificial Sequence: Synthetic oligonucleotide
  Antisense strand to SEQ ID NO: 1056060
ugccacagagugauaauga

SEQ ID NO: 1056062 - RNA, 19 nt, Artificial Sequence
  Description of Artificial Sequence: Synthetic oligonucleotide
  Sense strand starting at position 271 of SEQ ID NO: 915130
auuaucacucuguggcaga

SEQ ID NO: 1056063 - RNA, 19 nt, Artificial Sequence
  Description of Artificial Sequence: Synthetic oligonucleotide
  Antisense strand to SEQ ID NO: 1056062
ucugccacagagugauaau

SEQ ID NO: 1056064 - RNA, 19 nt, Artificial Sequence
  Description of Artificial Sequence: Synthetic oligonucleotide
  Sense strand starting at position 325 of SEQ ID NO: 915130
aguuauaguuugguuacua

SEQ ID NO: 1056065 - RNA, 19 nt, Artificial Sequence
  Description of Artificial Sequence: Synthetic oligonucleotide
  Antisense strand to SEQ ID NO: 1056064
uaguaaccaaacuauaacu

SEQ ID NO: 1056066 - RNA, 19 nt, Artificial Sequence
  Description of Artificial Sequence: Synthetic oligonucleotide
  Sense strand starting at position 326 of SEQ ID NO: 915130
guuauaguuugguuacuag

SEQ ID NO: 1056067 - RNA, 19 nt, Artificial Sequence
  Description of Artificial Sequence: Synthetic oligonucleotide
  Antisense strand to SEQ ID NO: 1056066
cuaguaaccaaacuauaac

SEQ ID NO: 1056068 - RNA, 19 nt, Artificial Sequence
  Description of Artificial Sequence: Synthetic oligonucleotide
  Sense strand starting at position 442 of SEQ ID NO: 915130
agauauuaccgcuagauac

SEQ ID NO: 1056069 - RNA, 19 nt, Artificial Sequence
  Description of Artificial Sequence: Synthetic oligonucleotide
  Antisense strand to SEQ ID NO: 1056068
guaucuagcgguaauaucu

SEQ ID NO: 1056070 - RNA, 19 nt, Artificial Sequence
  Description of Artificial Sequence: Synthetic oligonucleotide
  Sense strand starting at position 549 of SEQ ID NO: 915130
gguagaauuucccaaauau

SEQ ID NO: 1056071 - RNA, 19 nt, Artificial Sequence
  Description of Artificial Sequence: Synthetic oligonucleotide
  Antisense strand to SEQ ID NO: 1056070
auauuugggaaauucuacc

SEQ ID NO: 1056072 - RNA, 19 nt, Artificial Sequence
  Description of Artificial Sequence: Synthetic oligonucleotide
  Sense strand starting at position 567 of SEQ ID NO: 915130
ugcagaguuguccucgguu

SEQ ID NO: 1056073 - RNA, 19 nt, Artificial Sequence
  Description of Artificial Sequence: Synthetic oligonucleotide
  Antisense strand to SEQ ID NO: 1056072
aaccgaggacaacucugca

SEQ ID NO: 1056074 - RNA, 19 nt, Artificial Sequence
  Description of Artificial Sequence: Synthetic oligonucleotide
  Sense strand starting at position 1269 of SEQ ID NO: 915130
aaccgugaugugggagaca

SEQ ID NO: 1056075 - RNA, 19 nt, Artificial Sequence
  Description of Artificial Sequence: Synthetic oligonucleotide
  Antisense strand to SEQ ID NO: 1056074
ugucucccacaucacgguu

SEQ ID NO: 1056076 - RNA, 19 nt, Artificial Sequence
  Description of Artificial Sequence: Synthetic oligonucleotide
  Sense strand starting at position 1319 of SEQ ID NO: 915130
agcuaugaguccuuaggga

SEQ ID NO: 1056077 - RNA, 19 nt, Artificial Sequence
  Description of Artificial Sequence: Synthetic oligonucleotide
  Antisense strand to SEQ ID NO: 1056076
ucccuaaggacucauagcu

SEQ ID NO: 1056078 - RNA, 19 nt, Artificial Sequence
  Description of Artificial Sequence: Synthetic oligonucleotide
  Sense strand starting at position 1732 of SEQ ID NO: 915130
auggccuucuuuccauaga

SEQ ID NO: 1056079 - RNA, 19 nt, Artificial Sequence
  Description of Artificial Sequence: Synthetic oligonucleotide
  Antisense strand to SEQ ID NO: 1056078
ucuauggaaagaaggccau

SEQ ID NO: 1056080 - RNA, 19 nt, Artificial Sequence
  Description of Artificial Sequence: Synthetic oligonucleotide
  Sense strand starting at position 1735 of SEQ ID NO: 915130
gccuucuuuccauagagug

SEQ ID NO: 1056081 - RNA, 19 nt, Artificial Sequence
  Description of Artificial Sequence: Synthetic oligonucleotide
  Antisense strand to SEQ ID NO: 1056080
cacucuauggaaagaaggc

SEQ ID NO: 1056082 - RNA, 19 nt, Artificial Sequence
  Description of Artificial Sequence: Synthetic oligonucleotide
  Sense strand starting at position 1740 of SEQ ID NO: 915130
cuuuccauagagugaaugu

SEQ ID NO: 1056083 - RNA, 19 nt, Artificial Sequence
  Description of Artificial Sequence: Synthetic oligonucleotide
  Antisense strand to SEQ ID NO: 1056082
acauucacucuauggaaag

SEQ ID NO: 1056084 - RNA, 19 nt, Artificial Sequence
  Description of Artificial Sequence: Synthetic oligonucleotide
  Sense strand starting at position 1747 of SEQ ID NO: 915130
uagagugaaugugugauca

SEQ ID NO: 1056085 - RNA, 19 nt, Artificial Sequence
  Description of Artificial Sequence: Synthetic oligonucleotide
  Antisense strand to SEQ ID NO: 1056084
ugaucacacauucacucua

SEQ ID NO: 1056086 - RNA, 19 nt, Artificial Sequence
  Description of Artificial Sequence: Synthetic oligonucleotide
  Sense strand starting at position 1751 of SEQ ID NO: 915130
gugaaugugugaucagguu

SEQ ID NO: 1056087 - RNA, 19 nt, Artificial Sequence
  Description of Artificial Sequence: Synthetic oligonucleotide
  Antisense strand to SEQ ID NO: 1056086
aaccugaucacacauucac

SEQ ID NO: 1056088 - RNA, 19 nt, Artificial Sequence
  Description of Artificial Sequence: Synthetic oligonucleotide
  Sense strand starting at position 1975 of SEQ ID NO: 915130
ucugucauguuauuccuau

SEQ ID NO: 1056089 - RNA, 19 nt, Artificial Sequence
  Description of Artificial Sequence: Synthetic oligonucleotide
  Antisense strand to SEQ ID NO: 1056088
auaggaauaacaugacaga

SEQ ID NO: 1056090 - RNA, 19 nt, Artificial Sequence
  Description of Artificial Sequence: Synthetic oligonucleotide
  Sense strand starting at position 1976 of SEQ ID NO: 915130
cugucauguuauuccuauu

SEQ ID NO: 1056091 - RNA, 19 nt, Artificial Sequence
  Description of Artificial Sequence: Synthetic oligonucleotide
  Antisense strand to SEQ ID NO: 1056090
aauaggaauaacaugacag

SEQ ID NO: 1056092 - RNA, 19 nt, Artificial Sequence
  Description of Artificial Sequence: Synthetic oligonucleotide
  Sense strand starting at position 1997 of SEQ ID NO: 915130
ccauguauuucucaugaug

SEQ ID NO: 1056093 - RNA, 19 nt, Artificial Sequence
  Description of Artificial Sequence: Synthetic oligonucleotide
  Antisense strand to SEQ ID NO: 1056092
caucaugagaaauacaugg

SEQ ID NO: 1056094 - RNA, 19 nt, Artificial Sequence
  Description of Artificial Sequence: Synthetic oligonucleotide
  Sense strand starting at position 1999 of SEQ ID NO: 915130
auguauuucucaugaugau

SEQ ID NO: 1056095 - RNA, 19 nt, Artificial Sequence
  Description of Artificial Sequence: Synthetic oligonucleotide
  Antisense strand to SEQ ID NO: 1056094
aucaucaugagaaauacau

SEQ ID NO: 1056096 - RNA, 19 nt, Artificial Sequence
  Description of Artificial Sequence: Synthetic oligonucleotide
  Sense strand starting at position 2111 of SEQ ID NO: 915130
uguaaauuccuauaagguu

SEQ ID NO: 1056097 - RNA, 19 nt, Artificial Sequence
  Description of Artificial Sequence: Synthetic oligonucleotide
  Antisense strand to SEQ ID NO: 1056096
aaccuuauaggaauuuaca

SEQ ID NO: 1056098 - RNA, 19 nt, Artificial Sequence
  Description of Artificial Sequence: Synthetic oligonucleotide
  Sense strand starting at position 2226 of SEQ ID NO: 915130
caggaugucauguguguau

SEQ ID NO: 1056099 - RNA, 19 nt, Artificial Sequence
  Description of Artificial Sequence: Synthetic oligonucleotide
  Antisense strand to SEQ ID NO: 1056098
auacacacaugacauccug

SEQ ID NO: 1056100 - RNA, 19 nt, Artificial Sequence
  Description of Artificial Sequence: Synthetic oligonucleotide
  Sense strand starting at position 2228 of SEQ ID NO: 915130
ggaugucauguguguauac

SEQ ID NO: 1056101 - RNA, 19 nt, Artificial Sequence
  Description of Artificial Sequence: Synthetic oligonucleotide
  Antisense strand to SEQ ID NO: 1056100
guauacacacaugacaucc

SEQ ID NO: 1056102 - RNA, 19 nt, Artificial Sequence
  Description of Artificial Sequence: Synthetic oligonucleotide
  Sense strand starting at position 2229 of SEQ ID NO: 915130
gaugucauguguguauacu

SEQ ID NO: 1056103 - RNA, 19 nt, Artificial Sequence
  Description of Artificial Sequence: Synthetic oligonucleotide
  Antisense strand to SEQ ID NO: 1056102
aguauacacacaugacauc

SEQ ID NO: 1056104 - RNA, 19 nt, Artificial Sequence
  Description of Artificial Sequence: Synthetic oligonucleotide
  Sense strand starting at position 2235 of SEQ ID NO: 915130
auguguguauacucaauca

SEQ ID NO: 1056105 - RNA, 19 nt, Artificial Sequence
  Description of Artificial Sequence: Synthetic oligonucleotide
  Antisense strand to SEQ ID NO: 1056104
ugauugaguauacacacau

SEQ ID NO: 1056106 - RNA, 19 nt, Artificial Sequence
  Description of Artificial Sequence: Synthetic oligonucleotide
  Sense strand starting at position 2319 of SEQ ID NO: 915130
aagggagauugacaaugaa

SEQ ID NO: 1056107 - RNA, 19 nt, Artificial Sequence
  Description of Artificial Sequence: Synthetic oligonucleotide
  Antisense strand to SEQ ID NO: 1056106
uucauugucaaucucccuu

SEQ ID NO: 1056108 - RNA, 19 nt, Artificial Sequence
  Description of Artificial Sequence: Synthetic oligonucleotide
  Sense strand starting at position 2393 of SEQ ID NO: 915130
ggaacauugguagguuacu

SEQ ID NO: 1056109 - RNA, 19 nt, Artificial Sequence
  Description of Artificial Sequence: Synthetic oligonucleotide
  Antisense strand to SEQ ID NO: 1056108
aguaaccuaccaauguucc

SEQ ID NO: 1056110 - RNA, 19 nt, Artificial Sequence
  Description of Artificial Sequence: Synthetic oligonucleotide
  Sense strand starting at position 2405 of SEQ ID NO: 915130
gguuacugucaauaugagu

SEQ ID NO: 1056111 - RNA, 19 nt, Artificial Sequence
  Description of Artificial Sequence: Synthetic oligonucleotide
  Antisense strand to SEQ ID NO: 1056110
acucauauugacaguaacc

SEQ ID NO: 1056112 - RNA, 19 nt, Artificial Sequence
  Description of Artificial Sequence: Synthetic oligonucleotide
  Sense strand starting at position 2410 of SEQ ID NO: 915130
cugucaauaugagugggaa

SEQ ID NO: 1056113 - RNA, 19 nt, Artificial Sequence
  Description of Artificial Sequence: Synthetic oligonucleotide
  Antisense strand to SEQ ID NO: 1056112
uucccacucauauugacag

SEQ ID NO: 1056114 - RNA, 19 nt, Artificial Sequence
  Description of Artificial Sequence: Synthetic oligonucleotide
  Sense strand starting at position 2411 of SEQ ID NO: 915130
ugucaauaugagugggaag

SEQ ID NO: 1056115 - RNA, 19 nt, Artificial Sequence
  Description of Artificial Sequence: Synthetic oligonucleotide
  Antisense strand to SEQ ID NO: 1056114
cuucccacucauauugaca

SEQ ID NO: 1056116 - RNA, 19 nt, Artificial Sequence
  Description of Artificial Sequence: Synthetic oligonucleotide
  Sense strand starting at position 2412 of SEQ ID NO: 915130
gucaauaugagugggaaga

SEQ ID NO: 1056117 - RNA, 19 nt, Artificial Sequence
  Description of Artificial Sequence: Synthetic oligonucleotide
  Antisense strand to SEQ ID NO: 1056116
ucuucccacucauauugac

SEQ ID NO: 1056118 - RNA, 19 nt, Artificial Sequence
  Description of Artificial Sequence: Synthetic oligonucleotide
  Sense strand starting at position 2414 of SEQ ID NO: 915130
caauaugagugggaagaug

SEQ ID NO: 1056119 - RNA, 19 nt, Artificial Sequence
  Description of Artificial Sequence: Synthetic oligonucleotide
  Antisense strand to SEQ ID NO: 1056118
caucuucccacucauauug

SEQ ID NO: 1056120 - RNA, 19 nt, Artificial Sequence
  Description of Artificial Sequence: Synthetic oligonucleotide
  Sense strand starting at position 2460 of SEQ ID NO: 915130
ggaguaucccacuaguaca

SEQ ID NO: 1056121 - RNA, 19 nt, Artificial Sequence
  Description of Artificial Sequence: Synthetic oligonucleotide
  Antisense strand to SEQ ID NO: 1056120
uguacuagugggauacucc

SEQ ID NO: 1056122 - RNA, 19 nt, Artificial Sequence
  Description of Artificial Sequence: Synthetic oligonucleotide
  Sense strand starting at position 2473 of SEQ ID NO: 915130
aguacaagucuuuguaugu

SEQ ID NO: 1056123 - RNA, 19 nt, Artificial Sequence
  Description of Artificial Sequence: Synthetic oligonucleotide
  Antisense strand to SEQ ID NO: 1056122
acauacaaagacuuguacu

SEQ ID NO: 1056124 - RNA, 19 nt, Artificial Sequence
  Description of Artificial Sequence: Synthetic oligonucleotide
  Sense strand starting at position 2483 of SEQ ID NO: 915130
uuuguaugucuuggaugaa

SEQ ID NO: 1056125 - RNA, 19 nt, Artificial Sequence
  Description of Artificial Sequence: Synthetic oligonucleotide
  Antisense strand to SEQ ID NO: 1056124
uucauccaagacauacaaa

SEQ ID NO: 1056126 - RNA, 19 nt, Artificial Sequence
  Description of Artificial Sequence: Synthetic oligonucleotide
  Sense strand starting at position 2486 of SEQ ID NO: 915130
guaugucuuggaugaagug

SEQ ID NO: 1056127 - RNA, 19 nt, Artificial Sequence
  Description of Artificial Sequence: Synthetic oligonucleotide
  Antisense strand to SEQ ID NO: 1056126
cacuucauccaagacauac

SEQ ID NO: 1056128 - RNA, 19 nt, Artificial Sequence
  Description of Artificial Sequence: Synthetic oligonucleotide
  Sense strand starting at position 2555 of SEQ ID NO: 915130
gcagaauauuuagaguacu

SEQ ID NO: 1056129 - RNA, 19 nt, Artificial Sequence
  Description of Artificial Sequence: Synthetic oligonucleotide
  Antisense strand to SEQ ID NO: 1056128
aguacucuaaauauucugc

SEQ ID NO: 1056130 - RNA, 19 nt, Artificial Sequence
  Description of Artificial Sequence: Synthetic oligonucleotide
  Sense strand starting at position 3026 of SEQ ID NO: 915130
acaugauuccagugaacac

SEQ ID NO: 1056131 - RNA, 19 nt, Artificial Sequence
  Description of Artificial Sequence: Synthetic oligonucleotide
  Antisense strand to SEQ ID NO: 1056130
guguucacuggaaucaugu

SEQ ID NO: 1056132 - RNA, 19 nt, Artificial Sequence
  Description of Artificial Sequence: Synthetic oligonucleotide
  Sense strand starting at position 3586 of SEQ ID NO: 915130
cagugacaucuuugaguuc

SEQ ID NO: 1056133 - RNA, 19 nt, Artificial Sequence
  Description of Artificial Sequence: Synthetic oligonucleotide
  Antisense strand to SEQ ID NO: 1056132
gaacucaaagaugucacug

SEQ ID NO: 1056134 - RNA, 19 nt, Artificial Sequence
  Description of Artificial Sequence: Synthetic oligonucleotide
  Sense strand starting at position 3628 of SEQ ID NO: 915130
ugaaucauugaagguacau

SEQ ID NO: 1056135 - RNA, 19 nt, Artificial Sequence
  Description of Artificial Sequence: Synthetic oligonucleotide
  Antisense strand to SEQ ID NO: 1056134
auguaccuucaaugauuca

SEQ ID NO: 1056136 - RNA, 19 nt, Artificial Sequence
  Description of Artificial Sequence: Synthetic oligonucleotide
  Sense strand starting at position 58 of SEQ ID NO: 915131
uguuguagacuuuaaauca

SEQ ID NO: 1056137 - RNA, 19 nt, Artificial Sequence
  Description of Artificial Sequence: Synthetic oligonucleotide
  Antisense strand to SEQ ID NO: 1056136
ugauuuaaagucuacaaca

SEQ ID NO: 1056138 - RNA, 19 nt, Artificial Sequence
  Description of Artificial Sequence: Synthetic oligonucleotide
  Sense strand starting at position 217 of SEQ ID NO: 915131
aucugugauugguugauau

SEQ ID NO: 1056139 - RNA, 19 nt, Artificial Sequence
  Description of Artificial Sequence: Synthetic oligonucleotide
  Antisense strand to SEQ ID NO: 1056138
auaucaaccaaucacagau

SEQ ID NO: 1056140 - RNA, 19 nt, Artificial Sequence
  Description of Artificial Sequence: Synthetic oligonucleotide
  Sense strand starting at position 219 of SEQ ID NO: 915131
cugugauugguugauauug

SEQ ID NO: 1056141 - RNA, 19 nt, Artificial Sequence
  Description of Artificial Sequence: Synthetic oligonucleotide
  Antisense strand to SEQ ID NO: 1056140
caauaucaaccaaucacag

SEQ ID NO: 1056142 - RNA, 19 nt, Artificial Sequence
  Description of Artificial Sequence: Synthetic oligonucleotide
  Sense strand starting at position 230 of SEQ ID NO: 915131
ugauauugaacccguggau

SEQ ID NO: 1056143 - RNA, 19 nt, Artificial Sequence
  Description of Artificial Sequence: Synthetic oligonucleotide
  Antisense strand to SEQ ID NO: 1056142
auccacggguucaauauca

SEQ ID NO: 1056144 - RNA, 19 nt, Artificial Sequence
  Description of Artificial Sequence: Synthetic oligonucleotide
  Sense strand starting at position 392 of SEQ ID NO: 915131
ugguguauccuacacaaau

SEQ ID NO: 1056145 - RNA, 19 nt, Artificial Sequence
  Description of Artificial Sequence: Synthetic oligonucleotide
  Antisense strand to SEQ ID NO: 1056144
auuuguguaggauacacca

SEQ ID NO: 1056146 - RNA, 19 nt, Artificial Sequence
  Description of Artificial Sequence: Synthetic oligonucleotide
  Sense strand starting at position 569 of SEQ ID NO: 915131
auuuguuucuaagacaaug

SEQ ID NO: 1056147 - RNA, 19 nt, Artificial Sequence
  Description of Artificial Sequence: Synthetic oligonucleotide
  Antisense strand to SEQ ID NO: 1056146
cauugucuuagaaacaaau

SEQ ID NO: 1056148 - RNA, 19 nt, Artificial Sequence
  Description of Artificial Sequence: Synthetic oligonucleotide
  Sense strand starting at position 602 of SEQ ID NO: 915131
gguauaaagcaguaaagua

SEQ ID NO: 1056149 - RNA, 19 nt, Artificial Sequence
  Description of Artificial Sequence: Synthetic oligonucleotide
  Antisense strand to SEQ ID NO: 1056148
uacuuuacugcuuuauacc

SEQ ID NO: 1056150 - RNA, 19 nt, Artificial Sequence
  Description of Artificial Sequence: Synthetic oligonucleotide
  Sense strand starting at position 778 of SEQ ID NO: 915131
uuggcaacagggugaaauu

SEQ ID NO: 1056151 - RNA, 19 nt, Artificial Sequence
  Description of Artificial Sequence: Synthetic oligonucleotide
  Antisense strand to SEQ ID NO: 1056150
aauuucacccuguugccaa

SEQ ID NO: 1056152 - RNA, 19 nt, Artificial Sequence
  Description of Artificial Sequence: Synthetic oligonucleotide
  Sense strand starting at position 1040 of SEQ ID NO: 915131
uugggaaauacaugauguu

SEQ ID NO: 1056153 - RNA, 19 nt, Artificial Sequence
  Description of Artificial Sequence: Synthetic oligonucleotide
  Antisense strand to SEQ ID NO: 1056152
aacaucauguauuucccaa

SEQ ID NO: 1056154 - RNA, 19 nt, Artificial Sequence
  Description of Artificial Sequence: Synthetic oligonucleotide
  Sense strand starting at position 1067 of SEQ ID NO: 915131
ugcaguuauuucccagcca

SEQ ID NO: 1056155 - RNA, 19 nt, Artificial Sequence
  Description of Artificial Sequence: Synthetic oligonucleotide
  Antisense strand to SEQ ID NO: 1056154
uggcugggaaauaacugca

SEQ ID NO: 1056156 - RNA, 19 nt, Artificial Sequence
  Description of Artificial Sequence: Synthetic oligonucleotide
  Sense strand starting at position 2002 of SEQ ID NO: 915131
uucucagguguugauauga

SEQ ID NO: 1056157 - RNA, 19 nt, Artificial Sequence
  Description of Artificial Sequence: Synthetic oligonucleotide
  Antisense strand to SEQ ID NO: 1056156
ucauaucaacaccugagaa

SEQ ID NO: 1056158 - RNA, 19 nt, Artificial Sequence
  Description of Artificial Sequence: Synthetic oligonucleotide
  Sense strand starting at position 2018 of SEQ ID NO: 915131
ugaguuccagcugagaguu

SEQ ID NO: 1056159 - RNA, 19 nt, Artificial Sequence
  Description of Artificial Sequence: Synthetic oligonucleotide
  Antisense strand to SEQ ID NO: 1056158
aacucucagcuggaacuca

SEQ ID NO: 1056160 - RNA, 19 nt, Artificial Sequence
  Description of Artificial Sequence: Synthetic oligonucleotide
  Sense strand starting at position 2024 of SEQ ID NO: 915131
ccagcugagaguugagaau

SEQ ID NO: 1056161 - RNA, 19 nt, Artificial Sequence
  Description of Artificial Sequence: Synthetic oligonucleotide
  Antisense strand to SEQ ID NO: 1056160
auucucaacucucagcugg

SEQ ID NO: 1056162 - RNA, 19 nt, Artificial Sequence
  Description of Artificial Sequence: Synthetic oligonucleotide
  Sense strand starting at position 2073 of SEQ ID NO: 915131
gugacuaauuuggcuucuu

SEQ ID NO: 1056163 - RNA, 19 nt, Artificial Sequence
  Description of Artificial Sequence: Synthetic oligonucleotide
  Antisense strand to SEQ ID NO: 1056162
aagaagccaaauuagucac

SEQ ID NO: 1056164 - RNA, 19 nt, Artificial Sequence
  Description of Artificial Sequence: Synthetic oligonucleotide
  Sense strand starting at position 2132 of SEQ ID NO: 915131
ccauguauucuccaucuag

SEQ ID NO: 1056165 - RNA, 19 nt, Artificial Sequence
  Description of Artificial Sequence: Synthetic oligonucleotide
  Antisense strand to SEQ ID NO: 1056164
cuagauggagaauacaugg

SEQ ID NO: 1056166 - RNA, 19 nt, Artificial Sequence
  Description of Artificial Sequence: Synthetic oligonucleotide
  Sense strand starting at position 2157 of SEQ ID NO: 915131
gacuucuaagaaugugcua

SEQ ID NO: 1056167 - RNA, 19 nt, Artificial Sequence
  Description of Artificial Sequence: Synthetic oligonucleotide
  Antisense strand to SEQ ID NO: 1056166
uagcacauucuuagaaguc

SEQ ID NO: 1056168 - RNA, 19 nt, Artificial Sequence
  Description of Artificial Sequence: Synthetic oligonucleotide
  Sense strand starting at position 2160 of SEQ ID NO: 915131
uucuaagaaugugcuaaau

SEQ ID NO: 1056169 - RNA, 19 nt, Artificial Sequence
  Description of Artificial Sequence: Synthetic oligonucleotide
  Antisense strand to SEQ ID NO: 1056168
auuuagcacauucuuagaa

SEQ ID NO: 1056170 - RNA, 19 nt, Artificial Sequence
  Description of Artificial Sequence: Synthetic oligonucleotide
  Sense strand starting at position 2363 of SEQ ID NO: 915131
gcauuagaauaauucuaug

SEQ ID NO: 1056171 - RNA, 19 nt, Artificial Sequence
  Description of Artificial Sequence: Synthetic oligonucleotide
  Antisense strand to SEQ ID NO: 1056170
cauagaauuauucuaaugc

SEQ ID NO: 1056172 - RNA, 19 nt, Artificial Sequence
  Description of Artificial Sequence: Synthetic oligonucleotide
  Sense strand starting at position 2402 of SEQ ID NO: 915131
acaggaacguacucucaua

SEQ ID NO: 1056173 - RNA, 19 nt, Artificial Sequence
  Description of Artificial Sequence: Synthetic oligonucleotide
  Antisense strand to SEQ ID NO: 1056172
uaugagaguacguuccugu

SEQ ID NO: 1056174 - RNA, 19 nt, Artificial Sequence
  Description of Artificial Sequence: Synthetic oligonucleotide
  Sense strand starting at position 2496 of SEQ ID NO: 915131
cggaaucaguacccucaaa

SEQ ID NO: 1056175 - RNA, 19 nt, Artificial Sequence
  Description of Artificial Sequence: Synthetic oligonucleotide
  Antisense strand to SEQ ID NO: 1056174
uuugaggguacugauuccg

SEQ ID NO: 1056176 - RNA, 19 nt, Artificial Sequence
  Description of Artificial Sequence: Synthetic oligonucleotide
  Sense strand starting at position 2619 of SEQ ID NO: 915131
gaugaaguagguuauucuu

SEQ ID NO: 1056177 - RNA, 19 nt, Artificial Sequence
  Description of Artificial Sequence: Synthetic oligonucleotide
  Antisense strand to SEQ ID NO: 1056176
aagaauaaccuacuucauc

SEQ ID NO: 1056178 - RNA, 19 nt, Artificial Sequence
  Description of Artificial Sequence: Synthetic oligonucleotide
  Sense strand starting at position 2808 of SEQ ID NO: 915131
ugacuugaaccuugaauua

SEQ ID NO: 1056179 - RNA, 19 nt, Artificial Sequence
  Description of Artificial Sequence: Synthetic oligonucleotide
  Antisense strand to SEQ ID NO: 1056178
uaauucaagguucaaguca

SEQ ID NO: 1056180 - RNA, 19 nt, Artificial Sequence
  Description of Artificial Sequence: Synthetic oligonucleotide
  Sense strand starting at position 2819 of SEQ ID NO: 915131
uugaauuagccugagucau

SEQ ID NO: 1056181 - RNA, 19 nt, Artificial Sequence
  Description of Artificial Sequence: Synthetic oligonucleotide
  Antisense strand to SEQ ID NO: 1056180
augacucaggcuaauucaa

SEQ ID NO: 1056182 - RNA, 19 nt, Artificial Sequence
  Description of Artificial Sequence: Synthetic oligonucleotide
  Sense strand starting at position 2990 of SEQ ID NO: 915131
ugagguagguaccuauacu

SEQ ID NO: 1056183 - RNA, 19 nt, Artificial Sequence
  Description of Artificial Sequence: Synthetic oligonucleotide
  Antisense strand to SEQ ID NO: 1056182
aguauagguaccuaccuca

SEQ ID NO: 1056184 - RNA, 19 nt, Artificial Sequence
  Description of Artificial Sequence: Synthetic oligonucleotide
  Sense strand starting at position 3027 of SEQ ID NO: 915131
gaccaaagcccuuaggagu

SEQ ID NO: 1056185 - RNA, 19 nt, Artificial Sequence
  Description of Artificial Sequence: Synthetic oligonucleotide
  Antisense strand to SEQ ID NO: 1056184
acuccuaagggcuuugguc

SEQ ID NO: 1056186 - RNA, 19 nt, Artificial Sequence
  Description of Artificial Sequence: Synthetic oligonucleotide
  Sense strand starting at position 3050 of SEQ ID NO: 915131
uaucuugcacgagauuaua

SEQ ID NO: 1056187 - RNA, 19 nt, Artificial Sequence
  Description of Artificial Sequence: Synthetic oligonucleotide
  Antisense strand to SEQ ID NO: 1056186
uauaaucucgugcaagaua

SEQ ID NO: 1056188 - RNA, 19 nt, Artificial Sequence
  Description of Artificial Sequence: Synthetic oligonucleotide
  Sense strand starting at position 3053 of SEQ ID NO: 915131
cuugcacgagauuauauaa

SEQ ID NO: 1056189 - RNA, 19 nt, Artificial Sequence
  Description of Artificial Sequence: Synthetic oligonucleotide
  Antisense strand to SEQ ID NO: 1056188
uuauauaaucucgugcaag

SEQ ID NO: 1056190 - RNA, 19 nt, Artificial Sequence
  Description of Artificial Sequence: Synthetic oligonucleotide
  Sense strand starting at position 3202 of SEQ ID NO: 915131
aguaaagaaugccucauau

SEQ ID NO: 1056191 - RNA, 19 nt, Artificial Sequence
  Description of Artificial Sequence: Synthetic oligonucleotide
  Antisense strand to SEQ ID NO: 1056190
auaugaggcauucuuuacu

SEQ ID NO: 1056192 - RNA, 19 nt, Artificial Sequence
  Description of Artificial Sequence: Synthetic oligonucleotide
  Sense strand starting at position 3214 of SEQ ID NO: 915131
cucauauuacuagggacua

SEQ ID NO: 1056193 - RNA, 19 nt, Artificial Sequence
  Description of Artificial Sequence: Synthetic oligonucleotide
  Antisense strand to SEQ ID NO: 1056192
uagucccuaguaauaugag

SEQ ID NO: 1056194 - RNA, 19 nt, Artificial Sequence
  Description of Artificial Sequence: Synthetic oligonucleotide
  Sense strand starting at position 3286 of SEQ ID NO: 915131
cauugauauuuggauuaug

SEQ ID NO: 1056195 - RNA, 19 nt, Artificial Sequence
  Description of Artificial Sequence: Synthetic oligonucleotide
  Antisense strand to SEQ ID NO: 1056194
cauaauccaaauaucaaug

SEQ ID NO: 1056196 - RNA, 19 nt, Artificial Sequence
  Description of Artificial Sequence: Synthetic oligonucleotide
  Sense strand starting at position 3398 of SEQ ID NO: 915131
guggaagugccauauauua

SEQ ID NO: 1056197 - RNA, 19 nt, Artificial Sequence
  Description of Artificial Sequence: Synthetic oligonucleotide
  Antisense strand to SEQ ID NO: 1056196
uaauauauggcacuuccac

SEQ ID NO: 1056198 - RNA, 19 nt, Artificial Sequence
  Description of Artificial Sequence: Synthetic oligonucleotide
  Sense strand starting at position 3463 of SEQ ID NO: 915131
ugcaacaauccuugugaag

SEQ ID NO: 1056199 - RNA, 19 nt, Artificial Sequence
  Description of Artificial Sequence: Synthetic oligonucleotide
  Antisense strand to SEQ ID NO: 1056198
cuucacaaggauuguugca

SEQ ID NO: 1056200 - RNA, 19 nt, Artificial Sequence
  Description of Artificial Sequence: Synthetic oligonucleotide
  Sense strand starting at position 3606 of SEQ ID NO: 915131
guauaaggaugguuuccua

SEQ ID NO: 1056201 - RNA, 19 nt, Artificial Sequence
  Description of Artificial Sequence: Synthetic oligonucleotide
  Antisense strand to SEQ ID NO: 1056200
uaggaaaccauccuuauac

SEQ ID NO: 1056202 - RNA, 19 nt, Artificial Sequence
  Description of Artificial Sequence: Synthetic oligonucleotide
  Sense strand starting at position 3609 of SEQ ID NO: 915131
uaaggaugguuuccuagau

SEQ ID NO: 1056203 - RNA, 19 nt, Artificial Sequence
  Description of Artificial Sequence: Synthetic oligonucleotide
  Antisense strand to SEQ ID NO: 1056202
aucuaggaaaccauccuua

SEQ ID NO: 1056204 - RNA, 19 nt, Artificial Sequence
  Description of Artificial Sequence: Synthetic oligonucleotide
  Sense strand starting at position 3610 of SEQ ID NO: 915131
aaggaugguuuccuagaug

SEQ ID NO: 1056205 - RNA, 19 nt, Artificial Sequence
  Description of Artificial Sequence: Synthetic oligonucleotide
  Antisense strand to SEQ ID NO: 1056204
caucuaggaaaccauccuu

SEQ ID NO: 1056206 - RNA, 19 nt, Artificial Sequence
  Description of Artificial Sequence: Synthetic oligonucleotide
  Sense strand starting at position 3670 of SEQ ID NO: 915131
cucaguuguuauuugcauu

SEQ ID NO: 1056207 - RNA, 19 nt, Artificial Sequence
  Description of Artificial Sequence: Synthetic oligonucleotide
  Antisense strand to SEQ ID NO: 1056206
aaugcaaauaacaacugag

SEQ ID NO: 1056208 - RNA, 19 nt, Artificial Sequence
  Description of Artificial Sequence: Synthetic oligonucleotide
  Sense strand starting at position 3696 of SEQ ID NO: 915131
uaugucucuggguaggauu

SEQ ID NO: 1056209 - RNA, 19 nt, Artificial Sequence
  Description of Artificial Sequence: Synthetic oligonucleotide
  Antisense strand to SEQ ID NO: 1056208
aauccuacccagagacaua

SEQ ID NO: 1056210 - RNA, 19 nt, Artificial Sequence
  Description of Artificial Sequence: Synthetic oligonucleotide
  Sense strand starting at position 3816 of SEQ ID NO: 915131
uguguugauacggaacaga

SEQ ID NO: 1056211 - RNA, 19 nt, Artificial Sequence
  Description of Artificial Sequence: Synthetic oligonucleotide
  Antisense strand to SEQ ID NO: 1056210
ucuguuccguaucaacaca

SEQ ID NO: 1056212 - RNA, 19 nt, Artificial Sequence
  Description of Artificial Sequence: Synthetic oligonucleotide
  Sense strand starting at position 3955 of SEQ ID NO: 915131
ccagacucauacccuguua

SEQ ID NO: 1056213 - RNA, 19 nt, Artificial Sequence
  Description of Artificial Sequence: Synthetic oligonucleotide
  Antisense strand to SEQ ID NO: 1056212
uaacaggguaugagucugg

SEQ ID NO: 1056214 - RNA, 19 nt, Artificial Sequence
  Description of Artificial Sequence: Synthetic oligonucleotide
  Sense strand starting at position 3957 of SEQ ID NO: 915131
agacucauacccuguuauu

SEQ ID NO: 1056215 - RNA, 19 nt, Artificial Sequence
  Description of Artificial Sequence: Synthetic oligonucleotide
  Antisense strand to SEQ ID NO: 1056214
aauaacaggguaugagucu

SEQ ID NO: 1056216 - RNA, 19 nt, Artificial Sequence
  Description of Artificial Sequence: Synthetic oligonucleotide
  Sense strand starting at position 65 of SEQ ID NO: 915132
auaugcauagcuuaaagua

SEQ ID NO: 1056217 - RNA, 19 nt, Artificial Sequence
  Description of Artificial Sequence: Synthetic oligonucleotide
  Antisense strand to SEQ ID NO: 1056216
uacuuuaagcuaugcauau

SEQ ID NO: 1056218 - RNA, 19 nt, Artificial Sequence
  Description of Artificial Sequence: Synthetic oligonucleotide
  Sense strand starting at position 250 of SEQ ID NO: 915132
gucacugcccaguaagaga

SEQ ID NO: 1056219 - RNA, 19 nt, Artificial Sequence
  Description of Artificial Sequence: Synthetic oligonucleotide
  Antisense strand to SEQ ID NO: 1056218
ucucuuacugggcagugac

SEQ ID NO: 1056220 - RNA, 19 nt, Artificial Sequence
  Description of Artificial Sequence: Synthetic oligonucleotide
  Sense strand starting at position 413 of SEQ ID NO: 915132
gaucauguaggauacguuu

SEQ ID NO: 1056221 - RNA, 19 nt, Artificial Sequence
  Description of Artificial Sequence: Synthetic oligonucleotide
  Antisense strand to SEQ ID NO: 1056220
aaacguauccuacaugauc

SEQ ID NO: 1056222 - RNA, 19 nt, Artificial Sequence
  Description of Artificial Sequence: Synthetic oligonucleotide
  Sense strand starting at position 419 of SEQ ID NO: 915132
guaggauacguuuaccuua

SEQ ID NO: 1056223 - RNA, 19 nt, Artificial Sequence
  Description of Artificial Sequence: Synthetic oligonucleotide
  Antisense strand to SEQ ID NO: 1056222
uaagguaaacguauccuac

SEQ ID NO: 1056224 - RNA, 19 nt, Artificial Sequence
  Description of Artificial Sequence: Synthetic oligonucleotide
  Sense strand starting at position 422 of SEQ ID NO: 915132
ggauacguuuaccuuauga

SEQ ID NO: 1056225 - RNA, 19 nt, Artificial Sequence
  Description of Artificial Sequence: Synthetic oligonucleotide
  Antisense strand to SEQ ID NO: 1056224
ucauaagguaaacguaucc

SEQ ID NO: 1056226 - RNA, 19 nt, Artificial Sequence
  Description of Artificial Sequence: Synthetic oligonucleotide
  Sense strand starting at position 424 of SEQ ID NO: 915132
auacguuuaccuuaugaaa

SEQ ID NO: 1056227 - RNA, 19 nt, Artificial Sequence
  Description of Artificial Sequence: Synthetic oligonucleotide
  Antisense strand to SEQ ID NO: 1056226
uuucauaagguaaacguau

SEQ ID NO: 1056228 - RNA, 19 nt, Artificial Sequence
  Description of Artificial Sequence: Synthetic oligonucleotide
  Sense strand starting at position 698 of SEQ ID NO: 915132
augcauuugcuagguauau

SEQ ID NO: 1056229 - RNA, 19 nt, Artificial Sequence
  Description of Artificial Sequence: Synthetic oligonucleotide
  Antisense strand to SEQ ID NO: 1056228
auauaccuagcaaaugcau

SEQ ID NO: 1056230 - RNA, 19 nt, Artificial Sequence
  Description of Artificial Sequence: Synthetic oligonucleotide
  Sense strand starting at position 699 of SEQ ID NO: 915132
ugcauuugcuagguauaua

SEQ ID NO: 1056231 - RNA, 19 nt, Artificial Sequence
  Description of Artificial Sequence: Synthetic oligonucleotide
  Antisense strand to SEQ ID NO: 1056230
uauauaccuagcaaaugca

SEQ ID NO: 1056232 - RNA, 19 nt, Artificial Sequence
  Description of Artificial Sequence: Synthetic oligonucleotide
  Sense strand starting at position 879 of SEQ ID NO: 915132
ucaauuagaaggugugaau

SEQ ID NO: 1056233 - RNA, 19 nt, Artificial Sequence
  Description of Artificial Sequence: Synthetic oligonucleotide
  Antisense strand to SEQ ID NO: 1056232
auucacaccuucuaauuga

SEQ ID NO: 1056234 - RNA, 19 nt, Artificial Sequence
  Description of Artificial Sequence: Synthetic oligonucleotide
  Sense strand starting at position 892 of SEQ ID NO: 915132
gugaaucucucccugacca

SEQ ID NO: 1056235 - RNA, 19 nt, Artificial Sequence
  Description of Artificial Sequence: Synthetic oligonucleotide
  Antisense strand to SEQ ID NO: 1056234
uggucagggagagauucac

SEQ ID NO: 1056236 - RNA, 19 nt, Artificial Sequence
  Description of Artificial Sequence: Synthetic oligonucleotide
  Sense strand starting at position 905 of SEQ ID NO: 915132
ugaccagaagcuuaucagu

SEQ ID NO: 1056237 - RNA, 19 nt, Artificial Sequence
  Description of Artificial Sequence: Synthetic oligonucleotide
  Antisense strand to SEQ ID NO: 1056236
acugauaagcuucugguca

SEQ ID NO: 1056238 - RNA, 19 nt, Artificial Sequence
  Description of Artificial Sequence: Synthetic oligonucleotide
  Sense strand starting at position 907 of SEQ ID NO: 915132
accagaagcuuaucaguua

SEQ ID NO: 1056239 - RNA, 19 nt, Artificial Sequence
  Description of Artificial Sequence: Synthetic oligonucleotide
  Antisense strand to SEQ ID NO: 1056238
uaacugauaagcuucuggu

SEQ ID NO: 1056240 - RNA, 19 nt, Artificial Sequence
  Description of Artificial Sequence: Synthetic oligonucleotide
  Sense strand starting at position 910 of SEQ ID NO: 915132
agaagcuuaucaguuacuu

SEQ ID NO: 1056241 - RNA, 19 nt, Artificial Sequence
  Description of Artificial Sequence: Synthetic oligonucleotide
  Antisense strand to SEQ ID NO: 1056240
aaguaacugauaagcuucu

SEQ ID NO: 1056242 - RNA, 19 nt, Artificial Sequence
  Description of Artificial Sequence: Synthetic oligonucleotide
  Sense strand starting at position 1025 of SEQ ID NO: 915132
auaagauaucuuuggugau

SEQ ID NO: 1056243 - RNA, 19 nt, Artificial Sequence
  Description of Artificial Sequence: Synthetic oligonucleotide
  Antisense strand to SEQ ID NO: 1056242
aucaccaaagauaucuuau

SEQ ID NO: 1056244 - RNA, 19 nt, Artificial Sequence
  Description of Artificial Sequence: Synthetic oligonucleotide
  Sense strand starting at position 1027 of SEQ ID NO: 915132
aagauaucuuuggugauga

SEQ ID NO: 1056245 - RNA, 19 nt, Artificial Sequence
  Description of Artificial Sequence: Synthetic oligonucleotide
  Antisense strand to SEQ ID NO: 1056244
ucaucaccaaagauaucuu

SEQ ID NO: 1056246 - RNA, 19 nt, Artificial Sequence
  Description of Artificial Sequence: Synthetic oligonucleotide
  Sense strand starting at position 2043 of SEQ ID NO: 915132
ugugaaagcacugggauau

SEQ ID NO: 1056247 - RNA, 19 nt, Artificial Sequence
  Description of Artificial Sequence: Synthetic oligonucleotide
  Antisense strand to SEQ ID NO: 1056246
auaucccagugcuuucaca

SEQ ID NO: 1056248 - RNA, 19 nt, Artificial Sequence
  Description of Artificial Sequence: Synthetic oligonucleotide
  Sense strand starting at position 2044 of SEQ ID NO: 915132
gugaaagcacugggauauu

SEQ ID NO: 1056249 - RNA, 19 nt, Artificial Sequence
  Description of Artificial Sequence: Synthetic oligonucleotide
  Antisense strand to SEQ ID NO: 1056248
aauaucccagugcuuucac

SEQ ID NO: 1056250 - RNA, 19 nt, Artificial Sequence
  Description of Artificial Sequence: Synthetic oligonucleotide
  Sense strand starting at position 2347 of SEQ ID NO: 915132
uuuauucugcuuuaaggaa

SEQ ID NO: 1056251 - RNA, 19 nt, Artificial Sequence
  Description of Artificial Sequence: Synthetic oligonucleotide
  Antisense strand to SEQ ID NO: 1056250
uuccuuaaagcagaauaaa

SEQ ID NO: 1056252 - RNA, 19 nt, Artificial Sequence
  Description of Artificial Sequence: Synthetic oligonucleotide
  Sense strand starting at position 2392 of SEQ ID NO: 915132
uacugcuuuggaggucaaa

SEQ ID NO: 1056253 - RNA, 19 nt, Artificial Sequence
  Description of Artificial Sequence: Synthetic oligonucleotide
  Antisense strand to SEQ ID NO: 1056252
uuugaccuccaaagcagua

SEQ ID NO: 1056254 - RNA, 19 nt, Artificial Sequence
  Description of Artificial Sequence: Synthetic oligonucleotide
  Sense strand starting at position 2477 of SEQ ID NO: 915132
cugguuuauggucacuauu

SEQ ID NO: 1056255 - RNA, 19 nt, Artificial Sequence
  Description of Artificial Sequence: Synthetic oligonucleotide
  Antisense strand to SEQ ID NO: 1056254
aauagugaccauaaaccag

SEQ ID NO: 1056256 - RNA, 19 nt, Artificial Sequence
  Description of Artificial Sequence: Synthetic oligonucleotide
  Sense strand starting at position 2480 of SEQ ID NO: 915132
guuuauggucacuauuauu

SEQ ID NO: 1056257 - RNA, 19 nt, Artificial Sequence
  Description of Artificial Sequence: Synthetic oligonucleotide
  Antisense strand to SEQ ID NO: 1056256
aauaauagugaccauaaac

SEQ ID NO: 1056258 - RNA, 19 nt, Artificial Sequence
  Description of Artificial Sequence: Synthetic oligonucleotide
  Sense strand starting at position 2632 of SEQ ID NO: 915132
ugaagagagcucuggauug

SEQ ID NO: 1056259 - RNA, 19 nt, Artificial Sequence
  Description of Artificial Sequence: Synthetic oligonucleotide
  Antisense strand to SEQ ID NO: 1056258
caauccagagcucucuuca

SEQ ID NO: 1056260 - RNA, 19 nt, Artificial Sequence
  Description of Artificial Sequence: Synthetic oligonucleotide
  Sense strand starting at position 2758 of SEQ ID NO: 915132
gguaauaacaguuggaguc

SEQ ID NO: 1056261 - RNA, 19 nt, Artificial Sequence
  Description of Artificial Sequence: Synthetic oligonucleotide
  Antisense strand to SEQ ID NO: 1056260
gacuccaacuguuauuacc

SEQ ID NO: 1056262 - RNA, 19 nt, Artificial Sequence
  Description of Artificial Sequence: Synthetic oligonucleotide
  Sense strand starting at position 2759 of SEQ ID NO: 915132
guaauaacaguuggaguca

SEQ ID NO: 1056263 - RNA, 19 nt, Artificial Sequence
  Description of Artificial Sequence: Synthetic oligonucleotide
  Antisense strand to SEQ ID NO: 1056262
ugacuccaacuguuauuac

SEQ ID NO: 1056264 - RNA, 19 nt, Artificial Sequence
  Description of Artificial Sequence: Synthetic oligonucleotide
  Sense strand starting at position 2764 of SEQ ID NO: 915132
aacaguuggagucagcaga

SEQ ID NO: 1056265 - RNA, 19 nt, Artificial Sequence
  Description of Artificial Sequence: Synthetic oligonucleotide
  Antisense strand to SEQ ID NO: 1056264
ucugcugacuccaacuguu

SEQ ID NO: 1056266 - RNA, 19 nt, Artificial Sequence
  Description of Artificial Sequence: Synthetic oligonucleotide
  Sense strand starting at position 2771 of SEQ ID NO: 915132
ggagucagcagagaugagu

SEQ ID NO: 1056267 - RNA, 19 nt, Artificial Sequence
  Description of Artificial Sequence: Synthetic oligonucleotide
  Antisense strand to SEQ ID NO: 1056266
acucaucucugcugacucc

SEQ ID NO: 1056268 - RNA, 19 nt, Artificial Sequence
  Description of Artificial Sequence: Synthetic oligonucleotide
  Sense strand starting at position 3261 of SEQ ID NO: 915132
ugugaauuauucucuuaug

SEQ ID NO: 1056269 - RNA, 19 nt, Artificial Sequence
  Description of Artificial Sequence: Synthetic oligonucleotide
  Antisense strand to SEQ ID NO: 1056268
cauaagagaauaauucaca

SEQ ID NO: 1056270 - RNA, 19 nt, Artificial Sequence
  Description of Artificial Sequence: Synthetic oligonucleotide
  Sense strand starting at position 3338 of SEQ ID NO: 915132
ucagaaagguaggcucauu

SEQ ID NO: 1056271 - RNA, 19 nt, Artificial Sequence
  Description of Artificial Sequence: Synthetic oligonucleotide
  Antisense strand to SEQ ID NO: 1056270
aaugagccuaccuuucuga

SEQ ID NO: 1056272 - RNA, 19 nt, Artificial Sequence
  Description of Artificial Sequence: Synthetic oligonucleotide
  Sense strand starting at position 3390 of SEQ ID NO: 915132
cugaacuuaggaugugauu

SEQ ID NO: 1056273 - RNA, 19 nt, Artificial Sequence
  Description of Artificial Sequence: Synthetic oligonucleotide
  Antisense strand to SEQ ID NO: 1056272
aaucacauccuaaguucag

SEQ ID NO: 1056274 - RNA, 19 nt, Artificial Sequence
  Description of Artificial Sequence: Synthetic oligonucleotide
  Sense strand starting at position 3450 of SEQ ID NO: 915132
auaugaucauuguuuaagc

SEQ ID NO: 1056275 - RNA, 19 nt, Artificial Sequence
  Description of Artificial Sequence: Synthetic oligonucleotide
  Antisense strand to SEQ ID NO: 1056274
gcuuaaacaaugaucauau

SEQ ID NO: 1056276 - RNA, 19 nt, Artificial Sequence
  Description of Artificial Sequence: Synthetic oligonucleotide
  Sense strand starting at position 3452 of SEQ ID NO: 915132
augaucauuguuuaagcau

SEQ ID NO: 1056277 - RNA, 19 nt, Artificial Sequence
  Description of Artificial Sequence: Synthetic oligonucleotide
  Antisense strand to SEQ ID NO: 1056276
augcuuaaacaaugaucau

SEQ ID NO: 1056278 - RNA, 19 nt, Artificial Sequence
  Description of Artificial Sequence: Synthetic oligonucleotide
  Sense strand starting at position 3481 of SEQ ID NO: 915132
aguuguuucuucccauuua

SEQ ID NO: 1056279 - RNA, 19 nt, Artificial Sequence
  Description of Artificial Sequence: Synthetic oligonucleotide
  Antisense strand to SEQ ID NO: 1056278
uaaaugggaagaaacaacu

SEQ ID NO: 1056280 - RNA, 19 nt, Artificial Sequence
  Description of Artificial Sequence: Synthetic oligonucleotide
  Sense strand starting at position 3496 of SEQ ID NO: 915132
uuuacuuuaggguaaaggu

SEQ ID NO: 1056281 - RNA, 19 nt, Artificial Sequence
  Description of Artificial Sequence: Synthetic oligonucleotide
  Antisense strand to SEQ ID NO: 1056280
accuuuacccuaaaguaaa

SEQ ID NO: 1056282 - RNA, 19 nt, Artificial Sequence
  Description of Artificial Sequence: Synthetic oligonucleotide
  Sense strand starting at position 3625 of SEQ ID NO: 915132
aagacugugcugcagaaau

SEQ ID NO: 1056283 - RNA, 19 nt, Artificial Sequence
  Description of Artificial Sequence: Synthetic oligonucleotide
  Antisense strand to SEQ ID NO: 1056282
auuucugcagcacagucuu

SEQ ID NO: 1056284 - RNA, 19 nt, Artificial Sequence
  Description of Artificial Sequence: Synthetic oligonucleotide
  Sense strand starting at position 3627 of SEQ ID NO: 915132
gacugugcugcagaaauug

SEQ ID NO: 1056285 - RNA, 19 nt, Artificial Sequence
  Description of Artificial Sequence: Synthetic oligonucleotide
  Antisense strand to SEQ ID NO: 1056284
caauuucugcagcacaguc

SEQ ID NO: 1056286 - RNA, 19 nt, Artificial Sequence
  Description of Artificial Sequence: Synthetic oligonucleotide
  Sense strand starting at position 3674 of SEQ ID NO: 915132
aauguuggauuugauuaca

SEQ ID NO: 1056287 - RNA, 19 nt, Artificial Sequence
  Description of Artificial Sequence: Synthetic oligonucleotide
  Antisense strand to SEQ ID NO: 1056286
uguaaucaaauccaacauu

SEQ ID NO: 1056288 - RNA, 19 nt, Artificial Sequence
  Description of Artificial Sequence: Synthetic oligonucleotide
  Sense strand starting at position 3708 of SEQ ID NO: 915132
uuauuaggccagugagaag

SEQ ID NO: 1056289 - RNA, 19 nt, Artificial Sequence
  Description of Artificial Sequence: Synthetic oligonucleotide
  Antisense strand to SEQ ID NO: 1056288
cuucucacuggccuaauaa

SEQ ID NO: 1056290 - RNA, 19 nt, Artificial Sequence
  Description of Artificial Sequence: Synthetic oligonucleotide
  Sense strand starting at position 3771 of SEQ ID NO: 915132
uuguaaucccuauagugug

SEQ ID NO: 1056291 - RNA, 19 nt, Artificial Sequence
  Description of Artificial Sequence: Synthetic oligonucleotide
  Antisense strand to SEQ ID NO: 1056290
cacacuauagggauuacaa

SEQ ID NO: 1056292 - RNA, 19 nt, Artificial Sequence
  Description of Artificial Sequence: Synthetic oligonucleotide
  Sense strand starting at position 3836 of SEQ ID NO: 915132
guucuuacucuggagcaau

SEQ ID NO: 1056293 - RNA, 19 nt, Artificial Sequence
  Description of Artificial Sequence: Synthetic oligonucleotide
  Antisense strand to SEQ ID NO: 1056292
auugcuccagaguaagaac

SEQ ID NO: 1056294 - RNA, 19 nt, Artificial Sequence
  Description of Artificial Sequence: Synthetic oligonucleotide
  Sense strand starting at position 3882 of SEQ ID NO: 915132
guaagugcauaaucacaca

SEQ ID NO: 1056295 - RNA, 19 nt, Artificial Sequence
  Description of Artificial Sequence: Synthetic oligonucleotide
  Antisense strand to SEQ ID NO: 1056294
ugugugauuaugcacuuac

SEQ ID NO: 1056296 - RNA, 19 nt, Artificial Sequence
  Description of Artificial Sequence: Synthetic oligonucleotide
  Sense strand starting at position 8 of SEQ ID NO: 915133
acaggauuauaguuuggua

SEQ ID NO: 1056297 - RNA, 19 nt, Artificial Sequence
  Description of Artificial Sequence: Synthetic oligonucleotide
  Antisense strand to SEQ ID NO: 1056296
uaccaaacuauaauccugu

SEQ ID NO: 1056298 - RNA, 19 nt, Artificial Sequence
  Description of Artificial Sequence: Synthetic oligonucleotide
  Sense strand starting at position 10 of SEQ ID NO: 915133
aggauuauaguuugguaua

SEQ ID NO: 1056299 - RNA, 19 nt, Artificial Sequence
  Description of Artificial Sequence: Synthetic oligonucleotide
  Antisense strand to SEQ ID NO: 1056298
uauaccaaacuauaauccu

SEQ ID NO: 1056300 - RNA, 19 nt, Artificial Sequence
  Description of Artificial Sequence: Synthetic oligonucleotide
  Sense strand starting at position 12 of SEQ ID NO: 915133
gauuauaguuugguauaga

SEQ ID NO: 1056301 - RNA, 19 nt, Artificial Sequence
  Description of Artificial Sequence: Synthetic oligonucleotide
  Antisense strand to SEQ ID NO: 1056300
ucuauaccaaacuauaauc

SEQ ID NO: 1056302 - RNA, 19 nt, Artificial Sequence
  Description of Artificial Sequence: Synthetic oligonucleotide
  Sense strand starting at position 21 of SEQ ID NO: 915133
uugguauagacagguccaa

SEQ ID NO: 1056303 - RNA, 19 nt, Artificial Sequence
  Description of Artificial Sequence: Synthetic oligonucleotide
  Antisense strand to SEQ ID NO: 1056302
uuggaccugucuauaccaa

SEQ ID NO: 1056304 - RNA, 19 nt, Artificial Sequence
  Description of Artificial Sequence: Synthetic oligonucleotide
  Sense strand starting at position 70 of SEQ ID NO: 915133
agaacaauggguugagcau

SEQ ID NO: 1056305 - RNA, 19 nt, Artificial Sequence
  Description of Artificial Sequence: Synthetic oligonucleotide
  Antisense strand to SEQ ID NO: 1056304
augcucaacccauuguucu

SEQ ID NO: 1056306 - RNA, 19 nt, Artificial Sequence
  Description of Artificial Sequence: Synthetic oligonucleotide
  Sense strand starting at position 87 of SEQ ID NO: 915133
aucugaagaugucucugua

SEQ ID NO: 1056307 - RNA, 19 nt, Artificial Sequence
  Description of Artificial Sequence: Synthetic oligonucleotide
  Antisense strand to SEQ ID NO: 1056306
uacagagacaucuucagau

SEQ ID NO: 1056308 - RNA, 19 nt, Artificial Sequence
  Description of Artificial Sequence: Synthetic oligonucleotide
  Sense strand starting at position 90 of SEQ ID NO: 915133
ugaagaugucucuguaauu

SEQ ID NO: 1056309 - RNA, 19 nt, Artificial Sequence
  Description of Artificial Sequence: Synthetic oligonucleotide
  Antisense strand to SEQ ID NO: 1056308
aauuacagagacaucuuca

SEQ ID NO: 1056310 - RNA, 19 nt, Artificial Sequence
  Description of Artificial Sequence: Synthetic oligonucleotide
  Sense strand starting at position 91 of SEQ ID NO: 915133
gaagaugucucuguaauua

SEQ ID NO: 1056311 - RNA, 19 nt, Artificial Sequence
  Description of Artificial Sequence: Synthetic oligonucleotide
  Antisense strand to SEQ ID NO: 1056310
uaauuacagagacaucuuc

SEQ ID NO: 1056312 - RNA, 19 nt, Artificial Sequence
  Description of Artificial Sequence: Synthetic oligonucleotide
  Sense strand starting at position 95 of SEQ ID NO: 915133
augucucuguaauuaacuu

SEQ ID NO: 1056313 - RNA, 19 nt, Artificial Sequence
  Description of Artificial Sequence: Synthetic oligonucleotide
  Antisense strand to SEQ ID NO: 1056312
aaguuaauuacagagacau

SEQ ID NO: 1056314 - RNA, 19 nt, Artificial Sequence
  Description of Artificial Sequence: Synthetic oligonucleotide
  Sense strand starting at position 214 of SEQ ID NO: 915133
agcugucuugauugacaua

SEQ ID NO: 1056315 - RNA, 19 nt, Artificial Sequence
  Description of Artificial Sequence: Synthetic oligonucleotide
  Antisense strand to SEQ ID NO: 1056314
uaugucaaucaagacagcu

SEQ ID NO: 1056316 - RNA, 19 nt, Artificial Sequence
  Description of Artificial Sequence: Synthetic oligonucleotide
  Sense strand starting at position 235 of SEQ ID NO: 915133
guuacuuggucuuuggaaa

SEQ ID NO: 1056317 - RNA, 19 nt, Artificial Sequence
  Description of Artificial Sequence: Synthetic oligonucleotide
  Antisense strand to SEQ ID NO: 1056316
uuuccaaagaccaaguaac

SEQ ID NO: 1056318 - RNA, 19 nt, Artificial Sequence
  Description of Artificial Sequence: Synthetic oligonucleotide
  Sense strand starting at position 301 of SEQ ID NO: 915133
agaagcuuagguuaucagu

SEQ ID NO: 1056319 - RNA, 19 nt, Artificial Sequence
  Description of Artificial Sequence: Synthetic oligonucleotide
  Antisense strand to SEQ ID NO: 1056318
acugauaaccuaagcuucu

SEQ ID NO: 1056320 - RNA, 19 nt, Artificial Sequence
  Description of Artificial Sequence: Synthetic oligonucleotide
  Sense strand starting at position 310 of SEQ ID NO: 915133
gguuaucaguuaucuacua

SEQ ID NO: 1056321 - RNA, 19 nt, Artificial Sequence
  Description of Artificial Sequence: Synthetic oligonucleotide
  Antisense strand to SEQ ID NO: 1056320
uaguagauaacugauaacc

SEQ ID NO: 1056322 - RNA, 19 nt, Artificial Sequence
  Description of Artificial Sequence: Synthetic oligonucleotide
  Sense strand starting at position 311 of SEQ ID NO: 915133
guuaucaguuaucuacuaa

SEQ ID NO: 1056323 - RNA, 19 nt, Artificial Sequence
  Description of Artificial Sequence: Synthetic oligonucleotide
  Antisense strand to SEQ ID NO: 1056322
uuaguagauaacugauaac

SEQ ID NO: 1056324 - RNA, 19 nt, Artificial Sequence
  Description of Artificial Sequence: Synthetic oligonucleotide
  Sense strand starting at position 363 of SEQ ID NO: 915133
auaguugguuuacugacaa

SEQ ID NO: 1056325 - RNA, 19 nt, Artificial Sequence
  Description of Artificial Sequence: Synthetic oligonucleotide
  Antisense strand to SEQ ID NO: 1056324
uugucaguaaaccaacuau

SEQ ID NO: 1056326 - RNA, 19 nt, Artificial Sequence
  Description of Artificial Sequence: Synthetic oligonucleotide
  Sense strand starting at position 370 of SEQ ID NO: 915133
guuuacugacaauguaucu

SEQ ID NO: 1056327 - RNA, 19 nt, Artificial Sequence
  Description of Artificial Sequence: Synthetic oligonucleotide
  Antisense strand to SEQ ID NO: 1056326
agauacauugucaguaaac

SEQ ID NO: 1056328 - RNA, 19 nt, Artificial Sequence
  Description of Artificial Sequence: Synthetic oligonucleotide
  Sense strand starting at position 375 of SEQ ID NO: 915133
cugacaauguaucugagua

SEQ ID NO: 1056329 - RNA, 19 nt, Artificial Sequence
  Description of Artificial Sequence: Synthetic oligonucleotide
  Antisense strand to SEQ ID NO: 1056328
uacucagauacauugucag

SEQ ID NO: 1056330 - RNA, 19 nt, Artificial Sequence
  Description of Artificial Sequence: Synthetic oligonucleotide
  Sense strand starting at position 379 of SEQ ID NO: 915133
caauguaucugaguaugua

SEQ ID NO: 1056331 - RNA, 19 nt, Artificial Sequence
  Description of Artificial Sequence: Synthetic oligonucleotide
  Antisense strand to SEQ ID NO: 1056330
uacauacucagauacauug

SEQ ID NO: 1056332 - RNA, 19 nt, Artificial Sequence
  Description of Artificial Sequence: Synthetic oligonucleotide
  Sense strand starting at position 380 of SEQ ID NO: 915133
aauguaucugaguauguaa

SEQ ID NO: 1056333 - RNA, 19 nt, Artificial Sequence
  Description of Artificial Sequence: Synthetic oligonucleotide
  Antisense strand to SEQ ID NO: 1056332
uuacauacucagauacauu

SEQ ID NO: 1056334 - RNA, 19 nt, Artificial Sequence
  Description of Artificial Sequence: Synthetic oligonucleotide
  Sense strand starting at position 382 of SEQ ID NO: 915133
uguaucugaguauguaaau

SEQ ID NO: 1056335 - RNA, 19 nt, Artificial Sequence
  Description of Artificial Sequence: Synthetic oligonucleotide
  Antisense strand to SEQ ID NO: 1056334
auuuacauacucagauaca

SEQ ID NO: 1056336 - RNA, 19 nt, Artificial Sequence
  Description of Artificial Sequence: Synthetic oligonucleotide
  Sense strand starting at position 383 of SEQ ID NO: 915133
guaucugaguauguaaaug

SEQ ID NO: 1056337 - RNA, 19 nt, Artificial Sequence
  Description of Artificial Sequence: Synthetic oligonucleotide
  Antisense strand to SEQ ID NO: 1056336
cauuuacauacucagauac

SEQ ID NO: 1056338 - RNA, 19 nt, Artificial Sequence
  Description of Artificial Sequence: Synthetic oligonucleotide
  Sense strand starting at position 388 of SEQ ID NO: 915133
ugaguauguaaaugugaau

SEQ ID NO: 1056339 - RNA, 19 nt, Artificial Sequence
  Description of Artificial Sequence: Synthetic oligonucleotide
  Antisense strand to SEQ ID NO: 1056338
auucacauuuacauacuca

SEQ ID NO: 1056340 - RNA, 19 nt, Artificial Sequence
  Description of Artificial Sequence: Synthetic oligonucleotide
  Sense strand starting at position 2288 of SEQ ID NO: 915133
acuauuguggcaugggaaa

SEQ ID NO: 1056341 - RNA, 19 nt, Artificial Sequence
  Description of Artificial Sequence: Synthetic oligonucleotide
  Antisense strand to SEQ ID NO: 1056340
uuucccaugccacaauagu

SEQ ID NO: 1056342 - RNA, 19 nt, Artificial Sequence
  Description of Artificial Sequence: Synthetic oligonucleotide
  Sense strand starting at position 2316 of SEQ ID NO: 915133
gggauuaguuuguugugag

SEQ ID NO: 1056343 - RNA, 19 nt, Artificial Sequence
  Description of Artificial Sequence: Synthetic oligonucleotide
  Antisense strand to SEQ ID NO: 1056342
cucacaacaaacuaauccc

SEQ ID NO: 1056344 - RNA, 19 nt, Artificial Sequence
  Description of Artificial Sequence: Synthetic oligonucleotide
  Sense strand starting at position 2349 of SEQ ID NO: 915133
uacuuugugugacuagaac

SEQ ID NO: 1056345 - RNA, 19 nt, Artificial Sequence
  Description of Artificial Sequence: Synthetic oligonucleotide
  Antisense strand to SEQ ID NO: 1056344
guucuagucacacaaagua

SEQ ID NO: 1056346 - RNA, 19 nt, Artificial Sequence
  Description of Artificial Sequence: Synthetic oligonucleotide
  Sense strand starting at position 2360 of SEQ ID NO: 915133
acuagaacaccuugaguuu

SEQ ID NO: 1056347 - RNA, 19 nt, Artificial Sequence
  Description of Artificial Sequence: Synthetic oligonucleotide
  Antisense strand to SEQ ID NO: 1056346
aaacucaagguguucuagu

SEQ ID NO: 1056348 - RNA, 19 nt, Artificial Sequence
  Description of Artificial Sequence: Synthetic oligonucleotide
  Sense strand starting at position 2570 of SEQ ID NO: 915133
gcucuauucuucuuuaagg

SEQ ID NO: 1056349 - RNA, 19 nt, Artificial Sequence
  Description of Artificial Sequence: Synthetic oligonucleotide
  Antisense strand to SEQ ID NO: 1056348
ccuuaaagaagaauagagc

SEQ ID NO: 1056350 - RNA, 19 nt, Artificial Sequence
  Description of Artificial Sequence: Synthetic oligonucleotide
  Sense strand starting at position 2648 of SEQ ID NO: 915133
ugaauagcuccuuagcaau

SEQ ID NO: 1056351 - RNA, 19 nt, Artificial Sequence
  Description of Artificial Sequence: Synthetic oligonucleotide
  Antisense strand to SEQ ID NO: 1056350
auugcuaaggagcuauuca

SEQ ID NO: 1056352 - RNA, 19 nt, Artificial Sequence
  Description of Artificial Sequence: Synthetic oligonucleotide
  Sense strand starting at position 2654 of SEQ ID NO: 915133
gcuccuuagcaauggaaau

SEQ ID NO: 1056353 - RNA, 19 nt, Artificial Sequence
  Description of Artificial Sequence: Synthetic oligonucleotide
  Antisense strand to SEQ ID NO: 1056352
auuuccauugcuaaggagc

SEQ ID NO: 1056354 - RNA, 19 nt, Artificial Sequence
  Description of Artificial Sequence: Synthetic oligonucleotide
  Sense strand starting at position 2735 of SEQ ID NO: 915133
uugagcuaucauugacaua

SEQ ID NO: 1056355 - RNA, 19 nt, Artificial Sequence
  Description of Artificial Sequence: Synthetic oligonucleotide
  Antisense strand to SEQ ID NO: 1056354
uaugucaaugauagcucaa

SEQ ID NO: 1056356 - RNA, 19 nt, Artificial Sequence
  Description of Artificial Sequence: Synthetic oligonucleotide
  Sense strand starting at position 3111 of SEQ ID NO: 915133
gugacaccaucucuauagu

SEQ ID NO: 1056357 - RNA, 19 nt, Artificial Sequence
  Description of Artificial Sequence: Synthetic oligonucleotide
  Antisense strand to SEQ ID NO: 1056356
acuauagagauggugucac

SEQ ID NO: 1056358 - RNA, 19 nt, Artificial Sequence
  Description of Artificial Sequence: Synthetic oligonucleotide
  Sense strand starting at position 3112 of SEQ ID NO: 915133
ugacaccaucucuauaguu

SEQ ID NO: 1056359 - RNA, 19 nt, Artificial Sequence
  Description of Artificial Sequence: Synthetic oligonucleotide
  Antisense strand to SEQ ID NO: 1056358
aacuauagagaugguguca

SEQ ID NO: 1056360 - RNA, 19 nt, Artificial Sequence
  Description of Artificial Sequence: Synthetic oligonucleotide
  Sense strand starting at position 3117 of SEQ ID NO: 915133
ccaucucuauaguuaagag

SEQ ID NO: 1056361 - RNA, 19 nt, Artificial Sequence
  Description of Artificial Sequence: Synthetic oligonucleotide
  Antisense strand to SEQ ID NO: 1056360
cucuuaacuauagagaugg

SEQ ID NO: 1056362 - RNA, 19 nt, Artificial Sequence
  Description of Artificial Sequence: Synthetic oligonucleotide
  Sense strand starting at position 3126 of SEQ ID NO: 915133
uaguuaagagagugaauau

SEQ ID NO: 1056363 - RNA, 19 nt, Artificial Sequence
  Description of Artificial Sequence: Synthetic oligonucleotide
  Antisense strand to SEQ ID NO: 1056362
auauucacucucuuaacua

SEQ ID NO: 1056364 - RNA, 19 nt, Artificial Sequence
  Description of Artificial Sequence: Synthetic oligonucleotide
  Sense strand starting at position 3225 of SEQ ID NO: 915133
gcuuucugucauuauacau

SEQ ID NO: 1056365 - RNA, 19 nt, Artificial Sequence
  Description of Artificial Sequence: Synthetic oligonucleotide
  Antisense strand to SEQ ID NO: 1056364
auguauaaugacagaaagc

SEQ ID NO: 1056366 - RNA, 19 nt, Artificial Sequence
  Description of Artificial Sequence: Synthetic oligonucleotide
  Sense strand starting at position 3402 of SEQ ID NO: 915133
ucacuuguaggugaacauu

SEQ ID NO: 1056367 - RNA, 19 nt, Artificial Sequence
  Description of Artificial Sequence: Synthetic oligonucleotide
  Antisense strand to SEQ ID NO: 1056366
aauguucaccuacaaguga

SEQ ID NO: 1056368 - RNA, 19 nt, Artificial Sequence
  Description of Artificial Sequence: Synthetic oligonucleotide
  Sense strand starting at position 3423 of SEQ ID NO: 915133
gguuauuuguggcuucuga

SEQ ID NO: 1056369 - RNA, 19 nt, Artificial Sequence
  Description of Artificial Sequence: Synthetic oligonucleotide
  Antisense strand to SEQ ID NO: 1056368
ucagaagccacaaauaacc

SEQ ID NO: 1056370 - RNA, 19 nt, Artificial Sequence
  Description of Artificial Sequence: Synthetic oligonucleotide
  Sense strand starting at position 3431 of SEQ ID NO: 915133
guggcuucugaauauuacu

SEQ ID NO: 1056371 - RNA, 19 nt, Artificial Sequence
  Description of Artificial Sequence: Synthetic oligonucleotide
  Antisense strand to SEQ ID NO: 1056370
aguaauauucagaagccac

SEQ ID NO: 1056372 - RNA, 19 nt, Artificial Sequence
  Description of Artificial Sequence: Synthetic oligonucleotide
  Sense strand starting at position 3529 of SEQ ID NO: 915133
guggaauggcuguaacucu

SEQ ID NO: 1056373 - RNA, 19 nt, Artificial Sequence
  Description of Artificial Sequence: Synthetic oligonucleotide
  Antisense strand to SEQ ID NO: 1056372
agaguuacagccauuccac

SEQ ID NO: 1056374 - RNA, 19 nt, Artificial Sequence
  Description of Artificial Sequence: Synthetic oligonucleotide
  Sense strand starting at position 3783 of SEQ ID NO: 915133
acauuagagucacuggaau

SEQ ID NO: 1056375 - RNA, 19 nt, Artificial Sequence
  Description of Artificial Sequence: Synthetic oligonucleotide
  Antisense strand to SEQ ID NO: 1056374
auuccagugacucuaaugu

SEQ ID NO: 1056376 - RNA, 19 nt, Artificial Sequence
  Description of Artificial Sequence: Synthetic oligonucleotide
  Sense strand starting at position 17 of SEQ ID NO: 915134
gaguuagagaagugagauu

SEQ ID NO: 1056377 - RNA, 19 nt, Artificial Sequence
  Description of Artificial Sequence: Synthetic oligonucleotide
  Antisense strand to SEQ ID NO: 1056376
aaucucacuucucuaacuc

SEQ ID NO: 1056378 - RNA, 19 nt, Artificial Sequence
  Description of Artificial Sequence: Synthetic oligonucleotide
  Sense strand starting at position 109 of SEQ ID NO: 915134
auggaaagccucugaguga

SEQ ID NO: 1056379 - RNA, 19 nt, Artificial Sequence
  Description of Artificial Sequence: Synthetic oligonucleotide
  Antisense strand to SEQ ID NO: 1056378
ucacucagaggcuuuccau

SEQ ID NO: 1056380 - RNA, 19 nt, Artificial Sequence
  Description of Artificial Sequence: Synthetic oligonucleotide
  Sense strand starting at position 175 of SEQ ID NO: 915134
ugccaagucuaucuaugau

SEQ ID NO: 1056381 - RNA, 19 nt, Artificial Sequence
  Description of Artificial Sequence: Synthetic oligonucleotide
  Antisense strand to SEQ ID NO: 1056380
aucauagauagacuuggca

SEQ ID NO: 1056382 - RNA, 19 nt, Artificial Sequence
  Description of Artificial Sequence: Synthetic oligonucleotide
  Sense strand starting at position 187 of SEQ ID NO: 915134
cuaugaugucaguauaacu

SEQ ID NO: 1056383 - RNA, 19 nt, Artificial Sequence
  Description of Artificial Sequence: Synthetic oligonucleotide
  Antisense strand to SEQ ID NO: 1056382
aguuauacugacaucauag

SEQ ID NO: 1056384 - RNA, 19 nt, Artificial Sequence
  Description of Artificial Sequence: Synthetic oligonucleotide
  Sense strand starting at position 194 of SEQ ID NO: 915134
gucaguauaacucacgaug

SEQ ID NO: 1056385 - RNA, 19 nt, Artificial Sequence
  Description of Artificial Sequence: Synthetic oligonucleotide
  Antisense strand to SEQ ID NO: 1056384
caucgugaguuauacugac

SEQ ID NO: 1056386 - RNA, 19 nt, Artificial Sequence
  Description of Artificial Sequence: Synthetic oligonucleotide
  Sense strand starting at position 295 of SEQ ID NO: 915134
ucugauguuguauagacuu

SEQ ID NO: 1056387 - RNA, 19 nt, Artificial Sequence
  Description of Artificial Sequence: Synthetic oligonucleotide
  Antisense strand to SEQ ID NO: 1056386
aagucuauacaacaucaga

SEQ ID NO: 1056388 - RNA, 19 nt, Artificial Sequence
  Description of Artificial Sequence: Synthetic oligonucleotide
  Sense strand starting at position 378 of SEQ ID NO: 915134
auggacucauguuuaaagu

SEQ ID NO: 1056389 - RNA, 19 nt, Artificial Sequence
  Description of Artificial Sequence: Synthetic oligonucleotide
  Antisense strand to SEQ ID NO: 1056388
acuuuaaacaugaguccau

SEQ ID NO: 1056390 - RNA, 19 nt, Artificial Sequence
  Description of Artificial Sequence: Synthetic oligonucleotide
  Sense strand starting at position 379 of SEQ ID NO: 915134
uggacucauguuuaaagua

SEQ ID NO: 1056391 - RNA, 19 nt, Artificial Sequence
  Description of Artificial Sequence: Synthetic oligonucleotide
  Antisense strand to SEQ ID NO: 1056390
uacuuuaaacaugagucca

SEQ ID NO: 1056392 - RNA, 19 nt, Artificial Sequence
  Description of Artificial Sequence: Synthetic oligonucleotide
  Sense strand starting at position 470 of SEQ ID NO: 915134
ggaacauaguaaguucuaa

SEQ ID NO: 1056393 - RNA, 19 nt, Artificial Sequence
  Description of Artificial Sequence: Synthetic oligonucleotide
  Antisense strand to SEQ ID NO: 1056392
uuagaacuuacuauguucc

SEQ ID NO: 1056394 - RNA, 19 nt, Artificial Sequence
  Description of Artificial Sequence: Synthetic oligonucleotide
  Sense strand starting at position 545 of SEQ ID NO: 915134
aggaaacuaugaggaagaa

SEQ ID NO: 1056395 - RNA, 19 nt, Artificial Sequence
  Description of Artificial Sequence: Synthetic oligonucleotide
  Antisense strand to SEQ ID NO: 1056394
uucuuccucauaguuuccu

SEQ ID NO: 1056396 - RNA, 19 nt, Artificial Sequence
  Description of Artificial Sequence: Synthetic oligonucleotide
  Sense strand starting at position 755 of SEQ ID NO: 915134
aguugaaacuuucucagca

SEQ ID NO: 1056397 - RNA, 19 nt, Artificial Sequence
  Description of Artificial Sequence: Synthetic oligonucleotide
  Antisense strand to SEQ ID NO: 1056396
ugcugagaaaguuucaacu

SEQ ID NO: 1056398 - RNA, 19 nt, Artificial Sequence
  Description of Artificial Sequence: Synthetic oligonucleotide
  Sense strand starting at position 756 of SEQ ID NO: 915134
guugaaacuuucucagcaa

SEQ ID NO: 1056399 - RNA, 19 nt, Artificial Sequence
  Description of Artificial Sequence: Synthetic oligonucleotide
  Antisense strand to SEQ ID NO: 1056398
uugcugagaaaguuucaac

SEQ ID NO: 1056400 - RNA, 19 nt, Artificial Sequence
  Description of Artificial Sequence: Synthetic oligonucleotide
  Sense strand starting at position 781 of SEQ ID NO: 915134
caucauucuuacgugggaa

SEQ ID NO: 1056401 - RNA, 19 nt, Artificial Sequence
  Description of Artificial Sequence: Synthetic oligonucleotide
  Antisense strand to SEQ ID NO: 1056400
uucccacguaagaaugaug

SEQ ID NO: 1056402 - RNA, 19 nt, Artificial Sequence
  Description of Artificial Sequence: Synthetic oligonucleotide
  Sense strand starting at position 782 of SEQ ID NO: 915134
aucauucuuacgugggaaa

SEQ ID NO: 1056403 - RNA, 19 nt, Artificial Sequence
  Description of Artificial Sequence: Synthetic oligonucleotide
  Antisense strand to SEQ ID NO: 1056402
uuucccacguaagaaugau

SEQ ID NO: 1056404 - RNA, 19 nt, Artificial Sequence
  Description of Artificial Sequence: Synthetic oligonucleotide
  Sense strand starting at position 892 of SEQ ID NO: 915134
cuucuauuguggcuaauag

SEQ ID NO: 1056405 - RNA, 19 nt, Artificial Sequence
  Description of Artificial Sequence: Synthetic oligonucleotide
  Antisense strand to SEQ ID NO: 1056404
cuauuagccacaauagaag

SEQ ID NO: 1056406 - RNA, 19 nt, Artificial Sequence
  Description of Artificial Sequence: Synthetic oligonucleotide
  Sense strand starting at position 893 of SEQ ID NO: 915134
uucuauuguggcuaauagu

SEQ ID NO: 1056407 - RNA, 19 nt, Artificial Sequence
  Description of Artificial Sequence: Synthetic oligonucleotide
  Antisense strand to SEQ ID NO: 1056406
acuauuagccacaauagaa

SEQ ID NO: 1056408 - RNA, 19 nt, Artificial Sequence
  Description of Artificial Sequence: Synthetic oligonucleotide
  Sense strand starting at position 920 of SEQ ID NO: 915134
ccagaaccugauugagguu

SEQ ID NO: 1056409 - RNA, 19 nt, Artificial Sequence
  Description of Artificial Sequence: Synthetic oligonucleotide
  Antisense strand to SEQ ID NO: 1056408
aaccucaaucagguucugg

SEQ ID NO: 1056410 - RNA, 19 nt, Artificial Sequence
  Description of Artificial Sequence: Synthetic oligonucleotide
  Sense strand starting at position 984 of SEQ ID NO: 915134
gguccuauccagcaggcua

SEQ ID NO: 1056411 - RNA, 19 nt, Artificial Sequence
  Description of Artificial Sequence: Synthetic oligonucleotide
  Antisense strand to SEQ ID NO: 1056410
uagccugcuggauaggacc

SEQ ID NO: 1056412 - RNA, 19 nt, Artificial Sequence
  Description of Artificial Sequence: Synthetic oligonucleotide
  Sense strand starting at position 1994 of SEQ ID NO: 915134
ggauucaucugguugguau

SEQ ID NO: 1056413 - RNA, 19 nt, Artificial Sequence
  Description of Artificial Sequence: Synthetic oligonucleotide
  Antisense strand to SEQ ID NO: 1056412
auaccaaccagaugaaucc

SEQ ID NO: 1056414 - RNA, 19 nt, Artificial Sequence
  Description of Artificial Sequence: Synthetic oligonucleotide
  Sense strand starting at position 2006 of SEQ ID NO: 915134
uugguaugaccuugucaau

SEQ ID NO: 1056415 - RNA, 19 nt, Artificial Sequence
  Description of Artificial Sequence: Synthetic oligonucleotide
  Antisense strand to SEQ ID NO: 1056414
auugacaaggucauaccaa

SEQ ID NO: 1056416 - RNA, 19 nt, Artificial Sequence
  Description of Artificial Sequence: Synthetic oligonucleotide
  Sense strand starting at position 2012 of SEQ ID NO: 915134
ugaccuugucaaugaaccu

SEQ ID NO: 1056417 - RNA, 19 nt, Artificial Sequence
  Description of Artificial Sequence: Synthetic oligonucleotide
  Antisense strand to SEQ ID NO: 1056416
agguucauugacaagguca

SEQ ID NO: 1056418 - RNA, 19 nt, Artificial Sequence
  Description of Artificial Sequence: Synthetic oligonucleotide
  Sense strand starting at position 2088 of SEQ ID NO: 915134
cucugcuuccucugggaaa

SEQ ID NO: 1056419 - RNA, 19 nt, Artificial Sequence
  Description of Artificial Sequence: Synthetic oligonucleotide
  Antisense strand to SEQ ID NO: 1056418
uuucccagaggaagcagag

SEQ ID NO: 1056420 - RNA, 19 nt, Artificial Sequence
  Description of Artificial Sequence: Synthetic oligonucleotide
  Sense strand starting at position 2090 of SEQ ID NO: 915134
cugcuuccucugggaaauu

SEQ ID NO: 1056421 - RNA, 19 nt, Artificial Sequence
  Description of Artificial Sequence: Synthetic oligonucleotide
  Antisense strand to SEQ ID NO: 1056420
aauuucccagaggaagcag

SEQ ID NO: 1056422 - RNA, 19 nt, Artificial Sequence
  Description of Artificial Sequence: Synthetic oligonucleotide
  Sense strand starting at position 2126 of SEQ ID NO: 915134
ccauaaggagaauguugua

SEQ ID NO: 1056423 - RNA, 19 nt, Artificial Sequence
  Description of Artificial Sequence: Synthetic oligonucleotide
  Antisense strand to SEQ ID NO: 1056422
uacaacauucuccuuaugg

SEQ ID NO: 1056424 - RNA, 19 nt, Artificial Sequence
  Description of Artificial Sequence: Synthetic oligonucleotide
  Sense strand starting at position 2132 of SEQ ID NO: 915134
ggagaauguuguaaguggu

SEQ ID NO: 1056425 - RNA, 19 nt, Artificial Sequence
  Description of Artificial Sequence: Synthetic oligonucleotide
  Antisense strand to SEQ ID NO: 1056424
accacuuacaacauucucc

SEQ ID NO: 1056426 - RNA, 19 nt, Artificial Sequence
  Description of Artificial Sequence: Synthetic oligonucleotide
  Sense strand starting at position 2323 of SEQ ID NO: 915134
ugauucuuccaguaacuag

SEQ ID NO: 1056427 - RNA, 19 nt, Artificial Sequence
  Description of Artificial Sequence: Synthetic oligonucleotide
  Antisense strand to SEQ ID NO: 1056426
cuaguuacuggaagaauca

SEQ ID NO: 1056428 - RNA, 19 nt, Artificial Sequence
  Description of Artificial Sequence: Synthetic oligonucleotide
  Sense strand starting at position 2334 of SEQ ID NO: 915134
guaacuaguuguguaaaca

SEQ ID NO: 1056429 - RNA, 19 nt, Artificial Sequence
  Description of Artificial Sequence: Synthetic oligonucleotide
  Antisense strand to SEQ ID NO: 1056428
uguuuacacaacuaguuac

SEQ ID NO: 1056430 - RNA, 19 nt, Artificial Sequence
  Description of Artificial Sequence: Synthetic oligonucleotide
  Sense strand starting at position 2335 of SEQ ID NO: 915134
uaacuaguuguguaaacag

SEQ ID NO: 1056431 - RNA, 19 nt, Artificial Sequence
  Description of Artificial Sequence: Synthetic oligonucleotide
  Antisense strand to SEQ ID NO: 1056430
cuguuuacacaacuaguua

SEQ ID NO: 1056432 - RNA, 19 nt, Artificial Sequence
  Description of Artificial Sequence: Synthetic oligonucleotide
  Sense strand starting at position 2509 of SEQ ID NO: 915134
cgaagcuuccauggauuga

SEQ ID NO: 1056433 - RNA, 19 nt, Artificial Sequence
  Description of Artificial Sequence: Synthetic oligonucleotide
  Antisense strand to SEQ ID NO: 1056432
ucaauccauggaagcuucg

SEQ ID NO: 1056434 - RNA, 19 nt, Artificial Sequence
  Description of Artificial Sequence: Synthetic oligonucleotide
  Sense strand starting at position 2513 of SEQ ID NO: 915134
gcuuccauggauugacaga

SEQ ID NO: 1056435 - RNA, 19 nt, Artificial Sequence
  Description of Artificial Sequence: Synthetic oligonucleotide
  Antisense strand to SEQ ID NO: 1056434
ucugucaauccauggaagc

SEQ ID NO: 1056436 - RNA, 19 nt, Artificial Sequence
  Description of Artificial Sequence: Synthetic oligonucleotide
  Sense strand starting at position 2607 of SEQ ID NO: 915134
cugauauagcucuaucuug

SEQ ID NO: 1056437 - RNA, 19 nt, Artificial Sequence
  Description of Artificial Sequence: Synthetic oligonucleotide
  Antisense strand to SEQ ID NO: 1056436
caagauagagcuauaucag

SEQ ID NO: 1056438 - RNA, 19 nt, Artificial Sequence
  Description of Artificial Sequence: Synthetic oligonucleotide
  Sense strand starting at position 2747 of SEQ ID NO: 915134
gacgcaucaccugaaguca

SEQ ID NO: 1056439 - RNA, 19 nt, Artificial Sequence
  Description of Artificial Sequence: Synthetic oligonucleotide
  Antisense strand to SEQ ID NO: 1056438
ugacuucaggugaugcguc

SEQ ID NO: 1056440 - RNA, 19 nt, Artificial Sequence
  Description of Artificial Sequence: Synthetic oligonucleotide
  Sense strand starting at position 3166 of SEQ ID NO: 915134
aacuauagucccggaggaa

SEQ ID NO: 1056441 - RNA, 19 nt, Artificial Sequence
  Description of Artificial Sequence: Synthetic oligonucleotide
  Antisense strand to SEQ ID NO: 1056440
uuccuccgggacuauaguu

SEQ ID NO: 1056442 - RNA, 19 nt, Artificial Sequence
  Description of Artificial Sequence: Synthetic oligonucleotide
  Sense strand starting at position 3460 of SEQ ID NO: 915134
gcugaauagaaccgugaag

SEQ ID NO: 1056443 - RNA, 19 nt, Artificial Sequence
  Description of Artificial Sequence: Synthetic oligonucleotide
  Antisense strand to SEQ ID NO: 1056442
cuucacgguucuauucagc

SEQ ID NO: 1056444 - RNA, 19 nt, Artificial Sequence
  Description of Artificial Sequence: Synthetic oligonucleotide
  Sense strand starting at position 3462 of SEQ ID NO: 915134
ugaauagaaccgugaagug

SEQ ID NO: 1056445 - RNA, 19 nt, Artificial Sequence
  Description of Artificial Sequence: Synthetic oligonucleotide
  Antisense strand to SEQ ID NO: 1056444
cacuucacgguucuauuca

SEQ ID NO: 1056446 - RNA, 19 nt, Artificial Sequence
  Description of Artificial Sequence: Synthetic oligonucleotide
  Sense strand starting at position 3605 of SEQ ID NO: 915134
guuaaagaguaagcuacaa

SEQ ID NO: 1056447 - RNA, 19 nt, Artificial Sequence
  Description of Artificial Sequence: Synthetic oligonucleotide
  Antisense strand to SEQ ID NO: 1056446
uuguagcuuacucuuuaac

SEQ ID NO: 1056448 - RNA, 19 nt, Artificial Sequence
  Description of Artificial Sequence: Synthetic oligonucleotide
  Sense strand starting at position 3628 of SEQ ID NO: 915134
uuaauacaucucuaagugu

SEQ ID NO: 1056449 - RNA, 19 nt, Artificial Sequence
  Description of Artificial Sequence: Synthetic oligonucleotide
  Antisense strand to SEQ ID NO: 1056448
acacuuagagauguauuaa

SEQ ID NO: 1056450 - RNA, 19 nt, Artificial Sequence
  Description of Artificial Sequence: Synthetic oligonucleotide
  Sense strand starting at position 3631 of SEQ ID NO: 915134
auacaucucuaagugugua

SEQ ID NO: 1056451 - RNA, 19 nt, Artificial Sequence
  Description of Artificial Sequence: Synthetic oligonucleotide
  Antisense strand to SEQ ID NO: 1056450
uacacacuuagagauguau

SEQ ID NO: 1056452 - RNA, 19 nt, Artificial Sequence
  Description of Artificial Sequence: Synthetic oligonucleotide
  Sense strand starting at position 3636 of SEQ ID NO: 915134
ucucuaaguguguaacacu

SEQ ID NO: 1056453 - RNA, 19 nt, Artificial Sequence
  Description of Artificial Sequence: Synthetic oligonucleotide
  Antisense strand to SEQ ID NO: 1056452
aguguuacacacuuagaga

SEQ ID NO: 1056454 - RNA, 19 nt, Artificial Sequence
  Description of Artificial Sequence: Synthetic oligonucleotide
  Sense strand starting at position 3753 of SEQ ID NO: 915134
uuguaaucuccacauguaa

SEQ ID NO: 1056455 - RNA, 19 nt, Artificial Sequence
  Description of Artificial Sequence: Synthetic oligonucleotide
  Antisense strand to SEQ ID NO: 1056454
uuacauguggagauuacaa

SEQ ID NO: 1056456 - RNA, 19 nt, Artificial Sequence
  Description of Artificial Sequence: Synthetic oligonucleotide
  Sense strand starting at position 73 of SEQ ID NO: 915135
caggaaauacuugguccau

SEQ ID NO: 1056457 - RNA, 19 nt, Artificial Sequence
  Description of Artificial Sequence: Synthetic oligonucleotide
  Antisense strand to SEQ ID NO: 1056456
auggaccaaguauuuccug

SEQ ID NO: 1056458 - RNA, 19 nt, Artificial Sequence
  Description of Artificial Sequence: Synthetic oligonucleotide
  Sense strand starting at position 74 of SEQ ID NO: 915135
aggaaauacuugguccaug

SEQ ID NO: 1056459 - RNA, 19 nt, Artificial Sequence
  Description of Artificial Sequence: Synthetic oligonucleotide
  Antisense strand to SEQ ID NO: 1056458
cauggaccaaguauuuccu

SEQ ID NO: 1056460 - RNA, 19 nt, Artificial Sequence
  Description of Artificial Sequence: Synthetic oligonucleotide
  Sense strand starting at position 75 of SEQ ID NO: 915135
ggaaauacuugguccaugu

SEQ ID NO: 1056461 - RNA, 19 nt, Artificial Sequence
  Description of Artificial Sequence: Synthetic oligonucleotide
  Antisense strand to SEQ ID NO: 1056460
acauggaccaaguauuucc

SEQ ID NO: 1056462 - RNA, 19 nt, Artificial Sequence
  Description of Artificial Sequence: Synthetic oligonucleotide
  Sense strand starting at position 79 of SEQ ID NO: 915135
auacuugguccauguauaa

SEQ ID NO: 1056463 - RNA, 19 nt, Artificial Sequence
  Description of Artificial Sequence: Synthetic oligonucleotide
  Antisense strand to SEQ ID NO: 1056462
uuauacauggaccaaguau

SEQ ID NO: 1056464 - RNA, 19 nt, Artificial Sequence
  Description of Artificial Sequence: Synthetic oligonucleotide
  Sense strand starting at position 629 of SEQ ID NO: 915135
guagguaauagggaauguu

SEQ ID NO: 1056465 - RNA, 19 nt, Artificial Sequence
  Description of Artificial Sequence: Synthetic oligonucleotide
  Antisense strand to SEQ ID NO: 1056464
aacauucccuauuaccuac

SEQ ID NO: 1056466 - RNA, 19 nt, Artificial Sequence
  Description of Artificial Sequence: Synthetic oligonucleotide
  Sense strand starting at position 632 of SEQ ID NO: 915135
gguaauagggaauguugau

SEQ ID NO: 1056467 - RNA, 19 nt, Artificial Sequence
  Description of Artificial Sequence: Synthetic oligonucleotide
  Antisense strand to SEQ ID NO: 1056466
aucaacauucccuauuacc

SEQ ID NO: 1056468 - RNA, 19 nt, Artificial Sequence
  Description of Artificial Sequence: Synthetic oligonucleotide
  Sense strand starting at position 659 of SEQ ID NO: 915135
ugauuaaugccaggagcag

SEQ ID NO: 1056469 - RNA, 19 nt, Artificial Sequence
  Description of Artificial Sequence: Synthetic oligonucleotide
  Antisense strand to SEQ ID NO: 1056468
cugcuccuggcauuaauca

SEQ ID NO: 1056470 - RNA, 19 nt, Artificial Sequence
  Description of Artificial Sequence: Synthetic oligonucleotide
  Sense strand starting at position 660 of SEQ ID NO: 915135
gauuaaugccaggagcagu

SEQ ID NO: 1056471 - RNA, 19 nt, Artificial Sequence
  Description of Artificial Sequence: Synthetic oligonucleotide
  Antisense strand to SEQ ID NO: 1056470
acugcuccuggcauuaauc

SEQ ID NO: 1056472 - RNA, 19 nt, Artificial Sequence
  Description of Artificial Sequence: Synthetic oligonucleotide
  Sense strand starting at position 732 of SEQ ID NO: 915135
acaaacuugugagcaagua

SEQ ID NO: 1056473 - RNA, 19 nt, Artificial Sequence
  Description of Artificial Sequence: Synthetic oligonucleotide
  Antisense strand to SEQ ID NO: 1056472
uacuugcucacaaguuugu

SEQ ID NO: 1056474 - RNA, 19 nt, Artificial Sequence
  Description of Artificial Sequence: Synthetic oligonucleotide
  Sense strand starting at position 733 of SEQ ID NO: 915135
caaacuugugagcaaguaa

SEQ ID NO: 1056475 - RNA, 19 nt, Artificial Sequence
  Description of Artificial Sequence: Synthetic oligonucleotide
  Antisense strand to SEQ ID NO: 1056474
uuacuugcucacaaguuug

SEQ ID NO: 1056476 - RNA, 19 nt, Artificial Sequence
  Description of Artificial Sequence: Synthetic oligonucleotide
  Sense strand starting at position 782 of SEQ ID NO: 915135
gagauaaguguugguauga

SEQ ID NO: 1056477 - RNA, 19 nt, Artificial Sequence
  Description of Artificial Sequence: Synthetic oligonucleotide
  Antisense strand to SEQ ID NO: 1056476
ucauaccaacacuuaucuc

SEQ ID NO: 1056478 - RNA, 19 nt, Artificial Sequence
  Description of Artificial Sequence: Synthetic oligonucleotide
  Sense strand starting at position 783 of SEQ ID NO: 915135
agauaaguguugguaugag

SEQ ID NO: 1056479 - RNA, 19 nt, Artificial Sequence
  Description of Artificial Sequence: Synthetic oligonucleotide
  Antisense strand to SEQ ID NO: 1056478
cucauaccaacacuuaucu

SEQ ID NO: 1056480 - RNA, 19 nt, Artificial Sequence
  Description of Artificial Sequence: Synthetic oligonucleotide
  Sense strand starting at position 795 of SEQ ID NO: 915135
guaugagucacagguaaca

SEQ ID NO: 1056481 - RNA, 19 nt, Artificial Sequence
  Description of Artificial Sequence: Synthetic oligonucleotide
  Antisense strand to SEQ ID NO: 1056480
uguuaccugugacucauac

SEQ ID NO: 1056482 - RNA, 19 nt, Artificial Sequence
  Description of Artificial Sequence: Synthetic oligonucleotide
  Sense strand starting at position 919 of SEQ ID NO: 915135
guauacucccgcuaauaga

SEQ ID NO: 1056483 - RNA, 19 nt, Artificial Sequence
  Description of Artificial Sequence: Synthetic oligonucleotide
  Antisense strand to SEQ ID NO: 1056482
ucuauuagcgggaguauac

SEQ ID NO: 1056484 - RNA, 19 nt, Artificial Sequence
  Description of Artificial Sequence: Synthetic oligonucleotide
  Sense strand starting at position 1987 of SEQ ID NO: 915135
guugaucugguccaugaug

SEQ ID NO: 1056485 - RNA, 19 nt, Artificial Sequence
  Description of Artificial Sequence: Synthetic oligonucleotide
  Antisense strand to SEQ ID NO: 1056484
caucauggaccagaucaac

SEQ ID NO: 1056486 - RNA, 19 nt, Artificial Sequence
  Description of Artificial Sequence: Synthetic oligonucleotide
  Sense strand starting at position 2007 of SEQ ID NO: 915135
ggaugacucucuuccaggu

SEQ ID NO: 1056487 - RNA, 19 nt, Artificial Sequence
  Description of Artificial Sequence: Synthetic oligonucleotide
  Antisense strand to SEQ ID NO: 1056486
accuggaagagagucaucc

SEQ ID NO: 1056488 - RNA, 19 nt, Artificial Sequence
  Description of Artificial Sequence: Synthetic oligonucleotide
  Sense strand starting at position 2022 of SEQ ID NO: 915135
agguccuaccuuugaugaa

SEQ ID NO: 1056489 - RNA, 19 nt, Artificial Sequence
  Description of Artificial Sequence: Synthetic oligonucleotide
  Antisense strand to SEQ ID NO: 1056488
uucaucaaagguaggaccu

SEQ ID NO: 1056490 - RNA, 19 nt, Artificial Sequence
  Description of Artificial Sequence: Synthetic oligonucleotide
  Sense strand starting at position 2044 of SEQ ID NO: 915135
auguuagaacuuggauuau

SEQ ID NO: 1056491 - RNA, 19 nt, Artificial Sequence
  Description of Artificial Sequence: Synthetic oligonucleotide
  Antisense strand to SEQ ID NO: 1056490
auaauccaaguucuaacau

SEQ ID NO: 1056492 - RNA, 19 nt, Artificial Sequence
  Description of Artificial Sequence: Synthetic oligonucleotide
  Sense strand starting at position 2113 of SEQ ID NO: 915135
aggucaucaugacuacaca

SEQ ID NO: 1056493 - RNA, 19 nt, Artificial Sequence
  Description of Artificial Sequence: Synthetic oligonucleotide
  Antisense strand to SEQ ID NO: 1056492
uguguagucaugaugaccu

SEQ ID NO: 1056494 - RNA, 19 nt, Artificial Sequence
  Description of Artificial Sequence: Synthetic oligonucleotide
  Sense strand starting at position 2153 of SEQ ID NO: 915135
cuuuguggucuggaaauuc

SEQ ID NO: 1056495 - RNA, 19 nt, Artificial Sequence
  Description of Artificial Sequence: Synthetic oligonucleotide
  Antisense strand to SEQ ID NO: 1056494
gaauuuccagaccacaaag

SEQ ID NO: 1056496 - RNA, 19 nt, Artificial Sequence
  Description of Artificial Sequence: Synthetic oligonucleotide
  Sense strand starting at position 2199 of SEQ ID NO: 915135
uguaaauaccuuggguuaa

SEQ ID NO: 1056497 - RNA, 19 nt, Artificial Sequence
  Description of Artificial Sequence: Synthetic oligonucleotide
  Antisense strand to SEQ ID NO: 1056496
uuaacccaagguauuuaca

SEQ ID NO: 1056498 - RNA, 19 nt, Artificial Sequence
  Description of Artificial Sequence: Synthetic oligonucleotide
  Sense strand starting at position 2345 of SEQ ID NO: 915135
gaaguuucugaagagucuu

SEQ ID NO: 1056499 - RNA, 19 nt, Artificial Sequence
  Description of Artificial Sequence: Synthetic oligonucleotide
  Antisense strand to SEQ ID NO: 1056498
aagacucuucagaaacuuc

SEQ ID NO: 1056500 - RNA, 19 nt, Artificial Sequence
  Description of Artificial Sequence: Synthetic oligonucleotide
  Sense strand starting at position 2351 of SEQ ID NO: 915135
ucugaagagucuuuaguau

SEQ ID NO: 1056501 - RNA, 19 nt, Artificial Sequence
  Description of Artificial Sequence: Synthetic oligonucleotide
  Antisense strand to SEQ ID NO: 1056500
auacuaaagacucuucaga

SEQ ID NO: 1056502 - RNA, 19 nt, Artificial Sequence
  Description of Artificial Sequence: Synthetic oligonucleotide
  Sense strand starting at position 2410 of SEQ ID NO: 915135
agcaguuaaugacuuacau

SEQ ID NO: 1056503 - RNA, 19 nt, Artificial Sequence
  Description of Artificial Sequence: Synthetic oligonucleotide
  Antisense strand to SEQ ID NO: 1056502
auguaagucauuaacugcu

SEQ ID NO: 1056504 - RNA, 19 nt, Artificial Sequence
  Description of Artificial Sequence: Synthetic oligonucleotide
  Sense strand starting at position 2479 of SEQ ID NO: 915135
ucaaucuccugacuugaga

SEQ ID NO: 1056505 - RNA, 19 nt, Artificial Sequence
  Description of Artificial Sequence: Synthetic oligonucleotide
  Antisense strand to SEQ ID NO: 1056504
ucucaagucaggagauuga

SEQ ID NO: 1056506 - RNA, 19 nt, Artificial Sequence
  Description of Artificial Sequence: Synthetic oligonucleotide
  Sense strand starting at position 2493 of SEQ ID NO: 915135
ugagaaagauucccuccuu

SEQ ID NO: 1056507 - RNA, 19 nt, Artificial Sequence
  Description of Artificial Sequence: Synthetic oligonucleotide
  Antisense strand to SEQ ID NO: 1056506
aaggagggaaucuuucuca

SEQ ID NO: 1056508 - RNA, 19 nt, Artificial Sequence
  Description of Artificial Sequence: Synthetic oligonucleotide
  Sense strand starting at position 2603 of SEQ ID NO: 915135
acaggaaucuugccaaguc

SEQ ID NO: 1056509 - RNA, 19 nt, Artificial Sequence
  Description of Artificial Sequence: Synthetic oligonucleotide
  Antisense strand to SEQ ID NO: 1056508
gacuuggcaagauuccugu

SEQ ID NO: 1056510 - RNA, 19 nt, Artificial Sequence
  Description of Artificial Sequence: Synthetic oligonucleotide
  Sense strand starting at position 2737 of SEQ ID NO: 915135
agucuuuagcaagaauucu

SEQ ID NO: 1056511 - RNA, 19 nt, Artificial Sequence
  Description of Artificial Sequence: Synthetic oligonucleotide
  Antisense strand to SEQ ID NO: 1056510
agaauucuugcuaaagacu

SEQ ID NO: 1056512 - RNA, 19 nt, Artificial Sequence
  Description of Artificial Sequence: Synthetic oligonucleotide
  Sense strand starting at position 2938 of SEQ ID NO: 915135
uuuaauaauugucugguga

SEQ ID NO: 1056513 - RNA, 19 nt, Artificial Sequence
  Description of Artificial Sequence: Synthetic oligonucleotide
  Antisense strand to SEQ ID NO: 1056512
ucaccagacaauuauuaaa

SEQ ID NO: 1056514 - RNA, 19 nt, Artificial Sequence
  Description of Artificial Sequence: Synthetic oligonucleotide
  Sense strand starting at position 2939 of SEQ ID NO: 915135
uuaauaauugucuggugaa

SEQ ID NO: 1056515 - RNA, 19 nt, Artificial Sequence
  Description of Artificial Sequence: Synthetic oligonucleotide
  Antisense strand to SEQ ID NO: 1056514
uucaccagacaauuauuaa

SEQ ID NO: 1056516 - RNA, 19 nt, Artificial Sequence
  Description of Artificial Sequence: Synthetic oligonucleotide
  Sense strand starting at position 3069 of SEQ ID NO: 915135
gcuuaaacaguuuauuaag

SEQ ID NO: 1056517 - RNA, 19 nt, Artificial Sequence
  Description of Artificial Sequence: Synthetic oligonucleotide
  Antisense strand to SEQ ID NO: 1056516
cuuaauaaacuguuuaagc

SEQ ID NO: 1056518 - RNA, 19 nt, Artificial Sequence
  Description of Artificial Sequence: Synthetic oligonucleotide
  Sense strand starting at position 3133 of SEQ ID NO: 915135
gggucaggcccucauaagu

SEQ ID NO: 1056519 - RNA, 19 nt, Artificial Sequence
  Description of Artificial Sequence: Synthetic oligonucleotide
  Antisense strand to SEQ ID NO: 1056518
acuuaugagggccugaccc

SEQ ID NO: 1056520 - RNA, 19 nt, Artificial Sequence
  Description of Artificial Sequence: Synthetic oligonucleotide
  Sense strand starting at position 3208 of SEQ ID NO: 915135
uguauagagccacagucau

SEQ ID NO: 1056521 - RNA, 19 nt, Artificial Sequence
  Description of Artificial Sequence: Synthetic oligonucleotide
  Antisense strand to SEQ ID NO: 1056520
augacuguggcucuauaca

SEQ ID NO: 1056522 - RNA, 19 nt, Artificial Sequence
  Description of Artificial Sequence: Synthetic oligonucleotide
  Sense strand starting at position 3304 of SEQ ID NO: 915135
uguuucuuacuuuagaagu

SEQ ID NO: 1056523 - RNA, 19 nt, Artificial Sequence
  Description of Artificial Sequence: Synthetic oligonucleotide
  Antisense strand to SEQ ID NO: 1056522
acuucuaaaguaagaaaca

SEQ ID NO: 1056524 - RNA, 19 nt, Artificial Sequence
  Description of Artificial Sequence: Synthetic oligonucleotide
  Sense strand starting at position 3356 of SEQ ID NO: 915135
agaguuugaauuggugaaa

SEQ ID NO: 1056525 - RNA, 19 nt, Artificial Sequence
  Description of Artificial Sequence: Synthetic oligonucleotide
  Antisense strand to SEQ ID NO: 1056524
uuucaccaauucaaacucu

SEQ ID NO: 1056526 - RNA, 19 nt, Artificial Sequence
  Description of Artificial Sequence: Synthetic oligonucleotide
  Sense strand starting at position 3357 of SEQ ID NO: 915135
gaguuugaauuggugaaau

SEQ ID NO: 1056527 - RNA, 19 nt, Artificial Sequence
  Description of Artificial Sequence: Synthetic oligonucleotide
  Antisense strand to SEQ ID NO: 1056526
auuucaccaauucaaacuc

SEQ ID NO: 1056528 - RNA, 19 nt, Artificial Sequence
  Description of Artificial Sequence: Synthetic oligonucleotide
  Sense strand starting at position 3391 of SEQ ID NO: 915135
cagguuuguugacucaaau

SEQ ID NO: 1056529 - RNA, 19 nt, Artificial Sequence
  Description of Artificial Sequence: Synthetic oligonucleotide
  Antisense strand to SEQ ID NO: 1056528
auuugagucaacaaaccug

SEQ ID NO: 1056530 - RNA, 19 nt, Artificial Sequence
  Description of Artificial Sequence: Synthetic oligonucleotide
  Sense strand starting at position 3509 of SEQ ID NO: 915135
caguaagaauaucuguaug

SEQ ID NO: 1056531 - RNA, 19 nt, Artificial Sequence
  Description of Artificial Sequence: Synthetic oligonucleotide
  Antisense strand to SEQ ID NO: 1056530
cauacagauauucuuacug

SEQ ID NO: 1056532 - RNA, 19 nt, Artificial Sequence
  Description of Artificial Sequence: Synthetic oligonucleotide
  Sense strand starting at position 3511 of SEQ ID NO: 915135
guaagaauaucuguaugaa

SEQ ID NO: 1056533 - RNA, 19 nt, Artificial Sequence
  Description of Artificial Sequence: Synthetic oligonucleotide
  Antisense strand to SEQ ID NO: 1056532
uucauacagauauucuuac

SEQ ID NO: 1056534 - RNA, 19 nt, Artificial Sequence
  Description of Artificial Sequence: Synthetic oligonucleotide
  Sense strand starting at position 3873 of SEQ ID NO: 915135
agaauaucuguauguucca

SEQ ID NO: 1056535 - RNA, 19 nt, Artificial Sequence
  Description of Artificial Sequence: Synthetic oligonucleotide
  Antisense strand to SEQ ID NO: 1056534
uggaacauacagauauucu

SEQ ID NO: 1056536 - RNA, 19 nt, Artificial Sequence
  Description of Artificial Sequence: Synthetic oligonucleotide
  Sense strand starting at position 324 of SEQ ID NO: 915136
aaugucuacuggcuguuaa

SEQ ID NO: 1056537 - RNA, 19 nt, Artificial Sequence
  Description of Artificial Sequence: Synthetic oligonucleotide
  Antisense strand to SEQ ID NO: 1056536
uuaacagccaguagacauu

SEQ ID NO: 1056538 - RNA, 19 nt, Artificial Sequence
  Description of Artificial Sequence: Synthetic oligonucleotide
  Sense strand starting at position 325 of SEQ ID NO: 915136
augucuacuggcuguuaaa

SEQ ID NO: 1056539 - RNA, 19 nt, Artificial Sequence
  Description of Artificial Sequence: Synthetic oligonucleotide
  Antisense strand to SEQ ID NO: 1056538
uuuaacagccaguagacau

SEQ ID NO: 1056540 - RNA, 19 nt, Artificial Sequence
  Description of Artificial Sequence: Synthetic oligonucleotide
  Sense strand starting at position 335 of SEQ ID NO: 915136
gcuguuaaaugucuuugga

SEQ ID NO: 1056541 - RNA, 19 nt, Artificial Sequence
  Description of Artificial Sequence: Synthetic oligonucleotide
  Antisense strand to SEQ ID NO: 1056540
uccaaagacauuuaacagc

SEQ ID NO: 1056542 - RNA, 19 nt, Artificial Sequence
  Description of Artificial Sequence: Synthetic oligonucleotide
  Sense strand starting at position 337 of SEQ ID NO: 915136
uguuaaaugucuuuggaaa

SEQ ID NO: 1056543 - RNA, 19 nt, Artificial Sequence
  Description of Artificial Sequence: Synthetic oligonucleotide
  Antisense strand to SEQ ID NO: 1056542
uuuccaaagacauuuaaca

SEQ ID NO: 1056544 - RNA, 19 nt, Artificial Sequence
  Description of Artificial Sequence: Synthetic oligonucleotide
  Sense strand starting at position 338 of SEQ ID NO: 915136
guuaaaugucuuuggaaac

SEQ ID NO: 1056545 - RNA, 19 nt, Artificial Sequence
  Description of Artificial Sequence: Synthetic oligonucleotide
  Antisense strand to SEQ ID NO: 1056544
guuuccaaagacauuuaac

SEQ ID NO: 1056546 - RNA, 19 nt, Artificial Sequence
  Description of Artificial Sequence: Synthetic oligonucleotide
  Sense strand starting at position 348 of SEQ ID NO: 915136
uuuggaaacucucaaguaa

SEQ ID NO: 1056547 - RNA, 19 nt, Artificial Sequence
  Description of Artificial Sequence: Synthetic oligonucleotide
  Antisense strand to SEQ ID NO: 1056546
uuacuugagaguuuccaaa

SEQ ID NO: 1056548 - RNA, 19 nt, Artificial Sequence
  Description of Artificial Sequence: Synthetic oligonucleotide
  Sense strand starting at position 363 of SEQ ID NO: 915136
guaauauuguggcuacagu

SEQ ID NO: 1056549 - RNA, 19 nt, Artificial Sequence
  Description of Artificial Sequence: Synthetic oligonucleotide
  Antisense strand to SEQ ID NO: 1056548
acuguagccacaauauuac

SEQ ID NO: 1056550 - RNA, 19 nt, Artificial Sequence
  Description of Artificial Sequence: Synthetic oligonucleotide
  Sense strand starting at position 364 of SEQ ID NO: 915136
uaauauuguggcuacaguu

SEQ ID NO: 1056551 - RNA, 19 nt, Artificial Sequence
  Description of Artificial Sequence: Synthetic oligonucleotide
  Antisense strand to SEQ ID NO: 1056550
aacuguagccacaauauua

SEQ ID NO: 1056552 - RNA, 19 nt, Artificial Sequence
  Description of Artificial Sequence: Synthetic oligonucleotide
  Sense strand starting at position 386 of SEQ ID NO: 915136
cuagcacuuuguuuauuua

SEQ ID NO: 1056553 - RNA, 19 nt, Artificial Sequence
  Description of Artificial Sequence: Synthetic oligonucleotide
  Antisense strand to SEQ ID NO: 1056552
uaaauaaacaaagugcuag

SEQ ID NO: 1056554 - RNA, 19 nt, Artificial Sequence
  Description of Artificial Sequence: Synthetic oligonucleotide
  Sense strand starting at position 705 of SEQ ID NO: 915136
acgccuggccuguuuauau

SEQ ID NO: 1056555 - RNA, 19 nt, Artificial Sequence
  Description of Artificial Sequence: Synthetic oligonucleotide
  Antisense strand to SEQ ID NO: 1056554
auauaaacaggccaggcgu

SEQ ID NO: 1056556 - RNA, 19 nt, Artificial Sequence
  Description of Artificial Sequence: Synthetic oligonucleotide
  Sense strand starting at position 741 of SEQ ID NO: 915136
ggguuaugccuccaggaag

SEQ ID NO: 1056557 - RNA, 19 nt, Artificial Sequence
  Description of Artificial Sequence: Synthetic oligonucleotide
  Antisense strand to SEQ ID NO: 1056556
cuuccuggaggcauaaccc

SEQ ID NO: 1056558 - RNA, 19 nt, Artificial Sequence
  Description of Artificial Sequence: Synthetic oligonucleotide
  Sense strand starting at position 752 of SEQ ID NO: 915136
ccaggaaggugacuacauu

SEQ ID NO: 1056559 - RNA, 19 nt, Artificial Sequence
  Description of Artificial Sequence: Synthetic oligonucleotide
  Antisense strand to SEQ ID NO: 1056558
aauguagucaccuuccugg

SEQ ID NO: 1056560 - RNA, 19 nt, Artificial Sequence
  Description of Artificial Sequence: Synthetic oligonucleotide
  Sense strand starting at position 809 of SEQ ID NO: 915136
acauauaguguaugcucua

SEQ ID NO: 1056561 - RNA, 19 nt, Artificial Sequence
  Description of Artificial Sequence: Synthetic oligonucleotide
  Antisense strand to SEQ ID NO: 1056560
uagagcauacacuauaugu

SEQ ID NO: 1056562 - RNA, 19 nt, Artificial Sequence
  Description of Artificial Sequence: Synthetic oligonucleotide
  Sense strand starting at position 863 of SEQ ID NO: 915136
gggaaagacuugaguggau

SEQ ID NO: 1056563 - RNA, 19 nt, Artificial Sequence
  Description of Artificial Sequence: Synthetic oligonucleotide
  Antisense strand to SEQ ID NO: 1056562
auccacucaagucuuuccc

SEQ ID NO: 1056564 - RNA, 19 nt, Artificial Sequence
  Description of Artificial Sequence: Synthetic oligonucleotide
  Sense strand starting at position 885 of SEQ ID NO: 915136
gucuuagagcaguaucauc

SEQ ID NO: 1056565 - RNA, 19 nt, Artificial Sequence
  Description of Artificial Sequence: Synthetic oligonucleotide
  Antisense strand to SEQ ID NO: 1056564
gaugauacugcucuaagac

SEQ ID NO: 1056566 - RNA, 19 nt, Artificial Sequence
  Description of Artificial Sequence: Synthetic oligonucleotide
  Sense strand starting at position 1031 of SEQ ID NO: 915136
cuuuaaauauggguacuau

SEQ ID NO: 1056567 - RNA, 19 nt, Artificial Sequence
  Description of Artificial Sequence: Synthetic oligonucleotide
  Antisense strand to SEQ ID NO: 1056566
auaguacccauauuuaaag

SEQ ID NO: 1056568 - RNA, 19 nt, Artificial Sequence
  Description of Artificial Sequence: Synthetic oligonucleotide
  Sense strand starting at position 1042 of SEQ ID NO: 915136
gguacuaucuuacccuuau

SEQ ID NO: 1056569 - RNA, 19 nt, Artificial Sequence
  Description of Artificial Sequence: Synthetic oligonucleotide
  Antisense strand to SEQ ID NO: 1056568
auaaggguaagauaguacc

SEQ ID NO: 1056570 - RNA, 19 nt, Artificial Sequence
  Description of Artificial Sequence: Synthetic oligonucleotide
  Sense strand starting at position 2008 of SEQ ID NO: 915136
acagauccuuuaucagguu

SEQ ID NO: 1056571 - RNA, 19 nt, Artificial Sequence
  Description of Artificial Sequence: Synthetic oligonucleotide
  Antisense strand to SEQ ID NO: 1056570
aaccugauaaaggaucugu

SEQ ID NO: 1056572 - RNA, 19 nt, Artificial Sequence
  Description of Artificial Sequence: Synthetic oligonucleotide
  Sense strand starting at position 2038 of SEQ ID NO: 915136
gaaauaauagugcaguuaa

SEQ ID NO: 1056573 - RNA, 19 nt, Artificial Sequence
  Description of Artificial Sequence: Synthetic oligonucleotide
  Antisense strand to SEQ ID NO: 1056572
uuaacugcacuauuauuuc

SEQ ID NO: 1056574 - RNA, 19 nt, Artificial Sequence
  Description of Artificial Sequence: Synthetic oligonucleotide
  Sense strand starting at position 2101 of SEQ ID NO: 915136
agauuuggcucagaauuag

SEQ ID NO: 1056575 - RNA, 19 nt, Artificial Sequence
  Description of Artificial Sequence: Synthetic oligonucleotide
  Antisense strand to SEQ ID NO: 1056574
cuaauucugagccaaaucu

SEQ ID NO: 1056576 - RNA, 19 nt, Artificial Sequence
  Description of Artificial Sequence: Synthetic oligonucleotide
  Sense strand starting at position 2178 of SEQ ID NO: 915136
augaaagauuacccagguu

SEQ ID NO: 1056577 - RNA, 19 nt, Artificial Sequence
  Description of Artificial Sequence: Synthetic oligonucleotide
  Antisense strand to SEQ ID NO: 1056576
aaccuggguaaucuuucau

SEQ ID NO: 1056578 - RNA, 19 nt, Artificial Sequence
  Description of Artificial Sequence: Synthetic oligonucleotide
  Sense strand starting at position 2203 of SEQ ID NO: 915136
ucagucaucccaggagaca

SEQ ID NO: 1056579 - RNA, 19 nt, Artificial Sequence
  Description of Artificial Sequence: Synthetic oligonucleotide
  Antisense strand to SEQ ID NO: 1056578
ugucuccugggaugacuga

SEQ ID NO: 1056580 - RNA, 19 nt, Artificial Sequence
  Description of Artificial Sequence: Synthetic oligonucleotide
  Sense strand starting at position 2254 of SEQ ID NO: 915136
uugcaaguccgugaaucua

SEQ ID NO: 1056581 - RNA, 19 nt, Artificial Sequence
  Description of Artificial Sequence: Synthetic oligonucleotide
  Antisense strand to SEQ ID NO: 1056580
uagauucacggacuugcaa

SEQ ID NO: 1056582 - RNA, 19 nt, Artificial Sequence
  Description of Artificial Sequence: Synthetic oligonucleotide
  Sense strand starting at position 2416 of SEQ ID NO: 915136
acauuuaucugagaaauga

SEQ ID NO: 1056583 - RNA, 19 nt, Artificial Sequence
  Description of Artificial Sequence: Synthetic oligonucleotide
  Antisense strand to SEQ ID NO: 1056582
ucauuucucagauaaaugu

SEQ ID NO: 1056584 - RNA, 19 nt, Artificial Sequence
  Description of Artificial Sequence: Synthetic oligonucleotide
  Sense strand starting at position 2590 of SEQ ID NO: 915136
augccagauuggcuaaauu

SEQ ID NO: 1056585 - RNA, 19 nt, Artificial Sequence
  Description of Artificial Sequence: Synthetic oligonucleotide
  Antisense strand to SEQ ID NO: 1056584
aauuuagccaaucuggcau

SEQ ID NO: 1056586 - RNA, 19 nt, Artificial Sequence
  Description of Artificial Sequence: Synthetic oligonucleotide
  Sense strand starting at position 2677 of SEQ ID NO: 915136
acugcuaguggguguguaa

SEQ ID NO: 1056587 - RNA, 19 nt, Artificial Sequence
  Description of Artificial Sequence: Synthetic oligonucleotide
  Antisense strand to SEQ ID NO: 1056586
uuacacacccacuagcagu

SEQ ID NO: 1056588 - RNA, 19 nt, Artificial Sequence
  Description of Artificial Sequence: Synthetic oligonucleotide
  Sense strand starting at position 2718 of SEQ ID NO: 915136
uuugauuaucucugcuaag

SEQ ID NO: 1056589 - RNA, 19 nt, Artificial Sequence
  Description of Artificial Sequence: Synthetic oligonucleotide
  Antisense strand to SEQ ID NO: 1056588
cuuagcagagauaaucaaa

SEQ ID NO: 1056590 - RNA, 19 nt, Artificial Sequence
  Description of Artificial Sequence: Synthetic oligonucleotide
  Sense strand starting at position 2719 of SEQ ID NO: 915136
uugauuaucucugcuaaga

SEQ ID NO: 1056591 - RNA, 19 nt, Artificial Sequence
  Description of Artificial Sequence: Synthetic oligonucleotide
  Antisense strand to SEQ ID NO: 1056590
ucuuagcagagauaaucaa

SEQ ID NO: 1056592 - RNA, 19 nt, Artificial Sequence
  Description of Artificial Sequence: Synthetic oligonucleotide
  Sense strand starting at position 2729 of SEQ ID NO: 915136
cugcuaagacaguauauaa

SEQ ID NO: 1056593 - RNA, 19 nt, Artificial Sequence
  Description of Artificial Sequence: Synthetic oligonucleotide
  Antisense strand to SEQ ID NO: 1056592
uuauauacugucuuagcag

SEQ ID NO: 1056594 - RNA, 19 nt, Artificial Sequence
  Description of Artificial Sequence: Synthetic oligonucleotide
  Sense strand starting at position 2780 of SEQ ID NO: 915136
aucuacauguaugaugaua

SEQ ID NO: 1056595 - RNA, 19 nt, Artificial Sequence
  Description of Artificial Sequence: Synthetic oligonucleotide
  Antisense strand to SEQ ID NO: 1056594
uaucaucauacauguagau

SEQ ID NO: 1056596 - RNA, 19 nt, Artificial Sequence
  Description of Artificial Sequence: Synthetic oligonucleotide
  Sense strand starting at position 2987 of SEQ ID NO: 915136
gagcuuauagcucacugua

SEQ ID NO: 1056597 - RNA, 19 nt, Artificial Sequence
  Description of Artificial Sequence: Synthetic oligonucleotide
  Antisense strand to SEQ ID NO: 1056596
uacagugagcuauaagcuc

SEQ ID NO: 1056598 - RNA, 19 nt, Artificial Sequence
  Description of Artificial Sequence: Synthetic oligonucleotide
  Sense strand starting at position 3217 of SEQ ID NO: 915136
gccucuuaaguuugauuac

SEQ ID NO: 1056599 - RNA, 19 nt, Artificial Sequence
  Description of Artificial Sequence: Synthetic oligonucleotide
  Antisense strand to SEQ ID NO: 1056598
guaaucaaacuuaagaggc

SEQ ID NO: 1056600 - RNA, 19 nt, Artificial Sequence
  Description of Artificial Sequence: Synthetic oligonucleotide
  Sense strand starting at position 3220 of SEQ ID NO: 915136
ucuuaaguuugauuacaag

SEQ ID NO: 1056601 - RNA, 19 nt, Artificial Sequence
  Description of Artificial Sequence: Synthetic oligonucleotide
  Antisense strand to SEQ ID NO: 1056600
cuuguaaucaaacuuaaga

SEQ ID NO: 1056602 - RNA, 19 nt, Artificial Sequence
  Description of Artificial Sequence: Synthetic oligonucleotide
  Sense strand starting at position 3260 of SEQ ID NO: 915136
aguagcacugauuauaauu

SEQ ID NO: 1056603 - RNA, 19 nt, Artificial Sequence
  Description of Artificial Sequence: Synthetic oligonucleotide
  Antisense strand to SEQ ID NO: 1056602
aauuauaaucagugcuacu

SEQ ID NO: 1056604 - RNA, 19 nt, Artificial Sequence
  Description of Artificial Sequence: Synthetic oligonucleotide
  Sense strand starting at position 3326 of SEQ ID NO: 915136
uaaauaaacuguguuacgu

SEQ ID NO: 1056605 - RNA, 19 nt, Artificial Sequence
  Description of Artificial Sequence: Synthetic oligonucleotide
  Antisense strand to SEQ ID NO: 1056604
acguaacacaguuuauuua

SEQ ID NO: 1056606 - RNA, 19 nt, Artificial Sequence
  Description of Artificial Sequence: Synthetic oligonucleotide
  Sense strand starting at position 3412 of SEQ ID NO: 915136
acauaauguugugcugaau

SEQ ID NO: 1056607 - RNA, 19 nt, Artificial Sequence
  Description of Artificial Sequence: Synthetic oligonucleotide
  Antisense strand to SEQ ID NO: 1056606
auucagcacaacauuaugu

SEQ ID NO: 1056608 - RNA, 19 nt, Artificial Sequence
  Description of Artificial Sequence: Synthetic oligonucleotide
  Sense strand starting at position 3415 of SEQ ID NO: 915136
uaauguugugcugaauaau

SEQ ID NO: 1056609 - RNA, 19 nt, Artificial Sequence
  Description of Artificial Sequence: Synthetic oligonucleotide
  Antisense strand to SEQ ID NO: 1056608
auuauucagcacaacauua

SEQ ID NO: 1056610 - RNA, 19 nt, Artificial Sequence
  Description of Artificial Sequence: Synthetic oligonucleotide
  Sense strand starting at position 3418 of SEQ ID NO: 915136
uguugugcugaauaaucca

SEQ ID NO: 1056611 - RNA, 19 nt, Artificial Sequence
  Description of Artificial Sequence: Synthetic oligonucleotide
  Antisense strand to SEQ ID NO: 1056610
uggauuauucagcacaaca

SEQ ID NO: 1056612 - RNA, 19 nt, Artificial Sequence
  Description of Artificial Sequence: Synthetic oligonucleotide
  Sense strand starting at position 3516 of SEQ ID NO: 915136
gguuuacaccaguaggcau

SEQ ID NO: 1056613 - RNA, 19 nt, Artificial Sequence
  Description of Artificial Sequence: Synthetic oligonucleotide
  Antisense strand to SEQ ID NO: 1056612
augccuacugguguaaacc

SEQ ID NO: 1056614 - RNA, 19 nt, Artificial Sequence
  Description of Artificial Sequence: Synthetic oligonucleotide
  Sense strand starting at position 3835 of SEQ ID NO: 915136
cauugagcuguacauguau

SEQ ID NO: 1056615 - RNA, 19 nt, Artificial Sequence
  Description of Artificial Sequence: Synthetic oligonucleotide
  Antisense strand to SEQ ID NO: 1056614
auacauguacagcucaaug

SEQ ID NO: 1056616 - RNA, 19 nt, Artificial Sequence
  Description of Artificial Sequence: Synthetic oligonucleotide
  Sense strand starting at position 88 of SEQ ID NO: 915137
agaaaugacucacaaauga

SEQ ID NO: 1056617 - RNA, 19 nt, Artificial Sequence
  Description of Artificial Sequence: Synthetic oligonucleotide
  Antisense strand to SEQ ID NO: 1056616
ucauuugugagucauuucu

SEQ ID NO: 1056618 - RNA, 19 nt, Artificial Sequence
  Description of Artificial Sequence: Synthetic oligonucleotide
  Sense strand starting at position 539 of SEQ ID NO: 915137
uuaacuuugggagguauua

SEQ ID NO: 1056619 - RNA, 19 nt, Artificial Sequence
  Description of Artificial Sequence: Synthetic oligonucleotide
  Antisense strand to SEQ ID NO: 1056618
uaauaccucccaaaguuaa

SEQ ID NO: 1056620 - RNA, 19 nt, Artificial Sequence
  Description of Artificial Sequence: Synthetic oligonucleotide
  Sense strand starting at position 550 of SEQ ID NO: 915137
agguauuaaucauaaagag

SEQ ID NO: 1056621 - RNA, 19 nt, Artificial Sequence
  Description of Artificial Sequence: Synthetic oligonucleotide
  Antisense strand to SEQ ID NO: 1056620
cucuuuaugauuaauaccu

SEQ ID NO: 1056622 - RNA, 19 nt, Artificial Sequence
  Description of Artificial Sequence: Synthetic oligonucleotide
  Sense strand starting at position 582 of SEQ ID NO: 915137
cucugaugugcugauaauu

SEQ ID NO: 1056623 - RNA, 19 nt, Artificial Sequence
  Description of Artificial Sequence: Synthetic oligonucleotide
  Antisense strand to SEQ ID NO: 1056622
aauuaucagcacaucagag

SEQ ID NO: 1056624 - RNA, 19 nt, Artificial Sequence
  Description of Artificial Sequence: Synthetic oligonucleotide
  Sense strand starting at position 688 of SEQ ID NO: 915137
uguguuuagacuugaguaa

SEQ ID NO: 1056625 - RNA, 19 nt, Artificial Sequence
  Description of Artificial Sequence: Synthetic oligonucleotide
  Antisense strand to SEQ ID NO: 1056624
uuacucaagucuaaacaca

SEQ ID NO: 1056626 - RNA, 19 nt, Artificial Sequence
  Description of Artificial Sequence: Synthetic oligonucleotide
  Sense strand starting at position 689 of SEQ ID NO: 915137
guguuuagacuugaguaaa

SEQ ID NO: 1056627 - RNA, 19 nt, Artificial Sequence
  Description of Artificial Sequence: Synthetic oligonucleotide
  Antisense strand to SEQ ID NO: 1056626
uuuacucaagucuaaacac

SEQ ID NO: 1056628 - RNA, 19 nt, Artificial Sequence
  Description of Artificial Sequence: Synthetic oligonucleotide
  Sense strand starting at position 919 of SEQ ID NO: 915137
gaugucaauguagaaguau

SEQ ID NO: 1056629 - RNA, 19 nt, Artificial Sequence
  Description of Artificial Sequence: Synthetic oligonucleotide
  Antisense strand to SEQ ID NO: 1056628
auacuucuacauugacauc

SEQ ID NO: 1056630 - RNA, 19 nt, Artificial Sequence
  Description of Artificial Sequence: Synthetic oligonucleotide
  Sense strand starting at position 950 of SEQ ID NO: 915137
gggauaugcuuccuguuug

SEQ ID NO: 1056631 - RNA, 19 nt, Artificial Sequence
  Description of Artificial Sequence: Synthetic oligonucleotide
  Antisense strand to SEQ ID NO: 1056630
caaacaggaagcauauccc

SEQ ID NO: 1056632 - RNA, 19 nt, Artificial Sequence
  Description of Artificial Sequence: Synthetic oligonucleotide
  Sense strand starting at position 2053 of SEQ ID NO: 915137
gcuuacaagucuuuguuaa

SEQ ID NO: 1056633 - RNA, 19 nt, Artificial Sequence
  Description of Artificial Sequence: Synthetic oligonucleotide
  Antisense strand to SEQ ID NO: 1056632
uuaacaaagacuuguaagc

SEQ ID NO: 1056634 - RNA, 19 nt, Artificial Sequence
  Description of Artificial Sequence: Synthetic oligonucleotide
  Sense strand starting at position 2054 of SEQ ID NO: 915137
cuuacaagucuuuguuaag

SEQ ID NO: 1056635 - RNA, 19 nt, Artificial Sequence
  Description of Artificial Sequence: Synthetic oligonucleotide
  Antisense strand to SEQ ID NO: 1056634
cuuaacaaagacuuguaag

SEQ ID NO: 1056636 - RNA, 19 nt, Artificial Sequence
  Description of Artificial Sequence: Synthetic oligonucleotide
  Sense strand starting at position 2055 of SEQ ID NO: 915137
uuacaagucuuuguuaaga

SEQ ID NO: 1056637 - RNA, 19 nt, Artificial Sequence
  Description of Artificial Sequence: Synthetic oligonucleotide
  Antisense strand to SEQ ID NO: 1056636
ucuuaacaaagacuuguaa

SEQ ID NO: 1056638 - RNA, 19 nt, Artificial Sequence
  Description of Artificial Sequence: Synthetic oligonucleotide
  Sense strand starting at position 2139 of SEQ ID NO: 915137
gagaguaaauaucugguau

SEQ ID NO: 1056639 - RNA, 19 nt, Artificial Sequence
  Description of Artificial Sequence: Synthetic oligonucleotide
  Antisense strand to SEQ ID NO: 1056638
auaccagauauuuacucuc

SEQ ID NO: 1056640 - RNA, 19 nt, Artificial Sequence
  Description of Artificial Sequence: Synthetic oligonucleotide
  Sense strand starting at position 2235 of SEQ ID NO: 915137
gugaucaaucccugcccua

SEQ ID NO: 1056641 - RNA, 19 nt, Artificial Sequence
  Description of Artificial Sequence: Synthetic oligonucleotide
  Antisense strand to SEQ ID NO: 1056640
uagggcagggauugaucac

SEQ ID NO: 1056642 - RNA, 19 nt, Artificial Sequence
  Description of Artificial Sequence: Synthetic oligonucleotide
  Sense strand starting at position 2247 of SEQ ID NO: 915137
ugcccuaguagguaugaau

SEQ ID NO: 1056643 - RNA, 19 nt, Artificial Sequence
  Description of Artificial Sequence: Synthetic oligonucleotide
  Antisense strand to SEQ ID NO: 1056642
auucauaccuacuagggca

SEQ ID NO: 1056644 - RNA, 19 nt, Artificial Sequence
  Description of Artificial Sequence: Synthetic oligonucleotide
  Sense strand starting at position 2296 of SEQ ID NO: 915137
uaucauagggaauguuuau

SEQ ID NO: 1056645 - RNA, 19 nt, Artificial Sequence
  Description of Artificial Sequence: Synthetic oligonucleotide
  Antisense strand to SEQ ID NO: 1056644
auaaacauucccuaugaua

SEQ ID NO: 1056646 - RNA, 19 nt, Artificial Sequence
  Description of Artificial Sequence: Synthetic oligonucleotide
  Sense strand starting at position 2408 of SEQ ID NO: 915137
ggaaacaagucauacaaau

SEQ ID NO: 1056647 - RNA, 19 nt, Artificial Sequence
  Description of Artificial Sequence: Synthetic oligonucleotide
  Antisense strand to SEQ ID NO: 1056646
auuuguaugacuuguuucc

SEQ ID NO: 1056648 - RNA, 19 nt, Artificial Sequence
  Description of Artificial Sequence: Synthetic oligonucleotide
  Sense strand starting at position 2469 of SEQ ID NO: 915137
agcacuaagcauuagcaau

SEQ ID NO: 1056649 - RNA, 19 nt, Artificial Sequence
  Description of Artificial Sequence: Synthetic oligonucleotide
  Antisense strand to SEQ ID NO: 1056648
auugcuaaugcuuagugcu

SEQ ID NO: 1056650 - RNA, 19 nt, Artificial Sequence
  Description of Artificial Sequence: Synthetic oligonucleotide
  Sense strand starting at position 2504 of SEQ ID NO: 915137
gggauuugauugcauaaac

SEQ ID NO: 1056651 - RNA, 19 nt, Artificial Sequence
  Description of Artificial Sequence: Synthetic oligonucleotide
  Antisense strand to SEQ ID NO: 1056650
guuuaugcaaucaaauccc

SEQ ID NO: 1056652 - RNA, 19 nt, Artificial Sequence
  Description of Artificial Sequence: Synthetic oligonucleotide
  Sense strand starting at position 2533 of SEQ ID NO: 915137
guuguagguggugaacaaa

SEQ ID NO: 1056653 - RNA, 19 nt, Artificial Sequence
  Description of Artificial Sequence: Synthetic oligonucleotide
  Antisense strand to SEQ ID NO: 1056652
uuuguucaccaccuacaac

SEQ ID NO: 1056654 - RNA, 19 nt, Artificial Sequence
  Description of Artificial Sequence: Synthetic oligonucleotide
  Sense strand starting at position 2558 of SEQ ID NO: 915137
uuaaguuguuagucuugaa

SEQ ID NO: 1056655 - RNA, 19 nt, Artificial Sequence
  Description of Artificial Sequence: Synthetic oligonucleotide
  Antisense strand to SEQ ID NO: 1056654
uucaagacuaacaacuuaa

SEQ ID NO: 1056656 - RNA, 19 nt, Artificial Sequence
  Description of Artificial Sequence: Synthetic oligonucleotide
  Sense strand starting at position 2562 of SEQ ID NO: 915137
guuguuagucuugaauguu

SEQ ID NO: 1056657 - RNA, 19 nt, Artificial Sequence
  Description of Artificial Sequence: Synthetic oligonucleotide
  Antisense strand to SEQ ID NO: 1056656
aacauucaagacuaacaac

SEQ ID NO: 1056658 - RNA, 19 nt, Artificial Sequence
  Description of Artificial Sequence: Synthetic oligonucleotide
  Sense strand starting at position 2570 of SEQ ID NO: 915137
ucuugaauguugcugcaaa

SEQ ID NO: 1056659 - RNA, 19 nt, Artificial Sequence
  Description of Artificial Sequence: Synthetic oligonucleotide
  Antisense strand to SEQ ID NO: 1056658
uuugcagcaacauucaaga

SEQ ID NO: 1056660 - RNA, 19 nt, Artificial Sequence
  Description of Artificial Sequence: Synthetic oligonucleotide
  Sense strand starting at position 2903 of SEQ ID NO: 915137
agguuaugaucuucuccau

SEQ ID NO: 1056661 - RNA, 19 nt, Artificial Sequence
  Description of Artificial Sequence: Synthetic oligonucleotide
  Antisense strand to SEQ ID NO: 1056660
auggagaagaucauaaccu

SEQ ID NO: 1056662 - RNA, 19 nt, Artificial Sequence
  Description of Artificial Sequence: Synthetic oligonucleotide
  Sense strand starting at position 3152 of SEQ ID NO: 915137
ggcacagaauguucucaga

SEQ ID NO: 1056663 - RNA, 19 nt, Artificial Sequence
  Description of Artificial Sequence: Synthetic oligonucleotide
  Antisense strand to SEQ ID NO: 1056662
ucugagaacauucugugcc

SEQ ID NO: 1056664 - RNA, 19 nt, Artificial Sequence
  Description of Artificial Sequence: Synthetic oligonucleotide
  Sense strand starting at position 3208 of SEQ ID NO: 915137
guuuacuaacaacguaauu

SEQ ID NO: 1056665 - RNA, 19 nt, Artificial Sequence
  Description of Artificial Sequence: Synthetic oligonucleotide
  Antisense strand to SEQ ID NO: 1056664
aauuacguuguuaguaaac

SEQ ID NO: 1056666 - RNA, 19 nt, Artificial Sequence
  Description of Artificial Sequence: Synthetic oligonucleotide
  Sense strand starting at position 3234 of SEQ ID NO: 915137
cuauaauuguugucuuggu

SEQ ID NO: 1056667 - RNA, 19 nt, Artificial Sequence
  Description of Artificial Sequence: Synthetic oligonucleotide
  Antisense strand to SEQ ID NO: 1056666
accaagacaacaauuauag

SEQ ID NO: 1056668 - RNA, 19 nt, Artificial Sequence
  Description of Artificial Sequence: Synthetic oligonucleotide
  Sense strand starting at position 3338 of SEQ ID NO: 915137
guuuaacuacuacaauguu

SEQ ID NO: 1056669 - RNA, 19 nt, Artificial Sequence
  Description of Artificial Sequence: Synthetic oligonucleotide
  Antisense strand to SEQ ID NO: 1056668
aacauuguaguaguuaaac

SEQ ID NO: 1056670 - RNA, 19 nt, Artificial Sequence
  Description of Artificial Sequence: Synthetic oligonucleotide
  Sense strand starting at position 3396 of SEQ ID NO: 915137
cuuuauaauuuggaggcaa

SEQ ID NO: 1056671 - RNA, 19 nt, Artificial Sequence
  Description of Artificial Sequence: Synthetic oligonucleotide
  Antisense strand to SEQ ID NO: 1056670
uugccuccaaauuauaaag

SEQ ID NO: 1056672 - RNA, 19 nt, Artificial Sequence
  Description of Artificial Sequence: Synthetic oligonucleotide
  Sense strand starting at position 3524 of SEQ ID NO: 915137
uccucuguguacuuagaga

SEQ ID NO: 1056673 - RNA, 19 nt, Artificial Sequence
  Description of Artificial Sequence: Synthetic oligonucleotide
  Antisense strand to SEQ ID NO: 1056672
ucucuaaguacacagagga

SEQ ID NO: 1056674 - RNA, 19 nt, Artificial Sequence
  Description of Artificial Sequence: Synthetic oligonucleotide
  Sense strand starting at position 3529 of SEQ ID NO: 915137
uguguacuuagagauugau

SEQ ID NO: 1056675 - RNA, 19 nt, Artificial Sequence
  Description of Artificial Sequence: Synthetic oligonucleotide
  Antisense strand to SEQ ID NO: 1056674
aucaaucucuaaguacaca

SEQ ID NO: 1056676 - RNA, 19 nt, Artificial Sequence
  Description of Artificial Sequence: Synthetic oligonucleotide
  Sense strand starting at position 3532 of SEQ ID NO: 915137
guacuuagagauugaugcu

SEQ ID NO: 1056677 - RNA, 19 nt, Artificial Sequence
  Description of Artificial Sequence: Synthetic oligonucleotide
  Antisense strand to SEQ ID NO: 1056676
agcaucaaucucuaaguac

SEQ ID NO: 1056678 - RNA, 19 nt, Artificial Sequence
  Description of Artificial Sequence: Synthetic oligonucleotide
  Sense strand starting at position 3611 of SEQ ID NO: 915137
ggaugauaucguugugcua

SEQ ID NO: 1056679 - RNA, 19 nt, Artificial Sequence
  Description of Artificial Sequence: Synthetic oligonucleotide
  Antisense strand to SEQ ID NO: 1056678
uagcacaacgauaucaucc

SEQ ID NO: 1056680 - RNA, 19 nt, Artificial Sequence
  Description of Artificial Sequence: Synthetic oligonucleotide
  Sense strand starting at position 3740 of SEQ ID NO: 915137
ugaguucucugacuccaaa

SEQ ID NO: 1056681 - RNA, 19 nt, Artificial Sequence
  Description of Artificial Sequence: Synthetic oligonucleotide
  Antisense strand to SEQ ID NO: 1056680
uuuggagucagagaacuca

SEQ ID NO: 1056682 - RNA, 19 nt, Artificial Sequence
  Description of Artificial Sequence: Synthetic oligonucleotide
  Sense strand starting at position 3778 of SEQ ID NO: 915137
ucaccauauguccauguga

SEQ ID NO: 1056683 - RNA, 19 nt, Artificial Sequence
  Description of Artificial Sequence: Synthetic oligonucleotide
  Antisense strand to SEQ ID NO: 1056682
ucacauggacauaugguga

SEQ ID NO: 1056684 - RNA, 19 nt, Artificial Sequence
  Description of Artificial Sequence: Synthetic oligonucleotide
  Sense strand starting at position 3780 of SEQ ID NO: 915137
accauauguccaugugaaa

SEQ ID NO: 1056685 - RNA, 19 nt, Artificial Sequence
  Description of Artificial Sequence: Synthetic oligonucleotide
  Antisense strand to SEQ ID NO: 1056684
uuucacauggacauauggu

SEQ ID NO: 1056686 - RNA, 19 nt, Artificial Sequence
  Description of Artificial Sequence: Synthetic oligonucleotide
  Sense strand starting at position 3858 of SEQ ID NO: 915137
uugcauacaugucugaauu

SEQ ID NO: 1056687 - RNA, 19 nt, Artificial Sequence
  Description of Artificial Sequence: Synthetic oligonucleotide
  Antisense strand to SEQ ID NO: 1056686
aauucagacauguaugcaa

SEQ ID NO: 1056688 - RNA, 19 nt, Artificial Sequence
  Description of Artificial Sequence: Synthetic oligonucleotide
  Sense strand starting at position 3860 of SEQ ID NO: 915137
gcauacaugucugaauuuc

SEQ ID NO: 1056689 - RNA, 19 nt, Artificial Sequence
  Description of Artificial Sequence: Synthetic oligonucleotide
  Antisense strand to SEQ ID NO: 1056688
gaaauucagacauguaugc

SEQ ID NO: 1056690 - RNA, 19 nt, Artificial Sequence
  Description of Artificial Sequence: Synthetic oligonucleotide
  Sense strand starting at position 3868 of SEQ ID NO: 915137
gucugaauuucucaggcaa

SEQ ID NO: 1056691 - RNA, 19 nt, Artificial Sequence
  Description of Artificial Sequence: Synthetic oligonucleotide
  Antisense strand to SEQ ID NO: 1056690
uugccugagaaauucagac

SEQ ID NO: 1056692 - RNA, 19 nt, Artificial Sequence
  Description of Artificial Sequence: Synthetic oligonucleotide
  Sense strand starting at position 3870 of SEQ ID NO: 915137
cugaauuucucaggcaaag

SEQ ID NO: 1056693 - RNA, 19 nt, Artificial Sequence
  Description of Artificial Sequence: Synthetic oligonucleotide
  Antisense strand to SEQ ID NO: 1056692
cuuugccugagaaauucag

SEQ ID NO: 1056694 - RNA, 19 nt, Artificial Sequence
  Description of Artificial Sequence: Synthetic oligonucleotide
  Sense strand starting at position 3888 of SEQ ID NO: 915137
guaggacacuucuugaauu

SEQ ID NO: 1056695 - RNA, 19 nt, Artificial Sequence
  Description of Artificial Sequence: Synthetic oligonucleotide
  Antisense strand to SEQ ID NO: 1056694
aauucaagaaguguccuac

SEQ ID NO: 1056696 - RNA, 19 nt, Artificial Sequence
  Description of Artificial Sequence: Synthetic oligonucleotide
  Sense strand starting at position 74 of SEQ ID NO: 915138
gacuuugauuuaggucuuu

SEQ ID NO: 1056697 - RNA, 19 nt, Artificial Sequence
  Description of Artificial Sequence: Synthetic oligonucleotide
  Antisense strand to SEQ ID NO: 1056696
aaagaccuaaaucaaaguc

SEQ ID NO: 1056698 - RNA, 19 nt, Artificial Sequence
  Description of Artificial Sequence: Synthetic oligonucleotide
  Sense strand starting at position 99 of SEQ ID NO: 915138
ucuuauagguccucucaca

SEQ ID NO: 1056699 - RNA, 19 nt, Artificial Sequence
  Description of Artificial Sequence: Synthetic oligonucleotide
  Antisense strand to SEQ ID NO: 1056698
ugugagaggaccuauaaga

SEQ ID NO: 1056700 - RNA, 19 nt, Artificial Sequence
  Description of Artificial Sequence: Synthetic oligonucleotide
  Sense strand starting at position 118 of SEQ ID NO: 915138
gccuucugaagcugguauu

SEQ ID NO: 1056701 - RNA, 19 nt, Artificial Sequence
  Description of Artificial Sequence: Synthetic oligonucleotide
  Antisense strand to SEQ ID NO: 1056700
aauaccagcuucagaaggc

SEQ ID NO: 1056702 - RNA, 19 nt, Artificial Sequence
  Description of Artificial Sequence: Synthetic oligonucleotide
  Sense strand starting at position 137 of SEQ ID NO: 915138
gucaauaucuccuucugua

SEQ ID NO: 1056703 - RNA, 19 nt, Artificial Sequence
  Description of Artificial Sequence: Synthetic oligonucleotide
  Antisense strand to SEQ ID NO: 1056702
uacagaaggagauauugac

SEQ ID NO: 1056704 - RNA, 19 nt, Artificial Sequence
  Description of Artificial Sequence: Synthetic oligonucleotide
  Sense strand starting at position 171 of SEQ ID NO: 915138
gcccaaugagguuacauga

SEQ ID NO: 1056705 - RNA, 19 nt, Artificial Sequence
  Description of Artificial Sequence: Synthetic oligonucleotide
  Antisense strand to SEQ ID NO: 1056704
ucauguaaccucauugggc

SEQ ID NO: 1056706 - RNA, 19 nt, Artificial Sequence
  Description of Artificial Sequence: Synthetic oligonucleotide
  Sense strand starting at position 180 of SEQ ID NO: 915138
gguuacaugacccacgaau

SEQ ID NO: 1056707 - RNA, 19 nt, Artificial Sequence
  Description of Artificial Sequence: Synthetic oligonucleotide
  Antisense strand to SEQ ID NO: 1056706
auucgugggucauguaacc

SEQ ID NO: 1056708 - RNA, 19 nt, Artificial Sequence
  Description of Artificial Sequence: Synthetic oligonucleotide
  Sense strand starting at position 438 of SEQ ID NO: 915138
ccugcuugguguccauuua

SEQ ID NO: 1056709 - RNA, 19 nt, Artificial Sequence
  Description of Artificial Sequence: Synthetic oligonucleotide
  Antisense strand to SEQ ID NO: 1056708
uaaauggacaccaagcagg

SEQ ID NO: 1056710 - RNA, 19 nt, Artificial Sequence
  Description of Artificial Sequence: Synthetic oligonucleotide
  Sense strand starting at position 446 of SEQ ID NO: 915138
guguccauuuagucacacu

SEQ ID NO: 1056711 - RNA, 19 nt, Artificial Sequence
  Description of Artificial Sequence: Synthetic oligonucleotide
  Antisense strand to SEQ ID NO: 1056710
agugugacuaaauggacac

SEQ ID NO: 1056712 - RNA, 19 nt, Artificial Sequence
  Description of Artificial Sequence: Synthetic oligonucleotide
  Sense strand starting at position 500 of SEQ ID NO: 915138
gacuuagggaccuguguuc

SEQ ID NO: 1056713 - RNA, 19 nt, Artificial Sequence
  Description of Artificial Sequence: Synthetic oligonucleotide
  Antisense strand to SEQ ID NO: 1056712
gaacacaggucccuaaguc

SEQ ID NO: 1056714 - RNA, 19 nt, Artificial Sequence
  Description of Artificial Sequence: Synthetic oligonucleotide
  Sense strand starting at position 526 of SEQ ID NO: 915138
cacccugcucuggaguuaa

SEQ ID NO: 1056715 - RNA, 19 nt, Artificial Sequence
  Description of Artificial Sequence: Synthetic oligonucleotide
  Antisense strand to SEQ ID NO: 1056714
uuaacuccagagcagggug

SEQ ID NO: 1056716 - RNA, 19 nt, Artificial Sequence
  Description of Artificial Sequence: Synthetic oligonucleotide
  Sense strand starting at position 537 of SEQ ID NO: 915138
ggaguuaaaguguaacuuu

SEQ ID NO: 1056717 - RNA, 19 nt, Artificial Sequence
  Description of Artificial Sequence: Synthetic oligonucleotide
  Antisense strand to SEQ ID NO: 1056716
aaaguuacacuuuaacucc

SEQ ID NO: 1056718 - RNA, 19 nt, Artificial Sequence
  Description of Artificial Sequence: Synthetic oligonucleotide
  Sense strand starting at position 611 of SEQ ID NO: 915138
gccugcugagagcaugaaa

SEQ ID NO: 1056719 - RNA, 19 nt, Artificial Sequence
  Description of Artificial Sequence: Synthetic oligonucleotide
  Antisense strand to SEQ ID NO: 1056718
uuucaugcucucagcaggc

SEQ ID NO: 1056720 - RNA, 19 nt, Artificial Sequence
  Description of Artificial Sequence: Synthetic oligonucleotide
  Sense strand starting at position 635 of SEQ ID NO: 915138
agaguaaaguggcucuuua

SEQ ID NO: 1056721 - RNA, 19 nt, Artificial Sequence
  Description of Artificial Sequence: Synthetic oligonucleotide
  Antisense strand to SEQ ID NO: 1056720
uaaagagccacuuuacucu

SEQ ID NO: 1056722 - RNA, 19 nt, Artificial Sequence
  Description of Artificial Sequence: Synthetic oligonucleotide
  Sense strand starting at position 676 of SEQ ID NO: 915138
uccauugagcacuguguua

SEQ ID NO: 1056723 - RNA, 19 nt, Artificial Sequence
  Description of Artificial Sequence: Synthetic oligonucleotide
  Antisense strand to SEQ ID NO: 1056722
uaacacagugcucaaugga

SEQ ID NO: 1056724 - RNA, 19 nt, Artificial Sequence
  Description of Artificial Sequence: Synthetic oligonucleotide
  Sense strand starting at position 779 of SEQ ID NO: 915138
ccucacacguuuccugaau

SEQ ID NO: 1056725 - RNA, 19 nt, Artificial Sequence
  Description of Artificial Sequence: Synthetic oligonucleotide
  Antisense strand to SEQ ID NO: 1056724
auucaggaaacgugugagg

SEQ ID NO: 1056726 - RNA, 19 nt, Artificial Sequence
  Description of Artificial Sequence: Synthetic oligonucleotide
  Sense strand starting at position 788 of SEQ ID NO: 915138
uuuccugaaugagcucuua

SEQ ID NO: 1056727 - RNA, 19 nt, Artificial Sequence
  Description of Artificial Sequence: Synthetic oligonucleotide
  Antisense strand to SEQ ID NO: 1056726
uaagagcucauucaggaaa

SEQ ID NO: 1056728 - RNA, 19 nt, Artificial Sequence
  Description of Artificial Sequence: Synthetic oligonucleotide
  Sense strand starting at position 832 of SEQ ID NO: 915138
cuguacucuccuugaggga

SEQ ID NO: 1056729 - RNA, 19 nt, Artificial Sequence
  Description of Artificial Sequence: Synthetic oligonucleotide
  Antisense strand to SEQ ID NO: 1056728
ucccucaaggagaguacag

SEQ ID NO: 1056730 - RNA, 19 nt, Artificial Sequence
  Description of Artificial Sequence: Synthetic oligonucleotide
  Sense strand starting at position 846 of SEQ ID NO: 915138
agggaaagauuauaucuua

SEQ ID NO: 1056731 - RNA, 19 nt, Artificial Sequence
  Description of Artificial Sequence: Synthetic oligonucleotide
  Antisense strand to SEQ ID NO: 1056730
uaagauauaaucuuucccu

SEQ ID NO: 1056732 - RNA, 19 nt, Artificial Sequence
  Description of Artificial Sequence: Synthetic oligonucleotide
  Sense strand starting at position 935 of SEQ ID NO: 915138
guggaauuauuauaacaac

SEQ ID NO: 1056733 - RNA, 19 nt, Artificial Sequence
  Description of Artificial Sequence: Synthetic oligonucleotide
  Antisense strand to SEQ ID NO: 1056732
guuguuauaauaauuccac

SEQ ID NO: 1056734 - RNA, 19 nt, Artificial Sequence
  Description of Artificial Sequence: Synthetic oligonucleotide
  Sense strand starting at position 1024 of SEQ ID NO: 915138
gauggaaagucucccaauu

SEQ ID NO: 1056735 - RNA, 19 nt, Artificial Sequence
  Description of Artificial Sequence: Synthetic oligonucleotide
  Antisense strand to SEQ ID NO: 1056734
aauugggagacuuuccauc

SEQ ID NO: 1056736 - RNA, 19 nt, Artificial Sequence
  Description of Artificial Sequence: Synthetic oligonucleotide
  Sense strand starting at position 1026 of SEQ ID NO: 915138
uggaaagucucccaauuuc

SEQ ID NO: 1056737 - RNA, 19 nt, Artificial Sequence
  Description of Artificial Sequence: Synthetic oligonucleotide
  Antisense strand to SEQ ID NO: 1056736
gaaauugggagacuuucca

SEQ ID NO: 1056738 - RNA, 19 nt, Artificial Sequence
  Description of Artificial Sequence: Synthetic oligonucleotide
  Sense strand starting at position 1999 of SEQ ID NO: 915138
cauggauuaucugcccuga

SEQ ID NO: 1056739 - RNA, 19 nt, Artificial Sequence
  Description of Artificial Sequence: Synthetic oligonucleotide
  Antisense strand to SEQ ID NO: 1056738
ucagggcagauaauccaug

SEQ ID NO: 1056740 - RNA, 19 nt, Artificial Sequence
  Description of Artificial Sequence: Synthetic oligonucleotide
  Sense strand starting at position 2001 of SEQ ID NO: 915138
uggauuaucugcccugaug

SEQ ID NO: 1056741 - RNA, 19 nt, Artificial Sequence
  Description of Artificial Sequence: Synthetic oligonucleotide
  Antisense strand to SEQ ID NO: 1056740
caucagggcagauaaucca

SEQ ID NO: 1056742 - RNA, 19 nt, Artificial Sequence
  Description of Artificial Sequence: Synthetic oligonucleotide
  Sense strand starting at position 2003 of SEQ ID NO: 915138
gauuaucugcccugaugac

SEQ ID NO: 1056743 - RNA, 19 nt, Artificial Sequence
  Description of Artificial Sequence: Synthetic oligonucleotide
  Antisense strand to SEQ ID NO: 1056742
gucaucagggcagauaauc

SEQ ID NO: 1056744 - RNA, 19 nt, Artificial Sequence
  Description of Artificial Sequence: Synthetic oligonucleotide
  Sense strand starting at position 2010 of SEQ ID NO: 915138
ugcccugaugaccgacaaa

SEQ ID NO: 1056745 - RNA, 19 nt, Artificial Sequence
  Description of Artificial Sequence: Synthetic oligonucleotide
  Antisense strand to SEQ ID NO: 1056744
uuugucggucaucagggca

SEQ ID NO: 1056746 - RNA, 19 nt, Artificial Sequence
  Description of Artificial Sequence: Synthetic oligonucleotide
  Sense strand starting at position 2049 of SEQ ID NO: 915138
agacauaaauuaugagaca

SEQ ID NO: 1056747 - RNA, 19 nt, Artificial Sequence
  Description of Artificial Sequence: Synthetic oligonucleotide
  Antisense strand to SEQ ID NO: 1056746
ugucucauaauuuaugucu

SEQ ID NO: 1056748 - RNA, 19 nt, Artificial Sequence
  Description of Artificial Sequence: Synthetic oligonucleotide
  Sense strand starting at position 2486 of SEQ ID NO: 915138
aaggauuucuagugauauc

SEQ ID NO: 1056749 - RNA, 19 nt, Artificial Sequence
  Description of Artificial Sequence: Synthetic oligonucleotide
  Antisense strand to SEQ ID NO: 1056748
gauaucacuagaaauccuu

SEQ ID NO: 1056750 - RNA, 19 nt, Artificial Sequence
  Description of Artificial Sequence: Synthetic oligonucleotide
  Sense strand starting at position 2497 of SEQ ID NO: 915138
gugauaucugcauacuuga

SEQ ID NO: 1056751 - RNA, 19 nt, Artificial Sequence
  Description of Artificial Sequence: Synthetic oligonucleotide
  Antisense strand to SEQ ID NO: 1056750
ucaaguaugcagauaucac

SEQ ID NO: 1056752 - RNA, 19 nt, Artificial Sequence
  Description of Artificial Sequence: Synthetic oligonucleotide
  Sense strand starting at position 2500 of SEQ ID NO: 915138
auaucugcauacuugagau

SEQ ID NO: 1056753 - RNA, 19 nt, Artificial Sequence
  Description of Artificial Sequence: Synthetic oligonucleotide
  Antisense strand to SEQ ID NO: 1056752
aucucaaguaugcagauau

SEQ ID NO: 1056754 - RNA, 19 nt, Artificial Sequence
  Description of Artificial Sequence: Synthetic oligonucleotide
  Sense strand starting at position 2523 of SEQ ID NO: 915138
ggagaugguuaggaacaaa

SEQ ID NO: 1056755 - RNA, 19 nt, Artificial Sequence
  Description of Artificial Sequence: Synthetic oligonucleotide
  Antisense strand to SEQ ID NO: 1056754
uuuguuccuaaccaucucc

SEQ ID NO: 1056756 - RNA, 19 nt, Artificial Sequence
  Description of Artificial Sequence: Synthetic oligonucleotide
  Sense strand starting at position 2549 of SEQ ID NO: 915138
gguugaggcaauuaguauc

SEQ ID NO: 1056757 - RNA, 19 nt, Artificial Sequence
  Description of Artificial Sequence: Synthetic oligonucleotide
  Antisense strand to SEQ ID NO: 1056756
gauacuaauugccucaacc

SEQ ID NO: 1056758 - RNA, 19 nt, Artificial Sequence
  Description of Artificial Sequence: Synthetic oligonucleotide
  Sense strand starting at position 2576 of SEQ ID NO: 915138
ggugguagucaucaagauc

SEQ ID NO: 1056759 - RNA, 19 nt, Artificial Sequence
  Description of Artificial Sequence: Synthetic oligonucleotide
  Antisense strand to SEQ ID NO: 1056758
gaucuugaugacuaccacc

SEQ ID NO: 1056760 - RNA, 19 nt, Artificial Sequence
  Description of Artificial Sequence: Synthetic oligonucleotide
  Sense strand starting at position 2591 of SEQ ID NO: 915138
gaucccugcuuugcagaga

SEQ ID NO: 1056761 - RNA, 19 nt, Artificial Sequence
  Description of Artificial Sequence: Synthetic oligonucleotide
  Antisense strand to SEQ ID NO: 1056760
ucucugcaaagcagggauc

SEQ ID NO: 1056762 - RNA, 19 nt, Artificial Sequence
  Description of Artificial Sequence: Synthetic oligonucleotide
  Sense strand starting at position 2602 of SEQ ID NO: 915138
ugcagagaacgcuagcauu

SEQ ID NO: 1056763 - RNA, 19 nt, Artificial Sequence
  Description of Artificial Sequence: Synthetic oligonucleotide
  Antisense strand to SEQ ID NO: 1056762
aaugcuagcguucucugca

SEQ ID NO: 1056764 - RNA, 19 nt, Artificial Sequence
  Description of Artificial Sequence: Synthetic oligonucleotide
  Sense strand starting at position 2605 of SEQ ID NO: 915138
agagaacgcuagcauuuau

SEQ ID NO: 1056765 - RNA, 19 nt, Artificial Sequence
  Description of Artificial Sequence: Synthetic oligonucleotide
  Antisense strand to SEQ ID NO: 1056764
auaaaugcuagcguucucu

SEQ ID NO: 1056766 - RNA, 19 nt, Artificial Sequence
  Description of Artificial Sequence: Synthetic oligonucleotide
  Sense strand starting at position 3081 of SEQ ID NO: 915138
gugucauuaucauuccaga

SEQ ID NO: 1056767 - RNA, 19 nt, Artificial Sequence
  Description of Artificial Sequence: Synthetic oligonucleotide
  Antisense strand to SEQ ID NO: 1056766
ucuggaaugauaaugacac

SEQ ID NO: 1056768 - RNA, 19 nt, Artificial Sequence
  Description of Artificial Sequence: Synthetic oligonucleotide
  Sense strand starting at position 3146 of SEQ ID NO: 915138
guuacauggcugcacaaua

SEQ ID NO: 1056769 - RNA, 19 nt, Artificial Sequence
  Description of Artificial Sequence: Synthetic oligonucleotide
  Antisense strand to SEQ ID NO: 1056768
uauugugcagccauguaac

SEQ ID NO: 1056770 - RNA, 19 nt, Artificial Sequence
  Description of Artificial Sequence: Synthetic oligonucleotide
  Sense strand starting at position 3364 of SEQ ID NO: 915138
ccucaaaucugggucaaca

SEQ ID NO: 1056771 - RNA, 19 nt, Artificial Sequence
  Description of Artificial Sequence: Synthetic oligonucleotide
  Antisense strand to SEQ ID NO: 1056770
uguugacccagauuugagg

SEQ ID NO: 1056772 - RNA, 19 nt, Artificial Sequence
  Description of Artificial Sequence: Synthetic oligonucleotide
  Sense strand starting at position 3378 of SEQ ID NO: 915138
caacauugacgucagcuaa

SEQ ID NO: 1056773 - RNA, 19 nt, Artificial Sequence
  Description of Artificial Sequence: Synthetic oligonucleotide
  Antisense strand to SEQ ID NO: 1056772
uuagcugacgucaauguug

SEQ ID NO: 1056774 - RNA, 19 nt, Artificial Sequence
  Description of Artificial Sequence: Synthetic oligonucleotide
  Sense strand starting at position 3471 of SEQ ID NO: 915138
ccauuauaugcuuguguca

SEQ ID NO: 1056775 - RNA, 19 nt, Artificial Sequence
  Description of Artificial Sequence: Synthetic oligonucleotide
  Antisense strand to SEQ ID NO: 1056774
ugacacaagcauauaaugg

SEQ ID NO: 1056776 - RNA, 19 nt, Artificial Sequence
  Description of Artificial Sequence: Synthetic oligonucleotide
  Sense strand starting at position 74 of SEQ ID NO: 915139
ggaaauaccagcuggugaa

SEQ ID NO: 1056777 - RNA, 19 nt, Artificial Sequence
  Description of Artificial Sequence: Synthetic oligonucleotide
  Antisense strand to SEQ ID NO: 1056776
uucaccagcugguauuucc

SEQ ID NO: 1056778 - RNA, 19 nt, Artificial Sequence
  Description of Artificial Sequence: Synthetic oligonucleotide
  Sense strand starting at position 75 of SEQ ID NO: 915139
gaaauaccagcuggugaaa

SEQ ID NO: 1056779 - RNA, 19 nt, Artificial Sequence
  Description of Artificial Sequence: Synthetic oligonucleotide
  Antisense strand to SEQ ID NO: 1056778
uuucaccagcugguauuuc

SEQ ID NO: 1056780 - RNA, 19 nt, Artificial Sequence
  Description of Artificial Sequence: Synthetic oligonucleotide
  Sense strand starting at position 116 of SEQ ID NO: 915139
aauagagaacaguguuacu

SEQ ID NO: 1056781 - RNA, 19 nt, Artificial Sequence
  Description of Artificial Sequence: Synthetic oligonucleotide
  Antisense strand to SEQ ID NO: 1056780
aguaacacuguucucuauu

SEQ ID NO: 1056782 - RNA, 19 nt, Artificial Sequence
  Description of Artificial Sequence: Synthetic oligonucleotide
  Sense strand starting at position 121 of SEQ ID NO: 915139
agaacaguguuacuaagua

SEQ ID NO: 1056783 - RNA, 19 nt, Artificial Sequence
  Description of Artificial Sequence: Synthetic oligonucleotide
  Antisense strand to SEQ ID NO: 1056782
uacuuaguaacacuguucu

SEQ ID NO: 1056784 - RNA, 19 nt, Artificial Sequence
  Description of Artificial Sequence: Synthetic oligonucleotide
  Sense strand starting at position 159 of SEQ ID NO: 915139
ggaaguuauagccaucuga

SEQ ID NO: 1056785 - RNA, 19 nt, Artificial Sequence
  Description of Artificial Sequence: Synthetic oligonucleotide
  Antisense strand to SEQ ID NO: 1056784
ucagauggcuauaacuucc

SEQ ID NO: 1056786 - RNA, 19 nt, Artificial Sequence
  Description of Artificial Sequence: Synthetic oligonucleotide
  Sense strand starting at position 331 of SEQ ID NO: 915139
agguaagaauuccucuaua

SEQ ID NO: 1056787 - RNA, 19 nt, Artificial Sequence
  Description of Artificial Sequence: Synthetic oligonucleotide
  Antisense strand to SEQ ID NO: 1056786
uauagaggaauucuuaccu

SEQ ID NO: 1056788 - RNA, 19 nt, Artificial Sequence
  Description of Artificial Sequence: Synthetic oligonucleotide
  Sense strand starting at position 405 of SEQ ID NO: 915139
ccaguauuaauguggagga

SEQ ID NO: 1056789 - RNA, 19 nt, Artificial Sequence
  Description of Artificial Sequence: Synthetic oligonucleotide
  Antisense strand to SEQ ID NO: 1056788
uccuccacauuaauacugg

SEQ ID NO: 1056790 - RNA, 19 nt, Artificial Sequence
  Description of Artificial Sequence: Synthetic oligonucleotide
  Sense strand starting at position 409 of SEQ ID NO: 915139
uauuaauguggaggacagu

SEQ ID NO: 1056791 - RNA, 19 nt, Artificial Sequence
  Description of Artificial Sequence: Synthetic oligonucleotide
  Antisense strand to SEQ ID NO: 1056790
acuguccuccacauuaaua

SEQ ID NO: 1056792 - RNA, 19 nt, Artificial Sequence
  Description of Artificial Sequence: Synthetic oligonucleotide
  Sense strand starting at position 442 of SEQ ID NO: 915139
gcacaaggauaagugaaau

SEQ ID NO: 1056793 - RNA, 19 nt, Artificial Sequence
  Description of Artificial Sequence: Synthetic oligonucleotide
  Antisense strand to SEQ ID NO: 1056792
auuucacuuauccuugugc

SEQ ID NO: 1056794 - RNA, 19 nt, Artificial Sequence
  Description of Artificial Sequence: Synthetic oligonucleotide
  Sense strand starting at position 452 of SEQ ID NO: 915139
aagugaaaucuacagugug

SEQ ID NO: 1056795 - RNA, 19 nt, Artificial Sequence
  Description of Artificial Sequence: Synthetic oligonucleotide
  Antisense strand to SEQ ID NO: 1056794
cacacuguagauuucacuu

SEQ ID NO: 1056796 - RNA, 19 nt, Artificial Sequence
  Description of Artificial Sequence: Synthetic oligonucleotide
  Sense strand starting at position 455 of SEQ ID NO: 915139
ugaaaucuacagugugaac

SEQ ID NO: 1056797 - RNA, 19 nt, Artificial Sequence
  Description of Artificial Sequence: Synthetic oligonucleotide
  Antisense strand to SEQ ID NO: 1056796
guucacacuguagauuuca

SEQ ID NO: 1056798 - RNA, 19 nt, Artificial Sequence
  Description of Artificial Sequence: Synthetic oligonucleotide
  Sense strand starting at position 572 of SEQ ID NO: 915139
aggguagaggauuguuuau

SEQ ID NO: 1056799 - RNA, 19 nt, Artificial Sequence
  Description of Artificial Sequence: Synthetic oligonucleotide
  Antisense strand to SEQ ID NO: 1056798
auaaacaauccucuacccu

SEQ ID NO: 1056800 - RNA, 19 nt, Artificial Sequence
  Description of Artificial Sequence: Synthetic oligonucleotide
  Sense strand starting at position 781 of SEQ ID NO: 915139
agaaaucuguccucaaagg

SEQ ID NO: 1056801 - RNA, 19 nt, Artificial Sequence
  Description of Artificial Sequence: Synthetic oligonucleotide
  Antisense strand to SEQ ID NO: 1056800
ccuuugaggacagauuucu

SEQ ID NO: 1056802 - RNA, 19 nt, Artificial Sequence
  Description of Artificial Sequence: Synthetic oligonucleotide
  Sense strand starting at position 872 of SEQ ID NO: 915139
ucaggaaguuaucuaauua

SEQ ID NO: 1056803 - RNA, 19 nt, Artificial Sequence
  Description of Artificial Sequence: Synthetic oligonucleotide
  Antisense strand to SEQ ID NO: 1056802
uaauuagauaacuuccuga

SEQ ID NO: 1056804 - RNA, 19 nt, Artificial Sequence
  Description of Artificial Sequence: Synthetic oligonucleotide
  Sense strand starting at position 944 of SEQ ID NO: 915139
auguguuauugucucauuu

SEQ ID NO: 1056805 - RNA, 19 nt, Artificial Sequence
  Description of Artificial Sequence: Synthetic oligonucleotide
  Antisense strand to SEQ ID NO: 1056804
aaaugagacaauaacacau

SEQ ID NO: 1056806 - RNA, 19 nt, Artificial Sequence
  Description of Artificial Sequence: Synthetic oligonucleotide
  Sense strand starting at position 968 of SEQ ID NO: 915139
cuccaaaucccaugagguu

SEQ ID NO: 1056807 - RNA, 19 nt, Artificial Sequence
  Description of Artificial Sequence: Synthetic oligonucleotide
  Antisense strand to SEQ ID NO: 1056806
aaccucaugggauuuggag

SEQ ID NO: 1056808 - RNA, 19 nt, Artificial Sequence
  Description of Artificial Sequence: Synthetic oligonucleotide
  Sense strand starting at position 995 of SEQ ID NO: 915139
cuugauugcacagaugagu

SEQ ID NO: 1056809 - RNA, 19 nt, Artificial Sequence
  Description of Artificial Sequence: Synthetic oligonucleotide
  Antisense strand to SEQ ID NO: 1056808
acucaucugugcaaucaag

SEQ ID NO: 1056810 - RNA, 19 nt, Artificial Sequence
  Description of Artificial Sequence: Synthetic oligonucleotide
  Sense strand starting at position 1037 of SEQ ID NO: 915139
ggucaucuagcuuaaauua

SEQ ID NO: 1056811 - RNA, 19 nt, Artificial Sequence
  Description of Artificial Sequence: Synthetic oligonucleotide
  Antisense strand to SEQ ID NO: 1056810
uaauuuaagcuagaugacc

SEQ ID NO: 1056812 - RNA, 19 nt, Artificial Sequence
  Description of Artificial Sequence: Synthetic oligonucleotide
  Sense strand starting at position 2138 of SEQ ID NO: 915139
gcaugcauacuugaagaaa

SEQ ID NO: 1056813 - RNA, 19 nt, Artificial Sequence
  Description of Artificial Sequence: Synthetic oligonucleotide
  Antisense strand to SEQ ID NO: 1056812
uuucuucaaguaugcaugc

SEQ ID NO: 1056814 - RNA, 19 nt, Artificial Sequence
  Description of Artificial Sequence: Synthetic oligonucleotide
  Sense strand starting at position 2424 of SEQ ID NO: 915139
ucuggaaaugauugcuuua

SEQ ID NO: 1056815 - RNA, 19 nt, Artificial Sequence
  Description of Artificial Sequence: Synthetic oligonucleotide
  Antisense strand to SEQ ID NO: 1056814
uaaagcaaucauuuccaga

SEQ ID NO: 1056816 - RNA, 19 nt, Artificial Sequence
  Description of Artificial Sequence: Synthetic oligonucleotide
  Sense strand starting at position 2426 of SEQ ID NO: 915139
uggaaaugauugcuuuauu

SEQ ID NO: 1056817 - RNA, 19 nt, Artificial Sequence
  Description of Artificial Sequence: Synthetic oligonucleotide
  Antisense strand to SEQ ID NO: 1056816
aauaaagcaaucauuucca

SEQ ID NO: 1056818 - RNA, 19 nt, Artificial Sequence
  Description of Artificial Sequence: Synthetic oligonucleotide
  Sense strand starting at position 2528 of SEQ ID NO: 915139
ucugcaauuucucugcaag

SEQ ID NO: 1056819 - RNA, 19 nt, Artificial Sequence
  Description of Artificial Sequence: Synthetic oligonucleotide
  Antisense strand to SEQ ID NO: 1056818
cuugcagagaaauugcaga

SEQ ID NO: 1056820 - RNA, 19 nt, Artificial Sequence
  Description of Artificial Sequence: Synthetic oligonucleotide
  Sense strand starting at position 2529 of SEQ ID NO: 915139
cugcaauuucucugcaagu

SEQ ID NO: 1056821 - RNA, 19 nt, Artificial Sequence
  Description of Artificial Sequence: Synthetic oligonucleotide
  Antisense strand to SEQ ID NO: 1056820
acuugcagagaaauugcag

SEQ ID NO: 1056822 - RNA, 19 nt, Artificial Sequence
  Description of Artificial Sequence: Synthetic oligonucleotide
  Sense strand starting at position 2530 of SEQ ID NO: 915139
ugcaauuucucugcaaguu

SEQ ID NO: 1056823 - RNA, 19 nt, Artificial Sequence
  Description of Artificial Sequence: Synthetic oligonucleotide
  Antisense strand to SEQ ID NO: 1056822
aacuugcagagaaauugca

SEQ ID NO: 1056824 - RNA, 19 nt, Artificial Sequence
  Description of Artificial Sequence: Synthetic oligonucleotide
  Sense strand starting at position 2531 of SEQ ID NO: 915139
gcaauuucucugcaaguuu

SEQ ID NO: 1056825 - RNA, 19 nt, Artificial Sequence
  Description of Artificial Sequence: Synthetic oligonucleotide
  Antisense strand to SEQ ID NO: 1056824
aaacuugcagagaaauugc

SEQ ID NO: 1056826 - RNA, 19 nt, Artificial Sequence
  Description of Artificial Sequence: Synthetic oligonucleotide
  Sense strand starting at position 2632 of SEQ ID NO: 915139
gagcccugauagucaagau

SEQ ID NO: 1056827 - RNA, 19 nt, Artificial Sequence
  Description of Artificial Sequence: Synthetic oligonucleotide
  Antisense strand to SEQ ID NO: 1056826
aucuugacuaucagggcuc

SEQ ID NO: 1056828 - RNA, 19 nt, Artificial Sequence
  Description of Artificial Sequence: Synthetic oligonucleotide
  Sense strand starting at position 2650 of SEQ ID NO: 915139
uguagugugagguaauaga

SEQ ID NO: 1056829 - RNA, 19 nt, Artificial Sequence
  Description of Artificial Sequence: Synthetic oligonucleotide
  Antisense strand to SEQ ID NO: 1056828
ucuauuaccucacacuaca

SEQ ID NO: 1056830 - RNA, 19 nt, Artificial Sequence
  Description of Artificial Sequence: Synthetic oligonucleotide
  Sense strand starting at position 2963 of SEQ ID NO: 915139
guaauuucuccaugugcaa

SEQ ID NO: 1056831 - RNA, 19 nt, Artificial Sequence
  Description of Artificial Sequence: Synthetic oligonucleotide
  Antisense strand to SEQ ID NO: 1056830
uugcacauggagaaauuac

SEQ ID NO: 1056832 - RNA, 19 nt, Artificial Sequence
  Description of Artificial Sequence: Synthetic oligonucleotide
  Sense strand starting at position 3010 of SEQ ID NO: 915139
cugacuuugcuuuguauuu

SEQ ID NO: 1056833 - RNA, 19 nt, Artificial Sequence
  Description of Artificial Sequence: Synthetic oligonucleotide
  Antisense strand to SEQ ID NO: 1056832
aaauacaaagcaaagucag

SEQ ID NO: 1056834 - RNA, 19 nt, Artificial Sequence
  Description of Artificial Sequence: Synthetic oligonucleotide
  Sense strand starting at position 3075 of SEQ ID NO: 915139
agagaagacugucccuuaa

SEQ ID NO: 1056835 - RNA, 19 nt, Artificial Sequence
  Description of Artificial Sequence: Synthetic oligonucleotide
  Antisense strand to SEQ ID NO: 1056834
uuaagggacagucuucucu

SEQ ID NO: 1056836 - RNA, 19 nt, Artificial Sequence
  Description of Artificial Sequence: Synthetic oligonucleotide
  Sense strand starting at position 3077 of SEQ ID NO: 915139
agaagacugucccuuaaug

SEQ ID NO: 1056837 - RNA, 19 nt, Artificial Sequence
  Description of Artificial Sequence: Synthetic oligonucleotide
  Antisense strand to SEQ ID NO: 1056836
cauuaagggacagucuucu

SEQ ID NO: 1056838 - RNA, 19 nt, Artificial Sequence
  Description of Artificial Sequence: Synthetic oligonucleotide
  Sense strand starting at position 3281 of SEQ ID NO: 915139
gggucauugguacauggau

SEQ ID NO: 1056839 - RNA, 19 nt, Artificial Sequence
  Description of Artificial Sequence: Synthetic oligonucleotide
  Antisense strand to SEQ ID NO: 1056838
auccauguaccaaugaccc

SEQ ID NO: 1056840 - RNA, 19 nt, Artificial Sequence
  Description of Artificial Sequence: Synthetic oligonucleotide
  Sense strand starting at position 3342 of SEQ ID NO: 915139
ggauucuuucgcuaaucaa

SEQ ID NO: 1056841 - RNA, 19 nt, Artificial Sequence
  Description of Artificial Sequence: Synthetic oligonucleotide
  Antisense strand to SEQ ID NO: 1056840
uugauuagcgaaagaaucc

SEQ ID NO: 1056842 - RNA, 19 nt, Artificial Sequence
  Description of Artificial Sequence: Synthetic oligonucleotide
  Sense strand starting at position 3516 of SEQ ID NO: 915139
ugggaaucuauaggauugu

SEQ ID NO: 1056843 - RNA, 19 nt, Artificial Sequence
  Description of Artificial Sequence: Synthetic oligonucleotide
  Antisense strand to SEQ ID NO: 1056842
acaauccuauagauuccca

SEQ ID NO: 1056844 - RNA, 19 nt, Artificial Sequence
  Description of Artificial Sequence: Synthetic oligonucleotide
  Sense strand starting at position 3564 of SEQ ID NO: 915139
cacaguagucauuacaggu

SEQ ID NO: 1056845 - RNA, 19 nt, Artificial Sequence
  Description of Artificial Sequence: Synthetic oligonucleotide
  Antisense strand to SEQ ID NO: 1056844
accuguaaugacuacugug

SEQ ID NO: 1056846 - RNA, 19 nt, Artificial Sequence
  Description of Artificial Sequence: Synthetic oligonucleotide
  Sense strand starting at position 3581 of SEQ ID NO: 915139
gugugcuaucucuugugca

SEQ ID NO: 1056847 - RNA, 19 nt, Artificial Sequence
  Description of Artificial Sequence: Synthetic oligonucleotide
  Antisense strand to SEQ ID NO: 1056846
ugcacaagagauagcacac

SEQ ID NO: 1056848 - RNA, 19 nt, Artificial Sequence
  Description of Artificial Sequence: Synthetic oligonucleotide
  Sense strand starting at position 3583 of SEQ ID NO: 915139
gugcuaucucuugugcauu

SEQ ID NO: 1056849 - RNA, 19 nt, Artificial Sequence
  Description of Artificial Sequence: Synthetic oligonucleotide
  Antisense strand to SEQ ID NO: 1056848
aaugcacaagagauagcac

SEQ ID NO: 1056850 - RNA, 19 nt, Artificial Sequence
  Description of Artificial Sequence: Synthetic oligonucleotide
  Sense strand starting at position 3689 of SEQ ID NO: 915139
aguuauccugcugaauuaa

SEQ ID NO: 1056851 - RNA, 19 nt, Artificial Sequence
  Description of Artificial Sequence: Synthetic oligonucleotide
  Antisense strand to SEQ ID NO: 1056850
uuaauucagcaggauaacu

SEQ ID NO: 1056852 - RNA, 19 nt, Artificial Sequence
  Description of Artificial Sequence: Synthetic oligonucleotide
  Sense strand starting at position 3827 of SEQ ID NO: 915139
gcacacaagccugaggauu

SEQ ID NO: 1056853 - RNA, 19 nt, Artificial Sequence
  Description of Artificial Sequence: Synthetic oligonucleotide
  Antisense strand to SEQ ID NO: 1056852
aauccucaggcuugugugc

SEQ ID NO: 1056854 - RNA, 19 nt, Artificial Sequence
  Description of Artificial Sequence: Synthetic oligonucleotide
  Sense strand starting at position 3928 of SEQ ID NO: 915139
aucuuaauugcaggauuga

SEQ ID NO: 1056855 - RNA, 19 nt, Artificial Sequence
  Description of Artificial Sequence: Synthetic oligonucleotide
  Antisense strand to SEQ ID NO: 1056854
ucaauccugcaauuaagau

SEQ ID NO: 1056856 - RNA, 19 nt, Artificial Sequence
  Description of Artificial Sequence: Synthetic oligonucleotide
  Sense strand starting at position 196 of SEQ ID NO: 915140
gcucuaauaguguaauuga

SEQ ID NO: 1056857 - RNA, 19 nt, Artificial Sequence
  Description of Artificial Sequence: Synthetic oligonucleotide
  Antisense strand to SEQ ID NO: 1056856
ucaauuacacuauuagagc

SEQ ID NO: 1056858 - RNA, 19 nt, Artificial Sequence
  Description of Artificial Sequence: Synthetic oligonucleotide
  Sense strand starting at position 342 of SEQ ID NO: 915140
cagagaacugcuugaaggu

SEQ ID NO: 1056859 - RNA, 19 nt, Artificial Sequence
  Description of Artificial Sequence: Synthetic oligonucleotide
  Antisense strand to SEQ ID NO: 1056858
accuucaagcaguucucug

SEQ ID NO: 1056860 - RNA, 19 nt, Artificial Sequence
  Description of Artificial Sequence: Synthetic oligonucleotide
  Sense strand starting at position 357 of SEQ ID NO: 915140
aggugaugagucugaaagc

SEQ ID NO: 1056861 - RNA, 19 nt, Artificial Sequence
  Description of Artificial Sequence: Synthetic oligonucleotide
  Antisense strand to SEQ ID NO: 1056860
gcuuucagacucaucaccu

SEQ ID NO: 1056862 - RNA, 19 nt, Artificial Sequence
  Description of Artificial Sequence: Synthetic oligonucleotide
  Sense strand starting at position 367 of SEQ ID NO: 915140
ucugaaagcauguggaaga

SEQ ID NO: 1056863 - RNA, 19 nt, Artificial Sequence
  Description of Artificial Sequence: Synthetic oligonucleotide
  Antisense strand to SEQ ID NO: 1056862
ucuuccacaugcuuucaga

SEQ ID NO: 1056864 - RNA, 19 nt, Artificial Sequence
  Description of Artificial Sequence: Synthetic oligonucleotide
  Sense strand starting at position 545 of SEQ ID NO: 915140
ucuugagaacccugagucu

SEQ ID NO: 1056865 - RNA, 19 nt, Artificial Sequence
  Description of Artificial Sequence: Synthetic oligonucleotide
  Antisense strand to SEQ ID NO: 1056864
agacucaggguucucaaga

SEQ ID NO: 1056866 - RNA, 19 nt, Artificial Sequence
  Description of Artificial Sequence: Synthetic oligonucleotide
  Sense strand starting at position 548 of SEQ ID NO: 915140
ugagaacccugagucuaau

SEQ ID NO: 1056867 - RNA, 19 nt, Artificial Sequence
  Description of Artificial Sequence: Synthetic oligonucleotide
  Antisense strand to SEQ ID NO: 1056866
auuagacucaggguucuca

SEQ ID NO: 1056868 - RNA, 19 nt, Artificial Sequence
  Description of Artificial Sequence: Synthetic oligonucleotide
  Sense strand starting at position 568 of SEQ ID NO: 915140
cuagcaugagcucauguga

SEQ ID NO: 1056869 - RNA, 19 nt, Artificial Sequence
  Description of Artificial Sequence: Synthetic oligonucleotide
  Antisense strand to SEQ ID NO: 1056868
ucacaugagcucaugcuag

SEQ ID NO: 1056870 - RNA, 19 nt, Artificial Sequence
  Description of Artificial Sequence: Synthetic oligonucleotide
  Sense strand starting at position 579 of SEQ ID NO: 915140
ucaugugaaucucuugaca

SEQ ID NO: 1056871 - RNA, 19 nt, Artificial Sequence
  Description of Artificial Sequence: Synthetic oligonucleotide
  Antisense strand to SEQ ID NO: 1056870
ugucaagagauucacauga

SEQ ID NO: 1056872 - RNA, 19 nt, Artificial Sequence
  Description of Artificial Sequence: Synthetic oligonucleotide
  Sense strand starting at position 809 of SEQ ID NO: 915140
ggaagaguuuauucucuuu

SEQ ID NO: 1056873 - RNA, 19 nt, Artificial Sequence
  Description of Artificial Sequence: Synthetic oligonucleotide
  Antisense strand to SEQ ID NO: 1056872
aaagagaauaaacucuucc

SEQ ID NO: 1056874 - RNA, 19 nt, Artificial Sequence
  Description of Artificial Sequence: Synthetic oligonucleotide
  Sense strand starting at position 812 of SEQ ID NO: 915140
agaguuuauucucuuuaga

SEQ ID NO: 1056875 - RNA, 19 nt, Artificial Sequence
  Description of Artificial Sequence: Synthetic oligonucleotide
  Antisense strand to SEQ ID NO: 1056874
ucuaaagagaauaaacucu

SEQ ID NO: 1056876 - RNA, 19 nt, Artificial Sequence
  Description of Artificial Sequence: Synthetic oligonucleotide
  Sense strand starting at position 814 of SEQ ID NO: 915140
aguuuauucucuuuagacc

SEQ ID NO: 1056877 - RNA, 19 nt, Artificial Sequence
  Description of Artificial Sequence: Synthetic oligonucleotide
  Antisense strand to SEQ ID NO: 1056876
ggucuaaagagaauaaacu

SEQ ID NO: 1056878 - RNA, 19 nt, Artificial Sequence
  Description of Artificial Sequence: Synthetic oligonucleotide
  Sense strand starting at position 815 of SEQ ID NO: 915140
guuuauucucuuuagacca

SEQ ID NO: 1056879 - RNA, 19 nt, Artificial Sequence
  Description of Artificial Sequence: Synthetic oligonucleotide
  Antisense strand to SEQ ID NO: 1056878
uggucuaaagagaauaaac

SEQ ID NO: 1056880 - RNA, 19 nt, Artificial Sequence
  Description of Artificial Sequence: Synthetic oligonucleotide
  Sense strand starting at position 2222 of SEQ ID NO: 915140
aguguugcggccuugaagu

SEQ ID NO: 1056881 - RNA, 19 nt, Artificial Sequence
  Description of Artificial Sequence: Synthetic oligonucleotide
  Antisense strand to SEQ ID NO: 1056880
acuucaaggccgcaacacu

SEQ ID NO: 1056882 - RNA, 19 nt, Artificial Sequence
  Description of Artificial Sequence: Synthetic oligonucleotide
  Sense strand starting at position 2263 of SEQ ID NO: 915140
cugauugaaugcucacaag

SEQ ID NO: 1056883 - RNA, 19 nt, Artificial Sequence
  Description of Artificial Sequence: Synthetic oligonucleotide
  Antisense strand to SEQ ID NO: 1056882
cuugugagcauucaaucag

SEQ ID NO: 1056884 - RNA, 19 nt, Artificial Sequence
  Description of Artificial Sequence: Synthetic oligonucleotide
  Sense strand starting at position 2359 of SEQ ID NO: 915140
gcucuuauuugagcccaga

SEQ ID NO: 1056885 - RNA, 19 nt, Artificial Sequence
  Description of Artificial Sequence: Synthetic oligonucleotide
  Antisense strand to SEQ ID NO: 1056884
ucugggcucaaauaagagc

SEQ ID NO: 1056886 - RNA, 19 nt, Artificial Sequence
  Description of Artificial Sequence: Synthetic oligonucleotide
  Sense strand starting at position 2424 of SEQ ID NO: 915140
uaaagagugccugaugucu

SEQ ID NO: 1056887 - RNA, 19 nt, Artificial Sequence
  Description of Artificial Sequence: Synthetic oligonucleotide
  Antisense strand to SEQ ID NO: 1056886
agacaucaggcacucuuua

SEQ ID NO: 1056888 - RNA, 19 nt, Artificial Sequence
  Description of Artificial Sequence: Synthetic oligonucleotide
  Sense strand starting at position 2519 of SEQ ID NO: 915140
ucagaacagucagcuacau

SEQ ID NO: 1056889 - RNA, 19 nt, Artificial Sequence
  Description of Artificial Sequence: Synthetic oligonucleotide
  Antisense strand to SEQ ID NO: 1056888
auguagcugacuguucuga

SEQ ID NO: 1056890 - RNA, 19 nt, Artificial Sequence
  Description of Artificial Sequence: Synthetic oligonucleotide
  Sense strand starting at position 2551 of SEQ ID NO: 915140
ugaauaugcuaagugacau

SEQ ID NO: 1056891 - RNA, 19 nt, Artificial Sequence
  Description of Artificial Sequence: Synthetic oligonucleotide
  Antisense strand to SEQ ID NO: 1056890
augucacuuagcauauuca

SEQ ID NO: 1056892 - RNA, 19 nt, Artificial Sequence
  Description of Artificial Sequence: Synthetic oligonucleotide
  Sense strand starting at position 2693 of SEQ ID NO: 915140
agaauauggaguuaguguu

SEQ ID NO: 1056893 - RNA, 19 nt, Artificial Sequence
  Description of Artificial Sequence: Synthetic oligonucleotide
  Antisense strand to SEQ ID NO: 1056892
aacacuaacuccauauucu

SEQ ID NO: 1056894 - RNA, 19 nt, Artificial Sequence
  Description of Artificial Sequence: Synthetic oligonucleotide
  Sense strand starting at position 2735 of SEQ ID NO: 915140
aaugaaagguguucuagag

SEQ ID NO: 1056895 - RNA, 19 nt, Artificial Sequence
  Description of Artificial Sequence: Synthetic oligonucleotide
  Antisense strand to SEQ ID NO: 1056894
cucuagaacaccuuucauu

SEQ ID NO: 1056896 - RNA, 19 nt, Artificial Sequence
  Description of Artificial Sequence: Synthetic oligonucleotide
  Sense strand starting at position 2743 of SEQ ID NO: 915140
guguucuagagaugaaagg

SEQ ID NO: 1056897 - RNA, 19 nt, Artificial Sequence
  Description of Artificial Sequence: Synthetic oligonucleotide
  Antisense strand to SEQ ID NO: 1056896
ccuuucaucucuagaacac

SEQ ID NO: 1056898 - RNA, 19 nt, Artificial Sequence
  Description of Artificial Sequence: Synthetic oligonucleotide
  Sense strand starting at position 2799 of SEQ ID NO: 915140
guuacucagcuauacacuu

SEQ ID NO: 1056899 - RNA, 19 nt, Artificial Sequence
  Description of Artificial Sequence: Synthetic oligonucleotide
  Antisense strand to SEQ ID NO: 1056898
aaguguauagcugaguaac

SEQ ID NO: 1056900 - RNA, 19 nt, Artificial Sequence
  Description of Artificial Sequence: Synthetic oligonucleotide
  Sense strand starting at position 3069 of SEQ ID NO: 915140
cucauuccacgugauagua

SEQ ID NO: 1056901 - RNA, 19 nt, Artificial Sequence
  Description of Artificial Sequence: Synthetic oligonucleotide
  Antisense strand to SEQ ID NO: 1056900
uacuaucacguggaaugag

SEQ ID NO: 1056902 - RNA, 19 nt, Artificial Sequence
  Description of Artificial Sequence: Synthetic oligonucleotide
  Sense strand starting at position 3117 of SEQ ID NO: 915140
uaagguacucugcagaagu

SEQ ID NO: 1056903 - RNA, 19 nt, Artificial Sequence
  Description of Artificial Sequence: Synthetic oligonucleotide
  Antisense strand to SEQ ID NO: 1056902
acuucugcagaguaccuua

SEQ ID NO: 1056904 - RNA, 19 nt, Artificial Sequence
  Description of Artificial Sequence: Synthetic oligonucleotide
  Sense strand starting at position 3119 of SEQ ID NO: 915140
agguacucugcagaaguga

SEQ ID NO: 1056905 - RNA, 19 nt, Artificial Sequence
  Description of Artificial Sequence: Synthetic oligonucleotide
  Antisense strand to SEQ ID NO: 1056904
ucacuucugcagaguaccu

SEQ ID NO: 1056906 - RNA, 19 nt, Artificial Sequence
  Description of Artificial Sequence: Synthetic oligonucleotide
  Sense strand starting at position 3132 of SEQ ID NO: 915140
aagugagugaugugguaga

SEQ ID NO: 1056907 - RNA, 19 nt, Artificial Sequence
  Description of Artificial Sequence: Synthetic oligonucleotide
  Antisense strand to SEQ ID NO: 1056906
ucuaccacaucacucacuu

SEQ ID NO: 1056908 - RNA, 19 nt, Artificial Sequence
  Description of Artificial Sequence: Synthetic oligonucleotide
  Sense strand starting at position 3137 of SEQ ID NO: 915140
agugaugugguagaagcau

SEQ ID NO: 1056909 - RNA, 19 nt, Artificial Sequence
  Description of Artificial Sequence: Synthetic oligonucleotide
  Antisense strand to SEQ ID NO: 1056908
augcuucuaccacaucacu

SEQ ID NO: 1056910 - RNA, 19 nt, Artificial Sequence
  Description of Artificial Sequence: Synthetic oligonucleotide
  Sense strand starting at position 3145 of SEQ ID NO: 915140
gguagaagcauguacaucu

SEQ ID NO: 1056911 - RNA, 19 nt, Artificial Sequence
  Description of Artificial Sequence: Synthetic oligonucleotide
  Antisense strand to SEQ ID NO: 1056910
agauguacaugcuucuacc

SEQ ID NO: 1056912 - RNA, 19 nt, Artificial Sequence
  Description of Artificial Sequence: Synthetic oligonucleotide
  Sense strand starting at position 3362 of SEQ ID NO: 915140
gauguuuaugcagaaggca

SEQ ID NO: 1056913 - RNA, 19 nt, Artificial Sequence
  Description of Artificial Sequence: Synthetic oligonucleotide
  Antisense strand to SEQ ID NO: 1056912
ugccuucugcauaaacauc

SEQ ID NO: 1056914 - RNA, 19 nt, Artificial Sequence
  Description of Artificial Sequence: Synthetic oligonucleotide
  Sense strand starting at position 3422 of SEQ ID NO: 915140
acucuaucacuaggugagu

SEQ ID NO: 1056915 - RNA, 19 nt, Artificial Sequence
  Description of Artificial Sequence: Synthetic oligonucleotide
  Antisense strand to SEQ ID NO: 1056914
acucaccuagugauagagu

SEQ ID NO: 1056916 - RNA, 19 nt, Artificial Sequence
  Description of Artificial Sequence: Synthetic oligonucleotide
  Sense strand starting at position 3423 of SEQ ID NO: 915140
cucuaucacuaggugagua

SEQ ID NO: 1056917 - RNA, 19 nt, Artificial Sequence
  Description of Artificial Sequence: Synthetic oligonucleotide
  Antisense strand to SEQ ID NO: 1056916
uacucaccuagugauagag

SEQ ID NO: 1056918 - RNA, 19 nt, Artificial Sequence
  Description of Artificial Sequence: Synthetic oligonucleotide
  Sense strand starting at position 3425 of SEQ ID NO: 915140
cuaucacuaggugaguauu

SEQ ID NO: 1056919 - RNA, 19 nt, Artificial Sequence
  Description of Artificial Sequence: Synthetic oligonucleotide
  Antisense strand to SEQ ID NO: 1056918
aauacucaccuagugauag

SEQ ID NO: 1056920 - RNA, 19 nt, Artificial Sequence
  Description of Artificial Sequence: Synthetic oligonucleotide
  Sense strand starting at position 3493 of SEQ ID NO: 915140
uggagugucaaugagaggu

SEQ ID NO: 1056921 - RNA, 19 nt, Artificial Sequence
  Description of Artificial Sequence: Synthetic oligonucleotide
  Antisense strand to SEQ ID NO: 1056920
accucucauugacacucca

SEQ ID NO: 1056922 - RNA, 19 nt, Artificial Sequence
  Description of Artificial Sequence: Synthetic oligonucleotide
  Sense strand starting at position 3586 of SEQ ID NO: 915140
cguauugaagguuaacaga

SEQ ID NO: 1056923 - RNA, 19 nt, Artificial Sequence
  Description of Artificial Sequence: Synthetic oligonucleotide
  Antisense strand to SEQ ID NO: 1056922
ucuguuaaccuucaauacg

SEQ ID NO: 1056924 - RNA, 19 nt, Artificial Sequence
  Description of Artificial Sequence: Synthetic oligonucleotide
  Sense strand starting at position 3647 of SEQ ID NO: 915140
gcuacaaauugaguggauu

SEQ ID NO: 1056925 - RNA, 19 nt, Artificial Sequence
  Description of Artificial Sequence: Synthetic oligonucleotide
  Antisense strand to SEQ ID NO: 1056924
aauccacucaauuuguagc

SEQ ID NO: 1056926 - RNA, 19 nt, Artificial Sequence
  Description of Artificial Sequence: Synthetic oligonucleotide
  Sense strand starting at position 3749 of SEQ ID NO: 915140
gaggucaauagauguguaa

SEQ ID NO: 1056927 - RNA, 19 nt, Artificial Sequence
  Description of Artificial Sequence: Synthetic oligonucleotide
  Antisense strand to SEQ ID NO: 1056926
uuacacaucuauugaccuc

SEQ ID NO: 1056928 - RNA, 19 nt, Artificial Sequence
  Description of Artificial Sequence: Synthetic oligonucleotide
  Sense strand starting at position 3751 of SEQ ID NO: 915140
ggucaauagauguguaaac

SEQ ID NO: 1056929 - RNA, 19 nt, Artificial Sequence
  Description of Artificial Sequence: Synthetic oligonucleotide
  Antisense strand to SEQ ID NO: 1056928
guuuacacaucuauugacc

SEQ ID NO: 1056930 - RNA, 19 nt, Artificial Sequence
  Description of Artificial Sequence: Synthetic oligonucleotide
  Sense strand starting at position 3862 of SEQ ID NO: 915140
acauaaaucuguguucuaa

SEQ ID NO: 1056931 - RNA, 19 nt, Artificial Sequence
  Description of Artificial Sequence: Synthetic oligonucleotide
  Antisense strand to SEQ ID NO: 1056930
uuagaacacagauuuaugu

SEQ ID NO: 1056932 - RNA, 19 nt, Artificial Sequence
  Description of Artificial Sequence: Synthetic oligonucleotide
  Sense strand starting at position 3864 of SEQ ID NO: 915140
auaaaucuguguucuaauc

SEQ ID NO: 1056933 - RNA, 19 nt, Artificial Sequence
  Description of Artificial Sequence: Synthetic oligonucleotide
  Antisense strand to SEQ ID NO: 1056932
gauuagaacacagauuuau

SEQ ID NO: 1056934 - RNA, 19 nt, Artificial Sequence
  Description of Artificial Sequence: Synthetic oligonucleotide
  Sense strand starting at position 3963 of SEQ ID NO: 915140
ggccuaaccucaguaaaca

SEQ ID NO: 1056935 - RNA, 19 nt, Artificial Sequence
  Description of Artificial Sequence: Synthetic oligonucleotide
  Antisense strand to SEQ ID NO: 1056934
uguuuacugagguuaggcc

SEQ ID NO: 1056936 - RNA, 19 nt, Artificial Sequence
  Description of Artificial Sequence: Synthetic oligonucleotide
  Sense strand starting at position 53 of SEQ ID NO: 915141
uuguguauaguauagguau

SEQ ID NO: 1056937 - RNA, 19 nt, Artificial Sequence
  Description of Artificial Sequence: Synthetic oligonucleotide
  Antisense strand to SEQ ID NO: 1056936
auaccuauacuauacacaa

SEQ ID NO: 1056938 - RNA, 19 nt, Artificial Sequence
  Description of Artificial Sequence: Synthetic oligonucleotide
  Sense strand starting at position 84 of SEQ ID NO: 915141
uguugcucaccuuaaagau

SEQ ID NO: 1056939 - RNA, 19 nt, Artificial Sequence
  Description of Artificial Sequence: Synthetic oligonucleotide
  Antisense strand to SEQ ID NO: 1056938
aucuuuaaggugagcaaca

SEQ ID NO: 1056940 - RNA, 19 nt, Artificial Sequence
  Description of Artificial Sequence: Synthetic oligonucleotide
  Sense strand starting at position 137 of SEQ ID NO: 915141
gagagcugccaauaugaug

SEQ ID NO: 1056941 - RNA, 19 nt, Artificial Sequence
  Description of Artificial Sequence: Synthetic oligonucleotide
  Antisense strand to SEQ ID NO: 1056940
caucauauuggcagcucuc

SEQ ID NO: 1056942 - RNA, 19 nt, Artificial Sequence
  Description of Artificial Sequence: Synthetic oligonucleotide
  Sense strand starting at position 155 of SEQ ID NO: 915141
gucccuccaucucuagaua

SEQ ID NO: 1056943 - RNA, 19 nt, Artificial Sequence
  Description of Artificial Sequence: Synthetic oligonucleotide
  Antisense strand to SEQ ID NO: 1056942
uaucuagagauggagggac

SEQ ID NO: 1056944 - RNA, 19 nt, Artificial Sequence
  Description of Artificial Sequence: Synthetic oligonucleotide
  Sense strand starting at position 266 of SEQ ID NO: 915141
uuaucucaucuacagaguu

SEQ ID NO: 1056945 - RNA, 19 nt, Artificial Sequence
  Description of Artificial Sequence: Synthetic oligonucleotide
  Antisense strand to SEQ ID NO: 1056944
aacucuguagaugagauaa

SEQ ID NO: 1056946 - RNA, 19 nt, Artificial Sequence
  Description of Artificial Sequence: Synthetic oligonucleotide
  Sense strand starting at position 425 of SEQ ID NO: 915141
gcagaauauucuuucuuug

SEQ ID NO: 1056947 - RNA, 19 nt, Artificial Sequence
  Description of Artificial Sequence: Synthetic oligonucleotide
  Antisense strand to SEQ ID NO: 1056946
caaagaaagaauauucugc

SEQ ID NO: 1056948 - RNA, 19 nt, Artificial Sequence
  Description of Artificial Sequence: Synthetic oligonucleotide
  Sense strand starting at position 722 of SEQ ID NO: 915141
acaggauucuauucuguca

SEQ ID NO: 1056949 - RNA, 19 nt, Artificial Sequence
  Description of Artificial Sequence: Synthetic oligonucleotide
  Antisense strand to SEQ ID NO: 1056948
ugacagaauagaauccugu

SEQ ID NO: 1056950 - RNA, 19 nt, Artificial Sequence
  Description of Artificial Sequence: Synthetic oligonucleotide
  Sense strand starting at position 725 of SEQ ID NO: 915141
ggauucuauucugucaaga

SEQ ID NO: 1056951 - RNA, 19 nt, Artificial Sequence
  Description of Artificial Sequence: Synthetic oligonucleotide
  Antisense strand to SEQ ID NO: 1056950
ucuugacagaauagaaucc

SEQ ID NO: 1056952 - RNA, 19 nt, Artificial Sequence
  Description of Artificial Sequence: Synthetic oligonucleotide
  Sense strand starting at position 730 of SEQ ID NO: 915141
cuauucugucaagagcacu

SEQ ID NO: 1056953 - RNA, 19 nt, Artificial Sequence
  Description of Artificial Sequence: Synthetic oligonucleotide
  Antisense strand to SEQ ID NO: 1056952
agugcucuugacagaauag

SEQ ID NO: 1056954 - RNA, 19 nt, Artificial Sequence
  Description of Artificial Sequence: Synthetic oligonucleotide
  Sense strand starting at position 757 of SEQ ID NO: 915141
auaggugacucaguguaac

SEQ ID NO: 1056955 - RNA, 19 nt, Artificial Sequence
  Description of Artificial Sequence: Synthetic oligonucleotide
  Antisense strand to SEQ ID NO: 1056954
guuacacugagucaccuau

SEQ ID NO: 1056956 - RNA, 19 nt, Artificial Sequence
  Description of Artificial Sequence: Synthetic oligonucleotide
  Sense strand starting at position 760 of SEQ ID NO: 915141
ggugacucaguguaacacu

SEQ ID NO: 1056957 - RNA, 19 nt, Artificial Sequence
  Description of Artificial Sequence: Synthetic oligonucleotide
  Antisense strand to SEQ ID NO: 1056956
aguguuacacugagucacc

SEQ ID NO: 1056958 - RNA, 19 nt, Artificial Sequence
  Description of Artificial Sequence: Synthetic oligonucleotide
  Sense strand starting at position 839 of SEQ ID NO: 915141
aagucagaagcaugguuaa

SEQ ID NO: 1056959 - RNA, 19 nt, Artificial Sequence
  Description of Artificial Sequence: Synthetic oligonucleotide
  Antisense strand to SEQ ID NO: 1056958
uuaaccaugcuucugacuu

SEQ ID NO: 1056960 - RNA, 19 nt, Artificial Sequence
  Description of Artificial Sequence: Synthetic oligonucleotide
  Sense strand starting at position 976 of SEQ ID NO: 915141
guagaauaaucugcaacua

SEQ ID NO: 1056961 - RNA, 19 nt, Artificial Sequence
  Description of Artificial Sequence: Synthetic oligonucleotide
  Antisense strand to SEQ ID NO: 1056960
uaguugcagauuauucuac

SEQ ID NO: 1056962 - RNA, 19 nt, Artificial Sequence
  Description of Artificial Sequence: Synthetic oligonucleotide
  Sense strand starting at position 2039 of SEQ ID NO: 915141
agcaauuugggugguguga

SEQ ID NO: 1056963 - RNA, 19 nt, Artificial Sequence
  Description of Artificial Sequence: Synthetic oligonucleotide
  Antisense strand to SEQ ID NO: 1056962
ucacaccacccaaauugcu

SEQ ID NO: 1056964 - RNA, 19 nt, Artificial Sequence
  Description of Artificial Sequence: Synthetic oligonucleotide
  Sense strand starting at position 2082 of SEQ ID NO: 915141
ucacucagugggugaauua

SEQ ID NO: 1056965 - RNA, 19 nt, Artificial Sequence
  Description of Artificial Sequence: Synthetic oligonucleotide
  Antisense strand to SEQ ID NO: 1056964
uaauucacccacugaguga

SEQ ID NO: 1056966 - RNA, 19 nt, Artificial Sequence
  Description of Artificial Sequence: Synthetic oligonucleotide
  Sense strand starting at position 2091 of SEQ ID NO: 915141
gggugaauuacaugaaagc

SEQ ID NO: 1056967 - RNA, 19 nt, Artificial Sequence
  Description of Artificial Sequence: Synthetic oligonucleotide
  Antisense strand to SEQ ID NO: 1056966
gcuuucauguaauucaccc

SEQ ID NO: 1056968 - RNA, 19 nt, Artificial Sequence
  Description of Artificial Sequence: Synthetic oligonucleotide
  Sense strand starting at position 2125 of SEQ ID NO: 915141
augcuucugaguuggaaau

SEQ ID NO: 1056969 - RNA, 19 nt, Artificial Sequence
  Description of Artificial Sequence: Synthetic oligonucleotide
  Antisense strand to SEQ ID NO: 1056968
auuuccaacucagaagcau

SEQ ID NO: 1056970 - RNA, 19 nt, Artificial Sequence
  Description of Artificial Sequence: Synthetic oligonucleotide
  Sense strand starting at position 2137 of SEQ ID NO: 915141
uggaaauugaaaggugagu

SEQ ID NO: 1056971 - RNA, 19 nt, Artificial Sequence
  Description of Artificial Sequence: Synthetic oligonucleotide
  Antisense strand to SEQ ID NO: 1056970
acucaccuuucaauuucca

SEQ ID NO: 1056972 - RNA, 19 nt, Artificial Sequence
  Description of Artificial Sequence: Synthetic oligonucleotide
  Sense strand starting at position 2150 of SEQ ID NO: 915141
gugaguaggaguuaguuau

SEQ ID NO: 1056973 - RNA, 19 nt, Artificial Sequence
  Description of Artificial Sequence: Synthetic oligonucleotide
  Antisense strand to SEQ ID NO: 1056972
auaacuaacuccuacucac

SEQ ID NO: 1056974 - RNA, 19 nt, Artificial Sequence
  Description of Artificial Sequence: Synthetic oligonucleotide
  Sense strand starting at position 2160 of SEQ ID NO: 915141
guuaguuauguguagaagg

SEQ ID NO: 1056975 - RNA, 19 nt, Artificial Sequence
  Description of Artificial Sequence: Synthetic oligonucleotide
  Antisense strand to SEQ ID NO: 1056974
ccuucuacacauaacuaac

SEQ ID NO: 1056976 - RNA, 19 nt, Artificial Sequence
  Description of Artificial Sequence: Synthetic oligonucleotide
  Sense strand starting at position 2162 of SEQ ID NO: 915141
uaguuauguguagaaggga

SEQ ID NO: 1056977 - RNA, 19 nt, Artificial Sequence
  Description of Artificial Sequence: Synthetic oligonucleotide
  Antisense strand to SEQ ID NO: 1056976
ucccuucuacacauaacua

SEQ ID NO: 1056978 - RNA, 19 nt, Artificial Sequence
  Description of Artificial Sequence: Synthetic oligonucleotide
  Sense strand starting at position 2262 of SEQ ID NO: 915141
gcuguagauagacauuagu

SEQ ID NO: 1056979 - RNA, 19 nt, Artificial Sequence
  Description of Artificial Sequence: Synthetic oligonucleotide
  Antisense strand to SEQ ID NO: 1056978
acuaaugucuaucuacagc

SEQ ID NO: 1056980 - RNA, 19 nt, Artificial Sequence
  Description of Artificial Sequence: Synthetic oligonucleotide
  Sense strand starting at position 2279 of SEQ ID NO: 915141
guaccaauuugugaaggac

SEQ ID NO: 1056981 - RNA, 19 nt, Artificial Sequence
  Description of Artificial Sequence: Synthetic oligonucleotide
  Antisense strand to SEQ ID NO: 1056980
guccuucacaaauugguac

SEQ ID NO: 1056982 - RNA, 19 nt, Artificial Sequence
  Description of Artificial Sequence: Synthetic oligonucleotide
  Sense strand starting at position 2349 of SEQ ID NO: 915141
ugaugaacaugcuugauga

SEQ ID NO: 1056983 - RNA, 19 nt, Artificial Sequence
  Description of Artificial Sequence: Synthetic oligonucleotide
  Antisense strand to SEQ ID NO: 1056982
ucaucaagcauguucauca

SEQ ID NO: 1056984 - RNA, 19 nt, Artificial Sequence
  Description of Artificial Sequence: Synthetic oligonucleotide
  Sense strand starting at position 2350 of SEQ ID NO: 915141
gaugaacaugcuugaugau

SEQ ID NO: 1056985 - RNA, 19 nt, Artificial Sequence
  Description of Artificial Sequence: Synthetic oligonucleotide
  Antisense strand to SEQ ID NO: 1056984
aucaucaagcauguucauc

SEQ ID NO: 1056986 - RNA, 19 nt, Artificial Sequence
  Description of Artificial Sequence: Synthetic oligonucleotide
  Sense strand starting at position 2373 of SEQ ID NO: 915141
cauugucugcaggaucaga

SEQ ID NO: 1056987 - RNA, 19 nt, Artificial Sequence
  Description of Artificial Sequence: Synthetic oligonucleotide
  Antisense strand to SEQ ID NO: 1056986
ucugauccugcagacaaug

SEQ ID NO: 1056988 - RNA, 19 nt, Artificial Sequence
  Description of Artificial Sequence: Synthetic oligonucleotide
  Sense strand starting at position 2387 of SEQ ID NO: 915141
ucagacaaagucuguagua

SEQ ID NO: 1056989 - RNA, 19 nt, Artificial Sequence
  Description of Artificial Sequence: Synthetic oligonucleotide
  Antisense strand to SEQ ID NO: 1056988
uacuacagacuuugucuga

SEQ ID NO: 1056990 - RNA, 19 nt, Artificial Sequence
  Description of Artificial Sequence: Synthetic oligonucleotide
  Sense strand starting at position 2388 of SEQ ID NO: 915141
cagacaaagucuguaguau

SEQ ID NO: 1056991 - RNA, 19 nt, Artificial Sequence
  Description of Artificial Sequence: Synthetic oligonucleotide
  Antisense strand to SEQ ID NO: 1056990
auacuacagacuuugucug

SEQ ID NO: 1056992 - RNA, 19 nt, Artificial Sequence
  Description of Artificial Sequence: Synthetic oligonucleotide
  Sense strand starting at position 2389 of SEQ ID NO: 915141
agacaaagucuguaguaug

SEQ ID NO: 1056993 - RNA, 19 nt, Artificial Sequence
  Description of Artificial Sequence: Synthetic oligonucleotide
  Antisense strand to SEQ ID NO: 1056992
cauacuacagacuuugucu

SEQ ID NO: 1056994 - RNA, 19 nt, Artificial Sequence
  Description of Artificial Sequence: Synthetic oligonucleotide
  Sense strand starting at position 2396 of SEQ ID NO: 915141
gucuguaguauguagaacu

SEQ ID NO: 1056995 - RNA, 19 nt, Artificial Sequence
  Description of Artificial Sequence: Synthetic oligonucleotide
  Antisense strand to SEQ ID NO: 1056994
aguucuacauacuacagac

SEQ ID NO: 1056996 - RNA, 19 nt, Artificial Sequence
  Description of Artificial Sequence: Synthetic oligonucleotide
  Sense strand starting at position 2407 of SEQ ID NO: 915141
guagaacuaaaguguggaa

SEQ ID NO: 1056997 - RNA, 19 nt, Artificial Sequence
  Description of Artificial Sequence: Synthetic oligonucleotide
  Antisense strand to SEQ ID NO: 1056996
uuccacacuuuaguucuac

SEQ ID NO: 1056998 - RNA, 19 nt, Artificial Sequence
  Description of Artificial Sequence: Synthetic oligonucleotide
  Sense strand starting at position 2472 of SEQ ID NO: 915141
guuaauaagucccucauug

SEQ ID NO: 1056999 - RNA, 19 nt, Artificial Sequence
  Description of Artificial Sequence: Synthetic oligonucleotide
  Antisense strand to SEQ ID NO: 1056998
caaugagggacuuauuaac

SEQ ID NO: 1057000 - RNA, 19 nt, Artificial Sequence
  Description of Artificial Sequence: Synthetic oligonucleotide
  Sense strand starting at position 2932 of SEQ ID NO: 915141
agaacaguguccucaaccu

SEQ ID NO: 1057001 - RNA, 19 nt, Artificial Sequence
  Description of Artificial Sequence: Synthetic oligonucleotide
  Antisense strand to SEQ ID NO: 1057000
agguugaggacacuguucu

SEQ ID NO: 1057002 - RNA, 19 nt, Artificial Sequence
  Description of Artificial Sequence: Synthetic oligonucleotide
  Sense strand starting at position 2991 of SEQ ID NO: 915141
guggaccuccuuugacaau

SEQ ID NO: 1057003 - RNA, 19 nt, Artificial Sequence
  Description of Artificial Sequence: Synthetic oligonucleotide
  Antisense strand to SEQ ID NO: 1057002
auugucaaaggagguccac

SEQ ID NO: 1057004 - RNA, 19 nt, Artificial Sequence
  Description of Artificial Sequence: Synthetic oligonucleotide
  Sense strand starting at position 3469 of SEQ ID NO: 915141
gcuuccaugauugggacaa

SEQ ID NO: 1057005 - RNA, 19 nt, Artificial Sequence
  Description of Artificial Sequence: Synthetic oligonucleotide
  Antisense strand to SEQ ID NO: 1057004
uugucccaaucauggaagc

SEQ ID NO: 1057006 - RNA, 19 nt, Artificial Sequence
  Description of Artificial Sequence: Synthetic oligonucleotide
  Sense strand starting at position 3607 of SEQ ID NO: 915141
ccaagaagcugcucacaga

SEQ ID NO: 1057007 - RNA, 19 nt, Artificial Sequence
  Description of Artificial Sequence: Synthetic oligonucleotide
  Antisense strand to SEQ ID NO: 1057006
ucugugagcagcuucuugg

SEQ ID NO: 1057008 - RNA, 19 nt, Artificial Sequence
  Description of Artificial Sequence: Synthetic oligonucleotide
  Sense strand starting at position 3684 of SEQ ID NO: 915141
guguaagaucuagaaaguu

SEQ ID NO: 1057009 - RNA, 19 nt, Artificial Sequence
  Description of Artificial Sequence: Synthetic oligonucleotide
  Antisense strand to SEQ ID NO: 1057008
aacuuucuagaucuuacac

SEQ ID NO: 1057010 - RNA, 19 nt, Artificial Sequence
  Description of Artificial Sequence: Synthetic oligonucleotide
  Sense strand starting at position 3733 of SEQ ID NO: 915141
cuguaacaugcagauaaug

SEQ ID NO: 1057011 - RNA, 19 nt, Artificial Sequence
  Description of Artificial Sequence: Synthetic oligonucleotide
  Antisense strand to SEQ ID NO: 1057010
cauuaucugcauguuacag

SEQ ID NO: 1057012 - RNA, 19 nt, Artificial Sequence
  Description of Artificial Sequence: Synthetic oligonucleotide
  Sense strand starting at position 3976 of SEQ ID NO: 915141
guuuccuuacggcagagau

SEQ ID NO: 1057013 - RNA, 19 nt, Artificial Sequence
  Description of Artificial Sequence: Synthetic oligonucleotide
  Antisense strand to SEQ ID NO: 1057012
aucucugccguaaggaaac

SEQ ID NO: 1057014 - RNA, 19 nt, Artificial Sequence
  Description of Artificial Sequence: Synthetic oligonucleotide
  Sense strand starting at position 3978 of SEQ ID NO: 915141
uuccuuacggcagagauga

SEQ ID NO: 1057015 - RNA, 19 nt, Artificial Sequence
  Description of Artificial Sequence: Synthetic oligonucleotide
  Antisense strand to SEQ ID NO: 1057014
ucaucucugccguaaggaa

SEQ ID NO: 1057016 - RNA, 19 nt, Artificial Sequence
  Description of Artificial Sequence: Synthetic oligonucleotide
  Sense strand starting at position 371 of SEQ ID NO: 915142
uuucuaaagaagugagagu

SEQ ID NO: 1057017 - RNA, 19 nt, Artificial Sequence
  Description of Artificial Sequence: Synthetic oligonucleotide
  Antisense strand to SEQ ID NO: 1057016
acucucacuucuuuagaaa

SEQ ID NO: 1057018 - RNA, 19 nt, Artificial Sequence
  Description of Artificial Sequence: Synthetic oligonucleotide
  Sense strand starting at position 492 of SEQ ID NO: 915142
ugaagaaaugcuuggugac

SEQ ID NO: 1057019 - RNA, 19 nt, Artificial Sequence
  Description of Artificial Sequence: Synthetic oligonucleotide
  Antisense strand to SEQ ID NO: 1057018
gucaccaagcauuucuuca

SEQ ID NO: 1057020 - RNA, 19 nt, Artificial Sequence
  Description of Artificial Sequence: Synthetic oligonucleotide
  Sense strand starting at position 493 of SEQ ID NO: 915142
gaagaaaugcuuggugacu

SEQ ID NO: 1057021 - RNA, 19 nt, Artificial Sequence
  Description of Artificial Sequence: Synthetic oligonucleotide
  Antisense strand to SEQ ID NO: 1057020
agucaccaagcauuucuuc

SEQ ID NO: 1057022 - RNA, 19 nt, Artificial Sequence
  Description of Artificial Sequence: Synthetic oligonucleotide
  Sense strand starting at position 494 of SEQ ID NO: 915142
aagaaaugcuuggugacuu

SEQ ID NO: 1057023 - RNA, 19 nt, Artificial Sequence
  Description of Artificial Sequence: Synthetic oligonucleotide
  Antisense strand to SEQ ID NO: 1057022
aagucaccaagcauuucuu

SEQ ID NO: 1057024 - RNA, 19 nt, Artificial Sequence
  Description of Artificial Sequence: Synthetic oligonucleotide
  Sense strand starting at position 805 of SEQ ID NO: 915142
guaauuuguuguuuguauc

SEQ ID NO: 1057025 - RNA, 19 nt, Artificial Sequence
  Description of Artificial Sequence: Synthetic oligonucleotide
  Antisense strand to SEQ ID NO: 1057024
gauacaaacaacaaauuac

SEQ ID NO: 1057026 - RNA, 19 nt, Artificial Sequence
  Description of Artificial Sequence: Synthetic oligonucleotide
  Sense strand starting at position 887 of SEQ ID NO: 915142
guacuuccugguuacaguu

SEQ ID NO: 1057027 - RNA, 19 nt, Artificial Sequence
  Description of Artificial Sequence: Synthetic oligonucleotide
  Antisense strand to SEQ ID NO: 1057026
aacuguaaccaggaaguac

SEQ ID NO: 1057028 - RNA, 19 nt, Artificial Sequence
  Description of Artificial Sequence: Synthetic oligonucleotide
  Sense strand starting at position 919 of SEQ ID NO: 915142
caguaucuagagugaauaa

SEQ ID NO: 1057029 - RNA, 19 nt, Artificial Sequence
  Description of Artificial Sequence: Synthetic oligonucleotide
  Antisense strand to SEQ ID NO: 1057028
uuauucacucuagauacug

SEQ ID NO: 1057030 - RNA, 19 nt, Artificial Sequence
  Description of Artificial Sequence: Synthetic oligonucleotide
  Sense strand starting at position 1190 of SEQ ID NO: 915142
gagagacaugcccggcaaa

SEQ ID NO: 1057031 - RNA, 19 nt, Artificial Sequence
  Description of Artificial Sequence: Synthetic oligonucleotide
  Antisense strand to SEQ ID NO: 1057030
uuugccgggcaugucucuc

SEQ ID NO: 1057032 - RNA, 19 nt, Artificial Sequence
  Description of Artificial Sequence: Synthetic oligonucleotide
  Sense strand starting at position 1601 of SEQ ID NO: 915142
aucucagaggauuguggau

SEQ ID NO: 1057033 - RNA, 19 nt, Artificial Sequence
  Description of Artificial Sequence: Synthetic oligonucleotide
  Antisense strand to SEQ ID NO: 1057032
auccacaauccucugagau

SEQ ID NO: 1057034 - RNA, 19 nt, Artificial Sequence
  Description of Artificial Sequence: Synthetic oligonucleotide
  Sense strand starting at position 2078 of SEQ ID NO: 915142
auaggcauaucuguaaauu

SEQ ID NO: 1057035 - RNA, 19 nt, Artificial Sequence
  Description of Artificial Sequence: Synthetic oligonucleotide
  Antisense strand to SEQ ID NO: 1057034
aauuuacagauaugccuau

SEQ ID NO: 1057036 - RNA, 19 nt, Artificial Sequence
  Description of Artificial Sequence: Synthetic oligonucleotide
  Sense strand starting at position 2203 of SEQ ID NO: 915142
agaguagaaucugucuauu

SEQ ID NO: 1057037 - RNA, 19 nt, Artificial Sequence
  Description of Artificial Sequence: Synthetic oligonucleotide
  Antisense strand to SEQ ID NO: 1057036
aauagacagauucuacucu

SEQ ID NO: 1057038 - RNA, 19 nt, Artificial Sequence
  Description of Artificial Sequence: Synthetic oligonucleotide
  Sense strand starting at position 2205 of SEQ ID NO: 915142
aguagaaucugucuauuaa

SEQ ID NO: 1057039 - RNA, 19 nt, Artificial Sequence
  Description of Artificial Sequence: Synthetic oligonucleotide
  Antisense strand to SEQ ID NO: 1057038
uuaauagacagauucuacu

SEQ ID NO: 1057040 - RNA, 19 nt, Artificial Sequence
  Description of Artificial Sequence: Synthetic oligonucleotide
  Sense strand starting at position 2206 of SEQ ID NO: 915142
guagaaucugucuauuaau

SEQ ID NO: 1057041 - RNA, 19 nt, Artificial Sequence
  Description of Artificial Sequence: Synthetic oligonucleotide
  Antisense strand to SEQ ID NO: 1057040
auuaauagacagauucuac

SEQ ID NO: 1057042 - RNA, 19 nt, Artificial Sequence
  Description of Artificial Sequence: Synthetic oligonucleotide
  Sense strand starting at position 2217 of SEQ ID NO: 915142
cuauuaaugcauugggaaa

SEQ ID NO: 1057043 - RNA, 19 nt, Artificial Sequence
  Description of Artificial Sequence: Synthetic oligonucleotide
  Antisense strand to SEQ ID NO: 1057042
uuucccaaugcauuaauag

SEQ ID NO: 1057044 - RNA, 19 nt, Artificial Sequence
  Description of Artificial Sequence: Synthetic oligonucleotide
  Sense strand starting at position 2338 of SEQ ID NO: 915142
gugaauuaacuggaaugcu

SEQ ID NO: 1057045 - RNA, 19 nt, Artificial Sequence
  Description of Artificial Sequence: Synthetic oligonucleotide
  Antisense strand to SEQ ID NO: 1057044
agcauuccaguuaauucac

SEQ ID NO: 1057046 - RNA, 19 nt, Artificial Sequence
  Description of Artificial Sequence: Synthetic oligonucleotide
  Sense strand starting at position 2446 of SEQ ID NO: 915142
ugagaauaucugggcacuu

SEQ ID NO: 1057047 - RNA, 19 nt, Artificial Sequence
  Description of Artificial Sequence: Synthetic oligonucleotide
  Antisense strand to SEQ ID NO: 1057046
aagugcccagauauucuca

SEQ ID NO: 1057048 - RNA, 19 nt, Artificial Sequence
  Description of Artificial Sequence: Synthetic oligonucleotide
  Sense strand starting at position 2447 of SEQ ID NO: 915142
gagaauaucugggcacuua

SEQ ID NO: 1057049 - RNA, 19 nt, Artificial Sequence
  Description of Artificial Sequence: Synthetic oligonucleotide
  Antisense strand to SEQ ID NO: 1057048
uaagugcccagauauucuc

SEQ ID NO: 1057050 - RNA, 19 nt, Artificial Sequence
  Description of Artificial Sequence: Synthetic oligonucleotide
  Sense strand starting at position 2463 of SEQ ID NO: 915142
uuaccagagaguggauauu

SEQ ID NO: 1057051 - RNA, 19 nt, Artificial Sequence
  Description of Artificial Sequence: Synthetic oligonucleotide
  Antisense strand to SEQ ID NO: 1057050
aauauccacucucugguaa

SEQ ID NO: 1057052 - RNA, 19 nt, Artificial Sequence
  Description of Artificial Sequence: Synthetic oligonucleotide
  Sense strand starting at position 2682 of SEQ ID NO: 915142
cagagauaguuguuaccaa

SEQ ID NO: 1057053 - RNA, 19 nt, Artificial Sequence
  Description of Artificial Sequence: Synthetic oligonucleotide
  Antisense strand to SEQ ID NO: 1057052
uugguaacaacuaucucug

SEQ ID NO: 1057054 - RNA, 19 nt, Artificial Sequence
  Description of Artificial Sequence: Synthetic oligonucleotide
  Sense strand starting at position 2689 of SEQ ID NO: 915142
aguuguuaccaaggaaacu

SEQ ID NO: 1057055 - RNA, 19 nt, Artificial Sequence
  Description of Artificial Sequence: Synthetic oligonucleotide
  Antisense strand to SEQ ID NO: 1057054
aguuuccuugguaacaacu

SEQ ID NO: 1057056 - RNA, 19 nt, Artificial Sequence
  Description of Artificial Sequence: Synthetic oligonucleotide
  Sense strand starting at position 2739 of SEQ ID NO: 915142
gaugauuuguuuggagaga

SEQ ID NO: 1057057 - RNA, 19 nt, Artificial Sequence
  Description of Artificial Sequence: Synthetic oligonucleotide
  Antisense strand to SEQ ID NO: 1057056
ucucuccaaacaaaucauc

SEQ ID NO: 1057058 - RNA, 19 nt, Artificial Sequence
  Description of Artificial Sequence: Synthetic oligonucleotide
  Sense strand starting at position 2740 of SEQ ID NO: 915142
augauuuguuuggagagag

SEQ ID NO: 1057059 - RNA, 19 nt, Artificial Sequence
  Description of Artificial Sequence: Synthetic oligonucleotide
  Antisense strand to SEQ ID NO: 1057058
cucucuccaaacaaaucau

SEQ ID NO: 1057060 - RNA, 19 nt, Artificial Sequence
  Description of Artificial Sequence: Synthetic oligonucleotide
  Sense strand starting at position 2761 of SEQ ID NO: 915142
ccuuaauuggcagguauua

SEQ ID NO: 1057061 - RNA, 19 nt, Artificial Sequence
  Description of Artificial Sequence: Synthetic oligonucleotide
  Antisense strand to SEQ ID NO: 1057060
uaauaccugccaauuaagg

SEQ ID NO: 1057062 - RNA, 19 nt, Artificial Sequence
  Description of Artificial Sequence: Synthetic oligonucleotide
  Sense strand starting at position 2763 of SEQ ID NO: 915142
uuaauuggcagguauuaga

SEQ ID NO: 1057063 - RNA, 19 nt, Artificial Sequence
  Description of Artificial Sequence: Synthetic oligonucleotide
  Antisense strand to SEQ ID NO: 1057062
ucuaauaccugccaauuaa

SEQ ID NO: 1057064 - RNA, 19 nt, Artificial Sequence
  Description of Artificial Sequence: Synthetic oligonucleotide
  Sense strand starting at position 2787 of SEQ ID NO: 915142
augguaaauucucugcaaa

SEQ ID NO: 1057065 - RNA, 19 nt, Artificial Sequence
  Description of Artificial Sequence: Synthetic oligonucleotide
  Antisense strand to SEQ ID NO: 1057064
uuugcagagaauuuaccau

SEQ ID NO: 1057066 - RNA, 19 nt, Artificial Sequence
  Description of Artificial Sequence: Synthetic oligonucleotide
  Sense strand starting at position 2809 of SEQ ID NO: 915142
uuggauauuucugaaugga

SEQ ID NO: 1057067 - RNA, 19 nt, Artificial Sequence
  Description of Artificial Sequence: Synthetic oligonucleotide
  Antisense strand to SEQ ID NO: 1057066
uccauucagaaauauccaa

SEQ ID NO: 1057068 - RNA, 19 nt, Artificial Sequence
  Description of Artificial Sequence: Synthetic oligonucleotide
  Sense strand starting at position 2838 of SEQ ID NO: 915142
guguauuucuccucugcac

SEQ ID NO: 1057069 - RNA, 19 nt, Artificial Sequence
  Description of Artificial Sequence: Synthetic oligonucleotide
  Antisense strand to SEQ ID NO: 1057068
gugcagaggagaaauacac

SEQ ID NO: 1057070 - RNA, 19 nt, Artificial Sequence
  Description of Artificial Sequence: Synthetic oligonucleotide
  Sense strand starting at position 2864 of SEQ ID NO: 915142
agucuaagcagagaugcua

SEQ ID NO: 1057071 - RNA, 19 nt, Artificial Sequence
  Description of Artificial Sequence: Synthetic oligonucleotide
  Antisense strand to SEQ ID NO: 1057070
uagcaucucugcuuagacu

SEQ ID NO: 1057072 - RNA, 19 nt, Artificial Sequence
  Description of Artificial Sequence: Synthetic oligonucleotide
  Sense strand starting at position 2985 of SEQ ID NO: 915142
cccauuagacaucgcuaac

SEQ ID NO: 1057073 - RNA, 19 nt, Artificial Sequence
  Description of Artificial Sequence: Synthetic oligonucleotide
  Antisense strand to SEQ ID NO: 1057072
guuagcgaugucuaauggg

SEQ ID NO: 1057074 - RNA, 19 nt, Artificial Sequence
  Description of Artificial Sequence: Synthetic oligonucleotide
  Sense strand starting at position 2988 of SEQ ID NO: 915142
auuagacaucgcuaacuaa

SEQ ID NO: 1057075 - RNA, 19 nt, Artificial Sequence
  Description of Artificial Sequence: Synthetic oligonucleotide
  Antisense strand to SEQ ID NO: 1057074
uuaguuagcgaugucuaau

SEQ ID NO: 1057076 - RNA, 19 nt, Artificial Sequence
  Description of Artificial Sequence: Synthetic oligonucleotide
  Sense strand starting at position 2991 of SEQ ID NO: 915142
agacaucgcuaacuaaaua

SEQ ID NO: 1057077 - RNA, 19 nt, Artificial Sequence
  Description of Artificial Sequence: Synthetic oligonucleotide
  Antisense strand to SEQ ID NO: 1057076
uauuuaguuagcgaugucu

SEQ ID NO: 1057078 - RNA, 19 nt, Artificial Sequence
  Description of Artificial Sequence: Synthetic oligonucleotide
  Sense strand starting at position 3088 of SEQ ID NO: 915142
guaauaagccuuuaagaau

SEQ ID NO: 1057079 - RNA, 19 nt, Artificial Sequence
  Description of Artificial Sequence: Synthetic oligonucleotide
  Antisense strand to SEQ ID NO: 1057078
auucuuaaaggcuuauuac

SEQ ID NO: 1057080 - RNA, 19 nt, Artificial Sequence
  Description of Artificial Sequence: Synthetic oligonucleotide
  Sense strand starting at position 3120 of SEQ ID NO: 915142
aucugagauucuuugucuu

SEQ ID NO: 1057081 - RNA, 19 nt, Artificial Sequence
  Description of Artificial Sequence: Synthetic oligonucleotide
  Antisense strand to SEQ ID NO: 1057080
aagacaaagaaucucagau

SEQ ID NO: 1057082 - RNA, 19 nt, Artificial Sequence
  Description of Artificial Sequence: Synthetic oligonucleotide
  Sense strand starting at position 3122 of SEQ ID NO: 915142
cugagauucuuugucuuac

SEQ ID NO: 1057083 - RNA, 19 nt, Artificial Sequence
  Description of Artificial Sequence: Synthetic oligonucleotide
  Antisense strand to SEQ ID NO: 1057082
guaagacaaagaaucucag

SEQ ID NO: 1057084 - RNA, 19 nt, Artificial Sequence
  Description of Artificial Sequence: Synthetic oligonucleotide
  Sense strand starting at position 3123 of SEQ ID NO: 915142
ugagauucuuugucuuaca

SEQ ID NO: 1057085 - RNA, 19 nt, Artificial Sequence
  Description of Artificial Sequence: Synthetic oligonucleotide
  Antisense strand to SEQ ID NO: 1057084
uguaagacaaagaaucuca

SEQ ID NO: 1057086 - RNA, 19 nt, Artificial Sequence
  Description of Artificial Sequence: Synthetic oligonucleotide
  Sense strand starting at position 3375 of SEQ ID NO: 915142
acugauaauuagguguaua

SEQ ID NO: 1057087 - RNA, 19 nt, Artificial Sequence
  Description of Artificial Sequence: Synthetic oligonucleotide
  Antisense strand to SEQ ID NO: 1057086
uauacaccuaauuaucagu

SEQ ID NO: 1057088 - RNA, 19 nt, Artificial Sequence
  Description of Artificial Sequence: Synthetic oligonucleotide
  Sense strand starting at position 3426 of SEQ ID NO: 915142
agaguuaugaacugaaugu

SEQ ID NO: 1057089 - RNA, 19 nt, Artificial Sequence
  Description of Artificial Sequence: Synthetic oligonucleotide
  Antisense strand to SEQ ID NO: 1057088
acauucaguucauaacucu

SEQ ID NO: 1057090 - RNA, 19 nt, Artificial Sequence
  Description of Artificial Sequence: Synthetic oligonucleotide
  Sense strand starting at position 3554 of SEQ ID NO: 915142
auguguuuacaucauugua

SEQ ID NO: 1057091 - RNA, 19 nt, Artificial Sequence
  Description of Artificial Sequence: Synthetic oligonucleotide
  Antisense strand to SEQ ID NO: 1057090
uacaaugauguaaacacau

SEQ ID NO: 1057092 - RNA, 19 nt, Artificial Sequence
  Description of Artificial Sequence: Synthetic oligonucleotide
  Sense strand starting at position 3692 of SEQ ID NO: 915142
aggucaauugcucaucaua

SEQ ID NO: 1057093 - RNA, 19 nt, Artificial Sequence
  Description of Artificial Sequence: Synthetic oligonucleotide
  Antisense strand to SEQ ID NO: 1057092
uaugaugagcaauugaccu

SEQ ID NO: 1057094 - RNA, 19 nt, Artificial Sequence
  Description of Artificial Sequence: Synthetic oligonucleotide
  Sense strand starting at position 3744 of SEQ ID NO: 915142
cuuguaauugggcagcaua

SEQ ID NO: 1057095 - RNA, 19 nt, Artificial Sequence
  Description of Artificial Sequence: Synthetic oligonucleotide
  Antisense strand to SEQ ID NO: 1057094
uaugcugcccaauuacaag

SEQ ID NO: 1057096 - RNA, 19 nt, Artificial Sequence
  Description of Artificial Sequence: Synthetic oligonucleotide
  Sense strand starting at position 104 of SEQ ID NO: 915143
agggcuagguaaucuauga

SEQ ID NO: 1057097 - RNA, 19 nt, Artificial Sequence
  Description of Artificial Sequence: Synthetic oligonucleotide
  Antisense strand to SEQ ID NO: 1057096
ucauagauuaccuagcccu

SEQ ID NO: 1057098 - RNA, 19 nt, Artificial Sequence
  Description of Artificial Sequence: Synthetic oligonucleotide
  Sense strand starting at position 224 of SEQ ID NO: 915143
agcaaagagcucuguaaau

SEQ ID NO: 1057099 - RNA, 19 nt, Artificial Sequence
  Description of Artificial Sequence: Synthetic oligonucleotide
  Antisense strand to SEQ ID NO: 1057098
auuuacagagcucuuugcu

SEQ ID NO: 1057100 - RNA, 19 nt, Artificial Sequence
  Description of Artificial Sequence: Synthetic oligonucleotide
  Sense strand starting at position 260 of SEQ ID NO: 915143
gguugauguggcuggagau

SEQ ID NO: 1057101 - RNA, 19 nt, Artificial Sequence
  Description of Artificial Sequence: Synthetic oligonucleotide
  Antisense strand to SEQ ID NO: 1057100
aucuccagccacaucaacc

SEQ ID NO: 1057102 - RNA, 19 nt, Artificial Sequence
  Description of Artificial Sequence: Synthetic oligonucleotide
  Sense strand starting at position 294 of SEQ ID NO: 915143
gacguugaguaaguagaaa

SEQ ID NO: 1057103 - RNA, 19 nt, Artificial Sequence
  Description of Artificial Sequence: Synthetic oligonucleotide
  Antisense strand to SEQ ID NO: 1057102
uuucuacuuacucaacguc

SEQ ID NO: 1057104 - RNA, 19 nt, Artificial Sequence
  Description of Artificial Sequence: Synthetic oligonucleotide
  Sense strand starting at position 336 of SEQ ID NO: 915143
agaauauguuccuuauuga

SEQ ID NO: 1057105 - RNA, 19 nt, Artificial Sequence
  Description of Artificial Sequence: Synthetic oligonucleotide
  Antisense strand to SEQ ID NO: 1057104
ucaauaaggaacauauucu

SEQ ID NO: 1057106 - RNA, 19 nt, Artificial Sequence
  Description of Artificial Sequence: Synthetic oligonucleotide
  Sense strand starting at position 360 of SEQ ID NO: 915143
cuguauuucuaacaaagga

SEQ ID NO: 1057107 - RNA, 19 nt, Artificial Sequence
  Description of Artificial Sequence: Synthetic oligonucleotide
  Antisense strand to SEQ ID NO: 1057106
uccuuuguuagaaauacag

SEQ ID NO: 1057108 - RNA, 19 nt, Artificial Sequence
  Description of Artificial Sequence: Synthetic oligonucleotide
  Sense strand starting at position 485 of SEQ ID NO: 915143
gagagaaaugcuggugacu

SEQ ID NO: 1057109 - RNA, 19 nt, Artificial Sequence
  Description of Artificial Sequence: Synthetic oligonucleotide
  Antisense strand to SEQ ID NO: 1057108
agucaccagcauuucucuc

SEQ ID NO: 1057110 - RNA, 19 nt, Artificial Sequence
  Description of Artificial Sequence: Synthetic oligonucleotide
  Sense strand starting at position 725 of SEQ ID NO: 915143
gguauaagagauugaaugu

SEQ ID NO: 1057111 - RNA, 19 nt, Artificial Sequence
  Description of Artificial Sequence: Synthetic oligonucleotide
  Antisense strand to SEQ ID NO: 1057110
acauucaaucucuuauacc

SEQ ID NO: 1057112 - RNA, 19 nt, Artificial Sequence
  Description of Artificial Sequence: Synthetic oligonucleotide
  Sense strand starting at position 805 of SEQ ID NO: 915143
guaauuuguugcuuguauc

SEQ ID NO: 1057113 - RNA, 19 nt, Artificial Sequence
  Description of Artificial Sequence: Synthetic oligonucleotide
  Antisense strand to SEQ ID NO: 1057112
gauacaagcaacaaauuac

SEQ ID NO: 1057114 - RNA, 19 nt, Artificial Sequence
  Description of Artificial Sequence: Synthetic oligonucleotide
  Sense strand starting at position 919 of SEQ ID NO: 915143
caguauccagagugaauaa

SEQ ID NO: 1057115 - RNA, 19 nt, Artificial Sequence
  Description of Artificial Sequence: Synthetic oligonucleotide
  Antisense strand to SEQ ID NO: 1057114
uuauucacucuggauacug

SEQ ID NO: 1057116 - RNA, 19 nt, Artificial Sequence
  Description of Artificial Sequence: Synthetic oligonucleotide
  Sense strand starting at position 1190 of SEQ ID NO: 915143
gagagacaugccgggcaaa

SEQ ID NO: 1057117 - RNA, 19 nt, Artificial Sequence
  Description of Artificial Sequence: Synthetic oligonucleotide
  Antisense strand to SEQ ID NO: 1057116
uuugcccggcaugucucuc

SEQ ID NO: 1057118 - RNA, 19 nt, Artificial Sequence
  Description of Artificial Sequence: Synthetic oligonucleotide
  Sense strand starting at position 1280 of SEQ ID NO: 915143
uauugagagccuuaagcug

SEQ ID NO: 1057119 - RNA, 19 nt, Artificial Sequence
  Description of Artificial Sequence: Synthetic oligonucleotide
  Antisense strand to SEQ ID NO: 1057118
cagcuuaaggcucucaaua

SEQ ID NO: 1057120 - RNA, 19 nt, Artificial Sequence
  Description of Artificial Sequence: Synthetic oligonucleotide
  Sense strand starting at position 1493 of SEQ ID NO: 915143
aucucaaguuucuuaaagu

SEQ ID NO: 1057121 - RNA, 19 nt, Artificial Sequence
  Description of Artificial Sequence: Synthetic oligonucleotide
  Antisense strand to SEQ ID NO: 1057120
acuuuaagaaacuugagau

SEQ ID NO: 1057122 - RNA, 19 nt, Artificial Sequence
  Description of Artificial Sequence: Synthetic oligonucleotide
  Sense strand starting at position 1601 of SEQ ID NO: 915143
aucucagaggguuguggau

SEQ ID NO: 1057123 - RNA, 19 nt, Artificial Sequence
  Description of Artificial Sequence: Synthetic oligonucleotide
  Antisense strand to SEQ ID NO: 1057122
auccacaacccucugagau

SEQ ID NO: 1057124 - RNA, 19 nt, Artificial Sequence
  Description of Artificial Sequence: Synthetic oligonucleotide
  Sense strand starting at position 1704 of SEQ ID NO: 915143
gcaggcauuggaugaaauu

SEQ ID NO: 1057125 - RNA, 19 nt, Artificial Sequence
  Description of Artificial Sequence: Synthetic oligonucleotide
  Antisense strand to SEQ ID NO: 1057124
aauuucauccaaugccugc

SEQ ID NO: 1057126 - RNA, 19 nt, Artificial Sequence
  Description of Artificial Sequence: Synthetic oligonucleotide
  Sense strand starting at position 2174 of SEQ ID NO: 915143
gcugcuuuggacuauaauc

SEQ ID NO: 1057127 - RNA, 19 nt, Artificial Sequence
  Description of Artificial Sequence: Synthetic oligonucleotide
  Antisense strand to SEQ ID NO: 1057126
gauuauaguccaaagcagc

SEQ ID NO: 1057128 - RNA, 19 nt, Artificial Sequence
  Description of Artificial Sequence: Synthetic oligonucleotide
  Sense strand starting at position 2308 of SEQ ID NO: 915143
guaaacgcuggucaauuaa

SEQ ID NO: 1057129 - RNA, 19 nt, Artificial Sequence
  Description of Artificial Sequence: Synthetic oligonucleotide
  Antisense strand to SEQ ID NO: 1057128
uuaauugaccagcguuuac

SEQ ID NO: 1057130 - RNA, 19 nt, Artificial Sequence
  Description of Artificial Sequence: Synthetic oligonucleotide
  Sense strand starting at position 2372 of SEQ ID NO: 915143
aguucuaugugauuaauug

SEQ ID NO: 1057131 - RNA, 19 nt, Artificial Sequence
  Description of Artificial Sequence: Synthetic oligonucleotide
  Antisense strand to SEQ ID NO: 1057130
caauuaaucacauagaacu

SEQ ID NO: 1057132 - RNA, 19 nt, Artificial Sequence
  Description of Artificial Sequence: Synthetic oligonucleotide
  Sense strand starting at position 2425 of SEQ ID NO: 915143
gagaauaccuggguacuua

SEQ ID NO: 1057133 - RNA, 19 nt, Artificial Sequence
  Description of Artificial Sequence: Synthetic oligonucleotide
  Antisense strand to SEQ ID NO: 1057132
uaaguacccagguauucuc

SEQ ID NO: 1057134 - RNA, 19 nt, Artificial Sequence
  Description of Artificial Sequence: Synthetic oligonucleotide
  Sense strand starting at position 2444 of SEQ ID NO: 915143
ccaguaaguggauauguuu

SEQ ID NO: 1057135 - RNA, 19 nt, Artificial Sequence
  Description of Artificial Sequence: Synthetic oligonucleotide
  Antisense strand to SEQ ID NO: 1057134
aaacauauccacuuacugg

SEQ ID NO: 1057136 - RNA, 19 nt, Artificial Sequence
  Description of Artificial Sequence: Synthetic oligonucleotide
  Sense strand starting at position 2549 of SEQ ID NO: 915143
uauauaagggcuugucuua

SEQ ID NO: 1057137 - RNA, 19 nt, Artificial Sequence
  Description of Artificial Sequence: Synthetic oligonucleotide
  Antisense strand to SEQ ID NO: 1057136
uaagacaagcccuuauaua

SEQ ID NO: 1057138 - RNA, 19 nt, Artificial Sequence
  Description of Artificial Sequence: Synthetic oligonucleotide
  Sense strand starting at position 2592 of SEQ ID NO: 915143
ugggauuacugaguucucu

SEQ ID NO: 1057139 - RNA, 19 nt, Artificial Sequence
  Description of Artificial Sequence: Synthetic oligonucleotide
  Antisense strand to SEQ ID NO: 1057138
agagaacucaguaauccca

SEQ ID NO: 1057140 - RNA, 19 nt, Artificial Sequence
  Description of Artificial Sequence: Synthetic oligonucleotide
  Sense strand starting at position 2701 of SEQ ID NO: 915143
acaaacaucuaggucugua

SEQ ID NO: 1057141 - RNA, 19 nt, Artificial Sequence
  Description of Artificial Sequence: Synthetic oligonucleotide
  Antisense strand to SEQ ID NO: 1057140
uacagaccuagauguuugu

SEQ ID NO: 1057142 - RNA, 19 nt, Artificial Sequence
  Description of Artificial Sequence: Synthetic oligonucleotide
  Sense strand starting at position 2705 of SEQ ID NO: 915143
acaucuaggucuguaauaa

SEQ ID NO: 1057143 - RNA, 19 nt, Artificial Sequence
  Description of Artificial Sequence: Synthetic oligonucleotide
  Antisense strand to SEQ ID NO: 1057142
uuauuacagaccuagaugu

SEQ ID NO: 1057144 - RNA, 19 nt, Artificial Sequence
  Description of Artificial Sequence: Synthetic oligonucleotide
  Sense strand starting at position 2706 of SEQ ID NO: 915143
caucuaggucuguaauaag

SEQ ID NO: 1057145 - RNA, 19 nt, Artificial Sequence
  Description of Artificial Sequence: Synthetic oligonucleotide
  Antisense strand to SEQ ID NO: 1057144
cuuauuacagaccuagaug

SEQ ID NO: 1057146 - RNA, 19 nt, Artificial Sequence
  Description of Artificial Sequence: Synthetic oligonucleotide
  Sense strand starting at position 2772 of SEQ ID NO: 915143
augguaaauuaucugcaaa

SEQ ID NO: 1057147 - RNA, 19 nt, Artificial Sequence
  Description of Artificial Sequence: Synthetic oligonucleotide
  Antisense strand to SEQ ID NO: 1057146
uuugcagauaauuuaccau

SEQ ID NO: 1057148 - RNA, 19 nt, Artificial Sequence
  Description of Artificial Sequence: Synthetic oligonucleotide
  Sense strand starting at position 2796 of SEQ ID NO: 915143
gauacuucugauggauagu

SEQ ID NO: 1057149 - RNA, 19 nt, Artificial Sequence
  Description of Artificial Sequence: Synthetic oligonucleotide
  Antisense strand to SEQ ID NO: 1057148
acuauccaucagaaguauc

SEQ ID NO: 1057150 - RNA, 19 nt, Artificial Sequence
  Description of Artificial Sequence: Synthetic oligonucleotide
  Sense strand starting at position 2820 of SEQ ID NO: 915143
uguguauuacucgucugca

SEQ ID NO: 1057151 - RNA, 19 nt, Artificial Sequence
  Description of Artificial Sequence: Synthetic oligonucleotide
  Antisense strand to SEQ ID NO: 1057150
ugcagacgaguaauacaca

SEQ ID NO: 1057152 - RNA, 19 nt, Artificial Sequence
  Description of Artificial Sequence: Synthetic oligonucleotide
  Sense strand starting at position 3058 of SEQ ID NO: 915143
ggaccuacuucgguaauaa

SEQ ID NO: 1057153 - RNA, 19 nt, Artificial Sequence
  Description of Artificial Sequence: Synthetic oligonucleotide
  Antisense strand to SEQ ID NO: 1057152
uuauuaccgaaguaggucc

SEQ ID NO: 1057154 - RNA, 19 nt, Artificial Sequence
  Description of Artificial Sequence: Synthetic oligonucleotide
  Sense strand starting at position 3059 of SEQ ID NO: 915143
gaccuacuucgguaauaag

SEQ ID NO: 1057155 - RNA, 19 nt, Artificial Sequence
  Description of Artificial Sequence: Synthetic oligonucleotide
  Antisense strand to SEQ ID NO: 1057154
cuuauuaccgaaguagguc

SEQ ID NO: 1057156 - RNA, 19 nt, Artificial Sequence
  Description of Artificial Sequence: Synthetic oligonucleotide
  Sense strand starting at position 3285 of SEQ ID NO: 915143
gaagucuucuguuuaagau

SEQ ID NO: 1057157 - RNA, 19 nt, Artificial Sequence
  Description of Artificial Sequence: Synthetic oligonucleotide
  Antisense strand to SEQ ID NO: 1057156
aucuuaaacagaagacuuc

SEQ ID NO: 1057158 - RNA, 19 nt, Artificial Sequence
  Description of Artificial Sequence: Synthetic oligonucleotide
  Sense strand starting at position 3407 of SEQ ID NO: 915143
ggaguuaugaacugaaugu

SEQ ID NO: 1057159 - RNA, 19 nt, Artificial Sequence
  Description of Artificial Sequence: Synthetic oligonucleotide
  Antisense strand to SEQ ID NO: 1057158
acauucaguucauaacucc

SEQ ID NO: 1057160 - RNA, 19 nt, Artificial Sequence
  Description of Artificial Sequence: Synthetic oligonucleotide
  Sense strand starting at position 3429 of SEQ ID NO: 915143
gcuggaauuguguauuauu

SEQ ID NO: 1057161 - RNA, 19 nt, Artificial Sequence
  Description of Artificial Sequence: Synthetic oligonucleotide
  Antisense strand to SEQ ID NO: 1057160
aauaauacacaauuccagc

SEQ ID NO: 1057162 - RNA, 19 nt, Artificial Sequence
  Description of Artificial Sequence: Synthetic oligonucleotide
  Sense strand starting at position 3463 of SEQ ID NO: 915143
ugacuacuaguugauucua

SEQ ID NO: 1057163 - RNA, 19 nt, Artificial Sequence
  Description of Artificial Sequence: Synthetic oligonucleotide
  Antisense strand to SEQ ID NO: 1057162
uagaaucaacuaguaguca

SEQ ID NO: 1057164 - RNA, 19 nt, Artificial Sequence
  Description of Artificial Sequence: Synthetic oligonucleotide
  Sense strand starting at position 3472 of SEQ ID NO: 915143
guugauucuaguggauaag

SEQ ID NO: 1057165 - RNA, 19 nt, Artificial Sequence
  Description of Artificial Sequence: Synthetic oligonucleotide
  Antisense strand to SEQ ID NO: 1057164
cuuauccacuagaaucaac

SEQ ID NO: 1057166 - RNA, 19 nt, Artificial Sequence
  Description of Artificial Sequence: Synthetic oligonucleotide
  Sense strand starting at position 3605 of SEQ ID NO: 915143
aguaaauagucauuggaag

SEQ ID NO: 1057167 - RNA, 19 nt, Artificial Sequence
  Description of Artificial Sequence: Synthetic oligonucleotide
  Antisense strand to SEQ ID NO: 1057166
cuuccaaugacuauuuacu

SEQ ID NO: 1057168 - RNA, 19 nt, Artificial Sequence
  Description of Artificial Sequence: Synthetic oligonucleotide
  Sense strand starting at position 3706 of SEQ ID NO: 915143
gaugauuacuucuuaguug

SEQ ID NO: 1057169 - RNA, 19 nt, Artificial Sequence
  Description of Artificial Sequence: Synthetic oligonucleotide
  Antisense strand to SEQ ID NO: 1057168
caacuaagaaguaaucauc

SEQ ID NO: 1057170 - RNA, 19 nt, Artificial Sequence
  Description of Artificial Sequence: Synthetic oligonucleotide
  Sense strand starting at position 3768 of SEQ ID NO: 915143
uugguuauguugucaagaa

SEQ ID NO: 1057171 - RNA, 19 nt, Artificial Sequence
  Description of Artificial Sequence: Synthetic oligonucleotide
  Antisense strand to SEQ ID NO: 1057170
uucuugacaacauaaccaa

SEQ ID NO: 1057172 - RNA, 19 nt, Artificial Sequence
  Description of Artificial Sequence: Synthetic oligonucleotide
  Sense strand starting at position 3772 of SEQ ID NO: 915143
uuauguugucaagaauucu

SEQ ID NO: 1057173 - RNA, 19 nt, Artificial Sequence
  Description of Artificial Sequence: Synthetic oligonucleotide
  Antisense strand to SEQ ID NO: 1057172
agaauucuugacaacauaa

SEQ ID NO: 1057174 - RNA, 19 nt, Artificial Sequence
  Description of Artificial Sequence: Synthetic oligonucleotide
  Sense strand starting at position 3827 of SEQ ID NO: 915143
agguacuucuuauuaaaga

SEQ ID NO: 1057175 - RNA, 19 nt, Artificial Sequence
  Description of Artificial Sequence: Synthetic oligonucleotide
  Antisense strand to SEQ ID NO: 1057174
ucuuuaauaagaaguaccu

SEQ ID NO: 1057176 - RNA, 19 nt, Artificial Sequence
  Description of Artificial Sequence: Synthetic oligonucleotide
  Sense strand starting at position 167 of SEQ ID NO: 915144
ccaaaugucguguccugca

SEQ ID NO: 1057177 - RNA, 19 nt, Artificial Sequence
  Description of Artificial Sequence: Synthetic oligonucleotide
  Antisense strand to SEQ ID NO: 1057176
ugcaggacacgacauuugg

SEQ ID NO: 1057178 - RNA, 19 nt, Artificial Sequence
  Description of Artificial Sequence: Synthetic oligonucleotide
  Sense strand starting at position 371 of SEQ ID NO: 915144
gcagcuaaaugaucuuguu

SEQ ID NO: 1057179 - RNA, 19 nt, Artificial Sequence
  Description of Artificial Sequence: Synthetic oligonucleotide
  Antisense strand to SEQ ID NO: 1057178
aacaagaucauuuagcugc

SEQ ID NO: 1057180 - RNA, 19 nt, Artificial Sequence
  Description of Artificial Sequence: Synthetic oligonucleotide
  Sense strand starting at position 397 of SEQ ID NO: 915144
ugccuauucugagucauca

SEQ ID NO: 1057181 - RNA, 19 nt, Artificial Sequence
  Description of Artificial Sequence: Synthetic oligonucleotide
  Antisense strand to SEQ ID NO: 1057180
ugaugacucagaauaggca

SEQ ID NO: 1057182 - RNA, 19 nt, Artificial Sequence
  Description of Artificial Sequence: Synthetic oligonucleotide
  Sense strand starting at position 510 of SEQ ID NO: 915144
ugaaauuuaucauguagag

SEQ ID NO: 1057183 - RNA, 19 nt, Artificial Sequence
  Description of Artificial Sequence: Synthetic oligonucleotide
  Antisense strand to SEQ ID NO: 1057182
cucuacaugauaaauuuca

SEQ ID NO: 1057184 - RNA, 19 nt, Artificial Sequence
  Description of Artificial Sequence: Synthetic oligonucleotide
  Sense strand starting at position 684 of SEQ ID NO: 915144
uuuaccuuuccuugacagu

SEQ ID NO: 1057185 - RNA, 19 nt, Artificial Sequence
  Description of Artificial Sequence: Synthetic oligonucleotide
  Antisense strand to SEQ ID NO: 1057184
acugucaaggaaagguaaa

SEQ ID NO: 1057186 - RNA, 19 nt, Artificial Sequence
  Description of Artificial Sequence: Synthetic oligonucleotide
  Sense strand starting at position 685 of SEQ ID NO: 915144
uuaccuuuccuugacagua

SEQ ID NO: 1057187 - RNA, 19 nt, Artificial Sequence
  Description of Artificial Sequence: Synthetic oligonucleotide
  Antisense strand to SEQ ID NO: 1057186
uacugucaaggaaagguaa

SEQ ID NO: 1057188 - RNA, 19 nt, Artificial Sequence
  Description of Artificial Sequence: Synthetic oligonucleotide
  Sense strand starting at position 705 of SEQ ID NO: 915144
gagauuagacuuuguauau

SEQ ID NO: 1057189 - RNA, 19 nt, Artificial Sequence
  Description of Artificial Sequence: Synthetic oligonucleotide
  Antisense strand to SEQ ID NO: 1057188
auauacaaagucuaaucuc

SEQ ID NO: 1057190 - RNA, 19 nt, Artificial Sequence
  Description of Artificial Sequence: Synthetic oligonucleotide
  Sense strand starting at position 706 of SEQ ID NO: 915144
agauuagacuuuguauauc

SEQ ID NO: 1057191 - RNA, 19 nt, Artificial Sequence
  Description of Artificial Sequence: Synthetic oligonucleotide
  Antisense strand to SEQ ID NO: 1057190
gauauacaaagucuaaucu

SEQ ID NO: 1057192 - RNA, 19 nt, Artificial Sequence
  Description of Artificial Sequence: Synthetic oligonucleotide
  Sense strand starting at position 714 of SEQ ID NO: 915144
cuuuguauaucaucuguau

SEQ ID NO: 1057193 - RNA, 19 nt, Artificial Sequence
  Description of Artificial Sequence: Synthetic oligonucleotide
  Antisense strand to SEQ ID NO: 1057192
auacagaugauauacaaag

SEQ ID NO: 1057194 - RNA, 19 nt, Artificial Sequence
  Description of Artificial Sequence: Synthetic oligonucleotide
  Sense strand starting at position 748 of SEQ ID NO: 915144
acugaaugguaaucucaau

SEQ ID NO: 1057195 - RNA, 19 nt, Artificial Sequence
  Description of Artificial Sequence: Synthetic oligonucleotide
  Antisense strand to SEQ ID NO: 1057194
auugagauuaccauucagu

SEQ ID NO: 1057196 - RNA, 19 nt, Artificial Sequence
  Description of Artificial Sequence: Synthetic oligonucleotide
  Sense strand starting at position 783 of SEQ ID NO: 915144
cauucuuuauggguugacu

SEQ ID NO: 1057197 - RNA, 19 nt, Artificial Sequence
  Description of Artificial Sequence: Synthetic oligonucleotide
  Antisense strand to SEQ ID NO: 1057196
agucaacccauaaagaaug

SEQ ID NO: 1057198 - RNA, 19 nt, Artificial Sequence
  Description of Artificial Sequence: Synthetic oligonucleotide
  Sense strand starting at position 785 of SEQ ID NO: 915144
uucuuuauggguugacuca

SEQ ID NO: 1057199 - RNA, 19 nt, Artificial Sequence
  Description of Artificial Sequence: Synthetic oligonucleotide
  Antisense strand to SEQ ID NO: 1057198
ugagucaacccauaaagaa

SEQ ID NO: 1057200 - RNA, 19 nt, Artificial Sequence
  Description of Artificial Sequence: Synthetic oligonucleotide
  Sense strand starting at position 786 of SEQ ID NO: 915144
ucuuuauggguugacucaa

SEQ ID NO: 1057201 - RNA, 19 nt, Artificial Sequence
  Description of Artificial Sequence: Synthetic oligonucleotide
  Antisense strand to SEQ ID NO: 1057200
uugagucaacccauaaaga

SEQ ID NO: 1057202 - RNA, 19 nt, Artificial Sequence
  Description of Artificial Sequence: Synthetic oligonucleotide
  Sense strand starting at position 979 of SEQ ID NO: 915144
uagugacuucuauggcauu

SEQ ID NO: 1057203 - RNA, 19 nt, Artificial Sequence
  Description of Artificial Sequence: Synthetic oligonucleotide
  Antisense strand to SEQ ID NO: 1057202
aaugccauagaagucacua

SEQ ID NO: 1057204 - RNA, 19 nt, Artificial Sequence
  Description of Artificial Sequence: Synthetic oligonucleotide
  Sense strand starting at position 1021 of SEQ ID NO: 915144
augccuacugguugauaau

SEQ ID NO: 1057205 - RNA, 19 nt, Artificial Sequence
  Description of Artificial Sequence: Synthetic oligonucleotide
  Antisense strand to SEQ ID NO: 1057204
auuaucaaccaguaggcau

SEQ ID NO: 1057206 - RNA, 19 nt, Artificial Sequence
  Description of Artificial Sequence: Synthetic oligonucleotide
  Sense strand starting at position 1022 of SEQ ID NO: 915144
ugccuacugguugauaauu

SEQ ID NO: 1057207 - RNA, 19 nt, Artificial Sequence
  Description of Artificial Sequence: Synthetic oligonucleotide
  Antisense strand to SEQ ID NO: 1057206
aauuaucaaccaguaggca

SEQ ID NO: 1057208 - RNA, 19 nt, Artificial Sequence
  Description of Artificial Sequence: Synthetic oligonucleotide
  Sense strand starting at position 1995 of SEQ ID NO: 915144
cagacauaaugagggagau

SEQ ID NO: 1057209 - RNA, 19 nt, Artificial Sequence
  Description of Artificial Sequence: Synthetic oligonucleotide
  Antisense strand to SEQ ID NO: 1057208
aucucccucauuaugucug

SEQ ID NO: 1057210 - RNA, 19 nt, Artificial Sequence
  Description of Artificial Sequence: Synthetic oligonucleotide
  Sense strand starting at position 2121 of SEQ ID NO: 915144
aggcauauuuggcugcuaa

SEQ ID NO: 1057211 - RNA, 19 nt, Artificial Sequence
  Description of Artificial Sequence: Synthetic oligonucleotide
  Antisense strand to SEQ ID NO: 1057210
uuagcagccaaauaugccu

SEQ ID NO: 1057212 - RNA, 19 nt, Artificial Sequence
  Description of Artificial Sequence: Synthetic oligonucleotide
  Sense strand starting at position 2122 of SEQ ID NO: 915144
ggcauauuuggcugcuaau

SEQ ID NO: 1057213 - RNA, 19 nt, Artificial Sequence
  Description of Artificial Sequence: Synthetic oligonucleotide
  Antisense strand to SEQ ID NO: 1057212
auuagcagccaaauaugcc

SEQ ID NO: 1057214 - RNA, 19 nt, Artificial Sequence
  Description of Artificial Sequence: Synthetic oligonucleotide
  Sense strand starting at position 2125 of SEQ ID NO: 915144
auauuuggcugcuaaucaa

SEQ ID NO: 1057215 - RNA, 19 nt, Artificial Sequence
  Description of Artificial Sequence: Synthetic oligonucleotide
  Antisense strand to SEQ ID NO: 1057214
uugauuagcagccaaauau

SEQ ID NO: 1057216 - RNA, 19 nt, Artificial Sequence
  Description of Artificial Sequence: Synthetic oligonucleotide
  Sense strand starting at position 2707 of SEQ ID NO: 915144
cugagcuuuauguagaaag

SEQ ID NO: 1057217 - RNA, 19 nt, Artificial Sequence
  Description of Artificial Sequence: Synthetic oligonucleotide
  Antisense strand to SEQ ID NO: 1057216
cuuucuacauaaagcucag

SEQ ID NO: 1057218 - RNA, 19 nt, Artificial Sequence
  Description of Artificial Sequence: Synthetic oligonucleotide
  Sense strand starting at position 2709 of SEQ ID NO: 915144
gagcuuuauguagaaaguu

SEQ ID NO: 1057219 - RNA, 19 nt, Artificial Sequence
  Description of Artificial Sequence: Synthetic oligonucleotide
  Antisense strand to SEQ ID NO: 1057218
aacuuucuacauaaagcuc

SEQ ID NO: 1057220 - RNA, 19 nt, Artificial Sequence
  Description of Artificial Sequence: Synthetic oligonucleotide
  Sense strand starting at position 2754 of SEQ ID NO: 915144
cagagaucacugcgaauau

SEQ ID NO: 1057221 - RNA, 19 nt, Artificial Sequence
  Description of Artificial Sequence: Synthetic oligonucleotide
  Antisense strand to SEQ ID NO: 1057220
auauucgcagugaucucug

SEQ ID NO: 1057222 - RNA, 19 nt, Artificial Sequence
  Description of Artificial Sequence: Synthetic oligonucleotide
  Sense strand starting at position 2840 of SEQ ID NO: 915144
uuaugagguagguacuuau

SEQ ID NO: 1057223 - RNA, 19 nt, Artificial Sequence
  Description of Artificial Sequence: Synthetic oligonucleotide
  Antisense strand to SEQ ID NO: 1057222
auaaguaccuaccucauaa

SEQ ID NO: 1057224 - RNA, 19 nt, Artificial Sequence
  Description of Artificial Sequence: Synthetic oligonucleotide
  Sense strand starting at position 2843 of SEQ ID NO: 915144
ugagguagguacuuaugca

SEQ ID NO: 1057225 - RNA, 19 nt, Artificial Sequence
  Description of Artificial Sequence: Synthetic oligonucleotide
  Antisense strand to SEQ ID NO: 1057224
ugcauaaguaccuaccuca

SEQ ID NO: 1057226 - RNA, 19 nt, Artificial Sequence
  Description of Artificial Sequence: Synthetic oligonucleotide
  Sense strand starting at position 2847 of SEQ ID NO: 915144
guagguacuuaugcacauu

SEQ ID NO: 1057227 - RNA, 19 nt, Artificial Sequence
  Description of Artificial Sequence: Synthetic oligonucleotide
  Antisense strand to SEQ ID NO: 1057226
aaugugcauaaguaccuac

SEQ ID NO: 1057228 - RNA, 19 nt, Artificial Sequence
  Description of Artificial Sequence: Synthetic oligonucleotide
  Sense strand starting at position 2967 of SEQ ID NO: 915144
uaacuuauuugggcguuau

SEQ ID NO: 1057229 - RNA, 19 nt, Artificial Sequence
  Description of Artificial Sequence: Synthetic oligonucleotide
  Antisense strand to SEQ ID NO: 1057228
auaacgcccaaauaaguua

SEQ ID NO: 1057230 - RNA, 19 nt, Artificial Sequence
  Description of Artificial Sequence: Synthetic oligonucleotide
  Sense strand starting at position 2968 of SEQ ID NO: 915144
aacuuauuugggcguuauu

SEQ ID NO: 1057231 - RNA, 19 nt, Artificial Sequence
  Description of Artificial Sequence: Synthetic oligonucleotide
  Antisense strand to SEQ ID NO: 1057230
aauaacgcccaaauaaguu

SEQ ID NO: 1057232 - RNA, 19 nt, Artificial Sequence
  Description of Artificial Sequence: Synthetic oligonucleotide
  Sense strand starting at position 3002 of SEQ ID NO: 915144
gaauacaaucuugguaggu

SEQ ID NO: 1057233 - RNA, 19 nt, Artificial Sequence
  Description of Artificial Sequence: Synthetic oligonucleotide
  Antisense strand to SEQ ID NO: 1057232
accuaccaagauuguauuc

SEQ ID NO: 1057234 - RNA, 19 nt, Artificial Sequence
  Description of Artificial Sequence: Synthetic oligonucleotide
  Sense strand starting at position 3003 of SEQ ID NO: 915144
aauacaaucuugguagguu

SEQ ID NO: 1057235 - RNA, 19 nt, Artificial Sequence
  Description of Artificial Sequence: Synthetic oligonucleotide
  Antisense strand to SEQ ID NO: 1057234
aaccuaccaagauuguauu

SEQ ID NO: 1057236 - RNA, 19 nt, Artificial Sequence
  Description of Artificial Sequence: Synthetic oligonucleotide
  Sense strand starting at position 3125 of SEQ ID NO: 915144
uagaacauguuggagaaau

SEQ ID NO: 1057237 - RNA, 19 nt, Artificial Sequence
  Description of Artificial Sequence: Synthetic oligonucleotide
  Antisense strand to SEQ ID NO: 1057236
auuucuccaacauguucua

SEQ ID NO: 1057238 - RNA, 19 nt, Artificial Sequence
  Description of Artificial Sequence: Synthetic oligonucleotide
  Sense strand starting at position 3152 of SEQ ID NO: 915144
ggauaaguacuuuggaguu

SEQ ID NO: 1057239 - RNA, 19 nt, Artificial Sequence
  Description of Artificial Sequence: Synthetic oligonucleotide
  Antisense strand to SEQ ID NO: 1057238
aacuccaaaguacuuaucc

SEQ ID NO: 1057240 - RNA, 19 nt, Artificial Sequence
  Description of Artificial Sequence: Synthetic oligonucleotide
  Sense strand starting at position 3158 of SEQ ID NO: 915144
guacuuuggaguuacguau

SEQ ID NO: 1057241 - RNA, 19 nt, Artificial Sequence
  Description of Artificial Sequence: Synthetic oligonucleotide
  Antisense strand to SEQ ID NO: 1057240
auacguaacuccaaaguac

SEQ ID NO: 1057242 - RNA, 19 nt, Artificial Sequence
  Description of Artificial Sequence: Synthetic oligonucleotide
  Sense strand starting at position 3162 of SEQ ID NO: 915144
uuuggaguuacguauucuu

SEQ ID NO: 1057243 - RNA, 19 nt, Artificial Sequence
  Description of Artificial Sequence: Synthetic oligonucleotide
  Antisense strand to SEQ ID NO: 1057242
aagaauacguaacuccaaa

SEQ ID NO: 1057244 - RNA, 19 nt, Artificial Sequence
  Description of Artificial Sequence: Synthetic oligonucleotide
  Sense strand starting at position 3165 of SEQ ID NO: 915144
ggaguuacguauucuuauu

SEQ ID NO: 1057245 - RNA, 19 nt, Artificial Sequence
  Description of Artificial Sequence: Synthetic oligonucleotide
  Antisense strand to SEQ ID NO: 1057244
aauaagaauacguaacucc

SEQ ID NO: 1057246 - RNA, 19 nt, Artificial Sequence
  Description of Artificial Sequence: Synthetic oligonucleotide
  Sense strand starting at position 3281 of SEQ ID NO: 915144
gaagcucuacaguaguauu

SEQ ID NO: 1057247 - RNA, 19 nt, Artificial Sequence
  Description of Artificial Sequence: Synthetic oligonucleotide
  Antisense strand to SEQ ID NO: 1057246
aauacuacuguagagcuuc

SEQ ID NO: 1057248 - RNA, 19 nt, Artificial Sequence
  Description of Artificial Sequence: Synthetic oligonucleotide
  Sense strand starting at position 3317 of SEQ ID NO: 915144
auccaucuugauuggauua

SEQ ID NO: 1057249 - RNA, 19 nt, Artificial Sequence
  Description of Artificial Sequence: Synthetic oligonucleotide
  Antisense strand to SEQ ID NO: 1057248
uaauccaaucaagauggau

SEQ ID NO: 1057250 - RNA, 19 nt, Artificial Sequence
  Description of Artificial Sequence: Synthetic oligonucleotide
  Sense strand starting at position 3434 of SEQ ID NO: 915144
caauuucuguuggaaauga

SEQ ID NO: 1057251 - RNA, 19 nt, Artificial Sequence
  Description of Artificial Sequence: Synthetic oligonucleotide
  Antisense strand to SEQ ID NO: 1057250
ucauuuccaacagaaauug

SEQ ID NO: 1057252 - RNA, 19 nt, Artificial Sequence
  Description of Artificial Sequence: Synthetic oligonucleotide
  Sense strand starting at position 3865 of SEQ ID NO: 915144
acuggaaauugauugagcu

SEQ ID NO: 1057253 - RNA, 19 nt, Artificial Sequence
  Description of Artificial Sequence: Synthetic oligonucleotide
  Antisense strand to SEQ ID NO: 1057252
agcucaaucaauuuccagu

SEQ ID NO: 1057254 - RNA, 19 nt, Artificial Sequence
  Description of Artificial Sequence: Synthetic oligonucleotide
  Sense strand starting at position 3971 of SEQ ID NO: 915144
gcagccuugggccaauaua

SEQ ID NO: 1057255 - RNA, 19 nt, Artificial Sequence
  Description of Artificial Sequence: Synthetic oligonucleotide
  Antisense strand to SEQ ID NO: 1057254
uauauuggcccaaggcugc

SEQ ID NO: 1057256 - RNA, 19 nt, Artificial Sequence
  Description of Artificial Sequence: Synthetic oligonucleotide
  Sense strand starting at position 7 of SEQ ID NO: 915145
gagaguuuacaguagaugu

SEQ ID NO: 1057257 - RNA, 19 nt, Artificial Sequence
  Description of Artificial Sequence: Synthetic oligonucleotide
  Antisense strand to SEQ ID NO: 1057256
acaucuacuguaaacucuc

SEQ ID NO: 1057258 - RNA, 19 nt, Artificial Sequence
  Description of Artificial Sequence: Synthetic oligonucleotide
  Sense strand starting at position 9 of SEQ ID NO: 915145
gaguuuacaguagauguca

SEQ ID NO: 1057259 - RNA, 19 nt, Artificial Sequence
  Description of Artificial Sequence: Synthetic oligonucleotide
  Antisense strand to SEQ ID NO: 1057258
ugacaucuacuguaaacuc

SEQ ID NO: 1057260 - RNA, 19 nt, Artificial Sequence
  Description of Artificial Sequence: Synthetic oligonucleotide
  Sense strand starting at position 129 of SEQ ID NO: 915145
auucuagaauggcuauauu

SEQ ID NO: 1057261 - RNA, 19 nt, Artificial Sequence
  Description of Artificial Sequence: Synthetic oligonucleotide
  Antisense strand to SEQ ID NO: 1057260
aauauagccauucuagaau

SEQ ID NO: 1057262 - RNA, 19 nt, Artificial Sequence
  Description of Artificial Sequence: Synthetic oligonucleotide
  Sense strand starting at position 265 of SEQ ID NO: 915145
ugacaagaagcuugucuag

SEQ ID NO: 1057263 - RNA, 19 nt, Artificial Sequence
  Description of Artificial Sequence: Synthetic oligonucleotide
  Antisense strand to SEQ ID NO: 1057262
cuagacaagcuucuuguca

SEQ ID NO: 1057264 - RNA, 19 nt, Artificial Sequence
  Description of Artificial Sequence: Synthetic oligonucleotide
  Sense strand starting at position 404 of SEQ ID NO: 915145
auugaaauacucuguaagu

SEQ ID NO: 1057265 - RNA, 19 nt, Artificial Sequence
  Description of Artificial Sequence: Synthetic oligonucleotide
  Antisense strand to SEQ ID NO: 1057264
acuuacagaguauuucaau

SEQ ID NO: 1057266 - RNA, 19 nt, Artificial Sequence
  Description of Artificial Sequence: Synthetic oligonucleotide
  Sense strand starting at position 405 of SEQ ID NO: 915145
uugaaauacucuguaagug

SEQ ID NO: 1057267 - RNA, 19 nt, Artificial Sequence
  Description of Artificial Sequence: Synthetic oligonucleotide
  Antisense strand to SEQ ID NO: 1057266
cacuuacagaguauuucaa

SEQ ID NO: 1057268 - RNA, 19 nt, Artificial Sequence
  Description of Artificial Sequence: Synthetic oligonucleotide
  Sense strand starting at position 415 of SEQ ID NO: 915145
cuguaagugacuuacgacu

SEQ ID NO: 1057269 - RNA, 19 nt, Artificial Sequence
  Description of Artificial Sequence: Synthetic oligonucleotide
  Antisense strand to SEQ ID NO: 1057268
agucguaagucacuuacag

SEQ ID NO: 1057270 - RNA, 19 nt, Artificial Sequence
  Description of Artificial Sequence: Synthetic oligonucleotide
  Sense strand starting at position 421 of SEQ ID NO: 915145
gugacuuacgacuguauuu

SEQ ID NO: 1057271 - RNA, 19 nt, Artificial Sequence
  Description of Artificial Sequence: Synthetic oligonucleotide
  Antisense strand to SEQ ID NO: 1057270
aaauacagucguaagucac

SEQ ID NO: 1057272 - RNA, 19 nt, Artificial Sequence
  Description of Artificial Sequence: Synthetic oligonucleotide
  Sense strand starting at position 883 of SEQ ID NO: 915145
guccuugugagugacaaca

SEQ ID NO: 1057273 - RNA, 19 nt, Artificial Sequence
  Description of Artificial Sequence: Synthetic oligonucleotide
  Antisense strand to SEQ ID NO: 1057272
uguugucacucacaaggac

SEQ ID NO: 1057274 - RNA, 19 nt, Artificial Sequence
  Description of Artificial Sequence: Synthetic oligonucleotide
  Sense strand starting at position 986 of SEQ ID NO: 915145
ucugauucuccagauccga

SEQ ID NO: 1057275 - RNA, 19 nt, Artificial Sequence
  Description of Artificial Sequence: Synthetic oligonucleotide
  Antisense strand to SEQ ID NO: 1057274
ucggaucuggagaaucaga

SEQ ID NO: 1057276 - RNA, 19 nt, Artificial Sequence
  Description of Artificial Sequence: Synthetic oligonucleotide
  Sense strand starting at position 999 of SEQ ID NO: 915145
auccgaguuuaacuacuaa

SEQ ID NO: 1057277 - RNA, 19 nt, Artificial Sequence
  Description of Artificial Sequence: Synthetic oligonucleotide
  Antisense strand to SEQ ID NO: 1057276
uuaguaguuaaacucggau

SEQ ID NO: 1057278 - RNA, 19 nt, Artificial Sequence
  Description of Artificial Sequence: Synthetic oligonucleotide
  Sense strand starting at position 1038 of SEQ ID NO: 915145
cggauaaugccauauugua

SEQ ID NO: 1057279 - RNA, 19 nt, Artificial Sequence
  Description of Artificial Sequence: Synthetic oligonucleotide
  Antisense strand to SEQ ID NO: 1057278
uacaauauggcauuauccg

SEQ ID NO: 1057280 - RNA, 19 nt, Artificial Sequence
  Description of Artificial Sequence: Synthetic oligonucleotide
  Sense strand starting at position 1163 of SEQ ID NO: 915145
ucuguaaaugaaugucaaa

SEQ ID NO: 1057281 - RNA, 19 nt, Artificial Sequence
  Description of Artificial Sequence: Synthetic oligonucleotide
  Antisense strand to SEQ ID NO: 1057280
uuugacauucauuuacaga

SEQ ID NO: 1057282 - RNA, 19 nt, Artificial Sequence
  Description of Artificial Sequence: Synthetic oligonucleotide
  Sense strand starting at position 1175 of SEQ ID NO: 915145
ugucaaacccaucacugua

SEQ ID NO: 1057283 - RNA, 19 nt, Artificial Sequence
  Description of Artificial Sequence: Synthetic oligonucleotide
  Antisense strand to SEQ ID NO: 1057282
uacagugauggguuugaca

SEQ ID NO: 1057284 - RNA, 19 nt, Artificial Sequence
  Description of Artificial Sequence: Synthetic oligonucleotide
  Sense strand starting at position 1262 of SEQ ID NO: 915145
agaagcaaugccuaugaca

SEQ ID NO: 1057285 - RNA, 19 nt, Artificial Sequence
  Description of Artificial Sequence: Synthetic oligonucleotide
  Antisense strand to SEQ ID NO: 1057284
ugucauaggcauugcuucu

SEQ ID NO: 1057286 - RNA, 19 nt, Artificial Sequence
  Description of Artificial Sequence: Synthetic oligonucleotide
  Sense strand starting at position 1270 of SEQ ID NO: 915145
ugccuaugacaguauuaag

SEQ ID NO: 1057287 - RNA, 19 nt, Artificial Sequence
  Description of Artificial Sequence: Synthetic oligonucleotide
  Antisense strand to SEQ ID NO: 1057286
cuuaauacugucauaggca

SEQ ID NO: 1057288 - RNA, 19 nt, Artificial Sequence
  Description of Artificial Sequence: Synthetic oligonucleotide
  Sense strand starting at position 1290 of SEQ ID NO: 915145
auuagaauauaggagaaga

SEQ ID NO: 1057289 - RNA, 19 nt, Artificial Sequence
  Description of Artificial Sequence: Synthetic oligonucleotide
  Antisense strand to SEQ ID NO: 1057288
ucuucuccuauauucuaau

SEQ ID NO: 1057290 - RNA, 19 nt, Artificial Sequence
  Description of Artificial Sequence: Synthetic oligonucleotide
  Sense strand starting at position 1434 of SEQ ID NO: 915145
acaugagauuugcaauaug

SEQ ID NO: 1057291 - RNA, 19 nt, Artificial Sequence
  Description of Artificial Sequence: Synthetic oligonucleotide
  Antisense strand to SEQ ID NO: 1057290
cauauugcaaaucucaugu

SEQ ID NO: 1057292 - RNA, 19 nt, Artificial Sequence
  Description of Artificial Sequence: Synthetic oligonucleotide
  Sense strand starting at position 1529 of SEQ ID NO: 915145
gacucuaguauuggugaga

SEQ ID NO: 1057293 - RNA, 19 nt, Artificial Sequence
  Description of Artificial Sequence: Synthetic oligonucleotide
  Antisense strand to SEQ ID NO: 1057292
ucucaccaauacuagaguc

SEQ ID NO: 1057294 - RNA, 19 nt, Artificial Sequence
  Description of Artificial Sequence: Synthetic oligonucleotide
  Sense strand starting at position 1530 of SEQ ID NO: 915145
acucuaguauuggugagaa

SEQ ID NO: 1057295 - RNA, 19 nt, Artificial Sequence
  Description of Artificial Sequence: Synthetic oligonucleotide
  Antisense strand to SEQ ID NO: 1057294
uucucaccaauacuagagu

SEQ ID NO: 1057296 - RNA, 19 nt, Artificial Sequence
  Description of Artificial Sequence: Synthetic oligonucleotide
  Sense strand starting at position 1532 of SEQ ID NO: 915145
ucuaguauuggugagaaug

SEQ ID NO: 1057297 - RNA, 19 nt, Artificial Sequence
  Description of Artificial Sequence: Synthetic oligonucleotide
  Antisense strand to SEQ ID NO: 1057296
cauucucaccaauacuaga

SEQ ID NO: 1057298 - RNA, 19 nt, Artificial Sequence
  Description of Artificial Sequence: Synthetic oligonucleotide
  Sense strand starting at position 1558 of SEQ ID NO: 915145
aucucaaaggauugcggau

SEQ ID NO: 1057299 - RNA, 19 nt, Artificial Sequence
  Description of Artificial Sequence: Synthetic oligonucleotide
  Antisense strand to SEQ ID NO: 1057298
auccgcaauccuuugagau

SEQ ID NO: 1057300 - RNA, 19 nt, Artificial Sequence
  Description of Artificial Sequence: Synthetic oligonucleotide
  Sense strand starting at position 1697 of SEQ ID NO: 915145
uaggaugcccauuacagua

SEQ ID NO: 1057301 - RNA, 19 nt, Artificial Sequence
  Description of Artificial Sequence: Synthetic oligonucleotide
  Antisense strand to SEQ ID NO: 1057300
uacuguaaugggcauccua

SEQ ID NO: 1057302 - RNA, 19 nt, Artificial Sequence
  Description of Artificial Sequence: Synthetic oligonucleotide
  Sense strand starting at position 1822 of SEQ ID NO: 915145
ugccauugcccagaaggau

SEQ ID NO: 1057303 - RNA, 19 nt, Artificial Sequence
  Description of Artificial Sequence: Synthetic oligonucleotide
  Antisense strand to SEQ ID NO: 1057302
auccuucugggcaauggca

SEQ ID NO: 1057304 - RNA, 19 nt, Artificial Sequence
  Description of Artificial Sequence: Synthetic oligonucleotide
  Sense strand starting at position 1929 of SEQ ID NO: 915145
guaauauugggccacauag

SEQ ID NO: 1057305 - RNA, 19 nt, Artificial Sequence
  Description of Artificial Sequence: Synthetic oligonucleotide
  Antisense strand to SEQ ID NO: 1057304
cuauguggcccaauauuac

SEQ ID NO: 1057306 - RNA, 19 nt, Artificial Sequence
  Description of Artificial Sequence: Synthetic oligonucleotide
  Sense strand starting at position 1948 of SEQ ID NO: 915145
uguauccaccgguaaagau

SEQ ID NO: 1057307 - RNA, 19 nt, Artificial Sequence
  Description of Artificial Sequence: Synthetic oligonucleotide
  Antisense strand to SEQ ID NO: 1057306
aucuuuaccgguggauaca

SEQ ID NO: 1057308 - RNA, 19 nt, Artificial Sequence
  Description of Artificial Sequence: Synthetic oligonucleotide
  Sense strand starting at position 2007 of SEQ ID NO: 915145
ccugcuuggagaugauuaa

SEQ ID NO: 1057309 - RNA, 19 nt, Artificial Sequence
  Description of Artificial Sequence: Synthetic oligonucleotide
  Antisense strand to SEQ ID NO: 1057308
uuaaucaucuccaagcagg

SEQ ID NO: 1057310 - RNA, 19 nt, Artificial Sequence
  Description of Artificial Sequence: Synthetic oligonucleotide
  Sense strand starting at position 2016 of SEQ ID NO: 915145
agaugauuaacugguguga

SEQ ID NO: 1057311 - RNA, 19 nt, Artificial Sequence
  Description of Artificial Sequence: Synthetic oligonucleotide
  Antisense strand to SEQ ID NO: 1057310
ucacaccaguuaaucaucu

SEQ ID NO: 1057312 - RNA, 19 nt, Artificial Sequence
  Description of Artificial Sequence: Synthetic oligonucleotide
  Sense strand starting at position 2020 of SEQ ID NO: 915145
gauuaacuggugugauaaa

SEQ ID NO: 1057313 - RNA, 19 nt, Artificial Sequence
  Description of Artificial Sequence: Synthetic oligonucleotide
  Antisense strand to SEQ ID NO: 1057312
uuuaucacaccaguuaauc

SEQ ID NO: 1057314 - RNA, 19 nt, Artificial Sequence
  Description of Artificial Sequence: Synthetic oligonucleotide
  Sense strand starting at position 2301 of SEQ ID NO: 915145
uuuggaaaugauuguugua

SEQ ID NO: 1057315 - RNA, 19 nt, Artificial Sequence
  Description of Artificial Sequence: Synthetic oligonucleotide
  Antisense strand to SEQ ID NO: 1057314
uacaacaaucauuuccaaa

SEQ ID NO: 1057316 - RNA, 19 nt, Artificial Sequence
  Description of Artificial Sequence: Synthetic oligonucleotide
  Sense strand starting at position 2303 of SEQ ID NO: 915145
uggaaaugauuguuguaau

SEQ ID NO: 1057317 - RNA, 19 nt, Artificial Sequence
  Description of Artificial Sequence: Synthetic oligonucleotide
  Antisense strand to SEQ ID NO: 1057316
auuacaacaaucauuucca

SEQ ID NO: 1057318 - RNA, 19 nt, Artificial Sequence
  Description of Artificial Sequence: Synthetic oligonucleotide
  Sense strand starting at position 2384 of SEQ ID NO: 915145
uuggaaauugaaugucagu

SEQ ID NO: 1057319 - RNA, 19 nt, Artificial Sequence
  Description of Artificial Sequence: Synthetic oligonucleotide
  Antisense strand to SEQ ID NO: 1057318
acugacauucaauuuccaa

SEQ ID NO: 1057320 - RNA, 19 nt, Artificial Sequence
  Description of Artificial Sequence: Synthetic oligonucleotide
  Sense strand starting at position 2615 of SEQ ID NO: 915145
aaacaaugucugggcauca

SEQ ID NO: 1057321 - RNA, 19 nt, Artificial Sequence
  Description of Artificial Sequence: Synthetic oligonucleotide
  Antisense strand to SEQ ID NO: 1057320
ugaugcccagacauuguuu

SEQ ID NO: 1057322 - RNA, 19 nt, Artificial Sequence
  Description of Artificial Sequence: Synthetic oligonucleotide
  Sense strand starting at position 2653 of SEQ ID NO: 915145
ccuaauccaucuuucgaga

SEQ ID NO: 1057323 - RNA, 19 nt, Artificial Sequence
  Description of Artificial Sequence: Synthetic oligonucleotide
  Antisense strand to SEQ ID NO: 1057322
ucucgaaagauggauuagg

SEQ ID NO: 1057324 - RNA, 19 nt, Artificial Sequence
  Description of Artificial Sequence: Synthetic oligonucleotide
  Sense strand starting at position 3196 of SEQ ID NO: 915145
gagucaggauuacuaacuu

SEQ ID NO: 1057325 - RNA, 19 nt, Artificial Sequence
  Description of Artificial Sequence: Synthetic oligonucleotide
  Antisense strand to SEQ ID NO: 1057324
aaguuaguaauccugacuc

SEQ ID NO: 1057326 - RNA, 19 nt, Artificial Sequence
  Description of Artificial Sequence: Synthetic oligonucleotide
  Sense strand starting at position 3362 of SEQ ID NO: 915145
ggauguacggaaugaggua

SEQ ID NO: 1057327 - RNA, 19 nt, Artificial Sequence
  Description of Artificial Sequence: Synthetic oligonucleotide
  Antisense strand to SEQ ID NO: 1057326
uaccucauuccguacaucc

SEQ ID NO: 1057328 - RNA, 19 nt, Artificial Sequence
  Description of Artificial Sequence: Synthetic oligonucleotide
  Sense strand starting at position 3627 of SEQ ID NO: 915145
acaauaacgucuuuagaga

SEQ ID NO: 1057329 - RNA, 19 nt, Artificial Sequence
  Description of Artificial Sequence: Synthetic oligonucleotide
  Antisense strand to SEQ ID NO: 1057328
ucucuaaagacguuauugu

SEQ ID NO: 1057330 - RNA, 19 nt, Artificial Sequence
  Description of Artificial Sequence: Synthetic oligonucleotide
  Sense strand starting at position 3739 of SEQ ID NO: 915145
cuaagcuugggucauuaaa

SEQ ID NO: 1057331 - RNA, 19 nt, Artificial Sequence
  Description of Artificial Sequence: Synthetic oligonucleotide
  Antisense strand to SEQ ID NO: 1057330
uuuaaugacccaagcuuag

SEQ ID NO: 1057332 - RNA, 19 nt, Artificial Sequence
  Description of Artificial Sequence: Synthetic oligonucleotide
  Sense strand starting at position 3799 of SEQ ID NO: 915145
gguaaaucaugucugagau

SEQ ID NO: 1057333 - RNA, 19 nt, Artificial Sequence
  Description of Artificial Sequence: Synthetic oligonucleotide
  Antisense strand to SEQ ID NO: 1057332
aucucagacaugauuuacc

SEQ ID NO: 1057334 - RNA, 19 nt, Artificial Sequence
  Description of Artificial Sequence: Synthetic oligonucleotide
  Sense strand starting at position 3800 of SEQ ID NO: 915145
guaaaucaugucugagauu

SEQ ID NO: 1057335 - RNA, 19 nt, Artificial Sequence
  Description of Artificial Sequence: Synthetic oligonucleotide
  Antisense strand to SEQ ID NO: 1057334
aaucucagacaugauuuac

SEQ ID NO: 1057336 - RNA, 19 nt, Artificial Sequence
  Description of Artificial Sequence: Synthetic oligonucleotide
  Sense strand starting at position 62 of SEQ ID NO: 915146
acuaauagcaagugguaga

SEQ ID NO: 1057337 - RNA, 19 nt, Artificial Sequence
  Description of Artificial Sequence: Synthetic oligonucleotide
  Antisense strand to SEQ ID NO: 1057336
ucuaccacuugcuauuagu

SEQ ID NO: 1057338 - RNA, 19 nt, Artificial Sequence
  Description of Artificial Sequence: Synthetic oligonucleotide
  Sense strand starting at position 273 of SEQ ID NO: 915146
aauagaaauggguggugau

SEQ ID NO: 1057339 - RNA, 19 nt, Artificial Sequence
  Description of Artificial Sequence: Synthetic oligonucleotide
  Antisense strand to SEQ ID NO: 1057338
aucaccacccauuucuauu

SEQ ID NO: 1057340 - RNA, 19 nt, Artificial Sequence
  Description of Artificial Sequence: Synthetic oligonucleotide
  Sense strand starting at position 274 of SEQ ID NO: 915146
auagaaauggguggugaua

SEQ ID NO: 1057341 - RNA, 19 nt, Artificial Sequence
  Description of Artificial Sequence: Synthetic oligonucleotide
  Antisense strand to SEQ ID NO: 1057340
uaucaccacccauuucuau

SEQ ID NO: 1057342 - RNA, 19 nt, Artificial Sequence
  Description of Artificial Sequence: Synthetic oligonucleotide
  Sense strand starting at position 422 of SEQ ID NO: 915146
ucuggcuuccacgagauga

SEQ ID NO: 1057343 - RNA, 19 nt, Artificial Sequence
  Description of Artificial Sequence: Synthetic oligonucleotide
  Antisense strand to SEQ ID NO: 1057342
ucaucucguggaagccaga

SEQ ID NO: 1057344 - RNA, 19 nt, Artificial Sequence
  Description of Artificial Sequence: Synthetic oligonucleotide
  Sense strand starting at position 424 of SEQ ID NO: 915146
uggcuuccacgagaugaua

SEQ ID NO: 1057345 - RNA, 19 nt, Artificial Sequence
  Description of Artificial Sequence: Synthetic oligonucleotide
  Antisense strand to SEQ ID NO: 1057344
uaucaucucguggaagcca

SEQ ID NO: 1057346 - RNA, 19 nt, Artificial Sequence
  Description of Artificial Sequence: Synthetic oligonucleotide
  Sense strand starting at position 554 of SEQ ID NO: 915146
ucuagauauuugcuguuua

SEQ ID NO: 1057347 - RNA, 19 nt, Artificial Sequence
  Description of Artificial Sequence: Synthetic oligonucleotide
  Antisense strand to SEQ ID NO: 1057346
uaaacagcaaauaucuaga

SEQ ID NO: 1057348 - RNA, 19 nt, Artificial Sequence
  Description of Artificial Sequence: Synthetic oligonucleotide
  Sense strand starting at position 854 of SEQ ID NO: 915146
ccucuuuauuaggugauau

SEQ ID NO: 1057349 - RNA, 19 nt, Artificial Sequence
  Description of Artificial Sequence: Synthetic oligonucleotide
  Antisense strand to SEQ ID NO: 1057348
auaucaccuaauaaagagg

SEQ ID NO: 1057350 - RNA, 19 nt, Artificial Sequence
  Description of Artificial Sequence: Synthetic oligonucleotide
  Sense strand starting at position 1170 of SEQ ID NO: 915146
auggacauagcucauggua

SEQ ID NO: 1057351 - RNA, 19 nt, Artificial Sequence
  Description of Artificial Sequence: Synthetic oligonucleotide
  Antisense strand to SEQ ID NO: 1057350
uaccaugagcuauguccau

SEQ ID NO: 1057352 - RNA, 19 nt, Artificial Sequence
  Description of Artificial Sequence: Synthetic oligonucleotide
  Sense strand starting at position 1173 of SEQ ID NO: 915146
gacauagcucaugguaaug

SEQ ID NO: 1057353 - RNA, 19 nt, Artificial Sequence
  Description of Artificial Sequence: Synthetic oligonucleotide
  Antisense strand to SEQ ID NO: 1057352
cauuaccaugagcuauguc

SEQ ID NO: 1057354 - RNA, 19 nt, Artificial Sequence
  Description of Artificial Sequence: Synthetic oligonucleotide
  Sense strand starting at position 1332 of SEQ ID NO: 915146
caucacugucuugaggauu

SEQ ID NO: 1057355 - RNA, 19 nt, Artificial Sequence
  Description of Artificial Sequence: Synthetic oligonucleotide
  Antisense strand to SEQ ID NO: 1057354
aauccucaagacagugaug

SEQ ID NO: 1057356 - RNA, 19 nt, Artificial Sequence
  Description of Artificial Sequence: Synthetic oligonucleotide
  Sense strand starting at position 1335 of SEQ ID NO: 915146
cacugucuugaggauuagu

SEQ ID NO: 1057357 - RNA, 19 nt, Artificial Sequence
  Description of Artificial Sequence: Synthetic oligonucleotide
  Antisense strand to SEQ ID NO: 1057356
acuaauccucaagacagug

SEQ ID NO: 1057358 - RNA, 19 nt, Artificial Sequence
  Description of Artificial Sequence: Synthetic oligonucleotide
  Sense strand starting at position 1338 of SEQ ID NO: 915146
ugucuugaggauuaguaua

SEQ ID NO: 1057359 - RNA, 19 nt, Artificial Sequence
  Description of Artificial Sequence: Synthetic oligonucleotide
  Antisense strand to SEQ ID NO: 1057358
uauacuaauccucaagaca

SEQ ID NO: 1057360 - RNA, 19 nt, Artificial Sequence
  Description of Artificial Sequence: Synthetic oligonucleotide
  Sense strand starting at position 1340 of SEQ ID NO: 915146
ucuugaggauuaguauaua

SEQ ID NO: 1057361 - RNA, 19 nt, Artificial Sequence
  Description of Artificial Sequence: Synthetic oligonucleotide
  Antisense strand to SEQ ID NO: 1057360
uauauacuaauccucaaga

SEQ ID NO: 1057362 - RNA, 19 nt, Artificial Sequence
  Description of Artificial Sequence: Synthetic oligonucleotide
  Sense strand starting at position 1393 of SEQ ID NO: 915146
gucaaagaagucugaauaa

SEQ ID NO: 1057363 - RNA, 19 nt, Artificial Sequence
  Description of Artificial Sequence: Synthetic oligonucleotide
  Antisense strand to SEQ ID NO: 1057362
uuauucagacuucuuugac

SEQ ID NO: 1057364 - RNA, 19 nt, Artificial Sequence
  Description of Artificial Sequence: Synthetic oligonucleotide
  Sense strand starting at position 1414 of SEQ ID NO: 915146
ggauauaugugauuaaacg

SEQ ID NO: 1057365 - RNA, 19 nt, Artificial Sequence
  Description of Artificial Sequence: Synthetic oligonucleotide
  Antisense strand to SEQ ID NO: 1057364
cguuuaaucacauauaucc

SEQ ID NO: 1057366 - RNA, 19 nt, Artificial Sequence
  Description of Artificial Sequence: Synthetic oligonucleotide
  Sense strand starting at position 1415 of SEQ ID NO: 915146
gauauaugugauuaaacgu

SEQ ID NO: 1057367 - RNA, 19 nt, Artificial Sequence
  Description of Artificial Sequence: Synthetic oligonucleotide
  Antisense strand to SEQ ID NO: 1057366
acguuuaaucacauauauc

SEQ ID NO: 1057368 - RNA, 19 nt, Artificial Sequence
  Description of Artificial Sequence: Synthetic oligonucleotide
  Sense strand starting at position 1422 of SEQ ID NO: 915146
gugauuaaacgugauauca

SEQ ID NO: 1057369 - RNA, 19 nt, Artificial Sequence
  Description of Artificial Sequence: Synthetic oligonucleotide
  Antisense strand to SEQ ID NO: 1057368
ugauaucacguuuaaucac

SEQ ID NO: 1057370 - RNA, 19 nt, Artificial Sequence
  Description of Artificial Sequence: Synthetic oligonucleotide
  Sense strand starting at position 1501 of SEQ ID NO: 915146
ccacaauauggguagcagu

SEQ ID NO: 1057371 - RNA, 19 nt, Artificial Sequence
  Description of Artificial Sequence: Synthetic oligonucleotide
  Antisense strand to SEQ ID NO: 1057370
acugcuacccauauugugg

SEQ ID NO: 1057372 - RNA, 19 nt, Artificial Sequence
  Description of Artificial Sequence: Synthetic oligonucleotide
  Sense strand starting at position 1680 of SEQ ID NO: 915146
uacaauggccagugaauga

SEQ ID NO: 1057373 - RNA, 19 nt, Artificial Sequence
  Description of Artificial Sequence: Synthetic oligonucleotide
  Antisense strand to SEQ ID NO: 1057372
ucauucacuggccauugua

SEQ ID NO: 1057374 - RNA, 19 nt, Artificial Sequence
  Description of Artificial Sequence: Synthetic oligonucleotide
  Sense strand starting at position 1778 of SEQ ID NO: 915146
uagugaaugucaucccaag

SEQ ID NO: 1057375 - RNA, 19 nt, Artificial Sequence
  Description of Artificial Sequence: Synthetic oligonucleotide
  Antisense strand to SEQ ID NO: 1057374
cuugggaugacauucacua

SEQ ID NO: 1057376 - RNA, 19 nt, Artificial Sequence
  Description of Artificial Sequence: Synthetic oligonucleotide
  Sense strand starting at position 1841 of SEQ ID NO: 915146
ggaggcugugaucauucca

SEQ ID NO: 1057377 - RNA, 19 nt, Artificial Sequence
  Description of Artificial Sequence: Synthetic oligonucleotide
  Antisense strand to SEQ ID NO: 1057376
uggaaugaucacagccucc

SEQ ID NO: 1057378 - RNA, 19 nt, Artificial Sequence
  Description of Artificial Sequence: Synthetic oligonucleotide
  Sense strand starting at position 1865 of SEQ ID NO: 915146
ggacaagaagagugccauu

SEQ ID NO: 1057379 - RNA, 19 nt, Artificial Sequence
  Description of Artificial Sequence: Synthetic oligonucleotide
  Antisense strand to SEQ ID NO: 1057378
aauggcacucuucuugucc

SEQ ID NO: 1057380 - RNA, 19 nt, Artificial Sequence
  Description of Artificial Sequence: Synthetic oligonucleotide
  Sense strand starting at position 1986 of SEQ ID NO: 915146
guuguuauaccacauggua

SEQ ID NO: 1057381 - RNA, 19 nt, Artificial Sequence
  Description of Artificial Sequence: Synthetic oligonucleotide
  Antisense strand to SEQ ID NO: 1057380
uaccaugugguauaacaac

SEQ ID NO: 1057382 - RNA, 19 nt, Artificial Sequence
  Description of Artificial Sequence: Synthetic oligonucleotide
  Sense strand starting at position 2177 of SEQ ID NO: 915146
ggccuuucccuagaauaac

SEQ ID NO: 1057383 - RNA, 19 nt, Artificial Sequence
  Description of Artificial Sequence: Synthetic oligonucleotide
  Antisense strand to SEQ ID NO: 1057382
guuauucuagggaaaggcc

SEQ ID NO: 1057384 - RNA, 19 nt, Artificial Sequence
  Description of Artificial Sequence: Synthetic oligonucleotide
  Sense strand starting at position 2498 of SEQ ID NO: 915146
gaaauauugugaucaaugu

SEQ ID NO: 1057385 - RNA, 19 nt, Artificial Sequence
  Description of Artificial Sequence: Synthetic oligonucleotide
  Antisense strand to SEQ ID NO: 1057384
acauugaucacaauauuuc

SEQ ID NO: 1057386 - RNA, 19 nt, Artificial Sequence
  Description of Artificial Sequence: Synthetic oligonucleotide
  Sense strand starting at position 2522 of SEQ ID NO: 915146
ucucaaguggacugugaau

SEQ ID NO: 1057387 - RNA, 19 nt, Artificial Sequence
  Description of Artificial Sequence: Synthetic oligonucleotide
  Antisense strand to SEQ ID NO: 1057386
auucacaguccacuugaga

SEQ ID NO: 1057388 - RNA, 19 nt, Artificial Sequence
  Description of Artificial Sequence: Synthetic oligonucleotide
  Sense strand starting at position 2524 of SEQ ID NO: 915146
ucaaguggacugugaauaa

SEQ ID NO: 1057389 - RNA, 19 nt, Artificial Sequence
  Description of Artificial Sequence: Synthetic oligonucleotide
  Antisense strand to SEQ ID NO: 1057388
uuauucacaguccacuuga

SEQ ID NO: 1057390 - RNA, 19 nt, Artificial Sequence
  Description of Artificial Sequence: Synthetic oligonucleotide
  Sense strand starting at position 2795 of SEQ ID NO: 915146
ugaacaaguggguaaaguu

SEQ ID NO: 1057391 - RNA, 19 nt, Artificial Sequence
  Description of Artificial Sequence: Synthetic oligonucleotide
  Antisense strand to SEQ ID NO: 1057390
aacuuuacccacuuguuca

SEQ ID NO: 1057392 - RNA, 19 nt, Artificial Sequence
  Description of Artificial Sequence: Synthetic oligonucleotide
  Sense strand starting at position 2803 of SEQ ID NO: 915146
uggguaaaguuaguaaacu

SEQ ID NO: 1057393 - RNA, 19 nt, Artificial Sequence
  Description of Artificial Sequence: Synthetic oligonucleotide
  Antisense strand to SEQ ID NO: 1057392
aguuuacuaacuuuaccca

SEQ ID NO: 1057394 - RNA, 19 nt, Artificial Sequence
  Description of Artificial Sequence: Synthetic oligonucleotide
  Sense strand starting at position 2833 of SEQ ID NO: 915146
gguguaauuacucagugga

SEQ ID NO: 1057395 - RNA, 19 nt, Artificial Sequence
  Description of Artificial Sequence: Synthetic oligonucleotide
  Antisense strand to SEQ ID NO: 1057394
uccacugaguaauuacacc

SEQ ID NO: 1057396 - RNA, 19 nt, Artificial Sequence
  Description of Artificial Sequence: Synthetic oligonucleotide
  Sense strand starting at position 3025 of SEQ ID NO: 915146
uaaguauguugaucugaag

SEQ ID NO: 1057397 - RNA, 19 nt, Artificial Sequence
  Description of Artificial Sequence: Synthetic oligonucleotide
  Antisense strand to SEQ ID NO: 1057396
cuucagaucaacauacuua

SEQ ID NO: 1057398 - RNA, 19 nt, Artificial Sequence
  Description of Artificial Sequence: Synthetic oligonucleotide
  Sense strand starting at position 3031 of SEQ ID NO: 915146
uguugaucugaagggcaau

SEQ ID NO: 1057399 - RNA, 19 nt, Artificial Sequence
  Description of Artificial Sequence: Synthetic oligonucleotide
  Antisense strand to SEQ ID NO: 1057398
auugcccuucagaucaaca

SEQ ID NO: 1057400 - RNA, 19 nt, Artificial Sequence
  Description of Artificial Sequence: Synthetic oligonucleotide
  Sense strand starting at position 3032 of SEQ ID NO: 915146
guugaucugaagggcaaua

SEQ ID NO: 1057401 - RNA, 19 nt, Artificial Sequence
  Description of Artificial Sequence: Synthetic oligonucleotide
  Antisense strand to SEQ ID NO: 1057400
uauugcccuucagaucaac

SEQ ID NO: 1057402 - RNA, 19 nt, Artificial Sequence
  Description of Artificial Sequence: Synthetic oligonucleotide
  Sense strand starting at position 3587 of SEQ ID NO: 915146
aagcaauuauugguggaga

SEQ ID NO: 1057403 - RNA, 19 nt, Artificial Sequence
  Description of Artificial Sequence: Synthetic oligonucleotide
  Antisense strand to SEQ ID NO: 1057402
ucuccaccaauaauugcuu

SEQ ID NO: 1057404 - RNA, 19 nt, Artificial Sequence
  Description of Artificial Sequence: Synthetic oligonucleotide
  Sense strand starting at position 3589 of SEQ ID NO: 915146
gcaauuauugguggagaga

SEQ ID NO: 1057405 - RNA, 19 nt, Artificial Sequence
  Description of Artificial Sequence: Synthetic oligonucleotide
  Antisense strand to SEQ ID NO: 1057404
ucucuccaccaauaauugc

SEQ ID NO: 1057406 - RNA, 19 nt, Artificial Sequence
  Description of Artificial Sequence: Synthetic oligonucleotide
  Sense strand starting at position 3753 of SEQ ID NO: 915146
acugaauuaugaccugcau

SEQ ID NO: 1057407 - RNA, 19 nt, Artificial Sequence
  Description of Artificial Sequence: Synthetic oligonucleotide
  Antisense strand to SEQ ID NO: 1057406
augcaggucauaauucagu

SEQ ID NO: 1057408 - RNA, 19 nt, Artificial Sequence
  Description of Artificial Sequence: Synthetic oligonucleotide
  Sense strand starting at position 3776 of SEQ ID NO: 915146
cuuaauguggcagaacuua

SEQ ID NO: 1057409 - RNA, 19 nt, Artificial Sequence
  Description of Artificial Sequence: Synthetic oligonucleotide
  Antisense strand to SEQ ID NO: 1057408
uaaguucugccacauuaag

SEQ ID NO: 1057410 - RNA, 19 nt, Artificial Sequence
  Description of Artificial Sequence: Synthetic oligonucleotide
  Sense strand starting at position 3806 of SEQ ID NO: 915146
aggagugauguguauauca

SEQ ID NO: 1057411 - RNA, 19 nt, Artificial Sequence
  Description of Artificial Sequence: Synthetic oligonucleotide
  Antisense strand to SEQ ID NO: 1057410
ugauauacacaucacuccu

SEQ ID NO: 1057412 - RNA, 19 nt, Artificial Sequence
  Description of Artificial Sequence: Synthetic oligonucleotide
  Sense strand starting at position 3808 of SEQ ID NO: 915146
gagugauguguauaucauu

SEQ ID NO: 1057413 - RNA, 19 nt, Artificial Sequence
  Description of Artificial Sequence: Synthetic oligonucleotide
  Antisense strand to SEQ ID NO: 1057412
aaugauauacacaucacuc

SEQ ID NO: 1057414 - RNA, 19 nt, Artificial Sequence
  Description of Artificial Sequence: Synthetic oligonucleotide
  Sense strand starting at position 3964 of SEQ ID NO: 915146
aggccugauuauucuuaaa

SEQ ID NO: 1057415 - RNA, 19 nt, Artificial Sequence
  Description of Artificial Sequence: Synthetic oligonucleotide
  Antisense strand to SEQ ID NO: 1057414
uuuaagaauaaucaggccu

SEQ ID NO: 1057416 - RNA, 19 nt, Artificial Sequence
  Description of Artificial Sequence: Synthetic oligonucleotide
  Sense strand starting at position 212 of SEQ ID NO: 915147
uauugcagugauuaagagu

SEQ ID NO: 1057417 - RNA, 19 nt, Artificial Sequence
  Description of Artificial Sequence: Synthetic oligonucleotide
  Antisense strand to SEQ ID NO: 1057416
acucuuaaucacugcaaua

SEQ ID NO: 1057418 - RNA, 19 nt, Artificial Sequence
  Description of Artificial Sequence: Synthetic oligonucleotide
  Sense strand starting at position 227 of SEQ ID NO: 915147
gaguaugggcucuggaauu

SEQ ID NO: 1057419 - RNA, 19 nt, Artificial Sequence
  Description of Artificial Sequence: Synthetic oligonucleotide
  Antisense strand to SEQ ID NO: 1057418
aauuccagagcccauacuc

SEQ ID NO: 1057420 - RNA, 19 nt, Artificial Sequence
  Description of Artificial Sequence: Synthetic oligonucleotide
  Sense strand starting at position 238 of SEQ ID NO: 915147
cuggaauuagacugucuaa

SEQ ID NO: 1057421 - RNA, 19 nt, Artificial Sequence
  Description of Artificial Sequence: Synthetic oligonucleotide
  Antisense strand to SEQ ID NO: 1057420
uuagacagucuaauuccag

SEQ ID NO: 1057422 - RNA, 19 nt, Artificial Sequence
  Description of Artificial Sequence: Synthetic oligonucleotide
  Sense strand starting at position 254 of SEQ ID NO: 915147
uaauccuggcuguaauaug

SEQ ID NO: 1057423 - RNA, 19 nt, Artificial Sequence
  Description of Artificial Sequence: Synthetic oligonucleotide
  Antisense strand to SEQ ID NO: 1057422
cauauuacagccaggauua

SEQ ID NO: 1057424 - RNA, 19 nt, Artificial Sequence
  Description of Artificial Sequence: Synthetic oligonucleotide
  Sense strand starting at position 353 of SEQ ID NO: 915147
uaauaucugcgcuaaagga

SEQ ID NO: 1057425 - RNA, 19 nt, Artificial Sequence
  Description of Artificial Sequence: Synthetic oligonucleotide
  Antisense strand to SEQ ID NO: 1057424
uccuuuagcgcagauauua

SEQ ID NO: 1057426 - RNA, 19 nt, Artificial Sequence
  Description of Artificial Sequence: Synthetic oligonucleotide
  Sense strand starting at position 368 of SEQ ID NO: 915147
aggacuauuguguggaauc

SEQ ID NO: 1057427 - RNA, 19 nt, Artificial Sequence
  Description of Artificial Sequence: Synthetic oligonucleotide
  Antisense strand to SEQ ID NO: 1057426
gauuccacacaauaguccu

SEQ ID NO: 1057428 - RNA, 19 nt, Artificial Sequence
  Description of Artificial Sequence: Synthetic oligonucleotide
  Sense strand starting at position 378 of SEQ ID NO: 915147
uguggaauccgaugguaaa

SEQ ID NO: 1057429 - RNA, 19 nt, Artificial Sequence
  Description of Artificial Sequence: Synthetic oligonucleotide
  Antisense strand to SEQ ID NO: 1057428
uuuaccaucggauuccaca

SEQ ID NO: 1057430 - RNA, 19 nt, Artificial Sequence
  Description of Artificial Sequence: Synthetic oligonucleotide
  Sense strand starting at position 699 of SEQ ID NO: 915147
caaaucucuuggucugaag

SEQ ID NO: 1057431 - RNA, 19 nt, Artificial Sequence
  Description of Artificial Sequence: Synthetic oligonucleotide
  Antisense strand to SEQ ID NO: 1057430
cuucagaccaagagauuug

SEQ ID NO: 1057432 - RNA, 19 nt, Artificial Sequence
  Description of Artificial Sequence: Synthetic oligonucleotide
  Sense strand starting at position 855 of SEQ ID NO: 915147
gcugauagaguguaagaac

SEQ ID NO: 1057433 - RNA, 19 nt, Artificial Sequence
  Description of Artificial Sequence: Synthetic oligonucleotide
  Antisense strand to SEQ ID NO: 1057432
guucuuacacucuaucagc

SEQ ID NO: 1057434 - RNA, 19 nt, Artificial Sequence
  Description of Artificial Sequence: Synthetic oligonucleotide
  Sense strand starting at position 1009 of SEQ ID NO: 915147
auuuguaucuauccagugu

SEQ ID NO: 1057435 - RNA, 19 nt, Artificial Sequence
  Description of Artificial Sequence: Synthetic oligonucleotide
  Antisense strand to SEQ ID NO: 1057434
acacuggauagauacaaau

SEQ ID NO: 1057436 - RNA, 19 nt, Artificial Sequence
  Description of Artificial Sequence: Synthetic oligonucleotide
  Sense strand starting at position 1033 of SEQ ID NO: 915147
gucacuuccucauuuguuu

SEQ ID NO: 1057437 - RNA, 19 nt, Artificial Sequence
  Description of Artificial Sequence: Synthetic oligonucleotide
  Antisense strand to SEQ ID NO: 1057436
aaacaaaugaggaagugac

SEQ ID NO: 1057438 - RNA, 19 nt, Artificial Sequence
  Description of Artificial Sequence: Synthetic oligonucleotide
  Sense strand starting at position 1208 of SEQ ID NO: 915147
ggcugaugaguuuacucuu

SEQ ID NO: 1057439 - RNA, 19 nt, Artificial Sequence
  Description of Artificial Sequence: Synthetic oligonucleotide
  Antisense strand to SEQ ID NO: 1057438
aagaguaaacucaucagcc

SEQ ID NO: 1057440 - RNA, 19 nt, Artificial Sequence
  Description of Artificial Sequence: Synthetic oligonucleotide
  Sense strand starting at position 1211 of SEQ ID NO: 915147
ugaugaguuuacucuuuaa

SEQ ID NO: 1057441 - RNA, 19 nt, Artificial Sequence
  Description of Artificial Sequence: Synthetic oligonucleotide
  Antisense strand to SEQ ID NO: 1057440
uuaaagaguaaacucauca

SEQ ID NO: 1057442 - RNA, 19 nt, Artificial Sequence
  Description of Artificial Sequence: Synthetic oligonucleotide
  Sense strand starting at position 1214 of SEQ ID NO: 915147
ugaguuuacucuuuaauga

SEQ ID NO: 1057443 - RNA, 19 nt, Artificial Sequence
  Description of Artificial Sequence: Synthetic oligonucleotide
  Antisense strand to SEQ ID NO: 1057442
ucauuaaagaguaaacuca

SEQ ID NO: 1057444 - RNA, 19 nt, Artificial Sequence
  Description of Artificial Sequence: Synthetic oligonucleotide
  Sense strand starting at position 1274 of SEQ ID NO: 915147
gcucuaagagguuauggca

SEQ ID NO: 1057445 - RNA, 19 nt, Artificial Sequence
  Description of Artificial Sequence: Synthetic oligonucleotide
  Antisense strand to SEQ ID NO: 1057444
ugccauaaccucuuagagc

SEQ ID NO: 1057446 - RNA, 19 nt, Artificial Sequence
  Description of Artificial Sequence: Synthetic oligonucleotide
  Sense strand starting at position 1290 of SEQ ID NO: 915147
gcaagagaauuauccacua

SEQ ID NO: 1057447 - RNA, 19 nt, Artificial Sequence
  Description of Artificial Sequence: Synthetic oligonucleotide
  Antisense strand to SEQ ID NO: 1057446
uaguggauaauucucuugc

SEQ ID NO: 1057448 - RNA, 19 nt, Artificial Sequence
  Description of Artificial Sequence: Synthetic oligonucleotide
  Sense strand starting at position 1531 of SEQ ID NO: 915147
ucauaugacccucagguuu

SEQ ID NO: 1057449 - RNA, 19 nt, Artificial Sequence
  Description of Artificial Sequence: Synthetic oligonucleotide
  Antisense strand to SEQ ID NO: 1057448
aaaccugagggucauauga

SEQ ID NO: 1057450 - RNA, 19 nt, Artificial Sequence
  Description of Artificial Sequence: Synthetic oligonucleotide
  Sense strand starting at position 2279 of SEQ ID NO: 915147
ugugcuagcagcucuaagu

SEQ ID NO: 1057451 - RNA, 19 nt, Artificial Sequence
  Description of Artificial Sequence: Synthetic oligonucleotide
  Antisense strand to SEQ ID NO: 1057450
acuuagagcugcuagcaca

SEQ ID NO: 1057452 - RNA, 19 nt, Artificial Sequence
  Description of Artificial Sequence: Synthetic oligonucleotide
  Sense strand starting at position 2280 of SEQ ID NO: 915147
gugcuagcagcucuaaguu

SEQ ID NO: 1057453 - RNA, 19 nt, Artificial Sequence
  Description of Artificial Sequence: Synthetic oligonucleotide
  Antisense strand to SEQ ID NO: 1057452
aacuuagagcugcuagcac

SEQ ID NO: 1057454 - RNA, 19 nt, Artificial Sequence
  Description of Artificial Sequence: Synthetic oligonucleotide
  Sense strand starting at position 2351 of SEQ ID NO: 915147
aguacugagucucugacau

SEQ ID NO: 1057455 - RNA, 19 nt, Artificial Sequence
  Description of Artificial Sequence: Synthetic oligonucleotide
  Antisense strand to SEQ ID NO: 1057454
augucagagacucaguacu

SEQ ID NO: 1057456 - RNA, 19 nt, Artificial Sequence
  Description of Artificial Sequence: Synthetic oligonucleotide
  Sense strand starting at position 2448 of SEQ ID NO: 915147
guuucuuagguuuacacuu

SEQ ID NO: 1057457 - RNA, 19 nt, Artificial Sequence
  Description of Artificial Sequence: Synthetic oligonucleotide
  Antisense strand to SEQ ID NO: 1057456
aaguguaaaccuaagaaac

SEQ ID NO: 1057458 - RNA, 19 nt, Artificial Sequence
  Description of Artificial Sequence: Synthetic oligonucleotide
  Sense strand starting at position 2475 of SEQ ID NO: 915147
cgaugaaacucugauuuaa

SEQ ID NO: 1057459 - RNA, 19 nt, Artificial Sequence
  Description of Artificial Sequence: Synthetic oligonucleotide
  Antisense strand to SEQ ID NO: 1057458
uuaaaucagaguuucaucg

SEQ ID NO: 1057460 - RNA, 19 nt, Artificial Sequence
  Description of Artificial Sequence: Synthetic oligonucleotide
  Sense strand starting at position 2598 of SEQ ID NO: 915147
guggguuuaccugacacau

SEQ ID NO: 1057461 - RNA, 19 nt, Artificial Sequence
  Description of Artificial Sequence: Synthetic oligonucleotide
  Antisense strand to SEQ ID NO: 1057460
augugucagguaaacccac

SEQ ID NO: 1057462 - RNA, 19 nt, Artificial Sequence
  Description of Artificial Sequence: Synthetic oligonucleotide
  Sense strand starting at position 2609 of SEQ ID NO: 915147
ugacacauuugugugcaua

SEQ ID NO: 1057463 - RNA, 19 nt, Artificial Sequence
  Description of Artificial Sequence: Synthetic oligonucleotide
  Antisense strand to SEQ ID NO: 1057462
uaugcacacaaauguguca

SEQ ID NO: 1057464 - RNA, 19 nt, Artificial Sequence
  Description of Artificial Sequence: Synthetic oligonucleotide
  Sense strand starting at position 2610 of SEQ ID NO: 915147
gacacauuugugugcauau

SEQ ID NO: 1057465 - RNA, 19 nt, Artificial Sequence
  Description of Artificial Sequence: Synthetic oligonucleotide
  Antisense strand to SEQ ID NO: 1057464
auaugcacacaaauguguc

SEQ ID NO: 1057466 - RNA, 19 nt, Artificial Sequence
  Description of Artificial Sequence: Synthetic oligonucleotide
  Sense strand starting at position 2611 of SEQ ID NO: 915147
acacauuugugugcauaug

SEQ ID NO: 1057467 - RNA, 19 nt, Artificial Sequence
  Description of Artificial Sequence: Synthetic oligonucleotide
  Antisense strand to SEQ ID NO: 1057466
cauaugcacacaaaugugu

SEQ ID NO: 1057468 - RNA, 19 nt, Artificial Sequence
  Description of Artificial Sequence: Synthetic oligonucleotide
  Sense strand starting at position 2682 of SEQ ID NO: 915147
cuagaaguacaugguuaau

SEQ ID NO: 1057469 - RNA, 19 nt, Artificial Sequence
  Description of Artificial Sequence: Synthetic oligonucleotide
  Antisense strand to SEQ ID NO: 1057468
auuaaccauguacuucuag

SEQ ID NO: 1057470 - RNA, 19 nt, Artificial Sequence
  Description of Artificial Sequence: Synthetic oligonucleotide
  Sense strand starting at position 2702 of SEQ ID NO: 915147
gaaggcauccuugaaugca

SEQ ID NO: 1057471 - RNA, 19 nt, Artificial Sequence
  Description of Artificial Sequence: Synthetic oligonucleotide
  Antisense strand to SEQ ID NO: 1057470
ugcauucaaggaugccuuc

SEQ ID NO: 1057472 - RNA, 19 nt, Artificial Sequence
  Description of Artificial Sequence: Synthetic oligonucleotide
  Sense strand starting at position 2724 of SEQ ID NO: 915147
aaggaucuagucugagauc

SEQ ID NO: 1057473 - RNA, 19 nt, Artificial Sequence
  Description of Artificial Sequence: Synthetic oligonucleotide
  Antisense strand to SEQ ID NO: 1057472
gaucucagacuagauccuu

SEQ ID NO: 1057474 - RNA, 19 nt, Artificial Sequence
  Description of Artificial Sequence: Synthetic oligonucleotide
  Sense strand starting at position 2781 of SEQ ID NO: 915147
agugccuuuguacauaaua

SEQ ID NO: 1057475 - RNA, 19 nt, Artificial Sequence
  Description of Artificial Sequence: Synthetic oligonucleotide
  Antisense strand to SEQ ID NO: 1057474
uauuauguacaaaggcacu

SEQ ID NO: 1057476 - RNA, 19 nt, Artificial Sequence
  Description of Artificial Sequence: Synthetic oligonucleotide
  Sense strand starting at position 2797 of SEQ ID NO: 915147
auagcucuucugcaggaaa

SEQ ID NO: 1057477 - RNA, 19 nt, Artificial Sequence
  Description of Artificial Sequence: Synthetic oligonucleotide
  Antisense strand to SEQ ID NO: 1057476
uuuccugcagaagagcuau

SEQ ID NO: 1057478 - RNA, 19 nt, Artificial Sequence
  Description of Artificial Sequence: Synthetic oligonucleotide
  Sense strand starting at position 3183 of SEQ ID NO: 915147
gcuacaagggacuguauaa

SEQ ID NO: 1057479 - RNA, 19 nt, Artificial Sequence
  Description of Artificial Sequence: Synthetic oligonucleotide
  Antisense strand to SEQ ID NO: 1057478
uuauacagucccuuguagc

SEQ ID NO: 1057480 - RNA, 19 nt, Artificial Sequence
  Description of Artificial Sequence: Synthetic oligonucleotide
  Sense strand starting at position 3196 of SEQ ID NO: 915147
guauaaagucgguaagauu

SEQ ID NO: 1057481 - RNA, 19 nt, Artificial Sequence
  Description of Artificial Sequence: Synthetic oligonucleotide
  Antisense strand to SEQ ID NO: 1057480
aaucuuaccgacuuuauac

SEQ ID NO: 1057482 - RNA, 19 nt, Artificial Sequence
  Description of Artificial Sequence: Synthetic oligonucleotide
  Sense strand starting at position 3254 of SEQ ID NO: 915147
aucucuaucugcuuagaga

SEQ ID NO: 1057483 - RNA, 19 nt, Artificial Sequence
  Description of Artificial Sequence: Synthetic oligonucleotide
  Antisense strand to SEQ ID NO: 1057482
ucucuaagcagauagagau

SEQ ID NO: 1057484 - RNA, 19 nt, Artificial Sequence
  Description of Artificial Sequence: Synthetic oligonucleotide
  Sense strand starting at position 3255 of SEQ ID NO: 915147
ucucuaucugcuuagagau

SEQ ID NO: 1057485 - RNA, 19 nt, Artificial Sequence
  Description of Artificial Sequence: Synthetic oligonucleotide
  Antisense strand to SEQ ID NO: 1057484
aucucuaagcagauagaga

SEQ ID NO: 1057486 - RNA, 19 nt, Artificial Sequence
  Description of Artificial Sequence: Synthetic oligonucleotide
  Sense strand starting at position 3568 of SEQ ID NO: 915147
agagacagcccuuaucacu

SEQ ID NO: 1057487 - RNA, 19 nt, Artificial Sequence
  Description of Artificial Sequence: Synthetic oligonucleotide
  Antisense strand to SEQ ID NO: 1057486
agugauaagggcugucucu

SEQ ID NO: 1057488 - RNA, 19 nt, Artificial Sequence
  Description of Artificial Sequence: Synthetic oligonucleotide
  Sense strand starting at position 3653 of SEQ ID NO: 915147
auuggaaauuggguguaau

SEQ ID NO: 1057489 - RNA, 19 nt, Artificial Sequence
  Description of Artificial Sequence: Synthetic oligonucleotide
  Antisense strand to SEQ ID NO: 1057488
auuacacccaauuuccaau

SEQ ID NO: 1057490 - RNA, 19 nt, Artificial Sequence
  Description of Artificial Sequence: Synthetic oligonucleotide
  Sense strand starting at position 3654 of SEQ ID NO: 915147
uuggaaauuggguguaauu

SEQ ID NO: 1057491 - RNA, 19 nt, Artificial Sequence
  Description of Artificial Sequence: Synthetic oligonucleotide
  Antisense strand to SEQ ID NO: 1057490
aauuacacccaauuuccaa

SEQ ID NO: 1057492 - RNA, 19 nt, Artificial Sequence
  Description of Artificial Sequence: Synthetic oligonucleotide
  Sense strand starting at position 3772 of SEQ ID NO: 915147
gccauuagucuuccucguu

SEQ ID NO: 1057493 - RNA, 19 nt, Artificial Sequence
  Description of Artificial Sequence: Synthetic oligonucleotide
  Antisense strand to SEQ ID NO: 1057492
aacgaggaagacuaauggc

SEQ ID NO: 1057494 - RNA, 19 nt, Artificial Sequence
  Description of Artificial Sequence: Synthetic oligonucleotide
  Sense strand starting at position 3911 of SEQ ID NO: 915147
aaacguaugguuugaauga

SEQ ID NO: 1057495 - RNA, 19 nt, Artificial Sequence
  Description of Artificial Sequence: Synthetic oligonucleotide
  Antisense strand to SEQ ID NO: 1057494
ucauucaaaccauacguuu

SEQ ID NO: 1057496 - RNA, 19 nt, Artificial Sequence
  Description of Artificial Sequence: Synthetic oligonucleotide
  Sense strand starting at position 185 of SEQ ID NO: 915148
cuaucaagacaauggucau

SEQ ID NO: 1057497 - RNA, 19 nt, Artificial Sequence
  Description of Artificial Sequence: Synthetic oligonucleotide
  Antisense strand to SEQ ID NO: 1057496
augaccauugucuugauag

SEQ ID NO: 1057498 - RNA, 19 nt, Artificial Sequence
  Description of Artificial Sequence: Synthetic oligonucleotide
  Sense strand starting at position 191 of SEQ ID NO: 915148
agacaauggucaucugaau

SEQ ID NO: 1057499 - RNA, 19 nt, Artificial Sequence
  Description of Artificial Sequence: Synthetic oligonucleotide
  Antisense strand to SEQ ID NO: 1057498
auucagaugaccauugucu

SEQ ID NO: 1057500 - RNA, 19 nt, Artificial Sequence
  Description of Artificial Sequence: Synthetic oligonucleotide
  Sense strand starting at position 331 of SEQ ID NO: 915148
ggaaaugguuuacccucau

SEQ ID NO: 1057501 - RNA, 19 nt, Artificial Sequence
  Description of Artificial Sequence: Synthetic oligonucleotide
  Antisense strand to SEQ ID NO: 1057500
augaggguaaaccauuucc

SEQ ID NO: 1057502 - RNA, 19 nt, Artificial Sequence
  Description of Artificial Sequence: Synthetic oligonucleotide
  Sense strand starting at position 335 of SEQ ID NO: 915148
augguuuacccucauugaa

SEQ ID NO: 1057503 - RNA, 19 nt, Artificial Sequence
  Description of Artificial Sequence: Synthetic oligonucleotide
  Antisense strand to SEQ ID NO: 1057502
uucaaugaggguaaaccau

SEQ ID NO: 1057504 - RNA, 19 nt, Artificial Sequence
  Description of Artificial Sequence: Synthetic oligonucleotide
  Sense strand starting at position 337 of SEQ ID NO: 915148
gguuuacccucauugaaga

SEQ ID NO: 1057505 - RNA, 19 nt, Artificial Sequence
  Description of Artificial Sequence: Synthetic oligonucleotide
  Antisense strand to SEQ ID NO: 1057504
ucuucaaugaggguaaacc

SEQ ID NO: 1057506 - RNA, 19 nt, Artificial Sequence
  Description of Artificial Sequence: Synthetic oligonucleotide
  Sense strand starting at position 338 of SEQ ID NO: 915148
guuuacccucauugaagaa

SEQ ID NO: 1057507 - RNA, 19 nt, Artificial Sequence
  Description of Artificial Sequence: Synthetic oligonucleotide
  Antisense strand to SEQ ID NO: 1057506
uucuucaaugaggguaaac

SEQ ID NO: 1057508 - RNA, 19 nt, Artificial Sequence
  Description of Artificial Sequence: Synthetic oligonucleotide
  Sense strand starting at position 367 of SEQ ID NO: 915148
ggaaauggcuuacucucau

SEQ ID NO: 1057509 - RNA, 19 nt, Artificial Sequence
  Description of Artificial Sequence: Synthetic oligonucleotide
  Antisense strand to SEQ ID NO: 1057508
augagaguaagccauuucc

SEQ ID NO: 1057510 - RNA, 19 nt, Artificial Sequence
  Description of Artificial Sequence: Synthetic oligonucleotide
  Sense strand starting at position 373 of SEQ ID NO: 915148
ggcuuacucucauugaaga

SEQ ID NO: 1057511 - RNA, 19 nt, Artificial Sequence
  Description of Artificial Sequence: Synthetic oligonucleotide
  Antisense strand to SEQ ID NO: 1057510
ucuucaaugagaguaagcc

SEQ ID NO: 1057512 - RNA, 19 nt, Artificial Sequence
  Description of Artificial Sequence: Synthetic oligonucleotide
  Sense strand starting at position 374 of SEQ ID NO: 915148
gcuuacucucauugaagaa

SEQ ID NO: 1057513 - RNA, 19 nt, Artificial Sequence
  Description of Artificial Sequence: Synthetic oligonucleotide
  Antisense strand to SEQ ID NO: 1057512
uucuucaaugagaguaagc

SEQ ID NO: 1057514 - RNA, 19 nt, Artificial Sequence
  Description of Artificial Sequence: Synthetic oligonucleotide
  Sense strand starting at position 448 of SEQ ID NO: 915148
aagagaacuggauguaugu

SEQ ID NO: 1057515 - RNA, 19 nt, Artificial Sequence
  Description of Artificial Sequence: Synthetic oligonucleotide
  Antisense strand to SEQ ID NO: 1057514
acauacauccaguucucuu

SEQ ID NO: 1057516 - RNA, 19 nt, Artificial Sequence
  Description of Artificial Sequence: Synthetic oligonucleotide
  Sense strand starting at position 787 of SEQ ID NO: 915148
cuaaucaaacaaugugagu

SEQ ID NO: 1057517 - RNA, 19 nt, Artificial Sequence
  Description of Artificial Sequence: Synthetic oligonucleotide
  Antisense strand to SEQ ID NO: 1057516
acucacauuguuugauuag

SEQ ID NO: 1057518 - RNA, 19 nt, Artificial Sequence
  Description of Artificial Sequence: Synthetic oligonucleotide
  Sense strand starting at position 801 of SEQ ID NO: 915148
ugaguuaaauuaccugaga

SEQ ID NO: 1057519 - RNA, 19 nt, Artificial Sequence
  Description of Artificial Sequence: Synthetic oligonucleotide
  Antisense strand to SEQ ID NO: 1057518
ucucagguaauuuaacuca

SEQ ID NO: 1057520 - RNA, 19 nt, Artificial Sequence
  Description of Artificial Sequence: Synthetic oligonucleotide
  Sense strand starting at position 928 of SEQ ID NO: 915148
uugacugauuuccacugaa

SEQ ID NO: 1057521 - RNA, 19 nt, Artificial Sequence
  Description of Artificial Sequence: Synthetic oligonucleotide
  Antisense strand to SEQ ID NO: 1057520
uucaguggaaaucagucaa

SEQ ID NO: 1057522 - RNA, 19 nt, Artificial Sequence
  Description of Artificial Sequence: Synthetic oligonucleotide
  Sense strand starting at position 943 of SEQ ID NO: 915148
ugaaaugcucagggauuga

SEQ ID NO: 1057523 - RNA, 19 nt, Artificial Sequence
  Description of Artificial Sequence: Synthetic oligonucleotide
  Antisense strand to SEQ ID NO: 1057522
ucaaucccugagcauuuca

SEQ ID NO: 1057524 - RNA, 19 nt, Artificial Sequence
  Description of Artificial Sequence: Synthetic oligonucleotide
  Sense strand starting at position 953 of SEQ ID NO: 915148
agggauugauuaguucuca

SEQ ID NO: 1057525 - RNA, 19 nt, Artificial Sequence
  Description of Artificial Sequence: Synthetic oligonucleotide
  Antisense strand to SEQ ID NO: 1057524
ugagaacuaaucaaucccu

SEQ ID NO: 1057526 - RNA, 19 nt, Artificial Sequence
  Description of Artificial Sequence: Synthetic oligonucleotide
  Sense strand starting at position 954 of SEQ ID NO: 915148
gggauugauuaguucucau

SEQ ID NO: 1057527 - RNA, 19 nt, Artificial Sequence
  Description of Artificial Sequence: Synthetic oligonucleotide
  Antisense strand to SEQ ID NO: 1057526
augagaacuaaucaauccc

SEQ ID NO: 1057528 - RNA, 19 nt, Artificial Sequence
  Description of Artificial Sequence: Synthetic oligonucleotide
  Sense strand starting at position 957 of SEQ ID NO: 915148
auugauuaguucucauuga

SEQ ID NO: 1057529 - RNA, 19 nt, Artificial Sequence
  Description of Artificial Sequence: Synthetic oligonucleotide
  Antisense strand to SEQ ID NO: 1057528
ucaaugagaacuaaucaau

SEQ ID NO: 1057530 - RNA, 19 nt, Artificial Sequence
  Description of Artificial Sequence: Synthetic oligonucleotide
  Sense strand starting at position 961 of SEQ ID NO: 915148
auuaguucucauugaaaug

SEQ ID NO: 1057531 - RNA, 19 nt, Artificial Sequence
  Description of Artificial Sequence: Synthetic oligonucleotide
  Antisense strand to SEQ ID NO: 1057530
cauuucaaugagaacuaau

SEQ ID NO: 1057532 - RNA, 19 nt, Artificial Sequence
  Description of Artificial Sequence: Synthetic oligonucleotide
  Sense strand starting at position 973 of SEQ ID NO: 915148
ugaaaugacuuucccuagu

SEQ ID NO: 1057533 - RNA, 19 nt, Artificial Sequence
  Description of Artificial Sequence: Synthetic oligonucleotide
  Antisense strand to SEQ ID NO: 1057532
acuagggaaagucauuuca

SEQ ID NO: 1057534 - RNA, 19 nt, Artificial Sequence
  Description of Artificial Sequence: Synthetic oligonucleotide
  Sense strand starting at position 1029 of SEQ ID NO: 915148
ccugaauuauuccucagag

SEQ ID NO: 1057535 - RNA, 19 nt, Artificial Sequence
  Description of Artificial Sequence: Synthetic oligonucleotide
  Antisense strand to SEQ ID NO: 1057534
cucugaggaauaauucagg

SEQ ID NO: 1057536 - RNA, 19 nt, Artificial Sequence
  Description of Artificial Sequence: Synthetic oligonucleotide
  Sense strand starting at position 2034 of SEQ ID NO: 915148
cagguaaagcaauaguaau

SEQ ID NO: 1057537 - RNA, 19 nt, Artificial Sequence
  Description of Artificial Sequence: Synthetic oligonucleotide
  Antisense strand to SEQ ID NO: 1057536
auuacuauugcuuuaccug

SEQ ID NO: 1057538 - RNA, 19 nt, Artificial Sequence
  Description of Artificial Sequence: Synthetic oligonucleotide
  Sense strand starting at position 2141 of SEQ ID NO: 915148
uuagucauuccugggagau

SEQ ID NO: 1057539 - RNA, 19 nt, Artificial Sequence
  Description of Artificial Sequence: Synthetic oligonucleotide
  Antisense strand to SEQ ID NO: 1057538
aucucccaggaaugacuaa

SEQ ID NO: 1057540 - RNA, 19 nt, Artificial Sequence
  Description of Artificial Sequence: Synthetic oligonucleotide
  Sense strand starting at position 2142 of SEQ ID NO: 915148
uagucauuccugggagauc

SEQ ID NO: 1057541 - RNA, 19 nt, Artificial Sequence
  Description of Artificial Sequence: Synthetic oligonucleotide
  Antisense strand to SEQ ID NO: 1057540
gaucucccaggaaugacua

SEQ ID NO: 1057542 - RNA, 19 nt, Artificial Sequence
  Description of Artificial Sequence: Synthetic oligonucleotide
  Sense strand starting at position 2201 of SEQ ID NO: 915148
uaggguuuacucuauguaa

SEQ ID NO: 1057543 - RNA, 19 nt, Artificial Sequence
  Description of Artificial Sequence: Synthetic oligonucleotide
  Antisense strand to SEQ ID NO: 1057542
uuacauagaguaaacccua

SEQ ID NO: 1057544 - RNA, 19 nt, Artificial Sequence
  Description of Artificial Sequence: Synthetic oligonucleotide
  Sense strand starting at position 2347 of SEQ ID NO: 915148
cuguaauggccugaaacuu

SEQ ID NO: 1057545 - RNA, 19 nt, Artificial Sequence
  Description of Artificial Sequence: Synthetic oligonucleotide
  Antisense strand to SEQ ID NO: 1057544
aaguuucaggccauuacag

SEQ ID NO: 1057546 - RNA, 19 nt, Artificial Sequence
  Description of Artificial Sequence: Synthetic oligonucleotide
  Sense strand starting at position 2353 of SEQ ID NO: 915148
uggccugaaacuuauaggu

SEQ ID NO: 1057547 - RNA, 19 nt, Artificial Sequence
  Description of Artificial Sequence: Synthetic oligonucleotide
  Antisense strand to SEQ ID NO: 1057546
accuauaaguuucaggcca

SEQ ID NO: 1057548 - RNA, 19 nt, Artificial Sequence
  Description of Artificial Sequence: Synthetic oligonucleotide
  Sense strand starting at position 2358 of SEQ ID NO: 915148
ugaaacuuauaggucacuu

SEQ ID NO: 1057549 - RNA, 19 nt, Artificial Sequence
  Description of Artificial Sequence: Synthetic oligonucleotide
  Antisense strand to SEQ ID NO: 1057548
aagugaccuauaaguuuca

SEQ ID NO: 1057550 - RNA, 19 nt, Artificial Sequence
  Description of Artificial Sequence: Synthetic oligonucleotide
  Sense strand starting at position 2469 of SEQ ID NO: 915148
gguucuaagcacuauugga

SEQ ID NO: 1057551 - RNA, 19 nt, Artificial Sequence
  Description of Artificial Sequence: Synthetic oligonucleotide
  Antisense strand to SEQ ID NO: 1057550
uccaauagugcuuagaacc

SEQ ID NO: 1057552 - RNA, 19 nt, Artificial Sequence
  Description of Artificial Sequence: Synthetic oligonucleotide
  Sense strand starting at position 2652 of SEQ ID NO: 915148
guaagagugacuuaccugu

SEQ ID NO: 1057553 - RNA, 19 nt, Artificial Sequence
  Description of Artificial Sequence: Synthetic oligonucleotide
  Antisense strand to SEQ ID NO: 1057552
acagguaagucacucuuac

SEQ ID NO: 1057554 - RNA, 19 nt, Artificial Sequence
  Description of Artificial Sequence: Synthetic oligonucleotide
  Sense strand starting at position 2785 of SEQ ID NO: 915148
aaauguggauuugaugaua

SEQ ID NO: 1057555 - RNA, 19 nt, Artificial Sequence
  Description of Artificial Sequence: Synthetic oligonucleotide
  Antisense strand to SEQ ID NO: 1057554
uaucaucaaauccacauuu

SEQ ID NO: 1057556 - RNA, 19 nt, Artificial Sequence
  Description of Artificial Sequence: Synthetic oligonucleotide
  Sense strand starting at position 2927 of SEQ ID NO: 915148
ggaaucugaugggauuuga

SEQ ID NO: 1057557 - RNA, 19 nt, Artificial Sequence
  Description of Artificial Sequence: Synthetic oligonucleotide
  Antisense strand to SEQ ID NO: 1057556
ucaaaucccaucagauucc

SEQ ID NO: 1057558 - RNA, 19 nt, Artificial Sequence
  Description of Artificial Sequence: Synthetic oligonucleotide
  Sense strand starting at position 2958 of SEQ ID NO: 915148
ggcucugugacucauuaga

SEQ ID NO: 1057559 - RNA, 19 nt, Artificial Sequence
  Description of Artificial Sequence: Synthetic oligonucleotide
  Antisense strand to SEQ ID NO: 1057558
ucuaaugagucacagagcc

SEQ ID NO: 1057560 - RNA, 19 nt, Artificial Sequence
  Description of Artificial Sequence: Synthetic oligonucleotide
  Sense strand starting at position 2960 of SEQ ID NO: 915148
cucugugacucauuagaau

SEQ ID NO: 1057561 - RNA, 19 nt, Artificial Sequence
  Description of Artificial Sequence: Synthetic oligonucleotide
  Antisense strand to SEQ ID NO: 1057560
auucuaaugagucacagag

SEQ ID NO: 1057562 - RNA, 19 nt, Artificial Sequence
  Description of Artificial Sequence: Synthetic oligonucleotide
  Sense strand starting at position 3077 of SEQ ID NO: 915148
guugguuuggacuauacau

SEQ ID NO: 1057563 - RNA, 19 nt, Artificial Sequence
  Description of Artificial Sequence: Synthetic oligonucleotide
  Antisense strand to SEQ ID NO: 1057562
auguauaguccaaaccaac

SEQ ID NO: 1057564 - RNA, 19 nt, Artificial Sequence
  Description of Artificial Sequence: Synthetic oligonucleotide
  Sense strand starting at position 3305 of SEQ ID NO: 915148
agugauuucugucuucuca

SEQ ID NO: 1057565 - RNA, 19 nt, Artificial Sequence
  Description of Artificial Sequence: Synthetic oligonucleotide
  Antisense strand to SEQ ID NO: 1057564
ugagaagacagaaaucacu

SEQ ID NO: 1057566 - RNA, 19 nt, Artificial Sequence
  Description of Artificial Sequence: Synthetic oligonucleotide
  Sense strand starting at position 3309 of SEQ ID NO: 915148
auuucugucuucucaguca

SEQ ID NO: 1057567 - RNA, 19 nt, Artificial Sequence
  Description of Artificial Sequence: Synthetic oligonucleotide
  Antisense strand to SEQ ID NO: 1057566
ugacugagaagacagaaau

SEQ ID NO: 1057568 - RNA, 19 nt, Artificial Sequence
  Description of Artificial Sequence: Synthetic oligonucleotide
  Sense strand starting at position 3357 of SEQ ID NO: 915148
uuuguaaagaguggauaau

SEQ ID NO: 1057569 - RNA, 19 nt, Artificial Sequence
  Description of Artificial Sequence: Synthetic oligonucleotide
  Antisense strand to SEQ ID NO: 1057568
auuauccacucuuuacaaa

SEQ ID NO: 1057570 - RNA, 19 nt, Artificial Sequence
  Description of Artificial Sequence: Synthetic oligonucleotide
  Sense strand starting at position 3438 of SEQ ID NO: 915148
aguacaugucaggauuauu

SEQ ID NO: 1057571 - RNA, 19 nt, Artificial Sequence
  Description of Artificial Sequence: Synthetic oligonucleotide
  Antisense strand to SEQ ID NO: 1057570
aauaauccugacauguacu

SEQ ID NO: 1057572 - RNA, 19 nt, Artificial Sequence
  Description of Artificial Sequence: Synthetic oligonucleotide
  Sense strand starting at position 3602 of SEQ ID NO: 915148
ugauaugucugggugggaa

SEQ ID NO: 1057573 - RNA, 19 nt, Artificial Sequence
  Description of Artificial Sequence: Synthetic oligonucleotide
  Antisense strand to SEQ ID NO: 1057572
uucccacccagacauauca

SEQ ID NO: 1057574 - RNA, 19 nt, Artificial Sequence
  Description of Artificial Sequence: Synthetic oligonucleotide
  Sense strand starting at position 3791 of SEQ ID NO: 915148
agacaauacucagcuuaug

SEQ ID NO: 1057575 - RNA, 19 nt, Artificial Sequence
  Description of Artificial Sequence: Synthetic oligonucleotide
  Antisense strand to SEQ ID NO: 1057574
cauaagcugaguauugucu

SEQ ID NO: 1057576 - RNA, 19 nt, Artificial Sequence
  Description of Artificial Sequence: Synthetic oligonucleotide
  Sense strand starting at position 66 of SEQ ID NO: 915149
gcagcauucuuaccagaua

SEQ ID NO: 1057577 - RNA, 19 nt, Artificial Sequence
  Description of Artificial Sequence: Synthetic oligonucleotide
  Antisense strand to SEQ ID NO: 1057576
uaucugguaagaaugcugc

SEQ ID NO: 1057578 - RNA, 19 nt, Artificial Sequence
  Description of Artificial Sequence: Synthetic oligonucleotide
  Sense strand starting at position 190 of SEQ ID NO: 915149
agagacacgucucaugaaa

SEQ ID NO: 1057579 - RNA, 19 nt, Artificial Sequence
  Description of Artificial Sequence: Synthetic oligonucleotide
  Antisense strand to SEQ ID NO: 1057578
uuucaugagacgugucucu

SEQ ID NO: 1057580 - RNA, 19 nt, Artificial Sequence
  Description of Artificial Sequence: Synthetic oligonucleotide
  Sense strand starting at position 210 of SEQ ID NO: 915149
auacaugugccaggacaua

SEQ ID NO: 1057581 - RNA, 19 nt, Artificial Sequence
  Description of Artificial Sequence: Synthetic oligonucleotide
  Antisense strand to SEQ ID NO: 1057580
uauguccuggcacauguau

SEQ ID NO: 1057582 - RNA, 19 nt, Artificial Sequence
  Description of Artificial Sequence: Synthetic oligonucleotide
  Sense strand starting at position 257 of SEQ ID NO: 915149
uacguauuccaugugugca

SEQ ID NO: 1057583 - RNA, 19 nt, Artificial Sequence
  Description of Artificial Sequence: Synthetic oligonucleotide
  Antisense strand to SEQ ID NO: 1057582
ugcacacauggaauacgua

SEQ ID NO: 1057584 - RNA, 19 nt, Artificial Sequence
  Description of Artificial Sequence: Synthetic oligonucleotide
  Sense strand starting at position 372 of SEQ ID NO: 915149
gacaaauagucauauagag

SEQ ID NO: 1057585 - RNA, 19 nt, Artificial Sequence
  Description of Artificial Sequence: Synthetic oligonucleotide
  Antisense strand to SEQ ID NO: 1057584
cucuauaugacuauuuguc

SEQ ID NO: 1057586 - RNA, 19 nt, Artificial Sequence
  Description of Artificial Sequence: Synthetic oligonucleotide
  Sense strand starting at position 486 of SEQ ID NO: 915149
guugcugucucuccaguua

SEQ ID NO: 1057587 - RNA, 19 nt, Artificial Sequence
  Description of Artificial Sequence: Synthetic oligonucleotide
  Antisense strand to SEQ ID NO: 1057586
uaacuggagagacagcaac

SEQ ID NO: 1057588 - RNA, 19 nt, Artificial Sequence
  Description of Artificial Sequence: Synthetic oligonucleotide
  Sense strand starting at position 530 of SEQ ID NO: 915149
cccugauuauggcugggua

SEQ ID NO: 1057589 - RNA, 19 nt, Artificial Sequence
  Description of Artificial Sequence: Synthetic oligonucleotide
  Antisense strand to SEQ ID NO: 1057588
uacccagccauaaucaggg

SEQ ID NO: 1057590 - RNA, 19 nt, Artificial Sequence
  Description of Artificial Sequence: Synthetic oligonucleotide
  Sense strand starting at position 531 of SEQ ID NO: 915149
ccugauuauggcuggguaa

SEQ ID NO: 1057591 - RNA, 19 nt, Artificial Sequence
  Description of Artificial Sequence: Synthetic oligonucleotide
  Antisense strand to SEQ ID NO: 1057590
uuacccagccauaaucagg

SEQ ID NO: 1057592 - RNA, 19 nt, Artificial Sequence
  Description of Artificial Sequence: Synthetic oligonucleotide
  Sense strand starting at position 565 of SEQ ID NO: 915149
ugcaauaacguuuauaguc

SEQ ID NO: 1057593 - RNA, 19 nt, Artificial Sequence
  Description of Artificial Sequence: Synthetic oligonucleotide
  Antisense strand to SEQ ID NO: 1057592
gacuauaaacguuauugca

SEQ ID NO: 1057594 - RNA, 19 nt, Artificial Sequence
  Description of Artificial Sequence: Synthetic oligonucleotide
  Sense strand starting at position 572 of SEQ ID NO: 915149
acguuuauaguccaugcaa

SEQ ID NO: 1057595 - RNA, 19 nt, Artificial Sequence
  Description of Artificial Sequence: Synthetic oligonucleotide
  Antisense strand to SEQ ID NO: 1057594
uugcauggacuauaaacgu

SEQ ID NO: 1057596 - RNA, 19 nt, Artificial Sequence
  Description of Artificial Sequence: Synthetic oligonucleotide
  Sense strand starting at position 574 of SEQ ID NO: 915149
guuuauaguccaugcaaau

SEQ ID NO: 1057597 - RNA, 19 nt, Artificial Sequence
  Description of Artificial Sequence: Synthetic oligonucleotide
  Antisense strand to SEQ ID NO: 1057596
auuugcauggacuauaaac

SEQ ID NO: 1057598 - RNA, 19 nt, Artificial Sequence
  Description of Artificial Sequence: Synthetic oligonucleotide
  Sense strand starting at position 651 of SEQ ID NO: 915149
aaccaugaggugugaucuu

SEQ ID NO: 1057599 - RNA, 19 nt, Artificial Sequence
  Description of Artificial Sequence: Synthetic oligonucleotide
  Antisense strand to SEQ ID NO: 1057598
aagaucacaccucaugguu

SEQ ID NO: 1057600 - RNA, 19 nt, Artificial Sequence
  Description of Artificial Sequence: Synthetic oligonucleotide
  Sense strand starting at position 743 of SEQ ID NO: 915149
gagggacuagugcagucau

SEQ ID NO: 1057601 - RNA, 19 nt, Artificial Sequence
  Description of Artificial Sequence: Synthetic oligonucleotide
  Antisense strand to SEQ ID NO: 1057600
augacugcacuagucccuc

SEQ ID NO: 1057602 - RNA, 19 nt, Artificial Sequence
  Description of Artificial Sequence: Synthetic oligonucleotide
  Sense strand starting at position 831 of SEQ ID NO: 915149
acuuaaauugcuggaagaa

SEQ ID NO: 1057603 - RNA, 19 nt, Artificial Sequence
  Description of Artificial Sequence: Synthetic oligonucleotide
  Antisense strand to SEQ ID NO: 1057602
uucuuccagcaauuuaagu

SEQ ID NO: 1057604 - RNA, 19 nt, Artificial Sequence
  Description of Artificial Sequence: Synthetic oligonucleotide
  Sense strand starting at position 854 of SEQ ID NO: 915149
gcacaauagguuugauacu

SEQ ID NO: 1057605 - RNA, 19 nt, Artificial Sequence
  Description of Artificial Sequence: Synthetic oligonucleotide
  Antisense strand to SEQ ID NO: 1057604
aguaucaaaccuauugugc

SEQ ID NO: 1057606 - RNA, 19 nt, Artificial Sequence
  Description of Artificial Sequence: Synthetic oligonucleotide
  Sense strand starting at position 2015 of SEQ ID NO: 915149
aggcauuggaguggugaca

SEQ ID NO: 1057607 - RNA, 19 nt, Artificial Sequence
  Description of Artificial Sequence: Synthetic oligonucleotide
  Antisense strand to SEQ ID NO: 1057606
ugucaccacuccaaugccu

SEQ ID NO: 1057608 - RNA, 19 nt, Artificial Sequence
  Description of Artificial Sequence: Synthetic oligonucleotide
  Sense strand starting at position 2047 of SEQ ID NO: 915149
cuaagucauccugguaauu

SEQ ID NO: 1057609 - RNA, 19 nt, Artificial Sequence
  Description of Artificial Sequence: Synthetic oligonucleotide
  Antisense strand to SEQ ID NO: 1057608
aauuaccaggaugacuuag

SEQ ID NO: 1057610 - RNA, 19 nt, Artificial Sequence
  Description of Artificial Sequence: Synthetic oligonucleotide
  Sense strand starting at position 2169 of SEQ ID NO: 915149
uucuauuacugucccauga

SEQ ID NO: 1057611 - RNA, 19 nt, Artificial Sequence
  Description of Artificial Sequence: Synthetic oligonucleotide
  Antisense strand to SEQ ID NO: 1057610
ucaugggacaguaauagaa

SEQ ID NO: 1057612 - RNA, 19 nt, Artificial Sequence
  Description of Artificial Sequence: Synthetic oligonucleotide
  Sense strand starting at position 2182 of SEQ ID NO: 915149
ccaugaaucucagugugug

SEQ ID NO: 1057613 - RNA, 19 nt, Artificial Sequence
  Description of Artificial Sequence: Synthetic oligonucleotide
  Antisense strand to SEQ ID NO: 1057612
cacacacugagauucaugg

SEQ ID NO: 1057614 - RNA, 19 nt, Artificial Sequence
  Description of Artificial Sequence: Synthetic oligonucleotide
  Sense strand starting at position 2183 of SEQ ID NO: 915149
caugaaucucaguguguga

SEQ ID NO: 1057615 - RNA, 19 nt, Artificial Sequence
  Description of Artificial Sequence: Synthetic oligonucleotide
  Antisense strand to SEQ ID NO: 1057614
ucacacacugagauucaug

SEQ ID NO: 1057616 - RNA, 19 nt, Artificial Sequence
  Description of Artificial Sequence: Synthetic oligonucleotide
  Sense strand starting at position 2186 of SEQ ID NO: 915149
gaaucucagugugugaaga

SEQ ID NO: 1057617 - RNA, 19 nt, Artificial Sequence
  Description of Artificial Sequence: Synthetic oligonucleotide
  Antisense strand to SEQ ID NO: 1057616
ucuucacacacugagauuc

SEQ ID NO: 1057618 - RNA, 19 nt, Artificial Sequence
  Description of Artificial Sequence: Synthetic oligonucleotide
  Sense strand starting at position 2289 of SEQ ID NO: 915149
agaguagacuugcaggauu

SEQ ID NO: 1057619 - RNA, 19 nt, Artificial Sequence
  Description of Artificial Sequence: Synthetic oligonucleotide
  Antisense strand to SEQ ID NO: 1057618
aauccugcaagucuacucu

SEQ ID NO: 1057620 - RNA, 19 nt, Artificial Sequence
  Description of Artificial Sequence: Synthetic oligonucleotide
  Sense strand starting at position 2297 of SEQ ID NO: 915149
cuugcaggauugcucagaa

SEQ ID NO: 1057621 - RNA, 19 nt, Artificial Sequence
  Description of Artificial Sequence: Synthetic oligonucleotide
  Antisense strand to SEQ ID NO: 1057620
uucugagcaauccugcaag

SEQ ID NO: 1057622 - RNA, 19 nt, Artificial Sequence
  Description of Artificial Sequence: Synthetic oligonucleotide
  Sense strand starting at position 2307 of SEQ ID NO: 915149
ugcucagaaugguccacau

SEQ ID NO: 1057623 - RNA, 19 nt, Artificial Sequence
  Description of Artificial Sequence: Synthetic oligonucleotide
  Antisense strand to SEQ ID NO: 1057622
auguggaccauucugagca

SEQ ID NO: 1057624 - RNA, 19 nt, Artificial Sequence
  Description of Artificial Sequence: Synthetic oligonucleotide
  Sense strand starting at position 2441 of SEQ ID NO: 915149
ggcucagucugggaugaga

SEQ ID NO: 1057625 - RNA, 19 nt, Artificial Sequence
  Description of Artificial Sequence: Synthetic oligonucleotide
  Antisense strand to SEQ ID NO: 1057624
ucucaucccagacugagcc

SEQ ID NO: 1057626 - RNA, 19 nt, Artificial Sequence
  Description of Artificial Sequence: Synthetic oligonucleotide
  Sense strand starting at position 2443 of SEQ ID NO: 915149
cucagucugggaugagauu

SEQ ID NO: 1057627 - RNA, 19 nt, Artificial Sequence
  Description of Artificial Sequence: Synthetic oligonucleotide
  Antisense strand to SEQ ID NO: 1057626
aaucucaucccagacugag

SEQ ID NO: 1057628 - RNA, 19 nt, Artificial Sequence
  Description of Artificial Sequence: Synthetic oligonucleotide
  Sense strand starting at position 2462 of SEQ ID NO: 915149
ucaagagagguuuguguuu

SEQ ID NO: 1057629 - RNA, 19 nt, Artificial Sequence
  Description of Artificial Sequence: Synthetic oligonucleotide
  Antisense strand to SEQ ID NO: 1057628
aaacacaaaccucucuuga

SEQ ID NO: 1057630 - RNA, 19 nt, Artificial Sequence
  Description of Artificial Sequence: Synthetic oligonucleotide
  Sense strand starting at position 2471 of SEQ ID NO: 915149
guuuguguuuaggccugaa

SEQ ID NO: 1057631 - RNA, 19 nt, Artificial Sequence
  Description of Artificial Sequence: Synthetic oligonucleotide
  Antisense strand to SEQ ID NO: 1057630
uucaggccuaaacacaaac

SEQ ID NO: 1057632 - RNA, 19 nt, Artificial Sequence
  Description of Artificial Sequence: Synthetic oligonucleotide
  Sense strand starting at position 2474 of SEQ ID NO: 915149
uguguuuaggccugaauac

SEQ ID NO: 1057633 - RNA, 19 nt, Artificial Sequence
  Description of Artificial Sequence: Synthetic oligonucleotide
  Antisense strand to SEQ ID NO: 1057632
guauucaggccuaaacaca

SEQ ID NO: 1057634 - RNA, 19 nt, Artificial Sequence
  Description of Artificial Sequence: Synthetic oligonucleotide
  Sense strand starting at position 2574 of SEQ ID NO: 915149
ucagaauugccagggcaag

SEQ ID NO: 1057635 - RNA, 19 nt, Artificial Sequence
  Description of Artificial Sequence: Synthetic oligonucleotide
  Antisense strand to SEQ ID NO: 1057634
cuugcccuggcaauucuga

SEQ ID NO: 1057636 - RNA, 19 nt, Artificial Sequence
  Description of Artificial Sequence: Synthetic oligonucleotide
  Sense strand starting at position 2958 of SEQ ID NO: 915149
cuaggaaauuugugcuuua

SEQ ID NO: 1057637 - RNA, 19 nt, Artificial Sequence
  Description of Artificial Sequence: Synthetic oligonucleotide
  Antisense strand to SEQ ID NO: 1057636
uaaagcacaaauuuccuag

SEQ ID NO: 1057638 - RNA, 19 nt, Artificial Sequence
  Description of Artificial Sequence: Synthetic oligonucleotide
  Sense strand starting at position 2970 of SEQ ID NO: 915149
ugcuuuaaaucagagaacu

SEQ ID NO: 1057639 - RNA, 19 nt, Artificial Sequence
  Description of Artificial Sequence: Synthetic oligonucleotide
  Antisense strand to SEQ ID NO: 1057638
aguucucugauuuaaagca

SEQ ID NO: 1057640 - RNA, 19 nt, Artificial Sequence
  Description of Artificial Sequence: Synthetic oligonucleotide
  Sense strand starting at position 3143 of SEQ ID NO: 915149
agaggagcaugucauggaa

SEQ ID NO: 1057641 - RNA, 19 nt, Artificial Sequence
  Description of Artificial Sequence: Synthetic oligonucleotide
  Antisense strand to SEQ ID NO: 1057640
uuccaugacaugcuccucu

SEQ ID NO: 1057642 - RNA, 19 nt, Artificial Sequence
  Description of Artificial Sequence: Synthetic oligonucleotide
  Sense strand starting at position 3146 of SEQ ID NO: 915149
ggagcaugucauggaaauc

SEQ ID NO: 1057643 - RNA, 19 nt, Artificial Sequence
  Description of Artificial Sequence: Synthetic oligonucleotide
  Antisense strand to SEQ ID NO: 1057642
gauuuccaugacaugcucc

SEQ ID NO: 1057644 - RNA, 19 nt, Artificial Sequence
  Description of Artificial Sequence: Synthetic oligonucleotide
  Sense strand starting at position 3195 of SEQ ID NO: 915149
gccagugcugcugcuguua

SEQ ID NO: 1057645 - RNA, 19 nt, Artificial Sequence
  Description of Artificial Sequence: Synthetic oligonucleotide
  Antisense strand to SEQ ID NO: 1057644
uaacagcagcagcacuggc

SEQ ID NO: 1057646 - RNA, 19 nt, Artificial Sequence
  Description of Artificial Sequence: Synthetic oligonucleotide
  Sense strand starting at position 3207 of SEQ ID NO: 915149
gcuguuacuccacaguguu

SEQ ID NO: 1057647 - RNA, 19 nt, Artificial Sequence
  Description of Artificial Sequence: Synthetic oligonucleotide
  Antisense strand to SEQ ID NO: 1057646
aacacuguggaguaacagc

SEQ ID NO: 1057648 - RNA, 19 nt, Artificial Sequence
  Description of Artificial Sequence: Synthetic oligonucleotide
  Sense strand starting at position 3431 of SEQ ID NO: 915149
accuguuccugaucucaga

SEQ ID NO: 1057649 - RNA, 19 nt, Artificial Sequence
  Description of Artificial Sequence: Synthetic oligonucleotide
  Antisense strand to SEQ ID NO: 1057648
ucugagaucaggaacaggu

SEQ ID NO: 1057650 - RNA, 19 nt, Artificial Sequence
  Description of Artificial Sequence: Synthetic oligonucleotide
  Sense strand starting at position 3743 of SEQ ID NO: 915149
gagugauucccauagcuuu

SEQ ID NO: 1057651 - RNA, 19 nt, Artificial Sequence
  Description of Artificial Sequence: Synthetic oligonucleotide
  Antisense strand to SEQ ID NO: 1057650
aaagcuaugggaaucacuc

SEQ ID NO: 1057652 - RNA, 19 nt, Artificial Sequence
  Description of Artificial Sequence: Synthetic oligonucleotide
  Sense strand starting at position 3960 of SEQ ID NO: 915149
ugccuugcuuaagugaaga

SEQ ID NO: 1057653 - RNA, 19 nt, Artificial Sequence
  Description of Artificial Sequence: Synthetic oligonucleotide
  Antisense strand to SEQ ID NO: 1057652
ucuucacuuaagcaaggca

SEQ ID NO: 1057654 - RNA, 19 nt, Artificial Sequence
  Description of Artificial Sequence: Synthetic oligonucleotide
  Sense strand starting at position 3962 of SEQ ID NO: 915149
ccuugcuuaagugaagagu

SEQ ID NO: 1057655 - RNA, 19 nt, Artificial Sequence
  Description of Artificial Sequence: Synthetic oligonucleotide
  Antisense strand to SEQ ID NO: 1057654
acucuucacuuaagcaagg

SEQ ID NO: 1057656 - RNA, 19 nt, Artificial Sequence
  Description of Artificial Sequence: Synthetic oligonucleotide
  Sense strand starting at position 209 of SEQ ID NO: 915150
ggaccagauaaguguucua

SEQ ID NO: 1057657 - RNA, 19 nt, Artificial Sequence
  Description of Artificial Sequence: Synthetic oligonucleotide
  Antisense strand to SEQ ID NO: 1057656
uagaacacuuaucuggucc

SEQ ID NO: 1057658 - RNA, 19 nt, Artificial Sequence
  Description of Artificial Sequence: Synthetic oligonucleotide
  Sense strand starting at position 212 of SEQ ID NO: 915150
ccagauaaguguucuaaag

SEQ ID NO: 1057659 - RNA, 19 nt, Artificial Sequence
  Description of Artificial Sequence: Synthetic oligonucleotide
  Antisense strand to SEQ ID NO: 1057658
cuuuagaacacuuaucugg

SEQ ID NO: 1057660 - RNA, 19 nt, Artificial Sequence
  Description of Artificial Sequence: Synthetic oligonucleotide
  Sense strand starting at position 224 of SEQ ID NO: 915150
ucuaaagaucugcaaagcu

SEQ ID NO: 1057661 - RNA, 19 nt, Artificial Sequence
  Description of Artificial Sequence: Synthetic oligonucleotide
  Antisense strand to SEQ ID NO: 1057660
agcuuugcagaucuuuaga

SEQ ID NO: 1057662 - RNA, 19 nt, Artificial Sequence
  Description of Artificial Sequence: Synthetic oligonucleotide
  Sense strand starting at position 381 of SEQ ID NO: 915150
gaguaccagagauaucguu

SEQ ID NO: 1057663 - RNA, 19 nt, Artificial Sequence
  Description of Artificial Sequence: Synthetic oligonucleotide
  Antisense strand to SEQ ID NO: 1057662
aacgauaucucugguacuc

SEQ ID NO: 1057664 - RNA, 19 nt, Artificial Sequence
  Description of Artificial Sequence: Synthetic oligonucleotide
  Sense strand starting at position 417 of SEQ ID NO: 915150
gggagaaauugagacaaau

SEQ ID NO: 1057665 - RNA, 19 nt, Artificial Sequence
  Description of Artificial Sequence: Synthetic oligonucleotide
  Antisense strand to SEQ ID NO: 1057664
auuugucucaauuucuccc

SEQ ID NO: 1057666 - RNA, 19 nt, Artificial Sequence
  Description of Artificial Sequence: Synthetic oligonucleotide
  Sense strand starting at position 508 of SEQ ID NO: 915150
acaauagcucagcaagcuu

SEQ ID NO: 1057667 - RNA, 19 nt, Artificial Sequence
  Description of Artificial Sequence: Synthetic oligonucleotide
  Antisense strand to SEQ ID NO: 1057666
aagcuugcugagcuauugu

SEQ ID NO: 1057668 - RNA, 19 nt, Artificial Sequence
  Description of Artificial Sequence: Synthetic oligonucleotide
  Sense strand starting at position 558 of SEQ ID NO: 915150
acauuuaagccauggcagu

SEQ ID NO: 1057669 - RNA, 19 nt, Artificial Sequence
  Description of Artificial Sequence: Synthetic oligonucleotide
  Antisense strand to SEQ ID NO: 1057668
acugccauggcuuaaaugu

SEQ ID NO: 1057670 - RNA, 19 nt, Artificial Sequence
  Description of Artificial Sequence: Synthetic oligonucleotide
  Sense strand starting at position 868 of SEQ ID NO: 915150
gccucucuuaaggauguga

SEQ ID NO: 1057671 - RNA, 19 nt, Artificial Sequence
  Description of Artificial Sequence: Synthetic oligonucleotide
  Antisense strand to SEQ ID NO: 1057670
ucacauccuuaagagaggc

SEQ ID NO: 1057672 - RNA, 19 nt, Artificial Sequence
  Description of Artificial Sequence: Synthetic oligonucleotide
  Sense strand starting at position 870 of SEQ ID NO: 915150
cucucuuaaggaugugaca

SEQ ID NO: 1057673 - RNA, 19 nt, Artificial Sequence
  Description of Artificial Sequence: Synthetic oligonucleotide
  Antisense strand to SEQ ID NO: 1057672
ugucacauccuuaagagag

SEQ ID NO: 1057674 - RNA, 19 nt, Artificial Sequence
  Description of Artificial Sequence: Synthetic oligonucleotide
  Sense strand starting at position 872 of SEQ ID NO: 915150
cucuuaaggaugugacaug

SEQ ID NO: 1057675 - RNA, 19 nt, Artificial Sequence
  Description of Artificial Sequence: Synthetic oligonucleotide
  Antisense strand to SEQ ID NO: 1057674
caugucacauccuuaagag

SEQ ID NO: 1057676 - RNA, 19 nt, Artificial Sequence
  Description of Artificial Sequence: Synthetic oligonucleotide
  Sense strand starting at position 877 of SEQ ID NO: 915150
aaggaugugacaugugaug

SEQ ID NO: 1057677 - RNA, 19 nt, Artificial Sequence
  Description of Artificial Sequence: Synthetic oligonucleotide
  Antisense strand to SEQ ID NO: 1057676
caucacaugucacauccuu

SEQ ID NO: 1057678 - RNA, 19 nt, Artificial Sequence
  Description of Artificial Sequence: Synthetic oligonucleotide
  Sense strand starting at position 879 of SEQ ID NO: 915150
ggaugugacaugugaugag

SEQ ID NO: 1057679 - RNA, 19 nt, Artificial Sequence
  Description of Artificial Sequence: Synthetic oligonucleotide
  Antisense strand to SEQ ID NO: 1057678
cucaucacaugucacaucc

SEQ ID NO: 1057680 - RNA, 19 nt, Artificial Sequence
  Description of Artificial Sequence: Synthetic oligonucleotide
  Sense strand starting at position 1112 of SEQ ID NO: 915150
caaggagcuuugguuuaau

SEQ ID NO: 1057681 - RNA, 19 nt, Artificial Sequence
  Description of Artificial Sequence: Synthetic oligonucleotide
  Antisense strand to SEQ ID NO: 1057680
auuaaaccaaagcuccuug

SEQ ID NO: 1057682 - RNA, 19 nt, Artificial Sequence
  Description of Artificial Sequence: Synthetic oligonucleotide
  Sense strand starting at position 1115 of SEQ ID NO: 915150
ggagcuuugguuuaauucu

SEQ ID NO: 1057683 - RNA, 19 nt, Artificial Sequence
  Description of Artificial Sequence: Synthetic oligonucleotide
  Antisense strand to SEQ ID NO: 1057682
agaauuaaaccaaagcucc

SEQ ID NO: 1057684 - RNA, 19 nt, Artificial Sequence
  Description of Artificial Sequence: Synthetic oligonucleotide
  Sense strand starting at position 1124 of SEQ ID NO: 915150
guuuaauucugagugacuu

SEQ ID NO: 1057685 - RNA, 19 nt, Artificial Sequence
  Description of Artificial Sequence: Synthetic oligonucleotide
  Antisense strand to SEQ ID NO: 1057684
aagucacucagaauuaaac

SEQ ID NO: 1057686 - RNA, 19 nt, Artificial Sequence
  Description of Artificial Sequence: Synthetic oligonucleotide
  Sense strand starting at position 1125 of SEQ ID NO: 915150
uuuaauucugagugacuug

SEQ ID NO: 1057687 - RNA, 19 nt, Artificial Sequence
  Description of Artificial Sequence: Synthetic oligonucleotide
  Antisense strand to SEQ ID NO: 1057686
caagucacucagaauuaaa

SEQ ID NO: 1057688 - RNA, 19 nt, Artificial Sequence
  Description of Artificial Sequence: Synthetic oligonucleotide
  Sense strand starting at position 1224 of SEQ ID NO: 915150
aacagaccuuguuuggaaa

SEQ ID NO: 1057689 - RNA, 19 nt, Artificial Sequence
  Description of Artificial Sequence: Synthetic oligonucleotide
  Antisense strand to SEQ ID NO: 1057688
uuuccaaacaaggucuguu

SEQ ID NO: 1057690 - RNA, 19 nt, Artificial Sequence
  Description of Artificial Sequence: Synthetic oligonucleotide
  Sense strand starting at position 1244 of SEQ ID NO: 915150
cugaaagugacuuagugua

SEQ ID NO: 1057691 - RNA, 19 nt, Artificial Sequence
  Description of Artificial Sequence: Synthetic oligonucleotide
  Antisense strand to SEQ ID NO: 1057690
uacacuaagucacuuucag

SEQ ID NO: 1057692 - RNA, 19 nt, Artificial Sequence
  Description of Artificial Sequence: Synthetic oligonucleotide
  Sense strand starting at position 1288 of SEQ ID NO: 915150
ggguguugccguguggaca

SEQ ID NO: 1057693 - RNA, 19 nt, Artificial Sequence
  Description of Artificial Sequence: Synthetic oligonucleotide
  Antisense strand to SEQ ID NO: 1057692
uguccacacggcaacaccc

SEQ ID NO: 1057694 - RNA, 19 nt, Artificial Sequence
  Description of Artificial Sequence: Synthetic oligonucleotide
  Sense strand starting at position 1296 of SEQ ID NO: 915150
ccguguggacacuaaucua

SEQ ID NO: 1057695 - RNA, 19 nt, Artificial Sequence
  Description of Artificial Sequence: Synthetic oligonucleotide
  Antisense strand to SEQ ID NO: 1057694
uagauuaguguccacacgg

SEQ ID NO: 1057696 - RNA, 19 nt, Artificial Sequence
  Description of Artificial Sequence: Synthetic oligonucleotide
  Sense strand starting at position 1491 of SEQ ID NO: 915150
ccagucauagacugagcuu

SEQ ID NO: 1057697 - RNA, 19 nt, Artificial Sequence
  Description of Artificial Sequence: Synthetic oligonucleotide
  Antisense strand to SEQ ID NO: 1057696
aagcucagucuaugacugg

SEQ ID NO: 1057698 - RNA, 19 nt, Artificial Sequence
  Description of Artificial Sequence: Synthetic oligonucleotide
  Sense strand starting at position 1630 of SEQ ID NO: 915150
uccagaugggcauacuagu

SEQ ID NO: 1057699 - RNA, 19 nt, Artificial Sequence
  Description of Artificial Sequence: Synthetic oligonucleotide
  Antisense strand to SEQ ID NO: 1057698
acuaguaugcccaucugga

SEQ ID NO: 1057700 - RNA, 19 nt, Artificial Sequence
  Description of Artificial Sequence: Synthetic oligonucleotide
  Sense strand starting at position 2020 of SEQ ID NO: 915150
gguuauuuauucucugccu

SEQ ID NO: 1057701 - RNA, 19 nt, Artificial Sequence
  Description of Artificial Sequence: Synthetic oligonucleotide
  Antisense strand to SEQ ID NO: 1057700
aggcagagaauaaauaacc

SEQ ID NO: 1057702 - RNA, 19 nt, Artificial Sequence
  Description of Artificial Sequence: Synthetic oligonucleotide
  Sense strand starting at position 2301 of SEQ ID NO: 915150
agaagaaacucauuagugu

SEQ ID NO: 1057703 - RNA, 19 nt, Artificial Sequence
  Description of Artificial Sequence: Synthetic oligonucleotide
  Antisense strand to SEQ ID NO: 1057702
acacuaaugaguuucuucu

SEQ ID NO: 1057704 - RNA, 19 nt, Artificial Sequence
  Description of Artificial Sequence: Synthetic oligonucleotide
  Sense strand starting at position 2321 of SEQ ID NO: 915150
gucuucgugacggucuuua

SEQ ID NO: 1057705 - RNA, 19 nt, Artificial Sequence
  Description of Artificial Sequence: Synthetic oligonucleotide
  Antisense strand to SEQ ID NO: 1057704
uaaagaccgucacgaagac

SEQ ID NO: 1057706 - RNA, 19 nt, Artificial Sequence
  Description of Artificial Sequence: Synthetic oligonucleotide
  Sense strand starting at position 2398 of SEQ ID NO: 915150
agagacacuccacgguuaa

SEQ ID NO: 1057707 - RNA, 19 nt, Artificial Sequence
  Description of Artificial Sequence: Synthetic oligonucleotide
  Antisense strand to SEQ ID NO: 1057706
uuaaccguggagugucucu

SEQ ID NO: 1057708 - RNA, 19 nt, Artificial Sequence
  Description of Artificial Sequence: Synthetic oligonucleotide
  Sense strand starting at position 2579 of SEQ ID NO: 915150
gugucuggauaacuuauaa

SEQ ID NO: 1057709 - RNA, 19 nt, Artificial Sequence
  Description of Artificial Sequence: Synthetic oligonucleotide
  Antisense strand to SEQ ID NO: 1057708
uuauaaguuauccagacac

SEQ ID NO: 1057710 - RNA, 19 nt, Artificial Sequence
  Description of Artificial Sequence: Synthetic oligonucleotide
  Sense strand starting at position 2714 of SEQ ID NO: 915150
acguaagaccaaugacauc

SEQ ID NO: 1057711 - RNA, 19 nt, Artificial Sequence
  Description of Artificial Sequence: Synthetic oligonucleotide
  Antisense strand to SEQ ID NO: 1057710
gaugucauuggucuuacgu

SEQ ID NO: 1057712 - RNA, 19 nt, Artificial Sequence
  Description of Artificial Sequence: Synthetic oligonucleotide
  Sense strand starting at position 2782 of SEQ ID NO: 915150
agagaacaauuugaaugua

SEQ ID NO: 1057713 - RNA, 19 nt, Artificial Sequence
  Description of Artificial Sequence: Synthetic oligonucleotide
  Antisense strand to SEQ ID NO: 1057712
uacauucaaauuguucucu

SEQ ID NO: 1057714 - RNA, 19 nt, Artificial Sequence
  Description of Artificial Sequence: Synthetic oligonucleotide
  Sense strand starting at position 2951 of SEQ ID NO: 915150
uguuaaauagaucauggca

SEQ ID NO: 1057715 - RNA, 19 nt, Artificial Sequence
  Description of Artificial Sequence: Synthetic oligonucleotide
  Antisense strand to SEQ ID NO: 1057714
ugccaugaucuauuuaaca

SEQ ID NO: 1057716 - RNA, 19 nt, Artificial Sequence
  Description of Artificial Sequence: Synthetic oligonucleotide
  Sense strand starting at position 3212 of SEQ ID NO: 915150
uaaugaggugaaugcuaca

SEQ ID NO: 1057717 - RNA, 19 nt, Artificial Sequence
  Description of Artificial Sequence: Synthetic oligonucleotide
  Antisense strand to SEQ ID NO: 1057716
uguagcauucaccucauua

SEQ ID NO: 1057718 - RNA, 19 nt, Artificial Sequence
  Description of Artificial Sequence: Synthetic oligonucleotide
  Sense strand starting at position 3305 of SEQ ID NO: 915150
cuugcuuucccagagggau

SEQ ID NO: 1057719 - RNA, 19 nt, Artificial Sequence
  Description of Artificial Sequence: Synthetic oligonucleotide
  Antisense strand to SEQ ID NO: 1057718
aucccucugggaaagcaag

SEQ ID NO: 1057720 - RNA, 19 nt, Artificial Sequence
  Description of Artificial Sequence: Synthetic oligonucleotide
  Sense strand starting at position 3307 of SEQ ID NO: 915150
ugcuuucccagagggauua

SEQ ID NO: 1057721 - RNA, 19 nt, Artificial Sequence
  Description of Artificial Sequence: Synthetic oligonucleotide
  Antisense strand to SEQ ID NO: 1057720
uaaucccucugggaaagca

SEQ ID NO: 1057722 - RNA, 19 nt, Artificial Sequence
  Description of Artificial Sequence: Synthetic oligonucleotide
  Sense strand starting at position 3556 of SEQ ID NO: 915150
uuuauacauguuuggcaga

SEQ ID NO: 1057723 - RNA, 19 nt, Artificial Sequence
  Description of Artificial Sequence: Synthetic oligonucleotide
  Antisense strand to SEQ ID NO: 1057722
ucugccaaacauguauaaa

SEQ ID NO: 1057724 - RNA, 19 nt, Artificial Sequence
  Description of Artificial Sequence: Synthetic oligonucleotide
  Sense strand starting at position 3709 of SEQ ID NO: 915150
ccuuguguucaggaugaag

SEQ ID NO: 1057725 - RNA, 19 nt, Artificial Sequence
  Description of Artificial Sequence: Synthetic oligonucleotide
  Antisense strand to SEQ ID NO: 1057724
cuucauccugaacacaagg

SEQ ID NO: 1057726 - RNA, 19 nt, Artificial Sequence
  Description of Artificial Sequence: Synthetic oligonucleotide
  Sense strand starting at position 3711 of SEQ ID NO: 915150
uuguguucaggaugaagaa

SEQ ID NO: 1057727 - RNA, 19 nt, Artificial Sequence
  Description of Artificial Sequence: Synthetic oligonucleotide
  Antisense strand to SEQ ID NO: 1057726
uucuucauccugaacacaa

SEQ ID NO: 1057728 - RNA, 19 nt, Artificial Sequence
  Description of Artificial Sequence: Synthetic oligonucleotide
  Sense strand starting at position 3822 of SEQ ID NO: 915150
ccgagaaacugggcaucuu

SEQ ID NO: 1057729 - RNA, 19 nt, Artificial Sequence
  Description of Artificial Sequence: Synthetic oligonucleotide
  Antisense strand to SEQ ID NO: 1057728
aagaugcccaguuucucgg

SEQ ID NO: 1057730 - RNA, 19 nt, Artificial Sequence
  Description of Artificial Sequence: Synthetic oligonucleotide
  Sense strand starting at position 3823 of SEQ ID NO: 915150
cgagaaacugggcaucuua

SEQ ID NO: 1057731 - RNA, 19 nt, Artificial Sequence
  Description of Artificial Sequence: Synthetic oligonucleotide
  Antisense strand to SEQ ID NO: 1057730
uaagaugcccaguuucucg

SEQ ID NO: 1057732 - RNA, 19 nt, Artificial Sequence
  Description of Artificial Sequence: Synthetic oligonucleotide
  Sense strand starting at position 3841 of SEQ ID NO: 915150
agagucaugucacucaacu

SEQ ID NO: 1057733 - RNA, 19 nt, Artificial Sequence
  Description of Artificial Sequence: Synthetic oligonucleotide
  Antisense strand to SEQ ID NO: 1057732
aguugagugacaugacucu

SEQ ID NO: 1057734 - RNA, 19 nt, Artificial Sequence
  Description of Artificial Sequence: Synthetic oligonucleotide
  Sense strand starting at position 3849 of SEQ ID NO: 915150
gucacucaacuuuggaaau

SEQ ID NO: 1057735 - RNA, 19 nt, Artificial Sequence
  Description of Artificial Sequence: Synthetic oligonucleotide
  Antisense strand to SEQ ID NO: 1057734
auuuccaaaguugagugac

SEQ ID NO: 1057736 - RNA, 19 nt, Artificial Sequence
  Description of Artificial Sequence: Synthetic oligonucleotide
  Sense strand starting at position 44 of SEQ ID NO: 915151
auaugcucuccuugagaua

SEQ ID NO: 1057737 - RNA, 19 nt, Artificial Sequence
  Description of Artificial Sequence: Synthetic oligonucleotide
  Antisense strand to SEQ ID NO: 1057736
uaucucaaggagagcauau

SEQ ID NO: 1057738 - RNA, 19 nt, Artificial Sequence
  Description of Artificial Sequence: Synthetic oligonucleotide
  Sense strand starting at position 55 of SEQ ID NO: 915151
uugagauaucuugguuauu

SEQ ID NO: 1057739 - RNA, 19 nt, Artificial Sequence
  Description of Artificial Sequence: Synthetic oligonucleotide
  Antisense strand to SEQ ID NO: 1057738
aauaaccaagauaucucaa

SEQ ID NO: 1057740 - RNA, 19 nt, Artificial Sequence
  Description of Artificial Sequence: Synthetic oligonucleotide
  Sense strand starting at position 56 of SEQ ID NO: 915151
ugagauaucuugguuauuc

SEQ ID NO: 1057741 - RNA, 19 nt, Artificial Sequence
  Description of Artificial Sequence: Synthetic oligonucleotide
  Antisense strand to SEQ ID NO: 1057740
gaauaaccaagauaucuca

SEQ ID NO: 1057742 - RNA, 19 nt, Artificial Sequence
  Description of Artificial Sequence: Synthetic oligonucleotide
  Sense strand starting at position 72 of SEQ ID NO: 915151
uucucauggcuuuaaauag

SEQ ID NO: 1057743 - RNA, 19 nt, Artificial Sequence
  Description of Artificial Sequence: Synthetic oligonucleotide
  Antisense strand to SEQ ID NO: 1057742
cuauuuaaagccaugagaa

SEQ ID NO: 1057744 - RNA, 19 nt, Artificial Sequence
  Description of Artificial Sequence: Synthetic oligonucleotide
  Sense strand starting at position 130 of SEQ ID NO: 915151
auggcaucuccagaguucu

SEQ ID NO: 1057745 - RNA, 19 nt, Artificial Sequence
  Description of Artificial Sequence: Synthetic oligonucleotide
  Antisense strand to SEQ ID NO: 1057744
agaacucuggagaugccau

SEQ ID NO: 1057746 - RNA, 19 nt, Artificial Sequence
  Description of Artificial Sequence: Synthetic oligonucleotide
  Sense strand starting at position 652 of SEQ ID NO: 915151
uuguuaguaguggguauuu

SEQ ID NO: 1057747 - RNA, 19 nt, Artificial Sequence
  Description of Artificial Sequence: Synthetic oligonucleotide
  Antisense strand to SEQ ID NO: 1057746
aaauacccacuacuaacaa

SEQ ID NO: 1057748 - RNA, 19 nt, Artificial Sequence
  Description of Artificial Sequence: Synthetic oligonucleotide
  Sense strand starting at position 997 of SEQ ID NO: 915151
aucaguauucuccaugcua

SEQ ID NO: 1057749 - RNA, 19 nt, Artificial Sequence
  Description of Artificial Sequence: Synthetic oligonucleotide
  Antisense strand to SEQ ID NO: 1057748
uagcauggagaauacugau

SEQ ID NO: 1057750 - RNA, 19 nt, Artificial Sequence
  Description of Artificial Sequence: Synthetic oligonucleotide
  Sense strand starting at position 1200 of SEQ ID NO: 915151
uuacuaugucaucauguga

SEQ ID NO: 1057751 - RNA, 19 nt, Artificial Sequence
  Description of Artificial Sequence: Synthetic oligonucleotide
  Antisense strand to SEQ ID NO: 1057750
ucacaugaugacauaguaa

SEQ ID NO: 1057752 - RNA, 19 nt, Artificial Sequence
  Description of Artificial Sequence: Synthetic oligonucleotide
  Sense strand starting at position 1269 of SEQ ID NO: 915151
guaucagaagucugaaaca

SEQ ID NO: 1057753 - RNA, 19 nt, Artificial Sequence
  Description of Artificial Sequence: Synthetic oligonucleotide
  Antisense strand to SEQ ID NO: 1057752
uguuucagacuucugauac

SEQ ID NO: 1057754 - RNA, 19 nt, Artificial Sequence
  Description of Artificial Sequence: Synthetic oligonucleotide
  Sense strand starting at position 1444 of SEQ ID NO: 915151
auaugcgcugugucuaaua

SEQ ID NO: 1057755 - RNA, 19 nt, Artificial Sequence
  Description of Artificial Sequence: Synthetic oligonucleotide
  Antisense strand to SEQ ID NO: 1057754
uauuagacacagcgcauau

SEQ ID NO: 1057756 - RNA, 19 nt, Artificial Sequence
  Description of Artificial Sequence: Synthetic oligonucleotide
  Sense strand starting at position 1473 of SEQ ID NO: 915151
gcaggcaaugcguucgaaa

SEQ ID NO: 1057757 - RNA, 19 nt, Artificial Sequence
  Description of Artificial Sequence: Synthetic oligonucleotide
  Antisense strand to SEQ ID NO: 1057756
uuucgaacgcauugccugc

SEQ ID NO: 1057758 - RNA, 19 nt, Artificial Sequence
  Description of Artificial Sequence: Synthetic oligonucleotide
  Sense strand starting at position 1514 of SEQ ID NO: 915151
aauaguuauugggcauaga

SEQ ID NO: 1057759 - RNA, 19 nt, Artificial Sequence
  Description of Artificial Sequence: Synthetic oligonucleotide
  Antisense strand to SEQ ID NO: 1057758
ucuaugcccaauaacuauu

SEQ ID NO: 1057760 - RNA, 19 nt, Artificial Sequence
  Description of Artificial Sequence: Synthetic oligonucleotide
  Sense strand starting at position 1626 of SEQ ID NO: 915151
auacccauucucuacguau

SEQ ID NO: 1057761 - RNA, 19 nt, Artificial Sequence
  Description of Artificial Sequence: Synthetic oligonucleotide
  Antisense strand to SEQ ID NO: 1057760
auacguagagaauggguau

SEQ ID NO: 1057762 - RNA, 19 nt, Artificial Sequence
  Description of Artificial Sequence: Synthetic oligonucleotide
  Sense strand starting at position 1628 of SEQ ID NO: 915151
acccauucucuacguauuu

SEQ ID NO: 1057763 - RNA, 19 nt, Artificial Sequence
  Description of Artificial Sequence: Synthetic oligonucleotide
  Antisense strand to SEQ ID NO: 1057762
aaauacguagagaaugggu

SEQ ID NO: 1057764 - RNA, 19 nt, Artificial Sequence
  Description of Artificial Sequence: Synthetic oligonucleotide
  Sense strand starting at position 1735 of SEQ ID NO: 915151
acucccugugggugagaaa

SEQ ID NO: 1057765 - RNA, 19 nt, Artificial Sequence
  Description of Artificial Sequence: Synthetic oligonucleotide
  Antisense strand to SEQ ID NO: 1057764
uuucucacccacagggagu

SEQ ID NO: 1057766 - RNA, 19 nt, Artificial Sequence
  Description of Artificial Sequence: Synthetic oligonucleotide
  Sense strand starting at position 2299 of SEQ ID NO: 915151
agucacucugaaggagauu

SEQ ID NO: 1057767 - RNA, 19 nt, Artificial Sequence
  Description of Artificial Sequence: Synthetic oligonucleotide
  Antisense strand to SEQ ID NO: 1057766
aaucuccuucagagugacu

SEQ ID NO: 1057768 - RNA, 19 nt, Artificial Sequence
  Description of Artificial Sequence: Synthetic oligonucleotide
  Sense strand starting at position 2358 of SEQ ID NO: 915151
ucccauuaugagugagagu

SEQ ID NO: 1057769 - RNA, 19 nt, Artificial Sequence
  Description of Artificial Sequence: Synthetic oligonucleotide
  Antisense strand to SEQ ID NO: 1057768
acucucacucauaauggga

SEQ ID NO: 1057770 - RNA, 19 nt, Artificial Sequence
  Description of Artificial Sequence: Synthetic oligonucleotide
  Sense strand starting at position 2359 of SEQ ID NO: 915151
cccauuaugagugagaguc

SEQ ID NO: 1057771 - RNA, 19 nt, Artificial Sequence
  Description of Artificial Sequence: Synthetic oligonucleotide
  Antisense strand to SEQ ID NO: 1057770
gacucucacucauaauggg

SEQ ID NO: 1057772 - RNA, 19 nt, Artificial Sequence
  Description of Artificial Sequence: Synthetic oligonucleotide
  Sense strand starting at position 2551 of SEQ ID NO: 915151
acauuauacucagugauag

SEQ ID NO: 1057773 - RNA, 19 nt, Artificial Sequence
  Description of Artificial Sequence: Synthetic oligonucleotide
  Antisense strand to SEQ ID NO: 1057772
cuaucacugaguauaaugu

SEQ ID NO: 1057774 - RNA, 19 nt, Artificial Sequence
  Description of Artificial Sequence: Synthetic oligonucleotide
  Sense strand starting at position 2597 of SEQ ID NO: 915151
auucuuacuguuuaggauu

SEQ ID NO: 1057775 - RNA, 19 nt, Artificial Sequence
  Description of Artificial Sequence: Synthetic oligonucleotide
  Antisense strand to SEQ ID NO: 1057774
aauccuaaacaguaagaau

SEQ ID NO: 1057776 - RNA, 19 nt, Artificial Sequence
  Description of Artificial Sequence: Synthetic oligonucleotide
  Sense strand starting at position 2662 of SEQ ID NO: 915151
augauaagguuauccuaga

SEQ ID NO: 1057777 - RNA, 19 nt, Artificial Sequence
  Description of Artificial Sequence: Synthetic oligonucleotide
  Antisense strand to SEQ ID NO: 1057776
ucuaggauaaccuuaucau

SEQ ID NO: 1057778 - RNA, 19 nt, Artificial Sequence
  Description of Artificial Sequence: Synthetic oligonucleotide
  Sense strand starting at position 2663 of SEQ ID NO: 915151
ugauaagguuauccuagag

SEQ ID NO: 1057779 - RNA, 19 nt, Artificial Sequence
  Description of Artificial Sequence: Synthetic oligonucleotide
  Antisense strand to SEQ ID NO: 1057778
cucuaggauaaccuuauca

SEQ ID NO: 1057780 - RNA, 19 nt, Artificial Sequence
  Description of Artificial Sequence: Synthetic oligonucleotide
  Sense strand starting at position 2667 of SEQ ID NO: 915151
aagguuauccuagaggcau

SEQ ID NO: 1057781 - RNA, 19 nt, Artificial Sequence
  Description of Artificial Sequence: Synthetic oligonucleotide
  Antisense strand to SEQ ID NO: 1057780
augccucuaggauaaccuu

SEQ ID NO: 1057782 - RNA, 19 nt, Artificial Sequence
  Description of Artificial Sequence: Synthetic oligonucleotide
  Sense strand starting at position 2669 of SEQ ID NO: 915151
gguuauccuagaggcauga

SEQ ID NO: 1057783 - RNA, 19 nt, Artificial Sequence
  Description of Artificial Sequence: Synthetic oligonucleotide
  Antisense strand to SEQ ID NO: 1057782
ucaugccucuaggauaacc

SEQ ID NO: 1057784 - RNA, 19 nt, Artificial Sequence
  Description of Artificial Sequence: Synthetic oligonucleotide
  Sense strand starting at position 2686 of SEQ ID NO: 915151
gaaccaaaugcuuggugaa

SEQ ID NO: 1057785 - RNA, 19 nt, Artificial Sequence
  Description of Artificial Sequence: Synthetic oligonucleotide
  Antisense strand to SEQ ID NO: 1057784
uucaccaagcauuugguuc

SEQ ID NO: 1057786 - RNA, 19 nt, Artificial Sequence
  Description of Artificial Sequence: Synthetic oligonucleotide
  Sense strand starting at position 2688 of SEQ ID NO: 915151
accaaaugcuuggugaaua

SEQ ID NO: 1057787 - RNA, 19 nt, Artificial Sequence
  Description of Artificial Sequence: Synthetic oligonucleotide
  Antisense strand to SEQ ID NO: 1057786
uauucaccaagcauuuggu

SEQ ID NO: 1057788 - RNA, 19 nt, Artificial Sequence
  Description of Artificial Sequence: Synthetic oligonucleotide
  Sense strand starting at position 2693 of SEQ ID NO: 915151
augcuuggugaauacagua

SEQ ID NO: 1057789 - RNA, 19 nt, Artificial Sequence
  Description of Artificial Sequence: Synthetic oligonucleotide
  Antisense strand to SEQ ID NO: 1057788
uacuguauucaccaagcau

SEQ ID NO: 1057790 - RNA, 19 nt, Artificial Sequence
  Description of Artificial Sequence: Synthetic oligonucleotide
  Sense strand starting at position 2698 of SEQ ID NO: 915151
uggugaauacaguagguaa

SEQ ID NO: 1057791 - RNA, 19 nt, Artificial Sequence
  Description of Artificial Sequence: Synthetic oligonucleotide
  Antisense strand to SEQ ID NO: 1057790
uuaccuacuguauucacca

SEQ ID NO: 1057792 - RNA, 19 nt, Artificial Sequence
  Description of Artificial Sequence: Synthetic oligonucleotide
  Sense strand starting at position 2981 of SEQ ID NO: 915151
augcauagauugcuauaag

SEQ ID NO: 1057793 - RNA, 19 nt, Artificial Sequence
  Description of Artificial Sequence: Synthetic oligonucleotide
  Antisense strand to SEQ ID NO: 1057792
cuuauagcaaucuaugcau

SEQ ID NO: 1057794 - RNA, 19 nt, Artificial Sequence
  Description of Artificial Sequence: Synthetic oligonucleotide
  Sense strand starting at position 2984 of SEQ ID NO: 915151
cauagauugcuauaaguug

SEQ ID NO: 1057795 - RNA, 19 nt, Artificial Sequence
  Description of Artificial Sequence: Synthetic oligonucleotide
  Antisense strand to SEQ ID NO: 1057794
caacuuauagcaaucuaug

SEQ ID NO: 1057796 - RNA, 19 nt, Artificial Sequence
  Description of Artificial Sequence: Synthetic oligonucleotide
  Sense strand starting at position 3127 of SEQ ID NO: 915151
uugguaaauuaugucaauc

SEQ ID NO: 1057797 - RNA, 19 nt, Artificial Sequence
  Description of Artificial Sequence: Synthetic oligonucleotide
  Antisense strand to SEQ ID NO: 1057796
gauugacauaauuuaccaa

SEQ ID NO: 1057798 - RNA, 19 nt, Artificial Sequence
  Description of Artificial Sequence: Synthetic oligonucleotide
  Sense strand starting at position 3161 of SEQ ID NO: 915151
aucagaaauugaucacugu

SEQ ID NO: 1057799 - RNA, 19 nt, Artificial Sequence
  Description of Artificial Sequence: Synthetic oligonucleotide
  Antisense strand to SEQ ID NO: 1057798
acagugaucaauuucugau

SEQ ID NO: 1057800 - RNA, 19 nt, Artificial Sequence
  Description of Artificial Sequence: Synthetic oligonucleotide
  Sense strand starting at position 3164 of SEQ ID NO: 915151
agaaauugaucacuguuua

SEQ ID NO: 1057801 - RNA, 19 nt, Artificial Sequence
  Description of Artificial Sequence: Synthetic oligonucleotide
  Antisense strand to SEQ ID NO: 1057800
uaaacagugaucaauuucu

SEQ ID NO: 1057802 - RNA, 19 nt, Artificial Sequence
  Description of Artificial Sequence: Synthetic oligonucleotide
  Sense strand starting at position 3168 of SEQ ID NO: 915151
auugaucacuguuuaucau

SEQ ID NO: 1057803 - RNA, 19 nt, Artificial Sequence
  Description of Artificial Sequence: Synthetic oligonucleotide
  Antisense strand to SEQ ID NO: 1057802
augauaaacagugaucaau

SEQ ID NO: 1057804 - RNA, 19 nt, Artificial Sequence
  Description of Artificial Sequence: Synthetic oligonucleotide
  Sense strand starting at position 3315 of SEQ ID NO: 915151
aaugucauggccugagaua

SEQ ID NO: 1057805 - RNA, 19 nt, Artificial Sequence
  Description of Artificial Sequence: Synthetic oligonucleotide
  Antisense strand to SEQ ID NO: 1057804
uaucucaggccaugacauu

SEQ ID NO: 1057806 - RNA, 19 nt, Artificial Sequence
  Description of Artificial Sequence: Synthetic oligonucleotide
  Sense strand starting at position 3316 of SEQ ID NO: 915151
augucauggccugagauau

SEQ ID NO: 1057807 - RNA, 19 nt, Artificial Sequence
  Description of Artificial Sequence: Synthetic oligonucleotide
  Antisense strand to SEQ ID NO: 1057806
auaucucaggccaugacau

SEQ ID NO: 1057808 - RNA, 19 nt, Artificial Sequence
  Description of Artificial Sequence: Synthetic oligonucleotide
  Sense strand starting at position 3404 of SEQ ID NO: 915151
ccaugauacuaggccaagu

SEQ ID NO: 1057809 - RNA, 19 nt, Artificial Sequence
  Description of Artificial Sequence: Synthetic oligonucleotide
  Antisense strand to SEQ ID NO: 1057808
acuuggccuaguaucaugg

SEQ ID NO: 1057810 - RNA, 19 nt, Artificial Sequence
  Description of Artificial Sequence: Synthetic oligonucleotide
  Sense strand starting at position 3421 of SEQ ID NO: 915151
guguuugugguagacagga

SEQ ID NO: 1057811 - RNA, 19 nt, Artificial Sequence
  Description of Artificial Sequence: Synthetic oligonucleotide
  Antisense strand to SEQ ID NO: 1057810
uccugucuaccacaaacac

SEQ ID NO: 1057812 - RNA, 19 nt, Artificial Sequence
  Description of Artificial Sequence: Synthetic oligonucleotide
  Sense strand starting at position 3423 of SEQ ID NO: 915151
guuugugguagacaggaua

SEQ ID NO: 1057813 - RNA, 19 nt, Artificial Sequence
  Description of Artificial Sequence: Synthetic oligonucleotide
  Antisense strand to SEQ ID NO: 1057812
uauccugucuaccacaaac

SEQ ID NO: 1057814 - RNA, 19 nt, Artificial Sequence
  Description of Artificial Sequence: Synthetic oligonucleotide
  Sense strand starting at position 3789 of SEQ ID NO: 915151
cagugagauccaugucaac

SEQ ID NO: 1057815 - RNA, 19 nt, Artificial Sequence
  Description of Artificial Sequence: Synthetic oligonucleotide
  Antisense strand to SEQ ID NO: 1057814
guugacauggaucucacug

SEQ ID NO: 1057816 - RNA, 19 nt, Artificial Sequence
  Description of Artificial Sequence: Synthetic oligonucleotide
  Sense strand starting at position 75 of SEQ ID NO: 915152
guguauaggcaagaacuau

SEQ ID NO: 1057817 - RNA, 19 nt, Artificial Sequence
  Description of Artificial Sequence: Synthetic oligonucleotide
  Antisense strand to SEQ ID NO: 1057816
auaguucuugccuauacac

SEQ ID NO: 1057818 - RNA, 19 nt, Artificial Sequence
  Description of Artificial Sequence: Synthetic oligonucleotide
  Sense strand starting at position 81 of SEQ ID NO: 915152
aggcaagaacuaugaauuc

SEQ ID NO: 1057819 - RNA, 19 nt, Artificial Sequence
  Description of Artificial Sequence: Synthetic oligonucleotide
  Antisense strand to SEQ ID NO: 1057818
gaauucauaguucuugccu

SEQ ID NO: 1057820 - RNA, 19 nt, Artificial Sequence
  Description of Artificial Sequence: Synthetic oligonucleotide
  Sense strand starting at position 388 of SEQ ID NO: 915152
acuggauagugacucacau

SEQ ID NO: 1057821 - RNA, 19 nt, Artificial Sequence
  Description of Artificial Sequence: Synthetic oligonucleotide
  Antisense strand to SEQ ID NO: 1057820
augugagucacuauccagu

SEQ ID NO: 1057822 - RNA, 19 nt, Artificial Sequence
  Description of Artificial Sequence: Synthetic oligonucleotide
  Sense strand starting at position 459 of SEQ ID NO: 915152
acagcuagaguauauucua

SEQ ID NO: 1057823 - RNA, 19 nt, Artificial Sequence
  Description of Artificial Sequence: Synthetic oligonucleotide
  Antisense strand to SEQ ID NO: 1057822
uagaauauacucuagcugu

SEQ ID NO: 1057824 - RNA, 19 nt, Artificial Sequence
  Description of Artificial Sequence: Synthetic oligonucleotide
  Sense strand starting at position 562 of SEQ ID NO: 915152
augacuuuggcagaguaug

SEQ ID NO: 1057825 - RNA, 19 nt, Artificial Sequence
  Description of Artificial Sequence: Synthetic oligonucleotide
  Antisense strand to SEQ ID NO: 1057824
cauacucugccaaagucau

SEQ ID NO: 1057826 - RNA, 19 nt, Artificial Sequence
  Description of Artificial Sequence: Synthetic oligonucleotide
  Sense strand starting at position 577 of SEQ ID NO: 915152
uauguaauacagugaugaa

SEQ ID NO: 1057827 - RNA, 19 nt, Artificial Sequence
  Description of Artificial Sequence: Synthetic oligonucleotide
  Antisense strand to SEQ ID NO: 1057826
uucaucacuguauuacaua

SEQ ID NO: 1057828 - RNA, 19 nt, Artificial Sequence
  Description of Artificial Sequence: Synthetic oligonucleotide
  Sense strand starting at position 589 of SEQ ID NO: 915152
ugaugaagagcauagcauu

SEQ ID NO: 1057829 - RNA, 19 nt, Artificial Sequence
  Description of Artificial Sequence: Synthetic oligonucleotide
  Antisense strand to SEQ ID NO: 1057828
aaugcuaugcucuucauca

SEQ ID NO: 1057830 - RNA, 19 nt, Artificial Sequence
  Description of Artificial Sequence: Synthetic oligonucleotide
  Sense strand starting at position 672 of SEQ ID NO: 915152
ggccuaaaugucuauaaau

SEQ ID NO: 1057831 - RNA, 19 nt, Artificial Sequence
  Description of Artificial Sequence: Synthetic oligonucleotide
  Antisense strand to SEQ ID NO: 1057830
auuuauagacauuuaggcc

SEQ ID NO: 1057832 - RNA, 19 nt, Artificial Sequence
  Description of Artificial Sequence: Synthetic oligonucleotide
  Sense strand starting at position 823 of SEQ ID NO: 915152
aauugccaggaguauuauu

SEQ ID NO: 1057833 - RNA, 19 nt, Artificial Sequence
  Description of Artificial Sequence: Synthetic oligonucleotide
  Antisense strand to SEQ ID NO: 1057832
aauaauacuccuggcaauu

SEQ ID NO: 1057834 - RNA, 19 nt, Artificial Sequence
  Description of Artificial Sequence: Synthetic oligonucleotide
  Sense strand starting at position 880 of SEQ ID NO: 915152
aaugucuugggugauauau

SEQ ID NO: 1057835 - RNA, 19 nt, Artificial Sequence
  Description of Artificial Sequence: Synthetic oligonucleotide
  Antisense strand to SEQ ID NO: 1057834
auauaucacccaagacauu

SEQ ID NO: 1057836 - RNA, 19 nt, Artificial Sequence
  Description of Artificial Sequence: Synthetic oligonucleotide
  Sense strand starting at position 977 of SEQ ID NO: 915152
ugcaauaggcaguaagaga

SEQ ID NO: 1057837 - RNA, 19 nt, Artificial Sequence
  Description of Artificial Sequence: Synthetic oligonucleotide
  Antisense strand to SEQ ID NO: 1057836
ucucuuacugccuauugca

SEQ ID NO: 1057838 - RNA, 19 nt, Artificial Sequence
  Description of Artificial Sequence: Synthetic oligonucleotide
  Sense strand starting at position 1165 of SEQ ID NO: 915152
gccaucacugaauggacua

SEQ ID NO: 1057839 - RNA, 19 nt, Artificial Sequence
  Description of Artificial Sequence: Synthetic oligonucleotide
  Antisense strand to SEQ ID NO: 1057838
uaguccauucagugauggc

SEQ ID NO: 1057840 - RNA, 19 nt, Artificial Sequence
  Description of Artificial Sequence: Synthetic oligonucleotide
  Sense strand starting at position 1403 of SEQ ID NO: 915152
agaugcuauuugcccgaau

SEQ ID NO: 1057841 - RNA, 19 nt, Artificial Sequence
  Description of Artificial Sequence: Synthetic oligonucleotide
  Antisense strand to SEQ ID NO: 1057840
auucgggcaaauagcaucu

SEQ ID NO: 1057842 - RNA, 19 nt, Artificial Sequence
  Description of Artificial Sequence: Synthetic oligonucleotide
  Sense strand starting at position 1404 of SEQ ID NO: 915152
gaugcuauuugcccgaaug

SEQ ID NO: 1057843 - RNA, 19 nt, Artificial Sequence
  Description of Artificial Sequence: Synthetic oligonucleotide
  Antisense strand to SEQ ID NO: 1057842
cauucgggcaaauagcauc

SEQ ID NO: 1057844 - RNA, 19 nt, Artificial Sequence
  Description of Artificial Sequence: Synthetic oligonucleotide
  Sense strand starting at position 1425 of SEQ ID NO: 915152
ugaacaugcuaauugaauc

SEQ ID NO: 1057845 - RNA, 19 nt, Artificial Sequence
  Description of Artificial Sequence: Synthetic oligonucleotide
  Antisense strand to SEQ ID NO: 1057844
gauucaauuagcauguuca

SEQ ID NO: 1057846 - RNA, 19 nt, Artificial Sequence
  Description of Artificial Sequence: Synthetic oligonucleotide
  Sense strand starting at position 1542 of SEQ ID NO: 915152
acguguaaucaucagaaga

SEQ ID NO: 1057847 - RNA, 19 nt, Artificial Sequence
  Description of Artificial Sequence: Synthetic oligonucleotide
  Antisense strand to SEQ ID NO: 1057846
ucuucugaugauuacacgu

SEQ ID NO: 1057848 - RNA, 19 nt, Artificial Sequence
  Description of Artificial Sequence: Synthetic oligonucleotide
  Sense strand starting at position 1697 of SEQ ID NO: 915152
ggacaaugcagcuauauag

SEQ ID NO: 1057849 - RNA, 19 nt, Artificial Sequence
  Description of Artificial Sequence: Synthetic oligonucleotide
  Antisense strand to SEQ ID NO: 1057848
cuauauagcugcauugucc

SEQ ID NO: 1057850 - RNA, 19 nt, Artificial Sequence
  Description of Artificial Sequence: Synthetic oligonucleotide
  Sense strand starting at position 1752 of SEQ ID NO: 915152
uguuguugacaaugaagaa

SEQ ID NO: 1057851 - RNA, 19 nt, Artificial Sequence
  Description of Artificial Sequence: Synthetic oligonucleotide
  Antisense strand to SEQ ID NO: 1057850
uucuucauugucaacaaca

SEQ ID NO: 1057852 - RNA, 19 nt, Artificial Sequence
  Description of Artificial Sequence: Synthetic oligonucleotide
  Sense strand starting at position 1832 of SEQ ID NO: 915152
gacucugcuggguaaugau

SEQ ID NO: 1057853 - RNA, 19 nt, Artificial Sequence
  Description of Artificial Sequence: Synthetic oligonucleotide
  Antisense strand to SEQ ID NO: 1057852
aucauuacccagcagaguc

SEQ ID NO: 1057854 - RNA, 19 nt, Artificial Sequence
  Description of Artificial Sequence: Synthetic oligonucleotide
  Sense strand starting at position 1955 of SEQ ID NO: 915152
acaagaagguuggaaauuu

SEQ ID NO: 1057855 - RNA, 19 nt, Artificial Sequence
  Description of Artificial Sequence: Synthetic oligonucleotide
  Antisense strand to SEQ ID NO: 1057854
aaauuuccaaccuucuugu

SEQ ID NO: 1057856 - RNA, 19 nt, Artificial Sequence
  Description of Artificial Sequence: Synthetic oligonucleotide
  Sense strand starting at position 2102 of SEQ ID NO: 915152
aguagaguuauccaagguc

SEQ ID NO: 1057857 - RNA, 19 nt, Artificial Sequence
  Description of Artificial Sequence: Synthetic oligonucleotide
  Antisense strand to SEQ ID NO: 1057856
gaccuuggauaacucuacu

SEQ ID NO: 1057858 - RNA, 19 nt, Artificial Sequence
  Description of Artificial Sequence: Synthetic oligonucleotide
  Sense strand starting at position 2105 of SEQ ID NO: 915152
agaguuauccaaggucaua

SEQ ID NO: 1057859 - RNA, 19 nt, Artificial Sequence
  Description of Artificial Sequence: Synthetic oligonucleotide
  Antisense strand to SEQ ID NO: 1057858
uaugaccuuggauaacucu

SEQ ID NO: 1057860 - RNA, 19 nt, Artificial Sequence
  Description of Artificial Sequence: Synthetic oligonucleotide
  Sense strand starting at position 2108 of SEQ ID NO: 915152
guuauccaaggucauagau

SEQ ID NO: 1057861 - RNA, 19 nt, Artificial Sequence
  Description of Artificial Sequence: Synthetic oligonucleotide
  Antisense strand to SEQ ID NO: 1057860
aucuaugaccuuggauaac

SEQ ID NO: 1057862 - RNA, 19 nt, Artificial Sequence
  Description of Artificial Sequence: Synthetic oligonucleotide
  Sense strand starting at position 2128 of SEQ ID NO: 915152
agaucugcaucauugagaa

SEQ ID NO: 1057863 - RNA, 19 nt, Artificial Sequence
  Description of Artificial Sequence: Synthetic oligonucleotide
  Antisense strand to SEQ ID NO: 1057862
uucucaaugaugcagaucu

SEQ ID NO: 1057864 - RNA, 19 nt, Artificial Sequence
  Description of Artificial Sequence: Synthetic oligonucleotide
  Sense strand starting at position 2369 of SEQ ID NO: 915152
uugugaguacaaugaauaa

SEQ ID NO: 1057865 - RNA, 19 nt, Artificial Sequence
  Description of Artificial Sequence: Synthetic oligonucleotide
  Antisense strand to SEQ ID NO: 1057864
uuauucauuguacucacaa

SEQ ID NO: 1057866 - RNA, 19 nt, Artificial Sequence
  Description of Artificial Sequence: Synthetic oligonucleotide
  Sense strand starting at position 3088 of SEQ ID NO: 915152
cagugugguaaugaugaaa

SEQ ID NO: 1057867 - RNA, 19 nt, Artificial Sequence
  Description of Artificial Sequence: Synthetic oligonucleotide
  Antisense strand to SEQ ID NO: 1057866
uuucaucauuaccacacug

SEQ ID NO: 1057868 - RNA, 19 nt, Artificial Sequence
  Description of Artificial Sequence: Synthetic oligonucleotide
  Sense strand starting at position 3134 of SEQ ID NO: 915152
uuaagaaacuuggcaguga

SEQ ID NO: 1057869 - RNA, 19 nt, Artificial Sequence
  Description of Artificial Sequence: Synthetic oligonucleotide
  Antisense strand to SEQ ID NO: 1057868
ucacugccaaguuucuuaa

SEQ ID NO: 1057870 - RNA, 19 nt, Artificial Sequence
  Description of Artificial Sequence: Synthetic oligonucleotide
  Sense strand starting at position 3167 of SEQ ID NO: 915152
guaggccaugucuaaagaa

SEQ ID NO: 1057871 - RNA, 19 nt, Artificial Sequence
  Description of Artificial Sequence: Synthetic oligonucleotide
  Antisense strand to SEQ ID NO: 1057870
uucuuuagacauggccuac

SEQ ID NO: 1057872 - RNA, 19 nt, Artificial Sequence
  Description of Artificial Sequence: Synthetic oligonucleotide
  Sense strand starting at position 3189 of SEQ ID NO: 915152
guaucagguagauggagaa

SEQ ID NO: 1057873 - RNA, 19 nt, Artificial Sequence
  Description of Artificial Sequence: Synthetic oligonucleotide
  Antisense strand to SEQ ID NO: 1057872
uucuccaucuaccugauac

SEQ ID NO: 1057874 - RNA, 19 nt, Artificial Sequence
  Description of Artificial Sequence: Synthetic oligonucleotide
  Sense strand starting at position 3244 of SEQ ID NO: 915152
uguuuauaaacggagguua

SEQ ID NO: 1057875 - RNA, 19 nt, Artificial Sequence
  Description of Artificial Sequence: Synthetic oligonucleotide
  Antisense strand to SEQ ID NO: 1057874
uaaccuccguuuauaaaca

SEQ ID NO: 1057876 - RNA, 19 nt, Artificial Sequence
  Description of Artificial Sequence: Synthetic oligonucleotide
  Sense strand starting at position 3246 of SEQ ID NO: 915152
uuuauaaacggagguuaaa

SEQ ID NO: 1057877 - RNA, 19 nt, Artificial Sequence
  Description of Artificial Sequence: Synthetic oligonucleotide
  Antisense strand to SEQ ID NO: 1057876
uuuaaccuccguuuauaaa

SEQ ID NO: 1057878 - RNA, 19 nt, Artificial Sequence
  Description of Artificial Sequence: Synthetic oligonucleotide
  Sense strand starting at position 3270 of SEQ ID NO: 915152
agcagauaaugagaaauuu

SEQ ID NO: 1057879 - RNA, 19 nt, Artificial Sequence
  Description of Artificial Sequence: Synthetic oligonucleotide
  Antisense strand to SEQ ID NO: 1057878
aaauuucucauuaucugcu

SEQ ID NO: 1057880 - RNA, 19 nt, Artificial Sequence
  Description of Artificial Sequence: Synthetic oligonucleotide
  Sense strand starting at position 3332 of SEQ ID NO: 915152
aagaaaguagugggugauu

SEQ ID NO: 1057881 - RNA, 19 nt, Artificial Sequence
  Description of Artificial Sequence: Synthetic oligonucleotide
  Antisense strand to SEQ ID NO: 1057880
aaucacccacuacuuucuu

SEQ ID NO: 1057882 - RNA, 19 nt, Artificial Sequence
  Description of Artificial Sequence: Synthetic oligonucleotide
  Sense strand starting at position 3334 of SEQ ID NO: 915152
gaaaguagugggugauuaa

SEQ ID NO: 1057883 - RNA, 19 nt, Artificial Sequence
  Description of Artificial Sequence: Synthetic oligonucleotide
  Antisense strand to SEQ ID NO: 1057882
uuaaucacccacuacuuuc

SEQ ID NO: 1057884 - RNA, 19 nt, Artificial Sequence
  Description of Artificial Sequence: Synthetic oligonucleotide
  Sense strand starting at position 3409 of SEQ ID NO: 915152
guaagugucaaauauguaa

SEQ ID NO: 1057885 - RNA, 19 nt, Artificial Sequence
  Description of Artificial Sequence: Synthetic oligonucleotide
  Antisense strand to SEQ ID NO: 1057884
uuacauauuugacacuuac

SEQ ID NO: 1057886 - RNA, 19 nt, Artificial Sequence
  Description of Artificial Sequence: Synthetic oligonucleotide
  Sense strand starting at position 3425 of SEQ ID NO: 915152
uaaguuuguggagaguuau

SEQ ID NO: 1057887 - RNA, 19 nt, Artificial Sequence
  Description of Artificial Sequence: Synthetic oligonucleotide
  Antisense strand to SEQ ID NO: 1057886
auaacucuccacaaacuua

SEQ ID NO: 1057888 - RNA, 19 nt, Artificial Sequence
  Description of Artificial Sequence: Synthetic oligonucleotide
  Sense strand starting at position 3766 of SEQ ID NO: 915152
gagaguaaauauucuguag

SEQ ID NO: 1057889 - RNA, 19 nt, Artificial Sequence
  Description of Artificial Sequence: Synthetic oligonucleotide
  Antisense strand to SEQ ID NO: 1057888
cuacagaauauuuacucuc

SEQ ID NO: 1057890 - RNA, 19 nt, Artificial Sequence
  Description of Artificial Sequence: Synthetic oligonucleotide
  Sense strand starting at position 3770 of SEQ ID NO: 915152
guaaauauucuguagcaag

SEQ ID NO: 1057891 - RNA, 19 nt, Artificial Sequence
  Description of Artificial Sequence: Synthetic oligonucleotide
  Antisense strand to SEQ ID NO: 1057890
cuugcuacagaauauuuac

SEQ ID NO: 1057892 - RNA, 19 nt, Artificial Sequence
  Description of Artificial Sequence: Synthetic oligonucleotide
  Sense strand starting at position 3781 of SEQ ID NO: 915152
guagcaaggauacaaguua

SEQ ID NO: 1057893 - RNA, 19 nt, Artificial Sequence
  Description of Artificial Sequence: Synthetic oligonucleotide
  Antisense strand to SEQ ID NO: 1057892
uaacuuguauccuugcuac

SEQ ID NO: 1057894 - RNA, 19 nt, Artificial Sequence
  Description of Artificial Sequence: Synthetic oligonucleotide
  Sense strand starting at position 3816 of SEQ ID NO: 915152
aguauucugugguuuauuu

SEQ ID NO: 1057895 - RNA, 19 nt, Artificial Sequence
  Description of Artificial Sequence: Synthetic oligonucleotide
  Antisense strand to SEQ ID NO: 1057894
aaauaaaccacagaauacu

SEQ ID NO: 1057896 - RNA, 19 nt, Artificial Sequence
  Description of Artificial Sequence: Synthetic oligonucleotide
  Sense strand starting at position 14 of SEQ ID NO: 915153
uguggauauacauggacua

SEQ ID NO: 1057897 - RNA, 19 nt, Artificial Sequence
  Description of Artificial Sequence: Synthetic oligonucleotide
  Antisense strand to SEQ ID NO: 1057896
uaguccauguauauccaca

SEQ ID NO: 1057898 - RNA, 19 nt, Artificial Sequence
  Description of Artificial Sequence: Synthetic oligonucleotide
  Sense strand starting at position 27 of SEQ ID NO: 915153
ggacuaggacuuugcuaaa

SEQ ID NO: 1057899 - RNA, 19 nt, Artificial Sequence
  Description of Artificial Sequence: Synthetic oligonucleotide
  Antisense strand to SEQ ID NO: 1057898
uuuagcaaaguccuagucc

SEQ ID NO: 1057900 - RNA, 19 nt, Artificial Sequence
  Description of Artificial Sequence: Synthetic oligonucleotide
  Sense strand starting at position 51 of SEQ ID NO: 915153
uggauaauuugucaacaga

SEQ ID NO: 1057901 - RNA, 19 nt, Artificial Sequence
  Description of Artificial Sequence: Synthetic oligonucleotide
  Antisense strand to SEQ ID NO: 1057900
ucuguugacaaauuaucca

SEQ ID NO: 1057902 - RNA, 19 nt, Artificial Sequence
  Description of Artificial Sequence: Synthetic oligonucleotide
  Sense strand starting at position 74 of SEQ ID NO: 915153
acuagcaacuuuguuagaa

SEQ ID NO: 1057903 - RNA, 19 nt, Artificial Sequence
  Description of Artificial Sequence: Synthetic oligonucleotide
  Antisense strand to SEQ ID NO: 1057902
uucuaacaaaguugcuagu

SEQ ID NO: 1057904 - RNA, 19 nt, Artificial Sequence
  Description of Artificial Sequence: Synthetic oligonucleotide
  Sense strand starting at position 75 of SEQ ID NO: 915153
cuagcaacuuuguuagaag

SEQ ID NO: 1057905 - RNA, 19 nt, Artificial Sequence
  Description of Artificial Sequence: Synthetic oligonucleotide
  Antisense strand to SEQ ID NO: 1057904
cuucuaacaaaguugcuag

SEQ ID NO: 1057906 - RNA, 19 nt, Artificial Sequence
  Description of Artificial Sequence: Synthetic oligonucleotide
  Sense strand starting at position 99 of SEQ ID NO: 915153
uaagaaagucugcauguga

SEQ ID NO: 1057907 - RNA, 19 nt, Artificial Sequence
  Description of Artificial Sequence: Synthetic oligonucleotide
  Antisense strand to SEQ ID NO: 1057906
ucacaugcagacuuucuua

SEQ ID NO: 1057908 - RNA, 19 nt, Artificial Sequence
  Description of Artificial Sequence: Synthetic oligonucleotide
  Sense strand starting at position 220 of SEQ ID NO: 915153
aaguaucuauacguugaua

SEQ ID NO: 1057909 - RNA, 19 nt, Artificial Sequence
  Description of Artificial Sequence: Synthetic oligonucleotide
  Antisense strand to SEQ ID NO: 1057908
uaucaacguauagauacuu

SEQ ID NO: 1057910 - RNA, 19 nt, Artificial Sequence
  Description of Artificial Sequence: Synthetic oligonucleotide
  Sense strand starting at position 382 of SEQ ID NO: 915153
uguuauccuuacuccuaga

SEQ ID NO: 1057911 - RNA, 19 nt, Artificial Sequence
  Description of Artificial Sequence: Synthetic oligonucleotide
  Antisense strand to SEQ ID NO: 1057910
ucuaggaguaaggauaaca

SEQ ID NO: 1057912 - RNA, 19 nt, Artificial Sequence
  Description of Artificial Sequence: Synthetic oligonucleotide
  Sense strand starting at position 455 of SEQ ID NO: 915153
ugaugcugagcacauaaua

SEQ ID NO: 1057913 - RNA, 19 nt, Artificial Sequence
  Description of Artificial Sequence: Synthetic oligonucleotide
  Antisense strand to SEQ ID NO: 1057912
uauuaugugcucagcauca

SEQ ID NO: 1057914 - RNA, 19 nt, Artificial Sequence
  Description of Artificial Sequence: Synthetic oligonucleotide
  Sense strand starting at position 550 of SEQ ID NO: 915153
guggaauuacauugaugug

SEQ ID NO: 1057915 - RNA, 19 nt, Artificial Sequence
  Description of Artificial Sequence: Synthetic oligonucleotide
  Antisense strand to SEQ ID NO: 1057914
cacaucaauguaauuccac

SEQ ID NO: 1057916 - RNA, 19 nt, Artificial Sequence
  Description of Artificial Sequence: Synthetic oligonucleotide
  Sense strand starting at position 551 of SEQ ID NO: 915153
uggaauuacauugaugugu

SEQ ID NO: 1057917 - RNA, 19 nt, Artificial Sequence
  Description of Artificial Sequence: Synthetic oligonucleotide
  Antisense strand to SEQ ID NO: 1057916
acacaucaauguaauucca

SEQ ID NO: 1057918 - RNA, 19 nt, Artificial Sequence
  Description of Artificial Sequence: Synthetic oligonucleotide
  Sense strand starting at position 600 of SEQ ID NO: 915153
uuuggaaucgcauauauaa

SEQ ID NO: 1057919 - RNA, 19 nt, Artificial Sequence
  Description of Artificial Sequence: Synthetic oligonucleotide
  Antisense strand to SEQ ID NO: 1057918
uuauauaugcgauuccaaa

SEQ ID NO: 1057920 - RNA, 19 nt, Artificial Sequence
  Description of Artificial Sequence: Synthetic oligonucleotide
  Sense strand starting at position 607 of SEQ ID NO: 915153
ucgcauauauaaucaagaa

SEQ ID NO: 1057921 - RNA, 19 nt, Artificial Sequence
  Description of Artificial Sequence: Synthetic oligonucleotide
  Antisense strand to SEQ ID NO: 1057920
uucuugauuauauaugcga

SEQ ID NO: 1057922 - RNA, 19 nt, Artificial Sequence
  Description of Artificial Sequence: Synthetic oligonucleotide
  Sense strand starting at position 682 of SEQ ID NO: 915153
cugacuuauuuagaaaguu

SEQ ID NO: 1057923 - RNA, 19 nt, Artificial Sequence
  Description of Artificial Sequence: Synthetic oligonucleotide
  Antisense strand to SEQ ID NO: 1057922
aacuuucuaaauaagucag

SEQ ID NO: 1057924 - RNA, 19 nt, Artificial Sequence
  Description of Artificial Sequence: Synthetic oligonucleotide
  Sense strand starting at position 697 of SEQ ID NO: 915153
aguuucucacauuaaaugu

SEQ ID NO: 1057925 - RNA, 19 nt, Artificial Sequence
  Description of Artificial Sequence: Synthetic oligonucleotide
  Antisense strand to SEQ ID NO: 1057924
acauuuaaugugagaaacu

SEQ ID NO: 1057926 - RNA, 19 nt, Artificial Sequence
  Description of Artificial Sequence: Synthetic oligonucleotide
  Sense strand starting at position 730 of SEQ ID NO: 915153
guauacagagccugaauua

SEQ ID NO: 1057927 - RNA, 19 nt, Artificial Sequence
  Description of Artificial Sequence: Synthetic oligonucleotide
  Antisense strand to SEQ ID NO: 1057926
uaauucaggcucuguauac

SEQ ID NO: 1057928 - RNA, 19 nt, Artificial Sequence
  Description of Artificial Sequence: Synthetic oligonucleotide
  Sense strand starting at position 907 of SEQ ID NO: 915153
cuuaguuuggacuguugga

SEQ ID NO: 1057929 - RNA, 19 nt, Artificial Sequence
  Description of Artificial Sequence: Synthetic oligonucleotide
  Antisense strand to SEQ ID NO: 1057928
uccaacaguccaaacuaag

SEQ ID NO: 1057930 - RNA, 19 nt, Artificial Sequence
  Description of Artificial Sequence: Synthetic oligonucleotide
  Sense strand starting at position 2169 of SEQ ID NO: 915153
agugaauucccugaacugu

SEQ ID NO: 1057931 - RNA, 19 nt, Artificial Sequence
  Description of Artificial Sequence: Synthetic oligonucleotide
  Antisense strand to SEQ ID NO: 1057930
acaguucagggaauucacu

SEQ ID NO: 1057932 - RNA, 19 nt, Artificial Sequence
  Description of Artificial Sequence: Synthetic oligonucleotide
  Sense strand starting at position 2180 of SEQ ID NO: 915153
ugaacugugccacaucaaa

SEQ ID NO: 1057933 - RNA, 19 nt, Artificial Sequence
  Description of Artificial Sequence: Synthetic oligonucleotide
  Antisense strand to SEQ ID NO: 1057932
uuugauguggcacaguuca

SEQ ID NO: 1057934 - RNA, 19 nt, Artificial Sequence
  Description of Artificial Sequence: Synthetic oligonucleotide
  Sense strand starting at position 2305 of SEQ ID NO: 915153
ugagaaaccugcuuuccag

SEQ ID NO: 1057935 - RNA, 19 nt, Artificial Sequence
  Description of Artificial Sequence: Synthetic oligonucleotide
  Antisense strand to SEQ ID NO: 1057934
cuggaaagcagguuucuca

SEQ ID NO: 1057936 - RNA, 19 nt, Artificial Sequence
  Description of Artificial Sequence: Synthetic oligonucleotide
  Sense strand starting at position 2363 of SEQ ID NO: 915153
ugagcaaacuaagucauau

SEQ ID NO: 1057937 - RNA, 19 nt, Artificial Sequence
  Description of Artificial Sequence: Synthetic oligonucleotide
  Antisense strand to SEQ ID NO: 1057936
auaugacuuaguuugcuca

SEQ ID NO: 1057938 - RNA, 19 nt, Artificial Sequence
  Description of Artificial Sequence: Synthetic oligonucleotide
  Sense strand starting at position 2513 of SEQ ID NO: 915153
aucgcauuuguugggaguu

SEQ ID NO: 1057939 - RNA, 19 nt, Artificial Sequence
  Description of Artificial Sequence: Synthetic oligonucleotide
  Antisense strand to SEQ ID NO: 1057938
aacucccaacaaaugcgau

SEQ ID NO: 1057940 - RNA, 19 nt, Artificial Sequence
  Description of Artificial Sequence: Synthetic oligonucleotide
  Sense strand starting at position 2532 of SEQ ID NO: 915153
cccuguguuguugacauuu

SEQ ID NO: 1057941 - RNA, 19 nt, Artificial Sequence
  Description of Artificial Sequence: Synthetic oligonucleotide
  Antisense strand to SEQ ID NO: 1057940
aaaugucaacaacacaggg

SEQ ID NO: 1057942 - RNA, 19 nt, Artificial Sequence
  Description of Artificial Sequence: Synthetic oligonucleotide
  Sense strand starting at position 2624 of SEQ ID NO: 915153
agcuaagacucagcaauua

SEQ ID NO: 1057943 - RNA, 19 nt, Artificial Sequence
  Description of Artificial Sequence: Synthetic oligonucleotide
  Antisense strand to SEQ ID NO: 1057942
uaauugcugagucuuagcu

SEQ ID NO: 1057944 - RNA, 19 nt, Artificial Sequence
  Description of Artificial Sequence: Synthetic oligonucleotide
  Sense strand starting at position 3012 of SEQ ID NO: 915153
gaacaugugccauaugcca

SEQ ID NO: 1057945 - RNA, 19 nt, Artificial Sequence
  Description of Artificial Sequence: Synthetic oligonucleotide
  Antisense strand to SEQ ID NO: 1057944
uggcauauggcacauguuc

SEQ ID NO: 1057946 - RNA, 19 nt, Artificial Sequence
  Description of Artificial Sequence: Synthetic oligonucleotide
  Sense strand starting at position 3115 of SEQ ID NO: 915153
ugaagaaacugauauuuac

SEQ ID NO: 1057947 - RNA, 19 nt, Artificial Sequence
  Description of Artificial Sequence: Synthetic oligonucleotide
  Antisense strand to SEQ ID NO: 1057946
guaaauaucaguuucuuca

SEQ ID NO: 1057948 - RNA, 19 nt, Artificial Sequence
  Description of Artificial Sequence: Synthetic oligonucleotide
  Sense strand starting at position 3158 of SEQ ID NO: 915153
gcaguuaggcaguagaaga

SEQ ID NO: 1057949 - RNA, 19 nt, Artificial Sequence
  Description of Artificial Sequence: Synthetic oligonucleotide
  Antisense strand to SEQ ID NO: 1057948
ucuucuacugccuaacugc

SEQ ID NO: 1057950 - RNA, 19 nt, Artificial Sequence
  Description of Artificial Sequence: Synthetic oligonucleotide
  Sense strand starting at position 3223 of SEQ ID NO: 915153
aaagcugaggaaugcauaa

SEQ ID NO: 1057951 - RNA, 19 nt, Artificial Sequence
  Description of Artificial Sequence: Synthetic oligonucleotide
  Antisense strand to SEQ ID NO: 1057950
uuaugcauuccucagcuuu

SEQ ID NO: 1057952 - RNA, 19 nt, Artificial Sequence
  Description of Artificial Sequence: Synthetic oligonucleotide
  Sense strand starting at position 3266 of SEQ ID NO: 915153
aaaggcuccagguguauga

SEQ ID NO: 1057953 - RNA, 19 nt, Artificial Sequence
  Description of Artificial Sequence: Synthetic oligonucleotide
  Antisense strand to SEQ ID NO: 1057952
ucauacaccuggagccuuu

SEQ ID NO: 1057954 - RNA, 19 nt, Artificial Sequence
  Description of Artificial Sequence: Synthetic oligonucleotide
  Sense strand starting at position 3268 of SEQ ID NO: 915153
aggcuccagguguaugauu

SEQ ID NO: 1057955 - RNA, 19 nt, Artificial Sequence
  Description of Artificial Sequence: Synthetic oligonucleotide
  Antisense strand to SEQ ID NO: 1057954
aaucauacaccuggagccu

SEQ ID NO: 1057956 - RNA, 19 nt, Artificial Sequence
  Description of Artificial Sequence: Synthetic oligonucleotide
  Sense strand starting at position 3326 of SEQ ID NO: 915153
gggaguuugaugugucaaa

SEQ ID NO: 1057957 - RNA, 19 nt, Artificial Sequence
  Description of Artificial Sequence: Synthetic oligonucleotide
  Antisense strand to SEQ ID NO: 1057956
uuugacacaucaaacuccc

SEQ ID NO: 1057958 - RNA, 19 nt, Artificial Sequence
  Description of Artificial Sequence: Synthetic oligonucleotide
  Sense strand starting at position 3327 of SEQ ID NO: 915153
ggaguuugaugugucaaau

SEQ ID NO: 1057959 - RNA, 19 nt, Artificial Sequence
  Description of Artificial Sequence: Synthetic oligonucleotide
  Antisense strand to SEQ ID NO: 1057958
auuugacacaucaaacucc

SEQ ID NO: 1057960 - RNA, 19 nt, Artificial Sequence
  Description of Artificial Sequence: Synthetic oligonucleotide
  Sense strand starting at position 3339 of SEQ ID NO: 915153
gucaaauguuaauuccaug

SEQ ID NO: 1057961 - RNA, 19 nt, Artificial Sequence
  Description of Artificial Sequence: Synthetic oligonucleotide
  Antisense strand to SEQ ID NO: 1057960
cauggaauuaacauuugac

SEQ ID NO: 1057962 - RNA, 19 nt, Artificial Sequence
  Description of Artificial Sequence: Synthetic oligonucleotide
  Sense strand starting at position 3344 of SEQ ID NO: 915153
auguuaauuccaugugaac

SEQ ID NO: 1057963 - RNA, 19 nt, Artificial Sequence
  Description of Artificial Sequence: Synthetic oligonucleotide
  Antisense strand to SEQ ID NO: 1057962
guucacauggaauuaacau

SEQ ID NO: 1057964 - RNA, 19 nt, Artificial Sequence
  Description of Artificial Sequence: Synthetic oligonucleotide
  Sense strand starting at position 3353 of SEQ ID NO: 915153
ccaugugaacuguggagau

SEQ ID NO: 1057965 - RNA, 19 nt, Artificial Sequence
  Description of Artificial Sequence: Synthetic oligonucleotide
  Antisense strand to SEQ ID NO: 1057964
aucuccacaguucacaugg

SEQ ID NO: 1057966 - RNA, 19 nt, Artificial Sequence
  Description of Artificial Sequence: Synthetic oligonucleotide
  Sense strand starting at position 3379 of SEQ ID NO: 915153
ucuuuaggcuucucuggaa

SEQ ID NO: 1057967 - RNA, 19 nt, Artificial Sequence
  Description of Artificial Sequence: Synthetic oligonucleotide
  Antisense strand to SEQ ID NO: 1057966
uuccagagaagccuaaaga

SEQ ID NO: 1057968 - RNA, 19 nt, Artificial Sequence
  Description of Artificial Sequence: Synthetic oligonucleotide
  Sense strand starting at position 3383 of SEQ ID NO: 915153
uaggcuucucuggaaagua

SEQ ID NO: 1057969 - RNA, 19 nt, Artificial Sequence
  Description of Artificial Sequence: Synthetic oligonucleotide
  Antisense strand to SEQ ID NO: 1057968
uacuuuccagagaagccua

SEQ ID NO: 1057970 - RNA, 19 nt, Artificial Sequence
  Description of Artificial Sequence: Synthetic oligonucleotide
  Sense strand starting at position 3391 of SEQ ID NO: 915153
ucuggaaaguagucuuaau

SEQ ID NO: 1057971 - RNA, 19 nt, Artificial Sequence
  Description of Artificial Sequence: Synthetic oligonucleotide
  Antisense strand to SEQ ID NO: 1057970
auuaagacuacuuuccaga

SEQ ID NO: 1057972 - RNA, 19 nt, Artificial Sequence
  Description of Artificial Sequence: Synthetic oligonucleotide
  Sense strand starting at position 3714 of SEQ ID NO: 915153
cucagaagucaagauugca

SEQ ID NO: 1057973 - RNA, 19 nt, Artificial Sequence
  Description of Artificial Sequence: Synthetic oligonucleotide
  Antisense strand to SEQ ID NO: 1057972
ugcaaucuugacuucugag

SEQ ID NO: 1057974 - RNA, 19 nt, Artificial Sequence
  Description of Artificial Sequence: Synthetic oligonucleotide
  Sense strand starting at position 3727 of SEQ ID NO: 915153
auugcagugagucaugaau

SEQ ID NO: 1057975 - RNA, 19 nt, Artificial Sequence
  Description of Artificial Sequence: Synthetic oligonucleotide
  Antisense strand to SEQ ID NO: 1057974
auucaugacucacugcaau

SEQ ID NO: 1057976 - RNA, 19 nt, Artificial Sequence
  Description of Artificial Sequence: Synthetic oligonucleotide
  Sense strand starting at position 73 of SEQ ID NO: 915154
cucccuauguaucuagaua

SEQ ID NO: 1057977 - RNA, 19 nt, Artificial Sequence
  Description of Artificial Sequence: Synthetic oligonucleotide
  Antisense strand to SEQ ID NO: 1057976
uaucuagauacauagggag

SEQ ID NO: 1057978 - RNA, 19 nt, Artificial Sequence
  Description of Artificial Sequence: Synthetic oligonucleotide
  Sense strand starting at position 173 of SEQ ID NO: 915154
agauuuauaugccaaggaa

SEQ ID NO: 1057979 - RNA, 19 nt, Artificial Sequence
  Description of Artificial Sequence: Synthetic oligonucleotide
  Antisense strand to SEQ ID NO: 1057978
uuccuuggcauauaaaucu

SEQ ID NO: 1057980 - RNA, 19 nt, Artificial Sequence
  Description of Artificial Sequence: Synthetic oligonucleotide
  Sense strand starting at position 176 of SEQ ID NO: 915154
uuuauaugccaaggaauau

SEQ ID NO: 1057981 - RNA, 19 nt, Artificial Sequence
  Description of Artificial Sequence: Synthetic oligonucleotide
  Antisense strand to SEQ ID NO: 1057980
auauuccuuggcauauaaa

SEQ ID NO: 1057982 - RNA, 19 nt, Artificial Sequence
  Description of Artificial Sequence: Synthetic oligonucleotide
  Sense strand starting at position 248 of SEQ ID NO: 915154
guuugauauggcuagauac

SEQ ID NO: 1057983 - RNA, 19 nt, Artificial Sequence
  Description of Artificial Sequence: Synthetic oligonucleotide
  Antisense strand to SEQ ID NO: 1057982
guaucuagccauaucaaac

SEQ ID NO: 1057984 - RNA, 19 nt, Artificial Sequence
  Description of Artificial Sequence: Synthetic oligonucleotide
  Sense strand starting at position 269 of SEQ ID NO: 915154
agaugagagaaacgucuua

SEQ ID NO: 1057985 - RNA, 19 nt, Artificial Sequence
  Description of Artificial Sequence: Synthetic oligonucleotide
  Antisense strand to SEQ ID NO: 1057984
uaagacguuucucucaucu

SEQ ID NO: 1057986 - RNA, 19 nt, Artificial Sequence
  Description of Artificial Sequence: Synthetic oligonucleotide
  Sense strand starting at position 384 of SEQ ID NO: 915154
aggugauaauccucaaucu

SEQ ID NO: 1057987 - RNA, 19 nt, Artificial Sequence
  Description of Artificial Sequence: Synthetic oligonucleotide
  Antisense strand to SEQ ID NO: 1057986
agauugaggauuaucaccu

SEQ ID NO: 1057988 - RNA, 19 nt, Artificial Sequence
  Description of Artificial Sequence: Synthetic oligonucleotide
  Sense strand starting at position 385 of SEQ ID NO: 915154
ggugauaauccucaaucuc

SEQ ID NO: 1057989 - RNA, 19 nt, Artificial Sequence
  Description of Artificial Sequence: Synthetic oligonucleotide
  Antisense strand to SEQ ID NO: 1057988
gagauugaggauuaucacc

SEQ ID NO: 1057990 - RNA, 19 nt, Artificial Sequence
  Description of Artificial Sequence: Synthetic oligonucleotide
  Sense strand starting at position 504 of SEQ ID NO: 915154
ugggcauauguuuaguaaa

SEQ ID NO: 1057991 - RNA, 19 nt, Artificial Sequence
  Description of Artificial Sequence: Synthetic oligonucleotide
  Antisense strand to SEQ ID NO: 1057990
uuuacuaaacauaugccca

SEQ ID NO: 1057992 - RNA, 19 nt, Artificial Sequence
  Description of Artificial Sequence: Synthetic oligonucleotide
  Sense strand starting at position 985 of SEQ ID NO: 915154
aacagaaaccugugggcuu

SEQ ID NO: 1057993 - RNA, 19 nt, Artificial Sequence
  Description of Artificial Sequence: Synthetic oligonucleotide
  Antisense strand to SEQ ID NO: 1057992
aagcccacagguuucuguu

SEQ ID NO: 1057994 - RNA, 19 nt, Artificial Sequence
  Description of Artificial Sequence: Synthetic oligonucleotide
  Sense strand starting at position 1096 of SEQ ID NO: 915154
cgaauuugcuuggucuuga

SEQ ID NO: 1057995 - RNA, 19 nt, Artificial Sequence
  Description of Artificial Sequence: Synthetic oligonucleotide
  Antisense strand to SEQ ID NO: 1057994
ucaagaccaagcaaauucg

SEQ ID NO: 1057996 - RNA, 19 nt, Artificial Sequence
  Description of Artificial Sequence: Synthetic oligonucleotide
  Sense strand starting at position 1396 of SEQ ID NO: 915154
agcccauagaugugauuga

SEQ ID NO: 1057997 - RNA, 19 nt, Artificial Sequence
  Description of Artificial Sequence: Synthetic oligonucleotide
  Antisense strand to SEQ ID NO: 1057996
ucaaucacaucuaugggcu

SEQ ID NO: 1057998 - RNA, 19 nt, Artificial Sequence
  Description of Artificial Sequence: Synthetic oligonucleotide
  Sense strand starting at position 1400 of SEQ ID NO: 915154
cauagaugugauugacaau

SEQ ID NO: 1057999 - RNA, 19 nt, Artificial Sequence
  Description of Artificial Sequence: Synthetic oligonucleotide
  Antisense strand to SEQ ID NO: 1057998
auugucaaucacaucuaug

SEQ ID NO: 1058000 - RNA, 19 nt, Artificial Sequence
  Description of Artificial Sequence: Synthetic oligonucleotide
  Sense strand starting at position 1407 of SEQ ID NO: 915154
gugauugacaaugaugcua

SEQ ID NO: 1058001 - RNA, 19 nt, Artificial Sequence
  Description of Artificial Sequence: Synthetic oligonucleotide
  Antisense strand to SEQ ID NO: 1058000
uagcaucauugucaaucac

SEQ ID NO: 1058002 - RNA, 19 nt, Artificial Sequence
  Description of Artificial Sequence: Synthetic oligonucleotide
  Sense strand starting at position 1439 of SEQ ID NO: 915154
ucaugaucuccaggugaag

SEQ ID NO: 1058003 - RNA, 19 nt, Artificial Sequence
  Description of Artificial Sequence: Synthetic oligonucleotide
  Antisense strand to SEQ ID NO: 1058002
cuucaccuggagaucauga

SEQ ID NO: 1058004 - RNA, 19 nt, Artificial Sequence
  Description of Artificial Sequence: Synthetic oligonucleotide
  Sense strand starting at position 1487 of SEQ ID NO: 915154
ggcaguauuggaagcgcuu

SEQ ID NO: 1058005 - RNA, 19 nt, Artificial Sequence
  Description of Artificial Sequence: Synthetic oligonucleotide
  Antisense strand to SEQ ID NO: 1058004
aagcgcuuccaauacugcc

SEQ ID NO: 1058006 - RNA, 19 nt, Artificial Sequence
  Description of Artificial Sequence: Synthetic oligonucleotide
  Sense strand starting at position 1834 of SEQ ID NO: 915154
guggcaucaguacaaauga

SEQ ID NO: 1058007 - RNA, 19 nt, Artificial Sequence
  Description of Artificial Sequence: Synthetic oligonucleotide
  Antisense strand to SEQ ID NO: 1058006
ucauuuguacugaugccac

SEQ ID NO: 1058008 - RNA, 19 nt, Artificial Sequence
  Description of Artificial Sequence: Synthetic oligonucleotide
  Sense strand starting at position 1843 of SEQ ID NO: 915154
guacaaaugacguggagaa

SEQ ID NO: 1058009 - RNA, 19 nt, Artificial Sequence
  Description of Artificial Sequence: Synthetic oligonucleotide
  Antisense strand to SEQ ID NO: 1058008
uucuccacgucauuuguac

SEQ ID NO: 1058010 - RNA, 19 nt, Artificial Sequence
  Description of Artificial Sequence: Synthetic oligonucleotide
  Sense strand starting at position 1844 of SEQ ID NO: 915154
uacaaaugacguggagaau

SEQ ID NO: 1058011 - RNA, 19 nt, Artificial Sequence
  Description of Artificial Sequence: Synthetic oligonucleotide
  Antisense strand to SEQ ID NO: 1058010
auucuccacgucauuugua

SEQ ID NO: 1058012 - RNA, 19 nt, Artificial Sequence
  Description of Artificial Sequence: Synthetic oligonucleotide
  Sense strand starting at position 1979 of SEQ ID NO: 915154
ugcuauuaagaagaauugu

SEQ ID NO: 1058013 - RNA, 19 nt, Artificial Sequence
  Description of Artificial Sequence: Synthetic oligonucleotide
  Antisense strand to SEQ ID NO: 1058012
acaauucuucuuaauagca

SEQ ID NO: 1058014 - RNA, 19 nt, Artificial Sequence
  Description of Artificial Sequence: Synthetic oligonucleotide
  Sense strand starting at position 2302 of SEQ ID NO: 915154
uucguucugagagauauga

SEQ ID NO: 1058015 - RNA, 19 nt, Artificial Sequence
  Description of Artificial Sequence: Synthetic oligonucleotide
  Antisense strand to SEQ ID NO: 1058014
ucauaucucucagaacgaa

SEQ ID NO: 1058016 - RNA, 19 nt, Artificial Sequence
  Description of Artificial Sequence: Synthetic oligonucleotide
  Sense strand starting at position 2325 of SEQ ID NO: 915154
agauguaugucuuuaauag

SEQ ID NO: 1058017 - RNA, 19 nt, Artificial Sequence
  Description of Artificial Sequence: Synthetic oligonucleotide
  Antisense strand to SEQ ID NO: 1058016
cuauuaaagacauacaucu

SEQ ID NO: 1058018 - RNA, 19 nt, Artificial Sequence
  Description of Artificial Sequence: Synthetic oligonucleotide
  Sense strand starting at position 2394 of SEQ ID NO: 915154
uuacacuagguuugaaaca

SEQ ID NO: 1058019 - RNA, 19 nt, Artificial Sequence
  Description of Artificial Sequence: Synthetic oligonucleotide
  Antisense strand to SEQ ID NO: 1058018
uguuucaaaccuaguguaa

SEQ ID NO: 1058020 - RNA, 19 nt, Artificial Sequence
  Description of Artificial Sequence: Synthetic oligonucleotide
  Sense strand starting at position 2454 of SEQ ID NO: 915154
cugaaaucuuugguuuaga

SEQ ID NO: 1058021 - RNA, 19 nt, Artificial Sequence
  Description of Artificial Sequence: Synthetic oligonucleotide
  Antisense strand to SEQ ID NO: 1058020
ucuaaaccaaagauuucag

SEQ ID NO: 1058022 - RNA, 19 nt, Artificial Sequence
  Description of Artificial Sequence: Synthetic oligonucleotide
  Sense strand starting at position 2455 of SEQ ID NO: 915154
ugaaaucuuugguuuagaa

SEQ ID NO: 1058023 - RNA, 19 nt, Artificial Sequence
  Description of Artificial Sequence: Synthetic oligonucleotide
  Antisense strand to SEQ ID NO: 1058022
uucuaaaccaaagauuuca

SEQ ID NO: 1058024 - RNA, 19 nt, Artificial Sequence
  Description of Artificial Sequence: Synthetic oligonucleotide
  Sense strand starting at position 2661 of SEQ ID NO: 915154
ugacuaguacauugucaca

SEQ ID NO: 1058025 - RNA, 19 nt, Artificial Sequence
  Description of Artificial Sequence: Synthetic oligonucleotide
  Antisense strand to SEQ ID NO: 1058024
ugugacaauguacuaguca

SEQ ID NO: 1058026 - RNA, 19 nt, Artificial Sequence
  Description of Artificial Sequence: Synthetic oligonucleotide
  Sense strand starting at position 2721 of SEQ ID NO: 915154
ugagccuguuaauuuguaa

SEQ ID NO: 1058027 - RNA, 19 nt, Artificial Sequence
  Description of Artificial Sequence: Synthetic oligonucleotide
  Antisense strand to SEQ ID NO: 1058026
uuacaaauuaacaggcuca

SEQ ID NO: 1058028 - RNA, 19 nt, Artificial Sequence
  Description of Artificial Sequence: Synthetic oligonucleotide
  Sense strand starting at position 2724 of SEQ ID NO: 915154
gccuguuaauuuguaaaug

SEQ ID NO: 1058029 - RNA, 19 nt, Artificial Sequence
  Description of Artificial Sequence: Synthetic oligonucleotide
  Antisense strand to SEQ ID NO: 1058028
cauuuacaaauuaacaggc

SEQ ID NO: 1058030 - RNA, 19 nt, Artificial Sequence
  Description of Artificial Sequence: Synthetic oligonucleotide
  Sense strand starting at position 2796 of SEQ ID NO: 915154
uauucuuaggagcauagua

SEQ ID NO: 1058031 - RNA, 19 nt, Artificial Sequence
  Description of Artificial Sequence: Synthetic oligonucleotide
  Antisense strand to SEQ ID NO: 1058030
uacuaugcuccuaagaaua

SEQ ID NO: 1058032 - RNA, 19 nt, Artificial Sequence
  Description of Artificial Sequence: Synthetic oligonucleotide
  Sense strand starting at position 2805 of SEQ ID NO: 915154
gagcauaguacaggugaga

SEQ ID NO: 1058033 - RNA, 19 nt, Artificial Sequence
  Description of Artificial Sequence: Synthetic oligonucleotide
  Antisense strand to SEQ ID NO: 1058032
ucucaccuguacuaugcuc

SEQ ID NO: 1058034 - RNA, 19 nt, Artificial Sequence
  Description of Artificial Sequence: Synthetic oligonucleotide
  Sense strand starting at position 2841 of SEQ ID NO: 915154
gguaaagugaccuggguag

SEQ ID NO: 1058035 - RNA, 19 nt, Artificial Sequence
  Description of Artificial Sequence: Synthetic oligonucleotide
  Antisense strand to SEQ ID NO: 1058034
cuacccaggucacuuuacc

SEQ ID NO: 1058036 - RNA, 19 nt, Artificial Sequence
  Description of Artificial Sequence: Synthetic oligonucleotide
  Sense strand starting at position 2858 of SEQ ID NO: 915154
agguuuacagagcaaguaa

SEQ ID NO: 1058037 - RNA, 19 nt, Artificial Sequence
  Description of Artificial Sequence: Synthetic oligonucleotide
  Antisense strand to SEQ ID NO: 1058036
uuacuugcucuguaaaccu

SEQ ID NO: 1058038 - RNA, 19 nt, Artificial Sequence
  Description of Artificial Sequence: Synthetic oligonucleotide
  Sense strand starting at position 2916 of SEQ ID NO: 915154
aagucuauguuauuggaca

SEQ ID NO: 1058039 - RNA, 19 nt, Artificial Sequence
  Description of Artificial Sequence: Synthetic oligonucleotide
  Antisense strand to SEQ ID NO: 1058038
uguccaauaacauagacuu

SEQ ID NO: 1058040 - RNA, 19 nt, Artificial Sequence
  Description of Artificial Sequence: Synthetic oligonucleotide
  Sense strand starting at position 3163 of SEQ ID NO: 915154
gggagagggucuagaggau

SEQ ID NO: 1058041 - RNA, 19 nt, Artificial Sequence
  Description of Artificial Sequence: Synthetic oligonucleotide
  Antisense strand to SEQ ID NO: 1058040
auccucuagacccucuccc

SEQ ID NO: 1058042 - RNA, 19 nt, Artificial Sequence
  Description of Artificial Sequence: Synthetic oligonucleotide
  Sense strand starting at position 3178 of SEQ ID NO: 915154
ggauauuauauguagcgau

SEQ ID NO: 1058043 - RNA, 19 nt, Artificial Sequence
  Description of Artificial Sequence: Synthetic oligonucleotide
  Antisense strand to SEQ ID NO: 1058042
aucgcuacauauaauaucc

SEQ ID NO: 1058044 - RNA, 19 nt, Artificial Sequence
  Description of Artificial Sequence: Synthetic oligonucleotide
  Sense strand starting at position 3358 of SEQ ID NO: 915154
aauggagaaucagagaaau

SEQ ID NO: 1058045 - RNA, 19 nt, Artificial Sequence
  Description of Artificial Sequence: Synthetic oligonucleotide
  Antisense strand to SEQ ID NO: 1058044
auuucucugauucuccauu

SEQ ID NO: 1058046 - RNA, 19 nt, Artificial Sequence
  Description of Artificial Sequence: Synthetic oligonucleotide
  Sense strand starting at position 3556 of SEQ ID NO: 915154
auuguaagggcuuaccuua

SEQ ID NO: 1058047 - RNA, 19 nt, Artificial Sequence
  Description of Artificial Sequence: Synthetic oligonucleotide
  Antisense strand to SEQ ID NO: 1058046
uaagguaagcccuuacaau

SEQ ID NO: 1058048 - RNA, 19 nt, Artificial Sequence
  Description of Artificial Sequence: Synthetic oligonucleotide
  Sense strand starting at position 3561 of SEQ ID NO: 915154
aagggcuuaccuuauuagu

SEQ ID NO: 1058049 - RNA, 19 nt, Artificial Sequence
  Description of Artificial Sequence: Synthetic oligonucleotide
  Antisense strand to SEQ ID NO: 1058048
acuaauaagguaagcccuu

SEQ ID NO: 1058050 - RNA, 19 nt, Artificial Sequence
  Description of Artificial Sequence: Synthetic oligonucleotide
  Sense strand starting at position 3570 of SEQ ID NO: 915154
ccuuauuagugggugagga

SEQ ID NO: 1058051 - RNA, 19 nt, Artificial Sequence
  Description of Artificial Sequence: Synthetic oligonucleotide
  Antisense strand to SEQ ID NO: 1058050
uccucacccacuaauaagg

SEQ ID NO: 1058052 - RNA, 19 nt, Artificial Sequence
  Description of Artificial Sequence: Synthetic oligonucleotide
  Sense strand starting at position 3604 of SEQ ID NO: 915154
uuuauauucugugccauuu

SEQ ID NO: 1058053 - RNA, 19 nt, Artificial Sequence
  Description of Artificial Sequence: Synthetic oligonucleotide
  Antisense strand to SEQ ID NO: 1058052
aaauggcacagaauauaaa

SEQ ID NO: 1058054 - RNA, 19 nt, Artificial Sequence
  Description of Artificial Sequence: Synthetic oligonucleotide
  Sense strand starting at position 3617 of SEQ ID NO: 915154
ccauuucccucugagagaa

SEQ ID NO: 1058055 - RNA, 19 nt, Artificial Sequence
  Description of Artificial Sequence: Synthetic oligonucleotide
  Antisense strand to SEQ ID NO: 1058054
uucucucagagggaaaugg

SEQ ID NO: 1058056 - RNA, 19 nt, Artificial Sequence
  Description of Artificial Sequence: Synthetic oligonucleotide
  Sense strand starting at position 134 of SEQ ID NO: 915155
guuccuuuggacuggaaca

SEQ ID NO: 1058057 - RNA, 19 nt, Artificial Sequence
  Description of Artificial Sequence: Synthetic oligonucleotide
  Antisense strand to SEQ ID NO: 1058056
uguuccaguccaaaggaac

SEQ ID NO: 1058058 - RNA, 19 nt, Artificial Sequence
  Description of Artificial Sequence: Synthetic oligonucleotide
  Sense strand starting at position 406 of SEQ ID NO: 915155
agaacaauugauugcuuua

SEQ ID NO: 1058059 - RNA, 19 nt, Artificial Sequence
  Description of Artificial Sequence: Synthetic oligonucleotide
  Antisense strand to SEQ ID NO: 1058058
uaaagcaaucaauuguucu

SEQ ID NO: 1058060 - RNA, 19 nt, Artificial Sequence
  Description of Artificial Sequence: Synthetic oligonucleotide
  Sense strand starting at position 490 of SEQ ID NO: 915155
ggugguuaacacugacuca

SEQ ID NO: 1058061 - RNA, 19 nt, Artificial Sequence
  Description of Artificial Sequence: Synthetic oligonucleotide
  Antisense strand to SEQ ID NO: 1058060
ugagucaguguuaaccacc

SEQ ID NO: 1058062 - RNA, 19 nt, Artificial Sequence
  Description of Artificial Sequence: Synthetic oligonucleotide
  Sense strand starting at position 689 of SEQ ID NO: 915155
agaagauacaugggcuauu

SEQ ID NO: 1058063 - RNA, 19 nt, Artificial Sequence
  Description of Artificial Sequence: Synthetic oligonucleotide
  Antisense strand to SEQ ID NO: 1058062
aauagcccauguaucuucu

SEQ ID NO: 1058064 - RNA, 19 nt, Artificial Sequence
  Description of Artificial Sequence: Synthetic oligonucleotide
  Sense strand starting at position 767 of SEQ ID NO: 915155
aguagacccuaucucuuua

SEQ ID NO: 1058065 - RNA, 19 nt, Artificial Sequence
  Description of Artificial Sequence: Synthetic oligonucleotide
  Antisense strand to SEQ ID NO: 1058064
uaaagagauagggucuacu

SEQ ID NO: 1058066 - RNA, 19 nt, Artificial Sequence
  Description of Artificial Sequence: Synthetic oligonucleotide
  Sense strand starting at position 912 of SEQ ID NO: 915155
ggguucuguaaggacugua

SEQ ID NO: 1058067 - RNA, 19 nt, Artificial Sequence
  Description of Artificial Sequence: Synthetic oligonucleotide
  Antisense strand to SEQ ID NO: 1058066
uacaguccuuacagaaccc

SEQ ID NO: 1058068 - RNA, 19 nt, Artificial Sequence
  Description of Artificial Sequence: Synthetic oligonucleotide
  Sense strand starting at position 1106 of SEQ ID NO: 915155
cacuguagacaaugggauu

SEQ ID NO: 1058069 - RNA, 19 nt, Artificial Sequence
  Description of Artificial Sequence: Synthetic oligonucleotide
  Antisense strand to SEQ ID NO: 1058068
aaucccauugucuacagug

SEQ ID NO: 1058070 - RNA, 19 nt, Artificial Sequence
  Description of Artificial Sequence: Synthetic oligonucleotide
  Sense strand starting at position 1189 of SEQ ID NO: 915155
uuuccaaagcgauggauga

SEQ ID NO: 1058071 - RNA, 19 nt, Artificial Sequence
  Description of Artificial Sequence: Synthetic oligonucleotide
  Antisense strand to SEQ ID NO: 1058070
ucauccaucgcuuuggaaa

SEQ ID NO: 1058072 - RNA, 19 nt, Artificial Sequence
  Description of Artificial Sequence: Synthetic oligonucleotide
  Sense strand starting at position 1217 of SEQ ID NO: 915155
caaucaugggaguguagaa

SEQ ID NO: 1058073 - RNA, 19 nt, Artificial Sequence
  Description of Artificial Sequence: Synthetic oligonucleotide
  Antisense strand to SEQ ID NO: 1058072
uucuacacucccaugauug

SEQ ID NO: 1058074 - RNA, 19 nt, Artificial Sequence
  Description of Artificial Sequence: Synthetic oligonucleotide
  Sense strand starting at position 1254 of SEQ ID NO: 915155
gugggaaacacagguguua

SEQ ID NO: 1058075 - RNA, 19 nt, Artificial Sequence
  Description of Artificial Sequence: Synthetic oligonucleotide
  Antisense strand to SEQ ID NO: 1058074
uaacaccuguguuucccac

SEQ ID NO: 1058076 - RNA, 19 nt, Artificial Sequence
  Description of Artificial Sequence: Synthetic oligonucleotide
  Sense strand starting at position 1256 of SEQ ID NO: 915155
gggaaacacagguguuaag

SEQ ID NO: 1058077 - RNA, 19 nt, Artificial Sequence
  Description of Artificial Sequence: Synthetic oligonucleotide
  Antisense strand to SEQ ID NO: 1058076
cuuaacaccuguguuuccc

SEQ ID NO: 1058078 - RNA, 19 nt, Artificial Sequence
  Description of Artificial Sequence: Synthetic oligonucleotide
  Sense strand starting at position 1431 of SEQ ID NO: 915155
caucacuucuugguggaga

SEQ ID NO: 1058079 - RNA, 19 nt, Artificial Sequence
  Description of Artificial Sequence: Synthetic oligonucleotide
  Antisense strand to SEQ ID NO: 1058078
ucuccaccaagaagugaug

SEQ ID NO: 1058080 - RNA, 19 nt, Artificial Sequence
  Description of Artificial Sequence: Synthetic oligonucleotide
  Sense strand starting at position 1433 of SEQ ID NO: 915155
ucacuucuugguggagaca

SEQ ID NO: 1058081 - RNA, 19 nt, Artificial Sequence
  Description of Artificial Sequence: Synthetic oligonucleotide
  Antisense strand to SEQ ID NO: 1058080
ugucuccaccaagaaguga

SEQ ID NO: 1058082 - RNA, 19 nt, Artificial Sequence
  Description of Artificial Sequence: Synthetic oligonucleotide
  Sense strand starting at position 1566 of SEQ ID NO: 915155
gacuguguuggugagaaug

SEQ ID NO: 1058083 - RNA, 19 nt, Artificial Sequence
  Description of Artificial Sequence: Synthetic oligonucleotide
  Antisense strand to SEQ ID NO: 1058082
cauucucaccaacacaguc

SEQ ID NO: 1058084 - RNA, 19 nt, Artificial Sequence
  Description of Artificial Sequence: Synthetic oligonucleotide
  Sense strand starting at position 1572 of SEQ ID NO: 915155
guuggugagaauggaaaca

SEQ ID NO: 1058085 - RNA, 19 nt, Artificial Sequence
  Description of Artificial Sequence: Synthetic oligonucleotide
  Antisense strand to SEQ ID NO: 1058084
uguuuccauucucaccaac

SEQ ID NO: 1058086 - RNA, 19 nt, Artificial Sequence
  Description of Artificial Sequence: Synthetic oligonucleotide
  Sense strand starting at position 1819 of SEQ ID NO: 915155
ugaagugagcgcucuguuu

SEQ ID NO: 1058087 - RNA, 19 nt, Artificial Sequence
  Description of Artificial Sequence: Synthetic oligonucleotide
  Antisense strand to SEQ ID NO: 1058086
aaacagagcgcucacuuca

SEQ ID NO: 1058088 - RNA, 19 nt, Artificial Sequence
  Description of Artificial Sequence: Synthetic oligonucleotide
  Sense strand starting at position 1901 of SEQ ID NO: 915155
uggagauccagaugugcau

SEQ ID NO: 1058089 - RNA, 19 nt, Artificial Sequence
  Description of Artificial Sequence: Synthetic oligonucleotide
  Antisense strand to SEQ ID NO: 1058088
augcacaucuggaucucca

SEQ ID NO: 1058090 - RNA, 19 nt, Artificial Sequence
  Description of Artificial Sequence: Synthetic oligonucleotide
  Sense strand starting at position 1983 of SEQ ID NO: 915155
cagggaucccagggucauu

SEQ ID NO: 1058091 - RNA, 19 nt, Artificial Sequence
  Description of Artificial Sequence: Synthetic oligonucleotide
  Antisense strand to SEQ ID NO: 1058090
aaugacccugggaucccug

SEQ ID NO: 1058092 - RNA, 19 nt, Artificial Sequence
  Description of Artificial Sequence: Synthetic oligonucleotide
  Sense strand starting at position 2047 of SEQ ID NO: 915155
aguaaauugaggcaguacu

SEQ ID NO: 1058093 - RNA, 19 nt, Artificial Sequence
  Description of Artificial Sequence: Synthetic oligonucleotide
  Antisense strand to SEQ ID NO: 1058092
aguacugccucaauuuacu

SEQ ID NO: 1058094 - RNA, 19 nt, Artificial Sequence
  Description of Artificial Sequence: Synthetic oligonucleotide
  Sense strand starting at position 2225 of SEQ ID NO: 915155
ggaauugugaagugaugag

SEQ ID NO: 1058095 - RNA, 19 nt, Artificial Sequence
  Description of Artificial Sequence: Synthetic oligonucleotide
  Antisense strand to SEQ ID NO: 1058094
cucaucacuucacaauucc

SEQ ID NO: 1058096 - RNA, 19 nt, Artificial Sequence
  Description of Artificial Sequence: Synthetic oligonucleotide
  Sense strand starting at position 2886 of SEQ ID NO: 915155
ugauuaacuucuccaggca

SEQ ID NO: 1058097 - RNA, 19 nt, Artificial Sequence
  Description of Artificial Sequence: Synthetic oligonucleotide
  Antisense strand to SEQ ID NO: 1058096
ugccuggagaaguuaauca

SEQ ID NO: 1058098 - RNA, 19 nt, Artificial Sequence
  Description of Artificial Sequence: Synthetic oligonucleotide
  Sense strand starting at position 2912 of SEQ ID NO: 915155
gcccuaauucuagacagac

SEQ ID NO: 1058099 - RNA, 19 nt, Artificial Sequence
  Description of Artificial Sequence: Synthetic oligonucleotide
  Antisense strand to SEQ ID NO: 1058098
gucugucuagaauuagggc

SEQ ID NO: 1058100 - RNA, 19 nt, Artificial Sequence
  Description of Artificial Sequence: Synthetic oligonucleotide
  Sense strand starting at position 2953 of SEQ ID NO: 915155
ucuggucuuccugacauag

SEQ ID NO: 1058101 - RNA, 19 nt, Artificial Sequence
  Description of Artificial Sequence: Synthetic oligonucleotide
  Antisense strand to SEQ ID NO: 1058100
cuaugucaggaagaccaga

SEQ ID NO: 1058102 - RNA, 19 nt, Artificial Sequence
  Description of Artificial Sequence: Synthetic oligonucleotide
  Sense strand starting at position 2984 of SEQ ID NO: 915155
guccaaguagcucauaaau

SEQ ID NO: 1058103 - RNA, 19 nt, Artificial Sequence
  Description of Artificial Sequence: Synthetic oligonucleotide
  Antisense strand to SEQ ID NO: 1058102
auuuaugagcuacuuggac

SEQ ID NO: 1058104 - RNA, 19 nt, Artificial Sequence
  Description of Artificial Sequence: Synthetic oligonucleotide
  Sense strand starting at position 3025 of SEQ ID NO: 915155
agagaaagguggagaguau

SEQ ID NO: 1058105 - RNA, 19 nt, Artificial Sequence
  Description of Artificial Sequence: Synthetic oligonucleotide
  Antisense strand to SEQ ID NO: 1058104
auacucuccaccuuucucu

SEQ ID NO: 1058106 - RNA, 19 nt, Artificial Sequence
  Description of Artificial Sequence: Synthetic oligonucleotide
  Sense strand starting at position 3037 of SEQ ID NO: 915155
agaguaugugaaugaugac

SEQ ID NO: 1058107 - RNA, 19 nt, Artificial Sequence
  Description of Artificial Sequence: Synthetic oligonucleotide
  Antisense strand to SEQ ID NO: 1058106
gucaucauucacauacucu

SEQ ID NO: 1058108 - RNA, 19 nt, Artificial Sequence
  Description of Artificial Sequence: Synthetic oligonucleotide
  Sense strand starting at position 3043 of SEQ ID NO: 915155
ugugaaugaugaccuguga

SEQ ID NO: 1058109 - RNA, 19 nt, Artificial Sequence
  Description of Artificial Sequence: Synthetic oligonucleotide
  Antisense strand to SEQ ID NO: 1058108
ucacaggucaucauucaca

SEQ ID NO: 1058110 - RNA, 19 nt, Artificial Sequence
  Description of Artificial Sequence: Synthetic oligonucleotide
  Sense strand starting at position 3047 of SEQ ID NO: 915155
aaugaugaccugugaagcu

SEQ ID NO: 1058111 - RNA, 19 nt, Artificial Sequence
  Description of Artificial Sequence: Synthetic oligonucleotide
  Antisense strand to SEQ ID NO: 1058110
agcuucacaggucaucauu

SEQ ID NO: 1058112 - RNA, 19 nt, Artificial Sequence
  Description of Artificial Sequence: Synthetic oligonucleotide
  Sense strand starting at position 3063 of SEQ ID NO: 915155
gcuauuucugacugcuaga

SEQ ID NO: 1058113 - RNA, 19 nt, Artificial Sequence
  Description of Artificial Sequence: Synthetic oligonucleotide
  Antisense strand to SEQ ID NO: 1058112
ucuagcagucagaaauagc

SEQ ID NO: 1058114 - RNA, 19 nt, Artificial Sequence
  Description of Artificial Sequence: Synthetic oligonucleotide
  Sense strand starting at position 3068 of SEQ ID NO: 915155
uucugacugcuagaguaag

SEQ ID NO: 1058115 - RNA, 19 nt, Artificial Sequence
  Description of Artificial Sequence: Synthetic oligonucleotide
  Antisense strand to SEQ ID NO: 1058114
cuuacucuagcagucagaa

SEQ ID NO: 1058116 - RNA, 19 nt, Artificial Sequence
  Description of Artificial Sequence: Synthetic oligonucleotide
  Sense strand starting at position 3109 of SEQ ID NO: 915155
gucaaucaguaaccagaau

SEQ ID NO: 1058117 - RNA, 19 nt, Artificial Sequence
  Description of Artificial Sequence: Synthetic oligonucleotide
  Antisense strand to SEQ ID NO: 1058116
auucugguuacugauugac

SEQ ID NO: 1058118 - RNA, 19 nt, Artificial Sequence
  Description of Artificial Sequence: Synthetic oligonucleotide
  Sense strand starting at position 3304 of SEQ ID NO: 915155
agagucuugucacugggaa

SEQ ID NO: 1058119 - RNA, 19 nt, Artificial Sequence
  Description of Artificial Sequence: Synthetic oligonucleotide
  Antisense strand to SEQ ID NO: 1058118
uucccagugacaagacucu

SEQ ID NO: 1058120 - RNA, 19 nt, Artificial Sequence
  Description of Artificial Sequence: Synthetic oligonucleotide
  Sense strand starting at position 3305 of SEQ ID NO: 915155
gagucuugucacugggaag

SEQ ID NO: 1058121 - RNA, 19 nt, Artificial Sequence
  Description of Artificial Sequence: Synthetic oligonucleotide
  Antisense strand to SEQ ID NO: 1058120
cuucccagugacaagacuc

SEQ ID NO: 1058122 - RNA, 19 nt, Artificial Sequence
  Description of Artificial Sequence: Synthetic oligonucleotide
  Sense strand starting at position 3306 of SEQ ID NO: 915155
agucuugucacugggaaga

SEQ ID NO: 1058123 - RNA, 19 nt, Artificial Sequence
  Description of Artificial Sequence: Synthetic oligonucleotide
  Antisense strand to SEQ ID NO: 1058122
ucuucccagugacaagacu

SEQ ID NO: 1058124 - RNA, 19 nt, Artificial Sequence
  Description of Artificial Sequence: Synthetic oligonucleotide
  Sense strand starting at position 3349 of SEQ ID NO: 915155
ugacuuccacagcagugau

SEQ ID NO: 1058125 - RNA, 19 nt, Artificial Sequence
  Description of Artificial Sequence: Synthetic oligonucleotide
  Antisense strand to SEQ ID NO: 1058124
aucacugcuguggaaguca

SEQ ID NO: 1058126 - RNA, 19 nt, Artificial Sequence
  Description of Artificial Sequence: Synthetic oligonucleotide
  Sense strand starting at position 3472 of SEQ ID NO: 915155
agcagaugccaagaauguu

SEQ ID NO: 1058127 - RNA, 19 nt, Artificial Sequence
  Description of Artificial Sequence: Synthetic oligonucleotide
  Antisense strand to SEQ ID NO: 1058126
aacauucuuggcaucugcu

SEQ ID NO: 1058128 - RNA, 19 nt, Artificial Sequence
  Description of Artificial Sequence: Synthetic oligonucleotide
  Sense strand starting at position 3564 of SEQ ID NO: 915155
gccuaugaauauucuauug

SEQ ID NO: 1058129 - RNA, 19 nt, Artificial Sequence
  Description of Artificial Sequence: Synthetic oligonucleotide
  Antisense strand to SEQ ID NO: 1058128
caauagaauauucauaggc

SEQ ID NO: 1058130 - RNA, 19 nt, Artificial Sequence
  Description of Artificial Sequence: Synthetic oligonucleotide
  Sense strand starting at position 3587 of SEQ ID NO: 915155
uauuaugcuguagauaaga

SEQ ID NO: 1058131 - RNA, 19 nt, Artificial Sequence
  Description of Artificial Sequence: Synthetic oligonucleotide
  Antisense strand to SEQ ID NO: 1058130
ucuuaucuacagcauaaua

SEQ ID NO: 1058132 - RNA, 19 nt, Artificial Sequence
  Description of Artificial Sequence: Synthetic oligonucleotide
  Sense strand starting at position 3798 of SEQ ID NO: 915155
cugauucuuuagcugaaua

SEQ ID NO: 1058133 - RNA, 19 nt, Artificial Sequence
  Description of Artificial Sequence: Synthetic oligonucleotide
  Antisense strand to SEQ ID NO: 1058132
uauucagcuaaagaaucag

SEQ ID NO: 1058134 - RNA, 19 nt, Artificial Sequence
  Description of Artificial Sequence: Synthetic oligonucleotide
  Sense strand starting at position 3972 of SEQ ID NO: 915155
gugaucagugguuaccaca

SEQ ID NO: 1058135 - RNA, 19 nt, Artificial Sequence
  Description of Artificial Sequence: Synthetic oligonucleotide
  Antisense strand to SEQ ID NO: 1058134
ugugguaaccacugaucac

SEQ ID NO: 1058136 - RNA, 19 nt, Artificial Sequence
  Description of Artificial Sequence: Synthetic oligonucleotide
  Sense strand starting at position 32 of SEQ ID NO: 915156
ggucucacuccugauaguu

SEQ ID NO: 1058137 - RNA, 19 nt, Artificial Sequence
  Description of Artificial Sequence: Synthetic oligonucleotide
  Antisense strand to SEQ ID NO: 1058136
aacuaucaggagugagacc

SEQ ID NO: 1058138 - RNA, 19 nt, Artificial Sequence
  Description of Artificial Sequence: Synthetic oligonucleotide
  Sense strand starting at position 104 of SEQ ID NO: 915156
cgaugcaaagcugaugaua

SEQ ID NO: 1058139 - RNA, 19 nt, Artificial Sequence
  Description of Artificial Sequence: Synthetic oligonucleotide
  Antisense strand to SEQ ID NO: 1058138
uaucaucagcuuugcaucg

SEQ ID NO: 1058140 - RNA, 19 nt, Artificial Sequence
  Description of Artificial Sequence: Synthetic oligonucleotide
  Sense strand starting at position 200 of SEQ ID NO: 915156
gcagaugggcaucaaucua

SEQ ID NO: 1058141 - RNA, 19 nt, Artificial Sequence
  Description of Artificial Sequence: Synthetic oligonucleotide
  Antisense strand to SEQ ID NO: 1058140
uagauugaugcccaucugc

SEQ ID NO: 1058142 - RNA, 19 nt, Artificial Sequence
  Description of Artificial Sequence: Synthetic oligonucleotide
  Sense strand starting at position 240 of SEQ ID NO: 915156
agagaaacauuguccuucu

SEQ ID NO: 1058143 - RNA, 19 nt, Artificial Sequence
  Description of Artificial Sequence: Synthetic oligonucleotide
  Antisense strand to SEQ ID NO: 1058142
agaaggacaauguuucucu

SEQ ID NO: 1058144 - RNA, 19 nt, Artificial Sequence
  Description of Artificial Sequence: Synthetic oligonucleotide
  Sense strand starting at position 360 of SEQ ID NO: 915156
caaugauauuguuuaguag

SEQ ID NO: 1058145 - RNA, 19 nt, Artificial Sequence
  Description of Artificial Sequence: Synthetic oligonucleotide
  Antisense strand to SEQ ID NO: 1058144
cuacuaaacaauaucauug

SEQ ID NO: 1058146 - RNA, 19 nt, Artificial Sequence
  Description of Artificial Sequence: Synthetic oligonucleotide
  Sense strand starting at position 369 of SEQ ID NO: 915156
uguuuaguagaccauacuu

SEQ ID NO: 1058147 - RNA, 19 nt, Artificial Sequence
  Description of Artificial Sequence: Synthetic oligonucleotide
  Antisense strand to SEQ ID NO: 1058146
aaguauggucuacuaaaca

SEQ ID NO: 1058148 - RNA, 19 nt, Artificial Sequence
  Description of Artificial Sequence: Synthetic oligonucleotide
  Sense strand starting at position 374 of SEQ ID NO: 915156
aguagaccauacuuggaau

SEQ ID NO: 1058149 - RNA, 19 nt, Artificial Sequence
  Description of Artificial Sequence: Synthetic oligonucleotide
  Antisense strand to SEQ ID NO: 1058148
auuccaaguauggucuacu

SEQ ID NO: 1058150 - RNA, 19 nt, Artificial Sequence
  Description of Artificial Sequence: Synthetic oligonucleotide
  Sense strand starting at position 767 of SEQ ID NO: 915156
ugucuaucugguuacuuga

SEQ ID NO: 1058151 - RNA, 19 nt, Artificial Sequence
  Description of Artificial Sequence: Synthetic oligonucleotide
  Antisense strand to SEQ ID NO: 1058150
ucaaguaaccagauagaca

SEQ ID NO: 1058152 - RNA, 19 nt, Artificial Sequence
  Description of Artificial Sequence: Synthetic oligonucleotide
  Sense strand starting at position 770 of SEQ ID NO: 915156
cuaucugguuacuugacaa

SEQ ID NO: 1058153 - RNA, 19 nt, Artificial Sequence
  Description of Artificial Sequence: Synthetic oligonucleotide
  Antisense strand to SEQ ID NO: 1058152
uugucaaguaaccagauag

SEQ ID NO: 1058154 - RNA, 19 nt, Artificial Sequence
  Description of Artificial Sequence: Synthetic oligonucleotide
  Sense strand starting at position 1082 of SEQ ID NO: 915156
agaugauaggguugagcau

SEQ ID NO: 1058155 - RNA, 19 nt, Artificial Sequence
  Description of Artificial Sequence: Synthetic oligonucleotide
  Antisense strand to SEQ ID NO: 1058154
augcucaacccuaucaucu

SEQ ID NO: 1058156 - RNA, 19 nt, Artificial Sequence
  Description of Artificial Sequence: Synthetic oligonucleotide
  Sense strand starting at position 1160 of SEQ ID NO: 915156
uccagaagcggugaaucau

SEQ ID NO: 1058157 - RNA, 19 nt, Artificial Sequence
  Description of Artificial Sequence: Synthetic oligonucleotide
  Antisense strand to SEQ ID NO: 1058156
augauucaccgcuucugga

SEQ ID NO: 1058158 - RNA, 19 nt, Artificial Sequence
  Description of Artificial Sequence: Synthetic oligonucleotide
  Sense strand starting at position 1185 of SEQ ID NO: 915156
agcaauuaugggcacauaa

SEQ ID NO: 1058159 - RNA, 19 nt, Artificial Sequence
  Description of Artificial Sequence: Synthetic oligonucleotide
  Antisense strand to SEQ ID NO: 1058158
uuaugugcccauaauugcu

SEQ ID NO: 1058160 - RNA, 19 nt, Artificial Sequence
  Description of Artificial Sequence: Synthetic oligonucleotide
  Sense strand starting at position 1265 of SEQ ID NO: 915156
gggauaugaugaccagcau

SEQ ID NO: 1058161 - RNA, 19 nt, Artificial Sequence
  Description of Artificial Sequence: Synthetic oligonucleotide
  Antisense strand to SEQ ID NO: 1058160
augcuggucaucauauccc

SEQ ID NO: 1058162 - RNA, 19 nt, Artificial Sequence
  Description of Artificial Sequence: Synthetic oligonucleotide
  Sense strand starting at position 1418 of SEQ ID NO: 915156
gacaguaggagugaugcaa

SEQ ID NO: 1058163 - RNA, 19 nt, Artificial Sequence
  Description of Artificial Sequence: Synthetic oligonucleotide
  Antisense strand to SEQ ID NO: 1058162
uugcaucacuccuacuguc

SEQ ID NO: 1058164 - RNA, 19 nt, Artificial Sequence
  Description of Artificial Sequence: Synthetic oligonucleotide
  Sense strand starting at position 1495 of SEQ ID NO: 915156
gugaaacucuugguaagga

SEQ ID NO: 1058165 - RNA, 19 nt, Artificial Sequence
  Description of Artificial Sequence: Synthetic oligonucleotide
  Antisense strand to SEQ ID NO: 1058164
uccuuaccaagaguuucac

SEQ ID NO: 1058166 - RNA, 19 nt, Artificial Sequence
  Description of Artificial Sequence: Synthetic oligonucleotide
  Sense strand starting at position 1544 of SEQ ID NO: 915156
gagugagcacagugacaua

SEQ ID NO: 1058167 - RNA, 19 nt, Artificial Sequence
  Description of Artificial Sequence: Synthetic oligonucleotide
  Antisense strand to SEQ ID NO: 1058166
uaugucacugugcucacuc

SEQ ID NO: 1058168 - RNA, 19 nt, Artificial Sequence
  Description of Artificial Sequence: Synthetic oligonucleotide
  Sense strand starting at position 1554 of SEQ ID NO: 915156
agugacauagcguaaugga

SEQ ID NO: 1058169 - RNA, 19 nt, Artificial Sequence
  Description of Artificial Sequence: Synthetic oligonucleotide
  Antisense strand to SEQ ID NO: 1058168
uccauuacgcuaugucacu

SEQ ID NO: 1058170 - RNA, 19 nt, Artificial Sequence
  Description of Artificial Sequence: Synthetic oligonucleotide
  Sense strand starting at position 1561 of SEQ ID NO: 915156
uagcguaauggauaacaaa

SEQ ID NO: 1058171 - RNA, 19 nt, Artificial Sequence
  Description of Artificial Sequence: Synthetic oligonucleotide
  Antisense strand to SEQ ID NO: 1058170
uuuguuauccauuacgcua

SEQ ID NO: 1058172 - RNA, 19 nt, Artificial Sequence
  Description of Artificial Sequence: Synthetic oligonucleotide
  Sense strand starting at position 1689 of SEQ ID NO: 915156
guaguugaagcagaaagua

SEQ ID NO: 1058173 - RNA, 19 nt, Artificial Sequence
  Description of Artificial Sequence: Synthetic oligonucleotide
  Antisense strand to SEQ ID NO: 1058172
uacuuucugcuucaacuac

SEQ ID NO: 1058174 - RNA, 19 nt, Artificial Sequence
  Description of Artificial Sequence: Synthetic oligonucleotide
  Sense strand starting at position 1746 of SEQ ID NO: 915156
aucauugagagcgagcaua

SEQ ID NO: 1058175 - RNA, 19 nt, Artificial Sequence
  Description of Artificial Sequence: Synthetic oligonucleotide
  Antisense strand to SEQ ID NO: 1058174
uaugcucgcucucaaugau

SEQ ID NO: 1058176 - RNA, 19 nt, Artificial Sequence
  Description of Artificial Sequence: Synthetic oligonucleotide
  Sense strand starting at position 1823 of SEQ ID NO: 915156
ugcugagguuaccuacaau

SEQ ID NO: 1058177 - RNA, 19 nt, Artificial Sequence
  Description of Artificial Sequence: Synthetic oligonucleotide
  Antisense strand to SEQ ID NO: 1058176
auuguagguaaccucagca

SEQ ID NO: 1058178 - RNA, 19 nt, Artificial Sequence
  Description of Artificial Sequence: Synthetic oligonucleotide
  Sense strand starting at position 2081 of SEQ ID NO: 915156
cugccuucccaguaagaca

SEQ ID NO: 1058179 - RNA, 19 nt, Artificial Sequence
  Description of Artificial Sequence: Synthetic oligonucleotide
  Antisense strand to SEQ ID NO: 1058178
ugucuuacugggaaggcag

SEQ ID NO: 1058180 - RNA, 19 nt, Artificial Sequence
  Description of Artificial Sequence: Synthetic oligonucleotide
  Sense strand starting at position 2161 of SEQ ID NO: 915156
cuaucuaggccauaguaga

SEQ ID NO: 1058181 - RNA, 19 nt, Artificial Sequence
  Description of Artificial Sequence: Synthetic oligonucleotide
  Antisense strand to SEQ ID NO: 1058180
ucuacuauggccuagauag

SEQ ID NO: 1058182 - RNA, 19 nt, Artificial Sequence
  Description of Artificial Sequence: Synthetic oligonucleotide
  Sense strand starting at position 2178 of SEQ ID NO: 915156
gaaacucugugguuugaug

SEQ ID NO: 1058183 - RNA, 19 nt, Artificial Sequence
  Description of Artificial Sequence: Synthetic oligonucleotide
  Antisense strand to SEQ ID NO: 1058182
caucaaaccacagaguuuc

SEQ ID NO: 1058184 - RNA, 19 nt, Artificial Sequence
  Description of Artificial Sequence: Synthetic oligonucleotide
  Sense strand starting at position 2180 of SEQ ID NO: 915156
aacucugugguuugaugau

SEQ ID NO: 1058185 - RNA, 19 nt, Artificial Sequence
  Description of Artificial Sequence: Synthetic oligonucleotide
  Antisense strand to SEQ ID NO: 1058184
aucaucaaaccacagaguu

SEQ ID NO: 1058186 - RNA, 19 nt, Artificial Sequence
  Description of Artificial Sequence: Synthetic oligonucleotide
  Sense strand starting at position 2186 of SEQ ID NO: 915156
gugguuugaugaucaaaug

SEQ ID NO: 1058187 - RNA, 19 nt, Artificial Sequence
  Description of Artificial Sequence: Synthetic oligonucleotide
  Antisense strand to SEQ ID NO: 1058186
cauuugaucaucaaaccac

SEQ ID NO: 1058188 - RNA, 19 nt, Artificial Sequence
  Description of Artificial Sequence: Synthetic oligonucleotide
  Sense strand starting at position 2198 of SEQ ID NO: 915156
ucaaaugagugcccauaac

SEQ ID NO: 1058189 - RNA, 19 nt, Artificial Sequence
  Description of Artificial Sequence: Synthetic oligonucleotide
  Antisense strand to SEQ ID NO: 1058188
guuaugggcacucauuuga

SEQ ID NO: 1058190 - RNA, 19 nt, Artificial Sequence
  Description of Artificial Sequence: Synthetic oligonucleotide
  Sense strand starting at position 2290 of SEQ ID NO: 915156
uuuggaaagucuuugguag

SEQ ID NO: 1058191 - RNA, 19 nt, Artificial Sequence
  Description of Artificial Sequence: Synthetic oligonucleotide
  Antisense strand to SEQ ID NO: 1058190
cuaccaaagacuuuccaaa

SEQ ID NO: 1058192 - RNA, 19 nt, Artificial Sequence
  Description of Artificial Sequence: Synthetic oligonucleotide
  Sense strand starting at position 2291 of SEQ ID NO: 915156
uuggaaagucuuugguaga

SEQ ID NO: 1058193 - RNA, 19 nt, Artificial Sequence
  Description of Artificial Sequence: Synthetic oligonucleotide
  Antisense strand to SEQ ID NO: 1058192
ucuaccaaagacuuuccaa

SEQ ID NO: 1058194 - RNA, 19 nt, Artificial Sequence
  Description of Artificial Sequence: Synthetic oligonucleotide
  Sense strand starting at position 2296 of SEQ ID NO: 915156
aagucuuugguagauagca

SEQ ID NO: 1058195 - RNA, 19 nt, Artificial Sequence
  Description of Artificial Sequence: Synthetic oligonucleotide
  Antisense strand to SEQ ID NO: 1058194
ugcuaucuaccaaagacuu

SEQ ID NO: 1058196 - RNA, 19 nt, Artificial Sequence
  Description of Artificial Sequence: Synthetic oligonucleotide
  Sense strand starting at position 2298 of SEQ ID NO: 915156
gucuuugguagauagcaua

SEQ ID NO: 1058197 - RNA, 19 nt, Artificial Sequence
  Description of Artificial Sequence: Synthetic oligonucleotide
  Antisense strand to SEQ ID NO: 1058196
uaugcuaucuaccaaagac

SEQ ID NO: 1058198 - RNA, 19 nt, Artificial Sequence
  Description of Artificial Sequence: Synthetic oligonucleotide
  Sense strand starting at position 2683 of SEQ ID NO: 915156
agguaugcagcuggauaaa

SEQ ID NO: 1058199 - RNA, 19 nt, Artificial Sequence
  Description of Artificial Sequence: Synthetic oligonucleotide
  Antisense strand to SEQ ID NO: 1058198
uuuauccagcugcauaccu

SEQ ID NO: 1058200 - RNA, 19 nt, Artificial Sequence
  Description of Artificial Sequence: Synthetic oligonucleotide
  Sense strand starting at position 2945 of SEQ ID NO: 915156
agacaauaaguaugugcaa

SEQ ID NO: 1058201 - RNA, 19 nt, Artificial Sequence
  Description of Artificial Sequence: Synthetic oligonucleotide
  Antisense strand to SEQ ID NO: 1058200
uugcacauacuuauugucu

SEQ ID NO: 1058202 - RNA, 19 nt, Artificial Sequence
  Description of Artificial Sequence: Synthetic oligonucleotide
  Sense strand starting at position 2952 of SEQ ID NO: 915156
aaguaugugcaagacuauu

SEQ ID NO: 1058203 - RNA, 19 nt, Artificial Sequence
  Description of Artificial Sequence: Synthetic oligonucleotide
  Antisense strand to SEQ ID NO: 1058202
aauagucuugcacauacuu

SEQ ID NO: 1058204 - RNA, 19 nt, Artificial Sequence
  Description of Artificial Sequence: Synthetic oligonucleotide
  Sense strand starting at position 2958 of SEQ ID NO: 915156
gugcaagacuauuccauca

SEQ ID NO: 1058205 - RNA, 19 nt, Artificial Sequence
  Description of Artificial Sequence: Synthetic oligonucleotide
  Antisense strand to SEQ ID NO: 1058204
ugauggaauagucuugcac

SEQ ID NO: 1058206 - RNA, 19 nt, Artificial Sequence
  Description of Artificial Sequence: Synthetic oligonucleotide
  Sense strand starting at position 3144 of SEQ ID NO: 915156
cuucgaugucgggauucaa

SEQ ID NO: 1058207 - RNA, 19 nt, Artificial Sequence
  Description of Artificial Sequence: Synthetic oligonucleotide
  Antisense strand to SEQ ID NO: 1058206
uugaaucccgacaucgaag

SEQ ID NO: 1058208 - RNA, 19 nt, Artificial Sequence
  Description of Artificial Sequence: Synthetic oligonucleotide
  Sense strand starting at position 3262 of SEQ ID NO: 915156
ugaccucuuugucucugaa

SEQ ID NO: 1058209 - RNA, 19 nt, Artificial Sequence
  Description of Artificial Sequence: Synthetic oligonucleotide
  Antisense strand to SEQ ID NO: 1058208
uucagagacaaagagguca

SEQ ID NO: 1058210 - RNA, 19 nt, Artificial Sequence
  Description of Artificial Sequence: Synthetic oligonucleotide
  Sense strand starting at position 3328 of SEQ ID NO: 915156
aguuaacacugucuuuaac

SEQ ID NO: 1058211 - RNA, 19 nt, Artificial Sequence
  Description of Artificial Sequence: Synthetic oligonucleotide
  Antisense strand to SEQ ID NO: 1058210
guuaaagacaguguuaacu

SEQ ID NO: 1058212 - RNA, 19 nt, Artificial Sequence
  Description of Artificial Sequence: Synthetic oligonucleotide
  Sense strand starting at position 3703 of SEQ ID NO: 915156
gugaaauuagauggugaca

SEQ ID NO: 1058213 - RNA, 19 nt, Artificial Sequence
  Description of Artificial Sequence: Synthetic oligonucleotide
  Antisense strand to SEQ ID NO: 1058212
ugucaccaucuaauuucac

SEQ ID NO: 1058214 - RNA, 19 nt, Artificial Sequence
  Description of Artificial Sequence: Synthetic oligonucleotide
  Sense strand starting at position 3717 of SEQ ID NO: 915156
ugacaaggugcuggaucau

SEQ ID NO: 1058215 - RNA, 19 nt, Artificial Sequence
  Description of Artificial Sequence: Synthetic oligonucleotide
  Antisense strand to SEQ ID NO: 1058214
augauccagcaccuuguca

SEQ ID NO: 1058216 - RNA, 19 nt, Artificial Sequence
  Description of Artificial Sequence: Synthetic oligonucleotide
  Sense strand starting at position 13 of SEQ ID NO: 915157
ccauaagugcucuagucug

SEQ ID NO: 1058217 - RNA, 19 nt, Artificial Sequence
  Description of Artificial Sequence: Synthetic oligonucleotide
  Antisense strand to SEQ ID NO: 1058216
cagacuagagcacuuaugg

SEQ ID NO: 1058218 - RNA, 19 nt, Artificial Sequence
  Description of Artificial Sequence: Synthetic oligonucleotide
  Sense strand starting at position 189 of SEQ ID NO: 915157
uucuaugagucagauauuu

SEQ ID NO: 1058219 - RNA, 19 nt, Artificial Sequence
  Description of Artificial Sequence: Synthetic oligonucleotide
  Antisense strand to SEQ ID NO: 1058218
aaauaucugacucauagaa

SEQ ID NO: 1058220 - RNA, 19 nt, Artificial Sequence
  Description of Artificial Sequence: Synthetic oligonucleotide
  Sense strand starting at position 241 of SEQ ID NO: 915157
uugaguggugggcagauaa

SEQ ID NO: 1058221 - RNA, 19 nt, Artificial Sequence
  Description of Artificial Sequence: Synthetic oligonucleotide
  Antisense strand to SEQ ID NO: 1058220
uuaucugcccaccacucaa

SEQ ID NO: 1058222 - RNA, 19 nt, Artificial Sequence
  Description of Artificial Sequence: Synthetic oligonucleotide
  Sense strand starting at position 306 of SEQ ID NO: 915157
ucaguuuaccuggaucaca

SEQ ID NO: 1058223 - RNA, 19 nt, Artificial Sequence
  Description of Artificial Sequence: Synthetic oligonucleotide
  Antisense strand to SEQ ID NO: 1058222
ugugauccagguaaacuga

SEQ ID NO: 1058224 - RNA, 19 nt, Artificial Sequence
  Description of Artificial Sequence: Synthetic oligonucleotide
  Sense strand starting at position 346 of SEQ ID NO: 915157
gaguucuaauaguuaagcu

SEQ ID NO: 1058225 - RNA, 19 nt, Artificial Sequence
  Description of Artificial Sequence: Synthetic oligonucleotide
  Antisense strand to SEQ ID NO: 1058224
agcuuaacuauuagaacuc

SEQ ID NO: 1058226 - RNA, 19 nt, Artificial Sequence
  Description of Artificial Sequence: Synthetic oligonucleotide
  Sense strand starting at position 350 of SEQ ID NO: 915157
ucuaauaguuaagcugauu

SEQ ID NO: 1058227 - RNA, 19 nt, Artificial Sequence
  Description of Artificial Sequence: Synthetic oligonucleotide
  Antisense strand to SEQ ID NO: 1058226
aaucagcuuaacuauuaga

SEQ ID NO: 1058228 - RNA, 19 nt, Artificial Sequence
  Description of Artificial Sequence: Synthetic oligonucleotide
  Sense strand starting at position 379 of SEQ ID NO: 915157
aaguuaaagcaauguauga

SEQ ID NO: 1058229 - RNA, 19 nt, Artificial Sequence
  Description of Artificial Sequence: Synthetic oligonucleotide
  Antisense strand to SEQ ID NO: 1058228
ucauacauugcuuuaacuu

SEQ ID NO: 1058230 - RNA, 19 nt, Artificial Sequence
  Description of Artificial Sequence: Synthetic oligonucleotide
  Sense strand starting at position 381 of SEQ ID NO: 915157
guuaaagcaauguaugagu

SEQ ID NO: 1058231 - RNA, 19 nt, Artificial Sequence
  Description of Artificial Sequence: Synthetic oligonucleotide
  Antisense strand to SEQ ID NO: 1058230
acucauacauugcuuuaac

SEQ ID NO: 1058232 - RNA, 19 nt, Artificial Sequence
  Description of Artificial Sequence: Synthetic oligonucleotide
  Sense strand starting at position 390 of SEQ ID NO: 915157
auguaugaguguuugagaa

SEQ ID NO: 1058233 - RNA, 19 nt, Artificial Sequence
  Description of Artificial Sequence: Synthetic oligonucleotide
  Antisense strand to SEQ ID NO: 1058232
uucucaaacacucauacau

SEQ ID NO: 1058234 - RNA, 19 nt, Artificial Sequence
  Description of Artificial Sequence: Synthetic oligonucleotide
  Sense strand starting at position 397 of SEQ ID NO: 915157
aguguuugagaaugacagu

SEQ ID NO: 1058235 - RNA, 19 nt, Artificial Sequence
  Description of Artificial Sequence: Synthetic oligonucleotide
  Antisense strand to SEQ ID NO: 1058234
acugucauucucaaacacu

SEQ ID NO: 1058236 - RNA, 19 nt, Artificial Sequence
  Description of Artificial Sequence: Synthetic oligonucleotide
  Sense strand starting at position 514 of SEQ ID NO: 915157
gagauuaguguugaauguc

SEQ ID NO: 1058237 - RNA, 19 nt, Artificial Sequence
  Description of Artificial Sequence: Synthetic oligonucleotide
  Antisense strand to SEQ ID NO: 1058236
gacauucaacacuaaucuc

SEQ ID NO: 1058238 - RNA, 19 nt, Artificial Sequence
  Description of Artificial Sequence: Synthetic oligonucleotide
  Sense strand starting at position 517 of SEQ ID NO: 915157
auuaguguugaaugucaac

SEQ ID NO: 1058239 - RNA, 19 nt, Artificial Sequence
  Description of Artificial Sequence: Synthetic oligonucleotide
  Antisense strand to SEQ ID NO: 1058238
guugacauucaacacuaau

SEQ ID NO: 1058240 - RNA, 19 nt, Artificial Sequence
  Description of Artificial Sequence: Synthetic oligonucleotide
  Sense strand starting at position 542 of SEQ ID NO: 915157
acauauuaucuguguuagg

SEQ ID NO: 1058241 - RNA, 19 nt, Artificial Sequence
  Description of Artificial Sequence: Synthetic oligonucleotide
  Antisense strand to SEQ ID NO: 1058240
ccuaacacagauaauaugu

SEQ ID NO: 1058242 - RNA, 19 nt, Artificial Sequence
  Description of Artificial Sequence: Synthetic oligonucleotide
  Sense strand starting at position 551 of SEQ ID NO: 915157
cuguguuaggcugaagaau

SEQ ID NO: 1058243 - RNA, 19 nt, Artificial Sequence
  Description of Artificial Sequence: Synthetic oligonucleotide
  Antisense strand to SEQ ID NO: 1058242
auucuucagccuaacacag

SEQ ID NO: 1058244 - RNA, 19 nt, Artificial Sequence
  Description of Artificial Sequence: Synthetic oligonucleotide
  Sense strand starting at position 592 of SEQ ID NO: 915157
gaggauuuguaugaauauu

SEQ ID NO: 1058245 - RNA, 19 nt, Artificial Sequence
  Description of Artificial Sequence: Synthetic oligonucleotide
  Antisense strand to SEQ ID NO: 1058244
aauauucauacaaauccuc

SEQ ID NO: 1058246 - RNA, 19 nt, Artificial Sequence
  Description of Artificial Sequence: Synthetic oligonucleotide
  Sense strand starting at position 659 of SEQ ID NO: 915157
uaggacuaaguuuguuaau

SEQ ID NO: 1058247 - RNA, 19 nt, Artificial Sequence
  Description of Artificial Sequence: Synthetic oligonucleotide
  Antisense strand to SEQ ID NO: 1058246
auuaacaaacuuaguccua

SEQ ID NO: 1058248 - RNA, 19 nt, Artificial Sequence
  Description of Artificial Sequence: Synthetic oligonucleotide
  Sense strand starting at position 660 of SEQ ID NO: 915157
aggacuaaguuuguuaauu

SEQ ID NO: 1058249 - RNA, 19 nt, Artificial Sequence
  Description of Artificial Sequence: Synthetic oligonucleotide
  Antisense strand to SEQ ID NO: 1058248
aauuaacaaacuuaguccu

SEQ ID NO: 1058250 - RNA, 19 nt, Artificial Sequence
  Description of Artificial Sequence: Synthetic oligonucleotide
  Sense strand starting at position 661 of SEQ ID NO: 915157
ggacuaaguuuguuaauua

SEQ ID NO: 1058251 - RNA, 19 nt, Artificial Sequence
  Description of Artificial Sequence: Synthetic oligonucleotide
  Antisense strand to SEQ ID NO: 1058250
uaauuaacaaacuuagucc

SEQ ID NO: 1058252 - RNA, 19 nt, Artificial Sequence
  Description of Artificial Sequence: Synthetic oligonucleotide
  Sense strand starting at position 2017 of SEQ ID NO: 915157
gagacaaagcgaugauguu

SEQ ID NO: 1058253 - RNA, 19 nt, Artificial Sequence
  Description of Artificial Sequence: Synthetic oligonucleotide
  Antisense strand to SEQ ID NO: 1058252
aacaucaucgcuuugucuc

SEQ ID NO: 1058254 - RNA, 19 nt, Artificial Sequence
  Description of Artificial Sequence: Synthetic oligonucleotide
  Sense strand starting at position 2024 of SEQ ID NO: 915157
agcgaugauguugacauaa

SEQ ID NO: 1058255 - RNA, 19 nt, Artificial Sequence
  Description of Artificial Sequence: Synthetic oligonucleotide
  Antisense strand to SEQ ID NO: 1058254
uuaugucaacaucaucgcu

SEQ ID NO: 1058256 - RNA, 19 nt, Artificial Sequence
  Description of Artificial Sequence: Synthetic oligonucleotide
  Sense strand starting at position 2166 of SEQ ID NO: 915157
ggaagacauugacaaauac

SEQ ID NO: 1058257 - RNA, 19 nt, Artificial Sequence
  Description of Artificial Sequence: Synthetic oligonucleotide
  Antisense strand to SEQ ID NO: 1058256
guauuugucaaugucuucc

SEQ ID NO: 1058258 - RNA, 19 nt, Artificial Sequence
  Description of Artificial Sequence: Synthetic oligonucleotide
  Sense strand starting at position 2386 of SEQ ID NO: 915157
acaaauuaaugagagacuu

SEQ ID NO: 1058259 - RNA, 19 nt, Artificial Sequence
  Description of Artificial Sequence: Synthetic oligonucleotide
  Antisense strand to SEQ ID NO: 1058258
aagucucucauuaauuugu

SEQ ID NO: 1058260 - RNA, 19 nt, Artificial Sequence
  Description of Artificial Sequence: Synthetic oligonucleotide
  Sense strand starting at position 2473 of SEQ ID NO: 915157
guaauugacugccuccaga

SEQ ID NO: 1058261 - RNA, 19 nt, Artificial Sequence
  Description of Artificial Sequence: Synthetic oligonucleotide
  Antisense strand to SEQ ID NO: 1058260
ucuggaggcagucaauuac

SEQ ID NO: 1058262 - RNA, 19 nt, Artificial Sequence
  Description of Artificial Sequence: Synthetic oligonucleotide
  Sense strand starting at position 2511 of SEQ ID NO: 915157
uuggcagaauuacugcaaa

SEQ ID NO: 1058263 - RNA, 19 nt, Artificial Sequence
  Description of Artificial Sequence: Synthetic oligonucleotide
  Antisense strand to SEQ ID NO: 1058262
uuugcaguaauucugccaa

SEQ ID NO: 1058264 - RNA, 19 nt, Artificial Sequence
  Description of Artificial Sequence: Synthetic oligonucleotide
  Sense strand starting at position 2643 of SEQ ID NO: 915157
gggagagcauuguuccaaa

SEQ ID NO: 1058265 - RNA, 19 nt, Artificial Sequence
  Description of Artificial Sequence: Synthetic oligonucleotide
  Antisense strand to SEQ ID NO: 1058264
uuuggaacaaugcucuccc

SEQ ID NO: 1058266 - RNA, 19 nt, Artificial Sequence
  Description of Artificial Sequence: Synthetic oligonucleotide
  Sense strand starting at position 2673 of SEQ ID NO: 915157
auaccaucacaugguuaga

SEQ ID NO: 1058267 - RNA, 19 nt, Artificial Sequence
  Description of Artificial Sequence: Synthetic oligonucleotide
  Antisense strand to SEQ ID NO: 1058266
ucuaaccaugugaugguau

SEQ ID NO: 1058268 - RNA, 19 nt, Artificial Sequence
  Description of Artificial Sequence: Synthetic oligonucleotide
  Sense strand starting at position 2816 of SEQ ID NO: 915157
ucguaaagucgcucuuguu

SEQ ID NO: 1058269 - RNA, 19 nt, Artificial Sequence
  Description of Artificial Sequence: Synthetic oligonucleotide
  Antisense strand to SEQ ID NO: 1058268
aacaagagcgacuuuacga

SEQ ID NO: 1058270 - RNA, 19 nt, Artificial Sequence
  Description of Artificial Sequence: Synthetic oligonucleotide
  Sense strand starting at position 2823 of SEQ ID NO: 915157
gucgcucuuguugugcaaa

SEQ ID NO: 1058271 - RNA, 19 nt, Artificial Sequence
  Description of Artificial Sequence: Synthetic oligonucleotide
  Antisense strand to SEQ ID NO: 1058270
uuugcacaacaagagcgac

SEQ ID NO: 1058272 - RNA, 19 nt, Artificial Sequence
  Description of Artificial Sequence: Synthetic oligonucleotide
  Sense strand starting at position 2847 of SEQ ID NO: 915157
ucaaacagucccuguugau

SEQ ID NO: 1058273 - RNA, 19 nt, Artificial Sequence
  Description of Artificial Sequence: Synthetic oligonucleotide
  Antisense strand to SEQ ID NO: 1058272
aucaacagggacuguuuga

SEQ ID NO: 1058274 - RNA, 19 nt, Artificial Sequence
  Description of Artificial Sequence: Synthetic oligonucleotide
  Sense strand starting at position 3333 of SEQ ID NO: 915157
gggacugcccacugauauu

SEQ ID NO: 1058275 - RNA, 19 nt, Artificial Sequence
  Description of Artificial Sequence: Synthetic oligonucleotide
  Antisense strand to SEQ ID NO: 1058274
aauaucagugggcaguccc

SEQ ID NO: 1058276 - RNA, 19 nt, Artificial Sequence
  Description of Artificial Sequence: Synthetic oligonucleotide
  Sense strand starting at position 3383 of SEQ ID NO: 915157
cccuuaauggcuuguauuu

SEQ ID NO: 1058277 - RNA, 19 nt, Artificial Sequence
  Description of Artificial Sequence: Synthetic oligonucleotide
  Antisense strand to SEQ ID NO: 1058276
aaauacaagccauuaaggg

SEQ ID NO: 1058278 - RNA, 19 nt, Artificial Sequence
  Description of Artificial Sequence: Synthetic oligonucleotide
  Sense strand starting at position 3446 of SEQ ID NO: 915157
agccauuucucugucacag

SEQ ID NO: 1058279 - RNA, 19 nt, Artificial Sequence
  Description of Artificial Sequence: Synthetic oligonucleotide
  Antisense strand to SEQ ID NO: 1058278
cugugacagagaaauggcu

SEQ ID NO: 1058280 - RNA, 19 nt, Artificial Sequence
  Description of Artificial Sequence: Synthetic oligonucleotide
  Sense strand starting at position 3454 of SEQ ID NO: 915157
cucugucacagugauugua

SEQ ID NO: 1058281 - RNA, 19 nt, Artificial Sequence
  Description of Artificial Sequence: Synthetic oligonucleotide
  Antisense strand to SEQ ID NO: 1058280
uacaaucacugugacagag

SEQ ID NO: 1058282 - RNA, 19 nt, Artificial Sequence
  Description of Artificial Sequence: Synthetic oligonucleotide
  Sense strand starting at position 3570 of SEQ ID NO: 915157
gcuaauaggucacccucau

SEQ ID NO: 1058283 - RNA, 19 nt, Artificial Sequence
  Description of Artificial Sequence: Synthetic oligonucleotide
  Antisense strand to SEQ ID NO: 1058282
augagggugaccuauuagc

SEQ ID NO: 1058284 - RNA, 19 nt, Artificial Sequence
  Description of Artificial Sequence: Synthetic oligonucleotide
  Sense strand starting at position 3674 of SEQ ID NO: 915157
cucucagaguucuuucuga

SEQ ID NO: 1058285 - RNA, 19 nt, Artificial Sequence
  Description of Artificial Sequence: Synthetic oligonucleotide
  Antisense strand to SEQ ID NO: 1058284
ucagaaagaacucugagag

SEQ ID NO: 1058286 - RNA, 19 nt, Artificial Sequence
  Description of Artificial Sequence: Synthetic oligonucleotide
  Sense strand starting at position 3682 of SEQ ID NO: 915157
guucuuucugaugggaaug

SEQ ID NO: 1058287 - RNA, 19 nt, Artificial Sequence
  Description of Artificial Sequence: Synthetic oligonucleotide
  Antisense strand to SEQ ID NO: 1058286
cauucccaucagaaagaac

SEQ ID NO: 1058288 - RNA, 19 nt, Artificial Sequence
  Description of Artificial Sequence: Synthetic oligonucleotide
  Sense strand starting at position 3683 of SEQ ID NO: 915157
uucuuucugaugggaauga

SEQ ID NO: 1058289 - RNA, 19 nt, Artificial Sequence
  Description of Artificial Sequence: Synthetic oligonucleotide
  Antisense strand to SEQ ID NO: 1058288
ucauucccaucagaaagaa

SEQ ID NO: 1058290 - RNA, 19 nt, Artificial Sequence
  Description of Artificial Sequence: Synthetic oligonucleotide
  Sense strand starting at position 3833 of SEQ ID NO: 915157
uaugguuuccagcaaggca

SEQ ID NO: 1058291 - RNA, 19 nt, Artificial Sequence
  Description of Artificial Sequence: Synthetic oligonucleotide
  Antisense strand to SEQ ID NO: 1058290
ugccuugcuggaaaccaua

SEQ ID NO: 1058292 - RNA, 19 nt, Artificial Sequence
  Description of Artificial Sequence: Synthetic oligonucleotide
  Sense strand starting at position 3864 of SEQ ID NO: 915157
ccguguuguacugaauaug

SEQ ID NO: 1058293 - RNA, 19 nt, Artificial Sequence
  Description of Artificial Sequence: Synthetic oligonucleotide
  Antisense strand to SEQ ID NO: 1058292
cauauucaguacaacacgg

SEQ ID NO: 1058294 - RNA, 19 nt, Artificial Sequence
  Description of Artificial Sequence: Synthetic oligonucleotide
  Sense strand starting at position 3958 of SEQ ID NO: 915157
ugauguuugucucuuauuu

SEQ ID NO: 1058295 - RNA, 19 nt, Artificial Sequence
  Description of Artificial Sequence: Synthetic oligonucleotide
  Antisense strand to SEQ ID NO: 1058294
aaauaagagacaaacauca

SEQ ID NO: 1058296 - RNA, 19 nt, Artificial Sequence
  Description of Artificial Sequence: Synthetic oligonucleotide
  Sense strand starting at position 167 of SEQ ID NO: 915158
agauaaacauccgugagca

SEQ ID NO: 1058297 - RNA, 19 nt, Artificial Sequence
  Description of Artificial Sequence: Synthetic oligonucleotide
  Antisense strand to SEQ ID NO: 1058296
ugcucacggauguuuaucu

SEQ ID NO: 1058298 - RNA, 19 nt, Artificial Sequence
  Description of Artificial Sequence: Synthetic oligonucleotide
  Sense strand starting at position 168 of SEQ ID NO: 915158
gauaaacauccgugagcaa

SEQ ID NO: 1058299 - RNA, 19 nt, Artificial Sequence
  Description of Artificial Sequence: Synthetic oligonucleotide
  Antisense strand to SEQ ID NO: 1058298
uugcucacggauguuuauc

SEQ ID NO: 1058300 - RNA, 19 nt, Artificial Sequence
  Description of Artificial Sequence: Synthetic oligonucleotide
  Sense strand starting at position 179 of SEQ ID NO: 915158
gugagcaagccuuauagac

SEQ ID NO: 1058301 - RNA, 19 nt, Artificial Sequence
  Description of Artificial Sequence: Synthetic oligonucleotide
  Antisense strand to SEQ ID NO: 1058300
gucuauaaggcuugcucac

SEQ ID NO: 1058302 - RNA, 19 nt, Artificial Sequence
  Description of Artificial Sequence: Synthetic oligonucleotide
  Sense strand starting at position 205 of SEQ ID NO: 915158
gucuaugugccuucugcau

SEQ ID NO: 1058303 - RNA, 19 nt, Artificial Sequence
  Description of Artificial Sequence: Synthetic oligonucleotide
  Antisense strand to SEQ ID NO: 1058302
augcagaaggcacauagac

SEQ ID NO: 1058304 - RNA, 19 nt, Artificial Sequence
  Description of Artificial Sequence: Synthetic oligonucleotide
  Sense strand starting at position 257 of SEQ ID NO: 915158
cugcuuucugcccagaaug

SEQ ID NO: 1058305 - RNA, 19 nt, Artificial Sequence
  Description of Artificial Sequence: Synthetic oligonucleotide
  Antisense strand to SEQ ID NO: 1058304
cauucugggcagaaagcag

SEQ ID NO: 1058306 - RNA, 19 nt, Artificial Sequence
  Description of Artificial Sequence: Synthetic oligonucleotide
  Sense strand starting at position 315 of SEQ ID NO: 915158
aucacuaagcucuggaaua

SEQ ID NO: 1058307 - RNA, 19 nt, Artificial Sequence
  Description of Artificial Sequence: Synthetic oligonucleotide
  Antisense strand to SEQ ID NO: 1058306
uauuccagagcuuagugau

SEQ ID NO: 1058308 - RNA, 19 nt, Artificial Sequence
  Description of Artificial Sequence: Synthetic oligonucleotide
  Sense strand starting at position 317 of SEQ ID NO: 915158
cacuaagcucuggaauagu

SEQ ID NO: 1058309 - RNA, 19 nt, Artificial Sequence
  Description of Artificial Sequence: Synthetic oligonucleotide
  Antisense strand to SEQ ID NO: 1058308
acuauuccagagcuuagug

SEQ ID NO: 1058310 - RNA, 19 nt, Artificial Sequence
  Description of Artificial Sequence: Synthetic oligonucleotide
  Sense strand starting at position 405 of SEQ ID NO: 915158
guaacacucccauguaucu

SEQ ID NO: 1058311 - RNA, 19 nt, Artificial Sequence
  Description of Artificial Sequence: Synthetic oligonucleotide
  Antisense strand to SEQ ID NO: 1058310
agauacaugggaguguuac

SEQ ID NO: 1058312 - RNA, 19 nt, Artificial Sequence
  Description of Artificial Sequence: Synthetic oligonucleotide
  Sense strand starting at position 414 of SEQ ID NO: 915158
ccauguaucuaacucagua

SEQ ID NO: 1058313 - RNA, 19 nt, Artificial Sequence
  Description of Artificial Sequence: Synthetic oligonucleotide
  Antisense strand to SEQ ID NO: 1058312
uacugaguuagauacaugg

SEQ ID NO: 1058314 - RNA, 19 nt, Artificial Sequence
  Description of Artificial Sequence: Synthetic oligonucleotide
  Sense strand starting at position 427 of SEQ ID NO: 915158
ucaguauuugcuggcaaau

SEQ ID NO: 1058315 - RNA, 19 nt, Artificial Sequence
  Description of Artificial Sequence: Synthetic oligonucleotide
  Antisense strand to SEQ ID NO: 1058314
auuugccagcaaauacuga

SEQ ID NO: 1058316 - RNA, 19 nt, Artificial Sequence
  Description of Artificial Sequence: Synthetic oligonucleotide
  Sense strand starting at position 612 of SEQ ID NO: 915158
gacauuguagcaugaacaa

SEQ ID NO: 1058317 - RNA, 19 nt, Artificial Sequence
  Description of Artificial Sequence: Synthetic oligonucleotide
  Antisense strand to SEQ ID NO: 1058316
uuguucaugcuacaauguc

SEQ ID NO: 1058318 - RNA, 19 nt, Artificial Sequence
  Description of Artificial Sequence: Synthetic oligonucleotide
  Sense strand starting at position 665 of SEQ ID NO: 915158
gagauugauuucugaguuu

SEQ ID NO: 1058319 - RNA, 19 nt, Artificial Sequence
  Description of Artificial Sequence: Synthetic oligonucleotide
  Antisense strand to SEQ ID NO: 1058318
aaacucagaaaucaaucuc

SEQ ID NO: 1058320 - RNA, 19 nt, Artificial Sequence
  Description of Artificial Sequence: Synthetic oligonucleotide
  Sense strand starting at position 860 of SEQ ID NO: 915158
aggccauaguugucacaau

SEQ ID NO: 1058321 - RNA, 19 nt, Artificial Sequence
  Description of Artificial Sequence: Synthetic oligonucleotide
  Antisense strand to SEQ ID NO: 1058320
auugugacaacuauggccu

SEQ ID NO: 1058322 - RNA, 19 nt, Artificial Sequence
  Description of Artificial Sequence: Synthetic oligonucleotide
  Sense strand starting at position 2001 of SEQ ID NO: 915158
uagugacuuugaguaauuc

SEQ ID NO: 1058323 - RNA, 19 nt, Artificial Sequence
  Description of Artificial Sequence: Synthetic oligonucleotide
  Antisense strand to SEQ ID NO: 1058322
gaauuacucaaagucacua

SEQ ID NO: 1058324 - RNA, 19 nt, Artificial Sequence
  Description of Artificial Sequence: Synthetic oligonucleotide
  Sense strand starting at position 2018 of SEQ ID NO: 915158
ucagcaaguagugaggaau

SEQ ID NO: 1058325 - RNA, 19 nt, Artificial Sequence
  Description of Artificial Sequence: Synthetic oligonucleotide
  Antisense strand to SEQ ID NO: 1058324
auuccucacuacuugcuga

SEQ ID NO: 1058326 - RNA, 19 nt, Artificial Sequence
  Description of Artificial Sequence: Synthetic oligonucleotide
  Sense strand starting at position 2021 of SEQ ID NO: 915158
gcaaguagugaggaauggu

SEQ ID NO: 1058327 - RNA, 19 nt, Artificial Sequence
  Description of Artificial Sequence: Synthetic oligonucleotide
  Antisense strand to SEQ ID NO: 1058326
accauuccucacuacuugc

SEQ ID NO: 1058328 - RNA, 19 nt, Artificial Sequence
  Description of Artificial Sequence: Synthetic oligonucleotide
  Sense strand starting at position 2366 of SEQ ID NO: 915158
auggauuuguaugaguuuc

SEQ ID NO: 1058329 - RNA, 19 nt, Artificial Sequence
  Description of Artificial Sequence: Synthetic oligonucleotide
  Antisense strand to SEQ ID NO: 1058328
gaaacucauacaaauccau

SEQ ID NO: 1058330 - RNA, 19 nt, Artificial Sequence
  Description of Artificial Sequence: Synthetic oligonucleotide
  Sense strand starting at position 2376 of SEQ ID NO: 915158
augaguuucuggccaaugu

SEQ ID NO: 1058331 - RNA, 19 nt, Artificial Sequence
  Description of Artificial Sequence: Synthetic oligonucleotide
  Antisense strand to SEQ ID NO: 1058330
acauuggccagaaacucau

SEQ ID NO: 1058332 - RNA, 19 nt, Artificial Sequence
  Description of Artificial Sequence: Synthetic oligonucleotide
  Sense strand starting at position 2377 of SEQ ID NO: 915158
ugaguuucuggccaauguu

SEQ ID NO: 1058333 - RNA, 19 nt, Artificial Sequence
  Description of Artificial Sequence: Synthetic oligonucleotide
  Antisense strand to SEQ ID NO: 1058332
aacauuggccagaaacuca

SEQ ID NO: 1058334 - RNA, 19 nt, Artificial Sequence
  Description of Artificial Sequence: Synthetic oligonucleotide
  Sense strand starting at position 2387 of SEQ ID NO: 915158
gccaauguucuugaguuaa

SEQ ID NO: 1058335 - RNA, 19 nt, Artificial Sequence
  Description of Artificial Sequence: Synthetic oligonucleotide
  Antisense strand to SEQ ID NO: 1058334
uuaacucaagaacauuggc

SEQ ID NO: 1058336 - RNA, 19 nt, Artificial Sequence
  Description of Artificial Sequence: Synthetic oligonucleotide
  Sense strand starting at position 2397 of SEQ ID NO: 915158
uugaguuaaucaguuauug

SEQ ID NO: 1058337 - RNA, 19 nt, Artificial Sequence
  Description of Artificial Sequence: Synthetic oligonucleotide
  Antisense strand to SEQ ID NO: 1058336
caauaacugauuaacucaa

SEQ ID NO: 1058338 - RNA, 19 nt, Artificial Sequence
  Description of Artificial Sequence: Synthetic oligonucleotide
  Sense strand starting at position 2843 of SEQ ID NO: 915158
acaauauaacuacgaaagu

SEQ ID NO: 1058339 - RNA, 19 nt, Artificial Sequence
  Description of Artificial Sequence: Synthetic oligonucleotide
  Antisense strand to SEQ ID NO: 1058338
acuuucguaguuauauugu

SEQ ID NO: 1058340 - RNA, 19 nt, Artificial Sequence
  Description of Artificial Sequence: Synthetic oligonucleotide
  Sense strand starting at position 2990 of SEQ ID NO: 915158
gauuucuguuuccaaacga

SEQ ID NO: 1058341 - RNA, 19 nt, Artificial Sequence
  Description of Artificial Sequence: Synthetic oligonucleotide
  Antisense strand to SEQ ID NO: 1058340
ucguuuggaaacagaaauc

SEQ ID NO: 1058342 - RNA, 19 nt, Artificial Sequence
  Description of Artificial Sequence: Synthetic oligonucleotide
  Sense strand starting at position 3079 of SEQ ID NO: 915158
gcaccuacuucugugaacu

SEQ ID NO: 1058343 - RNA, 19 nt, Artificial Sequence
  Description of Artificial Sequence: Synthetic oligonucleotide
  Antisense strand to SEQ ID NO: 1058342
aguucacagaaguaggugc

SEQ ID NO: 1058344 - RNA, 19 nt, Artificial Sequence
  Description of Artificial Sequence: Synthetic oligonucleotide
  Sense strand starting at position 3267 of SEQ ID NO: 915158
uguaucauacuguguugau

SEQ ID NO: 1058345 - RNA, 19 nt, Artificial Sequence
  Description of Artificial Sequence: Synthetic oligonucleotide
  Antisense strand to SEQ ID NO: 1058344
aucaacacaguaugauaca

SEQ ID NO: 1058346 - RNA, 19 nt, Artificial Sequence
  Description of Artificial Sequence: Synthetic oligonucleotide
  Sense strand starting at position 3268 of SEQ ID NO: 915158
guaucauacuguguugaug

SEQ ID NO: 1058347 - RNA, 19 nt, Artificial Sequence
  Description of Artificial Sequence: Synthetic oligonucleotide
  Antisense strand to SEQ ID NO: 1058346
caucaacacaguaugauac

SEQ ID NO: 1058348 - RNA, 19 nt, Artificial Sequence
  Description of Artificial Sequence: Synthetic oligonucleotide
  Sense strand starting at position 3299 of SEQ ID NO: 915158
gcagcugagcauuaugaga

SEQ ID NO: 1058349 - RNA, 19 nt, Artificial Sequence
  Description of Artificial Sequence: Synthetic oligonucleotide
  Antisense strand to SEQ ID NO: 1058348
ucucauaaugcucagcugc

SEQ ID NO: 1058350 - RNA, 19 nt, Artificial Sequence
  Description of Artificial Sequence: Synthetic oligonucleotide
  Sense strand starting at position 3330 of SEQ ID NO: 915158
ucuguuaccuaggucuuua

SEQ ID NO: 1058351 - RNA, 19 nt, Artificial Sequence
  Description of Artificial Sequence: Synthetic oligonucleotide
  Antisense strand to SEQ ID NO: 1058350
uaaagaccuagguaacaga

SEQ ID NO: 1058352 - RNA, 19 nt, Artificial Sequence
  Description of Artificial Sequence: Synthetic oligonucleotide
  Sense strand starting at position 3517 of SEQ ID NO: 915158
agauaagacuuagccucau

SEQ ID NO: 1058353 - RNA, 19 nt, Artificial Sequence
  Description of Artificial Sequence: Synthetic oligonucleotide
  Antisense strand to SEQ ID NO: 1058352
augaggcuaagucuuaucu

SEQ ID NO: 1058354 - RNA, 19 nt, Artificial Sequence
  Description of Artificial Sequence: Synthetic oligonucleotide
  Sense strand starting at position 3528 of SEQ ID NO: 915158
agccucauccuagaguaaa

SEQ ID NO: 1058355 - RNA, 19 nt, Artificial Sequence
  Description of Artificial Sequence: Synthetic oligonucleotide
  Antisense strand to SEQ ID NO: 1058354
uuuacucuaggaugaggcu

SEQ ID NO: 1058356 - RNA, 19 nt, Artificial Sequence
  Description of Artificial Sequence: Synthetic oligonucleotide
  Sense strand starting at position 3552 of SEQ ID NO: 915158
uuccaaauguggucucaaa

SEQ ID NO: 1058357 - RNA, 19 nt, Artificial Sequence
  Description of Artificial Sequence: Synthetic oligonucleotide
  Antisense strand to SEQ ID NO: 1058356
uuugagaccacauuuggaa

SEQ ID NO: 1058358 - RNA, 19 nt, Artificial Sequence
  Description of Artificial Sequence: Synthetic oligonucleotide
  Sense strand starting at position 3681 of SEQ ID NO: 915158
uaccgugaagacugaaagu

SEQ ID NO: 1058359 - RNA, 19 nt, Artificial Sequence
  Description of Artificial Sequence: Synthetic oligonucleotide
  Antisense strand to SEQ ID NO: 1058358
acuuucagucuucacggua

SEQ ID NO: 1058360 - RNA, 19 nt, Artificial Sequence
  Description of Artificial Sequence: Synthetic oligonucleotide
  Sense strand starting at position 3690 of SEQ ID NO: 915158
gacugaaaguucuuagaug

SEQ ID NO: 1058361 - RNA, 19 nt, Artificial Sequence
  Description of Artificial Sequence: Synthetic oligonucleotide
  Antisense strand to SEQ ID NO: 1058360
caucuaagaacuuucaguc

SEQ ID NO: 1058362 - RNA, 19 nt, Artificial Sequence
  Description of Artificial Sequence: Synthetic oligonucleotide
  Sense strand starting at position 3842 of SEQ ID NO: 915158
cuccaucuucuaugaguca

SEQ ID NO: 1058363 - RNA, 19 nt, Artificial Sequence
  Description of Artificial Sequence: Synthetic oligonucleotide
  Antisense strand to SEQ ID NO: 1058362
ugacucauagaagauggag

SEQ ID NO: 1058364 - RNA, 19 nt, Artificial Sequence
  Description of Artificial Sequence: Synthetic oligonucleotide
  Sense strand starting at position 3872 of SEQ ID NO: 915158
gguacucuucucuagccua

SEQ ID NO: 1058365 - RNA, 19 nt, Artificial Sequence
  Description of Artificial Sequence: Synthetic oligonucleotide
  Antisense strand to SEQ ID NO: 1058364
uaggcuagagaagaguacc

SEQ ID NO: 1058366 - RNA, 19 nt, Artificial Sequence
  Description of Artificial Sequence: Synthetic oligonucleotide
  Sense strand starting at position 3884 of SEQ ID NO: 915158
uagccuaggcaaugugaau

SEQ ID NO: 1058367 - RNA, 19 nt, Artificial Sequence
  Description of Artificial Sequence: Synthetic oligonucleotide
  Antisense strand to SEQ ID NO: 1058366
auucacauugccuaggcua

SEQ ID NO: 1058368 - RNA, 19 nt, Artificial Sequence
  Description of Artificial Sequence: Synthetic oligonucleotide
  Sense strand starting at position 3890 of SEQ ID NO: 915158
aggcaaugugaaugaagcu

SEQ ID NO: 1058369 - RNA, 19 nt, Artificial Sequence
  Description of Artificial Sequence: Synthetic oligonucleotide
  Antisense strand to SEQ ID NO: 1058368
agcuucauucacauugccu

SEQ ID NO: 1058370 - RNA, 19 nt, Artificial Sequence
  Description of Artificial Sequence: Synthetic oligonucleotide
  Sense strand starting at position 3891 of SEQ ID NO: 915158
ggcaaugugaaugaagcuu

SEQ ID NO: 1058371 - RNA, 19 nt, Artificial Sequence
  Description of Artificial Sequence: Synthetic oligonucleotide
  Antisense strand to SEQ ID NO: 1058370
aagcuucauucacauugcc

SEQ ID NO: 1058372 - RNA, 19 nt, Artificial Sequence
  Description of Artificial Sequence: Synthetic oligonucleotide
  Sense strand starting at position 3914 of SEQ ID NO: 915158
uugagacccucgucuuaaa

SEQ ID NO: 1058373 - RNA, 19 nt, Artificial Sequence
  Description of Artificial Sequence: Synthetic oligonucleotide
  Antisense strand to SEQ ID NO: 1058372
uuuaagacgagggucucaa

SEQ ID NO: 1058374 - RNA, 19 nt, Artificial Sequence
  Description of Artificial Sequence: Synthetic oligonucleotide
  Sense strand starting at position 3972 of SEQ ID NO: 915158
agaguauguguuuagagca

SEQ ID NO: 1058375 - RNA, 19 nt, Artificial Sequence
  Description of Artificial Sequence: Synthetic oligonucleotide
  Antisense strand to SEQ ID NO: 1058374
ugcucuaaacacauacucu

SEQ ID NO: 1058376 - RNA, 19 nt, Artificial Sequence
  Description of Artificial Sequence: Synthetic oligonucleotide
  Sense strand starting at position 60 of SEQ ID NO: 915159
gugcuuuaccauuggaaag

SEQ ID NO: 1058377 - RNA, 19 nt, Artificial Sequence
  Description of Artificial Sequence: Synthetic oligonucleotide
  Antisense strand to SEQ ID NO: 1058376
cuuuccaaugguaaagcac

SEQ ID NO: 1058378 - RNA, 19 nt, Artificial Sequence
  Description of Artificial Sequence: Synthetic oligonucleotide
  Sense strand starting at position 79 of SEQ ID NO: 915159
ggaggagcuaucugugaaa

SEQ ID NO: 1058379 - RNA, 19 nt, Artificial Sequence
  Description of Artificial Sequence: Synthetic oligonucleotide
  Antisense strand to SEQ ID NO: 1058378
uuucacagauagcuccucc

SEQ ID NO: 1058380 - RNA, 19 nt, Artificial Sequence
  Description of Artificial Sequence: Synthetic oligonucleotide
  Sense strand starting at position 195 of SEQ ID NO: 915159
ccuccugagcaaugggauu

SEQ ID NO: 1058381 - RNA, 19 nt, Artificial Sequence
  Description of Artificial Sequence: Synthetic oligonucleotide
  Antisense strand to SEQ ID NO: 1058380
aaucccauugcucaggagg

SEQ ID NO: 1058382 - RNA, 19 nt, Artificial Sequence
  Description of Artificial Sequence: Synthetic oligonucleotide
  Sense strand starting at position 201 of SEQ ID NO: 915159
gagcaaugggauugugacu

SEQ ID NO: 1058383 - RNA, 19 nt, Artificial Sequence
  Description of Artificial Sequence: Synthetic oligonucleotide
  Antisense strand to SEQ ID NO: 1058382
agucacaaucccauugcuc

SEQ ID NO: 1058384 - RNA, 19 nt, Artificial Sequence
  Description of Artificial Sequence: Synthetic oligonucleotide
  Sense strand starting at position 234 of SEQ ID NO: 915159
ugaguuuccuuggcugaag

SEQ ID NO: 1058385 - RNA, 19 nt, Artificial Sequence
  Description of Artificial Sequence: Synthetic oligonucleotide
  Antisense strand to SEQ ID NO: 1058384
cuucagccaaggaaacuca

SEQ ID NO: 1058386 - RNA, 19 nt, Artificial Sequence
  Description of Artificial Sequence: Synthetic oligonucleotide
  Sense strand starting at position 369 of SEQ ID NO: 915159
agucaaggauaggaucaaa

SEQ ID NO: 1058387 - RNA, 19 nt, Artificial Sequence
  Description of Artificial Sequence: Synthetic oligonucleotide
  Antisense strand to SEQ ID NO: 1058386
uuugauccuauccuugacu

SEQ ID NO: 1058388 - RNA, 19 nt, Artificial Sequence
  Description of Artificial Sequence: Synthetic oligonucleotide
  Sense strand starting at position 451 of SEQ ID NO: 915159
gcuugaaacagguguugag

SEQ ID NO: 1058389 - RNA, 19 nt, Artificial Sequence
  Description of Artificial Sequence: Synthetic oligonucleotide
  Antisense strand to SEQ ID NO: 1058388
cucaacaccuguuucaagc

SEQ ID NO: 1058390 - RNA, 19 nt, Artificial Sequence
  Description of Artificial Sequence: Synthetic oligonucleotide
  Sense strand starting at position 511 of SEQ ID NO: 915159
gucugaaaguuacugcuga

SEQ ID NO: 1058391 - RNA, 19 nt, Artificial Sequence
  Description of Artificial Sequence: Synthetic oligonucleotide
  Antisense strand to SEQ ID NO: 1058390
ucagcaguaacuuucagac

SEQ ID NO: 1058392 - RNA, 19 nt, Artificial Sequence
  Description of Artificial Sequence: Synthetic oligonucleotide
  Sense strand starting at position 519 of SEQ ID NO: 915159
guuacugcugaccaggaua

SEQ ID NO: 1058393 - RNA, 19 nt, Artificial Sequence
  Description of Artificial Sequence: Synthetic oligonucleotide
  Antisense strand to SEQ ID NO: 1058392
uauccuggucagcaguaac

SEQ ID NO: 1058394 - RNA, 19 nt, Artificial Sequence
  Description of Artificial Sequence: Synthetic oligonucleotide
  Sense strand starting at position 549 of SEQ ID NO: 915159
gaagaaacuuggccaggua

SEQ ID NO: 1058395 - RNA, 19 nt, Artificial Sequence
  Description of Artificial Sequence: Synthetic oligonucleotide
  Antisense strand to SEQ ID NO: 1058394
uaccuggccaaguuucuuc

SEQ ID NO: 1058396 - RNA, 19 nt, Artificial Sequence
  Description of Artificial Sequence: Synthetic oligonucleotide
  Sense strand starting at position 552 of SEQ ID NO: 915159
gaaacuuggccagguagau

SEQ ID NO: 1058397 - RNA, 19 nt, Artificial Sequence
  Description of Artificial Sequence: Synthetic oligonucleotide
  Antisense strand to SEQ ID NO: 1058396
aucuaccuggccaaguuuc

SEQ ID NO: 1058398 - RNA, 19 nt, Artificial Sequence
  Description of Artificial Sequence: Synthetic oligonucleotide
  Sense strand starting at position 607 of SEQ ID NO: 915159
uguauuuccggaggugagu

SEQ ID NO: 1058399 - RNA, 19 nt, Artificial Sequence
  Description of Artificial Sequence: Synthetic oligonucleotide
  Antisense strand to SEQ ID NO: 1058398
acucaccuccggaaauaca

SEQ ID NO: 1058400 - RNA, 19 nt, Artificial Sequence
  Description of Artificial Sequence: Synthetic oligonucleotide
  Sense strand starting at position 905 of SEQ ID NO: 915159
ucuuuaagagcaugcuaua

SEQ ID NO: 1058401 - RNA, 19 nt, Artificial Sequence
  Description of Artificial Sequence: Synthetic oligonucleotide
  Antisense strand to SEQ ID NO: 1058400
uauagcaugcucuuaaaga

SEQ ID NO: 1058402 - RNA, 19 nt, Artificial Sequence
  Description of Artificial Sequence: Synthetic oligonucleotide
  Sense strand starting at position 2057 of SEQ ID NO: 915159
caagcaguaccauggucau

SEQ ID NO: 1058403 - RNA, 19 nt, Artificial Sequence
  Description of Artificial Sequence: Synthetic oligonucleotide
  Antisense strand to SEQ ID NO: 1058402
augaccaugguacugcuug

SEQ ID NO: 1058404 - RNA, 19 nt, Artificial Sequence
  Description of Artificial Sequence: Synthetic oligonucleotide
  Sense strand starting at position 2260 of SEQ ID NO: 915159
uggcaauuuccuggccaua

SEQ ID NO: 1058405 - RNA, 19 nt, Artificial Sequence
  Description of Artificial Sequence: Synthetic oligonucleotide
  Antisense strand to SEQ ID NO: 1058404
uauggccaggaaauugcca

SEQ ID NO: 1058406 - RNA, 19 nt, Artificial Sequence
  Description of Artificial Sequence: Synthetic oligonucleotide
  Sense strand starting at position 2262 of SEQ ID NO: 915159
gcaauuuccuggccauauu

SEQ ID NO: 1058407 - RNA, 19 nt, Artificial Sequence
  Description of Artificial Sequence: Synthetic oligonucleotide
  Antisense strand to SEQ ID NO: 1058406
aauauggccaggaaauugc

SEQ ID NO: 1058408 - RNA, 19 nt, Artificial Sequence
  Description of Artificial Sequence: Synthetic oligonucleotide
  Sense strand starting at position 2452 of SEQ ID NO: 915159
auguuagacuucuccauau

SEQ ID NO: 1058409 - RNA, 19 nt, Artificial Sequence
  Description of Artificial Sequence: Synthetic oligonucleotide
  Antisense strand to SEQ ID NO: 1058408
auauggagaagucuaacau

SEQ ID NO: 1058410 - RNA, 19 nt, Artificial Sequence
  Description of Artificial Sequence: Synthetic oligonucleotide
  Sense strand starting at position 2454 of SEQ ID NO: 915159
guuagacuucuccauauca

SEQ ID NO: 1058411 - RNA, 19 nt, Artificial Sequence
  Description of Artificial Sequence: Synthetic oligonucleotide
  Antisense strand to SEQ ID NO: 1058410
ugauauggagaagucuaac

SEQ ID NO: 1058412 - RNA, 19 nt, Artificial Sequence
  Description of Artificial Sequence: Synthetic oligonucleotide
  Sense strand starting at position 2512 of SEQ ID NO: 915159
uaggguuucuguuuacuga

SEQ ID NO: 1058413 - RNA, 19 nt, Artificial Sequence
  Description of Artificial Sequence: Synthetic oligonucleotide
  Antisense strand to SEQ ID NO: 1058412
ucaguaaacagaaacccua

SEQ ID NO: 1058414 - RNA, 19 nt, Artificial Sequence
  Description of Artificial Sequence: Synthetic oligonucleotide
  Sense strand starting at position 2513 of SEQ ID NO: 915159
aggguuucuguuuacugaa

SEQ ID NO: 1058415 - RNA, 19 nt, Artificial Sequence
  Description of Artificial Sequence: Synthetic oligonucleotide
  Antisense strand to SEQ ID NO: 1058414
uucaguaaacagaaacccu

SEQ ID NO: 1058416 - RNA, 19 nt, Artificial Sequence
  Description of Artificial Sequence: Synthetic oligonucleotide
  Sense strand starting at position 2597 of SEQ ID NO: 915159
ggacuauuccagugacuca

SEQ ID NO: 1058417 - RNA, 19 nt, Artificial Sequence
  Description of Artificial Sequence: Synthetic oligonucleotide
  Antisense strand to SEQ ID NO: 1058416
ugagucacuggaauagucc

SEQ ID NO: 1058418 - RNA, 19 nt, Artificial Sequence
  Description of Artificial Sequence: Synthetic oligonucleotide
  Sense strand starting at position 2636 of SEQ ID NO: 915159
aguugacuacuauauagca

SEQ ID NO: 1058419 - RNA, 19 nt, Artificial Sequence
  Description of Artificial Sequence: Synthetic oligonucleotide
  Antisense strand to SEQ ID NO: 1058418
ugcuauauaguagucaacu

SEQ ID NO: 1058420 - RNA, 19 nt, Artificial Sequence
  Description of Artificial Sequence: Synthetic oligonucleotide
  Sense strand starting at position 2652 of SEQ ID NO: 915159
gcaagagagacguauacau

SEQ ID NO: 1058421 - RNA, 19 nt, Artificial Sequence
  Description of Artificial Sequence: Synthetic oligonucleotide
  Antisense strand to SEQ ID NO: 1058420
auguauacgucucucuugc

SEQ ID NO: 1058422 - RNA, 19 nt, Artificial Sequence
  Description of Artificial Sequence: Synthetic oligonucleotide
  Sense strand starting at position 2901 of SEQ ID NO: 915159
cuuaaucuuugucuaguua

SEQ ID NO: 1058423 - RNA, 19 nt, Artificial Sequence
  Description of Artificial Sequence: Synthetic oligonucleotide
  Antisense strand to SEQ ID NO: 1058422
uaacuagacaaagauuaag

SEQ ID NO: 1058424 - RNA, 19 nt, Artificial Sequence
  Description of Artificial Sequence: Synthetic oligonucleotide
  Sense strand starting at position 2985 of SEQ ID NO: 915159
ccaaguuuaguuugaauac

SEQ ID NO: 1058425 - RNA, 19 nt, Artificial Sequence
  Description of Artificial Sequence: Synthetic oligonucleotide
  Antisense strand to SEQ ID NO: 1058424
guauucaaacuaaacuugg

SEQ ID NO: 1058426 - RNA, 19 nt, Artificial Sequence
  Description of Artificial Sequence: Synthetic oligonucleotide
  Sense strand starting at position 3057 of SEQ ID NO: 915159
ccugcagcauugucaauuu

SEQ ID NO: 1058427 - RNA, 19 nt, Artificial Sequence
  Description of Artificial Sequence: Synthetic oligonucleotide
  Antisense strand to SEQ ID NO: 1058426
aaauugacaaugcugcagg

SEQ ID NO: 1058428 - RNA, 19 nt, Artificial Sequence
  Description of Artificial Sequence: Synthetic oligonucleotide
  Sense strand starting at position 3067 of SEQ ID NO: 915159
ugucaauuucuguauugcu

SEQ ID NO: 1058429 - RNA, 19 nt, Artificial Sequence
  Description of Artificial Sequence: Synthetic oligonucleotide
  Antisense strand to SEQ ID NO: 1058428
agcaauacagaaauugaca

SEQ ID NO: 1058430 - RNA, 19 nt, Artificial Sequence
  Description of Artificial Sequence: Synthetic oligonucleotide
  Sense strand starting at position 3092 of SEQ ID NO: 915159
augugaauuccuuguggac

SEQ ID NO: 1058431 - RNA, 19 nt, Artificial Sequence
  Description of Artificial Sequence: Synthetic oligonucleotide
  Antisense strand to SEQ ID NO: 1058430
guccacaaggaauucacau

SEQ ID NO: 1058432 - RNA, 19 nt, Artificial Sequence
  Description of Artificial Sequence: Synthetic oligonucleotide
  Sense strand starting at position 3107 of SEQ ID NO: 915159
ggacauaaaccaugacugu

SEQ ID NO: 1058433 - RNA, 19 nt, Artificial Sequence
  Description of Artificial Sequence: Synthetic oligonucleotide
  Antisense strand to SEQ ID NO: 1058432
acagucaugguuuaugucc

SEQ ID NO: 1058434 - RNA, 19 nt, Artificial Sequence
  Description of Artificial Sequence: Synthetic oligonucleotide
  Sense strand starting at position 3142 of SEQ ID NO: 915159
auauuagcucuagggauug

SEQ ID NO: 1058435 - RNA, 19 nt, Artificial Sequence
  Description of Artificial Sequence: Synthetic oligonucleotide
  Antisense strand to SEQ ID NO: 1058434
caaucccuagagcuaauau

SEQ ID NO: 1058436 - RNA, 19 nt, Artificial Sequence
  Description of Artificial Sequence: Synthetic oligonucleotide
  Sense strand starting at position 3147 of SEQ ID NO: 915159
agcucuagggauugacuuu

SEQ ID NO: 1058437 - RNA, 19 nt, Artificial Sequence
  Description of Artificial Sequence: Synthetic oligonucleotide
  Antisense strand to SEQ ID NO: 1058436
aaagucaaucccuagagcu

SEQ ID NO: 1058438 - RNA, 19 nt, Artificial Sequence
  Description of Artificial Sequence: Synthetic oligonucleotide
  Sense strand starting at position 3170 of SEQ ID NO: 915159
gccaccauaucauuggaau

SEQ ID NO: 1058439 - RNA, 19 nt, Artificial Sequence
  Description of Artificial Sequence: Synthetic oligonucleotide
  Antisense strand to SEQ ID NO: 1058438
auuccaaugauaugguggc

SEQ ID NO: 1058440 - RNA, 19 nt, Artificial Sequence
  Description of Artificial Sequence: Synthetic oligonucleotide
  Sense strand starting at position 3529 of SEQ ID NO: 915159
gaagguaagagugaugcau

SEQ ID NO: 1058441 - RNA, 19 nt, Artificial Sequence
  Description of Artificial Sequence: Synthetic oligonucleotide
  Antisense strand to SEQ ID NO: 1058440
augcaucacucuuaccuuc

SEQ ID NO: 1058442 - RNA, 19 nt, Artificial Sequence
  Description of Artificial Sequence: Synthetic oligonucleotide
  Sense strand starting at position 3550 of SEQ ID NO: 915159
uauauaggguagucagaga

SEQ ID NO: 1058443 - RNA, 19 nt, Artificial Sequence
  Description of Artificial Sequence: Synthetic oligonucleotide
  Antisense strand to SEQ ID NO: 1058442
ucucugacuacccuauaua

SEQ ID NO: 1058444 - RNA, 19 nt, Artificial Sequence
  Description of Artificial Sequence: Synthetic oligonucleotide
  Sense strand starting at position 3569 of SEQ ID NO: 915159
agaccucucugaguaggua

SEQ ID NO: 1058445 - RNA, 19 nt, Artificial Sequence
  Description of Artificial Sequence: Synthetic oligonucleotide
  Antisense strand to SEQ ID NO: 1058444
uaccuacucagagaggucu

SEQ ID NO: 1058446 - RNA, 19 nt, Artificial Sequence
  Description of Artificial Sequence: Synthetic oligonucleotide
  Sense strand starting at position 3570 of SEQ ID NO: 915159
gaccucucugaguagguaa

SEQ ID NO: 1058447 - RNA, 19 nt, Artificial Sequence
  Description of Artificial Sequence: Synthetic oligonucleotide
  Antisense strand to SEQ ID NO: 1058446
uuaccuacucagagagguc

SEQ ID NO: 1058448 - RNA, 19 nt, Artificial Sequence
  Description of Artificial Sequence: Synthetic oligonucleotide
  Sense strand starting at position 3572 of SEQ ID NO: 915159
ccucucugaguagguaauu

SEQ ID NO: 1058449 - RNA, 19 nt, Artificial Sequence
  Description of Artificial Sequence: Synthetic oligonucleotide
  Antisense strand to SEQ ID NO: 1058448
aauuaccuacucagagagg

SEQ ID NO: 1058450 - RNA, 19 nt, Artificial Sequence
  Description of Artificial Sequence: Synthetic oligonucleotide
  Sense strand starting at position 3668 of SEQ ID NO: 915159
gugaaaguuccugaagcag

SEQ ID NO: 1058451 - RNA, 19 nt, Artificial Sequence
  Description of Artificial Sequence: Synthetic oligonucleotide
  Antisense strand to SEQ ID NO: 1058450
cugcuucaggaacuuucac

SEQ ID NO: 1058452 - RNA, 19 nt, Artificial Sequence
  Description of Artificial Sequence: Synthetic oligonucleotide
  Sense strand starting at position 3868 of SEQ ID NO: 915159
agaggugcugcauggauau

SEQ ID NO: 1058453 - RNA, 19 nt, Artificial Sequence
  Description of Artificial Sequence: Synthetic oligonucleotide
  Antisense strand to SEQ ID NO: 1058452
auauccaugcagcaccucu

SEQ ID NO: 1058454 - RNA, 19 nt, Artificial Sequence
  Description of Artificial Sequence: Synthetic oligonucleotide
  Sense strand starting at position 3870 of SEQ ID NO: 915159
aggugcugcauggauauaa

SEQ ID NO: 1058455 - RNA, 19 nt, Artificial Sequence
  Description of Artificial Sequence: Synthetic oligonucleotide
  Antisense strand to SEQ ID NO: 1058454
uuauauccaugcagcaccu

SEQ ID NO: 1058456 - RNA, 19 nt, Artificial Sequence
  Description of Artificial Sequence: Synthetic oligonucleotide
  Sense strand starting at position 26 of SEQ ID NO: 915160
accgauauugcugggaaag

SEQ ID NO: 1058457 - RNA, 19 nt, Artificial Sequence
  Description of Artificial Sequence: Synthetic oligonucleotide
  Antisense strand to SEQ ID NO: 1058456
cuuucccagcaauaucggu

SEQ ID NO: 1058458 - RNA, 19 nt, Artificial Sequence
  Description of Artificial Sequence: Synthetic oligonucleotide
  Sense strand starting at position 37 of SEQ ID NO: 915160
ugggaaaguuuaucuuguu

SEQ ID NO: 1058459 - RNA, 19 nt, Artificial Sequence
  Description of Artificial Sequence: Synthetic oligonucleotide
  Antisense strand to SEQ ID NO: 1058458
aacaagauaaacuuuccca

SEQ ID NO: 1058460 - RNA, 19 nt, Artificial Sequence
  Description of Artificial Sequence: Synthetic oligonucleotide
  Sense strand starting at position 38 of SEQ ID NO: 915160
gggaaaguuuaucuuguuu

SEQ ID NO: 1058461 - RNA, 19 nt, Artificial Sequence
  Description of Artificial Sequence: Synthetic oligonucleotide
  Antisense strand to SEQ ID NO: 1058460
aaacaagauaaacuuuccc

SEQ ID NO: 1058462 - RNA, 19 nt, Artificial Sequence
  Description of Artificial Sequence: Synthetic oligonucleotide
  Sense strand starting at position 83 of SEQ ID NO: 915160
aggucauaucacuguacua

SEQ ID NO: 1058463 - RNA, 19 nt, Artificial Sequence
  Description of Artificial Sequence: Synthetic oligonucleotide
  Antisense strand to SEQ ID NO: 1058462
uaguacagugauaugaccu

SEQ ID NO: 1058464 - RNA, 19 nt, Artificial Sequence
  Description of Artificial Sequence: Synthetic oligonucleotide
  Sense strand starting at position 85 of SEQ ID NO: 915160
gucauaucacuguacuaga

SEQ ID NO: 1058465 - RNA, 19 nt, Artificial Sequence
  Description of Artificial Sequence: Synthetic oligonucleotide
  Antisense strand to SEQ ID NO: 1058464
ucuaguacagugauaugac

SEQ ID NO: 1058466 - RNA, 19 nt, Artificial Sequence
  Description of Artificial Sequence: Synthetic oligonucleotide
  Sense strand starting at position 99 of SEQ ID NO: 915160
cuagaauauuugcucguga

SEQ ID NO: 1058467 - RNA, 19 nt, Artificial Sequence
  Description of Artificial Sequence: Synthetic oligonucleotide
  Antisense strand to SEQ ID NO: 1058466
ucacgagcaaauauucuag

SEQ ID NO: 1058468 - RNA, 19 nt, Artificial Sequence
  Description of Artificial Sequence: Synthetic oligonucleotide
  Sense strand starting at position 134 of SEQ ID NO: 915160
aaggaaaucugccuguaag

SEQ ID NO: 1058469 - RNA, 19 nt, Artificial Sequence
  Description of Artificial Sequence: Synthetic oligonucleotide
  Antisense strand to SEQ ID NO: 1058468
cuuacaggcagauuuccuu

SEQ ID NO: 1058470 - RNA, 19 nt, Artificial Sequence
  Description of Artificial Sequence: Synthetic oligonucleotide
  Sense strand starting at position 135 of SEQ ID NO: 915160
aggaaaucugccuguaaga

SEQ ID NO: 1058471 - RNA, 19 nt, Artificial Sequence
  Description of Artificial Sequence: Synthetic oligonucleotide
  Antisense strand to SEQ ID NO: 1058470
ucuuacaggcagauuuccu

SEQ ID NO: 1058472 - RNA, 19 nt, Artificial Sequence
  Description of Artificial Sequence: Synthetic oligonucleotide
  Sense strand starting at position 315 of SEQ ID NO: 915160
agacuucuugcauauguuu

SEQ ID NO: 1058473 - RNA, 19 nt, Artificial Sequence
  Description of Artificial Sequence: Synthetic oligonucleotide
  Antisense strand to SEQ ID NO: 1058472
aaacauaugcaagaagucu

SEQ ID NO: 1058474 - RNA, 19 nt, Artificial Sequence
  Description of Artificial Sequence: Synthetic oligonucleotide
  Sense strand starting at position 373 of SEQ ID NO: 915160
uuggguguuagguaaaucu

SEQ ID NO: 1058475 - RNA, 19 nt, Artificial Sequence
  Description of Artificial Sequence: Synthetic oligonucleotide
  Antisense strand to SEQ ID NO: 1058474
agauuuaccuaacacccaa

SEQ ID NO: 1058476 - RNA, 19 nt, Artificial Sequence
  Description of Artificial Sequence: Synthetic oligonucleotide
  Sense strand starting at position 420 of SEQ ID NO: 915160
gcugguguuaauuagguaa

SEQ ID NO: 1058477 - RNA, 19 nt, Artificial Sequence
  Description of Artificial Sequence: Synthetic oligonucleotide
  Antisense strand to SEQ ID NO: 1058476
uuaccuaauuaacaccagc

SEQ ID NO: 1058478 - RNA, 19 nt, Artificial Sequence
  Description of Artificial Sequence: Synthetic oligonucleotide
  Sense strand starting at position 423 of SEQ ID NO: 915160
gguguuaauuagguaaauc

SEQ ID NO: 1058479 - RNA, 19 nt, Artificial Sequence
  Description of Artificial Sequence: Synthetic oligonucleotide
  Antisense strand to SEQ ID NO: 1058478
gauuuaccuaauuaacacc

SEQ ID NO: 1058480 - RNA, 19 nt, Artificial Sequence
  Description of Artificial Sequence: Synthetic oligonucleotide
  Sense strand starting at position 434 of SEQ ID NO: 915160
gguaaaucugaauggcaga

SEQ ID NO: 1058481 - RNA, 19 nt, Artificial Sequence
  Description of Artificial Sequence: Synthetic oligonucleotide
  Antisense strand to SEQ ID NO: 1058480
ucugccauucagauuuacc

SEQ ID NO: 1058482 - RNA, 19 nt, Artificial Sequence
  Description of Artificial Sequence: Synthetic oligonucleotide
  Sense strand starting at position 435 of SEQ ID NO: 915160
guaaaucugaauggcagaa

SEQ ID NO: 1058483 - RNA, 19 nt, Artificial Sequence
  Description of Artificial Sequence: Synthetic oligonucleotide
  Antisense strand to SEQ ID NO: 1058482
uucugccauucagauuuac

SEQ ID NO: 1058484 - RNA, 19 nt, Artificial Sequence
  Description of Artificial Sequence: Synthetic oligonucleotide
  Sense strand starting at position 507 of SEQ ID NO: 915160
aguccaaucacccgugaga

SEQ ID NO: 1058485 - RNA, 19 nt, Artificial Sequence
  Description of Artificial Sequence: Synthetic oligonucleotide
  Antisense strand to SEQ ID NO: 1058484
ucucacgggugauuggacu

SEQ ID NO: 1058486 - RNA, 19 nt, Artificial Sequence
  Description of Artificial Sequence: Synthetic oligonucleotide
  Sense strand starting at position 616 of SEQ ID NO: 915160
uuuaaacuucugggaguuu

SEQ ID NO: 1058487 - RNA, 19 nt, Artificial Sequence
  Description of Artificial Sequence: Synthetic oligonucleotide
  Antisense strand to SEQ ID NO: 1058486
aaacucccagaaguuuaaa

SEQ ID NO: 1058488 - RNA, 19 nt, Artificial Sequence
  Description of Artificial Sequence: Synthetic oligonucleotide
  Sense strand starting at position 625 of SEQ ID NO: 915160
cugggaguuuaaguuuaaa

SEQ ID NO: 1058489 - RNA, 19 nt, Artificial Sequence
  Description of Artificial Sequence: Synthetic oligonucleotide
  Antisense strand to SEQ ID NO: 1058488
uuuaaacuuaaacucccag

SEQ ID NO: 1058490 - RNA, 19 nt, Artificial Sequence
  Description of Artificial Sequence: Synthetic oligonucleotide
  Sense strand starting at position 676 of SEQ ID NO: 915160
aaagacaagcuucgagaga

SEQ ID NO: 1058491 - RNA, 19 nt, Artificial Sequence
  Description of Artificial Sequence: Synthetic oligonucleotide
  Antisense strand to SEQ ID NO: 1058490
ucucucgaagcuugucuuu

SEQ ID NO: 1058492 - RNA, 19 nt, Artificial Sequence
  Description of Artificial Sequence: Synthetic oligonucleotide
  Sense strand starting at position 713 of SEQ ID NO: 915160
aaauccucccguugggaua

SEQ ID NO: 1058493 - RNA, 19 nt, Artificial Sequence
  Description of Artificial Sequence: Synthetic oligonucleotide
  Antisense strand to SEQ ID NO: 1058492
uaucccaacgggaggauuu

SEQ ID NO: 1058494 - RNA, 19 nt, Artificial Sequence
  Description of Artificial Sequence: Synthetic oligonucleotide
  Sense strand starting at position 2020 of SEQ ID NO: 915160
uucagaguuguugagggua

SEQ ID NO: 1058495 - RNA, 19 nt, Artificial Sequence
  Description of Artificial Sequence: Synthetic oligonucleotide
  Antisense strand to SEQ ID NO: 1058494
uacccucaacaacucugaa

SEQ ID NO: 1058496 - RNA, 19 nt, Artificial Sequence
  Description of Artificial Sequence: Synthetic oligonucleotide
  Sense strand starting at position 2023 of SEQ ID NO: 915160
agaguuguugaggguaacu

SEQ ID NO: 1058497 - RNA, 19 nt, Artificial Sequence
  Description of Artificial Sequence: Synthetic oligonucleotide
  Antisense strand to SEQ ID NO: 1058496
aguuacccucaacaacucu

SEQ ID NO: 1058498 - RNA, 19 nt, Artificial Sequence
  Description of Artificial Sequence: Synthetic oligonucleotide
  Sense strand starting at position 2025 of SEQ ID NO: 915160
aguuguugaggguaacuaa

SEQ ID NO: 1058499 - RNA, 19 nt, Artificial Sequence
  Description of Artificial Sequence: Synthetic oligonucleotide
  Antisense strand to SEQ ID NO: 1058498
uuaguuacccucaacaacu

SEQ ID NO: 1058500 - RNA, 19 nt, Artificial Sequence
  Description of Artificial Sequence: Synthetic oligonucleotide
  Sense strand starting at position 2114 of SEQ ID NO: 915160
agcuaaucuucccuugaug

SEQ ID NO: 1058501 - RNA, 19 nt, Artificial Sequence
  Description of Artificial Sequence: Synthetic oligonucleotide
  Antisense strand to SEQ ID NO: 1058500
caucaagggaagauuagcu

SEQ ID NO: 1058502 - RNA, 19 nt, Artificial Sequence
  Description of Artificial Sequence: Synthetic oligonucleotide
  Sense strand starting at position 2123 of SEQ ID NO: 915160
ucccuugaugacggaauau

SEQ ID NO: 1058503 - RNA, 19 nt, Artificial Sequence
  Description of Artificial Sequence: Synthetic oligonucleotide
  Antisense strand to SEQ ID NO: 1058502
auauuccgucaucaaggga

SEQ ID NO: 1058504 - RNA, 19 nt, Artificial Sequence
  Description of Artificial Sequence: Synthetic oligonucleotide
  Sense strand starting at position 2323 of SEQ ID NO: 915160
auauaaauccagugucuuu

SEQ ID NO: 1058505 - RNA, 19 nt, Artificial Sequence
  Description of Artificial Sequence: Synthetic oligonucleotide
  Antisense strand to SEQ ID NO: 1058504
aaagacacuggauuuauau

SEQ ID NO: 1058506 - RNA, 19 nt, Artificial Sequence
  Description of Artificial Sequence: Synthetic oligonucleotide
  Sense strand starting at position 2589 of SEQ ID NO: 915160
uagucagaagucuguuuaa

SEQ ID NO: 1058507 - RNA, 19 nt, Artificial Sequence
  Description of Artificial Sequence: Synthetic oligonucleotide
  Antisense strand to SEQ ID NO: 1058506
uuaaacagacuucugacua

SEQ ID NO: 1058508 - RNA, 19 nt, Artificial Sequence
  Description of Artificial Sequence: Synthetic oligonucleotide
  Sense strand starting at position 2592 of SEQ ID NO: 915160
ucagaagucuguuuaacag

SEQ ID NO: 1058509 - RNA, 19 nt, Artificial Sequence
  Description of Artificial Sequence: Synthetic oligonucleotide
  Antisense strand to SEQ ID NO: 1058508
cuguuaaacagacuucuga

SEQ ID NO: 1058510 - RNA, 19 nt, Artificial Sequence
  Description of Artificial Sequence: Synthetic oligonucleotide
  Sense strand starting at position 2659 of SEQ ID NO: 915160
cugcuuuaaguggauaacu

SEQ ID NO: 1058511 - RNA, 19 nt, Artificial Sequence
  Description of Artificial Sequence: Synthetic oligonucleotide
  Antisense strand to SEQ ID NO: 1058510
aguuauccacuuaaagcag

SEQ ID NO: 1058512 - RNA, 19 nt, Artificial Sequence
  Description of Artificial Sequence: Synthetic oligonucleotide
  Sense strand starting at position 2979 of SEQ ID NO: 915160
gguguccucacagagcaau

SEQ ID NO: 1058513 - RNA, 19 nt, Artificial Sequence
  Description of Artificial Sequence: Synthetic oligonucleotide
  Antisense strand to SEQ ID NO: 1058512
auugcucugugaggacacc

SEQ ID NO: 1058514 - RNA, 19 nt, Artificial Sequence
  Description of Artificial Sequence: Synthetic oligonucleotide
  Sense strand starting at position 2985 of SEQ ID NO: 915160
cucacagagcaauaaguua

SEQ ID NO: 1058515 - RNA, 19 nt, Artificial Sequence
  Description of Artificial Sequence: Synthetic oligonucleotide
  Antisense strand to SEQ ID NO: 1058514
uaacuuauugcucugugag

SEQ ID NO: 1058516 - RNA, 19 nt, Artificial Sequence
  Description of Artificial Sequence: Synthetic oligonucleotide
  Sense strand starting at position 3033 of SEQ ID NO: 915160
gcuuguugaaugugauuug

SEQ ID NO: 1058517 - RNA, 19 nt, Artificial Sequence
  Description of Artificial Sequence: Synthetic oligonucleotide
  Antisense strand to SEQ ID NO: 1058516
caaaucacauucaacaagc

SEQ ID NO: 1058518 - RNA, 19 nt, Artificial Sequence
  Description of Artificial Sequence: Synthetic oligonucleotide
  Sense strand starting at position 3048 of SEQ ID NO: 915160
uuugaaacugcaugcuuaa

SEQ ID NO: 1058519 - RNA, 19 nt, Artificial Sequence
  Description of Artificial Sequence: Synthetic oligonucleotide
  Antisense strand to SEQ ID NO: 1058518
uuaagcaugcaguuucaaa

SEQ ID NO: 1058520 - RNA, 19 nt, Artificial Sequence
  Description of Artificial Sequence: Synthetic oligonucleotide
  Sense strand starting at position 3151 of SEQ ID NO: 915160
gcaagagagcuguaguuga

SEQ ID NO: 1058521 - RNA, 19 nt, Artificial Sequence
  Description of Artificial Sequence: Synthetic oligonucleotide
  Antisense strand to SEQ ID NO: 1058520
ucaacuacagcucucuugc

SEQ ID NO: 1058522 - RNA, 19 nt, Artificial Sequence
  Description of Artificial Sequence: Synthetic oligonucleotide
  Sense strand starting at position 3155 of SEQ ID NO: 915160
gagagcuguaguugaaaga

SEQ ID NO: 1058523 - RNA, 19 nt, Artificial Sequence
  Description of Artificial Sequence: Synthetic oligonucleotide
  Antisense strand to SEQ ID NO: 1058522
ucuuucaacuacagcucuc

SEQ ID NO: 1058524 - RNA, 19 nt, Artificial Sequence
  Description of Artificial Sequence: Synthetic oligonucleotide
  Sense strand starting at position 3171 of SEQ ID NO: 915160
agaaauauugugcaucaau

SEQ ID NO: 1058525 - RNA, 19 nt, Artificial Sequence
  Description of Artificial Sequence: Synthetic oligonucleotide
  Antisense strand to SEQ ID NO: 1058524
auugaugcacaauauuucu

SEQ ID NO: 1058526 - RNA, 19 nt, Artificial Sequence
  Description of Artificial Sequence: Synthetic oligonucleotide
  Sense strand starting at position 3447 of SEQ ID NO: 915160
uugugaagacuuuguaaau

SEQ ID NO: 1058527 - RNA, 19 nt, Artificial Sequence
  Description of Artificial Sequence: Synthetic oligonucleotide
  Antisense strand to SEQ ID NO: 1058526
auuuacaaagucuucacaa

SEQ ID NO: 1058528 - RNA, 19 nt, Artificial Sequence
  Description of Artificial Sequence: Synthetic oligonucleotide
  Sense strand starting at position 3448 of SEQ ID NO: 915160
ugugaagacuuuguaaaua

SEQ ID NO: 1058529 - RNA, 19 nt, Artificial Sequence
  Description of Artificial Sequence: Synthetic oligonucleotide
  Antisense strand to SEQ ID NO: 1058528
uauuuacaaagucuucaca

SEQ ID NO: 1058530 - RNA, 19 nt, Artificial Sequence
  Description of Artificial Sequence: Synthetic oligonucleotide
  Sense strand starting at position 3459 of SEQ ID NO: 915160
uguaaauagcagcaauaga

SEQ ID NO: 1058531 - RNA, 19 nt, Artificial Sequence
  Description of Artificial Sequence: Synthetic oligonucleotide
  Antisense strand to SEQ ID NO: 1058530
ucuauugcugcuauuuaca

SEQ ID NO: 1058532 - RNA, 19 nt, Artificial Sequence
  Description of Artificial Sequence: Synthetic oligonucleotide
  Sense strand starting at position 3475 of SEQ ID NO: 915160
agacaagaaucacagagaa

SEQ ID NO: 1058533 - RNA, 19 nt, Artificial Sequence
  Description of Artificial Sequence: Synthetic oligonucleotide
  Antisense strand to SEQ ID NO: 1058532
uucucugugauucuugucu

SEQ ID NO: 1058534 - RNA, 19 nt, Artificial Sequence
  Description of Artificial Sequence: Synthetic oligonucleotide
  Sense strand starting at position 3825 of SEQ ID NO: 915160
aggaaauggcaguguagaa

SEQ ID NO: 1058535 - RNA, 19 nt, Artificial Sequence
  Description of Artificial Sequence: Synthetic oligonucleotide
  Antisense strand to SEQ ID NO: 1058534
uucuacacugccauuuccu

SEQ ID NO: 1058536 - RNA, 19 nt, Artificial Sequence
  Description of Artificial Sequence: Synthetic oligonucleotide
  Sense strand starting at position 52 of SEQ ID NO: 915161
uccugauguggaugugaau

SEQ ID NO: 1058537 - RNA, 19 nt, Artificial Sequence
  Description of Artificial Sequence: Synthetic oligonucleotide
  Antisense strand to SEQ ID NO: 1058536
auucacauccacaucagga

SEQ ID NO: 1058538 - RNA, 19 nt, Artificial Sequence
  Description of Artificial Sequence: Synthetic oligonucleotide
  Sense strand starting at position 58 of SEQ ID NO: 915161
uguggaugugaauguauac

SEQ ID NO: 1058539 - RNA, 19 nt, Artificial Sequence
  Description of Artificial Sequence: Synthetic oligonucleotide
  Antisense strand to SEQ ID NO: 1058538
guauacauucacauccaca

SEQ ID NO: 1058540 - RNA, 19 nt, Artificial Sequence
  Description of Artificial Sequence: Synthetic oligonucleotide
  Sense strand starting at position 510 of SEQ ID NO: 915161
uaucucuuggugugaagaa

SEQ ID NO: 1058541 - RNA, 19 nt, Artificial Sequence
  Description of Artificial Sequence: Synthetic oligonucleotide
  Antisense strand to SEQ ID NO: 1058540
uucuucacaccaagagaua

SEQ ID NO: 1058542 - RNA, 19 nt, Artificial Sequence
  Description of Artificial Sequence: Synthetic oligonucleotide
  Sense strand starting at position 534 of SEQ ID NO: 915161
augagagacuuacuugcau

SEQ ID NO: 1058543 - RNA, 19 nt, Artificial Sequence
  Description of Artificial Sequence: Synthetic oligonucleotide
  Antisense strand to SEQ ID NO: 1058542
augcaaguaagucucucau

SEQ ID NO: 1058544 - RNA, 19 nt, Artificial Sequence
  Description of Artificial Sequence: Synthetic oligonucleotide
  Sense strand starting at position 561 of SEQ ID NO: 915161
uguaucuaauuccuaagga

SEQ ID NO: 1058545 - RNA, 19 nt, Artificial Sequence
  Description of Artificial Sequence: Synthetic oligonucleotide
  Antisense strand to SEQ ID NO: 1058544
uccuuaggaauuagauaca

SEQ ID NO: 1058546 - RNA, 19 nt, Artificial Sequence
  Description of Artificial Sequence: Synthetic oligonucleotide
  Sense strand starting at position 571 of SEQ ID NO: 915161
uccuaaggauuggucagaa

SEQ ID NO: 1058547 - RNA, 19 nt, Artificial Sequence
  Description of Artificial Sequence: Synthetic oligonucleotide
  Antisense strand to SEQ ID NO: 1058546
uucugaccaauccuuagga

SEQ ID NO: 1058548 - RNA, 19 nt, Artificial Sequence
  Description of Artificial Sequence: Synthetic oligonucleotide
  Sense strand starting at position 581 of SEQ ID NO: 915161
uggucagaauucuuacuuc

SEQ ID NO: 1058549 - RNA, 19 nt, Artificial Sequence
  Description of Artificial Sequence: Synthetic oligonucleotide
  Antisense strand to SEQ ID NO: 1058548
gaaguaagaauucugacca

SEQ ID NO: 1058550 - RNA, 19 nt, Artificial Sequence
  Description of Artificial Sequence: Synthetic oligonucleotide
  Sense strand starting at position 595 of SEQ ID NO: 915161
acuucuuaaggagguacaa

SEQ ID NO: 1058551 - RNA, 19 nt, Artificial Sequence
  Description of Artificial Sequence: Synthetic oligonucleotide
  Antisense strand to SEQ ID NO: 1058550
uuguaccuccuuaagaagu

SEQ ID NO: 1058552 - RNA, 19 nt, Artificial Sequence
  Description of Artificial Sequence: Synthetic oligonucleotide
  Sense strand starting at position 627 of SEQ ID NO: 915161
ucuucuaucuaguugagaa

SEQ ID NO: 1058553 - RNA, 19 nt, Artificial Sequence
  Description of Artificial Sequence: Synthetic oligonucleotide
  Antisense strand to SEQ ID NO: 1058552
uucucaacuagauagaaga

SEQ ID NO: 1058554 - RNA, 19 nt, Artificial Sequence
  Description of Artificial Sequence: Synthetic oligonucleotide
  Sense strand starting at position 668 of SEQ ID NO: 915161
cuuugcuauguagaugauu

SEQ ID NO: 1058555 - RNA, 19 nt, Artificial Sequence
  Description of Artificial Sequence: Synthetic oligonucleotide
  Antisense strand to SEQ ID NO: 1058554
aaucaucuacauagcaaag

SEQ ID NO: 1058556 - RNA, 19 nt, Artificial Sequence
  Description of Artificial Sequence: Synthetic oligonucleotide
  Sense strand starting at position 671 of SEQ ID NO: 915161
ugcuauguagaugauuaac

SEQ ID NO: 1058557 - RNA, 19 nt, Artificial Sequence
  Description of Artificial Sequence: Synthetic oligonucleotide
  Antisense strand to SEQ ID NO: 1058556
guuaaucaucuacauagca

SEQ ID NO: 1058558 - RNA, 19 nt, Artificial Sequence
  Description of Artificial Sequence: Synthetic oligonucleotide
  Sense strand starting at position 696 of SEQ ID NO: 915161
agcuuuauccaguauuaag

SEQ ID NO: 1058559 - RNA, 19 nt, Artificial Sequence
  Description of Artificial Sequence: Synthetic oligonucleotide
  Antisense strand to SEQ ID NO: 1058558
cuuaauacuggauaaagcu

SEQ ID NO: 1058560 - RNA, 19 nt, Artificial Sequence
  Description of Artificial Sequence: Synthetic oligonucleotide
  Sense strand starting at position 800 of SEQ ID NO: 915161
cuuccuaugucauugauau

SEQ ID NO: 1058561 - RNA, 19 nt, Artificial Sequence
  Description of Artificial Sequence: Synthetic oligonucleotide
  Antisense strand to SEQ ID NO: 1058560
auaucaaugacauaggaag

SEQ ID NO: 1058562 - RNA, 19 nt, Artificial Sequence
  Description of Artificial Sequence: Synthetic oligonucleotide
  Sense strand starting at position 801 of SEQ ID NO: 915161
uuccuaugucauugauaug

SEQ ID NO: 1058563 - RNA, 19 nt, Artificial Sequence
  Description of Artificial Sequence: Synthetic oligonucleotide
  Antisense strand to SEQ ID NO: 1058562
cauaucaaugacauaggaa

SEQ ID NO: 1058564 - RNA, 19 nt, Artificial Sequence
  Description of Artificial Sequence: Synthetic oligonucleotide
  Sense strand starting at position 808 of SEQ ID NO: 915161
gucauugauauguaaugua

SEQ ID NO: 1058565 - RNA, 19 nt, Artificial Sequence
  Description of Artificial Sequence: Synthetic oligonucleotide
  Antisense strand to SEQ ID NO: 1058564
uacauuacauaucaaugac

SEQ ID NO: 1058566 - RNA, 19 nt, Artificial Sequence
  Description of Artificial Sequence: Synthetic oligonucleotide
  Sense strand starting at position 813 of SEQ ID NO: 915161
ugauauguaauguaccagu

SEQ ID NO: 1058567 - RNA, 19 nt, Artificial Sequence
  Description of Artificial Sequence: Synthetic oligonucleotide
  Antisense strand to SEQ ID NO: 1058566
acugguacauuacauauca

SEQ ID NO: 1058568 - RNA, 19 nt, Artificial Sequence
  Description of Artificial Sequence: Synthetic oligonucleotide
  Sense strand starting at position 861 of SEQ ID NO: 915161
guaaguuugcaucaauaua

SEQ ID NO: 1058569 - RNA, 19 nt, Artificial Sequence
  Description of Artificial Sequence: Synthetic oligonucleotide
  Antisense strand to SEQ ID NO: 1058568
uauauugaugcaaacuuac

SEQ ID NO: 1058570 - RNA, 19 nt, Artificial Sequence
  Description of Artificial Sequence: Synthetic oligonucleotide
  Sense strand starting at position 884 of SEQ ID NO: 915161
ggcauacuuccagggacag

SEQ ID NO: 1058571 - RNA, 19 nt, Artificial Sequence
  Description of Artificial Sequence: Synthetic oligonucleotide
  Antisense strand to SEQ ID NO: 1058570
cugucccuggaaguaugcc

SEQ ID NO: 1058572 - RNA, 19 nt, Artificial Sequence
  Description of Artificial Sequence: Synthetic oligonucleotide
  Sense strand starting at position 927 of SEQ ID NO: 915161
uuauguguacgugaaugau

SEQ ID NO: 1058573 - RNA, 19 nt, Artificial Sequence
  Description of Artificial Sequence: Synthetic oligonucleotide
  Antisense strand to SEQ ID NO: 1058572
aucauucacguacacauaa

SEQ ID NO: 1058574 - RNA, 19 nt, Artificial Sequence
  Description of Artificial Sequence: Synthetic oligonucleotide
  Sense strand starting at position 931 of SEQ ID NO: 915161
guguacgugaaugaucauu

SEQ ID NO: 1058575 - RNA, 19 nt, Artificial Sequence
  Description of Artificial Sequence: Synthetic oligonucleotide
  Antisense strand to SEQ ID NO: 1058574
aaugaucauucacguacac

SEQ ID NO: 1058576 - RNA, 19 nt, Artificial Sequence
  Description of Artificial Sequence: Synthetic oligonucleotide
  Sense strand starting at position 1017 of SEQ ID NO: 915161
gggacauccuacucacuga

SEQ ID NO: 1058577 - RNA, 19 nt, Artificial Sequence
  Description of Artificial Sequence: Synthetic oligonucleotide
  Antisense strand to SEQ ID NO: 1058576
ucagugaguaggauguccc

SEQ ID NO: 1058578 - RNA, 19 nt, Artificial Sequence
  Description of Artificial Sequence: Synthetic oligonucleotide
  Sense strand starting at position 1150 of SEQ ID NO: 915161
gauagaagaguauggguau

SEQ ID NO: 1058579 - RNA, 19 nt, Artificial Sequence
  Description of Artificial Sequence: Synthetic oligonucleotide
  Antisense strand to SEQ ID NO: 1058578
auacccauacucuucuauc

SEQ ID NO: 1058580 - RNA, 19 nt, Artificial Sequence
  Description of Artificial Sequence: Synthetic oligonucleotide
  Sense strand starting at position 1196 of SEQ ID NO: 915161
uaaucagugccaggaggau

SEQ ID NO: 1058581 - RNA, 19 nt, Artificial Sequence
  Description of Artificial Sequence: Synthetic oligonucleotide
  Antisense strand to SEQ ID NO: 1058580
auccuccuggcacugauua

SEQ ID NO: 1058582 - RNA, 19 nt, Artificial Sequence
  Description of Artificial Sequence: Synthetic oligonucleotide
  Sense strand starting at position 1421 of SEQ ID NO: 915161
gagccacaucuggaugcaa

SEQ ID NO: 1058583 - RNA, 19 nt, Artificial Sequence
  Description of Artificial Sequence: Synthetic oligonucleotide
  Antisense strand to SEQ ID NO: 1058582
uugcauccagauguggcuc

SEQ ID NO: 1058584 - RNA, 19 nt, Artificial Sequence
  Description of Artificial Sequence: Synthetic oligonucleotide
  Sense strand starting at position 1438 of SEQ ID NO: 915161
aagcaauaagaauggguua

SEQ ID NO: 1058585 - RNA, 19 nt, Artificial Sequence
  Description of Artificial Sequence: Synthetic oligonucleotide
  Antisense strand to SEQ ID NO: 1058584
uaacccauucuuauugcuu

SEQ ID NO: 1058586 - RNA, 19 nt, Artificial Sequence
  Description of Artificial Sequence: Synthetic oligonucleotide
  Sense strand starting at position 1529 of SEQ ID NO: 915161
aagaaauggccaggcugau

SEQ ID NO: 1058587 - RNA, 19 nt, Artificial Sequence
  Description of Artificial Sequence: Synthetic oligonucleotide
  Antisense strand to SEQ ID NO: 1058586
aucagccuggccauuucuu

SEQ ID NO: 1058588 - RNA, 19 nt, Artificial Sequence
  Description of Artificial Sequence: Synthetic oligonucleotide
  Sense strand starting at position 2052 of SEQ ID NO: 915161
uuacuuaaucgcgugccaa

SEQ ID NO: 1058589 - RNA, 19 nt, Artificial Sequence
  Description of Artificial Sequence: Synthetic oligonucleotide
  Antisense strand to SEQ ID NO: 1058588
uuggcacgcgauuaaguaa

SEQ ID NO: 1058590 - RNA, 19 nt, Artificial Sequence
  Description of Artificial Sequence: Synthetic oligonucleotide
  Sense strand starting at position 2055 of SEQ ID NO: 915161
cuuaaucgcgugccaaauu

SEQ ID NO: 1058591 - RNA, 19 nt, Artificial Sequence
  Description of Artificial Sequence: Synthetic oligonucleotide
  Antisense strand to SEQ ID NO: 1058590
aauuuggcacgcgauuaag

SEQ ID NO: 1058592 - RNA, 19 nt, Artificial Sequence
  Description of Artificial Sequence: Synthetic oligonucleotide
  Sense strand starting at position 2395 of SEQ ID NO: 915161
ugacuucuagacugccuua

SEQ ID NO: 1058593 - RNA, 19 nt, Artificial Sequence
  Description of Artificial Sequence: Synthetic oligonucleotide
  Antisense strand to SEQ ID NO: 1058592
uaaggcagucuagaaguca

SEQ ID NO: 1058594 - RNA, 19 nt, Artificial Sequence
  Description of Artificial Sequence: Synthetic oligonucleotide
  Sense strand starting at position 2398 of SEQ ID NO: 915161
cuucuagacugccuuaaga

SEQ ID NO: 1058595 - RNA, 19 nt, Artificial Sequence
  Description of Artificial Sequence: Synthetic oligonucleotide
  Antisense strand to SEQ ID NO: 1058594
ucuuaaggcagucuagaag

SEQ ID NO: 1058596 - RNA, 19 nt, Artificial Sequence
  Description of Artificial Sequence: Synthetic oligonucleotide
  Sense strand starting at position 2400 of SEQ ID NO: 915161
ucuagacugccuuaagaua

SEQ ID NO: 1058597 - RNA, 19 nt, Artificial Sequence
  Description of Artificial Sequence: Synthetic oligonucleotide
  Antisense strand to SEQ ID NO: 1058596
uaucuuaaggcagucuaga

SEQ ID NO: 1058598 - RNA, 19 nt, Artificial Sequence
  Description of Artificial Sequence: Synthetic oligonucleotide
  Sense strand starting at position 2743 of SEQ ID NO: 915161
auccaucgccuugaguaau

SEQ ID NO: 1058599 - RNA, 19 nt, Artificial Sequence
  Description of Artificial Sequence: Synthetic oligonucleotide
  Antisense strand to SEQ ID NO: 1058598
auuacucaaggcgauggau

SEQ ID NO: 1058600 - RNA, 19 nt, Artificial Sequence
  Description of Artificial Sequence: Synthetic oligonucleotide
  Sense strand starting at position 2852 of SEQ ID NO: 915161
uuggcuacugaacauuaua

SEQ ID NO: 1058601 - RNA, 19 nt, Artificial Sequence
  Description of Artificial Sequence: Synthetic oligonucleotide
  Antisense strand to SEQ ID NO: 1058600
uauaauguucaguagccaa

SEQ ID NO: 1058602 - RNA, 19 nt, Artificial Sequence
  Description of Artificial Sequence: Synthetic oligonucleotide
  Sense strand starting at position 2945 of SEQ ID NO: 915161
ggucuuaucuacucucaug

SEQ ID NO: 1058603 - RNA, 19 nt, Artificial Sequence
  Description of Artificial Sequence: Synthetic oligonucleotide
  Antisense strand to SEQ ID NO: 1058602
caugagaguagauaagacc

SEQ ID NO: 1058604 - RNA, 19 nt, Artificial Sequence
  Description of Artificial Sequence: Synthetic oligonucleotide
  Sense strand starting at position 2962 of SEQ ID NO: 915161
ugacaucaacucgagucua

SEQ ID NO: 1058605 - RNA, 19 nt, Artificial Sequence
  Description of Artificial Sequence: Synthetic oligonucleotide
  Antisense strand to SEQ ID NO: 1058604
uagacucgaguugauguca

SEQ ID NO: 1058606 - RNA, 19 nt, Artificial Sequence
  Description of Artificial Sequence: Synthetic oligonucleotide
  Sense strand starting at position 3194 of SEQ ID NO: 915161
uggugccaccauuaaucaa

SEQ ID NO: 1058607 - RNA, 19 nt, Artificial Sequence
  Description of Artificial Sequence: Synthetic oligonucleotide
  Antisense strand to SEQ ID NO: 1058606
uugauuaaugguggcacca

SEQ ID NO: 1058608 - RNA, 19 nt, Artificial Sequence
  Description of Artificial Sequence: Synthetic oligonucleotide
  Sense strand starting at position 3872 of SEQ ID NO: 915161
gcaagcugucaauaagauc

SEQ ID NO: 1058609 - RNA, 19 nt, Artificial Sequence
  Description of Artificial Sequence: Synthetic oligonucleotide
  Antisense strand to SEQ ID NO: 1058608
gaucuuauugacagcuugc

SEQ ID NO: 1058610 - RNA, 19 nt, Artificial Sequence
  Description of Artificial Sequence: Synthetic oligonucleotide
  Sense strand starting at position 3917 of SEQ ID NO: 915161
gagauauaagcuuguuuau

SEQ ID NO: 1058611 - RNA, 19 nt, Artificial Sequence
  Description of Artificial Sequence: Synthetic oligonucleotide
  Antisense strand to SEQ ID NO: 1058610
auaaacaagcuuauaucuc

SEQ ID NO: 1058612 - RNA, 19 nt, Artificial Sequence
  Description of Artificial Sequence: Synthetic oligonucleotide
  Sense strand starting at position 3919 of SEQ ID NO: 915161
gauauaagcuuguuuauug

SEQ ID NO: 1058613 - RNA, 19 nt, Artificial Sequence
  Description of Artificial Sequence: Synthetic oligonucleotide
  Antisense strand to SEQ ID NO: 1058612
caauaaacaagcuuauauc

SEQ ID NO: 1058614 - RNA, 19 nt, Artificial Sequence
  Description of Artificial Sequence: Synthetic oligonucleotide
  Sense strand starting at position 3929 of SEQ ID NO: 915161
uguuuauugaaacgacuga

SEQ ID NO: 1058615 - RNA, 19 nt, Artificial Sequence
  Description of Artificial Sequence: Synthetic oligonucleotide
  Antisense strand to SEQ ID NO: 1058614
ucagucguuucaauaaaca

SEQ ID NO: 1058616 - RNA, 19 nt, Artificial Sequence
  Description of Artificial Sequence: Synthetic oligonucleotide
  Sense strand starting at position 84 of SEQ ID NO: 915162
ugugcaauucuagagugau

SEQ ID NO: 1058617 - RNA, 19 nt, Artificial Sequence
  Description of Artificial Sequence: Synthetic oligonucleotide
  Antisense strand to SEQ ID NO: 1058616
aucacucuagaauugcaca

SEQ ID NO: 1058618 - RNA, 19 nt, Artificial Sequence
  Description of Artificial Sequence: Synthetic oligonucleotide
  Sense strand starting at position 87 of SEQ ID NO: 915162
gcaauucuagagugaugag

SEQ ID NO: 1058619 - RNA, 19 nt, Artificial Sequence
  Description of Artificial Sequence: Synthetic oligonucleotide
  Antisense strand to SEQ ID NO: 1058618
cucaucacucuagaauugc

SEQ ID NO: 1058620 - RNA, 19 nt, Artificial Sequence
  Description of Artificial Sequence: Synthetic oligonucleotide
  Sense strand starting at position 125 of SEQ ID NO: 915162
agucaauagcuagguagaa

SEQ ID NO: 1058621 - RNA, 19 nt, Artificial Sequence
  Description of Artificial Sequence: Synthetic oligonucleotide
  Antisense strand to SEQ ID NO: 1058620
uucuaccuagcuauugacu

SEQ ID NO: 1058622 - RNA, 19 nt, Artificial Sequence
  Description of Artificial Sequence: Synthetic oligonucleotide
  Sense strand starting at position 126 of SEQ ID NO: 915162
gucaauagcuagguagaaa

SEQ ID NO: 1058623 - RNA, 19 nt, Artificial Sequence
  Description of Artificial Sequence: Synthetic oligonucleotide
  Antisense strand to SEQ ID NO: 1058622
uuucuaccuagcuauugac

SEQ ID NO: 1058624 - RNA, 19 nt, Artificial Sequence
  Description of Artificial Sequence: Synthetic oligonucleotide
  Sense strand starting at position 186 of SEQ ID NO: 915162
aguucugagaguuagcaau

SEQ ID NO: 1058625 - RNA, 19 nt, Artificial Sequence
  Description of Artificial Sequence: Synthetic oligonucleotide
  Antisense strand to SEQ ID NO: 1058624
auugcuaacucucagaacu

SEQ ID NO: 1058626 - RNA, 19 nt, Artificial Sequence
  Description of Artificial Sequence: Synthetic oligonucleotide
  Sense strand starting at position 192 of SEQ ID NO: 915162
gagaguuagcaauggagua

SEQ ID NO: 1058627 - RNA, 19 nt, Artificial Sequence
  Description of Artificial Sequence: Synthetic oligonucleotide
  Antisense strand to SEQ ID NO: 1058626
uacuccauugcuaacucuc

SEQ ID NO: 1058628 - RNA, 19 nt, Artificial Sequence
  Description of Artificial Sequence: Synthetic oligonucleotide
  Sense strand starting at position 197 of SEQ ID NO: 915162
uuagcaauggaguagcuau

SEQ ID NO: 1058629 - RNA, 19 nt, Artificial Sequence
  Description of Artificial Sequence: Synthetic oligonucleotide
  Antisense strand to SEQ ID NO: 1058628
auagcuacuccauugcuaa

SEQ ID NO: 1058630 - RNA, 19 nt, Artificial Sequence
  Description of Artificial Sequence: Synthetic oligonucleotide
  Sense strand starting at position 263 of SEQ ID NO: 915162
aaugaaagucaauguguaa

SEQ ID NO: 1058631 - RNA, 19 nt, Artificial Sequence
  Description of Artificial Sequence: Synthetic oligonucleotide
  Antisense strand to SEQ ID NO: 1058630
uuacacauugacuuucauu

SEQ ID NO: 1058632 - RNA, 19 nt, Artificial Sequence
  Description of Artificial Sequence: Synthetic oligonucleotide
  Sense strand starting at position 385 of SEQ ID NO: 915162
ggaguauauuuguaaggau

SEQ ID NO: 1058633 - RNA, 19 nt, Artificial Sequence
  Description of Artificial Sequence: Synthetic oligonucleotide
  Antisense strand to SEQ ID NO: 1058632
auccuuacaaauauacucc

SEQ ID NO: 1058634 - RNA, 19 nt, Artificial Sequence
  Description of Artificial Sequence: Synthetic oligonucleotide
  Sense strand starting at position 405 of SEQ ID NO: 915162
cagcacucucuagaaguga

SEQ ID NO: 1058635 - RNA, 19 nt, Artificial Sequence
  Description of Artificial Sequence: Synthetic oligonucleotide
  Antisense strand to SEQ ID NO: 1058634
ucacuucuagagagugcug

SEQ ID NO: 1058636 - RNA, 19 nt, Artificial Sequence
  Description of Artificial Sequence: Synthetic oligonucleotide
  Sense strand starting at position 543 of SEQ ID NO: 915162
auugccucacuggaaauau

SEQ ID NO: 1058637 - RNA, 19 nt, Artificial Sequence
  Description of Artificial Sequence: Synthetic oligonucleotide
  Antisense strand to SEQ ID NO: 1058636
auauuuccagugaggcaau

SEQ ID NO: 1058638 - RNA, 19 nt, Artificial Sequence
  Description of Artificial Sequence: Synthetic oligonucleotide
  Sense strand starting at position 666 of SEQ ID NO: 915162
auauuaaagugacuagucu

SEQ ID NO: 1058639 - RNA, 19 nt, Artificial Sequence
  Description of Artificial Sequence: Synthetic oligonucleotide
  Antisense strand to SEQ ID NO: 1058638
agacuagucacuuuaauau

SEQ ID NO: 1058640 - RNA, 19 nt, Artificial Sequence
  Description of Artificial Sequence: Synthetic oligonucleotide
  Sense strand starting at position 728 of SEQ ID NO: 915162
agggacauaugcucaauua

SEQ ID NO: 1058641 - RNA, 19 nt, Artificial Sequence
  Description of Artificial Sequence: Synthetic oligonucleotide
  Antisense strand to SEQ ID NO: 1058640
uaauugagcauaugucccu

SEQ ID NO: 1058642 - RNA, 19 nt, Artificial Sequence
  Description of Artificial Sequence: Synthetic oligonucleotide
  Sense strand starting at position 843 of SEQ ID NO: 915162
ggaauugacucagcaacca

SEQ ID NO: 1058643 - RNA, 19 nt, Artificial Sequence
  Description of Artificial Sequence: Synthetic oligonucleotide
  Antisense strand to SEQ ID NO: 1058642
ugguugcugagucaauucc

SEQ ID NO: 1058644 - RNA, 19 nt, Artificial Sequence
  Description of Artificial Sequence: Synthetic oligonucleotide
  Sense strand starting at position 2078 of SEQ ID NO: 915162
auaguauaucuaggcuaaa

SEQ ID NO: 1058645 - RNA, 19 nt, Artificial Sequence
  Description of Artificial Sequence: Synthetic oligonucleotide
  Antisense strand to SEQ ID NO: 1058644
uuuagccuagauauacuau

SEQ ID NO: 1058646 - RNA, 19 nt, Artificial Sequence
  Description of Artificial Sequence: Synthetic oligonucleotide
  Sense strand starting at position 2215 of SEQ ID NO: 915162
uguuguaauuuccuuccuu

SEQ ID NO: 1058647 - RNA, 19 nt, Artificial Sequence
  Description of Artificial Sequence: Synthetic oligonucleotide
  Antisense strand to SEQ ID NO: 1058646
aaggaaggaaauuacaaca

SEQ ID NO: 1058648 - RNA, 19 nt, Artificial Sequence
  Description of Artificial Sequence: Synthetic oligonucleotide
  Sense strand starting at position 2216 of SEQ ID NO: 915162
guuguaauuuccuuccuuu

SEQ ID NO: 1058649 - RNA, 19 nt, Artificial Sequence
  Description of Artificial Sequence: Synthetic oligonucleotide
  Antisense strand to SEQ ID NO: 1058648
aaaggaaggaaauuacaac

SEQ ID NO: 1058650 - RNA, 19 nt, Artificial Sequence
  Description of Artificial Sequence: Synthetic oligonucleotide
  Sense strand starting at position 2311 of SEQ ID NO: 915162
agagaacuauguucucaug

SEQ ID NO: 1058651 - RNA, 19 nt, Artificial Sequence
  Description of Artificial Sequence: Synthetic oligonucleotide
  Antisense strand to SEQ ID NO: 1058650
caugagaacauaguucucu

SEQ ID NO: 1058652 - RNA, 19 nt, Artificial Sequence
  Description of Artificial Sequence: Synthetic oligonucleotide
  Sense strand starting at position 2313 of SEQ ID NO: 915162
agaacuauguucucaugac

SEQ ID NO: 1058653 - RNA, 19 nt, Artificial Sequence
  Description of Artificial Sequence: Synthetic oligonucleotide
  Antisense strand to SEQ ID NO: 1058652
gucaugagaacauaguucu

SEQ ID NO: 1058654 - RNA, 19 nt, Artificial Sequence
  Description of Artificial Sequence: Synthetic oligonucleotide
  Sense strand starting at position 2317 of SEQ ID NO: 915162
cuauguucucaugacucau

SEQ ID NO: 1058655 - RNA, 19 nt, Artificial Sequence
  Description of Artificial Sequence: Synthetic oligonucleotide
  Antisense strand to SEQ ID NO: 1058654
augagucaugagaacauag

SEQ ID NO: 1058656 - RNA, 19 nt, Artificial Sequence
  Description of Artificial Sequence: Synthetic oligonucleotide
  Sense strand starting at position 2340 of SEQ ID NO: 915162
agaagaauguuuguggagu

SEQ ID NO: 1058657 - RNA, 19 nt, Artificial Sequence
  Description of Artificial Sequence: Synthetic oligonucleotide
  Antisense strand to SEQ ID NO: 1058656
acuccacaaacauucuucu

SEQ ID NO: 1058658 - RNA, 19 nt, Artificial Sequence
  Description of Artificial Sequence: Synthetic oligonucleotide
  Sense strand starting at position 2425 of SEQ ID NO: 915162
gaugaaugcagagggcauu

SEQ ID NO: 1058659 - RNA, 19 nt, Artificial Sequence
  Description of Artificial Sequence: Synthetic oligonucleotide
  Antisense strand to SEQ ID NO: 1058658
aaugcccucugcauucauc

SEQ ID NO: 1058660 - RNA, 19 nt, Artificial Sequence
  Description of Artificial Sequence: Synthetic oligonucleotide
  Sense strand starting at position 2457 of SEQ ID NO: 915162
guaacugagcgaugagaug

SEQ ID NO: 1058661 - RNA, 19 nt, Artificial Sequence
  Description of Artificial Sequence: Synthetic oligonucleotide
  Antisense strand to SEQ ID NO: 1058660
caucucaucgcucaguuac

SEQ ID NO: 1058662 - RNA, 19 nt, Artificial Sequence
  Description of Artificial Sequence: Synthetic oligonucleotide
  Sense strand starting at position 2475 of SEQ ID NO: 915162
gcuuauaaagcagauauca

SEQ ID NO: 1058663 - RNA, 19 nt, Artificial Sequence
  Description of Artificial Sequence: Synthetic oligonucleotide
  Antisense strand to SEQ ID NO: 1058662
ugauaucugcuuuauaagc

SEQ ID NO: 1058664 - RNA, 19 nt, Artificial Sequence
  Description of Artificial Sequence: Synthetic oligonucleotide
  Sense strand starting at position 2502 of SEQ ID NO: 915162
cuguucuuggaaugauauc

SEQ ID NO: 1058665 - RNA, 19 nt, Artificial Sequence
  Description of Artificial Sequence: Synthetic oligonucleotide
  Antisense strand to SEQ ID NO: 1058664
gauaucauuccaagaacag

SEQ ID NO: 1058666 - RNA, 19 nt, Artificial Sequence
  Description of Artificial Sequence: Synthetic oligonucleotide
  Sense strand starting at position 2597 of SEQ ID NO: 915162
gggaaaucuuuccugugga

SEQ ID NO: 1058667 - RNA, 19 nt, Artificial Sequence
  Description of Artificial Sequence: Synthetic oligonucleotide
  Antisense strand to SEQ ID NO: 1058666
uccacaggaaagauuuccc

SEQ ID NO: 1058668 - RNA, 19 nt, Artificial Sequence
  Description of Artificial Sequence: Synthetic oligonucleotide
  Sense strand starting at position 2600 of SEQ ID NO: 915162
aaaucuuuccuguggaaug

SEQ ID NO: 1058669 - RNA, 19 nt, Artificial Sequence
  Description of Artificial Sequence: Synthetic oligonucleotide
  Antisense strand to SEQ ID NO: 1058668
cauuccacaggaaagauuu

SEQ ID NO: 1058670 - RNA, 19 nt, Artificial Sequence
  Description of Artificial Sequence: Synthetic oligonucleotide
  Sense strand starting at position 2729 of SEQ ID NO: 915162
ggcuaaccagagcaauaua

SEQ ID NO: 1058671 - RNA, 19 nt, Artificial Sequence
  Description of Artificial Sequence: Synthetic oligonucleotide
  Antisense strand to SEQ ID NO: 1058670
uauauugcucugguuagcc

SEQ ID NO: 1058672 - RNA, 19 nt, Artificial Sequence
  Description of Artificial Sequence: Synthetic oligonucleotide
  Sense strand starting at position 2767 of SEQ ID NO: 915162
gguacaagucuccaucuga

SEQ ID NO: 1058673 - RNA, 19 nt, Artificial Sequence
  Description of Artificial Sequence: Synthetic oligonucleotide
  Antisense strand to SEQ ID NO: 1058672
ucagauggagacuuguacc

SEQ ID NO: 1058674 - RNA, 19 nt, Artificial Sequence
  Description of Artificial Sequence: Synthetic oligonucleotide
  Sense strand starting at position 3006 of SEQ ID NO: 915162
cccugaaaguucccugaca

SEQ ID NO: 1058675 - RNA, 19 nt, Artificial Sequence
  Description of Artificial Sequence: Synthetic oligonucleotide
  Antisense strand to SEQ ID NO: 1058674
ugucagggaacuuucaggg

SEQ ID NO: 1058676 - RNA, 19 nt, Artificial Sequence
  Description of Artificial Sequence: Synthetic oligonucleotide
  Sense strand starting at position 3007 of SEQ ID NO: 915162
ccugaaaguucccugacau

SEQ ID NO: 1058677 - RNA, 19 nt, Artificial Sequence
  Description of Artificial Sequence: Synthetic oligonucleotide
  Antisense strand to SEQ ID NO: 1058676
augucagggaacuuucagg

SEQ ID NO: 1058678 - RNA, 19 nt, Artificial Sequence
  Description of Artificial Sequence: Synthetic oligonucleotide
  Sense strand starting at position 3008 of SEQ ID NO: 915162
cugaaaguucccugacaua

SEQ ID NO: 1058679 - RNA, 19 nt, Artificial Sequence
  Description of Artificial Sequence: Synthetic oligonucleotide
  Antisense strand to SEQ ID NO: 1058678
uaugucagggaacuuucag

SEQ ID NO: 1058680 - RNA, 19 nt, Artificial Sequence
  Description of Artificial Sequence: Synthetic oligonucleotide
  Sense strand starting at position 3082 of SEQ ID NO: 915162
ucccuuggugcuuaauaau

SEQ ID NO: 1058681 - RNA, 19 nt, Artificial Sequence
  Description of Artificial Sequence: Synthetic oligonucleotide
  Antisense strand to SEQ ID NO: 1058680
auuauuaagcaccaaggga

SEQ ID NO: 1058682 - RNA, 19 nt, Artificial Sequence
  Description of Artificial Sequence: Synthetic oligonucleotide
  Sense strand starting at position 3653 of SEQ ID NO: 915162
gggagcauucuugauuagu

SEQ ID NO: 1058683 - RNA, 19 nt, Artificial Sequence
  Description of Artificial Sequence: Synthetic oligonucleotide
  Antisense strand to SEQ ID NO: 1058682
acuaaucaagaaugcuccc

SEQ ID NO: 1058684 - RNA, 19 nt, Artificial Sequence
  Description of Artificial Sequence: Synthetic oligonucleotide
  Sense strand starting at position 3655 of SEQ ID NO: 915162
gagcauucuugauuaguaa

SEQ ID NO: 1058685 - RNA, 19 nt, Artificial Sequence
  Description of Artificial Sequence: Synthetic oligonucleotide
  Antisense strand to SEQ ID NO: 1058684
uuacuaaucaagaaugcuc

SEQ ID NO: 1058686 - RNA, 19 nt, Artificial Sequence
  Description of Artificial Sequence: Synthetic oligonucleotide
  Sense strand starting at position 3656 of SEQ ID NO: 915162
agcauucuugauuaguaag

SEQ ID NO: 1058687 - RNA, 19 nt, Artificial Sequence
  Description of Artificial Sequence: Synthetic oligonucleotide
  Antisense strand to SEQ ID NO: 1058686
cuuacuaaucaagaaugcu

SEQ ID NO: 1058688 - RNA, 19 nt, Artificial Sequence
  Description of Artificial Sequence: Synthetic oligonucleotide
  Sense strand starting at position 3681 of SEQ ID NO: 915162
gguuggagugagugaugga

SEQ ID NO: 1058689 - RNA, 19 nt, Artificial Sequence
  Description of Artificial Sequence: Synthetic oligonucleotide
  Antisense strand to SEQ ID NO: 1058688
uccaucacucacuccaacc

SEQ ID NO: 1058690 - RNA, 19 nt, Artificial Sequence
  Description of Artificial Sequence: Synthetic oligonucleotide
  Sense strand starting at position 3682 of SEQ ID NO: 915162
guuggagugagugauggaa

SEQ ID NO: 1058691 - RNA, 19 nt, Artificial Sequence
  Description of Artificial Sequence: Synthetic oligonucleotide
  Antisense strand to SEQ ID NO: 1058690
uuccaucacucacuccaac

SEQ ID NO: 1058692 - RNA, 19 nt, Artificial Sequence
  Description of Artificial Sequence: Synthetic oligonucleotide
  Sense strand starting at position 3814 of SEQ ID NO: 915162
aguaauagauaucugcuaa

SEQ ID NO: 1058693 - RNA, 19 nt, Artificial Sequence
  Description of Artificial Sequence: Synthetic oligonucleotide
  Antisense strand to SEQ ID NO: 1058692
uuagcagauaucuauuacu

SEQ ID NO: 1058694 - RNA, 19 nt, Artificial Sequence
  Description of Artificial Sequence: Synthetic oligonucleotide
  Sense strand starting at position 3888 of SEQ ID NO: 915162
uaaggaaucucagccagga

SEQ ID NO: 1058695 - RNA, 19 nt, Artificial Sequence
  Description of Artificial Sequence: Synthetic oligonucleotide
  Antisense strand to SEQ ID NO: 1058694
uccuggcugagauuccuua

SEQ ID NO: 1058696 - RNA, 19 nt, Artificial Sequence
  Description of Artificial Sequence: Synthetic oligonucleotide
  Sense strand starting at position 173 of SEQ ID NO: 915163
agaauaagucgguagcgga

SEQ ID NO: 1058697 - RNA, 19 nt, Artificial Sequence
  Description of Artificial Sequence: Synthetic oligonucleotide
  Antisense strand to SEQ ID NO: 1058696
uccgcuaccgacuuauucu

SEQ ID NO: 1058698 - RNA, 19 nt, Artificial Sequence
  Description of Artificial Sequence: Synthetic oligonucleotide
  Sense strand starting at position 270 of SEQ ID NO: 915163
agcaguggaguccacauau

SEQ ID NO: 1058699 - RNA, 19 nt, Artificial Sequence
  Description of Artificial Sequence: Synthetic oligonucleotide
  Antisense strand to SEQ ID NO: 1058698
auauguggacuccacugcu

SEQ ID NO: 1058700 - RNA, 19 nt, Artificial Sequence
  Description of Artificial Sequence: Synthetic oligonucleotide
  Sense strand starting at position 520 of SEQ ID NO: 915163
ggagccauauauuccacuu

SEQ ID NO: 1058701 - RNA, 19 nt, Artificial Sequence
  Description of Artificial Sequence: Synthetic oligonucleotide
  Antisense strand to SEQ ID NO: 1058700
aaguggaauauauggcucc

SEQ ID NO: 1058702 - RNA, 19 nt, Artificial Sequence
  Description of Artificial Sequence: Synthetic oligonucleotide
  Sense strand starting at position 559 of SEQ ID NO: 915163
auagaacaucgccaucagu

SEQ ID NO: 1058703 - RNA, 19 nt, Artificial Sequence
  Description of Artificial Sequence: Synthetic oligonucleotide
  Antisense strand to SEQ ID NO: 1058702
acugauggcgauguucuau

SEQ ID NO: 1058704 - RNA, 19 nt, Artificial Sequence
  Description of Artificial Sequence: Synthetic oligonucleotide
  Sense strand starting at position 562 of SEQ ID NO: 915163
gaacaucgccaucaguuua

SEQ ID NO: 1058705 - RNA, 19 nt, Artificial Sequence
  Description of Artificial Sequence: Synthetic oligonucleotide
  Antisense strand to SEQ ID NO: 1058704
uaaacugauggcgauguuc

SEQ ID NO: 1058706 - RNA, 19 nt, Artificial Sequence
  Description of Artificial Sequence: Synthetic oligonucleotide
  Sense strand starting at position 594 of SEQ ID NO: 915163
ggacaauucugguccauac

SEQ ID NO: 1058707 - RNA, 19 nt, Artificial Sequence
  Description of Artificial Sequence: Synthetic oligonucleotide
  Antisense strand to SEQ ID NO: 1058706
guauggaccagaauugucc

SEQ ID NO: 1058708 - RNA, 19 nt, Artificial Sequence
  Description of Artificial Sequence: Synthetic oligonucleotide
  Sense strand starting at position 807 of SEQ ID NO: 915163
ucuuaaauauggucagacu

SEQ ID NO: 1058709 - RNA, 19 nt, Artificial Sequence
  Description of Artificial Sequence: Synthetic oligonucleotide
  Antisense strand to SEQ ID NO: 1058708
agucugaccauauuuaaga

SEQ ID NO: 1058710 - RNA, 19 nt, Artificial Sequence
  Description of Artificial Sequence: Synthetic oligonucleotide
  Sense strand starting at position 824 of SEQ ID NO: 915163
cugauagagugaccuacau

SEQ ID NO: 1058711 - RNA, 19 nt, Artificial Sequence
  Description of Artificial Sequence: Synthetic oligonucleotide
  Antisense strand to SEQ ID NO: 1058710
auguaggucacucuaucag

SEQ ID NO: 1058712 - RNA, 19 nt, Artificial Sequence
  Description of Artificial Sequence: Synthetic oligonucleotide
  Sense strand starting at position 828 of SEQ ID NO: 915163
uagagugaccuacaugugu

SEQ ID NO: 1058713 - RNA, 19 nt, Artificial Sequence
  Description of Artificial Sequence: Synthetic oligonucleotide
  Antisense strand to SEQ ID NO: 1058712
acacauguaggucacucua

SEQ ID NO: 1058714 - RNA, 19 nt, Artificial Sequence
  Description of Artificial Sequence: Synthetic oligonucleotide
  Sense strand starting at position 859 of SEQ ID NO: 915163
aauggaacuuguuuguuga

SEQ ID NO: 1058715 - RNA, 19 nt, Artificial Sequence
  Description of Artificial Sequence: Synthetic oligonucleotide
  Antisense strand to SEQ ID NO: 1058714
ucaacaaacaaguuccauu

SEQ ID NO: 1058716 - RNA, 19 nt, Artificial Sequence
  Description of Artificial Sequence: Synthetic oligonucleotide
  Sense strand starting at position 913 of SEQ ID NO: 915163
uugucauggacucagagua

SEQ ID NO: 1058717 - RNA, 19 nt, Artificial Sequence
  Description of Artificial Sequence: Synthetic oligonucleotide
  Antisense strand to SEQ ID NO: 1058716
uacucugaguccaugacaa

SEQ ID NO: 1058718 - RNA, 19 nt, Artificial Sequence
  Description of Artificial Sequence: Synthetic oligonucleotide
  Sense strand starting at position 1085 of SEQ ID NO: 915163
gggucuugacacuguagau

SEQ ID NO: 1058719 - RNA, 19 nt, Artificial Sequence
  Description of Artificial Sequence: Synthetic oligonucleotide
  Antisense strand to SEQ ID NO: 1058718
aucuacagugucaagaccc

SEQ ID NO: 1058720 - RNA, 19 nt, Artificial Sequence
  Description of Artificial Sequence: Synthetic oligonucleotide
  Sense strand starting at position 1136 of SEQ ID NO: 915163
agauguugccaaugagaac

SEQ ID NO: 1058721 - RNA, 19 nt, Artificial Sequence
  Description of Artificial Sequence: Synthetic oligonucleotide
  Antisense strand to SEQ ID NO: 1058720
guucucauuggcaacaucu

SEQ ID NO: 1058722 - RNA, 19 nt, Artificial Sequence
  Description of Artificial Sequence: Synthetic oligonucleotide
  Sense strand starting at position 1201 of SEQ ID NO: 915163
aggcuaaugauagggaugu

SEQ ID NO: 1058723 - RNA, 19 nt, Artificial Sequence
  Description of Artificial Sequence: Synthetic oligonucleotide
  Antisense strand to SEQ ID NO: 1058722
acaucccuaucauuagccu

SEQ ID NO: 1058724 - RNA, 19 nt, Artificial Sequence
  Description of Artificial Sequence: Synthetic oligonucleotide
  Sense strand starting at position 1388 of SEQ ID NO: 915163
uauugaaucggaugucuga

SEQ ID NO: 1058725 - RNA, 19 nt, Artificial Sequence
  Description of Artificial Sequence: Synthetic oligonucleotide
  Antisense strand to SEQ ID NO: 1058724
ucagacauccgauucaaua

SEQ ID NO: 1058726 - RNA, 19 nt, Artificial Sequence
  Description of Artificial Sequence: Synthetic oligonucleotide
  Sense strand starting at position 1694 of SEQ ID NO: 915163
agcugaucucucgaaugau

SEQ ID NO: 1058727 - RNA, 19 nt, Artificial Sequence
  Description of Artificial Sequence: Synthetic oligonucleotide
  Antisense strand to SEQ ID NO: 1058726
aucauucgagagaucagcu

SEQ ID NO: 1058728 - RNA, 19 nt, Artificial Sequence
  Description of Artificial Sequence: Synthetic oligonucleotide
  Sense strand starting at position 1815 of SEQ ID NO: 915163
uggcucaguccauaucaca

SEQ ID NO: 1058729 - RNA, 19 nt, Artificial Sequence
  Description of Artificial Sequence: Synthetic oligonucleotide
  Antisense strand to SEQ ID NO: 1058728
ugugauauggacugagcca

SEQ ID NO: 1058730 - RNA, 19 nt, Artificial Sequence
  Description of Artificial Sequence: Synthetic oligonucleotide
  Sense strand starting at position 1956 of SEQ ID NO: 915163
ggugcuagggcuuacugaa

SEQ ID NO: 1058731 - RNA, 19 nt, Artificial Sequence
  Description of Artificial Sequence: Synthetic oligonucleotide
  Antisense strand to SEQ ID NO: 1058730
uucaguaagcccuagcacc

SEQ ID NO: 1058732 - RNA, 19 nt, Artificial Sequence
  Description of Artificial Sequence: Synthetic oligonucleotide
  Sense strand starting at position 1990 of SEQ ID NO: 915163
cugagaaacaugugagagu

SEQ ID NO: 1058733 - RNA, 19 nt, Artificial Sequence
  Description of Artificial Sequence: Synthetic oligonucleotide
  Antisense strand to SEQ ID NO: 1058732
acucucacauguuucucag

SEQ ID NO: 1058734 - RNA, 19 nt, Artificial Sequence
  Description of Artificial Sequence: Synthetic oligonucleotide
  Sense strand starting at position 2105 of SEQ ID NO: 915163
gagaaauucuguuucuuug

SEQ ID NO: 1058735 - RNA, 19 nt, Artificial Sequence
  Description of Artificial Sequence: Synthetic oligonucleotide
  Antisense strand to SEQ ID NO: 1058734
caaagaaacagaauuucuc

SEQ ID NO: 1058736 - RNA, 19 nt, Artificial Sequence
  Description of Artificial Sequence: Synthetic oligonucleotide
  Sense strand starting at position 2107 of SEQ ID NO: 915163
gaaauucuguuucuuugag

SEQ ID NO: 1058737 - RNA, 19 nt, Artificial Sequence
  Description of Artificial Sequence: Synthetic oligonucleotide
  Antisense strand to SEQ ID NO: 1058736
cucaaagaaacagaauuuc

SEQ ID NO: 1058738 - RNA, 19 nt, Artificial Sequence
  Description of Artificial Sequence: Synthetic oligonucleotide
  Sense strand starting at position 2133 of SEQ ID NO: 915163
auccauugccuuugagaaa

SEQ ID NO: 1058739 - RNA, 19 nt, Artificial Sequence
  Description of Artificial Sequence: Synthetic oligonucleotide
  Antisense strand to SEQ ID NO: 1058738
uuucucaaaggcaauggau

SEQ ID NO: 1058740 - RNA, 19 nt, Artificial Sequence
  Description of Artificial Sequence: Synthetic oligonucleotide
  Sense strand starting at position 2193 of SEQ ID NO: 915163
acugucuggaugugaacau

SEQ ID NO: 1058741 - RNA, 19 nt, Artificial Sequence
  Description of Artificial Sequence: Synthetic oligonucleotide
  Antisense strand to SEQ ID NO: 1058740
auguucacauccagacagu

SEQ ID NO: 1058742 - RNA, 19 nt, Artificial Sequence
  Description of Artificial Sequence: Synthetic oligonucleotide
  Sense strand starting at position 2202 of SEQ ID NO: 915163
augugaacauauccuuaga

SEQ ID NO: 1058743 - RNA, 19 nt, Artificial Sequence
  Description of Artificial Sequence: Synthetic oligonucleotide
  Antisense strand to SEQ ID NO: 1058742
ucuaaggauauguucacau

SEQ ID NO: 1058744 - RNA, 19 nt, Artificial Sequence
  Description of Artificial Sequence: Synthetic oligonucleotide
  Sense strand starting at position 2204 of SEQ ID NO: 915163
gugaacauauccuuagaag

SEQ ID NO: 1058745 - RNA, 19 nt, Artificial Sequence
  Description of Artificial Sequence: Synthetic oligonucleotide
  Antisense strand to SEQ ID NO: 1058744
cuucuaaggauauguucac

SEQ ID NO: 1058746 - RNA, 19 nt, Artificial Sequence
  Description of Artificial Sequence: Synthetic oligonucleotide
  Sense strand starting at position 2280 of SEQ ID NO: 915163
aaauacguugcuuagacau

SEQ ID NO: 1058747 - RNA, 19 nt, Artificial Sequence
  Description of Artificial Sequence: Synthetic oligonucleotide
  Antisense strand to SEQ ID NO: 1058746
augucuaagcaacguauuu

SEQ ID NO: 1058748 - RNA, 19 nt, Artificial Sequence
  Description of Artificial Sequence: Synthetic oligonucleotide
  Sense strand starting at position 2388 of SEQ ID NO: 915163
cgaagugaagaguaaucuu

SEQ ID NO: 1058749 - RNA, 19 nt, Artificial Sequence
  Description of Artificial Sequence: Synthetic oligonucleotide
  Antisense strand to SEQ ID NO: 1058748
aagauuacucuucacuucg

SEQ ID NO: 1058750 - RNA, 19 nt, Artificial Sequence
  Description of Artificial Sequence: Synthetic oligonucleotide
  Sense strand starting at position 2402 of SEQ ID NO: 915163
aucuuugggcuuuaaauau

SEQ ID NO: 1058751 - RNA, 19 nt, Artificial Sequence
  Description of Artificial Sequence: Synthetic oligonucleotide
  Antisense strand to SEQ ID NO: 1058750
auauuuaaagcccaaagau

SEQ ID NO: 1058752 - RNA, 19 nt, Artificial Sequence
  Description of Artificial Sequence: Synthetic oligonucleotide
  Sense strand starting at position 2593 of SEQ ID NO: 915163
gcaugagaccuuggguaaa

SEQ ID NO: 1058753 - RNA, 19 nt, Artificial Sequence
  Description of Artificial Sequence: Synthetic oligonucleotide
  Antisense strand to SEQ ID NO: 1058752
uuuacccaaggucucaugc

SEQ ID NO: 1058754 - RNA, 19 nt, Artificial Sequence
  Description of Artificial Sequence: Synthetic oligonucleotide
  Sense strand starting at position 2660 of SEQ ID NO: 915163
gccuuugugauguagagaa

SEQ ID NO: 1058755 - RNA, 19 nt, Artificial Sequence
  Description of Artificial Sequence: Synthetic oligonucleotide
  Antisense strand to SEQ ID NO: 1058754
uucucuacaucacaaaggc

SEQ ID NO: 1058756 - RNA, 19 nt, Artificial Sequence
  Description of Artificial Sequence: Synthetic oligonucleotide
  Sense strand starting at position 2740 of SEQ ID NO: 915163
aguuaaugagcugauuaac

SEQ ID NO: 1058757 - RNA, 19 nt, Artificial Sequence
  Description of Artificial Sequence: Synthetic oligonucleotide
  Antisense strand to SEQ ID NO: 1058756
guuaaucagcucauuaacu

SEQ ID NO: 1058758 - RNA, 19 nt, Artificial Sequence
  Description of Artificial Sequence: Synthetic oligonucleotide
  Sense strand starting at position 2817 of SEQ ID NO: 915163
ccugcaguucuacagauca

SEQ ID NO: 1058759 - RNA, 19 nt, Artificial Sequence
  Description of Artificial Sequence: Synthetic oligonucleotide
  Antisense strand to SEQ ID NO: 1058758
ugaucuguagaacugcagg

SEQ ID NO: 1058760 - RNA, 19 nt, Artificial Sequence
  Description of Artificial Sequence: Synthetic oligonucleotide
  Sense strand starting at position 2924 of SEQ ID NO: 915163
cuuuaaguuccagaccuga

SEQ ID NO: 1058761 - RNA, 19 nt, Artificial Sequence
  Description of Artificial Sequence: Synthetic oligonucleotide
  Antisense strand to SEQ ID NO: 1058760
ucaggucuggaacuuaaag

SEQ ID NO: 1058762 - RNA, 19 nt, Artificial Sequence
  Description of Artificial Sequence: Synthetic oligonucleotide
  Sense strand starting at position 3007 of SEQ ID NO: 915163
auguuugauugaguaacuu

SEQ ID NO: 1058763 - RNA, 19 nt, Artificial Sequence
  Description of Artificial Sequence: Synthetic oligonucleotide
  Antisense strand to SEQ ID NO: 1058762
aaguuacucaaucaaacau

SEQ ID NO: 1058764 - RNA, 19 nt, Artificial Sequence
  Description of Artificial Sequence: Synthetic oligonucleotide
  Sense strand starting at position 3017 of SEQ ID NO: 915163
gaguaacuucgagauguua

SEQ ID NO: 1058765 - RNA, 19 nt, Artificial Sequence
  Description of Artificial Sequence: Synthetic oligonucleotide
  Antisense strand to SEQ ID NO: 1058764
uaacaucucgaaguuacuc

SEQ ID NO: 1058766 - RNA, 19 nt, Artificial Sequence
  Description of Artificial Sequence: Synthetic oligonucleotide
  Sense strand starting at position 3239 of SEQ ID NO: 915163
uccauagaaugcuugaagu

SEQ ID NO: 1058767 - RNA, 19 nt, Artificial Sequence
  Description of Artificial Sequence: Synthetic oligonucleotide
  Antisense strand to SEQ ID NO: 1058766
acuucaagcauucuaugga

SEQ ID NO: 1058768 - RNA, 19 nt, Artificial Sequence
  Description of Artificial Sequence: Synthetic oligonucleotide
  Sense strand starting at position 3241 of SEQ ID NO: 915163
cauagaaugcuugaaguuu

SEQ ID NO: 1058769 - RNA, 19 nt, Artificial Sequence
  Description of Artificial Sequence: Synthetic oligonucleotide
  Antisense strand to SEQ ID NO: 1058768
aaacuucaagcauucuaug

SEQ ID NO: 1058770 - RNA, 19 nt, Artificial Sequence
  Description of Artificial Sequence: Synthetic oligonucleotide
  Sense strand starting at position 3445 of SEQ ID NO: 915163
ucaagaaguuucuuaagac

SEQ ID NO: 1058771 - RNA, 19 nt, Artificial Sequence
  Description of Artificial Sequence: Synthetic oligonucleotide
  Antisense strand to SEQ ID NO: 1058770
gucuuaagaaacuucuuga

SEQ ID NO: 1058772 - RNA, 19 nt, Artificial Sequence
  Description of Artificial Sequence: Synthetic oligonucleotide
  Sense strand starting at position 3606 of SEQ ID NO: 915163
uuccuuaaugugcagacua

SEQ ID NO: 1058773 - RNA, 19 nt, Artificial Sequence
  Description of Artificial Sequence: Synthetic oligonucleotide
  Antisense strand to SEQ ID NO: 1058772
uagucugcacauuaaggaa

SEQ ID NO: 1058774 - RNA, 19 nt, Artificial Sequence
  Description of Artificial Sequence: Synthetic oligonucleotide
  Sense strand starting at position 3730 of SEQ ID NO: 915163
cugaguguuuaaucuuaaa

SEQ ID NO: 1058775 - RNA, 19 nt, Artificial Sequence
  Description of Artificial Sequence: Synthetic oligonucleotide
  Antisense strand to SEQ ID NO: 1058774
uuuaagauuaaacacucag

SEQ ID NO: 1058776 - RNA, 19 nt, Artificial Sequence
  Description of Artificial Sequence: Synthetic oligonucleotide
  Sense strand starting at position 252 of SEQ ID NO: 915164
uguguacacuuguuauuuc

SEQ ID NO: 1058777 - RNA, 19 nt, Artificial Sequence
  Description of Artificial Sequence: Synthetic oligonucleotide
  Antisense strand to SEQ ID NO: 1058776
gaaauaacaaguguacaca

SEQ ID NO: 1058778 - RNA, 19 nt, Artificial Sequence
  Description of Artificial Sequence: Synthetic oligonucleotide
  Sense strand starting at position 392 of SEQ ID NO: 915164
gauucuguaguauaguauu

SEQ ID NO: 1058779 - RNA, 19 nt, Artificial Sequence
  Description of Artificial Sequence: Synthetic oligonucleotide
  Antisense strand to SEQ ID NO: 1058778
aauacuauacuacagaauc

SEQ ID NO: 1058780 - RNA, 19 nt, Artificial Sequence
  Description of Artificial Sequence: Synthetic oligonucleotide
  Sense strand starting at position 538 of SEQ ID NO: 915164
uuccuuguaugacucugaa

SEQ ID NO: 1058781 - RNA, 19 nt, Artificial Sequence
  Description of Artificial Sequence: Synthetic oligonucleotide
  Antisense strand to SEQ ID NO: 1058780
uucagagucauacaaggaa

SEQ ID NO: 1058782 - RNA, 19 nt, Artificial Sequence
  Description of Artificial Sequence: Synthetic oligonucleotide
  Sense strand starting at position 628 of SEQ ID NO: 915164
acauguacuuccuuugauu

SEQ ID NO: 1058783 - RNA, 19 nt, Artificial Sequence
  Description of Artificial Sequence: Synthetic oligonucleotide
  Antisense strand to SEQ ID NO: 1058782
aaucaaaggaaguacaugu

SEQ ID NO: 1058784 - RNA, 19 nt, Artificial Sequence
  Description of Artificial Sequence: Synthetic oligonucleotide
  Sense strand starting at position 916 of SEQ ID NO: 915164
ugauaugagccaugaugau

SEQ ID NO: 1058785 - RNA, 19 nt, Artificial Sequence
  Description of Artificial Sequence: Synthetic oligonucleotide
  Antisense strand to SEQ ID NO: 1058784
aucaucauggcucauauca

SEQ ID NO: 1058786 - RNA, 19 nt, Artificial Sequence
  Description of Artificial Sequence: Synthetic oligonucleotide
  Sense strand starting at position 1079 of SEQ ID NO: 915164
uuaccacaugaaugcgaau

SEQ ID NO: 1058787 - RNA, 19 nt, Artificial Sequence
  Description of Artificial Sequence: Synthetic oligonucleotide
  Antisense strand to SEQ ID NO: 1058786
auucgcauucaugugguaa

SEQ ID NO: 1058788 - RNA, 19 nt, Artificial Sequence
  Description of Artificial Sequence: Synthetic oligonucleotide
  Sense strand starting at position 1195 of SEQ ID NO: 915164
gacccaaaccuauguguga

SEQ ID NO: 1058789 - RNA, 19 nt, Artificial Sequence
  Description of Artificial Sequence: Synthetic oligonucleotide
  Antisense strand to SEQ ID NO: 1058788
ucacacauagguuuggguc

SEQ ID NO: 1058790 - RNA, 19 nt, Artificial Sequence
  Description of Artificial Sequence: Synthetic oligonucleotide
  Sense strand starting at position 1196 of SEQ ID NO: 915164
acccaaaccuaugugugaa

SEQ ID NO: 1058791 - RNA, 19 nt, Artificial Sequence
  Description of Artificial Sequence: Synthetic oligonucleotide
  Antisense strand to SEQ ID NO: 1058790
uucacacauagguuugggu

SEQ ID NO: 1058792 - RNA, 19 nt, Artificial Sequence
  Description of Artificial Sequence: Synthetic oligonucleotide
  Sense strand starting at position 1199 of SEQ ID NO: 915164
caaaccuaugugugaagaa

SEQ ID NO: 1058793 - RNA, 19 nt, Artificial Sequence
  Description of Artificial Sequence: Synthetic oligonucleotide
  Antisense strand to SEQ ID NO: 1058792
uucuucacacauagguuug

SEQ ID NO: 1058794 - RNA, 19 nt, Artificial Sequence
  Description of Artificial Sequence: Synthetic oligonucleotide
  Sense strand starting at position 1253 of SEQ ID NO: 915164
cacagaugugagcaaugca

SEQ ID NO: 1058795 - RNA, 19 nt, Artificial Sequence
  Description of Artificial Sequence: Synthetic oligonucleotide
  Antisense strand to SEQ ID NO: 1058794
ugcauugcucacaucugug

SEQ ID NO: 1058796 - RNA, 19 nt, Artificial Sequence
  Description of Artificial Sequence: Synthetic oligonucleotide
  Sense strand starting at position 1272 of SEQ ID NO: 915164
gguauugaaugcuuuaaac

SEQ ID NO: 1058797 - RNA, 19 nt, Artificial Sequence
  Description of Artificial Sequence: Synthetic oligonucleotide
  Antisense strand to SEQ ID NO: 1058796
guuuaaagcauucaauacc

SEQ ID NO: 1058798 - RNA, 19 nt, Artificial Sequence
  Description of Artificial Sequence: Synthetic oligonucleotide
  Sense strand starting at position 1321 of SEQ ID NO: 915164
gugauaaauaucuggaugu

SEQ ID NO: 1058799 - RNA, 19 nt, Artificial Sequence
  Description of Artificial Sequence: Synthetic oligonucleotide
  Antisense strand to SEQ ID NO: 1058798
acauccagauauuuaucac

SEQ ID NO: 1058800 - RNA, 19 nt, Artificial Sequence
  Description of Artificial Sequence: Synthetic oligonucleotide
  Sense strand starting at position 1470 of SEQ ID NO: 915164
gaugacuguugugugauaa

SEQ ID NO: 1058801 - RNA, 19 nt, Artificial Sequence
  Description of Artificial Sequence: Synthetic oligonucleotide
  Antisense strand to SEQ ID NO: 1058800
uuaucacacaacagucauc

SEQ ID NO: 1058802 - RNA, 19 nt, Artificial Sequence
  Description of Artificial Sequence: Synthetic oligonucleotide
  Sense strand starting at position 1471 of SEQ ID NO: 915164
augacuguugugugauaaa

SEQ ID NO: 1058803 - RNA, 19 nt, Artificial Sequence
  Description of Artificial Sequence: Synthetic oligonucleotide
  Antisense strand to SEQ ID NO: 1058802
uuuaucacacaacagucau

SEQ ID NO: 1058804 - RNA, 19 nt, Artificial Sequence
  Description of Artificial Sequence: Synthetic oligonucleotide
  Sense strand starting at position 1559 of SEQ ID NO: 915164
uuccuaucugaaugacaag

SEQ ID NO: 1058805 - RNA, 19 nt, Artificial Sequence
  Description of Artificial Sequence: Synthetic oligonucleotide
  Antisense strand to SEQ ID NO: 1058804
cuugucauucagauaggaa

SEQ ID NO: 1058806 - RNA, 19 nt, Artificial Sequence
  Description of Artificial Sequence: Synthetic oligonucleotide
  Sense strand starting at position 1598 of SEQ ID NO: 915164
caugucuuaguggauaaca

SEQ ID NO: 1058807 - RNA, 19 nt, Artificial Sequence
  Description of Artificial Sequence: Synthetic oligonucleotide
  Antisense strand to SEQ ID NO: 1058806
uguuauccacuaagacaug

SEQ ID NO: 1058808 - RNA, 19 nt, Artificial Sequence
  Description of Artificial Sequence: Synthetic oligonucleotide
  Sense strand starting at position 1835 of SEQ ID NO: 915164
ugcgcucagauuugaugau

SEQ ID NO: 1058809 - RNA, 19 nt, Artificial Sequence
  Description of Artificial Sequence: Synthetic oligonucleotide
  Antisense strand to SEQ ID NO: 1058808
aucaucaaaucugagcgca

SEQ ID NO: 1058810 - RNA, 19 nt, Artificial Sequence
  Description of Artificial Sequence: Synthetic oligonucleotide
  Sense strand starting at position 2091 of SEQ ID NO: 915164
uauauugagucugucugau

SEQ ID NO: 1058811 - RNA, 19 nt, Artificial Sequence
  Description of Artificial Sequence: Synthetic oligonucleotide
  Antisense strand to SEQ ID NO: 1058810
aucagacagacucaauaua

SEQ ID NO: 1058812 - RNA, 19 nt, Artificial Sequence
  Description of Artificial Sequence: Synthetic oligonucleotide
  Sense strand starting at position 2097 of SEQ ID NO: 915164
gagucugucugauuugggu

SEQ ID NO: 1058813 - RNA, 19 nt, Artificial Sequence
  Description of Artificial Sequence: Synthetic oligonucleotide
  Antisense strand to SEQ ID NO: 1058812
acccaaaucagacagacuc

SEQ ID NO: 1058814 - RNA, 19 nt, Artificial Sequence
  Description of Artificial Sequence: Synthetic oligonucleotide
  Sense strand starting at position 2099 of SEQ ID NO: 915164
gucugucugauuuggguau

SEQ ID NO: 1058815 - RNA, 19 nt, Artificial Sequence
  Description of Artificial Sequence: Synthetic oligonucleotide
  Antisense strand to SEQ ID NO: 1058814
auacccaaaucagacagac

SEQ ID NO: 1058816 - RNA, 19 nt, Artificial Sequence
  Description of Artificial Sequence: Synthetic oligonucleotide
  Sense strand starting at position 2216 of SEQ ID NO: 915164
gccauaauaggauguuaug

SEQ ID NO: 1058817 - RNA, 19 nt, Artificial Sequence
  Description of Artificial Sequence: Synthetic oligonucleotide
  Antisense strand to SEQ ID NO: 1058816
cauaacauccuauuauggc

SEQ ID NO: 1058818 - RNA, 19 nt, Artificial Sequence
  Description of Artificial Sequence: Synthetic oligonucleotide
  Sense strand starting at position 2297 of SEQ ID NO: 915164
gccagucuguuauuucuuu

SEQ ID NO: 1058819 - RNA, 19 nt, Artificial Sequence
  Description of Artificial Sequence: Synthetic oligonucleotide
  Antisense strand to SEQ ID NO: 1058818
aaagaaauaacagacuggc

SEQ ID NO: 1058820 - RNA, 19 nt, Artificial Sequence
  Description of Artificial Sequence: Synthetic oligonucleotide
  Sense strand starting at position 2313 of SEQ ID NO: 915164
uuuccagaccuguggacaa

SEQ ID NO: 1058821 - RNA, 19 nt, Artificial Sequence
  Description of Artificial Sequence: Synthetic oligonucleotide
  Antisense strand to SEQ ID NO: 1058820
uuguccacaggucuggaaa

SEQ ID NO: 1058822 - RNA, 19 nt, Artificial Sequence
  Description of Artificial Sequence: Synthetic oligonucleotide
  Sense strand starting at position 2481 of SEQ ID NO: 915164
accaguacauugguguaaa

SEQ ID NO: 1058823 - RNA, 19 nt, Artificial Sequence
  Description of Artificial Sequence: Synthetic oligonucleotide
  Antisense strand to SEQ ID NO: 1058822
uuuacaccaauguacuggu

SEQ ID NO: 1058824 - RNA, 19 nt, Artificial Sequence
  Description of Artificial Sequence: Synthetic oligonucleotide
  Sense strand starting at position 2579 of SEQ ID NO: 915164
auguaaagagaaugcuuua

SEQ ID NO: 1058825 - RNA, 19 nt, Artificial Sequence
  Description of Artificial Sequence: Synthetic oligonucleotide
  Antisense strand to SEQ ID NO: 1058824
uaaagcauucucuuuacau

SEQ ID NO: 1058826 - RNA, 19 nt, Artificial Sequence
  Description of Artificial Sequence: Synthetic oligonucleotide
  Sense strand starting at position 2710 of SEQ ID NO: 915164
gcugaaacucuugaaaugu

SEQ ID NO: 1058827 - RNA, 19 nt, Artificial Sequence
  Description of Artificial Sequence: Synthetic oligonucleotide
  Antisense strand to SEQ ID NO: 1058826
acauuucaagaguuucagc

SEQ ID NO: 1058828 - RNA, 19 nt, Artificial Sequence
  Description of Artificial Sequence: Synthetic oligonucleotide
  Sense strand starting at position 2939 of SEQ ID NO: 915164
ccaauaaaggcucauuagu

SEQ ID NO: 1058829 - RNA, 19 nt, Artificial Sequence
  Description of Artificial Sequence: Synthetic oligonucleotide
  Antisense strand to SEQ ID NO: 1058828
acuaaugagccuuuauugg

SEQ ID NO: 1058830 - RNA, 19 nt, Artificial Sequence
  Description of Artificial Sequence: Synthetic oligonucleotide
  Sense strand starting at position 3282 of SEQ ID NO: 915164
uagagaaauguuugugaua

SEQ ID NO: 1058831 - RNA, 19 nt, Artificial Sequence
  Description of Artificial Sequence: Synthetic oligonucleotide
  Antisense strand to SEQ ID NO: 1058830
uaucacaaacauuucucua

SEQ ID NO: 1058832 - RNA, 19 nt, Artificial Sequence
  Description of Artificial Sequence: Synthetic oligonucleotide
  Sense strand starting at position 3283 of SEQ ID NO: 915164
agagaaauguuugugauac

SEQ ID NO: 1058833 - RNA, 19 nt, Artificial Sequence
  Description of Artificial Sequence: Synthetic oligonucleotide
  Antisense strand to SEQ ID NO: 1058832
guaucacaaacauuucucu

SEQ ID NO: 1058834 - RNA, 19 nt, Artificial Sequence
  Description of Artificial Sequence: Synthetic oligonucleotide
  Sense strand starting at position 3289 of SEQ ID NO: 915164
auguuugugauacagugaa

SEQ ID NO: 1058835 - RNA, 19 nt, Artificial Sequence
  Description of Artificial Sequence: Synthetic oligonucleotide
  Antisense strand to SEQ ID NO: 1058834
uucacuguaucacaaacau

SEQ ID NO: 1058836 - RNA, 19 nt, Artificial Sequence
  Description of Artificial Sequence: Synthetic oligonucleotide
  Sense strand starting at position 3645 of SEQ ID NO: 915164
guaaacuaguaggucaauu

SEQ ID NO: 1058837 - RNA, 19 nt, Artificial Sequence
  Description of Artificial Sequence: Synthetic oligonucleotide
  Antisense strand to SEQ ID NO: 1058836
aauugaccuacuaguuuac

SEQ ID NO: 1058838 - RNA, 19 nt, Artificial Sequence
  Description of Artificial Sequence: Synthetic oligonucleotide
  Sense strand starting at position 3802 of SEQ ID NO: 915164
uggcaaucacaaugucuga

SEQ ID NO: 1058839 - RNA, 19 nt, Artificial Sequence
  Description of Artificial Sequence: Synthetic oligonucleotide
  Antisense strand to SEQ ID NO: 1058838
ucagacauugugauugcca

SEQ ID NO: 1058840 - RNA, 19 nt, Artificial Sequence
  Description of Artificial Sequence: Synthetic oligonucleotide
  Sense strand starting at position 3909 of SEQ ID NO: 915164
guuaguuggauagagugau

SEQ ID NO: 1058841 - RNA, 19 nt, Artificial Sequence
  Description of Artificial Sequence: Synthetic oligonucleotide
  Antisense strand to SEQ ID NO: 1058840
aucacucuauccaacuaac

SEQ ID NO: 1058842 - RNA, 19 nt, Artificial Sequence
  Description of Artificial Sequence: Synthetic oligonucleotide
  Sense strand starting at position 3913 of SEQ ID NO: 915164
guuggauagagugauuguu

SEQ ID NO: 1058843 - RNA, 19 nt, Artificial Sequence
  Description of Artificial Sequence: Synthetic oligonucleotide
  Antisense strand to SEQ ID NO: 1058842
aacaaucacucuauccaac

SEQ ID NO: 1058844 - RNA, 19 nt, Artificial Sequence
  Description of Artificial Sequence: Synthetic oligonucleotide
  Sense strand starting at position 3915 of SEQ ID NO: 915164
uggauagagugauuguuau

SEQ ID NO: 1058845 - RNA, 19 nt, Artificial Sequence
  Description of Artificial Sequence: Synthetic oligonucleotide
  Antisense strand to SEQ ID NO: 1058844
auaacaaucacucuaucca

SEQ ID NO: 1058846 - RNA, 19 nt, Artificial Sequence
  Description of Artificial Sequence: Synthetic oligonucleotide
  Sense strand starting at position 3921 of SEQ ID NO: 915164
gagugauuguuauuggaga

SEQ ID NO: 1058847 - RNA, 19 nt, Artificial Sequence
  Description of Artificial Sequence: Synthetic oligonucleotide
  Antisense strand to SEQ ID NO: 1058846
ucuccaauaacaaucacuc

SEQ ID NO: 1058848 - RNA, 19 nt, Artificial Sequence
  Description of Artificial Sequence: Synthetic oligonucleotide
  Sense strand starting at position 3923 of SEQ ID NO: 915164
gugauuguuauuggagaag

SEQ ID NO: 1058849 - RNA, 19 nt, Artificial Sequence
  Description of Artificial Sequence: Synthetic oligonucleotide
  Antisense strand to SEQ ID NO: 1058848
cuucuccaauaacaaucac

SEQ ID NO: 1058850 - RNA, 19 nt, Artificial Sequence
  Description of Artificial Sequence: Synthetic oligonucleotide
  Sense strand starting at position 3932 of SEQ ID NO: 915164
auuggagaagcugguaauu

SEQ ID NO: 1058851 - RNA, 19 nt, Artificial Sequence
  Description of Artificial Sequence: Synthetic oligonucleotide
  Antisense strand to SEQ ID NO: 1058850
aauuaccagcuucuccaau

SEQ ID NO: 1058852 - RNA, 19 nt, Artificial Sequence
  Description of Artificial Sequence: Synthetic oligonucleotide
  Sense strand starting at position 3937 of SEQ ID NO: 915164
agaagcugguaauuaaauu

SEQ ID NO: 1058853 - RNA, 19 nt, Artificial Sequence
  Description of Artificial Sequence: Synthetic oligonucleotide
  Antisense strand to SEQ ID NO: 1058852
aauuuaauuaccagcuucu

SEQ ID NO: 1058854 - RNA, 19 nt, Artificial Sequence
  Description of Artificial Sequence: Synthetic oligonucleotide
  Sense strand starting at position 3964 of SEQ ID NO: 915164
gaaacuuggaaucgugaga

SEQ ID NO: 1058855 - RNA, 19 nt, Artificial Sequence
  Description of Artificial Sequence: Synthetic oligonucleotide
  Antisense strand to SEQ ID NO: 1058854
ucucacgauuccaaguuuc

SEQ ID NO: 1058856 - RNA, 19 nt, Artificial Sequence
  Description of Artificial Sequence: Synthetic oligonucleotide
  Sense strand starting at position 50 of SEQ ID NO: 915165
cugccucuugaaugauaug

SEQ ID NO: 1058857 - RNA, 19 nt, Artificial Sequence
  Description of Artificial Sequence: Synthetic oligonucleotide
  Antisense strand to SEQ ID NO: 1058856
cauaucauucaagaggcag

SEQ ID NO: 1058858 - RNA, 19 nt, Artificial Sequence
  Description of Artificial Sequence: Synthetic oligonucleotide
  Sense strand starting at position 139 of SEQ ID NO: 915165
ucagaugacucugucaacu

SEQ ID NO: 1058859 - RNA, 19 nt, Artificial Sequence
  Description of Artificial Sequence: Synthetic oligonucleotide
  Antisense strand to SEQ ID NO: 1058858
aguugacagagucaucuga

SEQ ID NO: 1058860 - RNA, 19 nt, Artificial Sequence
  Description of Artificial Sequence: Synthetic oligonucleotide
  Sense strand starting at position 187 of SEQ ID NO: 915165
guucuaagucuugacuaaa

SEQ ID NO: 1058861 - RNA, 19 nt, Artificial Sequence
  Description of Artificial Sequence: Synthetic oligonucleotide
  Antisense strand to SEQ ID NO: 1058860
uuuagucaagacuuagaac

SEQ ID NO: 1058862 - RNA, 19 nt, Artificial Sequence
  Description of Artificial Sequence: Synthetic oligonucleotide
  Sense strand starting at position 190 of SEQ ID NO: 915165
cuaagucuugacuaaaguc

SEQ ID NO: 1058863 - RNA, 19 nt, Artificial Sequence
  Description of Artificial Sequence: Synthetic oligonucleotide
  Antisense strand to SEQ ID NO: 1058862
gacuuuagucaagacuuag

SEQ ID NO: 1058864 - RNA, 19 nt, Artificial Sequence
  Description of Artificial Sequence: Synthetic oligonucleotide
  Sense strand starting at position 217 of SEQ ID NO: 915165
ggaggugguuucuuauaug

SEQ ID NO: 1058865 - RNA, 19 nt, Artificial Sequence
  Description of Artificial Sequence: Synthetic oligonucleotide
  Antisense strand to SEQ ID NO: 1058864
cauauaagaaaccaccucc

SEQ ID NO: 1058866 - RNA, 19 nt, Artificial Sequence
  Description of Artificial Sequence: Synthetic oligonucleotide
  Sense strand starting at position 464 of SEQ ID NO: 915165
uucuaagaauucucaggca

SEQ ID NO: 1058867 - RNA, 19 nt, Artificial Sequence
  Description of Artificial Sequence: Synthetic oligonucleotide
  Antisense strand to SEQ ID NO: 1058866
ugccugagaauucuuagaa

SEQ ID NO: 1058868 - RNA, 19 nt, Artificial Sequence
  Description of Artificial Sequence: Synthetic oligonucleotide
  Sense strand starting at position 512 of SEQ ID NO: 915165
auaagauaguuucuguacu

SEQ ID NO: 1058869 - RNA, 19 nt, Artificial Sequence
  Description of Artificial Sequence: Synthetic oligonucleotide
  Antisense strand to SEQ ID NO: 1058868
aguacagaaacuaucuuau

SEQ ID NO: 1058870 - RNA, 19 nt, Artificial Sequence
  Description of Artificial Sequence: Synthetic oligonucleotide
  Sense strand starting at position 522 of SEQ ID NO: 915165
uucuguacucaagaugcuu

SEQ ID NO: 1058871 - RNA, 19 nt, Artificial Sequence
  Description of Artificial Sequence: Synthetic oligonucleotide
  Antisense strand to SEQ ID NO: 1058870
aagcaucuugaguacagaa

SEQ ID NO: 1058872 - RNA, 19 nt, Artificial Sequence
  Description of Artificial Sequence: Synthetic oligonucleotide
  Sense strand starting at position 537 of SEQ ID NO: 915165
gcuuucaguggguaacaga

SEQ ID NO: 1058873 - RNA, 19 nt, Artificial Sequence
  Description of Artificial Sequence: Synthetic oligonucleotide
  Antisense strand to SEQ ID NO: 1058872
ucuguuacccacugaaagc

SEQ ID NO: 1058874 - RNA, 19 nt, Artificial Sequence
  Description of Artificial Sequence: Synthetic oligonucleotide
  Sense strand starting at position 633 of SEQ ID NO: 915165
gugguucuagaaggauauu

SEQ ID NO: 1058875 - RNA, 19 nt, Artificial Sequence
  Description of Artificial Sequence: Synthetic oligonucleotide
  Antisense strand to SEQ ID NO: 1058874
aauauccuucuagaaccac

SEQ ID NO: 1058876 - RNA, 19 nt, Artificial Sequence
  Description of Artificial Sequence: Synthetic oligonucleotide
  Sense strand starting at position 798 of SEQ ID NO: 915165
uguagauaucgguauuacu

SEQ ID NO: 1058877 - RNA, 19 nt, Artificial Sequence
  Description of Artificial Sequence: Synthetic oligonucleotide
  Antisense strand to SEQ ID NO: 1058876
aguaauaccgauaucuaca

SEQ ID NO: 1058878 - RNA, 19 nt, Artificial Sequence
  Description of Artificial Sequence: Synthetic oligonucleotide
  Sense strand starting at position 956 of SEQ ID NO: 915165
gagcuaguaguuugagaau

SEQ ID NO: 1058879 - RNA, 19 nt, Artificial Sequence
  Description of Artificial Sequence: Synthetic oligonucleotide
  Antisense strand to SEQ ID NO: 1058878
auucucaaacuacuagcuc

SEQ ID NO: 1058880 - RNA, 19 nt, Artificial Sequence
  Description of Artificial Sequence: Synthetic oligonucleotide
  Sense strand starting at position 968 of SEQ ID NO: 915165
ugagaauauugaucuguga

SEQ ID NO: 1058881 - RNA, 19 nt, Artificial Sequence
  Description of Artificial Sequence: Synthetic oligonucleotide
  Antisense strand to SEQ ID NO: 1058880
ucacagaucaauauucuca

SEQ ID NO: 1058882 - RNA, 19 nt, Artificial Sequence
  Description of Artificial Sequence: Synthetic oligonucleotide
  Sense strand starting at position 971 of SEQ ID NO: 915165
gaauauugaucugugacuu

SEQ ID NO: 1058883 - RNA, 19 nt, Artificial Sequence
  Description of Artificial Sequence: Synthetic oligonucleotide
  Antisense strand to SEQ ID NO: 1058882
aagucacagaucaauauuc

SEQ ID NO: 1058884 - RNA, 19 nt, Artificial Sequence
  Description of Artificial Sequence: Synthetic oligonucleotide
  Sense strand starting at position 1039 of SEQ ID NO: 915165
gucacuaacgaucaaguua

SEQ ID NO: 1058885 - RNA, 19 nt, Artificial Sequence
  Description of Artificial Sequence: Synthetic oligonucleotide
  Antisense strand to SEQ ID NO: 1058884
uaacuugaucguuagugac

SEQ ID NO: 1058886 - RNA, 19 nt, Artificial Sequence
  Description of Artificial Sequence: Synthetic oligonucleotide
  Sense strand starting at position 1079 of SEQ ID NO: 915165
ucacaauauggucacgaau

SEQ ID NO: 1058887 - RNA, 19 nt, Artificial Sequence
  Description of Artificial Sequence: Synthetic oligonucleotide
  Antisense strand to SEQ ID NO: 1058886
auucgugaccauauuguga

SEQ ID NO: 1058888 - RNA, 19 nt, Artificial Sequence
  Description of Artificial Sequence: Synthetic oligonucleotide
  Sense strand starting at position 1090 of SEQ ID NO: 915165
ucacgaauuugcuuggucu

SEQ ID NO: 1058889 - RNA, 19 nt, Artificial Sequence
  Description of Artificial Sequence: Synthetic oligonucleotide
  Antisense strand to SEQ ID NO: 1058888
agaccaagcaaauucguga

SEQ ID NO: 1058890 - RNA, 19 nt, Artificial Sequence
  Description of Artificial Sequence: Synthetic oligonucleotide
  Sense strand starting at position 1091 of SEQ ID NO: 915165
cacgaauuugcuuggucuu

SEQ ID NO: 1058891 - RNA, 19 nt, Artificial Sequence
  Description of Artificial Sequence: Synthetic oligonucleotide
  Antisense strand to SEQ ID NO: 1058890
aagaccaagcaaauucgug

SEQ ID NO: 1058892 - RNA, 19 nt, Artificial Sequence
  Description of Artificial Sequence: Synthetic oligonucleotide
  Sense strand starting at position 1163 of SEQ ID NO: 915165
acaagaggauaugaauaua

SEQ ID NO: 1058893 - RNA, 19 nt, Artificial Sequence
  Description of Artificial Sequence: Synthetic oligonucleotide
  Antisense strand to SEQ ID NO: 1058892
uauauucauauccucuugu

SEQ ID NO: 1058894 - RNA, 19 nt, Artificial Sequence
  Description of Artificial Sequence: Synthetic oligonucleotide
  Sense strand starting at position 1262 of SEQ ID NO: 915165
gggcaaugcauguauuaaa

SEQ ID NO: 1058895 - RNA, 19 nt, Artificial Sequence
  Description of Artificial Sequence: Synthetic oligonucleotide
  Antisense strand to SEQ ID NO: 1058894
uuuaauacaugcauugccc

SEQ ID NO: 1058896 - RNA, 19 nt, Artificial Sequence
  Description of Artificial Sequence: Synthetic oligonucleotide
  Sense strand starting at position 1396 of SEQ ID NO: 915165
ccauauaucuuguugacuc

SEQ ID NO: 1058897 - RNA, 19 nt, Artificial Sequence
  Description of Artificial Sequence: Synthetic oligonucleotide
  Antisense strand to SEQ ID NO: 1058896
gagucaacaagauauaugg

SEQ ID NO: 1058898 - RNA, 19 nt, Artificial Sequence
  Description of Artificial Sequence: Synthetic oligonucleotide
  Sense strand starting at position 1406 of SEQ ID NO: 915165
uguugacucggauaucuuc

SEQ ID NO: 1058899 - RNA, 19 nt, Artificial Sequence
  Description of Artificial Sequence: Synthetic oligonucleotide
  Antisense strand to SEQ ID NO: 1058898
gaagauauccgagucaaca

SEQ ID NO: 1058900 - RNA, 19 nt, Artificial Sequence
  Description of Artificial Sequence: Synthetic oligonucleotide
  Sense strand starting at position 1447 of SEQ ID NO: 915165
augugcucacaguaagagu

SEQ ID NO: 1058901 - RNA, 19 nt, Artificial Sequence
  Description of Artificial Sequence: Synthetic oligonucleotide
  Antisense strand to SEQ ID NO: 1058900
acucuuacugugagcacau

SEQ ID NO: 1058902 - RNA, 19 nt, Artificial Sequence
  Description of Artificial Sequence: Synthetic oligonucleotide
  Sense strand starting at position 1469 of SEQ ID NO: 915165
agaugacuguaguucgaua

SEQ ID NO: 1058903 - RNA, 19 nt, Artificial Sequence
  Description of Artificial Sequence: Synthetic oligonucleotide
  Antisense strand to SEQ ID NO: 1058902
uaucgaacuacagucaucu

SEQ ID NO: 1058904 - RNA, 19 nt, Artificial Sequence
  Description of Artificial Sequence: Synthetic oligonucleotide
  Sense strand starting at position 1510 of SEQ ID NO: 915165
agcccuaaggaagguauua

SEQ ID NO: 1058905 - RNA, 19 nt, Artificial Sequence
  Description of Artificial Sequence: Synthetic oligonucleotide
  Antisense strand to SEQ ID NO: 1058904
uaauaccuuccuuagggcu

SEQ ID NO: 1058906 - RNA, 19 nt, Artificial Sequence
  Description of Artificial Sequence: Synthetic oligonucleotide
  Sense strand starting at position 1558 of SEQ ID NO: 915165
aguccaauaugaguuaaga

SEQ ID NO: 1058907 - RNA, 19 nt, Artificial Sequence
  Description of Artificial Sequence: Synthetic oligonucleotide
  Antisense strand to SEQ ID NO: 1058906
ucuuaacucauauuggacu

SEQ ID NO: 1058908 - RNA, 19 nt, Artificial Sequence
  Description of Artificial Sequence: Synthetic oligonucleotide
  Sense strand starting at position 1637 of SEQ ID NO: 915165
gggccauugccagaaggau

SEQ ID NO: 1058909 - RNA, 19 nt, Artificial Sequence
  Description of Artificial Sequence: Synthetic oligonucleotide
  Antisense strand to SEQ ID NO: 1058908
auccuucuggcaauggccc

SEQ ID NO: 1058910 - RNA, 19 nt, Artificial Sequence
  Description of Artificial Sequence: Synthetic oligonucleotide
  Sense strand starting at position 1736 of SEQ ID NO: 915165
accagaagaugccuaacau

SEQ ID NO: 1058911 - RNA, 19 nt, Artificial Sequence
  Description of Artificial Sequence: Synthetic oligonucleotide
  Antisense strand to SEQ ID NO: 1058910
auguuaggcaucuucuggu

SEQ ID NO: 1058912 - RNA, 19 nt, Artificial Sequence
  Description of Artificial Sequence: Synthetic oligonucleotide
  Sense strand starting at position 1760 of SEQ ID NO: 915165
gaagaaugcagguguuaag

SEQ ID NO: 1058913 - RNA, 19 nt, Artificial Sequence
  Description of Artificial Sequence: Synthetic oligonucleotide
  Antisense strand to SEQ ID NO: 1058912
cuuaacaccugcauucuuc

SEQ ID NO: 1058914 - RNA, 19 nt, Artificial Sequence
  Description of Artificial Sequence: Synthetic oligonucleotide
  Sense strand starting at position 1986 of SEQ ID NO: 915165
auugaaugucggcaugauu

SEQ ID NO: 1058915 - RNA, 19 nt, Artificial Sequence
  Description of Artificial Sequence: Synthetic oligonucleotide
  Antisense strand to SEQ ID NO: 1058914
aaucaugccgacauucaau

SEQ ID NO: 1058916 - RNA, 19 nt, Artificial Sequence
  Description of Artificial Sequence: Synthetic oligonucleotide
  Sense strand starting at position 2766 of SEQ ID NO: 915165
agaccauucuggucauaau

SEQ ID NO: 1058917 - RNA, 19 nt, Artificial Sequence
  Description of Artificial Sequence: Synthetic oligonucleotide
  Antisense strand to SEQ ID NO: 1058916
auuaugaccagaauggucu

SEQ ID NO: 1058918 - RNA, 19 nt, Artificial Sequence
  Description of Artificial Sequence: Synthetic oligonucleotide
  Sense strand starting at position 2800 of SEQ ID NO: 915165
acugaaauguucuuuaguu

SEQ ID NO: 1058919 - RNA, 19 nt, Artificial Sequence
  Description of Artificial Sequence: Synthetic oligonucleotide
  Antisense strand to SEQ ID NO: 1058918
aacuaaagaacauuucagu

SEQ ID NO: 1058920 - RNA, 19 nt, Artificial Sequence
  Description of Artificial Sequence: Synthetic oligonucleotide
  Sense strand starting at position 3357 of SEQ ID NO: 915165
ugguaacuccagcauguaa

SEQ ID NO: 1058921 - RNA, 19 nt, Artificial Sequence
  Description of Artificial Sequence: Synthetic oligonucleotide
  Antisense strand to SEQ ID NO: 1058920
uuacaugcuggaguuacca

SEQ ID NO: 1058922 - RNA, 19 nt, Artificial Sequence
  Description of Artificial Sequence: Synthetic oligonucleotide
  Sense strand starting at position 3415 of SEQ ID NO: 915165
ggacaagugucaguguaga

SEQ ID NO: 1058923 - RNA, 19 nt, Artificial Sequence
  Description of Artificial Sequence: Synthetic oligonucleotide
  Antisense strand to SEQ ID NO: 1058922
ucuacacugacacuugucc

SEQ ID NO: 1058924 - RNA, 19 nt, Artificial Sequence
  Description of Artificial Sequence: Synthetic oligonucleotide
  Sense strand starting at position 3723 of SEQ ID NO: 915165
cuuacauuguuucugggaa

SEQ ID NO: 1058925 - RNA, 19 nt, Artificial Sequence
  Description of Artificial Sequence: Synthetic oligonucleotide
  Antisense strand to SEQ ID NO: 1058924
uucccagaaacaauguaag

SEQ ID NO: 1058926 - RNA, 19 nt, Artificial Sequence
  Description of Artificial Sequence: Synthetic oligonucleotide
  Sense strand starting at position 3731 of SEQ ID NO: 915165
guuucugggaagugaaaga

SEQ ID NO: 1058927 - RNA, 19 nt, Artificial Sequence
  Description of Artificial Sequence: Synthetic oligonucleotide
  Antisense strand to SEQ ID NO: 1058926
ucuuucacuucccagaaac

SEQ ID NO: 1058928 - RNA, 19 nt, Artificial Sequence
  Description of Artificial Sequence: Synthetic oligonucleotide
  Sense strand starting at position 3741 of SEQ ID NO: 915165
agugaaagagcauguauaa

SEQ ID NO: 1058929 - RNA, 19 nt, Artificial Sequence
  Description of Artificial Sequence: Synthetic oligonucleotide
  Antisense strand to SEQ ID NO: 1058928
uuauacaugcucuuucacu

SEQ ID NO: 1058930 - RNA, 19 nt, Artificial Sequence
  Description of Artificial Sequence: Synthetic oligonucleotide
  Sense strand starting at position 3883 of SEQ ID NO: 915165
auccaaauauuguuugaag

SEQ ID NO: 1058931 - RNA, 19 nt, Artificial Sequence
  Description of Artificial Sequence: Synthetic oligonucleotide
  Antisense strand to SEQ ID NO: 1058930
cuucaaacaauauuuggau

SEQ ID NO: 1058932 - RNA, 19 nt, Artificial Sequence
  Description of Artificial Sequence: Synthetic oligonucleotide
  Sense strand starting at position 3894 of SEQ ID NO: 915165
guuugaagcaauugagaaa

SEQ ID NO: 1058933 - RNA, 19 nt, Artificial Sequence
  Description of Artificial Sequence: Synthetic oligonucleotide
  Antisense strand to SEQ ID NO: 1058932
uuucucaauugcuucaaac

SEQ ID NO: 1058934 - RNA, 19 nt, Artificial Sequence
  Description of Artificial Sequence: Synthetic oligonucleotide
  Sense strand starting at position 3959 of SEQ ID NO: 915165
gcugaauguguggacuuca

SEQ ID NO: 1058935 - RNA, 19 nt, Artificial Sequence
  Description of Artificial Sequence: Synthetic oligonucleotide
  Antisense strand to SEQ ID NO: 1058934
ugaaguccacacauucagc

SEQ ID NO: 1058936 - RNA, 19 nt, Artificial Sequence
  Description of Artificial Sequence: Synthetic oligonucleotide
  Sense strand starting at position 4 of SEQ ID NO: 915166
ggccaugaacaauguacua

SEQ ID NO: 1058937 - RNA, 19 nt, Artificial Sequence
  Description of Artificial Sequence: Synthetic oligonucleotide
  Antisense strand to SEQ ID NO: 1058936
uaguacauuguucauggcc

SEQ ID NO: 1058938 - RNA, 19 nt, Artificial Sequence
  Description of Artificial Sequence: Synthetic oligonucleotide
  Sense strand starting at position 30 of SEQ ID NO: 915166
uaauucugggucuggucaa

SEQ ID NO: 1058939 - RNA, 19 nt, Artificial Sequence
  Description of Artificial Sequence: Synthetic oligonucleotide
  Antisense strand to SEQ ID NO: 1058938
uugaccagacccagaauua

SEQ ID NO: 1058940 - RNA, 19 nt, Artificial Sequence
  Description of Artificial Sequence: Synthetic oligonucleotide
  Sense strand starting at position 146 of SEQ ID NO: 915166
gcaguugauuuggcucaau

SEQ ID NO: 1058941 - RNA, 19 nt, Artificial Sequence
  Description of Artificial Sequence: Synthetic oligonucleotide
  Antisense strand to SEQ ID NO: 1058940
auugagccaaaucaacugc

SEQ ID NO: 1058942 - RNA, 19 nt, Artificial Sequence
  Description of Artificial Sequence: Synthetic oligonucleotide
  Sense strand starting at position 248 of SEQ ID NO: 915166
agagaugccuguucugauc

SEQ ID NO: 1058943 - RNA, 19 nt, Artificial Sequence
  Description of Artificial Sequence: Synthetic oligonucleotide
  Antisense strand to SEQ ID NO: 1058942
gaucagaacaggcaucucu

SEQ ID NO: 1058944 - RNA, 19 nt, Artificial Sequence
  Description of Artificial Sequence: Synthetic oligonucleotide
  Sense strand starting at position 386 of SEQ ID NO: 915166
cagucaauugaggguacaa

SEQ ID NO: 1058945 - RNA, 19 nt, Artificial Sequence
  Description of Artificial Sequence: Synthetic oligonucleotide
  Antisense strand to SEQ ID NO: 1058944
uuguacccucaauugacug

SEQ ID NO: 1058946 - RNA, 19 nt, Artificial Sequence
  Description of Artificial Sequence: Synthetic oligonucleotide
  Sense strand starting at position 445 of SEQ ID NO: 915166
uuuggagauuuguacaaga

SEQ ID NO: 1058947 - RNA, 19 nt, Artificial Sequence
  Description of Artificial Sequence: Synthetic oligonucleotide
  Antisense strand to SEQ ID NO: 1058946
ucuuguacaaaucuccaaa

SEQ ID NO: 1058948 - RNA, 19 nt, Artificial Sequence
  Description of Artificial Sequence: Synthetic oligonucleotide
  Sense strand starting at position 491 of SEQ ID NO: 915166
uuggcuugccuggagaaau

SEQ ID NO: 1058949 - RNA, 19 nt, Artificial Sequence
  Description of Artificial Sequence: Synthetic oligonucleotide
  Antisense strand to SEQ ID NO: 1058948
auuucuccaggcaagccaa

SEQ ID NO: 1058950 - RNA, 19 nt, Artificial Sequence
  Description of Artificial Sequence: Synthetic oligonucleotide
  Sense strand starting at position 842 of SEQ ID NO: 915166
ggguuguagggaggaauau

SEQ ID NO: 1058951 - RNA, 19 nt, Artificial Sequence
  Description of Artificial Sequence: Synthetic oligonucleotide
  Antisense strand to SEQ ID NO: 1058950
auauuccucccuacaaccc

SEQ ID NO: 1058952 - RNA, 19 nt, Artificial Sequence
  Description of Artificial Sequence: Synthetic oligonucleotide
  Sense strand starting at position 893 of SEQ ID NO: 915166
gaggaagaauuaugagaaa

SEQ ID NO: 1058953 - RNA, 19 nt, Artificial Sequence
  Description of Artificial Sequence: Synthetic oligonucleotide
  Antisense strand to SEQ ID NO: 1058952
uuucucauaauucuuccuc

SEQ ID NO: 1058954 - RNA, 19 nt, Artificial Sequence
  Description of Artificial Sequence: Synthetic oligonucleotide
  Sense strand starting at position 962 of SEQ ID NO: 915166
gccuucucaguccaggaaa

SEQ ID NO: 1058955 - RNA, 19 nt, Artificial Sequence
  Description of Artificial Sequence: Synthetic oligonucleotide
  Antisense strand to SEQ ID NO: 1058954
uuuccuggacugagaaggc

SEQ ID NO: 1058956 - RNA, 19 nt, Artificial Sequence
  Description of Artificial Sequence: Synthetic oligonucleotide
  Sense strand starting at position 964 of SEQ ID NO: 915166
cuucucaguccaggaaauc

SEQ ID NO: 1058957 - RNA, 19 nt, Artificial Sequence
  Description of Artificial Sequence: Synthetic oligonucleotide
  Antisense strand to SEQ ID NO: 1058956
gauuuccuggacugagaag

SEQ ID NO: 1058958 - RNA, 19 nt, Artificial Sequence
  Description of Artificial Sequence: Synthetic oligonucleotide
  Sense strand starting at position 965 of SEQ ID NO: 915166
uucucaguccaggaaaucu

SEQ ID NO: 1058959 - RNA, 19 nt, Artificial Sequence
  Description of Artificial Sequence: Synthetic oligonucleotide
  Antisense strand to SEQ ID NO: 1058958
agauuuccuggacugagaa

SEQ ID NO: 1058960 - RNA, 19 nt, Artificial Sequence
  Description of Artificial Sequence: Synthetic oligonucleotide
  Sense strand starting at position 1053 of SEQ ID NO: 915166
gcaccaagucuugauguca

SEQ ID NO: 1058961 - RNA, 19 nt, Artificial Sequence
  Description of Artificial Sequence: Synthetic oligonucleotide
  Antisense strand to SEQ ID NO: 1058960
ugacaucaagacuuggugc

SEQ ID NO: 1058962 - RNA, 19 nt, Artificial Sequence
  Description of Artificial Sequence: Synthetic oligonucleotide
  Sense strand starting at position 1187 of SEQ ID NO: 915166
gaggaauauuacgcccaaa

SEQ ID NO: 1058963 - RNA, 19 nt, Artificial Sequence
  Description of Artificial Sequence: Synthetic oligonucleotide
  Antisense strand to SEQ ID NO: 1058962
uuugggcguaauauuccuc

SEQ ID NO: 1058964 - RNA, 19 nt, Artificial Sequence
  Description of Artificial Sequence: Synthetic oligonucleotide
  Sense strand starting at position 1316 of SEQ ID NO: 915166
gaaacacugcucggaggau

SEQ ID NO: 1058965 - RNA, 19 nt, Artificial Sequence
  Description of Artificial Sequence: Synthetic oligonucleotide
  Antisense strand to SEQ ID NO: 1058964
auccuccgagcaguguuuc

SEQ ID NO: 1058966 - RNA, 19 nt, Artificial Sequence
  Description of Artificial Sequence: Synthetic oligonucleotide
  Sense strand starting at position 1325 of SEQ ID NO: 915166
cucggaggaucagugagua

SEQ ID NO: 1058967 - RNA, 19 nt, Artificial Sequence
  Description of Artificial Sequence: Synthetic oligonucleotide
  Antisense strand to SEQ ID NO: 1058966
uacucacugauccuccgag

SEQ ID NO: 1058968 - RNA, 19 nt, Artificial Sequence
  Description of Artificial Sequence: Synthetic oligonucleotide
  Sense strand starting at position 1337 of SEQ ID NO: 915166
gugaguaagacacagcgau

SEQ ID NO: 1058969 - RNA, 19 nt, Artificial Sequence
  Description of Artificial Sequence: Synthetic oligonucleotide
  Antisense strand to SEQ ID NO: 1058968
aucgcugugucuuacucac

SEQ ID NO: 1058970 - RNA, 19 nt, Artificial Sequence
  Description of Artificial Sequence: Synthetic oligonucleotide
  Sense strand starting at position 1406 of SEQ ID NO: 915166
aaauguuaacagugauguc

SEQ ID NO: 1058971 - RNA, 19 nt, Artificial Sequence
  Description of Artificial Sequence: Synthetic oligonucleotide
  Antisense strand to SEQ ID NO: 1058970
gacaucacuguuaacauuu

SEQ ID NO: 1058972 - RNA, 19 nt, Artificial Sequence
  Description of Artificial Sequence: Synthetic oligonucleotide
  Sense strand starting at position 1472 of SEQ ID NO: 915166
gaacaauguugguuaggca

SEQ ID NO: 1058973 - RNA, 19 nt, Artificial Sequence
  Description of Artificial Sequence: Synthetic oligonucleotide
  Antisense strand to SEQ ID NO: 1058972
ugccuaaccaacauuguuc

SEQ ID NO: 1058974 - RNA, 19 nt, Artificial Sequence
  Description of Artificial Sequence: Synthetic oligonucleotide
  Sense strand starting at position 1512 of SEQ ID NO: 915166
gaauaugacugggaagaug

SEQ ID NO: 1058975 - RNA, 19 nt, Artificial Sequence
  Description of Artificial Sequence: Synthetic oligonucleotide
  Antisense strand to SEQ ID NO: 1058974
caucuucccagucauauuc

SEQ ID NO: 1058976 - RNA, 19 nt, Artificial Sequence
  Description of Artificial Sequence: Synthetic oligonucleotide
  Sense strand starting at position 1547 of SEQ ID NO: 915166
ugaugacggccagagcaau

SEQ ID NO: 1058977 - RNA, 19 nt, Artificial Sequence
  Description of Artificial Sequence: Synthetic oligonucleotide
  Antisense strand to SEQ ID NO: 1058976
auugcucuggccgucauca

SEQ ID NO: 1058978 - RNA, 19 nt, Artificial Sequence
  Description of Artificial Sequence: Synthetic oligonucleotide
  Sense strand starting at position 1875 of SEQ ID NO: 915166
caggacugcagugauguaa

SEQ ID NO: 1058979 - RNA, 19 nt, Artificial Sequence
  Description of Artificial Sequence: Synthetic oligonucleotide
  Antisense strand to SEQ ID NO: 1058978
uuacaucacugcaguccug

SEQ ID NO: 1058980 - RNA, 19 nt, Artificial Sequence
  Description of Artificial Sequence: Synthetic oligonucleotide
  Sense strand starting at position 1879 of SEQ ID NO: 915166
acugcagugauguaaauga

SEQ ID NO: 1058981 - RNA, 19 nt, Artificial Sequence
  Description of Artificial Sequence: Synthetic oligonucleotide
  Antisense strand to SEQ ID NO: 1058980
ucauuuacaucacugcagu

SEQ ID NO: 1058982 - RNA, 19 nt, Artificial Sequence
  Description of Artificial Sequence: Synthetic oligonucleotide
  Sense strand starting at position 1906 of SEQ ID NO: 915166
gguauugacagccaaaugu

SEQ ID NO: 1058983 - RNA, 19 nt, Artificial Sequence
  Description of Artificial Sequence: Synthetic oligonucleotide
  Antisense strand to SEQ ID NO: 1058982
acauuuggcugucaauacc

SEQ ID NO: 1058984 - RNA, 19 nt, Artificial Sequence
  Description of Artificial Sequence: Synthetic oligonucleotide
  Sense strand starting at position 1923 of SEQ ID NO: 915166
gugauaagccuccaaccca

SEQ ID NO: 1058985 - RNA, 19 nt, Artificial Sequence
  Description of Artificial Sequence: Synthetic oligonucleotide
  Antisense strand to SEQ ID NO: 1058984
uggguuggaggcuuaucac

SEQ ID NO: 1058986 - RNA, 19 nt, Artificial Sequence
  Description of Artificial Sequence: Synthetic oligonucleotide
  Sense strand starting at position 1977 of SEQ ID NO: 915166
gaugguaacauugguguga

SEQ ID NO: 1058987 - RNA, 19 nt, Artificial Sequence
  Description of Artificial Sequence: Synthetic oligonucleotide
  Antisense strand to SEQ ID NO: 1058986
ucacaccaauguuaccauc

SEQ ID NO: 1058988 - RNA, 19 nt, Artificial Sequence
  Description of Artificial Sequence: Synthetic oligonucleotide
  Sense strand starting at position 1981 of SEQ ID NO: 915166
guaacauuggugugacuca

SEQ ID NO: 1058989 - RNA, 19 nt, Artificial Sequence
  Description of Artificial Sequence: Synthetic oligonucleotide
  Antisense strand to SEQ ID NO: 1058988
ugagucacaccaauguuac

SEQ ID NO: 1058990 - RNA, 19 nt, Artificial Sequence
  Description of Artificial Sequence: Synthetic oligonucleotide
  Sense strand starting at position 1986 of SEQ ID NO: 915166
auuggugugacucaugaug

SEQ ID NO: 1058991 - RNA, 19 nt, Artificial Sequence
  Description of Artificial Sequence: Synthetic oligonucleotide
  Antisense strand to SEQ ID NO: 1058990
caucaugagucacaccaau

SEQ ID NO: 1058992 - RNA, 19 nt, Artificial Sequence
  Description of Artificial Sequence: Synthetic oligonucleotide
  Sense strand starting at position 2006 of SEQ ID NO: 915166
acuuuaugguccucucuau

SEQ ID NO: 1058993 - RNA, 19 nt, Artificial Sequence
  Description of Artificial Sequence: Synthetic oligonucleotide
  Antisense strand to SEQ ID NO: 1058992
auagagaggaccauaaagu

SEQ ID NO: 1058994 - RNA, 19 nt, Artificial Sequence
  Description of Artificial Sequence: Synthetic oligonucleotide
  Sense strand starting at position 2036 of SEQ ID NO: 915166
agcugaugagucuacugaa

SEQ ID NO: 1058995 - RNA, 19 nt, Artificial Sequence
  Description of Artificial Sequence: Synthetic oligonucleotide
  Antisense strand to SEQ ID NO: 1058994
uucaguagacucaucagcu

SEQ ID NO: 1058996 - RNA, 19 nt, Artificial Sequence
  Description of Artificial Sequence: Synthetic oligonucleotide
  Sense strand starting at position 2045 of SEQ ID NO: 915166
gucuacugaaagugauaga

SEQ ID NO: 1058997 - RNA, 19 nt, Artificial Sequence
  Description of Artificial Sequence: Synthetic oligonucleotide
  Antisense strand to SEQ ID NO: 1058996
ucuaucacuuucaguagac

SEQ ID NO: 1058998 - RNA, 19 nt, Artificial Sequence
  Description of Artificial Sequence: Synthetic oligonucleotide
  Sense strand starting at position 2071 of SEQ ID NO: 915166
agcacucccgaauauguau

SEQ ID NO: 1058999 - RNA, 19 nt, Artificial Sequence
  Description of Artificial Sequence: Synthetic oligonucleotide
  Antisense strand to SEQ ID NO: 1058998
auacauauucgggagugcu

SEQ ID NO: 1059000 - RNA, 19 nt, Artificial Sequence
  Description of Artificial Sequence: Synthetic oligonucleotide
  Sense strand starting at position 2572 of SEQ ID NO: 915166
ggcuauugccuugaacauu

SEQ ID NO: 1059001 - RNA, 19 nt, Artificial Sequence
  Description of Artificial Sequence: Synthetic oligonucleotide
  Antisense strand to SEQ ID NO: 1059000
aauguucaaggcaauagcc

SEQ ID NO: 1059002 - RNA, 19 nt, Artificial Sequence
  Description of Artificial Sequence: Synthetic oligonucleotide
  Sense strand starting at position 2632 of SEQ ID NO: 915166
agaguaucaagugggaauc

SEQ ID NO: 1059003 - RNA, 19 nt, Artificial Sequence
  Description of Artificial Sequence: Synthetic oligonucleotide
  Antisense strand to SEQ ID NO: 1059002
gauucccacuugauacucu

SEQ ID NO: 1059004 - RNA, 19 nt, Artificial Sequence
  Description of Artificial Sequence: Synthetic oligonucleotide
  Sense strand starting at position 3187 of SEQ ID NO: 915166
cuagacugaucuucugaua

SEQ ID NO: 1059005 - RNA, 19 nt, Artificial Sequence
  Description of Artificial Sequence: Synthetic oligonucleotide
  Antisense strand to SEQ ID NO: 1059004
uaucagaagaucagucuag

SEQ ID NO: 1059006 - RNA, 19 nt, Artificial Sequence
  Description of Artificial Sequence: Synthetic oligonucleotide
  Sense strand starting at position 3241 of SEQ ID NO: 915166
ggaaucaaauccucaguuu

SEQ ID NO: 1059007 - RNA, 19 nt, Artificial Sequence
  Description of Artificial Sequence: Synthetic oligonucleotide
  Antisense strand to SEQ ID NO: 1059006
aaacugaggauuugauucc

SEQ ID NO: 1059008 - RNA, 19 nt, Artificial Sequence
  Description of Artificial Sequence: Synthetic oligonucleotide
  Sense strand starting at position 3392 of SEQ ID NO: 915166
gcaggcuaauaaucugaca

SEQ ID NO: 1059009 - RNA, 19 nt, Artificial Sequence
  Description of Artificial Sequence: Synthetic oligonucleotide
  Antisense strand to SEQ ID NO: 1059008
ugucagauuauuagccugc

SEQ ID NO: 1059010 - RNA, 19 nt, Artificial Sequence
  Description of Artificial Sequence: Synthetic oligonucleotide
  Sense strand starting at position 3519 of SEQ ID NO: 915166
ucaagaccugccuagguaa

SEQ ID NO: 1059011 - RNA, 19 nt, Artificial Sequence
  Description of Artificial Sequence: Synthetic oligonucleotide
  Antisense strand to SEQ ID NO: 1059010
uuaccuaggcaggucuuga

SEQ ID NO: 1059012 - RNA, 19 nt, Artificial Sequence
  Description of Artificial Sequence: Synthetic oligonucleotide
  Sense strand starting at position 3849 of SEQ ID NO: 915166
ugagcuuugcuggaaugag

SEQ ID NO: 1059013 - RNA, 19 nt, Artificial Sequence
  Description of Artificial Sequence: Synthetic oligonucleotide
  Antisense strand to SEQ ID NO: 1059012
cucauuccagcaaagcuca

SEQ ID NO: 1059014 - RNA, 19 nt, Artificial Sequence
  Description of Artificial Sequence: Synthetic oligonucleotide
  Sense strand starting at position 3977 of SEQ ID NO: 915166
gaggaaauuuauuggacau

SEQ ID NO: 1059015 - RNA, 19 nt, Artificial Sequence
  Description of Artificial Sequence: Synthetic oligonucleotide
  Antisense strand to SEQ ID NO: 1059014
auguccaauaaauuuccuc

SEQ ID NO: 1059016 - RNA, 19 nt, Artificial Sequence
  Description of Artificial Sequence: Synthetic oligonucleotide
  Sense strand starting at position 41 of SEQ ID NO: 915167
agaauuagauaugaaagga

SEQ ID NO: 1059017 - RNA, 19 nt, Artificial Sequence
  Description of Artificial Sequence: Synthetic oligonucleotide
  Antisense strand to SEQ ID NO: 1059016
uccuuucauaucuaauucu

SEQ ID NO: 1059018 - RNA, 19 nt, Artificial Sequence
  Description of Artificial Sequence: Synthetic oligonucleotide
  Sense strand starting at position 105 of SEQ ID NO: 915167
ggcagaguacccgaagagu

SEQ ID NO: 1059019 - RNA, 19 nt, Artificial Sequence
  Description of Artificial Sequence: Synthetic oligonucleotide
  Antisense strand to SEQ ID NO: 1059018
acucuucggguacucugcc

SEQ ID NO: 1059020 - RNA, 19 nt, Artificial Sequence
  Description of Artificial Sequence: Synthetic oligonucleotide
  Sense strand starting at position 113 of SEQ ID NO: 915167
acccgaagaguaugguaua

SEQ ID NO: 1059021 - RNA, 19 nt, Artificial Sequence
  Description of Artificial Sequence: Synthetic oligonucleotide
  Antisense strand to SEQ ID NO: 1059020
uauaccauacucuucgggu

SEQ ID NO: 1059022 - RNA, 19 nt, Artificial Sequence
  Description of Artificial Sequence: Synthetic oligonucleotide
  Sense strand starting at position 175 of SEQ ID NO: 915167
ucagguugcauagaaggua

SEQ ID NO: 1059023 - RNA, 19 nt, Artificial Sequence
  Description of Artificial Sequence: Synthetic oligonucleotide
  Antisense strand to SEQ ID NO: 1059022
uaccuucuaugcaaccuga

SEQ ID NO: 1059024 - RNA, 19 nt, Artificial Sequence
  Description of Artificial Sequence: Synthetic oligonucleotide
  Sense strand starting at position 279 of SEQ ID NO: 915167
acagccugacacugagaau

SEQ ID NO: 1059025 - RNA, 19 nt, Artificial Sequence
  Description of Artificial Sequence: Synthetic oligonucleotide
  Antisense strand to SEQ ID NO: 1059024
auucucagugucaggcugu

SEQ ID NO: 1059026 - RNA, 19 nt, Artificial Sequence
  Description of Artificial Sequence: Synthetic oligonucleotide
  Sense strand starting at position 517 of SEQ ID NO: 915167
ugauucuaagaaugucacu

SEQ ID NO: 1059027 - RNA, 19 nt, Artificial Sequence
  Description of Artificial Sequence: Synthetic oligonucleotide
  Antisense strand to SEQ ID NO: 1059026
agugacauucuuagaauca

SEQ ID NO: 1059028 - RNA, 19 nt, Artificial Sequence
  Description of Artificial Sequence: Synthetic oligonucleotide
  Sense strand starting at position 835 of SEQ ID NO: 915167
uugaccuugcuccagacau

SEQ ID NO: 1059029 - RNA, 19 nt, Artificial Sequence
  Description of Artificial Sequence: Synthetic oligonucleotide
  Antisense strand to SEQ ID NO: 1059028
augucuggagcaaggucaa

SEQ ID NO: 1059030 - RNA, 19 nt, Artificial Sequence
  Description of Artificial Sequence: Synthetic oligonucleotide
  Sense strand starting at position 854 of SEQ ID NO: 915167
cguacucacugaguuauuu

SEQ ID NO: 1059031 - RNA, 19 nt, Artificial Sequence
  Description of Artificial Sequence: Synthetic oligonucleotide
  Antisense strand to SEQ ID NO: 1059030
aaauaacucagugaguacg

SEQ ID NO: 1059032 - RNA, 19 nt, Artificial Sequence
  Description of Artificial Sequence: Synthetic oligonucleotide
  Sense strand starting at position 862 of SEQ ID NO: 915167
cugaguuauuuccuacggu

SEQ ID NO: 1059033 - RNA, 19 nt, Artificial Sequence
  Description of Artificial Sequence: Synthetic oligonucleotide
  Antisense strand to SEQ ID NO: 1059032
accguaggaaauaacucag

SEQ ID NO: 1059034 - RNA, 19 nt, Artificial Sequence
  Description of Artificial Sequence: Synthetic oligonucleotide
  Sense strand starting at position 865 of SEQ ID NO: 915167
aguuauuuccuacgguauc

SEQ ID NO: 1059035 - RNA, 19 nt, Artificial Sequence
  Description of Artificial Sequence: Synthetic oligonucleotide
  Antisense strand to SEQ ID NO: 1059034
gauaccguaggaaauaacu

SEQ ID NO: 1059036 - RNA, 19 nt, Artificial Sequence
  Description of Artificial Sequence: Synthetic oligonucleotide
  Sense strand starting at position 1118 of SEQ ID NO: 915167
cuggguaaggauugugaag

SEQ ID NO: 1059037 - RNA, 19 nt, Artificial Sequence
  Description of Artificial Sequence: Synthetic oligonucleotide
  Antisense strand to SEQ ID NO: 1059036
cuucacaauccuuacccag

SEQ ID NO: 1059038 - RNA, 19 nt, Artificial Sequence
  Description of Artificial Sequence: Synthetic oligonucleotide
  Sense strand starting at position 1310 of SEQ ID NO: 915167
auaccaaauguuuauucga

SEQ ID NO: 1059039 - RNA, 19 nt, Artificial Sequence
  Description of Artificial Sequence: Synthetic oligonucleotide
  Antisense strand to SEQ ID NO: 1059038
ucgaauaaacauuugguau

SEQ ID NO: 1059040 - RNA, 19 nt, Artificial Sequence
  Description of Artificial Sequence: Synthetic oligonucleotide
  Sense strand starting at position 1312 of SEQ ID NO: 915167
accaaauguuuauucgaau

SEQ ID NO: 1059041 - RNA, 19 nt, Artificial Sequence
  Description of Artificial Sequence: Synthetic oligonucleotide
  Antisense strand to SEQ ID NO: 1059040
auucgaauaaacauuuggu

SEQ ID NO: 1059042 - RNA, 19 nt, Artificial Sequence
  Description of Artificial Sequence: Synthetic oligonucleotide
  Sense strand starting at position 1372 of SEQ ID NO: 915167
agguguguggaauaauauu

SEQ ID NO: 1059043 - RNA, 19 nt, Artificial Sequence
  Description of Artificial Sequence: Synthetic oligonucleotide
  Antisense strand to SEQ ID NO: 1059042
aauauuauuccacacaccu

SEQ ID NO: 1059044 - RNA, 19 nt, Artificial Sequence
  Description of Artificial Sequence: Synthetic oligonucleotide
  Sense strand starting at position 1388 of SEQ ID NO: 915167
auuauucuggcagaaaguc

SEQ ID NO: 1059045 - RNA, 19 nt, Artificial Sequence
  Description of Artificial Sequence: Synthetic oligonucleotide
  Antisense strand to SEQ ID NO: 1059044
gacuuucugccagaauaau

SEQ ID NO: 1059046 - RNA, 19 nt, Artificial Sequence
  Description of Artificial Sequence: Synthetic oligonucleotide
  Sense strand starting at position 1417 of SEQ ID NO: 915167
aaagaaauaugauagggaa

SEQ ID NO: 1059047 - RNA, 19 nt, Artificial Sequence
  Description of Artificial Sequence: Synthetic oligonucleotide
  Antisense strand to SEQ ID NO: 1059046
uucccuaucauauuucuuu

SEQ ID NO: 1059048 - RNA, 19 nt, Artificial Sequence
  Description of Artificial Sequence: Synthetic oligonucleotide
  Sense strand starting at position 1530 of SEQ ID NO: 915167
gcaauauaguggucaaagg

SEQ ID NO: 1059049 - RNA, 19 nt, Artificial Sequence
  Description of Artificial Sequence: Synthetic oligonucleotide
  Antisense strand to SEQ ID NO: 1059048
ccuuugaccacuauauugc

SEQ ID NO: 1059050 - RNA, 19 nt, Artificial Sequence
  Description of Artificial Sequence: Synthetic oligonucleotide
  Sense strand starting at position 1653 of SEQ ID NO: 915167
auagcuaaggccugaggaa

SEQ ID NO: 1059051 - RNA, 19 nt, Artificial Sequence
  Description of Artificial Sequence: Synthetic oligonucleotide
  Antisense strand to SEQ ID NO: 1059050
uuccucaggccuuagcuau

SEQ ID NO: 1059052 - RNA, 19 nt, Artificial Sequence
  Description of Artificial Sequence: Synthetic oligonucleotide
  Sense strand starting at position 1783 of SEQ ID NO: 915167
caagaagggcggugacaua

SEQ ID NO: 1059053 - RNA, 19 nt, Artificial Sequence
  Description of Artificial Sequence: Synthetic oligonucleotide
  Antisense strand to SEQ ID NO: 1059052
uaugucaccgcccuucuug

SEQ ID NO: 1059054 - RNA, 19 nt, Artificial Sequence
  Description of Artificial Sequence: Synthetic oligonucleotide
  Sense strand starting at position 1805 of SEQ ID NO: 915167
aaugaagaaugggauagaa

SEQ ID NO: 1059055 - RNA, 19 nt, Artificial Sequence
  Description of Artificial Sequence: Synthetic oligonucleotide
  Antisense strand to SEQ ID NO: 1059054
uucuaucccauucuucauu

SEQ ID NO: 1059056 - RNA, 19 nt, Artificial Sequence
  Description of Artificial Sequence: Synthetic oligonucleotide
  Sense strand starting at position 1996 of SEQ ID NO: 915167
gagcuuauggcauauucca

SEQ ID NO: 1059057 - RNA, 19 nt, Artificial Sequence
  Description of Artificial Sequence: Synthetic oligonucleotide
  Antisense strand to SEQ ID NO: 1059056
uggaauaugccauaagcuc

SEQ ID NO: 1059058 - RNA, 19 nt, Artificial Sequence
  Description of Artificial Sequence: Synthetic oligonucleotide
  Sense strand starting at position 2023 of SEQ ID NO: 915167
gucuucuuugaacauguaa

SEQ ID NO: 1059059 - RNA, 19 nt, Artificial Sequence
  Description of Artificial Sequence: Synthetic oligonucleotide
  Antisense strand to SEQ ID NO: 1059058
uuacauguucaaagaagac

SEQ ID NO: 1059060 - RNA, 19 nt, Artificial Sequence
  Description of Artificial Sequence: Synthetic oligonucleotide
  Sense strand starting at position 2203 of SEQ ID NO: 915167
agcugaauaaggugauacu

SEQ ID NO: 1059061 - RNA, 19 nt, Artificial Sequence
  Description of Artificial Sequence: Synthetic oligonucleotide
  Antisense strand to SEQ ID NO: 1059060
aguaucaccuuauucagcu

SEQ ID NO: 1059062 - RNA, 19 nt, Artificial Sequence
  Description of Artificial Sequence: Synthetic oligonucleotide
  Sense strand starting at position 2204 of SEQ ID NO: 915167
gcugaauaaggugauacuu

SEQ ID NO: 1059063 - RNA, 19 nt, Artificial Sequence
  Description of Artificial Sequence: Synthetic oligonucleotide
  Antisense strand to SEQ ID NO: 1059062
aaguaucaccuuauucagc

SEQ ID NO: 1059064 - RNA, 19 nt, Artificial Sequence
  Description of Artificial Sequence: Synthetic oligonucleotide
  Sense strand starting at position 2287 of SEQ ID NO: 915167
gaguguacagaucaaugca

SEQ ID NO: 1059065 - RNA, 19 nt, Artificial Sequence
  Description of Artificial Sequence: Synthetic oligonucleotide
  Antisense strand to SEQ ID NO: 1059064
ugcauugaucuguacacuc

SEQ ID NO: 1059066 - RNA, 19 nt, Artificial Sequence
  Description of Artificial Sequence: Synthetic oligonucleotide
  Sense strand starting at position 2485 of SEQ ID NO: 915167
uugauauuuguuggaacgu

SEQ ID NO: 1059067 - RNA, 19 nt, Artificial Sequence
  Description of Artificial Sequence: Synthetic oligonucleotide
  Antisense strand to SEQ ID NO: 1059066
acguuccaacaaauaucaa

SEQ ID NO: 1059068 - RNA, 19 nt, Artificial Sequence
  Description of Artificial Sequence: Synthetic oligonucleotide
  Sense strand starting at position 2499 of SEQ ID NO: 915167
aacguugauugauugaaga

SEQ ID NO: 1059069 - RNA, 19 nt, Artificial Sequence
  Description of Artificial Sequence: Synthetic oligonucleotide
  Antisense strand to SEQ ID NO: 1059068
ucuucaaucaaucaacguu

SEQ ID NO: 1059070 - RNA, 19 nt, Artificial Sequence
  Description of Artificial Sequence: Synthetic oligonucleotide
  Sense strand starting at position 2717 of SEQ ID NO: 915167
gugagucuuagacaaugug

SEQ ID NO: 1059071 - RNA, 19 nt, Artificial Sequence
  Description of Artificial Sequence: Synthetic oligonucleotide
  Antisense strand to SEQ ID NO: 1059070
cacauugucuaagacucac

SEQ ID NO: 1059072 - RNA, 19 nt, Artificial Sequence
  Description of Artificial Sequence: Synthetic oligonucleotide
  Sense strand starting at position 2720 of SEQ ID NO: 915167
agucuuagacaaugugaau

SEQ ID NO: 1059073 - RNA, 19 nt, Artificial Sequence
  Description of Artificial Sequence: Synthetic oligonucleotide
  Antisense strand to SEQ ID NO: 1059072
auucacauugucuaagacu

SEQ ID NO: 1059074 - RNA, 19 nt, Artificial Sequence
  Description of Artificial Sequence: Synthetic oligonucleotide
  Sense strand starting at position 2835 of SEQ ID NO: 915167
gguaccucuuuaucugaga

SEQ ID NO: 1059075 - RNA, 19 nt, Artificial Sequence
  Description of Artificial Sequence: Synthetic oligonucleotide
  Antisense strand to SEQ ID NO: 1059074
ucucagauaaagagguacc

SEQ ID NO: 1059076 - RNA, 19 nt, Artificial Sequence
  Description of Artificial Sequence: Synthetic oligonucleotide
  Sense strand starting at position 2842 of SEQ ID NO: 915167
cuuuaucugagaugaggca

SEQ ID NO: 1059077 - RNA, 19 nt, Artificial Sequence
  Description of Artificial Sequence: Synthetic oligonucleotide
  Antisense strand to SEQ ID NO: 1059076
ugccucaucucagauaaag

SEQ ID NO: 1059078 - RNA, 19 nt, Artificial Sequence
  Description of Artificial Sequence: Synthetic oligonucleotide
  Sense strand starting at position 2891 of SEQ ID NO: 915167
cuuagaagugacugaaauu

SEQ ID NO: 1059079 - RNA, 19 nt, Artificial Sequence
  Description of Artificial Sequence: Synthetic oligonucleotide
  Antisense strand to SEQ ID NO: 1059078
aauuucagucacuucuaag

SEQ ID NO: 1059080 - RNA, 19 nt, Artificial Sequence
  Description of Artificial Sequence: Synthetic oligonucleotide
  Sense strand starting at position 2952 of SEQ ID NO: 915167
cuugauauuugagaaauuc

SEQ ID NO: 1059081 - RNA, 19 nt, Artificial Sequence
  Description of Artificial Sequence: Synthetic oligonucleotide
  Antisense strand to SEQ ID NO: 1059080
gaauuucucaaauaucaag

SEQ ID NO: 1059082 - RNA, 19 nt, Artificial Sequence
  Description of Artificial Sequence: Synthetic oligonucleotide
  Sense strand starting at position 3106 of SEQ ID NO: 915167
ccuaaauagcuuuaugguu

SEQ ID NO: 1059083 - RNA, 19 nt, Artificial Sequence
  Description of Artificial Sequence: Synthetic oligonucleotide
  Antisense strand to SEQ ID NO: 1059082
aaccauaaagcuauuuagg

SEQ ID NO: 1059084 - RNA, 19 nt, Artificial Sequence
  Description of Artificial Sequence: Synthetic oligonucleotide
  Sense strand starting at position 3136 of SEQ ID NO: 915167
ugggcuugugaguaaauag

SEQ ID NO: 1059085 - RNA, 19 nt, Artificial Sequence
  Description of Artificial Sequence: Synthetic oligonucleotide
  Antisense strand to SEQ ID NO: 1059084
cuauuuacucacaagccca

SEQ ID NO: 1059086 - RNA, 19 nt, Artificial Sequence
  Description of Artificial Sequence: Synthetic oligonucleotide
  Sense strand starting at position 3312 of SEQ ID NO: 915167
aauauuuaguuguuggcua

SEQ ID NO: 1059087 - RNA, 19 nt, Artificial Sequence
  Description of Artificial Sequence: Synthetic oligonucleotide
  Antisense strand to SEQ ID NO: 1059086
uagccaacaacuaaauauu

SEQ ID NO: 1059088 - RNA, 19 nt, Artificial Sequence
  Description of Artificial Sequence: Synthetic oligonucleotide
  Sense strand starting at position 3317 of SEQ ID NO: 915167
uuaguuguuggcuaagaua

SEQ ID NO: 1059089 - RNA, 19 nt, Artificial Sequence
  Description of Artificial Sequence: Synthetic oligonucleotide
  Antisense strand to SEQ ID NO: 1059088
uaucuuagccaacaacuaa

SEQ ID NO: 1059090 - RNA, 19 nt, Artificial Sequence
  Description of Artificial Sequence: Synthetic oligonucleotide
  Sense strand starting at position 3405 of SEQ ID NO: 915167
ggaggauaauuggcucuua

SEQ ID NO: 1059091 - RNA, 19 nt, Artificial Sequence
  Description of Artificial Sequence: Synthetic oligonucleotide
  Antisense strand to SEQ ID NO: 1059090
uaagagccaauuauccucc

SEQ ID NO: 1059092 - RNA, 19 nt, Artificial Sequence
  Description of Artificial Sequence: Synthetic oligonucleotide
  Sense strand starting at position 3532 of SEQ ID NO: 915167
auauuaugccaagaguugu

SEQ ID NO: 1059093 - RNA, 19 nt, Artificial Sequence
  Description of Artificial Sequence: Synthetic oligonucleotide
  Antisense strand to SEQ ID NO: 1059092
acaacucuuggcauaauau

SEQ ID NO: 1059094 - RNA, 19 nt, Artificial Sequence
  Description of Artificial Sequence: Synthetic oligonucleotide
  Sense strand starting at position 3786 of SEQ ID NO: 915167
accucuggccuguaugaua

SEQ ID NO: 1059095 - RNA, 19 nt, Artificial Sequence
  Description of Artificial Sequence: Synthetic oligonucleotide
  Antisense strand to SEQ ID NO: 1059094
uaucauacaggccagaggu

SEQ ID NO: 1059096 - RNA, 19 nt, Artificial Sequence
  Description of Artificial Sequence: Synthetic oligonucleotide
  Sense strand starting at position 85 of SEQ ID NO: 915168
gcaggauugagaugugaac

SEQ ID NO: 1059097 - RNA, 19 nt, Artificial Sequence
  Description of Artificial Sequence: Synthetic oligonucleotide
  Antisense strand to SEQ ID NO: 1059096
guucacaucucaauccugc

SEQ ID NO: 1059098 - RNA, 19 nt, Artificial Sequence
  Description of Artificial Sequence: Synthetic oligonucleotide
  Sense strand starting at position 180 of SEQ ID NO: 915168
aggcuaauuccugauguua

SEQ ID NO: 1059099 - RNA, 19 nt, Artificial Sequence
  Description of Artificial Sequence: Synthetic oligonucleotide
  Antisense strand to SEQ ID NO: 1059098
uaacaucaggaauuagccu

SEQ ID NO: 1059100 - RNA, 19 nt, Artificial Sequence
  Description of Artificial Sequence: Synthetic oligonucleotide
  Sense strand starting at position 199 of SEQ ID NO: 915168
guaguuauaauugagcaag

SEQ ID NO: 1059101 - RNA, 19 nt, Artificial Sequence
  Description of Artificial Sequence: Synthetic oligonucleotide
  Antisense strand to SEQ ID NO: 1059100
cuugcucaauuauaacuac

SEQ ID NO: 1059102 - RNA, 19 nt, Artificial Sequence
  Description of Artificial Sequence: Synthetic oligonucleotide
  Sense strand starting at position 202 of SEQ ID NO: 915168
guuauaauugagcaaguua

SEQ ID NO: 1059103 - RNA, 19 nt, Artificial Sequence
  Description of Artificial Sequence: Synthetic oligonucleotide
  Antisense strand to SEQ ID NO: 1059102
uaacuugcucaauuauaac

SEQ ID NO: 1059104 - RNA, 19 nt, Artificial Sequence
  Description of Artificial Sequence: Synthetic oligonucleotide
  Sense strand starting at position 209 of SEQ ID NO: 915168
uugagcaaguuaguaaaua

SEQ ID NO: 1059105 - RNA, 19 nt, Artificial Sequence
  Description of Artificial Sequence: Synthetic oligonucleotide
  Antisense strand to SEQ ID NO: 1059104
uauuuacuaacuugcucaa

SEQ ID NO: 1059106 - RNA, 19 nt, Artificial Sequence
  Description of Artificial Sequence: Synthetic oligonucleotide
  Sense strand starting at position 282 of SEQ ID NO: 915168
agguaucagauaugaguag

SEQ ID NO: 1059107 - RNA, 19 nt, Artificial Sequence
  Description of Artificial Sequence: Synthetic oligonucleotide
  Antisense strand to SEQ ID NO: 1059106
cuacucauaucugauaccu

SEQ ID NO: 1059108 - RNA, 19 nt, Artificial Sequence
  Description of Artificial Sequence: Synthetic oligonucleotide
  Sense strand starting at position 346 of SEQ ID NO: 915168
aaagcauauuuggauggaa

SEQ ID NO: 1059109 - RNA, 19 nt, Artificial Sequence
  Description of Artificial Sequence: Synthetic oligonucleotide
  Antisense strand to SEQ ID NO: 1059108
uuccauccaaauaugcuuu

SEQ ID NO: 1059110 - RNA, 19 nt, Artificial Sequence
  Description of Artificial Sequence: Synthetic oligonucleotide
  Sense strand starting at position 414 of SEQ ID NO: 915168
agguaaugguuaguucaga

SEQ ID NO: 1059111 - RNA, 19 nt, Artificial Sequence
  Description of Artificial Sequence: Synthetic oligonucleotide
  Antisense strand to SEQ ID NO: 1059110
ucugaacuaaccauuaccu

SEQ ID NO: 1059112 - RNA, 19 nt, Artificial Sequence
  Description of Artificial Sequence: Synthetic oligonucleotide
  Sense strand starting at position 415 of SEQ ID NO: 915168
gguaaugguuaguucagag

SEQ ID NO: 1059113 - RNA, 19 nt, Artificial Sequence
  Description of Artificial Sequence: Synthetic oligonucleotide
  Antisense strand to SEQ ID NO: 1059112
cucugaacuaaccauuacc

SEQ ID NO: 1059114 - RNA, 19 nt, Artificial Sequence
  Description of Artificial Sequence: Synthetic oligonucleotide
  Sense strand starting at position 430 of SEQ ID NO: 915168
agaguuauuugauagaagu

SEQ ID NO: 1059115 - RNA, 19 nt, Artificial Sequence
  Description of Artificial Sequence: Synthetic oligonucleotide
  Antisense strand to SEQ ID NO: 1059114
acuucuaucaaauaacucu

SEQ ID NO: 1059116 - RNA, 19 nt, Artificial Sequence
  Description of Artificial Sequence: Synthetic oligonucleotide
  Sense strand starting at position 494 of SEQ ID NO: 915168
aucucugaacauggguaua

SEQ ID NO: 1059117 - RNA, 19 nt, Artificial Sequence
  Description of Artificial Sequence: Synthetic oligonucleotide
  Antisense strand to SEQ ID NO: 1059116
uauacccauguucagagau

SEQ ID NO: 1059118 - RNA, 19 nt, Artificial Sequence
  Description of Artificial Sequence: Synthetic oligonucleotide
  Sense strand starting at position 496 of SEQ ID NO: 915168
cucugaacauggguauaua

SEQ ID NO: 1059119 - RNA, 19 nt, Artificial Sequence
  Description of Artificial Sequence: Synthetic oligonucleotide
  Antisense strand to SEQ ID NO: 1059118
uauauacccauguucagag

SEQ ID NO: 1059120 - RNA, 19 nt, Artificial Sequence
  Description of Artificial Sequence: Synthetic oligonucleotide
  Sense strand starting at position 507 of SEQ ID NO: 915168
gguauauacauguauguga

SEQ ID NO: 1059121 - RNA, 19 nt, Artificial Sequence
  Description of Artificial Sequence: Synthetic oligonucleotide
  Antisense strand to SEQ ID NO: 1059120
ucacauacauguauauacc

SEQ ID NO: 1059122 - RNA, 19 nt, Artificial Sequence
  Description of Artificial Sequence: Synthetic oligonucleotide
  Sense strand starting at position 514 of SEQ ID NO: 915168
acauguaugugauugugaa

SEQ ID NO: 1059123 - RNA, 19 nt, Artificial Sequence
  Description of Artificial Sequence: Synthetic oligonucleotide
  Antisense strand to SEQ ID NO: 1059122
uucacaaucacauacaugu

SEQ ID NO: 1059124 - RNA, 19 nt, Artificial Sequence
  Description of Artificial Sequence: Synthetic oligonucleotide
  Sense strand starting at position 526 of SEQ ID NO: 915168
uugugaauuugugcaacug

SEQ ID NO: 1059125 - RNA, 19 nt, Artificial Sequence
  Description of Artificial Sequence: Synthetic oligonucleotide
  Antisense strand to SEQ ID NO: 1059124
caguugcacaaauucacaa

SEQ ID NO: 1059126 - RNA, 19 nt, Artificial Sequence
  Description of Artificial Sequence: Synthetic oligonucleotide
  Sense strand starting at position 618 of SEQ ID NO: 915168
agauguugaacuggcaaau

SEQ ID NO: 1059127 - RNA, 19 nt, Artificial Sequence
  Description of Artificial Sequence: Synthetic oligonucleotide
  Antisense strand to SEQ ID NO: 1059126
auuugccaguucaacaucu

SEQ ID NO: 1059128 - RNA, 19 nt, Artificial Sequence
  Description of Artificial Sequence: Synthetic oligonucleotide
  Sense strand starting at position 754 of SEQ ID NO: 915168
ucuugaggugaugggaaau

SEQ ID NO: 1059129 - RNA, 19 nt, Artificial Sequence
  Description of Artificial Sequence: Synthetic oligonucleotide
  Antisense strand to SEQ ID NO: 1059128
auuucccaucaccucaaga

SEQ ID NO: 1059130 - RNA, 19 nt, Artificial Sequence
  Description of Artificial Sequence: Synthetic oligonucleotide
  Sense strand starting at position 837 of SEQ ID NO: 915168
agaaaucagagguggguuu

SEQ ID NO: 1059131 - RNA, 19 nt, Artificial Sequence
  Description of Artificial Sequence: Synthetic oligonucleotide
  Antisense strand to SEQ ID NO: 1059130
aaacccaccucugauuucu

SEQ ID NO: 1059132 - RNA, 19 nt, Artificial Sequence
  Description of Artificial Sequence: Synthetic oligonucleotide
  Sense strand starting at position 847 of SEQ ID NO: 915168
gguggguuugaauagguga

SEQ ID NO: 1059133 - RNA, 19 nt, Artificial Sequence
  Description of Artificial Sequence: Synthetic oligonucleotide
  Antisense strand to SEQ ID NO: 1059132
ucaccuauucaaacccacc

SEQ ID NO: 1059134 - RNA, 19 nt, Artificial Sequence
  Description of Artificial Sequence: Synthetic oligonucleotide
  Sense strand starting at position 849 of SEQ ID NO: 915168
uggguuugaauaggugaca

SEQ ID NO: 1059135 - RNA, 19 nt, Artificial Sequence
  Description of Artificial Sequence: Synthetic oligonucleotide
  Antisense strand to SEQ ID NO: 1059134
ugucaccuauucaaaccca

SEQ ID NO: 1059136 - RNA, 19 nt, Artificial Sequence
  Description of Artificial Sequence: Synthetic oligonucleotide
  Sense strand starting at position 850 of SEQ ID NO: 915168
ggguuugaauaggugacau

SEQ ID NO: 1059137 - RNA, 19 nt, Artificial Sequence
  Description of Artificial Sequence: Synthetic oligonucleotide
  Antisense strand to SEQ ID NO: 1059136
augucaccuauucaaaccc

SEQ ID NO: 1059138 - RNA, 19 nt, Artificial Sequence
  Description of Artificial Sequence: Synthetic oligonucleotide
  Sense strand starting at position 854 of SEQ ID NO: 915168
uugaauaggugacauauuu

SEQ ID NO: 1059139 - RNA, 19 nt, Artificial Sequence
  Description of Artificial Sequence: Synthetic oligonucleotide
  Antisense strand to SEQ ID NO: 1059138
aaauaugucaccuauucaa

SEQ ID NO: 1059140 - RNA, 19 nt, Artificial Sequence
  Description of Artificial Sequence: Synthetic oligonucleotide
  Sense strand starting at position 925 of SEQ ID NO: 915168
aggugagaaugggcuaaau

SEQ ID NO: 1059141 - RNA, 19 nt, Artificial Sequence
  Description of Artificial Sequence: Synthetic oligonucleotide
  Antisense strand to SEQ ID NO: 1059140
auuuagcccauucucaccu

SEQ ID NO: 1059142 - RNA, 19 nt, Artificial Sequence
  Description of Artificial Sequence: Synthetic oligonucleotide
  Sense strand starting at position 935 of SEQ ID NO: 915168
gggcuaaauacgggacaau

SEQ ID NO: 1059143 - RNA, 19 nt, Artificial Sequence
  Description of Artificial Sequence: Synthetic oligonucleotide
  Antisense strand to SEQ ID NO: 1059142
auugucccguauuuagccc

SEQ ID NO: 1059144 - RNA, 19 nt, Artificial Sequence
  Description of Artificial Sequence: Synthetic oligonucleotide
  Sense strand starting at position 971 of SEQ ID NO: 915168
gguugagacuaaguugaaa

SEQ ID NO: 1059145 - RNA, 19 nt, Artificial Sequence
  Description of Artificial Sequence: Synthetic oligonucleotide
  Antisense strand to SEQ ID NO: 1059144
uuucaacuuagucucaacc

SEQ ID NO: 1059146 - RNA, 19 nt, Artificial Sequence
  Description of Artificial Sequence: Synthetic oligonucleotide
  Sense strand starting at position 1989 of SEQ ID NO: 915168
ucaccugugccauagggaa

SEQ ID NO: 1059147 - RNA, 19 nt, Artificial Sequence
  Description of Artificial Sequence: Synthetic oligonucleotide
  Antisense strand to SEQ ID NO: 1059146
uucccuauggcacagguga

SEQ ID NO: 1059148 - RNA, 19 nt, Artificial Sequence
  Description of Artificial Sequence: Synthetic oligonucleotide
  Sense strand starting at position 2025 of SEQ ID NO: 915168
uugaauacauuaguagagu

SEQ ID NO: 1059149 - RNA, 19 nt, Artificial Sequence
  Description of Artificial Sequence: Synthetic oligonucleotide
  Antisense strand to SEQ ID NO: 1059148
acucuacuaauguauucaa

SEQ ID NO: 1059150 - RNA, 19 nt, Artificial Sequence
  Description of Artificial Sequence: Synthetic oligonucleotide
  Sense strand starting at position 2679 of SEQ ID NO: 915168
gcaugugaacuguaaugag

SEQ ID NO: 1059151 - RNA, 19 nt, Artificial Sequence
  Description of Artificial Sequence: Synthetic oligonucleotide
  Antisense strand to SEQ ID NO: 1059150
cucauuacaguucacaugc

SEQ ID NO: 1059152 - RNA, 19 nt, Artificial Sequence
  Description of Artificial Sequence: Synthetic oligonucleotide
  Sense strand starting at position 2765 of SEQ ID NO: 915168
ugauuagcagauuauguga

SEQ ID NO: 1059153 - RNA, 19 nt, Artificial Sequence
  Description of Artificial Sequence: Synthetic oligonucleotide
  Antisense strand to SEQ ID NO: 1059152
ucacauaaucugcuaauca

SEQ ID NO: 1059154 - RNA, 19 nt, Artificial Sequence
  Description of Artificial Sequence: Synthetic oligonucleotide
  Sense strand starting at position 2949 of SEQ ID NO: 915168
cugcuugaucuuggacaag

SEQ ID NO: 1059155 - RNA, 19 nt, Artificial Sequence
  Description of Artificial Sequence: Synthetic oligonucleotide
  Antisense strand to SEQ ID NO: 1059154
cuuguccaagaucaagcag

SEQ ID NO: 1059156 - RNA, 19 nt, Artificial Sequence
  Description of Artificial Sequence: Synthetic oligonucleotide
  Sense strand starting at position 2973 of SEQ ID NO: 915168
gucuucucugaguaacaau

SEQ ID NO: 1059157 - RNA, 19 nt, Artificial Sequence
  Description of Artificial Sequence: Synthetic oligonucleotide
  Antisense strand to SEQ ID NO: 1059156
auuguuacucagagaagac

SEQ ID NO: 1059158 - RNA, 19 nt, Artificial Sequence
  Description of Artificial Sequence: Synthetic oligonucleotide
  Sense strand starting at position 3357 of SEQ ID NO: 915168
guggaaagcuuauuaaauu

SEQ ID NO: 1059159 - RNA, 19 nt, Artificial Sequence
  Description of Artificial Sequence: Synthetic oligonucleotide
  Antisense strand to SEQ ID NO: 1059158
aauuuaauaagcuuuccac

SEQ ID NO: 1059160 - RNA, 19 nt, Artificial Sequence
  Description of Artificial Sequence: Synthetic oligonucleotide
  Sense strand starting at position 3418 of SEQ ID NO: 915168
cacugucauccagagcaga

SEQ ID NO: 1059161 - RNA, 19 nt, Artificial Sequence
  Description of Artificial Sequence: Synthetic oligonucleotide
  Antisense strand to SEQ ID NO: 1059160
ucugcucuggaugacagug

SEQ ID NO: 1059162 - RNA, 19 nt, Artificial Sequence
  Description of Artificial Sequence: Synthetic oligonucleotide
  Sense strand starting at position 3446 of SEQ ID NO: 915168
guagaacaaugcuucugaa

SEQ ID NO: 1059163 - RNA, 19 nt, Artificial Sequence
  Description of Artificial Sequence: Synthetic oligonucleotide
  Antisense strand to SEQ ID NO: 1059162
uucagaagcauuguucuac

SEQ ID NO: 1059164 - RNA, 19 nt, Artificial Sequence
  Description of Artificial Sequence: Synthetic oligonucleotide
  Sense strand starting at position 3603 of SEQ ID NO: 915168
uugugagccacugauguaa

SEQ ID NO: 1059165 - RNA, 19 nt, Artificial Sequence
  Description of Artificial Sequence: Synthetic oligonucleotide
  Antisense strand to SEQ ID NO: 1059164
uuacaucaguggcucacaa

SEQ ID NO: 1059166 - RNA, 19 nt, Artificial Sequence
  Description of Artificial Sequence: Synthetic oligonucleotide
  Sense strand starting at position 3641 of SEQ ID NO: 915168
cccuaucuacucuagaugu

SEQ ID NO: 1059167 - RNA, 19 nt, Artificial Sequence
  Description of Artificial Sequence: Synthetic oligonucleotide
  Antisense strand to SEQ ID NO: 1059166
acaucuagaguagauaggg

SEQ ID NO: 1059168 - RNA, 19 nt, Artificial Sequence
  Description of Artificial Sequence: Synthetic oligonucleotide
  Sense strand starting at position 3643 of SEQ ID NO: 915168
cuaucuacucuagaugucu

SEQ ID NO: 1059169 - RNA, 19 nt, Artificial Sequence
  Description of Artificial Sequence: Synthetic oligonucleotide
  Antisense strand to SEQ ID NO: 1059168
agacaucuagaguagauag

SEQ ID NO: 1059170 - RNA, 19 nt, Artificial Sequence
  Description of Artificial Sequence: Synthetic oligonucleotide
  Sense strand starting at position 3649 of SEQ ID NO: 915168
acucuagaugucuaucagu

SEQ ID NO: 1059171 - RNA, 19 nt, Artificial Sequence
  Description of Artificial Sequence: Synthetic oligonucleotide
  Antisense strand to SEQ ID NO: 1059170
acugauagacaucuagagu

SEQ ID NO: 1059172 - RNA, 19 nt, Artificial Sequence
  Description of Artificial Sequence: Synthetic oligonucleotide
  Sense strand starting at position 3758 of SEQ ID NO: 915168
cagcuuacauagucaggau

SEQ ID NO: 1059173 - RNA, 19 nt, Artificial Sequence
  Description of Artificial Sequence: Synthetic oligonucleotide
  Antisense strand to SEQ ID NO: 1059172
auccugacuauguaagcug

SEQ ID NO: 1059174 - RNA, 19 nt, Artificial Sequence
  Description of Artificial Sequence: Synthetic oligonucleotide
  Sense strand starting at position 3798 of SEQ ID NO: 915168
auaaguagucuuuaguaca

SEQ ID NO: 1059175 - RNA, 19 nt, Artificial Sequence
  Description of Artificial Sequence: Synthetic oligonucleotide
  Antisense strand to SEQ ID NO: 1059174
uguacuaaagacuacuuau

SEQ ID NO: 1059176 - RNA, 19 nt, Artificial Sequence
  Description of Artificial Sequence: Synthetic oligonucleotide
  Sense strand starting at position 9 of SEQ ID NO: 915169
cuauuagucucccugaaug

SEQ ID NO: 1059177 - RNA, 19 nt, Artificial Sequence
  Description of Artificial Sequence: Synthetic oligonucleotide
  Antisense strand to SEQ ID NO: 1059176
cauucagggagacuaauag

SEQ ID NO: 1059178 - RNA, 19 nt, Artificial Sequence
  Description of Artificial Sequence: Synthetic oligonucleotide
  Sense strand starting at position 11 of SEQ ID NO: 915169
auuagucucccugaaugac

SEQ ID NO: 1059179 - RNA, 19 nt, Artificial Sequence
  Description of Artificial Sequence: Synthetic oligonucleotide
  Antisense strand to SEQ ID NO: 1059178
gucauucagggagacuaau

SEQ ID NO: 1059180 - RNA, 19 nt, Artificial Sequence
  Description of Artificial Sequence: Synthetic oligonucleotide
  Sense strand starting at position 255 of SEQ ID NO: 915169
aguuguauuaaguaccagu

SEQ ID NO: 1059181 - RNA, 19 nt, Artificial Sequence
  Description of Artificial Sequence: Synthetic oligonucleotide
  Antisense strand to SEQ ID NO: 1059180
acugguacuuaauacaacu

SEQ ID NO: 1059182 - RNA, 19 nt, Artificial Sequence
  Description of Artificial Sequence: Synthetic oligonucleotide
  Sense strand starting at position 319 of SEQ ID NO: 915169
aacccugugaugugaggua

SEQ ID NO: 1059183 - RNA, 19 nt, Artificial Sequence
  Description of Artificial Sequence: Synthetic oligonucleotide
  Antisense strand to SEQ ID NO: 1059182
uaccucacaucacaggguu

SEQ ID NO: 1059184 - RNA, 19 nt, Artificial Sequence
  Description of Artificial Sequence: Synthetic oligonucleotide
  Sense strand starting at position 324 of SEQ ID NO: 915169
ugugaugugagguaaugua

SEQ ID NO: 1059185 - RNA, 19 nt, Artificial Sequence
  Description of Artificial Sequence: Synthetic oligonucleotide
  Antisense strand to SEQ ID NO: 1059184
uacauuaccucacaucaca

SEQ ID NO: 1059186 - RNA, 19 nt, Artificial Sequence
  Description of Artificial Sequence: Synthetic oligonucleotide
  Sense strand starting at position 354 of SEQ ID NO: 915169
auauaagugucuuuacuag

SEQ ID NO: 1059187 - RNA, 19 nt, Artificial Sequence
  Description of Artificial Sequence: Synthetic oligonucleotide
  Antisense strand to SEQ ID NO: 1059186
cuaguaaagacacuuauau

SEQ ID NO: 1059188 - RNA, 19 nt, Artificial Sequence
  Description of Artificial Sequence: Synthetic oligonucleotide
  Sense strand starting at position 368 of SEQ ID NO: 915169
acuaguaacguuuagagag

SEQ ID NO: 1059189 - RNA, 19 nt, Artificial Sequence
  Description of Artificial Sequence: Synthetic oligonucleotide
  Antisense strand to SEQ ID NO: 1059188
cucucuaaacguuacuagu

SEQ ID NO: 1059190 - RNA, 19 nt, Artificial Sequence
  Description of Artificial Sequence: Synthetic oligonucleotide
  Sense strand starting at position 374 of SEQ ID NO: 915169
aacguuuagagagguuaca

SEQ ID NO: 1059191 - RNA, 19 nt, Artificial Sequence
  Description of Artificial Sequence: Synthetic oligonucleotide
  Antisense strand to SEQ ID NO: 1059190
uguaaccucucuaaacguu

SEQ ID NO: 1059192 - RNA, 19 nt, Artificial Sequence
  Description of Artificial Sequence: Synthetic oligonucleotide
  Sense strand starting at position 724 of SEQ ID NO: 915169
uccagaugccucugaagac

SEQ ID NO: 1059193 - RNA, 19 nt, Artificial Sequence
  Description of Artificial Sequence: Synthetic oligonucleotide
  Antisense strand to SEQ ID NO: 1059192
gucuucagaggcaucugga

SEQ ID NO: 1059194 - RNA, 19 nt, Artificial Sequence
  Description of Artificial Sequence: Synthetic oligonucleotide
  Sense strand starting at position 745 of SEQ ID NO: 915169
ggaauugacuuucuccuua

SEQ ID NO: 1059195 - RNA, 19 nt, Artificial Sequence
  Description of Artificial Sequence: Synthetic oligonucleotide
  Antisense strand to SEQ ID NO: 1059194
uaaggagaaagucaauucc

SEQ ID NO: 1059196 - RNA, 19 nt, Artificial Sequence
  Description of Artificial Sequence: Synthetic oligonucleotide
  Sense strand starting at position 750 of SEQ ID NO: 915169
ugacuuucuccuuaguaag

SEQ ID NO: 1059197 - RNA, 19 nt, Artificial Sequence
  Description of Artificial Sequence: Synthetic oligonucleotide
  Antisense strand to SEQ ID NO: 1059196
cuuacuaaggagaaaguca

SEQ ID NO: 1059198 - RNA, 19 nt, Artificial Sequence
  Description of Artificial Sequence: Synthetic oligonucleotide
  Sense strand starting at position 781 of SEQ ID NO: 915169
uuaagacaagugugagaau

SEQ ID NO: 1059199 - RNA, 19 nt, Artificial Sequence
  Description of Artificial Sequence: Synthetic oligonucleotide
  Antisense strand to SEQ ID NO: 1059198
auucucacacuugucuuaa

SEQ ID NO: 1059200 - RNA, 19 nt, Artificial Sequence
  Description of Artificial Sequence: Synthetic oligonucleotide
  Sense strand starting at position 792 of SEQ ID NO: 915169
gugagaauauuaucaccuu

SEQ ID NO: 1059201 - RNA, 19 nt, Artificial Sequence
  Description of Artificial Sequence: Synthetic oligonucleotide
  Antisense strand to SEQ ID NO: 1059200
aaggugauaauauucucac

SEQ ID NO: 1059202 - RNA, 19 nt, Artificial Sequence
  Description of Artificial Sequence: Synthetic oligonucleotide
  Sense strand starting at position 1999 of SEQ ID NO: 915169
gcucuuucugaauaguauu

SEQ ID NO: 1059203 - RNA, 19 nt, Artificial Sequence
  Description of Artificial Sequence: Synthetic oligonucleotide
  Antisense strand to SEQ ID NO: 1059202
aauacuauucagaaagagc

SEQ ID NO: 1059204 - RNA, 19 nt, Artificial Sequence
  Description of Artificial Sequence: Synthetic oligonucleotide
  Sense strand starting at position 2311 of SEQ ID NO: 915169
uccacaucaugggauauuu

SEQ ID NO: 1059205 - RNA, 19 nt, Artificial Sequence
  Description of Artificial Sequence: Synthetic oligonucleotide
  Antisense strand to SEQ ID NO: 1059204
aaauaucccaugaugugga

SEQ ID NO: 1059206 - RNA, 19 nt, Artificial Sequence
  Description of Artificial Sequence: Synthetic oligonucleotide
  Sense strand starting at position 2361 of SEQ ID NO: 915169
uagggagucucauuccuuu

SEQ ID NO: 1059207 - RNA, 19 nt, Artificial Sequence
  Description of Artificial Sequence: Synthetic oligonucleotide
  Antisense strand to SEQ ID NO: 1059206
aaaggaaugagacucccua

SEQ ID NO: 1059208 - RNA, 19 nt, Artificial Sequence
  Description of Artificial Sequence: Synthetic oligonucleotide
  Sense strand starting at position 2364 of SEQ ID NO: 915169
ggagucucauuccuuuauu

SEQ ID NO: 1059209 - RNA, 19 nt, Artificial Sequence
  Description of Artificial Sequence: Synthetic oligonucleotide
  Antisense strand to SEQ ID NO: 1059208
aauaaaggaaugagacucc

SEQ ID NO: 1059210 - RNA, 19 nt, Artificial Sequence
  Description of Artificial Sequence: Synthetic oligonucleotide
  Sense strand starting at position 2443 of SEQ ID NO: 915169
uaaacuggucuugguaauc

SEQ ID NO: 1059211 - RNA, 19 nt, Artificial Sequence
  Description of Artificial Sequence: Synthetic oligonucleotide
  Antisense strand to SEQ ID NO: 1059210
gauuaccaagaccaguuua

SEQ ID NO: 1059212 - RNA, 19 nt, Artificial Sequence
  Description of Artificial Sequence: Synthetic oligonucleotide
  Sense strand starting at position 2448 of SEQ ID NO: 915169
uggucuugguaaucucuaa

SEQ ID NO: 1059213 - RNA, 19 nt, Artificial Sequence
  Description of Artificial Sequence: Synthetic oligonucleotide
  Antisense strand to SEQ ID NO: 1059212
uuagagauuaccaagacca

SEQ ID NO: 1059214 - RNA, 19 nt, Artificial Sequence
  Description of Artificial Sequence: Synthetic oligonucleotide
  Sense strand starting at position 2499 of SEQ ID NO: 915169
aaauucugcuggguuagaa

SEQ ID NO: 1059215 - RNA, 19 nt, Artificial Sequence
  Description of Artificial Sequence: Synthetic oligonucleotide
  Antisense strand to SEQ ID NO: 1059214
uucuaacccagcagaauuu

SEQ ID NO: 1059216 - RNA, 19 nt, Artificial Sequence
  Description of Artificial Sequence: Synthetic oligonucleotide
  Sense strand starting at position 2507 of SEQ ID NO: 915169
cuggguuagaacuaugucu

SEQ ID NO: 1059217 - RNA, 19 nt, Artificial Sequence
  Description of Artificial Sequence: Synthetic oligonucleotide
  Antisense strand to SEQ ID NO: 1059216
agacauaguucuaacccag

SEQ ID NO: 1059218 - RNA, 19 nt, Artificial Sequence
  Description of Artificial Sequence: Synthetic oligonucleotide
  Sense strand starting at position 2509 of SEQ ID NO: 915169
ggguuagaacuaugucuuu

SEQ ID NO: 1059219 - RNA, 19 nt, Artificial Sequence
  Description of Artificial Sequence: Synthetic oligonucleotide
  Antisense strand to SEQ ID NO: 1059218
aaagacauaguucuaaccc

SEQ ID NO: 1059220 - RNA, 19 nt, Artificial Sequence
  Description of Artificial Sequence: Synthetic oligonucleotide
  Sense strand starting at position 2512 of SEQ ID NO: 915169
uuagaacuaugucuuuaug

SEQ ID NO: 1059221 - RNA, 19 nt, Artificial Sequence
  Description of Artificial Sequence: Synthetic oligonucleotide
  Antisense strand to SEQ ID NO: 1059220
cauaaagacauaguucuaa

SEQ ID NO: 1059222 - RNA, 19 nt, Artificial Sequence
  Description of Artificial Sequence: Synthetic oligonucleotide
  Sense strand starting at position 2514 of SEQ ID NO: 915169
agaacuaugucuuuaugca

SEQ ID NO: 1059223 - RNA, 19 nt, Artificial Sequence
  Description of Artificial Sequence: Synthetic oligonucleotide
  Antisense strand to SEQ ID NO: 1059222
ugcauaaagacauaguucu

SEQ ID NO: 1059224 - RNA, 19 nt, Artificial Sequence
  Description of Artificial Sequence: Synthetic oligonucleotide
  Sense strand starting at position 2674 of SEQ ID NO: 915169
ugcauuuguuaugugccaa

SEQ ID NO: 1059225 - RNA, 19 nt, Artificial Sequence
  Description of Artificial Sequence: Synthetic oligonucleotide
  Antisense strand to SEQ ID NO: 1059224
uuggcacauaacaaaugca

SEQ ID NO: 1059226 - RNA, 19 nt, Artificial Sequence
  Description of Artificial Sequence: Synthetic oligonucleotide
  Sense strand starting at position 2726 of SEQ ID NO: 915169
aucugaagugccuaugaag

SEQ ID NO: 1059227 - RNA, 19 nt, Artificial Sequence
  Description of Artificial Sequence: Synthetic oligonucleotide
  Antisense strand to SEQ ID NO: 1059226
cuucauaggcacuucagau

SEQ ID NO: 1059228 - RNA, 19 nt, Artificial Sequence
  Description of Artificial Sequence: Synthetic oligonucleotide
  Sense strand starting at position 2840 of SEQ ID NO: 915169
aucagauaugcuuguugag

SEQ ID NO: 1059229 - RNA, 19 nt, Artificial Sequence
  Description of Artificial Sequence: Synthetic oligonucleotide
  Antisense strand to SEQ ID NO: 1059228
cucaacaagcauaucugau

SEQ ID NO: 1059230 - RNA, 19 nt, Artificial Sequence
  Description of Artificial Sequence: Synthetic oligonucleotide
  Sense strand starting at position 2842 of SEQ ID NO: 915169
cagauaugcuuguugagga

SEQ ID NO: 1059231 - RNA, 19 nt, Artificial Sequence
  Description of Artificial Sequence: Synthetic oligonucleotide
  Antisense strand to SEQ ID NO: 1059230
uccucaacaagcauaucug

SEQ ID NO: 1059232 - RNA, 19 nt, Artificial Sequence
  Description of Artificial Sequence: Synthetic oligonucleotide
  Sense strand starting at position 2888 of SEQ ID NO: 915169
cguauaguccuccaaucca

SEQ ID NO: 1059233 - RNA, 19 nt, Artificial Sequence
  Description of Artificial Sequence: Synthetic oligonucleotide
  Antisense strand to SEQ ID NO: 1059232
uggauuggaggacuauacg

SEQ ID NO: 1059234 - RNA, 19 nt, Artificial Sequence
  Description of Artificial Sequence: Synthetic oligonucleotide
  Sense strand starting at position 3065 of SEQ ID NO: 915169
aguaacauguaucccuaaa

SEQ ID NO: 1059235 - RNA, 19 nt, Artificial Sequence
  Description of Artificial Sequence: Synthetic oligonucleotide
  Antisense strand to SEQ ID NO: 1059234
uuuagggauacauguuacu

SEQ ID NO: 1059236 - RNA, 19 nt, Artificial Sequence
  Description of Artificial Sequence: Synthetic oligonucleotide
  Sense strand starting at position 3094 of SEQ ID NO: 915169
guagaaaugccaggaaauc

SEQ ID NO: 1059237 - RNA, 19 nt, Artificial Sequence
  Description of Artificial Sequence: Synthetic oligonucleotide
  Antisense strand to SEQ ID NO: 1059236
gauuuccuggcauuucuac

SEQ ID NO: 1059238 - RNA, 19 nt, Artificial Sequence
  Description of Artificial Sequence: Synthetic oligonucleotide
  Sense strand starting at position 3145 of SEQ ID NO: 915169
auuugugacuuugaacaaa

SEQ ID NO: 1059239 - RNA, 19 nt, Artificial Sequence
  Description of Artificial Sequence: Synthetic oligonucleotide
  Antisense strand to SEQ ID NO: 1059238
uuuguucaaagucacaaau

SEQ ID NO: 1059240 - RNA, 19 nt, Artificial Sequence
  Description of Artificial Sequence: Synthetic oligonucleotide
  Sense strand starting at position 3198 of SEQ ID NO: 915169
gggcaaugaauguagucau

SEQ ID NO: 1059241 - RNA, 19 nt, Artificial Sequence
  Description of Artificial Sequence: Synthetic oligonucleotide
  Antisense strand to SEQ ID NO: 1059240
augacuacauucauugccc

SEQ ID NO: 1059242 - RNA, 19 nt, Artificial Sequence
  Description of Artificial Sequence: Synthetic oligonucleotide
  Sense strand starting at position 3548 of SEQ ID NO: 915169
gcagaacuaugauuagguc

SEQ ID NO: 1059243 - RNA, 19 nt, Artificial Sequence
  Description of Artificial Sequence: Synthetic oligonucleotide
  Antisense strand to SEQ ID NO: 1059242
gaccuaaucauaguucugc

SEQ ID NO: 1059244 - RNA, 19 nt, Artificial Sequence
  Description of Artificial Sequence: Synthetic oligonucleotide
  Sense strand starting at position 3685 of SEQ ID NO: 915169
auuccuagugcugaaguau

SEQ ID NO: 1059245 - RNA, 19 nt, Artificial Sequence
  Description of Artificial Sequence: Synthetic oligonucleotide
  Antisense strand to SEQ ID NO: 1059244
auacuucagcacuaggaau

SEQ ID NO: 1059246 - RNA, 19 nt, Artificial Sequence
  Description of Artificial Sequence: Synthetic oligonucleotide
  Sense strand starting at position 3713 of SEQ ID NO: 915169
uuaucuuagcuccaaagag

SEQ ID NO: 1059247 - RNA, 19 nt, Artificial Sequence
  Description of Artificial Sequence: Synthetic oligonucleotide
  Antisense strand to SEQ ID NO: 1059246
cucuuuggagcuaagauaa

SEQ ID NO: 1059248 - RNA, 19 nt, Artificial Sequence
  Description of Artificial Sequence: Synthetic oligonucleotide
  Sense strand starting at position 3721 of SEQ ID NO: 915169
gcuccaaagagguggaauu

SEQ ID NO: 1059249 - RNA, 19 nt, Artificial Sequence
  Description of Artificial Sequence: Synthetic oligonucleotide
  Antisense strand to SEQ ID NO: 1059248
aauuccaccucuuuggagc

SEQ ID NO: 1059250 - RNA, 19 nt, Artificial Sequence
  Description of Artificial Sequence: Synthetic oligonucleotide
  Sense strand starting at position 3787 of SEQ ID NO: 915169
ggaggcaucuuauugauuc

SEQ ID NO: 1059251 - RNA, 19 nt, Artificial Sequence
  Description of Artificial Sequence: Synthetic oligonucleotide
  Antisense strand to SEQ ID NO: 1059250
gaaucaauaagaugccucc

SEQ ID NO: 1059252 - RNA, 19 nt, Artificial Sequence
  Description of Artificial Sequence: Synthetic oligonucleotide
  Sense strand starting at position 3818 of SEQ ID NO: 915169
agcaccuaggacuguaaua

SEQ ID NO: 1059253 - RNA, 19 nt, Artificial Sequence
  Description of Artificial Sequence: Synthetic oligonucleotide
  Antisense strand to SEQ ID NO: 1059252
uauuacaguccuaggugcu

SEQ ID NO: 1059254 - RNA, 19 nt, Artificial Sequence
  Description of Artificial Sequence: Synthetic oligonucleotide
  Sense strand starting at position 3875 of SEQ ID NO: 915169
gaccgaugguguuuaggaa

SEQ ID NO: 1059255 - RNA, 19 nt, Artificial Sequence
  Description of Artificial Sequence: Synthetic oligonucleotide
  Antisense strand to SEQ ID NO: 1059254
uuccuaaacaccaucgguc

SEQ ID NO: 1059256 - RNA, 19 nt, Artificial Sequence
  Description of Artificial Sequence: Synthetic oligonucleotide
  Sense strand starting at position 74 of SEQ ID NO: 915170
acaguaauucgugaggaua

SEQ ID NO: 1059257 - RNA, 19 nt, Artificial Sequence
  Description of Artificial Sequence: Synthetic oligonucleotide
  Antisense strand to SEQ ID NO: 1059256
uauccucacgaauuacugu

SEQ ID NO: 1059258 - RNA, 19 nt, Artificial Sequence
  Description of Artificial Sequence: Synthetic oligonucleotide
  Sense strand starting at position 77 of SEQ ID NO: 915170
guaauucgugaggauauug

SEQ ID NO: 1059259 - RNA, 19 nt, Artificial Sequence
  Description of Artificial Sequence: Synthetic oligonucleotide
  Antisense strand to SEQ ID NO: 1059258
caauauccucacgaauuac

SEQ ID NO: 1059260 - RNA, 19 nt, Artificial Sequence
  Description of Artificial Sequence: Synthetic oligonucleotide
  Sense strand starting at position 172 of SEQ ID NO: 915170
auuaaugaagcagguaauu

SEQ ID NO: 1059261 - RNA, 19 nt, Artificial Sequence
  Description of Artificial Sequence: Synthetic oligonucleotide
  Antisense strand to SEQ ID NO: 1059260
aauuaccugcuucauuaau

SEQ ID NO: 1059262 - RNA, 19 nt, Artificial Sequence
  Description of Artificial Sequence: Synthetic oligonucleotide
  Sense strand starting at position 305 of SEQ ID NO: 915170
gugucucuuaagggaagau

SEQ ID NO: 1059263 - RNA, 19 nt, Artificial Sequence
  Description of Artificial Sequence: Synthetic oligonucleotide
  Antisense strand to SEQ ID NO: 1059262
aucuucccuuaagagacac

SEQ ID NO: 1059264 - RNA, 19 nt, Artificial Sequence
  Description of Artificial Sequence: Synthetic oligonucleotide
  Sense strand starting at position 455 of SEQ ID NO: 915170
uccagcauccuacaguuau

SEQ ID NO: 1059265 - RNA, 19 nt, Artificial Sequence
  Description of Artificial Sequence: Synthetic oligonucleotide
  Antisense strand to SEQ ID NO: 1059264
auaacuguaggaugcugga

SEQ ID NO: 1059266 - RNA, 19 nt, Artificial Sequence
  Description of Artificial Sequence: Synthetic oligonucleotide
  Sense strand starting at position 1109 of SEQ ID NO: 915170
ugguucugacuccauauau

SEQ ID NO: 1059267 - RNA, 19 nt, Artificial Sequence
  Description of Artificial Sequence: Synthetic oligonucleotide
  Antisense strand to SEQ ID NO: 1059266
auauauggagucagaacca

SEQ ID NO: 1059268 - RNA, 19 nt, Artificial Sequence
  Description of Artificial Sequence: Synthetic oligonucleotide
  Sense strand starting at position 1124 of SEQ ID NO: 915170
auaugacaggauugagcau

SEQ ID NO: 1059269 - RNA, 19 nt, Artificial Sequence
  Description of Artificial Sequence: Synthetic oligonucleotide
  Antisense strand to SEQ ID NO: 1059268
augcucaauccugucauau

SEQ ID NO: 1059270 - RNA, 19 nt, Artificial Sequence
  Description of Artificial Sequence: Synthetic oligonucleotide
  Sense strand starting at position 1160 of SEQ ID NO: 915170
agagauuggcuaggaguau

SEQ ID NO: 1059271 - RNA, 19 nt, Artificial Sequence
  Description of Artificial Sequence: Synthetic oligonucleotide
  Antisense strand to SEQ ID NO: 1059270
auacuccuagccaaucucu

SEQ ID NO: 1059272 - RNA, 19 nt, Artificial Sequence
  Description of Artificial Sequence: Synthetic oligonucleotide
  Sense strand starting at position 1166 of SEQ ID NO: 915170
uggcuaggaguauauggau

SEQ ID NO: 1059273 - RNA, 19 nt, Artificial Sequence
  Description of Artificial Sequence: Synthetic oligonucleotide
  Antisense strand to SEQ ID NO: 1059272
auccauauacuccuagcca

SEQ ID NO: 1059274 - RNA, 19 nt, Artificial Sequence
  Description of Artificial Sequence: Synthetic oligonucleotide
  Sense strand starting at position 1494 of SEQ ID NO: 915170
gggcaaccgcaauauaaga

SEQ ID NO: 1059275 - RNA, 19 nt, Artificial Sequence
  Description of Artificial Sequence: Synthetic oligonucleotide
  Antisense strand to SEQ ID NO: 1059274
ucuuauauugcgguugccc

SEQ ID NO: 1059276 - RNA, 19 nt, Artificial Sequence
  Description of Artificial Sequence: Synthetic oligonucleotide
  Sense strand starting at position 1570 of SEQ ID NO: 915170
gaaacaaccuuguugguga

SEQ ID NO: 1059277 - RNA, 19 nt, Artificial Sequence
  Description of Artificial Sequence: Synthetic oligonucleotide
  Antisense strand to SEQ ID NO: 1059276
ucaccaacaagguuguuuc

SEQ ID NO: 1059278 - RNA, 19 nt, Artificial Sequence
  Description of Artificial Sequence: Synthetic oligonucleotide
  Sense strand starting at position 1586 of SEQ ID NO: 915170
ugaggauggcgcuauauug

SEQ ID NO: 1059279 - RNA, 19 nt, Artificial Sequence
  Description of Artificial Sequence: Synthetic oligonucleotide
  Antisense strand to SEQ ID NO: 1059278
caauauagcgccauccuca

SEQ ID NO: 1059280 - RNA, 19 nt, Artificial Sequence
  Description of Artificial Sequence: Synthetic oligonucleotide
  Sense strand starting at position 1596 of SEQ ID NO: 915170
gcuauauuggaguggauug

SEQ ID NO: 1059281 - RNA, 19 nt, Artificial Sequence
  Description of Artificial Sequence: Synthetic oligonucleotide
  Antisense strand to SEQ ID NO: 1059280
caauccacuccaauauagc

SEQ ID NO: 1059282 - RNA, 19 nt, Artificial Sequence
  Description of Artificial Sequence: Synthetic oligonucleotide
  Sense strand starting at position 1601 of SEQ ID NO: 915170
auuggaguggauugcagau

SEQ ID NO: 1059283 - RNA, 19 nt, Artificial Sequence
  Description of Artificial Sequence: Synthetic oligonucleotide
  Antisense strand to SEQ ID NO: 1059282
aucugcaauccacuccaau

SEQ ID NO: 1059284 - RNA, 19 nt, Artificial Sequence
  Description of Artificial Sequence: Synthetic oligonucleotide
  Sense strand starting at position 1653 of SEQ ID NO: 915170
gacugcugacuccauaagu

SEQ ID NO: 1059285 - RNA, 19 nt, Artificial Sequence
  Description of Artificial Sequence: Synthetic oligonucleotide
  Antisense strand to SEQ ID NO: 1059284
acuuauggagucagcaguc

SEQ ID NO: 1059286 - RNA, 19 nt, Artificial Sequence
  Description of Artificial Sequence: Synthetic oligonucleotide
  Sense strand starting at position 1715 of SEQ ID NO: 915170
agaugaucccucugagguu

SEQ ID NO: 1059287 - RNA, 19 nt, Artificial Sequence
  Description of Artificial Sequence: Synthetic oligonucleotide
  Antisense strand to SEQ ID NO: 1059286
aaccucagagggaucaucu

SEQ ID NO: 1059288 - RNA, 19 nt, Artificial Sequence
  Description of Artificial Sequence: Synthetic oligonucleotide
  Sense strand starting at position 1724 of SEQ ID NO: 915170
cucugagguugauccagaa

SEQ ID NO: 1059289 - RNA, 19 nt, Artificial Sequence
  Description of Artificial Sequence: Synthetic oligonucleotide
  Antisense strand to SEQ ID NO: 1059288
uucuggaucaaccucagag

SEQ ID NO: 1059290 - RNA, 19 nt, Artificial Sequence
  Description of Artificial Sequence: Synthetic oligonucleotide
  Sense strand starting at position 1833 of SEQ ID NO: 915170
gcugcugucagucuugauc

SEQ ID NO: 1059291 - RNA, 19 nt, Artificial Sequence
  Description of Artificial Sequence: Synthetic oligonucleotide
  Antisense strand to SEQ ID NO: 1059290
gaucaagacugacagcagc

SEQ ID NO: 1059292 - RNA, 19 nt, Artificial Sequence
  Description of Artificial Sequence: Synthetic oligonucleotide
  Sense strand starting at position 1839 of SEQ ID NO: 915170
gucagucuugaucacaagu

SEQ ID NO: 1059293 - RNA, 19 nt, Artificial Sequence
  Description of Artificial Sequence: Synthetic oligonucleotide
  Antisense strand to SEQ ID NO: 1059292
acuugugaucaagacugac

SEQ ID NO: 1059294 - RNA, 19 nt, Artificial Sequence
  Description of Artificial Sequence: Synthetic oligonucleotide
  Sense strand starting at position 1862 of SEQ ID NO: 915170
uagugaaguucccuaugag

SEQ ID NO: 1059295 - RNA, 19 nt, Artificial Sequence
  Description of Artificial Sequence: Synthetic oligonucleotide
  Antisense strand to SEQ ID NO: 1059294
cucauagggaacuucacua

SEQ ID NO: 1059296 - RNA, 19 nt, Artificial Sequence
  Description of Artificial Sequence: Synthetic oligonucleotide
  Sense strand starting at position 1863 of SEQ ID NO: 915170
agugaaguucccuaugagu

SEQ ID NO: 1059297 - RNA, 19 nt, Artificial Sequence
  Description of Artificial Sequence: Synthetic oligonucleotide
  Antisense strand to SEQ ID NO: 1059296
acucauagggaacuucacu

SEQ ID NO: 1059298 - RNA, 19 nt, Artificial Sequence
  Description of Artificial Sequence: Synthetic oligonucleotide
  Sense strand starting at position 2013 of SEQ ID NO: 915170
ugcauaaguccacagucua

SEQ ID NO: 1059299 - RNA, 19 nt, Artificial Sequence
  Description of Artificial Sequence: Synthetic oligonucleotide
  Antisense strand to SEQ ID NO: 1059298
uagacuguggacuuaugca

SEQ ID NO: 1059300 - RNA, 19 nt, Artificial Sequence
  Description of Artificial Sequence: Synthetic oligonucleotide
  Sense strand starting at position 2020 of SEQ ID NO: 915170
guccacagucuacagaaau

SEQ ID NO: 1059301 - RNA, 19 nt, Artificial Sequence
  Description of Artificial Sequence: Synthetic oligonucleotide
  Antisense strand to SEQ ID NO: 1059300
auuucuguagacuguggac

SEQ ID NO: 1059302 - RNA, 19 nt, Artificial Sequence
  Description of Artificial Sequence: Synthetic oligonucleotide
  Sense strand starting at position 2033 of SEQ ID NO: 915170
agaaauguaugcucaccca

SEQ ID NO: 1059303 - RNA, 19 nt, Artificial Sequence
  Description of Artificial Sequence: Synthetic oligonucleotide
  Antisense strand to SEQ ID NO: 1059302
ugggugagcauacauuucu

SEQ ID NO: 1059304 - RNA, 19 nt, Artificial Sequence
  Description of Artificial Sequence: Synthetic oligonucleotide
  Sense strand starting at position 2168 of SEQ ID NO: 915170
uacagagcacuuuagguaa

SEQ ID NO: 1059305 - RNA, 19 nt, Artificial Sequence
  Description of Artificial Sequence: Synthetic oligonucleotide
  Antisense strand to SEQ ID NO: 1059304
uuaccuaaagugcucugua

SEQ ID NO: 1059306 - RNA, 19 nt, Artificial Sequence
  Description of Artificial Sequence: Synthetic oligonucleotide
  Sense strand starting at position 2171 of SEQ ID NO: 915170
agagcacuuuagguaagua

SEQ ID NO: 1059307 - RNA, 19 nt, Artificial Sequence
  Description of Artificial Sequence: Synthetic oligonucleotide
  Antisense strand to SEQ ID NO: 1059306
uacuuaccuaaagugcucu

SEQ ID NO: 1059308 - RNA, 19 nt, Artificial Sequence
  Description of Artificial Sequence: Synthetic oligonucleotide
  Sense strand starting at position 2432 of SEQ ID NO: 915170
cuuaaauguagugguggaa

SEQ ID NO: 1059309 - RNA, 19 nt, Artificial Sequence
  Description of Artificial Sequence: Synthetic oligonucleotide
  Antisense strand to SEQ ID NO: 1059308
uuccaccacuacauuuaag

SEQ ID NO: 1059310 - RNA, 19 nt, Artificial Sequence
  Description of Artificial Sequence: Synthetic oligonucleotide
  Sense strand starting at position 2444 of SEQ ID NO: 915170
gguggaaauuaauuccagu

SEQ ID NO: 1059311 - RNA, 19 nt, Artificial Sequence
  Description of Artificial Sequence: Synthetic oligonucleotide
  Antisense strand to SEQ ID NO: 1059310
acuggaauuaauuuccacc

SEQ ID NO: 1059312 - RNA, 19 nt, Artificial Sequence
  Description of Artificial Sequence: Synthetic oligonucleotide
  Sense strand starting at position 2455 of SEQ ID NO: 915170
auuccaguugauugaauga

SEQ ID NO: 1059313 - RNA, 19 nt, Artificial Sequence
  Description of Artificial Sequence: Synthetic oligonucleotide
  Antisense strand to SEQ ID NO: 1059312
ucauucaaucaacuggaau

SEQ ID NO: 1059314 - RNA, 19 nt, Artificial Sequence
  Description of Artificial Sequence: Synthetic oligonucleotide
  Sense strand starting at position 2667 of SEQ ID NO: 915170
ugaaguacugccuacuauu

SEQ ID NO: 1059315 - RNA, 19 nt, Artificial Sequence
  Description of Artificial Sequence: Synthetic oligonucleotide
  Antisense strand to SEQ ID NO: 1059314
aauaguaggcaguacuuca

SEQ ID NO: 1059316 - RNA, 19 nt, Artificial Sequence
  Description of Artificial Sequence: Synthetic oligonucleotide
  Sense strand starting at position 2768 of SEQ ID NO: 915170
cauguaagcgaucaaugag

SEQ ID NO: 1059317 - RNA, 19 nt, Artificial Sequence
  Description of Artificial Sequence: Synthetic oligonucleotide
  Antisense strand to SEQ ID NO: 1059316
cucauugaucgcuuacaug

SEQ ID NO: 1059318 - RNA, 19 nt, Artificial Sequence
  Description of Artificial Sequence: Synthetic oligonucleotide
  Sense strand starting at position 2774 of SEQ ID NO: 915170
agcgaucaaugaguuuaag

SEQ ID NO: 1059319 - RNA, 19 nt, Artificial Sequence
  Description of Artificial Sequence: Synthetic oligonucleotide
  Antisense strand to SEQ ID NO: 1059318
cuuaaacucauugaucgcu

SEQ ID NO: 1059320 - RNA, 19 nt, Artificial Sequence
  Description of Artificial Sequence: Synthetic oligonucleotide
  Sense strand starting at position 2788 of SEQ ID NO: 915170
uuaagaggcuugucagaug

SEQ ID NO: 1059321 - RNA, 19 nt, Artificial Sequence
  Description of Artificial Sequence: Synthetic oligonucleotide
  Antisense strand to SEQ ID NO: 1059320
caucugacaagccucuuaa

SEQ ID NO: 1059322 - RNA, 19 nt, Artificial Sequence
  Description of Artificial Sequence: Synthetic oligonucleotide
  Sense strand starting at position 3012 of SEQ ID NO: 915170
ugaauaacacguuaguauc

SEQ ID NO: 1059323 - RNA, 19 nt, Artificial Sequence
  Description of Artificial Sequence: Synthetic oligonucleotide
  Antisense strand to SEQ ID NO: 1059322
gauacuaacguguuauuca

SEQ ID NO: 1059324 - RNA, 19 nt, Artificial Sequence
  Description of Artificial Sequence: Synthetic oligonucleotide
  Sense strand starting at position 3196 of SEQ ID NO: 915170
cuuugucacccugauugga

SEQ ID NO: 1059325 - RNA, 19 nt, Artificial Sequence
  Description of Artificial Sequence: Synthetic oligonucleotide
  Antisense strand to SEQ ID NO: 1059324
uccaaucagggugacaaag

SEQ ID NO: 1059326 - RNA, 19 nt, Artificial Sequence
  Description of Artificial Sequence: Synthetic oligonucleotide
  Sense strand starting at position 3591 of SEQ ID NO: 915170
ugccuuacucaagauuaga

SEQ ID NO: 1059327 - RNA, 19 nt, Artificial Sequence
  Description of Artificial Sequence: Synthetic oligonucleotide
  Antisense strand to SEQ ID NO: 1059326
ucuaaucuugaguaaggca

SEQ ID NO: 1059328 - RNA, 19 nt, Artificial Sequence
  Description of Artificial Sequence: Synthetic oligonucleotide
  Sense strand starting at position 3644 of SEQ ID NO: 915170
ccauguaaauuauugggau

SEQ ID NO: 1059329 - RNA, 19 nt, Artificial Sequence
  Description of Artificial Sequence: Synthetic oligonucleotide
  Antisense strand to SEQ ID NO: 1059328
aucccaauaauuuacaugg

SEQ ID NO: 1059330 - RNA, 19 nt, Artificial Sequence
  Description of Artificial Sequence: Synthetic oligonucleotide
  Sense strand starting at position 3682 of SEQ ID NO: 915170
agugauaaguauguaaaug

SEQ ID NO: 1059331 - RNA, 19 nt, Artificial Sequence
  Description of Artificial Sequence: Synthetic oligonucleotide
  Antisense strand to SEQ ID NO: 1059330
cauuuacauacuuaucacu

SEQ ID NO: 1059332 - RNA, 19 nt, Artificial Sequence
  Description of Artificial Sequence: Synthetic oligonucleotide
  Sense strand starting at position 3804 of SEQ ID NO: 915170
auagccaucuucuugagaa

SEQ ID NO: 1059333 - RNA, 19 nt, Artificial Sequence
  Description of Artificial Sequence: Synthetic oligonucleotide
  Antisense strand to SEQ ID NO: 1059332
uucucaagaagauggcuau

SEQ ID NO: 1059334 - RNA, 19 nt, Artificial Sequence
  Description of Artificial Sequence: Synthetic oligonucleotide
  Sense strand starting at position 3806 of SEQ ID NO: 915170
agccaucuucuugagaaau

SEQ ID NO: 1059335 - RNA, 19 nt, Artificial Sequence
  Description of Artificial Sequence: Synthetic oligonucleotide
  Antisense strand to SEQ ID NO: 1059334
auuucucaagaagauggcu

SEQ ID NO: 1059336 - RNA, 19 nt, Artificial Sequence
  Description of Artificial Sequence: Synthetic oligonucleotide
  Sense strand starting at position 660 of SEQ ID NO: 915171
acacuacugcuggauuaca

SEQ ID NO: 1059337 - RNA, 19 nt, Artificial Sequence
  Description of Artificial Sequence: Synthetic oligonucleotide
  Antisense strand to SEQ ID NO: 1059336
uguaauccagcaguagugu

SEQ ID NO: 1059338 - RNA, 19 nt, Artificial Sequence
  Description of Artificial Sequence: Synthetic oligonucleotide
  Sense strand starting at position 908 of SEQ ID NO: 915171
uuaaguuugcauuaucugu

SEQ ID NO: 1059339 - RNA, 19 nt, Artificial Sequence
  Description of Artificial Sequence: Synthetic oligonucleotide
  Antisense strand to SEQ ID NO: 1059338
acagauaaugcaaacuuaa

SEQ ID NO: 1059340 - RNA, 19 nt, Artificial Sequence
  Description of Artificial Sequence: Synthetic oligonucleotide
  Sense strand starting at position 1020 of SEQ ID NO: 915171
uuggguuguauauagauau

SEQ ID NO: 1059341 - RNA, 19 nt, Artificial Sequence
  Description of Artificial Sequence: Synthetic oligonucleotide
  Antisense strand to SEQ ID NO: 1059340
auaucuauauacaacccaa

SEQ ID NO: 1059342 - RNA, 19 nt, Artificial Sequence
  Description of Artificial Sequence: Synthetic oligonucleotide
  Sense strand starting at position 2007 of SEQ ID NO: 915171
cagcaagugucacugaauu

SEQ ID NO: 1059343 - RNA, 19 nt, Artificial Sequence
  Description of Artificial Sequence: Synthetic oligonucleotide
  Antisense strand to SEQ ID NO: 1059342
aauucagugacacuugcug

SEQ ID NO: 1059344 - RNA, 19 nt, Artificial Sequence
  Description of Artificial Sequence: Synthetic oligonucleotide
  Sense strand starting at position 2015 of SEQ ID NO: 915171
gucacugaauuccuaagua

SEQ ID NO: 1059345 - RNA, 19 nt, Artificial Sequence
  Description of Artificial Sequence: Synthetic oligonucleotide
  Antisense strand to SEQ ID NO: 1059344
uacuuaggaauucagugac

SEQ ID NO: 1059346 - RNA, 19 nt, Artificial Sequence
  Description of Artificial Sequence: Synthetic oligonucleotide
  Sense strand starting at position 2019 of SEQ ID NO: 915171
cugaauuccuaaguaugaa

SEQ ID NO: 1059347 - RNA, 19 nt, Artificial Sequence
  Description of Artificial Sequence: Synthetic oligonucleotide
  Antisense strand to SEQ ID NO: 1059346
uucauacuuaggaauucag

SEQ ID NO: 1059348 - RNA, 19 nt, Artificial Sequence
  Description of Artificial Sequence: Synthetic oligonucleotide
  Sense strand starting at position 2064 of SEQ ID NO: 915171
cuugucaaguuccugaaga

SEQ ID NO: 1059349 - RNA, 19 nt, Artificial Sequence
  Description of Artificial Sequence: Synthetic oligonucleotide
  Antisense strand to SEQ ID NO: 1059348
ucuucaggaacuugacaag

SEQ ID NO: 1059350 - RNA, 19 nt, Artificial Sequence
  Description of Artificial Sequence: Synthetic oligonucleotide
  Sense strand starting at position 2087 of SEQ ID NO: 915171
gaaagacucuuaucagugu

SEQ ID NO: 1059351 - RNA, 19 nt, Artificial Sequence
  Description of Artificial Sequence: Synthetic oligonucleotide
  Antisense strand to SEQ ID NO: 1059350
acacugauaagagucuuuc

SEQ ID NO: 1059352 - RNA, 19 nt, Artificial Sequence
  Description of Artificial Sequence: Synthetic oligonucleotide
  Sense strand starting at position 2098 of SEQ ID NO: 915171
aucagugugcuagagguaa

SEQ ID NO: 1059353 - RNA, 19 nt, Artificial Sequence
  Description of Artificial Sequence: Synthetic oligonucleotide
  Antisense strand to SEQ ID NO: 1059352
uuaccucuagcacacugau

SEQ ID NO: 1059354 - RNA, 19 nt, Artificial Sequence
  Description of Artificial Sequence: Synthetic oligonucleotide
  Sense strand starting at position 2102 of SEQ ID NO: 915171
gugugcuagagguaauggu

SEQ ID NO: 1059355 - RNA, 19 nt, Artificial Sequence
  Description of Artificial Sequence: Synthetic oligonucleotide
  Antisense strand to SEQ ID NO: 1059354
accauuaccucuagcacac

SEQ ID NO: 1059356 - RNA, 19 nt, Artificial Sequence
  Description of Artificial Sequence: Synthetic oligonucleotide
  Sense strand starting at position 2115 of SEQ ID NO: 915171
aaugguauaggugguuaau

SEQ ID NO: 1059357 - RNA, 19 nt, Artificial Sequence
  Description of Artificial Sequence: Synthetic oligonucleotide
  Antisense strand to SEQ ID NO: 1059356
auuaaccaccuauaccauu

SEQ ID NO: 1059358 - RNA, 19 nt, Artificial Sequence
  Description of Artificial Sequence: Synthetic oligonucleotide
  Sense strand starting at position 2125 of SEQ ID NO: 915171
gugguuaauuuacaaacau

SEQ ID NO: 1059359 - RNA, 19 nt, Artificial Sequence
  Description of Artificial Sequence: Synthetic oligonucleotide
  Antisense strand to SEQ ID NO: 1059358
auguuuguaaauuaaccac

SEQ ID NO: 1059360 - RNA, 19 nt, Artificial Sequence
  Description of Artificial Sequence: Synthetic oligonucleotide
  Sense strand starting at position 2189 of SEQ ID NO: 915171
cacagauuauuguucugag

SEQ ID NO: 1059361 - RNA, 19 nt, Artificial Sequence
  Description of Artificial Sequence: Synthetic oligonucleotide
  Antisense strand to SEQ ID NO: 1059360
cucagaacaauaaucugug

SEQ ID NO: 1059362 - RNA, 19 nt, Artificial Sequence
  Description of Artificial Sequence: Synthetic oligonucleotide
  Sense strand starting at position 2190 of SEQ ID NO: 915171
acagauuauuguucugaga

SEQ ID NO: 1059363 - RNA, 19 nt, Artificial Sequence
  Description of Artificial Sequence: Synthetic oligonucleotide
  Antisense strand to SEQ ID NO: 1059362
ucucagaacaauaaucugu

SEQ ID NO: 1059364 - RNA, 19 nt, Artificial Sequence
  Description of Artificial Sequence: Synthetic oligonucleotide
  Sense strand starting at position 2367 of SEQ ID NO: 915171
uuccauguguucuuugaag

SEQ ID NO: 1059365 - RNA, 19 nt, Artificial Sequence
  Description of Artificial Sequence: Synthetic oligonucleotide
  Antisense strand to SEQ ID NO: 1059364
cuucaaagaacacauggaa

SEQ ID NO: 1059366 - RNA, 19 nt, Artificial Sequence
  Description of Artificial Sequence: Synthetic oligonucleotide
  Sense strand starting at position 2379 of SEQ ID NO: 915171
uuugaaguguggucuugag

SEQ ID NO: 1059367 - RNA, 19 nt, Artificial Sequence
  Description of Artificial Sequence: Synthetic oligonucleotide
  Antisense strand to SEQ ID NO: 1059366
cucaagaccacacuucaaa

SEQ ID NO: 1059368 - RNA, 19 nt, Artificial Sequence
  Description of Artificial Sequence: Synthetic oligonucleotide
  Sense strand starting at position 2383 of SEQ ID NO: 915171
aaguguggucuugagaucu

SEQ ID NO: 1059369 - RNA, 19 nt, Artificial Sequence
  Description of Artificial Sequence: Synthetic oligonucleotide
  Antisense strand to SEQ ID NO: 1059368
agaucucaagaccacacuu

SEQ ID NO: 1059370 - RNA, 19 nt, Artificial Sequence
  Description of Artificial Sequence: Synthetic oligonucleotide
  Sense strand starting at position 2412 of SEQ ID NO: 915171
cuaaguaccuuuccagaag

SEQ ID NO: 1059371 - RNA, 19 nt, Artificial Sequence
  Description of Artificial Sequence: Synthetic oligonucleotide
  Antisense strand to SEQ ID NO: 1059370
cuucuggaaagguacuuag

SEQ ID NO: 1059372 - RNA, 19 nt, Artificial Sequence
  Description of Artificial Sequence: Synthetic oligonucleotide
  Sense strand starting at position 2561 of SEQ ID NO: 915171
aaaugauguugugagauuu

SEQ ID NO: 1059373 - RNA, 19 nt, Artificial Sequence
  Description of Artificial Sequence: Synthetic oligonucleotide
  Antisense strand to SEQ ID NO: 1059372
aaaucucacaacaucauuu

SEQ ID NO: 1059374 - RNA, 19 nt, Artificial Sequence
  Description of Artificial Sequence: Synthetic oligonucleotide
  Sense strand starting at position 2799 of SEQ ID NO: 915171
ugaguaucucaauaguuuc

SEQ ID NO: 1059375 - RNA, 19 nt, Artificial Sequence
  Description of Artificial Sequence: Synthetic oligonucleotide
  Antisense strand to SEQ ID NO: 1059374
gaaacuauugagauacuca

SEQ ID NO: 1059376 - RNA, 19 nt, Artificial Sequence
  Description of Artificial Sequence: Synthetic oligonucleotide
  Sense strand starting at position 2805 of SEQ ID NO: 915171
ucucaauaguuucuagaug

SEQ ID NO: 1059377 - RNA, 19 nt, Artificial Sequence
  Description of Artificial Sequence: Synthetic oligonucleotide
  Antisense strand to SEQ ID NO: 1059376
caucuagaaacuauugaga

SEQ ID NO: 1059378 - RNA, 19 nt, Artificial Sequence
  Description of Artificial Sequence: Synthetic oligonucleotide
  Sense strand starting at position 2910 of SEQ ID NO: 915171
agugacaucacauaagugu

SEQ ID NO: 1059379 - RNA, 19 nt, Artificial Sequence
  Description of Artificial Sequence: Synthetic oligonucleotide
  Antisense strand to SEQ ID NO: 1059378
acacuuaugugaugucacu

SEQ ID NO: 1059380 - RNA, 19 nt, Artificial Sequence
  Description of Artificial Sequence: Synthetic oligonucleotide
  Sense strand starting at position 2916 of SEQ ID NO: 915171
aucacauaaguguaguuaa

SEQ ID NO: 1059381 - RNA, 19 nt, Artificial Sequence
  Description of Artificial Sequence: Synthetic oligonucleotide
  Antisense strand to SEQ ID NO: 1059380
uuaacuacacuuaugugau

SEQ ID NO: 1059382 - RNA, 19 nt, Artificial Sequence
  Description of Artificial Sequence: Synthetic oligonucleotide
  Sense strand starting at position 2919 of SEQ ID NO: 915171
acauaaguguaguuaauca

SEQ ID NO: 1059383 - RNA, 19 nt, Artificial Sequence
  Description of Artificial Sequence: Synthetic oligonucleotide
  Antisense strand to SEQ ID NO: 1059382
ugauuaacuacacuuaugu

SEQ ID NO: 1059384 - RNA, 19 nt, Artificial Sequence
  Description of Artificial Sequence: Synthetic oligonucleotide
  Sense strand starting at position 2931 of SEQ ID NO: 915171
uuaaucagucucuguuaga

SEQ ID NO: 1059385 - RNA, 19 nt, Artificial Sequence
  Description of Artificial Sequence: Synthetic oligonucleotide
  Antisense strand to SEQ ID NO: 1059384
ucuaacagagacugauuaa

SEQ ID NO: 1059386 - RNA, 19 nt, Artificial Sequence
  Description of Artificial Sequence: Synthetic oligonucleotide
  Sense strand starting at position 2958 of SEQ ID NO: 915171
gguucuaacucagcuaaac

SEQ ID NO: 1059387 - RNA, 19 nt, Artificial Sequence
  Description of Artificial Sequence: Synthetic oligonucleotide
  Antisense strand to SEQ ID NO: 1059386
guuuagcugaguuagaacc

SEQ ID NO: 1059388 - RNA, 19 nt, Artificial Sequence
  Description of Artificial Sequence: Synthetic oligonucleotide
  Sense strand starting at position 3138 of SEQ ID NO: 915171
ucuauaacaucaguuagua

SEQ ID NO: 1059389 - RNA, 19 nt, Artificial Sequence
  Description of Artificial Sequence: Synthetic oligonucleotide
  Antisense strand to SEQ ID NO: 1059388
uacuaacugauguuauaga

SEQ ID NO: 1059390 - RNA, 19 nt, Artificial Sequence
  Description of Artificial Sequence: Synthetic oligonucleotide
  Sense strand starting at position 3346 of SEQ ID NO: 915171
uaauguaaccuggauugua

SEQ ID NO: 1059391 - RNA, 19 nt, Artificial Sequence
  Description of Artificial Sequence: Synthetic oligonucleotide
  Antisense strand to SEQ ID NO: 1059390
uacaauccagguuacauua

SEQ ID NO: 1059392 - RNA, 19 nt, Artificial Sequence
  Description of Artificial Sequence: Synthetic oligonucleotide
  Sense strand starting at position 3349 of SEQ ID NO: 915171
uguaaccuggauuguauaa

SEQ ID NO: 1059393 - RNA, 19 nt, Artificial Sequence
  Description of Artificial Sequence: Synthetic oligonucleotide
  Antisense strand to SEQ ID NO: 1059392
uuauacaauccagguuaca

SEQ ID NO: 1059394 - RNA, 19 nt, Artificial Sequence
  Description of Artificial Sequence: Synthetic oligonucleotide
  Sense strand starting at position 3383 of SEQ ID NO: 915171
uggccuuauuucuacaaag

SEQ ID NO: 1059395 - RNA, 19 nt, Artificial Sequence
  Description of Artificial Sequence: Synthetic oligonucleotide
  Antisense strand to SEQ ID NO: 1059394
cuuuguagaaauaaggcca

SEQ ID NO: 1059396 - RNA, 19 nt, Artificial Sequence
  Description of Artificial Sequence: Synthetic oligonucleotide
  Sense strand starting at position 3411 of SEQ ID NO: 915171
gcaacuaagaguugagaac

SEQ ID NO: 1059397 - RNA, 19 nt, Artificial Sequence
  Description of Artificial Sequence: Synthetic oligonucleotide
  Antisense strand to SEQ ID NO: 1059396
guucucaacucuuaguugc

SEQ ID NO: 1059398 - RNA, 19 nt, Artificial Sequence
  Description of Artificial Sequence: Synthetic oligonucleotide
  Sense strand starting at position 3464 of SEQ ID NO: 915171
acaugaauguugguuccca

SEQ ID NO: 1059399 - RNA, 19 nt, Artificial Sequence
  Description of Artificial Sequence: Synthetic oligonucleotide
  Antisense strand to SEQ ID NO: 1059398
ugggaaccaacauucaugu

SEQ ID NO: 1059400 - RNA, 19 nt, Artificial Sequence
  Description of Artificial Sequence: Synthetic oligonucleotide
  Sense strand starting at position 3597 of SEQ ID NO: 915171
ggagaagguuggagagaua

SEQ ID NO: 1059401 - RNA, 19 nt, Artificial Sequence
  Description of Artificial Sequence: Synthetic oligonucleotide
  Antisense strand to SEQ ID NO: 1059400
uaucucuccaaccuucucc

SEQ ID NO: 1059402 - RNA, 19 nt, Artificial Sequence
  Description of Artificial Sequence: Synthetic oligonucleotide
  Sense strand starting at position 3663 of SEQ ID NO: 915171
ucaguuguccuguaacuuu

SEQ ID NO: 1059403 - RNA, 19 nt, Artificial Sequence
  Description of Artificial Sequence: Synthetic oligonucleotide
  Antisense strand to SEQ ID NO: 1059402
aaaguuacaggacaacuga

SEQ ID NO: 1059404 - RNA, 19 nt, Artificial Sequence
  Description of Artificial Sequence: Synthetic oligonucleotide
  Sense strand starting at position 3801 of SEQ ID NO: 915171
gaacauaauguuugccagu

SEQ ID NO: 1059405 - RNA, 19 nt, Artificial Sequence
  Description of Artificial Sequence: Synthetic oligonucleotide
  Antisense strand to SEQ ID NO: 1059404
acuggcaaacauuauguuc

SEQ ID NO: 1059406 - RNA, 19 nt, Artificial Sequence
  Description of Artificial Sequence: Synthetic oligonucleotide
  Sense strand starting at position 3803 of SEQ ID NO: 915171
acauaauguuugccaguau

SEQ ID NO: 1059407 - RNA, 19 nt, Artificial Sequence
  Description of Artificial Sequence: Synthetic oligonucleotide
  Antisense strand to SEQ ID NO: 1059406
auacuggcaaacauuaugu

SEQ ID NO: 1059408 - RNA, 19 nt, Artificial Sequence
  Description of Artificial Sequence: Synthetic oligonucleotide
  Sense strand starting at position 3807 of SEQ ID NO: 915171
aauguuugccaguauugag

SEQ ID NO: 1059409 - RNA, 19 nt, Artificial Sequence
  Description of Artificial Sequence: Synthetic oligonucleotide
  Antisense strand to SEQ ID NO: 1059408
cucaauacuggcaaacauu

SEQ ID NO: 1059410 - RNA, 19 nt, Artificial Sequence
  Description of Artificial Sequence: Synthetic oligonucleotide
  Sense strand starting at position 3811 of SEQ ID NO: 915171
uuugccaguauugaggaaa

SEQ ID NO: 1059411 - RNA, 19 nt, Artificial Sequence
  Description of Artificial Sequence: Synthetic oligonucleotide
  Antisense strand to SEQ ID NO: 1059410
uuuccucaauacuggcaaa

SEQ ID NO: 1059412 - RNA, 19 nt, Artificial Sequence
  Description of Artificial Sequence: Synthetic oligonucleotide
  Sense strand starting at position 3899 of SEQ ID NO: 915171
cuaggaugauguguuguga

SEQ ID NO: 1059413 - RNA, 19 nt, Artificial Sequence
  Description of Artificial Sequence: Synthetic oligonucleotide
  Antisense strand to SEQ ID NO: 1059412
ucacaacacaucauccuag

SEQ ID NO: 1059414 - RNA, 19 nt, Artificial Sequence
  Description of Artificial Sequence: Synthetic oligonucleotide
  Sense strand starting at position 3957 of SEQ ID NO: 915171
gugucucaacaugauacuu

SEQ ID NO: 1059415 - RNA, 19 nt, Artificial Sequence
  Description of Artificial Sequence: Synthetic oligonucleotide
  Antisense strand to SEQ ID NO: 1059414
aaguaucauguugagacac

SEQ ID NO: 1059416 - RNA, 19 nt, Artificial Sequence
  Description of Artificial Sequence: Synthetic oligonucleotide
  Sense strand starting at position 276 of SEQ ID NO: 915172
acuuauuuaucugcggauu

SEQ ID NO: 1059417 - RNA, 19 nt, Artificial Sequence
  Description of Artificial Sequence: Synthetic oligonucleotide
  Antisense strand to SEQ ID NO: 1059416
aauccgcagauaaauaagu

SEQ ID NO: 1059418 - RNA, 19 nt, Artificial Sequence
  Description of Artificial Sequence: Synthetic oligonucleotide
  Sense strand starting at position 277 of SEQ ID NO: 915172
cuuauuuaucugcggauua

SEQ ID NO: 1059419 - RNA, 19 nt, Artificial Sequence
  Description of Artificial Sequence: Synthetic oligonucleotide
  Antisense strand to SEQ ID NO: 1059418
uaauccgcagauaaauaag

SEQ ID NO: 1059420 - RNA, 19 nt, Artificial Sequence
  Description of Artificial Sequence: Synthetic oligonucleotide
  Sense strand starting at position 425 of SEQ ID NO: 915172
gaggaaaugucaguuacua

SEQ ID NO: 1059421 - RNA, 19 nt, Artificial Sequence
  Description of Artificial Sequence: Synthetic oligonucleotide
  Antisense strand to SEQ ID NO: 1059420
uaguaacugacauuuccuc

SEQ ID NO: 1059422 - RNA, 19 nt, Artificial Sequence
  Description of Artificial Sequence: Synthetic oligonucleotide
  Sense strand starting at position 888 of SEQ ID NO: 915172
acugaaggugacugugaaa

SEQ ID NO: 1059423 - RNA, 19 nt, Artificial Sequence
  Description of Artificial Sequence: Synthetic oligonucleotide
  Antisense strand to SEQ ID NO: 1059422
uuucacagucaccuucagu

SEQ ID NO: 1059424 - RNA, 19 nt, Artificial Sequence
  Description of Artificial Sequence: Synthetic oligonucleotide
  Sense strand starting at position 1048 of SEQ ID NO: 915172
acuccaacugguuagugau

SEQ ID NO: 1059425 - RNA, 19 nt, Artificial Sequence
  Description of Artificial Sequence: Synthetic oligonucleotide
  Antisense strand to SEQ ID NO: 1059424
aucacuaaccaguuggagu

SEQ ID NO: 1059426 - RNA, 19 nt, Artificial Sequence
  Description of Artificial Sequence: Synthetic oligonucleotide
  Sense strand starting at position 1205 of SEQ ID NO: 915172
caaagcaguguguaaagaa

SEQ ID NO: 1059427 - RNA, 19 nt, Artificial Sequence
  Description of Artificial Sequence: Synthetic oligonucleotide
  Antisense strand to SEQ ID NO: 1059426
uucuuuacacacugcuuug

SEQ ID NO: 1059428 - RNA, 19 nt, Artificial Sequence
  Description of Artificial Sequence: Synthetic oligonucleotide
  Sense strand starting at position 1403 of SEQ ID NO: 915172
acauaauguugacuuugau

SEQ ID NO: 1059429 - RNA, 19 nt, Artificial Sequence
  Description of Artificial Sequence: Synthetic oligonucleotide
  Antisense strand to SEQ ID NO: 1059428
aucaaagucaacauuaugu

SEQ ID NO: 1059430 - RNA, 19 nt, Artificial Sequence
  Description of Artificial Sequence: Synthetic oligonucleotide
  Sense strand starting at position 1520 of SEQ ID NO: 915172
guggaaugaccauguacaa

SEQ ID NO: 1059431 - RNA, 19 nt, Artificial Sequence
  Description of Artificial Sequence: Synthetic oligonucleotide
  Antisense strand to SEQ ID NO: 1059430
uuguacauggucauuccac

SEQ ID NO: 1059432 - RNA, 19 nt, Artificial Sequence
  Description of Artificial Sequence: Synthetic oligonucleotide
  Sense strand starting at position 1595 of SEQ ID NO: 915172
ugguguaccaaagagguuu

SEQ ID NO: 1059433 - RNA, 19 nt, Artificial Sequence
  Description of Artificial Sequence: Synthetic oligonucleotide
  Antisense strand to SEQ ID NO: 1059432
aaaccucuuugguacacca

SEQ ID NO: 1059434 - RNA, 19 nt, Artificial Sequence
  Description of Artificial Sequence: Synthetic oligonucleotide
  Sense strand starting at position 1601 of SEQ ID NO: 915172
accaaagagguuugcaaau

SEQ ID NO: 1059435 - RNA, 19 nt, Artificial Sequence
  Description of Artificial Sequence: Synthetic oligonucleotide
  Antisense strand to SEQ ID NO: 1059434
auuugcaaaccucuuuggu

SEQ ID NO: 1059436 - RNA, 19 nt, Artificial Sequence
  Description of Artificial Sequence: Synthetic oligonucleotide
  Sense strand starting at position 1653 of SEQ ID NO: 915172
uacgaugcucuccaugaca

SEQ ID NO: 1059437 - RNA, 19 nt, Artificial Sequence
  Description of Artificial Sequence: Synthetic oligonucleotide
  Antisense strand to SEQ ID NO: 1059436
ugucauggagagcaucgua

SEQ ID NO: 1059438 - RNA, 19 nt, Artificial Sequence
  Description of Artificial Sequence: Synthetic oligonucleotide
  Sense strand starting at position 1661 of SEQ ID NO: 915172
ucuccaugacagugaagaa

SEQ ID NO: 1059439 - RNA, 19 nt, Artificial Sequence
  Description of Artificial Sequence: Synthetic oligonucleotide
  Antisense strand to SEQ ID NO: 1059438
uucuucacugucauggaga

SEQ ID NO: 1059440 - RNA, 19 nt, Artificial Sequence
  Description of Artificial Sequence: Synthetic oligonucleotide
  Sense strand starting at position 1685 of SEQ ID NO: 915172
ugaagaacaucugagaaag

SEQ ID NO: 1059441 - RNA, 19 nt, Artificial Sequence
  Description of Artificial Sequence: Synthetic oligonucleotide
  Antisense strand to SEQ ID NO: 1059440
cuuucucagauguucuuca

SEQ ID NO: 1059442 - RNA, 19 nt, Artificial Sequence
  Description of Artificial Sequence: Synthetic oligonucleotide
  Sense strand starting at position 1737 of SEQ ID NO: 915172
ccagaagaugcccagcauu

SEQ ID NO: 1059443 - RNA, 19 nt, Artificial Sequence
  Description of Artificial Sequence: Synthetic oligonucleotide
  Antisense strand to SEQ ID NO: 1059442
aaugcugggcaucuucugg

SEQ ID NO: 1059444 - RNA, 19 nt, Artificial Sequence
  Description of Artificial Sequence: Synthetic oligonucleotide
  Sense strand starting at position 2024 of SEQ ID NO: 915172
guguguaucagugacaauu

SEQ ID NO: 1059445 - RNA, 19 nt, Artificial Sequence
  Description of Artificial Sequence: Synthetic oligonucleotide
  Antisense strand to SEQ ID NO: 1059444
aauugucacugauacacac

SEQ ID NO: 1059446 - RNA, 19 nt, Artificial Sequence
  Description of Artificial Sequence: Synthetic oligonucleotide
  Sense strand starting at position 2044 of SEQ ID NO: 915172
uugacuuuccauuagugau

SEQ ID NO: 1059447 - RNA, 19 nt, Artificial Sequence
  Description of Artificial Sequence: Synthetic oligonucleotide
  Antisense strand to SEQ ID NO: 1059446
aucacuaauggaaagucaa

SEQ ID NO: 1059448 - RNA, 19 nt, Artificial Sequence
  Description of Artificial Sequence: Synthetic oligonucleotide
  Sense strand starting at position 2082 of SEQ ID NO: 915172
uuauccugauuccugguaa

SEQ ID NO: 1059449 - RNA, 19 nt, Artificial Sequence
  Description of Artificial Sequence: Synthetic oligonucleotide
  Antisense strand to SEQ ID NO: 1059448
uuaccaggaaucaggauaa

SEQ ID NO: 1059450 - RNA, 19 nt, Artificial Sequence
  Description of Artificial Sequence: Synthetic oligonucleotide
  Sense strand starting at position 2162 of SEQ ID NO: 915172
cucugcuagggucauauga

SEQ ID NO: 1059451 - RNA, 19 nt, Artificial Sequence
  Description of Artificial Sequence: Synthetic oligonucleotide
  Antisense strand to SEQ ID NO: 1059450
ucauaugacccuagcagag

SEQ ID NO: 1059452 - RNA, 19 nt, Artificial Sequence
  Description of Artificial Sequence: Synthetic oligonucleotide
  Sense strand starting at position 2169 of SEQ ID NO: 915172
agggucauaugagcaugaa

SEQ ID NO: 1059453 - RNA, 19 nt, Artificial Sequence
  Description of Artificial Sequence: Synthetic oligonucleotide
  Antisense strand to SEQ ID NO: 1059452
uucaugcucauaugacccu

SEQ ID NO: 1059454 - RNA, 19 nt, Artificial Sequence
  Description of Artificial Sequence: Synthetic oligonucleotide
  Sense strand starting at position 2172 of SEQ ID NO: 915172
gucauaugagcaugaaaca

SEQ ID NO: 1059455 - RNA, 19 nt, Artificial Sequence
  Description of Artificial Sequence: Synthetic oligonucleotide
  Antisense strand to SEQ ID NO: 1059454
uguuucaugcucauaugac

SEQ ID NO: 1059456 - RNA, 19 nt, Artificial Sequence
  Description of Artificial Sequence: Synthetic oligonucleotide
  Sense strand starting at position 2302 of SEQ ID NO: 915172
ugaagagucuaugcagaaa

SEQ ID NO: 1059457 - RNA, 19 nt, Artificial Sequence
  Description of Artificial Sequence: Synthetic oligonucleotide
  Antisense strand to SEQ ID NO: 1059456
uuucugcauagacucuuca

SEQ ID NO: 1059458 - RNA, 19 nt, Artificial Sequence
  Description of Artificial Sequence: Synthetic oligonucleotide
  Sense strand starting at position 2414 of SEQ ID NO: 915172
guuaaucccuuacuagaga

SEQ ID NO: 1059459 - RNA, 19 nt, Artificial Sequence
  Description of Artificial Sequence: Synthetic oligonucleotide
  Antisense strand to SEQ ID NO: 1059458
ucucuaguaagggauuaac

SEQ ID NO: 1059460 - RNA, 19 nt, Artificial Sequence
  Description of Artificial Sequence: Synthetic oligonucleotide
  Sense strand starting at position 2449 of SEQ ID NO: 915172
guuuauauuugugcacuga

SEQ ID NO: 1059461 - RNA, 19 nt, Artificial Sequence
  Description of Artificial Sequence: Synthetic oligonucleotide
  Antisense strand to SEQ ID NO: 1059460
ucagugcacaaauauaaac

SEQ ID NO: 1059462 - RNA, 19 nt, Artificial Sequence
  Description of Artificial Sequence: Synthetic oligonucleotide
  Sense strand starting at position 2453 of SEQ ID NO: 915172
auauuugugcacugagugu

SEQ ID NO: 1059463 - RNA, 19 nt, Artificial Sequence
  Description of Artificial Sequence: Synthetic oligonucleotide
  Antisense strand to SEQ ID NO: 1059462
acacucagugcacaaauau

SEQ ID NO: 1059464 - RNA, 19 nt, Artificial Sequence
  Description of Artificial Sequence: Synthetic oligonucleotide
  Sense strand starting at position 2501 of SEQ ID NO: 915172
ugaauuguagaguacuagu

SEQ ID NO: 1059465 - RNA, 19 nt, Artificial Sequence
  Description of Artificial Sequence: Synthetic oligonucleotide
  Antisense strand to SEQ ID NO: 1059464
acuaguacucuacaauuca

SEQ ID NO: 1059466 - RNA, 19 nt, Artificial Sequence
  Description of Artificial Sequence: Synthetic oligonucleotide
  Sense strand starting at position 2808 of SEQ ID NO: 915172
cccuacuuaugaguaagaa

SEQ ID NO: 1059467 - RNA, 19 nt, Artificial Sequence
  Description of Artificial Sequence: Synthetic oligonucleotide
  Antisense strand to SEQ ID NO: 1059466
uucuuacucauaaguaggg

SEQ ID NO: 1059468 - RNA, 19 nt, Artificial Sequence
  Description of Artificial Sequence: Synthetic oligonucleotide
  Sense strand starting at position 3520 of SEQ ID NO: 915172
acucuuucugucuauggaa

SEQ ID NO: 1059469 - RNA, 19 nt, Artificial Sequence
  Description of Artificial Sequence: Synthetic oligonucleotide
  Antisense strand to SEQ ID NO: 1059468
uuccauagacagaaagagu

SEQ ID NO: 1059470 - RNA, 19 nt, Artificial Sequence
  Description of Artificial Sequence: Synthetic oligonucleotide
  Sense strand starting at position 3522 of SEQ ID NO: 915172
ucuuucugucuauggaaag

SEQ ID NO: 1059471 - RNA, 19 nt, Artificial Sequence
  Description of Artificial Sequence: Synthetic oligonucleotide
  Antisense strand to SEQ ID NO: 1059470
cuuuccauagacagaaaga

SEQ ID NO: 1059472 - RNA, 19 nt, Artificial Sequence
  Description of Artificial Sequence: Synthetic oligonucleotide
  Sense strand starting at position 3585 of SEQ ID NO: 915172
gugagagauguuuauuauu

SEQ ID NO: 1059473 - RNA, 19 nt, Artificial Sequence
  Description of Artificial Sequence: Synthetic oligonucleotide
  Antisense strand to SEQ ID NO: 1059472
aauaauaaacaucucucac

SEQ ID NO: 1059474 - RNA, 19 nt, Artificial Sequence
  Description of Artificial Sequence: Synthetic oligonucleotide
  Sense strand starting at position 3587 of SEQ ID NO: 915172
gagagauguuuauuauuga

SEQ ID NO: 1059475 - RNA, 19 nt, Artificial Sequence
  Description of Artificial Sequence: Synthetic oligonucleotide
  Antisense strand to SEQ ID NO: 1059474
ucaauaauaaacaucucuc

SEQ ID NO: 1059476 - RNA, 19 nt, Artificial Sequence
  Description of Artificial Sequence: Synthetic oligonucleotide
  Sense strand starting at position 3590 of SEQ ID NO: 915172
agauguuuauuauugagca

SEQ ID NO: 1059477 - RNA, 19 nt, Artificial Sequence
  Description of Artificial Sequence: Synthetic oligonucleotide
  Antisense strand to SEQ ID NO: 1059476
ugcucaauaauaaacaucu

SEQ ID NO: 1059478 - RNA, 19 nt, Artificial Sequence
  Description of Artificial Sequence: Synthetic oligonucleotide
  Sense strand starting at position 3635 of SEQ ID NO: 915172
gauaauguggagugauugu

SEQ ID NO: 1059479 - RNA, 19 nt, Artificial Sequence
  Description of Artificial Sequence: Synthetic oligonucleotide
  Antisense strand to SEQ ID NO: 1059478
acaaucacuccacauuauc

SEQ ID NO: 1059480 - RNA, 19 nt, Artificial Sequence
  Description of Artificial Sequence: Synthetic oligonucleotide
  Sense strand starting at position 3723 of SEQ ID NO: 915172
ucgagaggucuccauuaga

SEQ ID NO: 1059481 - RNA, 19 nt, Artificial Sequence
  Description of Artificial Sequence: Synthetic oligonucleotide
  Antisense strand to SEQ ID NO: 1059480
ucuaauggagaccucucga

SEQ ID NO: 1059482 - RNA, 19 nt, Artificial Sequence
  Description of Artificial Sequence: Synthetic oligonucleotide
  Sense strand starting at position 3726 of SEQ ID NO: 915172
agaggucuccauuagaagc

SEQ ID NO: 1059483 - RNA, 19 nt, Artificial Sequence
  Description of Artificial Sequence: Synthetic oligonucleotide
  Antisense strand to SEQ ID NO: 1059482
gcuucuaauggagaccucu

SEQ ID NO: 1059484 - RNA, 19 nt, Artificial Sequence
  Description of Artificial Sequence: Synthetic oligonucleotide
  Sense strand starting at position 3815 of SEQ ID NO: 915172
gcuaaugauggcuagcaga

SEQ ID NO: 1059485 - RNA, 19 nt, Artificial Sequence
  Description of Artificial Sequence: Synthetic oligonucleotide
  Antisense strand to SEQ ID NO: 1059484
ucugcuagccaucauuagc

SEQ ID NO: 1059486 - RNA, 19 nt, Artificial Sequence
  Description of Artificial Sequence: Synthetic oligonucleotide
  Sense strand starting at position 3891 of SEQ ID NO: 915172
ggcuguugagaauagcuuu

SEQ ID NO: 1059487 - RNA, 19 nt, Artificial Sequence
  Description of Artificial Sequence: Synthetic oligonucleotide
  Antisense strand to SEQ ID NO: 1059486
aaagcuauucucaacagcc

SEQ ID NO: 1059488 - RNA, 19 nt, Artificial Sequence
  Description of Artificial Sequence: Synthetic oligonucleotide
  Sense strand starting at position 3894 of SEQ ID NO: 915172
uguugagaauagcuuuaaa

SEQ ID NO: 1059489 - RNA, 19 nt, Artificial Sequence
  Description of Artificial Sequence: Synthetic oligonucleotide
  Antisense strand to SEQ ID NO: 1059488
uuuaaagcuauucucaaca

SEQ ID NO: 1059490 - RNA, 19 nt, Artificial Sequence
  Description of Artificial Sequence: Synthetic oligonucleotide
  Sense strand starting at position 3897 of SEQ ID NO: 915172
ugagaauagcuuuaaaguu

SEQ ID NO: 1059491 - RNA, 19 nt, Artificial Sequence
  Description of Artificial Sequence: Synthetic oligonucleotide
  Antisense strand to SEQ ID NO: 1059490
aacuuuaaagcuauucuca

SEQ ID NO: 1059492 - RNA, 19 nt, Artificial Sequence
  Description of Artificial Sequence: Synthetic oligonucleotide
  Sense strand starting at position 3913 of SEQ ID NO: 915172
guucucagaucuguaauag

SEQ ID NO: 1059493 - RNA, 19 nt, Artificial Sequence
  Description of Artificial Sequence: Synthetic oligonucleotide
  Antisense strand to SEQ ID NO: 1059492
cuauuacagaucugagaac

SEQ ID NO: 1059494 - RNA, 19 nt, Artificial Sequence
  Description of Artificial Sequence: Synthetic oligonucleotide
  Sense strand starting at position 3919 of SEQ ID NO: 915172
agaucuguaauaggaaagu

SEQ ID NO: 1059495 - RNA, 19 nt, Artificial Sequence
  Description of Artificial Sequence: Synthetic oligonucleotide
  Antisense strand to SEQ ID NO: 1059494
acuuuccuauuacagaucu

SEQ ID NO: 1059496 - RNA, 19 nt, Artificial Sequence
  Description of Artificial Sequence: Synthetic oligonucleotide
  Sense strand starting at position 509 of SEQ ID NO: 915173
aagauuauggugggcauga

SEQ ID NO: 1059497 - RNA, 19 nt, Artificial Sequence
  Description of Artificial Sequence: Synthetic oligonucleotide
  Antisense strand to SEQ ID NO: 1059496
ucaugcccaccauaaucuu

SEQ ID NO: 1059498 - RNA, 19 nt, Artificial Sequence
  Description of Artificial Sequence: Synthetic oligonucleotide
  Sense strand starting at position 510 of SEQ ID NO: 915173
agauuauggugggcaugau

SEQ ID NO: 1059499 - RNA, 19 nt, Artificial Sequence
  Description of Artificial Sequence: Synthetic oligonucleotide
  Antisense strand to SEQ ID NO: 1059498
aucaugcccaccauaaucu

SEQ ID NO: 1059500 - RNA, 19 nt, Artificial Sequence
  Description of Artificial Sequence: Synthetic oligonucleotide
  Sense strand starting at position 511 of SEQ ID NO: 915173
gauuauggugggcaugaua

SEQ ID NO: 1059501 - RNA, 19 nt, Artificial Sequence
  Description of Artificial Sequence: Synthetic oligonucleotide
  Antisense strand to SEQ ID NO: 1059500
uaucaugcccaccauaauc

SEQ ID NO: 1059502 - RNA, 19 nt, Artificial Sequence
  Description of Artificial Sequence: Synthetic oligonucleotide
  Sense strand starting at position 522 of SEQ ID NO: 915173
gcaugauaugaguauauuc

SEQ ID NO: 1059503 - RNA, 19 nt, Artificial Sequence
  Description of Artificial Sequence: Synthetic oligonucleotide
  Antisense strand to SEQ ID NO: 1059502
gaauauacucauaucaugc

SEQ ID NO: 1059504 - RNA, 19 nt, Artificial Sequence
  Description of Artificial Sequence: Synthetic oligonucleotide
  Sense strand starting at position 599 of SEQ ID NO: 915173
uuauuacuagaguaagcua

SEQ ID NO: 1059505 - RNA, 19 nt, Artificial Sequence
  Description of Artificial Sequence: Synthetic oligonucleotide
  Antisense strand to SEQ ID NO: 1059504
uagcuuacucuaguaauaa

SEQ ID NO: 1059506 - RNA, 19 nt, Artificial Sequence
  Description of Artificial Sequence: Synthetic oligonucleotide
  Sense strand starting at position 602 of SEQ ID NO: 915173
uuacuagaguaagcuauua

SEQ ID NO: 1059507 - RNA, 19 nt, Artificial Sequence
  Description of Artificial Sequence: Synthetic oligonucleotide
  Antisense strand to SEQ ID NO: 1059506
uaauagcuuacucuaguaa

SEQ ID NO: 1059508 - RNA, 19 nt, Artificial Sequence
  Description of Artificial Sequence: Synthetic oligonucleotide
  Sense strand starting at position 731 of SEQ ID NO: 915173
gcagucuauuuggcuuaaa

SEQ ID NO: 1059509 - RNA, 19 nt, Artificial Sequence
  Description of Artificial Sequence: Synthetic oligonucleotide
  Antisense strand to SEQ ID NO: 1059508
uuuaagccaaauagacugc

SEQ ID NO: 1059510 - RNA, 19 nt, Artificial Sequence
  Description of Artificial Sequence: Synthetic oligonucleotide
  Sense strand starting at position 765 of SEQ ID NO: 915173
aaacauguaguuugaguaa

SEQ ID NO: 1059511 - RNA, 19 nt, Artificial Sequence
  Description of Artificial Sequence: Synthetic oligonucleotide
  Antisense strand to SEQ ID NO: 1059510
uuacucaaacuacauguuu

SEQ ID NO: 1059512 - RNA, 19 nt, Artificial Sequence
  Description of Artificial Sequence: Synthetic oligonucleotide
  Sense strand starting at position 796 of SEQ ID NO: 915173
uuccgaacauaaguauauu

SEQ ID NO: 1059513 - RNA, 19 nt, Artificial Sequence
  Description of Artificial Sequence: Synthetic oligonucleotide
  Antisense strand to SEQ ID NO: 1059512
aauauacuuauguucggaa

SEQ ID NO: 1059514 - RNA, 19 nt, Artificial Sequence
  Description of Artificial Sequence: Synthetic oligonucleotide
  Sense strand starting at position 899 of SEQ ID NO: 915173
agaguucgacaaggguaaa

SEQ ID NO: 1059515 - RNA, 19 nt, Artificial Sequence
  Description of Artificial Sequence: Synthetic oligonucleotide
  Antisense strand to SEQ ID NO: 1059514
uuuacccuugucgaacucu

SEQ ID NO: 1059516 - RNA, 19 nt, Artificial Sequence
  Description of Artificial Sequence: Synthetic oligonucleotide
  Sense strand starting at position 1036 of SEQ ID NO: 915173
ccuccaacugguuagugau

SEQ ID NO: 1059517 - RNA, 19 nt, Artificial Sequence
  Description of Artificial Sequence: Synthetic oligonucleotide
  Antisense strand to SEQ ID NO: 1059516
aucacuaaccaguuggagg

SEQ ID NO: 1059518 - RNA, 19 nt, Artificial Sequence
  Description of Artificial Sequence: Synthetic oligonucleotide
  Sense strand starting at position 1097 of SEQ ID NO: 915173
uuguccugacuccauagau

SEQ ID NO: 1059519 - RNA, 19 nt, Artificial Sequence
  Description of Artificial Sequence: Synthetic oligonucleotide
  Antisense strand to SEQ ID NO: 1059518
aucuauggagucaggacaa

SEQ ID NO: 1059520 - RNA, 19 nt, Artificial Sequence
  Description of Artificial Sequence: Synthetic oligonucleotide
  Sense strand starting at position 1167 of SEQ ID NO: 915173
auguauauacugugggaua

SEQ ID NO: 1059521 - RNA, 19 nt, Artificial Sequence
  Description of Artificial Sequence: Synthetic oligonucleotide
  Antisense strand to SEQ ID NO: 1059520
uaucccacaguauauacau

SEQ ID NO: 1059522 - RNA, 19 nt, Artificial Sequence
  Description of Artificial Sequence: Synthetic oligonucleotide
  Sense strand starting at position 1169 of SEQ ID NO: 915173
guauauacugugggauauu

SEQ ID NO: 1059523 - RNA, 19 nt, Artificial Sequence
  Description of Artificial Sequence: Synthetic oligonucleotide
  Antisense strand to SEQ ID NO: 1059522
aauaucccacaguauauac

SEQ ID NO: 1059524 - RNA, 19 nt, Artificial Sequence
  Description of Artificial Sequence: Synthetic oligonucleotide
  Sense strand starting at position 1334 of SEQ ID NO: 915173
aggagagaauaauaaggau

SEQ ID NO: 1059525 - RNA, 19 nt, Artificial Sequence
  Description of Artificial Sequence: Synthetic oligonucleotide
  Antisense strand to SEQ ID NO: 1059524
auccuuauuauucucuccu

SEQ ID NO: 1059526 - RNA, 19 nt, Artificial Sequence
  Description of Artificial Sequence: Synthetic oligonucleotide
  Sense strand starting at position 1391 of SEQ ID NO: 915173
accuaauguugacuuugau

SEQ ID NO: 1059527 - RNA, 19 nt, Artificial Sequence
  Description of Artificial Sequence: Synthetic oligonucleotide
  Antisense strand to SEQ ID NO: 1059526
aucaaagucaacauuaggu

SEQ ID NO: 1059528 - RNA, 19 nt, Artificial Sequence
  Description of Artificial Sequence: Synthetic oligonucleotide
  Sense strand starting at position 1438 of SEQ ID NO: 915173
augugcucacaauaaguau

SEQ ID NO: 1059529 - RNA, 19 nt, Artificial Sequence
  Description of Artificial Sequence: Synthetic oligonucleotide
  Antisense strand to SEQ ID NO: 1059528
auacuuauugugagcacau

SEQ ID NO: 1059530 - RNA, 19 nt, Artificial Sequence
  Description of Artificial Sequence: Synthetic oligonucleotide
  Sense strand starting at position 1649 of SEQ ID NO: 915173
ucuccauagcagugaagaa

SEQ ID NO: 1059531 - RNA, 19 nt, Artificial Sequence
  Description of Artificial Sequence: Synthetic oligonucleotide
  Antisense strand to SEQ ID NO: 1059530
uucuucacugcuauggaga

SEQ ID NO: 1059532 - RNA, 19 nt, Artificial Sequence
  Description of Artificial Sequence: Synthetic oligonucleotide
  Sense strand starting at position 1958 of SEQ ID NO: 915173
gauggaacugggugugauu

SEQ ID NO: 1059533 - RNA, 19 nt, Artificial Sequence
  Description of Artificial Sequence: Synthetic oligonucleotide
  Antisense strand to SEQ ID NO: 1059532
aaucacacccaguuccauc

SEQ ID NO: 1059534 - RNA, 19 nt, Artificial Sequence
  Description of Artificial Sequence: Synthetic oligonucleotide
  Sense strand starting at position 1970 of SEQ ID NO: 915173
ugugauuagacguagacau

SEQ ID NO: 1059535 - RNA, 19 nt, Artificial Sequence
  Description of Artificial Sequence: Synthetic oligonucleotide
  Antisense strand to SEQ ID NO: 1059534
augucuacgucuaaucaca

SEQ ID NO: 1059536 - RNA, 19 nt, Artificial Sequence
  Description of Artificial Sequence: Synthetic oligonucleotide
  Sense strand starting at position 1972 of SEQ ID NO: 915173
ugauuagacguagacauuc

SEQ ID NO: 1059537 - RNA, 19 nt, Artificial Sequence
  Description of Artificial Sequence: Synthetic oligonucleotide
  Antisense strand to SEQ ID NO: 1059536
gaaugucuacgucuaauca

SEQ ID NO: 1059538 - RNA, 19 nt, Artificial Sequence
  Description of Artificial Sequence: Synthetic oligonucleotide
  Sense strand starting at position 2018 of SEQ ID NO: 915173
accagcgacgauuauaaua

SEQ ID NO: 1059539 - RNA, 19 nt, Artificial Sequence
  Description of Artificial Sequence: Synthetic oligonucleotide
  Antisense strand to SEQ ID NO: 1059538
uauuauaaucgucgcuggu

SEQ ID NO: 1059540 - RNA, 19 nt, Artificial Sequence
  Description of Artificial Sequence: Synthetic oligonucleotide
  Sense strand starting at position 2333 of SEQ ID NO: 915173
agggucagugucuauagaa

SEQ ID NO: 1059541 - RNA, 19 nt, Artificial Sequence
  Description of Artificial Sequence: Synthetic oligonucleotide
  Antisense strand to SEQ ID NO: 1059540
uucuauagacacugacccu

SEQ ID NO: 1059542 - RNA, 19 nt, Artificial Sequence
  Description of Artificial Sequence: Synthetic oligonucleotide
  Sense strand starting at position 2403 of SEQ ID NO: 915173
uccucuauuugggaaucaa

SEQ ID NO: 1059543 - RNA, 19 nt, Artificial Sequence
  Description of Artificial Sequence: Synthetic oligonucleotide
  Antisense strand to SEQ ID NO: 1059542
uugauucccaaauagagga

SEQ ID NO: 1059544 - RNA, 19 nt, Artificial Sequence
  Description of Artificial Sequence: Synthetic oligonucleotide
  Sense strand starting at position 2438 of SEQ ID NO: 915173
accguuucuguguuguuau

SEQ ID NO: 1059545 - RNA, 19 nt, Artificial Sequence
  Description of Artificial Sequence: Synthetic oligonucleotide
  Antisense strand to SEQ ID NO: 1059544
auaacaacacagaaacggu

SEQ ID NO: 1059546 - RNA, 19 nt, Artificial Sequence
  Description of Artificial Sequence: Synthetic oligonucleotide
  Sense strand starting at position 2473 of SEQ ID NO: 915173
uugugacuacuagacugua

SEQ ID NO: 1059547 - RNA, 19 nt, Artificial Sequence
  Description of Artificial Sequence: Synthetic oligonucleotide
  Antisense strand to SEQ ID NO: 1059546
uacagucuaguagucacaa

SEQ ID NO: 1059548 - RNA, 19 nt, Artificial Sequence
  Description of Artificial Sequence: Synthetic oligonucleotide
  Sense strand starting at position 2532 of SEQ ID NO: 915173
ggacuacuagacuguauac

SEQ ID NO: 1059549 - RNA, 19 nt, Artificial Sequence
  Description of Artificial Sequence: Synthetic oligonucleotide
  Antisense strand to SEQ ID NO: 1059548
guauacagucuaguagucc

SEQ ID NO: 1059550 - RNA, 19 nt, Artificial Sequence
  Description of Artificial Sequence: Synthetic oligonucleotide
  Sense strand starting at position 2544 of SEQ ID NO: 915173
uguauacuucuguauacaa

SEQ ID NO: 1059551 - RNA, 19 nt, Artificial Sequence
  Description of Artificial Sequence: Synthetic oligonucleotide
  Antisense strand to SEQ ID NO: 1059550
uuguauacagaaguauaca

SEQ ID NO: 1059552 - RNA, 19 nt, Artificial Sequence
  Description of Artificial Sequence: Synthetic oligonucleotide
  Sense strand starting at position 2584 of SEQ ID NO: 915173
acaguuugugacuacuaga

SEQ ID NO: 1059553 - RNA, 19 nt, Artificial Sequence
  Description of Artificial Sequence: Synthetic oligonucleotide
  Antisense strand to SEQ ID NO: 1059552
ucuaguagucacaaacugu

SEQ ID NO: 1059554 - RNA, 19 nt, Artificial Sequence
  Description of Artificial Sequence: Synthetic oligonucleotide
  Sense strand starting at position 2629 of SEQ ID NO: 915173
cuguguauacuguauacaa

SEQ ID NO: 1059555 - RNA, 19 nt, Artificial Sequence
  Description of Artificial Sequence: Synthetic oligonucleotide
  Antisense strand to SEQ ID NO: 1059554
uuguauacaguauacacag

SEQ ID NO: 1059556 - RNA, 19 nt, Artificial Sequence
  Description of Artificial Sequence: Synthetic oligonucleotide
  Sense strand starting at position 2631 of SEQ ID NO: 915173
guguauacuguauacaauu

SEQ ID NO: 1059557 - RNA, 19 nt, Artificial Sequence
  Description of Artificial Sequence: Synthetic oligonucleotide
  Antisense strand to SEQ ID NO: 1059556
aauuguauacaguauacac

SEQ ID NO: 1059558 - RNA, 19 nt, Artificial Sequence
  Description of Artificial Sequence: Synthetic oligonucleotide
  Sense strand starting at position 2760 of SEQ ID NO: 915173
cauugauuacaaggaggca

SEQ ID NO: 1059559 - RNA, 19 nt, Artificial Sequence
  Description of Artificial Sequence: Synthetic oligonucleotide
  Antisense strand to SEQ ID NO: 1059558
ugccuccuuguaaucaaug

SEQ ID NO: 1059560 - RNA, 19 nt, Artificial Sequence
  Description of Artificial Sequence: Synthetic oligonucleotide
  Sense strand starting at position 3056 of SEQ ID NO: 915173
cuaaauauucugggcuaca

SEQ ID NO: 1059561 - RNA, 19 nt, Artificial Sequence
  Description of Artificial Sequence: Synthetic oligonucleotide
  Antisense strand to SEQ ID NO: 1059560
uguagcccagaauauuuag

SEQ ID NO: 1059562 - RNA, 19 nt, Artificial Sequence
  Description of Artificial Sequence: Synthetic oligonucleotide
  Sense strand starting at position 3186 of SEQ ID NO: 915173
ggaugucuccaauauagua

SEQ ID NO: 1059563 - RNA, 19 nt, Artificial Sequence
  Description of Artificial Sequence: Synthetic oligonucleotide
  Antisense strand to SEQ ID NO: 1059562
uacuauauuggagacaucc

SEQ ID NO: 1059564 - RNA, 19 nt, Artificial Sequence
  Description of Artificial Sequence: Synthetic oligonucleotide
  Sense strand starting at position 3616 of SEQ ID NO: 915173
guauaaacuugggugaaac

SEQ ID NO: 1059565 - RNA, 19 nt, Artificial Sequence
  Description of Artificial Sequence: Synthetic oligonucleotide
  Antisense strand to SEQ ID NO: 1059564
guuucacccaaguuuauac

SEQ ID NO: 1059566 - RNA, 19 nt, Artificial Sequence
  Description of Artificial Sequence: Synthetic oligonucleotide
  Sense strand starting at position 3617 of SEQ ID NO: 915173
uauaaacuugggugaaacu

SEQ ID NO: 1059567 - RNA, 19 nt, Artificial Sequence
  Description of Artificial Sequence: Synthetic oligonucleotide
  Antisense strand to SEQ ID NO: 1059566
aguuucacccaaguuuaua

SEQ ID NO: 1059568 - RNA, 19 nt, Artificial Sequence
  Description of Artificial Sequence: Synthetic oligonucleotide
  Sense strand starting at position 3731 of SEQ ID NO: 915173
ugaagagguucucuaugua

SEQ ID NO: 1059569 - RNA, 19 nt, Artificial Sequence
  Description of Artificial Sequence: Synthetic oligonucleotide
  Antisense strand to SEQ ID NO: 1059568
uacauagagaaccucuuca

SEQ ID NO: 1059570 - RNA, 19 nt, Artificial Sequence
  Description of Artificial Sequence: Synthetic oligonucleotide
  Sense strand starting at position 3794 of SEQ ID NO: 915173
ggucauauauccuuaagga

SEQ ID NO: 1059571 - RNA, 19 nt, Artificial Sequence
  Description of Artificial Sequence: Synthetic oligonucleotide
  Antisense strand to SEQ ID NO: 1059570
uccuuaaggauauaugacc

SEQ ID NO: 1059572 - RNA, 19 nt, Artificial Sequence
  Description of Artificial Sequence: Synthetic oligonucleotide
  Sense strand starting at position 3809 of SEQ ID NO: 915173
aggaaaucaccacguagua

SEQ ID NO: 1059573 - RNA, 19 nt, Artificial Sequence
  Description of Artificial Sequence: Synthetic oligonucleotide
  Antisense strand to SEQ ID NO: 1059572
uacuacguggugauuuccu

SEQ ID NO: 1059574 - RNA, 19 nt, Artificial Sequence
  Description of Artificial Sequence: Synthetic oligonucleotide
  Sense strand starting at position 3880 of SEQ ID NO: 915173
gguagaaaugugcacagga

SEQ ID NO: 1059575 - RNA, 19 nt, Artificial Sequence
  Description of Artificial Sequence: Synthetic oligonucleotide
  Antisense strand to SEQ ID NO: 1059574
uccugugcacauuucuacc

SEQ ID NO: 1059576 - RNA, 19 nt, Artificial Sequence
  Description of Artificial Sequence: Synthetic oligonucleotide
  Sense strand starting at position 2 of SEQ ID NO: 915174
cucggaaaccacugggaua

SEQ ID NO: 1059577 - RNA, 19 nt, Artificial Sequence
  Description of Artificial Sequence: Synthetic oligonucleotide
  Antisense strand to SEQ ID NO: 1059576
uaucccagugguuuccgag

SEQ ID NO: 1059578 - RNA, 19 nt, Artificial Sequence
  Description of Artificial Sequence: Synthetic oligonucleotide
  Sense strand starting at position 195 of SEQ ID NO: 915174
gugucuugcaaucaaggaa

SEQ ID NO: 1059579 - RNA, 19 nt, Artificial Sequence
  Description of Artificial Sequence: Synthetic oligonucleotide
  Antisense strand to SEQ ID NO: 1059578
uuccuugauugcaagacac

SEQ ID NO: 1059580 - RNA, 19 nt, Artificial Sequence
  Description of Artificial Sequence: Synthetic oligonucleotide
  Sense strand starting at position 277 of SEQ ID NO: 915174
uuucuaaauguacagaagu

SEQ ID NO: 1059581 - RNA, 19 nt, Artificial Sequence
  Description of Artificial Sequence: Synthetic oligonucleotide
  Antisense strand to SEQ ID NO: 1059580
acuucuguacauuuagaaa

SEQ ID NO: 1059582 - RNA, 19 nt, Artificial Sequence
  Description of Artificial Sequence: Synthetic oligonucleotide
  Sense strand starting at position 660 of SEQ ID NO: 915174
guaauccucucacugagaa

SEQ ID NO: 1059583 - RNA, 19 nt, Artificial Sequence
  Description of Artificial Sequence: Synthetic oligonucleotide
  Antisense strand to SEQ ID NO: 1059582
uucucagugagaggauuac

SEQ ID NO: 1059584 - RNA, 19 nt, Artificial Sequence
  Description of Artificial Sequence: Synthetic oligonucleotide
  Sense strand starting at position 673 of SEQ ID NO: 915174
ugagaaauuucucacugau

SEQ ID NO: 1059585 - RNA, 19 nt, Artificial Sequence
  Description of Artificial Sequence: Synthetic oligonucleotide
  Antisense strand to SEQ ID NO: 1059584
aucagugagaaauuucuca

SEQ ID NO: 1059586 - RNA, 19 nt, Artificial Sequence
  Description of Artificial Sequence: Synthetic oligonucleotide
  Sense strand starting at position 899 of SEQ ID NO: 915174
auaugaccaucauugucau

SEQ ID NO: 1059587 - RNA, 19 nt, Artificial Sequence
  Description of Artificial Sequence: Synthetic oligonucleotide
  Antisense strand to SEQ ID NO: 1059586
augacaaugauggucauau

SEQ ID NO: 1059588 - RNA, 19 nt, Artificial Sequence
  Description of Artificial Sequence: Synthetic oligonucleotide
  Sense strand starting at position 902 of SEQ ID NO: 915174
ugaccaucauugucauaca

SEQ ID NO: 1059589 - RNA, 19 nt, Artificial Sequence
  Description of Artificial Sequence: Synthetic oligonucleotide
  Antisense strand to SEQ ID NO: 1059588
uguaugacaaugaugguca

SEQ ID NO: 1059590 - RNA, 19 nt, Artificial Sequence
  Description of Artificial Sequence: Synthetic oligonucleotide
  Sense strand starting at position 960 of SEQ ID NO: 915174
uaguucuugcuuuaaagag

SEQ ID NO: 1059591 - RNA, 19 nt, Artificial Sequence
  Description of Artificial Sequence: Synthetic oligonucleotide
  Antisense strand to SEQ ID NO: 1059590
cucuuuaaagcaagaacua

SEQ ID NO: 1059592 - RNA, 19 nt, Artificial Sequence
  Description of Artificial Sequence: Synthetic oligonucleotide
  Sense strand starting at position 1124 of SEQ ID NO: 915174
gugggauaacaauguagag

SEQ ID NO: 1059593 - RNA, 19 nt, Artificial Sequence
  Description of Artificial Sequence: Synthetic oligonucleotide
  Antisense strand to SEQ ID NO: 1059592
cucuacauuguuaucccac

SEQ ID NO: 1059594 - RNA, 19 nt, Artificial Sequence
  Description of Artificial Sequence: Synthetic oligonucleotide
  Sense strand starting at position 1133 of SEQ ID NO: 915174
caauguagagauuggcaaa

SEQ ID NO: 1059595 - RNA, 19 nt, Artificial Sequence
  Description of Artificial Sequence: Synthetic oligonucleotide
  Antisense strand to SEQ ID NO: 1059594
uuugccaaucucuacauug

SEQ ID NO: 1059596 - RNA, 19 nt, Artificial Sequence
  Description of Artificial Sequence: Synthetic oligonucleotide
  Sense strand starting at position 1169 of SEQ ID NO: 915174
gagagacauuguguccaaa

SEQ ID NO: 1059597 - RNA, 19 nt, Artificial Sequence
  Description of Artificial Sequence: Synthetic oligonucleotide
  Antisense strand to SEQ ID NO: 1059596
uuuggacacaaugucucuc

SEQ ID NO: 1059598 - RNA, 19 nt, Artificial Sequence
  Description of Artificial Sequence: Synthetic oligonucleotide
  Sense strand starting at position 1313 of SEQ ID NO: 915174
ggaugugugcguaggaaac

SEQ ID NO: 1059599 - RNA, 19 nt, Artificial Sequence
  Description of Artificial Sequence: Synthetic oligonucleotide
  Antisense strand to SEQ ID NO: 1059598
guuuccuacgcacacaucc

SEQ ID NO: 1059600 - RNA, 19 nt, Artificial Sequence
  Description of Artificial Sequence: Synthetic oligonucleotide
  Sense strand starting at position 1350 of SEQ ID NO: 915174
ugagaugaccgucaugaug

SEQ ID NO: 1059601 - RNA, 19 nt, Artificial Sequence
  Description of Artificial Sequence: Synthetic oligonucleotide
  Antisense strand to SEQ ID NO: 1059600
caucaugacggucaucuca

SEQ ID NO: 1059602 - RNA, 19 nt, Artificial Sequence
  Description of Artificial Sequence: Synthetic oligonucleotide
  Sense strand starting at position 1356 of SEQ ID NO: 915174
gaccgucaugaugggaaca

SEQ ID NO: 1059603 - RNA, 19 nt, Artificial Sequence
  Description of Artificial Sequence: Synthetic oligonucleotide
  Antisense strand to SEQ ID NO: 1059602
uguucccaucaugacgguc

SEQ ID NO: 1059604 - RNA, 19 nt, Artificial Sequence
  Description of Artificial Sequence: Synthetic oligonucleotide
  Sense strand starting at position 1399 of SEQ ID NO: 915174
gagauaucagcacaggcga

SEQ ID NO: 1059605 - RNA, 19 nt, Artificial Sequence
  Description of Artificial Sequence: Synthetic oligonucleotide
  Antisense strand to SEQ ID NO: 1059604
ucgccugugcugauaucuc

SEQ ID NO: 1059606 - RNA, 19 nt, Artificial Sequence
  Description of Artificial Sequence: Synthetic oligonucleotide
  Sense strand starting at position 1454 of SEQ ID NO: 915174
guaugaugcguguccugca

SEQ ID NO: 1059607 - RNA, 19 nt, Artificial Sequence
  Description of Artificial Sequence: Synthetic oligonucleotide
  Antisense strand to SEQ ID NO: 1059606
ugcaggacacgcaucauac

SEQ ID NO: 1059608 - RNA, 19 nt, Artificial Sequence
  Description of Artificial Sequence: Synthetic oligonucleotide
  Sense strand starting at position 1479 of SEQ ID NO: 915174
caggcaugucagcaagaau

SEQ ID NO: 1059609 - RNA, 19 nt, Artificial Sequence
  Description of Artificial Sequence: Synthetic oligonucleotide
  Antisense strand to SEQ ID NO: 1059608
auucuugcugacaugccug

SEQ ID NO: 1059610 - RNA, 19 nt, Artificial Sequence
  Description of Artificial Sequence: Synthetic oligonucleotide
  Sense strand starting at position 1482 of SEQ ID NO: 915174
gcaugucagcaagaauaca

SEQ ID NO: 1059611 - RNA, 19 nt, Artificial Sequence
  Description of Artificial Sequence: Synthetic oligonucleotide
  Antisense strand to SEQ ID NO: 1059610
uguauucuugcugacaugc

SEQ ID NO: 1059612 - RNA, 19 nt, Artificial Sequence
  Description of Artificial Sequence: Synthetic oligonucleotide
  Sense strand starting at position 1496 of SEQ ID NO: 915174
auacaucuggcaggaugau

SEQ ID NO: 1059613 - RNA, 19 nt, Artificial Sequence
  Description of Artificial Sequence: Synthetic oligonucleotide
  Antisense strand to SEQ ID NO: 1059612
aucauccugccagauguau

SEQ ID NO: 1059614 - RNA, 19 nt, Artificial Sequence
  Description of Artificial Sequence: Synthetic oligonucleotide
  Sense strand starting at position 1529 of SEQ ID NO: 915174
aggagaugcccauagcacu

SEQ ID NO: 1059615 - RNA, 19 nt, Artificial Sequence
  Description of Artificial Sequence: Synthetic oligonucleotide
  Antisense strand to SEQ ID NO: 1059614
agugcuaugggcaucuccu

SEQ ID NO: 1059616 - RNA, 19 nt, Artificial Sequence
  Description of Artificial Sequence: Synthetic oligonucleotide
  Sense strand starting at position 1563 of SEQ ID NO: 915174
gggagucaagaugguggua

SEQ ID NO: 1059617 - RNA, 19 nt, Artificial Sequence
  Description of Artificial Sequence: Synthetic oligonucleotide
  Antisense strand to SEQ ID NO: 1059616
uaccaccaucuugacuccc

SEQ ID NO: 1059618 - RNA, 19 nt, Artificial Sequence
  Description of Artificial Sequence: Synthetic oligonucleotide
  Sense strand starting at position 1566 of SEQ ID NO: 915174
agucaagauggugguauau

SEQ ID NO: 1059619 - RNA, 19 nt, Artificial Sequence
  Description of Artificial Sequence: Synthetic oligonucleotide
  Antisense strand to SEQ ID NO: 1059618
auauaccaccaucuugacu

SEQ ID NO: 1059620 - RNA, 19 nt, Artificial Sequence
  Description of Artificial Sequence: Synthetic oligonucleotide
  Sense strand starting at position 1603 of SEQ ID NO: 915174
gcuacauagugaucaaaug

SEQ ID NO: 1059621 - RNA, 19 nt, Artificial Sequence
  Description of Artificial Sequence: Synthetic oligonucleotide
  Antisense strand to SEQ ID NO: 1059620
cauuugaucacuauguagc

SEQ ID NO: 1059622 - RNA, 19 nt, Artificial Sequence
  Description of Artificial Sequence: Synthetic oligonucleotide
  Sense strand starting at position 1682 of SEQ ID NO: 915174
uaaggcauccugggaaugu

SEQ ID NO: 1059623 - RNA, 19 nt, Artificial Sequence
  Description of Artificial Sequence: Synthetic oligonucleotide
  Antisense strand to SEQ ID NO: 1059622
acauucccaggaugccuua

SEQ ID NO: 1059624 - RNA, 19 nt, Artificial Sequence
  Description of Artificial Sequence: Synthetic oligonucleotide
  Sense strand starting at position 1722 of SEQ ID NO: 915174
aaagauacugagugcuuua

SEQ ID NO: 1059625 - RNA, 19 nt, Artificial Sequence
  Description of Artificial Sequence: Synthetic oligonucleotide
  Antisense strand to SEQ ID NO: 1059624
uaaagcacucaguaucuuu

SEQ ID NO: 1059626 - RNA, 19 nt, Artificial Sequence
  Description of Artificial Sequence: Synthetic oligonucleotide
  Sense strand starting at position 2125 of SEQ ID NO: 915174
auagaaccugucugaaaug

SEQ ID NO: 1059627 - RNA, 19 nt, Artificial Sequence
  Description of Artificial Sequence: Synthetic oligonucleotide
  Antisense strand to SEQ ID NO: 1059626
cauuucagacagguucuau

SEQ ID NO: 1059628 - RNA, 19 nt, Artificial Sequence
  Description of Artificial Sequence: Synthetic oligonucleotide
  Sense strand starting at position 2292 of SEQ ID NO: 915174
cuuccagacugguuacacu

SEQ ID NO: 1059629 - RNA, 19 nt, Artificial Sequence
  Description of Artificial Sequence: Synthetic oligonucleotide
  Antisense strand to SEQ ID NO: 1059628
aguguaaccagucuggaag

SEQ ID NO: 1059630 - RNA, 19 nt, Artificial Sequence
  Description of Artificial Sequence: Synthetic oligonucleotide
  Sense strand starting at position 2322 of SEQ ID NO: 915174
acuguucucccauacaagu

SEQ ID NO: 1059631 - RNA, 19 nt, Artificial Sequence
  Description of Artificial Sequence: Synthetic oligonucleotide
  Antisense strand to SEQ ID NO: 1059630
acuuguaugggagaacagu

SEQ ID NO: 1059632 - RNA, 19 nt, Artificial Sequence
  Description of Artificial Sequence: Synthetic oligonucleotide
  Sense strand starting at position 2473 of SEQ ID NO: 915174
ucuuaaagcuaccugauga

SEQ ID NO: 1059633 - RNA, 19 nt, Artificial Sequence
  Description of Artificial Sequence: Synthetic oligonucleotide
  Antisense strand to SEQ ID NO: 1059632
ucaucagguagcuuuaaga

SEQ ID NO: 1059634 - RNA, 19 nt, Artificial Sequence
  Description of Artificial Sequence: Synthetic oligonucleotide
  Sense strand starting at position 2564 of SEQ ID NO: 915174
ccagaugaguuccuacacu

SEQ ID NO: 1059635 - RNA, 19 nt, Artificial Sequence
  Description of Artificial Sequence: Synthetic oligonucleotide
  Antisense strand to SEQ ID NO: 1059634
aguguaggaacucaucugg

SEQ ID NO: 1059636 - RNA, 19 nt, Artificial Sequence
  Description of Artificial Sequence: Synthetic oligonucleotide
  Sense strand starting at position 2588 of SEQ ID NO: 915174
ggauaacauguguaaguca

SEQ ID NO: 1059637 - RNA, 19 nt, Artificial Sequence
  Description of Artificial Sequence: Synthetic oligonucleotide
  Antisense strand to SEQ ID NO: 1059636
ugacuuacacauguuaucc

SEQ ID NO: 1059638 - RNA, 19 nt, Artificial Sequence
  Description of Artificial Sequence: Synthetic oligonucleotide
  Sense strand starting at position 2591 of SEQ ID NO: 915174
uaacauguguaagucagau

SEQ ID NO: 1059639 - RNA, 19 nt, Artificial Sequence
  Description of Artificial Sequence: Synthetic oligonucleotide
  Antisense strand to SEQ ID NO: 1059638
aucugacuuacacauguua

SEQ ID NO: 1059640 - RNA, 19 nt, Artificial Sequence
  Description of Artificial Sequence: Synthetic oligonucleotide
  Sense strand starting at position 2697 of SEQ ID NO: 915174
uauacuacguaagugaaua

SEQ ID NO: 1059641 - RNA, 19 nt, Artificial Sequence
  Description of Artificial Sequence: Synthetic oligonucleotide
  Antisense strand to SEQ ID NO: 1059640
uauucacuuacguaguaua

SEQ ID NO: 1059642 - RNA, 19 nt, Artificial Sequence
  Description of Artificial Sequence: Synthetic oligonucleotide
  Sense strand starting at position 2718 of SEQ ID NO: 915174
auucuaauacuguggacuu

SEQ ID NO: 1059643 - RNA, 19 nt, Artificial Sequence
  Description of Artificial Sequence: Synthetic oligonucleotide
  Antisense strand to SEQ ID NO: 1059642
aaguccacaguauuagaau

SEQ ID NO: 1059644 - RNA, 19 nt, Artificial Sequence
  Description of Artificial Sequence: Synthetic oligonucleotide
  Sense strand starting at position 2728 of SEQ ID NO: 915174
uguggacuuagugacacua

SEQ ID NO: 1059645 - RNA, 19 nt, Artificial Sequence
  Description of Artificial Sequence: Synthetic oligonucleotide
  Antisense strand to SEQ ID NO: 1059644
uagugucacuaaguccaca

SEQ ID NO: 1059646 - RNA, 19 nt, Artificial Sequence
  Description of Artificial Sequence: Synthetic oligonucleotide
  Sense strand starting at position 2975 of SEQ ID NO: 915174
gacacaugugcugacaaua

SEQ ID NO: 1059647 - RNA, 19 nt, Artificial Sequence
  Description of Artificial Sequence: Synthetic oligonucleotide
  Antisense strand to SEQ ID NO: 1059646
uauugucagcacauguguc

SEQ ID NO: 1059648 - RNA, 19 nt, Artificial Sequence
  Description of Artificial Sequence: Synthetic oligonucleotide
  Sense strand starting at position 3417 of SEQ ID NO: 915174
aaugcagugugguuauuua

SEQ ID NO: 1059649 - RNA, 19 nt, Artificial Sequence
  Description of Artificial Sequence: Synthetic oligonucleotide
  Antisense strand to SEQ ID NO: 1059648
uaaauaaccacacugcauu

SEQ ID NO: 1059650 - RNA, 19 nt, Artificial Sequence
  Description of Artificial Sequence: Synthetic oligonucleotide
  Sense strand starting at position 3736 of SEQ ID NO: 915174
aguguaguucuugauugaa

SEQ ID NO: 1059651 - RNA, 19 nt, Artificial Sequence
  Description of Artificial Sequence: Synthetic oligonucleotide
  Antisense strand to SEQ ID NO: 1059650
uucaaucaagaacuacacu

SEQ ID NO: 1059652 - RNA, 19 nt, Artificial Sequence
  Description of Artificial Sequence: Synthetic oligonucleotide
  Sense strand starting at position 3819 of SEQ ID NO: 915174
cuagguauugagugauaua

SEQ ID NO: 1059653 - RNA, 19 nt, Artificial Sequence
  Description of Artificial Sequence: Synthetic oligonucleotide
  Antisense strand to SEQ ID NO: 1059652
uauaucacucaauaccuag

SEQ ID NO: 1059654 - RNA, 19 nt, Artificial Sequence
  Description of Artificial Sequence: Synthetic oligonucleotide
  Sense strand starting at position 3904 of SEQ ID NO: 915174
aggcauccacaguauguua

SEQ ID NO: 1059655 - RNA, 19 nt, Artificial Sequence
  Description of Artificial Sequence: Synthetic oligonucleotide
  Antisense strand to SEQ ID NO: 1059654
uaacauacuguggaugccu

SEQ ID NO: 1059656 - RNA, 19 nt, Artificial Sequence
  Description of Artificial Sequence: Synthetic oligonucleotide
  Sense strand starting at position 126 of SEQ ID NO: 915175
agaagaaagaccuguguau

SEQ ID NO: 1059657 - RNA, 19 nt, Artificial Sequence
  Description of Artificial Sequence: Synthetic oligonucleotide
  Antisense strand to SEQ ID NO: 1059656
auacacaggucuuucuucu

SEQ ID NO: 1059658 - RNA, 19 nt, Artificial Sequence
  Description of Artificial Sequence: Synthetic oligonucleotide
  Sense strand starting at position 128 of SEQ ID NO: 915175
aagaaagaccuguguauau

SEQ ID NO: 1059659 - RNA, 19 nt, Artificial Sequence
  Description of Artificial Sequence: Synthetic oligonucleotide
  Antisense strand to SEQ ID NO: 1059658
auauacacaggucuuucuu

SEQ ID NO: 1059660 - RNA, 19 nt, Artificial Sequence
  Description of Artificial Sequence: Synthetic oligonucleotide
  Sense strand starting at position 139 of SEQ ID NO: 915175
guguauauuugaucccuuu

SEQ ID NO: 1059661 - RNA, 19 nt, Artificial Sequence
  Description of Artificial Sequence: Synthetic oligonucleotide
  Antisense strand to SEQ ID NO: 1059660
aaagggaucaaauauacac

SEQ ID NO: 1059662 - RNA, 19 nt, Artificial Sequence
  Description of Artificial Sequence: Synthetic oligonucleotide
  Sense strand starting at position 163 of SEQ ID NO: 915175
augccuuaagguuaaguua

SEQ ID NO: 1059663 - RNA, 19 nt, Artificial Sequence
  Description of Artificial Sequence: Synthetic oligonucleotide
  Antisense strand to SEQ ID NO: 1059662
uaacuuaaccuuaaggcau

SEQ ID NO: 1059664 - RNA, 19 nt, Artificial Sequence
  Description of Artificial Sequence: Synthetic oligonucleotide
  Sense strand starting at position 349 of SEQ ID NO: 915175
aauauaccuggguguccaa

SEQ ID NO: 1059665 - RNA, 19 nt, Artificial Sequence
  Description of Artificial Sequence: Synthetic oligonucleotide
  Antisense strand to SEQ ID NO: 1059664
uuggacacccagguauauu

SEQ ID NO: 1059666 - RNA, 19 nt, Artificial Sequence
  Description of Artificial Sequence: Synthetic oligonucleotide
  Sense strand starting at position 466 of SEQ ID NO: 915175
uuauguguuguagaauuac

SEQ ID NO: 1059667 - RNA, 19 nt, Artificial Sequence
  Description of Artificial Sequence: Synthetic oligonucleotide
  Antisense strand to SEQ ID NO: 1059666
guaauucuacaacacauaa

SEQ ID NO: 1059668 - RNA, 19 nt, Artificial Sequence
  Description of Artificial Sequence: Synthetic oligonucleotide
  Sense strand starting at position 472 of SEQ ID NO: 915175
guuguagaauuaccaccau

SEQ ID NO: 1059669 - RNA, 19 nt, Artificial Sequence
  Description of Artificial Sequence: Synthetic oligonucleotide
  Antisense strand to SEQ ID NO: 1059668
auggugguaauucuacaac

SEQ ID NO: 1059670 - RNA, 19 nt, Artificial Sequence
  Description of Artificial Sequence: Synthetic oligonucleotide
  Sense strand starting at position 661 of SEQ ID NO: 915175
caguucugagaauaucagu

SEQ ID NO: 1059671 - RNA, 19 nt, Artificial Sequence
  Description of Artificial Sequence: Synthetic oligonucleotide
  Antisense strand to SEQ ID NO: 1059670
acugauauucucagaacug

SEQ ID NO: 1059672 - RNA, 19 nt, Artificial Sequence
  Description of Artificial Sequence: Synthetic oligonucleotide
  Sense strand starting at position 666 of SEQ ID NO: 915175
cugagaauaucagucaggu

SEQ ID NO: 1059673 - RNA, 19 nt, Artificial Sequence
  Description of Artificial Sequence: Synthetic oligonucleotide
  Antisense strand to SEQ ID NO: 1059672
accugacugauauucucag

SEQ ID NO: 1059674 - RNA, 19 nt, Artificial Sequence
  Description of Artificial Sequence: Synthetic oligonucleotide
  Sense strand starting at position 777 of SEQ ID NO: 915175
auuacagagcuguauucua

SEQ ID NO: 1059675 - RNA, 19 nt, Artificial Sequence
  Description of Artificial Sequence: Synthetic oligonucleotide
  Antisense strand to SEQ ID NO: 1059674
uagaauacagcucuguaau

SEQ ID NO: 1059676 - RNA, 19 nt, Artificial Sequence
  Description of Artificial Sequence: Synthetic oligonucleotide
  Sense strand starting at position 934 of SEQ ID NO: 915175
cuuauaguaccagguaaac

SEQ ID NO: 1059677 - RNA, 19 nt, Artificial Sequence
  Description of Artificial Sequence: Synthetic oligonucleotide
  Antisense strand to SEQ ID NO: 1059676
guuuaccugguacuauaag

SEQ ID NO: 1059678 - RNA, 19 nt, Artificial Sequence
  Description of Artificial Sequence: Synthetic oligonucleotide
  Sense strand starting at position 962 of SEQ ID NO: 915175
uccacagaucucugaggca

SEQ ID NO: 1059679 - RNA, 19 nt, Artificial Sequence
  Description of Artificial Sequence: Synthetic oligonucleotide
  Antisense strand to SEQ ID NO: 1059678
ugccucagagaucugugga

SEQ ID NO: 1059680 - RNA, 19 nt, Artificial Sequence
  Description of Artificial Sequence: Synthetic oligonucleotide
  Sense strand starting at position 982 of SEQ ID NO: 915175
cuuugaaguuggcuagaau

SEQ ID NO: 1059681 - RNA, 19 nt, Artificial Sequence
  Description of Artificial Sequence: Synthetic oligonucleotide
  Antisense strand to SEQ ID NO: 1059680
auucuagccaacuucaaag

SEQ ID NO: 1059682 - RNA, 19 nt, Artificial Sequence
  Description of Artificial Sequence: Synthetic oligonucleotide
  Sense strand starting at position 985 of SEQ ID NO: 915175
ugaaguuggcuagaaugcu

SEQ ID NO: 1059683 - RNA, 19 nt, Artificial Sequence
  Description of Artificial Sequence: Synthetic oligonucleotide
  Antisense strand to SEQ ID NO: 1059682
agcauucuagccaacuuca

SEQ ID NO: 1059684 - RNA, 19 nt, Artificial Sequence
  Description of Artificial Sequence: Synthetic oligonucleotide
  Sense strand starting at position 991 of SEQ ID NO: 915175
uggcuagaaugcucuggau

SEQ ID NO: 1059685 - RNA, 19 nt, Artificial Sequence
  Description of Artificial Sequence: Synthetic oligonucleotide
  Antisense strand to SEQ ID NO: 1059684
auccagagcauucuagcca

SEQ ID NO: 1059686 - RNA, 19 nt, Artificial Sequence
  Description of Artificial Sequence: Synthetic oligonucleotide
  Sense strand starting at position 2005 of SEQ ID NO: 915175
aggugagacuucuugccua

SEQ ID NO: 1059687 - RNA, 19 nt, Artificial Sequence
  Description of Artificial Sequence: Synthetic oligonucleotide
  Antisense strand to SEQ ID NO: 1059686
uaggcaagaagucucaccu

SEQ ID NO: 1059688 - RNA, 19 nt, Artificial Sequence
  Description of Artificial Sequence: Synthetic oligonucleotide
  Sense strand starting at position 2008 of SEQ ID NO: 915175
ugagacuucuugccuauua

SEQ ID NO: 1059689 - RNA, 19 nt, Artificial Sequence
  Description of Artificial Sequence: Synthetic oligonucleotide
  Antisense strand to SEQ ID NO: 1059688
uaauaggcaagaagucuca

SEQ ID NO: 1059690 - RNA, 19 nt, Artificial Sequence
  Description of Artificial Sequence: Synthetic oligonucleotide
  Sense strand starting at position 2050 of SEQ ID NO: 915175
ggugcaguccuauaagauu

SEQ ID NO: 1059691 - RNA, 19 nt, Artificial Sequence
  Description of Artificial Sequence: Synthetic oligonucleotide
  Antisense strand to SEQ ID NO: 1059690
aaucuuauaggacugcacc

SEQ ID NO: 1059692 - RNA, 19 nt, Artificial Sequence
  Description of Artificial Sequence: Synthetic oligonucleotide
  Sense strand starting at position 2116 of SEQ ID NO: 915175
gugguauggcaggaucaga

SEQ ID NO: 1059693 - RNA, 19 nt, Artificial Sequence
  Description of Artificial Sequence: Synthetic oligonucleotide
  Antisense strand to SEQ ID NO: 1059692
ucugauccugccauaccac

SEQ ID NO: 1059694 - RNA, 19 nt, Artificial Sequence
  Description of Artificial Sequence: Synthetic oligonucleotide
  Sense strand starting at position 2194 of SEQ ID NO: 915175
gaaggaucagcucgugaau

SEQ ID NO: 1059695 - RNA, 19 nt, Artificial Sequence
  Description of Artificial Sequence: Synthetic oligonucleotide
  Antisense strand to SEQ ID NO: 1059694
auucacgagcugauccuuc

SEQ ID NO: 1059696 - RNA, 19 nt, Artificial Sequence
  Description of Artificial Sequence: Synthetic oligonucleotide
  Sense strand starting at position 2208 of SEQ ID NO: 915175
ugaauuccuuccuuaggga

SEQ ID NO: 1059697 - RNA, 19 nt, Artificial Sequence
  Description of Artificial Sequence: Synthetic oligonucleotide
  Antisense strand to SEQ ID NO: 1059696
ucccuaaggaaggaauuca

SEQ ID NO: 1059698 - RNA, 19 nt, Artificial Sequence
  Description of Artificial Sequence: Synthetic oligonucleotide
  Sense strand starting at position 2321 of SEQ ID NO: 915175
cgacaauuccaguacugua

SEQ ID NO: 1059699 - RNA, 19 nt, Artificial Sequence
  Description of Artificial Sequence: Synthetic oligonucleotide
  Antisense strand to SEQ ID NO: 1059698
uacaguacuggaauugucg

SEQ ID NO: 1059700 - RNA, 19 nt, Artificial Sequence
  Description of Artificial Sequence: Synthetic oligonucleotide
  Sense strand starting at position 2326 of SEQ ID NO: 915175
auuccaguacuguaugagu

SEQ ID NO: 1059701 - RNA, 19 nt, Artificial Sequence
  Description of Artificial Sequence: Synthetic oligonucleotide
  Antisense strand to SEQ ID NO: 1059700
acucauacaguacuggaau

SEQ ID NO: 1059702 - RNA, 19 nt, Artificial Sequence
  Description of Artificial Sequence: Synthetic oligonucleotide
  Sense strand starting at position 2356 of SEQ ID NO: 915175
acucaagugccuuauagga

SEQ ID NO: 1059703 - RNA, 19 nt, Artificial Sequence
  Description of Artificial Sequence: Synthetic oligonucleotide
  Antisense strand to SEQ ID NO: 1059702
uccuauaaggcacuugagu

SEQ ID NO: 1059704 - RNA, 19 nt, Artificial Sequence
  Description of Artificial Sequence: Synthetic oligonucleotide
  Sense strand starting at position 2376 of SEQ ID NO: 915175
gauugugauccauagcugu

SEQ ID NO: 1059705 - RNA, 19 nt, Artificial Sequence
  Description of Artificial Sequence: Synthetic oligonucleotide
  Antisense strand to SEQ ID NO: 1059704
acagcuauggaucacaauc

SEQ ID NO: 1059706 - RNA, 19 nt, Artificial Sequence
  Description of Artificial Sequence: Synthetic oligonucleotide
  Sense strand starting at position 2395 of SEQ ID NO: 915175
ggucacaagucacuugagu

SEQ ID NO: 1059707 - RNA, 19 nt, Artificial Sequence
  Description of Artificial Sequence: Synthetic oligonucleotide
  Antisense strand to SEQ ID NO: 1059706
acucaagugacuugugacc

SEQ ID NO: 1059708 - RNA, 19 nt, Artificial Sequence
  Description of Artificial Sequence: Synthetic oligonucleotide
  Sense strand starting at position 2400 of SEQ ID NO: 915175
caagucacuugagugaaga

SEQ ID NO: 1059709 - RNA, 19 nt, Artificial Sequence
  Description of Artificial Sequence: Synthetic oligonucleotide
  Antisense strand to SEQ ID NO: 1059708
ucuucacucaagugacuug

SEQ ID NO: 1059710 - RNA, 19 nt, Artificial Sequence
  Description of Artificial Sequence: Synthetic oligonucleotide
  Sense strand starting at position 2401 of SEQ ID NO: 915175
aagucacuugagugaagau

SEQ ID NO: 1059711 - RNA, 19 nt, Artificial Sequence
  Description of Artificial Sequence: Synthetic oligonucleotide
  Antisense strand to SEQ ID NO: 1059710
aucuucacucaagugacuu

SEQ ID NO: 1059712 - RNA, 19 nt, Artificial Sequence
  Description of Artificial Sequence: Synthetic oligonucleotide
  Sense strand starting at position 2770 of SEQ ID NO: 915175
aucuuaggguuaccuuaua

SEQ ID NO: 1059713 - RNA, 19 nt, Artificial Sequence
  Description of Artificial Sequence: Synthetic oligonucleotide
  Antisense strand to SEQ ID NO: 1059712
uauaagguaacccuaagau

SEQ ID NO: 1059714 - RNA, 19 nt, Artificial Sequence
  Description of Artificial Sequence: Synthetic oligonucleotide
  Sense strand starting at position 2958 of SEQ ID NO: 915175
cugaguguauuucuccauu

SEQ ID NO: 1059715 - RNA, 19 nt, Artificial Sequence
  Description of Artificial Sequence: Synthetic oligonucleotide
  Antisense strand to SEQ ID NO: 1059714
aauggagaaauacacucag

SEQ ID NO: 1059716 - RNA, 19 nt, Artificial Sequence
  Description of Artificial Sequence: Synthetic oligonucleotide
  Sense strand starting at position 3054 of SEQ ID NO: 915175
aguacgugugugguaaguu

SEQ ID NO: 1059717 - RNA, 19 nt, Artificial Sequence
  Description of Artificial Sequence: Synthetic oligonucleotide
  Antisense strand to SEQ ID NO: 1059716
aacuuaccacacacguacu

SEQ ID NO: 1059718 - RNA, 19 nt, Artificial Sequence
  Description of Artificial Sequence: Synthetic oligonucleotide
  Sense strand starting at position 3380 of SEQ ID NO: 915175
guuacucucuccuuaggau

SEQ ID NO: 1059719 - RNA, 19 nt, Artificial Sequence
  Description of Artificial Sequence: Synthetic oligonucleotide
  Antisense strand to SEQ ID NO: 1059718
auccuaaggagagaguaac

SEQ ID NO: 1059720 - RNA, 19 nt, Artificial Sequence
  Description of Artificial Sequence: Synthetic oligonucleotide
  Sense strand starting at position 3393 of SEQ ID NO: 915175
uaggaugauugguuuccau

SEQ ID NO: 1059721 - RNA, 19 nt, Artificial Sequence
  Description of Artificial Sequence: Synthetic oligonucleotide
  Antisense strand to SEQ ID NO: 1059720
auggaaaccaaucauccua

SEQ ID NO: 1059722 - RNA, 19 nt, Artificial Sequence
  Description of Artificial Sequence: Synthetic oligonucleotide
  Sense strand starting at position 3396 of SEQ ID NO: 915175
gaugauugguuuccaugau

SEQ ID NO: 1059723 - RNA, 19 nt, Artificial Sequence
  Description of Artificial Sequence: Synthetic oligonucleotide
  Antisense strand to SEQ ID NO: 1059722
aucauggaaaccaaucauc

SEQ ID NO: 1059724 - RNA, 19 nt, Artificial Sequence
  Description of Artificial Sequence: Synthetic oligonucleotide
  Sense strand starting at position 3515 of SEQ ID NO: 915175
uuuggagacauugguuaau

SEQ ID NO: 1059725 - RNA, 19 nt, Artificial Sequence
  Description of Artificial Sequence: Synthetic oligonucleotide
  Antisense strand to SEQ ID NO: 1059724
auuaaccaaugucuccaaa

SEQ ID NO: 1059726 - RNA, 19 nt, Artificial Sequence
  Description of Artificial Sequence: Synthetic oligonucleotide
  Sense strand starting at position 3517 of SEQ ID NO: 915175
uggagacauugguuaaucu

SEQ ID NO: 1059727 - RNA, 19 nt, Artificial Sequence
  Description of Artificial Sequence: Synthetic oligonucleotide
  Antisense strand to SEQ ID NO: 1059726
agauuaaccaaugucucca

SEQ ID NO: 1059728 - RNA, 19 nt, Artificial Sequence
  Description of Artificial Sequence: Synthetic oligonucleotide
  Sense strand starting at position 3566 of SEQ ID NO: 915175
cagaauagagcguacaaau

SEQ ID NO: 1059729 - RNA, 19 nt, Artificial Sequence
  Description of Artificial Sequence: Synthetic oligonucleotide
  Antisense strand to SEQ ID NO: 1059728
auuuguacgcucuauucug

SEQ ID NO: 1059730 - RNA, 19 nt, Artificial Sequence
  Description of Artificial Sequence: Synthetic oligonucleotide
  Sense strand starting at position 3614 of SEQ ID NO: 915175
auauguuauuggucccaca

SEQ ID NO: 1059731 - RNA, 19 nt, Artificial Sequence
  Description of Artificial Sequence: Synthetic oligonucleotide
  Antisense strand to SEQ ID NO: 1059730
ugugggaccaauaacauau

SEQ ID NO: 1059732 - RNA, 19 nt, Artificial Sequence
  Description of Artificial Sequence: Synthetic oligonucleotide
  Sense strand starting at position 3809 of SEQ ID NO: 915175
agauuuaagugauaagcua

SEQ ID NO: 1059733 - RNA, 19 nt, Artificial Sequence
  Description of Artificial Sequence: Synthetic oligonucleotide
  Antisense strand to SEQ ID NO: 1059732
uagcuuaucacuuaaaucu

SEQ ID NO: 1059734 - RNA, 19 nt, Artificial Sequence
  Description of Artificial Sequence: Synthetic oligonucleotide
  Sense strand starting at position 3952 of SEQ ID NO: 915175
cuuaaauggguguauguga

SEQ ID NO: 1059735 - RNA, 19 nt, Artificial Sequence
  Description of Artificial Sequence: Synthetic oligonucleotide
  Antisense strand to SEQ ID NO: 1059734
ucacauacacccauuuaag

SEQ ID NO: 1059736 - RNA, 19 nt, Artificial Sequence
  Description of Artificial Sequence: Synthetic oligonucleotide
  Sense strand starting at position 108 of SEQ ID NO: 915176
agguuucacugguuagaug

SEQ ID NO: 1059737 - RNA, 19 nt, Artificial Sequence
  Description of Artificial Sequence: Synthetic oligonucleotide
  Antisense strand to SEQ ID NO: 1059736
caucuaaccagugaaaccu

SEQ ID NO: 1059738 - RNA, 19 nt, Artificial Sequence
  Description of Artificial Sequence: Synthetic oligonucleotide
  Sense strand starting at position 109 of SEQ ID NO: 915176
gguuucacugguuagaugu

SEQ ID NO: 1059739 - RNA, 19 nt, Artificial Sequence
  Description of Artificial Sequence: Synthetic oligonucleotide
  Antisense strand to SEQ ID NO: 1059738
acaucuaaccagugaaacc

SEQ ID NO: 1059740 - RNA, 19 nt, Artificial Sequence
  Description of Artificial Sequence: Synthetic oligonucleotide
  Sense strand starting at position 119 of SEQ ID NO: 915176
guuagauguuucccaugac

SEQ ID NO: 1059741 - RNA, 19 nt, Artificial Sequence
  Description of Artificial Sequence: Synthetic oligonucleotide
  Antisense strand to SEQ ID NO: 1059740
gucaugggaaacaucuaac

SEQ ID NO: 1059742 - RNA, 19 nt, Artificial Sequence
  Description of Artificial Sequence: Synthetic oligonucleotide
  Sense strand starting at position 138 of SEQ ID NO: 915176
gcuguuauagcauccuguu

SEQ ID NO: 1059743 - RNA, 19 nt, Artificial Sequence
  Description of Artificial Sequence: Synthetic oligonucleotide
  Antisense strand to SEQ ID NO: 1059742
aacaggaugcuauaacagc

SEQ ID NO: 1059744 - RNA, 19 nt, Artificial Sequence
  Description of Artificial Sequence: Synthetic oligonucleotide
  Sense strand starting at position 148 of SEQ ID NO: 915176
cauccuguugaacggagaa

SEQ ID NO: 1059745 - RNA, 19 nt, Artificial Sequence
  Description of Artificial Sequence: Synthetic oligonucleotide
  Antisense strand to SEQ ID NO: 1059744
uucuccguucaacaggaug

SEQ ID NO: 1059746 - RNA, 19 nt, Artificial Sequence
  Description of Artificial Sequence: Synthetic oligonucleotide
  Sense strand starting at position 187 of SEQ ID NO: 915176
gggcaaggaagaugaguuu

SEQ ID NO: 1059747 - RNA, 19 nt, Artificial Sequence
  Description of Artificial Sequence: Synthetic oligonucleotide
  Antisense strand to SEQ ID NO: 1059746
aaacucaucuuccuugccc

SEQ ID NO: 1059748 - RNA, 19 nt, Artificial Sequence
  Description of Artificial Sequence: Synthetic oligonucleotide
  Sense strand starting at position 374 of SEQ ID NO: 915176
cugagcaucaucuguggaa

SEQ ID NO: 1059749 - RNA, 19 nt, Artificial Sequence
  Description of Artificial Sequence: Synthetic oligonucleotide
  Antisense strand to SEQ ID NO: 1059748
uuccacagaugaugcucag

SEQ ID NO: 1059750 - RNA, 19 nt, Artificial Sequence
  Description of Artificial Sequence: Synthetic oligonucleotide
  Sense strand starting at position 375 of SEQ ID NO: 915176
ugagcaucaucuguggaaa

SEQ ID NO: 1059751 - RNA, 19 nt, Artificial Sequence
  Description of Artificial Sequence: Synthetic oligonucleotide
  Antisense strand to SEQ ID NO: 1059750
uuuccacagaugaugcuca

SEQ ID NO: 1059752 - RNA, 19 nt, Artificial Sequence
  Description of Artificial Sequence: Synthetic oligonucleotide
  Sense strand starting at position 376 of SEQ ID NO: 915176
gagcaucaucuguggaaag

SEQ ID NO: 1059753 - RNA, 19 nt, Artificial Sequence
  Description of Artificial Sequence: Synthetic oligonucleotide
  Antisense strand to SEQ ID NO: 1059752
cuuuccacagaugaugcuc

SEQ ID NO: 1059754 - RNA, 19 nt, Artificial Sequence
  Description of Artificial Sequence: Synthetic oligonucleotide
  Sense strand starting at position 473 of SEQ ID NO: 915176
gauaacuauuuggaaguau

SEQ ID NO: 1059755 - RNA, 19 nt, Artificial Sequence
  Description of Artificial Sequence: Synthetic oligonucleotide
  Antisense strand to SEQ ID NO: 1059754
auacuuccaaauaguuauc

SEQ ID NO: 1059756 - RNA, 19 nt, Artificial Sequence
  Description of Artificial Sequence: Synthetic oligonucleotide
  Sense strand starting at position 693 of SEQ ID NO: 915176
auguguauucucuaccaaa

SEQ ID NO: 1059757 - RNA, 19 nt, Artificial Sequence
  Description of Artificial Sequence: Synthetic oligonucleotide
  Antisense strand to SEQ ID NO: 1059756
uuugguagagaauacacau

SEQ ID NO: 1059758 - RNA, 19 nt, Artificial Sequence
  Description of Artificial Sequence: Synthetic oligonucleotide
  Sense strand starting at position 728 of SEQ ID NO: 915176
gauacaaguugauugaauc

SEQ ID NO: 1059759 - RNA, 19 nt, Artificial Sequence
  Description of Artificial Sequence: Synthetic oligonucleotide
  Antisense strand to SEQ ID NO: 1059758
gauucaaucaacuuguauc

SEQ ID NO: 1059760 - RNA, 19 nt, Artificial Sequence
  Description of Artificial Sequence: Synthetic oligonucleotide
  Sense strand starting at position 806 of SEQ ID NO: 915176
aaaguuaugcaaggauauc

SEQ ID NO: 1059761 - RNA, 19 nt, Artificial Sequence
  Description of Artificial Sequence: Synthetic oligonucleotide
  Antisense strand to SEQ ID NO: 1059760
gauauccuugcauaacuuu

SEQ ID NO: 1059762 - RNA, 19 nt, Artificial Sequence
  Description of Artificial Sequence: Synthetic oligonucleotide
  Sense strand starting at position 872 of SEQ ID NO: 915176
ucugcagaucucuaaggca

SEQ ID NO: 1059763 - RNA, 19 nt, Artificial Sequence
  Description of Artificial Sequence: Synthetic oligonucleotide
  Antisense strand to SEQ ID NO: 1059762
ugccuuagagaucugcaga

SEQ ID NO: 1059764 - RNA, 19 nt, Artificial Sequence
  Description of Artificial Sequence: Synthetic oligonucleotide
  Sense strand starting at position 2130 of SEQ ID NO: 915176
uggcuuaccuccuuuggaa

SEQ ID NO: 1059765 - RNA, 19 nt, Artificial Sequence
  Description of Artificial Sequence: Synthetic oligonucleotide
  Antisense strand to SEQ ID NO: 1059764
uuccaaaggagguaagcca

SEQ ID NO: 1059766 - RNA, 19 nt, Artificial Sequence
  Description of Artificial Sequence: Synthetic oligonucleotide
  Sense strand starting at position 2132 of SEQ ID NO: 915176
gcuuaccuccuuuggaaag

SEQ ID NO: 1059767 - RNA, 19 nt, Artificial Sequence
  Description of Artificial Sequence: Synthetic oligonucleotide
  Antisense strand to SEQ ID NO: 1059766
cuuuccaaaggagguaagc

SEQ ID NO: 1059768 - RNA, 19 nt, Artificial Sequence
  Description of Artificial Sequence: Synthetic oligonucleotide
  Sense strand starting at position 2227 of SEQ ID NO: 915176
agacuaaauugaucauugu

SEQ ID NO: 1059769 - RNA, 19 nt, Artificial Sequence
  Description of Artificial Sequence: Synthetic oligonucleotide
  Antisense strand to SEQ ID NO: 1059768
acaaugaucaauuuagucu

SEQ ID NO: 1059770 - RNA, 19 nt, Artificial Sequence
  Description of Artificial Sequence: Synthetic oligonucleotide
  Sense strand starting at position 2261 of SEQ ID NO: 915176
cuuuauugugugcauuaag

SEQ ID NO: 1059771 - RNA, 19 nt, Artificial Sequence
  Description of Artificial Sequence: Synthetic oligonucleotide
  Antisense strand to SEQ ID NO: 1059770
cuuaaugcacacaauaaag

SEQ ID NO: 1059772 - RNA, 19 nt, Artificial Sequence
  Description of Artificial Sequence: Synthetic oligonucleotide
  Sense strand starting at position 2375 of SEQ ID NO: 915176
augguuaaguuuccacaga

SEQ ID NO: 1059773 - RNA, 19 nt, Artificial Sequence
  Description of Artificial Sequence: Synthetic oligonucleotide
  Antisense strand to SEQ ID NO: 1059772
ucuguggaaacuuaaccau

SEQ ID NO: 1059774 - RNA, 19 nt, Artificial Sequence
  Description of Artificial Sequence: Synthetic oligonucleotide
  Sense strand starting at position 2474 of SEQ ID NO: 915176
ugaggucaaacauaucgua

SEQ ID NO: 1059775 - RNA, 19 nt, Artificial Sequence
  Description of Artificial Sequence: Synthetic oligonucleotide
  Antisense strand to SEQ ID NO: 1059774
uacgauauguuugaccuca

SEQ ID NO: 1059776 - RNA, 19 nt, Artificial Sequence
  Description of Artificial Sequence: Synthetic oligonucleotide
  Sense strand starting at position 2530 of SEQ ID NO: 915176
aaagaaguauccuuguggu

SEQ ID NO: 1059777 - RNA, 19 nt, Artificial Sequence
  Description of Artificial Sequence: Synthetic oligonucleotide
  Antisense strand to SEQ ID NO: 1059776
accacaaggauacuucuuu

SEQ ID NO: 1059778 - RNA, 19 nt, Artificial Sequence
  Description of Artificial Sequence: Synthetic oligonucleotide
  Sense strand starting at position 2578 of SEQ ID NO: 915176
auaagaucauuagagaaca

SEQ ID NO: 1059779 - RNA, 19 nt, Artificial Sequence
  Description of Artificial Sequence: Synthetic oligonucleotide
  Antisense strand to SEQ ID NO: 1059778
uguucucuaaugaucuuau

SEQ ID NO: 1059780 - RNA, 19 nt, Artificial Sequence
  Description of Artificial Sequence: Synthetic oligonucleotide
  Sense strand starting at position 2739 of SEQ ID NO: 915176
agaugaacuuuacccagua

SEQ ID NO: 1059781 - RNA, 19 nt, Artificial Sequence
  Description of Artificial Sequence: Synthetic oligonucleotide
  Antisense strand to SEQ ID NO: 1059780
uacuggguaaaguucaucu

SEQ ID NO: 1059782 - RNA, 19 nt, Artificial Sequence
  Description of Artificial Sequence: Synthetic oligonucleotide
  Sense strand starting at position 2846 of SEQ ID NO: 915176
uuaggcacuuuauuaugaa

SEQ ID NO: 1059783 - RNA, 19 nt, Artificial Sequence
  Description of Artificial Sequence: Synthetic oligonucleotide
  Antisense strand to SEQ ID NO: 1059782
uucauaauaaagugccuaa

SEQ ID NO: 1059784 - RNA, 19 nt, Artificial Sequence
  Description of Artificial Sequence: Synthetic oligonucleotide
  Sense strand starting at position 3065 of SEQ ID NO: 915176
gcccaauauggauagucaa

SEQ ID NO: 1059785 - RNA, 19 nt, Artificial Sequence
  Description of Artificial Sequence: Synthetic oligonucleotide
  Antisense strand to SEQ ID NO: 1059784
uugacuauccauauugggc

SEQ ID NO: 1059786 - RNA, 19 nt, Artificial Sequence
  Description of Artificial Sequence: Synthetic oligonucleotide
  Sense strand starting at position 3257 of SEQ ID NO: 915176
ugaauaaucuggcuggaga

SEQ ID NO: 1059787 - RNA, 19 nt, Artificial Sequence
  Description of Artificial Sequence: Synthetic oligonucleotide
  Antisense strand to SEQ ID NO: 1059786
ucuccagccagauuauuca

SEQ ID NO: 1059788 - RNA, 19 nt, Artificial Sequence
  Description of Artificial Sequence: Synthetic oligonucleotide
  Sense strand starting at position 3259 of SEQ ID NO: 915176
aauaaucuggcuggagaac

SEQ ID NO: 1059789 - RNA, 19 nt, Artificial Sequence
  Description of Artificial Sequence: Synthetic oligonucleotide
  Antisense strand to SEQ ID NO: 1059788
guucuccagccagauuauu

SEQ ID NO: 1059790 - RNA, 19 nt, Artificial Sequence
  Description of Artificial Sequence: Synthetic oligonucleotide
  Sense strand starting at position 3320 of SEQ ID NO: 915176
cgugguagcccuuuaguua

SEQ ID NO: 1059791 - RNA, 19 nt, Artificial Sequence
  Description of Artificial Sequence: Synthetic oligonucleotide
  Antisense strand to SEQ ID NO: 1059790
uaacuaaagggcuaccacg

SEQ ID NO: 1059792 - RNA, 19 nt, Artificial Sequence
  Description of Artificial Sequence: Synthetic oligonucleotide
  Sense strand starting at position 3335 of SEQ ID NO: 915176
guuacuuucuccuuaggau

SEQ ID NO: 1059793 - RNA, 19 nt, Artificial Sequence
  Description of Artificial Sequence: Synthetic oligonucleotide
  Antisense strand to SEQ ID NO: 1059792
auccuaaggagaaaguaac

SEQ ID NO: 1059794 - RNA, 19 nt, Artificial Sequence
  Description of Artificial Sequence: Synthetic oligonucleotide
  Sense strand starting at position 3336 of SEQ ID NO: 915176
uuacuuucuccuuaggaug

SEQ ID NO: 1059795 - RNA, 19 nt, Artificial Sequence
  Description of Artificial Sequence: Synthetic oligonucleotide
  Antisense strand to SEQ ID NO: 1059794
cauccuaaggagaaaguaa

SEQ ID NO: 1059796 - RNA, 19 nt, Artificial Sequence
  Description of Artificial Sequence: Synthetic oligonucleotide
  Sense strand starting at position 3374 of SEQ ID NO: 915176
uaugauguuuggucacgga

SEQ ID NO: 1059797 - RNA, 19 nt, Artificial Sequence
  Description of Artificial Sequence: Synthetic oligonucleotide
  Antisense strand to SEQ ID NO: 1059796
uccgugaccaaacaucaua

SEQ ID NO: 1059798 - RNA, 19 nt, Artificial Sequence
  Description of Artificial Sequence: Synthetic oligonucleotide
  Sense strand starting at position 3378 of SEQ ID NO: 915176
auguuuggucacggacaca

SEQ ID NO: 1059799 - RNA, 19 nt, Artificial Sequence
  Description of Artificial Sequence: Synthetic oligonucleotide
  Antisense strand to SEQ ID NO: 1059798
uguguccgugaccaaacau

SEQ ID NO: 1059800 - RNA, 19 nt, Artificial Sequence
  Description of Artificial Sequence: Synthetic oligonucleotide
  Sense strand starting at position 3411 of SEQ ID NO: 915176
ugagaauacuccuugcaag

SEQ ID NO: 1059801 - RNA, 19 nt, Artificial Sequence
  Description of Artificial Sequence: Synthetic oligonucleotide
  Antisense strand to SEQ ID NO: 1059800
cuugcaaggaguauucuca

SEQ ID NO: 1059802 - RNA, 19 nt, Artificial Sequence
  Description of Artificial Sequence: Synthetic oligonucleotide
  Sense strand starting at position 3412 of SEQ ID NO: 915176
gagaauacuccuugcaagg

SEQ ID NO: 1059803 - RNA, 19 nt, Artificial Sequence
  Description of Artificial Sequence: Synthetic oligonucleotide
  Antisense strand to SEQ ID NO: 1059802
ccuugcaaggaguauucuc

SEQ ID NO: 1059804 - RNA, 19 nt, Artificial Sequence
  Description of Artificial Sequence: Synthetic oligonucleotide
  Sense strand starting at position 3463 of SEQ ID NO: 915176
uugggagacauuggcugau

SEQ ID NO: 1059805 - RNA, 19 nt, Artificial Sequence
  Description of Artificial Sequence: Synthetic oligonucleotide
  Antisense strand to SEQ ID NO: 1059804
aucagccaaugucucccaa

SEQ ID NO: 1059806 - RNA, 19 nt, Artificial Sequence
  Description of Artificial Sequence: Synthetic oligonucleotide
  Sense strand starting at position 3465 of SEQ ID NO: 915176
gggagacauuggcugaucu

SEQ ID NO: 1059807 - RNA, 19 nt, Artificial Sequence
  Description of Artificial Sequence: Synthetic oligonucleotide
  Antisense strand to SEQ ID NO: 1059806
agaucagccaaugucuccc

SEQ ID NO: 1059808 - RNA, 19 nt, Artificial Sequence
  Description of Artificial Sequence: Synthetic oligonucleotide
  Sense strand starting at position 3466 of SEQ ID NO: 915176
ggagacauuggcugaucuu

SEQ ID NO: 1059809 - RNA, 19 nt, Artificial Sequence
  Description of Artificial Sequence: Synthetic oligonucleotide
  Antisense strand to SEQ ID NO: 1059808
aagaucagccaaugucucc

SEQ ID NO: 1059810 - RNA, 19 nt, Artificial Sequence
  Description of Artificial Sequence: Synthetic oligonucleotide
  Sense strand starting at position 3467 of SEQ ID NO: 915176
gagacauuggcugaucuuc

SEQ ID NO: 1059811 - RNA, 19 nt, Artificial Sequence
  Description of Artificial Sequence: Synthetic oligonucleotide
  Antisense strand to SEQ ID NO: 1059810
gaagaucagccaaugucuc

SEQ ID NO: 1059812 - RNA, 19 nt, Artificial Sequence
  Description of Artificial Sequence: Synthetic oligonucleotide
  Sense strand starting at position 3667 of SEQ ID NO: 915176
agccgcuuugccuuaguca

SEQ ID NO: 1059813 - RNA, 19 nt, Artificial Sequence
  Description of Artificial Sequence: Synthetic oligonucleotide
  Antisense strand to SEQ ID NO: 1059812
ugacuaaggcaaagcggcu

SEQ ID NO: 1059814 - RNA, 19 nt, Artificial Sequence
  Description of Artificial Sequence: Synthetic oligonucleotide
  Sense strand starting at position 3879 of SEQ ID NO: 915176
uuuagauugcugcaaguag

SEQ ID NO: 1059815 - RNA, 19 nt, Artificial Sequence
  Description of Artificial Sequence: Synthetic oligonucleotide
  Antisense strand to SEQ ID NO: 1059814
cuacuugcagcaaucuaaa

SEQ ID NO: 1059816 - RNA, 19 nt, Artificial Sequence
  Description of Artificial Sequence: Synthetic oligonucleotide
  Sense strand starting at position 37 of SEQ ID NO: 915177
augugacaaguuugauaau

SEQ ID NO: 1059817 - RNA, 19 nt, Artificial Sequence
  Description of Artificial Sequence: Synthetic oligonucleotide
  Antisense strand to SEQ ID NO: 1059816
auuaucaaacuugucacau

SEQ ID NO: 1059818 - RNA, 19 nt, Artificial Sequence
  Description of Artificial Sequence: Synthetic oligonucleotide
  Sense strand starting at position 123 of SEQ ID NO: 915177
gugaaauguggcuauccau

SEQ ID NO: 1059819 - RNA, 19 nt, Artificial Sequence
  Description of Artificial Sequence: Synthetic oligonucleotide
  Antisense strand to SEQ ID NO: 1059818
auggauagccacauuucac

SEQ ID NO: 1059820 - RNA, 19 nt, Artificial Sequence
  Description of Artificial Sequence: Synthetic oligonucleotide
  Sense strand starting at position 161 of SEQ ID NO: 915177
uauauuaaagucuguggga

SEQ ID NO: 1059821 - RNA, 19 nt, Artificial Sequence
  Description of Artificial Sequence: Synthetic oligonucleotide
  Antisense strand to SEQ ID NO: 1059820
ucccacagacuuuaauaua

SEQ ID NO: 1059822 - RNA, 19 nt, Artificial Sequence
  Description of Artificial Sequence: Synthetic oligonucleotide
  Sense strand starting at position 163 of SEQ ID NO: 915177
uauuaaagucugugggaga

SEQ ID NO: 1059823 - RNA, 19 nt, Artificial Sequence
  Description of Artificial Sequence: Synthetic oligonucleotide
  Antisense strand to SEQ ID NO: 1059822
ucucccacagacuuuaaua

SEQ ID NO: 1059824 - RNA, 19 nt, Artificial Sequence
  Description of Artificial Sequence: Synthetic oligonucleotide
  Sense strand starting at position 333 of SEQ ID NO: 915177
uuauguuauggucaugaau

SEQ ID NO: 1059825 - RNA, 19 nt, Artificial Sequence
  Description of Artificial Sequence: Synthetic oligonucleotide
  Antisense strand to SEQ ID NO: 1059824
auucaugaccauaacauaa

SEQ ID NO: 1059826 - RNA, 19 nt, Artificial Sequence
  Description of Artificial Sequence: Synthetic oligonucleotide
  Sense strand starting at position 445 of SEQ ID NO: 915177
augucuuuggcauaugauu

SEQ ID NO: 1059827 - RNA, 19 nt, Artificial Sequence
  Description of Artificial Sequence: Synthetic oligonucleotide
  Antisense strand to SEQ ID NO: 1059826
aaucauaugccaaagacau

SEQ ID NO: 1059828 - RNA, 19 nt, Artificial Sequence
  Description of Artificial Sequence: Synthetic oligonucleotide
  Sense strand starting at position 503 of SEQ ID NO: 915177
ccgugaaauuugcuuugua

SEQ ID NO: 1059829 - RNA, 19 nt, Artificial Sequence
  Description of Artificial Sequence: Synthetic oligonucleotide
  Antisense strand to SEQ ID NO: 1059828
uacaaagcaaauuucacgg

SEQ ID NO: 1059830 - RNA, 19 nt, Artificial Sequence
  Description of Artificial Sequence: Synthetic oligonucleotide
  Sense strand starting at position 504 of SEQ ID NO: 915177
cgugaaauuugcuuuguaa

SEQ ID NO: 1059831 - RNA, 19 nt, Artificial Sequence
  Description of Artificial Sequence: Synthetic oligonucleotide
  Antisense strand to SEQ ID NO: 1059830
uuacaaagcaaauuucacg

SEQ ID NO: 1059832 - RNA, 19 nt, Artificial Sequence
  Description of Artificial Sequence: Synthetic oligonucleotide
  Sense strand starting at position 541 of SEQ ID NO: 915177
gcuccauagggccagacau

SEQ ID NO: 1059833 - RNA, 19 nt, Artificial Sequence
  Description of Artificial Sequence: Synthetic oligonucleotide
  Antisense strand to SEQ ID NO: 1059832
augucuggcccuauggagc

SEQ ID NO: 1059834 - RNA, 19 nt, Artificial Sequence
  Description of Artificial Sequence: Synthetic oligonucleotide
  Sense strand starting at position 590 of SEQ ID NO: 915177
augcaugaugcaugaauaa

SEQ ID NO: 1059835 - RNA, 19 nt, Artificial Sequence
  Description of Artificial Sequence: Synthetic oligonucleotide
  Antisense strand to SEQ ID NO: 1059834
uuauucaugcaucaugcau

SEQ ID NO: 1059836 - RNA, 19 nt, Artificial Sequence
  Description of Artificial Sequence: Synthetic oligonucleotide
  Sense strand starting at position 690 of SEQ ID NO: 915177
aguaguuuacaggguaaau

SEQ ID NO: 1059837 - RNA, 19 nt, Artificial Sequence
  Description of Artificial Sequence: Synthetic oligonucleotide
  Antisense strand to SEQ ID NO: 1059836
auuuacccuguaaacuacu

SEQ ID NO: 1059838 - RNA, 19 nt, Artificial Sequence
  Description of Artificial Sequence: Synthetic oligonucleotide
  Sense strand starting at position 703 of SEQ ID NO: 915177
guaaauuuccagugccaca

SEQ ID NO: 1059839 - RNA, 19 nt, Artificial Sequence
  Description of Artificial Sequence: Synthetic oligonucleotide
  Antisense strand to SEQ ID NO: 1059838
uguggcacuggaaauuuac

SEQ ID NO: 1059840 - RNA, 19 nt, Artificial Sequence
  Description of Artificial Sequence: Synthetic oligonucleotide
  Sense strand starting at position 834 of SEQ ID NO: 915177
aguucucucccaggauauc

SEQ ID NO: 1059841 - RNA, 19 nt, Artificial Sequence
  Description of Artificial Sequence: Synthetic oligonucleotide
  Antisense strand to SEQ ID NO: 1059840
gauauccugggagagaacu

SEQ ID NO: 1059842 - RNA, 19 nt, Artificial Sequence
  Description of Artificial Sequence: Synthetic oligonucleotide
  Sense strand starting at position 859 of SEQ ID NO: 915177
aggauaguuggucagucuu

SEQ ID NO: 1059843 - RNA, 19 nt, Artificial Sequence
  Description of Artificial Sequence: Synthetic oligonucleotide
  Antisense strand to SEQ ID NO: 1059842
aagacugaccaacuauccu

SEQ ID NO: 1059844 - RNA, 19 nt, Artificial Sequence
  Description of Artificial Sequence: Synthetic oligonucleotide
  Sense strand starting at position 958 of SEQ ID NO: 915177
gcaaguugacagcaauaag

SEQ ID NO: 1059845 - RNA, 19 nt, Artificial Sequence
  Description of Artificial Sequence: Synthetic oligonucleotide
  Antisense strand to SEQ ID NO: 1059844
cuuauugcugucaacuugc

SEQ ID NO: 1059846 - RNA, 19 nt, Artificial Sequence
  Description of Artificial Sequence: Synthetic oligonucleotide
  Sense strand starting at position 961 of SEQ ID NO: 915177
aguugacagcaauaaguua

SEQ ID NO: 1059847 - RNA, 19 nt, Artificial Sequence
  Description of Artificial Sequence: Synthetic oligonucleotide
  Antisense strand to SEQ ID NO: 1059846
uaacuuauugcugucaacu

SEQ ID NO: 1059848 - RNA, 19 nt, Artificial Sequence
  Description of Artificial Sequence: Synthetic oligonucleotide
  Sense strand starting at position 986 of SEQ ID NO: 915177
aggagauauuccuuaaggc

SEQ ID NO: 1059849 - RNA, 19 nt, Artificial Sequence
  Description of Artificial Sequence: Synthetic oligonucleotide
  Antisense strand to SEQ ID NO: 1059848
gccuuaaggaauaucuccu

SEQ ID NO: 1059850 - RNA, 19 nt, Artificial Sequence
  Description of Artificial Sequence: Synthetic oligonucleotide
  Sense strand starting at position 1005 of SEQ ID NO: 915177
aagaacauaucggucuuua

SEQ ID NO: 1059851 - RNA, 19 nt, Artificial Sequence
  Description of Artificial Sequence: Synthetic oligonucleotide
  Antisense strand to SEQ ID NO: 1059850
uaaagaccgauauguucuu

SEQ ID NO: 1059852 - RNA, 19 nt, Artificial Sequence
  Description of Artificial Sequence: Synthetic oligonucleotide
  Sense strand starting at position 1009 of SEQ ID NO: 915177
acauaucggucuuuauaga

SEQ ID NO: 1059853 - RNA, 19 nt, Artificial Sequence
  Description of Artificial Sequence: Synthetic oligonucleotide
  Antisense strand to SEQ ID NO: 1059852
ucuauaaagaccgauaugu

SEQ ID NO: 1059854 - RNA, 19 nt, Artificial Sequence
  Description of Artificial Sequence: Synthetic oligonucleotide
  Sense strand starting at position 1010 of SEQ ID NO: 915177
cauaucggucuuuauagaa

SEQ ID NO: 1059855 - RNA, 19 nt, Artificial Sequence
  Description of Artificial Sequence: Synthetic oligonucleotide
  Antisense strand to SEQ ID NO: 1059854
uucuauaaagaccgauaug

SEQ ID NO: 1059856 - RNA, 19 nt, Artificial Sequence
  Description of Artificial Sequence: Synthetic oligonucleotide
  Sense strand starting at position 1014 of SEQ ID NO: 915177
ucggucuuuauagaaggau

SEQ ID NO: 1059857 - RNA, 19 nt, Artificial Sequence
  Description of Artificial Sequence: Synthetic oligonucleotide
  Antisense strand to SEQ ID NO: 1059856
auccuucuauaaagaccga

SEQ ID NO: 1059858 - RNA, 19 nt, Artificial Sequence
  Description of Artificial Sequence: Synthetic oligonucleotide
  Sense strand starting at position 1017 of SEQ ID NO: 915177
gucuuuauagaaggaucaa

SEQ ID NO: 1059859 - RNA, 19 nt, Artificial Sequence
  Description of Artificial Sequence: Synthetic oligonucleotide
  Antisense strand to SEQ ID NO: 1059858
uugauccuucuauaaagac

SEQ ID NO: 1059860 - RNA, 19 nt, Artificial Sequence
  Description of Artificial Sequence: Synthetic oligonucleotide
  Sense strand starting at position 2005 of SEQ ID NO: 915177
uccaaaucacaguguagga

SEQ ID NO: 1059861 - RNA, 19 nt, Artificial Sequence
  Description of Artificial Sequence: Synthetic oligonucleotide
  Antisense strand to SEQ ID NO: 1059860
uccuacacugugauuugga

SEQ ID NO: 1059862 - RNA, 19 nt, Artificial Sequence
  Description of Artificial Sequence: Synthetic oligonucleotide
  Sense strand starting at position 2088 of SEQ ID NO: 915177
ucaguauaugcagagcaaa

SEQ ID NO: 1059863 - RNA, 19 nt, Artificial Sequence
  Description of Artificial Sequence: Synthetic oligonucleotide
  Antisense strand to SEQ ID NO: 1059862
uuugcucugcauauacuga

SEQ ID NO: 1059864 - RNA, 19 nt, Artificial Sequence
  Description of Artificial Sequence: Synthetic oligonucleotide
  Sense strand starting at position 2160 of SEQ ID NO: 915177
uugaauagaucagucucaa

SEQ ID NO: 1059865 - RNA, 19 nt, Artificial Sequence
  Description of Artificial Sequence: Synthetic oligonucleotide
  Antisense strand to SEQ ID NO: 1059864
uugagacugaucuauucaa

SEQ ID NO: 1059866 - RNA, 19 nt, Artificial Sequence
  Description of Artificial Sequence: Synthetic oligonucleotide
  Sense strand starting at position 2255 of SEQ ID NO: 915177
ugacauagagucugauauu

SEQ ID NO: 1059867 - RNA, 19 nt, Artificial Sequence
  Description of Artificial Sequence: Synthetic oligonucleotide
  Antisense strand to SEQ ID NO: 1059866
aauaucagacucuauguca

SEQ ID NO: 1059868 - RNA, 19 nt, Artificial Sequence
  Description of Artificial Sequence: Synthetic oligonucleotide
  Sense strand starting at position 2256 of SEQ ID NO: 915177
gacauagagucugauauuu

SEQ ID NO: 1059869 - RNA, 19 nt, Artificial Sequence
  Description of Artificial Sequence: Synthetic oligonucleotide
  Antisense strand to SEQ ID NO: 1059868
aaauaucagacucuauguc

SEQ ID NO: 1059870 - RNA, 19 nt, Artificial Sequence
  Description of Artificial Sequence: Synthetic oligonucleotide
  Sense strand starting at position 2492 of SEQ ID NO: 915177
ggcacaugccaagauuaag

SEQ ID NO: 1059871 - RNA, 19 nt, Artificial Sequence
  Description of Artificial Sequence: Synthetic oligonucleotide
  Antisense strand to SEQ ID NO: 1059870
cuuaaucuuggcaugugcc

SEQ ID NO: 1059872 - RNA, 19 nt, Artificial Sequence
  Description of Artificial Sequence: Synthetic oligonucleotide
  Sense strand starting at position 2531 of SEQ ID NO: 915177
acagaaagauaacaugaga

SEQ ID NO: 1059873 - RNA, 19 nt, Artificial Sequence
  Description of Artificial Sequence: Synthetic oligonucleotide
  Antisense strand to SEQ ID NO: 1059872
ucucauguuaucuuucugu

SEQ ID NO: 1059874 - RNA, 19 nt, Artificial Sequence
  Description of Artificial Sequence: Synthetic oligonucleotide
  Sense strand starting at position 2690 of SEQ ID NO: 915177
guacuuucucaagagcaac

SEQ ID NO: 1059875 - RNA, 19 nt, Artificial Sequence
  Description of Artificial Sequence: Synthetic oligonucleotide
  Antisense strand to SEQ ID NO: 1059874
guugcucuugagaaaguac

SEQ ID NO: 1059876 - RNA, 19 nt, Artificial Sequence
  Description of Artificial Sequence: Synthetic oligonucleotide
  Sense strand starting at position 2748 of SEQ ID NO: 915177
guaguuucuagugguauuu

SEQ ID NO: 1059877 - RNA, 19 nt, Artificial Sequence
  Description of Artificial Sequence: Synthetic oligonucleotide
  Antisense strand to SEQ ID NO: 1059876
aaauaccacuagaaacuac

SEQ ID NO: 1059878 - RNA, 19 nt, Artificial Sequence
  Description of Artificial Sequence: Synthetic oligonucleotide
  Sense strand starting at position 2809 of SEQ ID NO: 915177
aguauauacuggguuuaua

SEQ ID NO: 1059879 - RNA, 19 nt, Artificial Sequence
  Description of Artificial Sequence: Synthetic oligonucleotide
  Antisense strand to SEQ ID NO: 1059878
uauaaacccaguauauacu

SEQ ID NO: 1059880 - RNA, 19 nt, Artificial Sequence
  Description of Artificial Sequence: Synthetic oligonucleotide
  Sense strand starting at position 2871 of SEQ ID NO: 915177
cuagaagacuccuuugguu

SEQ ID NO: 1059881 - RNA, 19 nt, Artificial Sequence
  Description of Artificial Sequence: Synthetic oligonucleotide
  Antisense strand to SEQ ID NO: 1059880
aaccaaaggagucuucuag

SEQ ID NO: 1059882 - RNA, 19 nt, Artificial Sequence
  Description of Artificial Sequence: Synthetic oligonucleotide
  Sense strand starting at position 2873 of SEQ ID NO: 915177
agaagacuccuuugguuau

SEQ ID NO: 1059883 - RNA, 19 nt, Artificial Sequence
  Description of Artificial Sequence: Synthetic oligonucleotide
  Antisense strand to SEQ ID NO: 1059882
auaaccaaaggagucuucu

SEQ ID NO: 1059884 - RNA, 19 nt, Artificial Sequence
  Description of Artificial Sequence: Synthetic oligonucleotide
  Sense strand starting at position 2877 of SEQ ID NO: 915177
gacuccuuugguuauguau

SEQ ID NO: 1059885 - RNA, 19 nt, Artificial Sequence
  Description of Artificial Sequence: Synthetic oligonucleotide
  Antisense strand to SEQ ID NO: 1059884
auacauaaccaaaggaguc

SEQ ID NO: 1059886 - RNA, 19 nt, Artificial Sequence
  Description of Artificial Sequence: Synthetic oligonucleotide
  Sense strand starting at position 3081 of SEQ ID NO: 915177
ggcagagugguucaggaua

SEQ ID NO: 1059887 - RNA, 19 nt, Artificial Sequence
  Description of Artificial Sequence: Synthetic oligonucleotide
  Antisense strand to SEQ ID NO: 1059886
uauccugaaccacucugcc

SEQ ID NO: 1059888 - RNA, 19 nt, Artificial Sequence
  Description of Artificial Sequence: Synthetic oligonucleotide
  Sense strand starting at position 3148 of SEQ ID NO: 915177
uucugacaaguaugucaaa

SEQ ID NO: 1059889 - RNA, 19 nt, Artificial Sequence
  Description of Artificial Sequence: Synthetic oligonucleotide
  Antisense strand to SEQ ID NO: 1059888
uuugacauacuugucagaa

SEQ ID NO: 1059890 - RNA, 19 nt, Artificial Sequence
  Description of Artificial Sequence: Synthetic oligonucleotide
  Sense strand starting at position 3380 of SEQ ID NO: 915177
acaucuauuccaugggucu

SEQ ID NO: 1059891 - RNA, 19 nt, Artificial Sequence
  Description of Artificial Sequence: Synthetic oligonucleotide
  Antisense strand to SEQ ID NO: 1059890
agacccauggaauagaugu

SEQ ID NO: 1059892 - RNA, 19 nt, Artificial Sequence
  Description of Artificial Sequence: Synthetic oligonucleotide
  Sense strand starting at position 3931 of SEQ ID NO: 915177
ccaccaaauucugugggau

SEQ ID NO: 1059893 - RNA, 19 nt, Artificial Sequence
  Description of Artificial Sequence: Synthetic oligonucleotide
  Antisense strand to SEQ ID NO: 1059892
aucccacagaauuuggugg

SEQ ID NO: 1059894 - RNA, 19 nt, Artificial Sequence
  Description of Artificial Sequence: Synthetic oligonucleotide
  Sense strand starting at position 3932 of SEQ ID NO: 915177
caccaaauucugugggaug

SEQ ID NO: 1059895 - RNA, 19 nt, Artificial Sequence
  Description of Artificial Sequence: Synthetic oligonucleotide
  Antisense strand to SEQ ID NO: 1059894
caucccacagaauuuggug

SEQ ID NO: 1059896 - RNA, 19 nt, Artificial Sequence
  Description of Artificial Sequence: Synthetic oligonucleotide
  Sense strand starting at position 74 of SEQ ID NO: 915178
uggcuuuaccuagauaaca

SEQ ID NO: 1059897 - RNA, 19 nt, Artificial Sequence
  Description of Artificial Sequence: Synthetic oligonucleotide
  Antisense strand to SEQ ID NO: 1059896
uguuaucuagguaaagcca

SEQ ID NO: 1059898 - RNA, 19 nt, Artificial Sequence
  Description of Artificial Sequence: Synthetic oligonucleotide
  Sense strand starting at position 130 of SEQ ID NO: 915178
guaaauauacgguacuaua

SEQ ID NO: 1059899 - RNA, 19 nt, Artificial Sequence
  Description of Artificial Sequence: Synthetic oligonucleotide
  Antisense strand to SEQ ID NO: 1059898
uauaguaccguauauuuac

SEQ ID NO: 1059900 - RNA, 19 nt, Artificial Sequence
  Description of Artificial Sequence: Synthetic oligonucleotide
  Sense strand starting at position 166 of SEQ ID NO: 915178
ucauauaggugauccauua

SEQ ID NO: 1059901 - RNA, 19 nt, Artificial Sequence
  Description of Artificial Sequence: Synthetic oligonucleotide
  Antisense strand to SEQ ID NO: 1059900
uaauggaucaccuauauga

SEQ ID NO: 1059902 - RNA, 19 nt, Artificial Sequence
  Description of Artificial Sequence: Synthetic oligonucleotide
  Sense strand starting at position 440 of SEQ ID NO: 915178
aaaggaauuggccaugucu

SEQ ID NO: 1059903 - RNA, 19 nt, Artificial Sequence
  Description of Artificial Sequence: Synthetic oligonucleotide
  Antisense strand to SEQ ID NO: 1059902
agacauggccaauuccuuu

SEQ ID NO: 1059904 - RNA, 19 nt, Artificial Sequence
  Description of Artificial Sequence: Synthetic oligonucleotide
  Sense strand starting at position 442 of SEQ ID NO: 915178
aggaauuggccaugucuau

SEQ ID NO: 1059905 - RNA, 19 nt, Artificial Sequence
  Description of Artificial Sequence: Synthetic oligonucleotide
  Antisense strand to SEQ ID NO: 1059904
auagacauggccaauuccu

SEQ ID NO: 1059906 - RNA, 19 nt, Artificial Sequence
  Description of Artificial Sequence: Synthetic oligonucleotide
  Sense strand starting at position 515 of SEQ ID NO: 915178
aauggagcugucuaacugu

SEQ ID NO: 1059907 - RNA, 19 nt, Artificial Sequence
  Description of Artificial Sequence: Synthetic oligonucleotide
  Antisense strand to SEQ ID NO: 1059906
acaguuagacagcuccauu

SEQ ID NO: 1059908 - RNA, 19 nt, Artificial Sequence
  Description of Artificial Sequence: Synthetic oligonucleotide
  Sense strand starting at position 521 of SEQ ID NO: 915178
gcugucuaacuguagaaau

SEQ ID NO: 1059909 - RNA, 19 nt, Artificial Sequence
  Description of Artificial Sequence: Synthetic oligonucleotide
  Antisense strand to SEQ ID NO: 1059908
auuucuacaguuagacagc

SEQ ID NO: 1059910 - RNA, 19 nt, Artificial Sequence
  Description of Artificial Sequence: Synthetic oligonucleotide
  Sense strand starting at position 546 of SEQ ID NO: 915178
gggagauaguaggcuauaa

SEQ ID NO: 1059911 - RNA, 19 nt, Artificial Sequence
  Description of Artificial Sequence: Synthetic oligonucleotide
  Antisense strand to SEQ ID NO: 1059910
uuauagccuacuaucuccc

SEQ ID NO: 1059912 - RNA, 19 nt, Artificial Sequence
  Description of Artificial Sequence: Synthetic oligonucleotide
  Sense strand starting at position 557 of SEQ ID NO: 915178
ggcuauaaagaguggcaaa

SEQ ID NO: 1059913 - RNA, 19 nt, Artificial Sequence
  Description of Artificial Sequence: Synthetic oligonucleotide
  Antisense strand to SEQ ID NO: 1059912
uuugccacucuuuauagcc

SEQ ID NO: 1059914 - RNA, 19 nt, Artificial Sequence
  Description of Artificial Sequence: Synthetic oligonucleotide
  Sense strand starting at position 719 of SEQ ID NO: 915178
gggccaaucucagccaaua

SEQ ID NO: 1059915 - RNA, 19 nt, Artificial Sequence
  Description of Artificial Sequence: Synthetic oligonucleotide
  Antisense strand to SEQ ID NO: 1059914
uauuggcugagauuggccc

SEQ ID NO: 1059916 - RNA, 19 nt, Artificial Sequence
  Description of Artificial Sequence: Synthetic oligonucleotide
  Sense strand starting at position 779 of SEQ ID NO: 915178
agagguuugucuuccuuag

SEQ ID NO: 1059917 - RNA, 19 nt, Artificial Sequence
  Description of Artificial Sequence: Synthetic oligonucleotide
  Antisense strand to SEQ ID NO: 1059916
cuaaggaagacaaaccucu

SEQ ID NO: 1059918 - RNA, 19 nt, Artificial Sequence
  Description of Artificial Sequence: Synthetic oligonucleotide
  Sense strand starting at position 795 of SEQ ID NO: 915178
uagccaugugaugagucua

SEQ ID NO: 1059919 - RNA, 19 nt, Artificial Sequence
  Description of Artificial Sequence: Synthetic oligonucleotide
  Antisense strand to SEQ ID NO: 1059918
uagacucaucacauggcua

SEQ ID NO: 1059920 - RNA, 19 nt, Artificial Sequence
  Description of Artificial Sequence: Synthetic oligonucleotide
  Sense strand starting at position 870 of SEQ ID NO: 915178
uuugaccugacucguagau

SEQ ID NO: 1059921 - RNA, 19 nt, Artificial Sequence
  Description of Artificial Sequence: Synthetic oligonucleotide
  Antisense strand to SEQ ID NO: 1059920
aucuacgagucaggucaaa

SEQ ID NO: 1059922 - RNA, 19 nt, Artificial Sequence
  Description of Artificial Sequence: Synthetic oligonucleotide
  Sense strand starting at position 879 of SEQ ID NO: 915178
acucguagaucugugagga

SEQ ID NO: 1059923 - RNA, 19 nt, Artificial Sequence
  Description of Artificial Sequence: Synthetic oligonucleotide
  Antisense strand to SEQ ID NO: 1059922
uccucacagaucuacgagu

SEQ ID NO: 1059924 - RNA, 19 nt, Artificial Sequence
  Description of Artificial Sequence: Synthetic oligonucleotide
  Sense strand starting at position 880 of SEQ ID NO: 915178
cucguagaucugugaggaa

SEQ ID NO: 1059925 - RNA, 19 nt, Artificial Sequence
  Description of Artificial Sequence: Synthetic oligonucleotide
  Antisense strand to SEQ ID NO: 1059924
uuccucacagaucuacgag

SEQ ID NO: 1059926 - RNA, 19 nt, Artificial Sequence
  Description of Artificial Sequence: Synthetic oligonucleotide
  Sense strand starting at position 932 of SEQ ID NO: 915178
ugucaaagauacucugcaa

SEQ ID NO: 1059927 - RNA, 19 nt, Artificial Sequence
  Description of Artificial Sequence: Synthetic oligonucleotide
  Antisense strand to SEQ ID NO: 1059926
uugcagaguaucuuugaca

SEQ ID NO: 1059928 - RNA, 19 nt, Artificial Sequence
  Description of Artificial Sequence: Synthetic oligonucleotide
  Sense strand starting at position 1985 of SEQ ID NO: 915178
cuggaaaucuccuugucaa

SEQ ID NO: 1059929 - RNA, 19 nt, Artificial Sequence
  Description of Artificial Sequence: Synthetic oligonucleotide
  Antisense strand to SEQ ID NO: 1059928
uugacaaggagauuuccag

SEQ ID NO: 1059930 - RNA, 19 nt, Artificial Sequence
  Description of Artificial Sequence: Synthetic oligonucleotide
  Sense strand starting at position 1986 of SEQ ID NO: 915178
uggaaaucuccuugucaau

SEQ ID NO: 1059931 - RNA, 19 nt, Artificial Sequence
  Description of Artificial Sequence: Synthetic oligonucleotide
  Antisense strand to SEQ ID NO: 1059930
auugacaaggagauuucca

SEQ ID NO: 1059932 - RNA, 19 nt, Artificial Sequence
  Description of Artificial Sequence: Synthetic oligonucleotide
  Sense strand starting at position 2043 of SEQ ID NO: 915178
caguauauaugauuagagu

SEQ ID NO: 1059933 - RNA, 19 nt, Artificial Sequence
  Description of Artificial Sequence: Synthetic oligonucleotide
  Antisense strand to SEQ ID NO: 1059932
acucuaaucauauauacug

SEQ ID NO: 1059934 - RNA, 19 nt, Artificial Sequence
  Description of Artificial Sequence: Synthetic oligonucleotide
  Sense strand starting at position 2187 of SEQ ID NO: 915178
uuugaaucucauugaguag

SEQ ID NO: 1059935 - RNA, 19 nt, Artificial Sequence
  Description of Artificial Sequence: Synthetic oligonucleotide
  Antisense strand to SEQ ID NO: 1059934
cuacucaaugagauucaaa

SEQ ID NO: 1059936 - RNA, 19 nt, Artificial Sequence
  Description of Artificial Sequence: Synthetic oligonucleotide
  Sense strand starting at position 2190 of SEQ ID NO: 915178
gaaucucauugaguagaug

SEQ ID NO: 1059937 - RNA, 19 nt, Artificial Sequence
  Description of Artificial Sequence: Synthetic oligonucleotide
  Antisense strand to SEQ ID NO: 1059936
caucuacucaaugagauuc

SEQ ID NO: 1059938 - RNA, 19 nt, Artificial Sequence
  Description of Artificial Sequence: Synthetic oligonucleotide
  Sense strand starting at position 2290 of SEQ ID NO: 915178
uggugaugucaugaauacc

SEQ ID NO: 1059939 - RNA, 19 nt, Artificial Sequence
  Description of Artificial Sequence: Synthetic oligonucleotide
  Antisense strand to SEQ ID NO: 1059938
gguauucaugacaucacca

SEQ ID NO: 1059940 - RNA, 19 nt, Artificial Sequence
  Description of Artificial Sequence: Synthetic oligonucleotide
  Sense strand starting at position 2296 of SEQ ID NO: 915178
ugucaugaauaccuugaaa

SEQ ID NO: 1059941 - RNA, 19 nt, Artificial Sequence
  Description of Artificial Sequence: Synthetic oligonucleotide
  Antisense strand to SEQ ID NO: 1059940
uuucaagguauucaugaca

SEQ ID NO: 1059942 - RNA, 19 nt, Artificial Sequence
  Description of Artificial Sequence: Synthetic oligonucleotide
  Sense strand starting at position 2420 of SEQ ID NO: 915178
ccugaaaucugaguugagu

SEQ ID NO: 1059943 - RNA, 19 nt, Artificial Sequence
  Description of Artificial Sequence: Synthetic oligonucleotide
  Antisense strand to SEQ ID NO: 1059942
acucaacucagauuucagg

SEQ ID NO: 1059944 - RNA, 19 nt, Artificial Sequence
  Description of Artificial Sequence: Synthetic oligonucleotide
  Sense strand starting at position 2428 of SEQ ID NO: 915178
cugaguugaguccauguau

SEQ ID NO: 1059945 - RNA, 19 nt, Artificial Sequence
  Description of Artificial Sequence: Synthetic oligonucleotide
  Antisense strand to SEQ ID NO: 1059944
auacauggacucaacucag

SEQ ID NO: 1059946 - RNA, 19 nt, Artificial Sequence
  Description of Artificial Sequence: Synthetic oligonucleotide
  Sense strand starting at position 2672 of SEQ ID NO: 915178
agaccacugcucuacagua

SEQ ID NO: 1059947 - RNA, 19 nt, Artificial Sequence
  Description of Artificial Sequence: Synthetic oligonucleotide
  Antisense strand to SEQ ID NO: 1059946
uacuguagagcaguggucu

SEQ ID NO: 1059948 - RNA, 19 nt, Artificial Sequence
  Description of Artificial Sequence: Synthetic oligonucleotide
  Sense strand starting at position 2674 of SEQ ID NO: 915178
accacugcucuacaguaua

SEQ ID NO: 1059949 - RNA, 19 nt, Artificial Sequence
  Description of Artificial Sequence: Synthetic oligonucleotide
  Antisense strand to SEQ ID NO: 1059948
uauacuguagagcaguggu

SEQ ID NO: 1059950 - RNA, 19 nt, Artificial Sequence
  Description of Artificial Sequence: Synthetic oligonucleotide
  Sense strand starting at position 2775 of SEQ ID NO: 915178
uugguucuccacugaaacu

SEQ ID NO: 1059951 - RNA, 19 nt, Artificial Sequence
  Description of Artificial Sequence: Synthetic oligonucleotide
  Antisense strand to SEQ ID NO: 1059950
aguuucaguggagaaccaa

SEQ ID NO: 1059952 - RNA, 19 nt, Artificial Sequence
  Description of Artificial Sequence: Synthetic oligonucleotide
  Sense strand starting at position 3235 of SEQ ID NO: 915178
gucagacagccauaucuga

SEQ ID NO: 1059953 - RNA, 19 nt, Artificial Sequence
  Description of Artificial Sequence: Synthetic oligonucleotide
  Antisense strand to SEQ ID NO: 1059952
ucagauauggcugucugac

SEQ ID NO: 1059954 - RNA, 19 nt, Artificial Sequence
  Description of Artificial Sequence: Synthetic oligonucleotide
  Sense strand starting at position 3281 of SEQ ID NO: 915178
uuaaguaacuaggcuuauu

SEQ ID NO: 1059955 - RNA, 19 nt, Artificial Sequence
  Description of Artificial Sequence: Synthetic oligonucleotide
  Antisense strand to SEQ ID NO: 1059954
aauaagccuaguuacuuaa

SEQ ID NO: 1059956 - RNA, 19 nt, Artificial Sequence
  Description of Artificial Sequence: Synthetic oligonucleotide
  Sense strand starting at position 3308 of SEQ ID NO: 915178
cuagaugcccuauaugcaa

SEQ ID NO: 1059957 - RNA, 19 nt, Artificial Sequence
  Description of Artificial Sequence: Synthetic oligonucleotide
  Antisense strand to SEQ ID NO: 1059956
uugcauauagggcaucuag

SEQ ID NO: 1059958 - RNA, 19 nt, Artificial Sequence
  Description of Artificial Sequence: Synthetic oligonucleotide
  Sense strand starting at position 3394 of SEQ ID NO: 915178
uaaaguuauuggcugaaau

SEQ ID NO: 1059959 - RNA, 19 nt, Artificial Sequence
  Description of Artificial Sequence: Synthetic oligonucleotide
  Antisense strand to SEQ ID NO: 1059958
auuucagccaauaacuuua

SEQ ID NO: 1059960 - RNA, 19 nt, Artificial Sequence
  Description of Artificial Sequence: Synthetic oligonucleotide
  Sense strand starting at position 3395 of SEQ ID NO: 915178
aaaguuauuggcugaaauc

SEQ ID NO: 1059961 - RNA, 19 nt, Artificial Sequence
  Description of Artificial Sequence: Synthetic oligonucleotide
  Antisense strand to SEQ ID NO: 1059960
gauuucagccaauaacuuu

SEQ ID NO: 1059962 - RNA, 19 nt, Artificial Sequence
  Description of Artificial Sequence: Synthetic oligonucleotide
  Sense strand starting at position 3396 of SEQ ID NO: 915178
aaguuauuggcugaaauca

SEQ ID NO: 1059963 - RNA, 19 nt, Artificial Sequence
  Description of Artificial Sequence: Synthetic oligonucleotide
  Antisense strand to SEQ ID NO: 1059962
ugauuucagccaauaacuu

SEQ ID NO: 1059964 - RNA, 19 nt, Artificial Sequence
  Description of Artificial Sequence: Synthetic oligonucleotide
  Sense strand starting at position 3407 of SEQ ID NO: 915178
ugaaaucaugacugccaca

SEQ ID NO: 1059965 - RNA, 19 nt, Artificial Sequence
  Description of Artificial Sequence: Synthetic oligonucleotide
  Antisense strand to SEQ ID NO: 1059964
uguggcagucaugauuuca

SEQ ID NO: 1059966 - RNA, 19 nt, Artificial Sequence
  Description of Artificial Sequence: Synthetic oligonucleotide
  Sense strand starting at position 3496 of SEQ ID NO: 915178
agugcuauuucccuuuauc

SEQ ID NO: 1059967 - RNA, 19 nt, Artificial Sequence
  Description of Artificial Sequence: Synthetic oligonucleotide
  Antisense strand to SEQ ID NO: 1059966
gauaaagggaaauagcacu

SEQ ID NO: 1059968 - RNA, 19 nt, Artificial Sequence
  Description of Artificial Sequence: Synthetic oligonucleotide
  Sense strand starting at position 3527 of SEQ ID NO: 915178
ggagguuaagugugauuau

SEQ ID NO: 1059969 - RNA, 19 nt, Artificial Sequence
  Description of Artificial Sequence: Synthetic oligonucleotide
  Antisense strand to SEQ ID NO: 1059968
auaaucacacuuaaccucc

SEQ ID NO: 1059970 - RNA, 19 nt, Artificial Sequence
  Description of Artificial Sequence: Synthetic oligonucleotide
  Sense strand starting at position 3560 of SEQ ID NO: 915178
uguauaauuccuuagugug

SEQ ID NO: 1059971 - RNA, 19 nt, Artificial Sequence
  Description of Artificial Sequence: Synthetic oligonucleotide
  Antisense strand to SEQ ID NO: 1059970
cacacuaaggaauuauaca

SEQ ID NO: 1059972 - RNA, 19 nt, Artificial Sequence
  Description of Artificial Sequence: Synthetic oligonucleotide
  Sense strand starting at position 3644 of SEQ ID NO: 915178
auuaaucuaccgugacauu

SEQ ID NO: 1059973 - RNA, 19 nt, Artificial Sequence
  Description of Artificial Sequence: Synthetic oligonucleotide
  Antisense strand to SEQ ID NO: 1059972
aaugucacgguagauuaau

SEQ ID NO: 1059974 - RNA, 19 nt, Artificial Sequence
  Description of Artificial Sequence: Synthetic oligonucleotide
  Sense strand starting at position 3645 of SEQ ID NO: 915178
uuaaucuaccgugacauua

SEQ ID NO: 1059975 - RNA, 19 nt, Artificial Sequence
  Description of Artificial Sequence: Synthetic oligonucleotide
  Antisense strand to SEQ ID NO: 1059974
uaaugucacgguagauuaa

SEQ ID NO: 1059976 - RNA, 19 nt, Artificial Sequence
  Description of Artificial Sequence: Synthetic oligonucleotide
  Sense strand starting at position 26 of SEQ ID NO: 915179
cuguguugucaggauuaau

SEQ ID NO: 1059977 - RNA, 19 nt, Artificial Sequence
  Description of Artificial Sequence: Synthetic oligonucleotide
  Antisense strand to SEQ ID NO: 1059976
auuaauccugacaacacag

SEQ ID NO: 1059978 - RNA, 19 nt, Artificial Sequence
  Description of Artificial Sequence: Synthetic oligonucleotide
  Sense strand starting at position 143 of SEQ ID NO: 915179
ugggccuugggauggaaau

SEQ ID NO: 1059979 - RNA, 19 nt, Artificial Sequence
  Description of Artificial Sequence: Synthetic oligonucleotide
  Antisense strand to SEQ ID NO: 1059978
auuuccaucccaaggccca

SEQ ID NO: 1059980 - RNA, 19 nt, Artificial Sequence
  Description of Artificial Sequence: Synthetic oligonucleotide
  Sense strand starting at position 144 of SEQ ID NO: 915179
gggccuugggauggaaauu

SEQ ID NO: 1059981 - RNA, 19 nt, Artificial Sequence
  Description of Artificial Sequence: Synthetic oligonucleotide
  Antisense strand to SEQ ID NO: 1059980
aauuuccaucccaaggccc

SEQ ID NO: 1059982 - RNA, 19 nt, Artificial Sequence
  Description of Artificial Sequence: Synthetic oligonucleotide
  Sense strand starting at position 320 of SEQ ID NO: 915179
agauacaucuaugugcaaa

SEQ ID NO: 1059983 - RNA, 19 nt, Artificial Sequence
  Description of Artificial Sequence: Synthetic oligonucleotide
  Antisense strand to SEQ ID NO: 1059982
uuugcacauagauguaucu

SEQ ID NO: 1059984 - RNA, 19 nt, Artificial Sequence
  Description of Artificial Sequence: Synthetic oligonucleotide
  Sense strand starting at position 322 of SEQ ID NO: 915179
auacaucuaugugcaaaga

SEQ ID NO: 1059985 - RNA, 19 nt, Artificial Sequence
  Description of Artificial Sequence: Synthetic oligonucleotide
  Antisense strand to SEQ ID NO: 1059984
ucuuugcacauagauguau

SEQ ID NO: 1059986 - RNA, 19 nt, Artificial Sequence
  Description of Artificial Sequence: Synthetic oligonucleotide
  Sense strand starting at position 484 of SEQ ID NO: 915179
auaggugucuuacucagaa

SEQ ID NO: 1059987 - RNA, 19 nt, Artificial Sequence
  Description of Artificial Sequence: Synthetic oligonucleotide
  Antisense strand to SEQ ID NO: 1059986
uucugaguaagacaccuau

SEQ ID NO: 1059988 - RNA, 19 nt, Artificial Sequence
  Description of Artificial Sequence: Synthetic oligonucleotide
  Sense strand starting at position 581 of SEQ ID NO: 915179
gaaggauuccuaugucaga

SEQ ID NO: 1059989 - RNA, 19 nt, Artificial Sequence
  Description of Artificial Sequence: Synthetic oligonucleotide
  Antisense strand to SEQ ID NO: 1059988
ucugacauaggaauccuuc

SEQ ID NO: 1059990 - RNA, 19 nt, Artificial Sequence
  Description of Artificial Sequence: Synthetic oligonucleotide
  Sense strand starting at position 582 of SEQ ID NO: 915179
aaggauuccuaugucagau

SEQ ID NO: 1059991 - RNA, 19 nt, Artificial Sequence
  Description of Artificial Sequence: Synthetic oligonucleotide
  Antisense strand to SEQ ID NO: 1059990
aucugacauaggaauccuu

SEQ ID NO: 1059992 - RNA, 19 nt, Artificial Sequence
  Description of Artificial Sequence: Synthetic oligonucleotide
  Sense strand starting at position 728 of SEQ ID NO: 915179
ggugaagucaccuggagac

SEQ ID NO: 1059993 - RNA, 19 nt, Artificial Sequence
  Description of Artificial Sequence: Synthetic oligonucleotide
  Antisense strand to SEQ ID NO: 1059992
gucuccaggugacuucacc

SEQ ID NO: 1059994 - RNA, 19 nt, Artificial Sequence
  Description of Artificial Sequence: Synthetic oligonucleotide
  Sense strand starting at position 751 of SEQ ID NO: 915179
gggucaagucucugucaag

SEQ ID NO: 1059995 - RNA, 19 nt, Artificial Sequence
  Description of Artificial Sequence: Synthetic oligonucleotide
  Antisense strand to SEQ ID NO: 1059994
cuugacagagacuugaccc

SEQ ID NO: 1059996 - RNA, 19 nt, Artificial Sequence
  Description of Artificial Sequence: Synthetic oligonucleotide
  Sense strand starting at position 2024 of SEQ ID NO: 915179
gcagaauuacaaugcucac

SEQ ID NO: 1059997 - RNA, 19 nt, Artificial Sequence
  Description of Artificial Sequence: Synthetic oligonucleotide
  Antisense strand to SEQ ID NO: 1059996
gugagcauuguaauucugc

SEQ ID NO: 1059998 - RNA, 19 nt, Artificial Sequence
  Description of Artificial Sequence: Synthetic oligonucleotide
  Sense strand starting at position 2064 of SEQ ID NO: 915179
gugagaagauuaguucuua

SEQ ID NO: 1059999 - RNA, 19 nt, Artificial Sequence
  Description of Artificial Sequence: Synthetic oligonucleotide
  Antisense strand to SEQ ID NO: 1059998
uaagaacuaaucuucucac

SEQ ID NO: 1060000 - RNA, 19 nt, Artificial Sequence
  Description of Artificial Sequence: Synthetic oligonucleotide
  Sense strand starting at position 2065 of SEQ ID NO: 915179
ugagaagauuaguucuuag

SEQ ID NO: 1060001 - RNA, 19 nt, Artificial Sequence
  Description of Artificial Sequence: Synthetic oligonucleotide
  Antisense strand to SEQ ID NO: 1060000
cuaagaacuaaucuucuca

SEQ ID NO: 1060002 - RNA, 19 nt, Artificial Sequence
  Description of Artificial Sequence: Synthetic oligonucleotide
  Sense strand starting at position 2068 of SEQ ID NO: 915179
gaagauuaguucuuagacc

SEQ ID NO: 1060003 - RNA, 19 nt, Artificial Sequence
  Description of Artificial Sequence: Synthetic oligonucleotide
  Antisense strand to SEQ ID NO: 1060002
ggucuaagaacuaaucuuc

SEQ ID NO: 1060004 - RNA, 19 nt, Artificial Sequence
  Description of Artificial Sequence: Synthetic oligonucleotide
  Sense strand starting at position 2391 of SEQ ID NO: 915179
gaaagaguuucugcccuga

SEQ ID NO: 1060005 - RNA, 19 nt, Artificial Sequence
  Description of Artificial Sequence: Synthetic oligonucleotide
  Antisense strand to SEQ ID NO: 1060004
ucagggcagaaacucuuuc

SEQ ID NO: 1060006 - RNA, 19 nt, Artificial Sequence
  Description of Artificial Sequence: Synthetic oligonucleotide
  Sense strand starting at position 2393 of SEQ ID NO: 915179
aagaguuucugcccugaaa

SEQ ID NO: 1060007 - RNA, 19 nt, Artificial Sequence
  Description of Artificial Sequence: Synthetic oligonucleotide
  Antisense strand to SEQ ID NO: 1060006
uuucagggcagaaacucuu

SEQ ID NO: 1060008 - RNA, 19 nt, Artificial Sequence
  Description of Artificial Sequence: Synthetic oligonucleotide
  Sense strand starting at position 2395 of SEQ ID NO: 915179
gaguuucugcccugaaaug

SEQ ID NO: 1060009 - RNA, 19 nt, Artificial Sequence
  Description of Artificial Sequence: Synthetic oligonucleotide
  Antisense strand to SEQ ID NO: 1060008
cauuucagggcagaaacuc

SEQ ID NO: 1060010 - RNA, 19 nt, Artificial Sequence
  Description of Artificial Sequence: Synthetic oligonucleotide
  Sense strand starting at position 2396 of SEQ ID NO: 915179
aguuucugcccugaaaugu

SEQ ID NO: 1060011 - RNA, 19 nt, Artificial Sequence
  Description of Artificial Sequence: Synthetic oligonucleotide
  Antisense strand to SEQ ID NO: 1060010
acauuucagggcagaaacu

SEQ ID NO: 1060012 - RNA, 19 nt, Artificial Sequence
  Description of Artificial Sequence: Synthetic oligonucleotide
  Sense strand starting at position 2411 of SEQ ID NO: 915179
augucaaucuuggucauau

SEQ ID NO: 1060013 - RNA, 19 nt, Artificial Sequence
  Description of Artificial Sequence: Synthetic oligonucleotide
  Antisense strand to SEQ ID NO: 1060012
auaugaccaagauugacau

SEQ ID NO: 1060014 - RNA, 19 nt, Artificial Sequence
  Description of Artificial Sequence: Synthetic oligonucleotide
  Sense strand starting at position 2412 of SEQ ID NO: 915179
ugucaaucuuggucauaug

SEQ ID NO: 1060015 - RNA, 19 nt, Artificial Sequence
  Description of Artificial Sequence: Synthetic oligonucleotide
  Antisense strand to SEQ ID NO: 1060014
cauaugaccaagauugaca

SEQ ID NO: 1060016 - RNA, 19 nt, Artificial Sequence
  Description of Artificial Sequence: Synthetic oligonucleotide
  Sense strand starting at position 2413 of SEQ ID NO: 915179
gucaaucuuggucauauga

SEQ ID NO: 1060017 - RNA, 19 nt, Artificial Sequence
  Description of Artificial Sequence: Synthetic oligonucleotide
  Antisense strand to SEQ ID NO: 1060016
ucauaugaccaagauugac

SEQ ID NO: 1060018 - RNA, 19 nt, Artificial Sequence
  Description of Artificial Sequence: Synthetic oligonucleotide
  Sense strand starting at position 2732 of SEQ ID NO: 915179
cugggauccuuaucauucu

SEQ ID NO: 1060019 - RNA, 19 nt, Artificial Sequence
  Description of Artificial Sequence: Synthetic oligonucleotide
  Antisense strand to SEQ ID NO: 1060018
agaaugauaaggaucccag

SEQ ID NO: 1060020 - RNA, 19 nt, Artificial Sequence
  Description of Artificial Sequence: Synthetic oligonucleotide
  Sense strand starting at position 2767 of SEQ ID NO: 915179
uguugucauuucccuugaa

SEQ ID NO: 1060021 - RNA, 19 nt, Artificial Sequence
  Description of Artificial Sequence: Synthetic oligonucleotide
  Antisense strand to SEQ ID NO: 1060020
uucaagggaaaugacaaca

SEQ ID NO: 1060022 - RNA, 19 nt, Artificial Sequence
  Description of Artificial Sequence: Synthetic oligonucleotide
  Sense strand starting at position 2901 of SEQ ID NO: 915179
uugaaacagugcucaguaa

SEQ ID NO: 1060023 - RNA, 19 nt, Artificial Sequence
  Description of Artificial Sequence: Synthetic oligonucleotide
  Antisense strand to SEQ ID NO: 1060022
uuacugagcacuguuucaa

SEQ ID NO: 1060024 - RNA, 19 nt, Artificial Sequence
  Description of Artificial Sequence: Synthetic oligonucleotide
  Sense strand starting at position 2902 of SEQ ID NO: 915179
ugaaacagugcucaguaaa

SEQ ID NO: 1060025 - RNA, 19 nt, Artificial Sequence
  Description of Artificial Sequence: Synthetic oligonucleotide
  Antisense strand to SEQ ID NO: 1060024
uuuacugagcacuguuuca

SEQ ID NO: 1060026 - RNA, 19 nt, Artificial Sequence
  Description of Artificial Sequence: Synthetic oligonucleotide
  Sense strand starting at position 2913 of SEQ ID NO: 915179
ucaguaaacguggacacuu

SEQ ID NO: 1060027 - RNA, 19 nt, Artificial Sequence
  Description of Artificial Sequence: Synthetic oligonucleotide
  Antisense strand to SEQ ID NO: 1060026
aaguguccacguuuacuga

SEQ ID NO: 1060028 - RNA, 19 nt, Artificial Sequence
  Description of Artificial Sequence: Synthetic oligonucleotide
  Sense strand starting at position 2996 of SEQ ID NO: 915179
aaacuugagcuucgagaac

SEQ ID NO: 1060029 - RNA, 19 nt, Artificial Sequence
  Description of Artificial Sequence: Synthetic oligonucleotide
  Antisense strand to SEQ ID NO: 1060028
guucucgaagcucaaguuu

SEQ ID NO: 1060030 - RNA, 19 nt, Artificial Sequence
  Description of Artificial Sequence: Synthetic oligonucleotide
  Sense strand starting at position 3005 of SEQ ID NO: 915179
cuucgagaacucugguuug

SEQ ID NO: 1060031 - RNA, 19 nt, Artificial Sequence
  Description of Artificial Sequence: Synthetic oligonucleotide
  Antisense strand to SEQ ID NO: 1060030
caaaccagaguucucgaag

SEQ ID NO: 1060032 - RNA, 19 nt, Artificial Sequence
  Description of Artificial Sequence: Synthetic oligonucleotide
  Sense strand starting at position 3165 of SEQ ID NO: 915179
aucuaaagacuuggguuua

SEQ ID NO: 1060033 - RNA, 19 nt, Artificial Sequence
  Description of Artificial Sequence: Synthetic oligonucleotide
  Antisense strand to SEQ ID NO: 1060032
uaaacccaagucuuuagau

SEQ ID NO: 1060034 - RNA, 19 nt, Artificial Sequence
  Description of Artificial Sequence: Synthetic oligonucleotide
  Sense strand starting at position 3181 of SEQ ID NO: 915179
uuaaguaaugauugagcca

SEQ ID NO: 1060035 - RNA, 19 nt, Artificial Sequence
  Description of Artificial Sequence: Synthetic oligonucleotide
  Antisense strand to SEQ ID NO: 1060034
uggcucaaucauuacuuaa

SEQ ID NO: 1060036 - RNA, 19 nt, Artificial Sequence
  Description of Artificial Sequence: Synthetic oligonucleotide
  Sense strand starting at position 3184 of SEQ ID NO: 915179
aguaaugauugagccauca

SEQ ID NO: 1060037 - RNA, 19 nt, Artificial Sequence
  Description of Artificial Sequence: Synthetic oligonucleotide
  Antisense strand to SEQ ID NO: 1060036
ugauggcucaaucauuacu

SEQ ID NO: 1060038 - RNA, 19 nt, Artificial Sequence
  Description of Artificial Sequence: Synthetic oligonucleotide
  Sense strand starting at position 3252 of SEQ ID NO: 915179
guuccucaccuauagauga

SEQ ID NO: 1060039 - RNA, 19 nt, Artificial Sequence
  Description of Artificial Sequence: Synthetic oligonucleotide
  Antisense strand to SEQ ID NO: 1060038
ucaucuauaggugaggaac

SEQ ID NO: 1060040 - RNA, 19 nt, Artificial Sequence
  Description of Artificial Sequence: Synthetic oligonucleotide
  Sense strand starting at position 3260 of SEQ ID NO: 915179
ccuauagaugaaggcauaa

SEQ ID NO: 1060041 - RNA, 19 nt, Artificial Sequence
  Description of Artificial Sequence: Synthetic oligonucleotide
  Antisense strand to SEQ ID NO: 1060040
uuaugccuucaucuauagg

SEQ ID NO: 1060042 - RNA, 19 nt, Artificial Sequence
  Description of Artificial Sequence: Synthetic oligonucleotide
  Sense strand starting at position 3331 of SEQ ID NO: 915179
ugagaagagucccuguaaa

SEQ ID NO: 1060043 - RNA, 19 nt, Artificial Sequence
  Description of Artificial Sequence: Synthetic oligonucleotide
  Antisense strand to SEQ ID NO: 1060042
uuuacagggacucuucuca

SEQ ID NO: 1060044 - RNA, 19 nt, Artificial Sequence
  Description of Artificial Sequence: Synthetic oligonucleotide
  Sense strand starting at position 3341 of SEQ ID NO: 915179
cccuguaaacuguaaagca

SEQ ID NO: 1060045 - RNA, 19 nt, Artificial Sequence
  Description of Artificial Sequence: Synthetic oligonucleotide
  Antisense strand to SEQ ID NO: 1060044
ugcuuuacaguuuacaggg

SEQ ID NO: 1060046 - RNA, 19 nt, Artificial Sequence
  Description of Artificial Sequence: Synthetic oligonucleotide
  Sense strand starting at position 3507 of SEQ ID NO: 915179
acaacaauguuuguugaaa

SEQ ID NO: 1060047 - RNA, 19 nt, Artificial Sequence
  Description of Artificial Sequence: Synthetic oligonucleotide
  Antisense strand to SEQ ID NO: 1060046
uuucaacaaacauuguugu

SEQ ID NO: 1060048 - RNA, 19 nt, Artificial Sequence
  Description of Artificial Sequence: Synthetic oligonucleotide
  Sense strand starting at position 3888 of SEQ ID NO: 915179
cccaucucaguauguauua

SEQ ID NO: 1060049 - RNA, 19 nt, Artificial Sequence
  Description of Artificial Sequence: Synthetic oligonucleotide
  Antisense strand to SEQ ID NO: 1060048
uaauacauacugagauggg

SEQ ID NO: 1060050 - RNA, 19 nt, Artificial Sequence
  Description of Artificial Sequence: Synthetic oligonucleotide
  Sense strand starting at position 3889 of SEQ ID NO: 915179
ccaucucaguauguauuau

SEQ ID NO: 1060051 - RNA, 19 nt, Artificial Sequence
  Description of Artificial Sequence: Synthetic oligonucleotide
  Antisense strand to SEQ ID NO: 1060050
auaauacauacugagaugg

SEQ ID NO: 1060052 - RNA, 19 nt, Artificial Sequence
  Description of Artificial Sequence: Synthetic oligonucleotide
  Sense strand starting at position 3916 of SEQ ID NO: 915179
auccuauagcuaggucaga

SEQ ID NO: 1060053 - RNA, 19 nt, Artificial Sequence
  Description of Artificial Sequence: Synthetic oligonucleotide
  Antisense strand to SEQ ID NO: 1060052
ucugaccuagcuauaggau

SEQ ID NO: 1060054 - RNA, 19 nt, Artificial Sequence
  Description of Artificial Sequence: Synthetic oligonucleotide
  Sense strand starting at position 3917 of SEQ ID NO: 915179
uccuauagcuaggucagaa

SEQ ID NO: 1060055 - RNA, 19 nt, Artificial Sequence
  Description of Artificial Sequence: Synthetic oligonucleotide
  Antisense strand to SEQ ID NO: 1060054
uucugaccuagcuauagga

SEQ ID NO: 1060056 - RNA, 19 nt, Artificial Sequence
  Description of Artificial Sequence: Synthetic oligonucleotide
  Sense strand starting at position 770 of SEQ ID NO: 915180
uccagauauccagguacau

SEQ ID NO: 1060057 - RNA, 19 nt, Artificial Sequence
  Description of Artificial Sequence: Synthetic oligonucleotide
  Antisense strand to SEQ ID NO: 1060056
auguaccuggauaucugga

SEQ ID NO: 1060058 - RNA, 19 nt, Artificial Sequence
  Description of Artificial Sequence: Synthetic oligonucleotide
  Sense strand starting at position 782 of SEQ ID NO: 915180
gguacaucccaauaagcca

SEQ ID NO: 1060059 - RNA, 19 nt, Artificial Sequence
  Description of Artificial Sequence: Synthetic oligonucleotide
  Antisense strand to SEQ ID NO: 1060058
uggcuuauugggauguacc

SEQ ID NO: 1060060 - RNA, 19 nt, Artificial Sequence
  Description of Artificial Sequence: Synthetic oligonucleotide
  Sense strand starting at position 873 of SEQ ID NO: 915180
ucauguaaucuacaccagu

SEQ ID NO: 1060061 - RNA, 19 nt, Artificial Sequence
  Description of Artificial Sequence: Synthetic oligonucleotide
  Antisense strand to SEQ ID NO: 1060060
acugguguagauuacauga

SEQ ID NO: 1060062 - RNA, 19 nt, Artificial Sequence
  Description of Artificial Sequence: Synthetic oligonucleotide
  Sense strand starting at position 916 of SEQ ID NO: 915180
agaagaagccuccgaagga

SEQ ID NO: 1060063 - RNA, 19 nt, Artificial Sequence
  Description of Artificial Sequence: Synthetic oligonucleotide
  Antisense strand to SEQ ID NO: 1060062
uccuucggaggcuucuucu

SEQ ID NO: 1060064 - RNA, 19 nt, Artificial Sequence
  Description of Artificial Sequence: Synthetic oligonucleotide
  Sense strand starting at position 1388 of SEQ ID NO: 915180
gaagauaaguguucccaac

SEQ ID NO: 1060065 - RNA, 19 nt, Artificial Sequence
  Description of Artificial Sequence: Synthetic oligonucleotide
  Antisense strand to SEQ ID NO: 1060064
guugggaacacuuaucuuc

SEQ ID NO: 1060066 - RNA, 19 nt, Artificial Sequence
  Description of Artificial Sequence: Synthetic oligonucleotide
  Sense strand starting at position 1390 of SEQ ID NO: 915180
agauaaguguucccaacaa

SEQ ID NO: 1060067 - RNA, 19 nt, Artificial Sequence
  Description of Artificial Sequence: Synthetic oligonucleotide
  Antisense strand to SEQ ID NO: 1060066
uuguugggaacacuuaucu

SEQ ID NO: 1060068 - RNA, 19 nt, Artificial Sequence
  Description of Artificial Sequence: Synthetic oligonucleotide
  Sense strand starting at position 1711 of SEQ ID NO: 915180
gguacauagauuggugcaa

SEQ ID NO: 1060069 - RNA, 19 nt, Artificial Sequence
  Description of Artificial Sequence: Synthetic oligonucleotide
  Antisense strand to SEQ ID NO: 1060068
uugcaccaaucuauguacc

SEQ ID NO: 1060070 - RNA, 19 nt, Artificial Sequence
  Description of Artificial Sequence: Synthetic oligonucleotide
  Sense strand starting at position 1759 of SEQ ID NO: 915180
ugguaacauugcccacuaa

SEQ ID NO: 1060071 - RNA, 19 nt, Artificial Sequence
  Description of Artificial Sequence: Synthetic oligonucleotide
  Antisense strand to SEQ ID NO: 1060070
uuagugggcaauguuacca

SEQ ID NO: 1060072 - RNA, 19 nt, Artificial Sequence
  Description of Artificial Sequence: Synthetic oligonucleotide
  Sense strand starting at position 1760 of SEQ ID NO: 915180
gguaacauugcccacuaaa

SEQ ID NO: 1060073 - RNA, 19 nt, Artificial Sequence
  Description of Artificial Sequence: Synthetic oligonucleotide
  Antisense strand to SEQ ID NO: 1060072
uuuagugggcaauguuacc

SEQ ID NO: 1060074 - RNA, 19 nt, Artificial Sequence
  Description of Artificial Sequence: Synthetic oligonucleotide
  Sense strand starting at position 2063 of SEQ ID NO: 915180
aucuccuuugguggagaua

SEQ ID NO: 1060075 - RNA, 19 nt, Artificial Sequence
  Description of Artificial Sequence: Synthetic oligonucleotide
  Antisense strand to SEQ ID NO: 1060074
uaucuccaccaaaggagau

SEQ ID NO: 1060076 - RNA, 19 nt, Artificial Sequence
  Description of Artificial Sequence: Synthetic oligonucleotide
  Sense strand starting at position 2248 of SEQ ID NO: 915180
ugguauuacugaccacugu

SEQ ID NO: 1060077 - RNA, 19 nt, Artificial Sequence
  Description of Artificial Sequence: Synthetic oligonucleotide
  Antisense strand to SEQ ID NO: 1060076
acaguggucaguaauacca

SEQ ID NO: 1060078 - RNA, 19 nt, Artificial Sequence
  Description of Artificial Sequence: Synthetic oligonucleotide
  Sense strand starting at position 2252 of SEQ ID NO: 915180
auuacugaccacugugaau

SEQ ID NO: 1060079 - RNA, 19 nt, Artificial Sequence
  Description of Artificial Sequence: Synthetic oligonucleotide
  Antisense strand to SEQ ID NO: 1060078
auucacaguggucaguaau

SEQ ID NO: 1060080 - RNA, 19 nt, Artificial Sequence
  Description of Artificial Sequence: Synthetic oligonucleotide
  Sense strand starting at position 2285 of SEQ ID NO: 915180
ugaaauuagucuuccucag

SEQ ID NO: 1060081 - RNA, 19 nt, Artificial Sequence
  Description of Artificial Sequence: Synthetic oligonucleotide
  Antisense strand to SEQ ID NO: 1060080
cugaggaagacuaauuuca

SEQ ID NO: 1060082 - RNA, 19 nt, Artificial Sequence
  Description of Artificial Sequence: Synthetic oligonucleotide
  Sense strand starting at position 2367 of SEQ ID NO: 915180
cucauuaugucauugauuc

SEQ ID NO: 1060083 - RNA, 19 nt, Artificial Sequence
  Description of Artificial Sequence: Synthetic oligonucleotide
  Antisense strand to SEQ ID NO: 1060082
gaaucaaugacauaaugag

SEQ ID NO: 1060084 - RNA, 19 nt, Artificial Sequence
  Description of Artificial Sequence: Synthetic oligonucleotide
  Sense strand starting at position 2377 of SEQ ID NO: 915180
cauugauuccagggaucca

SEQ ID NO: 1060085 - RNA, 19 nt, Artificial Sequence
  Description of Artificial Sequence: Synthetic oligonucleotide
  Antisense strand to SEQ ID NO: 1060084
uggaucccuggaaucaaug

SEQ ID NO: 1060086 - RNA, 19 nt, Artificial Sequence
  Description of Artificial Sequence: Synthetic oligonucleotide
  Sense strand starting at position 2494 of SEQ ID NO: 915180
augucuguuuacccaaaua

SEQ ID NO: 1060087 - RNA, 19 nt, Artificial Sequence
  Description of Artificial Sequence: Synthetic oligonucleotide
  Antisense strand to SEQ ID NO: 1060086
uauuuggguaaacagacau

SEQ ID NO: 1060088 - RNA, 19 nt, Artificial Sequence
  Description of Artificial Sequence: Synthetic oligonucleotide
  Sense strand starting at position 2687 of SEQ ID NO: 915180
cuuggaaccugucuuuacu

SEQ ID NO: 1060089 - RNA, 19 nt, Artificial Sequence
  Description of Artificial Sequence: Synthetic oligonucleotide
  Antisense strand to SEQ ID NO: 1060088
aguaaagacagguuccaag

SEQ ID NO: 1060090 - RNA, 19 nt, Artificial Sequence
  Description of Artificial Sequence: Synthetic oligonucleotide
  Sense strand starting at position 2690 of SEQ ID NO: 915180
ggaaccugucuuuacucau

SEQ ID NO: 1060091 - RNA, 19 nt, Artificial Sequence
  Description of Artificial Sequence: Synthetic oligonucleotide
  Antisense strand to SEQ ID NO: 1060090
augaguaaagacagguucc

SEQ ID NO: 1060092 - RNA, 19 nt, Artificial Sequence
  Description of Artificial Sequence: Synthetic oligonucleotide
  Sense strand starting at position 2740 of SEQ ID NO: 915180
ucauguugacuuuauguua

SEQ ID NO: 1060093 - RNA, 19 nt, Artificial Sequence
  Description of Artificial Sequence: Synthetic oligonucleotide
  Antisense strand to SEQ ID NO: 1060092
uaacauaaagucaacauga

SEQ ID NO: 1060094 - RNA, 19 nt, Artificial Sequence
  Description of Artificial Sequence: Synthetic oligonucleotide
  Sense strand starting at position 2988 of SEQ ID NO: 915180
auacuuugagacuggcaua

SEQ ID NO: 1060095 - RNA, 19 nt, Artificial Sequence
  Description of Artificial Sequence: Synthetic oligonucleotide
  Antisense strand to SEQ ID NO: 1060094
uaugccagucucaaaguau

SEQ ID NO: 1060096 - RNA, 19 nt, Artificial Sequence
  Description of Artificial Sequence: Synthetic oligonucleotide
  Sense strand starting at position 3043 of SEQ ID NO: 915180
ugucuuacaguugauauau

SEQ ID NO: 1060097 - RNA, 19 nt, Artificial Sequence
  Description of Artificial Sequence: Synthetic oligonucleotide
  Antisense strand to SEQ ID NO: 1060096
auauaucaacuguaagaca

SEQ ID NO: 1060098 - RNA, 19 nt, Artificial Sequence
  Description of Artificial Sequence: Synthetic oligonucleotide
  Sense strand starting at position 3209 of SEQ ID NO: 915180
ggacucauugccuauguca

SEQ ID NO: 1060099 - RNA, 19 nt, Artificial Sequence
  Description of Artificial Sequence: Synthetic oligonucleotide
  Antisense strand to SEQ ID NO: 1060098
ugacauaggcaaugagucc

SEQ ID NO: 1060100 - RNA, 19 nt, Artificial Sequence
  Description of Artificial Sequence: Synthetic oligonucleotide
  Sense strand starting at position 3532 of SEQ ID NO: 915180
aucuuacagguuuauugua

SEQ ID NO: 1060101 - RNA, 19 nt, Artificial Sequence
  Description of Artificial Sequence: Synthetic oligonucleotide
  Antisense strand to SEQ ID NO: 1060100
uacaauaaaccuguaagau

SEQ ID NO: 1060102 - RNA, 19 nt, Artificial Sequence
  Description of Artificial Sequence: Synthetic oligonucleotide
  Sense strand starting at position 3570 of SEQ ID NO: 915180
auguaaagucuugauaucu

SEQ ID NO: 1060103 - RNA, 19 nt, Artificial Sequence
  Description of Artificial Sequence: Synthetic oligonucleotide
  Antisense strand to SEQ ID NO: 1060102
agauaucaagacuuuacau

SEQ ID NO: 1060104 - RNA, 19 nt, Artificial Sequence
  Description of Artificial Sequence: Synthetic oligonucleotide
  Sense strand starting at position 3578 of SEQ ID NO: 915180
ucuugauaucuagauuagu

SEQ ID NO: 1060105 - RNA, 19 nt, Artificial Sequence
  Description of Artificial Sequence: Synthetic oligonucleotide
  Antisense strand to SEQ ID NO: 1060104
acuaaucuagauaucaaga

SEQ ID NO: 1060106 - RNA, 19 nt, Artificial Sequence
  Description of Artificial Sequence: Synthetic oligonucleotide
  Sense strand starting at position 3583 of SEQ ID NO: 915180
auaucuagauuagucuaca

SEQ ID NO: 1060107 - RNA, 19 nt, Artificial Sequence
  Description of Artificial Sequence: Synthetic oligonucleotide
  Antisense strand to SEQ ID NO: 1060106
uguagacuaaucuagauau

SEQ ID NO: 1060108 - RNA, 19 nt, Artificial Sequence
  Description of Artificial Sequence: Synthetic oligonucleotide
  Sense strand starting at position 3636 of SEQ ID NO: 915180
gaagaugacugagaauuag

SEQ ID NO: 1060109 - RNA, 19 nt, Artificial Sequence
  Description of Artificial Sequence: Synthetic oligonucleotide
  Antisense strand to SEQ ID NO: 1060108
cuaauucucagucaucuuc

SEQ ID NO: 1060110 - RNA, 19 nt, Artificial Sequence
  Description of Artificial Sequence: Synthetic oligonucleotide
  Sense strand starting at position 3675 of SEQ ID NO: 915180
cuucuuugucuccaugacu

SEQ ID NO: 1060111 - RNA, 19 nt, Artificial Sequence
  Description of Artificial Sequence: Synthetic oligonucleotide
  Antisense strand to SEQ ID NO: 1060110
agucauggagacaaagaag

SEQ ID NO: 1060112 - RNA, 19 nt, Artificial Sequence
  Description of Artificial Sequence: Synthetic oligonucleotide
  Sense strand starting at position 3715 of SEQ ID NO: 915180
uugauauguuuaccucuca

SEQ ID NO: 1060113 - RNA, 19 nt, Artificial Sequence
  Description of Artificial Sequence: Synthetic oligonucleotide
  Antisense strand to SEQ ID NO: 1060112
ugagagguaaacauaucaa

SEQ ID NO: 1060114 - RNA, 19 nt, Artificial Sequence
  Description of Artificial Sequence: Synthetic oligonucleotide
  Sense strand starting at position 3716 of SEQ ID NO: 915180
ugauauguuuaccucucau

SEQ ID NO: 1060115 - RNA, 19 nt, Artificial Sequence
  Description of Artificial Sequence: Synthetic oligonucleotide
  Antisense strand to SEQ ID NO: 1060114
augagagguaaacauauca

SEQ ID NO: 1060116 - RNA, 19 nt, Artificial Sequence
  Description of Artificial Sequence: Synthetic oligonucleotide
  Sense strand starting at position 3722 of SEQ ID NO: 915180
guuuaccucucaucaugau

SEQ ID NO: 1060117 - RNA, 19 nt, Artificial Sequence
  Description of Artificial Sequence: Synthetic oligonucleotide
  Antisense strand to SEQ ID NO: 1060116
aucaugaugagagguaaac

SEQ ID NO: 1060118 - RNA, 19 nt, Artificial Sequence
  Description of Artificial Sequence: Synthetic oligonucleotide
  Sense strand starting at position 3763 of SEQ ID NO: 915180
cuuugacaaccgcauguua

SEQ ID NO: 1060119 - RNA, 19 nt, Artificial Sequence
  Description of Artificial Sequence: Synthetic oligonucleotide
  Antisense strand to SEQ ID NO: 1060118
uaacaugcgguugucaaag

SEQ ID NO: 1060120 - RNA, 19 nt, Artificial Sequence
  Description of Artificial Sequence: Synthetic oligonucleotide
  Sense strand starting at position 3774 of SEQ ID NO: 915180
gcauguuaacaugaaguau

SEQ ID NO: 1060121 - RNA, 19 nt, Artificial Sequence
  Description of Artificial Sequence: Synthetic oligonucleotide
  Antisense strand to SEQ ID NO: 1060120
auacuucauguuaacaugc

SEQ ID NO: 1060122 - RNA, 19 nt, Artificial Sequence
  Description of Artificial Sequence: Synthetic oligonucleotide
  Sense strand starting at position 3793 of SEQ ID NO: 915180
caacuuuguccaugggauu

SEQ ID NO: 1060123 - RNA, 19 nt, Artificial Sequence
  Description of Artificial Sequence: Synthetic oligonucleotide
  Antisense strand to SEQ ID NO: 1060122
aaucccauggacaaaguug

SEQ ID NO: 1060124 - RNA, 19 nt, Artificial Sequence
  Description of Artificial Sequence: Synthetic oligonucleotide
  Sense strand starting at position 3842 of SEQ ID NO: 915180
ugaaacuggauauguguau

SEQ ID NO: 1060125 - RNA, 19 nt, Artificial Sequence
  Description of Artificial Sequence: Synthetic oligonucleotide
  Antisense strand to SEQ ID NO: 1060124
auacacauauccaguuuca

SEQ ID NO: 1060126 - RNA, 19 nt, Artificial Sequence
  Description of Artificial Sequence: Synthetic oligonucleotide
  Sense strand starting at position 3888 of SEQ ID NO: 915180
cguagucugaaauaacugu

SEQ ID NO: 1060127 - RNA, 19 nt, Artificial Sequence
  Description of Artificial Sequence: Synthetic oligonucleotide
  Antisense strand to SEQ ID NO: 1060126
acaguuauuucagacuacg

SEQ ID NO: 1060128 - RNA, 19 nt, Artificial Sequence
  Description of Artificial Sequence: Synthetic oligonucleotide
  Sense strand starting at position 3956 of SEQ ID NO: 915180
agucaagaaugacuuaguu

SEQ ID NO: 1060129 - RNA, 19 nt, Artificial Sequence
  Description of Artificial Sequence: Synthetic oligonucleotide
  Antisense strand to SEQ ID NO: 1060128
aacuaagucauucuugacu

SEQ ID NO: 1060130 - RNA, 19 nt, Artificial Sequence
  Description of Artificial Sequence: Synthetic oligonucleotide
  Sense strand starting at position 3964 of SEQ ID NO: 915180
augacuuaguucuugugga

SEQ ID NO: 1060131 - RNA, 19 nt, Artificial Sequence
  Description of Artificial Sequence: Synthetic oligonucleotide
  Antisense strand to SEQ ID NO: 1060130
uccacaagaacuaagucau

SEQ ID NO: 1060132 - RNA, 19 nt, Artificial Sequence
  Description of Artificial Sequence: Synthetic oligonucleotide
  Sense strand starting at position 3969 of SEQ ID NO: 915180
uuaguucuuguggauaaug

SEQ ID NO: 1060133 - RNA, 19 nt, Artificial Sequence
  Description of Artificial Sequence: Synthetic oligonucleotide
  Antisense strand to SEQ ID NO: 1060132
cauuauccacaagaacuaa

SEQ ID NO: 1060134 - RNA, 19 nt, Artificial Sequence
  Description of Artificial Sequence: Synthetic oligonucleotide
  Sense strand starting at position 3971 of SEQ ID NO: 915180
aguucuuguggauaaugca

SEQ ID NO: 1060135 - RNA, 19 nt, Artificial Sequence
  Description of Artificial Sequence: Synthetic oligonucleotide
  Antisense strand to SEQ ID NO: 1060134
ugcauuauccacaagaacu

SEQ ID NO: 1060136 - RNA, 19 nt, Artificial Sequence
  Description of Artificial Sequence: Synthetic oligonucleotide
  Sense strand starting at position 62 of SEQ ID NO: 915181
uugggaggacuaugucagu

SEQ ID NO: 1060137 - RNA, 19 nt, Artificial Sequence
  Description of Artificial Sequence: Synthetic oligonucleotide
  Antisense strand to SEQ ID NO: 1060136
acugacauaguccucccaa

SEQ ID NO: 1060138 - RNA, 19 nt, Artificial Sequence
  Description of Artificial Sequence: Synthetic oligonucleotide
  Sense strand starting at position 68 of SEQ ID NO: 915181
ggacuaugucaguaauccu

SEQ ID NO: 1060139 - RNA, 19 nt, Artificial Sequence
  Description of Artificial Sequence: Synthetic oligonucleotide
  Antisense strand to SEQ ID NO: 1060138
aggauuacugacauagucc

SEQ ID NO: 1060140 - RNA, 19 nt, Artificial Sequence
  Description of Artificial Sequence: Synthetic oligonucleotide
  Sense strand starting at position 86 of SEQ ID NO: 915181
ugucaauaguaacuaaaug

SEQ ID NO: 1060141 - RNA, 19 nt, Artificial Sequence
  Description of Artificial Sequence: Synthetic oligonucleotide
  Antisense strand to SEQ ID NO: 1060140
cauuuaguuacuauugaca

SEQ ID NO: 1060142 - RNA, 19 nt, Artificial Sequence
  Description of Artificial Sequence: Synthetic oligonucleotide
  Sense strand starting at position 298 of SEQ ID NO: 915181
uccacagaguccucauaug

SEQ ID NO: 1060143 - RNA, 19 nt, Artificial Sequence
  Description of Artificial Sequence: Synthetic oligonucleotide
  Antisense strand to SEQ ID NO: 1060142
cauaugaggacucugugga

SEQ ID NO: 1060144 - RNA, 19 nt, Artificial Sequence
  Description of Artificial Sequence: Synthetic oligonucleotide
  Sense strand starting at position 316 of SEQ ID NO: 915181
gcaucaagccugcagagaa

SEQ ID NO: 1060145 - RNA, 19 nt, Artificial Sequence
  Description of Artificial Sequence: Synthetic oligonucleotide
  Antisense strand to SEQ ID NO: 1060144
uucucugcaggcuugaugc

SEQ ID NO: 1060146 - RNA, 19 nt, Artificial Sequence
  Description of Artificial Sequence: Synthetic oligonucleotide
  Sense strand starting at position 359 of SEQ ID NO: 915181
ugguaaccuugucucauuu

SEQ ID NO: 1060147 - RNA, 19 nt, Artificial Sequence
  Description of Artificial Sequence: Synthetic oligonucleotide
  Antisense strand to SEQ ID NO: 1060146
aaaugagacaagguuacca

SEQ ID NO: 1060148 - RNA, 19 nt, Artificial Sequence
  Description of Artificial Sequence: Synthetic oligonucleotide
  Sense strand starting at position 452 of SEQ ID NO: 915181
acaagugagucuucuagaa

SEQ ID NO: 1060149 - RNA, 19 nt, Artificial Sequence
  Description of Artificial Sequence: Synthetic oligonucleotide
  Antisense strand to SEQ ID NO: 1060148
uucuagaagacucacuugu

SEQ ID NO: 1060150 - RNA, 19 nt, Artificial Sequence
  Description of Artificial Sequence: Synthetic oligonucleotide
  Sense strand starting at position 456 of SEQ ID NO: 915181
gugagucuucuagaacaca

SEQ ID NO: 1060151 - RNA, 19 nt, Artificial Sequence
  Description of Artificial Sequence: Synthetic oligonucleotide
  Antisense strand to SEQ ID NO: 1060150
uguguucuagaagacucac

SEQ ID NO: 1060152 - RNA, 19 nt, Artificial Sequence
  Description of Artificial Sequence: Synthetic oligonucleotide
  Sense strand starting at position 808 of SEQ ID NO: 915181
gucguuaucacgguugguu

SEQ ID NO: 1060153 - RNA, 19 nt, Artificial Sequence
  Description of Artificial Sequence: Synthetic oligonucleotide
  Antisense strand to SEQ ID NO: 1060152
aaccaaccgugauaacgac

SEQ ID NO: 1060154 - RNA, 19 nt, Artificial Sequence
  Description of Artificial Sequence: Synthetic oligonucleotide
  Sense strand starting at position 809 of SEQ ID NO: 915181
ucguuaucacgguugguuu

SEQ ID NO: 1060155 - RNA, 19 nt, Artificial Sequence
  Description of Artificial Sequence: Synthetic oligonucleotide
  Antisense strand to SEQ ID NO: 1060154
aaaccaaccgugauaacga

SEQ ID NO: 1060156 - RNA, 19 nt, Artificial Sequence
  Description of Artificial Sequence: Synthetic oligonucleotide
  Sense strand starting at position 842 of SEQ ID NO: 915181
ucaaauauccuuuaguugu

SEQ ID NO: 1060157 - RNA, 19 nt, Artificial Sequence
  Description of Artificial Sequence: Synthetic oligonucleotide
  Antisense strand to SEQ ID NO: 1060156
acaacuaaaggauauuuga

SEQ ID NO: 1060158 - RNA, 19 nt, Artificial Sequence
  Description of Artificial Sequence: Synthetic oligonucleotide
  Sense strand starting at position 884 of SEQ ID NO: 915181
aggacuuagaguuguauac

SEQ ID NO: 1060159 - RNA, 19 nt, Artificial Sequence
  Description of Artificial Sequence: Synthetic oligonucleotide
  Antisense strand to SEQ ID NO: 1060158
guauacaacucuaaguccu

SEQ ID NO: 1060160 - RNA, 19 nt, Artificial Sequence
  Description of Artificial Sequence: Synthetic oligonucleotide
  Sense strand starting at position 904 of SEQ ID NO: 915181
uucuuagaauuccuuugga

SEQ ID NO: 1060161 - RNA, 19 nt, Artificial Sequence
  Description of Artificial Sequence: Synthetic oligonucleotide
  Antisense strand to SEQ ID NO: 1060160
uccaaaggaauucuaagaa

SEQ ID NO: 1060162 - RNA, 19 nt, Artificial Sequence
  Description of Artificial Sequence: Synthetic oligonucleotide
  Sense strand starting at position 907 of SEQ ID NO: 915181
uuagaauuccuuuggaacu

SEQ ID NO: 1060163 - RNA, 19 nt, Artificial Sequence
  Description of Artificial Sequence: Synthetic oligonucleotide
  Antisense strand to SEQ ID NO: 1060162
aguuccaaaggaauucuaa

SEQ ID NO: 1060164 - RNA, 19 nt, Artificial Sequence
  Description of Artificial Sequence: Synthetic oligonucleotide
  Sense strand starting at position 2098 of SEQ ID NO: 915181
auaauagggucacugacua

SEQ ID NO: 1060165 - RNA, 19 nt, Artificial Sequence
  Description of Artificial Sequence: Synthetic oligonucleotide
  Antisense strand to SEQ ID NO: 1060164
uagucagugacccuauuau

SEQ ID NO: 1060166 - RNA, 19 nt, Artificial Sequence
  Description of Artificial Sequence: Synthetic oligonucleotide
  Sense strand starting at position 2105 of SEQ ID NO: 915181
ggucacugacuagauguua

SEQ ID NO: 1060167 - RNA, 19 nt, Artificial Sequence
  Description of Artificial Sequence: Synthetic oligonucleotide
  Antisense strand to SEQ ID NO: 1060166
uaacaucuagucagugacc

SEQ ID NO: 1060168 - RNA, 19 nt, Artificial Sequence
  Description of Artificial Sequence: Synthetic oligonucleotide
  Sense strand starting at position 2121 of SEQ ID NO: 915181
uuagauaagucaucuuuag

SEQ ID NO: 1060169 - RNA, 19 nt, Artificial Sequence
  Description of Artificial Sequence: Synthetic oligonucleotide
  Antisense strand to SEQ ID NO: 1060168
cuaaagaugacuuaucuaa

SEQ ID NO: 1060170 - RNA, 19 nt, Artificial Sequence
  Description of Artificial Sequence: Synthetic oligonucleotide
  Sense strand starting at position 2244 of SEQ ID NO: 915181
augaccuucgaggagugau

SEQ ID NO: 1060171 - RNA, 19 nt, Artificial Sequence
  Description of Artificial Sequence: Synthetic oligonucleotide
  Antisense strand to SEQ ID NO: 1060170
aucacuccucgaaggucau

SEQ ID NO: 1060172 - RNA, 19 nt, Artificial Sequence
  Description of Artificial Sequence: Synthetic oligonucleotide
  Sense strand starting at position 2261 of SEQ ID NO: 915181
auauucuugcaucagugaa

SEQ ID NO: 1060173 - RNA, 19 nt, Artificial Sequence
  Description of Artificial Sequence: Synthetic oligonucleotide
  Antisense strand to SEQ ID NO: 1060172
uucacugaugcaagaauau

SEQ ID NO: 1060174 - RNA, 19 nt, Artificial Sequence
  Description of Artificial Sequence: Synthetic oligonucleotide
  Sense strand starting at position 2393 of SEQ ID NO: 915181
aggagaugcacugaagugu

SEQ ID NO: 1060175 - RNA, 19 nt, Artificial Sequence
  Description of Artificial Sequence: Synthetic oligonucleotide
  Antisense strand to SEQ ID NO: 1060174
acacuucagugcaucuccu

SEQ ID NO: 1060176 - RNA, 19 nt, Artificial Sequence
  Description of Artificial Sequence: Synthetic oligonucleotide
  Sense strand starting at position 2431 of SEQ ID NO: 915181
gggacuaucuaggcucuau

SEQ ID NO: 1060177 - RNA, 19 nt, Artificial Sequence
  Description of Artificial Sequence: Synthetic oligonucleotide
  Antisense strand to SEQ ID NO: 1060176
auagagccuagauaguccc

SEQ ID NO: 1060178 - RNA, 19 nt, Artificial Sequence
  Description of Artificial Sequence: Synthetic oligonucleotide
  Sense strand starting at position 2435 of SEQ ID NO: 915181
cuaucuaggcucuauggua

SEQ ID NO: 1060179 - RNA, 19 nt, Artificial Sequence
  Description of Artificial Sequence: Synthetic oligonucleotide
  Antisense strand to SEQ ID NO: 1060178
uaccauagagccuagauag

SEQ ID NO: 1060180 - RNA, 19 nt, Artificial Sequence
  Description of Artificial Sequence: Synthetic oligonucleotide
  Sense strand starting at position 2504 of SEQ ID NO: 915181
gucuaauuugcaggccaaa

SEQ ID NO: 1060181 - RNA, 19 nt, Artificial Sequence
  Description of Artificial Sequence: Synthetic oligonucleotide
  Antisense strand to SEQ ID NO: 1060180
uuuggccugcaaauuagac

SEQ ID NO: 1060182 - RNA, 19 nt, Artificial Sequence
  Description of Artificial Sequence: Synthetic oligonucleotide
  Sense strand starting at position 2615 of SEQ ID NO: 915181
ucaguuuaugcguauuuga

SEQ ID NO: 1060183 - RNA, 19 nt, Artificial Sequence
  Description of Artificial Sequence: Synthetic oligonucleotide
  Antisense strand to SEQ ID NO: 1060182
ucaaauacgcauaaacuga

SEQ ID NO: 1060184 - RNA, 19 nt, Artificial Sequence
  Description of Artificial Sequence: Synthetic oligonucleotide
  Sense strand starting at position 2618 of SEQ ID NO: 915181
guuuaugcguauuugauac

SEQ ID NO: 1060185 - RNA, 19 nt, Artificial Sequence
  Description of Artificial Sequence: Synthetic oligonucleotide
  Antisense strand to SEQ ID NO: 1060184
guaucaaauacgcauaaac

SEQ ID NO: 1060186 - RNA, 19 nt, Artificial Sequence
  Description of Artificial Sequence: Synthetic oligonucleotide
  Sense strand starting at position 2710 of SEQ ID NO: 915181
ggguuaucagcagggagga

SEQ ID NO: 1060187 - RNA, 19 nt, Artificial Sequence
  Description of Artificial Sequence: Synthetic oligonucleotide
  Antisense strand to SEQ ID NO: 1060186
uccucccugcugauaaccc

SEQ ID NO: 1060188 - RNA, 19 nt, Artificial Sequence
  Description of Artificial Sequence: Synthetic oligonucleotide
  Sense strand starting at position 2762 of SEQ ID NO: 915181
aagacaaauguuuggccau

SEQ ID NO: 1060189 - RNA, 19 nt, Artificial Sequence
  Description of Artificial Sequence: Synthetic oligonucleotide
  Antisense strand to SEQ ID NO: 1060188
auggccaaacauuugucuu

SEQ ID NO: 1060190 - RNA, 19 nt, Artificial Sequence
  Description of Artificial Sequence: Synthetic oligonucleotide
  Sense strand starting at position 2764 of SEQ ID NO: 915181
gacaaauguuuggccauga

SEQ ID NO: 1060191 - RNA, 19 nt, Artificial Sequence
  Description of Artificial Sequence: Synthetic oligonucleotide
  Antisense strand to SEQ ID NO: 1060190
ucauggccaaacauuuguc

SEQ ID NO: 1060192 - RNA, 19 nt, Artificial Sequence
  Description of Artificial Sequence: Synthetic oligonucleotide
  Sense strand starting at position 2765 of SEQ ID NO: 915181
acaaauguuuggccaugaa

SEQ ID NO: 1060193 - RNA, 19 nt, Artificial Sequence
  Description of Artificial Sequence: Synthetic oligonucleotide
  Antisense strand to SEQ ID NO: 1060192
uucauggccaaacauuugu

SEQ ID NO: 1060194 - RNA, 19 nt, Artificial Sequence
  Description of Artificial Sequence: Synthetic oligonucleotide
  Sense strand starting at position 2768 of SEQ ID NO: 915181
aauguuuggccaugaaaca

SEQ ID NO: 1060195 - RNA, 19 nt, Artificial Sequence
  Description of Artificial Sequence: Synthetic oligonucleotide
  Antisense strand to SEQ ID NO: 1060194
uguuucauggccaaacauu

SEQ ID NO: 1060196 - RNA, 19 nt, Artificial Sequence
  Description of Artificial Sequence: Synthetic oligonucleotide
  Sense strand starting at position 2978 of SEQ ID NO: 915181
ccuaguuagguugauuaca

SEQ ID NO: 1060197 - RNA, 19 nt, Artificial Sequence
  Description of Artificial Sequence: Synthetic oligonucleotide
  Antisense strand to SEQ ID NO: 1060196
uguaaucaaccuaacuagg

SEQ ID NO: 1060198 - RNA, 19 nt, Artificial Sequence
  Description of Artificial Sequence: Synthetic oligonucleotide
  Sense strand starting at position 2980 of SEQ ID NO: 915181
uaguuagguugauuacaga

SEQ ID NO: 1060199 - RNA, 19 nt, Artificial Sequence
  Description of Artificial Sequence: Synthetic oligonucleotide
  Antisense strand to SEQ ID NO: 1060198
ucuguaaucaaccuaacua

SEQ ID NO: 1060200 - RNA, 19 nt, Artificial Sequence
  Description of Artificial Sequence: Synthetic oligonucleotide
  Sense strand starting at position 2994 of SEQ ID NO: 915181
acagaauagucagcaaucu

SEQ ID NO: 1060201 - RNA, 19 nt, Artificial Sequence
  Description of Artificial Sequence: Synthetic oligonucleotide
  Antisense strand to SEQ ID NO: 1060200
agauugcugacuauucugu

SEQ ID NO: 1060202 - RNA, 19 nt, Artificial Sequence
  Description of Artificial Sequence: Synthetic oligonucleotide
  Sense strand starting at position 3072 of SEQ ID NO: 915181
gcuuuaucccauuagugaa

SEQ ID NO: 1060203 - RNA, 19 nt, Artificial Sequence
  Description of Artificial Sequence: Synthetic oligonucleotide
  Antisense strand to SEQ ID NO: 1060202
uucacuaaugggauaaagc

SEQ ID NO: 1060204 - RNA, 19 nt, Artificial Sequence
  Description of Artificial Sequence: Synthetic oligonucleotide
  Sense strand starting at position 3123 of SEQ ID NO: 915181
agccauggccuagagaagu

SEQ ID NO: 1060205 - RNA, 19 nt, Artificial Sequence
  Description of Artificial Sequence: Synthetic oligonucleotide
  Antisense strand to SEQ ID NO: 1060204
acuucucuaggccauggcu

SEQ ID NO: 1060206 - RNA, 19 nt, Artificial Sequence
  Description of Artificial Sequence: Synthetic oligonucleotide
  Sense strand starting at position 3194 of SEQ ID NO: 915181
cuuuauucuguugagacua

SEQ ID NO: 1060207 - RNA, 19 nt, Artificial Sequence
  Description of Artificial Sequence: Synthetic oligonucleotide
  Antisense strand to SEQ ID NO: 1060206
uagucucaacagaauaaag

SEQ ID NO: 1060208 - RNA, 19 nt, Artificial Sequence
  Description of Artificial Sequence: Synthetic oligonucleotide
  Sense strand starting at position 3374 of SEQ ID NO: 915181
agacauaauguuggcaaua

SEQ ID NO: 1060209 - RNA, 19 nt, Artificial Sequence
  Description of Artificial Sequence: Synthetic oligonucleotide
  Antisense strand to SEQ ID NO: 1060208
uauugccaacauuaugucu

SEQ ID NO: 1060210 - RNA, 19 nt, Artificial Sequence
  Description of Artificial Sequence: Synthetic oligonucleotide
  Sense strand starting at position 3464 of SEQ ID NO: 915181
cugugaagucaucagguag

SEQ ID NO: 1060211 - RNA, 19 nt, Artificial Sequence
  Description of Artificial Sequence: Synthetic oligonucleotide
  Antisense strand to SEQ ID NO: 1060210
cuaccugaugacuucacag

SEQ ID NO: 1060212 - RNA, 19 nt, Artificial Sequence
  Description of Artificial Sequence: Synthetic oligonucleotide
  Sense strand starting at position 3842 of SEQ ID NO: 915181
ggcuaaguugugcugcuua

SEQ ID NO: 1060213 - RNA, 19 nt, Artificial Sequence
  Description of Artificial Sequence: Synthetic oligonucleotide
  Antisense strand to SEQ ID NO: 1060212
uaagcagcacaacuuagcc

SEQ ID NO: 1060214 - RNA, 19 nt, Artificial Sequence
  Description of Artificial Sequence: Synthetic oligonucleotide
  Sense strand starting at position 3844 of SEQ ID NO: 915181
cuaaguugugcugcuuacu

SEQ ID NO: 1060215 - RNA, 19 nt, Artificial Sequence
  Description of Artificial Sequence: Synthetic oligonucleotide
  Antisense strand to SEQ ID NO: 1060214
aguaagcagcacaacuuag

SEQ ID NO: 1060216 - RNA, 19 nt, Artificial Sequence
  Description of Artificial Sequence: Synthetic oligonucleotide
  Sense strand starting at position 139 of SEQ ID NO: 915182
agaguaugugcucaagaca

SEQ ID NO: 1060217 - RNA, 19 nt, Artificial Sequence
  Description of Artificial Sequence: Synthetic oligonucleotide
  Antisense strand to SEQ ID NO: 1060216
ugucuugagcacauacucu

SEQ ID NO: 1060218 - RNA, 19 nt, Artificial Sequence
  Description of Artificial Sequence: Synthetic oligonucleotide
  Sense strand starting at position 174 of SEQ ID NO: 915182
aauguugaagcauaguaca

SEQ ID NO: 1060219 - RNA, 19 nt, Artificial Sequence
  Description of Artificial Sequence: Synthetic oligonucleotide
  Antisense strand to SEQ ID NO: 1060218
uguacuaugcuucaacauu

SEQ ID NO: 1060220 - RNA, 19 nt, Artificial Sequence
  Description of Artificial Sequence: Synthetic oligonucleotide
  Sense strand starting at position 565 of SEQ ID NO: 915182
guugcuacuggauagauau

SEQ ID NO: 1060221 - RNA, 19 nt, Artificial Sequence
  Description of Artificial Sequence: Synthetic oligonucleotide
  Antisense strand to SEQ ID NO: 1060220
auaucuauccaguagcaac

SEQ ID NO: 1060222 - RNA, 19 nt, Artificial Sequence
  Description of Artificial Sequence: Synthetic oligonucleotide
  Sense strand starting at position 752 of SEQ ID NO: 915182
cugcaaauuuguguagacu

SEQ ID NO: 1060223 - RNA, 19 nt, Artificial Sequence
  Description of Artificial Sequence: Synthetic oligonucleotide
  Antisense strand to SEQ ID NO: 1060222
agucuacacaaauuugcag

SEQ ID NO: 1060224 - RNA, 19 nt, Artificial Sequence
  Description of Artificial Sequence: Synthetic oligonucleotide
  Sense strand starting at position 758 of SEQ ID NO: 915182
auuuguguagacugucauu

SEQ ID NO: 1060225 - RNA, 19 nt, Artificial Sequence
  Description of Artificial Sequence: Synthetic oligonucleotide
  Antisense strand to SEQ ID NO: 1060224
aaugacagucuacacaaau

SEQ ID NO: 1060226 - RNA, 19 nt, Artificial Sequence
  Description of Artificial Sequence: Synthetic oligonucleotide
  Sense strand starting at position 768 of SEQ ID NO: 915182
acugucauuuaggagagaa

SEQ ID NO: 1060227 - RNA, 19 nt, Artificial Sequence
  Description of Artificial Sequence: Synthetic oligonucleotide
  Antisense strand to SEQ ID NO: 1060226
uucucuccuaaaugacagu

SEQ ID NO: 1060228 - RNA, 19 nt, Artificial Sequence
  Description of Artificial Sequence: Synthetic oligonucleotide
  Sense strand starting at position 783 of SEQ ID NO: 915182
agaagaugaugucugugaa

SEQ ID NO: 1060229 - RNA, 19 nt, Artificial Sequence
  Description of Artificial Sequence: Synthetic oligonucleotide
  Antisense strand to SEQ ID NO: 1060228
uucacagacaucaucuucu

SEQ ID NO: 1060230 - RNA, 19 nt, Artificial Sequence
  Description of Artificial Sequence: Synthetic oligonucleotide
  Sense strand starting at position 784 of SEQ ID NO: 915182
gaagaugaugucugugaag

SEQ ID NO: 1060231 - RNA, 19 nt, Artificial Sequence
  Description of Artificial Sequence: Synthetic oligonucleotide
  Antisense strand to SEQ ID NO: 1060230
cuucacagacaucaucuuc

SEQ ID NO: 1060232 - RNA, 19 nt, Artificial Sequence
  Description of Artificial Sequence: Synthetic oligonucleotide
  Sense strand starting at position 786 of SEQ ID NO: 915182
agaugaugucugugaagau

SEQ ID NO: 1060233 - RNA, 19 nt, Artificial Sequence
  Description of Artificial Sequence: Synthetic oligonucleotide
  Antisense strand to SEQ ID NO: 1060232
aucuucacagacaucaucu

SEQ ID NO: 1060234 - RNA, 19 nt, Artificial Sequence
  Description of Artificial Sequence: Synthetic oligonucleotide
  Sense strand starting at position 821 of SEQ ID NO: 915182
cgaaguccucuauaguaaa

SEQ ID NO: 1060235 - RNA, 19 nt, Artificial Sequence
  Description of Artificial Sequence: Synthetic oligonucleotide
  Antisense strand to SEQ ID NO: 1060234
uuuacuauagaggacuucg

SEQ ID NO: 1060236 - RNA, 19 nt, Artificial Sequence
  Description of Artificial Sequence: Synthetic oligonucleotide
  Sense strand starting at position 896 of SEQ ID NO: 915182
augguacccuuuccaaaga

SEQ ID NO: 1060237 - RNA, 19 nt, Artificial Sequence
  Description of Artificial Sequence: Synthetic oligonucleotide
  Antisense strand to SEQ ID NO: 1060236
ucuuuggaaaggguaccau

SEQ ID NO: 1060238 - RNA, 19 nt, Artificial Sequence
  Description of Artificial Sequence: Synthetic oligonucleotide
  Sense strand starting at position 919 of SEQ ID NO: 915182
gaguaauccgaguaucaua

SEQ ID NO: 1060239 - RNA, 19 nt, Artificial Sequence
  Description of Artificial Sequence: Synthetic oligonucleotide
  Antisense strand to SEQ ID NO: 1060238
uaugauacucggauuacuc

SEQ ID NO: 1060240 - RNA, 19 nt, Artificial Sequence
  Description of Artificial Sequence: Synthetic oligonucleotide
  Sense strand starting at position 956 of SEQ ID NO: 915182
gauuucuggugucauuuaa

SEQ ID NO: 1060241 - RNA, 19 nt, Artificial Sequence
  Description of Artificial Sequence: Synthetic oligonucleotide
  Antisense strand to SEQ ID NO: 1060240
uuaaaugacaccagaaauc

SEQ ID NO: 1060242 - RNA, 19 nt, Artificial Sequence
  Description of Artificial Sequence: Synthetic oligonucleotide
  Sense strand starting at position 984 of SEQ ID NO: 915182
uauugacuuggugaucuca

SEQ ID NO: 1060243 - RNA, 19 nt, Artificial Sequence
  Description of Artificial Sequence: Synthetic oligonucleotide
  Antisense strand to SEQ ID NO: 1060242
ugagaucaccaagucaaua

SEQ ID NO: 1060244 - RNA, 19 nt, Artificial Sequence
  Description of Artificial Sequence: Synthetic oligonucleotide
  Sense strand starting at position 1141 of SEQ ID NO: 915182
ggcauuaguagguagagau

SEQ ID NO: 1060245 - RNA, 19 nt, Artificial Sequence
  Description of Artificial Sequence: Synthetic oligonucleotide
  Antisense strand to SEQ ID NO: 1060244
aucucuaccuacuaaugcc

SEQ ID NO: 1060246 - RNA, 19 nt, Artificial Sequence
  Description of Artificial Sequence: Synthetic oligonucleotide
  Sense strand starting at position 1148 of SEQ ID NO: 915182
guagguagagauuagccau

SEQ ID NO: 1060247 - RNA, 19 nt, Artificial Sequence
  Description of Artificial Sequence: Synthetic oligonucleotide
  Antisense strand to SEQ ID NO: 1060246
auggcuaaucucuaccuac

SEQ ID NO: 1060248 - RNA, 19 nt, Artificial Sequence
  Description of Artificial Sequence: Synthetic oligonucleotide
  Sense strand starting at position 1151 of SEQ ID NO: 915182
gguagagauuagccauaau

SEQ ID NO: 1060249 - RNA, 19 nt, Artificial Sequence
  Description of Artificial Sequence: Synthetic oligonucleotide
  Antisense strand to SEQ ID NO: 1060248
auuauggcuaaucucuacc

SEQ ID NO: 1060250 - RNA, 19 nt, Artificial Sequence
  Description of Artificial Sequence: Synthetic oligonucleotide
  Sense strand starting at position 1172 of SEQ ID NO: 915182
uauguauguguagaggaau

SEQ ID NO: 1060251 - RNA, 19 nt, Artificial Sequence
  Description of Artificial Sequence: Synthetic oligonucleotide
  Antisense strand to SEQ ID NO: 1060250
auuccucuacacauacaua

SEQ ID NO: 1060252 - RNA, 19 nt, Artificial Sequence
  Description of Artificial Sequence: Synthetic oligonucleotide
  Sense strand starting at position 1314 of SEQ ID NO: 915182
acucacaacugcuugaaga

SEQ ID NO: 1060253 - RNA, 19 nt, Artificial Sequence
  Description of Artificial Sequence: Synthetic oligonucleotide
  Antisense strand to SEQ ID NO: 1060252
ucuucaagcaguugugagu

SEQ ID NO: 1060254 - RNA, 19 nt, Artificial Sequence
  Description of Artificial Sequence: Synthetic oligonucleotide
  Sense strand starting at position 1315 of SEQ ID NO: 915182
cucacaacugcuugaagaa

SEQ ID NO: 1060255 - RNA, 19 nt, Artificial Sequence
  Description of Artificial Sequence: Synthetic oligonucleotide
  Antisense strand to SEQ ID NO: 1060254
uucuucaagcaguugugag

SEQ ID NO: 1060256 - RNA, 19 nt, Artificial Sequence
  Description of Artificial Sequence: Synthetic oligonucleotide
  Sense strand starting at position 1332 of SEQ ID NO: 915182
aaucauaguguaggagauu

SEQ ID NO: 1060257 - RNA, 19 nt, Artificial Sequence
  Description of Artificial Sequence: Synthetic oligonucleotide
  Antisense strand to SEQ ID NO: 1060256
aaucuccuacacuaugauu

SEQ ID NO: 1060258 - RNA, 19 nt, Artificial Sequence
  Description of Artificial Sequence: Synthetic oligonucleotide
  Sense strand starting at position 1335 of SEQ ID NO: 915182
cauaguguaggagauugua

SEQ ID NO: 1060259 - RNA, 19 nt, Artificial Sequence
  Description of Artificial Sequence: Synthetic oligonucleotide
  Antisense strand to SEQ ID NO: 1060258
uacaaucuccuacacuaug

SEQ ID NO: 1060260 - RNA, 19 nt, Artificial Sequence
  Description of Artificial Sequence: Synthetic oligonucleotide
  Sense strand starting at position 1428 of SEQ ID NO: 915182
acaagauaucuuggccaca

SEQ ID NO: 1060261 - RNA, 19 nt, Artificial Sequence
  Description of Artificial Sequence: Synthetic oligonucleotide
  Antisense strand to SEQ ID NO: 1060260
uguggccaagauaucuugu

SEQ ID NO: 1060262 - RNA, 19 nt, Artificial Sequence
  Description of Artificial Sequence: Synthetic oligonucleotide
  Sense strand starting at position 1433 of SEQ ID NO: 915182
auaucuuggccacagacau

SEQ ID NO: 1060263 - RNA, 19 nt, Artificial Sequence
  Description of Artificial Sequence: Synthetic oligonucleotide
  Antisense strand to SEQ ID NO: 1060262
augucuguggccaagauau

SEQ ID NO: 1060264 - RNA, 19 nt, Artificial Sequence
  Description of Artificial Sequence: Synthetic oligonucleotide
  Sense strand starting at position 1445 of SEQ ID NO: 915182
cagacauguggucacagua

SEQ ID NO: 1060265 - RNA, 19 nt, Artificial Sequence
  Description of Artificial Sequence: Synthetic oligonucleotide
  Antisense strand to SEQ ID NO: 1060264
uacugugaccacaugucug

SEQ ID NO: 1060266 - RNA, 19 nt, Artificial Sequence
  Description of Artificial Sequence: Synthetic oligonucleotide
  Sense strand starting at position 1834 of SEQ ID NO: 915182
gccucaucacaguagauga

SEQ ID NO: 1060267 - RNA, 19 nt, Artificial Sequence
  Description of Artificial Sequence: Synthetic oligonucleotide
  Antisense strand to SEQ ID NO: 1060266
ucaucuacugugaugaggc

SEQ ID NO: 1060268 - RNA, 19 nt, Artificial Sequence
  Description of Artificial Sequence: Synthetic oligonucleotide
  Sense strand starting at position 1956 of SEQ ID NO: 915182
gaugaaugaagcuggaguu

SEQ ID NO: 1060269 - RNA, 19 nt, Artificial Sequence
  Description of Artificial Sequence: Synthetic oligonucleotide
  Antisense strand to SEQ ID NO: 1060268
aacuccagcuucauucauc

SEQ ID NO: 1060270 - RNA, 19 nt, Artificial Sequence
  Description of Artificial Sequence: Synthetic oligonucleotide
  Sense strand starting at position 1957 of SEQ ID NO: 915182
augaaugaagcuggaguua

SEQ ID NO: 1060271 - RNA, 19 nt, Artificial Sequence
  Description of Artificial Sequence: Synthetic oligonucleotide
  Antisense strand to SEQ ID NO: 1060270
uaacuccagcuucauucau

SEQ ID NO: 1060272 - RNA, 19 nt, Artificial Sequence
  Description of Artificial Sequence: Synthetic oligonucleotide
  Sense strand starting at position 1995 of SEQ ID NO: 915182
ugacauaaugacuguugga

SEQ ID NO: 1060273 - RNA, 19 nt, Artificial Sequence
  Description of Artificial Sequence: Synthetic oligonucleotide
  Antisense strand to SEQ ID NO: 1060272
uccaacagucauuauguca

SEQ ID NO: 1060274 - RNA, 19 nt, Artificial Sequence
  Description of Artificial Sequence: Synthetic oligonucleotide
  Sense strand starting at position 2129 of SEQ ID NO: 915182
cuuguagaucaaugacuau

SEQ ID NO: 1060275 - RNA, 19 nt, Artificial Sequence
  Description of Artificial Sequence: Synthetic oligonucleotide
  Antisense strand to SEQ ID NO: 1060274
auagucauugaucuacaag

SEQ ID NO: 1060276 - RNA, 19 nt, Artificial Sequence
  Description of Artificial Sequence: Synthetic oligonucleotide
  Sense strand starting at position 2132 of SEQ ID NO: 915182
guagaucaaugacuauauu

SEQ ID NO: 1060277 - RNA, 19 nt, Artificial Sequence
  Description of Artificial Sequence: Synthetic oligonucleotide
  Antisense strand to SEQ ID NO: 1060276
aauauagucauugaucuac

SEQ ID NO: 1060278 - RNA, 19 nt, Artificial Sequence
  Description of Artificial Sequence: Synthetic oligonucleotide
  Sense strand starting at position 2204 of SEQ ID NO: 915182
gcauuagguguugacagga

SEQ ID NO: 1060279 - RNA, 19 nt, Artificial Sequence
  Description of Artificial Sequence: Synthetic oligonucleotide
  Antisense strand to SEQ ID NO: 1060278
uccugucaacaccuaaugc

SEQ ID NO: 1060280 - RNA, 19 nt, Artificial Sequence
  Description of Artificial Sequence: Synthetic oligonucleotide
  Sense strand starting at position 2317 of SEQ ID NO: 915182
acaacucuguggucaagaa

SEQ ID NO: 1060281 - RNA, 19 nt, Artificial Sequence
  Description of Artificial Sequence: Synthetic oligonucleotide
  Antisense strand to SEQ ID NO: 1060280
uucuugaccacagaguugu

SEQ ID NO: 1060282 - RNA, 19 nt, Artificial Sequence
  Description of Artificial Sequence: Synthetic oligonucleotide
  Sense strand starting at position 2318 of SEQ ID NO: 915182
caacucuguggucaagaau

SEQ ID NO: 1060283 - RNA, 19 nt, Artificial Sequence
  Description of Artificial Sequence: Synthetic oligonucleotide
  Antisense strand to SEQ ID NO: 1060282
auucuugaccacagaguug

SEQ ID NO: 1060284 - RNA, 19 nt, Artificial Sequence
  Description of Artificial Sequence: Synthetic oligonucleotide
  Sense strand starting at position 2321 of SEQ ID NO: 915182
cucuguggucaagaauuga

SEQ ID NO: 1060285 - RNA, 19 nt, Artificial Sequence
  Description of Artificial Sequence: Synthetic oligonucleotide
  Antisense strand to SEQ ID NO: 1060284
ucaauucuugaccacagag

SEQ ID NO: 1060286 - RNA, 19 nt, Artificial Sequence
  Description of Artificial Sequence: Synthetic oligonucleotide
  Sense strand starting at position 2325 of SEQ ID NO: 915182
guggucaagaauugauuaa

SEQ ID NO: 1060287 - RNA, 19 nt, Artificial Sequence
  Description of Artificial Sequence: Synthetic oligonucleotide
  Antisense strand to SEQ ID NO: 1060286
uuaaucaauucuugaccac

SEQ ID NO: 1060288 - RNA, 19 nt, Artificial Sequence
  Description of Artificial Sequence: Synthetic oligonucleotide
  Sense strand starting at position 2748 of SEQ ID NO: 915182
ucuaauugacucuagaguc

SEQ ID NO: 1060289 - RNA, 19 nt, Artificial Sequence
  Description of Artificial Sequence: Synthetic oligonucleotide
  Antisense strand to SEQ ID NO: 1060288
gacucuagagucaauuaga

SEQ ID NO: 1060290 - RNA, 19 nt, Artificial Sequence
  Description of Artificial Sequence: Synthetic oligonucleotide
  Sense strand starting at position 3165 of SEQ ID NO: 915182
ccggaauguguugauuaaa

SEQ ID NO: 1060291 - RNA, 19 nt, Artificial Sequence
  Description of Artificial Sequence: Synthetic oligonucleotide
  Antisense strand to SEQ ID NO: 1060290
uuuaaucaacacauuccgg

SEQ ID NO: 1060292 - RNA, 19 nt, Artificial Sequence
  Description of Artificial Sequence: Synthetic oligonucleotide
  Sense strand starting at position 3429 of SEQ ID NO: 915182
aaauauuagggcuguauaa

SEQ ID NO: 1060293 - RNA, 19 nt, Artificial Sequence
  Description of Artificial Sequence: Synthetic oligonucleotide
  Antisense strand to SEQ ID NO: 1060292
uuauacagcccuaauauuu

SEQ ID NO: 1060294 - RNA, 19 nt, Artificial Sequence
  Description of Artificial Sequence: Synthetic oligonucleotide
  Sense strand starting at position 3431 of SEQ ID NO: 915182
auauuagggcuguauaaau

SEQ ID NO: 1060295 - RNA, 19 nt, Artificial Sequence
  Description of Artificial Sequence: Synthetic oligonucleotide
  Antisense strand to SEQ ID NO: 1060294
auuuauacagcccuaauau

SEQ ID NO: 1060296 - RNA, 19 nt, Artificial Sequence
  Description of Artificial Sequence: Synthetic oligonucleotide
  Sense strand starting at position 137 of SEQ ID NO: 915183
auacuaauagcuuaauggu

SEQ ID NO: 1060297 - RNA, 19 nt, Artificial Sequence
  Description of Artificial Sequence: Synthetic oligonucleotide
  Antisense strand to SEQ ID NO: 1060296
accauuaagcuauuaguau

SEQ ID NO: 1060298 - RNA, 19 nt, Artificial Sequence
  Description of Artificial Sequence: Synthetic oligonucleotide
  Sense strand starting at position 160 of SEQ ID NO: 915183
cugcuuggucaauaacaug

SEQ ID NO: 1060299 - RNA, 19 nt, Artificial Sequence
  Description of Artificial Sequence: Synthetic oligonucleotide
  Antisense strand to SEQ ID NO: 1060298
cauguuauugaccaagcag

SEQ ID NO: 1060300 - RNA, 19 nt, Artificial Sequence
  Description of Artificial Sequence: Synthetic oligonucleotide
  Sense strand starting at position 317 of SEQ ID NO: 915183
ccagauagugaauguagua

SEQ ID NO: 1060301 - RNA, 19 nt, Artificial Sequence
  Description of Artificial Sequence: Synthetic oligonucleotide
  Antisense strand to SEQ ID NO: 1060300
uacuacauucacuaucugg

SEQ ID NO: 1060302 - RNA, 19 nt, Artificial Sequence
  Description of Artificial Sequence: Synthetic oligonucleotide
  Sense strand starting at position 460 of SEQ ID NO: 915183
cuuggacauucuucuguga

SEQ ID NO: 1060303 - RNA, 19 nt, Artificial Sequence
  Description of Artificial Sequence: Synthetic oligonucleotide
  Antisense strand to SEQ ID NO: 1060302
ucacagaagaauguccaag

SEQ ID NO: 1060304 - RNA, 19 nt, Artificial Sequence
  Description of Artificial Sequence: Synthetic oligonucleotide
  Sense strand starting at position 463 of SEQ ID NO: 915183
ggacauucuucugugaauu

SEQ ID NO: 1060305 - RNA, 19 nt, Artificial Sequence
  Description of Artificial Sequence: Synthetic oligonucleotide
  Antisense strand to SEQ ID NO: 1060304
aauucacagaagaaugucc

SEQ ID NO: 1060306 - RNA, 19 nt, Artificial Sequence
  Description of Artificial Sequence: Synthetic oligonucleotide
  Sense strand starting at position 648 of SEQ ID NO: 915183
gcaggucugcuguccuuau

SEQ ID NO: 1060307 - RNA, 19 nt, Artificial Sequence
  Description of Artificial Sequence: Synthetic oligonucleotide
  Antisense strand to SEQ ID NO: 1060306
auaaggacagcagaccugc

SEQ ID NO: 1060308 - RNA, 19 nt, Artificial Sequence
  Description of Artificial Sequence: Synthetic oligonucleotide
  Sense strand starting at position 687 of SEQ ID NO: 915183
acaaacaugugagucuaua

SEQ ID NO: 1060309 - RNA, 19 nt, Artificial Sequence
  Description of Artificial Sequence: Synthetic oligonucleotide
  Antisense strand to SEQ ID NO: 1060308
uauagacucacauguuugu

SEQ ID NO: 1060310 - RNA, 19 nt, Artificial Sequence
  Description of Artificial Sequence: Synthetic oligonucleotide
  Sense strand starting at position 700 of SEQ ID NO: 915183
ucuauaaacgcuuaggaaa

SEQ ID NO: 1060311 - RNA, 19 nt, Artificial Sequence
  Description of Artificial Sequence: Synthetic oligonucleotide
  Antisense strand to SEQ ID NO: 1060310
uuuccuaagcguuuauaga

SEQ ID NO: 1060312 - RNA, 19 nt, Artificial Sequence
  Description of Artificial Sequence: Synthetic oligonucleotide
  Sense strand starting at position 739 of SEQ ID NO: 915183
uggguauauuacuucuuua

SEQ ID NO: 1060313 - RNA, 19 nt, Artificial Sequence
  Description of Artificial Sequence: Synthetic oligonucleotide
  Antisense strand to SEQ ID NO: 1060312
uaaagaaguaauauaccca

SEQ ID NO: 1060314 - RNA, 19 nt, Artificial Sequence
  Description of Artificial Sequence: Synthetic oligonucleotide
  Sense strand starting at position 844 of SEQ ID NO: 915183
auauuauggugacuuacaa

SEQ ID NO: 1060315 - RNA, 19 nt, Artificial Sequence
  Description of Artificial Sequence: Synthetic oligonucleotide
  Antisense strand to SEQ ID NO: 1060314
uuguaagucaccauaauau

SEQ ID NO: 1060316 - RNA, 19 nt, Artificial Sequence
  Description of Artificial Sequence: Synthetic oligonucleotide
  Sense strand starting at position 930 of SEQ ID NO: 915183
ggguaaauuacaugucaug

SEQ ID NO: 1060317 - RNA, 19 nt, Artificial Sequence
  Description of Artificial Sequence: Synthetic oligonucleotide
  Antisense strand to SEQ ID NO: 1060316
caugacauguaauuuaccc

SEQ ID NO: 1060318 - RNA, 19 nt, Artificial Sequence
  Description of Artificial Sequence: Synthetic oligonucleotide
  Sense strand starting at position 2045 of SEQ ID NO: 915183
uugcuuucugccuaggaga

SEQ ID NO: 1060319 - RNA, 19 nt, Artificial Sequence
  Description of Artificial Sequence: Synthetic oligonucleotide
  Antisense strand to SEQ ID NO: 1060318
ucuccuaggcagaaagcaa

SEQ ID NO: 1060320 - RNA, 19 nt, Artificial Sequence
  Description of Artificial Sequence: Synthetic oligonucleotide
  Sense strand starting at position 2092 of SEQ ID NO: 915183
gagguacugguuuggacaa

SEQ ID NO: 1060321 - RNA, 19 nt, Artificial Sequence
  Description of Artificial Sequence: Synthetic oligonucleotide
  Antisense strand to SEQ ID NO: 1060320
uuguccaaaccaguaccuc

SEQ ID NO: 1060322 - RNA, 19 nt, Artificial Sequence
  Description of Artificial Sequence: Synthetic oligonucleotide
  Sense strand starting at position 2192 of SEQ ID NO: 915183
gaacuacaguguccaaagu

SEQ ID NO: 1060323 - RNA, 19 nt, Artificial Sequence
  Description of Artificial Sequence: Synthetic oligonucleotide
  Antisense strand to SEQ ID NO: 1060322
acuuuggacacuguaguuc

SEQ ID NO: 1060324 - RNA, 19 nt, Artificial Sequence
  Description of Artificial Sequence: Synthetic oligonucleotide
  Sense strand starting at position 2406 of SEQ ID NO: 915183
cuaauuguaccugagucuu

SEQ ID NO: 1060325 - RNA, 19 nt, Artificial Sequence
  Description of Artificial Sequence: Synthetic oligonucleotide
  Antisense strand to SEQ ID NO: 1060324
aagacucagguacaauuag

SEQ ID NO: 1060326 - RNA, 19 nt, Artificial Sequence
  Description of Artificial Sequence: Synthetic oligonucleotide
  Sense strand starting at position 2417 of SEQ ID NO: 915183
ugagucuugucacugaaau

SEQ ID NO: 1060327 - RNA, 19 nt, Artificial Sequence
  Description of Artificial Sequence: Synthetic oligonucleotide
  Antisense strand to SEQ ID NO: 1060326
auuucagugacaagacuca

SEQ ID NO: 1060328 - RNA, 19 nt, Artificial Sequence
  Description of Artificial Sequence: Synthetic oligonucleotide
  Sense strand starting at position 2418 of SEQ ID NO: 915183
gagucuugucacugaaauc

SEQ ID NO: 1060329 - RNA, 19 nt, Artificial Sequence
  Description of Artificial Sequence: Synthetic oligonucleotide
  Antisense strand to SEQ ID NO: 1060328
gauuucagugacaagacuc

SEQ ID NO: 1060330 - RNA, 19 nt, Artificial Sequence
  Description of Artificial Sequence: Synthetic oligonucleotide
  Sense strand starting at position 2429 of SEQ ID NO: 915183
cugaaaucacauggguaua

SEQ ID NO: 1060331 - RNA, 19 nt, Artificial Sequence
  Description of Artificial Sequence: Synthetic oligonucleotide
  Antisense strand to SEQ ID NO: 1060330
uauacccaugugauuucag

SEQ ID NO: 1060332 - RNA, 19 nt, Artificial Sequence
  Description of Artificial Sequence: Synthetic oligonucleotide
  Sense strand starting at position 2570 of SEQ ID NO: 915183
auaagaugucaguaauguc

SEQ ID NO: 1060333 - RNA, 19 nt, Artificial Sequence
  Description of Artificial Sequence: Synthetic oligonucleotide
  Antisense strand to SEQ ID NO: 1060332
gacauuacugacaucuuau

SEQ ID NO: 1060334 - RNA, 19 nt, Artificial Sequence
  Description of Artificial Sequence: Synthetic oligonucleotide
  Sense strand starting at position 2580 of SEQ ID NO: 915183
aguaaugucccacauaacu

SEQ ID NO: 1060335 - RNA, 19 nt, Artificial Sequence
  Description of Artificial Sequence: Synthetic oligonucleotide
  Antisense strand to SEQ ID NO: 1060334
aguuaugugggacauuacu

SEQ ID NO: 1060336 - RNA, 19 nt, Artificial Sequence
  Description of Artificial Sequence: Synthetic oligonucleotide
  Sense strand starting at position 2628 of SEQ ID NO: 915183
aauauaugugaaugaguga

SEQ ID NO: 1060337 - RNA, 19 nt, Artificial Sequence
  Description of Artificial Sequence: Synthetic oligonucleotide
  Antisense strand to SEQ ID NO: 1060336
ucacucauucacauauauu

SEQ ID NO: 1060338 - RNA, 19 nt, Artificial Sequence
  Description of Artificial Sequence: Synthetic oligonucleotide
  Sense strand starting at position 2631 of SEQ ID NO: 915183
auaugugaaugagugaaua

SEQ ID NO: 1060339 - RNA, 19 nt, Artificial Sequence
  Description of Artificial Sequence: Synthetic oligonucleotide
  Antisense strand to SEQ ID NO: 1060338
uauucacucauucacauau

SEQ ID NO: 1060340 - RNA, 19 nt, Artificial Sequence
  Description of Artificial Sequence: Synthetic oligonucleotide
  Sense strand starting at position 2643 of SEQ ID NO: 915183
gugaauacaugaguuaaga

SEQ ID NO: 1060341 - RNA, 19 nt, Artificial Sequence
  Description of Artificial Sequence: Synthetic oligonucleotide
  Antisense strand to SEQ ID NO: 1060340
ucuuaacucauguauucac

SEQ ID NO: 1060342 - RNA, 19 nt, Artificial Sequence
  Description of Artificial Sequence: Synthetic oligonucleotide
  Sense strand starting at position 2754 of SEQ ID NO: 915183
ggaagauauuuacaauucu

SEQ ID NO: 1060343 - RNA, 19 nt, Artificial Sequence
  Description of Artificial Sequence: Synthetic oligonucleotide
  Antisense strand to SEQ ID NO: 1060342
agaauuguaaauaucuucc

SEQ ID NO: 1060344 - RNA, 19 nt, Artificial Sequence
  Description of Artificial Sequence: Synthetic oligonucleotide
  Sense strand starting at position 3046 of SEQ ID NO: 915183
ugaauaguauuugaaggaa

SEQ ID NO: 1060345 - RNA, 19 nt, Artificial Sequence
  Description of Artificial Sequence: Synthetic oligonucleotide
  Antisense strand to SEQ ID NO: 1060344
uuccuucaaauacuauuca

SEQ ID NO: 1060346 - RNA, 19 nt, Artificial Sequence
  Description of Artificial Sequence: Synthetic oligonucleotide
  Sense strand starting at position 3146 of SEQ ID NO: 915183
ccuuaaguucuguaguaga

SEQ ID NO: 1060347 - RNA, 19 nt, Artificial Sequence
  Description of Artificial Sequence: Synthetic oligonucleotide
  Antisense strand to SEQ ID NO: 1060346
ucuacuacagaacuuaagg

SEQ ID NO: 1060348 - RNA, 19 nt, Artificial Sequence
  Description of Artificial Sequence: Synthetic oligonucleotide
  Sense strand starting at position 3231 of SEQ ID NO: 915183
ugugauggcauggauuaca

SEQ ID NO: 1060349 - RNA, 19 nt, Artificial Sequence
  Description of Artificial Sequence: Synthetic oligonucleotide
  Antisense strand to SEQ ID NO: 1060348
uguaauccaugccaucaca

SEQ ID NO: 1060350 - RNA, 19 nt, Artificial Sequence
  Description of Artificial Sequence: Synthetic oligonucleotide
  Sense strand starting at position 3241 of SEQ ID NO: 915183
uggauuacaugguugugaa

SEQ ID NO: 1060351 - RNA, 19 nt, Artificial Sequence
  Description of Artificial Sequence: Synthetic oligonucleotide
  Antisense strand to SEQ ID NO: 1060350
uucacaaccauguaaucca

SEQ ID NO: 1060352 - RNA, 19 nt, Artificial Sequence
  Description of Artificial Sequence: Synthetic oligonucleotide
  Sense strand starting at position 3242 of SEQ ID NO: 915183
ggauuacaugguugugaau

SEQ ID NO: 1060353 - RNA, 19 nt, Artificial Sequence
  Description of Artificial Sequence: Synthetic oligonucleotide
  Antisense strand to SEQ ID NO: 1060352
auucacaaccauguaaucc

SEQ ID NO: 1060354 - RNA, 19 nt, Artificial Sequence
  Description of Artificial Sequence: Synthetic oligonucleotide
  Sense strand starting at position 3272 of SEQ ID NO: 915183
agaguucugugaccgaaac

SEQ ID NO: 1060355 - RNA, 19 nt, Artificial Sequence
  Description of Artificial Sequence: Synthetic oligonucleotide
  Antisense strand to SEQ ID NO: 1060354
guuucggucacagaacucu

SEQ ID NO: 1060356 - RNA, 19 nt, Artificial Sequence
  Description of Artificial Sequence: Synthetic oligonucleotide
  Sense strand starting at position 3273 of SEQ ID NO: 915183
gaguucugugaccgaaaca

SEQ ID NO: 1060357 - RNA, 19 nt, Artificial Sequence
  Description of Artificial Sequence: Synthetic oligonucleotide
  Antisense strand to SEQ ID NO: 1060356
uguuucggucacagaacuc

SEQ ID NO: 1060358 - RNA, 19 nt, Artificial Sequence
  Description of Artificial Sequence: Synthetic oligonucleotide
  Sense strand starting at position 3274 of SEQ ID NO: 915183
aguucugugaccgaaacau

SEQ ID NO: 1060359 - RNA, 19 nt, Artificial Sequence
  Description of Artificial Sequence: Synthetic oligonucleotide
  Antisense strand to SEQ ID NO: 1060358
auguuucggucacagaacu

SEQ ID NO: 1060360 - RNA, 19 nt, Artificial Sequence
  Description of Artificial Sequence: Synthetic oligonucleotide
  Sense strand starting at position 3293 of SEQ ID NO: 915183
ucuagaaaucacugcaguu

SEQ ID NO: 1060361 - RNA, 19 nt, Artificial Sequence
  Description of Artificial Sequence: Synthetic oligonucleotide
  Antisense strand to SEQ ID NO: 1060360
aacugcagugauuucuaga

SEQ ID NO: 1060362 - RNA, 19 nt, Artificial Sequence
  Description of Artificial Sequence: Synthetic oligonucleotide
  Sense strand starting at position 3295 of SEQ ID NO: 915183
uagaaaucacugcaguugu

SEQ ID NO: 1060363 - RNA, 19 nt, Artificial Sequence
  Description of Artificial Sequence: Synthetic oligonucleotide
  Antisense strand to SEQ ID NO: 1060362
acaacugcagugauuucua

SEQ ID NO: 1060364 - RNA, 19 nt, Artificial Sequence
  Description of Artificial Sequence: Synthetic oligonucleotide
  Sense strand starting at position 3325 of SEQ ID NO: 915183
gcuagaguacauggaaauu

SEQ ID NO: 1060365 - RNA, 19 nt, Artificial Sequence
  Description of Artificial Sequence: Synthetic oligonucleotide
  Antisense strand to SEQ ID NO: 1060364
aauuuccauguacucuagc

SEQ ID NO: 1060366 - RNA, 19 nt, Artificial Sequence
  Description of Artificial Sequence: Synthetic oligonucleotide
  Sense strand starting at position 3556 of SEQ ID NO: 915183
auguguacaccacauugaa

SEQ ID NO: 1060367 - RNA, 19 nt, Artificial Sequence
  Description of Artificial Sequence: Synthetic oligonucleotide
  Antisense strand to SEQ ID NO: 1060366
uucaaugugguguacacau

SEQ ID NO: 1060368 - RNA, 19 nt, Artificial Sequence
  Description of Artificial Sequence: Synthetic oligonucleotide
  Sense strand starting at position 3829 of SEQ ID NO: 915183
ggcugagaaucuuuaggag

SEQ ID NO: 1060369 - RNA, 19 nt, Artificial Sequence
  Description of Artificial Sequence: Synthetic oligonucleotide
  Antisense strand to SEQ ID NO: 1060368
cuccuaaagauucucagcc

SEQ ID NO: 1060370 - RNA, 19 nt, Artificial Sequence
  Description of Artificial Sequence: Synthetic oligonucleotide
  Sense strand starting at position 3837 of SEQ ID NO: 915183
aucuuuaggaguuguuuga

SEQ ID NO: 1060371 - RNA, 19 nt, Artificial Sequence
  Description of Artificial Sequence: Synthetic oligonucleotide
  Antisense strand to SEQ ID NO: 1060370
ucaaacaacuccuaaagau

SEQ ID NO: 1060372 - RNA, 19 nt, Artificial Sequence
  Description of Artificial Sequence: Synthetic oligonucleotide
  Sense strand starting at position 3841 of SEQ ID NO: 915183
uuaggaguuguuugaaauc

SEQ ID NO: 1060373 - RNA, 19 nt, Artificial Sequence
  Description of Artificial Sequence: Synthetic oligonucleotide
  Antisense strand to SEQ ID NO: 1060372
gauuucaaacaacuccuaa

SEQ ID NO: 1060374 - RNA, 19 nt, Artificial Sequence
  Description of Artificial Sequence: Synthetic oligonucleotide
  Sense strand starting at position 3850 of SEQ ID NO: 915183
guuugaaaucuaggaugac

SEQ ID NO: 1060375 - RNA, 19 nt, Artificial Sequence
  Description of Artificial Sequence: Synthetic oligonucleotide
  Antisense strand to SEQ ID NO: 1060374
gucauccuagauuucaaac

SEQ ID NO: 1060376 - RNA, 19 nt, Artificial Sequence
  Description of Artificial Sequence: Synthetic oligonucleotide
  Sense strand starting at position 54 of SEQ ID NO: 915184
ugacgacuauaguuaacua

SEQ ID NO: 1060377 - RNA, 19 nt, Artificial Sequence
  Description of Artificial Sequence: Synthetic oligonucleotide
  Antisense strand to SEQ ID NO: 1060376
uaguuaacuauagucguca

SEQ ID NO: 1060378 - RNA, 19 nt, Artificial Sequence
  Description of Artificial Sequence: Synthetic oligonucleotide
  Sense strand starting at position 145 of SEQ ID NO: 915184
cuuauauaauuggcuuagu

SEQ ID NO: 1060379 - RNA, 19 nt, Artificial Sequence
  Description of Artificial Sequence: Synthetic oligonucleotide
  Antisense strand to SEQ ID NO: 1060378
acuaagccaauuauauaag

SEQ ID NO: 1060380 - RNA, 19 nt, Artificial Sequence
  Description of Artificial Sequence: Synthetic oligonucleotide
  Sense strand starting at position 153 of SEQ ID NO: 915184
auuggcuuaguuuaugaga

SEQ ID NO: 1060381 - RNA, 19 nt, Artificial Sequence
  Description of Artificial Sequence: Synthetic oligonucleotide
  Antisense strand to SEQ ID NO: 1060380
ucucauaaacuaagccaau

SEQ ID NO: 1060382 - RNA, 19 nt, Artificial Sequence
  Description of Artificial Sequence: Synthetic oligonucleotide
  Sense strand starting at position 192 of SEQ ID NO: 915184
guucuauaguuucucacuu

SEQ ID NO: 1060383 - RNA, 19 nt, Artificial Sequence
  Description of Artificial Sequence: Synthetic oligonucleotide
  Antisense strand to SEQ ID NO: 1060382
aagugagaaacuauagaac

SEQ ID NO: 1060384 - RNA, 19 nt, Artificial Sequence
  Description of Artificial Sequence: Synthetic oligonucleotide
  Sense strand starting at position 358 of SEQ ID NO: 915184
gguuaagaucucuaccucu

SEQ ID NO: 1060385 - RNA, 19 nt, Artificial Sequence
  Description of Artificial Sequence: Synthetic oligonucleotide
  Antisense strand to SEQ ID NO: 1060384
agagguagagaucuuaacc

SEQ ID NO: 1060386 - RNA, 19 nt, Artificial Sequence
  Description of Artificial Sequence: Synthetic oligonucleotide
  Sense strand starting at position 427 of SEQ ID NO: 915184
uccaauuauucuguuguga

SEQ ID NO: 1060387 - RNA, 19 nt, Artificial Sequence
  Description of Artificial Sequence: Synthetic oligonucleotide
  Antisense strand to SEQ ID NO: 1060386
ucacaacagaauaauugga

SEQ ID NO: 1060388 - RNA, 19 nt, Artificial Sequence
  Description of Artificial Sequence: Synthetic oligonucleotide
  Sense strand starting at position 480 of SEQ ID NO: 915184
uuagcuagaugcuuagaga

SEQ ID NO: 1060389 - RNA, 19 nt, Artificial Sequence
  Description of Artificial Sequence: Synthetic oligonucleotide
  Antisense strand to SEQ ID NO: 1060388
ucucuaagcaucuagcuaa

SEQ ID NO: 1060390 - RNA, 19 nt, Artificial Sequence
  Description of Artificial Sequence: Synthetic oligonucleotide
  Sense strand starting at position 481 of SEQ ID NO: 915184
uagcuagaugcuuagagac

SEQ ID NO: 1060391 - RNA, 19 nt, Artificial Sequence
  Description of Artificial Sequence: Synthetic oligonucleotide
  Antisense strand to SEQ ID NO: 1060390
gucucuaagcaucuagcua

SEQ ID NO: 1060392 - RNA, 19 nt, Artificial Sequence
  Description of Artificial Sequence: Synthetic oligonucleotide
  Sense strand starting at position 618 of SEQ ID NO: 915184
aguaauaacuggcuauuaa

SEQ ID NO: 1060393 - RNA, 19 nt, Artificial Sequence
  Description of Artificial Sequence: Synthetic oligonucleotide
  Antisense strand to SEQ ID NO: 1060392
uuaauagccaguuauuacu

SEQ ID NO: 1060394 - RNA, 19 nt, Artificial Sequence
  Description of Artificial Sequence: Synthetic oligonucleotide
  Sense strand starting at position 619 of SEQ ID NO: 915184
guaauaacuggcuauuaau

SEQ ID NO: 1060395 - RNA, 19 nt, Artificial Sequence
  Description of Artificial Sequence: Synthetic oligonucleotide
  Antisense strand to SEQ ID NO: 1060394
auuaauagccaguuauuac

SEQ ID NO: 1060396 - RNA, 19 nt, Artificial Sequence
  Description of Artificial Sequence: Synthetic oligonucleotide
  Sense strand starting at position 625 of SEQ ID NO: 915184
acuggcuauuaaucugaaa

SEQ ID NO: 1060397 - RNA, 19 nt, Artificial Sequence
  Description of Artificial Sequence: Synthetic oligonucleotide
  Antisense strand to SEQ ID NO: 1060396
uuucagauuaauagccagu

SEQ ID NO: 1060398 - RNA, 19 nt, Artificial Sequence
  Description of Artificial Sequence: Synthetic oligonucleotide
  Sense strand starting at position 817 of SEQ ID NO: 915184
ugggccuuccaaugauguu

SEQ ID NO: 1060399 - RNA, 19 nt, Artificial Sequence
  Description of Artificial Sequence: Synthetic oligonucleotide
  Antisense strand to SEQ ID NO: 1060398
aacaucauuggaaggccca

SEQ ID NO: 1060400 - RNA, 19 nt, Artificial Sequence
  Description of Artificial Sequence: Synthetic oligonucleotide
  Sense strand starting at position 835 of SEQ ID NO: 915184
ugagauucccaagguacuu

SEQ ID NO: 1060401 - RNA, 19 nt, Artificial Sequence
  Description of Artificial Sequence: Synthetic oligonucleotide
  Antisense strand to SEQ ID NO: 1060400
aaguaccuugggaaucuca

SEQ ID NO: 1060402 - RNA, 19 nt, Artificial Sequence
  Description of Artificial Sequence: Synthetic oligonucleotide
  Sense strand starting at position 855 of SEQ ID NO: 915184
uugagaaugcaccaguuaa

SEQ ID NO: 1060403 - RNA, 19 nt, Artificial Sequence
  Description of Artificial Sequence: Synthetic oligonucleotide
  Antisense strand to SEQ ID NO: 1060402
uuaacuggugcauucucaa

SEQ ID NO: 1060404 - RNA, 19 nt, Artificial Sequence
  Description of Artificial Sequence: Synthetic oligonucleotide
  Sense strand starting at position 891 of SEQ ID NO: 915184
ucaauacagugcuuccaga

SEQ ID NO: 1060405 - RNA, 19 nt, Artificial Sequence
  Description of Artificial Sequence: Synthetic oligonucleotide
  Antisense strand to SEQ ID NO: 1060404
ucuggaagcacuguauuga

SEQ ID NO: 1060406 - RNA, 19 nt, Artificial Sequence
  Description of Artificial Sequence: Synthetic oligonucleotide
  Sense strand starting at position 1993 of SEQ ID NO: 915184
ugggcuuuccuagaguuaa

SEQ ID NO: 1060407 - RNA, 19 nt, Artificial Sequence
  Description of Artificial Sequence: Synthetic oligonucleotide
  Antisense strand to SEQ ID NO: 1060406
uuaacucuaggaaagccca

SEQ ID NO: 1060408 - RNA, 19 nt, Artificial Sequence
  Description of Artificial Sequence: Synthetic oligonucleotide
  Sense strand starting at position 2108 of SEQ ID NO: 915184
auuucugagugccaagaaa

SEQ ID NO: 1060409 - RNA, 19 nt, Artificial Sequence
  Description of Artificial Sequence: Synthetic oligonucleotide
  Antisense strand to SEQ ID NO: 1060408
uuucuuggcacucagaaau

SEQ ID NO: 1060410 - RNA, 19 nt, Artificial Sequence
  Description of Artificial Sequence: Synthetic oligonucleotide
  Sense strand starting at position 2131 of SEQ ID NO: 915184
uuuguuugucuguuuaguu

SEQ ID NO: 1060411 - RNA, 19 nt, Artificial Sequence
  Description of Artificial Sequence: Synthetic oligonucleotide
  Antisense strand to SEQ ID NO: 1060410
aacuaaacagacaaacaaa

SEQ ID NO: 1060412 - RNA, 19 nt, Artificial Sequence
  Description of Artificial Sequence: Synthetic oligonucleotide
  Sense strand starting at position 2184 of SEQ ID NO: 915184
auucuuauugagcagucua

SEQ ID NO: 1060413 - RNA, 19 nt, Artificial Sequence
  Description of Artificial Sequence: Synthetic oligonucleotide
  Antisense strand to SEQ ID NO: 1060412
uagacugcucaauaagaau

SEQ ID NO: 1060414 - RNA, 19 nt, Artificial Sequence
  Description of Artificial Sequence: Synthetic oligonucleotide
  Sense strand starting at position 2189 of SEQ ID NO: 915184
uauugagcagucuaaguuu

SEQ ID NO: 1060415 - RNA, 19 nt, Artificial Sequence
  Description of Artificial Sequence: Synthetic oligonucleotide
  Antisense strand to SEQ ID NO: 1060414
aaacuuagacugcucaaua

SEQ ID NO: 1060416 - RNA, 19 nt, Artificial Sequence
  Description of Artificial Sequence: Synthetic oligonucleotide
  Sense strand starting at position 2381 of SEQ ID NO: 915184
uugauuaccucacugauga

SEQ ID NO: 1060417 - RNA, 19 nt, Artificial Sequence
  Description of Artificial Sequence: Synthetic oligonucleotide
  Antisense strand to SEQ ID NO: 1060416
ucaucagugagguaaucaa

SEQ ID NO: 1060418 - RNA, 19 nt, Artificial Sequence
  Description of Artificial Sequence: Synthetic oligonucleotide
  Sense strand starting at position 2382 of SEQ ID NO: 915184
ugauuaccucacugaugau

SEQ ID NO: 1060419 - RNA, 19 nt, Artificial Sequence
  Description of Artificial Sequence: Synthetic oligonucleotide
  Antisense strand to SEQ ID NO: 1060418
aucaucagugagguaauca

SEQ ID NO: 1060420 - RNA, 19 nt, Artificial Sequence
  Description of Artificial Sequence: Synthetic oligonucleotide
  Sense strand starting at position 2388 of SEQ ID NO: 915184
ccucacugaugaucugaga

SEQ ID NO: 1060421 - RNA, 19 nt, Artificial Sequence
  Description of Artificial Sequence: Synthetic oligonucleotide
  Antisense strand to SEQ ID NO: 1060420
ucucagaucaucagugagg

SEQ ID NO: 1060422 - RNA, 19 nt, Artificial Sequence
  Description of Artificial Sequence: Synthetic oligonucleotide
  Sense strand starting at position 2391 of SEQ ID NO: 915184
cacugaugaucugagagau

SEQ ID NO: 1060423 - RNA, 19 nt, Artificial Sequence
  Description of Artificial Sequence: Synthetic oligonucleotide
  Antisense strand to SEQ ID NO: 1060422
aucucucagaucaucagug

SEQ ID NO: 1060424 - RNA, 19 nt, Artificial Sequence
  Description of Artificial Sequence: Synthetic oligonucleotide
  Sense strand starting at position 2433 of SEQ ID NO: 915184
auucuuaaugacugacuga

SEQ ID NO: 1060425 - RNA, 19 nt, Artificial Sequence
  Description of Artificial Sequence: Synthetic oligonucleotide
  Antisense strand to SEQ ID NO: 1060424
ucagucagucauuaagaau

SEQ ID NO: 1060426 - RNA, 19 nt, Artificial Sequence
  Description of Artificial Sequence: Synthetic oligonucleotide
  Sense strand starting at position 2440 of SEQ ID NO: 915184
augacugacugauauuuau

SEQ ID NO: 1060427 - RNA, 19 nt, Artificial Sequence
  Description of Artificial Sequence: Synthetic oligonucleotide
  Antisense strand to SEQ ID NO: 1060426
auaaauaucagucagucau

SEQ ID NO: 1060428 - RNA, 19 nt, Artificial Sequence
  Description of Artificial Sequence: Synthetic oligonucleotide
  Sense strand starting at position 2450 of SEQ ID NO: 915184
gauauuuauucuuggguac

SEQ ID NO: 1060429 - RNA, 19 nt, Artificial Sequence
  Description of Artificial Sequence: Synthetic oligonucleotide
  Antisense strand to SEQ ID NO: 1060428
guacccaagaauaaauauc

SEQ ID NO: 1060430 - RNA, 19 nt, Artificial Sequence
  Description of Artificial Sequence: Synthetic oligonucleotide
  Sense strand starting at position 2553 of SEQ ID NO: 915184
gggugucuauacucaauaa

SEQ ID NO: 1060431 - RNA, 19 nt, Artificial Sequence
  Description of Artificial Sequence: Synthetic oligonucleotide
  Antisense strand to SEQ ID NO: 1060430
uuauugaguauagacaccc

SEQ ID NO: 1060432 - RNA, 19 nt, Artificial Sequence
  Description of Artificial Sequence: Synthetic oligonucleotide
  Sense strand starting at position 2606 of SEQ ID NO: 915184
auauaauuggguugucugu

SEQ ID NO: 1060433 - RNA, 19 nt, Artificial Sequence
  Description of Artificial Sequence: Synthetic oligonucleotide
  Antisense strand to SEQ ID NO: 1060432
acagacaacccaauuauau

SEQ ID NO: 1060434 - RNA, 19 nt, Artificial Sequence
  Description of Artificial Sequence: Synthetic oligonucleotide
  Sense strand starting at position 3130 of SEQ ID NO: 915184
cuuucuuguucuuuaugua

SEQ ID NO: 1060435 - RNA, 19 nt, Artificial Sequence
  Description of Artificial Sequence: Synthetic oligonucleotide
  Antisense strand to SEQ ID NO: 1060434
uacauaaagaacaagaaag

SEQ ID NO: 1060436 - RNA, 19 nt, Artificial Sequence
  Description of Artificial Sequence: Synthetic oligonucleotide
  Sense strand starting at position 3134 of SEQ ID NO: 915184
cuuguucuuuauguaucua

SEQ ID NO: 1060437 - RNA, 19 nt, Artificial Sequence
  Description of Artificial Sequence: Synthetic oligonucleotide
  Antisense strand to SEQ ID NO: 1060436
uagauacauaaagaacaag

SEQ ID NO: 1060438 - RNA, 19 nt, Artificial Sequence
  Description of Artificial Sequence: Synthetic oligonucleotide
  Sense strand starting at position 3138 of SEQ ID NO: 915184
uucuuuauguaucuaguca

SEQ ID NO: 1060439 - RNA, 19 nt, Artificial Sequence
  Description of Artificial Sequence: Synthetic oligonucleotide
  Antisense strand to SEQ ID NO: 1060438
ugacuagauacauaaagaa

SEQ ID NO: 1060440 - RNA, 19 nt, Artificial Sequence
  Description of Artificial Sequence: Synthetic oligonucleotide
  Sense strand starting at position 3453 of SEQ ID NO: 915184
auuuacugcugguagacau

SEQ ID NO: 1060441 - RNA, 19 nt, Artificial Sequence
  Description of Artificial Sequence: Synthetic oligonucleotide
  Antisense strand to SEQ ID NO: 1060440
augucuaccagcaguaaau

SEQ ID NO: 1060442 - RNA, 19 nt, Artificial Sequence
  Description of Artificial Sequence: Synthetic oligonucleotide
  Sense strand starting at position 3581 of SEQ ID NO: 915184
uuagaaugcuuauugaaac

SEQ ID NO: 1060443 - RNA, 19 nt, Artificial Sequence
  Description of Artificial Sequence: Synthetic oligonucleotide
  Antisense strand to SEQ ID NO: 1060442
guuucaauaagcauucuaa

SEQ ID NO: 1060444 - RNA, 19 nt, Artificial Sequence
  Description of Artificial Sequence: Synthetic oligonucleotide
  Sense strand starting at position 3738 of SEQ ID NO: 915184
auagacgaaucucacaaua

SEQ ID NO: 1060445 - RNA, 19 nt, Artificial Sequence
  Description of Artificial Sequence: Synthetic oligonucleotide
  Antisense strand to SEQ ID NO: 1060444
uauugugagauucgucuau

SEQ ID NO: 1060446 - RNA, 19 nt, Artificial Sequence
  Description of Artificial Sequence: Synthetic oligonucleotide
  Sense strand starting at position 3748 of SEQ ID NO: 915184
cucacaauauguguuaauu

SEQ ID NO: 1060447 - RNA, 19 nt, Artificial Sequence
  Description of Artificial Sequence: Synthetic oligonucleotide
  Antisense strand to SEQ ID NO: 1060446
aauuaacacauauugugag

SEQ ID NO: 1060448 - RNA, 19 nt, Artificial Sequence
  Description of Artificial Sequence: Synthetic oligonucleotide
  Sense strand starting at position 3798 of SEQ ID NO: 915184
ucuugugaucuuuaaauga

SEQ ID NO: 1060449 - RNA, 19 nt, Artificial Sequence
  Description of Artificial Sequence: Synthetic oligonucleotide
  Antisense strand to SEQ ID NO: 1060448
ucauuuaaagaucacaaga

SEQ ID NO: 1060450 - RNA, 19 nt, Artificial Sequence
  Description of Artificial Sequence: Synthetic oligonucleotide
  Sense strand starting at position 3932 of SEQ ID NO: 915184
uggucauauucccuuacuu

SEQ ID NO: 1060451 - RNA, 19 nt, Artificial Sequence
  Description of Artificial Sequence: Synthetic oligonucleotide
  Antisense strand to SEQ ID NO: 1060450
aaguaagggaauaugacca

SEQ ID NO: 1060452 - RNA, 19 nt, Artificial Sequence
  Description of Artificial Sequence: Synthetic oligonucleotide
  Sense strand starting at position 3934 of SEQ ID NO: 915184
gucauauucccuuacuuga

SEQ ID NO: 1060453 - RNA, 19 nt, Artificial Sequence
  Description of Artificial Sequence: Synthetic oligonucleotide
  Antisense strand to SEQ ID NO: 1060452
ucaaguaagggaauaugac

SEQ ID NO: 1060454 - RNA, 19 nt, Artificial Sequence
  Description of Artificial Sequence: Synthetic oligonucleotide
  Sense strand starting at position 3950 of SEQ ID NO: 915184
ugauuugguugugagauau

SEQ ID NO: 1060455 - RNA, 19 nt, Artificial Sequence
  Description of Artificial Sequence: Synthetic oligonucleotide
  Antisense strand to SEQ ID NO: 1060454
auaucucacaaccaaauca

SEQ ID NO: 1060456 - RNA, 19 nt, Artificial Sequence
  Description of Artificial Sequence: Synthetic oligonucleotide
  Sense strand starting at position 391 of SEQ ID NO: 915185
ucaauaguacaguggauaa

SEQ ID NO: 1060457 - RNA, 19 nt, Artificial Sequence
  Description of Artificial Sequence: Synthetic oligonucleotide
  Antisense strand to SEQ ID NO: 1060456
uuauccacuguacuauuga

SEQ ID NO: 1060458 - RNA, 19 nt, Artificial Sequence
  Description of Artificial Sequence: Synthetic oligonucleotide
  Sense strand starting at position 401 of SEQ ID NO: 915185
aguggauaacuguaguuaa

SEQ ID NO: 1060459 - RNA, 19 nt, Artificial Sequence
  Description of Artificial Sequence: Synthetic oligonucleotide
  Antisense strand to SEQ ID NO: 1060458
uuaacuacaguuauccacu

SEQ ID NO: 1060460 - RNA, 19 nt, Artificial Sequence
  Description of Artificial Sequence: Synthetic oligonucleotide
  Sense strand starting at position 680 of SEQ ID NO: 915185
uuagccauucuguaagguu

SEQ ID NO: 1060461 - RNA, 19 nt, Artificial Sequence
  Description of Artificial Sequence: Synthetic oligonucleotide
  Antisense strand to SEQ ID NO: 1060460
aaccuuacagaauggcuaa

SEQ ID NO: 1060462 - RNA, 19 nt, Artificial Sequence
  Description of Artificial Sequence: Synthetic oligonucleotide
  Sense strand starting at position 978 of SEQ ID NO: 915185
uuaaguugccuugaaucaa

SEQ ID NO: 1060463 - RNA, 19 nt, Artificial Sequence
  Description of Artificial Sequence: Synthetic oligonucleotide
  Antisense strand to SEQ ID NO: 1060462
uugauucaaggcaacuuaa

SEQ ID NO: 1060464 - RNA, 19 nt, Artificial Sequence
  Description of Artificial Sequence: Synthetic oligonucleotide
  Sense strand starting at position 1003 of SEQ ID NO: 915185
cccuuaucacccuggaaga

SEQ ID NO: 1060465 - RNA, 19 nt, Artificial Sequence
  Description of Artificial Sequence: Synthetic oligonucleotide
  Antisense strand to SEQ ID NO: 1060464
ucuuccagggugauaaggg

SEQ ID NO: 1060466 - RNA, 19 nt, Artificial Sequence
  Description of Artificial Sequence: Synthetic oligonucleotide
  Sense strand starting at position 1004 of SEQ ID NO: 915185
ccuuaucacccuggaagaa

SEQ ID NO: 1060467 - RNA, 19 nt, Artificial Sequence
  Description of Artificial Sequence: Synthetic oligonucleotide
  Antisense strand to SEQ ID NO: 1060466
uucuuccagggugauaagg

SEQ ID NO: 1060468 - RNA, 19 nt, Artificial Sequence
  Description of Artificial Sequence: Synthetic oligonucleotide
  Sense strand starting at position 1108 of SEQ ID NO: 915185
gccacaaugaugugaagag

SEQ ID NO: 1060469 - RNA, 19 nt, Artificial Sequence
  Description of Artificial Sequence: Synthetic oligonucleotide
  Antisense strand to SEQ ID NO: 1060468
cucuucacaucauuguggc

SEQ ID NO: 1060470 - RNA, 19 nt, Artificial Sequence
  Description of Artificial Sequence: Synthetic oligonucleotide
  Sense strand starting at position 1266 of SEQ ID NO: 915185
cgcugccuugaggaucaaa

SEQ ID NO: 1060471 - RNA, 19 nt, Artificial Sequence
  Description of Artificial Sequence: Synthetic oligonucleotide
  Antisense strand to SEQ ID NO: 1060470
uuugauccucaaggcagcg

SEQ ID NO: 1060472 - RNA, 19 nt, Artificial Sequence
  Description of Artificial Sequence: Synthetic oligonucleotide
  Sense strand starting at position 1371 of SEQ ID NO: 915185
ggcacaagauagcuuuacu

SEQ ID NO: 1060473 - RNA, 19 nt, Artificial Sequence
  Description of Artificial Sequence: Synthetic oligonucleotide
  Antisense strand to SEQ ID NO: 1060472
aguaaagcuaucuugugcc

SEQ ID NO: 1060474 - RNA, 19 nt, Artificial Sequence
  Description of Artificial Sequence: Synthetic oligonucleotide
  Sense strand starting at position 1404 of SEQ ID NO: 915185
gcaguacguaugggagaua

SEQ ID NO: 1060475 - RNA, 19 nt, Artificial Sequence
  Description of Artificial Sequence: Synthetic oligonucleotide
  Antisense strand to SEQ ID NO: 1060474
uaucucccauacguacugc

SEQ ID NO: 1060476 - RNA, 19 nt, Artificial Sequence
  Description of Artificial Sequence: Synthetic oligonucleotide
  Sense strand starting at position 1407 of SEQ ID NO: 915185
guacguaugggagauaaua

SEQ ID NO: 1060477 - RNA, 19 nt, Artificial Sequence
  Description of Artificial Sequence: Synthetic oligonucleotide
  Antisense strand to SEQ ID NO: 1060476
uauuaucucccauacguac

SEQ ID NO: 1060478 - RNA, 19 nt, Artificial Sequence
  Description of Artificial Sequence: Synthetic oligonucleotide
  Sense strand starting at position 1418 of SEQ ID NO: 915185
agauaauauugcuuuggca

SEQ ID NO: 1060479 - RNA, 19 nt, Artificial Sequence
  Description of Artificial Sequence: Synthetic oligonucleotide
  Antisense strand to SEQ ID NO: 1060478
ugccaaagcaauauuaucu

SEQ ID NO: 1060480 - RNA, 19 nt, Artificial Sequence
  Description of Artificial Sequence: Synthetic oligonucleotide
  Sense strand starting at position 1420 of SEQ ID NO: 915185
auaauauugcuuuggcaga

SEQ ID NO: 1060481 - RNA, 19 nt, Artificial Sequence
  Description of Artificial Sequence: Synthetic oligonucleotide
  Antisense strand to SEQ ID NO: 1060480
ucugccaaagcaauauuau

SEQ ID NO: 1060482 - RNA, 19 nt, Artificial Sequence
  Description of Artificial Sequence: Synthetic oligonucleotide
  Sense strand starting at position 1577 of SEQ ID NO: 915185
ggucuagagccaugagcau

SEQ ID NO: 1060483 - RNA, 19 nt, Artificial Sequence
  Description of Artificial Sequence: Synthetic oligonucleotide
  Antisense strand to SEQ ID NO: 1060482
augcucauggcucuagacc

SEQ ID NO: 1060484 - RNA, 19 nt, Artificial Sequence
  Description of Artificial Sequence: Synthetic oligonucleotide
  Sense strand starting at position 1646 of SEQ ID NO: 915185
ccaagcaagcauugaaguu

SEQ ID NO: 1060485 - RNA, 19 nt, Artificial Sequence
  Description of Artificial Sequence: Synthetic oligonucleotide
  Antisense strand to SEQ ID NO: 1060484
aacuucaaugcuugcuugg

SEQ ID NO: 1060486 - RNA, 19 nt, Artificial Sequence
  Description of Artificial Sequence: Synthetic oligonucleotide
  Sense strand starting at position 1662 of SEQ ID NO: 915185
guuaauuucuuugagacug

SEQ ID NO: 1060487 - RNA, 19 nt, Artificial Sequence
  Description of Artificial Sequence: Synthetic oligonucleotide
  Antisense strand to SEQ ID NO: 1060486
cagucucaaagaaauuaac

SEQ ID NO: 1060488 - RNA, 19 nt, Artificial Sequence
  Description of Artificial Sequence: Synthetic oligonucleotide
  Sense strand starting at position 1667 of SEQ ID NO: 915185
uuucuuugagacugaacca

SEQ ID NO: 1060489 - RNA, 19 nt, Artificial Sequence
  Description of Artificial Sequence: Synthetic oligonucleotide
  Antisense strand to SEQ ID NO: 1060488
ugguucagucucaaagaaa

SEQ ID NO: 1060490 - RNA, 19 nt, Artificial Sequence
  Description of Artificial Sequence: Synthetic oligonucleotide
  Sense strand starting at position 1762 of SEQ ID NO: 915185
aaauacaucggaugaugua

SEQ ID NO: 1060491 - RNA, 19 nt, Artificial Sequence
  Description of Artificial Sequence: Synthetic oligonucleotide
  Antisense strand to SEQ ID NO: 1060490
uacaucauccgauguauuu

SEQ ID NO: 1060492 - RNA, 19 nt, Artificial Sequence
  Description of Artificial Sequence: Synthetic oligonucleotide
  Sense strand starting at position 2170 of SEQ ID NO: 915185
gucuaaauguaauuccaua

SEQ ID NO: 1060493 - RNA, 19 nt, Artificial Sequence
  Description of Artificial Sequence: Synthetic oligonucleotide
  Antisense strand to SEQ ID NO: 1060492
uauggaauuacauuuagac

SEQ ID NO: 1060494 - RNA, 19 nt, Artificial Sequence
  Description of Artificial Sequence: Synthetic oligonucleotide
  Sense strand starting at position 2361 of SEQ ID NO: 915185
ggacauauccuaugacagc

SEQ ID NO: 1060495 - RNA, 19 nt, Artificial Sequence
  Description of Artificial Sequence: Synthetic oligonucleotide
  Antisense strand to SEQ ID NO: 1060494
gcugucauaggauaugucc

SEQ ID NO: 1060496 - RNA, 19 nt, Artificial Sequence
  Description of Artificial Sequence: Synthetic oligonucleotide
  Sense strand starting at position 2498 of SEQ ID NO: 915185
cuaacugugugacuugaua

SEQ ID NO: 1060497 - RNA, 19 nt, Artificial Sequence
  Description of Artificial Sequence: Synthetic oligonucleotide
  Antisense strand to SEQ ID NO: 1060496
uaucaagucacacaguuag

SEQ ID NO: 1060498 - RNA, 19 nt, Artificial Sequence
  Description of Artificial Sequence: Synthetic oligonucleotide
  Sense strand starting at position 2506 of SEQ ID NO: 915185
gugacuugauaagcuuuau

SEQ ID NO: 1060499 - RNA, 19 nt, Artificial Sequence
  Description of Artificial Sequence: Synthetic oligonucleotide
  Antisense strand to SEQ ID NO: 1060498
auaaagcuuaucaagucac

SEQ ID NO: 1060500 - RNA, 19 nt, Artificial Sequence
  Description of Artificial Sequence: Synthetic oligonucleotide
  Sense strand starting at position 2510 of SEQ ID NO: 915185
cuugauaagcuuuauguca

SEQ ID NO: 1060501 - RNA, 19 nt, Artificial Sequence
  Description of Artificial Sequence: Synthetic oligonucleotide
  Antisense strand to SEQ ID NO: 1060500
ugacauaaagcuuaucaag

SEQ ID NO: 1060502 - RNA, 19 nt, Artificial Sequence
  Description of Artificial Sequence: Synthetic oligonucleotide
  Sense strand starting at position 2567 of SEQ ID NO: 915185
ggugauaccuaccucaaag

SEQ ID NO: 1060503 - RNA, 19 nt, Artificial Sequence
  Description of Artificial Sequence: Synthetic oligonucleotide
  Antisense strand to SEQ ID NO: 1060502
cuuugagguagguaucacc

SEQ ID NO: 1060504 - RNA, 19 nt, Artificial Sequence
  Description of Artificial Sequence: Synthetic oligonucleotide
  Sense strand starting at position 2635 of SEQ ID NO: 915185
auggauuagauaugcugau

SEQ ID NO: 1060505 - RNA, 19 nt, Artificial Sequence
  Description of Artificial Sequence: Synthetic oligonucleotide
  Antisense strand to SEQ ID NO: 1060504
aucagcauaucuaauccau

SEQ ID NO: 1060506 - RNA, 19 nt, Artificial Sequence
  Description of Artificial Sequence: Synthetic oligonucleotide
  Sense strand starting at position 2636 of SEQ ID NO: 915185
uggauuagauaugcugauu

SEQ ID NO: 1060507 - RNA, 19 nt, Artificial Sequence
  Description of Artificial Sequence: Synthetic oligonucleotide
  Antisense strand to SEQ ID NO: 1060506
aaucagcauaucuaaucca

SEQ ID NO: 1060508 - RNA, 19 nt, Artificial Sequence
  Description of Artificial Sequence: Synthetic oligonucleotide
  Sense strand starting at position 2790 of SEQ ID NO: 915185
ugucauugagauuaucuau

SEQ ID NO: 1060509 - RNA, 19 nt, Artificial Sequence
  Description of Artificial Sequence: Synthetic oligonucleotide
  Antisense strand to SEQ ID NO: 1060508
auagauaaucucaaugaca

SEQ ID NO: 1060510 - RNA, 19 nt, Artificial Sequence
  Description of Artificial Sequence: Synthetic oligonucleotide
  Sense strand starting at position 3160 of SEQ ID NO: 915185
uuaugaucuucccugguau

SEQ ID NO: 1060511 - RNA, 19 nt, Artificial Sequence
  Description of Artificial Sequence: Synthetic oligonucleotide
  Antisense strand to SEQ ID NO: 1060510
auaccagggaagaucauaa

SEQ ID NO: 1060512 - RNA, 19 nt, Artificial Sequence
  Description of Artificial Sequence: Synthetic oligonucleotide
  Sense strand starting at position 3494 of SEQ ID NO: 915185
gggcucaaauuccuuggua

SEQ ID NO: 1060513 - RNA, 19 nt, Artificial Sequence
  Description of Artificial Sequence: Synthetic oligonucleotide
  Antisense strand to SEQ ID NO: 1060512
uaccaaggaauuugagccc

SEQ ID NO: 1060514 - RNA, 19 nt, Artificial Sequence
  Description of Artificial Sequence: Synthetic oligonucleotide
  Sense strand starting at position 3496 of SEQ ID NO: 915185
gcucaaauuccuugguaug

SEQ ID NO: 1060515 - RNA, 19 nt, Artificial Sequence
  Description of Artificial Sequence: Synthetic oligonucleotide
  Antisense strand to SEQ ID NO: 1060514
cauaccaaggaauuugagc

SEQ ID NO: 1060516 - RNA, 19 nt, Artificial Sequence
  Description of Artificial Sequence: Synthetic oligonucleotide
  Sense strand starting at position 3497 of SEQ ID NO: 915185
cucaaauuccuugguauga

SEQ ID NO: 1060517 - RNA, 19 nt, Artificial Sequence
  Description of Artificial Sequence: Synthetic oligonucleotide
  Antisense strand to SEQ ID NO: 1060516
ucauaccaaggaauuugag

SEQ ID NO: 1060518 - RNA, 19 nt, Artificial Sequence
  Description of Artificial Sequence: Synthetic oligonucleotide
  Sense strand starting at position 3498 of SEQ ID NO: 915185
ucaaauuccuugguaugac

SEQ ID NO: 1060519 - RNA, 19 nt, Artificial Sequence
  Description of Artificial Sequence: Synthetic oligonucleotide
  Antisense strand to SEQ ID NO: 1060518
gucauaccaaggaauuuga

SEQ ID NO: 1060520 - RNA, 19 nt, Artificial Sequence
  Description of Artificial Sequence: Synthetic oligonucleotide
  Sense strand starting at position 3525 of SEQ ID NO: 915185
aaaggaaauuuaggucuua

SEQ ID NO: 1060521 - RNA, 19 nt, Artificial Sequence
  Description of Artificial Sequence: Synthetic oligonucleotide
  Antisense strand to SEQ ID NO: 1060520
uaagaccuaaauuuccuuu

SEQ ID NO: 1060522 - RNA, 19 nt, Artificial Sequence
  Description of Artificial Sequence: Synthetic oligonucleotide
  Sense strand starting at position 3590 of SEQ ID NO: 915185
aguauccuggcuuaaacaa

SEQ ID NO: 1060523 - RNA, 19 nt, Artificial Sequence
  Description of Artificial Sequence: Synthetic oligonucleotide
  Antisense strand to SEQ ID NO: 1060522
uuguuuaagccaggauacu

SEQ ID NO: 1060524 - RNA, 19 nt, Artificial Sequence
  Description of Artificial Sequence: Synthetic oligonucleotide
  Sense strand starting at position 3597 of SEQ ID NO: 915185
uggcuuaaacaaugcauua

SEQ ID NO: 1060525 - RNA, 19 nt, Artificial Sequence
  Description of Artificial Sequence: Synthetic oligonucleotide
  Antisense strand to SEQ ID NO: 1060524
uaaugcauuguuuaagcca

SEQ ID NO: 1060526 - RNA, 19 nt, Artificial Sequence
  Description of Artificial Sequence: Synthetic oligonucleotide
  Sense strand starting at position 3609 of SEQ ID NO: 915185
ugcauuauauagucaaugu

SEQ ID NO: 1060527 - RNA, 19 nt, Artificial Sequence
  Description of Artificial Sequence: Synthetic oligonucleotide
  Antisense strand to SEQ ID NO: 1060526
acauugacuauauaaugca

SEQ ID NO: 1060528 - RNA, 19 nt, Artificial Sequence
  Description of Artificial Sequence: Synthetic oligonucleotide
  Sense strand starting at position 3641 of SEQ ID NO: 915185
ggguuuaaauacuugcuaa

SEQ ID NO: 1060529 - RNA, 19 nt, Artificial Sequence
  Description of Artificial Sequence: Synthetic oligonucleotide
  Antisense strand to SEQ ID NO: 1060528
uuagcaaguauuuaaaccc

SEQ ID NO: 1060530 - RNA, 19 nt, Artificial Sequence
  Description of Artificial Sequence: Synthetic oligonucleotide
  Sense strand starting at position 3678 of SEQ ID NO: 915185
acuuaaagucuauguugac

SEQ ID NO: 1060531 - RNA, 19 nt, Artificial Sequence
  Description of Artificial Sequence: Synthetic oligonucleotide
  Antisense strand to SEQ ID NO: 1060530
gucaacauagacuuuaagu

SEQ ID NO: 1060532 - RNA, 19 nt, Artificial Sequence
  Description of Artificial Sequence: Synthetic oligonucleotide
  Sense strand starting at position 3679 of SEQ ID NO: 915185
cuuaaagucuauguugacu

SEQ ID NO: 1060533 - RNA, 19 nt, Artificial Sequence
  Description of Artificial Sequence: Synthetic oligonucleotide
  Antisense strand to SEQ ID NO: 1060532
agucaacauagacuuuaag

SEQ ID NO: 1060534 - RNA, 19 nt, Artificial Sequence
  Description of Artificial Sequence: Synthetic oligonucleotide
  Sense strand starting at position 3743 of SEQ ID NO: 915185
agaauauuauagcugaagu

SEQ ID NO: 1060535 - RNA, 19 nt, Artificial Sequence
  Description of Artificial Sequence: Synthetic oligonucleotide
  Antisense strand to SEQ ID NO: 1060534
acuucagcuauaauauucu

SEQ ID NO: 1060536 - RNA, 19 nt, Artificial Sequence
  Description of Artificial Sequence: Synthetic oligonucleotide
  Sense strand starting at position 71 of SEQ ID NO: 915186
uuuaauuauguagggugau

SEQ ID NO: 1060537 - RNA, 19 nt, Artificial Sequence
  Description of Artificial Sequence: Synthetic oligonucleotide
  Antisense strand to SEQ ID NO: 1060536
aucacccuacauaauuaaa

SEQ ID NO: 1060538 - RNA, 19 nt, Artificial Sequence
  Description of Artificial Sequence: Synthetic oligonucleotide
  Sense strand starting at position 74 of SEQ ID NO: 915186
aauuauguagggugauaaa

SEQ ID NO: 1060539 - RNA, 19 nt, Artificial Sequence
  Description of Artificial Sequence: Synthetic oligonucleotide
  Antisense strand to SEQ ID NO: 1060538
uuuaucacccuacauaauu

SEQ ID NO: 1060540 - RNA, 19 nt, Artificial Sequence
  Description of Artificial Sequence: Synthetic oligonucleotide
  Sense strand starting at position 105 of SEQ ID NO: 915186
gacugagagguaugguauu

SEQ ID NO: 1060541 - RNA, 19 nt, Artificial Sequence
  Description of Artificial Sequence: Synthetic oligonucleotide
  Antisense strand to SEQ ID NO: 1060540
aauaccauaccucucaguc

SEQ ID NO: 1060542 - RNA, 19 nt, Artificial Sequence
  Description of Artificial Sequence: Synthetic oligonucleotide
  Sense strand starting at position 182 of SEQ ID NO: 915186
ugauaaguacuaggugaac

SEQ ID NO: 1060543 - RNA, 19 nt, Artificial Sequence
  Description of Artificial Sequence: Synthetic oligonucleotide
  Antisense strand to SEQ ID NO: 1060542
guucaccuaguacuuauca

SEQ ID NO: 1060544 - RNA, 19 nt, Artificial Sequence
  Description of Artificial Sequence: Synthetic oligonucleotide
  Sense strand starting at position 374 of SEQ ID NO: 915186
uacguauuccaguauagaa

SEQ ID NO: 1060545 - RNA, 19 nt, Artificial Sequence
  Description of Artificial Sequence: Synthetic oligonucleotide
  Antisense strand to SEQ ID NO: 1060544
uucuauacuggaauacgua

SEQ ID NO: 1060546 - RNA, 19 nt, Artificial Sequence
  Description of Artificial Sequence: Synthetic oligonucleotide
  Sense strand starting at position 376 of SEQ ID NO: 915186
cguauuccaguauagaauu

SEQ ID NO: 1060547 - RNA, 19 nt, Artificial Sequence
  Description of Artificial Sequence: Synthetic oligonucleotide
  Antisense strand to SEQ ID NO: 1060546
aauucuauacuggaauacg

SEQ ID NO: 1060548 - RNA, 19 nt, Artificial Sequence
  Description of Artificial Sequence: Synthetic oligonucleotide
  Sense strand starting at position 384 of SEQ ID NO: 915186
aguauagaauugguaccaa

SEQ ID NO: 1060549 - RNA, 19 nt, Artificial Sequence
  Description of Artificial Sequence: Synthetic oligonucleotide
  Antisense strand to SEQ ID NO: 1060548
uugguaccaauucuauacu

SEQ ID NO: 1060550 - RNA, 19 nt, Artificial Sequence
  Description of Artificial Sequence: Synthetic oligonucleotide
  Sense strand starting at position 441 of SEQ ID NO: 915186
auaucuugcuuauuuguca

SEQ ID NO: 1060551 - RNA, 19 nt, Artificial Sequence
  Description of Artificial Sequence: Synthetic oligonucleotide
  Antisense strand to SEQ ID NO: 1060550
ugacaaauaagcaagauau

SEQ ID NO: 1060552 - RNA, 19 nt, Artificial Sequence
  Description of Artificial Sequence: Synthetic oligonucleotide
  Sense strand starting at position 541 of SEQ ID NO: 915186
aggacaauauuugaaucau

SEQ ID NO: 1060553 - RNA, 19 nt, Artificial Sequence
  Description of Artificial Sequence: Synthetic oligonucleotide
  Antisense strand to SEQ ID NO: 1060552
augauucaaauauuguccu

SEQ ID NO: 1060554 - RNA, 19 nt, Artificial Sequence
  Description of Artificial Sequence: Synthetic oligonucleotide
  Sense strand starting at position 744 of SEQ ID NO: 915186
cuuaaucaucugugggaga

SEQ ID NO: 1060555 - RNA, 19 nt, Artificial Sequence
  Description of Artificial Sequence: Synthetic oligonucleotide
  Antisense strand to SEQ ID NO: 1060554
ucucccacagaugauuaag

SEQ ID NO: 1060556 - RNA, 19 nt, Artificial Sequence
  Description of Artificial Sequence: Synthetic oligonucleotide
  Sense strand starting at position 746 of SEQ ID NO: 915186
uaaucaucugugggagaug

SEQ ID NO: 1060557 - RNA, 19 nt, Artificial Sequence
  Description of Artificial Sequence: Synthetic oligonucleotide
  Antisense strand to SEQ ID NO: 1060556
caucucccacagaugauua

SEQ ID NO: 1060558 - RNA, 19 nt, Artificial Sequence
  Description of Artificial Sequence: Synthetic oligonucleotide
  Sense strand starting at position 751 of SEQ ID NO: 915186
aucugugggagaugacauu

SEQ ID NO: 1060559 - RNA, 19 nt, Artificial Sequence
  Description of Artificial Sequence: Synthetic oligonucleotide
  Antisense strand to SEQ ID NO: 1060558
aaugucaucucccacagau

SEQ ID NO: 1060560 - RNA, 19 nt, Artificial Sequence
  Description of Artificial Sequence: Synthetic oligonucleotide
  Sense strand starting at position 828 of SEQ ID NO: 915186
augaauauguagucaacaa

SEQ ID NO: 1060561 - RNA, 19 nt, Artificial Sequence
  Description of Artificial Sequence: Synthetic oligonucleotide
  Antisense strand to SEQ ID NO: 1060560
uuguugacuacauauucau

SEQ ID NO: 1060562 - RNA, 19 nt, Artificial Sequence
  Description of Artificial Sequence: Synthetic oligonucleotide
  Sense strand starting at position 832 of SEQ ID NO: 915186
auauguagucaacaaaguu

SEQ ID NO: 1060563 - RNA, 19 nt, Artificial Sequence
  Description of Artificial Sequence: Synthetic oligonucleotide
  Antisense strand to SEQ ID NO: 1060562
aacuuuguugacuacauau

SEQ ID NO: 1060564 - RNA, 19 nt, Artificial Sequence
  Description of Artificial Sequence: Synthetic oligonucleotide
  Sense strand starting at position 840 of SEQ ID NO: 915186
ucaacaaaguuguucuuau

SEQ ID NO: 1060565 - RNA, 19 nt, Artificial Sequence
  Description of Artificial Sequence: Synthetic oligonucleotide
  Antisense strand to SEQ ID NO: 1060564
auaagaacaacuuuguuga

SEQ ID NO: 1060566 - RNA, 19 nt, Artificial Sequence
  Description of Artificial Sequence: Synthetic oligonucleotide
  Sense strand starting at position 952 of SEQ ID NO: 915186
agagcugacuuagugauaa

SEQ ID NO: 1060567 - RNA, 19 nt, Artificial Sequence
  Description of Artificial Sequence: Synthetic oligonucleotide
  Antisense strand to SEQ ID NO: 1060566
uuaucacuaagucagcucu

SEQ ID NO: 1060568 - RNA, 19 nt, Artificial Sequence
  Description of Artificial Sequence: Synthetic oligonucleotide
  Sense strand starting at position 1131 of SEQ ID NO: 915186
gagcaugggagguaucagu

SEQ ID NO: 1060569 - RNA, 19 nt, Artificial Sequence
  Description of Artificial Sequence: Synthetic oligonucleotide
  Antisense strand to SEQ ID NO: 1060568
acugauaccucccaugcuc

SEQ ID NO: 1060570 - RNA, 19 nt, Artificial Sequence
  Description of Artificial Sequence: Synthetic oligonucleotide
  Sense strand starting at position 1394 of SEQ ID NO: 915186
gcccauucccacgacuuau

SEQ ID NO: 1060571 - RNA, 19 nt, Artificial Sequence
  Description of Artificial Sequence: Synthetic oligonucleotide
  Antisense strand to SEQ ID NO: 1060570
auaagucgugggaaugggc

SEQ ID NO: 1060572 - RNA, 19 nt, Artificial Sequence
  Description of Artificial Sequence: Synthetic oligonucleotide
  Sense strand starting at position 1447 of SEQ ID NO: 915186
augugcucacaguaugacu

SEQ ID NO: 1060573 - RNA, 19 nt, Artificial Sequence
  Description of Artificial Sequence: Synthetic oligonucleotide
  Antisense strand to SEQ ID NO: 1060572
agucauacugugagcacau

SEQ ID NO: 1060574 - RNA, 19 nt, Artificial Sequence
  Description of Artificial Sequence: Synthetic oligonucleotide
  Sense strand starting at position 1560 of SEQ ID NO: 915186
caguuugaucacgaccgau

SEQ ID NO: 1060575 - RNA, 19 nt, Artificial Sequence
  Description of Artificial Sequence: Synthetic oligonucleotide
  Antisense strand to SEQ ID NO: 1060574
aucggucgugaucaaacug

SEQ ID NO: 1060576 - RNA, 19 nt, Artificial Sequence
  Description of Artificial Sequence: Synthetic oligonucleotide
  Sense strand starting at position 1733 of SEQ ID NO: 915186
accagaauauggccaacau

SEQ ID NO: 1060577 - RNA, 19 nt, Artificial Sequence
  Description of Artificial Sequence: Synthetic oligonucleotide
  Antisense strand to SEQ ID NO: 1060576
auguuggccauauucuggu

SEQ ID NO: 1060578 - RNA, 19 nt, Artificial Sequence
  Description of Artificial Sequence: Synthetic oligonucleotide
  Sense strand starting at position 1745 of SEQ ID NO: 915186
ccaacaucuuagguugagu

SEQ ID NO: 1060579 - RNA, 19 nt, Artificial Sequence
  Description of Artificial Sequence: Synthetic oligonucleotide
  Antisense strand to SEQ ID NO: 1060578
acucaaccuaagauguugg

SEQ ID NO: 1060580 - RNA, 19 nt, Artificial Sequence
  Description of Artificial Sequence: Synthetic oligonucleotide
  Sense strand starting at position 1835 of SEQ ID NO: 915186
ggucaauucugauuacaug

SEQ ID NO: 1060581 - RNA, 19 nt, Artificial Sequence
  Description of Artificial Sequence: Synthetic oligonucleotide
  Antisense strand to SEQ ID NO: 1060580
cauguaaucagaauugacc

SEQ ID NO: 1060582 - RNA, 19 nt, Artificial Sequence
  Description of Artificial Sequence: Synthetic oligonucleotide
  Sense strand starting at position 1994 of SEQ ID NO: 915186
gcaccauggacugguuaau

SEQ ID NO: 1060583 - RNA, 19 nt, Artificial Sequence
  Description of Artificial Sequence: Synthetic oligonucleotide
  Antisense strand to SEQ ID NO: 1060582
auuaaccaguccauggugc

SEQ ID NO: 1060584 - RNA, 19 nt, Artificial Sequence
  Description of Artificial Sequence: Synthetic oligonucleotide
  Sense strand starting at position 2036 of SEQ ID NO: 915186
cuacucucugcagaugaua

SEQ ID NO: 1060585 - RNA, 19 nt, Artificial Sequence
  Description of Artificial Sequence: Synthetic oligonucleotide
  Antisense strand to SEQ ID NO: 1060584
uaucaucugcagagaguag

SEQ ID NO: 1060586 - RNA, 19 nt, Artificial Sequence
  Description of Artificial Sequence: Synthetic oligonucleotide
  Sense strand starting at position 2104 of SEQ ID NO: 915186
auuggauaccagggugauu

SEQ ID NO: 1060587 - RNA, 19 nt, Artificial Sequence
  Description of Artificial Sequence: Synthetic oligonucleotide
  Antisense strand to SEQ ID NO: 1060586
aaucacccugguauccaau

SEQ ID NO: 1060588 - RNA, 19 nt, Artificial Sequence
  Description of Artificial Sequence: Synthetic oligonucleotide
  Sense strand starting at position 2113 of SEQ ID NO: 915186
cagggugauuggguuugau

SEQ ID NO: 1060589 - RNA, 19 nt, Artificial Sequence
  Description of Artificial Sequence: Synthetic oligonucleotide
  Antisense strand to SEQ ID NO: 1060588
aucaaacccaaucacccug

SEQ ID NO: 1060590 - RNA, 19 nt, Artificial Sequence
  Description of Artificial Sequence: Synthetic oligonucleotide
  Sense strand starting at position 2116 of SEQ ID NO: 915186
ggugauuggguuugauuau

SEQ ID NO: 1060591 - RNA, 19 nt, Artificial Sequence
  Description of Artificial Sequence: Synthetic oligonucleotide
  Antisense strand to SEQ ID NO: 1060590
auaaucaaacccaaucacc

SEQ ID NO: 1060592 - RNA, 19 nt, Artificial Sequence
  Description of Artificial Sequence: Synthetic oligonucleotide
  Sense strand starting at position 2705 of SEQ ID NO: 915186
agcugauuagcuuaaacuu

SEQ ID NO: 1060593 - RNA, 19 nt, Artificial Sequence
  Description of Artificial Sequence: Synthetic oligonucleotide
  Antisense strand to SEQ ID NO: 1060592
aaguuuaagcuaaucagcu

SEQ ID NO: 1060594 - RNA, 19 nt, Artificial Sequence
  Description of Artificial Sequence: Synthetic oligonucleotide
  Sense strand starting at position 2776 of SEQ ID NO: 915186
guaggaagucaguagaguu

SEQ ID NO: 1060595 - RNA, 19 nt, Artificial Sequence
  Description of Artificial Sequence: Synthetic oligonucleotide
  Antisense strand to SEQ ID NO: 1060594
aacucuacugacuuccuac

SEQ ID NO: 1060596 - RNA, 19 nt, Artificial Sequence
  Description of Artificial Sequence: Synthetic oligonucleotide
  Sense strand starting at position 2822 of SEQ ID NO: 915186
cuuugaaguuagcuuugaa

SEQ ID NO: 1060597 - RNA, 19 nt, Artificial Sequence
  Description of Artificial Sequence: Synthetic oligonucleotide
  Antisense strand to SEQ ID NO: 1060596
uucaaagcuaacuucaaag

SEQ ID NO: 1060598 - RNA, 19 nt, Artificial Sequence
  Description of Artificial Sequence: Synthetic oligonucleotide
  Sense strand starting at position 2825 of SEQ ID NO: 915186
ugaaguuagcuuugaaucu

SEQ ID NO: 1060599 - RNA, 19 nt, Artificial Sequence
  Description of Artificial Sequence: Synthetic oligonucleotide
  Antisense strand to SEQ ID NO: 1060598
agauucaaagcuaacuuca

SEQ ID NO: 1060600 - RNA, 19 nt, Artificial Sequence
  Description of Artificial Sequence: Synthetic oligonucleotide
  Sense strand starting at position 2834 of SEQ ID NO: 915186
cuuugaaucuaggucaguu

SEQ ID NO: 1060601 - RNA, 19 nt, Artificial Sequence
  Description of Artificial Sequence: Synthetic oligonucleotide
  Antisense strand to SEQ ID NO: 1060600
aacugaccuagauucaaag

SEQ ID NO: 1060602 - RNA, 19 nt, Artificial Sequence
  Description of Artificial Sequence: Synthetic oligonucleotide
  Sense strand starting at position 2838 of SEQ ID NO: 915186
gaaucuaggucaguuacca

SEQ ID NO: 1060603 - RNA, 19 nt, Artificial Sequence
  Description of Artificial Sequence: Synthetic oligonucleotide
  Antisense strand to SEQ ID NO: 1060602
ugguaacugaccuagauuc

SEQ ID NO: 1060604 - RNA, 19 nt, Artificial Sequence
  Description of Artificial Sequence: Synthetic oligonucleotide
  Sense strand starting at position 2994 of SEQ ID NO: 915186
gaaauuguggccuauacug

SEQ ID NO: 1060605 - RNA, 19 nt, Artificial Sequence
  Description of Artificial Sequence: Synthetic oligonucleotide
  Antisense strand to SEQ ID NO: 1060604
caguauaggccacaauuuc

SEQ ID NO: 1060606 - RNA, 19 nt, Artificial Sequence
  Description of Artificial Sequence: Synthetic oligonucleotide
  Sense strand starting at position 3044 of SEQ ID NO: 915186
gugugaaaguaaccauagu

SEQ ID NO: 1060607 - RNA, 19 nt, Artificial Sequence
  Description of Artificial Sequence: Synthetic oligonucleotide
  Antisense strand to SEQ ID NO: 1060606
acuaugguuacuuucacac

SEQ ID NO: 1060608 - RNA, 19 nt, Artificial Sequence
  Description of Artificial Sequence: Synthetic oligonucleotide
  Sense strand starting at position 3299 of SEQ ID NO: 915186
gcagcagacucauuaacug

SEQ ID NO: 1060609 - RNA, 19 nt, Artificial Sequence
  Description of Artificial Sequence: Synthetic oligonucleotide
  Antisense strand to SEQ ID NO: 1060608
caguuaaugagucugcugc

SEQ ID NO: 1060610 - RNA, 19 nt, Artificial Sequence
  Description of Artificial Sequence: Synthetic oligonucleotide
  Sense strand starting at position 3460 of SEQ ID NO: 915186
uuuggugaucacuaucaau

SEQ ID NO: 1060611 - RNA, 19 nt, Artificial Sequence
  Description of Artificial Sequence: Synthetic oligonucleotide
  Antisense strand to SEQ ID NO: 1060610
auugauagugaucaccaaa

SEQ ID NO: 1060612 - RNA, 19 nt, Artificial Sequence
  Description of Artificial Sequence: Synthetic oligonucleotide
  Sense strand starting at position 3479 of SEQ ID NO: 915186
cucagaaucgauggcacaa

SEQ ID NO: 1060613 - RNA, 19 nt, Artificial Sequence
  Description of Artificial Sequence: Synthetic oligonucleotide
  Antisense strand to SEQ ID NO: 1060612
uugugccaucgauucugag

SEQ ID NO: 1060614 - RNA, 19 nt, Artificial Sequence
  Description of Artificial Sequence: Synthetic oligonucleotide
  Sense strand starting at position 3553 of SEQ ID NO: 915186
guuugaaagccucaguucu

SEQ ID NO: 1060615 - RNA, 19 nt, Artificial Sequence
  Description of Artificial Sequence: Synthetic oligonucleotide
  Antisense strand to SEQ ID NO: 1060614
agaacugaggcuuucaaac

SEQ ID NO: 1060616 - RNA, 19 nt, Artificial Sequence
  Description of Artificial Sequence: Synthetic oligonucleotide
  Sense strand starting at position 5 of SEQ ID NO: 915187
auuaaagaccuuuguuaug

SEQ ID NO: 1060617 - RNA, 19 nt, Artificial Sequence
  Description of Artificial Sequence: Synthetic oligonucleotide
  Antisense strand to SEQ ID NO: 1060616
cauaacaaaggucuuuaau

SEQ ID NO: 1060618 - RNA, 19 nt, Artificial Sequence
  Description of Artificial Sequence: Synthetic oligonucleotide
  Sense strand starting at position 11 of SEQ ID NO: 915187
gaccuuuguuauguaaugu

SEQ ID NO: 1060619 - RNA, 19 nt, Artificial Sequence
  Description of Artificial Sequence: Synthetic oligonucleotide
  Antisense strand to SEQ ID NO: 1060618
acauuacauaacaaagguc

SEQ ID NO: 1060620 - RNA, 19 nt, Artificial Sequence
  Description of Artificial Sequence: Synthetic oligonucleotide
  Sense strand starting at position 39 of SEQ ID NO: 915187
uguggugucuuagcugaaa

SEQ ID NO: 1060621 - RNA, 19 nt, Artificial Sequence
  Description of Artificial Sequence: Synthetic oligonucleotide
  Antisense strand to SEQ ID NO: 1060620
uuucagcuaagacaccaca

SEQ ID NO: 1060622 - RNA, 19 nt, Artificial Sequence
  Description of Artificial Sequence: Synthetic oligonucleotide
  Sense strand starting at position 249 of SEQ ID NO: 915187
agggcagauugacaagaaa

SEQ ID NO: 1060623 - RNA, 19 nt, Artificial Sequence
  Description of Artificial Sequence: Synthetic oligonucleotide
  Antisense strand to SEQ ID NO: 1060622
uuucuugucaaucugcccu

SEQ ID NO: 1060624 - RNA, 19 nt, Artificial Sequence
  Description of Artificial Sequence: Synthetic oligonucleotide
  Sense strand starting at position 456 of SEQ ID NO: 915187
agaggauucuuugaauuug

SEQ ID NO: 1060625 - RNA, 19 nt, Artificial Sequence
  Description of Artificial Sequence: Synthetic oligonucleotide
  Antisense strand to SEQ ID NO: 1060624
caaauucaaagaauccucu

SEQ ID NO: 1060626 - RNA, 19 nt, Artificial Sequence
  Description of Artificial Sequence: Synthetic oligonucleotide
  Sense strand starting at position 525 of SEQ ID NO: 915187
aggagaugagccuguagaa

SEQ ID NO: 1060627 - RNA, 19 nt, Artificial Sequence
  Description of Artificial Sequence: Synthetic oligonucleotide
  Antisense strand to SEQ ID NO: 1060626
uucuacaggcucaucuccu

SEQ ID NO: 1060628 - RNA, 19 nt, Artificial Sequence
  Description of Artificial Sequence: Synthetic oligonucleotide
  Sense strand starting at position 587 of SEQ ID NO: 915187
aguagagagggcugugauu

SEQ ID NO: 1060629 - RNA, 19 nt, Artificial Sequence
  Description of Artificial Sequence: Synthetic oligonucleotide
  Antisense strand to SEQ ID NO: 1060628
aaucacagcccucucuacu

SEQ ID NO: 1060630 - RNA, 19 nt, Artificial Sequence
  Description of Artificial Sequence: Synthetic oligonucleotide
  Sense strand starting at position 683 of SEQ ID NO: 915187
gggaucuauagaggagcuu

SEQ ID NO: 1060631 - RNA, 19 nt, Artificial Sequence
  Description of Artificial Sequence: Synthetic oligonucleotide
  Antisense strand to SEQ ID NO: 1060630
aagcuccucuauagauccc

SEQ ID NO: 1060632 - RNA, 19 nt, Artificial Sequence
  Description of Artificial Sequence: Synthetic oligonucleotide
  Sense strand starting at position 718 of SEQ ID NO: 915187
gcagacuuagguugaaaua

SEQ ID NO: 1060633 - RNA, 19 nt, Artificial Sequence
  Description of Artificial Sequence: Synthetic oligonucleotide
  Antisense strand to SEQ ID NO: 1060632
uauuucaaccuaagucugc

SEQ ID NO: 1060634 - RNA, 19 nt, Artificial Sequence
  Description of Artificial Sequence: Synthetic oligonucleotide
  Sense strand starting at position 937 of SEQ ID NO: 915187
agucauaugcagugggaug

SEQ ID NO: 1060635 - RNA, 19 nt, Artificial Sequence
  Description of Artificial Sequence: Synthetic oligonucleotide
  Antisense strand to SEQ ID NO: 1060634
caucccacugcauaugacu

SEQ ID NO: 1060636 - RNA, 19 nt, Artificial Sequence
  Description of Artificial Sequence: Synthetic oligonucleotide
  Sense strand starting at position 938 of SEQ ID NO: 915187
gucauaugcagugggauga

SEQ ID NO: 1060637 - RNA, 19 nt, Artificial Sequence
  Description of Artificial Sequence: Synthetic oligonucleotide
  Antisense strand to SEQ ID NO: 1060636
ucaucccacugcauaugac

SEQ ID NO: 1060638 - RNA, 19 nt, Artificial Sequence
  Description of Artificial Sequence: Synthetic oligonucleotide
  Sense strand starting at position 1023 of SEQ ID NO: 915187
uuguuaccacuggacauua

SEQ ID NO: 1060639 - RNA, 19 nt, Artificial Sequence
  Description of Artificial Sequence: Synthetic oligonucleotide
  Antisense strand to SEQ ID NO: 1060638
uaauguccagugguaacaa

SEQ ID NO: 1060640 - RNA, 19 nt, Artificial Sequence
  Description of Artificial Sequence: Synthetic oligonucleotide
  Sense strand starting at position 2036 of SEQ ID NO: 915187
caugacuccugacagggaa

SEQ ID NO: 1060641 - RNA, 19 nt, Artificial Sequence
  Description of Artificial Sequence: Synthetic oligonucleotide
  Antisense strand to SEQ ID NO: 1060640
uucccugucaggagucaug

SEQ ID NO: 1060642 - RNA, 19 nt, Artificial Sequence
  Description of Artificial Sequence: Synthetic oligonucleotide
  Sense strand starting at position 2102 of SEQ ID NO: 915187
auggcauacguguaggagu

SEQ ID NO: 1060643 - RNA, 19 nt, Artificial Sequence
  Description of Artificial Sequence: Synthetic oligonucleotide
  Antisense strand to SEQ ID NO: 1060642
acuccuacacguaugccau

SEQ ID NO: 1060644 - RNA, 19 nt, Artificial Sequence
  Description of Artificial Sequence: Synthetic oligonucleotide
  Sense strand starting at position 2177 of SEQ ID NO: 915187
gauaauuaaggucgcaauu

SEQ ID NO: 1060645 - RNA, 19 nt, Artificial Sequence
  Description of Artificial Sequence: Synthetic oligonucleotide
  Antisense strand to SEQ ID NO: 1060644
aauugcgaccuuaauuauc

SEQ ID NO: 1060646 - RNA, 19 nt, Artificial Sequence
  Description of Artificial Sequence: Synthetic oligonucleotide
  Sense strand starting at position 2188 of SEQ ID NO: 915187
ucgcaauucuagcuaagau

SEQ ID NO: 1060647 - RNA, 19 nt, Artificial Sequence
  Description of Artificial Sequence: Synthetic oligonucleotide
  Antisense strand to SEQ ID NO: 1060646
aucuuagcuagaauugcga

SEQ ID NO: 1060648 - RNA, 19 nt, Artificial Sequence
  Description of Artificial Sequence: Synthetic oligonucleotide
  Sense strand starting at position 2207 of SEQ ID NO: 915187
aggagaauccuuugcuccu

SEQ ID NO: 1060649 - RNA, 19 nt, Artificial Sequence
  Description of Artificial Sequence: Synthetic oligonucleotide
  Antisense strand to SEQ ID NO: 1060648
aggagcaaaggauucuccu

SEQ ID NO: 1060650 - RNA, 19 nt, Artificial Sequence
  Description of Artificial Sequence: Synthetic oligonucleotide
  Sense strand starting at position 2208 of SEQ ID NO: 915187
ggagaauccuuugcuccua

SEQ ID NO: 1060651 - RNA, 19 nt, Artificial Sequence
  Description of Artificial Sequence: Synthetic oligonucleotide
  Antisense strand to SEQ ID NO: 1060650
uaggagcaaaggauucucc

SEQ ID NO: 1060652 - RNA, 19 nt, Artificial Sequence
  Description of Artificial Sequence: Synthetic oligonucleotide
  Sense strand starting at position 2236 of SEQ ID NO: 915187
auguauuguagugggagga

SEQ ID NO: 1060653 - RNA, 19 nt, Artificial Sequence
  Description of Artificial Sequence: Synthetic oligonucleotide
  Antisense strand to SEQ ID NO: 1060652
uccucccacuacaauacau

SEQ ID NO: 1060654 - RNA, 19 nt, Artificial Sequence
  Description of Artificial Sequence: Synthetic oligonucleotide
  Sense strand starting at position 2237 of SEQ ID NO: 915187
uguauuguagugggaggaa

SEQ ID NO: 1060655 - RNA, 19 nt, Artificial Sequence
  Description of Artificial Sequence: Synthetic oligonucleotide
  Antisense strand to SEQ ID NO: 1060654
uuccucccacuacaauaca

SEQ ID NO: 1060656 - RNA, 19 nt, Artificial Sequence
  Description of Artificial Sequence: Synthetic oligonucleotide
  Sense strand starting at position 2291 of SEQ ID NO: 915187
ugguauagauagccugaga

SEQ ID NO: 1060657 - RNA, 19 nt, Artificial Sequence
  Description of Artificial Sequence: Synthetic oligonucleotide
  Antisense strand to SEQ ID NO: 1060656
ucucaggcuaucuauacca

SEQ ID NO: 1060658 - RNA, 19 nt, Artificial Sequence
  Description of Artificial Sequence: Synthetic oligonucleotide
  Sense strand starting at position 2385 of SEQ ID NO: 915187
agucucagucucuauauga

SEQ ID NO: 1060659 - RNA, 19 nt, Artificial Sequence
  Description of Artificial Sequence: Synthetic oligonucleotide
  Antisense strand to SEQ ID NO: 1060658
ucauauagagacugagacu

SEQ ID NO: 1060660 - RNA, 19 nt, Artificial Sequence
  Description of Artificial Sequence: Synthetic oligonucleotide
  Sense strand starting at position 2466 of SEQ ID NO: 915187
guguauccuugggcaagau

SEQ ID NO: 1060661 - RNA, 19 nt, Artificial Sequence
  Description of Artificial Sequence: Synthetic oligonucleotide
  Antisense strand to SEQ ID NO: 1060660
aucuugcccaaggauacac

SEQ ID NO: 1060662 - RNA, 19 nt, Artificial Sequence
  Description of Artificial Sequence: Synthetic oligonucleotide
  Sense strand starting at position 2476 of SEQ ID NO: 915187
gggcaagaucucuggaccu

SEQ ID NO: 1060663 - RNA, 19 nt, Artificial Sequence
  Description of Artificial Sequence: Synthetic oligonucleotide
  Antisense strand to SEQ ID NO: 1060662
agguccagagaucuugccc

SEQ ID NO: 1060664 - RNA, 19 nt, Artificial Sequence
  Description of Artificial Sequence: Synthetic oligonucleotide
  Sense strand starting at position 2478 of SEQ ID NO: 915187
gcaagaucucuggaccuca

SEQ ID NO: 1060665 - RNA, 19 nt, Artificial Sequence
  Description of Artificial Sequence: Synthetic oligonucleotide
  Antisense strand to SEQ ID NO: 1060664
ugagguccagagaucuugc

SEQ ID NO: 1060666 - RNA, 19 nt, Artificial Sequence
  Description of Artificial Sequence: Synthetic oligonucleotide
  Sense strand starting at position 2640 of SEQ ID NO: 915187
uggaaucuggagugaaucu

SEQ ID NO: 1060667 - RNA, 19 nt, Artificial Sequence
  Description of Artificial Sequence: Synthetic oligonucleotide
  Antisense strand to SEQ ID NO: 1060666
agauucacuccagauucca

SEQ ID NO: 1060668 - RNA, 19 nt, Artificial Sequence
  Description of Artificial Sequence: Synthetic oligonucleotide
  Sense strand starting at position 2925 of SEQ ID NO: 915187
guagcagccaucugaggaa

SEQ ID NO: 1060669 - RNA, 19 nt, Artificial Sequence
  Description of Artificial Sequence: Synthetic oligonucleotide
  Antisense strand to SEQ ID NO: 1060668
uuccucagauggcugcuac

SEQ ID NO: 1060670 - RNA, 19 nt, Artificial Sequence
  Description of Artificial Sequence: Synthetic oligonucleotide
  Sense strand starting at position 2980 of SEQ ID NO: 915187
gauugacuuaggugggauc

SEQ ID NO: 1060671 - RNA, 19 nt, Artificial Sequence
  Description of Artificial Sequence: Synthetic oligonucleotide
  Antisense strand to SEQ ID NO: 1060670
gaucccaccuaagucaauc

SEQ ID NO: 1060672 - RNA, 19 nt, Artificial Sequence
  Description of Artificial Sequence: Synthetic oligonucleotide
  Sense strand starting at position 3034 of SEQ ID NO: 915187
auaaaugaaugaggaagaa

SEQ ID NO: 1060673 - RNA, 19 nt, Artificial Sequence
  Description of Artificial Sequence: Synthetic oligonucleotide
  Antisense strand to SEQ ID NO: 1060672
uucuuccucauucauuuau

SEQ ID NO: 1060674 - RNA, 19 nt, Artificial Sequence
  Description of Artificial Sequence: Synthetic oligonucleotide
  Sense strand starting at position 3105 of SEQ ID NO: 915187
gcuucucuucgcuuuaauc

SEQ ID NO: 1060675 - RNA, 19 nt, Artificial Sequence
  Description of Artificial Sequence: Synthetic oligonucleotide
  Antisense strand to SEQ ID NO: 1060674
gauuaaagcgaagagaagc

SEQ ID NO: 1060676 - RNA, 19 nt, Artificial Sequence
  Description of Artificial Sequence: Synthetic oligonucleotide
  Sense strand starting at position 3301 of SEQ ID NO: 915187
gguggaaagaucugggcaa

SEQ ID NO: 1060677 - RNA, 19 nt, Artificial Sequence
  Description of Artificial Sequence: Synthetic oligonucleotide
  Antisense strand to SEQ ID NO: 1060676
uugcccagaucuuuccacc

SEQ ID NO: 1060678 - RNA, 19 nt, Artificial Sequence
  Description of Artificial Sequence: Synthetic oligonucleotide
  Sense strand starting at position 3352 of SEQ ID NO: 915187
cacugaaguccgggagaaa

SEQ ID NO: 1060679 - RNA, 19 nt, Artificial Sequence
  Description of Artificial Sequence: Synthetic oligonucleotide
  Antisense strand to SEQ ID NO: 1060678
uuucucccggacuucagug

SEQ ID NO: 1060680 - RNA, 19 nt, Artificial Sequence
  Description of Artificial Sequence: Synthetic oligonucleotide
  Sense strand starting at position 3377 of SEQ ID NO: 915187
ugguuuauucuuuaauagc

SEQ ID NO: 1060681 - RNA, 19 nt, Artificial Sequence
  Description of Artificial Sequence: Synthetic oligonucleotide
  Antisense strand to SEQ ID NO: 1060680
gcuauuaaagaauaaacca

SEQ ID NO: 1060682 - RNA, 19 nt, Artificial Sequence
  Description of Artificial Sequence: Synthetic oligonucleotide
  Sense strand starting at position 3412 of SEQ ID NO: 915187
uguaauuucuugucucuca

SEQ ID NO: 1060683 - RNA, 19 nt, Artificial Sequence
  Description of Artificial Sequence: Synthetic oligonucleotide
  Antisense strand to SEQ ID NO: 1060682
ugagagacaagaaauuaca

SEQ ID NO: 1060684 - RNA, 19 nt, Artificial Sequence
  Description of Artificial Sequence: Synthetic oligonucleotide
  Sense strand starting at position 3483 of SEQ ID NO: 915187
gucucuacugcuuaccaca

SEQ ID NO: 1060685 - RNA, 19 nt, Artificial Sequence
  Description of Artificial Sequence: Synthetic oligonucleotide
  Antisense strand to SEQ ID NO: 1060684
ugugguaagcaguagagac

SEQ ID NO: 1060686 - RNA, 19 nt, Artificial Sequence
  Description of Artificial Sequence: Synthetic oligonucleotide
  Sense strand starting at position 3506 of SEQ ID NO: 915187
cuggcauguaguuagcuau

SEQ ID NO: 1060687 - RNA, 19 nt, Artificial Sequence
  Description of Artificial Sequence: Synthetic oligonucleotide
  Antisense strand to SEQ ID NO: 1060686
auagcuaacuacaugccag

SEQ ID NO: 1060688 - RNA, 19 nt, Artificial Sequence
  Description of Artificial Sequence: Synthetic oligonucleotide
  Sense strand starting at position 3509 of SEQ ID NO: 915187
gcauguaguuagcuaugaa

SEQ ID NO: 1060689 - RNA, 19 nt, Artificial Sequence
  Description of Artificial Sequence: Synthetic oligonucleotide
  Antisense strand to SEQ ID NO: 1060688
uucauagcuaacuacaugc

SEQ ID NO: 1060690 - RNA, 19 nt, Artificial Sequence
  Description of Artificial Sequence: Synthetic oligonucleotide
  Sense strand starting at position 3512 of SEQ ID NO: 915187
uguaguuagcuaugaauaa

SEQ ID NO: 1060691 - RNA, 19 nt, Artificial Sequence
  Description of Artificial Sequence: Synthetic oligonucleotide
  Antisense strand to SEQ ID NO: 1060690
uuauucauagcuaacuaca

SEQ ID NO: 1060692 - RNA, 19 nt, Artificial Sequence
  Description of Artificial Sequence: Synthetic oligonucleotide
  Sense strand starting at position 3612 of SEQ ID NO: 915187
agcuuuagauauccaugaa

SEQ ID NO: 1060693 - RNA, 19 nt, Artificial Sequence
  Description of Artificial Sequence: Synthetic oligonucleotide
  Antisense strand to SEQ ID NO: 1060692
uucauggauaucuaaagcu

SEQ ID NO: 1060694 - RNA, 19 nt, Artificial Sequence
  Description of Artificial Sequence: Synthetic oligonucleotide
  Sense strand starting at position 3893 of SEQ ID NO: 915187
gagaccaguccgugcaaca

SEQ ID NO: 1060695 - RNA, 19 nt, Artificial Sequence
  Description of Artificial Sequence: Synthetic oligonucleotide
  Antisense strand to SEQ ID NO: 1060694
uguugcacggacuggucuc

SEQ ID NO: 1060696 - RNA, 19 nt, Artificial Sequence
  Description of Artificial Sequence: Synthetic oligonucleotide
  Sense strand starting at position 12 of SEQ ID NO: 915188
aguggagguuucuucccau

SEQ ID NO: 1060697 - RNA, 19 nt, Artificial Sequence
  Description of Artificial Sequence: Synthetic oligonucleotide
  Antisense strand to SEQ ID NO: 1060696
augggaagaaaccuccacu

SEQ ID NO: 1060698 - RNA, 19 nt, Artificial Sequence
  Description of Artificial Sequence: Synthetic oligonucleotide
  Sense strand starting at position 15 of SEQ ID NO: 915188
ggagguuucuucccauaga

SEQ ID NO: 1060699 - RNA, 19 nt, Artificial Sequence
  Description of Artificial Sequence: Synthetic oligonucleotide
  Antisense strand to SEQ ID NO: 1060698
ucuaugggaagaaaccucc

SEQ ID NO: 1060700 - RNA, 19 nt, Artificial Sequence
  Description of Artificial Sequence: Synthetic oligonucleotide
  Sense strand starting at position 18 of SEQ ID NO: 915188
gguuucuucccauagauac

SEQ ID NO: 1060701 - RNA, 19 nt, Artificial Sequence
  Description of Artificial Sequence: Synthetic oligonucleotide
  Antisense strand to SEQ ID NO: 1060700
guaucuaugggaagaaacc

SEQ ID NO: 1060702 - RNA, 19 nt, Artificial Sequence
  Description of Artificial Sequence: Synthetic oligonucleotide
  Sense strand starting at position 31 of SEQ ID NO: 915188
agauacuguuuaucuguua

SEQ ID NO: 1060703 - RNA, 19 nt, Artificial Sequence
  Description of Artificial Sequence: Synthetic oligonucleotide
  Antisense strand to SEQ ID NO: 1060702
uaacagauaaacaguaucu

SEQ ID NO: 1060704 - RNA, 19 nt, Artificial Sequence
  Description of Artificial Sequence: Synthetic oligonucleotide
  Sense strand starting at position 118 of SEQ ID NO: 915188
guaaauaaccaguguaagg

SEQ ID NO: 1060705 - RNA, 19 nt, Artificial Sequence
  Description of Artificial Sequence: Synthetic oligonucleotide
  Antisense strand to SEQ ID NO: 1060704
ccuuacacugguuauuuac

SEQ ID NO: 1060706 - RNA, 19 nt, Artificial Sequence
  Description of Artificial Sequence: Synthetic oligonucleotide
  Sense strand starting at position 120 of SEQ ID NO: 915188
aaauaaccaguguaagguu

SEQ ID NO: 1060707 - RNA, 19 nt, Artificial Sequence
  Description of Artificial Sequence: Synthetic oligonucleotide
  Antisense strand to SEQ ID NO: 1060706
aaccuuacacugguuauuu

SEQ ID NO: 1060708 - RNA, 19 nt, Artificial Sequence
  Description of Artificial Sequence: Synthetic oligonucleotide
  Sense strand starting at position 260 of SEQ ID NO: 915188
gaauguguagcuuaaacau

SEQ ID NO: 1060709 - RNA, 19 nt, Artificial Sequence
  Description of Artificial Sequence: Synthetic oligonucleotide
  Antisense strand to SEQ ID NO: 1060708
auguuuaagcuacacauuc

SEQ ID NO: 1060710 - RNA, 19 nt, Artificial Sequence
  Description of Artificial Sequence: Synthetic oligonucleotide
  Sense strand starting at position 386 of SEQ ID NO: 915188
aggugaugaggcuguauag

SEQ ID NO: 1060711 - RNA, 19 nt, Artificial Sequence
  Description of Artificial Sequence: Synthetic oligonucleotide
  Antisense strand to SEQ ID NO: 1060710
cuauacagccucaucaccu

SEQ ID NO: 1060712 - RNA, 19 nt, Artificial Sequence
  Description of Artificial Sequence: Synthetic oligonucleotide
  Sense strand starting at position 419 of SEQ ID NO: 915188
cugacauugcuuuauauug

SEQ ID NO: 1060713 - RNA, 19 nt, Artificial Sequence
  Description of Artificial Sequence: Synthetic oligonucleotide
  Antisense strand to SEQ ID NO: 1060712
caauauaaagcaaugucag

SEQ ID NO: 1060714 - RNA, 19 nt, Artificial Sequence
  Description of Artificial Sequence: Synthetic oligonucleotide
  Sense strand starting at position 674 of SEQ ID NO: 915188
auaugugaucuuuggucau

SEQ ID NO: 1060715 - RNA, 19 nt, Artificial Sequence
  Description of Artificial Sequence: Synthetic oligonucleotide
  Antisense strand to SEQ ID NO: 1060714
augaccaaagaucacauau

SEQ ID NO: 1060716 - RNA, 19 nt, Artificial Sequence
  Description of Artificial Sequence: Synthetic oligonucleotide
  Sense strand starting at position 677 of SEQ ID NO: 915188
ugugaucuuuggucauuuc

SEQ ID NO: 1060717 - RNA, 19 nt, Artificial Sequence
  Description of Artificial Sequence: Synthetic oligonucleotide
  Antisense strand to SEQ ID NO: 1060716
gaaaugaccaaagaucaca

SEQ ID NO: 1060718 - RNA, 19 nt, Artificial Sequence
  Description of Artificial Sequence: Synthetic oligonucleotide
  Sense strand starting at position 1178 of SEQ ID NO: 915188
caguauggugcugaagaaa

SEQ ID NO: 1060719 - RNA, 19 nt, Artificial Sequence
  Description of Artificial Sequence: Synthetic oligonucleotide
  Antisense strand to SEQ ID NO: 1060718
uuucuucagcaccauacug

SEQ ID NO: 1060720 - RNA, 19 nt, Artificial Sequence
  Description of Artificial Sequence: Synthetic oligonucleotide
  Sense strand starting at position 1354 of SEQ ID NO: 915188
uucuguuaagggugaaauu

SEQ ID NO: 1060721 - RNA, 19 nt, Artificial Sequence
  Description of Artificial Sequence: Synthetic oligonucleotide
  Antisense strand to SEQ ID NO: 1060720
aauuucacccuuaacagaa

SEQ ID NO: 1060722 - RNA, 19 nt, Artificial Sequence
  Description of Artificial Sequence: Synthetic oligonucleotide
  Sense strand starting at position 1483 of SEQ ID NO: 915188
gcgcauuccgcaccacaau

SEQ ID NO: 1060723 - RNA, 19 nt, Artificial Sequence
  Description of Artificial Sequence: Synthetic oligonucleotide
  Antisense strand to SEQ ID NO: 1060722
auuguggugcggaaugcgc

SEQ ID NO: 1060724 - RNA, 19 nt, Artificial Sequence
  Description of Artificial Sequence: Synthetic oligonucleotide
  Sense strand starting at position 1518 of SEQ ID NO: 915188
gccacaaauugauuaguga

SEQ ID NO: 1060725 - RNA, 19 nt, Artificial Sequence
  Description of Artificial Sequence: Synthetic oligonucleotide
  Antisense strand to SEQ ID NO: 1060724
ucacuaaucaauuuguggc

SEQ ID NO: 1060726 - RNA, 19 nt, Artificial Sequence
  Description of Artificial Sequence: Synthetic oligonucleotide
  Sense strand starting at position 1580 of SEQ ID NO: 915188
gucauaggccaugaccaua

SEQ ID NO: 1060727 - RNA, 19 nt, Artificial Sequence
  Description of Artificial Sequence: Synthetic oligonucleotide
  Antisense strand to SEQ ID NO: 1060726
uauggucauggccuaugac

SEQ ID NO: 1060728 - RNA, 19 nt, Artificial Sequence
  Description of Artificial Sequence: Synthetic oligonucleotide
  Sense strand starting at position 1663 of SEQ ID NO: 915188
agcugaucgaccuaagauc

SEQ ID NO: 1060729 - RNA, 19 nt, Artificial Sequence
  Description of Artificial Sequence: Synthetic oligonucleotide
  Antisense strand to SEQ ID NO: 1060728
gaucuuaggucgaucagcu

SEQ ID NO: 1060730 - RNA, 19 nt, Artificial Sequence
  Description of Artificial Sequence: Synthetic oligonucleotide
  Sense strand starting at position 1945 of SEQ ID NO: 915188
acgccauaggcugaaucau

SEQ ID NO: 1060731 - RNA, 19 nt, Artificial Sequence
  Description of Artificial Sequence: Synthetic oligonucleotide
  Antisense strand to SEQ ID NO: 1060730
augauucagccuauggcgu

SEQ ID NO: 1060732 - RNA, 19 nt, Artificial Sequence
  Description of Artificial Sequence: Synthetic oligonucleotide
  Sense strand starting at position 1975 of SEQ ID NO: 915188
gcuucugaugacuauguuu

SEQ ID NO: 1060733 - RNA, 19 nt, Artificial Sequence
  Description of Artificial Sequence: Synthetic oligonucleotide
  Antisense strand to SEQ ID NO: 1060732
aaacauagucaucagaagc

SEQ ID NO: 1060734 - RNA, 19 nt, Artificial Sequence
  Description of Artificial Sequence: Synthetic oligonucleotide
  Sense strand starting at position 1977 of SEQ ID NO: 915188
uucugaugacuauguuuau

SEQ ID NO: 1060735 - RNA, 19 nt, Artificial Sequence
  Description of Artificial Sequence: Synthetic oligonucleotide
  Antisense strand to SEQ ID NO: 1060734
auaaacauagucaucagaa

SEQ ID NO: 1060736 - RNA, 19 nt, Artificial Sequence
  Description of Artificial Sequence: Synthetic oligonucleotide
  Sense strand starting at position 1986 of SEQ ID NO: 915188
cuauguuuaugggcagaua

SEQ ID NO: 1060737 - RNA, 19 nt, Artificial Sequence
  Description of Artificial Sequence: Synthetic oligonucleotide
  Antisense strand to SEQ ID NO: 1060736
uaucugcccauaaacauag

SEQ ID NO: 1060738 - RNA, 19 nt, Artificial Sequence
  Description of Artificial Sequence: Synthetic oligonucleotide
  Sense strand starting at position 1989 of SEQ ID NO: 915188
uguuuaugggcagauacaa

SEQ ID NO: 1060739 - RNA, 19 nt, Artificial Sequence
  Description of Artificial Sequence: Synthetic oligonucleotide
  Antisense strand to SEQ ID NO: 1060738
uuguaucugcccauaaaca

SEQ ID NO: 1060740 - RNA, 19 nt, Artificial Sequence
  Description of Artificial Sequence: Synthetic oligonucleotide
  Sense strand starting at position 1998 of SEQ ID NO: 915188
gcagauacaagagguuauu

SEQ ID NO: 1060741 - RNA, 19 nt, Artificial Sequence
  Description of Artificial Sequence: Synthetic oligonucleotide
  Antisense strand to SEQ ID NO: 1060740
aauaaccucuuguaucugc

SEQ ID NO: 1060742 - RNA, 19 nt, Artificial Sequence
  Description of Artificial Sequence: Synthetic oligonucleotide
  Sense strand starting at position 2142 of SEQ ID NO: 915188
uaaauaaugguguggucua

SEQ ID NO: 1060743 - RNA, 19 nt, Artificial Sequence
  Description of Artificial Sequence: Synthetic oligonucleotide
  Antisense strand to SEQ ID NO: 1060742
uagaccacaccauuauuua

SEQ ID NO: 1060744 - RNA, 19 nt, Artificial Sequence
  Description of Artificial Sequence: Synthetic oligonucleotide
  Sense strand starting at position 2147 of SEQ ID NO: 915188
aaugguguggucuaugaag

SEQ ID NO: 1060745 - RNA, 19 nt, Artificial Sequence
  Description of Artificial Sequence: Synthetic oligonucleotide
  Antisense strand to SEQ ID NO: 1060744
cuucauagaccacaccauu

SEQ ID NO: 1060746 - RNA, 19 nt, Artificial Sequence
  Description of Artificial Sequence: Synthetic oligonucleotide
  Sense strand starting at position 2149 of SEQ ID NO: 915188
ugguguggucuaugaagaa

SEQ ID NO: 1060747 - RNA, 19 nt, Artificial Sequence
  Description of Artificial Sequence: Synthetic oligonucleotide
  Antisense strand to SEQ ID NO: 1060746
uucuucauagaccacacca

SEQ ID NO: 1060748 - RNA, 19 nt, Artificial Sequence
  Description of Artificial Sequence: Synthetic oligonucleotide
  Sense strand starting at position 2221 of SEQ ID NO: 915188
gcaguaaccucacuauaug

SEQ ID NO: 1060749 - RNA, 19 nt, Artificial Sequence
  Description of Artificial Sequence: Synthetic oligonucleotide
  Antisense strand to SEQ ID NO: 1060748
cauauagugagguuacugc

SEQ ID NO: 1060750 - RNA, 19 nt, Artificial Sequence
  Description of Artificial Sequence: Synthetic oligonucleotide
  Sense strand starting at position 2224 of SEQ ID NO: 915188
guaaccucacuauauguua

SEQ ID NO: 1060751 - RNA, 19 nt, Artificial Sequence
  Description of Artificial Sequence: Synthetic oligonucleotide
  Antisense strand to SEQ ID NO: 1060750
uaacauauagugagguuac

SEQ ID NO: 1060752 - RNA, 19 nt, Artificial Sequence
  Description of Artificial Sequence: Synthetic oligonucleotide
  Sense strand starting at position 2265 of SEQ ID NO: 915188
aaauuaggccaguauguua

SEQ ID NO: 1060753 - RNA, 19 nt, Artificial Sequence
  Description of Artificial Sequence: Synthetic oligonucleotide
  Antisense strand to SEQ ID NO: 1060752
uaacauacuggccuaauuu

SEQ ID NO: 1060754 - RNA, 19 nt, Artificial Sequence
  Description of Artificial Sequence: Synthetic oligonucleotide
  Sense strand starting at position 2278 of SEQ ID NO: 915188
auguuaccaguguaagaaa

SEQ ID NO: 1060755 - RNA, 19 nt, Artificial Sequence
  Description of Artificial Sequence: Synthetic oligonucleotide
  Antisense strand to SEQ ID NO: 1060754
uuucuuacacugguaacau

SEQ ID NO: 1060756 - RNA, 19 nt, Artificial Sequence
  Description of Artificial Sequence: Synthetic oligonucleotide
  Sense strand starting at position 2537 of SEQ ID NO: 915188
ccuagugcuccuggaauaa

SEQ ID NO: 1060757 - RNA, 19 nt, Artificial Sequence
  Description of Artificial Sequence: Synthetic oligonucleotide
  Antisense strand to SEQ ID NO: 1060756
uuauuccaggagcacuagg

SEQ ID NO: 1060758 - RNA, 19 nt, Artificial Sequence
  Description of Artificial Sequence: Synthetic oligonucleotide
  Sense strand starting at position 2752 of SEQ ID NO: 915188
auaccacgucauggagaaa

SEQ ID NO: 1060759 - RNA, 19 nt, Artificial Sequence
  Description of Artificial Sequence: Synthetic oligonucleotide
  Antisense strand to SEQ ID NO: 1060758
uuucuccaugacgugguau

SEQ ID NO: 1060760 - RNA, 19 nt, Artificial Sequence
  Description of Artificial Sequence: Synthetic oligonucleotide
  Sense strand starting at position 2755 of SEQ ID NO: 915188
ccacgucauggagaaagua

SEQ ID NO: 1060761 - RNA, 19 nt, Artificial Sequence
  Description of Artificial Sequence: Synthetic oligonucleotide
  Antisense strand to SEQ ID NO: 1060760
uacuuucuccaugacgugg

SEQ ID NO: 1060762 - RNA, 19 nt, Artificial Sequence
  Description of Artificial Sequence: Synthetic oligonucleotide
  Sense strand starting at position 2770 of SEQ ID NO: 915188
aguagaaaguaaucaguaa

SEQ ID NO: 1060763 - RNA, 19 nt, Artificial Sequence
  Description of Artificial Sequence: Synthetic oligonucleotide
  Antisense strand to SEQ ID NO: 1060762
uuacugauuacuuucuacu

SEQ ID NO: 1060764 - RNA, 19 nt, Artificial Sequence
  Description of Artificial Sequence: Synthetic oligonucleotide
  Sense strand starting at position 2901 of SEQ ID NO: 915188
caaggaugccaacauguau

SEQ ID NO: 1060765 - RNA, 19 nt, Artificial Sequence
  Description of Artificial Sequence: Synthetic oligonucleotide
  Antisense strand to SEQ ID NO: 1060764
auacauguuggcauccuug

SEQ ID NO: 1060766 - RNA, 19 nt, Artificial Sequence
  Description of Artificial Sequence: Synthetic oligonucleotide
  Sense strand starting at position 2934 of SEQ ID NO: 915188
augcaauuggugggaaugu

SEQ ID NO: 1060767 - RNA, 19 nt, Artificial Sequence
  Description of Artificial Sequence: Synthetic oligonucleotide
  Antisense strand to SEQ ID NO: 1060766
acauucccaccaauugcau

SEQ ID NO: 1060768 - RNA, 19 nt, Artificial Sequence
  Description of Artificial Sequence: Synthetic oligonucleotide
  Sense strand starting at position 3364 of SEQ ID NO: 915188
ugaaaugauugacaaugga

SEQ ID NO: 1060769 - RNA, 19 nt, Artificial Sequence
  Description of Artificial Sequence: Synthetic oligonucleotide
  Antisense strand to SEQ ID NO: 1060768
uccauugucaaucauuuca

SEQ ID NO: 1060770 - RNA, 19 nt, Artificial Sequence
  Description of Artificial Sequence: Synthetic oligonucleotide
  Sense strand starting at position 3496 of SEQ ID NO: 915188
acaaucuaugcauggaaca

SEQ ID NO: 1060771 - RNA, 19 nt, Artificial Sequence
  Description of Artificial Sequence: Synthetic oligonucleotide
  Antisense strand to SEQ ID NO: 1060770
uguuccaugcauagauugu

SEQ ID NO: 1060772 - RNA, 19 nt, Artificial Sequence
  Description of Artificial Sequence: Synthetic oligonucleotide
  Sense strand starting at position 3839 of SEQ ID NO: 915188
uguuaaaucuuguugaaac

SEQ ID NO: 1060773 - RNA, 19 nt, Artificial Sequence
  Description of Artificial Sequence: Synthetic oligonucleotide
  Antisense strand to SEQ ID NO: 1060772
guuucaacaagauuuaaca

SEQ ID NO: 1060774 - RNA, 19 nt, Artificial Sequence
  Description of Artificial Sequence: Synthetic oligonucleotide
  Sense strand starting at position 3980 of SEQ ID NO: 915188
cuaccuugacgucaguuua

SEQ ID NO: 1060775 - RNA, 19 nt, Artificial Sequence
  Description of Artificial Sequence: Synthetic oligonucleotide
  Antisense strand to SEQ ID NO: 1060774
uaaacugacgucaagguag

SEQ ID NO: 1060776 - RNA, 19 nt, Artificial Sequence
  Description of Artificial Sequence: Synthetic oligonucleotide
  Sense strand starting at position 31 of SEQ ID NO: 915189
cucacugcucuacaguuua

SEQ ID NO: 1060777 - RNA, 19 nt, Artificial Sequence
  Description of Artificial Sequence: Synthetic oligonucleotide
  Antisense strand to SEQ ID NO: 1060776
uaaacuguagagcagugag

SEQ ID NO: 1060778 - RNA, 19 nt, Artificial Sequence
  Description of Artificial Sequence: Synthetic oligonucleotide
  Sense strand starting at position 36 of SEQ ID NO: 915189
ugcucuacaguuuagaaga

SEQ ID NO: 1060779 - RNA, 19 nt, Artificial Sequence
  Description of Artificial Sequence: Synthetic oligonucleotide
  Antisense strand to SEQ ID NO: 1060778
ucuucuaaacuguagagca

SEQ ID NO: 1060780 - RNA, 19 nt, Artificial Sequence
  Description of Artificial Sequence: Synthetic oligonucleotide
  Sense strand starting at position 49 of SEQ ID NO: 915189
agaagaauguguucuggag

SEQ ID NO: 1060781 - RNA, 19 nt, Artificial Sequence
  Description of Artificial Sequence: Synthetic oligonucleotide
  Antisense strand to SEQ ID NO: 1060780
cuccagaacacauucuucu

SEQ ID NO: 1060782 - RNA, 19 nt, Artificial Sequence
  Description of Artificial Sequence: Synthetic oligonucleotide
  Sense strand starting at position 63 of SEQ ID NO: 915189
uggagugcauauuuguauu

SEQ ID NO: 1060783 - RNA, 19 nt, Artificial Sequence
  Description of Artificial Sequence: Synthetic oligonucleotide
  Antisense strand to SEQ ID NO: 1060782
aauacaaauaugcacucca

SEQ ID NO: 1060784 - RNA, 19 nt, Artificial Sequence
  Description of Artificial Sequence: Synthetic oligonucleotide
  Sense strand starting at position 95 of SEQ ID NO: 915189
cuuugagguccucaaauca

SEQ ID NO: 1060785 - RNA, 19 nt, Artificial Sequence
  Description of Artificial Sequence: Synthetic oligonucleotide
  Antisense strand to SEQ ID NO: 1060784
ugauuugaggaccucaaag

SEQ ID NO: 1060786 - RNA, 19 nt, Artificial Sequence
  Description of Artificial Sequence: Synthetic oligonucleotide
  Sense strand starting at position 165 of SEQ ID NO: 915189
gacaccaugugugcuuaga

SEQ ID NO: 1060787 - RNA, 19 nt, Artificial Sequence
  Description of Artificial Sequence: Synthetic oligonucleotide
  Antisense strand to SEQ ID NO: 1060786
ucuaagcacacaugguguc

SEQ ID NO: 1060788 - RNA, 19 nt, Artificial Sequence
  Description of Artificial Sequence: Synthetic oligonucleotide
  Sense strand starting at position 167 of SEQ ID NO: 915189
caccaugugugcuuagaag

SEQ ID NO: 1060789 - RNA, 19 nt, Artificial Sequence
  Description of Artificial Sequence: Synthetic oligonucleotide
  Antisense strand to SEQ ID NO: 1060788
cuucuaagcacacauggug

SEQ ID NO: 1060790 - RNA, 19 nt, Artificial Sequence
  Description of Artificial Sequence: Synthetic oligonucleotide
  Sense strand starting at position 178 of SEQ ID NO: 915189
cuuagaagcuguccaauua

SEQ ID NO: 1060791 - RNA, 19 nt, Artificial Sequence
  Description of Artificial Sequence: Synthetic oligonucleotide
  Antisense strand to SEQ ID NO: 1060790
uaauuggacagcuucuaag

SEQ ID NO: 1060792 - RNA, 19 nt, Artificial Sequence
  Description of Artificial Sequence: Synthetic oligonucleotide
  Sense strand starting at position 179 of SEQ ID NO: 915189
uuagaagcuguccaauuaa

SEQ ID NO: 1060793 - RNA, 19 nt, Artificial Sequence
  Description of Artificial Sequence: Synthetic oligonucleotide
  Antisense strand to SEQ ID NO: 1060792
uuaauuggacagcuucuaa

SEQ ID NO: 1060794 - RNA, 19 nt, Artificial Sequence
  Description of Artificial Sequence: Synthetic oligonucleotide
  Sense strand starting at position 405 of SEQ ID NO: 915189
ugauaauuguuacucauga

SEQ ID NO: 1060795 - RNA, 19 nt, Artificial Sequence
  Description of Artificial Sequence: Synthetic oligonucleotide
  Antisense strand to SEQ ID NO: 1060794
ucaugaguaacaauuauca

SEQ ID NO: 1060796 - RNA, 19 nt, Artificial Sequence
  Description of Artificial Sequence: Synthetic oligonucleotide
  Sense strand starting at position 406 of SEQ ID NO: 915189
gauaauuguuacucaugag

SEQ ID NO: 1060797 - RNA, 19 nt, Artificial Sequence
  Description of Artificial Sequence: Synthetic oligonucleotide
  Antisense strand to SEQ ID NO: 1060796
cucaugaguaacaauuauc

SEQ ID NO: 1060798 - RNA, 19 nt, Artificial Sequence
  Description of Artificial Sequence: Synthetic oligonucleotide
  Sense strand starting at position 541 of SEQ ID NO: 915189
aaggcaaugaugugguuga

SEQ ID NO: 1060799 - RNA, 19 nt, Artificial Sequence
  Description of Artificial Sequence: Synthetic oligonucleotide
  Antisense strand to SEQ ID NO: 1060798
ucaaccacaucauugccuu

SEQ ID NO: 1060800 - RNA, 19 nt, Artificial Sequence
  Description of Artificial Sequence: Synthetic oligonucleotide
  Sense strand starting at position 552 of SEQ ID NO: 915189
gugguugaagggugagaga

SEQ ID NO: 1060801 - RNA, 19 nt, Artificial Sequence
  Description of Artificial Sequence: Synthetic oligonucleotide
  Antisense strand to SEQ ID NO: 1060800
ucucucacccuucaaccac

SEQ ID NO: 1060802 - RNA, 19 nt, Artificial Sequence
  Description of Artificial Sequence: Synthetic oligonucleotide
  Sense strand starting at position 743 of SEQ ID NO: 915189
augacauauugaguugugu

SEQ ID NO: 1060803 - RNA, 19 nt, Artificial Sequence
  Description of Artificial Sequence: Synthetic oligonucleotide
  Antisense strand to SEQ ID NO: 1060802
acacaacucaauaugucau

SEQ ID NO: 1060804 - RNA, 19 nt, Artificial Sequence
  Description of Artificial Sequence: Synthetic oligonucleotide
  Sense strand starting at position 828 of SEQ ID NO: 915189
ugauuauaagcauggaaua

SEQ ID NO: 1060805 - RNA, 19 nt, Artificial Sequence
  Description of Artificial Sequence: Synthetic oligonucleotide
  Antisense strand to SEQ ID NO: 1060804
uauuccaugcuuauaauca

SEQ ID NO: 1060806 - RNA, 19 nt, Artificial Sequence
  Description of Artificial Sequence: Synthetic oligonucleotide
  Sense strand starting at position 950 of SEQ ID NO: 915189
ccaguuugagguuauaagu

SEQ ID NO: 1060807 - RNA, 19 nt, Artificial Sequence
  Description of Artificial Sequence: Synthetic oligonucleotide
  Antisense strand to SEQ ID NO: 1060806
acuuauaaccucaaacugg

SEQ ID NO: 1060808 - RNA, 19 nt, Artificial Sequence
  Description of Artificial Sequence: Synthetic oligonucleotide
  Sense strand starting at position 2088 of SEQ ID NO: 915189
agcacaauuuguuugucau

SEQ ID NO: 1060809 - RNA, 19 nt, Artificial Sequence
  Description of Artificial Sequence: Synthetic oligonucleotide
  Antisense strand to SEQ ID NO: 1060808
augacaaacaaauugugcu

SEQ ID NO: 1060810 - RNA, 19 nt, Artificial Sequence
  Description of Artificial Sequence: Synthetic oligonucleotide
  Sense strand starting at position 2089 of SEQ ID NO: 915189
gcacaauuuguuugucaua

SEQ ID NO: 1060811 - RNA, 19 nt, Artificial Sequence
  Description of Artificial Sequence: Synthetic oligonucleotide
  Antisense strand to SEQ ID NO: 1060810
uaugacaaacaaauugugc

SEQ ID NO: 1060812 - RNA, 19 nt, Artificial Sequence
  Description of Artificial Sequence: Synthetic oligonucleotide
  Sense strand starting at position 2098 of SEQ ID NO: 915189
guuugucauagguacaacu

SEQ ID NO: 1060813 - RNA, 19 nt, Artificial Sequence
  Description of Artificial Sequence: Synthetic oligonucleotide
  Antisense strand to SEQ ID NO: 1060812
aguuguaccuaugacaaac

SEQ ID NO: 1060814 - RNA, 19 nt, Artificial Sequence
  Description of Artificial Sequence: Synthetic oligonucleotide
  Sense strand starting at position 2128 of SEQ ID NO: 915189
gcagguuauguagagccaa

SEQ ID NO: 1060815 - RNA, 19 nt, Artificial Sequence
  Description of Artificial Sequence: Synthetic oligonucleotide
  Antisense strand to SEQ ID NO: 1060814
uuggcucuacauaaccugc

SEQ ID NO: 1060816 - RNA, 19 nt, Artificial Sequence
  Description of Artificial Sequence: Synthetic oligonucleotide
  Sense strand starting at position 2222 of SEQ ID NO: 915189
gugacaugauuccucuaua

SEQ ID NO: 1060817 - RNA, 19 nt, Artificial Sequence
  Description of Artificial Sequence: Synthetic oligonucleotide
  Antisense strand to SEQ ID NO: 1060816
uauagaggaaucaugucac

SEQ ID NO: 1060818 - RNA, 19 nt, Artificial Sequence
  Description of Artificial Sequence: Synthetic oligonucleotide
  Sense strand starting at position 2325 of SEQ ID NO: 915189
uuuagugugacaggugaga

SEQ ID NO: 1060819 - RNA, 19 nt, Artificial Sequence
  Description of Artificial Sequence: Synthetic oligonucleotide
  Antisense strand to SEQ ID NO: 1060818
ucucaccugucacacuaaa

SEQ ID NO: 1060820 - RNA, 19 nt, Artificial Sequence
  Description of Artificial Sequence: Synthetic oligonucleotide
  Sense strand starting at position 2420 of SEQ ID NO: 915189
ugacuauugcaauaagcuc

SEQ ID NO: 1060821 - RNA, 19 nt, Artificial Sequence
  Description of Artificial Sequence: Synthetic oligonucleotide
  Antisense strand to SEQ ID NO: 1060820
gagcuuauugcaauaguca

SEQ ID NO: 1060822 - RNA, 19 nt, Artificial Sequence
  Description of Artificial Sequence: Synthetic oligonucleotide
  Sense strand starting at position 2473 of SEQ ID NO: 915189
ucagauaaaugucccuagu

SEQ ID NO: 1060823 - RNA, 19 nt, Artificial Sequence
  Description of Artificial Sequence: Synthetic oligonucleotide
  Antisense strand to SEQ ID NO: 1060822
acuagggacauuuaucuga

SEQ ID NO: 1060824 - RNA, 19 nt, Artificial Sequence
  Description of Artificial Sequence: Synthetic oligonucleotide
  Sense strand starting at position 2750 of SEQ ID NO: 915189
gggagaaaugcuugucauu

SEQ ID NO: 1060825 - RNA, 19 nt, Artificial Sequence
  Description of Artificial Sequence: Synthetic oligonucleotide
  Antisense strand to SEQ ID NO: 1060824
aaugacaagcauuucuccc

SEQ ID NO: 1060826 - RNA, 19 nt, Artificial Sequence
  Description of Artificial Sequence: Synthetic oligonucleotide
  Sense strand starting at position 2752 of SEQ ID NO: 915189
gagaaaugcuugucauuag

SEQ ID NO: 1060827 - RNA, 19 nt, Artificial Sequence
  Description of Artificial Sequence: Synthetic oligonucleotide
  Antisense strand to SEQ ID NO: 1060826
cuaaugacaagcauuucuc

SEQ ID NO: 1060828 - RNA, 19 nt, Artificial Sequence
  Description of Artificial Sequence: Synthetic oligonucleotide
  Sense strand starting at position 2861 of SEQ ID NO: 915189
uuccaucuugacuguaaug

SEQ ID NO: 1060829 - RNA, 19 nt, Artificial Sequence
  Description of Artificial Sequence: Synthetic oligonucleotide
  Antisense strand to SEQ ID NO: 1060828
cauuacagucaagauggaa

SEQ ID NO: 1060830 - RNA, 19 nt, Artificial Sequence
  Description of Artificial Sequence: Synthetic oligonucleotide
  Sense strand starting at position 2863 of SEQ ID NO: 915189
ccaucuugacuguaaugau

SEQ ID NO: 1060831 - RNA, 19 nt, Artificial Sequence
  Description of Artificial Sequence: Synthetic oligonucleotide
  Antisense strand to SEQ ID NO: 1060830
aucauuacagucaagaugg

SEQ ID NO: 1060832 - RNA, 19 nt, Artificial Sequence
  Description of Artificial Sequence: Synthetic oligonucleotide
  Sense strand starting at position 3051 of SEQ ID NO: 915189
guguaacgagaaugaauga

SEQ ID NO: 1060833 - RNA, 19 nt, Artificial Sequence
  Description of Artificial Sequence: Synthetic oligonucleotide
  Antisense strand to SEQ ID NO: 1060832
ucauucauucucguuacac

SEQ ID NO: 1060834 - RNA, 19 nt, Artificial Sequence
  Description of Artificial Sequence: Synthetic oligonucleotide
  Sense strand starting at position 3067 of SEQ ID NO: 915189
ugauaugagcaaugucaga

SEQ ID NO: 1060835 - RNA, 19 nt, Artificial Sequence
  Description of Artificial Sequence: Synthetic oligonucleotide
  Antisense strand to SEQ ID NO: 1060834
ucugacauugcucauauca

SEQ ID NO: 1060836 - RNA, 19 nt, Artificial Sequence
  Description of Artificial Sequence: Synthetic oligonucleotide
  Sense strand starting at position 3115 of SEQ ID NO: 915189
aggagaguugagugugaca

SEQ ID NO: 1060837 - RNA, 19 nt, Artificial Sequence
  Description of Artificial Sequence: Synthetic oligonucleotide
  Antisense strand to SEQ ID NO: 1060836
ugucacacucaacucuccu

SEQ ID NO: 1060838 - RNA, 19 nt, Artificial Sequence
  Description of Artificial Sequence: Synthetic oligonucleotide
  Sense strand starting at position 3117 of SEQ ID NO: 915189
gagaguugagugugacaua

SEQ ID NO: 1060839 - RNA, 19 nt, Artificial Sequence
  Description of Artificial Sequence: Synthetic oligonucleotide
  Antisense strand to SEQ ID NO: 1060838
uaugucacacucaacucuc

SEQ ID NO: 1060840 - RNA, 19 nt, Artificial Sequence
  Description of Artificial Sequence: Synthetic oligonucleotide
  Sense strand starting at position 3321 of SEQ ID NO: 915189
gugcauauuucugucuacu

SEQ ID NO: 1060841 - RNA, 19 nt, Artificial Sequence
  Description of Artificial Sequence: Synthetic oligonucleotide
  Antisense strand to SEQ ID NO: 1060840
aguagacagaaauaugcac

SEQ ID NO: 1060842 - RNA, 19 nt, Artificial Sequence
  Description of Artificial Sequence: Synthetic oligonucleotide
  Sense strand starting at position 3329 of SEQ ID NO: 915189
uucugucuacugggacaga

SEQ ID NO: 1060843 - RNA, 19 nt, Artificial Sequence
  Description of Artificial Sequence: Synthetic oligonucleotide
  Antisense strand to SEQ ID NO: 1060842
ucugucccaguagacagaa

SEQ ID NO: 1060844 - RNA, 19 nt, Artificial Sequence
  Description of Artificial Sequence: Synthetic oligonucleotide
  Sense strand starting at position 3345 of SEQ ID NO: 915189
agagguuucuguucagaug

SEQ ID NO: 1060845 - RNA, 19 nt, Artificial Sequence
  Description of Artificial Sequence: Synthetic oligonucleotide
  Antisense strand to SEQ ID NO: 1060844
caucugaacagaaaccucu

SEQ ID NO: 1060846 - RNA, 19 nt, Artificial Sequence
  Description of Artificial Sequence: Synthetic oligonucleotide
  Sense strand starting at position 3414 of SEQ ID NO: 915189
uaagaucaagugugugaaa

SEQ ID NO: 1060847 - RNA, 19 nt, Artificial Sequence
  Description of Artificial Sequence: Synthetic oligonucleotide
  Antisense strand to SEQ ID NO: 1060846
uuucacacacuugaucuua

SEQ ID NO: 1060848 - RNA, 19 nt, Artificial Sequence
  Description of Artificial Sequence: Synthetic oligonucleotide
  Sense strand starting at position 3415 of SEQ ID NO: 915189
aagaucaagugugugaaau

SEQ ID NO: 1060849 - RNA, 19 nt, Artificial Sequence
  Description of Artificial Sequence: Synthetic oligonucleotide
  Antisense strand to SEQ ID NO: 1060848
auuucacacacuugaucuu

SEQ ID NO: 1060850 - RNA, 19 nt, Artificial Sequence
  Description of Artificial Sequence: Synthetic oligonucleotide
  Sense strand starting at position 3416 of SEQ ID NO: 915189
agaucaagugugugaaauu

SEQ ID NO: 1060851 - RNA, 19 nt, Artificial Sequence
  Description of Artificial Sequence: Synthetic oligonucleotide
  Antisense strand to SEQ ID NO: 1060850
aauuucacacacuugaucu

SEQ ID NO: 1060852 - RNA, 19 nt, Artificial Sequence
  Description of Artificial Sequence: Synthetic oligonucleotide
  Sense strand starting at position 3695 of SEQ ID NO: 915189
agagguuggguuggauuaa

SEQ ID NO: 1060853 - RNA, 19 nt, Artificial Sequence
  Description of Artificial Sequence: Synthetic oligonucleotide
  Antisense strand to SEQ ID NO: 1060852
uuaauccaacccaaccucu

SEQ ID NO: 1060854 - RNA, 19 nt, Artificial Sequence
  Description of Artificial Sequence: Synthetic oligonucleotide
  Sense strand starting at position 3706 of SEQ ID NO: 915189
uggauuaauuucuaggguu

SEQ ID NO: 1060855 - RNA, 19 nt, Artificial Sequence
  Description of Artificial Sequence: Synthetic oligonucleotide
  Antisense strand to SEQ ID NO: 1060854
aacccuagaaauuaaucca

SEQ ID NO: 1060856 - RNA, 19 nt, Artificial Sequence
  Description of Artificial Sequence: Synthetic oligonucleotide
  Sense strand starting at position 78 of SEQ ID NO: 915190
gcucauuugugccuaggau

SEQ ID NO: 1060857 - RNA, 19 nt, Artificial Sequence
  Description of Artificial Sequence: Synthetic oligonucleotide
  Antisense strand to SEQ ID NO: 1060856
auccuaggcacaaaugagc

SEQ ID NO: 1060858 - RNA, 19 nt, Artificial Sequence
  Description of Artificial Sequence: Synthetic oligonucleotide
  Sense strand starting at position 300 of SEQ ID NO: 915190
ggugguacagacugaauau

SEQ ID NO: 1060859 - RNA, 19 nt, Artificial Sequence
  Description of Artificial Sequence: Synthetic oligonucleotide
  Antisense strand to SEQ ID NO: 1060858
auauucagucuguaccacc

SEQ ID NO: 1060860 - RNA, 19 nt, Artificial Sequence
  Description of Artificial Sequence: Synthetic oligonucleotide
  Sense strand starting at position 631 of SEQ ID NO: 915190
aagucuuggcaagauucuu

SEQ ID NO: 1060861 - RNA, 19 nt, Artificial Sequence
  Description of Artificial Sequence: Synthetic oligonucleotide
  Antisense strand to SEQ ID NO: 1060860
aagaaucuugccaagacuu

SEQ ID NO: 1060862 - RNA, 19 nt, Artificial Sequence
  Description of Artificial Sequence: Synthetic oligonucleotide
  Sense strand starting at position 645 of SEQ ID NO: 915190
uucuuuguugcagauuaga

SEQ ID NO: 1060863 - RNA, 19 nt, Artificial Sequence
  Description of Artificial Sequence: Synthetic oligonucleotide
  Antisense strand to SEQ ID NO: 1060862
ucuaaucugcaacaaagaa

SEQ ID NO: 1060864 - RNA, 19 nt, Artificial Sequence
  Description of Artificial Sequence: Synthetic oligonucleotide
  Sense strand starting at position 786 of SEQ ID NO: 915190
uccgaacucaggcaggauu

SEQ ID NO: 1060865 - RNA, 19 nt, Artificial Sequence
  Description of Artificial Sequence: Synthetic oligonucleotide
  Antisense strand to SEQ ID NO: 1060864
aauccugccugaguucgga

SEQ ID NO: 1060866 - RNA, 19 nt, Artificial Sequence
  Description of Artificial Sequence: Synthetic oligonucleotide
  Sense strand starting at position 1241 of SEQ ID NO: 915190
gguagagcugauugaaagu

SEQ ID NO: 1060867 - RNA, 19 nt, Artificial Sequence
  Description of Artificial Sequence: Synthetic oligonucleotide
  Antisense strand to SEQ ID NO: 1060866
acuuucaaucagcucuacc

SEQ ID NO: 1060868 - RNA, 19 nt, Artificial Sequence
  Description of Artificial Sequence: Synthetic oligonucleotide
  Sense strand starting at position 1302 of SEQ ID NO: 915190
gaugcaguucuugauuaug

SEQ ID NO: 1060869 - RNA, 19 nt, Artificial Sequence
  Description of Artificial Sequence: Synthetic oligonucleotide
  Antisense strand to SEQ ID NO: 1060868
cauaaucaagaacugcauc

SEQ ID NO: 1060870 - RNA, 19 nt, Artificial Sequence
  Description of Artificial Sequence: Synthetic oligonucleotide
  Sense strand starting at position 1412 of SEQ ID NO: 915190
ccacaaacuggucagugau

SEQ ID NO: 1060871 - RNA, 19 nt, Artificial Sequence
  Description of Artificial Sequence: Synthetic oligonucleotide
  Antisense strand to SEQ ID NO: 1060870
aucacugaccaguuugugg

SEQ ID NO: 1060872 - RNA, 19 nt, Artificial Sequence
  Description of Artificial Sequence: Synthetic oligonucleotide
  Sense strand starting at position 1414 of SEQ ID NO: 915190
acaaacuggucagugauga

SEQ ID NO: 1060873 - RNA, 19 nt, Artificial Sequence
  Description of Artificial Sequence: Synthetic oligonucleotide
  Antisense strand to SEQ ID NO: 1060872
ucaucacugaccaguuugu

SEQ ID NO: 1060874 - RNA, 19 nt, Artificial Sequence
  Description of Artificial Sequence: Synthetic oligonucleotide
  Sense strand starting at position 1415 of SEQ ID NO: 915190
caaacuggucagugaugau

SEQ ID NO: 1060875 - RNA, 19 nt, Artificial Sequence
  Description of Artificial Sequence: Synthetic oligonucleotide
  Antisense strand to SEQ ID NO: 1060874
aucaucacugaccaguuug

SEQ ID NO: 1060876 - RNA, 19 nt, Artificial Sequence
  Description of Artificial Sequence: Synthetic oligonucleotide
  Sense strand starting at position 1425 of SEQ ID NO: 915190
agugaugauagacggguau

SEQ ID NO: 1060877 - RNA, 19 nt, Artificial Sequence
  Description of Artificial Sequence: Synthetic oligonucleotide
  Antisense strand to SEQ ID NO: 1060876
auacccgucuaucaucacu

SEQ ID NO: 1060878 - RNA, 19 nt, Artificial Sequence
  Description of Artificial Sequence: Synthetic oligonucleotide
  Sense strand starting at position 1427 of SEQ ID NO: 915190
ugaugauagacggguaucu

SEQ ID NO: 1060879 - RNA, 19 nt, Artificial Sequence
  Description of Artificial Sequence: Synthetic oligonucleotide
  Antisense strand to SEQ ID NO: 1060878
agauacccgucuaucauca

SEQ ID NO: 1060880 - RNA, 19 nt, Artificial Sequence
  Description of Artificial Sequence: Synthetic oligonucleotide
  Sense strand starting at position 1497 of SEQ ID NO: 915190
gcaggacuccauggucaaa

SEQ ID NO: 1060881 - RNA, 19 nt, Artificial Sequence
  Description of Artificial Sequence: Synthetic oligonucleotide
  Antisense strand to SEQ ID NO: 1060880
uuugaccauggaguccugc

SEQ ID NO: 1060882 - RNA, 19 nt, Artificial Sequence
  Description of Artificial Sequence: Synthetic oligonucleotide
  Sense strand starting at position 1821 of SEQ ID NO: 915190
ggagucauugcugggagau

SEQ ID NO: 1060883 - RNA, 19 nt, Artificial Sequence
  Description of Artificial Sequence: Synthetic oligonucleotide
  Antisense strand to SEQ ID NO: 1060882
aucucccagcaaugacucc

SEQ ID NO: 1060884 - RNA, 19 nt, Artificial Sequence
  Description of Artificial Sequence: Synthetic oligonucleotide
  Sense strand starting at position 1822 of SEQ ID NO: 915190
gagucauugcugggagaug

SEQ ID NO: 1060885 - RNA, 19 nt, Artificial Sequence
  Description of Artificial Sequence: Synthetic oligonucleotide
  Antisense strand to SEQ ID NO: 1060884
caucucccagcaaugacuc

SEQ ID NO: 1060886 - RNA, 19 nt, Artificial Sequence
  Description of Artificial Sequence: Synthetic oligonucleotide
  Sense strand starting at position 1834 of SEQ ID NO: 915190
ggagaugccauguaaaguu

SEQ ID NO: 1060887 - RNA, 19 nt, Artificial Sequence
  Description of Artificial Sequence: Synthetic oligonucleotide
  Antisense strand to SEQ ID NO: 1060886
aacuuuacauggcaucucc

SEQ ID NO: 1060888 - RNA, 19 nt, Artificial Sequence
  Description of Artificial Sequence: Synthetic oligonucleotide
  Sense strand starting at position 1843 of SEQ ID NO: 915190
auguaaaguuuccugauca

SEQ ID NO: 1060889 - RNA, 19 nt, Artificial Sequence
  Description of Artificial Sequence: Synthetic oligonucleotide
  Antisense strand to SEQ ID NO: 1060888
ugaucaggaaacuuuacau

SEQ ID NO: 1060890 - RNA, 19 nt, Artificial Sequence
  Description of Artificial Sequence: Synthetic oligonucleotide
  Sense strand starting at position 1919 of SEQ ID NO: 915190
acauucuagacguaguaga

SEQ ID NO: 1060891 - RNA, 19 nt, Artificial Sequence
  Description of Artificial Sequence: Synthetic oligonucleotide
  Antisense strand to SEQ ID NO: 1060890
ucuacuacgucuagaaugu

SEQ ID NO: 1060892 - RNA, 19 nt, Artificial Sequence
  Description of Artificial Sequence: Synthetic oligonucleotide
  Sense strand starting at position 2207 of SEQ ID NO: 915190
uauuguugugcguuuauau

SEQ ID NO: 1060893 - RNA, 19 nt, Artificial Sequence
  Description of Artificial Sequence: Synthetic oligonucleotide
  Antisense strand to SEQ ID NO: 1060892
auauaaacgcacaacaaua

SEQ ID NO: 1060894 - RNA, 19 nt, Artificial Sequence
  Description of Artificial Sequence: Synthetic oligonucleotide
  Sense strand starting at position 2208 of SEQ ID NO: 915190
auuguugugcguuuauaug

SEQ ID NO: 1060895 - RNA, 19 nt, Artificial Sequence
  Description of Artificial Sequence: Synthetic oligonucleotide
  Antisense strand to SEQ ID NO: 1060894
cauauaaacgcacaacaau

SEQ ID NO: 1060896 - RNA, 19 nt, Artificial Sequence
  Description of Artificial Sequence: Synthetic oligonucleotide
  Sense strand starting at position 2425 of SEQ ID NO: 915190
ugggacaauuuagacuuaa

SEQ ID NO: 1060897 - RNA, 19 nt, Artificial Sequence
  Description of Artificial Sequence: Synthetic oligonucleotide
  Antisense strand to SEQ ID NO: 1060896
uuaagucuaaauuguccca

SEQ ID NO: 1060898 - RNA, 19 nt, Artificial Sequence
  Description of Artificial Sequence: Synthetic oligonucleotide
  Sense strand starting at position 2611 of SEQ ID NO: 915190
gaggaccugcuguaaucaa

SEQ ID NO: 1060899 - RNA, 19 nt, Artificial Sequence
  Description of Artificial Sequence: Synthetic oligonucleotide
  Antisense strand to SEQ ID NO: 1060898
uugauuacagcagguccuc

SEQ ID NO: 1060900 - RNA, 19 nt, Artificial Sequence
  Description of Artificial Sequence: Synthetic oligonucleotide
  Sense strand starting at position 2659 of SEQ ID NO: 915190
gaagucagagagugaguuu

SEQ ID NO: 1060901 - RNA, 19 nt, Artificial Sequence
  Description of Artificial Sequence: Synthetic oligonucleotide
  Antisense strand to SEQ ID NO: 1060900
aaacucacucucugacuuc

SEQ ID NO: 1060902 - RNA, 19 nt, Artificial Sequence
  Description of Artificial Sequence: Synthetic oligonucleotide
  Sense strand starting at position 2916 of SEQ ID NO: 915190
gaauguagccagggaguca

SEQ ID NO: 1060903 - RNA, 19 nt, Artificial Sequence
  Description of Artificial Sequence: Synthetic oligonucleotide
  Antisense strand to SEQ ID NO: 1060902
ugacucccuggcuacauuc

SEQ ID NO: 1060904 - RNA, 19 nt, Artificial Sequence
  Description of Artificial Sequence: Synthetic oligonucleotide
  Sense strand starting at position 2928 of SEQ ID NO: 915190
ggagucauugcaggauaag

SEQ ID NO: 1060905 - RNA, 19 nt, Artificial Sequence
  Description of Artificial Sequence: Synthetic oligonucleotide
  Antisense strand to SEQ ID NO: 1060904
cuuauccugcaaugacucc

SEQ ID NO: 1060906 - RNA, 19 nt, Artificial Sequence
  Description of Artificial Sequence: Synthetic oligonucleotide
  Sense strand starting at position 3228 of SEQ ID NO: 915190
gagauuaggaaguguguaa

SEQ ID NO: 1060907 - RNA, 19 nt, Artificial Sequence
  Description of Artificial Sequence: Synthetic oligonucleotide
  Antisense strand to SEQ ID NO: 1060906
uuacacacuuccuaaucuc

SEQ ID NO: 1060908 - RNA, 19 nt, Artificial Sequence
  Description of Artificial Sequence: Synthetic oligonucleotide
  Sense strand starting at position 3232 of SEQ ID NO: 915190
uuaggaaguguguaaucag

SEQ ID NO: 1060909 - RNA, 19 nt, Artificial Sequence
  Description of Artificial Sequence: Synthetic oligonucleotide
  Antisense strand to SEQ ID NO: 1060908
cugauuacacacuuccuaa

SEQ ID NO: 1060910 - RNA, 19 nt, Artificial Sequence
  Description of Artificial Sequence: Synthetic oligonucleotide
  Sense strand starting at position 3296 of SEQ ID NO: 915190
ucuucuguaagaggauuga

SEQ ID NO: 1060911 - RNA, 19 nt, Artificial Sequence
  Description of Artificial Sequence: Synthetic oligonucleotide
  Antisense strand to SEQ ID NO: 1060910
ucaauccucuuacagaaga

SEQ ID NO: 1060912 - RNA, 19 nt, Artificial Sequence
  Description of Artificial Sequence: Synthetic oligonucleotide
  Sense strand starting at position 3309 of SEQ ID NO: 915190
gauugaggugugcaugaga

SEQ ID NO: 1060913 - RNA, 19 nt, Artificial Sequence
  Description of Artificial Sequence: Synthetic oligonucleotide
  Antisense strand to SEQ ID NO: 1060912
ucucaugcacaccucaauc

SEQ ID NO: 1060914 - RNA, 19 nt, Artificial Sequence
  Description of Artificial Sequence: Synthetic oligonucleotide
  Sense strand starting at position 3312 of SEQ ID NO: 915190
ugaggugugcaugagaaga

SEQ ID NO: 1060915 - RNA, 19 nt, Artificial Sequence
  Description of Artificial Sequence: Synthetic oligonucleotide
  Antisense strand to SEQ ID NO: 1060914
ucuucucaugcacaccuca

SEQ ID NO: 1060916 - RNA, 19 nt, Artificial Sequence
  Description of Artificial Sequence: Synthetic oligonucleotide
  Sense strand starting at position 3343 of SEQ ID NO: 915190
uuagcugccagagaagaua

SEQ ID NO: 1060917 - RNA, 19 nt, Artificial Sequence
  Description of Artificial Sequence: Synthetic oligonucleotide
  Antisense strand to SEQ ID NO: 1060916
uaucuucucuggcagcuaa

SEQ ID NO: 1060918 - RNA, 19 nt, Artificial Sequence
  Description of Artificial Sequence: Synthetic oligonucleotide
  Sense strand starting at position 3558 of SEQ ID NO: 915190
aaaugacccucagugugaa

SEQ ID NO: 1060919 - RNA, 19 nt, Artificial Sequence
  Description of Artificial Sequence: Synthetic oligonucleotide
  Antisense strand to SEQ ID NO: 1060918
uucacacugagggucauuu

SEQ ID NO: 1060920 - RNA, 19 nt, Artificial Sequence
  Description of Artificial Sequence: Synthetic oligonucleotide
  Sense strand starting at position 3559 of SEQ ID NO: 915190
aaugacccucagugugaau

SEQ ID NO: 1060921 - RNA, 19 nt, Artificial Sequence
  Description of Artificial Sequence: Synthetic oligonucleotide
  Antisense strand to SEQ ID NO: 1060920
auucacacugagggucauu

SEQ ID NO: 1060922 - RNA, 19 nt, Artificial Sequence
  Description of Artificial Sequence: Synthetic oligonucleotide
  Sense strand starting at position 3568 of SEQ ID NO: 915190
cagugugaauuugagaaau

SEQ ID NO: 1060923 - RNA, 19 nt, Artificial Sequence
  Description of Artificial Sequence: Synthetic oligonucleotide
  Antisense strand to SEQ ID NO: 1060922
auuucucaaauucacacug

SEQ ID NO: 1060924 - RNA, 19 nt, Artificial Sequence
  Description of Artificial Sequence: Synthetic oligonucleotide
  Sense strand starting at position 3570 of SEQ ID NO: 915190
gugugaauuugagaaauca

SEQ ID NO: 1060925 - RNA, 19 nt, Artificial Sequence
  Description of Artificial Sequence: Synthetic oligonucleotide
  Antisense strand to SEQ ID NO: 1060924
ugauuucucaaauucacac

SEQ ID NO: 1060926 - RNA, 19 nt, Artificial Sequence
  Description of Artificial Sequence: Synthetic oligonucleotide
  Sense strand starting at position 3651 of SEQ ID NO: 915190
cucugaauggcuuaaucua

SEQ ID NO: 1060927 - RNA, 19 nt, Artificial Sequence
  Description of Artificial Sequence: Synthetic oligonucleotide
  Antisense strand to SEQ ID NO: 1060926
uagauuaagccauucagag

SEQ ID NO: 1060928 - RNA, 19 nt, Artificial Sequence
  Description of Artificial Sequence: Synthetic oligonucleotide
  Sense strand starting at position 3763 of SEQ ID NO: 915190
uugagagcuuaccuaauua

SEQ ID NO: 1060929 - RNA, 19 nt, Artificial Sequence
  Description of Artificial Sequence: Synthetic oligonucleotide
  Antisense strand to SEQ ID NO: 1060928
uaauuagguaagcucucaa

SEQ ID NO: 1060930 - RNA, 19 nt, Artificial Sequence
  Description of Artificial Sequence: Synthetic oligonucleotide
  Sense strand starting at position 3767 of SEQ ID NO: 915190
gagcuuaccuaauuaguag

SEQ ID NO: 1060931 - RNA, 19 nt, Artificial Sequence
  Description of Artificial Sequence: Synthetic oligonucleotide
  Antisense strand to SEQ ID NO: 1060930
cuacuaauuagguaagcuc

SEQ ID NO: 1060932 - RNA, 19 nt, Artificial Sequence
  Description of Artificial Sequence: Synthetic oligonucleotide
  Sense strand starting at position 3770 of SEQ ID NO: 915190
cuuaccuaauuaguagaga

SEQ ID NO: 1060933 - RNA, 19 nt, Artificial Sequence
  Description of Artificial Sequence: Synthetic oligonucleotide
  Antisense strand to SEQ ID NO: 1060932
ucucuacuaauuagguaag

SEQ ID NO: 1060934 - RNA, 19 nt, Artificial Sequence
  Description of Artificial Sequence: Synthetic oligonucleotide
  Sense strand starting at position 3934 of SEQ ID NO: 915190
cucuuauacugaucaugua

SEQ ID NO: 1060935 - RNA, 19 nt, Artificial Sequence
  Description of Artificial Sequence: Synthetic oligonucleotide
  Antisense strand to SEQ ID NO: 1060934
uacaugaucaguauaagag

SEQ ID NO: 1060936 - RNA, 19 nt, Artificial Sequence
  Description of Artificial Sequence: Synthetic oligonucleotide
  Sense strand starting at position 52 of SEQ ID NO: 915191
ccaggaaauauuggucagu

SEQ ID NO: 1060937 - RNA, 19 nt, Artificial Sequence
  Description of Artificial Sequence: Synthetic oligonucleotide
  Antisense strand to SEQ ID NO: 1060936
acugaccaauauuuccugg

SEQ ID NO: 1060938 - RNA, 19 nt, Artificial Sequence
  Description of Artificial Sequence: Synthetic oligonucleotide
  Sense strand starting at position 53 of SEQ ID NO: 915191
caggaaauauuggucagua

SEQ ID NO: 1060939 - RNA, 19 nt, Artificial Sequence
  Description of Artificial Sequence: Synthetic oligonucleotide
  Antisense strand to SEQ ID NO: 1060938
uacugaccaauauuuccug

SEQ ID NO: 1060940 - RNA, 19 nt, Artificial Sequence
  Description of Artificial Sequence: Synthetic oligonucleotide
  Sense strand starting at position 54 of SEQ ID NO: 915191
aggaaauauuggucaguau

SEQ ID NO: 1060941 - RNA, 19 nt, Artificial Sequence
  Description of Artificial Sequence: Synthetic oligonucleotide
  Antisense strand to SEQ ID NO: 1060940
auacugaccaauauuuccu

SEQ ID NO: 1060942 - RNA, 19 nt, Artificial Sequence
  Description of Artificial Sequence: Synthetic oligonucleotide
  Sense strand starting at position 83 of SEQ ID NO: 915191
ccuauauacugaucagagc

SEQ ID NO: 1060943 - RNA, 19 nt, Artificial Sequence
  Description of Artificial Sequence: Synthetic oligonucleotide
  Antisense strand to SEQ ID NO: 1060942
gcucugaucaguauauagg

SEQ ID NO: 1060944 - RNA, 19 nt, Artificial Sequence
  Description of Artificial Sequence: Synthetic oligonucleotide
  Sense strand starting at position 242 of SEQ ID NO: 915191
ggaugagaaagacgguuua

SEQ ID NO: 1060945 - RNA, 19 nt, Artificial Sequence
  Description of Artificial Sequence: Synthetic oligonucleotide
  Antisense strand to SEQ ID NO: 1060944
uaaaccgucuuucucaucc

SEQ ID NO: 1060946 - RNA, 19 nt, Artificial Sequence
  Description of Artificial Sequence: Synthetic oligonucleotide
  Sense strand starting at position 253 of SEQ ID NO: 915191
acgguuuaacuguauaucu

SEQ ID NO: 1060947 - RNA, 19 nt, Artificial Sequence
  Description of Artificial Sequence: Synthetic oligonucleotide
  Antisense strand to SEQ ID NO: 1060946
agauauacaguuaaaccgu

SEQ ID NO: 1060948 - RNA, 19 nt, Artificial Sequence
  Description of Artificial Sequence: Synthetic oligonucleotide
  Sense strand starting at position 255 of SEQ ID NO: 915191
gguuuaacuguauaucuaa

SEQ ID NO: 1060949 - RNA, 19 nt, Artificial Sequence
  Description of Artificial Sequence: Synthetic oligonucleotide
  Antisense strand to SEQ ID NO: 1060948
uuagauauacaguuaaacc

SEQ ID NO: 1060950 - RNA, 19 nt, Artificial Sequence
  Description of Artificial Sequence: Synthetic oligonucleotide
  Sense strand starting at position 303 of SEQ ID NO: 915191
gugucagaaaucugaugga

SEQ ID NO: 1060951 - RNA, 19 nt, Artificial Sequence
  Description of Artificial Sequence: Synthetic oligonucleotide
  Antisense strand to SEQ ID NO: 1060950
uccaucagauuucugacac

SEQ ID NO: 1060952 - RNA, 19 nt, Artificial Sequence
  Description of Artificial Sequence: Synthetic oligonucleotide
  Sense strand starting at position 342 of SEQ ID NO: 915191
gaagucagaaguugguaaa

SEQ ID NO: 1060953 - RNA, 19 nt, Artificial Sequence
  Description of Artificial Sequence: Synthetic oligonucleotide
  Antisense strand to SEQ ID NO: 1060952
uuuaccaacuucugacuuc

SEQ ID NO: 1060954 - RNA, 19 nt, Artificial Sequence
  Description of Artificial Sequence: Synthetic oligonucleotide
  Sense strand starting at position 581 of SEQ ID NO: 915191
gaaucaaaguucuugaguc

SEQ ID NO: 1060955 - RNA, 19 nt, Artificial Sequence
  Description of Artificial Sequence: Synthetic oligonucleotide
  Antisense strand to SEQ ID NO: 1060954
gacucaagaacuuugauuc

SEQ ID NO: 1060956 - RNA, 19 nt, Artificial Sequence
  Description of Artificial Sequence: Synthetic oligonucleotide
  Sense strand starting at position 583 of SEQ ID NO: 915191
aucaaaguucuugagucaa

SEQ ID NO: 1060957 - RNA, 19 nt, Artificial Sequence
  Description of Artificial Sequence: Synthetic oligonucleotide
  Antisense strand to SEQ ID NO: 1060956
uugacucaagaacuuugau

SEQ ID NO: 1060958 - RNA, 19 nt, Artificial Sequence
  Description of Artificial Sequence: Synthetic oligonucleotide
  Sense strand starting at position 873 of SEQ ID NO: 915191
gauuccagucagugaaaca

SEQ ID NO: 1060959 - RNA, 19 nt, Artificial Sequence
  Description of Artificial Sequence: Synthetic oligonucleotide
  Antisense strand to SEQ ID NO: 1060958
uguuucacugacuggaauc

SEQ ID NO: 1060960 - RNA, 19 nt, Artificial Sequence
  Description of Artificial Sequence: Synthetic oligonucleotide
  Sense strand starting at position 896 of SEQ ID NO: 915191
gcaggauccaacgaguaga

SEQ ID NO: 1060961 - RNA, 19 nt, Artificial Sequence
  Description of Artificial Sequence: Synthetic oligonucleotide
  Antisense strand to SEQ ID NO: 1060960
ucuacucguuggauccugc

SEQ ID NO: 1060962 - RNA, 19 nt, Artificial Sequence
  Description of Artificial Sequence: Synthetic oligonucleotide
  Sense strand starting at position 906 of SEQ ID NO: 915191
acgaguagauaucccuaua

SEQ ID NO: 1060963 - RNA, 19 nt, Artificial Sequence
  Description of Artificial Sequence: Synthetic oligonucleotide
  Antisense strand to SEQ ID NO: 1060962
uauagggauaucuacucgu

SEQ ID NO: 1060964 - RNA, 19 nt, Artificial Sequence
  Description of Artificial Sequence: Synthetic oligonucleotide
  Sense strand starting at position 1174 of SEQ ID NO: 915191
gggacauccggaggaauuc

SEQ ID NO: 1060965 - RNA, 19 nt, Artificial Sequence
  Description of Artificial Sequence: Synthetic oligonucleotide
  Antisense strand to SEQ ID NO: 1060964
gaauuccuccggauguccc

SEQ ID NO: 1060966 - RNA, 19 nt, Artificial Sequence
  Description of Artificial Sequence: Synthetic oligonucleotide
  Sense strand starting at position 1278 of SEQ ID NO: 915191
uagagcuuuggccauaucu

SEQ ID NO: 1060967 - RNA, 19 nt, Artificial Sequence
  Description of Artificial Sequence: Synthetic oligonucleotide
  Antisense strand to SEQ ID NO: 1060966
agauauggccaaagcucua

SEQ ID NO: 1060968 - RNA, 19 nt, Artificial Sequence
  Description of Artificial Sequence: Synthetic oligonucleotide
  Sense strand starting at position 1458 of SEQ ID NO: 915191
gaugcaguucuugaugaug

SEQ ID NO: 1060969 - RNA, 19 nt, Artificial Sequence
  Description of Artificial Sequence: Synthetic oligonucleotide
  Antisense strand to SEQ ID NO: 1060968
caucaucaagaacugcauc

SEQ ID NO: 1060970 - RNA, 19 nt, Artificial Sequence
  Description of Artificial Sequence: Synthetic oligonucleotide
  Sense strand starting at position 1486 of SEQ ID NO: 915191
caguaucugagucgagaag

SEQ ID NO: 1060971 - RNA, 19 nt, Artificial Sequence
  Description of Artificial Sequence: Synthetic oligonucleotide
  Antisense strand to SEQ ID NO: 1060970
cuucucgacucagauacug

SEQ ID NO: 1060972 - RNA, 19 nt, Artificial Sequence
  Description of Artificial Sequence: Synthetic oligonucleotide
  Sense strand starting at position 1487 of SEQ ID NO: 915191
aguaucugagucgagaaga

SEQ ID NO: 1060973 - RNA, 19 nt, Artificial Sequence
  Description of Artificial Sequence: Synthetic oligonucleotide
  Antisense strand to SEQ ID NO: 1060972
ucuucucgacucagauacu

SEQ ID NO: 1060974 - RNA, 19 nt, Artificial Sequence
  Description of Artificial Sequence: Synthetic oligonucleotide
  Sense strand starting at position 1567 of SEQ ID NO: 915191
gcgacaaauugaucaguga

SEQ ID NO: 1060975 - RNA, 19 nt, Artificial Sequence
  Description of Artificial Sequence: Synthetic oligonucleotide
  Antisense strand to SEQ ID NO: 1060974
ucacugaucaauuugucgc

SEQ ID NO: 1060976 - RNA, 19 nt, Artificial Sequence
  Description of Artificial Sequence: Synthetic oligonucleotide
  Sense strand starting at position 1571 of SEQ ID NO: 915191
caaauugaucagugaugau

SEQ ID NO: 1060977 - RNA, 19 nt, Artificial Sequence
  Description of Artificial Sequence: Synthetic oligonucleotide
  Antisense strand to SEQ ID NO: 1060976
aucaucacugaucaauuug

SEQ ID NO: 1060978 - RNA, 19 nt, Artificial Sequence
  Description of Artificial Sequence: Synthetic oligonucleotide
  Sense strand starting at position 1706 of SEQ ID NO: 915191
cagggaagcugauugaucu

SEQ ID NO: 1060979 - RNA, 19 nt, Artificial Sequence
  Description of Artificial Sequence: Synthetic oligonucleotide
  Antisense strand to SEQ ID NO: 1060978
agaucaaucagcuucccug

SEQ ID NO: 1060980 - RNA, 19 nt, Artificial Sequence
  Description of Artificial Sequence: Synthetic oligonucleotide
  Sense strand starting at position 1835 of SEQ ID NO: 915191
cuuccagauagauggugau

SEQ ID NO: 1060981 - RNA, 19 nt, Artificial Sequence
  Description of Artificial Sequence: Synthetic oligonucleotide
  Antisense strand to SEQ ID NO: 1060980
aucaccaucuaucuggaag

SEQ ID NO: 1060982 - RNA, 19 nt, Artificial Sequence
  Description of Artificial Sequence: Synthetic oligonucleotide
  Sense strand starting at position 1850 of SEQ ID NO: 915191
ugaucagaaggguggcauu

SEQ ID NO: 1060983 - RNA, 19 nt, Artificial Sequence
  Description of Artificial Sequence: Synthetic oligonucleotide
  Antisense strand to SEQ ID NO: 1060982
aaugccacccuucugauca

SEQ ID NO: 1060984 - RNA, 19 nt, Artificial Sequence
  Description of Artificial Sequence: Synthetic oligonucleotide
  Sense strand starting at position 2029 of SEQ ID NO: 915191
accugaaauuguguuugau

SEQ ID NO: 1060985 - RNA, 19 nt, Artificial Sequence
  Description of Artificial Sequence: Synthetic oligonucleotide
  Antisense strand to SEQ ID NO: 1060984
aucaaacacaauuucaggu

SEQ ID NO: 1060986 - RNA, 19 nt, Artificial Sequence
  Description of Artificial Sequence: Synthetic oligonucleotide
  Sense strand starting at position 2031 of SEQ ID NO: 915191
cugaaauuguguuugauaa

SEQ ID NO: 1060987 - RNA, 19 nt, Artificial Sequence
  Description of Artificial Sequence: Synthetic oligonucleotide
  Antisense strand to SEQ ID NO: 1060986
uuaucaaacacaauuucag

SEQ ID NO: 1060988 - RNA, 19 nt, Artificial Sequence
  Description of Artificial Sequence: Synthetic oligonucleotide
  Sense strand starting at position 2032 of SEQ ID NO: 915191
ugaaauuguguuugauaag

SEQ ID NO: 1060989 - RNA, 19 nt, Artificial Sequence
  Description of Artificial Sequence: Synthetic oligonucleotide
  Antisense strand to SEQ ID NO: 1060988
cuuaucaaacacaauuuca

SEQ ID NO: 1060990 - RNA, 19 nt, Artificial Sequence
  Description of Artificial Sequence: Synthetic oligonucleotide
  Sense strand starting at position 2149 of SEQ ID NO: 915191
aggcaaaguuuaguaaaua

SEQ ID NO: 1060991 - RNA, 19 nt, Artificial Sequence
  Description of Artificial Sequence: Synthetic oligonucleotide
  Antisense strand to SEQ ID NO: 1060990
uauuuacuaaacuuugccu

SEQ ID NO: 1060992 - RNA, 19 nt, Artificial Sequence
  Description of Artificial Sequence: Synthetic oligonucleotide
  Sense strand starting at position 2180 of SEQ ID NO: 915191
gugaaagguuuaguaaauu

SEQ ID NO: 1060993 - RNA, 19 nt, Artificial Sequence
  Description of Artificial Sequence: Synthetic oligonucleotide
  Antisense strand to SEQ ID NO: 1060992
aauuuacuaaaccuuucac

SEQ ID NO: 1060994 - RNA, 19 nt, Artificial Sequence
  Description of Artificial Sequence: Synthetic oligonucleotide
  Sense strand starting at position 2419 of SEQ ID NO: 915191
ggguccuuucaguaaguag

SEQ ID NO: 1060995 - RNA, 19 nt, Artificial Sequence
  Description of Artificial Sequence: Synthetic oligonucleotide
  Antisense strand to SEQ ID NO: 1060994
cuacuuacugaaaggaccc

SEQ ID NO: 1060996 - RNA, 19 nt, Artificial Sequence
  Description of Artificial Sequence: Synthetic oligonucleotide
  Sense strand starting at position 2428 of SEQ ID NO: 915191
caguaaguagugcauaauu

SEQ ID NO: 1060997 - RNA, 19 nt, Artificial Sequence
  Description of Artificial Sequence: Synthetic oligonucleotide
  Antisense strand to SEQ ID NO: 1060996
aauuaugcacuacuuacug

SEQ ID NO: 1060998 - RNA, 19 nt, Artificial Sequence
  Description of Artificial Sequence: Synthetic oligonucleotide
  Sense strand starting at position 2494 of SEQ ID NO: 915191
aaguacauuugagauggaa

SEQ ID NO: 1060999 - RNA, 19 nt, Artificial Sequence
  Description of Artificial Sequence: Synthetic oligonucleotide
  Antisense strand to SEQ ID NO: 1060998
uuccaucucaaauguacuu

SEQ ID NO: 1061000 - RNA, 19 nt, Artificial Sequence
  Description of Artificial Sequence: Synthetic oligonucleotide
  Sense strand starting at position 2975 of SEQ ID NO: 915191
uccuuauugcaccagcaga

SEQ ID NO: 1061001 - RNA, 19 nt, Artificial Sequence
  Description of Artificial Sequence: Synthetic oligonucleotide
  Antisense strand to SEQ ID NO: 1061000
ucugcuggugcaauaagga

SEQ ID NO: 1061002 - RNA, 19 nt, Artificial Sequence
  Description of Artificial Sequence: Synthetic oligonucleotide
  Sense strand starting at position 3020 of SEQ ID NO: 915191
ggcaauccuugaccucaca

SEQ ID NO: 1061003 - RNA, 19 nt, Artificial Sequence
  Description of Artificial Sequence: Synthetic oligonucleotide
  Antisense strand to SEQ ID NO: 1061002
ugugaggucaaggauugcc

SEQ ID NO: 1061004 - RNA, 19 nt, Artificial Sequence
  Description of Artificial Sequence: Synthetic oligonucleotide
  Sense strand starting at position 3202 of SEQ ID NO: 915191
ggauaaagaccaugguuuc

SEQ ID NO: 1061005 - RNA, 19 nt, Artificial Sequence
  Description of Artificial Sequence: Synthetic oligonucleotide
  Antisense strand to SEQ ID NO: 1061004
gaaaccauggucuuuaucc

SEQ ID NO: 1061006 - RNA, 19 nt, Artificial Sequence
  Description of Artificial Sequence: Synthetic oligonucleotide
  Sense strand starting at position 3344 of SEQ ID NO: 915191
agaagugaucacuguguga

SEQ ID NO: 1061007 - RNA, 19 nt, Artificial Sequence
  Description of Artificial Sequence: Synthetic oligonucleotide
  Antisense strand to SEQ ID NO: 1061006
ucacacagugaucacuucu

SEQ ID NO: 1061008 - RNA, 19 nt, Artificial Sequence
  Description of Artificial Sequence: Synthetic oligonucleotide
  Sense strand starting at position 3347 of SEQ ID NO: 915191
agugaucacugugugaaua

SEQ ID NO: 1061009 - RNA, 19 nt, Artificial Sequence
  Description of Artificial Sequence: Synthetic oligonucleotide
  Antisense strand to SEQ ID NO: 1061008
uauucacacagugaucacu

SEQ ID NO: 1061010 - RNA, 19 nt, Artificial Sequence
  Description of Artificial Sequence: Synthetic oligonucleotide
  Sense strand starting at position 3439 of SEQ ID NO: 915191
agacuaguugcguagaaga

SEQ ID NO: 1061011 - RNA, 19 nt, Artificial Sequence
  Description of Artificial Sequence: Synthetic oligonucleotide
  Antisense strand to SEQ ID NO: 1061010
ucuucuacgcaacuagucu

SEQ ID NO: 1061012 - RNA, 19 nt, Artificial Sequence
  Description of Artificial Sequence: Synthetic oligonucleotide
  Sense strand starting at position 3600 of SEQ ID NO: 915191
uuuauuggaucuguaaacu

SEQ ID NO: 1061013 - RNA, 19 nt, Artificial Sequence
  Description of Artificial Sequence: Synthetic oligonucleotide
  Antisense strand to SEQ ID NO: 1061012
aguuuacagauccaauaaa

SEQ ID NO: 1061014 - RNA, 19 nt, Artificial Sequence
  Description of Artificial Sequence: Synthetic oligonucleotide
  Sense strand starting at position 3853 of SEQ ID NO: 915191
auaugcucacaugaagagu

SEQ ID NO: 1061015 - RNA, 19 nt, Artificial Sequence
  Description of Artificial Sequence: Synthetic oligonucleotide
  Antisense strand to SEQ ID NO: 1061014
acucuucaugugagcauau

SEQ ID NO: 1061016 - RNA, 19 nt, Artificial Sequence
  Description of Artificial Sequence: Synthetic oligonucleotide
  Sense strand starting at position 175 of SEQ ID NO: 915192
ggaguagaauaauaaauag

SEQ ID NO: 1061017 - RNA, 19 nt, Artificial Sequence
  Description of Artificial Sequence: Synthetic oligonucleotide
  Antisense strand to SEQ ID NO: 1061016
cuauuuauuauucuacucc

SEQ ID NO: 1061018 - RNA, 19 nt, Artificial Sequence
  Description of Artificial Sequence: Synthetic oligonucleotide
  Sense strand starting at position 269 of SEQ ID NO: 915192
aaaggaguuugggcuuaca

SEQ ID NO: 1061019 - RNA, 19 nt, Artificial Sequence
  Description of Artificial Sequence: Synthetic oligonucleotide
  Antisense strand to SEQ ID NO: 1061018
uguaagcccaaacuccuuu

SEQ ID NO: 1061020 - RNA, 19 nt, Artificial Sequence
  Description of Artificial Sequence: Synthetic oligonucleotide
  Sense strand starting at position 272 of SEQ ID NO: 915192
ggaguuugggcuuacaaua

SEQ ID NO: 1061021 - RNA, 19 nt, Artificial Sequence
  Description of Artificial Sequence: Synthetic oligonucleotide
  Antisense strand to SEQ ID NO: 1061020
uauuguaagcccaaacucc

SEQ ID NO: 1061022 - RNA, 19 nt, Artificial Sequence
  Description of Artificial Sequence: Synthetic oligonucleotide
  Sense strand starting at position 277 of SEQ ID NO: 915192
uugggcuuacaauauguga

SEQ ID NO: 1061023 - RNA, 19 nt, Artificial Sequence
  Description of Artificial Sequence: Synthetic oligonucleotide
  Antisense strand to SEQ ID NO: 1061022
ucacauauuguaagcccaa

SEQ ID NO: 1061024 - RNA, 19 nt, Artificial Sequence
  Description of Artificial Sequence: Synthetic oligonucleotide
  Sense strand starting at position 279 of SEQ ID NO: 915192
gggcuuacaauaugugaaa

SEQ ID NO: 1061025 - RNA, 19 nt, Artificial Sequence
  Description of Artificial Sequence: Synthetic oligonucleotide
  Antisense strand to SEQ ID NO: 1061024
uuucacauauuguaagccc

SEQ ID NO: 1061026 - RNA, 19 nt, Artificial Sequence
  Description of Artificial Sequence: Synthetic oligonucleotide
  Sense strand starting at position 280 of SEQ ID NO: 915192
ggcuuacaauaugugaaag

SEQ ID NO: 1061027 - RNA, 19 nt, Artificial Sequence
  Description of Artificial Sequence: Synthetic oligonucleotide
  Antisense strand to SEQ ID NO: 1061026
cuuucacauauuguaagcc

SEQ ID NO: 1061028 - RNA, 19 nt, Artificial Sequence
  Description of Artificial Sequence: Synthetic oligonucleotide
  Sense strand starting at position 375 of SEQ ID NO: 915192
uccuucuagcuagaugaau

SEQ ID NO: 1061029 - RNA, 19 nt, Artificial Sequence
  Description of Artificial Sequence: Synthetic oligonucleotide
  Antisense strand to SEQ ID NO: 1061028
auucaucuagcuagaagga

SEQ ID NO: 1061030 - RNA, 19 nt, Artificial Sequence
  Description of Artificial Sequence: Synthetic oligonucleotide
  Sense strand starting at position 504 of SEQ ID NO: 915192
auauuacuggaguaaugcu

SEQ ID NO: 1061031 - RNA, 19 nt, Artificial Sequence
  Description of Artificial Sequence: Synthetic oligonucleotide
  Antisense strand to SEQ ID NO: 1061030
agcauuacuccaguaauau

SEQ ID NO: 1061032 - RNA, 19 nt, Artificial Sequence
  Description of Artificial Sequence: Synthetic oligonucleotide
  Sense strand starting at position 613 of SEQ ID NO: 915192
acucauuugucugauugaa

SEQ ID NO: 1061033 - RNA, 19 nt, Artificial Sequence
  Description of Artificial Sequence: Synthetic oligonucleotide
  Antisense strand to SEQ ID NO: 1061032
uucaaucagacaaaugagu

SEQ ID NO: 1061034 - RNA, 19 nt, Artificial Sequence
  Description of Artificial Sequence: Synthetic oligonucleotide
  Sense strand starting at position 650 of SEQ ID NO: 915192
uguauuuguggguguguga

SEQ ID NO: 1061035 - RNA, 19 nt, Artificial Sequence
  Description of Artificial Sequence: Synthetic oligonucleotide
  Antisense strand to SEQ ID NO: 1061034
ucacacacccacaaauaca

SEQ ID NO: 1061036 - RNA, 19 nt, Artificial Sequence
  Description of Artificial Sequence: Synthetic oligonucleotide
  Sense strand starting at position 653 of SEQ ID NO: 915192
auuugugggugugugauua

SEQ ID NO: 1061037 - RNA, 19 nt, Artificial Sequence
  Description of Artificial Sequence: Synthetic oligonucleotide
  Antisense strand to SEQ ID NO: 1061036
uaaucacacacccacaaau

SEQ ID NO: 1061038 - RNA, 19 nt, Artificial Sequence
  Description of Artificial Sequence: Synthetic oligonucleotide
  Sense strand starting at position 722 of SEQ ID NO: 915192
ccaauuugauuuggcagaa

SEQ ID NO: 1061039 - RNA, 19 nt, Artificial Sequence
  Description of Artificial Sequence: Synthetic oligonucleotide
  Antisense strand to SEQ ID NO: 1061038
uucugccaaaucaaauugg

SEQ ID NO: 1061040 - RNA, 19 nt, Artificial Sequence
  Description of Artificial Sequence: Synthetic oligonucleotide
  Sense strand starting at position 859 of SEQ ID NO: 915192
gggaaucccaaagguauuc

SEQ ID NO: 1061041 - RNA, 19 nt, Artificial Sequence
  Description of Artificial Sequence: Synthetic oligonucleotide
  Antisense strand to SEQ ID NO: 1061040
gaauaccuuugggauuccc

SEQ ID NO: 1061042 - RNA, 19 nt, Artificial Sequence
  Description of Artificial Sequence: Synthetic oligonucleotide
  Sense strand starting at position 2054 of SEQ ID NO: 915192
agauuaaauggaugugcuu

SEQ ID NO: 1061043 - RNA, 19 nt, Artificial Sequence
  Description of Artificial Sequence: Synthetic oligonucleotide
  Antisense strand to SEQ ID NO: 1061042
aagcacauccauuuaaucu

SEQ ID NO: 1061044 - RNA, 19 nt, Artificial Sequence
  Description of Artificial Sequence: Synthetic oligonucleotide
  Sense strand starting at position 2102 of SEQ ID NO: 915192
ugacuugaugcagagguuu

SEQ ID NO: 1061045 - RNA, 19 nt, Artificial Sequence
  Description of Artificial Sequence: Synthetic oligonucleotide
  Antisense strand to SEQ ID NO: 1061044
aaaccucugcaucaaguca

SEQ ID NO: 1061046 - RNA, 19 nt, Artificial Sequence
  Description of Artificial Sequence: Synthetic oligonucleotide
  Sense strand starting at position 2104 of SEQ ID NO: 915192
acuugaugcagagguuuau

SEQ ID NO: 1061047 - RNA, 19 nt, Artificial Sequence
  Description of Artificial Sequence: Synthetic oligonucleotide
  Antisense strand to SEQ ID NO: 1061046
auaaaccucugcaucaagu

SEQ ID NO: 1061048 - RNA, 19 nt, Artificial Sequence
  Description of Artificial Sequence: Synthetic oligonucleotide
  Sense strand starting at position 2108 of SEQ ID NO: 915192
gaugcagagguuuauuaac

SEQ ID NO: 1061049 - RNA, 19 nt, Artificial Sequence
  Description of Artificial Sequence: Synthetic oligonucleotide
  Antisense strand to SEQ ID NO: 1061048
guuaauaaaccucugcauc

SEQ ID NO: 1061050 - RNA, 19 nt, Artificial Sequence
  Description of Artificial Sequence: Synthetic oligonucleotide
  Sense strand starting at position 2110 of SEQ ID NO: 915192
ugcagagguuuauuaacua

SEQ ID NO: 1061051 - RNA, 19 nt, Artificial Sequence
  Description of Artificial Sequence: Synthetic oligonucleotide
  Antisense strand to SEQ ID NO: 1061050
uaguuaauaaaccucugca

SEQ ID NO: 1061052 - RNA, 19 nt, Artificial Sequence
  Description of Artificial Sequence: Synthetic oligonucleotide
  Sense strand starting at position 2151 of SEQ ID NO: 915192
gaagaauuaugggagauga

SEQ ID NO: 1061053 - RNA, 19 nt, Artificial Sequence
  Description of Artificial Sequence: Synthetic oligonucleotide
  Antisense strand to SEQ ID NO: 1061052
ucaucucccauaauucuuc

SEQ ID NO: 1061054 - RNA, 19 nt, Artificial Sequence
  Description of Artificial Sequence: Synthetic oligonucleotide
  Sense strand starting at position 2164 of SEQ ID NO: 915192
agaugaaauuuauagcuac

SEQ ID NO: 1061055 - RNA, 19 nt, Artificial Sequence
  Description of Artificial Sequence: Synthetic oligonucleotide
  Antisense strand to SEQ ID NO: 1061054
guagcuauaaauuucaucu

SEQ ID NO: 1061056 - RNA, 19 nt, Artificial Sequence
  Description of Artificial Sequence: Synthetic oligonucleotide
  Sense strand starting at position 2195 of SEQ ID NO: 915192
ugauauagauguccauuaa

SEQ ID NO: 1061057 - RNA, 19 nt, Artificial Sequence
  Description of Artificial Sequence: Synthetic oligonucleotide
  Antisense strand to SEQ ID NO: 1061056
uuaauggacaucuauauca

SEQ ID NO: 1061058 - RNA, 19 nt, Artificial Sequence
  Description of Artificial Sequence: Synthetic oligonucleotide
  Sense strand starting at position 2199 of SEQ ID NO: 915192
auagauguccauuaacguc

SEQ ID NO: 1061059 - RNA, 19 nt, Artificial Sequence
  Description of Artificial Sequence: Synthetic oligonucleotide
  Antisense strand to SEQ ID NO: 1061058
gacguuaauggacaucuau

SEQ ID NO: 1061060 - RNA, 19 nt, Artificial Sequence
  Description of Artificial Sequence: Synthetic oligonucleotide
  Sense strand starting at position 2252 of SEQ ID NO: 915192
uuguaaagguuuccagaaa

SEQ ID NO: 1061061 - RNA, 19 nt, Artificial Sequence
  Description of Artificial Sequence: Synthetic oligonucleotide
  Antisense strand to SEQ ID NO: 1061060
uuucuggaaaccuuuacaa

SEQ ID NO: 1061062 - RNA, 19 nt, Artificial Sequence
  Description of Artificial Sequence: Synthetic oligonucleotide
  Sense strand starting at position 2360 of SEQ ID NO: 915192
gaaguuagugauuauggcu

SEQ ID NO: 1061063 - RNA, 19 nt, Artificial Sequence
  Description of Artificial Sequence: Synthetic oligonucleotide
  Antisense strand to SEQ ID NO: 1061062
agccauaaucacuaacuuc

SEQ ID NO: 1061064 - RNA, 19 nt, Artificial Sequence
  Description of Artificial Sequence: Synthetic oligonucleotide
  Sense strand starting at position 2365 of SEQ ID NO: 915192
uagugauuauggcugaauu

SEQ ID NO: 1061065 - RNA, 19 nt, Artificial Sequence
  Description of Artificial Sequence: Synthetic oligonucleotide
  Antisense strand to SEQ ID NO: 1061064
aauucagccauaaucacua

SEQ ID NO: 1061066 - RNA, 19 nt, Artificial Sequence
  Description of Artificial Sequence: Synthetic oligonucleotide
  Sense strand starting at position 2381 of SEQ ID NO: 915192
auuucuccauaugagaagu

SEQ ID NO: 1061067 - RNA, 19 nt, Artificial Sequence
  Description of Artificial Sequence: Synthetic oligonucleotide
  Antisense strand to SEQ ID NO: 1061066
acuucucauauggagaaau

SEQ ID NO: 1061068 - RNA, 19 nt, Artificial Sequence
  Description of Artificial Sequence: Synthetic oligonucleotide
  Sense strand starting at position 2410 of SEQ ID NO: 915192
agacauaccuuaguaaguu

SEQ ID NO: 1061069 - RNA, 19 nt, Artificial Sequence
  Description of Artificial Sequence: Synthetic oligonucleotide
  Antisense strand to SEQ ID NO: 1061068
aacuuacuaagguaugucu

SEQ ID NO: 1061070 - RNA, 19 nt, Artificial Sequence
  Description of Artificial Sequence: Synthetic oligonucleotide
  Sense strand starting at position 2577 of SEQ ID NO: 915192
acagcuggucucuagaacu

SEQ ID NO: 1061071 - RNA, 19 nt, Artificial Sequence
  Description of Artificial Sequence: Synthetic oligonucleotide
  Antisense strand to SEQ ID NO: 1061070
aguucuagagaccagcugu

SEQ ID NO: 1061072 - RNA, 19 nt, Artificial Sequence
  Description of Artificial Sequence: Synthetic oligonucleotide
  Sense strand starting at position 2679 of SEQ ID NO: 915192
uguugaaggaauugccauu

SEQ ID NO: 1061073 - RNA, 19 nt, Artificial Sequence
  Description of Artificial Sequence: Synthetic oligonucleotide
  Antisense strand to SEQ ID NO: 1061072
aauggcaauuccuucaaca

SEQ ID NO: 1061074 - RNA, 19 nt, Artificial Sequence
  Description of Artificial Sequence: Synthetic oligonucleotide
  Sense strand starting at position 2920 of SEQ ID NO: 915192
uggagcaaauguuucugau

SEQ ID NO: 1061075 - RNA, 19 nt, Artificial Sequence
  Description of Artificial Sequence: Synthetic oligonucleotide
  Antisense strand to SEQ ID NO: 1061074
aucagaaacauuugcucca

SEQ ID NO: 1061076 - RNA, 19 nt, Artificial Sequence
  Description of Artificial Sequence: Synthetic oligonucleotide
  Sense strand starting at position 3274 of SEQ ID NO: 915192
gcagguuuaugagcaagaa

SEQ ID NO: 1061077 - RNA, 19 nt, Artificial Sequence
  Description of Artificial Sequence: Synthetic oligonucleotide
  Antisense strand to SEQ ID NO: 1061076
uucuugcucauaaaccugc

SEQ ID NO: 1061078 - RNA, 19 nt, Artificial Sequence
  Description of Artificial Sequence: Synthetic oligonucleotide
  Sense strand starting at position 3340 of SEQ ID NO: 915192
auauuaguuauggguugau

SEQ ID NO: 1061079 - RNA, 19 nt, Artificial Sequence
  Description of Artificial Sequence: Synthetic oligonucleotide
  Antisense strand to SEQ ID NO: 1061078
aucaacccauaacuaauau

SEQ ID NO: 1061080 - RNA, 19 nt, Artificial Sequence
  Description of Artificial Sequence: Synthetic oligonucleotide
  Sense strand starting at position 3496 of SEQ ID NO: 915192
cucccaaaugauggaguaa

SEQ ID NO: 1061081 - RNA, 19 nt, Artificial Sequence
  Description of Artificial Sequence: Synthetic oligonucleotide
  Antisense strand to SEQ ID NO: 1061080
uuacuccaucauuugggag

SEQ ID NO: 1061082 - RNA, 19 nt, Artificial Sequence
  Description of Artificial Sequence: Synthetic oligonucleotide
  Sense strand starting at position 3507 of SEQ ID NO: 915192
uggaguaaaucauccuucu

SEQ ID NO: 1061083 - RNA, 19 nt, Artificial Sequence
  Description of Artificial Sequence: Synthetic oligonucleotide
  Antisense strand to SEQ ID NO: 1061082
agaaggaugauuuacucca

SEQ ID NO: 1061084 - RNA, 19 nt, Artificial Sequence
  Description of Artificial Sequence: Synthetic oligonucleotide
  Sense strand starting at position 3522 of SEQ ID NO: 915192
uucuuuaauggugaaugua

SEQ ID NO: 1061085 - RNA, 19 nt, Artificial Sequence
  Description of Artificial Sequence: Synthetic oligonucleotide
  Antisense strand to SEQ ID NO: 1061084
uacauucaccauuaaagaa

SEQ ID NO: 1061086 - RNA, 19 nt, Artificial Sequence
  Description of Artificial Sequence: Synthetic oligonucleotide
  Sense strand starting at position 3615 of SEQ ID NO: 915192
agguaaagcuaguuugacu

SEQ ID NO: 1061087 - RNA, 19 nt, Artificial Sequence
  Description of Artificial Sequence: Synthetic oligonucleotide
  Antisense strand to SEQ ID NO: 1061086
agucaaacuagcuuuaccu

SEQ ID NO: 1061088 - RNA, 19 nt, Artificial Sequence
  Description of Artificial Sequence: Synthetic oligonucleotide
  Sense strand starting at position 3683 of SEQ ID NO: 915192
ccuggaugcguggaaguau

SEQ ID NO: 1061089 - RNA, 19 nt, Artificial Sequence
  Description of Artificial Sequence: Synthetic oligonucleotide
  Antisense strand to SEQ ID NO: 1061088
auacuuccacgcauccagg

SEQ ID NO: 1061090 - RNA, 19 nt, Artificial Sequence
  Description of Artificial Sequence: Synthetic oligonucleotide
  Sense strand starting at position 3816 of SEQ ID NO: 915192
cugauuuguauauguguga

SEQ ID NO: 1061091 - RNA, 19 nt, Artificial Sequence
  Description of Artificial Sequence: Synthetic oligonucleotide
  Antisense strand to SEQ ID NO: 1061090
ucacacauauacaaaucag

SEQ ID NO: 1061092 - RNA, 19 nt, Artificial Sequence
  Description of Artificial Sequence: Synthetic oligonucleotide
  Sense strand starting at position 3843 of SEQ ID NO: 915192
agagaaguaguauguuuga

SEQ ID NO: 1061093 - RNA, 19 nt, Artificial Sequence
  Description of Artificial Sequence: Synthetic oligonucleotide
  Antisense strand to SEQ ID NO: 1061092
ucaaacauacuacuucucu

SEQ ID NO: 1061094 - RNA, 19 nt, Artificial Sequence
  Description of Artificial Sequence: Synthetic oligonucleotide
  Sense strand starting at position 3853 of SEQ ID NO: 915192
uauguuugagcucacagaa

SEQ ID NO: 1061095 - RNA, 19 nt, Artificial Sequence
  Description of Artificial Sequence: Synthetic oligonucleotide
  Antisense strand to SEQ ID NO: 1061094
uucugugagcucaaacaua

SEQ ID NO: 1061096 - RNA, 19 nt, Artificial Sequence
  Description of Artificial Sequence: Synthetic oligonucleotide
  Sense strand starting at position 12 of SEQ ID NO: 915193
uuuccauguguauaucuua

SEQ ID NO: 1061097 - RNA, 19 nt, Artificial Sequence
  Description of Artificial Sequence: Synthetic oligonucleotide
  Antisense strand to SEQ ID NO: 1061096
uaagauauacacauggaaa

SEQ ID NO: 1061098 - RNA, 19 nt, Artificial Sequence
  Description of Artificial Sequence: Synthetic oligonucleotide
  Sense strand starting at position 38 of SEQ ID NO: 915193
gcauguauucuuuaucucu

SEQ ID NO: 1061099 - RNA, 19 nt, Artificial Sequence
  Description of Artificial Sequence: Synthetic oligonucleotide
  Antisense strand to SEQ ID NO: 1061098
agagauaaagaauacaugc

SEQ ID NO: 1061100 - RNA, 19 nt, Artificial Sequence
  Description of Artificial Sequence: Synthetic oligonucleotide
  Sense strand starting at position 77 of SEQ ID NO: 915193
ugcgauuuggcucagcaaa

SEQ ID NO: 1061101 - RNA, 19 nt, Artificial Sequence
  Description of Artificial Sequence: Synthetic oligonucleotide
  Antisense strand to SEQ ID NO: 1061100
uuugcugagccaaaucgca

SEQ ID NO: 1061102 - RNA, 19 nt, Artificial Sequence
  Description of Artificial Sequence: Synthetic oligonucleotide
  Sense strand starting at position 261 of SEQ ID NO: 915193
cuuagaaacugugcuguca

SEQ ID NO: 1061103 - RNA, 19 nt, Artificial Sequence
  Description of Artificial Sequence: Synthetic oligonucleotide
  Antisense strand to SEQ ID NO: 1061102
ugacagcacaguuucuaag

SEQ ID NO: 1061104 - RNA, 19 nt, Artificial Sequence
  Description of Artificial Sequence: Synthetic oligonucleotide
  Sense strand starting at position 371 of SEQ ID NO: 915193
ugagucagauaaucuacau

SEQ ID NO: 1061105 - RNA, 19 nt, Artificial Sequence
  Description of Artificial Sequence: Synthetic oligonucleotide
  Antisense strand to SEQ ID NO: 1061104
auguagauuaucugacuca

SEQ ID NO: 1061106 - RNA, 19 nt, Artificial Sequence
  Description of Artificial Sequence: Synthetic oligonucleotide
  Sense strand starting at position 403 of SEQ ID NO: 915193
aaguuucuggccuacaaga

SEQ ID NO: 1061107 - RNA, 19 nt, Artificial Sequence
  Description of Artificial Sequence: Synthetic oligonucleotide
  Antisense strand to SEQ ID NO: 1061106
ucuuguaggccagaaacuu

SEQ ID NO: 1061108 - RNA, 19 nt, Artificial Sequence
  Description of Artificial Sequence: Synthetic oligonucleotide
  Sense strand starting at position 562 of SEQ ID NO: 915193
guaagaguuaaauaugugu

SEQ ID NO: 1061109 - RNA, 19 nt, Artificial Sequence
  Description of Artificial Sequence: Synthetic oligonucleotide
  Antisense strand to SEQ ID NO: 1061108
acacauauuuaacucuuac

SEQ ID NO: 1061110 - RNA, 19 nt, Artificial Sequence
  Description of Artificial Sequence: Synthetic oligonucleotide
  Sense strand starting at position 768 of SEQ ID NO: 915193
cuaccaguuguguaggaaa

SEQ ID NO: 1061111 - RNA, 19 nt, Artificial Sequence
  Description of Artificial Sequence: Synthetic oligonucleotide
  Antisense strand to SEQ ID NO: 1061110
uuuccuacacaacugguag

SEQ ID NO: 1061112 - RNA, 19 nt, Artificial Sequence
  Description of Artificial Sequence: Synthetic oligonucleotide
  Sense strand starting at position 770 of SEQ ID NO: 915193
accaguuguguaggaaagu

SEQ ID NO: 1061113 - RNA, 19 nt, Artificial Sequence
  Description of Artificial Sequence: Synthetic oligonucleotide
  Antisense strand to SEQ ID NO: 1061112
acuuuccuacacaacuggu

SEQ ID NO: 1061114 - RNA, 19 nt, Artificial Sequence
  Description of Artificial Sequence: Synthetic oligonucleotide
  Sense strand starting at position 801 of SEQ ID NO: 915193
guaggcuagcaguaauagu

SEQ ID NO: 1061115 - RNA, 19 nt, Artificial Sequence
  Description of Artificial Sequence: Synthetic oligonucleotide
  Antisense strand to SEQ ID NO: 1061114
acuauuacugcuagccuac

SEQ ID NO: 1061116 - RNA, 19 nt, Artificial Sequence
  Description of Artificial Sequence: Synthetic oligonucleotide
  Sense strand starting at position 900 of SEQ ID NO: 915193
auuagugaggcugacaguu

SEQ ID NO: 1061117 - RNA, 19 nt, Artificial Sequence
  Description of Artificial Sequence: Synthetic oligonucleotide
  Antisense strand to SEQ ID NO: 1061116
aacugucagccucacuaau

SEQ ID NO: 1061118 - RNA, 19 nt, Artificial Sequence
  Description of Artificial Sequence: Synthetic oligonucleotide
  Sense strand starting at position 955 of SEQ ID NO: 915193
gugguaagugcagauuaua

SEQ ID NO: 1061119 - RNA, 19 nt, Artificial Sequence
  Description of Artificial Sequence: Synthetic oligonucleotide
  Antisense strand to SEQ ID NO: 1061118
uauaaucugcacuuaccac

SEQ ID NO: 1061120 - RNA, 19 nt, Artificial Sequence
  Description of Artificial Sequence: Synthetic oligonucleotide
  Sense strand starting at position 963 of SEQ ID NO: 915193
ugcagauuauaacccugau

SEQ ID NO: 1061121 - RNA, 19 nt, Artificial Sequence
  Description of Artificial Sequence: Synthetic oligonucleotide
  Antisense strand to SEQ ID NO: 1061120
aucaggguuauaaucugca

SEQ ID NO: 1061122 - RNA, 19 nt, Artificial Sequence
  Description of Artificial Sequence: Synthetic oligonucleotide
  Sense strand starting at position 1026 of SEQ ID NO: 915193
auuccuaaagcuggaguua

SEQ ID NO: 1061123 - RNA, 19 nt, Artificial Sequence
  Description of Artificial Sequence: Synthetic oligonucleotide
  Antisense strand to SEQ ID NO: 1061122
uaacuccagcuuuaggaau

SEQ ID NO: 1061124 - RNA, 19 nt, Artificial Sequence
  Description of Artificial Sequence: Synthetic oligonucleotide
  Sense strand starting at position 2019 of SEQ ID NO: 915193
cucagugucugucugaaau

SEQ ID NO: 1061125 - RNA, 19 nt, Artificial Sequence
  Description of Artificial Sequence: Synthetic oligonucleotide
  Antisense strand to SEQ ID NO: 1061124
auuucagacagacacugag

SEQ ID NO: 1061126 - RNA, 19 nt, Artificial Sequence
  Description of Artificial Sequence: Synthetic oligonucleotide
  Sense strand starting at position 2149 of SEQ ID NO: 915193
ucgagacugaccuggcuaa

SEQ ID NO: 1061127 - RNA, 19 nt, Artificial Sequence
  Description of Artificial Sequence: Synthetic oligonucleotide
  Antisense strand to SEQ ID NO: 1061126
uuagccaggucagucucga

SEQ ID NO: 1061128 - RNA, 19 nt, Artificial Sequence
  Description of Artificial Sequence: Synthetic oligonucleotide
  Sense strand starting at position 2177 of SEQ ID NO: 915193
aucucaucucugcggagaa

SEQ ID NO: 1061129 - RNA, 19 nt, Artificial Sequence
  Description of Artificial Sequence: Synthetic oligonucleotide
  Antisense strand to SEQ ID NO: 1061128
uucuccgcagagaugagau

SEQ ID NO: 1061130 - RNA, 19 nt, Artificial Sequence
  Description of Artificial Sequence: Synthetic oligonucleotide
  Sense strand starting at position 2179 of SEQ ID NO: 915193
cucaucucugcggagaaua

SEQ ID NO: 1061131 - RNA, 19 nt, Artificial Sequence
  Description of Artificial Sequence: Synthetic oligonucleotide
  Antisense strand to SEQ ID NO: 1061130
uauucuccgcagagaugag

SEQ ID NO: 1061132 - RNA, 19 nt, Artificial Sequence
  Description of Artificial Sequence: Synthetic oligonucleotide
  Sense strand starting at position 2181 of SEQ ID NO: 915193
caucucugcggagaauaca

SEQ ID NO: 1061133 - RNA, 19 nt, Artificial Sequence
  Description of Artificial Sequence: Synthetic oligonucleotide
  Antisense strand to SEQ ID NO: 1061132
uguauucuccgcagagaug

SEQ ID NO: 1061134 - RNA, 19 nt, Artificial Sequence
  Description of Artificial Sequence: Synthetic oligonucleotide
  Sense strand starting at position 2371 of SEQ ID NO: 915193
aaaguuaagugucuuggua

SEQ ID NO: 1061135 - RNA, 19 nt, Artificial Sequence
  Description of Artificial Sequence: Synthetic oligonucleotide
  Antisense strand to SEQ ID NO: 1061134
uaccaagacacuuaacuuu

SEQ ID NO: 1061136 - RNA, 19 nt, Artificial Sequence
  Description of Artificial Sequence: Synthetic oligonucleotide
  Sense strand starting at position 2375 of SEQ ID NO: 915193
uuaagugucuugguaagag

SEQ ID NO: 1061137 - RNA, 19 nt, Artificial Sequence
  Description of Artificial Sequence: Synthetic oligonucleotide
  Antisense strand to SEQ ID NO: 1061136
cucuuaccaagacacuuaa

SEQ ID NO: 1061138 - RNA, 19 nt, Artificial Sequence
  Description of Artificial Sequence: Synthetic oligonucleotide
  Sense strand starting at position 2387 of SEQ ID NO: 915193
guaagagcuccucaauaau

SEQ ID NO: 1061139 - RNA, 19 nt, Artificial Sequence
  Description of Artificial Sequence: Synthetic oligonucleotide
  Antisense strand to SEQ ID NO: 1061138
auuauugaggagcucuuac

SEQ ID NO: 1061140 - RNA, 19 nt, Artificial Sequence
  Description of Artificial Sequence: Synthetic oligonucleotide
  Sense strand starting at position 2442 of SEQ ID NO: 915193
uuauuugacuucuggaaau

SEQ ID NO: 1061141 - RNA, 19 nt, Artificial Sequence
  Description of Artificial Sequence: Synthetic oligonucleotide
  Antisense strand to SEQ ID NO: 1061140
auuuccagaagucaaauaa

SEQ ID NO: 1061142 - RNA, 19 nt, Artificial Sequence
  Description of Artificial Sequence: Synthetic oligonucleotide
  Sense strand starting at position 2501 of SEQ ID NO: 915193
acagaagaguuggaauaac

SEQ ID NO: 1061143 - RNA, 19 nt, Artificial Sequence
  Description of Artificial Sequence: Synthetic oligonucleotide
  Antisense strand to SEQ ID NO: 1061142
guuauuccaacucuucugu

SEQ ID NO: 1061144 - RNA, 19 nt, Artificial Sequence
  Description of Artificial Sequence: Synthetic oligonucleotide
  Sense strand starting at position 2529 of SEQ ID NO: 915193
ucaccacuuguaugucuaa

SEQ ID NO: 1061145 - RNA, 19 nt, Artificial Sequence
  Description of Artificial Sequence: Synthetic oligonucleotide
  Antisense strand to SEQ ID NO: 1061144
uuagacauacaagugguga

SEQ ID NO: 1061146 - RNA, 19 nt, Artificial Sequence
  Description of Artificial Sequence: Synthetic oligonucleotide
  Sense strand starting at position 2691 of SEQ ID NO: 915193
uuagcaguauguguuaaga

SEQ ID NO: 1061147 - RNA, 19 nt, Artificial Sequence
  Description of Artificial Sequence: Synthetic oligonucleotide
  Antisense strand to SEQ ID NO: 1061146
ucuuaacacauacugcuaa

SEQ ID NO: 1061148 - RNA, 19 nt, Artificial Sequence
  Description of Artificial Sequence: Synthetic oligonucleotide
  Sense strand starting at position 2836 of SEQ ID NO: 915193
auaauuuacugacagguau

SEQ ID NO: 1061149 - RNA, 19 nt, Artificial Sequence
  Description of Artificial Sequence: Synthetic oligonucleotide
  Antisense strand to SEQ ID NO: 1061148
auaccugucaguaaauuau

SEQ ID NO: 1061150 - RNA, 19 nt, Artificial Sequence
  Description of Artificial Sequence: Synthetic oligonucleotide
  Sense strand starting at position 3083 of SEQ ID NO: 915193
aguaauauguuucuuggga

SEQ ID NO: 1061151 - RNA, 19 nt, Artificial Sequence
  Description of Artificial Sequence: Synthetic oligonucleotide
  Antisense strand to SEQ ID NO: 1061150
ucccaagaaacauauuacu

SEQ ID NO: 1061152 - RNA, 19 nt, Artificial Sequence
  Description of Artificial Sequence: Synthetic oligonucleotide
  Sense strand starting at position 3084 of SEQ ID NO: 915193
guaauauguuucuugggaa

SEQ ID NO: 1061153 - RNA, 19 nt, Artificial Sequence
  Description of Artificial Sequence: Synthetic oligonucleotide
  Antisense strand to SEQ ID NO: 1061152
uucccaagaaacauauuac

SEQ ID NO: 1061154 - RNA, 19 nt, Artificial Sequence
  Description of Artificial Sequence: Synthetic oligonucleotide
  Sense strand starting at position 3114 of SEQ ID NO: 915193
auaguuuaugcauggauaa

SEQ ID NO: 1061155 - RNA, 19 nt, Artificial Sequence
  Description of Artificial Sequence: Synthetic oligonucleotide
  Antisense strand to SEQ ID NO: 1061154
uuauccaugcauaaacuau

SEQ ID NO: 1061156 - RNA, 19 nt, Artificial Sequence
  Description of Artificial Sequence: Synthetic oligonucleotide
  Sense strand starting at position 3115 of SEQ ID NO: 915193
uaguuuaugcauggauaaa

SEQ ID NO: 1061157 - RNA, 19 nt, Artificial Sequence
  Description of Artificial Sequence: Synthetic oligonucleotide
  Antisense strand to SEQ ID NO: 1061156
uuuauccaugcauaaacua

SEQ ID NO: 1061158 - RNA, 19 nt, Artificial Sequence
  Description of Artificial Sequence: Synthetic oligonucleotide
  Sense strand starting at position 3242 of SEQ ID NO: 915193
uuugaagacugcuccauau

SEQ ID NO: 1061159 - RNA, 19 nt, Artificial Sequence
  Description of Artificial Sequence: Synthetic oligonucleotide
  Antisense strand to SEQ ID NO: 1061158
auauggagcagucuucaaa

SEQ ID NO: 1061160 - RNA, 19 nt, Artificial Sequence
  Description of Artificial Sequence: Synthetic oligonucleotide
  Sense strand starting at position 3298 of SEQ ID NO: 915193
cuagaugcccuauaguuua

SEQ ID NO: 1061161 - RNA, 19 nt, Artificial Sequence
  Description of Artificial Sequence: Synthetic oligonucleotide
  Antisense strand to SEQ ID NO: 1061160
uaaacuauagggcaucuag

SEQ ID NO: 1061162 - RNA, 19 nt, Artificial Sequence
  Description of Artificial Sequence: Synthetic oligonucleotide
  Sense strand starting at position 3303 of SEQ ID NO: 915193
ugcccuauaguuuaaugau

SEQ ID NO: 1061163 - RNA, 19 nt, Artificial Sequence
  Description of Artificial Sequence: Synthetic oligonucleotide
  Antisense strand to SEQ ID NO: 1061162
aucauuaaacuauagggca

SEQ ID NO: 1061164 - RNA, 19 nt, Artificial Sequence
  Description of Artificial Sequence: Synthetic oligonucleotide
  Sense strand starting at position 3416 of SEQ ID NO: 915193
gaaucaguguaauuaggau

SEQ ID NO: 1061165 - RNA, 19 nt, Artificial Sequence
  Description of Artificial Sequence: Synthetic oligonucleotide
  Antisense strand to SEQ ID NO: 1061164
auccuaauuacacugauuc

SEQ ID NO: 1061166 - RNA, 19 nt, Artificial Sequence
  Description of Artificial Sequence: Synthetic oligonucleotide
  Sense strand starting at position 3657 of SEQ ID NO: 915193
ucauuacuucugugagauc

SEQ ID NO: 1061167 - RNA, 19 nt, Artificial Sequence
  Description of Artificial Sequence: Synthetic oligonucleotide
  Antisense strand to SEQ ID NO: 1061166
gaucucacagaaguaauga

SEQ ID NO: 1061168 - RNA, 19 nt, Artificial Sequence
  Description of Artificial Sequence: Synthetic oligonucleotide
  Sense strand starting at position 3943 of SEQ ID NO: 915193
ucccaaacauguguaggaa

SEQ ID NO: 1061169 - RNA, 19 nt, Artificial Sequence
  Description of Artificial Sequence: Synthetic oligonucleotide
  Antisense strand to SEQ ID NO: 1061168
uuccuacacauguuuggga

SEQ ID NO: 1061170 - RNA, 19 nt, Artificial Sequence
  Description of Artificial Sequence: Synthetic oligonucleotide
  Sense strand starting at position 3946 of SEQ ID NO: 915193
caaacauguguaggaacau

SEQ ID NO: 1061171 - RNA, 19 nt, Artificial Sequence
  Description of Artificial Sequence: Synthetic oligonucleotide
  Antisense strand to SEQ ID NO: 1061170
auguuccuacacauguuug

SEQ ID NO: 1061172 - RNA, 19 nt, Artificial Sequence
  Description of Artificial Sequence: Synthetic oligonucleotide
  Sense strand starting at position 3952 of SEQ ID NO: 915193
uguguaggaacauguaaua

SEQ ID NO: 1061173 - RNA, 19 nt, Artificial Sequence
  Description of Artificial Sequence: Synthetic oligonucleotide
  Antisense strand to SEQ ID NO: 1061172
uauuacauguuccuacaca

SEQ ID NO: 1061174 - RNA, 19 nt, Artificial Sequence
  Description of Artificial Sequence: Synthetic oligonucleotide
  Sense strand starting at position 3971 of SEQ ID NO: 915193
uuugucuuucucuacuuga

SEQ ID NO: 1061175 - RNA, 19 nt, Artificial Sequence
  Description of Artificial Sequence: Synthetic oligonucleotide
  Antisense strand to SEQ ID NO: 1061174
ucaaguagagaaagacaaa

SEQ ID NO: 1061176 - RNA, 19 nt, Artificial Sequence
  Description of Artificial Sequence: Synthetic oligonucleotide
  Sense strand starting at position 229 of SEQ ID NO: 915194
cugacugauaggcaguuua

SEQ ID NO: 1061177 - RNA, 19 nt, Artificial Sequence
  Description of Artificial Sequence: Synthetic oligonucleotide
  Antisense strand to SEQ ID NO: 1061176
uaaacugccuaucagucag

SEQ ID NO: 1061178 - RNA, 19 nt, Artificial Sequence
  Description of Artificial Sequence: Synthetic oligonucleotide
  Sense strand starting at position 267 of SEQ ID NO: 915194
agaagaguauugguaugac

SEQ ID NO: 1061179 - RNA, 19 nt, Artificial Sequence
  Description of Artificial Sequence: Synthetic oligonucleotide
  Antisense strand to SEQ ID NO: 1061178
gucauaccaauacucuucu

SEQ ID NO: 1061180 - RNA, 19 nt, Artificial Sequence
  Description of Artificial Sequence: Synthetic oligonucleotide
  Sense strand starting at position 308 of SEQ ID NO: 915194
gcccuuacauagcugagaa

SEQ ID NO: 1061181 - RNA, 19 nt, Artificial Sequence
  Description of Artificial Sequence: Synthetic oligonucleotide
  Antisense strand to SEQ ID NO: 1061180
uucucagcuauguaagggc

SEQ ID NO: 1061182 - RNA, 19 nt, Artificial Sequence
  Description of Artificial Sequence: Synthetic oligonucleotide
  Sense strand starting at position 495 of SEQ ID NO: 915194
gccauaugccaguaacaag

SEQ ID NO: 1061183 - RNA, 19 nt, Artificial Sequence
  Description of Artificial Sequence: Synthetic oligonucleotide
  Antisense strand to SEQ ID NO: 1061182
cuuguuacuggcauauggc

SEQ ID NO: 1061184 - RNA, 19 nt, Artificial Sequence
  Description of Artificial Sequence: Synthetic oligonucleotide
  Sense strand starting at position 600 of SEQ ID NO: 915194
aagaccuuggugugaauga

SEQ ID NO: 1061185 - RNA, 19 nt, Artificial Sequence
  Description of Artificial Sequence: Synthetic oligonucleotide
  Antisense strand to SEQ ID NO: 1061184
ucauucacaccaaggucuu

SEQ ID NO: 1061186 - RNA, 19 nt, Artificial Sequence
  Description of Artificial Sequence: Synthetic oligonucleotide
  Sense strand starting at position 605 of SEQ ID NO: 915194
cuuggugugaaugagaguu

SEQ ID NO: 1061187 - RNA, 19 nt, Artificial Sequence
  Description of Artificial Sequence: Synthetic oligonucleotide
  Antisense strand to SEQ ID NO: 1061186
aacucucauucacaccaag

SEQ ID NO: 1061188 - RNA, 19 nt, Artificial Sequence
  Description of Artificial Sequence: Synthetic oligonucleotide
  Sense strand starting at position 774 of SEQ ID NO: 915194
cccaauaaaggcuaguuau

SEQ ID NO: 1061189 - RNA, 19 nt, Artificial Sequence
  Description of Artificial Sequence: Synthetic oligonucleotide
  Antisense strand to SEQ ID NO: 1061188
auaacuagccuuuauuggg

SEQ ID NO: 1061190 - RNA, 19 nt, Artificial Sequence
  Description of Artificial Sequence: Synthetic oligonucleotide
  Sense strand starting at position 777 of SEQ ID NO: 915194
aauaaaggcuaguuauugu

SEQ ID NO: 1061191 - RNA, 19 nt, Artificial Sequence
  Description of Artificial Sequence: Synthetic oligonucleotide
  Antisense strand to SEQ ID NO: 1061190
acaauaacuagccuuuauu

SEQ ID NO: 1061192 - RNA, 19 nt, Artificial Sequence
  Description of Artificial Sequence: Synthetic oligonucleotide
  Sense strand starting at position 780 of SEQ ID NO: 915194
aaaggcuaguuauugugau

SEQ ID NO: 1061193 - RNA, 19 nt, Artificial Sequence
  Description of Artificial Sequence: Synthetic oligonucleotide
  Antisense strand to SEQ ID NO: 1061192
aucacaauaacuagccuuu

SEQ ID NO: 1061194 - RNA, 19 nt, Artificial Sequence
  Description of Artificial Sequence: Synthetic oligonucleotide
  Sense strand starting at position 992 of SEQ ID NO: 915194
aggugaaggcuuggauugu

SEQ ID NO: 1061195 - RNA, 19 nt, Artificial Sequence
  Description of Artificial Sequence: Synthetic oligonucleotide
  Antisense strand to SEQ ID NO: 1061194
acaauccaagccuucaccu

SEQ ID NO: 1061196 - RNA, 19 nt, Artificial Sequence
  Description of Artificial Sequence: Synthetic oligonucleotide
  Sense strand starting at position 996 of SEQ ID NO: 915194
gaaggcuuggauuguuuaa

SEQ ID NO: 1061197 - RNA, 19 nt, Artificial Sequence
  Description of Artificial Sequence: Synthetic oligonucleotide
  Antisense strand to SEQ ID NO: 1061196
uuaaacaauccaagccuuc

SEQ ID NO: 1061198 - RNA, 19 nt, Artificial Sequence
  Description of Artificial Sequence: Synthetic oligonucleotide
  Sense strand starting at position 998 of SEQ ID NO: 915194
aggcuuggauuguuuaauu

SEQ ID NO: 1061199 - RNA, 19 nt, Artificial Sequence
  Description of Artificial Sequence: Synthetic oligonucleotide
  Antisense strand to SEQ ID NO: 1061198
aauuaaacaauccaagccu

SEQ ID NO: 1061200 - RNA, 19 nt, Artificial Sequence
  Description of Artificial Sequence: Synthetic oligonucleotide
  Sense strand starting at position 1003 of SEQ ID NO: 915194
uggauuguuuaauucucca

SEQ ID NO: 1061201 - RNA, 19 nt, Artificial Sequence
  Description of Artificial Sequence: Synthetic oligonucleotide
  Antisense strand to SEQ ID NO: 1061200
uggagaauuaaacaaucca

SEQ ID NO: 1061202 - RNA, 19 nt, Artificial Sequence
  Description of Artificial Sequence: Synthetic oligonucleotide
  Sense strand starting at position 1016 of SEQ ID NO: 915194
ucuccagcaguuuggauaa

SEQ ID NO: 1061203 - RNA, 19 nt, Artificial Sequence
  Description of Artificial Sequence: Synthetic oligonucleotide
  Antisense strand to SEQ ID NO: 1061202
uuauccaaacugcuggaga

SEQ ID NO: 1061204 - RNA, 19 nt, Artificial Sequence
  Description of Artificial Sequence: Synthetic oligonucleotide
  Sense strand starting at position 2026 of SEQ ID NO: 915194
gaugcagaccugggauagu

SEQ ID NO: 1061205 - RNA, 19 nt, Artificial Sequence
  Description of Artificial Sequence: Synthetic oligonucleotide
  Antisense strand to SEQ ID NO: 1061204
acuaucccaggucugcauc

SEQ ID NO: 1061206 - RNA, 19 nt, Artificial Sequence
  Description of Artificial Sequence: Synthetic oligonucleotide
  Sense strand starting at position 2053 of SEQ ID NO: 915194
uccacauuauaggugguau

SEQ ID NO: 1061207 - RNA, 19 nt, Artificial Sequence
  Description of Artificial Sequence: Synthetic oligonucleotide
  Antisense strand to SEQ ID NO: 1061206
auaccaccuauaaugugga

SEQ ID NO: 1061208 - RNA, 19 nt, Artificial Sequence
  Description of Artificial Sequence: Synthetic oligonucleotide
  Sense strand starting at position 2055 of SEQ ID NO: 915194
cacauuauaggugguauua

SEQ ID NO: 1061209 - RNA, 19 nt, Artificial Sequence
  Description of Artificial Sequence: Synthetic oligonucleotide
  Antisense strand to SEQ ID NO: 1061208
uaauaccaccuauaaugug

SEQ ID NO: 1061210 - RNA, 19 nt, Artificial Sequence
  Description of Artificial Sequence: Synthetic oligonucleotide
  Sense strand starting at position 2117 of SEQ ID NO: 915194
agguuacagcuuuaugcaa

SEQ ID NO: 1061211 - RNA, 19 nt, Artificial Sequence
  Description of Artificial Sequence: Synthetic oligonucleotide
  Antisense strand to SEQ ID NO: 1061210
uugcauaaagcuguaaccu

SEQ ID NO: 1061212 - RNA, 19 nt, Artificial Sequence
  Description of Artificial Sequence: Synthetic oligonucleotide
  Sense strand starting at position 2188 of SEQ ID NO: 915194
gggaguugcagucaucauc

SEQ ID NO: 1061213 - RNA, 19 nt, Artificial Sequence
  Description of Artificial Sequence: Synthetic oligonucleotide
  Antisense strand to SEQ ID NO: 1061212
gaugaugacugcaacuccc

SEQ ID NO: 1061214 - RNA, 19 nt, Artificial Sequence
  Description of Artificial Sequence: Synthetic oligonucleotide
  Sense strand starting at position 2191 of SEQ ID NO: 915194
aguugcagucaucaucuua

SEQ ID NO: 1061215 - RNA, 19 nt, Artificial Sequence
  Description of Artificial Sequence: Synthetic oligonucleotide
  Antisense strand to SEQ ID NO: 1061214
uaagaugaugacugcaacu

SEQ ID NO: 1061216 - RNA, 19 nt, Artificial Sequence
  Description of Artificial Sequence: Synthetic oligonucleotide
  Sense strand starting at position 2221 of SEQ ID NO: 915194
aguauaguguaguugauaa

SEQ ID NO: 1061217 - RNA, 19 nt, Artificial Sequence
  Description of Artificial Sequence: Synthetic oligonucleotide
  Antisense strand to SEQ ID NO: 1061216
uuaucaacuacacuauacu

SEQ ID NO: 1061218 - RNA, 19 nt, Artificial Sequence
  Description of Artificial Sequence: Synthetic oligonucleotide
  Sense strand starting at position 2393 of SEQ ID NO: 915194
acaagugaccagugaguaa

SEQ ID NO: 1061219 - RNA, 19 nt, Artificial Sequence
  Description of Artificial Sequence: Synthetic oligonucleotide
  Antisense strand to SEQ ID NO: 1061218
uuacucacuggucacuugu

SEQ ID NO: 1061220 - RNA, 19 nt, Artificial Sequence
  Description of Artificial Sequence: Synthetic oligonucleotide
  Sense strand starting at position 2396 of SEQ ID NO: 915194
agugaccagugaguaauua

SEQ ID NO: 1061221 - RNA, 19 nt, Artificial Sequence
  Description of Artificial Sequence: Synthetic oligonucleotide
  Antisense strand to SEQ ID NO: 1061220
uaauuacucacuggucacu

SEQ ID NO: 1061222 - RNA, 19 nt, Artificial Sequence
  Description of Artificial Sequence: Synthetic oligonucleotide
  Sense strand starting at position 2397 of SEQ ID NO: 915194
gugaccagugaguaauuau

SEQ ID NO: 1061223 - RNA, 19 nt, Artificial Sequence
  Description of Artificial Sequence: Synthetic oligonucleotide
  Antisense strand to SEQ ID NO: 1061222
auaauuacucacuggucac

SEQ ID NO: 1061224 - RNA, 19 nt, Artificial Sequence
  Description of Artificial Sequence: Synthetic oligonucleotide
  Sense strand starting at position 2446 of SEQ ID NO: 915194
aggucaugucuuggaauaa

SEQ ID NO: 1061225 - RNA, 19 nt, Artificial Sequence
  Description of Artificial Sequence: Synthetic oligonucleotide
  Antisense strand to SEQ ID NO: 1061224
uuauuccaagacaugaccu

SEQ ID NO: 1061226 - RNA, 19 nt, Artificial Sequence
  Description of Artificial Sequence: Synthetic oligonucleotide
  Sense strand starting at position 2603 of SEQ ID NO: 915194
cucuuaauugucgaauauu

SEQ ID NO: 1061227 - RNA, 19 nt, Artificial Sequence
  Description of Artificial Sequence: Synthetic oligonucleotide
  Antisense strand to SEQ ID NO: 1061226
aauauucgacaauuaagag

SEQ ID NO: 1061228 - RNA, 19 nt, Artificial Sequence
  Description of Artificial Sequence: Synthetic oligonucleotide
  Sense strand starting at position 2612 of SEQ ID NO: 915194
gucgaauauuggguccaaa

SEQ ID NO: 1061229 - RNA, 19 nt, Artificial Sequence
  Description of Artificial Sequence: Synthetic oligonucleotide
  Antisense strand to SEQ ID NO: 1061228
uuuggacccaauauucgac

SEQ ID NO: 1061230 - RNA, 19 nt, Artificial Sequence
  Description of Artificial Sequence: Synthetic oligonucleotide
  Sense strand starting at position 2631 of SEQ ID NO: 915194
uauacuaauguagguugaa

SEQ ID NO: 1061231 - RNA, 19 nt, Artificial Sequence
  Description of Artificial Sequence: Synthetic oligonucleotide
  Antisense strand to SEQ ID NO: 1061230
uucaaccuacauuaguaua

SEQ ID NO: 1061232 - RNA, 19 nt, Artificial Sequence
  Description of Artificial Sequence: Synthetic oligonucleotide
  Sense strand starting at position 2632 of SEQ ID NO: 915194
auacuaauguagguugaau

SEQ ID NO: 1061233 - RNA, 19 nt, Artificial Sequence
  Description of Artificial Sequence: Synthetic oligonucleotide
  Antisense strand to SEQ ID NO: 1061232
auucaaccuacauuaguau

SEQ ID NO: 1061234 - RNA, 19 nt, Artificial Sequence
  Description of Artificial Sequence: Synthetic oligonucleotide
  Sense strand starting at position 2669 of SEQ ID NO: 915194
ugagcauucugaguuauua

SEQ ID NO: 1061235 - RNA, 19 nt, Artificial Sequence
  Description of Artificial Sequence: Synthetic oligonucleotide
  Antisense strand to SEQ ID NO: 1061234
uaauaacucagaaugcuca

SEQ ID NO: 1061236 - RNA, 19 nt, Artificial Sequence
  Description of Artificial Sequence: Synthetic oligonucleotide
  Sense strand starting at position 3037 of SEQ ID NO: 915194
gaucuagacugccuggauu

SEQ ID NO: 1061237 - RNA, 19 nt, Artificial Sequence
  Description of Artificial Sequence: Synthetic oligonucleotide
  Antisense strand to SEQ ID NO: 1061236
aauccaggcagucuagauc

SEQ ID NO: 1061238 - RNA, 19 nt, Artificial Sequence
  Description of Artificial Sequence: Synthetic oligonucleotide
  Sense strand starting at position 3151 of SEQ ID NO: 915194
guuauaggaucugucuaau

SEQ ID NO: 1061239 - RNA, 19 nt, Artificial Sequence
  Description of Artificial Sequence: Synthetic oligonucleotide
  Antisense strand to SEQ ID NO: 1061238
auuagacagauccuauaac

SEQ ID NO: 1061240 - RNA, 19 nt, Artificial Sequence
  Description of Artificial Sequence: Synthetic oligonucleotide
  Sense strand starting at position 3157 of SEQ ID NO: 915194
ggaucugucuaauuaucau

SEQ ID NO: 1061241 - RNA, 19 nt, Artificial Sequence
  Description of Artificial Sequence: Synthetic oligonucleotide
  Antisense strand to SEQ ID NO: 1061240
augauaauuagacagaucc

SEQ ID NO: 1061242 - RNA, 19 nt, Artificial Sequence
  Description of Artificial Sequence: Synthetic oligonucleotide
  Sense strand starting at position 3383 of SEQ ID NO: 915194
guuacaaaguauccucaau

SEQ ID NO: 1061243 - RNA, 19 nt, Artificial Sequence
  Description of Artificial Sequence: Synthetic oligonucleotide
  Antisense strand to SEQ ID NO: 1061242
auugaggauacuuuguaac

SEQ ID NO: 1061244 - RNA, 19 nt, Artificial Sequence
  Description of Artificial Sequence: Synthetic oligonucleotide
  Sense strand starting at position 3534 of SEQ ID NO: 915194
agagaacuguagucaucag

SEQ ID NO: 1061245 - RNA, 19 nt, Artificial Sequence
  Description of Artificial Sequence: Synthetic oligonucleotide
  Antisense strand to SEQ ID NO: 1061244
cugaugacuacaguucucu

SEQ ID NO: 1061246 - RNA, 19 nt, Artificial Sequence
  Description of Artificial Sequence: Synthetic oligonucleotide
  Sense strand starting at position 3562 of SEQ ID NO: 915194
acugguagguuucccuaau

SEQ ID NO: 1061247 - RNA, 19 nt, Artificial Sequence
  Description of Artificial Sequence: Synthetic oligonucleotide
  Antisense strand to SEQ ID NO: 1061246
auuagggaaaccuaccagu

SEQ ID NO: 1061248 - RNA, 19 nt, Artificial Sequence
  Description of Artificial Sequence: Synthetic oligonucleotide
  Sense strand starting at position 3639 of SEQ ID NO: 915194
cccuuaaagguuuggaaua

SEQ ID NO: 1061249 - RNA, 19 nt, Artificial Sequence
  Description of Artificial Sequence: Synthetic oligonucleotide
  Antisense strand to SEQ ID NO: 1061248
uauuccaaaccuuuaaggg

SEQ ID NO: 1061250 - RNA, 19 nt, Artificial Sequence
  Description of Artificial Sequence: Synthetic oligonucleotide
  Sense strand starting at position 3649 of SEQ ID NO: 915194
uuuggaauauaucuugauc

SEQ ID NO: 1061251 - RNA, 19 nt, Artificial Sequence
  Description of Artificial Sequence: Synthetic oligonucleotide
  Antisense strand to SEQ ID NO: 1061250
gaucaagauauauuccaaa

SEQ ID NO: 1061252 - RNA, 19 nt, Artificial Sequence
  Description of Artificial Sequence: Synthetic oligonucleotide
  Sense strand starting at position 3733 of SEQ ID NO: 915194
aaagaacugugagauauuu

SEQ ID NO: 1061253 - RNA, 19 nt, Artificial Sequence
  Description of Artificial Sequence: Synthetic oligonucleotide
  Antisense strand to SEQ ID NO: 1061252
aaauaucucacaguucuuu

SEQ ID NO: 1061254 - RNA, 19 nt, Artificial Sequence
  Description of Artificial Sequence: Synthetic oligonucleotide
  Sense strand starting at position 3959 of SEQ ID NO: 915194
uauagaagucauugcaagu

SEQ ID NO: 1061255 - RNA, 19 nt, Artificial Sequence
  Description of Artificial Sequence: Synthetic oligonucleotide
  Antisense strand to SEQ ID NO: 1061254
acuugcaaugacuucuaua

SEQ ID NO: 1061256 - RNA, 19 nt, Artificial Sequence
  Description of Artificial Sequence: Synthetic oligonucleotide
  Sense strand starting at position 4 of SEQ ID NO: 915195
auugaauuggccgagaggu

SEQ ID NO: 1061257 - RNA, 19 nt, Artificial Sequence
  Description of Artificial Sequence: Synthetic oligonucleotide
  Antisense strand to SEQ ID NO: 1061256
accucucggccaauucaau

SEQ ID NO: 1061258 - RNA, 19 nt, Artificial Sequence
  Description of Artificial Sequence: Synthetic oligonucleotide
  Sense strand starting at position 6 of SEQ ID NO: 915195
ugaauuggccgagagguuu

SEQ ID NO: 1061259 - RNA, 19 nt, Artificial Sequence
  Description of Artificial Sequence: Synthetic oligonucleotide
  Antisense strand to SEQ ID NO: 1061258
aaaccucucggccaauuca

SEQ ID NO: 1061260 - RNA, 19 nt, Artificial Sequence
  Description of Artificial Sequence: Synthetic oligonucleotide
  Sense strand starting at position 70 of SEQ ID NO: 915195
uauuccuuaggcuagguaa

SEQ ID NO: 1061261 - RNA, 19 nt, Artificial Sequence
  Description of Artificial Sequence: Synthetic oligonucleotide
  Antisense strand to SEQ ID NO: 1061260
uuaccuagccuaaggaaua

SEQ ID NO: 1061262 - RNA, 19 nt, Artificial Sequence
  Description of Artificial Sequence: Synthetic oligonucleotide
  Sense strand starting at position 494 of SEQ ID NO: 915195
ccuuaaugccucuaaagag

SEQ ID NO: 1061263 - RNA, 19 nt, Artificial Sequence
  Description of Artificial Sequence: Synthetic oligonucleotide
  Antisense strand to SEQ ID NO: 1061262
cucuuuagaggcauuaagg

SEQ ID NO: 1061264 - RNA, 19 nt, Artificial Sequence
  Description of Artificial Sequence: Synthetic oligonucleotide
  Sense strand starting at position 634 of SEQ ID NO: 915195
aaaggcaacuguguuuaga

SEQ ID NO: 1061265 - RNA, 19 nt, Artificial Sequence
  Description of Artificial Sequence: Synthetic oligonucleotide
  Antisense strand to SEQ ID NO: 1061264
ucuaaacacaguugccuuu

SEQ ID NO: 1061266 - RNA, 19 nt, Artificial Sequence
  Description of Artificial Sequence: Synthetic oligonucleotide
  Sense strand starting at position 636 of SEQ ID NO: 915195
aggcaacuguguuuagaaa

SEQ ID NO: 1061267 - RNA, 19 nt, Artificial Sequence
  Description of Artificial Sequence: Synthetic oligonucleotide
  Antisense strand to SEQ ID NO: 1061266
uuucuaaacacaguugccu

SEQ ID NO: 1061268 - RNA, 19 nt, Artificial Sequence
  Description of Artificial Sequence: Synthetic oligonucleotide
  Sense strand starting at position 706 of SEQ ID NO: 915195
acacuaaaugcuggacuaa

SEQ ID NO: 1061269 - RNA, 19 nt, Artificial Sequence
  Description of Artificial Sequence: Synthetic oligonucleotide
  Antisense strand to SEQ ID NO: 1061268
uuaguccagcauuuagugu

SEQ ID NO: 1061270 - RNA, 19 nt, Artificial Sequence
  Description of Artificial Sequence: Synthetic oligonucleotide
  Sense strand starting at position 766 of SEQ ID NO: 915195
uuuaacauuccaggauguu

SEQ ID NO: 1061271 - RNA, 19 nt, Artificial Sequence
  Description of Artificial Sequence: Synthetic oligonucleotide
  Antisense strand to SEQ ID NO: 1061270
aacauccuggaauguuaaa

SEQ ID NO: 1061272 - RNA, 19 nt, Artificial Sequence
  Description of Artificial Sequence: Synthetic oligonucleotide
  Sense strand starting at position 767 of SEQ ID NO: 915195
uuaacauuccaggauguuu

SEQ ID NO: 1061273 - RNA, 19 nt, Artificial Sequence
  Description of Artificial Sequence: Synthetic oligonucleotide
  Antisense strand to SEQ ID NO: 1061272
aaacauccuggaauguuaa

SEQ ID NO: 1061274 - RNA, 19 nt, Artificial Sequence
  Description of Artificial Sequence: Synthetic oligonucleotide
  Sense strand starting at position 894 of SEQ ID NO: 915195
ggcaaacuauuagugaaau

SEQ ID NO: 1061275 - RNA, 19 nt, Artificial Sequence
  Description of Artificial Sequence: Synthetic oligonucleotide
  Antisense strand to SEQ ID NO: 1061274
auuucacuaauaguuugcc

SEQ ID NO: 1061276 - RNA, 19 nt, Artificial Sequence
  Description of Artificial Sequence: Synthetic oligonucleotide
  Sense strand starting at position 979 of SEQ ID NO: 915195
uguaaaugucugcacaauu

SEQ ID NO: 1061277 - RNA, 19 nt, Artificial Sequence
  Description of Artificial Sequence: Synthetic oligonucleotide
  Antisense strand to SEQ ID NO: 1061276
aauugugcagacauuuaca

SEQ ID NO: 1061278 - RNA, 19 nt, Artificial Sequence
  Description of Artificial Sequence: Synthetic oligonucleotide
  Sense strand starting at position 1023 of SEQ ID NO: 915195
acauuagcccaaggucaua

SEQ ID NO: 1061279 - RNA, 19 nt, Artificial Sequence
  Description of Artificial Sequence: Synthetic oligonucleotide
  Antisense strand to SEQ ID NO: 1061278
uaugaccuugggcuaaugu

SEQ ID NO: 1061280 - RNA, 19 nt, Artificial Sequence
  Description of Artificial Sequence: Synthetic oligonucleotide
  Sense strand starting at position 1048 of SEQ ID NO: 915195
aaugguccaccgugagaaa

SEQ ID NO: 1061281 - RNA, 19 nt, Artificial Sequence
  Description of Artificial Sequence: Synthetic oligonucleotide
  Antisense strand to SEQ ID NO: 1061280
uuucucacgguggaccauu

SEQ ID NO: 1061282 - RNA, 19 nt, Artificial Sequence
  Description of Artificial Sequence: Synthetic oligonucleotide
  Sense strand starting at position 1049 of SEQ ID NO: 915195
augguccaccgugagaaau

SEQ ID NO: 1061283 - RNA, 19 nt, Artificial Sequence
  Description of Artificial Sequence: Synthetic oligonucleotide
  Antisense strand to SEQ ID NO: 1061282
auuucucacgguggaccau

SEQ ID NO: 1061284 - RNA, 19 nt, Artificial Sequence
  Description of Artificial Sequence: Synthetic oligonucleotide
  Sense strand starting at position 1215 of SEQ ID NO: 915195
ucgcauguacaugaagaau

SEQ ID NO: 1061285 - RNA, 19 nt, Artificial Sequence
  Description of Artificial Sequence: Synthetic oligonucleotide
  Antisense strand to SEQ ID NO: 1061284
auucuucauguacaugcga

SEQ ID NO: 1061286 - RNA, 19 nt, Artificial Sequence
  Description of Artificial Sequence: Synthetic oligonucleotide
  Sense strand starting at position 1587 of SEQ ID NO: 915195
ggauaugaggacuguguaa

SEQ ID NO: 1061287 - RNA, 19 nt, Artificial Sequence
  Description of Artificial Sequence: Synthetic oligonucleotide
  Antisense strand to SEQ ID NO: 1061286
uuacacaguccucauaucc

SEQ ID NO: 1061288 - RNA, 19 nt, Artificial Sequence
  Description of Artificial Sequence: Synthetic oligonucleotide
  Sense strand starting at position 1589 of SEQ ID NO: 915195
auaugaggacuguguaaag

SEQ ID NO: 1061289 - RNA, 19 nt, Artificial Sequence
  Description of Artificial Sequence: Synthetic oligonucleotide
  Antisense strand to SEQ ID NO: 1061288
cuuuacacaguccucauau

SEQ ID NO: 1061290 - RNA, 19 nt, Artificial Sequence
  Description of Artificial Sequence: Synthetic oligonucleotide
  Sense strand starting at position 1743 of SEQ ID NO: 915195
gaugucagacagcaucuua

SEQ ID NO: 1061291 - RNA, 19 nt, Artificial Sequence
  Description of Artificial Sequence: Synthetic oligonucleotide
  Antisense strand to SEQ ID NO: 1061290
uaagaugcugucugacauc

SEQ ID NO: 1061292 - RNA, 19 nt, Artificial Sequence
  Description of Artificial Sequence: Synthetic oligonucleotide
  Sense strand starting at position 1857 of SEQ ID NO: 915195
ggcaaugaggcuuaaguuc

SEQ ID NO: 1061293 - RNA, 19 nt, Artificial Sequence
  Description of Artificial Sequence: Synthetic oligonucleotide
  Antisense strand to SEQ ID NO: 1061292
gaacuuaagccucauugcc

SEQ ID NO: 1061294 - RNA, 19 nt, Artificial Sequence
  Description of Artificial Sequence: Synthetic oligonucleotide
  Sense strand starting at position 2037 of SEQ ID NO: 915195
uuaagaauccuguggucag

SEQ ID NO: 1061295 - RNA, 19 nt, Artificial Sequence
  Description of Artificial Sequence: Synthetic oligonucleotide
  Antisense strand to SEQ ID NO: 1061294
cugaccacaggauucuuaa

SEQ ID NO: 1061296 - RNA, 19 nt, Artificial Sequence
  Description of Artificial Sequence: Synthetic oligonucleotide
  Sense strand starting at position 2177 of SEQ ID NO: 915195
gaagucagccuaggauaau

SEQ ID NO: 1061297 - RNA, 19 nt, Artificial Sequence
  Description of Artificial Sequence: Synthetic oligonucleotide
  Antisense strand to SEQ ID NO: 1061296
auuauccuaggcugacuuc

SEQ ID NO: 1061298 - RNA, 19 nt, Artificial Sequence
  Description of Artificial Sequence: Synthetic oligonucleotide
  Sense strand starting at position 2245 of SEQ ID NO: 915195
guagaaacugauugggagu

SEQ ID NO: 1061299 - RNA, 19 nt, Artificial Sequence
  Description of Artificial Sequence: Synthetic oligonucleotide
  Antisense strand to SEQ ID NO: 1061298
acucccaaucaguuucuac

SEQ ID NO: 1061300 - RNA, 19 nt, Artificial Sequence
  Description of Artificial Sequence: Synthetic oligonucleotide
  Sense strand starting at position 2294 of SEQ ID NO: 915195
ucauaacuugcugaggacu

SEQ ID NO: 1061301 - RNA, 19 nt, Artificial Sequence
  Description of Artificial Sequence: Synthetic oligonucleotide
  Antisense strand to SEQ ID NO: 1061300
aguccucagcaaguuauga

SEQ ID NO: 1061302 - RNA, 19 nt, Artificial Sequence
  Description of Artificial Sequence: Synthetic oligonucleotide
  Sense strand starting at position 2364 of SEQ ID NO: 915195
gguugaaucagaugaguuu

SEQ ID NO: 1061303 - RNA, 19 nt, Artificial Sequence
  Description of Artificial Sequence: Synthetic oligonucleotide
  Antisense strand to SEQ ID NO: 1061302
aaacucaucugauucaacc

SEQ ID NO: 1061304 - RNA, 19 nt, Artificial Sequence
  Description of Artificial Sequence: Synthetic oligonucleotide
  Sense strand starting at position 2370 of SEQ ID NO: 915195
aucagaugaguuugaagug

SEQ ID NO: 1061305 - RNA, 19 nt, Artificial Sequence
  Description of Artificial Sequence: Synthetic oligonucleotide
  Antisense strand to SEQ ID NO: 1061304
cacuucaaacucaucugau

SEQ ID NO: 1061306 - RNA, 19 nt, Artificial Sequence
  Description of Artificial Sequence: Synthetic oligonucleotide
  Sense strand starting at position 2489 of SEQ ID NO: 915195
uauagaucuuuaguaugag

SEQ ID NO: 1061307 - RNA, 19 nt, Artificial Sequence
  Description of Artificial Sequence: Synthetic oligonucleotide
  Antisense strand to SEQ ID NO: 1061306
cucauacuaaagaucuaua

SEQ ID NO: 1061308 - RNA, 19 nt, Artificial Sequence
  Description of Artificial Sequence: Synthetic oligonucleotide
  Sense strand starting at position 2492 of SEQ ID NO: 915195
agaucuuuaguaugagaac

SEQ ID NO: 1061309 - RNA, 19 nt, Artificial Sequence
  Description of Artificial Sequence: Synthetic oligonucleotide
  Antisense strand to SEQ ID NO: 1061308
guucucauacuaaagaucu

SEQ ID NO: 1061310 - RNA, 19 nt, Artificial Sequence
  Description of Artificial Sequence: Synthetic oligonucleotide
  Sense strand starting at position 2952 of SEQ ID NO: 915195
gagccauuguggucaagaa

SEQ ID NO: 1061311 - RNA, 19 nt, Artificial Sequence
  Description of Artificial Sequence: Synthetic oligonucleotide
  Antisense strand to SEQ ID NO: 1061310
uucuugaccacaauggcuc

SEQ ID NO: 1061312 - RNA, 19 nt, Artificial Sequence
  Description of Artificial Sequence: Synthetic oligonucleotide
  Sense strand starting at position 3066 of SEQ ID NO: 915195
augucaucaggccagaaca

SEQ ID NO: 1061313 - RNA, 19 nt, Artificial Sequence
  Description of Artificial Sequence: Synthetic oligonucleotide
  Antisense strand to SEQ ID NO: 1061312
uguucuggccugaugacau

SEQ ID NO: 1061314 - RNA, 19 nt, Artificial Sequence
  Description of Artificial Sequence: Synthetic oligonucleotide
  Sense strand starting at position 3105 of SEQ ID NO: 915195
gagguaagcccauacauau

SEQ ID NO: 1061315 - RNA, 19 nt, Artificial Sequence
  Description of Artificial Sequence: Synthetic oligonucleotide
  Antisense strand to SEQ ID NO: 1061314
auauguaugggcuuaccuc

SEQ ID NO: 1061316 - RNA, 19 nt, Artificial Sequence
  Description of Artificial Sequence: Synthetic oligonucleotide
  Sense strand starting at position 3145 of SEQ ID NO: 915195
cuggcacugauguaagauc

SEQ ID NO: 1061317 - RNA, 19 nt, Artificial Sequence
  Description of Artificial Sequence: Synthetic oligonucleotide
  Antisense strand to SEQ ID NO: 1061316
gaucuuacaucagugccag

SEQ ID NO: 1061318 - RNA, 19 nt, Artificial Sequence
  Description of Artificial Sequence: Synthetic oligonucleotide
  Sense strand starting at position 3579 of SEQ ID NO: 915195
gagccaugaccaugacugu

SEQ ID NO: 1061319 - RNA, 19 nt, Artificial Sequence
  Description of Artificial Sequence: Synthetic oligonucleotide
  Antisense strand to SEQ ID NO: 1061318
acagucauggucauggcuc

SEQ ID NO: 1061320 - RNA, 19 nt, Artificial Sequence
  Description of Artificial Sequence: Synthetic oligonucleotide
  Sense strand starting at position 3671 of SEQ ID NO: 915195
aggaaauacaaaugcguau

SEQ ID NO: 1061321 - RNA, 19 nt, Artificial Sequence
  Description of Artificial Sequence: Synthetic oligonucleotide
  Antisense strand to SEQ ID NO: 1061320
auacgcauuuguauuuccu

SEQ ID NO: 1061322 - RNA, 19 nt, Artificial Sequence
  Description of Artificial Sequence: Synthetic oligonucleotide
  Sense strand starting at position 3696 of SEQ ID NO: 915195
gcagaaaugcccugagaaa

SEQ ID NO: 1061323 - RNA, 19 nt, Artificial Sequence
  Description of Artificial Sequence: Synthetic oligonucleotide
  Antisense strand to SEQ ID NO: 1061322
uuucucagggcauuucugc

SEQ ID NO: 1061324 - RNA, 19 nt, Artificial Sequence
  Description of Artificial Sequence: Synthetic oligonucleotide
  Sense strand starting at position 3760 of SEQ ID NO: 915195
gaauuuguuugcccaugca

SEQ ID NO: 1061325 - RNA, 19 nt, Artificial Sequence
  Description of Artificial Sequence: Synthetic oligonucleotide
  Antisense strand to SEQ ID NO: 1061324
ugcaugggcaaacaaauuc

SEQ ID NO: 1061326 - RNA, 19 nt, Artificial Sequence
  Description of Artificial Sequence: Synthetic oligonucleotide
  Sense strand starting at position 3872 of SEQ ID NO: 915195
ucaaaucacuggucaagca

SEQ ID NO: 1061327 - RNA, 19 nt, Artificial Sequence
  Description of Artificial Sequence: Synthetic oligonucleotide
  Antisense strand to SEQ ID NO: 1061326
ugcuugaccagugauuuga

SEQ ID NO: 1061328 - RNA, 19 nt, Artificial Sequence
  Description of Artificial Sequence: Synthetic oligonucleotide
  Sense strand starting at position 3964 of SEQ ID NO: 915195
agaggaauuugguaucucu

SEQ ID NO: 1061329 - RNA, 19 nt, Artificial Sequence
  Description of Artificial Sequence: Synthetic oligonucleotide
  Antisense strand to SEQ ID NO: 1061328
agagauaccaaauuccucu

SEQ ID NO: 1061330 - RNA, 19 nt, Artificial Sequence
  Description of Artificial Sequence: Synthetic oligonucleotide
  Sense strand starting at position 3977 of SEQ ID NO: 915195
aucucuuaucuuggugaaa

SEQ ID NO: 1061331 - RNA, 19 nt, Artificial Sequence
  Description of Artificial Sequence: Synthetic oligonucleotide
  Antisense strand to SEQ ID NO: 1061330
uuucaccaagauaagagau

SEQ ID NO: 1061332 - RNA, 19 nt, Artificial Sequence
  Description of Artificial Sequence: Synthetic oligonucleotide
  Sense strand starting at position 3978 of SEQ ID NO: 915195
ucucuuaucuuggugaaau

SEQ ID NO: 1061333 - RNA, 19 nt, Artificial Sequence
  Description of Artificial Sequence: Synthetic oligonucleotide
  Antisense strand to SEQ ID NO: 1061332
auuucaccaagauaagaga

SEQ ID NO: 1061334 - RNA, 19 nt, Artificial Sequence
  Description of Artificial Sequence: Synthetic oligonucleotide
  Sense strand starting at position 3980 of SEQ ID NO: 915195
ucuuaucuuggugaaaucu

SEQ ID NO: 1061335 - RNA, 19 nt, Artificial Sequence
  Description of Artificial Sequence: Synthetic oligonucleotide
  Antisense strand to SEQ ID NO: 1061334
agauuucaccaagauaaga

SEQ ID NO: 1061336 - RNA, 19 nt, Artificial Sequence
  Description of Artificial Sequence: Synthetic oligonucleotide
  Sense strand starting at position 350 of SEQ ID NO: 915196
uuuguaucaggcugauacu

SEQ ID NO: 1061337 - RNA, 19 nt, Artificial Sequence
  Description of Artificial Sequence: Synthetic oligonucleotide
  Antisense strand to SEQ ID NO: 1061336
aguaucagccugauacaaa

SEQ ID NO: 1061338 - RNA, 19 nt, Artificial Sequence
  Description of Artificial Sequence: Synthetic oligonucleotide
  Sense strand starting at position 351 of SEQ ID NO: 915196
uuguaucaggcugauacua

SEQ ID NO: 1061339 - RNA, 19 nt, Artificial Sequence
  Description of Artificial Sequence: Synthetic oligonucleotide
  Antisense strand to SEQ ID NO: 1061338
uaguaucagccugauacaa

SEQ ID NO: 1061340 - RNA, 19 nt, Artificial Sequence
  Description of Artificial Sequence: Synthetic oligonucleotide
  Sense strand starting at position 394 of SEQ ID NO: 915196
agucccuguuccucaauuu

SEQ ID NO: 1061341 - RNA, 19 nt, Artificial Sequence
  Description of Artificial Sequence: Synthetic oligonucleotide
  Antisense strand to SEQ ID NO: 1061340
aaauugaggaacagggacu

SEQ ID NO: 1061342 - RNA, 19 nt, Artificial Sequence
  Description of Artificial Sequence: Synthetic oligonucleotide
  Sense strand starting at position 551 of SEQ ID NO: 915196
uauugauuggcucaggguu

SEQ ID NO: 1061343 - RNA, 19 nt, Artificial Sequence
  Description of Artificial Sequence: Synthetic oligonucleotide
  Antisense strand to SEQ ID NO: 1061342
aacccugagccaaucaaua

SEQ ID NO: 1061344 - RNA, 19 nt, Artificial Sequence
  Description of Artificial Sequence: Synthetic oligonucleotide
  Sense strand starting at position 643 of SEQ ID NO: 915196
agcuuauuugcauggaagu

SEQ ID NO: 1061345 - RNA, 19 nt, Artificial Sequence
  Description of Artificial Sequence: Synthetic oligonucleotide
  Antisense strand to SEQ ID NO: 1061344
acuuccaugcaaauaagcu

SEQ ID NO: 1061346 - RNA, 19 nt, Artificial Sequence
  Description of Artificial Sequence: Synthetic oligonucleotide
  Sense strand starting at position 644 of SEQ ID NO: 915196
gcuuauuugcauggaagug

SEQ ID NO: 1061347 - RNA, 19 nt, Artificial Sequence
  Description of Artificial Sequence: Synthetic oligonucleotide
  Antisense strand to SEQ ID NO: 1061346
cacuuccaugcaaauaagc

SEQ ID NO: 1061348 - RNA, 19 nt, Artificial Sequence
  Description of Artificial Sequence: Synthetic oligonucleotide
  Sense strand starting at position 733 of SEQ ID NO: 915196
gguugugcuuauuuagaua

SEQ ID NO: 1061349 - RNA, 19 nt, Artificial Sequence
  Description of Artificial Sequence: Synthetic oligonucleotide
  Antisense strand to SEQ ID NO: 1061348
uaucuaaauaagcacaacc

SEQ ID NO: 1061350 - RNA, 19 nt, Artificial Sequence
  Description of Artificial Sequence: Synthetic oligonucleotide
  Sense strand starting at position 1040 of SEQ ID NO: 915196
uguugaguugaauguuaac

SEQ ID NO: 1061351 - RNA, 19 nt, Artificial Sequence
  Description of Artificial Sequence: Synthetic oligonucleotide
  Antisense strand to SEQ ID NO: 1061350
guuaacauucaacucaaca

SEQ ID NO: 1061352 - RNA, 19 nt, Artificial Sequence
  Description of Artificial Sequence: Synthetic oligonucleotide
  Sense strand starting at position 1993 of SEQ ID NO: 915196
uagugucauggcuaguaaa

SEQ ID NO: 1061353 - RNA, 19 nt, Artificial Sequence
  Description of Artificial Sequence: Synthetic oligonucleotide
  Antisense strand to SEQ ID NO: 1061352
uuuacuagccaugacacua

SEQ ID NO: 1061354 - RNA, 19 nt, Artificial Sequence
  Description of Artificial Sequence: Synthetic oligonucleotide
  Sense strand starting at position 2048 of SEQ ID NO: 915196
agggaaaucuuugagauuu

SEQ ID NO: 1061355 - RNA, 19 nt, Artificial Sequence
  Description of Artificial Sequence: Synthetic oligonucleotide
  Antisense strand to SEQ ID NO: 1061354
aaaucucaaagauuucccu

SEQ ID NO: 1061356 - RNA, 19 nt, Artificial Sequence
  Description of Artificial Sequence: Synthetic oligonucleotide
  Sense strand starting at position 2059 of SEQ ID NO: 915196
ugagauuucuugcaaugaa

SEQ ID NO: 1061357 - RNA, 19 nt, Artificial Sequence
  Description of Artificial Sequence: Synthetic oligonucleotide
  Antisense strand to SEQ ID NO: 1061356
uucauugcaagaaaucuca

SEQ ID NO: 1061358 - RNA, 19 nt, Artificial Sequence
  Description of Artificial Sequence: Synthetic oligonucleotide
  Sense strand starting at position 2188 of SEQ ID NO: 915196
ugauuuacuugauguaaga

SEQ ID NO: 1061359 - RNA, 19 nt, Artificial Sequence
  Description of Artificial Sequence: Synthetic oligonucleotide
  Antisense strand to SEQ ID NO: 1061358
ucuuacaucaaguaaauca

SEQ ID NO: 1061360 - RNA, 19 nt, Artificial Sequence
  Description of Artificial Sequence: Synthetic oligonucleotide
  Sense strand starting at position 2228 of SEQ ID NO: 915196
aucgaaggagauugucuua

SEQ ID NO: 1061361 - RNA, 19 nt, Artificial Sequence
  Description of Artificial Sequence: Synthetic oligonucleotide
  Antisense strand to SEQ ID NO: 1061360
uaagacaaucuccuucgau

SEQ ID NO: 1061362 - RNA, 19 nt, Artificial Sequence
  Description of Artificial Sequence: Synthetic oligonucleotide
  Sense strand starting at position 2258 of SEQ ID NO: 915196
acuccuaauguguauaguu

SEQ ID NO: 1061363 - RNA, 19 nt, Artificial Sequence
  Description of Artificial Sequence: Synthetic oligonucleotide
  Antisense strand to SEQ ID NO: 1061362
aacuauacacauuaggagu

SEQ ID NO: 1061364 - RNA, 19 nt, Artificial Sequence
  Description of Artificial Sequence: Synthetic oligonucleotide
  Sense strand starting at position 2266 of SEQ ID NO: 915196
uguguauaguucuuagaaa

SEQ ID NO: 1061365 - RNA, 19 nt, Artificial Sequence
  Description of Artificial Sequence: Synthetic oligonucleotide
  Antisense strand to SEQ ID NO: 1061364
uuucuaagaacuauacaca

SEQ ID NO: 1061366 - RNA, 19 nt, Artificial Sequence
  Description of Artificial Sequence: Synthetic oligonucleotide
  Sense strand starting at position 2407 of SEQ ID NO: 915196
ugguuccagcuuuggaaau

SEQ ID NO: 1061367 - RNA, 19 nt, Artificial Sequence
  Description of Artificial Sequence: Synthetic oligonucleotide
  Antisense strand to SEQ ID NO: 1061366
auuuccaaagcuggaacca

SEQ ID NO: 1061368 - RNA, 19 nt, Artificial Sequence
  Description of Artificial Sequence: Synthetic oligonucleotide
  Sense strand starting at position 2482 of SEQ ID NO: 915196
ggcuucaacgugucuuugu

SEQ ID NO: 1061369 - RNA, 19 nt, Artificial Sequence
  Description of Artificial Sequence: Synthetic oligonucleotide
  Antisense strand to SEQ ID NO: 1061368
acaaagacacguugaagcc

SEQ ID NO: 1061370 - RNA, 19 nt, Artificial Sequence
  Description of Artificial Sequence: Synthetic oligonucleotide
  Sense strand starting at position 2490 of SEQ ID NO: 915196
cgugucuuuguauuaguau

SEQ ID NO: 1061371 - RNA, 19 nt, Artificial Sequence
  Description of Artificial Sequence: Synthetic oligonucleotide
  Antisense strand to SEQ ID NO: 1061370
auacuaauacaaagacacg

SEQ ID NO: 1061372 - RNA, 19 nt, Artificial Sequence
  Description of Artificial Sequence: Synthetic oligonucleotide
  Sense strand starting at position 2497 of SEQ ID NO: 915196
uuguauuaguaucccuaga

SEQ ID NO: 1061373 - RNA, 19 nt, Artificial Sequence
  Description of Artificial Sequence: Synthetic oligonucleotide
  Antisense strand to SEQ ID NO: 1061372
ucuagggauacuaauacaa

SEQ ID NO: 1061374 - RNA, 19 nt, Artificial Sequence
  Description of Artificial Sequence: Synthetic oligonucleotide
  Sense strand starting at position 2499 of SEQ ID NO: 915196
guauuaguaucccuagacu

SEQ ID NO: 1061375 - RNA, 19 nt, Artificial Sequence
  Description of Artificial Sequence: Synthetic oligonucleotide
  Antisense strand to SEQ ID NO: 1061374
agucuagggauacuaauac

SEQ ID NO: 1061376 - RNA, 19 nt, Artificial Sequence
  Description of Artificial Sequence: Synthetic oligonucleotide
  Sense strand starting at position 2520 of SEQ ID NO: 915196
aucucucaucuaugugaua

SEQ ID NO: 1061377 - RNA, 19 nt, Artificial Sequence
  Description of Artificial Sequence: Synthetic oligonucleotide
  Antisense strand to SEQ ID NO: 1061376
uaucacauagaugagagau

SEQ ID NO: 1061378 - RNA, 19 nt, Artificial Sequence
  Description of Artificial Sequence: Synthetic oligonucleotide
  Sense strand starting at position 2521 of SEQ ID NO: 915196
ucucucaucuaugugauau

SEQ ID NO: 1061379 - RNA, 19 nt, Artificial Sequence
  Description of Artificial Sequence: Synthetic oligonucleotide
  Antisense strand to SEQ ID NO: 1061378
auaucacauagaugagaga

SEQ ID NO: 1061380 - RNA, 19 nt, Artificial Sequence
  Description of Artificial Sequence: Synthetic oligonucleotide
  Sense strand starting at position 2531 of SEQ ID NO: 915196
augugauauucuuuacaag

SEQ ID NO: 1061381 - RNA, 19 nt, Artificial Sequence
  Description of Artificial Sequence: Synthetic oligonucleotide
  Antisense strand to SEQ ID NO: 1061380
cuuguaaagaauaucacau

SEQ ID NO: 1061382 - RNA, 19 nt, Artificial Sequence
  Description of Artificial Sequence: Synthetic oligonucleotide
  Sense strand starting at position 2532 of SEQ ID NO: 915196
ugugauauucuuuacaagc

SEQ ID NO: 1061383 - RNA, 19 nt, Artificial Sequence
  Description of Artificial Sequence: Synthetic oligonucleotide
  Antisense strand to SEQ ID NO: 1061382
gcuuguaaagaauaucaca

SEQ ID NO: 1061384 - RNA, 19 nt, Artificial Sequence
  Description of Artificial Sequence: Synthetic oligonucleotide
  Sense strand starting at position 2563 of SEQ ID NO: 915196
uuauguaauggaugccuga

SEQ ID NO: 1061385 - RNA, 19 nt, Artificial Sequence
  Description of Artificial Sequence: Synthetic oligonucleotide
  Antisense strand to SEQ ID NO: 1061384
ucaggcauccauuacauaa

SEQ ID NO: 1061386 - RNA, 19 nt, Artificial Sequence
  Description of Artificial Sequence: Synthetic oligonucleotide
  Sense strand starting at position 2566 of SEQ ID NO: 915196
uguaauggaugccugagaa

SEQ ID NO: 1061387 - RNA, 19 nt, Artificial Sequence
  Description of Artificial Sequence: Synthetic oligonucleotide
  Antisense strand to SEQ ID NO: 1061386
uucucaggcauccauuaca

SEQ ID NO: 1061388 - RNA, 19 nt, Artificial Sequence
  Description of Artificial Sequence: Synthetic oligonucleotide
  Sense strand starting at position 2616 of SEQ ID NO: 915196
ucaauucuguaguugagga

SEQ ID NO: 1061389 - RNA, 19 nt, Artificial Sequence
  Description of Artificial Sequence: Synthetic oligonucleotide
  Antisense strand to SEQ ID NO: 1061388
uccucaacuacagaauuga

SEQ ID NO: 1061390 - RNA, 19 nt, Artificial Sequence
  Description of Artificial Sequence: Synthetic oligonucleotide
  Sense strand starting at position 2680 of SEQ ID NO: 915196
uauaguaaguucguauaag

SEQ ID NO: 1061391 - RNA, 19 nt, Artificial Sequence
  Description of Artificial Sequence: Synthetic oligonucleotide
  Antisense strand to SEQ ID NO: 1061390
cuuauacgaacuuacuaua

SEQ ID NO: 1061392 - RNA, 19 nt, Artificial Sequence
  Description of Artificial Sequence: Synthetic oligonucleotide
  Sense strand starting at position 2694 of SEQ ID NO: 915196
auaaguuucuuccuagggu

SEQ ID NO: 1061393 - RNA, 19 nt, Artificial Sequence
  Description of Artificial Sequence: Synthetic oligonucleotide
  Antisense strand to SEQ ID NO: 1061392
acccuaggaagaaacuuau

SEQ ID NO: 1061394 - RNA, 19 nt, Artificial Sequence
  Description of Artificial Sequence: Synthetic oligonucleotide
  Sense strand starting at position 2697 of SEQ ID NO: 915196
aguuucuuccuaggguaaa

SEQ ID NO: 1061395 - RNA, 19 nt, Artificial Sequence
  Description of Artificial Sequence: Synthetic oligonucleotide
  Antisense strand to SEQ ID NO: 1061394
uuuacccuaggaagaaacu

SEQ ID NO: 1061396 - RNA, 19 nt, Artificial Sequence
  Description of Artificial Sequence: Synthetic oligonucleotide
  Sense strand starting at position 2799 of SEQ ID NO: 915196
aggccagaggucuacuuaa

SEQ ID NO: 1061397 - RNA, 19 nt, Artificial Sequence
  Description of Artificial Sequence: Synthetic oligonucleotide
  Antisense strand to SEQ ID NO: 1061396
uuaaguagaccucuggccu

SEQ ID NO: 1061398 - RNA, 19 nt, Artificial Sequence
  Description of Artificial Sequence: Synthetic oligonucleotide
  Sense strand starting at position 3054 of SEQ ID NO: 915196
aaaugagugcuacgaagaa

SEQ ID NO: 1061399 - RNA, 19 nt, Artificial Sequence
  Description of Artificial Sequence: Synthetic oligonucleotide
  Antisense strand to SEQ ID NO: 1061398
uucuucguagcacucauuu

SEQ ID NO: 1061400 - RNA, 19 nt, Artificial Sequence
  Description of Artificial Sequence: Synthetic oligonucleotide
  Sense strand starting at position 3234 of SEQ ID NO: 915196
gucaauauugugcagugga

SEQ ID NO: 1061401 - RNA, 19 nt, Artificial Sequence
  Description of Artificial Sequence: Synthetic oligonucleotide
  Antisense strand to SEQ ID NO: 1061400
uccacugcacaauauugac

SEQ ID NO: 1061402 - RNA, 19 nt, Artificial Sequence
  Description of Artificial Sequence: Synthetic oligonucleotide
  Sense strand starting at position 3237 of SEQ ID NO: 915196
aauauugugcaguggaaag

SEQ ID NO: 1061403 - RNA, 19 nt, Artificial Sequence
  Description of Artificial Sequence: Synthetic oligonucleotide
  Antisense strand to SEQ ID NO: 1061402
cuuuccacugcacaauauu

SEQ ID NO: 1061404 - RNA, 19 nt, Artificial Sequence
  Description of Artificial Sequence: Synthetic oligonucleotide
  Sense strand starting at position 3284 of SEQ ID NO: 915196
ugucucauccauuaguaga

SEQ ID NO: 1061405 - RNA, 19 nt, Artificial Sequence
  Description of Artificial Sequence: Synthetic oligonucleotide
  Antisense strand to SEQ ID NO: 1061404
ucuacuaauggaugagaca

SEQ ID NO: 1061406 - RNA, 19 nt, Artificial Sequence
  Description of Artificial Sequence: Synthetic oligonucleotide
  Sense strand starting at position 3330 of SEQ ID NO: 915196
aguuacuuccucuguacaa

SEQ ID NO: 1061407 - RNA, 19 nt, Artificial Sequence
  Description of Artificial Sequence: Synthetic oligonucleotide
  Antisense strand to SEQ ID NO: 1061406
uuguacagaggaaguaacu

SEQ ID NO: 1061408 - RNA, 19 nt, Artificial Sequence
  Description of Artificial Sequence: Synthetic oligonucleotide
  Sense strand starting at position 3331 of SEQ ID NO: 915196
guuacuuccucuguacaau

SEQ ID NO: 1061409 - RNA, 19 nt, Artificial Sequence
  Description of Artificial Sequence: Synthetic oligonucleotide
  Antisense strand to SEQ ID NO: 1061408
auuguacagaggaaguaac

SEQ ID NO: 1061410 - RNA, 19 nt, Artificial Sequence
  Description of Artificial Sequence: Synthetic oligonucleotide
  Sense strand starting at position 3534 of SEQ ID NO: 915196
agucuaaagcagugagaua

SEQ ID NO: 1061411 - RNA, 19 nt, Artificial Sequence
  Description of Artificial Sequence: Synthetic oligonucleotide
  Antisense strand to SEQ ID NO: 1061410
uaucucacugcuuuagacu

SEQ ID NO: 1061412 - RNA, 19 nt, Artificial Sequence
  Description of Artificial Sequence: Synthetic oligonucleotide
  Sense strand starting at position 3535 of SEQ ID NO: 915196
gucuaaagcagugagauaa

SEQ ID NO: 1061413 - RNA, 19 nt, Artificial Sequence
  Description of Artificial Sequence: Synthetic oligonucleotide
  Antisense strand to SEQ ID NO: 1061412
uuaucucacugcuuuagac

SEQ ID NO: 1061414 - RNA, 19 nt, Artificial Sequence
  Description of Artificial Sequence: Synthetic oligonucleotide
  Sense strand starting at position 3810 of SEQ ID NO: 915196
gcugcaugccuagcuaauu

SEQ ID NO: 1061415 - RNA, 19 nt, Artificial Sequence
  Description of Artificial Sequence: Synthetic oligonucleotide
  Antisense strand to SEQ ID NO: 1061414
aauuagcuaggcaugcagc

SEQ ID NO: 1061416 - RNA, 19 nt, Artificial Sequence
  Description of Artificial Sequence: Synthetic oligonucleotide
  Sense strand starting at position 52 of SEQ ID NO: 915197
ugauguagaguaggcuuaa

SEQ ID NO: 1061417 - RNA, 19 nt, Artificial Sequence
  Description of Artificial Sequence: Synthetic oligonucleotide
  Antisense strand to SEQ ID NO: 1061416
uuaagccuacucuacauca

SEQ ID NO: 1061418 - RNA, 19 nt, Artificial Sequence
  Description of Artificial Sequence: Synthetic oligonucleotide
  Sense strand starting at position 53 of SEQ ID NO: 915197
gauguagaguaggcuuaaa

SEQ ID NO: 1061419 - RNA, 19 nt, Artificial Sequence
  Description of Artificial Sequence: Synthetic oligonucleotide
  Antisense strand to SEQ ID NO: 1061418
uuuaagccuacucuacauc

SEQ ID NO: 1061420 - RNA, 19 nt, Artificial Sequence
  Description of Artificial Sequence: Synthetic oligonucleotide
  Sense strand starting at position 65 of SEQ ID NO: 915197
gcuuaaaugcaugacuucu

SEQ ID NO: 1061421 - RNA, 19 nt, Artificial Sequence
  Description of Artificial Sequence: Synthetic oligonucleotide
  Antisense strand to SEQ ID NO: 1061420
agaagucaugcauuuaagc

SEQ ID NO: 1061422 - RNA, 19 nt, Artificial Sequence
  Description of Artificial Sequence: Synthetic oligonucleotide
  Sense strand starting at position 71 of SEQ ID NO: 915197
augcaugacuucucugaac

SEQ ID NO: 1061423 - RNA, 19 nt, Artificial Sequence
  Description of Artificial Sequence: Synthetic oligonucleotide
  Antisense strand to SEQ ID NO: 1061422
guucagagaagucaugcau

SEQ ID NO: 1061424 - RNA, 19 nt, Artificial Sequence
  Description of Artificial Sequence: Synthetic oligonucleotide
  Sense strand starting at position 73 of SEQ ID NO: 915197
gcaugacuucucugaacau

SEQ ID NO: 1061425 - RNA, 19 nt, Artificial Sequence
  Description of Artificial Sequence: Synthetic oligonucleotide
  Antisense strand to SEQ ID NO: 1061424
auguucagagaagucaugc

SEQ ID NO: 1061426 - RNA, 19 nt, Artificial Sequence
  Description of Artificial Sequence: Synthetic oligonucleotide
  Sense strand starting at position 111 of SEQ ID NO: 915197
uagguugagcuugacugaa

SEQ ID NO: 1061427 - RNA, 19 nt, Artificial Sequence
  Description of Artificial Sequence: Synthetic oligonucleotide
  Antisense strand to SEQ ID NO: 1061426
uucagucaagcucaaccua

SEQ ID NO: 1061428 - RNA, 19 nt, Artificial Sequence
  Description of Artificial Sequence: Synthetic oligonucleotide
  Sense strand starting at position 113 of SEQ ID NO: 915197
gguugagcuugacugaaau

SEQ ID NO: 1061429 - RNA, 19 nt, Artificial Sequence
  Description of Artificial Sequence: Synthetic oligonucleotide
  Antisense strand to SEQ ID NO: 1061428
auuucagucaagcucaacc

SEQ ID NO: 1061430 - RNA, 19 nt, Artificial Sequence
  Description of Artificial Sequence: Synthetic oligonucleotide
  Sense strand starting at position 229 of SEQ ID NO: 915197
guuugagucccacaguauc

SEQ ID NO: 1061431 - RNA, 19 nt, Artificial Sequence
  Description of Artificial Sequence: Synthetic oligonucleotide
  Antisense strand to SEQ ID NO: 1061430
gauacugugggacucaaac

SEQ ID NO: 1061432 - RNA, 19 nt, Artificial Sequence
  Description of Artificial Sequence: Synthetic oligonucleotide
  Sense strand starting at position 341 of SEQ ID NO: 915197
aguaaauaugauugcagga

SEQ ID NO: 1061433 - RNA, 19 nt, Artificial Sequence
  Description of Artificial Sequence: Synthetic oligonucleotide
  Antisense strand to SEQ ID NO: 1061432
uccugcaaucauauuuacu

SEQ ID NO: 1061434 - RNA, 19 nt, Artificial Sequence
  Description of Artificial Sequence: Synthetic oligonucleotide
  Sense strand starting at position 424 of SEQ ID NO: 915197
ugguguaggcaaggaaauu

SEQ ID NO: 1061435 - RNA, 19 nt, Artificial Sequence
  Description of Artificial Sequence: Synthetic oligonucleotide
  Antisense strand to SEQ ID NO: 1061434
aauuuccuugccuacacca

SEQ ID NO: 1061436 - RNA, 19 nt, Artificial Sequence
  Description of Artificial Sequence: Synthetic oligonucleotide
  Sense strand starting at position 452 of SEQ ID NO: 915197
guauuagaugauuagcuga

SEQ ID NO: 1061437 - RNA, 19 nt, Artificial Sequence
  Description of Artificial Sequence: Synthetic oligonucleotide
  Antisense strand to SEQ ID NO: 1061436
ucagcuaaucaucuaauac

SEQ ID NO: 1061438 - RNA, 19 nt, Artificial Sequence
  Description of Artificial Sequence: Synthetic oligonucleotide
  Sense strand starting at position 454 of SEQ ID NO: 915197
auuagaugauuagcugaga

SEQ ID NO: 1061439 - RNA, 19 nt, Artificial Sequence
  Description of Artificial Sequence: Synthetic oligonucleotide
  Antisense strand to SEQ ID NO: 1061438
ucucagcuaaucaucuaau

SEQ ID NO: 1061440 - RNA, 19 nt, Artificial Sequence
  Description of Artificial Sequence: Synthetic oligonucleotide
  Sense strand starting at position 463 of SEQ ID NO: 915197
uuagcugagagaggucuua

SEQ ID NO: 1061441 - RNA, 19 nt, Artificial Sequence
  Description of Artificial Sequence: Synthetic oligonucleotide
  Antisense strand to SEQ ID NO: 1061440
uaagaccucucucagcuaa

SEQ ID NO: 1061442 - RNA, 19 nt, Artificial Sequence
  Description of Artificial Sequence: Synthetic oligonucleotide
  Sense strand starting at position 623 of SEQ ID NO: 915197
ccaccaugucuuuauuaug

SEQ ID NO: 1061443 - RNA, 19 nt, Artificial Sequence
  Description of Artificial Sequence: Synthetic oligonucleotide
  Antisense strand to SEQ ID NO: 1061442
cauaauaaagacauggugg

SEQ ID NO: 1061444 - RNA, 19 nt, Artificial Sequence
  Description of Artificial Sequence: Synthetic oligonucleotide
  Sense strand starting at position 731 of SEQ ID NO: 915197
agccaucuuugaucugaga

SEQ ID NO: 1061445 - RNA, 19 nt, Artificial Sequence
  Description of Artificial Sequence: Synthetic oligonucleotide
  Antisense strand to SEQ ID NO: 1061444
ucucagaucaaagauggcu

SEQ ID NO: 1061446 - RNA, 19 nt, Artificial Sequence
  Description of Artificial Sequence: Synthetic oligonucleotide
  Sense strand starting at position 834 of SEQ ID NO: 915197
uauccugauguaggauaaa

SEQ ID NO: 1061447 - RNA, 19 nt, Artificial Sequence
  Description of Artificial Sequence: Synthetic oligonucleotide
  Antisense strand to SEQ ID NO: 1061446
uuuauccuacaucaggaua

SEQ ID NO: 1061448 - RNA, 19 nt, Artificial Sequence
  Description of Artificial Sequence: Synthetic oligonucleotide
  Sense strand starting at position 871 of SEQ ID NO: 915197
ccuaaagauccugaugucu

SEQ ID NO: 1061449 - RNA, 19 nt, Artificial Sequence
  Description of Artificial Sequence: Synthetic oligonucleotide
  Antisense strand to SEQ ID NO: 1061448
agacaucaggaucuuuagg

SEQ ID NO: 1061450 - RNA, 19 nt, Artificial Sequence
  Description of Artificial Sequence: Synthetic oligonucleotide
  Sense strand starting at position 1018 of SEQ ID NO: 915197
ggagauucugaugggccau

SEQ ID NO: 1061451 - RNA, 19 nt, Artificial Sequence
  Description of Artificial Sequence: Synthetic oligonucleotide
  Antisense strand to SEQ ID NO: 1061450
auggcccaucagaaucucc

SEQ ID NO: 1061452 - RNA, 19 nt, Artificial Sequence
  Description of Artificial Sequence: Synthetic oligonucleotide
  Sense strand starting at position 1033 of SEQ ID NO: 915197
ccauaucuggcagaaaucu

SEQ ID NO: 1061453 - RNA, 19 nt, Artificial Sequence
  Description of Artificial Sequence: Synthetic oligonucleotide
  Antisense strand to SEQ ID NO: 1061452
agauuucugccagauaugg

SEQ ID NO: 1061454 - RNA, 19 nt, Artificial Sequence
  Description of Artificial Sequence: Synthetic oligonucleotide
  Sense strand starting at position 2044 of SEQ ID NO: 915197
auugcuaacucaguugaag

SEQ ID NO: 1061455 - RNA, 19 nt, Artificial Sequence
  Description of Artificial Sequence: Synthetic oligonucleotide
  Antisense strand to SEQ ID NO: 1061454
cuucaacugaguuagcaau

SEQ ID NO: 1061456 - RNA, 19 nt, Artificial Sequence
  Description of Artificial Sequence: Synthetic oligonucleotide
  Sense strand starting at position 2163 of SEQ ID NO: 915197
uugaauugucagcauguac

SEQ ID NO: 1061457 - RNA, 19 nt, Artificial Sequence
  Description of Artificial Sequence: Synthetic oligonucleotide
  Antisense strand to SEQ ID NO: 1061456
guacaugcugacaauucaa

SEQ ID NO: 1061458 - RNA, 19 nt, Artificial Sequence
  Description of Artificial Sequence: Synthetic oligonucleotide
  Sense strand starting at position 2194 of SEQ ID NO: 915197
ucagguucuugauuaauuc

SEQ ID NO: 1061459 - RNA, 19 nt, Artificial Sequence
  Description of Artificial Sequence: Synthetic oligonucleotide
  Antisense strand to SEQ ID NO: 1061458
gaauuaaucaagaaccuga

SEQ ID NO: 1061460 - RNA, 19 nt, Artificial Sequence
  Description of Artificial Sequence: Synthetic oligonucleotide
  Sense strand starting at position 2289 of SEQ ID NO: 915197
gagaguauuacguauaagg

SEQ ID NO: 1061461 - RNA, 19 nt, Artificial Sequence
  Description of Artificial Sequence: Synthetic oligonucleotide
  Antisense strand to SEQ ID NO: 1061460
ccuuauacguaauacucuc

SEQ ID NO: 1061462 - RNA, 19 nt, Artificial Sequence
  Description of Artificial Sequence: Synthetic oligonucleotide
  Sense strand starting at position 2291 of SEQ ID NO: 915197
gaguauuacguauaaggua

SEQ ID NO: 1061463 - RNA, 19 nt, Artificial Sequence
  Description of Artificial Sequence: Synthetic oligonucleotide
  Antisense strand to SEQ ID NO: 1061462
uaccuuauacguaauacuc

SEQ ID NO: 1061464 - RNA, 19 nt, Artificial Sequence
  Description of Artificial Sequence: Synthetic oligonucleotide
  Sense strand starting at position 2296 of SEQ ID NO: 915197
uuacguauaagguaaagau

SEQ ID NO: 1061465 - RNA, 19 nt, Artificial Sequence
  Description of Artificial Sequence: Synthetic oligonucleotide
  Antisense strand to SEQ ID NO: 1061464
aucuuuaccuuauacguaa

SEQ ID NO: 1061466 - RNA, 19 nt, Artificial Sequence
  Description of Artificial Sequence: Synthetic oligonucleotide
  Sense strand starting at position 2754 of SEQ ID NO: 915197
cuggauuguuaucuaagua

SEQ ID NO: 1061467 - RNA, 19 nt, Artificial Sequence
  Description of Artificial Sequence: Synthetic oligonucleotide
  Antisense strand to SEQ ID NO: 1061466
uacuuagauaacaauccag

SEQ ID NO: 1061468 - RNA, 19 nt, Artificial Sequence
  Description of Artificial Sequence: Synthetic oligonucleotide
  Sense strand starting at position 2755 of SEQ ID NO: 915197
uggauuguuaucuaaguag

SEQ ID NO: 1061469 - RNA, 19 nt, Artificial Sequence
  Description of Artificial Sequence: Synthetic oligonucleotide
  Antisense strand to SEQ ID NO: 1061468
cuacuuagauaacaaucca

SEQ ID NO: 1061470 - RNA, 19 nt, Artificial Sequence
  Description of Artificial Sequence: Synthetic oligonucleotide
  Sense strand starting at position 2930 of SEQ ID NO: 915197
guggguguccaauaaaguu

SEQ ID NO: 1061471 - RNA, 19 nt, Artificial Sequence
  Description of Artificial Sequence: Synthetic oligonucleotide
  Antisense strand to SEQ ID NO: 1061470
aacuuuauuggacacccac

SEQ ID NO: 1061472 - RNA, 19 nt, Artificial Sequence
  Description of Artificial Sequence: Synthetic oligonucleotide
  Sense strand starting at position 3063 of SEQ ID NO: 915197
uaguaauguggcuaagggu

SEQ ID NO: 1061473 - RNA, 19 nt, Artificial Sequence
  Description of Artificial Sequence: Synthetic oligonucleotide
  Antisense strand to SEQ ID NO: 1061472
acccuuagccacauuacua

SEQ ID NO: 1061474 - RNA, 19 nt, Artificial Sequence
  Description of Artificial Sequence: Synthetic oligonucleotide
  Sense strand starting at position 3071 of SEQ ID NO: 915197
uggcuaaggguucagacuu

SEQ ID NO: 1061475 - RNA, 19 nt, Artificial Sequence
  Description of Artificial Sequence: Synthetic oligonucleotide
  Antisense strand to SEQ ID NO: 1061474
aagucugaacccuuagcca

SEQ ID NO: 1061476 - RNA, 19 nt, Artificial Sequence
  Description of Artificial Sequence: Synthetic oligonucleotide
  Sense strand starting at position 3078 of SEQ ID NO: 915197
ggguucagacuuuggaguu

SEQ ID NO: 1061477 - RNA, 19 nt, Artificial Sequence
  Description of Artificial Sequence: Synthetic oligonucleotide
  Antisense strand to SEQ ID NO: 1061476
aacuccaaagucugaaccc

SEQ ID NO: 1061478 - RNA, 19 nt, Artificial Sequence
  Description of Artificial Sequence: Synthetic oligonucleotide
  Sense strand starting at position 3208 of SEQ ID NO: 915197
cugggaaggcuguaaguga

SEQ ID NO: 1061479 - RNA, 19 nt, Artificial Sequence
  Description of Artificial Sequence: Synthetic oligonucleotide
  Antisense strand to SEQ ID NO: 1061478
ucacuuacagccuucccag

SEQ ID NO: 1061480 - RNA, 19 nt, Artificial Sequence
  Description of Artificial Sequence: Synthetic oligonucleotide
  Sense strand starting at position 3209 of SEQ ID NO: 915197
ugggaaggcuguaagugaa

SEQ ID NO: 1061481 - RNA, 19 nt, Artificial Sequence
  Description of Artificial Sequence: Synthetic oligonucleotide
  Antisense strand to SEQ ID NO: 1061480
uucacuuacagccuuccca

SEQ ID NO: 1061482 - RNA, 19 nt, Artificial Sequence
  Description of Artificial Sequence: Synthetic oligonucleotide
  Sense strand starting at position 3317 of SEQ ID NO: 915197
ucaugagugacagguauac

SEQ ID NO: 1061483 - RNA, 19 nt, Artificial Sequence
  Description of Artificial Sequence: Synthetic oligonucleotide
  Antisense strand to SEQ ID NO: 1061482
guauaccugucacucauga

SEQ ID NO: 1061484 - RNA, 19 nt, Artificial Sequence
  Description of Artificial Sequence: Synthetic oligonucleotide
  Sense strand starting at position 3368 of SEQ ID NO: 915197
auggguuaauuugaggaaa

SEQ ID NO: 1061485 - RNA, 19 nt, Artificial Sequence
  Description of Artificial Sequence: Synthetic oligonucleotide
  Antisense strand to SEQ ID NO: 1061484
uuuccucaaauuaacccau

SEQ ID NO: 1061486 - RNA, 19 nt, Artificial Sequence
  Description of Artificial Sequence: Synthetic oligonucleotide
  Sense strand starting at position 3532 of SEQ ID NO: 915197
uacacuaggucaguggaaa

SEQ ID NO: 1061487 - RNA, 19 nt, Artificial Sequence
  Description of Artificial Sequence: Synthetic oligonucleotide
  Antisense strand to SEQ ID NO: 1061486
uuuccacugaccuagugua

SEQ ID NO: 1061488 - RNA, 19 nt, Artificial Sequence
  Description of Artificial Sequence: Synthetic oligonucleotide
  Sense strand starting at position 3558 of SEQ ID NO: 915197
ucaaauuaugauggaucuu

SEQ ID NO: 1061489 - RNA, 19 nt, Artificial Sequence
  Description of Artificial Sequence: Synthetic oligonucleotide
  Antisense strand to SEQ ID NO: 1061488
aagauccaucauaauuuga

SEQ ID NO: 1061490 - RNA, 19 nt, Artificial Sequence
  Description of Artificial Sequence: Synthetic oligonucleotide
  Sense strand starting at position 3768 of SEQ ID NO: 915197
gacuguccuuucuugagau

SEQ ID NO: 1061491 - RNA, 19 nt, Artificial Sequence
  Description of Artificial Sequence: Synthetic oligonucleotide
  Antisense strand to SEQ ID NO: 1061490
aucucaagaaaggacaguc

SEQ ID NO: 1061492 - RNA, 19 nt, Artificial Sequence
  Description of Artificial Sequence: Synthetic oligonucleotide
  Sense strand starting at position 3770 of SEQ ID NO: 915197
cuguccuuucuugagauca

SEQ ID NO: 1061493 - RNA, 19 nt, Artificial Sequence
  Description of Artificial Sequence: Synthetic oligonucleotide
  Antisense strand to SEQ ID NO: 1061492
ugaucucaagaaaggacag

SEQ ID NO: 1061494 - RNA, 19 nt, Artificial Sequence
  Description of Artificial Sequence: Synthetic oligonucleotide
  Sense strand starting at position 3834 of SEQ ID NO: 915197
gaugaauaauuagaaagga

SEQ ID NO: 1061495 - RNA, 19 nt, Artificial Sequence
  Description of Artificial Sequence: Synthetic oligonucleotide
  Antisense strand to SEQ ID NO: 1061494
uccuuucuaauuauucauc

SEQ ID NO: 1061496 - RNA, 19 nt, Artificial Sequence
  Description of Artificial Sequence: Synthetic oligonucleotide
  Sense strand starting at position 455 of SEQ ID NO: 915198
agggaauugccuuguccaa

SEQ ID NO: 1061497 - RNA, 19 nt, Artificial Sequence
  Description of Artificial Sequence: Synthetic oligonucleotide
  Antisense strand to SEQ ID NO: 1061496
uuggacaaggcaauucccu

SEQ ID NO: 1061498 - RNA, 19 nt, Artificial Sequence
  Description of Artificial Sequence: Synthetic oligonucleotide
  Sense strand starting at position 457 of SEQ ID NO: 915198
ggaauugccuuguccaaga

SEQ ID NO: 1061499 - RNA, 19 nt, Artificial Sequence
  Description of Artificial Sequence: Synthetic oligonucleotide
  Antisense strand to SEQ ID NO: 1061498
ucuuggacaaggcaauucc

SEQ ID NO: 1061500 - RNA, 19 nt, Artificial Sequence
  Description of Artificial Sequence: Synthetic oligonucleotide
  Sense strand starting at position 462 of SEQ ID NO: 915198
ugccuuguccaagauaaua

SEQ ID NO: 1061501 - RNA, 19 nt, Artificial Sequence
  Description of Artificial Sequence: Synthetic oligonucleotide
  Antisense strand to SEQ ID NO: 1061500
uauuaucuuggacaaggca

SEQ ID NO: 1061502 - RNA, 19 nt, Artificial Sequence
  Description of Artificial Sequence: Synthetic oligonucleotide
  Sense strand starting at position 551 of SEQ ID NO: 915198
uucuuaauuugggacaucu

SEQ ID NO: 1061503 - RNA, 19 nt, Artificial Sequence
  Description of Artificial Sequence: Synthetic oligonucleotide
  Antisense strand to SEQ ID NO: 1061502
agaugucccaaauuaagaa

SEQ ID NO: 1061504 - RNA, 19 nt, Artificial Sequence
  Description of Artificial Sequence: Synthetic oligonucleotide
  Sense strand starting at position 572 of SEQ ID NO: 915198
gaaggacaucucugcagaa

SEQ ID NO: 1061505 - RNA, 19 nt, Artificial Sequence
  Description of Artificial Sequence: Synthetic oligonucleotide
  Antisense strand to SEQ ID NO: 1061504
uucugcagagauguccuuc

SEQ ID NO: 1061506 - RNA, 19 nt, Artificial Sequence
  Description of Artificial Sequence: Synthetic oligonucleotide
  Sense strand starting at position 656 of SEQ ID NO: 915198
acuauauauuguuugugag

SEQ ID NO: 1061507 - RNA, 19 nt, Artificial Sequence
  Description of Artificial Sequence: Synthetic oligonucleotide
  Antisense strand to SEQ ID NO: 1061506
cucacaaacaauauauagu

SEQ ID NO: 1061508 - RNA, 19 nt, Artificial Sequence
  Description of Artificial Sequence: Synthetic oligonucleotide
  Sense strand starting at position 657 of SEQ ID NO: 915198
cuauauauuguuugugaga

SEQ ID NO: 1061509 - RNA, 19 nt, Artificial Sequence
  Description of Artificial Sequence: Synthetic oligonucleotide
  Antisense strand to SEQ ID NO: 1061508
ucucacaaacaauauauag

SEQ ID NO: 1061510 - RNA, 19 nt, Artificial Sequence
  Description of Artificial Sequence: Synthetic oligonucleotide
  Sense strand starting at position 740 of SEQ ID NO: 915198
agacaccaauguuuguaua

SEQ ID NO: 1061511 - RNA, 19 nt, Artificial Sequence
  Description of Artificial Sequence: Synthetic oligonucleotide
  Antisense strand to SEQ ID NO: 1061510
uauacaaacauuggugucu

SEQ ID NO: 1061512 - RNA, 19 nt, Artificial Sequence
  Description of Artificial Sequence: Synthetic oligonucleotide
  Sense strand starting at position 742 of SEQ ID NO: 915198
acaccaauguuuguauaau

SEQ ID NO: 1061513 - RNA, 19 nt, Artificial Sequence
  Description of Artificial Sequence: Synthetic oligonucleotide
  Antisense strand to SEQ ID NO: 1061512
auuauacaaacauuggugu

SEQ ID NO: 1061514 - RNA, 19 nt, Artificial Sequence
  Description of Artificial Sequence: Synthetic oligonucleotide
  Sense strand starting at position 862 of SEQ ID NO: 915198
aguguauuggugcaucaaa

SEQ ID NO: 1061515 - RNA, 19 nt, Artificial Sequence
  Description of Artificial Sequence: Synthetic oligonucleotide
  Antisense strand to SEQ ID NO: 1061514
uuugaugcaccaauacacu

SEQ ID NO: 1061516 - RNA, 19 nt, Artificial Sequence
  Description of Artificial Sequence: Synthetic oligonucleotide
  Sense strand starting at position 1039 of SEQ ID NO: 915198
guaacauggcucuacaaga

SEQ ID NO: 1061517 - RNA, 19 nt, Artificial Sequence
  Description of Artificial Sequence: Synthetic oligonucleotide
  Antisense strand to SEQ ID NO: 1061516
ucuuguagagccauguuac

SEQ ID NO: 1061518 - RNA, 19 nt, Artificial Sequence
  Description of Artificial Sequence: Synthetic oligonucleotide
  Sense strand starting at position 1053 of SEQ ID NO: 915198
caagauguguuuccauaag

SEQ ID NO: 1061519 - RNA, 19 nt, Artificial Sequence
  Description of Artificial Sequence: Synthetic oligonucleotide
  Antisense strand to SEQ ID NO: 1061518
cuuauggaaacacaucuug

SEQ ID NO: 1061520 - RNA, 19 nt, Artificial Sequence
  Description of Artificial Sequence: Synthetic oligonucleotide
  Sense strand starting at position 1133 of SEQ ID NO: 915198
cagggauuauuacuguaua

SEQ ID NO: 1061521 - RNA, 19 nt, Artificial Sequence
  Description of Artificial Sequence: Synthetic oligonucleotide
  Antisense strand to SEQ ID NO: 1061520
uauacaguaauaaucccug

SEQ ID NO: 1061522 - RNA, 19 nt, Artificial Sequence
  Description of Artificial Sequence: Synthetic oligonucleotide
  Sense strand starting at position 1373 of SEQ ID NO: 915198
uugagaaugccaugaucac

SEQ ID NO: 1061523 - RNA, 19 nt, Artificial Sequence
  Description of Artificial Sequence: Synthetic oligonucleotide
  Antisense strand to SEQ ID NO: 1061522
gugaucauggcauucucaa

SEQ ID NO: 1061524 - RNA, 19 nt, Artificial Sequence
  Description of Artificial Sequence: Synthetic oligonucleotide
  Sense strand starting at position 1408 of SEQ ID NO: 915198
guaucagagcaagagaguu

SEQ ID NO: 1061525 - RNA, 19 nt, Artificial Sequence
  Description of Artificial Sequence: Synthetic oligonucleotide
  Antisense strand to SEQ ID NO: 1061524
aacucucuugcucugauac

SEQ ID NO: 1061526 - RNA, 19 nt, Artificial Sequence
  Description of Artificial Sequence: Synthetic oligonucleotide
  Sense strand starting at position 1448 of SEQ ID NO: 915198
aguagaaaugguugauccu

SEQ ID NO: 1061527 - RNA, 19 nt, Artificial Sequence
  Description of Artificial Sequence: Synthetic oligonucleotide
  Antisense strand to SEQ ID NO: 1061526
aggaucaaccauuucuacu

SEQ ID NO: 1061528 - RNA, 19 nt, Artificial Sequence
  Description of Artificial Sequence: Synthetic oligonucleotide
  Sense strand starting at position 1451 of SEQ ID NO: 915198
agaaaugguugauccuauu

SEQ ID NO: 1061529 - RNA, 19 nt, Artificial Sequence
  Description of Artificial Sequence: Synthetic oligonucleotide
  Antisense strand to SEQ ID NO: 1061528
aauaggaucaaccauuucu

SEQ ID NO: 1061530 - RNA, 19 nt, Artificial Sequence
  Description of Artificial Sequence: Synthetic oligonucleotide
  Sense strand starting at position 1608 of SEQ ID NO: 915198
ggcugcauagcggucauau

SEQ ID NO: 1061531 - RNA, 19 nt, Artificial Sequence
  Description of Artificial Sequence: Synthetic oligonucleotide
  Antisense strand to SEQ ID NO: 1061530
auaugaccgcuaugcagcc

SEQ ID NO: 1061532 - RNA, 19 nt, Artificial Sequence
  Description of Artificial Sequence: Synthetic oligonucleotide
  Sense strand starting at position 1609 of SEQ ID NO: 915198
gcugcauagcggucauaug

SEQ ID NO: 1061533 - RNA, 19 nt, Artificial Sequence
  Description of Artificial Sequence: Synthetic oligonucleotide
  Antisense strand to SEQ ID NO: 1061532
cauaugaccgcuaugcagc

SEQ ID NO: 1061534 - RNA, 19 nt, Artificial Sequence
  Description of Artificial Sequence: Synthetic oligonucleotide
  Sense strand starting at position 1865 of SEQ ID NO: 915198
ccauguuugccauauagau

SEQ ID NO: 1061535 - RNA, 19 nt, Artificial Sequence
  Description of Artificial Sequence: Synthetic oligonucleotide
  Antisense strand to SEQ ID NO: 1061534
aucuauauggcaaacaugg

SEQ ID NO: 1061536 - RNA, 19 nt, Artificial Sequence
  Description of Artificial Sequence: Synthetic oligonucleotide
  Sense strand starting at position 1915 of SEQ ID NO: 915198
agaucuggauugucggaaa

SEQ ID NO: 1061537 - RNA, 19 nt, Artificial Sequence
  Description of Artificial Sequence: Synthetic oligonucleotide
  Antisense strand to SEQ ID NO: 1061536
uuuccgacaauccagaucu

SEQ ID NO: 1061538 - RNA, 19 nt, Artificial Sequence
  Description of Artificial Sequence: Synthetic oligonucleotide
  Sense strand starting at position 1942 of SEQ ID NO: 915198
aggagaaauucuguuacuu

SEQ ID NO: 1061539 - RNA, 19 nt, Artificial Sequence
  Description of Artificial Sequence: Synthetic oligonucleotide
  Antisense strand to SEQ ID NO: 1061538
aaguaacagaauuucuccu

SEQ ID NO: 1061540 - RNA, 19 nt, Artificial Sequence
  Description of Artificial Sequence: Synthetic oligonucleotide
  Sense strand starting at position 1953 of SEQ ID NO: 915198
uguuacuucuguuugauuu

SEQ ID NO: 1061541 - RNA, 19 nt, Artificial Sequence
  Description of Artificial Sequence: Synthetic oligonucleotide
  Antisense strand to SEQ ID NO: 1061540
aaaucaaacagaaguaaca

SEQ ID NO: 1061542 - RNA, 19 nt, Artificial Sequence
  Description of Artificial Sequence: Synthetic oligonucleotide
  Sense strand starting at position 1954 of SEQ ID NO: 915198
guuacuucuguuugauuuc

SEQ ID NO: 1061543 - RNA, 19 nt, Artificial Sequence
  Description of Artificial Sequence: Synthetic oligonucleotide
  Antisense strand to SEQ ID NO: 1061542
gaaaucaaacagaaguaac

SEQ ID NO: 1061544 - RNA, 19 nt, Artificial Sequence
  Description of Artificial Sequence: Synthetic oligonucleotide
  Sense strand starting at position 1964 of SEQ ID NO: 915198
uuugauuucugccucgaac

SEQ ID NO: 1061545 - RNA, 19 nt, Artificial Sequence
  Description of Artificial Sequence: Synthetic oligonucleotide
  Antisense strand to SEQ ID NO: 1061544
guucgaggcagaaaucaaa

SEQ ID NO: 1061546 - RNA, 19 nt, Artificial Sequence
  Description of Artificial Sequence: Synthetic oligonucleotide
  Sense strand starting at position 1966 of SEQ ID NO: 915198
ugauuucugccucgaaccu

SEQ ID NO: 1061547 - RNA, 19 nt, Artificial Sequence
  Description of Artificial Sequence: Synthetic oligonucleotide
  Antisense strand to SEQ ID NO: 1061546
agguucgaggcagaaauca

SEQ ID NO: 1061548 - RNA, 19 nt, Artificial Sequence
  Description of Artificial Sequence: Synthetic oligonucleotide
  Sense strand starting at position 2022 of SEQ ID NO: 915198
gaagaugcacaguggaauu

SEQ ID NO: 1061549 - RNA, 19 nt, Artificial Sequence
  Description of Artificial Sequence: Synthetic oligonucleotide
  Antisense strand to SEQ ID NO: 1061548
aauuccacugugcaucuuc

SEQ ID NO: 1061550 - RNA, 19 nt, Artificial Sequence
  Description of Artificial Sequence: Synthetic oligonucleotide
  Sense strand starting at position 2035 of SEQ ID NO: 915198
ggaauuuagucagaugaau

SEQ ID NO: 1061551 - RNA, 19 nt, Artificial Sequence
  Description of Artificial Sequence: Synthetic oligonucleotide
  Antisense strand to SEQ ID NO: 1061550
auucaucugacuaaauucc

SEQ ID NO: 1061552 - RNA, 19 nt, Artificial Sequence
  Description of Artificial Sequence: Synthetic oligonucleotide
  Sense strand starting at position 2126 of SEQ ID NO: 915198
aaagguauguuggauuuga

SEQ ID NO: 1061553 - RNA, 19 nt, Artificial Sequence
  Description of Artificial Sequence: Synthetic oligonucleotide
  Antisense strand to SEQ ID NO: 1061552
ucaaauccaacauaccuuu

SEQ ID NO: 1061554 - RNA, 19 nt, Artificial Sequence
  Description of Artificial Sequence: Synthetic oligonucleotide
  Sense strand starting at position 2136 of SEQ ID NO: 915198
uggauuugaugccaaauca

SEQ ID NO: 1061555 - RNA, 19 nt, Artificial Sequence
  Description of Artificial Sequence: Synthetic oligonucleotide
  Antisense strand to SEQ ID NO: 1061554
ugauuuggcaucaaaucca

SEQ ID NO: 1061556 - RNA, 19 nt, Artificial Sequence
  Description of Artificial Sequence: Synthetic oligonucleotide
  Sense strand starting at position 2171 of SEQ ID NO: 915198
agaugugcugucuacuaau

SEQ ID NO: 1061557 - RNA, 19 nt, Artificial Sequence
  Description of Artificial Sequence: Synthetic oligonucleotide
  Antisense strand to SEQ ID NO: 1061556
auuaguagacagcacaucu

SEQ ID NO: 1061558 - RNA, 19 nt, Artificial Sequence
  Description of Artificial Sequence: Synthetic oligonucleotide
  Sense strand starting at position 2197 of SEQ ID NO: 915198
gcaagugauuuagugugua

SEQ ID NO: 1061559 - RNA, 19 nt, Artificial Sequence
  Description of Artificial Sequence: Synthetic oligonucleotide
  Antisense strand to SEQ ID NO: 1061558
uacacacuaaaucacuugc

SEQ ID NO: 1061560 - RNA, 19 nt, Artificial Sequence
  Description of Artificial Sequence: Synthetic oligonucleotide
  Sense strand starting at position 2200 of SEQ ID NO: 915198
agugauuuaguguguauua

SEQ ID NO: 1061561 - RNA, 19 nt, Artificial Sequence
  Description of Artificial Sequence: Synthetic oligonucleotide
  Antisense strand to SEQ ID NO: 1061560
uaauacacacuaaaucacu

SEQ ID NO: 1061562 - RNA, 19 nt, Artificial Sequence
  Description of Artificial Sequence: Synthetic oligonucleotide
  Sense strand starting at position 2223 of SEQ ID NO: 915198
uggucauuccuacaguuaa

SEQ ID NO: 1061563 - RNA, 19 nt, Artificial Sequence
  Description of Artificial Sequence: Synthetic oligonucleotide
  Antisense strand to SEQ ID NO: 1061562
uuaacuguaggaaugacca

SEQ ID NO: 1061564 - RNA, 19 nt, Artificial Sequence
  Description of Artificial Sequence: Synthetic oligonucleotide
  Sense strand starting at position 2273 of SEQ ID NO: 915198
uuaagaugugacugucaua

SEQ ID NO: 1061565 - RNA, 19 nt, Artificial Sequence
  Description of Artificial Sequence: Synthetic oligonucleotide
  Antisense strand to SEQ ID NO: 1061564
uaugacagucacaucuuaa

SEQ ID NO: 1061566 - RNA, 19 nt, Artificial Sequence
  Description of Artificial Sequence: Synthetic oligonucleotide
  Sense strand starting at position 2352 of SEQ ID NO: 915198
ggagaaggaugauagaaug

SEQ ID NO: 1061567 - RNA, 19 nt, Artificial Sequence
  Description of Artificial Sequence: Synthetic oligonucleotide
  Antisense strand to SEQ ID NO: 1061566
cauucuaucauccuucucc

SEQ ID NO: 1061568 - RNA, 19 nt, Artificial Sequence
  Description of Artificial Sequence: Synthetic oligonucleotide
  Sense strand starting at position 2443 of SEQ ID NO: 915198
ucuauagugccagacaaga

SEQ ID NO: 1061569 - RNA, 19 nt, Artificial Sequence
  Description of Artificial Sequence: Synthetic oligonucleotide
  Antisense strand to SEQ ID NO: 1061568
ucuugucuggcacuauaga

SEQ ID NO: 1061570 - RNA, 19 nt, Artificial Sequence
  Description of Artificial Sequence: Synthetic oligonucleotide
  Sense strand starting at position 3091 of SEQ ID NO: 915198
agaauagggucaguuaaau

SEQ ID NO: 1061571 - RNA, 19 nt, Artificial Sequence
  Description of Artificial Sequence: Synthetic oligonucleotide
  Antisense strand to SEQ ID NO: 1061570
auuuaacugacccuauucu

SEQ ID NO: 1061572 - RNA, 19 nt, Artificial Sequence
  Description of Artificial Sequence: Synthetic oligonucleotide
  Sense strand starting at position 3097 of SEQ ID NO: 915198
gggucaguuaaauaguaau

SEQ ID NO: 1061573 - RNA, 19 nt, Artificial Sequence
  Description of Artificial Sequence: Synthetic oligonucleotide
  Antisense strand to SEQ ID NO: 1061572
auuacuauuuaacugaccc

SEQ ID NO: 1061574 - RNA, 19 nt, Artificial Sequence
  Description of Artificial Sequence: Synthetic oligonucleotide
  Sense strand starting at position 3345 of SEQ ID NO: 915198
cuuugcaagguguaaugaa

SEQ ID NO: 1061575 - RNA, 19 nt, Artificial Sequence
  Description of Artificial Sequence: Synthetic oligonucleotide
  Antisense strand to SEQ ID NO: 1061574
uucauuacaccuugcaaag

SEQ ID NO: 1061576 - RNA, 19 nt, Artificial Sequence
  Description of Artificial Sequence: Synthetic oligonucleotide
  Sense strand starting at position 6 of SEQ ID NO: 915199
gauuaaugagacuguucuu

SEQ ID NO: 1061577 - RNA, 19 nt, Artificial Sequence
  Description of Artificial Sequence: Synthetic oligonucleotide
  Antisense strand to SEQ ID NO: 1061576
aagaacagucucauuaauc

SEQ ID NO: 1061578 - RNA, 19 nt, Artificial Sequence
  Description of Artificial Sequence: Synthetic oligonucleotide
  Sense strand starting at position 9 of SEQ ID NO: 915199
uaaugagacuguucuuuga

SEQ ID NO: 1061579 - RNA, 19 nt, Artificial Sequence
  Description of Artificial Sequence: Synthetic oligonucleotide
  Antisense strand to SEQ ID NO: 1061578
ucaaagaacagucucauua

SEQ ID NO: 1061580 - RNA, 19 nt, Artificial Sequence
  Description of Artificial Sequence: Synthetic oligonucleotide
  Sense strand starting at position 11 of SEQ ID NO: 915199
augagacuguucuuugaaa

SEQ ID NO: 1061581 - RNA, 19 nt, Artificial Sequence
  Description of Artificial Sequence: Synthetic oligonucleotide
  Antisense strand to SEQ ID NO: 1061580
uuucaaagaacagucucau

SEQ ID NO: 1061582 - RNA, 19 nt, Artificial Sequence
  Description of Artificial Sequence: Synthetic oligonucleotide
  Sense strand starting at position 137 of SEQ ID NO: 915199
gcuaaccuuguagacauaa

SEQ ID NO: 1061583 - RNA, 19 nt, Artificial Sequence
  Description of Artificial Sequence: Synthetic oligonucleotide
  Antisense strand to SEQ ID NO: 1061582
uuaugucuacaagguuagc

SEQ ID NO: 1061584 - RNA, 19 nt, Artificial Sequence
  Description of Artificial Sequence: Synthetic oligonucleotide
  Sense strand starting at position 191 of SEQ ID NO: 915199
agcuuuaucuuucuuagag

SEQ ID NO: 1061585 - RNA, 19 nt, Artificial Sequence
  Description of Artificial Sequence: Synthetic oligonucleotide
  Antisense strand to SEQ ID NO: 1061584
cucuaagaaagauaaagcu

SEQ ID NO: 1061586 - RNA, 19 nt, Artificial Sequence
  Description of Artificial Sequence: Synthetic oligonucleotide
  Sense strand starting at position 236 of SEQ ID NO: 915199
gggccaagaagaugucaau

SEQ ID NO: 1061587 - RNA, 19 nt, Artificial Sequence
  Description of Artificial Sequence: Synthetic oligonucleotide
  Antisense strand to SEQ ID NO: 1061586
auugacaucuucuuggccc

SEQ ID NO: 1061588 - RNA, 19 nt, Artificial Sequence
  Description of Artificial Sequence: Synthetic oligonucleotide
  Sense strand starting at position 313 of SEQ ID NO: 915199
aaagaaauccugugguuau

SEQ ID NO: 1061589 - RNA, 19 nt, Artificial Sequence
  Description of Artificial Sequence: Synthetic oligonucleotide
  Antisense strand to SEQ ID NO: 1061588
auaaccacaggauuucuuu

SEQ ID NO: 1061590 - RNA, 19 nt, Artificial Sequence
  Description of Artificial Sequence: Synthetic oligonucleotide
  Sense strand starting at position 316 of SEQ ID NO: 915199
gaaauccugugguuauuag

SEQ ID NO: 1061591 - RNA, 19 nt, Artificial Sequence
  Description of Artificial Sequence: Synthetic oligonucleotide
  Antisense strand to SEQ ID NO: 1061590
cuaauaaccacaggauuuc

SEQ ID NO: 1061592 - RNA, 19 nt, Artificial Sequence
  Description of Artificial Sequence: Synthetic oligonucleotide
  Sense strand starting at position 325 of SEQ ID NO: 915199
ugguuauuaguugaaccca

SEQ ID NO: 1061593 - RNA, 19 nt, Artificial Sequence
  Description of Artificial Sequence: Synthetic oligonucleotide
  Antisense strand to SEQ ID NO: 1061592
uggguucaacuaauaacca

SEQ ID NO: 1061594 - RNA, 19 nt, Artificial Sequence
  Description of Artificial Sequence: Synthetic oligonucleotide
  Sense strand starting at position 399 of SEQ ID NO: 915199
cccugauuauagcuaguca

SEQ ID NO: 1061595 - RNA, 19 nt, Artificial Sequence
  Description of Artificial Sequence: Synthetic oligonucleotide
  Antisense strand to SEQ ID NO: 1061594
ugacuagcuauaaucaggg

SEQ ID NO: 1061596 - RNA, 19 nt, Artificial Sequence
  Description of Artificial Sequence: Synthetic oligonucleotide
  Sense strand starting at position 410 of SEQ ID NO: 915199
gcuagucaccagcagaacu

SEQ ID NO: 1061597 - RNA, 19 nt, Artificial Sequence
  Description of Artificial Sequence: Synthetic oligonucleotide
  Antisense strand to SEQ ID NO: 1061596
aguucugcuggugacuagc

SEQ ID NO: 1061598 - RNA, 19 nt, Artificial Sequence
  Description of Artificial Sequence: Synthetic oligonucleotide
  Sense strand starting at position 455 of SEQ ID NO: 915199
uucgcauagucacugauuu

SEQ ID NO: 1061599 - RNA, 19 nt, Artificial Sequence
  Description of Artificial Sequence: Synthetic oligonucleotide
  Antisense strand to SEQ ID NO: 1061598
aaaucagugacuaugcgaa

SEQ ID NO: 1061600 - RNA, 19 nt, Artificial Sequence
  Description of Artificial Sequence: Synthetic oligonucleotide
  Sense strand starting at position 456 of SEQ ID NO: 915199
ucgcauagucacugauuug

SEQ ID NO: 1061601 - RNA, 19 nt, Artificial Sequence
  Description of Artificial Sequence: Synthetic oligonucleotide
  Antisense strand to SEQ ID NO: 1061600
caaaucagugacuaugcga

SEQ ID NO: 1061602 - RNA, 19 nt, Artificial Sequence
  Description of Artificial Sequence: Synthetic oligonucleotide
  Sense strand starting at position 457 of SEQ ID NO: 915199
cgcauagucacugauuugu

SEQ ID NO: 1061603 - RNA, 19 nt, Artificial Sequence
  Description of Artificial Sequence: Synthetic oligonucleotide
  Antisense strand to SEQ ID NO: 1061602
acaaaucagugacuaugcg

SEQ ID NO: 1061604 - RNA, 19 nt, Artificial Sequence
  Description of Artificial Sequence: Synthetic oligonucleotide
  Sense strand starting at position 551 of SEQ ID NO: 915199
guguuuauauccucuagaa

SEQ ID NO: 1061605 - RNA, 19 nt, Artificial Sequence
  Description of Artificial Sequence: Synthetic oligonucleotide
  Antisense strand to SEQ ID NO: 1061604
uucuagaggauauaaacac

SEQ ID NO: 1061606 - RNA, 19 nt, Artificial Sequence
  Description of Artificial Sequence: Synthetic oligonucleotide
  Sense strand starting at position 619 of SEQ ID NO: 915199
uagaacucagacugaguua

SEQ ID NO: 1061607 - RNA, 19 nt, Artificial Sequence
  Description of Artificial Sequence: Synthetic oligonucleotide
  Antisense strand to SEQ ID NO: 1061606
uaacucagucugaguucua

SEQ ID NO: 1061608 - RNA, 19 nt, Artificial Sequence
  Description of Artificial Sequence: Synthetic oligonucleotide
  Sense strand starting at position 969 of SEQ ID NO: 915199
gguaacuuggguaguguuu

SEQ ID NO: 1061609 - RNA, 19 nt, Artificial Sequence
  Description of Artificial Sequence: Synthetic oligonucleotide
  Antisense strand to SEQ ID NO: 1061608
aaacacuacccaaguuacc

SEQ ID NO: 1061610 - RNA, 19 nt, Artificial Sequence
  Description of Artificial Sequence: Synthetic oligonucleotide
  Sense strand starting at position 975 of SEQ ID NO: 915199
uuggguaguguuuaucgaa

SEQ ID NO: 1061611 - RNA, 19 nt, Artificial Sequence
  Description of Artificial Sequence: Synthetic oligonucleotide
  Antisense strand to SEQ ID NO: 1061610
uucgauaaacacuacccaa

SEQ ID NO: 1061612 - RNA, 19 nt, Artificial Sequence
  Description of Artificial Sequence: Synthetic oligonucleotide
  Sense strand starting at position 2012 of SEQ ID NO: 915199
guaugugugccuggauuua

SEQ ID NO: 1061613 - RNA, 19 nt, Artificial Sequence
  Description of Artificial Sequence: Synthetic oligonucleotide
  Antisense strand to SEQ ID NO: 1061612
uaaauccaggcacacauac

SEQ ID NO: 1061614 - RNA, 19 nt, Artificial Sequence
  Description of Artificial Sequence: Synthetic oligonucleotide
  Sense strand starting at position 2154 of SEQ ID NO: 915199
guauacauauaguucuaca

SEQ ID NO: 1061615 - RNA, 19 nt, Artificial Sequence
  Description of Artificial Sequence: Synthetic oligonucleotide
  Antisense strand to SEQ ID NO: 1061614
uguagaacuauauguauac

SEQ ID NO: 1061616 - RNA, 19 nt, Artificial Sequence
  Description of Artificial Sequence: Synthetic oligonucleotide
  Sense strand starting at position 2175 of SEQ ID NO: 915199
aaaugaaggcuuuguuuag

SEQ ID NO: 1061617 - RNA, 19 nt, Artificial Sequence
  Description of Artificial Sequence: Synthetic oligonucleotide
  Antisense strand to SEQ ID NO: 1061616
cuaaacaaagccuucauuu

SEQ ID NO: 1061618 - RNA, 19 nt, Artificial Sequence
  Description of Artificial Sequence: Synthetic oligonucleotide
  Sense strand starting at position 2307 of SEQ ID NO: 915199
gguguuaacuucuugggaa

SEQ ID NO: 1061619 - RNA, 19 nt, Artificial Sequence
  Description of Artificial Sequence: Synthetic oligonucleotide
  Antisense strand to SEQ ID NO: 1061618
uucccaagaaguuaacacc

SEQ ID NO: 1061620 - RNA, 19 nt, Artificial Sequence
  Description of Artificial Sequence: Synthetic oligonucleotide
  Sense strand starting at position 2309 of SEQ ID NO: 915199
uguuaacuucuugggaaug

SEQ ID NO: 1061621 - RNA, 19 nt, Artificial Sequence
  Description of Artificial Sequence: Synthetic oligonucleotide
  Antisense strand to SEQ ID NO: 1061620
cauucccaagaaguuaaca

SEQ ID NO: 1061622 - RNA, 19 nt, Artificial Sequence
  Description of Artificial Sequence: Synthetic oligonucleotide
  Sense strand starting at position 2364 of SEQ ID NO: 915199
ggucauuuaucacaugaua

SEQ ID NO: 1061623 - RNA, 19 nt, Artificial Sequence
  Description of Artificial Sequence: Synthetic oligonucleotide
  Antisense strand to SEQ ID NO: 1061622
uaucaugugauaaaugacc

SEQ ID NO: 1061624 - RNA, 19 nt, Artificial Sequence
  Description of Artificial Sequence: Synthetic oligonucleotide
  Sense strand starting at position 2380 of SEQ ID NO: 915199
auacuagauguuugacuca

SEQ ID NO: 1061625 - RNA, 19 nt, Artificial Sequence
  Description of Artificial Sequence: Synthetic oligonucleotide
  Antisense strand to SEQ ID NO: 1061624
ugagucaaacaucuaguau

SEQ ID NO: 1061626 - RNA, 19 nt, Artificial Sequence
  Description of Artificial Sequence: Synthetic oligonucleotide
  Sense strand starting at position 2391 of SEQ ID NO: 915199
uugacucagucugcacaau

SEQ ID NO: 1061627 - RNA, 19 nt, Artificial Sequence
  Description of Artificial Sequence: Synthetic oligonucleotide
  Antisense strand to SEQ ID NO: 1061626
auugugcagacugagucaa

SEQ ID NO: 1061628 - RNA, 19 nt, Artificial Sequence
  Description of Artificial Sequence: Synthetic oligonucleotide
  Sense strand starting at position 2392 of SEQ ID NO: 915199
ugacucagucugcacaauu

SEQ ID NO: 1061629 - RNA, 19 nt, Artificial Sequence
  Description of Artificial Sequence: Synthetic oligonucleotide
  Antisense strand to SEQ ID NO: 1061628
aauugugcagacugaguca

SEQ ID NO: 1061630 - RNA, 19 nt, Artificial Sequence
  Description of Artificial Sequence: Synthetic oligonucleotide
  Sense strand starting at position 2651 of SEQ ID NO: 915199
agaguuacugaguggcaca

SEQ ID NO: 1061631 - RNA, 19 nt, Artificial Sequence
  Description of Artificial Sequence: Synthetic oligonucleotide
  Antisense strand to SEQ ID NO: 1061630
ugugccacucaguaacucu

SEQ ID NO: 1061632 - RNA, 19 nt, Artificial Sequence
  Description of Artificial Sequence: Synthetic oligonucleotide
  Sense strand starting at position 2652 of SEQ ID NO: 915199
gaguuacugaguggcacaa

SEQ ID NO: 1061633 - RNA, 19 nt, Artificial Sequence
  Description of Artificial Sequence: Synthetic oligonucleotide
  Antisense strand to SEQ ID NO: 1061632
uugugccacucaguaacuc

SEQ ID NO: 1061634 - RNA, 19 nt, Artificial Sequence
  Description of Artificial Sequence: Synthetic oligonucleotide
  Sense strand starting at position 2933 of SEQ ID NO: 915199
aguguugacaaggaaaugu

SEQ ID NO: 1061635 - RNA, 19 nt, Artificial Sequence
  Description of Artificial Sequence: Synthetic oligonucleotide
  Antisense strand to SEQ ID NO: 1061634
acauuuccuugucaacacu

SEQ ID NO: 1061636 - RNA, 19 nt, Artificial Sequence
  Description of Artificial Sequence: Synthetic oligonucleotide
  Sense strand starting at position 2937 of SEQ ID NO: 915199
uugacaaggaaauguagua

SEQ ID NO: 1061637 - RNA, 19 nt, Artificial Sequence
  Description of Artificial Sequence: Synthetic oligonucleotide
  Antisense strand to SEQ ID NO: 1061636
uacuacauuuccuugucaa

SEQ ID NO: 1061638 - RNA, 19 nt, Artificial Sequence
  Description of Artificial Sequence: Synthetic oligonucleotide
  Sense strand starting at position 2969 of SEQ ID NO: 915199
ucguuauugguagaaaugu

SEQ ID NO: 1061639 - RNA, 19 nt, Artificial Sequence
  Description of Artificial Sequence: Synthetic oligonucleotide
  Antisense strand to SEQ ID NO: 1061638
acauuucuaccaauaacga

SEQ ID NO: 1061640 - RNA, 19 nt, Artificial Sequence
  Description of Artificial Sequence: Synthetic oligonucleotide
  Sense strand starting at position 3106 of SEQ ID NO: 915199
gugacaggguaaguaaauu

SEQ ID NO: 1061641 - RNA, 19 nt, Artificial Sequence
  Description of Artificial Sequence: Synthetic oligonucleotide
  Antisense strand to SEQ ID NO: 1061640
aauuuacuuacccugucac

SEQ ID NO: 1061642 - RNA, 19 nt, Artificial Sequence
  Description of Artificial Sequence: Synthetic oligonucleotide
  Sense strand starting at position 3293 of SEQ ID NO: 915199
uuaauauugacaggaggca

SEQ ID NO: 1061643 - RNA, 19 nt, Artificial Sequence
  Description of Artificial Sequence: Synthetic oligonucleotide
  Antisense strand to SEQ ID NO: 1061642
ugccuccugucaauauuaa

SEQ ID NO: 1061644 - RNA, 19 nt, Artificial Sequence
  Description of Artificial Sequence: Synthetic oligonucleotide
  Sense strand starting at position 3312 of SEQ ID NO: 915199
gaucaauagucaccuggau

SEQ ID NO: 1061645 - RNA, 19 nt, Artificial Sequence
  Description of Artificial Sequence: Synthetic oligonucleotide
  Antisense strand to SEQ ID NO: 1061644
auccaggugacuauugauc

SEQ ID NO: 1061646 - RNA, 19 nt, Artificial Sequence
  Description of Artificial Sequence: Synthetic oligonucleotide
  Sense strand starting at position 3326 of SEQ ID NO: 915199
uggauagagauauguguga

SEQ ID NO: 1061647 - RNA, 19 nt, Artificial Sequence
  Description of Artificial Sequence: Synthetic oligonucleotide
  Antisense strand to SEQ ID NO: 1061646
ucacacauaucucuaucca

SEQ ID NO: 1061648 - RNA, 19 nt, Artificial Sequence
  Description of Artificial Sequence: Synthetic oligonucleotide
  Sense strand starting at position 3330 of SEQ ID NO: 915199
uagagauaugugugaggug

SEQ ID NO: 1061649 - RNA, 19 nt, Artificial Sequence
  Description of Artificial Sequence: Synthetic oligonucleotide
  Antisense strand to SEQ ID NO: 1061648
caccucacacauaucucua

SEQ ID NO: 1061650 - RNA, 19 nt, Artificial Sequence
  Description of Artificial Sequence: Synthetic oligonucleotide
  Sense strand starting at position 3362 of SEQ ID NO: 915199
ggaguaucaagaggcauga

SEQ ID NO: 1061651 - RNA, 19 nt, Artificial Sequence
  Description of Artificial Sequence: Synthetic oligonucleotide
  Antisense strand to SEQ ID NO: 1061650
ucaugccucuugauacucc

SEQ ID NO: 1061652 - RNA, 19 nt, Artificial Sequence
  Description of Artificial Sequence: Synthetic oligonucleotide
  Sense strand starting at position 3505 of SEQ ID NO: 915199
guuauaccugaauaaagcu

SEQ ID NO: 1061653 - RNA, 19 nt, Artificial Sequence
  Description of Artificial Sequence: Synthetic oligonucleotide
  Antisense strand to SEQ ID NO: 1061652
agcuuuauucagguauaac

SEQ ID NO: 1061654 - RNA, 19 nt, Artificial Sequence
  Description of Artificial Sequence: Synthetic oligonucleotide
  Sense strand starting at position 3946 of SEQ ID NO: 915199
gcauguauuuauguauugu

SEQ ID NO: 1061655 - RNA, 19 nt, Artificial Sequence
  Description of Artificial Sequence: Synthetic oligonucleotide
  Antisense strand to SEQ ID NO: 1061654
acaauacauaaauacaugc

SEQ ID NO: 1061656 - RNA, 19 nt, Artificial Sequence
  Description of Artificial Sequence: Synthetic oligonucleotide
  Sense strand starting at position 122 of SEQ ID NO: 915200
agccucaaagacuauguua

SEQ ID NO: 1061657 - RNA, 19 nt, Artificial Sequence
  Description of Artificial Sequence: Synthetic oligonucleotide
  Antisense strand to SEQ ID NO: 1061656
uaacauagucuuugaggcu

SEQ ID NO: 1061658 - RNA, 19 nt, Artificial Sequence
  Description of Artificial Sequence: Synthetic oligonucleotide
  Sense strand starting at position 133 of SEQ ID NO: 915200
cuauguuagcaacaugaau

SEQ ID NO: 1061659 - RNA, 19 nt, Artificial Sequence
  Description of Artificial Sequence: Synthetic oligonucleotide
  Antisense strand to SEQ ID NO: 1061658
auucauguugcuaacauag

SEQ ID NO: 1061660 - RNA, 19 nt, Artificial Sequence
  Description of Artificial Sequence: Synthetic oligonucleotide
  Sense strand starting at position 309 of SEQ ID NO: 915200
augagacuauugcuacaug

SEQ ID NO: 1061661 - RNA, 19 nt, Artificial Sequence
  Description of Artificial Sequence: Synthetic oligonucleotide
  Antisense strand to SEQ ID NO: 1061660
cauguagcaauagucucau

SEQ ID NO: 1061662 - RNA, 19 nt, Artificial Sequence
  Description of Artificial Sequence: Synthetic oligonucleotide
  Sense strand starting at position 312 of SEQ ID NO: 915200
agacuauugcuacaugucu

SEQ ID NO: 1061663 - RNA, 19 nt, Artificial Sequence
  Description of Artificial Sequence: Synthetic oligonucleotide
  Antisense strand to SEQ ID NO: 1061662
agacauguagcaauagucu

SEQ ID NO: 1061664 - RNA, 19 nt, Artificial Sequence
  Description of Artificial Sequence: Synthetic oligonucleotide
  Sense strand starting at position 332 of SEQ ID NO: 915200
cuaauuucuugagaaccag

SEQ ID NO: 1061665 - RNA, 19 nt, Artificial Sequence
  Description of Artificial Sequence: Synthetic oligonucleotide
  Antisense strand to SEQ ID NO: 1061664
cugguucucaagaaauuag

SEQ ID NO: 1061666 - RNA, 19 nt, Artificial Sequence
  Description of Artificial Sequence: Synthetic oligonucleotide
  Sense strand starting at position 411 of SEQ ID NO: 915200
augcuuugugaguacaaau

SEQ ID NO: 1061667 - RNA, 19 nt, Artificial Sequence
  Description of Artificial Sequence: Synthetic oligonucleotide
  Antisense strand to SEQ ID NO: 1061666
auuuguacucacaaagcau

SEQ ID NO: 1061668 - RNA, 19 nt, Artificial Sequence
  Description of Artificial Sequence: Synthetic oligonucleotide
  Sense strand starting at position 605 of SEQ ID NO: 915200
auggaacucuaugcauaaa

SEQ ID NO: 1061669 - RNA, 19 nt, Artificial Sequence
  Description of Artificial Sequence: Synthetic oligonucleotide
  Antisense strand to SEQ ID NO: 1061668
uuuaugcauagaguuccau

SEQ ID NO: 1061670 - RNA, 19 nt, Artificial Sequence
  Description of Artificial Sequence: Synthetic oligonucleotide
  Sense strand starting at position 617 of SEQ ID NO: 915200
gcauaaauggccuaaacac

SEQ ID NO: 1061671 - RNA, 19 nt, Artificial Sequence
  Description of Artificial Sequence: Synthetic oligonucleotide
  Antisense strand to SEQ ID NO: 1061670
guguuuaggccauuuaugc

SEQ ID NO: 1061672 - RNA, 19 nt, Artificial Sequence
  Description of Artificial Sequence: Synthetic oligonucleotide
  Sense strand starting at position 725 of SEQ ID NO: 915200
ucuaauaccgauugauuga

SEQ ID NO: 1061673 - RNA, 19 nt, Artificial Sequence
  Description of Artificial Sequence: Synthetic oligonucleotide
  Antisense strand to SEQ ID NO: 1061672
ucaaucaaucgguauuaga

SEQ ID NO: 1061674 - RNA, 19 nt, Artificial Sequence
  Description of Artificial Sequence: Synthetic oligonucleotide
  Sense strand starting at position 836 of SEQ ID NO: 915200
gacuauguuuaauuaggua

SEQ ID NO: 1061675 - RNA, 19 nt, Artificial Sequence
  Description of Artificial Sequence: Synthetic oligonucleotide
  Antisense strand to SEQ ID NO: 1061674
uaccuaauuaaacauaguc

SEQ ID NO: 1061676 - RNA, 19 nt, Artificial Sequence
  Description of Artificial Sequence: Synthetic oligonucleotide
  Sense strand starting at position 995 of SEQ ID NO: 915200
auaauugcuguuuaugaga

SEQ ID NO: 1061677 - RNA, 19 nt, Artificial Sequence
  Description of Artificial Sequence: Synthetic oligonucleotide
  Antisense strand to SEQ ID NO: 1061676
ucucauaaacagcaauuau

SEQ ID NO: 1061678 - RNA, 19 nt, Artificial Sequence
  Description of Artificial Sequence: Synthetic oligonucleotide
  Sense strand starting at position 1026 of SEQ ID NO: 915200
guuagauauugacuauucu

SEQ ID NO: 1061679 - RNA, 19 nt, Artificial Sequence
  Description of Artificial Sequence: Synthetic oligonucleotide
  Antisense strand to SEQ ID NO: 1061678
agaauagucaauaucuaac

SEQ ID NO: 1061680 - RNA, 19 nt, Artificial Sequence
  Description of Artificial Sequence: Synthetic oligonucleotide
  Sense strand starting at position 2043 of SEQ ID NO: 915200
gcagaugugaguuaacuug

SEQ ID NO: 1061681 - RNA, 19 nt, Artificial Sequence
  Description of Artificial Sequence: Synthetic oligonucleotide
  Antisense strand to SEQ ID NO: 1061680
caaguuaacucacaucugc

SEQ ID NO: 1061682 - RNA, 19 nt, Artificial Sequence
  Description of Artificial Sequence: Synthetic oligonucleotide
  Sense strand starting at position 2049 of SEQ ID NO: 915200
gugaguuaacuugaguuau

SEQ ID NO: 1061683 - RNA, 19 nt, Artificial Sequence
  Description of Artificial Sequence: Synthetic oligonucleotide
  Antisense strand to SEQ ID NO: 1061682
auaacucaaguuaacucac

SEQ ID NO: 1061684 - RNA, 19 nt, Artificial Sequence
  Description of Artificial Sequence: Synthetic oligonucleotide
  Sense strand starting at position 2053 of SEQ ID NO: 915200
guuaacuugaguuauggau

SEQ ID NO: 1061685 - RNA, 19 nt, Artificial Sequence
  Description of Artificial Sequence: Synthetic oligonucleotide
  Antisense strand to SEQ ID NO: 1061684
auccauaacucaaguuaac

SEQ ID NO: 1061686 - RNA, 19 nt, Artificial Sequence
  Description of Artificial Sequence: Synthetic oligonucleotide
  Sense strand starting at position 2059 of SEQ ID NO: 915200
uugaguuauggaugaacca

SEQ ID NO: 1061687 - RNA, 19 nt, Artificial Sequence
  Description of Artificial Sequence: Synthetic oligonucleotide
  Antisense strand to SEQ ID NO: 1061686
ugguucauccauaacucaa

SEQ ID NO: 1061688 - RNA, 19 nt, Artificial Sequence
  Description of Artificial Sequence: Synthetic oligonucleotide
  Sense strand starting at position 2226 of SEQ ID NO: 915200
uauuuagauggugguguuu

SEQ ID NO: 1061689 - RNA, 19 nt, Artificial Sequence
  Description of Artificial Sequence: Synthetic oligonucleotide
  Antisense strand to SEQ ID NO: 1061688
aaacaccaccaucuaaaua

SEQ ID NO: 1061690 - RNA, 19 nt, Artificial Sequence
  Description of Artificial Sequence: Synthetic oligonucleotide
  Sense strand starting at position 2314 of SEQ ID NO: 915200
auaaauguagcucauguaa

SEQ ID NO: 1061691 - RNA, 19 nt, Artificial Sequence
  Description of Artificial Sequence: Synthetic oligonucleotide
  Antisense strand to SEQ ID NO: 1061690
uuacaugagcuacauuuau

SEQ ID NO: 1061692 - RNA, 19 nt, Artificial Sequence
  Description of Artificial Sequence: Synthetic oligonucleotide
  Sense strand starting at position 2478 of SEQ ID NO: 915200
agaagaauaucugugaugu

SEQ ID NO: 1061693 - RNA, 19 nt, Artificial Sequence
  Description of Artificial Sequence: Synthetic oligonucleotide
  Antisense strand to SEQ ID NO: 1061692
acaucacagauauucuucu

SEQ ID NO: 1061694 - RNA, 19 nt, Artificial Sequence
  Description of Artificial Sequence: Synthetic oligonucleotide
  Sense strand starting at position 2479 of SEQ ID NO: 915200
gaagaauaucugugauguu

SEQ ID NO: 1061695 - RNA, 19 nt, Artificial Sequence
  Description of Artificial Sequence: Synthetic oligonucleotide
  Antisense strand to SEQ ID NO: 1061694
aacaucacagauauucuuc

SEQ ID NO: 1061696 - RNA, 19 nt, Artificial Sequence
  Description of Artificial Sequence: Synthetic oligonucleotide
  Sense strand starting at position 2515 of SEQ ID NO: 915200
gguaguuaagagcauggua

SEQ ID NO: 1061697 - RNA, 19 nt, Artificial Sequence
  Description of Artificial Sequence: Synthetic oligonucleotide
  Antisense strand to SEQ ID NO: 1061696
uaccaugcucuuaacuacc

SEQ ID NO: 1061698 - RNA, 19 nt, Artificial Sequence
  Description of Artificial Sequence: Synthetic oligonucleotide
  Sense strand starting at position 2587 of SEQ ID NO: 915200
gugacuuugguauaguuau

SEQ ID NO: 1061699 - RNA, 19 nt, Artificial Sequence
  Description of Artificial Sequence: Synthetic oligonucleotide
  Antisense strand to SEQ ID NO: 1061698
auaacuauaccaaagucac

SEQ ID NO: 1061700 - RNA, 19 nt, Artificial Sequence
  Description of Artificial Sequence: Synthetic oligonucleotide
  Sense strand starting at position 2612 of SEQ ID NO: 915200
uucugugauaguuaagaug

SEQ ID NO: 1061701 - RNA, 19 nt, Artificial Sequence
  Description of Artificial Sequence: Synthetic oligonucleotide
  Antisense strand to SEQ ID NO: 1061700
caucuuaacuaucacagaa

SEQ ID NO: 1061702 - RNA, 19 nt, Artificial Sequence
  Description of Artificial Sequence: Synthetic oligonucleotide
  Sense strand starting at position 2668 of SEQ ID NO: 915200
ucacuuaugugacuacaca

SEQ ID NO: 1061703 - RNA, 19 nt, Artificial Sequence
  Description of Artificial Sequence: Synthetic oligonucleotide
  Antisense strand to SEQ ID NO: 1061702
uguguagucacauaaguga

SEQ ID NO: 1061704 - RNA, 19 nt, Artificial Sequence
  Description of Artificial Sequence: Synthetic oligonucleotide
  Sense strand starting at position 2694 of SEQ ID NO: 915200
cacugugugagcgcugauu

SEQ ID NO: 1061705 - RNA, 19 nt, Artificial Sequence
  Description of Artificial Sequence: Synthetic oligonucleotide
  Antisense strand to SEQ ID NO: 1061704
aaucagcgcucacacagug

SEQ ID NO: 1061706 - RNA, 19 nt, Artificial Sequence
  Description of Artificial Sequence: Synthetic oligonucleotide
  Sense strand starting at position 2818 of SEQ ID NO: 915200
ugucuuugacaucauagau

SEQ ID NO: 1061707 - RNA, 19 nt, Artificial Sequence
  Description of Artificial Sequence: Synthetic oligonucleotide
  Antisense strand to SEQ ID NO: 1061706
aucuaugaugucaaagaca

SEQ ID NO: 1061708 - RNA, 19 nt, Artificial Sequence
  Description of Artificial Sequence: Synthetic oligonucleotide
  Sense strand starting at position 3013 of SEQ ID NO: 915200
ccagaaacauuaguauguu

SEQ ID NO: 1061709 - RNA, 19 nt, Artificial Sequence
  Description of Artificial Sequence: Synthetic oligonucleotide
  Antisense strand to SEQ ID NO: 1061708
aacauacuaauguuucugg

SEQ ID NO: 1061710 - RNA, 19 nt, Artificial Sequence
  Description of Artificial Sequence: Synthetic oligonucleotide
  Sense strand starting at position 3061 of SEQ ID NO: 915200
uaaacugguucuguaagga

SEQ ID NO: 1061711 - RNA, 19 nt, Artificial Sequence
  Description of Artificial Sequence: Synthetic oligonucleotide
  Antisense strand to SEQ ID NO: 1061710
uccuuacagaaccaguuua

SEQ ID NO: 1061712 - RNA, 19 nt, Artificial Sequence
  Description of Artificial Sequence: Synthetic oligonucleotide
  Sense strand starting at position 3146 of SEQ ID NO: 915200
auacaaugcgaauggaaua

SEQ ID NO: 1061713 - RNA, 19 nt, Artificial Sequence
  Description of Artificial Sequence: Synthetic oligonucleotide
  Antisense strand to SEQ ID NO: 1061712
uauuccauucgcauuguau

SEQ ID NO: 1061714 - RNA, 19 nt, Artificial Sequence
  Description of Artificial Sequence: Synthetic oligonucleotide
  Sense strand starting at position 3177 of SEQ ID NO: 915200
cuagaucauuuggaaguga

SEQ ID NO: 1061715 - RNA, 19 nt, Artificial Sequence
  Description of Artificial Sequence: Synthetic oligonucleotide
  Antisense strand to SEQ ID NO: 1061714
ucacuuccaaaugaucuag

SEQ ID NO: 1061716 - RNA, 19 nt, Artificial Sequence
  Description of Artificial Sequence: Synthetic oligonucleotide
  Sense strand starting at position 3188 of SEQ ID NO: 915200
ggaagugagaagugucuau

SEQ ID NO: 1061717 - RNA, 19 nt, Artificial Sequence
  Description of Artificial Sequence: Synthetic oligonucleotide
  Antisense strand to SEQ ID NO: 1061716
auagacacuucucacuucc

SEQ ID NO: 1061718 - RNA, 19 nt, Artificial Sequence
  Description of Artificial Sequence: Synthetic oligonucleotide
  Sense strand starting at position 3192 of SEQ ID NO: 915200
gugagaagugucuauggug

SEQ ID NO: 1061719 - RNA, 19 nt, Artificial Sequence
  Description of Artificial Sequence: Synthetic oligonucleotide
  Antisense strand to SEQ ID NO: 1061718
caccauagacacuucucac

SEQ ID NO: 1061720 - RNA, 19 nt, Artificial Sequence
  Description of Artificial Sequence: Synthetic oligonucleotide
  Sense strand starting at position 3213 of SEQ ID NO: 915200
uaacguagugaguaacuaa

SEQ ID NO: 1061721 - RNA, 19 nt, Artificial Sequence
  Description of Artificial Sequence: Synthetic oligonucleotide
  Antisense strand to SEQ ID NO: 1061720
uuaguuacucacuacguua

SEQ ID NO: 1061722 - RNA, 19 nt, Artificial Sequence
  Description of Artificial Sequence: Synthetic oligonucleotide
  Sense strand starting at position 3241 of SEQ ID NO: 915200
ugagaucuauugucucuau

SEQ ID NO: 1061723 - RNA, 19 nt, Artificial Sequence
  Description of Artificial Sequence: Synthetic oligonucleotide
  Antisense strand to SEQ ID NO: 1061722
auagagacaauagaucuca

SEQ ID NO: 1061724 - RNA, 19 nt, Artificial Sequence
  Description of Artificial Sequence: Synthetic oligonucleotide
  Sense strand starting at position 3245 of SEQ ID NO: 915200
aucuauugucucuaucaug

SEQ ID NO: 1061725 - RNA, 19 nt, Artificial Sequence
  Description of Artificial Sequence: Synthetic oligonucleotide
  Antisense strand to SEQ ID NO: 1061724
caugauagagacaauagau

SEQ ID NO: 1061726 - RNA, 19 nt, Artificial Sequence
  Description of Artificial Sequence: Synthetic oligonucleotide
  Sense strand starting at position 3492 of SEQ ID NO: 915200
cucacaacuggauguauau

SEQ ID NO: 1061727 - RNA, 19 nt, Artificial Sequence
  Description of Artificial Sequence: Synthetic oligonucleotide
  Antisense strand to SEQ ID NO: 1061726
auauacauccaguugugag

SEQ ID NO: 1061728 - RNA, 19 nt, Artificial Sequence
  Description of Artificial Sequence: Synthetic oligonucleotide
  Sense strand starting at position 3550 of SEQ ID NO: 915200
acuaacauuuccgauggga

SEQ ID NO: 1061729 - RNA, 19 nt, Artificial Sequence
  Description of Artificial Sequence: Synthetic oligonucleotide
  Antisense strand to SEQ ID NO: 1061728
ucccaucggaaauguuagu

SEQ ID NO: 1061730 - RNA, 19 nt, Artificial Sequence
  Description of Artificial Sequence: Synthetic oligonucleotide
  Sense strand starting at position 3684 of SEQ ID NO: 915200
ucuugagucccaugacaac

SEQ ID NO: 1061731 - RNA, 19 nt, Artificial Sequence
  Description of Artificial Sequence: Synthetic oligonucleotide
  Antisense strand to SEQ ID NO: 1061730
guugucaugggacucaaga

SEQ ID NO: 1061732 - RNA, 19 nt, Artificial Sequence
  Description of Artificial Sequence: Synthetic oligonucleotide
  Sense strand starting at position 3731 of SEQ ID NO: 915200
ucaauuguccagugagaga

SEQ ID NO: 1061733 - RNA, 19 nt, Artificial Sequence
  Description of Artificial Sequence: Synthetic oligonucleotide
  Antisense strand to SEQ ID NO: 1061732
ucucucacuggacaauuga

SEQ ID NO: 1061734 - RNA, 19 nt, Artificial Sequence
  Description of Artificial Sequence: Synthetic oligonucleotide
  Sense strand starting at position 3947 of SEQ ID NO: 915200
gcagaaauauuaguacuga

SEQ ID NO: 1061735 - RNA, 19 nt, Artificial Sequence
  Description of Artificial Sequence: Synthetic oligonucleotide
  Antisense strand to SEQ ID NO: 1061734
ucaguacuaauauuucugc

SEQ ID NO: 1061736 - RNA, 19 nt, Artificial Sequence
  Description of Artificial Sequence: Synthetic oligonucleotide
  Sense strand starting at position 21 of SEQ ID NO: 915201
gcauguuagcuugcuuuau

SEQ ID NO: 1061737 - RNA, 19 nt, Artificial Sequence
  Description of Artificial Sequence: Synthetic oligonucleotide
  Antisense strand to SEQ ID NO: 1061736
auaaagcaagcuaacaugc

SEQ ID NO: 1061738 - RNA, 19 nt, Artificial Sequence
  Description of Artificial Sequence: Synthetic oligonucleotide
  Sense strand starting at position 278 of SEQ ID NO: 915201
guguuugucaaagcguuga

SEQ ID NO: 1061739 - RNA, 19 nt, Artificial Sequence
  Description of Artificial Sequence: Synthetic oligonucleotide
  Antisense strand to SEQ ID NO: 1061738
ucaacgcuuugacaaacac

SEQ ID NO: 1061740 - RNA, 19 nt, Artificial Sequence
  Description of Artificial Sequence: Synthetic oligonucleotide
  Sense strand starting at position 333 of SEQ ID NO: 915201
uaaauaucaguuggagcau

SEQ ID NO: 1061741 - RNA, 19 nt, Artificial Sequence
  Description of Artificial Sequence: Synthetic oligonucleotide
  Antisense strand to SEQ ID NO: 1061740
augcuccaacugauauuua

SEQ ID NO: 1061742 - RNA, 19 nt, Artificial Sequence
  Description of Artificial Sequence: Synthetic oligonucleotide
  Sense strand starting at position 339 of SEQ ID NO: 915201
ucaguuggagcauacaaua

SEQ ID NO: 1061743 - RNA, 19 nt, Artificial Sequence
  Description of Artificial Sequence: Synthetic oligonucleotide
  Antisense strand to SEQ ID NO: 1061742
uauuguaugcuccaacuga

SEQ ID NO: 1061744 - RNA, 19 nt, Artificial Sequence
  Description of Artificial Sequence: Synthetic oligonucleotide
  Sense strand starting at position 383 of SEQ ID NO: 915201
ugaugacggcuuuagaaau

SEQ ID NO: 1061745 - RNA, 19 nt, Artificial Sequence
  Description of Artificial Sequence: Synthetic oligonucleotide
  Antisense strand to SEQ ID NO: 1061744
auuucuaaagccgucauca

SEQ ID NO: 1061746 - RNA, 19 nt, Artificial Sequence
  Description of Artificial Sequence: Synthetic oligonucleotide
  Sense strand starting at position 672 of SEQ ID NO: 915201
auuguuaguugaccacuaa

SEQ ID NO: 1061747 - RNA, 19 nt, Artificial Sequence
  Description of Artificial Sequence: Synthetic oligonucleotide
  Antisense strand to SEQ ID NO: 1061746
uuaguggucaacuaacaau

SEQ ID NO: 1061748 - RNA, 19 nt, Artificial Sequence
  Description of Artificial Sequence: Synthetic oligonucleotide
  Sense strand starting at position 964 of SEQ ID NO: 915201
aaauauugggcuugguaga

SEQ ID NO: 1061749 - RNA, 19 nt, Artificial Sequence
  Description of Artificial Sequence: Synthetic oligonucleotide
  Antisense strand to SEQ ID NO: 1061748
ucuaccaagcccaauauuu

SEQ ID NO: 1061750 - RNA, 19 nt, Artificial Sequence
  Description of Artificial Sequence: Synthetic oligonucleotide
  Sense strand starting at position 1135 of SEQ ID NO: 915201
ugggaaugacuauggcaua

SEQ ID NO: 1061751 - RNA, 19 nt, Artificial Sequence
  Description of Artificial Sequence: Synthetic oligonucleotide
  Antisense strand to SEQ ID NO: 1061750
uaugccauagucauuccca

SEQ ID NO: 1061752 - RNA, 19 nt, Artificial Sequence
  Description of Artificial Sequence: Synthetic oligonucleotide
  Sense strand starting at position 1181 of SEQ ID NO: 915201
caugaaauggcuggaguua

SEQ ID NO: 1061753 - RNA, 19 nt, Artificial Sequence
  Description of Artificial Sequence: Synthetic oligonucleotide
  Antisense strand to SEQ ID NO: 1061752
uaacuccagccauuucaug

SEQ ID NO: 1061754 - RNA, 19 nt, Artificial Sequence
  Description of Artificial Sequence: Synthetic oligonucleotide
  Sense strand starting at position 1197 of SEQ ID NO: 915201
uuaggucguaaguacauaa

SEQ ID NO: 1061755 - RNA, 19 nt, Artificial Sequence
  Description of Artificial Sequence: Synthetic oligonucleotide
  Antisense strand to SEQ ID NO: 1061754
uuauguacuuacgaccuaa

SEQ ID NO: 1061756 - RNA, 19 nt, Artificial Sequence
  Description of Artificial Sequence: Synthetic oligonucleotide
  Sense strand starting at position 1201 of SEQ ID NO: 915201
gucguaaguacauaaagau

SEQ ID NO: 1061757 - RNA, 19 nt, Artificial Sequence
  Description of Artificial Sequence: Synthetic oligonucleotide
  Antisense strand to SEQ ID NO: 1061756
aucuuuauguacuuacgac

SEQ ID NO: 1061758 - RNA, 19 nt, Artificial Sequence
  Description of Artificial Sequence: Synthetic oligonucleotide
  Sense strand starting at position 1409 of SEQ ID NO: 915201
guugucugaacaugagaga

SEQ ID NO: 1061759 - RNA, 19 nt, Artificial Sequence
  Description of Artificial Sequence: Synthetic oligonucleotide
  Antisense strand to SEQ ID NO: 1061758
ucucucauguucagacaac

SEQ ID NO: 1061760 - RNA, 19 nt, Artificial Sequence
  Description of Artificial Sequence: Synthetic oligonucleotide
  Sense strand starting at position 1495 of SEQ ID NO: 915201
aaguguucccaguaugaau

SEQ ID NO: 1061761 - RNA, 19 nt, Artificial Sequence
  Description of Artificial Sequence: Synthetic oligonucleotide
  Antisense strand to SEQ ID NO: 1061760
auucauacugggaacacuu

SEQ ID NO: 1061762 - RNA, 19 nt, Artificial Sequence
  Description of Artificial Sequence: Synthetic oligonucleotide
  Sense strand starting at position 1503 of SEQ ID NO: 915201
ccaguaugaauggaugcau

SEQ ID NO: 1061763 - RNA, 19 nt, Artificial Sequence
  Description of Artificial Sequence: Synthetic oligonucleotide
  Antisense strand to SEQ ID NO: 1061762
augcauccauucauacugg

SEQ ID NO: 1061764 - RNA, 19 nt, Artificial Sequence
  Description of Artificial Sequence: Synthetic oligonucleotide
  Sense strand starting at position 1564 of SEQ ID NO: 915201
auacauuuguugucauggu

SEQ ID NO: 1061765 - RNA, 19 nt, Artificial Sequence
  Description of Artificial Sequence: Synthetic oligonucleotide
  Antisense strand to SEQ ID NO: 1061764
accaugacaacaaauguau

SEQ ID NO: 1061766 - RNA, 19 nt, Artificial Sequence
  Description of Artificial Sequence: Synthetic oligonucleotide
  Sense strand starting at position 1642 of SEQ ID NO: 915201
ggaggaaacuuucugcagu

SEQ ID NO: 1061767 - RNA, 19 nt, Artificial Sequence
  Description of Artificial Sequence: Synthetic oligonucleotide
  Antisense strand to SEQ ID NO: 1061766
acugcagaaaguuuccucc

SEQ ID NO: 1061768 - RNA, 19 nt, Artificial Sequence
  Description of Artificial Sequence: Synthetic oligonucleotide
  Sense strand starting at position 1644 of SEQ ID NO: 915201
aggaaacuuucugcaguga

SEQ ID NO: 1061769 - RNA, 19 nt, Artificial Sequence
  Description of Artificial Sequence: Synthetic oligonucleotide
  Antisense strand to SEQ ID NO: 1061768
ucacugcagaaaguuuccu

SEQ ID NO: 1061770 - RNA, 19 nt, Artificial Sequence
  Description of Artificial Sequence: Synthetic oligonucleotide
  Sense strand starting at position 1645 of SEQ ID NO: 915201
ggaaacuuucugcagugau

SEQ ID NO: 1061771 - RNA, 19 nt, Artificial Sequence
  Description of Artificial Sequence: Synthetic oligonucleotide
  Antisense strand to SEQ ID NO: 1061770
aucacugcagaaaguuucc

SEQ ID NO: 1061772 - RNA, 19 nt, Artificial Sequence
  Description of Artificial Sequence: Synthetic oligonucleotide
  Sense strand starting at position 1678 of SEQ ID NO: 915201
agaagaauuguguggcaca

SEQ ID NO: 1061773 - RNA, 19 nt, Artificial Sequence
  Description of Artificial Sequence: Synthetic oligonucleotide
  Antisense strand to SEQ ID NO: 1061772
ugugccacacaauucuucu

SEQ ID NO: 1061774 - RNA, 19 nt, Artificial Sequence
  Description of Artificial Sequence: Synthetic oligonucleotide
  Sense strand starting at position 1690 of SEQ ID NO: 915201
uggcacaagcauuauauaa

SEQ ID NO: 1061775 - RNA, 19 nt, Artificial Sequence
  Description of Artificial Sequence: Synthetic oligonucleotide
  Antisense strand to SEQ ID NO: 1061774
uuauauaaugcuugugcca

SEQ ID NO: 1061776 - RNA, 19 nt, Artificial Sequence
  Description of Artificial Sequence: Synthetic oligonucleotide
  Sense strand starting at position 1748 of SEQ ID NO: 915201
gggagugacagcugaggaa

SEQ ID NO: 1061777 - RNA, 19 nt, Artificial Sequence
  Description of Artificial Sequence: Synthetic oligonucleotide
  Antisense strand to SEQ ID NO: 1061776
uuccucagcugucacuccc

SEQ ID NO: 1061778 - RNA, 19 nt, Artificial Sequence
  Description of Artificial Sequence: Synthetic oligonucleotide
  Sense strand starting at position 2105 of SEQ ID NO: 915201
ccaggagucccggaucuaa

SEQ ID NO: 1061779 - RNA, 19 nt, Artificial Sequence
  Description of Artificial Sequence: Synthetic oligonucleotide
  Antisense strand to SEQ ID NO: 1061778
uuagauccgggacuccugg

SEQ ID NO: 1061780 - RNA, 19 nt, Artificial Sequence
  Description of Artificial Sequence: Synthetic oligonucleotide
  Sense strand starting at position 2448 of SEQ ID NO: 915201
auuguaagucaaugugaag

SEQ ID NO: 1061781 - RNA, 19 nt, Artificial Sequence
  Description of Artificial Sequence: Synthetic oligonucleotide
  Antisense strand to SEQ ID NO: 1061780
cuucacauugacuuacaau

SEQ ID NO: 1061782 - RNA, 19 nt, Artificial Sequence
  Description of Artificial Sequence: Synthetic oligonucleotide
  Sense strand starting at position 2669 of SEQ ID NO: 915201
cauaaaucucuggaugugu

SEQ ID NO: 1061783 - RNA, 19 nt, Artificial Sequence
  Description of Artificial Sequence: Synthetic oligonucleotide
  Antisense strand to SEQ ID NO: 1061782
acacauccagagauuuaug

SEQ ID NO: 1061784 - RNA, 19 nt, Artificial Sequence
  Description of Artificial Sequence: Synthetic oligonucleotide
  Sense strand starting at position 2751 of SEQ ID NO: 915201
ccagguuuacauuaaugca

SEQ ID NO: 1061785 - RNA, 19 nt, Artificial Sequence
  Description of Artificial Sequence: Synthetic oligonucleotide
  Antisense strand to SEQ ID NO: 1061784
ugcauuaauguaaaccugg

SEQ ID NO: 1061786 - RNA, 19 nt, Artificial Sequence
  Description of Artificial Sequence: Synthetic oligonucleotide
  Sense strand starting at position 2842 of SEQ ID NO: 915201
cuccauucccaaggagaca

SEQ ID NO: 1061787 - RNA, 19 nt, Artificial Sequence
  Description of Artificial Sequence: Synthetic oligonucleotide
  Antisense strand to SEQ ID NO: 1061786
ugucuccuugggaauggag

SEQ ID NO: 1061788 - RNA, 19 nt, Artificial Sequence
  Description of Artificial Sequence: Synthetic oligonucleotide
  Sense strand starting at position 2879 of SEQ ID NO: 915201
cucagaacugugugauaga

SEQ ID NO: 1061789 - RNA, 19 nt, Artificial Sequence
  Description of Artificial Sequence: Synthetic oligonucleotide
  Antisense strand to SEQ ID NO: 1061788
ucuaucacacaguucugag

SEQ ID NO: 1061790 - RNA, 19 nt, Artificial Sequence
  Description of Artificial Sequence: Synthetic oligonucleotide
  Sense strand starting at position 2925 of SEQ ID NO: 915201
ucagucgguccacaauaua

SEQ ID NO: 1061791 - RNA, 19 nt, Artificial Sequence
  Description of Artificial Sequence: Synthetic oligonucleotide
  Antisense strand to SEQ ID NO: 1061790
uauauuguggaccgacuga

SEQ ID NO: 1061792 - RNA, 19 nt, Artificial Sequence
  Description of Artificial Sequence: Synthetic oligonucleotide
  Sense strand starting at position 2959 of SEQ ID NO: 915201
guccaaugaccagauguuu

SEQ ID NO: 1061793 - RNA, 19 nt, Artificial Sequence
  Description of Artificial Sequence: Synthetic oligonucleotide
  Antisense strand to SEQ ID NO: 1061792
aaacaucuggucauuggac

SEQ ID NO: 1061794 - RNA, 19 nt, Artificial Sequence
  Description of Artificial Sequence: Synthetic oligonucleotide
  Sense strand starting at position 2999 of SEQ ID NO: 915201
gagauuaggucuccucauu

SEQ ID NO: 1061795 - RNA, 19 nt, Artificial Sequence
  Description of Artificial Sequence: Synthetic oligonucleotide
  Antisense strand to SEQ ID NO: 1061794
aaugaggagaccuaaucuc

SEQ ID NO: 1061796 - RNA, 19 nt, Artificial Sequence
  Description of Artificial Sequence: Synthetic oligonucleotide
  Sense strand starting at position 3024 of SEQ ID NO: 915201
guuaguugugccuuaugua

SEQ ID NO: 1061797 - RNA, 19 nt, Artificial Sequence
  Description of Artificial Sequence: Synthetic oligonucleotide
  Antisense strand to SEQ ID NO: 1061796
uacauaaggcacaacuaac

SEQ ID NO: 1061798 - RNA, 19 nt, Artificial Sequence
  Description of Artificial Sequence: Synthetic oligonucleotide
  Sense strand starting at position 3080 of SEQ ID NO: 915201
gcuuguaagccugauuucu

SEQ ID NO: 1061799 - RNA, 19 nt, Artificial Sequence
  Description of Artificial Sequence: Synthetic oligonucleotide
  Antisense strand to SEQ ID NO: 1061798
agaaaucaggcuuacaagc

SEQ ID NO: 1061800 - RNA, 19 nt, Artificial Sequence
  Description of Artificial Sequence: Synthetic oligonucleotide
  Sense strand starting at position 3155 of SEQ ID NO: 915201
gggcuuccagauuauggua

SEQ ID NO: 1061801 - RNA, 19 nt, Artificial Sequence
  Description of Artificial Sequence: Synthetic oligonucleotide
  Antisense strand to SEQ ID NO: 1061800
uaccauaaucuggaagccc

SEQ ID NO: 1061802 - RNA, 19 nt, Artificial Sequence
  Description of Artificial Sequence: Synthetic oligonucleotide
  Sense strand starting at position 3351 of SEQ ID NO: 915201
gucacaugauaaguaaaca

SEQ ID NO: 1061803 - RNA, 19 nt, Artificial Sequence
  Description of Artificial Sequence: Synthetic oligonucleotide
  Antisense strand to SEQ ID NO: 1061802
uguuuacuuaucaugugac

SEQ ID NO: 1061804 - RNA, 19 nt, Artificial Sequence
  Description of Artificial Sequence: Synthetic oligonucleotide
  Sense strand starting at position 3540 of SEQ ID NO: 915201
uuacuuaggcuauggauau

SEQ ID NO: 1061805 - RNA, 19 nt, Artificial Sequence
  Description of Artificial Sequence: Synthetic oligonucleotide
  Antisense strand to SEQ ID NO: 1061804
auauccauagccuaaguaa

SEQ ID NO: 1061806 - RNA, 19 nt, Artificial Sequence
  Description of Artificial Sequence: Synthetic oligonucleotide
  Sense strand starting at position 3553 of SEQ ID NO: 915201
ggauauaacguguauauaa

SEQ ID NO: 1061807 - RNA, 19 nt, Artificial Sequence
  Description of Artificial Sequence: Synthetic oligonucleotide
  Antisense strand to SEQ ID NO: 1061806
uuauauacacguuauaucc

SEQ ID NO: 1061808 - RNA, 19 nt, Artificial Sequence
  Description of Artificial Sequence: Synthetic oligonucleotide
  Sense strand starting at position 3761 of SEQ ID NO: 915201
agagccaaaucccugauua

SEQ ID NO: 1061809 - RNA, 19 nt, Artificial Sequence
  Description of Artificial Sequence: Synthetic oligonucleotide
  Antisense strand to SEQ ID NO: 1061808
uaaucagggauuuggcucu

SEQ ID NO: 1061810 - RNA, 19 nt, Artificial Sequence
  Description of Artificial Sequence: Synthetic oligonucleotide
  Sense strand starting at position 3832 of SEQ ID NO: 915201
uguaacuuugugcagacaa

SEQ ID NO: 1061811 - RNA, 19 nt, Artificial Sequence
  Description of Artificial Sequence: Synthetic oligonucleotide
  Antisense strand to SEQ ID NO: 1061810
uugucugcacaaaguuaca

SEQ ID NO: 1061812 - RNA, 19 nt, Artificial Sequence
  Description of Artificial Sequence: Synthetic oligonucleotide
  Sense strand starting at position 3970 of SEQ ID NO: 915201
uuuggagacuguucuuuag

SEQ ID NO: 1061813 - RNA, 19 nt, Artificial Sequence
  Description of Artificial Sequence: Synthetic oligonucleotide
  Antisense strand to SEQ ID NO: 1061812
cuaaagaacagucuccaaa

SEQ ID NO: 1061814 - RNA, 19 nt, Artificial Sequence
  Description of Artificial Sequence: Synthetic oligonucleotide
  Sense strand starting at position 3980 of SEQ ID NO: 915201
guucuuuagcguuuggcca

SEQ ID NO: 1061815 - RNA, 19 nt, Artificial Sequence
  Description of Artificial Sequence: Synthetic oligonucleotide
  Antisense strand to SEQ ID NO: 1061814
uggccaaacgcuaaagaac

SEQ ID NO: 1061816 - RNA, 19 nt, Artificial Sequence
  Description of Artificial Sequence: Synthetic oligonucleotide
  Sense strand starting at position 132 of SEQ ID NO: 915202
ugguucuguaaauggaauu

SEQ ID NO: 1061817 - RNA, 19 nt, Artificial Sequence
  Description of Artificial Sequence: Synthetic oligonucleotide
  Antisense strand to SEQ ID NO: 1061816
aauuccauuuacagaacca

SEQ ID NO: 1061818 - RNA, 19 nt, Artificial Sequence
  Description of Artificial Sequence: Synthetic oligonucleotide
  Sense strand starting at position 648 of SEQ ID NO: 915202
uugauagucauaggcuaag

SEQ ID NO: 1061819 - RNA, 19 nt, Artificial Sequence
  Description of Artificial Sequence: Synthetic oligonucleotide
  Antisense strand to SEQ ID NO: 1061818
cuuagccuaugacuaucaa

SEQ ID NO: 1061820 - RNA, 19 nt, Artificial Sequence
  Description of Artificial Sequence: Synthetic oligonucleotide
  Sense strand starting at position 651 of SEQ ID NO: 915202
auagucauaggcuaaguuu

SEQ ID NO: 1061821 - RNA, 19 nt, Artificial Sequence
  Description of Artificial Sequence: Synthetic oligonucleotide
  Antisense strand to SEQ ID NO: 1061820
aaacuuagccuaugacuau

SEQ ID NO: 1061822 - RNA, 19 nt, Artificial Sequence
  Description of Artificial Sequence: Synthetic oligonucleotide
  Sense strand starting at position 820 of SEQ ID NO: 915202
ugacucauaguuggcuaaa

SEQ ID NO: 1061823 - RNA, 19 nt, Artificial Sequence
  Description of Artificial Sequence: Synthetic oligonucleotide
  Antisense strand to SEQ ID NO: 1061822
uuuagccaacuaugaguca

SEQ ID NO: 1061824 - RNA, 19 nt, Artificial Sequence
  Description of Artificial Sequence: Synthetic oligonucleotide
  Sense strand starting at position 897 of SEQ ID NO: 915202
uucuaacucguggauacuu

SEQ ID NO: 1061825 - RNA, 19 nt, Artificial Sequence
  Description of Artificial Sequence: Synthetic oligonucleotide
  Antisense strand to SEQ ID NO: 1061824
aaguauccacgaguuagaa

SEQ ID NO: 1061826 - RNA, 19 nt, Artificial Sequence
  Description of Artificial Sequence: Synthetic oligonucleotide
  Sense strand starting at position 1010 of SEQ ID NO: 915202
aguagaucuaagugagaua

SEQ ID NO: 1061827 - RNA, 19 nt, Artificial Sequence
  Description of Artificial Sequence: Synthetic oligonucleotide
  Antisense strand to SEQ ID NO: 1061826
uaucucacuuagaucuacu

SEQ ID NO: 1061828 - RNA, 19 nt, Artificial Sequence
  Description of Artificial Sequence: Synthetic oligonucleotide
  Sense strand starting at position 1139 of SEQ ID NO: 915202
agacuauaggacugagcau

SEQ ID NO: 1061829 - RNA, 19 nt, Artificial Sequence
  Description of Artificial Sequence: Synthetic oligonucleotide
  Antisense strand to SEQ ID NO: 1061828
augcucaguccuauagucu

SEQ ID NO: 1061830 - RNA, 19 nt, Artificial Sequence
  Description of Artificial Sequence: Synthetic oligonucleotide
  Sense strand starting at position 1275 of SEQ ID NO: 915202
gugagaaccacagguagau

SEQ ID NO: 1061831 - RNA, 19 nt, Artificial Sequence
  Description of Artificial Sequence: Synthetic oligonucleotide
  Antisense strand to SEQ ID NO: 1061830
aucuaccugugguucucac

SEQ ID NO: 1061832 - RNA, 19 nt, Artificial Sequence
  Description of Artificial Sequence: Synthetic oligonucleotide
  Sense strand starting at position 1422 of SEQ ID NO: 915202
acuaauguguuucucagag

SEQ ID NO: 1061833 - RNA, 19 nt, Artificial Sequence
  Description of Artificial Sequence: Synthetic oligonucleotide
  Antisense strand to SEQ ID NO: 1061832
cucugagaaacacauuagu

SEQ ID NO: 1061834 - RNA, 19 nt, Artificial Sequence
  Description of Artificial Sequence: Synthetic oligonucleotide
  Sense strand starting at position 1521 of SEQ ID NO: 915202
aucuccaauuuggauagaa

SEQ ID NO: 1061835 - RNA, 19 nt, Artificial Sequence
  Description of Artificial Sequence: Synthetic oligonucleotide
  Antisense strand to SEQ ID NO: 1061834
uucuauccaaauuggagau

SEQ ID NO: 1061836 - RNA, 19 nt, Artificial Sequence
  Description of Artificial Sequence: Synthetic oligonucleotide
  Sense strand starting at position 1847 of SEQ ID NO: 915202
gagaguccagcaggauuaa

SEQ ID NO: 1061837 - RNA, 19 nt, Artificial Sequence
  Description of Artificial Sequence: Synthetic oligonucleotide
  Antisense strand to SEQ ID NO: 1061836
uuaauccugcuggacucuc

SEQ ID NO: 1061838 - RNA, 19 nt, Artificial Sequence
  Description of Artificial Sequence: Synthetic oligonucleotide
  Sense strand starting at position 1985 of SEQ ID NO: 915202
cuguauuauucuccaugga

SEQ ID NO: 1061839 - RNA, 19 nt, Artificial Sequence
  Description of Artificial Sequence: Synthetic oligonucleotide
  Antisense strand to SEQ ID NO: 1061838
uccauggagaauaauacag

SEQ ID NO: 1061840 - RNA, 19 nt, Artificial Sequence
  Description of Artificial Sequence: Synthetic oligonucleotide
  Sense strand starting at position 1986 of SEQ ID NO: 915202
uguauuauucuccauggau

SEQ ID NO: 1061841 - RNA, 19 nt, Artificial Sequence
  Description of Artificial Sequence: Synthetic oligonucleotide
  Antisense strand to SEQ ID NO: 1061840
auccauggagaauaauaca

SEQ ID NO: 1061842 - RNA, 19 nt, Artificial Sequence
  Description of Artificial Sequence: Synthetic oligonucleotide
  Sense strand starting at position 1989 of SEQ ID NO: 915202
auuauucuccauggauguu

SEQ ID NO: 1061843 - RNA, 19 nt, Artificial Sequence
  Description of Artificial Sequence: Synthetic oligonucleotide
  Antisense strand to SEQ ID NO: 1061842
aacauccauggagaauaau

SEQ ID NO: 1061844 - RNA, 19 nt, Artificial Sequence
  Description of Artificial Sequence: Synthetic oligonucleotide
  Sense strand starting at position 2019 of SEQ ID NO: 915202
acaagauacucuguagcaa

SEQ ID NO: 1061845 - RNA, 19 nt, Artificial Sequence
  Description of Artificial Sequence: Synthetic oligonucleotide
  Antisense strand to SEQ ID NO: 1061844
uugcuacagaguaucuugu

SEQ ID NO: 1061846 - RNA, 19 nt, Artificial Sequence
  Description of Artificial Sequence: Synthetic oligonucleotide
  Sense strand starting at position 2176 of SEQ ID NO: 915202
guggauaacuuaucuauac

SEQ ID NO: 1061847 - RNA, 19 nt, Artificial Sequence
  Description of Artificial Sequence: Synthetic oligonucleotide
  Antisense strand to SEQ ID NO: 1061846
guauagauaaguuauccac

SEQ ID NO: 1061848 - RNA, 19 nt, Artificial Sequence
  Description of Artificial Sequence: Synthetic oligonucleotide
  Sense strand starting at position 2283 of SEQ ID NO: 915202
ggaauaaugaguuguccaa

SEQ ID NO: 1061849 - RNA, 19 nt, Artificial Sequence
  Description of Artificial Sequence: Synthetic oligonucleotide
  Antisense strand to SEQ ID NO: 1061848
uuggacaacucauuauucc

SEQ ID NO: 1061850 - RNA, 19 nt, Artificial Sequence
  Description of Artificial Sequence: Synthetic oligonucleotide
  Sense strand starting at position 2285 of SEQ ID NO: 915202
aauaaugaguuguccaaug

SEQ ID NO: 1061851 - RNA, 19 nt, Artificial Sequence
  Description of Artificial Sequence: Synthetic oligonucleotide
  Antisense strand to SEQ ID NO: 1061850
cauuggacaacucauuauu

SEQ ID NO: 1061852 - RNA, 19 nt, Artificial Sequence
  Description of Artificial Sequence: Synthetic oligonucleotide
  Sense strand starting at position 2287 of SEQ ID NO: 915202
uaaugaguuguccaauguc

SEQ ID NO: 1061853 - RNA, 19 nt, Artificial Sequence
  Description of Artificial Sequence: Synthetic oligonucleotide
  Antisense strand to SEQ ID NO: 1061852
gacauuggacaacucauua

SEQ ID NO: 1061854 - RNA, 19 nt, Artificial Sequence
  Description of Artificial Sequence: Synthetic oligonucleotide
  Sense strand starting at position 2397 of SEQ ID NO: 915202
auauguacauccucauaga

SEQ ID NO: 1061855 - RNA, 19 nt, Artificial Sequence
  Description of Artificial Sequence: Synthetic oligonucleotide
  Antisense strand to SEQ ID NO: 1061854
ucuaugaggauguacauau

SEQ ID NO: 1061856 - RNA, 19 nt, Artificial Sequence
  Description of Artificial Sequence: Synthetic oligonucleotide
  Sense strand starting at position 2467 of SEQ ID NO: 915202
ugaaguaucuugguagaaa

SEQ ID NO: 1061857 - RNA, 19 nt, Artificial Sequence
  Description of Artificial Sequence: Synthetic oligonucleotide
  Antisense strand to SEQ ID NO: 1061856
uuucuaccaagauacuuca

SEQ ID NO: 1061858 - RNA, 19 nt, Artificial Sequence
  Description of Artificial Sequence: Synthetic oligonucleotide
  Sense strand starting at position 2670 of SEQ ID NO: 915202
uaugaaguugcauaguaga

SEQ ID NO: 1061859 - RNA, 19 nt, Artificial Sequence
  Description of Artificial Sequence: Synthetic oligonucleotide
  Antisense strand to SEQ ID NO: 1061858
ucuacuaugcaacuucaua

SEQ ID NO: 1061860 - RNA, 19 nt, Artificial Sequence
  Description of Artificial Sequence: Synthetic oligonucleotide
  Sense strand starting at position 2720 of SEQ ID NO: 915202
guggaauaaaugcagcauu

SEQ ID NO: 1061861 - RNA, 19 nt, Artificial Sequence
  Description of Artificial Sequence: Synthetic oligonucleotide
  Antisense strand to SEQ ID NO: 1061860
aaugcugcauuuauuccac

SEQ ID NO: 1061862 - RNA, 19 nt, Artificial Sequence
  Description of Artificial Sequence: Synthetic oligonucleotide
  Sense strand starting at position 2761 of SEQ ID NO: 915202
gccaauucugcagagaaga

SEQ ID NO: 1061863 - RNA, 19 nt, Artificial Sequence
  Description of Artificial Sequence: Synthetic oligonucleotide
  Antisense strand to SEQ ID NO: 1061862
ucuucucugcagaauuggc

SEQ ID NO: 1061864 - RNA, 19 nt, Artificial Sequence
  Description of Artificial Sequence: Synthetic oligonucleotide
  Sense strand starting at position 2776 of SEQ ID NO: 915202
aagauauagcauuggguau

SEQ ID NO: 1061865 - RNA, 19 nt, Artificial Sequence
  Description of Artificial Sequence: Synthetic oligonucleotide
  Antisense strand to SEQ ID NO: 1061864
auacccaaugcuauaucuu

SEQ ID NO: 1061866 - RNA, 19 nt, Artificial Sequence
  Description of Artificial Sequence: Synthetic oligonucleotide
  Sense strand starting at position 2777 of SEQ ID NO: 915202
agauauagcauuggguaua

SEQ ID NO: 1061867 - RNA, 19 nt, Artificial Sequence
  Description of Artificial Sequence: Synthetic oligonucleotide
  Antisense strand to SEQ ID NO: 1061866
uauacccaaugcuauaucu

SEQ ID NO: 1061868 - RNA, 19 nt, Artificial Sequence
  Description of Artificial Sequence: Synthetic oligonucleotide
  Sense strand starting at position 2857 of SEQ ID NO: 915202
uugggagacacuggucuua

SEQ ID NO: 1061869 - RNA, 19 nt, Artificial Sequence
  Description of Artificial Sequence: Synthetic oligonucleotide
  Antisense strand to SEQ ID NO: 1061868
uaagaccagugucucccaa

SEQ ID NO: 1061870 - RNA, 19 nt, Artificial Sequence
  Description of Artificial Sequence: Synthetic oligonucleotide
  Sense strand starting at position 2859 of SEQ ID NO: 915202
gggagacacuggucuuaau

SEQ ID NO: 1061871 - RNA, 19 nt, Artificial Sequence
  Description of Artificial Sequence: Synthetic oligonucleotide
  Antisense strand to SEQ ID NO: 1061870
auuaagaccagugucuccc

SEQ ID NO: 1061872 - RNA, 19 nt, Artificial Sequence
  Description of Artificial Sequence: Synthetic oligonucleotide
  Sense strand starting at position 3000 of SEQ ID NO: 915202
cagcacaguccugaugagu

SEQ ID NO: 1061873 - RNA, 19 nt, Artificial Sequence
  Description of Artificial Sequence: Synthetic oligonucleotide
  Antisense strand to SEQ ID NO: 1061872
acucaucaggacugugcug

SEQ ID NO: 1061874 - RNA, 19 nt, Artificial Sequence
  Description of Artificial Sequence: Synthetic oligonucleotide
  Sense strand starting at position 3232 of SEQ ID NO: 915202
agccaucuagcaugagaac

SEQ ID NO: 1061875 - RNA, 19 nt, Artificial Sequence
  Description of Artificial Sequence: Synthetic oligonucleotide
  Antisense strand to SEQ ID NO: 1061874
guucucaugcuagauggcu

SEQ ID NO: 1061876 - RNA, 19 nt, Artificial Sequence
  Description of Artificial Sequence: Synthetic oligonucleotide
  Sense strand starting at position 3273 of SEQ ID NO: 915202
guguuuaauuucucccuuu

SEQ ID NO: 1061877 - RNA, 19 nt, Artificial Sequence
  Description of Artificial Sequence: Synthetic oligonucleotide
  Antisense strand to SEQ ID NO: 1061876
aaagggagaaauuaaacac

SEQ ID NO: 1061878 - RNA, 19 nt, Artificial Sequence
  Description of Artificial Sequence: Synthetic oligonucleotide
  Sense strand starting at position 3379 of SEQ ID NO: 915202
ucagauauugaggguugga

SEQ ID NO: 1061879 - RNA, 19 nt, Artificial Sequence
  Description of Artificial Sequence: Synthetic oligonucleotide
  Antisense strand to SEQ ID NO: 1061878
uccaacccucaauaucuga

SEQ ID NO: 1061880 - RNA, 19 nt, Artificial Sequence
  Description of Artificial Sequence: Synthetic oligonucleotide
  Sense strand starting at position 3462 of SEQ ID NO: 915202
auuugaaucugucagaagg

SEQ ID NO: 1061881 - RNA, 19 nt, Artificial Sequence
  Description of Artificial Sequence: Synthetic oligonucleotide
  Antisense strand to SEQ ID NO: 1061880
ccuucugacagauucaaau

SEQ ID NO: 1061882 - RNA, 19 nt, Artificial Sequence
  Description of Artificial Sequence: Synthetic oligonucleotide
  Sense strand starting at position 3498 of SEQ ID NO: 915202
accacuauugauugucuau

SEQ ID NO: 1061883 - RNA, 19 nt, Artificial Sequence
  Description of Artificial Sequence: Synthetic oligonucleotide
  Antisense strand to SEQ ID NO: 1061882
auagacaaucaauaguggu

SEQ ID NO: 1061884 - RNA, 19 nt, Artificial Sequence
  Description of Artificial Sequence: Synthetic oligonucleotide
  Sense strand starting at position 3501 of SEQ ID NO: 915202
acuauugauugucuaucau

SEQ ID NO: 1061885 - RNA, 19 nt, Artificial Sequence
  Description of Artificial Sequence: Synthetic oligonucleotide
  Antisense strand to SEQ ID NO: 1061884
augauagacaaucaauagu

SEQ ID NO: 1061886 - RNA, 19 nt, Artificial Sequence
  Description of Artificial Sequence: Synthetic oligonucleotide
  Sense strand starting at position 3656 of SEQ ID NO: 915202
acugaaagguucucacugu

SEQ ID NO: 1061887 - RNA, 19 nt, Artificial Sequence
  Description of Artificial Sequence: Synthetic oligonucleotide
  Antisense strand to SEQ ID NO: 1061886
acagugagaaccuuucagu

SEQ ID NO: 1061888 - RNA, 19 nt, Artificial Sequence
  Description of Artificial Sequence: Synthetic oligonucleotide
  Sense strand starting at position 3671 of SEQ ID NO: 915202
cuguaccuaccuggauaau

SEQ ID NO: 1061889 - RNA, 19 nt, Artificial Sequence
  Description of Artificial Sequence: Synthetic oligonucleotide
  Antisense strand to SEQ ID NO: 1061888
auuauccagguagguacag

SEQ ID NO: 1061890 - RNA, 19 nt, Artificial Sequence
  Description of Artificial Sequence: Synthetic oligonucleotide
  Sense strand starting at position 3819 of SEQ ID NO: 915202
cugccauaaugaguaugaa

SEQ ID NO: 1061891 - RNA, 19 nt, Artificial Sequence
  Description of Artificial Sequence: Synthetic oligonucleotide
  Antisense strand to SEQ ID NO: 1061890
uucauacucauuauggcag

SEQ ID NO: 1061892 - RNA, 19 nt, Artificial Sequence
  Description of Artificial Sequence: Synthetic oligonucleotide
  Sense strand starting at position 3820 of SEQ ID NO: 915202
ugccauaaugaguaugaau

SEQ ID NO: 1061893 - RNA, 19 nt, Artificial Sequence
  Description of Artificial Sequence: Synthetic oligonucleotide
  Antisense strand to SEQ ID NO: 1061892
auucauacucauuauggca

SEQ ID NO: 1061894 - RNA, 19 nt, Artificial Sequence
  Description of Artificial Sequence: Synthetic oligonucleotide
  Sense strand starting at position 3852 of SEQ ID NO: 915202
gguaaauuaucucuagaau

SEQ ID NO: 1061895 - RNA, 19 nt, Artificial Sequence
  Description of Artificial Sequence: Synthetic oligonucleotide
  Antisense strand to SEQ ID NO: 1061894
auucuagagauaauuuacc

SEQ ID NO: 1061896 - RNA, 19 nt, Artificial Sequence
  Description of Artificial Sequence: Synthetic oligonucleotide
  Sense strand starting at position 244 of SEQ ID NO: 915203
agagcuuuagagcagugaa

SEQ ID NO: 1061897 - RNA, 19 nt, Artificial Sequence
  Description of Artificial Sequence: Synthetic oligonucleotide
  Antisense strand to SEQ ID NO: 1061896
uucacugcucuaaagcucu

SEQ ID NO: 1061898 - RNA, 19 nt, Artificial Sequence
  Description of Artificial Sequence: Synthetic oligonucleotide
  Sense strand starting at position 353 of SEQ ID NO: 915203
uguaaauuauggucuugag

SEQ ID NO: 1061899 - RNA, 19 nt, Artificial Sequence
  Description of Artificial Sequence: Synthetic oligonucleotide
  Antisense strand to SEQ ID NO: 1061898
cucaagaccauaauuuaca

SEQ ID NO: 1061900 - RNA, 19 nt, Artificial Sequence
  Description of Artificial Sequence: Synthetic oligonucleotide
  Sense strand starting at position 361 of SEQ ID NO: 915203
auggucuugagaugauaau

SEQ ID NO: 1061901 - RNA, 19 nt, Artificial Sequence
  Description of Artificial Sequence: Synthetic oligonucleotide
  Antisense strand to SEQ ID NO: 1061900
auuaucaucucaagaccau

SEQ ID NO: 1061902 - RNA, 19 nt, Artificial Sequence
  Description of Artificial Sequence: Synthetic oligonucleotide
  Sense strand starting at position 419 of SEQ ID NO: 915203
cacucuguuggaggauauu

SEQ ID NO: 1061903 - RNA, 19 nt, Artificial Sequence
  Description of Artificial Sequence: Synthetic oligonucleotide
  Antisense strand to SEQ ID NO: 1061902
aauauccuccaacagagug

SEQ ID NO: 1061904 - RNA, 19 nt, Artificial Sequence
  Description of Artificial Sequence: Synthetic oligonucleotide
  Sense strand starting at position 760 of SEQ ID NO: 915203
gaguaaaccgaaugucauu

SEQ ID NO: 1061905 - RNA, 19 nt, Artificial Sequence
  Description of Artificial Sequence: Synthetic oligonucleotide
  Antisense strand to SEQ ID NO: 1061904
aaugacauucgguuuacuc

SEQ ID NO: 1061906 - RNA, 19 nt, Artificial Sequence
  Description of Artificial Sequence: Synthetic oligonucleotide
  Sense strand starting at position 765 of SEQ ID NO: 915203
aaccgaaugucauuaguaa

SEQ ID NO: 1061907 - RNA, 19 nt, Artificial Sequence
  Description of Artificial Sequence: Synthetic oligonucleotide
  Antisense strand to SEQ ID NO: 1061906
uuacuaaugacauucgguu

SEQ ID NO: 1061908 - RNA, 19 nt, Artificial Sequence
  Description of Artificial Sequence: Synthetic oligonucleotide
  Sense strand starting at position 766 of SEQ ID NO: 915203
accgaaugucauuaguaag

SEQ ID NO: 1061909 - RNA, 19 nt, Artificial Sequence
  Description of Artificial Sequence: Synthetic oligonucleotide
  Antisense strand to SEQ ID NO: 1061908
cuuacuaaugacauucggu

SEQ ID NO: 1061910 - RNA, 19 nt, Artificial Sequence
  Description of Artificial Sequence: Synthetic oligonucleotide
  Sense strand starting at position 895 of SEQ ID NO: 915203
guaagaauaucaccucaug

SEQ ID NO: 1061911 - RNA, 19 nt, Artificial Sequence
  Description of Artificial Sequence: Synthetic oligonucleotide
  Antisense strand to SEQ ID NO: 1061910
caugaggugauauucuuac

SEQ ID NO: 1061912 - RNA, 19 nt, Artificial Sequence
  Description of Artificial Sequence: Synthetic oligonucleotide
  Sense strand starting at position 988 of SEQ ID NO: 915203
uuguguauacaacaauguu

SEQ ID NO: 1061913 - RNA, 19 nt, Artificial Sequence
  Description of Artificial Sequence: Synthetic oligonucleotide
  Antisense strand to SEQ ID NO: 1061912
aacauuguuguauacacaa

SEQ ID NO: 1061914 - RNA, 19 nt, Artificial Sequence
  Description of Artificial Sequence: Synthetic oligonucleotide
  Sense strand starting at position 1171 of SEQ ID NO: 915203
gcugcaaguagaugaagau

SEQ ID NO: 1061915 - RNA, 19 nt, Artificial Sequence
  Description of Artificial Sequence: Synthetic oligonucleotide
  Antisense strand to SEQ ID NO: 1061914
aucuucaucuacuugcagc

SEQ ID NO: 1061916 - RNA, 19 nt, Artificial Sequence
  Description of Artificial Sequence: Synthetic oligonucleotide
  Sense strand starting at position 1184 of SEQ ID NO: 915203
gaagauuacugucccauag

SEQ ID NO: 1061917 - RNA, 19 nt, Artificial Sequence
  Description of Artificial Sequence: Synthetic oligonucleotide
  Antisense strand to SEQ ID NO: 1061916
cuaugggacaguaaucuuc

SEQ ID NO: 1061918 - RNA, 19 nt, Artificial Sequence
  Description of Artificial Sequence: Synthetic oligonucleotide
  Sense strand starting at position 1377 of SEQ ID NO: 915203
uguuuaucagagcaagaca

SEQ ID NO: 1061919 - RNA, 19 nt, Artificial Sequence
  Description of Artificial Sequence: Synthetic oligonucleotide
  Antisense strand to SEQ ID NO: 1061918
ugucuugcucugauaaaca

SEQ ID NO: 1061920 - RNA, 19 nt, Artificial Sequence
  Description of Artificial Sequence: Synthetic oligonucleotide
  Sense strand starting at position 1684 of SEQ ID NO: 915203
ccuugucuccucuaaggaa

SEQ ID NO: 1061921 - RNA, 19 nt, Artificial Sequence
  Description of Artificial Sequence: Synthetic oligonucleotide
  Antisense strand to SEQ ID NO: 1061920
uuccuuagaggagacaagg

SEQ ID NO: 1061922 - RNA, 19 nt, Artificial Sequence
  Description of Artificial Sequence: Synthetic oligonucleotide
  Sense strand starting at position 1705 of SEQ ID NO: 915203
cagccaugaccuugggagu

SEQ ID NO: 1061923 - RNA, 19 nt, Artificial Sequence
  Description of Artificial Sequence: Synthetic oligonucleotide
  Antisense strand to SEQ ID NO: 1061922
acucccaaggucauggcug

SEQ ID NO: 1061924 - RNA, 19 nt, Artificial Sequence
  Description of Artificial Sequence: Synthetic oligonucleotide
  Sense strand starting at position 1895 of SEQ ID NO: 915203
gacacugguuaguccuaga

SEQ ID NO: 1061925 - RNA, 19 nt, Artificial Sequence
  Description of Artificial Sequence: Synthetic oligonucleotide
  Antisense strand to SEQ ID NO: 1061924
ucuaggacuaaccaguguc

SEQ ID NO: 1061926 - RNA, 19 nt, Artificial Sequence
  Description of Artificial Sequence: Synthetic oligonucleotide
  Sense strand starting at position 1906 of SEQ ID NO: 915203
guccuagaagaaugaacuu

SEQ ID NO: 1061927 - RNA, 19 nt, Artificial Sequence
  Description of Artificial Sequence: Synthetic oligonucleotide
  Antisense strand to SEQ ID NO: 1061926
aaguucauucuucuaggac

SEQ ID NO: 1061928 - RNA, 19 nt, Artificial Sequence
  Description of Artificial Sequence: Synthetic oligonucleotide
  Sense strand starting at position 1934 of SEQ ID NO: 915203
cguacaauucuccaucagu

SEQ ID NO: 1061929 - RNA, 19 nt, Artificial Sequence
  Description of Artificial Sequence: Synthetic oligonucleotide
  Antisense strand to SEQ ID NO: 1061928
acugauggagaauuguacg

SEQ ID NO: 1061930 - RNA, 19 nt, Artificial Sequence
  Description of Artificial Sequence: Synthetic oligonucleotide
  Sense strand starting at position 1945 of SEQ ID NO: 915203
ccaucaguauuaucugaga

SEQ ID NO: 1061931 - RNA, 19 nt, Artificial Sequence
  Description of Artificial Sequence: Synthetic oligonucleotide
  Antisense strand to SEQ ID NO: 1061930
ucucagauaauacugaugg

SEQ ID NO: 1061932 - RNA, 19 nt, Artificial Sequence
  Description of Artificial Sequence: Synthetic oligonucleotide
  Sense strand starting at position 2100 of SEQ ID NO: 915203
agcauaggcuugguaacaa

SEQ ID NO: 1061933 - RNA, 19 nt, Artificial Sequence
  Description of Artificial Sequence: Synthetic oligonucleotide
  Antisense strand to SEQ ID NO: 1061932
uuguuaccaagccuaugcu

SEQ ID NO: 1061934 - RNA, 19 nt, Artificial Sequence
  Description of Artificial Sequence: Synthetic oligonucleotide
  Sense strand starting at position 2111 of SEQ ID NO: 915203
gguaacaaucuuuaaugca

SEQ ID NO: 1061935 - RNA, 19 nt, Artificial Sequence
  Description of Artificial Sequence: Synthetic oligonucleotide
  Antisense strand to SEQ ID NO: 1061934
ugcauuaaagauuguuacc

SEQ ID NO: 1061936 - RNA, 19 nt, Artificial Sequence
  Description of Artificial Sequence: Synthetic oligonucleotide
  Sense strand starting at position 2125 of SEQ ID NO: 915203
augcauuaucuacagaguu

SEQ ID NO: 1061937 - RNA, 19 nt, Artificial Sequence
  Description of Artificial Sequence: Synthetic oligonucleotide
  Antisense strand to SEQ ID NO: 1061936
aacucuguagauaaugcau

SEQ ID NO: 1061938 - RNA, 19 nt, Artificial Sequence
  Description of Artificial Sequence: Synthetic oligonucleotide
  Sense strand starting at position 2142 of SEQ ID NO: 915203
uuguaaucugcugaaucca

SEQ ID NO: 1061939 - RNA, 19 nt, Artificial Sequence
  Description of Artificial Sequence: Synthetic oligonucleotide
  Antisense strand to SEQ ID NO: 1061938
uggauucagcagauuacaa

SEQ ID NO: 1061940 - RNA, 19 nt, Artificial Sequence
  Description of Artificial Sequence: Synthetic oligonucleotide
  Sense strand starting at position 2232 of SEQ ID NO: 915203
ugauguguccaagaugacu

SEQ ID NO: 1061941 - RNA, 19 nt, Artificial Sequence
  Description of Artificial Sequence: Synthetic oligonucleotide
  Antisense strand to SEQ ID NO: 1061940
agucaucuuggacacauca

SEQ ID NO: 1061942 - RNA, 19 nt, Artificial Sequence
  Description of Artificial Sequence: Synthetic oligonucleotide
  Sense strand starting at position 2402 of SEQ ID NO: 915203
uuauuuaauuugugaggcu

SEQ ID NO: 1061943 - RNA, 19 nt, Artificial Sequence
  Description of Artificial Sequence: Synthetic oligonucleotide
  Antisense strand to SEQ ID NO: 1061942
agccucacaaauuaaauaa

SEQ ID NO: 1061944 - RNA, 19 nt, Artificial Sequence
  Description of Artificial Sequence: Synthetic oligonucleotide
  Sense strand starting at position 2472 of SEQ ID NO: 915203
uaucuucuggcucaggaga

SEQ ID NO: 1061945 - RNA, 19 nt, Artificial Sequence
  Description of Artificial Sequence: Synthetic oligonucleotide
  Antisense strand to SEQ ID NO: 1061944
ucuccugagccagaagaua

SEQ ID NO: 1061946 - RNA, 19 nt, Artificial Sequence
  Description of Artificial Sequence: Synthetic oligonucleotide
  Sense strand starting at position 2501 of SEQ ID NO: 915203
agcucaauggucuaaauug

SEQ ID NO: 1061947 - RNA, 19 nt, Artificial Sequence
  Description of Artificial Sequence: Synthetic oligonucleotide
  Antisense strand to SEQ ID NO: 1061946
caauuuagaccauugagcu

SEQ ID NO: 1061948 - RNA, 19 nt, Artificial Sequence
  Description of Artificial Sequence: Synthetic oligonucleotide
  Sense strand starting at position 2890 of SEQ ID NO: 915203
auguuaaauguuuagcaca

SEQ ID NO: 1061949 - RNA, 19 nt, Artificial Sequence
  Description of Artificial Sequence: Synthetic oligonucleotide
  Antisense strand to SEQ ID NO: 1061948
ugugcuaaacauuuaacau

SEQ ID NO: 1061950 - RNA, 19 nt, Artificial Sequence
  Description of Artificial Sequence: Synthetic oligonucleotide
  Sense strand starting at position 2944 of SEQ ID NO: 915203
auggaaugaugaucuguua

SEQ ID NO: 1061951 - RNA, 19 nt, Artificial Sequence
  Description of Artificial Sequence: Synthetic oligonucleotide
  Antisense strand to SEQ ID NO: 1061950
uaacagaucaucauuccau

SEQ ID NO: 1061952 - RNA, 19 nt, Artificial Sequence
  Description of Artificial Sequence: Synthetic oligonucleotide
  Sense strand starting at position 2947 of SEQ ID NO: 915203
gaaugaugaucuguuaguu

SEQ ID NO: 1061953 - RNA, 19 nt, Artificial Sequence
  Description of Artificial Sequence: Synthetic oligonucleotide
  Antisense strand to SEQ ID NO: 1061952
aacuaacagaucaucauuc

SEQ ID NO: 1061954 - RNA, 19 nt, Artificial Sequence
  Description of Artificial Sequence: Synthetic oligonucleotide
  Sense strand starting at position 3113 of SEQ ID NO: 915203
augauagacuguuccagaa

SEQ ID NO: 1061955 - RNA, 19 nt, Artificial Sequence
  Description of Artificial Sequence: Synthetic oligonucleotide
  Antisense strand to SEQ ID NO: 1061954
uucuggaacagucuaucau

SEQ ID NO: 1061956 - RNA, 19 nt, Artificial Sequence
  Description of Artificial Sequence: Synthetic oligonucleotide
  Sense strand starting at position 3125 of SEQ ID NO: 915203
uccagaauucuaugugaac

SEQ ID NO: 1061957 - RNA, 19 nt, Artificial Sequence
  Description of Artificial Sequence: Synthetic oligonucleotide
  Antisense strand to SEQ ID NO: 1061956
guucacauagaauucugga

SEQ ID NO: 1061958 - RNA, 19 nt, Artificial Sequence
  Description of Artificial Sequence: Synthetic oligonucleotide
  Sense strand starting at position 3126 of SEQ ID NO: 915203
ccagaauucuaugugaacc

SEQ ID NO: 1061959 - RNA, 19 nt, Artificial Sequence
  Description of Artificial Sequence: Synthetic oligonucleotide
  Antisense strand to SEQ ID NO: 1061958
gguucacauagaauucugg

SEQ ID NO: 1061960 - RNA, 19 nt, Artificial Sequence
  Description of Artificial Sequence: Synthetic oligonucleotide
  Sense strand starting at position 3245 of SEQ ID NO: 915203
uuaguugacccuuauaguu

SEQ ID NO: 1061961 - RNA, 19 nt, Artificial Sequence
  Description of Artificial Sequence: Synthetic oligonucleotide
  Antisense strand to SEQ ID NO: 1061960
aacuauaagggucaacuaa

SEQ ID NO: 1061962 - RNA, 19 nt, Artificial Sequence
  Description of Artificial Sequence: Synthetic oligonucleotide
  Sense strand starting at position 3346 of SEQ ID NO: 915203
ucaguucuugcauaugaau

SEQ ID NO: 1061963 - RNA, 19 nt, Artificial Sequence
  Description of Artificial Sequence: Synthetic oligonucleotide
  Antisense strand to SEQ ID NO: 1061962
auucauaugcaagaacuga

SEQ ID NO: 1061964 - RNA, 19 nt, Artificial Sequence
  Description of Artificial Sequence: Synthetic oligonucleotide
  Sense strand starting at position 3448 of SEQ ID NO: 915203
auaaguuuagcccaugaaa

SEQ ID NO: 1061965 - RNA, 19 nt, Artificial Sequence
  Description of Artificial Sequence: Synthetic oligonucleotide
  Antisense strand to SEQ ID NO: 1061964
uuucaugggcuaaacuuau

SEQ ID NO: 1061966 - RNA, 19 nt, Artificial Sequence
  Description of Artificial Sequence: Synthetic oligonucleotide
  Sense strand starting at position 3459 of SEQ ID NO: 915203
ccaugaaagcauuauguuu

SEQ ID NO: 1061967 - RNA, 19 nt, Artificial Sequence
  Description of Artificial Sequence: Synthetic oligonucleotide
  Antisense strand to SEQ ID NO: 1061966
aaacauaaugcuuucaugg

SEQ ID NO: 1061968 - RNA, 19 nt, Artificial Sequence
  Description of Artificial Sequence: Synthetic oligonucleotide
  Sense strand starting at position 3572 of SEQ ID NO: 915203
gugugugauaaguauuauu

SEQ ID NO: 1061969 - RNA, 19 nt, Artificial Sequence
  Description of Artificial Sequence: Synthetic oligonucleotide
  Antisense strand to SEQ ID NO: 1061968
aauaauacuuaucacacac

SEQ ID NO: 1061970 - RNA, 19 nt, Artificial Sequence
  Description of Artificial Sequence: Synthetic oligonucleotide
  Sense strand starting at position 3747 of SEQ ID NO: 915203
uuagauugcuagucauaau

SEQ ID NO: 1061971 - RNA, 19 nt, Artificial Sequence
  Description of Artificial Sequence: Synthetic oligonucleotide
  Antisense strand to SEQ ID NO: 1061970
auuaugacuagcaaucuaa

SEQ ID NO: 1061972 - RNA, 19 nt, Artificial Sequence
  Description of Artificial Sequence: Synthetic oligonucleotide
  Sense strand starting at position 3789 of SEQ ID NO: 915203
guuacaauucuguaugcau

SEQ ID NO: 1061973 - RNA, 19 nt, Artificial Sequence
  Description of Artificial Sequence: Synthetic oligonucleotide
  Antisense strand to SEQ ID NO: 1061972
augcauacagaauuguaac

SEQ ID NO: 1061974 - RNA, 19 nt, Artificial Sequence
  Description of Artificial Sequence: Synthetic oligonucleotide
  Sense strand starting at position 3977 of SEQ ID NO: 915203
gaagcaguaucacugaaca

SEQ ID NO: 1061975 - RNA, 19 nt, Artificial Sequence
  Description of Artificial Sequence: Synthetic oligonucleotide
  Antisense strand to SEQ ID NO: 1061974
uguucagugauacugcuuc

SEQ ID NO: 1061976 - RNA, 19 nt, Artificial Sequence
  Description of Artificial Sequence: Synthetic oligonucleotide
  Sense strand starting at position 76 of SEQ ID NO: 915204
uguagcaucuaauuacaga

SEQ ID NO: 1061977 - RNA, 19 nt, Artificial Sequence
  Description of Artificial Sequence: Synthetic oligonucleotide
  Antisense strand to SEQ ID NO: 1061976
ucuguaauuagaugcuaca

SEQ ID NO: 1061978 - RNA, 19 nt, Artificial Sequence
  Description of Artificial Sequence: Synthetic oligonucleotide
  Sense strand starting at position 284 of SEQ ID NO: 915204
cuaaaccuucuggaaguuu

SEQ ID NO: 1061979 - RNA, 19 nt, Artificial Sequence
  Description of Artificial Sequence: Synthetic oligonucleotide
  Antisense strand to SEQ ID NO: 1061978
aaacuuccagaagguuuag

SEQ ID NO: 1061980 - RNA, 19 nt, Artificial Sequence
  Description of Artificial Sequence: Synthetic oligonucleotide
  Sense strand starting at position 362 of SEQ ID NO: 915204
aguuguauuuagucagguu

SEQ ID NO: 1061981 - RNA, 19 nt, Artificial Sequence
  Description of Artificial Sequence: Synthetic oligonucleotide
  Antisense strand to SEQ ID NO: 1061980
aaccugacuaaauacaacu

SEQ ID NO: 1061982 - RNA, 19 nt, Artificial Sequence
  Description of Artificial Sequence: Synthetic oligonucleotide
  Sense strand starting at position 374 of SEQ ID NO: 915204
ucagguuaaaguugaagua

SEQ ID NO: 1061983 - RNA, 19 nt, Artificial Sequence
  Description of Artificial Sequence: Synthetic oligonucleotide
  Antisense strand to SEQ ID NO: 1061982
uacuucaacuuuaaccuga

SEQ ID NO: 1061984 - RNA, 19 nt, Artificial Sequence
  Description of Artificial Sequence: Synthetic oligonucleotide
  Sense strand starting at position 407 of SEQ ID NO: 915204
gcauucccauauuucugua

SEQ ID NO: 1061985 - RNA, 19 nt, Artificial Sequence
  Description of Artificial Sequence: Synthetic oligonucleotide
  Antisense strand to SEQ ID NO: 1061984
uacagaaauaugggaaugc

SEQ ID NO: 1061986 - RNA, 19 nt, Artificial Sequence
  Description of Artificial Sequence: Synthetic oligonucleotide
  Sense strand starting at position 422 of SEQ ID NO: 915204
uguauauaacaagguguaa

SEQ ID NO: 1061987 - RNA, 19 nt, Artificial Sequence
  Description of Artificial Sequence: Synthetic oligonucleotide
  Antisense strand to SEQ ID NO: 1061986
uuacaccuuguuauauaca

SEQ ID NO: 1061988 - RNA, 19 nt, Artificial Sequence
  Description of Artificial Sequence: Synthetic oligonucleotide
  Sense strand starting at position 635 of SEQ ID NO: 915204
cuuugucuaccucagaaag

SEQ ID NO: 1061989 - RNA, 19 nt, Artificial Sequence
  Description of Artificial Sequence: Synthetic oligonucleotide
  Antisense strand to SEQ ID NO: 1061988
cuuucugagguagacaaag

SEQ ID NO: 1061990 - RNA, 19 nt, Artificial Sequence
  Description of Artificial Sequence: Synthetic oligonucleotide
  Sense strand starting at position 938 of SEQ ID NO: 915204
cuucuaauagcagaaguaa

SEQ ID NO: 1061991 - RNA, 19 nt, Artificial Sequence
  Description of Artificial Sequence: Synthetic oligonucleotide
  Antisense strand to SEQ ID NO: 1061990
uuacuucugcuauuagaag

SEQ ID NO: 1061992 - RNA, 19 nt, Artificial Sequence
  Description of Artificial Sequence: Synthetic oligonucleotide
  Sense strand starting at position 1017 of SEQ ID NO: 915204
uuaggugugagagaaaguu

SEQ ID NO: 1061993 - RNA, 19 nt, Artificial Sequence
  Description of Artificial Sequence: Synthetic oligonucleotide
  Antisense strand to SEQ ID NO: 1061992
aacuuucucucacaccuaa

SEQ ID NO: 1061994 - RNA, 19 nt, Artificial Sequence
  Description of Artificial Sequence: Synthetic oligonucleotide
  Sense strand starting at position 1026 of SEQ ID NO: 915204
agagaaaguuuaucccuua

SEQ ID NO: 1061995 - RNA, 19 nt, Artificial Sequence
  Description of Artificial Sequence: Synthetic oligonucleotide
  Antisense strand to SEQ ID NO: 1061994
uaagggauaaacuuucucu

SEQ ID NO: 1061996 - RNA, 19 nt, Artificial Sequence
  Description of Artificial Sequence: Synthetic oligonucleotide
  Sense strand starting at position 1129 of SEQ ID NO: 915204
uuccuaaggcuguauauca

SEQ ID NO: 1061997 - RNA, 19 nt, Artificial Sequence
  Description of Artificial Sequence: Synthetic oligonucleotide
  Antisense strand to SEQ ID NO: 1061996
ugauauacagccuuaggaa

SEQ ID NO: 1061998 - RNA, 19 nt, Artificial Sequence
  Description of Artificial Sequence: Synthetic oligonucleotide
  Sense strand starting at position 1137 of SEQ ID NO: 915204
gcuguauaucaagggauuc

SEQ ID NO: 1061999 - RNA, 19 nt, Artificial Sequence
  Description of Artificial Sequence: Synthetic oligonucleotide
  Antisense strand to SEQ ID NO: 1061998
gaaucccuugauauacagc

SEQ ID NO: 1062000 - RNA, 19 nt, Artificial Sequence
  Description of Artificial Sequence: Synthetic oligonucleotide
  Sense strand starting at position 1148 of SEQ ID NO: 915204
agggauucagcaugggaau

SEQ ID NO: 1062001 - RNA, 19 nt, Artificial Sequence
  Description of Artificial Sequence: Synthetic oligonucleotide
  Antisense strand to SEQ ID NO: 1062000
auucccaugcugaaucccu

SEQ ID NO: 1062002 - RNA, 19 nt, Artificial Sequence
  Description of Artificial Sequence: Synthetic oligonucleotide
  Sense strand starting at position 1149 of SEQ ID NO: 915204
gggauucagcaugggaauc

SEQ ID NO: 1062003 - RNA, 19 nt, Artificial Sequence
  Description of Artificial Sequence: Synthetic oligonucleotide
  Antisense strand to SEQ ID NO: 1062002
gauucccaugcugaauccc

SEQ ID NO: 1062004 - RNA, 19 nt, Artificial Sequence
  Description of Artificial Sequence: Synthetic oligonucleotide
  Sense strand starting at position 1161 of SEQ ID NO: 915204
gggaaucaccacuguguaa

SEQ ID NO: 1062005 - RNA, 19 nt, Artificial Sequence
  Description of Artificial Sequence: Synthetic oligonucleotide
  Antisense strand to SEQ ID NO: 1062004
uuacacaguggugauuccc

SEQ ID NO: 1062006 - RNA, 19 nt, Artificial Sequence
  Description of Artificial Sequence: Synthetic oligonucleotide
  Sense strand starting at position 1325 of SEQ ID NO: 915204
gcauccucugaauggugau

SEQ ID NO: 1062007 - RNA, 19 nt, Artificial Sequence
  Description of Artificial Sequence: Synthetic oligonucleotide
  Antisense strand to SEQ ID NO: 1062006
aucaccauucagaggaugc

SEQ ID NO: 1062008 - RNA, 19 nt, Artificial Sequence
  Description of Artificial Sequence: Synthetic oligonucleotide
  Sense strand starting at position 1337 of SEQ ID NO: 915204
uggugaugcauaugaagaa

SEQ ID NO: 1062009 - RNA, 19 nt, Artificial Sequence
  Description of Artificial Sequence: Synthetic oligonucleotide
  Antisense strand to SEQ ID NO: 1062008
uucuucauaugcaucacca

SEQ ID NO: 1062010 - RNA, 19 nt, Artificial Sequence
  Description of Artificial Sequence: Synthetic oligonucleotide
  Sense strand starting at position 1664 of SEQ ID NO: 915204
ggagguagcacucaacagu

SEQ ID NO: 1062011 - RNA, 19 nt, Artificial Sequence
  Description of Artificial Sequence: Synthetic oligonucleotide
  Antisense strand to SEQ ID NO: 1062010
acuguugagugcuaccucc

SEQ ID NO: 1062012 - RNA, 19 nt, Artificial Sequence
  Description of Artificial Sequence: Synthetic oligonucleotide
  Sense strand starting at position 1856 of SEQ ID NO: 915204
aguggaugaucaccaucau

SEQ ID NO: 1062013 - RNA, 19 nt, Artificial Sequence
  Description of Artificial Sequence: Synthetic oligonucleotide
  Antisense strand to SEQ ID NO: 1062012
augauggugaucauccacu

SEQ ID NO: 1062014 - RNA, 19 nt, Artificial Sequence
  Description of Artificial Sequence: Synthetic oligonucleotide
  Sense strand starting at position 1965 of SEQ ID NO: 915204
gaggauaaacucugucacu

SEQ ID NO: 1062015 - RNA, 19 nt, Artificial Sequence
  Description of Artificial Sequence: Synthetic oligonucleotide
  Antisense strand to SEQ ID NO: 1062014
agugacagaguuuauccuc

SEQ ID NO: 1062016 - RNA, 19 nt, Artificial Sequence
  Description of Artificial Sequence: Synthetic oligonucleotide
  Sense strand starting at position 1966 of SEQ ID NO: 915204
aggauaaacucugucacuu

SEQ ID NO: 1062017 - RNA, 19 nt, Artificial Sequence
  Description of Artificial Sequence: Synthetic oligonucleotide
  Antisense strand to SEQ ID NO: 1062016
aagugacagaguuuauccu

SEQ ID NO: 1062018 - RNA, 19 nt, Artificial Sequence
  Description of Artificial Sequence: Synthetic oligonucleotide
  Sense strand starting at position 2010 of SEQ ID NO: 915204
cuugaauuagccuggugau

SEQ ID NO: 1062019 - RNA, 19 nt, Artificial Sequence
  Description of Artificial Sequence: Synthetic oligonucleotide
  Antisense strand to SEQ ID NO: 1062018
aucaccaggcuaauucaag

SEQ ID NO: 1062020 - RNA, 19 nt, Artificial Sequence
  Description of Artificial Sequence: Synthetic oligonucleotide
  Sense strand starting at position 2016 of SEQ ID NO: 915204
uuagccuggugauuaaaga

SEQ ID NO: 1062021 - RNA, 19 nt, Artificial Sequence
  Description of Artificial Sequence: Synthetic oligonucleotide
  Antisense strand to SEQ ID NO: 1062020
ucuuuaaucaccaggcuaa

SEQ ID NO: 1062022 - RNA, 19 nt, Artificial Sequence
  Description of Artificial Sequence: Synthetic oligonucleotide
  Sense strand starting at position 2126 of SEQ ID NO: 915204
guguaacacucauccuaga

SEQ ID NO: 1062023 - RNA, 19 nt, Artificial Sequence
  Description of Artificial Sequence: Synthetic oligonucleotide
  Antisense strand to SEQ ID NO: 1062022
ucuaggaugaguguuacac

SEQ ID NO: 1062024 - RNA, 19 nt, Artificial Sequence
  Description of Artificial Sequence: Synthetic oligonucleotide
  Sense strand starting at position 2172 of SEQ ID NO: 915204
ucauaugagauaggugcua

SEQ ID NO: 1062025 - RNA, 19 nt, Artificial Sequence
  Description of Artificial Sequence: Synthetic oligonucleotide
  Antisense strand to SEQ ID NO: 1062024
uagcaccuaucucauauga

SEQ ID NO: 1062026 - RNA, 19 nt, Artificial Sequence
  Description of Artificial Sequence: Synthetic oligonucleotide
  Sense strand starting at position 2231 of SEQ ID NO: 915204
gcugaauauugagcaagau

SEQ ID NO: 1062027 - RNA, 19 nt, Artificial Sequence
  Description of Artificial Sequence: Synthetic oligonucleotide
  Antisense strand to SEQ ID NO: 1062026
aucuugcucaauauucagc

SEQ ID NO: 1062028 - RNA, 19 nt, Artificial Sequence
  Description of Artificial Sequence: Synthetic oligonucleotide
  Sense strand starting at position 2365 of SEQ ID NO: 915204
uggauauaagauuguaugu

SEQ ID NO: 1062029 - RNA, 19 nt, Artificial Sequence
  Description of Artificial Sequence: Synthetic oligonucleotide
  Antisense strand to SEQ ID NO: 1062028
acauacaaucuuauaucca

SEQ ID NO: 1062030 - RNA, 19 nt, Artificial Sequence
  Description of Artificial Sequence: Synthetic oligonucleotide
  Sense strand starting at position 2676 of SEQ ID NO: 915204
gggaguaugguauauguaa

SEQ ID NO: 1062031 - RNA, 19 nt, Artificial Sequence
  Description of Artificial Sequence: Synthetic oligonucleotide
  Antisense strand to SEQ ID NO: 1062030
uuacauauaccauacuccc

SEQ ID NO: 1062032 - RNA, 19 nt, Artificial Sequence
  Description of Artificial Sequence: Synthetic oligonucleotide
  Sense strand starting at position 2684 of SEQ ID NO: 915204
gguauauguaaauaugagu

SEQ ID NO: 1062033 - RNA, 19 nt, Artificial Sequence
  Description of Artificial Sequence: Synthetic oligonucleotide
  Antisense strand to SEQ ID NO: 1062032
acucauauuuacauauacc

SEQ ID NO: 1062034 - RNA, 19 nt, Artificial Sequence
  Description of Artificial Sequence: Synthetic oligonucleotide
  Sense strand starting at position 2865 of SEQ ID NO: 915204
ugagucuuggcugauuauu

SEQ ID NO: 1062035 - RNA, 19 nt, Artificial Sequence
  Description of Artificial Sequence: Synthetic oligonucleotide
  Antisense strand to SEQ ID NO: 1062034
aauaaucagccaagacuca

SEQ ID NO: 1062036 - RNA, 19 nt, Artificial Sequence
  Description of Artificial Sequence: Synthetic oligonucleotide
  Sense strand starting at position 2875 of SEQ ID NO: 915204
cugauuauugcacaauuag

SEQ ID NO: 1062037 - RNA, 19 nt, Artificial Sequence
  Description of Artificial Sequence: Synthetic oligonucleotide
  Antisense strand to SEQ ID NO: 1062036
cuaauugugcaauaaucag

SEQ ID NO: 1062038 - RNA, 19 nt, Artificial Sequence
  Description of Artificial Sequence: Synthetic oligonucleotide
  Sense strand starting at position 2985 of SEQ ID NO: 915204
cucacacauguauguaaau

SEQ ID NO: 1062039 - RNA, 19 nt, Artificial Sequence
  Description of Artificial Sequence: Synthetic oligonucleotide
  Antisense strand to SEQ ID NO: 1062038
auuuacauacaugugugag

SEQ ID NO: 1062040 - RNA, 19 nt, Artificial Sequence
  Description of Artificial Sequence: Synthetic oligonucleotide
  Sense strand starting at position 2986 of SEQ ID NO: 915204
ucacacauguauguaaaua

SEQ ID NO: 1062041 - RNA, 19 nt, Artificial Sequence
  Description of Artificial Sequence: Synthetic oligonucleotide
  Antisense strand to SEQ ID NO: 1062040
uauuuacauacauguguga

SEQ ID NO: 1062042 - RNA, 19 nt, Artificial Sequence
  Description of Artificial Sequence: Synthetic oligonucleotide
  Sense strand starting at position 3127 of SEQ ID NO: 915204
agcuuagacuugucauaug

SEQ ID NO: 1062043 - RNA, 19 nt, Artificial Sequence
  Description of Artificial Sequence: Synthetic oligonucleotide
  Antisense strand to SEQ ID NO: 1062042
cauaugacaagucuaagcu

SEQ ID NO: 1062044 - RNA, 19 nt, Artificial Sequence
  Description of Artificial Sequence: Synthetic oligonucleotide
  Sense strand starting at position 3397 of SEQ ID NO: 915204
uuagcuuaccuugaagagu

SEQ ID NO: 1062045 - RNA, 19 nt, Artificial Sequence
  Description of Artificial Sequence: Synthetic oligonucleotide
  Antisense strand to SEQ ID NO: 1062044
acucuucaagguaagcuaa

SEQ ID NO: 1062046 - RNA, 19 nt, Artificial Sequence
  Description of Artificial Sequence: Synthetic oligonucleotide
  Sense strand starting at position 3535 of SEQ ID NO: 915204
guacauuacuauccaguaa

SEQ ID NO: 1062047 - RNA, 19 nt, Artificial Sequence
  Description of Artificial Sequence: Synthetic oligonucleotide
  Antisense strand to SEQ ID NO: 1062046
uuacuggauaguaauguac

SEQ ID NO: 1062048 - RNA, 19 nt, Artificial Sequence
  Description of Artificial Sequence: Synthetic oligonucleotide
  Sense strand starting at position 3539 of SEQ ID NO: 915204
auuacuauccaguaaugua

SEQ ID NO: 1062049 - RNA, 19 nt, Artificial Sequence
  Description of Artificial Sequence: Synthetic oligonucleotide
  Antisense strand to SEQ ID NO: 1062048
uacauuacuggauaguaau

SEQ ID NO: 1062050 - RNA, 19 nt, Artificial Sequence
  Description of Artificial Sequence: Synthetic oligonucleotide
  Sense strand starting at position 3562 of SEQ ID NO: 915204
uugacuuucugaccagcau

SEQ ID NO: 1062051 - RNA, 19 nt, Artificial Sequence
  Description of Artificial Sequence: Synthetic oligonucleotide
  Antisense strand to SEQ ID NO: 1062050
augcuggucagaaagucaa

SEQ ID NO: 1062052 - RNA, 19 nt, Artificial Sequence
  Description of Artificial Sequence: Synthetic oligonucleotide
  Sense strand starting at position 3813 of SEQ ID NO: 915204
acauuaugagcuggacagu

SEQ ID NO: 1062053 - RNA, 19 nt, Artificial Sequence
  Description of Artificial Sequence: Synthetic oligonucleotide
  Antisense strand to SEQ ID NO: 1062052
acuguccagcucauaaugu

SEQ ID NO: 1062054 - RNA, 19 nt, Artificial Sequence
  Description of Artificial Sequence: Synthetic oligonucleotide
  Sense strand starting at position 3814 of SEQ ID NO: 915204
cauuaugagcuggacaguu

SEQ ID NO: 1062055 - RNA, 19 nt, Artificial Sequence
  Description of Artificial Sequence: Synthetic oligonucleotide
  Antisense strand to SEQ ID NO: 1062054
aacuguccagcucauaaug

SEQ ID NO: 1062056 - RNA, 19 nt, Artificial Sequence
  Description of Artificial Sequence: Synthetic oligonucleotide
  Sense strand starting at position 477 of SEQ ID NO: 915205
gagcccucaguagauugaa

SEQ ID NO: 1062057 - RNA, 19 nt, Artificial Sequence
  Description of Artificial Sequence: Synthetic oligonucleotide
  Antisense strand to SEQ ID NO: 1062056
uucaaucuacugagggcuc

SEQ ID NO: 1062058 - RNA, 19 nt, Artificial Sequence
  Description of Artificial Sequence: Synthetic oligonucleotide
  Sense strand starting at position 480 of SEQ ID NO: 915205
cccucaguagauugaauga

SEQ ID NO: 1062059 - RNA, 19 nt, Artificial Sequence
  Description of Artificial Sequence: Synthetic oligonucleotide
  Antisense strand to SEQ ID NO: 1062058
ucauucaaucuacugaggg

SEQ ID NO: 1062060 - RNA, 19 nt, Artificial Sequence
  Description of Artificial Sequence: Synthetic oligonucleotide
  Sense strand starting at position 585 of SEQ ID NO: 915205
ucagaauaaugucuaagca

SEQ ID NO: 1062061 - RNA, 19 nt, Artificial Sequence
  Description of Artificial Sequence: Synthetic oligonucleotide
  Antisense strand to SEQ ID NO: 1062060
ugcuuagacauuauucuga

SEQ ID NO: 1062062 - RNA, 19 nt, Artificial Sequence
  Description of Artificial Sequence: Synthetic oligonucleotide
  Sense strand starting at position 902 of SEQ ID NO: 915205
uggacauaauguuuccuuu

SEQ ID NO: 1062063 - RNA, 19 nt, Artificial Sequence
  Description of Artificial Sequence: Synthetic oligonucleotide
  Antisense strand to SEQ ID NO: 1062062
aaaggaaacauuaugucca

SEQ ID NO: 1062064 - RNA, 19 nt, Artificial Sequence
  Description of Artificial Sequence: Synthetic oligonucleotide
  Sense strand starting at position 976 of SEQ ID NO: 915205
uauuguggaccuuaaaugu

SEQ ID NO: 1062065 - RNA, 19 nt, Artificial Sequence
  Description of Artificial Sequence: Synthetic oligonucleotide
  Antisense strand to SEQ ID NO: 1062064
acauuuaagguccacaaua

SEQ ID NO: 1062066 - RNA, 19 nt, Artificial Sequence
  Description of Artificial Sequence: Synthetic oligonucleotide
  Sense strand starting at position 980 of SEQ ID NO: 915205
guggaccuuaaaugugauu

SEQ ID NO: 1062067 - RNA, 19 nt, Artificial Sequence
  Description of Artificial Sequence: Synthetic oligonucleotide
  Antisense strand to SEQ ID NO: 1062066
aaucacauuuaagguccac

SEQ ID NO: 1062068 - RNA, 19 nt, Artificial Sequence
  Description of Artificial Sequence: Synthetic oligonucleotide
  Sense strand starting at position 1119 of SEQ ID NO: 915205
uuccuuguuccucagacua

SEQ ID NO: 1062069 - RNA, 19 nt, Artificial Sequence
  Description of Artificial Sequence: Synthetic oligonucleotide
  Antisense strand to SEQ ID NO: 1062068
uagucugaggaacaaggaa

SEQ ID NO: 1062070 - RNA, 19 nt, Artificial Sequence
  Description of Artificial Sequence: Synthetic oligonucleotide
  Sense strand starting at position 1223 of SEQ ID NO: 915205
guuguaaguacaugaagau

SEQ ID NO: 1062071 - RNA, 19 nt, Artificial Sequence
  Description of Artificial Sequence: Synthetic oligonucleotide
  Antisense strand to SEQ ID NO: 1062070
aucuucauguacuuacaac

SEQ ID NO: 1062072 - RNA, 19 nt, Artificial Sequence
  Description of Artificial Sequence: Synthetic oligonucleotide
  Sense strand starting at position 1296 of SEQ ID NO: 915205
aggcuucugguauacugaa

SEQ ID NO: 1062073 - RNA, 19 nt, Artificial Sequence
  Description of Artificial Sequence: Synthetic oligonucleotide
  Antisense strand to SEQ ID NO: 1062072
uucaguauaccagaagccu

SEQ ID NO: 1062074 - RNA, 19 nt, Artificial Sequence
  Description of Artificial Sequence: Synthetic oligonucleotide
  Sense strand starting at position 1344 of SEQ ID NO: 915205
aaugaauguguaggauauc

SEQ ID NO: 1062075 - RNA, 19 nt, Artificial Sequence
  Description of Artificial Sequence: Synthetic oligonucleotide
  Antisense strand to SEQ ID NO: 1062074
gauauccuacacauucauu

SEQ ID NO: 1062076 - RNA, 19 nt, Artificial Sequence
  Description of Artificial Sequence: Synthetic oligonucleotide
  Sense strand starting at position 1412 of SEQ ID NO: 915205
gaacaagcucgcuaauaug

SEQ ID NO: 1062077 - RNA, 19 nt, Artificial Sequence
  Description of Artificial Sequence: Synthetic oligonucleotide
  Antisense strand to SEQ ID NO: 1062076
cauauuagcgagcuuguuc

SEQ ID NO: 1062078 - RNA, 19 nt, Artificial Sequence
  Description of Artificial Sequence: Synthetic oligonucleotide
  Sense strand starting at position 1421 of SEQ ID NO: 915205
cgcuaauaugucuaucaga

SEQ ID NO: 1062079 - RNA, 19 nt, Artificial Sequence
  Description of Artificial Sequence: Synthetic oligonucleotide
  Antisense strand to SEQ ID NO: 1062078
ucugauagacauauuagcg

SEQ ID NO: 1062080 - RNA, 19 nt, Artificial Sequence
  Description of Artificial Sequence: Synthetic oligonucleotide
  Sense strand starting at position 1451 of SEQ ID NO: 915205
ccaugacugcuggaauauc

SEQ ID NO: 1062081 - RNA, 19 nt, Artificial Sequence
  Description of Artificial Sequence: Synthetic oligonucleotide
  Antisense strand to SEQ ID NO: 1062080
gauauuccagcagucaugg

SEQ ID NO: 1062082 - RNA, 19 nt, Artificial Sequence
  Description of Artificial Sequence: Synthetic oligonucleotide
  Sense strand starting at position 1727 of SEQ ID NO: 915205
aagagaugaccuugucuuc

SEQ ID NO: 1062083 - RNA, 19 nt, Artificial Sequence
  Description of Artificial Sequence: Synthetic oligonucleotide
  Antisense strand to SEQ ID NO: 1062082
gaagacaaggucaucucuu

SEQ ID NO: 1062084 - RNA, 19 nt, Artificial Sequence
  Description of Artificial Sequence: Synthetic oligonucleotide
  Sense strand starting at position 1730 of SEQ ID NO: 915205
agaugaccuugucuucuau

SEQ ID NO: 1062085 - RNA, 19 nt, Artificial Sequence
  Description of Artificial Sequence: Synthetic oligonucleotide
  Antisense strand to SEQ ID NO: 1062084
auagaagacaaggucaucu

SEQ ID NO: 1062086 - RNA, 19 nt, Artificial Sequence
  Description of Artificial Sequence: Synthetic oligonucleotide
  Sense strand starting at position 1736 of SEQ ID NO: 915205
ccuugucuucuauaaggaa

SEQ ID NO: 1062087 - RNA, 19 nt, Artificial Sequence
  Description of Artificial Sequence: Synthetic oligonucleotide
  Antisense strand to SEQ ID NO: 1062086
uuccuuauagaagacaagg

SEQ ID NO: 1062088 - RNA, 19 nt, Artificial Sequence
  Description of Artificial Sequence: Synthetic oligonucleotide
  Sense strand starting at position 1751 of SEQ ID NO: 915205
ggaauccagccaugacgau

SEQ ID NO: 1062089 - RNA, 19 nt, Artificial Sequence
  Description of Artificial Sequence: Synthetic oligonucleotide
  Antisense strand to SEQ ID NO: 1062088
aucgucauggcuggauucc

SEQ ID NO: 1062090 - RNA, 19 nt, Artificial Sequence
  Description of Artificial Sequence: Synthetic oligonucleotide
  Sense strand starting at position 1880 of SEQ ID NO: 915205
gguuuccaaccagagugau

SEQ ID NO: 1062091 - RNA, 19 nt, Artificial Sequence
  Description of Artificial Sequence: Synthetic oligonucleotide
  Antisense strand to SEQ ID NO: 1062090
aucacucugguuggaaacc

SEQ ID NO: 1062092 - RNA, 19 nt, Artificial Sequence
  Description of Artificial Sequence: Synthetic oligonucleotide
  Sense strand starting at position 1883 of SEQ ID NO: 915205
uuccaaccagagugauaau

SEQ ID NO: 1062093 - RNA, 19 nt, Artificial Sequence
  Description of Artificial Sequence: Synthetic oligonucleotide
  Antisense strand to SEQ ID NO: 1062092
auuaucacucugguuggaa

SEQ ID NO: 1062094 - RNA, 19 nt, Artificial Sequence
  Description of Artificial Sequence: Synthetic oligonucleotide
  Sense strand starting at position 1963 of SEQ ID NO: 915205
agaagaaugaauuguguua

SEQ ID NO: 1062095 - RNA, 19 nt, Artificial Sequence
  Description of Artificial Sequence: Synthetic oligonucleotide
  Antisense strand to SEQ ID NO: 1062094
uaacacaauucauucuucu

SEQ ID NO: 1062096 - RNA, 19 nt, Artificial Sequence
  Description of Artificial Sequence: Synthetic oligonucleotide
  Sense strand starting at position 1977 of SEQ ID NO: 915205
uguuacuucugucuuauuu

SEQ ID NO: 1062097 - RNA, 19 nt, Artificial Sequence
  Description of Artificial Sequence: Synthetic oligonucleotide
  Antisense strand to SEQ ID NO: 1062096
aaauaagacagaaguaaca

SEQ ID NO: 1062098 - RNA, 19 nt, Artificial Sequence
  Description of Artificial Sequence: Synthetic oligonucleotide
  Sense strand starting at position 2163 of SEQ ID NO: 915205
ccaaaugcagugcauuaau

SEQ ID NO: 1062099 - RNA, 19 nt, Artificial Sequence
  Description of Artificial Sequence: Synthetic oligonucleotide
  Antisense strand to SEQ ID NO: 1062098
auuaaugcacugcauuugg

SEQ ID NO: 1062100 - RNA, 19 nt, Artificial Sequence
  Description of Artificial Sequence: Synthetic oligonucleotide
  Sense strand starting at position 2208 of SEQ ID NO: 915205
ugaagaaucuuaguagauu

SEQ ID NO: 1062101 - RNA, 19 nt, Artificial Sequence
  Description of Artificial Sequence: Synthetic oligonucleotide
  Antisense strand to SEQ ID NO: 1062100
aaucuacuaagauucuuca

SEQ ID NO: 1062102 - RNA, 19 nt, Artificial Sequence
  Description of Artificial Sequence: Synthetic oligonucleotide
  Sense strand starting at position 2217 of SEQ ID NO: 915205
uuaguagauuaucuacaca

SEQ ID NO: 1062103 - RNA, 19 nt, Artificial Sequence
  Description of Artificial Sequence: Synthetic oligonucleotide
  Antisense strand to SEQ ID NO: 1062102
uguguagauaaucuacuaa

SEQ ID NO: 1062104 - RNA, 19 nt, Artificial Sequence
  Description of Artificial Sequence: Synthetic oligonucleotide
  Sense strand starting at position 2295 of SEQ ID NO: 915205
augacucaucuagaugcau

SEQ ID NO: 1062105 - RNA, 19 nt, Artificial Sequence
  Description of Artificial Sequence: Synthetic oligonucleotide
  Antisense strand to SEQ ID NO: 1062104
augcaucuagaugagucau

SEQ ID NO: 1062106 - RNA, 19 nt, Artificial Sequence
  Description of Artificial Sequence: Synthetic oligonucleotide
  Sense strand starting at position 2470 of SEQ ID NO: 915205
acaggagguugaguaacau

SEQ ID NO: 1062107 - RNA, 19 nt, Artificial Sequence
  Description of Artificial Sequence: Synthetic oligonucleotide
  Antisense strand to SEQ ID NO: 1062106
auguuacucaaccuccugu

SEQ ID NO: 1062108 - RNA, 19 nt, Artificial Sequence
  Description of Artificial Sequence: Synthetic oligonucleotide
  Sense strand starting at position 2790 of SEQ ID NO: 915205
gagcuugaguucuugaaag

SEQ ID NO: 1062109 - RNA, 19 nt, Artificial Sequence
  Description of Artificial Sequence: Synthetic oligonucleotide
  Antisense strand to SEQ ID NO: 1062108
cuuucaagaacucaagcuc

SEQ ID NO: 1062110 - RNA, 19 nt, Artificial Sequence
  Description of Artificial Sequence: Synthetic oligonucleotide
  Sense strand starting at position 2792 of SEQ ID NO: 915205
gcuugaguucuugaaagag

SEQ ID NO: 1062111 - RNA, 19 nt, Artificial Sequence
  Description of Artificial Sequence: Synthetic oligonucleotide
  Antisense strand to SEQ ID NO: 1062110
cucuuucaagaacucaagc

SEQ ID NO: 1062112 - RNA, 19 nt, Artificial Sequence
  Description of Artificial Sequence: Synthetic oligonucleotide
  Sense strand starting at position 2826 of SEQ ID NO: 915205
cgacuuaccaccugggaau

SEQ ID NO: 1062113 - RNA, 19 nt, Artificial Sequence
  Description of Artificial Sequence: Synthetic oligonucleotide
  Antisense strand to SEQ ID NO: 1062112
auucccaggugguaagucg

SEQ ID NO: 1062114 - RNA, 19 nt, Artificial Sequence
  Description of Artificial Sequence: Synthetic oligonucleotide
  Sense strand starting at position 2837 of SEQ ID NO: 915205
cugggaaucacugguucua

SEQ ID NO: 1062115 - RNA, 19 nt, Artificial Sequence
  Description of Artificial Sequence: Synthetic oligonucleotide
  Antisense strand to SEQ ID NO: 1062114
uagaaccagugauucccag

SEQ ID NO: 1062116 - RNA, 19 nt, Artificial Sequence
  Description of Artificial Sequence: Synthetic oligonucleotide
  Sense strand starting at position 2839 of SEQ ID NO: 915205
gggaaucacugguucuaau

SEQ ID NO: 1062117 - RNA, 19 nt, Artificial Sequence
  Description of Artificial Sequence: Synthetic oligonucleotide
  Antisense strand to SEQ ID NO: 1062116
auuagaaccagugauuccc

SEQ ID NO: 1062118 - RNA, 19 nt, Artificial Sequence
  Description of Artificial Sequence: Synthetic oligonucleotide
  Sense strand starting at position 2899 of SEQ ID NO: 915205
acaguaaugugaccuacuu

SEQ ID NO: 1062119 - RNA, 19 nt, Artificial Sequence
  Description of Artificial Sequence: Synthetic oligonucleotide
  Antisense strand to SEQ ID NO: 1062118
aaguaggucacauuacugu

SEQ ID NO: 1062120 - RNA, 19 nt, Artificial Sequence
  Description of Artificial Sequence: Synthetic oligonucleotide
  Sense strand starting at position 3040 of SEQ ID NO: 915205
ugguuugauaaagguggau

SEQ ID NO: 1062121 - RNA, 19 nt, Artificial Sequence
  Description of Artificial Sequence: Synthetic oligonucleotide
  Antisense strand to SEQ ID NO: 1062120
auccaccuuuaucaaacca

SEQ ID NO: 1062122 - RNA, 19 nt, Artificial Sequence
  Description of Artificial Sequence: Synthetic oligonucleotide
  Sense strand starting at position 3081 of SEQ ID NO: 915205
augggugagcuuugaaauc

SEQ ID NO: 1062123 - RNA, 19 nt, Artificial Sequence
  Description of Artificial Sequence: Synthetic oligonucleotide
  Antisense strand to SEQ ID NO: 1062122
gauuucaaagcucacccau

SEQ ID NO: 1062124 - RNA, 19 nt, Artificial Sequence
  Description of Artificial Sequence: Synthetic oligonucleotide
  Sense strand starting at position 3090 of SEQ ID NO: 915205
cuuugaaaucuugaagcuc

SEQ ID NO: 1062125 - RNA, 19 nt, Artificial Sequence
  Description of Artificial Sequence: Synthetic oligonucleotide
  Antisense strand to SEQ ID NO: 1062124
gagcuucaagauuucaaag

SEQ ID NO: 1062126 - RNA, 19 nt, Artificial Sequence
  Description of Artificial Sequence: Synthetic oligonucleotide
  Sense strand starting at position 3318 of SEQ ID NO: 915205
acuguuauuccauaguuaa

SEQ ID NO: 1062127 - RNA, 19 nt, Artificial Sequence
  Description of Artificial Sequence: Synthetic oligonucleotide
  Antisense strand to SEQ ID NO: 1062126
uuaacuauggaauaacagu

SEQ ID NO: 1062128 - RNA, 19 nt, Artificial Sequence
  Description of Artificial Sequence: Synthetic oligonucleotide
  Sense strand starting at position 3371 of SEQ ID NO: 915205
gggcuaucuuuauuuagcu

SEQ ID NO: 1062129 - RNA, 19 nt, Artificial Sequence
  Description of Artificial Sequence: Synthetic oligonucleotide
  Antisense strand to SEQ ID NO: 1062128
agcuaaauaaagauagccc

SEQ ID NO: 1062130 - RNA, 19 nt, Artificial Sequence
  Description of Artificial Sequence: Synthetic oligonucleotide
  Sense strand starting at position 3395 of SEQ ID NO: 915205
aucugauuugguggcaagu

SEQ ID NO: 1062131 - RNA, 19 nt, Artificial Sequence
  Description of Artificial Sequence: Synthetic oligonucleotide
  Antisense strand to SEQ ID NO: 1062130
acuugccaccaaaucagau

SEQ ID NO: 1062132 - RNA, 19 nt, Artificial Sequence
  Description of Artificial Sequence: Synthetic oligonucleotide
  Sense strand starting at position 3773 of SEQ ID NO: 915205
gauuauggccuccagauuc

SEQ ID NO: 1062133 - RNA, 19 nt, Artificial Sequence
  Description of Artificial Sequence: Synthetic oligonucleotide
  Antisense strand to SEQ ID NO: 1062132
gaaucuggaggccauaauc

SEQ ID NO: 1062134 - RNA, 19 nt, Artificial Sequence
  Description of Artificial Sequence: Synthetic oligonucleotide
  Sense strand starting at position 3835 of SEQ ID NO: 915205
uguaguauuccauaaaucu

SEQ ID NO: 1062135 - RNA, 19 nt, Artificial Sequence
  Description of Artificial Sequence: Synthetic oligonucleotide
  Antisense strand to SEQ ID NO: 1062134
agauuuauggaauacuaca

SEQ ID NO: 1062136 - RNA, 19 nt, Artificial Sequence
  Description of Artificial Sequence: Synthetic oligonucleotide
  Sense strand starting at position 20 of SEQ ID NO: 915206
ugaguacaauaguucuuua

SEQ ID NO: 1062137 - RNA, 19 nt, Artificial Sequence
  Description of Artificial Sequence: Synthetic oligonucleotide
  Antisense strand to SEQ ID NO: 1062136
uaaagaacuauuguacuca

SEQ ID NO: 1062138 - RNA, 19 nt, Artificial Sequence
  Description of Artificial Sequence: Synthetic oligonucleotide
  Sense strand starting at position 337 of SEQ ID NO: 915206
cuuuguaugaugggaaaua

SEQ ID NO: 1062139 - RNA, 19 nt, Artificial Sequence
  Description of Artificial Sequence: Synthetic oligonucleotide
  Antisense strand to SEQ ID NO: 1062138
uauuucccaucauacaaag

SEQ ID NO: 1062140 - RNA, 19 nt, Artificial Sequence
  Description of Artificial Sequence: Synthetic oligonucleotide
  Sense strand starting at position 452 of SEQ ID NO: 915206
accagauaugugugacuuc

SEQ ID NO: 1062141 - RNA, 19 nt, Artificial Sequence
  Description of Artificial Sequence: Synthetic oligonucleotide
  Antisense strand to SEQ ID NO: 1062140
gaagucacacauaucuggu

SEQ ID NO: 1062142 - RNA, 19 nt, Artificial Sequence
  Description of Artificial Sequence: Synthetic oligonucleotide
  Sense strand starting at position 476 of SEQ ID NO: 915206
aggacucuguuaccuuaau

SEQ ID NO: 1062143 - RNA, 19 nt, Artificial Sequence
  Description of Artificial Sequence: Synthetic oligonucleotide
  Antisense strand to SEQ ID NO: 1062142
auuaagguaacagaguccu

SEQ ID NO: 1062144 - RNA, 19 nt, Artificial Sequence
  Description of Artificial Sequence: Synthetic oligonucleotide
  Sense strand starting at position 477 of SEQ ID NO: 915206
ggacucuguuaccuuaaua

SEQ ID NO: 1062145 - RNA, 19 nt, Artificial Sequence
  Description of Artificial Sequence: Synthetic oligonucleotide
  Antisense strand to SEQ ID NO: 1062144
uauuaagguaacagagucc

SEQ ID NO: 1062146 - RNA, 19 nt, Artificial Sequence
  Description of Artificial Sequence: Synthetic oligonucleotide
  Sense strand starting at position 501 of SEQ ID NO: 915206
uugccugaauacucagaua

SEQ ID NO: 1062147 - RNA, 19 nt, Artificial Sequence
  Description of Artificial Sequence: Synthetic oligonucleotide
  Antisense strand to SEQ ID NO: 1062146
uaucugaguauucaggcaa

SEQ ID NO: 1062148 - RNA, 19 nt, Artificial Sequence
  Description of Artificial Sequence: Synthetic oligonucleotide
  Sense strand starting at position 657 of SEQ ID NO: 915206
uugguuguuccacaagaca

SEQ ID NO: 1062149 - RNA, 19 nt, Artificial Sequence
  Description of Artificial Sequence: Synthetic oligonucleotide
  Antisense strand to SEQ ID NO: 1062148
ugucuuguggaacaaccaa

SEQ ID NO: 1062150 - RNA, 19 nt, Artificial Sequence
  Description of Artificial Sequence: Synthetic oligonucleotide
  Sense strand starting at position 691 of SEQ ID NO: 915206
uuguuaaagucacucagga

SEQ ID NO: 1062151 - RNA, 19 nt, Artificial Sequence
  Description of Artificial Sequence: Synthetic oligonucleotide
  Antisense strand to SEQ ID NO: 1062150
uccugagugacuuuaacaa

SEQ ID NO: 1062152 - RNA, 19 nt, Artificial Sequence
  Description of Artificial Sequence: Synthetic oligonucleotide
  Sense strand starting at position 976 of SEQ ID NO: 915206
ucaauugcacuguaagaga

SEQ ID NO: 1062153 - RNA, 19 nt, Artificial Sequence
  Description of Artificial Sequence: Synthetic oligonucleotide
  Antisense strand to SEQ ID NO: 1062152
ucucuuacagugcaauuga

SEQ ID NO: 1062154 - RNA, 19 nt, Artificial Sequence
  Description of Artificial Sequence: Synthetic oligonucleotide
  Sense strand starting at position 984 of SEQ ID NO: 915206
acuguaagagauggguaau

SEQ ID NO: 1062155 - RNA, 19 nt, Artificial Sequence
  Description of Artificial Sequence: Synthetic oligonucleotide
  Antisense strand to SEQ ID NO: 1062154
auuacccaucucuuacagu

SEQ ID NO: 1062156 - RNA, 19 nt, Artificial Sequence
  Description of Artificial Sequence: Synthetic oligonucleotide
  Sense strand starting at position 990 of SEQ ID NO: 915206
agagauggguaaucuguaa

SEQ ID NO: 1062157 - RNA, 19 nt, Artificial Sequence
  Description of Artificial Sequence: Synthetic oligonucleotide
  Antisense strand to SEQ ID NO: 1062156
uuacagauuacccaucucu

SEQ ID NO: 1062158 - RNA, 19 nt, Artificial Sequence
  Description of Artificial Sequence: Synthetic oligonucleotide
  Sense strand starting at position 1990 of SEQ ID NO: 915206
agaugccaucaugauacuu

SEQ ID NO: 1062159 - RNA, 19 nt, Artificial Sequence
  Description of Artificial Sequence: Synthetic oligonucleotide
  Antisense strand to SEQ ID NO: 1062158
aaguaucaugauggcaucu

SEQ ID NO: 1062160 - RNA, 19 nt, Artificial Sequence
  Description of Artificial Sequence: Synthetic oligonucleotide
  Sense strand starting at position 1998 of SEQ ID NO: 915206
ucaugauacuuguuggauu

SEQ ID NO: 1062161 - RNA, 19 nt, Artificial Sequence
  Description of Artificial Sequence: Synthetic oligonucleotide
  Antisense strand to SEQ ID NO: 1062160
aauccaacaaguaucauga

SEQ ID NO: 1062162 - RNA, 19 nt, Artificial Sequence
  Description of Artificial Sequence: Synthetic oligonucleotide
  Sense strand starting at position 2000 of SEQ ID NO: 915206
augauacuuguuggauuaa

SEQ ID NO: 1062163 - RNA, 19 nt, Artificial Sequence
  Description of Artificial Sequence: Synthetic oligonucleotide
  Antisense strand to SEQ ID NO: 1062162
uuaauccaacaaguaucau

SEQ ID NO: 1062164 - RNA, 19 nt, Artificial Sequence
  Description of Artificial Sequence: Synthetic oligonucleotide
  Sense strand starting at position 2085 of SEQ ID NO: 915206
guguuucuaggacaaguga

SEQ ID NO: 1062165 - RNA, 19 nt, Artificial Sequence
  Description of Artificial Sequence: Synthetic oligonucleotide
  Antisense strand to SEQ ID NO: 1062164
ucacuuguccuagaaacac

SEQ ID NO: 1062166 - RNA, 19 nt, Artificial Sequence
  Description of Artificial Sequence: Synthetic oligonucleotide
  Sense strand starting at position 2102 of SEQ ID NO: 915206
gauauagaacagugauucu

SEQ ID NO: 1062167 - RNA, 19 nt, Artificial Sequence
  Description of Artificial Sequence: Synthetic oligonucleotide
  Antisense strand to SEQ ID NO: 1062166
agaaucacuguucuauauc

SEQ ID NO: 1062168 - RNA, 19 nt, Artificial Sequence
  Description of Artificial Sequence: Synthetic oligonucleotide
  Sense strand starting at position 2217 of SEQ ID NO: 915206
ugggaugaggcccacuauu

SEQ ID NO: 1062169 - RNA, 19 nt, Artificial Sequence
  Description of Artificial Sequence: Synthetic oligonucleotide
  Antisense strand to SEQ ID NO: 1062168
aauagugggccucauccca

SEQ ID NO: 1062170 - RNA, 19 nt, Artificial Sequence
  Description of Artificial Sequence: Synthetic oligonucleotide
  Sense strand starting at position 2233 of SEQ ID NO: 915206
auuugugguuuagucaagu

SEQ ID NO: 1062171 - RNA, 19 nt, Artificial Sequence
  Description of Artificial Sequence: Synthetic oligonucleotide
  Antisense strand to SEQ ID NO: 1062170
acuugacuaaaccacaaau

SEQ ID NO: 1062172 - RNA, 19 nt, Artificial Sequence
  Description of Artificial Sequence: Synthetic oligonucleotide
  Sense strand starting at position 2243 of SEQ ID NO: 915206
uagucaagucuccagguga

SEQ ID NO: 1062173 - RNA, 19 nt, Artificial Sequence
  Description of Artificial Sequence: Synthetic oligonucleotide
  Antisense strand to SEQ ID NO: 1062172
ucaccuggagacuugacua

SEQ ID NO: 1062174 - RNA, 19 nt, Artificial Sequence
  Description of Artificial Sequence: Synthetic oligonucleotide
  Sense strand starting at position 2451 of SEQ ID NO: 915206
gaggaucaaguaggugauu

SEQ ID NO: 1062175 - RNA, 19 nt, Artificial Sequence
  Description of Artificial Sequence: Synthetic oligonucleotide
  Antisense strand to SEQ ID NO: 1062174
aaucaccuacuugauccuc

SEQ ID NO: 1062176 - RNA, 19 nt, Artificial Sequence
  Description of Artificial Sequence: Synthetic oligonucleotide
  Sense strand starting at position 2464 of SEQ ID NO: 915206
gugauuuagcaccgccaau

SEQ ID NO: 1062177 - RNA, 19 nt, Artificial Sequence
  Description of Artificial Sequence: Synthetic oligonucleotide
  Antisense strand to SEQ ID NO: 1062176
auuggcggugcuaaaucac

SEQ ID NO: 1062178 - RNA, 19 nt, Artificial Sequence
  Description of Artificial Sequence: Synthetic oligonucleotide
  Sense strand starting at position 2595 of SEQ ID NO: 915206
gcaccuaauccucaagagu

SEQ ID NO: 1062179 - RNA, 19 nt, Artificial Sequence
  Description of Artificial Sequence: Synthetic oligonucleotide
  Antisense strand to SEQ ID NO: 1062178
acucuugaggauuaggugc

SEQ ID NO: 1062180 - RNA, 19 nt, Artificial Sequence
  Description of Artificial Sequence: Synthetic oligonucleotide
  Sense strand starting at position 2631 of SEQ ID NO: 915206
uucuaagauguuuauguag

SEQ ID NO: 1062181 - RNA, 19 nt, Artificial Sequence
  Description of Artificial Sequence: Synthetic oligonucleotide
  Antisense strand to SEQ ID NO: 1062180
cuacauaaacaucuuagaa

SEQ ID NO: 1062182 - RNA, 19 nt, Artificial Sequence
  Description of Artificial Sequence: Synthetic oligonucleotide
  Sense strand starting at position 2788 of SEQ ID NO: 915206
uaggucacaucuucugaga

SEQ ID NO: 1062183 - RNA, 19 nt, Artificial Sequence
  Description of Artificial Sequence: Synthetic oligonucleotide
  Antisense strand to SEQ ID NO: 1062182
ucucagaagaugugaccua

SEQ ID NO: 1062184 - RNA, 19 nt, Artificial Sequence
  Description of Artificial Sequence: Synthetic oligonucleotide
  Sense strand starting at position 2856 of SEQ ID NO: 915206
gcuaauacagaauauguua

SEQ ID NO: 1062185 - RNA, 19 nt, Artificial Sequence
  Description of Artificial Sequence: Synthetic oligonucleotide
  Antisense strand to SEQ ID NO: 1062184
uaacauauucuguauuagc

SEQ ID NO: 1062186 - RNA, 19 nt, Artificial Sequence
  Description of Artificial Sequence: Synthetic oligonucleotide
  Sense strand starting at position 2880 of SEQ ID NO: 915206
auagaaacaucuguaguug

SEQ ID NO: 1062187 - RNA, 19 nt, Artificial Sequence
  Description of Artificial Sequence: Synthetic oligonucleotide
  Antisense strand to SEQ ID NO: 1062186
caacuacagauguuucuau

SEQ ID NO: 1062188 - RNA, 19 nt, Artificial Sequence
  Description of Artificial Sequence: Synthetic oligonucleotide
  Sense strand starting at position 2881 of SEQ ID NO: 915206
uagaaacaucuguaguugu

SEQ ID NO: 1062189 - RNA, 19 nt, Artificial Sequence
  Description of Artificial Sequence: Synthetic oligonucleotide
  Antisense strand to SEQ ID NO: 1062188
acaacuacagauguuucua

SEQ ID NO: 1062190 - RNA, 19 nt, Artificial Sequence
  Description of Artificial Sequence: Synthetic oligonucleotide
  Sense strand starting at position 2927 of SEQ ID NO: 915206
cucugauacccugaaaguu

SEQ ID NO: 1062191 - RNA, 19 nt, Artificial Sequence
  Description of Artificial Sequence: Synthetic oligonucleotide
  Antisense strand to SEQ ID NO: 1062190
aacuuucaggguaucagag

SEQ ID NO: 1062192 - RNA, 19 nt, Artificial Sequence
  Description of Artificial Sequence: Synthetic oligonucleotide
  Sense strand starting at position 3034 of SEQ ID NO: 915206
auugaaauuagugguaaga

SEQ ID NO: 1062193 - RNA, 19 nt, Artificial Sequence
  Description of Artificial Sequence: Synthetic oligonucleotide
  Antisense strand to SEQ ID NO: 1062192
ucuuaccacuaauuucaau

SEQ ID NO: 1062194 - RNA, 19 nt, Artificial Sequence
  Description of Artificial Sequence: Synthetic oligonucleotide
  Sense strand starting at position 3457 of SEQ ID NO: 915206
aguaaauggacuuguuaug

SEQ ID NO: 1062195 - RNA, 19 nt, Artificial Sequence
  Description of Artificial Sequence: Synthetic oligonucleotide
  Antisense strand to SEQ ID NO: 1062194
cauaacaaguccauuuacu

SEQ ID NO: 1062196 - RNA, 19 nt, Artificial Sequence
  Description of Artificial Sequence: Synthetic oligonucleotide
  Sense strand starting at position 3509 of SEQ ID NO: 915206
agcagaaauccauguauau

SEQ ID NO: 1062197 - RNA, 19 nt, Artificial Sequence
  Description of Artificial Sequence: Synthetic oligonucleotide
  Antisense strand to SEQ ID NO: 1062196
auauacauggauuucugcu

SEQ ID NO: 1062198 - RNA, 19 nt, Artificial Sequence
  Description of Artificial Sequence: Synthetic oligonucleotide
  Sense strand starting at position 3544 of SEQ ID NO: 915206
ucagcuuucccugaaauga

SEQ ID NO: 1062199 - RNA, 19 nt, Artificial Sequence
  Description of Artificial Sequence: Synthetic oligonucleotide
  Antisense strand to SEQ ID NO: 1062198
ucauuucagggaaagcuga

SEQ ID NO: 1062200 - RNA, 19 nt, Artificial Sequence
  Description of Artificial Sequence: Synthetic oligonucleotide
  Sense strand starting at position 3570 of SEQ ID NO: 915206
gcuccaguccuaugcauuu

SEQ ID NO: 1062201 - RNA, 19 nt, Artificial Sequence
  Description of Artificial Sequence: Synthetic oligonucleotide
  Antisense strand to SEQ ID NO: 1062200
aaaugcauaggacuggagc

SEQ ID NO: 1062202 - RNA, 19 nt, Artificial Sequence
  Description of Artificial Sequence: Synthetic oligonucleotide
  Sense strand starting at position 3727 of SEQ ID NO: 915206
aacguuugaccagaguagu

SEQ ID NO: 1062203 - RNA, 19 nt, Artificial Sequence
  Description of Artificial Sequence: Synthetic oligonucleotide
  Antisense strand to SEQ ID NO: 1062202
acuacucuggucaaacguu

SEQ ID NO: 1062204 - RNA, 19 nt, Artificial Sequence
  Description of Artificial Sequence: Synthetic oligonucleotide
  Sense strand starting at position 3730 of SEQ ID NO: 915206
guuugaccagaguagugaa

SEQ ID NO: 1062205 - RNA, 19 nt, Artificial Sequence
  Description of Artificial Sequence: Synthetic oligonucleotide
  Antisense strand to SEQ ID NO: 1062204
uucacuacucuggucaaac

SEQ ID NO: 1062206 - RNA, 19 nt, Artificial Sequence
  Description of Artificial Sequence: Synthetic oligonucleotide
  Sense strand starting at position 3764 of SEQ ID NO: 915206
uugggauacuuggcacagu

SEQ ID NO: 1062207 - RNA, 19 nt, Artificial Sequence
  Description of Artificial Sequence: Synthetic oligonucleotide
  Antisense strand to SEQ ID NO: 1062206
acugugccaaguaucccaa

SEQ ID NO: 1062208 - RNA, 19 nt, Artificial Sequence
  Description of Artificial Sequence: Synthetic oligonucleotide
  Sense strand starting at position 3767 of SEQ ID NO: 915206
ggauacuuggcacaguuaa

SEQ ID NO: 1062209 - RNA, 19 nt, Artificial Sequence
  Description of Artificial Sequence: Synthetic oligonucleotide
  Antisense strand to SEQ ID NO: 1062208
uuaacugugccaaguaucc

SEQ ID NO: 1062210 - RNA, 19 nt, Artificial Sequence
  Description of Artificial Sequence: Synthetic oligonucleotide
  Sense strand starting at position 3861 of SEQ ID NO: 915206
acaucaauggguugucauu

SEQ ID NO: 1062211 - RNA, 19 nt, Artificial Sequence
  Description of Artificial Sequence: Synthetic oligonucleotide
  Antisense strand to SEQ ID NO: 1062210
aaugacaacccauugaugu

SEQ ID NO: 1062212 - RNA, 19 nt, Artificial Sequence
  Description of Artificial Sequence: Synthetic oligonucleotide
  Sense strand starting at position 3882 of SEQ ID NO: 915206
gcuuguacucaagacaaag

SEQ ID NO: 1062213 - RNA, 19 nt, Artificial Sequence
  Description of Artificial Sequence: Synthetic oligonucleotide
  Antisense strand to SEQ ID NO: 1062212
cuuugucuugaguacaagc

SEQ ID NO: 1062214 - RNA, 19 nt, Artificial Sequence
  Description of Artificial Sequence: Synthetic oligonucleotide
  Sense strand starting at position 3977 of SEQ ID NO: 915206
ccacuagcggugucuguau

SEQ ID NO: 1062215 - RNA, 19 nt, Artificial Sequence
  Description of Artificial Sequence: Synthetic oligonucleotide
  Antisense strand to SEQ ID NO: 1062214
auacagacaccgcuagugg

SEQ ID NO: 1062216 - RNA, 19 nt, Artificial Sequence
  Description of Artificial Sequence: Synthetic oligonucleotide
  Sense strand starting at position 20 of SEQ ID NO: 915207
agaugauucugacuacugu

SEQ ID NO: 1062217 - RNA, 19 nt, Artificial Sequence
  Description of Artificial Sequence: Synthetic oligonucleotide
  Antisense strand to SEQ ID NO: 1062216
acaguagucagaaucaucu

SEQ ID NO: 1062218 - RNA, 19 nt, Artificial Sequence
  Description of Artificial Sequence: Synthetic oligonucleotide
  Sense strand starting at position 41 of SEQ ID NO: 915207
auugcaguccauugagaag

SEQ ID NO: 1062219 - RNA, 19 nt, Artificial Sequence
  Description of Artificial Sequence: Synthetic oligonucleotide
  Antisense strand to SEQ ID NO: 1062218
cuucucaauggacugcaau

SEQ ID NO: 1062220 - RNA, 19 nt, Artificial Sequence
  Description of Artificial Sequence: Synthetic oligonucleotide
  Sense strand starting at position 62 of SEQ ID NO: 915207
caugguaacugguugauga

SEQ ID NO: 1062221 - RNA, 19 nt, Artificial Sequence
  Description of Artificial Sequence: Synthetic oligonucleotide
  Antisense strand to SEQ ID NO: 1062220
ucaucaaccaguuaccaug

SEQ ID NO: 1062222 - RNA, 19 nt, Artificial Sequence
  Description of Artificial Sequence: Synthetic oligonucleotide
  Sense strand starting at position 63 of SEQ ID NO: 915207
augguaacugguugaugau

SEQ ID NO: 1062223 - RNA, 19 nt, Artificial Sequence
  Description of Artificial Sequence: Synthetic oligonucleotide
  Antisense strand to SEQ ID NO: 1062222
aucaucaaccaguuaccau

SEQ ID NO: 1062224 - RNA, 19 nt, Artificial Sequence
  Description of Artificial Sequence: Synthetic oligonucleotide
  Sense strand starting at position 64 of SEQ ID NO: 915207
ugguaacugguugaugaua

SEQ ID NO: 1062225 - RNA, 19 nt, Artificial Sequence
  Description of Artificial Sequence: Synthetic oligonucleotide
  Antisense strand to SEQ ID NO: 1062224
uaucaucaaccaguuacca

SEQ ID NO: 1062226 - RNA, 19 nt, Artificial Sequence
  Description of Artificial Sequence: Synthetic oligonucleotide
  Sense strand starting at position 100 of SEQ ID NO: 915207
uagugaugaucauucugau

SEQ ID NO: 1062227 - RNA, 19 nt, Artificial Sequence
  Description of Artificial Sequence: Synthetic oligonucleotide
  Antisense strand to SEQ ID NO: 1062226
aucagaaugaucaucacua

SEQ ID NO: 1062228 - RNA, 19 nt, Artificial Sequence
  Description of Artificial Sequence: Synthetic oligonucleotide
  Sense strand starting at position 106 of SEQ ID NO: 915207
ugaucauucugaucucuga

SEQ ID NO: 1062229 - RNA, 19 nt, Artificial Sequence
  Description of Artificial Sequence: Synthetic oligonucleotide
  Antisense strand to SEQ ID NO: 1062228
ucagagaucagaaugauca

SEQ ID NO: 1062230 - RNA, 19 nt, Artificial Sequence
  Description of Artificial Sequence: Synthetic oligonucleotide
  Sense strand starting at position 244 of SEQ ID NO: 915207
aguugugauuguccaauuu

SEQ ID NO: 1062231 - RNA, 19 nt, Artificial Sequence
  Description of Artificial Sequence: Synthetic oligonucleotide
  Antisense strand to SEQ ID NO: 1062230
aaauuggacaaucacaacu

SEQ ID NO: 1062232 - RNA, 19 nt, Artificial Sequence
  Description of Artificial Sequence: Synthetic oligonucleotide
  Sense strand starting at position 300 of SEQ ID NO: 915207
cucauuaaucaguagguga

SEQ ID NO: 1062233 - RNA, 19 nt, Artificial Sequence
  Description of Artificial Sequence: Synthetic oligonucleotide
  Antisense strand to SEQ ID NO: 1062232
ucaccuacugauuaaugag

SEQ ID NO: 1062234 - RNA, 19 nt, Artificial Sequence
  Description of Artificial Sequence: Synthetic oligonucleotide
  Sense strand starting at position 302 of SEQ ID NO: 915207
cauuaaucaguaggugaug

SEQ ID NO: 1062235 - RNA, 19 nt, Artificial Sequence
  Description of Artificial Sequence: Synthetic oligonucleotide
  Antisense strand to SEQ ID NO: 1062234
caucaccuacugauuaaug

SEQ ID NO: 1062236 - RNA, 19 nt, Artificial Sequence
  Description of Artificial Sequence: Synthetic oligonucleotide
  Sense strand starting at position 580 of SEQ ID NO: 915207
gagacaaucugauuagcug

SEQ ID NO: 1062237 - RNA, 19 nt, Artificial Sequence
  Description of Artificial Sequence: Synthetic oligonucleotide
  Antisense strand to SEQ ID NO: 1062236
cagcuaaucagauugucuc

SEQ ID NO: 1062238 - RNA, 19 nt, Artificial Sequence
  Description of Artificial Sequence: Synthetic oligonucleotide
  Sense strand starting at position 604 of SEQ ID NO: 915207
aguauucuaucuuucugga

SEQ ID NO: 1062239 - RNA, 19 nt, Artificial Sequence
  Description of Artificial Sequence: Synthetic oligonucleotide
  Antisense strand to SEQ ID NO: 1062238
uccagaaagauagaauacu

SEQ ID NO: 1062240 - RNA, 19 nt, Artificial Sequence
  Description of Artificial Sequence: Synthetic oligonucleotide
  Sense strand starting at position 609 of SEQ ID NO: 915207
ucuaucuuucuggagcauu

SEQ ID NO: 1062241 - RNA, 19 nt, Artificial Sequence
  Description of Artificial Sequence: Synthetic oligonucleotide
  Antisense strand to SEQ ID NO: 1062240
aaugcuccagaaagauaga

SEQ ID NO: 1062242 - RNA, 19 nt, Artificial Sequence
  Description of Artificial Sequence: Synthetic oligonucleotide
  Sense strand starting at position 740 of SEQ ID NO: 915207
uggagaauguugcuugaau

SEQ ID NO: 1062243 - RNA, 19 nt, Artificial Sequence
  Description of Artificial Sequence: Synthetic oligonucleotide
  Antisense strand to SEQ ID NO: 1062242
auucaagcaacauucucca

SEQ ID NO: 1062244 - RNA, 19 nt, Artificial Sequence
  Description of Artificial Sequence: Synthetic oligonucleotide
  Sense strand starting at position 741 of SEQ ID NO: 915207
ggagaauguugcuugaauu

SEQ ID NO: 1062245 - RNA, 19 nt, Artificial Sequence
  Description of Artificial Sequence: Synthetic oligonucleotide
  Antisense strand to SEQ ID NO: 1062244
aauucaagcaacauucucc

SEQ ID NO: 1062246 - RNA, 19 nt, Artificial Sequence
  Description of Artificial Sequence: Synthetic oligonucleotide
  Sense strand starting at position 748 of SEQ ID NO: 915207
guugcuugaauuuguauag

SEQ ID NO: 1062247 - RNA, 19 nt, Artificial Sequence
  Description of Artificial Sequence: Synthetic oligonucleotide
  Antisense strand to SEQ ID NO: 1062246
cuauacaaauucaagcaac

SEQ ID NO: 1062248 - RNA, 19 nt, Artificial Sequence
  Description of Artificial Sequence: Synthetic oligonucleotide
  Sense strand starting at position 760 of SEQ ID NO: 915207
uguauaguauuuguuacca

SEQ ID NO: 1062249 - RNA, 19 nt, Artificial Sequence
  Description of Artificial Sequence: Synthetic oligonucleotide
  Antisense strand to SEQ ID NO: 1062248
ugguaacaaauacuauaca

SEQ ID NO: 1062250 - RNA, 19 nt, Artificial Sequence
  Description of Artificial Sequence: Synthetic oligonucleotide
  Sense strand starting at position 824 of SEQ ID NO: 915207
uuugaaauaugguuucuca

SEQ ID NO: 1062251 - RNA, 19 nt, Artificial Sequence
  Description of Artificial Sequence: Synthetic oligonucleotide
  Antisense strand to SEQ ID NO: 1062250
ugagaaaccauauuucaaa

SEQ ID NO: 1062252 - RNA, 19 nt, Artificial Sequence
  Description of Artificial Sequence: Synthetic oligonucleotide
  Sense strand starting at position 982 of SEQ ID NO: 915207
ugcucuaggcuuuagaaac

SEQ ID NO: 1062253 - RNA, 19 nt, Artificial Sequence
  Description of Artificial Sequence: Synthetic oligonucleotide
  Antisense strand to SEQ ID NO: 1062252
guuucuaaagccuagagca

SEQ ID NO: 1062254 - RNA, 19 nt, Artificial Sequence
  Description of Artificial Sequence: Synthetic oligonucleotide
  Sense strand starting at position 1046 of SEQ ID NO: 915207
uugagacugguucagugaa

SEQ ID NO: 1062255 - RNA, 19 nt, Artificial Sequence
  Description of Artificial Sequence: Synthetic oligonucleotide
  Antisense strand to SEQ ID NO: 1062254
uucacugaaccagucucaa

SEQ ID NO: 1062256 - RNA, 19 nt, Artificial Sequence
  Description of Artificial Sequence: Synthetic oligonucleotide
  Sense strand starting at position 2061 of SEQ ID NO: 915207
agugauaauuaugucauga

SEQ ID NO: 1062257 - RNA, 19 nt, Artificial Sequence
  Description of Artificial Sequence: Synthetic oligonucleotide
  Antisense strand to SEQ ID NO: 1062256
ucaugacauaauuaucacu

SEQ ID NO: 1062258 - RNA, 19 nt, Artificial Sequence
  Description of Artificial Sequence: Synthetic oligonucleotide
  Sense strand starting at position 2110 of SEQ ID NO: 915207
ggaauaguuacugguccua

SEQ ID NO: 1062259 - RNA, 19 nt, Artificial Sequence
  Description of Artificial Sequence: Synthetic oligonucleotide
  Antisense strand to SEQ ID NO: 1062258
uaggaccaguaacuauucc

SEQ ID NO: 1062260 - RNA, 19 nt, Artificial Sequence
  Description of Artificial Sequence: Synthetic oligonucleotide
  Sense strand starting at position 2283 of SEQ ID NO: 915207
auauguguacaguaguaua

SEQ ID NO: 1062261 - RNA, 19 nt, Artificial Sequence
  Description of Artificial Sequence: Synthetic oligonucleotide
  Antisense strand to SEQ ID NO: 1062260
uauacuacuguacacauau

SEQ ID NO: 1062262 - RNA, 19 nt, Artificial Sequence
  Description of Artificial Sequence: Synthetic oligonucleotide
  Sense strand starting at position 2296 of SEQ ID NO: 915207
aguauacaugucuacacau

SEQ ID NO: 1062263 - RNA, 19 nt, Artificial Sequence
  Description of Artificial Sequence: Synthetic oligonucleotide
  Antisense strand to SEQ ID NO: 1062262
auguguagacauguauacu

SEQ ID NO: 1062264 - RNA, 19 nt, Artificial Sequence
  Description of Artificial Sequence: Synthetic oligonucleotide
  Sense strand starting at position 2315 of SEQ ID NO: 915207
uaacuaguagcaugacaug

SEQ ID NO: 1062265 - RNA, 19 nt, Artificial Sequence
  Description of Artificial Sequence: Synthetic oligonucleotide
  Antisense strand to SEQ ID NO: 1062264
caugucaugcuacuaguua

SEQ ID NO: 1062266 - RNA, 19 nt, Artificial Sequence
  Description of Artificial Sequence: Synthetic oligonucleotide
  Sense strand starting at position 2324 of SEQ ID NO: 915207
gcaugacaugcacauaacu

SEQ ID NO: 1062267 - RNA, 19 nt, Artificial Sequence
  Description of Artificial Sequence: Synthetic oligonucleotide
  Antisense strand to SEQ ID NO: 1062266
aguuaugugcaugucaugc

SEQ ID NO: 1062268 - RNA, 19 nt, Artificial Sequence
  Description of Artificial Sequence: Synthetic oligonucleotide
  Sense strand starting at position 2430 of SEQ ID NO: 915207
gcuacuguauuuguuuaua

SEQ ID NO: 1062269 - RNA, 19 nt, Artificial Sequence
  Description of Artificial Sequence: Synthetic oligonucleotide
  Antisense strand to SEQ ID NO: 1062268
uauaaacaaauacaguagc

SEQ ID NO: 1062270 - RNA, 19 nt, Artificial Sequence
  Description of Artificial Sequence: Synthetic oligonucleotide
  Sense strand starting at position 2628 of SEQ ID NO: 915207
uuugaccucuugguggaau

SEQ ID NO: 1062271 - RNA, 19 nt, Artificial Sequence
  Description of Artificial Sequence: Synthetic oligonucleotide
  Antisense strand to SEQ ID NO: 1062270
auuccaccaagaggucaaa

SEQ ID NO: 1062272 - RNA, 19 nt, Artificial Sequence
  Description of Artificial Sequence: Synthetic oligonucleotide
  Sense strand starting at position 2660 of SEQ ID NO: 915207
ggguuuaugacuuaagggu

SEQ ID NO: 1062273 - RNA, 19 nt, Artificial Sequence
  Description of Artificial Sequence: Synthetic oligonucleotide
  Antisense strand to SEQ ID NO: 1062272
acccuuaagucauaaaccc

SEQ ID NO: 1062274 - RNA, 19 nt, Artificial Sequence
  Description of Artificial Sequence: Synthetic oligonucleotide
  Sense strand starting at position 2684 of SEQ ID NO: 915207
ucuacuauagcucagguau

SEQ ID NO: 1062275 - RNA, 19 nt, Artificial Sequence
  Description of Artificial Sequence: Synthetic oligonucleotide
  Antisense strand to SEQ ID NO: 1062274
auaccugagcuauaguaga

SEQ ID NO: 1062276 - RNA, 19 nt, Artificial Sequence
  Description of Artificial Sequence: Synthetic oligonucleotide
  Sense strand starting at position 2695 of SEQ ID NO: 915207
ucagguauugcauaaguau

SEQ ID NO: 1062277 - RNA, 19 nt, Artificial Sequence
  Description of Artificial Sequence: Synthetic oligonucleotide
  Antisense strand to SEQ ID NO: 1062276
auacuuaugcaauaccuga

SEQ ID NO: 1062278 - RNA, 19 nt, Artificial Sequence
  Description of Artificial Sequence: Synthetic oligonucleotide
  Sense strand starting at position 2738 of SEQ ID NO: 915207
aggugaaaguucccuuaag

SEQ ID NO: 1062279 - RNA, 19 nt, Artificial Sequence
  Description of Artificial Sequence: Synthetic oligonucleotide
  Antisense strand to SEQ ID NO: 1062278
cuuaagggaacuuucaccu

SEQ ID NO: 1062280 - RNA, 19 nt, Artificial Sequence
  Description of Artificial Sequence: Synthetic oligonucleotide
  Sense strand starting at position 3278 of SEQ ID NO: 915207
gcaugaaguuaacuaucaa

SEQ ID NO: 1062281 - RNA, 19 nt, Artificial Sequence
  Description of Artificial Sequence: Synthetic oligonucleotide
  Antisense strand to SEQ ID NO: 1062280
uugauaguuaacuucaugc

SEQ ID NO: 1062282 - RNA, 19 nt, Artificial Sequence
  Description of Artificial Sequence: Synthetic oligonucleotide
  Sense strand starting at position 3398 of SEQ ID NO: 915207
augcauccuggguauaaau

SEQ ID NO: 1062283 - RNA, 19 nt, Artificial Sequence
  Description of Artificial Sequence: Synthetic oligonucleotide
  Antisense strand to SEQ ID NO: 1062282
auuuauacccaggaugcau

SEQ ID NO: 1062284 - RNA, 19 nt, Artificial Sequence
  Description of Artificial Sequence: Synthetic oligonucleotide
  Sense strand starting at position 3400 of SEQ ID NO: 915207
gcauccuggguauaaauau

SEQ ID NO: 1062285 - RNA, 19 nt, Artificial Sequence
  Description of Artificial Sequence: Synthetic oligonucleotide
  Antisense strand to SEQ ID NO: 1062284
auauuuauacccaggaugc

SEQ ID NO: 1062286 - RNA, 19 nt, Artificial Sequence
  Description of Artificial Sequence: Synthetic oligonucleotide
  Sense strand starting at position 3516 of SEQ ID NO: 915207
ucuugcucagccugaauuu

SEQ ID NO: 1062287 - RNA, 19 nt, Artificial Sequence
  Description of Artificial Sequence: Synthetic oligonucleotide
  Antisense strand to SEQ ID NO: 1062286
aaauucaggcugagcaaga

SEQ ID NO: 1062288 - RNA, 19 nt, Artificial Sequence
  Description of Artificial Sequence: Synthetic oligonucleotide
  Sense strand starting at position 3525 of SEQ ID NO: 915207
gccugaauuugugucucau

SEQ ID NO: 1062289 - RNA, 19 nt, Artificial Sequence
  Description of Artificial Sequence: Synthetic oligonucleotide
  Antisense strand to SEQ ID NO: 1062288
augagacacaaauucaggc

SEQ ID NO: 1062290 - RNA, 19 nt, Artificial Sequence
  Description of Artificial Sequence: Synthetic oligonucleotide
  Sense strand starting at position 3829 of SEQ ID NO: 915207
gcuugaaaucugcaaccaa

SEQ ID NO: 1062291 - RNA, 19 nt, Artificial Sequence
  Description of Artificial Sequence: Synthetic oligonucleotide
  Antisense strand to SEQ ID NO: 1062290
uugguugcagauuucaagc

SEQ ID NO: 1062292 - RNA, 19 nt, Artificial Sequence
  Description of Artificial Sequence: Synthetic oligonucleotide
  Sense strand starting at position 3911 of SEQ ID NO: 915207
gcucuaaggguuuagaggu

SEQ ID NO: 1062293 - RNA, 19 nt, Artificial Sequence
  Description of Artificial Sequence: Synthetic oligonucleotide
  Antisense strand to SEQ ID NO: 1062292
accucuaaacccuuagagc

SEQ ID NO: 1062294 - RNA, 19 nt, Artificial Sequence
  Description of Artificial Sequence: Synthetic oligonucleotide
  Sense strand starting at position 3947 of SEQ ID NO: 915207
ucaugcuuccacuagagaa

SEQ ID NO: 1062295 - RNA, 19 nt, Artificial Sequence
  Description of Artificial Sequence: Synthetic oligonucleotide
  Antisense strand to SEQ ID NO: 1062294
uucucuaguggaagcauga

SEQ ID NO: 1062296 - RNA, 19 nt, Artificial Sequence
  Description of Artificial Sequence: Synthetic oligonucleotide
  Sense strand starting at position 194 of SEQ ID NO: 915208
ccaaauggauuugaaguaa

SEQ ID NO: 1062297 - RNA, 19 nt, Artificial Sequence
  Description of Artificial Sequence: Synthetic oligonucleotide
  Antisense strand to SEQ ID NO: 1062296
uuacuucaaauccauuugg

SEQ ID NO: 1062298 - RNA, 19 nt, Artificial Sequence
  Description of Artificial Sequence: Synthetic oligonucleotide
  Sense strand starting at position 347 of SEQ ID NO: 915208
accuaucagucaccaggaa

SEQ ID NO: 1062299 - RNA, 19 nt, Artificial Sequence
  Description of Artificial Sequence: Synthetic oligonucleotide
  Antisense strand to SEQ ID NO: 1062298
uuccuggugacugauaggu

SEQ ID NO: 1062300 - RNA, 19 nt, Artificial Sequence
  Description of Artificial Sequence: Synthetic oligonucleotide
  Sense strand starting at position 410 of SEQ ID NO: 915208
ccagcuauauuguuuacau

SEQ ID NO: 1062301 - RNA, 19 nt, Artificial Sequence
  Description of Artificial Sequence: Synthetic oligonucleotide
  Antisense strand to SEQ ID NO: 1062300
auguaaacaauauagcugg

SEQ ID NO: 1062302 - RNA, 19 nt, Artificial Sequence
  Description of Artificial Sequence: Synthetic oligonucleotide
  Sense strand starting at position 893 of SEQ ID NO: 915208
agaauagcuucccugaucu

SEQ ID NO: 1062303 - RNA, 19 nt, Artificial Sequence
  Description of Artificial Sequence: Synthetic oligonucleotide
  Antisense strand to SEQ ID NO: 1062302
agaucagggaagcuauucu

SEQ ID NO: 1062304 - RNA, 19 nt, Artificial Sequence
  Description of Artificial Sequence: Synthetic oligonucleotide
  Sense strand starting at position 970 of SEQ ID NO: 915208
uagugaacucuugaugcac

SEQ ID NO: 1062305 - RNA, 19 nt, Artificial Sequence
  Description of Artificial Sequence: Synthetic oligonucleotide
  Antisense strand to SEQ ID NO: 1062304
gugcaucaagaguucacua

SEQ ID NO: 1062306 - RNA, 19 nt, Artificial Sequence
  Description of Artificial Sequence: Synthetic oligonucleotide
  Sense strand starting at position 2007 of SEQ ID NO: 915208
ccuuucgugugauccgaaa

SEQ ID NO: 1062307 - RNA, 19 nt, Artificial Sequence
  Description of Artificial Sequence: Synthetic oligonucleotide
  Antisense strand to SEQ ID NO: 1062306
uuucggaucacacgaaagg

SEQ ID NO: 1062308 - RNA, 19 nt, Artificial Sequence
  Description of Artificial Sequence: Synthetic oligonucleotide
  Sense strand starting at position 2049 of SEQ ID NO: 915208
gaaagugauugacaaagca

SEQ ID NO: 1062309 - RNA, 19 nt, Artificial Sequence
  Description of Artificial Sequence: Synthetic oligonucleotide
  Antisense strand to SEQ ID NO: 1062308
ugcuuugucaaucacuuuc

SEQ ID NO: 1062310 - RNA, 19 nt, Artificial Sequence
  Description of Artificial Sequence: Synthetic oligonucleotide
  Sense strand starting at position 2116 of SEQ ID NO: 915208
uguuaauauccugauaggu

SEQ ID NO: 1062311 - RNA, 19 nt, Artificial Sequence
  Description of Artificial Sequence: Synthetic oligonucleotide
  Antisense strand to SEQ ID NO: 1062310
accuaucaggauauuaaca

SEQ ID NO: 1062312 - RNA, 19 nt, Artificial Sequence
  Description of Artificial Sequence: Synthetic oligonucleotide
  Sense strand starting at position 2137 of SEQ ID NO: 915208
ugugucaagacaggaauaa

SEQ ID NO: 1062313 - RNA, 19 nt, Artificial Sequence
  Description of Artificial Sequence: Synthetic oligonucleotide
  Antisense strand to SEQ ID NO: 1062312
uuauuccugucuugacaca

SEQ ID NO: 1062314 - RNA, 19 nt, Artificial Sequence
  Description of Artificial Sequence: Synthetic oligonucleotide
  Sense strand starting at position 2332 of SEQ ID NO: 915208
cucaccaguucugcaaaga

SEQ ID NO: 1062315 - RNA, 19 nt, Artificial Sequence
  Description of Artificial Sequence: Synthetic oligonucleotide
  Antisense strand to SEQ ID NO: 1062314
ucuuugcagaacuggugag

SEQ ID NO: 1062316 - RNA, 19 nt, Artificial Sequence
  Description of Artificial Sequence: Synthetic oligonucleotide
  Sense strand starting at position 2333 of SEQ ID NO: 915208
ucaccaguucugcaaagaa

SEQ ID NO: 1062317 - RNA, 19 nt, Artificial Sequence
  Description of Artificial Sequence: Synthetic oligonucleotide
  Antisense strand to SEQ ID NO: 1062316
uucuuugcagaacugguga

SEQ ID NO: 1062318 - RNA, 19 nt, Artificial Sequence
  Description of Artificial Sequence: Synthetic oligonucleotide
  Sense strand starting at position 2470 of SEQ ID NO: 915208
uugugauauagugaaugua

SEQ ID NO: 1062319 - RNA, 19 nt, Artificial Sequence
  Description of Artificial Sequence: Synthetic oligonucleotide
  Antisense strand to SEQ ID NO: 1062318
uacauucacuauaucacaa

SEQ ID NO: 1062320 - RNA, 19 nt, Artificial Sequence
  Description of Artificial Sequence: Synthetic oligonucleotide
  Sense strand starting at position 2478 of SEQ ID NO: 915208
uagugaauguagucuuaga

SEQ ID NO: 1062321 - RNA, 19 nt, Artificial Sequence
  Description of Artificial Sequence: Synthetic oligonucleotide
  Antisense strand to SEQ ID NO: 1062320
ucuaagacuacauucacua

SEQ ID NO: 1062322 - RNA, 19 nt, Artificial Sequence
  Description of Artificial Sequence: Synthetic oligonucleotide
  Sense strand starting at position 2684 of SEQ ID NO: 915208
guacaaauucgaugcaaug

SEQ ID NO: 1062323 - RNA, 19 nt, Artificial Sequence
  Description of Artificial Sequence: Synthetic oligonucleotide
  Antisense strand to SEQ ID NO: 1062322
cauugcaucgaauuuguac

SEQ ID NO: 1062324 - RNA, 19 nt, Artificial Sequence
  Description of Artificial Sequence: Synthetic oligonucleotide
  Sense strand starting at position 2713 of SEQ ID NO: 915208
ccuugacucucagucauag

SEQ ID NO: 1062325 - RNA, 19 nt, Artificial Sequence
  Description of Artificial Sequence: Synthetic oligonucleotide
  Antisense strand to SEQ ID NO: 1062324
cuaugacugagagucaagg

SEQ ID NO: 1062326 - RNA, 19 nt, Artificial Sequence
  Description of Artificial Sequence: Synthetic oligonucleotide
  Sense strand starting at position 2725 of SEQ ID NO: 915208
gucauagacucaucucucu

SEQ ID NO: 1062327 - RNA, 19 nt, Artificial Sequence
  Description of Artificial Sequence: Synthetic oligonucleotide
  Antisense strand to SEQ ID NO: 1062326
agagagaugagucuaugac

SEQ ID NO: 1062328 - RNA, 19 nt, Artificial Sequence
  Description of Artificial Sequence: Synthetic oligonucleotide
  Sense strand starting at position 2738 of SEQ ID NO: 915208
cucucuaugccaggcuuua

SEQ ID NO: 1062329 - RNA, 19 nt, Artificial Sequence
  Description of Artificial Sequence: Synthetic oligonucleotide
  Antisense strand to SEQ ID NO: 1062328
uaaagccuggcauagagag

SEQ ID NO: 1062330 - RNA, 19 nt, Artificial Sequence
  Description of Artificial Sequence: Synthetic oligonucleotide
  Sense strand starting at position 2874 of SEQ ID NO: 915208
aaauuagcccagugaaagu

SEQ ID NO: 1062331 - RNA, 19 nt, Artificial Sequence
  Description of Artificial Sequence: Synthetic oligonucleotide
  Antisense strand to SEQ ID NO: 1062330
acuuucacugggcuaauuu

SEQ ID NO: 1062332 - RNA, 19 nt, Artificial Sequence
  Description of Artificial Sequence: Synthetic oligonucleotide
  Sense strand starting at position 2884 of SEQ ID NO: 915208
agugaaagugcugauggau

SEQ ID NO: 1062333 - RNA, 19 nt, Artificial Sequence
  Description of Artificial Sequence: Synthetic oligonucleotide
  Antisense strand to SEQ ID NO: 1062332
auccaucagcacuuucacu

SEQ ID NO: 1062334 - RNA, 19 nt, Artificial Sequence
  Description of Artificial Sequence: Synthetic oligonucleotide
  Sense strand starting at position 3099 of SEQ ID NO: 915208
agaugagauucuuaaggug

SEQ ID NO: 1062335 - RNA, 19 nt, Artificial Sequence
  Description of Artificial Sequence: Synthetic oligonucleotide
  Antisense strand to SEQ ID NO: 1062334
caccuuaagaaucucaucu

SEQ ID NO: 1062336 - RNA, 19 nt, Artificial Sequence
  Description of Artificial Sequence: Synthetic oligonucleotide
  Sense strand starting at position 3272 of SEQ ID NO: 915208
cuaaauaugguguggaaca

SEQ ID NO: 1062337 - RNA, 19 nt, Artificial Sequence
  Description of Artificial Sequence: Synthetic oligonucleotide
  Antisense strand to SEQ ID NO: 1062336
uguuccacaccauauuuag

SEQ ID NO: 1062338 - RNA, 19 nt, Artificial Sequence
  Description of Artificial Sequence: Synthetic oligonucleotide
  Sense strand starting at position 3282 of SEQ ID NO: 915208
uguggaacauaaucauagu

SEQ ID NO: 1062339 - RNA, 19 nt, Artificial Sequence
  Description of Artificial Sequence: Synthetic oligonucleotide
  Antisense strand to SEQ ID NO: 1062338
acuaugauuauguuccaca

SEQ ID NO: 1062340 - RNA, 19 nt, Artificial Sequence
  Description of Artificial Sequence: Synthetic oligonucleotide
  Sense strand starting at position 3285 of SEQ ID NO: 915208
ggaacauaaucauaguaaa

SEQ ID NO: 1062341 - RNA, 19 nt, Artificial Sequence
  Description of Artificial Sequence: Synthetic oligonucleotide
  Antisense strand to SEQ ID NO: 1062340
uuuacuaugauuauguucc

SEQ ID NO: 1062342 - RNA, 19 nt, Artificial Sequence
  Description of Artificial Sequence: Synthetic oligonucleotide
  Sense strand starting at position 3347 of SEQ ID NO: 915208
ugcauuucugucugcugaa

SEQ ID NO: 1062343 - RNA, 19 nt, Artificial Sequence
  Description of Artificial Sequence: Synthetic oligonucleotide
  Antisense strand to SEQ ID NO: 1062342
uucagcagacagaaaugca

SEQ ID NO: 1062344 - RNA, 19 nt, Artificial Sequence
  Description of Artificial Sequence: Synthetic oligonucleotide
  Sense strand starting at position 3348 of SEQ ID NO: 915208
gcauuucugucugcugaau

SEQ ID NO: 1062345 - RNA, 19 nt, Artificial Sequence
  Description of Artificial Sequence: Synthetic oligonucleotide
  Antisense strand to SEQ ID NO: 1062344
auucagcagacagaaaugc

SEQ ID NO: 1062346 - RNA, 19 nt, Artificial Sequence
  Description of Artificial Sequence: Synthetic oligonucleotide
  Sense strand starting at position 3418 of SEQ ID NO: 915208
ccugguuuaccugacacuu

SEQ ID NO: 1062347 - RNA, 19 nt, Artificial Sequence
  Description of Artificial Sequence: Synthetic oligonucleotide
  Antisense strand to SEQ ID NO: 1062346
aagugucagguaaaccagg

SEQ ID NO: 1062348 - RNA, 19 nt, Artificial Sequence
  Description of Artificial Sequence: Synthetic oligonucleotide
  Sense strand starting at position 3514 of SEQ ID NO: 915208
ugucauuuaugguaagguc

SEQ ID NO: 1062349 - RNA, 19 nt, Artificial Sequence
  Description of Artificial Sequence: Synthetic oligonucleotide
  Antisense strand to SEQ ID NO: 1062348
gaccuuaccauaaaugaca

SEQ ID NO: 1062350 - RNA, 19 nt, Artificial Sequence
  Description of Artificial Sequence: Synthetic oligonucleotide
  Sense strand starting at position 3522 of SEQ ID NO: 915208
augguaaggucaucuccaa

SEQ ID NO: 1062351 - RNA, 19 nt, Artificial Sequence
  Description of Artificial Sequence: Synthetic oligonucleotide
  Antisense strand to SEQ ID NO: 1062350
uuggagaugaccuuaccau

SEQ ID NO: 1062352 - RNA, 19 nt, Artificial Sequence
  Description of Artificial Sequence: Synthetic oligonucleotide
  Sense strand starting at position 3553 of SEQ ID NO: 915208
acaaauagguucuaaaugu

SEQ ID NO: 1062353 - RNA, 19 nt, Artificial Sequence
  Description of Artificial Sequence: Synthetic oligonucleotide
  Antisense strand to SEQ ID NO: 1062352
acauuuagaaccuauuugu

SEQ ID NO: 1062354 - RNA, 19 nt, Artificial Sequence
  Description of Artificial Sequence: Synthetic oligonucleotide
  Sense strand starting at position 3560 of SEQ ID NO: 915208
gguucuaaauguuccagca

SEQ ID NO: 1062355 - RNA, 19 nt, Artificial Sequence
  Description of Artificial Sequence: Synthetic oligonucleotide
  Antisense strand to SEQ ID NO: 1062354
ugcuggaacauuuagaacc

SEQ ID NO: 1062356 - RNA, 19 nt, Artificial Sequence
  Description of Artificial Sequence: Synthetic oligonucleotide
  Sense strand starting at position 3600 of SEQ ID NO: 915208
gcgagaacucuccauagug

SEQ ID NO: 1062357 - RNA, 19 nt, Artificial Sequence
  Description of Artificial Sequence: Synthetic oligonucleotide
  Antisense strand to SEQ ID NO: 1062356
cacuauggagaguucucgc

SEQ ID NO: 1062358 - RNA, 19 nt, Artificial Sequence
  Description of Artificial Sequence: Synthetic oligonucleotide
  Sense strand starting at position 3602 of SEQ ID NO: 915208
gagaacucuccauagugcu

SEQ ID NO: 1062359 - RNA, 19 nt, Artificial Sequence
  Description of Artificial Sequence: Synthetic oligonucleotide
  Antisense strand to SEQ ID NO: 1062358
agcacuauggagaguucuc

SEQ ID NO: 1062360 - RNA, 19 nt, Artificial Sequence
  Description of Artificial Sequence: Synthetic oligonucleotide
  Sense strand starting at position 3734 of SEQ ID NO: 915208
ugacacugugcuggauuau

SEQ ID NO: 1062361 - RNA, 19 nt, Artificial Sequence
  Description of Artificial Sequence: Synthetic oligonucleotide
  Antisense strand to SEQ ID NO: 1062360
auaauccagcacaguguca

SEQ ID NO: 1062362 - RNA, 19 nt, Artificial Sequence
  Description of Artificial Sequence: Synthetic oligonucleotide
  Sense strand starting at position 3735 of SEQ ID NO: 915208
gacacugugcuggauuauu

SEQ ID NO: 1062363 - RNA, 19 nt, Artificial Sequence
  Description of Artificial Sequence: Synthetic oligonucleotide
  Antisense strand to SEQ ID NO: 1062362
aauaauccagcacaguguc

SEQ ID NO: 1062364 - RNA, 19 nt, Artificial Sequence
  Description of Artificial Sequence: Synthetic oligonucleotide
  Sense strand starting at position 3743 of SEQ ID NO: 915208
gcuggauuauucuuuguuu

SEQ ID NO: 1062365 - RNA, 19 nt, Artificial Sequence
  Description of Artificial Sequence: Synthetic oligonucleotide
  Antisense strand to SEQ ID NO: 1062364
aaacaaagaauaauccagc

SEQ ID NO: 1062366 - RNA, 19 nt, Artificial Sequence
  Description of Artificial Sequence: Synthetic oligonucleotide
  Sense strand starting at position 3765 of SEQ ID NO: 915208
gaagcuacccugugcauua

SEQ ID NO: 1062367 - RNA, 19 nt, Artificial Sequence
  Description of Artificial Sequence: Synthetic oligonucleotide
  Antisense strand to SEQ ID NO: 1062366
uaaugcacaggguagcuuc

SEQ ID NO: 1062368 - RNA, 19 nt, Artificial Sequence
  Description of Artificial Sequence: Synthetic oligonucleotide
  Sense strand starting at position 3918 of SEQ ID NO: 915208
ugcauaauucucuaugcug

SEQ ID NO: 1062369 - RNA, 19 nt, Artificial Sequence
  Description of Artificial Sequence: Synthetic oligonucleotide
  Antisense strand to SEQ ID NO: 1062368
cagcauagagaauuaugca

SEQ ID NO: 1062370 - RNA, 19 nt, Artificial Sequence
  Description of Artificial Sequence: Synthetic oligonucleotide
  Sense strand starting at position 3934 of SEQ ID NO: 915208
cugccuugcuuccuugauu

SEQ ID NO: 1062371 - RNA, 19 nt, Artificial Sequence
  Description of Artificial Sequence: Synthetic oligonucleotide
  Antisense strand to SEQ ID NO: 1062370
aaucaaggaagcaaggcag

SEQ ID NO: 1062372 - RNA, 19 nt, Artificial Sequence
  Description of Artificial Sequence: Synthetic oligonucleotide
  Sense strand starting at position 3945 of SEQ ID NO: 915208
ccuugauucugauagauug

SEQ ID NO: 1062373 - RNA, 19 nt, Artificial Sequence
  Description of Artificial Sequence: Synthetic oligonucleotide
  Antisense strand to SEQ ID NO: 1062372
caaucuaucagaaucaagg

SEQ ID NO: 1062374 - RNA, 19 nt, Artificial Sequence
  Description of Artificial Sequence: Synthetic oligonucleotide
  Sense strand starting at position 3955 of SEQ ID NO: 915208
gauagauugcaauguaucu

SEQ ID NO: 1062375 - RNA, 19 nt, Artificial Sequence
  Description of Artificial Sequence: Synthetic oligonucleotide
  Antisense strand to SEQ ID NO: 1062374
agauacauugcaaucuauc

SEQ ID NO: 1062376 - RNA, 19 nt, Artificial Sequence
  Description of Artificial Sequence: Synthetic oligonucleotide
  Sense strand starting at position 6 of SEQ ID NO: 915209
uuauaaagguuguugggaa

SEQ ID NO: 1062377 - RNA, 19 nt, Artificial Sequence
  Description of Artificial Sequence: Synthetic oligonucleotide
  Antisense strand to SEQ ID NO: 1062376
uucccaacaaccuuuauaa

SEQ ID NO: 1062378 - RNA, 19 nt, Artificial Sequence
  Description of Artificial Sequence: Synthetic oligonucleotide
  Sense strand starting at position 97 of SEQ ID NO: 915209
ugucuaacaguaugacaua

SEQ ID NO: 1062379 - RNA, 19 nt, Artificial Sequence
  Description of Artificial Sequence: Synthetic oligonucleotide
  Antisense strand to SEQ ID NO: 1062378
uaugucauacuguuagaca

SEQ ID NO: 1062380 - RNA, 19 nt, Artificial Sequence
  Description of Artificial Sequence: Synthetic oligonucleotide
  Sense strand starting at position 191 of SEQ ID NO: 915209
ucuggugaagucuauuaug

SEQ ID NO: 1062381 - RNA, 19 nt, Artificial Sequence
  Description of Artificial Sequence: Synthetic oligonucleotide
  Antisense strand to SEQ ID NO: 1062380
cauaauagacuucaccaga

SEQ ID NO: 1062382 - RNA, 19 nt, Artificial Sequence
  Description of Artificial Sequence: Synthetic oligonucleotide
  Sense strand starting at position 201 of SEQ ID NO: 915209
ucuauuaugguuuaucaga

SEQ ID NO: 1062383 - RNA, 19 nt, Artificial Sequence
  Description of Artificial Sequence: Synthetic oligonucleotide
  Antisense strand to SEQ ID NO: 1062382
ucugauaaaccauaauaga

SEQ ID NO: 1062384 - RNA, 19 nt, Artificial Sequence
  Description of Artificial Sequence: Synthetic oligonucleotide
  Sense strand starting at position 203 of SEQ ID NO: 915209
uauuaugguuuaucagaug

SEQ ID NO: 1062385 - RNA, 19 nt, Artificial Sequence
  Description of Artificial Sequence: Synthetic oligonucleotide
  Antisense strand to SEQ ID NO: 1062384
caucugauaaaccauaaua

SEQ ID NO: 1062386 - RNA, 19 nt, Artificial Sequence
  Description of Artificial Sequence: Synthetic oligonucleotide
  Sense strand starting at position 209 of SEQ ID NO: 915209
gguuuaucagauggucaca

SEQ ID NO: 1062387 - RNA, 19 nt, Artificial Sequence
  Description of Artificial Sequence: Synthetic oligonucleotide
  Antisense strand to SEQ ID NO: 1062386
ugugaccaucugauaaacc

SEQ ID NO: 1062388 - RNA, 19 nt, Artificial Sequence
  Description of Artificial Sequence: Synthetic oligonucleotide
  Sense strand starting at position 254 of SEQ ID NO: 915209
ggauguagcccauaucaua

SEQ ID NO: 1062389 - RNA, 19 nt, Artificial Sequence
  Description of Artificial Sequence: Synthetic oligonucleotide
  Antisense strand to SEQ ID NO: 1062388
uaugauaugggcuacaucc

SEQ ID NO: 1062390 - RNA, 19 nt, Artificial Sequence
  Description of Artificial Sequence: Synthetic oligonucleotide
  Sense strand starting at position 291 of SEQ ID NO: 915209
ucaaguaacccguauacau

SEQ ID NO: 1062391 - RNA, 19 nt, Artificial Sequence
  Description of Artificial Sequence: Synthetic oligonucleotide
  Antisense strand to SEQ ID NO: 1062390
auguauacggguuacuuga

SEQ ID NO: 1062392 - RNA, 19 nt, Artificial Sequence
  Description of Artificial Sequence: Synthetic oligonucleotide
  Sense strand starting at position 369 of SEQ ID NO: 915209
aguauuagaucuuugacua

SEQ ID NO: 1062393 - RNA, 19 nt, Artificial Sequence
  Description of Artificial Sequence: Synthetic oligonucleotide
  Antisense strand to SEQ ID NO: 1062392
uagucaaagaucuaauacu

SEQ ID NO: 1062394 - RNA, 19 nt, Artificial Sequence
  Description of Artificial Sequence: Synthetic oligonucleotide
  Sense strand starting at position 370 of SEQ ID NO: 915209
guauuagaucuuugacuag

SEQ ID NO: 1062395 - RNA, 19 nt, Artificial Sequence
  Description of Artificial Sequence: Synthetic oligonucleotide
  Antisense strand to SEQ ID NO: 1062394
cuagucaaagaucuaauac

SEQ ID NO: 1062396 - RNA, 19 nt, Artificial Sequence
  Description of Artificial Sequence: Synthetic oligonucleotide
  Sense strand starting at position 373 of SEQ ID NO: 915209
uuagaucuuugacuaggua

SEQ ID NO: 1062397 - RNA, 19 nt, Artificial Sequence
  Description of Artificial Sequence: Synthetic oligonucleotide
  Antisense strand to SEQ ID NO: 1062396
uaccuagucaaagaucuaa

SEQ ID NO: 1062398 - RNA, 19 nt, Artificial Sequence
  Description of Artificial Sequence: Synthetic oligonucleotide
  Sense strand starting at position 376 of SEQ ID NO: 915209
gaucuuugacuagguauua

SEQ ID NO: 1062399 - RNA, 19 nt, Artificial Sequence
  Description of Artificial Sequence: Synthetic oligonucleotide
  Antisense strand to SEQ ID NO: 1062398
uaauaccuagucaaagauc

SEQ ID NO: 1062400 - RNA, 19 nt, Artificial Sequence
  Description of Artificial Sequence: Synthetic oligonucleotide
  Sense strand starting at position 388 of SEQ ID NO: 915209
gguauuacauucuuaccua

SEQ ID NO: 1062401 - RNA, 19 nt, Artificial Sequence
  Description of Artificial Sequence: Synthetic oligonucleotide
  Antisense strand to SEQ ID NO: 1062400
uagguaagaauguaauacc

SEQ ID NO: 1062402 - RNA, 19 nt, Artificial Sequence
  Description of Artificial Sequence: Synthetic oligonucleotide
  Sense strand starting at position 445 of SEQ ID NO: 915209
ccuuucucccuggaaugua

SEQ ID NO: 1062403 - RNA, 19 nt, Artificial Sequence
  Description of Artificial Sequence: Synthetic oligonucleotide
  Antisense strand to SEQ ID NO: 1062402
uacauuccagggagaaagg

SEQ ID NO: 1062404 - RNA, 19 nt, Artificial Sequence
  Description of Artificial Sequence: Synthetic oligonucleotide
  Sense strand starting at position 453 of SEQ ID NO: 915209
ccuggaauguaucucauaa

SEQ ID NO: 1062405 - RNA, 19 nt, Artificial Sequence
  Description of Artificial Sequence: Synthetic oligonucleotide
  Antisense strand to SEQ ID NO: 1062404
uuaugagauacauuccagg

SEQ ID NO: 1062406 - RNA, 19 nt, Artificial Sequence
  Description of Artificial Sequence: Synthetic oligonucleotide
  Sense strand starting at position 576 of SEQ ID NO: 915209
cucucuuugguacauauua

SEQ ID NO: 1062407 - RNA, 19 nt, Artificial Sequence
  Description of Artificial Sequence: Synthetic oligonucleotide
  Antisense strand to SEQ ID NO: 1062406
uaauauguaccaaagagag

SEQ ID NO: 1062408 - RNA, 19 nt, Artificial Sequence
  Description of Artificial Sequence: Synthetic oligonucleotide
  Sense strand starting at position 888 of SEQ ID NO: 915209
ugaugcuucccagaaagua

SEQ ID NO: 1062409 - RNA, 19 nt, Artificial Sequence
  Description of Artificial Sequence: Synthetic oligonucleotide
  Antisense strand to SEQ ID NO: 1062408
uacuuucugggaagcauca

SEQ ID NO: 1062410 - RNA, 19 nt, Artificial Sequence
  Description of Artificial Sequence: Synthetic oligonucleotide
  Sense strand starting at position 940 of SEQ ID NO: 915209
aaauccauuucguugaguu

SEQ ID NO: 1062411 - RNA, 19 nt, Artificial Sequence
  Description of Artificial Sequence: Synthetic oligonucleotide
  Antisense strand to SEQ ID NO: 1062410
aacucaacgaaauggauuu

SEQ ID NO: 1062412 - RNA, 19 nt, Artificial Sequence
  Description of Artificial Sequence: Synthetic oligonucleotide
  Sense strand starting at position 941 of SEQ ID NO: 915209
aauccauuucguugaguug

SEQ ID NO: 1062413 - RNA, 19 nt, Artificial Sequence
  Description of Artificial Sequence: Synthetic oligonucleotide
  Antisense strand to SEQ ID NO: 1062412
caacucaacgaaauggauu

SEQ ID NO: 1062414 - RNA, 19 nt, Artificial Sequence
  Description of Artificial Sequence: Synthetic oligonucleotide
  Sense strand starting at position 942 of SEQ ID NO: 915209
auccauuucguugaguugu

SEQ ID NO: 1062415 - RNA, 19 nt, Artificial Sequence
  Description of Artificial Sequence: Synthetic oligonucleotide
  Antisense strand to SEQ ID NO: 1062414
acaacucaacgaaauggau

SEQ ID NO: 1062416 - RNA, 19 nt, Artificial Sequence
  Description of Artificial Sequence: Synthetic oligonucleotide
  Sense strand starting at position 956 of SEQ ID NO: 915209
guuguacaacccuaacuuu

SEQ ID NO: 1062417 - RNA, 19 nt, Artificial Sequence
  Description of Artificial Sequence: Synthetic oligonucleotide
  Antisense strand to SEQ ID NO: 1062416
aaaguuaggguuguacaac

SEQ ID NO: 1062418 - RNA, 19 nt, Artificial Sequence
  Description of Artificial Sequence: Synthetic oligonucleotide
  Sense strand starting at position 1000 of SEQ ID NO: 915209
aucaauauuuauggacaga

SEQ ID NO: 1062419 - RNA, 19 nt, Artificial Sequence
  Description of Artificial Sequence: Synthetic oligonucleotide
  Antisense strand to SEQ ID NO: 1062418
ucuguccauaaauauugau

SEQ ID NO: 1062420 - RNA, 19 nt, Artificial Sequence
  Description of Artificial Sequence: Synthetic oligonucleotide
  Sense strand starting at position 2019 of SEQ ID NO: 915209
aucugaaaguuaguucuga

SEQ ID NO: 1062421 - RNA, 19 nt, Artificial Sequence
  Description of Artificial Sequence: Synthetic oligonucleotide
  Antisense strand to SEQ ID NO: 1062420
ucagaacuaacuuucagau

SEQ ID NO: 1062422 - RNA, 19 nt, Artificial Sequence
  Description of Artificial Sequence: Synthetic oligonucleotide
  Sense strand starting at position 2020 of SEQ ID NO: 915209
ucugaaaguuaguucugaa

SEQ ID NO: 1062423 - RNA, 19 nt, Artificial Sequence
  Description of Artificial Sequence: Synthetic oligonucleotide
  Antisense strand to SEQ ID NO: 1062422
uucagaacuaacuuucaga

SEQ ID NO: 1062424 - RNA, 19 nt, Artificial Sequence
  Description of Artificial Sequence: Synthetic oligonucleotide
  Sense strand starting at position 2114 of SEQ ID NO: 915209
auaucucuuccggaaucua

SEQ ID NO: 1062425 - RNA, 19 nt, Artificial Sequence
  Description of Artificial Sequence: Synthetic oligonucleotide
  Antisense strand to SEQ ID NO: 1062424
uagauuccggaagagauau

SEQ ID NO: 1062426 - RNA, 19 nt, Artificial Sequence
  Description of Artificial Sequence: Synthetic oligonucleotide
  Sense strand starting at position 2134 of SEQ ID NO: 915209
gaguuuguuguuuaagauu

SEQ ID NO: 1062427 - RNA, 19 nt, Artificial Sequence
  Description of Artificial Sequence: Synthetic oligonucleotide
  Antisense strand to SEQ ID NO: 1062426
aaucuuaaacaacaaacuc

SEQ ID NO: 1062428 - RNA, 19 nt, Artificial Sequence
  Description of Artificial Sequence: Synthetic oligonucleotide
  Sense strand starting at position 2366 of SEQ ID NO: 915209
uaauaugaugacugauugu

SEQ ID NO: 1062429 - RNA, 19 nt, Artificial Sequence
  Description of Artificial Sequence: Synthetic oligonucleotide
  Antisense strand to SEQ ID NO: 1062428
acaaucagucaucauauua

SEQ ID NO: 1062430 - RNA, 19 nt, Artificial Sequence
  Description of Artificial Sequence: Synthetic oligonucleotide
  Sense strand starting at position 2369 of SEQ ID NO: 915209
uaugaugacugauugugua

SEQ ID NO: 1062431 - RNA, 19 nt, Artificial Sequence
  Description of Artificial Sequence: Synthetic oligonucleotide
  Antisense strand to SEQ ID NO: 1062430
uacacaaucagucaucaua

SEQ ID NO: 1062432 - RNA, 19 nt, Artificial Sequence
  Description of Artificial Sequence: Synthetic oligonucleotide
  Sense strand starting at position 2373 of SEQ ID NO: 915209
augacugauuguguaaauc

SEQ ID NO: 1062433 - RNA, 19 nt, Artificial Sequence
  Description of Artificial Sequence: Synthetic oligonucleotide
  Antisense strand to SEQ ID NO: 1062432
gauuuacacaaucagucau

SEQ ID NO: 1062434 - RNA, 19 nt, Artificial Sequence
  Description of Artificial Sequence: Synthetic oligonucleotide
  Sense strand starting at position 2443 of SEQ ID NO: 915209
uguuuauacgaugacauua

SEQ ID NO: 1062435 - RNA, 19 nt, Artificial Sequence
  Description of Artificial Sequence: Synthetic oligonucleotide
  Antisense strand to SEQ ID NO: 1062434
uaaugucaucguauaaaca

SEQ ID NO: 1062436 - RNA, 19 nt, Artificial Sequence
  Description of Artificial Sequence: Synthetic oligonucleotide
  Sense strand starting at position 2451 of SEQ ID NO: 915209
cgaugacauuaacuaucaa

SEQ ID NO: 1062437 - RNA, 19 nt, Artificial Sequence
  Description of Artificial Sequence: Synthetic oligonucleotide
  Antisense strand to SEQ ID NO: 1062436
uugauaguuaaugucaucg

SEQ ID NO: 1062438 - RNA, 19 nt, Artificial Sequence
  Description of Artificial Sequence: Synthetic oligonucleotide
  Sense strand starting at position 2524 of SEQ ID NO: 915209
auguuugucugacccagaa

SEQ ID NO: 1062439 - RNA, 19 nt, Artificial Sequence
  Description of Artificial Sequence: Synthetic oligonucleotide
  Antisense strand to SEQ ID NO: 1062438
uucugggucagacaaacau

SEQ ID NO: 1062440 - RNA, 19 nt, Artificial Sequence
  Description of Artificial Sequence: Synthetic oligonucleotide
  Sense strand starting at position 2621 of SEQ ID NO: 915209
uuccucauugcuugagaaa

SEQ ID NO: 1062441 - RNA, 19 nt, Artificial Sequence
  Description of Artificial Sequence: Synthetic oligonucleotide
  Antisense strand to SEQ ID NO: 1062440
uuucucaagcaaugaggaa

SEQ ID NO: 1062442 - RNA, 19 nt, Artificial Sequence
  Description of Artificial Sequence: Synthetic oligonucleotide
  Sense strand starting at position 2622 of SEQ ID NO: 915209
uccucauugcuugagaaau

SEQ ID NO: 1062443 - RNA, 19 nt, Artificial Sequence
  Description of Artificial Sequence: Synthetic oligonucleotide
  Antisense strand to SEQ ID NO: 1062442
auuucucaagcaaugagga

SEQ ID NO: 1062444 - RNA, 19 nt, Artificial Sequence
  Description of Artificial Sequence: Synthetic oligonucleotide
  Sense strand starting at position 2679 of SEQ ID NO: 915209
uucuuuauucuauagguga

SEQ ID NO: 1062445 - RNA, 19 nt, Artificial Sequence
  Description of Artificial Sequence: Synthetic oligonucleotide
  Antisense strand to SEQ ID NO: 1062444
ucaccuauagaauaaagaa

SEQ ID NO: 1062446 - RNA, 19 nt, Artificial Sequence
  Description of Artificial Sequence: Synthetic oligonucleotide
  Sense strand starting at position 2682 of SEQ ID NO: 915209
uuuauucuauaggugacaa

SEQ ID NO: 1062447 - RNA, 19 nt, Artificial Sequence
  Description of Artificial Sequence: Synthetic oligonucleotide
  Antisense strand to SEQ ID NO: 1062446
uugucaccuauagaauaaa

SEQ ID NO: 1062448 - RNA, 19 nt, Artificial Sequence
  Description of Artificial Sequence: Synthetic oligonucleotide
  Sense strand starting at position 2730 of SEQ ID NO: 915209
uaucgauaugcccaggaag

SEQ ID NO: 1062449 - RNA, 19 nt, Artificial Sequence
  Description of Artificial Sequence: Synthetic oligonucleotide
  Antisense strand to SEQ ID NO: 1062448
cuuccugggcauaucgaua

SEQ ID NO: 1062450 - RNA, 19 nt, Artificial Sequence
  Description of Artificial Sequence: Synthetic oligonucleotide
  Sense strand starting at position 2783 of SEQ ID NO: 915209
cuugaacuccuagacaugu

SEQ ID NO: 1062451 - RNA, 19 nt, Artificial Sequence
  Description of Artificial Sequence: Synthetic oligonucleotide
  Antisense strand to SEQ ID NO: 1062450
acaugucuaggaguucaag

SEQ ID NO: 1062452 - RNA, 19 nt, Artificial Sequence
  Description of Artificial Sequence: Synthetic oligonucleotide
  Sense strand starting at position 2830 of SEQ ID NO: 915209
cauuaucuaggucgagaua

SEQ ID NO: 1062453 - RNA, 19 nt, Artificial Sequence
  Description of Artificial Sequence: Synthetic oligonucleotide
  Antisense strand to SEQ ID NO: 1062452
uaucucgaccuagauaaug

SEQ ID NO: 1062454 - RNA, 19 nt, Artificial Sequence
  Description of Artificial Sequence: Synthetic oligonucleotide
  Sense strand starting at position 2833 of SEQ ID NO: 915209
uaucuaggucgagauacua

SEQ ID NO: 1062455 - RNA, 19 nt, Artificial Sequence
  Description of Artificial Sequence: Synthetic oligonucleotide
  Antisense strand to SEQ ID NO: 1062454
uaguaucucgaccuagaua

SEQ ID NO: 1062456 - RNA, 19 nt, Artificial Sequence
  Description of Artificial Sequence: Synthetic oligonucleotide
  Sense strand starting at position 57 of SEQ ID NO: 915210
gaguucuaccaaggcaacu

SEQ ID NO: 1062457 - RNA, 19 nt, Artificial Sequence
  Description of Artificial Sequence: Synthetic oligonucleotide
  Antisense strand to SEQ ID NO: 1062456
aguugccuugguagaacuc

SEQ ID NO: 1062458 - RNA, 19 nt, Artificial Sequence
  Description of Artificial Sequence: Synthetic oligonucleotide
  Sense strand starting at position 238 of SEQ ID NO: 915210
gcaacuaugcaaugauuaa

SEQ ID NO: 1062459 - RNA, 19 nt, Artificial Sequence
  Description of Artificial Sequence: Synthetic oligonucleotide
  Antisense strand to SEQ ID NO: 1062458
uuaaucauugcauaguugc

SEQ ID NO: 1062460 - RNA, 19 nt, Artificial Sequence
  Description of Artificial Sequence: Synthetic oligonucleotide
  Sense strand starting at position 379 of SEQ ID NO: 915210
guaauugaugcauacuaau

SEQ ID NO: 1062461 - RNA, 19 nt, Artificial Sequence
  Description of Artificial Sequence: Synthetic oligonucleotide
  Antisense strand to SEQ ID NO: 1062460
auuaguaugcaucaauuac

SEQ ID NO: 1062462 - RNA, 19 nt, Artificial Sequence
  Description of Artificial Sequence: Synthetic oligonucleotide
  Sense strand starting at position 385 of SEQ ID NO: 915210
gaugcauacuaauuagagu

SEQ ID NO: 1062463 - RNA, 19 nt, Artificial Sequence
  Description of Artificial Sequence: Synthetic oligonucleotide
  Antisense strand to SEQ ID NO: 1062462
acucuaauuaguaugcauc

SEQ ID NO: 1062464 - RNA, 19 nt, Artificial Sequence
  Description of Artificial Sequence: Synthetic oligonucleotide
  Sense strand starting at position 655 of SEQ ID NO: 915210
uuucucaccuaugugauau

SEQ ID NO: 1062465 - RNA, 19 nt, Artificial Sequence
  Description of Artificial Sequence: Synthetic oligonucleotide
  Antisense strand to SEQ ID NO: 1062464
auaucacauaggugagaaa

SEQ ID NO: 1062466 - RNA, 19 nt, Artificial Sequence
  Description of Artificial Sequence: Synthetic oligonucleotide
  Sense strand starting at position 780 of SEQ ID NO: 915210
uuggucugugaacauauau

SEQ ID NO: 1062467 - RNA, 19 nt, Artificial Sequence
  Description of Artificial Sequence: Synthetic oligonucleotide
  Antisense strand to SEQ ID NO: 1062466
auauauguucacagaccaa

SEQ ID NO: 1062468 - RNA, 19 nt, Artificial Sequence
  Description of Artificial Sequence: Synthetic oligonucleotide
  Sense strand starting at position 899 of SEQ ID NO: 915210
cuugaaucaguuugguaac

SEQ ID NO: 1062469 - RNA, 19 nt, Artificial Sequence
  Description of Artificial Sequence: Synthetic oligonucleotide
  Antisense strand to SEQ ID NO: 1062468
guuaccaaacugauucaag

SEQ ID NO: 1062470 - RNA, 19 nt, Artificial Sequence
  Description of Artificial Sequence: Synthetic oligonucleotide
  Sense strand starting at position 901 of SEQ ID NO: 915210
ugaaucaguuugguaacuu

SEQ ID NO: 1062471 - RNA, 19 nt, Artificial Sequence
  Description of Artificial Sequence: Synthetic oligonucleotide
  Antisense strand to SEQ ID NO: 1062470
aaguuaccaaacugauuca

SEQ ID NO: 1062472 - RNA, 19 nt, Artificial Sequence
  Description of Artificial Sequence: Synthetic oligonucleotide
  Sense strand starting at position 943 of SEQ ID NO: 915210
cuauuaacagaauguguuu

SEQ ID NO: 1062473 - RNA, 19 nt, Artificial Sequence
  Description of Artificial Sequence: Synthetic oligonucleotide
  Antisense strand to SEQ ID NO: 1062472
aaacacauucuguuaauag

SEQ ID NO: 1062474 - RNA, 19 nt, Artificial Sequence
  Description of Artificial Sequence: Synthetic oligonucleotide
  Sense strand starting at position 946 of SEQ ID NO: 915210
uuaacagaauguguuuacu

SEQ ID NO: 1062475 - RNA, 19 nt, Artificial Sequence
  Description of Artificial Sequence: Synthetic oligonucleotide
  Antisense strand to SEQ ID NO: 1062474
aguaaacacauucuguuaa

SEQ ID NO: 1062476 - RNA, 19 nt, Artificial Sequence
  Description of Artificial Sequence: Synthetic oligonucleotide
  Sense strand starting at position 948 of SEQ ID NO: 915210
aacagaauguguuuacuga

SEQ ID NO: 1062477 - RNA, 19 nt, Artificial Sequence
  Description of Artificial Sequence: Synthetic oligonucleotide
  Antisense strand to SEQ ID NO: 1062476
ucaguaaacacauucuguu

SEQ ID NO: 1062478 - RNA, 19 nt, Artificial Sequence
  Description of Artificial Sequence: Synthetic oligonucleotide
  Sense strand starting at position 1152 of SEQ ID NO: 915210
gggaaucaccacuguguag

SEQ ID NO: 1062479 - RNA, 19 nt, Artificial Sequence
  Description of Artificial Sequence: Synthetic oligonucleotide
  Antisense strand to SEQ ID NO: 1062478
cuacacaguggugauuccc

SEQ ID NO: 1062480 - RNA, 19 nt, Artificial Sequence
  Description of Artificial Sequence: Synthetic oligonucleotide
  Sense strand starting at position 1154 of SEQ ID NO: 915210
gaaucaccacuguguagaa

SEQ ID NO: 1062481 - RNA, 19 nt, Artificial Sequence
  Description of Artificial Sequence: Synthetic oligonucleotide
  Antisense strand to SEQ ID NO: 1062480
uucuacacaguggugauuc

SEQ ID NO: 1062482 - RNA, 19 nt, Artificial Sequence
  Description of Artificial Sequence: Synthetic oligonucleotide
  Sense strand starting at position 1213 of SEQ ID NO: 915210
cuaggucucagguaaguau

SEQ ID NO: 1062483 - RNA, 19 nt, Artificial Sequence
  Description of Artificial Sequence: Synthetic oligonucleotide
  Antisense strand to SEQ ID NO: 1062482
auacuuaccugagaccuag

SEQ ID NO: 1062484 - RNA, 19 nt, Artificial Sequence
  Description of Artificial Sequence: Synthetic oligonucleotide
  Sense strand starting at position 1216 of SEQ ID NO: 915210
ggucucagguaaguauaga

SEQ ID NO: 1062485 - RNA, 19 nt, Artificial Sequence
  Description of Artificial Sequence: Synthetic oligonucleotide
  Antisense strand to SEQ ID NO: 1062484
ucuauacuuaccugagacc

SEQ ID NO: 1062486 - RNA, 19 nt, Artificial Sequence
  Description of Artificial Sequence: Synthetic oligonucleotide
  Sense strand starting at position 1217 of SEQ ID NO: 915210
gucucagguaaguauagau

SEQ ID NO: 1062487 - RNA, 19 nt, Artificial Sequence
  Description of Artificial Sequence: Synthetic oligonucleotide
  Antisense strand to SEQ ID NO: 1062486
aucuauacuuaccugagac

SEQ ID NO: 1062488 - RNA, 19 nt, Artificial Sequence
  Description of Artificial Sequence: Synthetic oligonucleotide
  Sense strand starting at position 1518 of SEQ ID NO: 915210
gcuuguguugaccaugaag

SEQ ID NO: 1062489 - RNA, 19 nt, Artificial Sequence
  Description of Artificial Sequence: Synthetic oligonucleotide
  Antisense strand to SEQ ID NO: 1062488
cuucauggucaacacaagc

SEQ ID NO: 1062490 - RNA, 19 nt, Artificial Sequence
  Description of Artificial Sequence: Synthetic oligonucleotide
  Sense strand starting at position 1583 of SEQ ID NO: 915210
cgguccuggacaugaucaa

SEQ ID NO: 1062491 - RNA, 19 nt, Artificial Sequence
  Description of Artificial Sequence: Synthetic oligonucleotide
  Antisense strand to SEQ ID NO: 1062490
uugaucauguccaggaccg

SEQ ID NO: 1062492 - RNA, 19 nt, Artificial Sequence
  Description of Artificial Sequence: Synthetic oligonucleotide
  Sense strand starting at position 1669 of SEQ ID NO: 915210
ucgguugucgccagggaga

SEQ ID NO: 1062493 - RNA, 19 nt, Artificial Sequence
  Description of Artificial Sequence: Synthetic oligonucleotide
  Antisense strand to SEQ ID NO: 1062492
ucucccuggcgacaaccga

SEQ ID NO: 1062494 - RNA, 19 nt, Artificial Sequence
  Description of Artificial Sequence: Synthetic oligonucleotide
  Sense strand starting at position 1672 of SEQ ID NO: 915210
guugucgccagggagauaa

SEQ ID NO: 1062495 - RNA, 19 nt, Artificial Sequence
  Description of Artificial Sequence: Synthetic oligonucleotide
  Antisense strand to SEQ ID NO: 1062494
uuaucucccuggcgacaac

SEQ ID NO: 1062496 - RNA, 19 nt, Artificial Sequence
  Description of Artificial Sequence: Synthetic oligonucleotide
  Sense strand starting at position 1802 of SEQ ID NO: 915210
acagguuagccaggaagaa

SEQ ID NO: 1062497 - RNA, 19 nt, Artificial Sequence
  Description of Artificial Sequence: Synthetic oligonucleotide
  Antisense strand to SEQ ID NO: 1062496
uucuuccuggcuaaccugu

SEQ ID NO: 1062498 - RNA, 19 nt, Artificial Sequence
  Description of Artificial Sequence: Synthetic oligonucleotide
  Sense strand starting at position 1885 of SEQ ID NO: 915210
acuguaaguguauaaauca

SEQ ID NO: 1062499 - RNA, 19 nt, Artificial Sequence
  Description of Artificial Sequence: Synthetic oligonucleotide
  Antisense strand to SEQ ID NO: 1062498
ugauuuauacacuuacagu

SEQ ID NO: 1062500 - RNA, 19 nt, Artificial Sequence
  Description of Artificial Sequence: Synthetic oligonucleotide
  Sense strand starting at position 1993 of SEQ ID NO: 915210
cuggucauuuaugagaaau

SEQ ID NO: 1062501 - RNA, 19 nt, Artificial Sequence
  Description of Artificial Sequence: Synthetic oligonucleotide
  Antisense strand to SEQ ID NO: 1062500
auuucucauaaaugaccag

SEQ ID NO: 1062502 - RNA, 19 nt, Artificial Sequence
  Description of Artificial Sequence: Synthetic oligonucleotide
  Sense strand starting at position 1995 of SEQ ID NO: 915210
ggucauuuaugagaaauau

SEQ ID NO: 1062503 - RNA, 19 nt, Artificial Sequence
  Description of Artificial Sequence: Synthetic oligonucleotide
  Antisense strand to SEQ ID NO: 1062502
auauuucucauaaaugacc

SEQ ID NO: 1062504 - RNA, 19 nt, Artificial Sequence
  Description of Artificial Sequence: Synthetic oligonucleotide
  Sense strand starting at position 2211 of SEQ ID NO: 915210
auuguauugaauuggaguu

SEQ ID NO: 1062505 - RNA, 19 nt, Artificial Sequence
  Description of Artificial Sequence: Synthetic oligonucleotide
  Antisense strand to SEQ ID NO: 1062504
aacuccaauucaauacaau

SEQ ID NO: 1062506 - RNA, 19 nt, Artificial Sequence
  Description of Artificial Sequence: Synthetic oligonucleotide
  Sense strand starting at position 2362 of SEQ ID NO: 915210
ccauucucagagcagguau

SEQ ID NO: 1062507 - RNA, 19 nt, Artificial Sequence
  Description of Artificial Sequence: Synthetic oligonucleotide
  Antisense strand to SEQ ID NO: 1062506
auaccugcucugagaaugg

SEQ ID NO: 1062508 - RNA, 19 nt, Artificial Sequence
  Description of Artificial Sequence: Synthetic oligonucleotide
  Sense strand starting at position 2369 of SEQ ID NO: 915210
cagagcagguaugugaauu

SEQ ID NO: 1062509 - RNA, 19 nt, Artificial Sequence
  Description of Artificial Sequence: Synthetic oligonucleotide
  Antisense strand to SEQ ID NO: 1062508
aauucacauaccugcucug

SEQ ID NO: 1062510 - RNA, 19 nt, Artificial Sequence
  Description of Artificial Sequence: Synthetic oligonucleotide
  Sense strand starting at position 2460 of SEQ ID NO: 915210
aucucuugagaauggcuua

SEQ ID NO: 1062511 - RNA, 19 nt, Artificial Sequence
  Description of Artificial Sequence: Synthetic oligonucleotide
  Antisense strand to SEQ ID NO: 1062510
uaagccauucucaagagau

SEQ ID NO: 1062512 - RNA, 19 nt, Artificial Sequence
  Description of Artificial Sequence: Synthetic oligonucleotide
  Sense strand starting at position 2465 of SEQ ID NO: 915210
uugagaauggcuuaugugu

SEQ ID NO: 1062513 - RNA, 19 nt, Artificial Sequence
  Description of Artificial Sequence: Synthetic oligonucleotide
  Antisense strand to SEQ ID NO: 1062512
acacauaagccauucucaa

SEQ ID NO: 1062514 - RNA, 19 nt, Artificial Sequence
  Description of Artificial Sequence: Synthetic oligonucleotide
  Sense strand starting at position 2700 of SEQ ID NO: 915210
cuacuuaccuaaguaagua

SEQ ID NO: 1062515 - RNA, 19 nt, Artificial Sequence
  Description of Artificial Sequence: Synthetic oligonucleotide
  Antisense strand to SEQ ID NO: 1062514
uacuuacuuagguaaguag

SEQ ID NO: 1062516 - RNA, 19 nt, Artificial Sequence
  Description of Artificial Sequence: Synthetic oligonucleotide
  Sense strand starting at position 2824 of SEQ ID NO: 915210
aucuuaagaugccuuauga

SEQ ID NO: 1062517 - RNA, 19 nt, Artificial Sequence
  Description of Artificial Sequence: Synthetic oligonucleotide
  Antisense strand to SEQ ID NO: 1062516
ucauaaggcaucuuaagau

SEQ ID NO: 1062518 - RNA, 19 nt, Artificial Sequence
  Description of Artificial Sequence: Synthetic oligonucleotide
  Sense strand starting at position 2917 of SEQ ID NO: 915210
cuauuaauugcagagucaa

SEQ ID NO: 1062519 - RNA, 19 nt, Artificial Sequence
  Description of Artificial Sequence: Synthetic oligonucleotide
  Antisense strand to SEQ ID NO: 1062518
uugacucugcaauuaauag

SEQ ID NO: 1062520 - RNA, 19 nt, Artificial Sequence
  Description of Artificial Sequence: Synthetic oligonucleotide
  Sense strand starting at position 3028 of SEQ ID NO: 915210
aucauaaagugguuuguga

SEQ ID NO: 1062521 - RNA, 19 nt, Artificial Sequence
  Description of Artificial Sequence: Synthetic oligonucleotide
  Antisense strand to SEQ ID NO: 1062520
ucacaaaccacuuuaugau

SEQ ID NO: 1062522 - RNA, 19 nt, Artificial Sequence
  Description of Artificial Sequence: Synthetic oligonucleotide
  Sense strand starting at position 3343 of SEQ ID NO: 915210
ugccguuacuauuugugau

SEQ ID NO: 1062523 - RNA, 19 nt, Artificial Sequence
  Description of Artificial Sequence: Synthetic oligonucleotide
  Antisense strand to SEQ ID NO: 1062522
aucacaaauaguaacggca

SEQ ID NO: 1062524 - RNA, 19 nt, Artificial Sequence
  Description of Artificial Sequence: Synthetic oligonucleotide
  Sense strand starting at position 3549 of SEQ ID NO: 915210
ucagguugacauuauuauu

SEQ ID NO: 1062525 - RNA, 19 nt, Artificial Sequence
  Description of Artificial Sequence: Synthetic oligonucleotide
  Antisense strand to SEQ ID NO: 1062524
aauaauaaugucaaccuga

SEQ ID NO: 1062526 - RNA, 19 nt, Artificial Sequence
  Description of Artificial Sequence: Synthetic oligonucleotide
  Sense strand starting at position 3624 of SEQ ID NO: 915210
agauaaacuguugguaagu

SEQ ID NO: 1062527 - RNA, 19 nt, Artificial Sequence
  Description of Artificial Sequence: Synthetic oligonucleotide
  Antisense strand to SEQ ID NO: 1062526
acuuaccaacaguuuaucu

SEQ ID NO: 1062528 - RNA, 19 nt, Artificial Sequence
  Description of Artificial Sequence: Synthetic oligonucleotide
  Sense strand starting at position 3625 of SEQ ID NO: 915210
gauaaacuguugguaagua

SEQ ID NO: 1062529 - RNA, 19 nt, Artificial Sequence
  Description of Artificial Sequence: Synthetic oligonucleotide
  Antisense strand to SEQ ID NO: 1062528
uacuuaccaacaguuuauc

SEQ ID NO: 1062530 - RNA, 19 nt, Artificial Sequence
  Description of Artificial Sequence: Synthetic oligonucleotide
  Sense strand starting at position 3691 of SEQ ID NO: 915210
gcucgcuauuuccuaucau

SEQ ID NO: 1062531 - RNA, 19 nt, Artificial Sequence
  Description of Artificial Sequence: Synthetic oligonucleotide
  Antisense strand to SEQ ID NO: 1062530
augauaggaaauagcgagc

SEQ ID NO: 1062532 - RNA, 19 nt, Artificial Sequence
  Description of Artificial Sequence: Synthetic oligonucleotide
  Sense strand starting at position 3745 of SEQ ID NO: 915210
guauguuuacguguaugug

SEQ ID NO: 1062533 - RNA, 19 nt, Artificial Sequence
  Description of Artificial Sequence: Synthetic oligonucleotide
  Antisense strand to SEQ ID NO: 1062532
cacauacacguaaacauac

SEQ ID NO: 1062534 - RNA, 19 nt, Artificial Sequence
  Description of Artificial Sequence: Synthetic oligonucleotide
  Sense strand starting at position 3903 of SEQ ID NO: 915210
ucaccaucaugucugauau

SEQ ID NO: 1062535 - RNA, 19 nt, Artificial Sequence
  Description of Artificial Sequence: Synthetic oligonucleotide
  Antisense strand to SEQ ID NO: 1062534
auaucagacaugaugguga

SEQ ID NO: 1062536 - RNA, 19 nt, Artificial Sequence
  Description of Artificial Sequence: Synthetic oligonucleotide
  Sense strand starting at position 102 of SEQ ID NO: 915211
cuggauugaucucccuaug

SEQ ID NO: 1062537 - RNA, 19 nt, Artificial Sequence
  Description of Artificial Sequence: Synthetic oligonucleotide
  Antisense strand to SEQ ID NO: 1062536
cauagggagaucaauccag

SEQ ID NO: 1062538 - RNA, 19 nt, Artificial Sequence
  Description of Artificial Sequence: Synthetic oligonucleotide
  Sense strand starting at position 107 of SEQ ID NO: 915211
uugaucucccuaugaggau

SEQ ID NO: 1062539 - RNA, 19 nt, Artificial Sequence
  Description of Artificial Sequence: Synthetic oligonucleotide
  Antisense strand to SEQ ID NO: 1062538
auccucauagggagaucaa

SEQ ID NO: 1062540 - RNA, 19 nt, Artificial Sequence
  Description of Artificial Sequence: Synthetic oligonucleotide
  Sense strand starting at position 124 of SEQ ID NO: 915211
auacaauuacgauagugua

SEQ ID NO: 1062541 - RNA, 19 nt, Artificial Sequence
  Description of Artificial Sequence: Synthetic oligonucleotide
  Antisense strand to SEQ ID NO: 1062540
uacacuaucguaauuguau

SEQ ID NO: 1062542 - RNA, 19 nt, Artificial Sequence
  Description of Artificial Sequence: Synthetic oligonucleotide
  Sense strand starting at position 271 of SEQ ID NO: 915211
ugcucaagccacuaagaaa

SEQ ID NO: 1062543 - RNA, 19 nt, Artificial Sequence
  Description of Artificial Sequence: Synthetic oligonucleotide
  Antisense strand to SEQ ID NO: 1062542
uuucuuaguggcuugagca

SEQ ID NO: 1062544 - RNA, 19 nt, Artificial Sequence
  Description of Artificial Sequence: Synthetic oligonucleotide
  Sense strand starting at position 321 of SEQ ID NO: 915211
uguagaaaguuaucaacau

SEQ ID NO: 1062545 - RNA, 19 nt, Artificial Sequence
  Description of Artificial Sequence: Synthetic oligonucleotide
  Antisense strand to SEQ ID NO: 1062544
auguugauaacuuucuaca

SEQ ID NO: 1062546 - RNA, 19 nt, Artificial Sequence
  Description of Artificial Sequence: Synthetic oligonucleotide
  Sense strand starting at position 475 of SEQ ID NO: 915211
cauguaaguguauauaaug

SEQ ID NO: 1062547 - RNA, 19 nt, Artificial Sequence
  Description of Artificial Sequence: Synthetic oligonucleotide
  Antisense strand to SEQ ID NO: 1062546
cauuauauacacuuacaug

SEQ ID NO: 1062548 - RNA, 19 nt, Artificial Sequence
  Description of Artificial Sequence: Synthetic oligonucleotide
  Sense strand starting at position 688 of SEQ ID NO: 915211
ccaguuauccaguaaucua

SEQ ID NO: 1062549 - RNA, 19 nt, Artificial Sequence
  Description of Artificial Sequence: Synthetic oligonucleotide
  Antisense strand to SEQ ID NO: 1062548
uagauuacuggauaacugg

SEQ ID NO: 1062550 - RNA, 19 nt, Artificial Sequence
  Description of Artificial Sequence: Synthetic oligonucleotide
  Sense strand starting at position 731 of SEQ ID NO: 915211
gauagauacgcacauguac

SEQ ID NO: 1062551 - RNA, 19 nt, Artificial Sequence
  Description of Artificial Sequence: Synthetic oligonucleotide
  Antisense strand to SEQ ID NO: 1062550
guacaugugcguaucuauc

SEQ ID NO: 1062552 - RNA, 19 nt, Artificial Sequence
  Description of Artificial Sequence: Synthetic oligonucleotide
  Sense strand starting at position 1003 of SEQ ID NO: 915211
ucccaauuacaguauguga

SEQ ID NO: 1062553 - RNA, 19 nt, Artificial Sequence
  Description of Artificial Sequence: Synthetic oligonucleotide
  Antisense strand to SEQ ID NO: 1062552
ucacauacuguaauuggga

SEQ ID NO: 1062554 - RNA, 19 nt, Artificial Sequence
  Description of Artificial Sequence: Synthetic oligonucleotide
  Sense strand starting at position 1010 of SEQ ID NO: 915211
uacaguaugugauugagaa

SEQ ID NO: 1062555 - RNA, 19 nt, Artificial Sequence
  Description of Artificial Sequence: Synthetic oligonucleotide
  Antisense strand to SEQ ID NO: 1062554
uucucaaucacauacugua

SEQ ID NO: 1062556 - RNA, 19 nt, Artificial Sequence
  Description of Artificial Sequence: Synthetic oligonucleotide
  Sense strand starting at position 1011 of SEQ ID NO: 915211
acaguaugugauugagaaa

SEQ ID NO: 1062557 - RNA, 19 nt, Artificial Sequence
  Description of Artificial Sequence: Synthetic oligonucleotide
  Antisense strand to SEQ ID NO: 1062556
uuucucaaucacauacugu

SEQ ID NO: 1062558 - RNA, 19 nt, Artificial Sequence
  Description of Artificial Sequence: Synthetic oligonucleotide
  Sense strand starting at position 1048 of SEQ ID NO: 915211
gcuuuaucucaugaagaau

SEQ ID NO: 1062559 - RNA, 19 nt, Artificial Sequence
  Description of Artificial Sequence: Synthetic oligonucleotide
  Antisense strand to SEQ ID NO: 1062558
auucuucaugagauaaagc

SEQ ID NO: 1062560 - RNA, 19 nt, Artificial Sequence
  Description of Artificial Sequence: Synthetic oligonucleotide
  Sense strand starting at position 1158 of SEQ ID NO: 915211
gguguagaacacugagaua

SEQ ID NO: 1062561 - RNA, 19 nt, Artificial Sequence
  Description of Artificial Sequence: Synthetic oligonucleotide
  Antisense strand to SEQ ID NO: 1062560
uaucucaguguucuacacc

SEQ ID NO: 1062562 - RNA, 19 nt, Artificial Sequence
  Description of Artificial Sequence: Synthetic oligonucleotide
  Sense strand starting at position 1179 of SEQ ID NO: 915211
uuuaucaguguuuggagaa

SEQ ID NO: 1062563 - RNA, 19 nt, Artificial Sequence
  Description of Artificial Sequence: Synthetic oligonucleotide
  Antisense strand to SEQ ID NO: 1062562
uucuccaaacacugauaaa

SEQ ID NO: 1062564 - RNA, 19 nt, Artificial Sequence
  Description of Artificial Sequence: Synthetic oligonucleotide
  Sense strand starting at position 1226 of SEQ ID NO: 915211
agaggagagucccuuggua

SEQ ID NO: 1062565 - RNA, 19 nt, Artificial Sequence
  Description of Artificial Sequence: Synthetic oligonucleotide
  Antisense strand to SEQ ID NO: 1062564
uaccaagggacucuccucu

SEQ ID NO: 1062566 - RNA, 19 nt, Artificial Sequence
  Description of Artificial Sequence: Synthetic oligonucleotide
  Sense strand starting at position 1228 of SEQ ID NO: 915211
aggagagucccuugguaga

SEQ ID NO: 1062567 - RNA, 19 nt, Artificial Sequence
  Description of Artificial Sequence: Synthetic oligonucleotide
  Antisense strand to SEQ ID NO: 1062566
ucuaccaagggacucuccu

SEQ ID NO: 1062568 - RNA, 19 nt, Artificial Sequence
  Description of Artificial Sequence: Synthetic oligonucleotide
  Sense strand starting at position 1239 of SEQ ID NO: 915211
uugguagaucgucacugaa

SEQ ID NO: 1062569 - RNA, 19 nt, Artificial Sequence
  Description of Artificial Sequence: Synthetic oligonucleotide
  Antisense strand to SEQ ID NO: 1062568
uucagugacgaucuaccaa

SEQ ID NO: 1062570 - RNA, 19 nt, Artificial Sequence
  Description of Artificial Sequence: Synthetic oligonucleotide
  Sense strand starting at position 1400 of SEQ ID NO: 915211
ggagccacucauuaauugu

SEQ ID NO: 1062571 - RNA, 19 nt, Artificial Sequence
  Description of Artificial Sequence: Synthetic oligonucleotide
  Antisense strand to SEQ ID NO: 1062570
acaauuaaugaguggcucc

SEQ ID NO: 1062572 - RNA, 19 nt, Artificial Sequence
  Description of Artificial Sequence: Synthetic oligonucleotide
  Sense strand starting at position 1586 of SEQ ID NO: 915211
acaucacaacuguguacaa

SEQ ID NO: 1062573 - RNA, 19 nt, Artificial Sequence
  Description of Artificial Sequence: Synthetic oligonucleotide
  Antisense strand to SEQ ID NO: 1062572
uuguacacaguugugaugu

SEQ ID NO: 1062574 - RNA, 19 nt, Artificial Sequence
  Description of Artificial Sequence: Synthetic oligonucleotide
  Sense strand starting at position 1725 of SEQ ID NO: 915211
uuuguucuccgagaggaaa

SEQ ID NO: 1062575 - RNA, 19 nt, Artificial Sequence
  Description of Artificial Sequence: Synthetic oligonucleotide
  Antisense strand to SEQ ID NO: 1062574
uuuccucucggagaacaaa

SEQ ID NO: 1062576 - RNA, 19 nt, Artificial Sequence
  Description of Artificial Sequence: Synthetic oligonucleotide
  Sense strand starting at position 1727 of SEQ ID NO: 915211
uguucuccgagaggaaauu

SEQ ID NO: 1062577 - RNA, 19 nt, Artificial Sequence
  Description of Artificial Sequence: Synthetic oligonucleotide
  Antisense strand to SEQ ID NO: 1062576
aauuuccucucggagaaca

SEQ ID NO: 1062578 - RNA, 19 nt, Artificial Sequence
  Description of Artificial Sequence: Synthetic oligonucleotide
  Sense strand starting at position 1792 of SEQ ID NO: 915211
aaugauagguugcuaagga

SEQ ID NO: 1062579 - RNA, 19 nt, Artificial Sequence
  Description of Artificial Sequence: Synthetic oligonucleotide
  Antisense strand to SEQ ID NO: 1062578
uccuuagcaaccuaucauu

SEQ ID NO: 1062580 - RNA, 19 nt, Artificial Sequence
  Description of Artificial Sequence: Synthetic oligonucleotide
  Sense strand starting at position 1979 of SEQ ID NO: 915211
aguuucuaucuguaaauuc

SEQ ID NO: 1062581 - RNA, 19 nt, Artificial Sequence
  Description of Artificial Sequence: Synthetic oligonucleotide
  Antisense strand to SEQ ID NO: 1062580
gaauuuacagauagaaacu

SEQ ID NO: 1062582 - RNA, 19 nt, Artificial Sequence
  Description of Artificial Sequence: Synthetic oligonucleotide
  Sense strand starting at position 2320 of SEQ ID NO: 915211
caauuacuggcccagagua

SEQ ID NO: 1062583 - RNA, 19 nt, Artificial Sequence
  Description of Artificial Sequence: Synthetic oligonucleotide
  Antisense strand to SEQ ID NO: 1062582
uacucugggccaguaauug

SEQ ID NO: 1062584 - RNA, 19 nt, Artificial Sequence
  Description of Artificial Sequence: Synthetic oligonucleotide
  Sense strand starting at position 2322 of SEQ ID NO: 915211
auuacuggcccagaguauu

SEQ ID NO: 1062585 - RNA, 19 nt, Artificial Sequence
  Description of Artificial Sequence: Synthetic oligonucleotide
  Antisense strand to SEQ ID NO: 1062584
aauacucugggccaguaau

SEQ ID NO: 1062586 - RNA, 19 nt, Artificial Sequence
  Description of Artificial Sequence: Synthetic oligonucleotide
  Sense strand starting at position 2325 of SEQ ID NO: 915211
acuggcccagaguauuaaa

SEQ ID NO: 1062587 - RNA, 19 nt, Artificial Sequence
  Description of Artificial Sequence: Synthetic oligonucleotide
  Antisense strand to SEQ ID NO: 1062586
uuuaauacucugggccagu

SEQ ID NO: 1062588 - RNA, 19 nt, Artificial Sequence
  Description of Artificial Sequence: Synthetic oligonucleotide
  Sense strand starting at position 2479 of SEQ ID NO: 915211
gauagauaccgguaugcug

SEQ ID NO: 1062589 - RNA, 19 nt, Artificial Sequence
  Description of Artificial Sequence: Synthetic oligonucleotide
  Antisense strand to SEQ ID NO: 1062588
cagcauaccgguaucuauc

SEQ ID NO: 1062590 - RNA, 19 nt, Artificial Sequence
  Description of Artificial Sequence: Synthetic oligonucleotide
  Sense strand starting at position 2500 of SEQ ID NO: 915211
ucucuugacugaguaaaua

SEQ ID NO: 1062591 - RNA, 19 nt, Artificial Sequence
  Description of Artificial Sequence: Synthetic oligonucleotide
  Antisense strand to SEQ ID NO: 1062590
uauuuacucagucaagaga

SEQ ID NO: 1062592 - RNA, 19 nt, Artificial Sequence
  Description of Artificial Sequence: Synthetic oligonucleotide
  Sense strand starting at position 2515 of SEQ ID NO: 915211
aauagaguggugugaugaa

SEQ ID NO: 1062593 - RNA, 19 nt, Artificial Sequence
  Description of Artificial Sequence: Synthetic oligonucleotide
  Antisense strand to SEQ ID NO: 1062592
uucaucacaccacucuauu

SEQ ID NO: 1062594 - RNA, 19 nt, Artificial Sequence
  Description of Artificial Sequence: Synthetic oligonucleotide
  Sense strand starting at position 2742 of SEQ ID NO: 915211
uggaaaugcucauuaaaca

SEQ ID NO: 1062595 - RNA, 19 nt, Artificial Sequence
  Description of Artificial Sequence: Synthetic oligonucleotide
  Antisense strand to SEQ ID NO: 1062594
uguuuaaugagcauuucca

SEQ ID NO: 1062596 - RNA, 19 nt, Artificial Sequence
  Description of Artificial Sequence: Synthetic oligonucleotide
  Sense strand starting at position 2758 of SEQ ID NO: 915211
acauuaguggacugaccaa

SEQ ID NO: 1062597 - RNA, 19 nt, Artificial Sequence
  Description of Artificial Sequence: Synthetic oligonucleotide
  Antisense strand to SEQ ID NO: 1062596
uuggucaguccacuaaugu

SEQ ID NO: 1062598 - RNA, 19 nt, Artificial Sequence
  Description of Artificial Sequence: Synthetic oligonucleotide
  Sense strand starting at position 2836 of SEQ ID NO: 915211
auggcaucaucacugauua

SEQ ID NO: 1062599 - RNA, 19 nt, Artificial Sequence
  Description of Artificial Sequence: Synthetic oligonucleotide
  Antisense strand to SEQ ID NO: 1062598
uaaucagugaugaugccau

SEQ ID NO: 1062600 - RNA, 19 nt, Artificial Sequence
  Description of Artificial Sequence: Synthetic oligonucleotide
  Sense strand starting at position 2837 of SEQ ID NO: 915211
uggcaucaucacugauuaa

SEQ ID NO: 1062601 - RNA, 19 nt, Artificial Sequence
  Description of Artificial Sequence: Synthetic oligonucleotide
  Antisense strand to SEQ ID NO: 1062600
uuaaucagugaugaugcca

SEQ ID NO: 1062602 - RNA, 19 nt, Artificial Sequence
  Description of Artificial Sequence: Synthetic oligonucleotide
  Sense strand starting at position 2982 of SEQ ID NO: 915211
uuaacuugacuuugaagua

SEQ ID NO: 1062603 - RNA, 19 nt, Artificial Sequence
  Description of Artificial Sequence: Synthetic oligonucleotide
  Antisense strand to SEQ ID NO: 1062602
uacuucaaagucaaguuaa

SEQ ID NO: 1062604 - RNA, 19 nt, Artificial Sequence
  Description of Artificial Sequence: Synthetic oligonucleotide
  Sense strand starting at position 3134 of SEQ ID NO: 915211
uugagucacugccucauuu

SEQ ID NO: 1062605 - RNA, 19 nt, Artificial Sequence
  Description of Artificial Sequence: Synthetic oligonucleotide
  Antisense strand to SEQ ID NO: 1062604
aaaugaggcagugacucaa

SEQ ID NO: 1062606 - RNA, 19 nt, Artificial Sequence
  Description of Artificial Sequence: Synthetic oligonucleotide
  Sense strand starting at position 3168 of SEQ ID NO: 915211
ugacaaugacagugcuaaa

SEQ ID NO: 1062607 - RNA, 19 nt, Artificial Sequence
  Description of Artificial Sequence: Synthetic oligonucleotide
  Antisense strand to SEQ ID NO: 1062606
uuuagcacugucauuguca

SEQ ID NO: 1062608 - RNA, 19 nt, Artificial Sequence
  Description of Artificial Sequence: Synthetic oligonucleotide
  Sense strand starting at position 3245 of SEQ ID NO: 915211
gccuauugauaaucagaag

SEQ ID NO: 1062609 - RNA, 19 nt, Artificial Sequence
  Description of Artificial Sequence: Synthetic oligonucleotide
  Antisense strand to SEQ ID NO: 1062608
cuucugauuaucaauaggc

SEQ ID NO: 1062610 - RNA, 19 nt, Artificial Sequence
  Description of Artificial Sequence: Synthetic oligonucleotide
  Sense strand starting at position 3734 of SEQ ID NO: 915211
cuguauaaugcuuacuaug

SEQ ID NO: 1062611 - RNA, 19 nt, Artificial Sequence
  Description of Artificial Sequence: Synthetic oligonucleotide
  Antisense strand to SEQ ID NO: 1062610
cauaguaagcauuauacag

SEQ ID NO: 1062612 - RNA, 19 nt, Artificial Sequence
  Description of Artificial Sequence: Synthetic oligonucleotide
  Sense strand starting at position 3888 of SEQ ID NO: 915211
gauuuaggaugugauggaa

SEQ ID NO: 1062613 - RNA, 19 nt, Artificial Sequence
  Description of Artificial Sequence: Synthetic oligonucleotide
  Antisense strand to SEQ ID NO: 1062612
uuccaucacauccuaaauc

SEQ ID NO: 1062614 - RNA, 19 nt, Artificial Sequence
  Description of Artificial Sequence: Synthetic oligonucleotide
  Sense strand starting at position 3944 of SEQ ID NO: 915211
augauacacugguucucua

SEQ ID NO: 1062615 - RNA, 19 nt, Artificial Sequence
  Description of Artificial Sequence: Synthetic oligonucleotide
  Antisense strand to SEQ ID NO: 1062614
uagagaaccaguguaucau

SEQ ID NO: 1062616 - RNA, 19 nt, Artificial Sequence
  Description of Artificial Sequence: Synthetic oligonucleotide
  Sense strand starting at position 70 of SEQ ID NO: 915212
uccucugaucaugauagua

SEQ ID NO: 1062617 - RNA, 19 nt, Artificial Sequence
  Description of Artificial Sequence: Synthetic oligonucleotide
  Antisense strand to SEQ ID NO: 1062616
uacuaucaugaucagagga

SEQ ID NO: 1062618 - RNA, 19 nt, Artificial Sequence
  Description of Artificial Sequence: Synthetic oligonucleotide
  Sense strand starting at position 307 of SEQ ID NO: 915212
cgauaaauuuguggaauuu

SEQ ID NO: 1062619 - RNA, 19 nt, Artificial Sequence
  Description of Artificial Sequence: Synthetic oligonucleotide
  Antisense strand to SEQ ID NO: 1062618
aaauuccacaaauuuaucg

SEQ ID NO: 1062620 - RNA, 19 nt, Artificial Sequence
  Description of Artificial Sequence: Synthetic oligonucleotide
  Sense strand starting at position 813 of SEQ ID NO: 915212
gauguaauacuguacuaug

SEQ ID NO: 1062621 - RNA, 19 nt, Artificial Sequence
  Description of Artificial Sequence: Synthetic oligonucleotide
  Antisense strand to SEQ ID NO: 1062620
cauaguacaguauuacauc

SEQ ID NO: 1062622 - RNA, 19 nt, Artificial Sequence
  Description of Artificial Sequence: Synthetic oligonucleotide
  Sense strand starting at position 835 of SEQ ID NO: 915212
ugauuauuacgugaauaac

SEQ ID NO: 1062623 - RNA, 19 nt, Artificial Sequence
  Description of Artificial Sequence: Synthetic oligonucleotide
  Antisense strand to SEQ ID NO: 1062622
guuauucacguaauaauca

SEQ ID NO: 1062624 - RNA, 19 nt, Artificial Sequence
  Description of Artificial Sequence: Synthetic oligonucleotide
  Sense strand starting at position 838 of SEQ ID NO: 915212
uuauuacgugaauaaccua

SEQ ID NO: 1062625 - RNA, 19 nt, Artificial Sequence
  Description of Artificial Sequence: Synthetic oligonucleotide
  Antisense strand to SEQ ID NO: 1062624
uagguuauucacguaauaa

SEQ ID NO: 1062626 - RNA, 19 nt, Artificial Sequence
  Description of Artificial Sequence: Synthetic oligonucleotide
  Sense strand starting at position 841 of SEQ ID NO: 915212
uuacgugaauaaccuagaa

SEQ ID NO: 1062627 - RNA, 19 nt, Artificial Sequence
  Description of Artificial Sequence: Synthetic oligonucleotide
  Antisense strand to SEQ ID NO: 1062626
uucuagguuauucacguaa

SEQ ID NO: 1062628 - RNA, 19 nt, Artificial Sequence
  Description of Artificial Sequence: Synthetic oligonucleotide
  Sense strand starting at position 901 of SEQ ID NO: 915212
agguaugugaauuaaguuu

SEQ ID NO: 1062629 - RNA, 19 nt, Artificial Sequence
  Description of Artificial Sequence: Synthetic oligonucleotide
  Antisense strand to SEQ ID NO: 1062628
aaacuuaauucacauaccu

SEQ ID NO: 1062630 - RNA, 19 nt, Artificial Sequence
  Description of Artificial Sequence: Synthetic oligonucleotide
  Sense strand starting at position 962 of SEQ ID NO: 915212
augagaauaucuguaaagu

SEQ ID NO: 1062631 - RNA, 19 nt, Artificial Sequence
  Description of Artificial Sequence: Synthetic oligonucleotide
  Antisense strand to SEQ ID NO: 1062630
acuuuacagauauucucau

SEQ ID NO: 1062632 - RNA, 19 nt, Artificial Sequence
  Description of Artificial Sequence: Synthetic oligonucleotide
  Sense strand starting at position 1000 of SEQ ID NO: 915212
cacggaauucuuggaagug

SEQ ID NO: 1062633 - RNA, 19 nt, Artificial Sequence
  Description of Artificial Sequence: Synthetic oligonucleotide
  Antisense strand to SEQ ID NO: 1062632
cacuuccaagaauuccgug

SEQ ID NO: 1062634 - RNA, 19 nt, Artificial Sequence
  Description of Artificial Sequence: Synthetic oligonucleotide
  Sense strand starting at position 1031 of SEQ ID NO: 915212
cagaauguuguaggauuaa

SEQ ID NO: 1062635 - RNA, 19 nt, Artificial Sequence
  Description of Artificial Sequence: Synthetic oligonucleotide
  Antisense strand to SEQ ID NO: 1062634
uuaauccuacaacauucug

SEQ ID NO: 1062636 - RNA, 19 nt, Artificial Sequence
  Description of Artificial Sequence: Synthetic oligonucleotide
  Sense strand starting at position 1055 of SEQ ID NO: 915212
acuugaaauuaacagagga

SEQ ID NO: 1062637 - RNA, 19 nt, Artificial Sequence
  Description of Artificial Sequence: Synthetic oligonucleotide
  Antisense strand to SEQ ID NO: 1062636
uccucuguuaauuucaagu

SEQ ID NO: 1062638 - RNA, 19 nt, Artificial Sequence
  Description of Artificial Sequence: Synthetic oligonucleotide
  Sense strand starting at position 2230 of SEQ ID NO: 915212
gcuagacagucucuaauau

SEQ ID NO: 1062639 - RNA, 19 nt, Artificial Sequence
  Description of Artificial Sequence: Synthetic oligonucleotide
  Antisense strand to SEQ ID NO: 1062638
auauuagagacugucuagc

SEQ ID NO: 1062640 - RNA, 19 nt, Artificial Sequence
  Description of Artificial Sequence: Synthetic oligonucleotide
  Sense strand starting at position 2269 of SEQ ID NO: 915212
gugcuuauaccucauagaa

SEQ ID NO: 1062641 - RNA, 19 nt, Artificial Sequence
  Description of Artificial Sequence: Synthetic oligonucleotide
  Antisense strand to SEQ ID NO: 1062640
uucuaugagguauaagcac

SEQ ID NO: 1062642 - RNA, 19 nt, Artificial Sequence
  Description of Artificial Sequence: Synthetic oligonucleotide
  Sense strand starting at position 2279 of SEQ ID NO: 915212
cucauagaaaucgaugugu

SEQ ID NO: 1062643 - RNA, 19 nt, Artificial Sequence
  Description of Artificial Sequence: Synthetic oligonucleotide
  Antisense strand to SEQ ID NO: 1062642
acacaucgauuucuaugag

SEQ ID NO: 1062644 - RNA, 19 nt, Artificial Sequence
  Description of Artificial Sequence: Synthetic oligonucleotide
  Sense strand starting at position 2281 of SEQ ID NO: 915212
cauagaaaucgauguguaa

SEQ ID NO: 1062645 - RNA, 19 nt, Artificial Sequence
  Description of Artificial Sequence: Synthetic oligonucleotide
  Antisense strand to SEQ ID NO: 1062644
uuacacaucgauuucuaug

SEQ ID NO: 1062646 - RNA, 19 nt, Artificial Sequence
  Description of Artificial Sequence: Synthetic oligonucleotide
  Sense strand starting at position 2317 of SEQ ID NO: 915212
agcaucugucucugaaaug

SEQ ID NO: 1062647 - RNA, 19 nt, Artificial Sequence
  Description of Artificial Sequence: Synthetic oligonucleotide
  Antisense strand to SEQ ID NO: 1062646
cauuucagagacagaugcu

SEQ ID NO: 1062648 - RNA, 19 nt, Artificial Sequence
  Description of Artificial Sequence: Synthetic oligonucleotide
  Sense strand starting at position 2329 of SEQ ID NO: 915212
ugaaaugucuagcuccaua

SEQ ID NO: 1062649 - RNA, 19 nt, Artificial Sequence
  Description of Artificial Sequence: Synthetic oligonucleotide
  Antisense strand to SEQ ID NO: 1062648
uauggagcuagacauuuca

SEQ ID NO: 1062650 - RNA, 19 nt, Artificial Sequence
  Description of Artificial Sequence: Synthetic oligonucleotide
  Sense strand starting at position 2441 of SEQ ID NO: 915212
ugaaacuccuuucugguaa

SEQ ID NO: 1062651 - RNA, 19 nt, Artificial Sequence
  Description of Artificial Sequence: Synthetic oligonucleotide
  Antisense strand to SEQ ID NO: 1062650
uuaccagaaaggaguuuca

SEQ ID NO: 1062652 - RNA, 19 nt, Artificial Sequence
  Description of Artificial Sequence: Synthetic oligonucleotide
  Sense strand starting at position 2538 of SEQ ID NO: 915212
acaguugcauuauuauaga

SEQ ID NO: 1062653 - RNA, 19 nt, Artificial Sequence
  Description of Artificial Sequence: Synthetic oligonucleotide
  Antisense strand to SEQ ID NO: 1062652
ucuauaauaaugcaacugu

SEQ ID NO: 1062654 - RNA, 19 nt, Artificial Sequence
  Description of Artificial Sequence: Synthetic oligonucleotide
  Sense strand starting at position 2767 of SEQ ID NO: 915212
gcaaucauggugggagagu

SEQ ID NO: 1062655 - RNA, 19 nt, Artificial Sequence
  Description of Artificial Sequence: Synthetic oligonucleotide
  Antisense strand to SEQ ID NO: 1062654
acucucccaccaugauugc

SEQ ID NO: 1062656 - RNA, 19 nt, Artificial Sequence
  Description of Artificial Sequence: Synthetic oligonucleotide
  Sense strand starting at position 2776 of SEQ ID NO: 915212
gugggagaguagcccuaau

SEQ ID NO: 1062657 - RNA, 19 nt, Artificial Sequence
  Description of Artificial Sequence: Synthetic oligonucleotide
  Antisense strand to SEQ ID NO: 1062656
auuagggcuacucucccac

SEQ ID NO: 1062658 - RNA, 19 nt, Artificial Sequence
  Description of Artificial Sequence: Synthetic oligonucleotide
  Sense strand starting at position 2793 of SEQ ID NO: 915212
aucauuuacucugagauug

SEQ ID NO: 1062659 - RNA, 19 nt, Artificial Sequence
  Description of Artificial Sequence: Synthetic oligonucleotide
  Antisense strand to SEQ ID NO: 1062658
caaucucagaguaaaugau

SEQ ID NO: 1062660 - RNA, 19 nt, Artificial Sequence
  Description of Artificial Sequence: Synthetic oligonucleotide
  Sense strand starting at position 2795 of SEQ ID NO: 915212
cauuuacucugagauugag

SEQ ID NO: 1062661 - RNA, 19 nt, Artificial Sequence
  Description of Artificial Sequence: Synthetic oligonucleotide
  Antisense strand to SEQ ID NO: 1062660
cucaaucucagaguaaaug

SEQ ID NO: 1062662 - RNA, 19 nt, Artificial Sequence
  Description of Artificial Sequence: Synthetic oligonucleotide
  Sense strand starting at position 3161 of SEQ ID NO: 915212
gucuauguguaauuuauac

SEQ ID NO: 1062663 - RNA, 19 nt, Artificial Sequence
  Description of Artificial Sequence: Synthetic oligonucleotide
  Antisense strand to SEQ ID NO: 1062662
guauaaauuacacauagac

SEQ ID NO: 1062664 - RNA, 19 nt, Artificial Sequence
  Description of Artificial Sequence: Synthetic oligonucleotide
  Sense strand starting at position 3313 of SEQ ID NO: 915212
ucuagaaucccugagugua

SEQ ID NO: 1062665 - RNA, 19 nt, Artificial Sequence
  Description of Artificial Sequence: Synthetic oligonucleotide
  Antisense strand to SEQ ID NO: 1062664
uacacucagggauucuaga

SEQ ID NO: 1062666 - RNA, 19 nt, Artificial Sequence
  Description of Artificial Sequence: Synthetic oligonucleotide
  Sense strand starting at position 3315 of SEQ ID NO: 915212
uagaaucccugaguguauu

SEQ ID NO: 1062667 - RNA, 19 nt, Artificial Sequence
  Description of Artificial Sequence: Synthetic oligonucleotide
  Antisense strand to SEQ ID NO: 1062666
aauacacucagggauucua

SEQ ID NO: 1062668 - RNA, 19 nt, Artificial Sequence
  Description of Artificial Sequence: Synthetic oligonucleotide
  Sense strand starting at position 3318 of SEQ ID NO: 915212
aaucccugaguguauugaa

SEQ ID NO: 1062669 - RNA, 19 nt, Artificial Sequence
  Description of Artificial Sequence: Synthetic oligonucleotide
  Antisense strand to SEQ ID NO: 1062668
uucaauacacucagggauu

SEQ ID NO: 1062670 - RNA, 19 nt, Artificial Sequence
  Description of Artificial Sequence: Synthetic oligonucleotide
  Sense strand starting at position 3325 of SEQ ID NO: 915212
gaguguauugaaggagugu

SEQ ID NO: 1062671 - RNA, 19 nt, Artificial Sequence
  Description of Artificial Sequence: Synthetic oligonucleotide
  Antisense strand to SEQ ID NO: 1062670
acacuccuucaauacacuc

SEQ ID NO: 1062672 - RNA, 19 nt, Artificial Sequence
  Description of Artificial Sequence: Synthetic oligonucleotide
  Sense strand starting at position 3326 of SEQ ID NO: 915212
aguguauugaaggagugua

SEQ ID NO: 1062673 - RNA, 19 nt, Artificial Sequence
  Description of Artificial Sequence: Synthetic oligonucleotide
  Antisense strand to SEQ ID NO: 1062672
uacacuccuucaauacacu

SEQ ID NO: 1062674 - RNA, 19 nt, Artificial Sequence
  Description of Artificial Sequence: Synthetic oligonucleotide
  Sense strand starting at position 3395 of SEQ ID NO: 915212
caaauuagauaguuacgua

SEQ ID NO: 1062675 - RNA, 19 nt, Artificial Sequence
  Description of Artificial Sequence: Synthetic oligonucleotide
  Antisense strand to SEQ ID NO: 1062674
uacguaacuaucuaauuug

SEQ ID NO: 1062676 - RNA, 19 nt, Artificial Sequence
  Description of Artificial Sequence: Synthetic oligonucleotide
  Sense strand starting at position 3450 of SEQ ID NO: 915212
gugauagacacuuagugua

SEQ ID NO: 1062677 - RNA, 19 nt, Artificial Sequence
  Description of Artificial Sequence: Synthetic oligonucleotide
  Antisense strand to SEQ ID NO: 1062676
uacacuaagugucuaucac

SEQ ID NO: 1062678 - RNA, 19 nt, Artificial Sequence
  Description of Artificial Sequence: Synthetic oligonucleotide
  Sense strand starting at position 3452 of SEQ ID NO: 915212
gauagacacuuaguguaau

SEQ ID NO: 1062679 - RNA, 19 nt, Artificial Sequence
  Description of Artificial Sequence: Synthetic oligonucleotide
  Antisense strand to SEQ ID NO: 1062678
auuacacuaagugucuauc

SEQ ID NO: 1062680 - RNA, 19 nt, Artificial Sequence
  Description of Artificial Sequence: Synthetic oligonucleotide
  Sense strand starting at position 3530 of SEQ ID NO: 915212
ugcagcauuucugcaaugu

SEQ ID NO: 1062681 - RNA, 19 nt, Artificial Sequence
  Description of Artificial Sequence: Synthetic oligonucleotide
  Antisense strand to SEQ ID NO: 1062680
acauugcagaaaugcugca

SEQ ID NO: 1062682 - RNA, 19 nt, Artificial Sequence
  Description of Artificial Sequence: Synthetic oligonucleotide
  Sense strand starting at position 3531 of SEQ ID NO: 915212
gcagcauuucugcaauguu

SEQ ID NO: 1062683 - RNA, 19 nt, Artificial Sequence
  Description of Artificial Sequence: Synthetic oligonucleotide
  Antisense strand to SEQ ID NO: 1062682
aacauugcagaaaugcugc

SEQ ID NO: 1062684 - RNA, 19 nt, Artificial Sequence
  Description of Artificial Sequence: Synthetic oligonucleotide
  Sense strand starting at position 3534 of SEQ ID NO: 915212
gcauuucugcaauguuuaa

SEQ ID NO: 1062685 - RNA, 19 nt, Artificial Sequence
  Description of Artificial Sequence: Synthetic oligonucleotide
  Antisense strand to SEQ ID NO: 1062684
uuaaacauugcagaaaugc

SEQ ID NO: 1062686 - RNA, 19 nt, Artificial Sequence
  Description of Artificial Sequence: Synthetic oligonucleotide
  Sense strand starting at position 3577 of SEQ ID NO: 915212
aguaaauguuuaucucaag

SEQ ID NO: 1062687 - RNA, 19 nt, Artificial Sequence
  Description of Artificial Sequence: Synthetic oligonucleotide
  Antisense strand to SEQ ID NO: 1062686
cuugagauaaacauuuacu

SEQ ID NO: 1062688 - RNA, 19 nt, Artificial Sequence
  Description of Artificial Sequence: Synthetic oligonucleotide
  Sense strand starting at position 3775 of SEQ ID NO: 915212
cuuagaauaucagcuggau

SEQ ID NO: 1062689 - RNA, 19 nt, Artificial Sequence
  Description of Artificial Sequence: Synthetic oligonucleotide
  Antisense strand to SEQ ID NO: 1062688
auccagcugauauucuaag

SEQ ID NO: 1062690 - RNA, 19 nt, Artificial Sequence
  Description of Artificial Sequence: Synthetic oligonucleotide
  Sense strand starting at position 3778 of SEQ ID NO: 915212
agaauaucagcuggauagu

SEQ ID NO: 1062691 - RNA, 19 nt, Artificial Sequence
  Description of Artificial Sequence: Synthetic oligonucleotide
  Antisense strand to SEQ ID NO: 1062690
acuauccagcugauauucu

SEQ ID NO: 1062692 - RNA, 19 nt, Artificial Sequence
  Description of Artificial Sequence: Synthetic oligonucleotide
  Sense strand starting at position 3779 of SEQ ID NO: 915212
gaauaucagcuggauaguu

SEQ ID NO: 1062693 - RNA, 19 nt, Artificial Sequence
  Description of Artificial Sequence: Synthetic oligonucleotide
  Antisense strand to SEQ ID NO: 1062692
aacuauccagcugauauuc

SEQ ID NO: 1062694 - RNA, 19 nt, Artificial Sequence
  Description of Artificial Sequence: Synthetic oligonucleotide
  Sense strand starting at position 3895 of SEQ ID NO: 915212
uguauaaguguacaacuuu

SEQ ID NO: 1062695 - RNA, 19 nt, Artificial Sequence
  Description of Artificial Sequence: Synthetic oligonucleotide
  Antisense strand to SEQ ID NO: 1062694
aaaguuguacacuuauaca

SEQ ID NO: 1062696 - RNA, 19 nt, Artificial Sequence
  Description of Artificial Sequence: Synthetic oligonucleotide
  Sense strand starting at position 31 of SEQ ID NO: 915213
gcaucaauggugcauauaa

SEQ ID NO: 1062697 - RNA, 19 nt, Artificial Sequence
  Description of Artificial Sequence: Synthetic oligonucleotide
  Antisense strand to SEQ ID NO: 1062696
uuauaugcaccauugaugc

SEQ ID NO: 1062698 - RNA, 19 nt, Artificial Sequence
  Description of Artificial Sequence: Synthetic oligonucleotide
  Sense strand starting at position 33 of SEQ ID NO: 915213
aucaauggugcauauaauu

SEQ ID NO: 1062699 - RNA, 19 nt, Artificial Sequence
  Description of Artificial Sequence: Synthetic oligonucleotide
  Antisense strand to SEQ ID NO: 1062698
aauuauaugcaccauugau

SEQ ID NO: 1062700 - RNA, 19 nt, Artificial Sequence
  Description of Artificial Sequence: Synthetic oligonucleotide
  Sense strand starting at position 163 of SEQ ID NO: 915213
uuauaagugucaguaagca

SEQ ID NO: 1062701 - RNA, 19 nt, Artificial Sequence
  Description of Artificial Sequence: Synthetic oligonucleotide
  Antisense strand to SEQ ID NO: 1062700
ugcuuacugacacuuauaa

SEQ ID NO: 1062702 - RNA, 19 nt, Artificial Sequence
  Description of Artificial Sequence: Synthetic oligonucleotide
  Sense strand starting at position 179 of SEQ ID NO: 915213
gcaugucuuccucaaugga

SEQ ID NO: 1062703 - RNA, 19 nt, Artificial Sequence
  Description of Artificial Sequence: Synthetic oligonucleotide
  Antisense strand to SEQ ID NO: 1062702
uccauugaggaagacaugc

SEQ ID NO: 1062704 - RNA, 19 nt, Artificial Sequence
  Description of Artificial Sequence: Synthetic oligonucleotide
  Sense strand starting at position 235 of SEQ ID NO: 915213
gugagagaagaugguuaau

SEQ ID NO: 1062705 - RNA, 19 nt, Artificial Sequence
  Description of Artificial Sequence: Synthetic oligonucleotide
  Antisense strand to SEQ ID NO: 1062704
auuaaccaucuucucucac

SEQ ID NO: 1062706 - RNA, 19 nt, Artificial Sequence
  Description of Artificial Sequence: Synthetic oligonucleotide
  Sense strand starting at position 295 of SEQ ID NO: 915213
gcacauguuuauguauaua

SEQ ID NO: 1062707 - RNA, 19 nt, Artificial Sequence
  Description of Artificial Sequence: Synthetic oligonucleotide
  Antisense strand to SEQ ID NO: 1062706
uauauacauaaacaugugc

SEQ ID NO: 1062708 - RNA, 19 nt, Artificial Sequence
  Description of Artificial Sequence: Synthetic oligonucleotide
  Sense strand starting at position 375 of SEQ ID NO: 915213
ggauuauucuaagcuccuu

SEQ ID NO: 1062709 - RNA, 19 nt, Artificial Sequence
  Description of Artificial Sequence: Synthetic oligonucleotide
  Antisense strand to SEQ ID NO: 1062708
aaggagcuuagaauaaucc

SEQ ID NO: 1062710 - RNA, 19 nt, Artificial Sequence
  Description of Artificial Sequence: Synthetic oligonucleotide
  Sense strand starting at position 380 of SEQ ID NO: 915213
auucuaagcuccuuguaag

SEQ ID NO: 1062711 - RNA, 19 nt, Artificial Sequence
  Description of Artificial Sequence: Synthetic oligonucleotide
  Antisense strand to SEQ ID NO: 1062710
cuuacaaggagcuuagaau

SEQ ID NO: 1062712 - RNA, 19 nt, Artificial Sequence
  Description of Artificial Sequence: Synthetic oligonucleotide
  Sense strand starting at position 426 of SEQ ID NO: 915213
ccuagaguccugugaaauu

SEQ ID NO: 1062713 - RNA, 19 nt, Artificial Sequence
  Description of Artificial Sequence: Synthetic oligonucleotide
  Antisense strand to SEQ ID NO: 1062712
aauuucacaggacucuagg

SEQ ID NO: 1062714 - RNA, 19 nt, Artificial Sequence
  Description of Artificial Sequence: Synthetic oligonucleotide
  Sense strand starting at position 716 of SEQ ID NO: 915213
aaagaaucguaguuuccau

SEQ ID NO: 1062715 - RNA, 19 nt, Artificial Sequence
  Description of Artificial Sequence: Synthetic oligonucleotide
  Antisense strand to SEQ ID NO: 1062714
auggaaacuacgauucuuu

SEQ ID NO: 1062716 - RNA, 19 nt, Artificial Sequence
  Description of Artificial Sequence: Synthetic oligonucleotide
  Sense strand starting at position 1035 of SEQ ID NO: 915213
ggaauccugaauugugcua

SEQ ID NO: 1062717 - RNA, 19 nt, Artificial Sequence
  Description of Artificial Sequence: Synthetic oligonucleotide
  Antisense strand to SEQ ID NO: 1062716
uagcacaauucaggauucc

SEQ ID NO: 1062718 - RNA, 19 nt, Artificial Sequence
  Description of Artificial Sequence: Synthetic oligonucleotide
  Sense strand starting at position 2002 of SEQ ID NO: 915213
gucuccaauuuauaugaga

SEQ ID NO: 1062719 - RNA, 19 nt, Artificial Sequence
  Description of Artificial Sequence: Synthetic oligonucleotide
  Antisense strand to SEQ ID NO: 1062718
ucucauauaaauuggagac

SEQ ID NO: 1062720 - RNA, 19 nt, Artificial Sequence
  Description of Artificial Sequence: Synthetic oligonucleotide
  Sense strand starting at position 2005 of SEQ ID NO: 915213
uccaauuuauaugagauug

SEQ ID NO: 1062721 - RNA, 19 nt, Artificial Sequence
  Description of Artificial Sequence: Synthetic oligonucleotide
  Antisense strand to SEQ ID NO: 1062720
caaucucauauaaauugga

SEQ ID NO: 1062722 - RNA, 19 nt, Artificial Sequence
  Description of Artificial Sequence: Synthetic oligonucleotide
  Sense strand starting at position 2111 of SEQ ID NO: 915213
aggauaguuuaucuuauca

SEQ ID NO: 1062723 - RNA, 19 nt, Artificial Sequence
  Description of Artificial Sequence: Synthetic oligonucleotide
  Antisense strand to SEQ ID NO: 1062722
ugauaagauaaacuauccu

SEQ ID NO: 1062724 - RNA, 19 nt, Artificial Sequence
  Description of Artificial Sequence: Synthetic oligonucleotide
  Sense strand starting at position 2463 of SEQ ID NO: 915213
gauguuagcagucaagugu

SEQ ID NO: 1062725 - RNA, 19 nt, Artificial Sequence
  Description of Artificial Sequence: Synthetic oligonucleotide
  Antisense strand to SEQ ID NO: 1062724
acacuugacugcuaacauc

SEQ ID NO: 1062726 - RNA, 19 nt, Artificial Sequence
  Description of Artificial Sequence: Synthetic oligonucleotide
  Sense strand starting at position 2471 of SEQ ID NO: 915213
cagucaaguguuugcauuu

SEQ ID NO: 1062727 - RNA, 19 nt, Artificial Sequence
  Description of Artificial Sequence: Synthetic oligonucleotide
  Antisense strand to SEQ ID NO: 1062726
aaaugcaaacacuugacug

SEQ ID NO: 1062728 - RNA, 19 nt, Artificial Sequence
  Description of Artificial Sequence: Synthetic oligonucleotide
  Sense strand starting at position 2553 of SEQ ID NO: 915213
uuaguauggugauuugguu

SEQ ID NO: 1062729 - RNA, 19 nt, Artificial Sequence
  Description of Artificial Sequence: Synthetic oligonucleotide
  Antisense strand to SEQ ID NO: 1062728
aaccaaaucaccauacuaa

SEQ ID NO: 1062730 - RNA, 19 nt, Artificial Sequence
  Description of Artificial Sequence: Synthetic oligonucleotide
  Sense strand starting at position 2584 of SEQ ID NO: 915213
caaugucagccaugguuua

SEQ ID NO: 1062731 - RNA, 19 nt, Artificial Sequence
  Description of Artificial Sequence: Synthetic oligonucleotide
  Antisense strand to SEQ ID NO: 1062730
uaaaccauggcugacauug

SEQ ID NO: 1062732 - RNA, 19 nt, Artificial Sequence
  Description of Artificial Sequence: Synthetic oligonucleotide
  Sense strand starting at position 2597 of SEQ ID NO: 915213
gguuuagggaauugguacu

SEQ ID NO: 1062733 - RNA, 19 nt, Artificial Sequence
  Description of Artificial Sequence: Synthetic oligonucleotide
  Antisense strand to SEQ ID NO: 1062732
aguaccaauucccuaaacc

SEQ ID NO: 1062734 - RNA, 19 nt, Artificial Sequence
  Description of Artificial Sequence: Synthetic oligonucleotide
  Sense strand starting at position 2709 of SEQ ID NO: 915213
caaagaugugcaugggaaa

SEQ ID NO: 1062735 - RNA, 19 nt, Artificial Sequence
  Description of Artificial Sequence: Synthetic oligonucleotide
  Antisense strand to SEQ ID NO: 1062734
uuucccaugcacaucuuug

SEQ ID NO: 1062736 - RNA, 19 nt, Artificial Sequence
  Description of Artificial Sequence: Synthetic oligonucleotide
  Sense strand starting at position 2710 of SEQ ID NO: 915213
aaagaugugcaugggaaau

SEQ ID NO: 1062737 - RNA, 19 nt, Artificial Sequence
  Description of Artificial Sequence: Synthetic oligonucleotide
  Antisense strand to SEQ ID NO: 1062736
auuucccaugcacaucuuu

SEQ ID NO: 1062738 - RNA, 19 nt, Artificial Sequence
  Description of Artificial Sequence: Synthetic oligonucleotide
  Sense strand starting at position 2720 of SEQ ID NO: 915213
augggaaauuacuaagaaa

SEQ ID NO: 1062739 - RNA, 19 nt, Artificial Sequence
  Description of Artificial Sequence: Synthetic oligonucleotide
  Antisense strand to SEQ ID NO: 1062738
uuucuuaguaauuucccau

SEQ ID NO: 1062740 - RNA, 19 nt, Artificial Sequence
  Description of Artificial Sequence: Synthetic oligonucleotide
  Sense strand starting at position 2806 of SEQ ID NO: 915213
gaaagaugaucacauuugu

SEQ ID NO: 1062741 - RNA, 19 nt, Artificial Sequence
  Description of Artificial Sequence: Synthetic oligonucleotide
  Antisense strand to SEQ ID NO: 1062740
acaaaugugaucaucuuuc

SEQ ID NO: 1062742 - RNA, 19 nt, Artificial Sequence
  Description of Artificial Sequence: Synthetic oligonucleotide
  Sense strand starting at position 3083 of SEQ ID NO: 915213
cauuauuagugagugaaau

SEQ ID NO: 1062743 - RNA, 19 nt, Artificial Sequence
  Description of Artificial Sequence: Synthetic oligonucleotide
  Antisense strand to SEQ ID NO: 1062742
auuucacucacuaauaaug

SEQ ID NO: 1062744 - RNA, 19 nt, Artificial Sequence
  Description of Artificial Sequence: Synthetic oligonucleotide
  Sense strand starting at position 3084 of SEQ ID NO: 915213
auuauuagugagugaaaug

SEQ ID NO: 1062745 - RNA, 19 nt, Artificial Sequence
  Description of Artificial Sequence: Synthetic oligonucleotide
  Antisense strand to SEQ ID NO: 1062744
cauuucacucacuaauaau

SEQ ID NO: 1062746 - RNA, 19 nt, Artificial Sequence
  Description of Artificial Sequence: Synthetic oligonucleotide
  Sense strand starting at position 3180 of SEQ ID NO: 915213
gugagaaucuugucauucu

SEQ ID NO: 1062747 - RNA, 19 nt, Artificial Sequence
  Description of Artificial Sequence: Synthetic oligonucleotide
  Antisense strand to SEQ ID NO: 1062746
agaaugacaagauucucac

SEQ ID NO: 1062748 - RNA, 19 nt, Artificial Sequence
  Description of Artificial Sequence: Synthetic oligonucleotide
  Sense strand starting at position 3328 of SEQ ID NO: 915213
agauaugcagcaugcauau

SEQ ID NO: 1062749 - RNA, 19 nt, Artificial Sequence
  Description of Artificial Sequence: Synthetic oligonucleotide
  Antisense strand to SEQ ID NO: 1062748
auaugcaugcugcauaucu

SEQ ID NO: 1062750 - RNA, 19 nt, Artificial Sequence
  Description of Artificial Sequence: Synthetic oligonucleotide
  Sense strand starting at position 3347 of SEQ ID NO: 915213
ugcuaaaugccagguugaa

SEQ ID NO: 1062751 - RNA, 19 nt, Artificial Sequence
  Description of Artificial Sequence: Synthetic oligonucleotide
  Antisense strand to SEQ ID NO: 1062750
uucaaccuggcauuuagca

SEQ ID NO: 1062752 - RNA, 19 nt, Artificial Sequence
  Description of Artificial Sequence: Synthetic oligonucleotide
  Sense strand starting at position 3420 of SEQ ID NO: 915213
aggugaguuguguaucuuc

SEQ ID NO: 1062753 - RNA, 19 nt, Artificial Sequence
  Description of Artificial Sequence: Synthetic oligonucleotide
  Antisense strand to SEQ ID NO: 1062752
gaagauacacaacucaccu

SEQ ID NO: 1062754 - RNA, 19 nt, Artificial Sequence
  Description of Artificial Sequence: Synthetic oligonucleotide
  Sense strand starting at position 3512 of SEQ ID NO: 915213
cuguuaauugcacauagag

SEQ ID NO: 1062755 - RNA, 19 nt, Artificial Sequence
  Description of Artificial Sequence: Synthetic oligonucleotide
  Antisense strand to SEQ ID NO: 1062754
cucuaugugcaauuaacag

SEQ ID NO: 1062756 - RNA, 19 nt, Artificial Sequence
  Description of Artificial Sequence: Synthetic oligonucleotide
  Sense strand starting at position 3554 of SEQ ID NO: 915213
cuuugaucccaauggcaua

SEQ ID NO: 1062757 - RNA, 19 nt, Artificial Sequence
  Description of Artificial Sequence: Synthetic oligonucleotide
  Antisense strand to SEQ ID NO: 1062756
uaugccauugggaucaaag

SEQ ID NO: 1062758 - RNA, 19 nt, Artificial Sequence
  Description of Artificial Sequence: Synthetic oligonucleotide
  Sense strand starting at position 3565 of SEQ ID NO: 915213
auggcauauuugucaaugu

SEQ ID NO: 1062759 - RNA, 19 nt, Artificial Sequence
  Description of Artificial Sequence: Synthetic oligonucleotide
  Antisense strand to SEQ ID NO: 1062758
acauugacaaauaugccau

SEQ ID NO: 1062760 - RNA, 19 nt, Artificial Sequence
  Description of Artificial Sequence: Synthetic oligonucleotide
  Sense strand starting at position 3640 of SEQ ID NO: 915213
gauguuguugaacaaucua

SEQ ID NO: 1062761 - RNA, 19 nt, Artificial Sequence
  Description of Artificial Sequence: Synthetic oligonucleotide
  Antisense strand to SEQ ID NO: 1062760
uagauuguucaacaacauc

SEQ ID NO: 1062762 - RNA, 19 nt, Artificial Sequence
  Description of Artificial Sequence: Synthetic oligonucleotide
  Sense strand starting at position 3710 of SEQ ID NO: 915213
aaacguuaucuggaccaac

SEQ ID NO: 1062763 - RNA, 19 nt, Artificial Sequence
  Description of Artificial Sequence: Synthetic oligonucleotide
  Antisense strand to SEQ ID NO: 1062762
guugguccagauaacguuu

SEQ ID NO: 1062764 - RNA, 19 nt, Artificial Sequence
  Description of Artificial Sequence: Synthetic oligonucleotide
  Sense strand starting at position 3713 of SEQ ID NO: 915213
cguuaucuggaccaacaau

SEQ ID NO: 1062765 - RNA, 19 nt, Artificial Sequence
  Description of Artificial Sequence: Synthetic oligonucleotide
  Antisense strand to SEQ ID NO: 1062764
auuguugguccagauaacg

SEQ ID NO: 1062766 - RNA, 19 nt, Artificial Sequence
  Description of Artificial Sequence: Synthetic oligonucleotide
  Sense strand starting at position 3734 of SEQ ID NO: 915213
aaugaugccuuaguugaga

SEQ ID NO: 1062767 - RNA, 19 nt, Artificial Sequence
  Description of Artificial Sequence: Synthetic oligonucleotide
  Antisense strand to SEQ ID NO: 1062766
ucucaacuaaggcaucauu

SEQ ID NO: 1062768 - RNA, 19 nt, Artificial Sequence
  Description of Artificial Sequence: Synthetic oligonucleotide
  Sense strand starting at position 3736 of SEQ ID NO: 915213
ugaugccuuaguugagaaa

SEQ ID NO: 1062769 - RNA, 19 nt, Artificial Sequence
  Description of Artificial Sequence: Synthetic oligonucleotide
  Antisense strand to SEQ ID NO: 1062768
uuucucaacuaaggcauca

SEQ ID NO: 1062770 - RNA, 19 nt, Artificial Sequence
  Description of Artificial Sequence: Synthetic oligonucleotide
  Sense strand starting at position 3907 of SEQ ID NO: 915213
uggagauaaucuccaugca

SEQ ID NO: 1062771 - RNA, 19 nt, Artificial Sequence
  Description of Artificial Sequence: Synthetic oligonucleotide
  Antisense strand to SEQ ID NO: 1062770
ugcauggagauuaucucca

SEQ ID NO: 1062772 - RNA, 19 nt, Artificial Sequence
  Description of Artificial Sequence: Synthetic oligonucleotide
  Sense strand starting at position 3910 of SEQ ID NO: 915213
agauaaucuccaugcaguc

SEQ ID NO: 1062773 - RNA, 19 nt, Artificial Sequence
  Description of Artificial Sequence: Synthetic oligonucleotide
  Antisense strand to SEQ ID NO: 1062772
gacugcauggagauuaucu

SEQ ID NO: 1062774 - RNA, 19 nt, Artificial Sequence
  Description of Artificial Sequence: Synthetic oligonucleotide
  Sense strand starting at position 3943 of SEQ ID NO: 915213
uggacagaguuagugugau

SEQ ID NO: 1062775 - RNA, 19 nt, Artificial Sequence
  Description of Artificial Sequence: Synthetic oligonucleotide
  Antisense strand to SEQ ID NO: 1062774
aucacacuaacucugucca

SEQ ID NO: 1062776 - RNA, 19 nt, Artificial Sequence
  Description of Artificial Sequence: Synthetic oligonucleotide
  Sense strand starting at position 35 of SEQ ID NO: 915214
auaagucguaauggaauca

SEQ ID NO: 1062777 - RNA, 19 nt, Artificial Sequence
  Description of Artificial Sequence: Synthetic oligonucleotide
  Antisense strand to SEQ ID NO: 1062776
ugauuccauuacgacuuau

SEQ ID NO: 1062778 - RNA, 19 nt, Artificial Sequence
  Description of Artificial Sequence: Synthetic oligonucleotide
  Sense strand starting at position 62 of SEQ ID NO: 915214
gcauuaauggugcauauaa

SEQ ID NO: 1062779 - RNA, 19 nt, Artificial Sequence
  Description of Artificial Sequence: Synthetic oligonucleotide
  Antisense strand to SEQ ID NO: 1062778
uuauaugcaccauuaaugc

SEQ ID NO: 1062780 - RNA, 19 nt, Artificial Sequence
  Description of Artificial Sequence: Synthetic oligonucleotide
  Sense strand starting at position 89 of SEQ ID NO: 915214
ggaauuaagaaaugugguu

SEQ ID NO: 1062781 - RNA, 19 nt, Artificial Sequence
  Description of Artificial Sequence: Synthetic oligonucleotide
  Antisense strand to SEQ ID NO: 1062780
aaccacauuucuuaauucc

SEQ ID NO: 1062782 - RNA, 19 nt, Artificial Sequence
  Description of Artificial Sequence: Synthetic oligonucleotide
  Sense strand starting at position 240 of SEQ ID NO: 915214
guaugaagauaagcaguaa

SEQ ID NO: 1062783 - RNA, 19 nt, Artificial Sequence
  Description of Artificial Sequence: Synthetic oligonucleotide
  Antisense strand to SEQ ID NO: 1062782
uuacugcuuaucuucauac

SEQ ID NO: 1062784 - RNA, 19 nt, Artificial Sequence
  Description of Artificial Sequence: Synthetic oligonucleotide
  Sense strand starting at position 384 of SEQ ID NO: 915214
gcguaauguagguagagag

SEQ ID NO: 1062785 - RNA, 19 nt, Artificial Sequence
  Description of Artificial Sequence: Synthetic oligonucleotide
  Antisense strand to SEQ ID NO: 1062784
cucucuaccuacauuacgc

SEQ ID NO: 1062786 - RNA, 19 nt, Artificial Sequence
  Description of Artificial Sequence: Synthetic oligonucleotide
  Sense strand starting at position 416 of SEQ ID NO: 915214
aauuauguuccagggauua

SEQ ID NO: 1062787 - RNA, 19 nt, Artificial Sequence
  Description of Artificial Sequence: Synthetic oligonucleotide
  Antisense strand to SEQ ID NO: 1062786
uaaucccuggaacauaauu

SEQ ID NO: 1062788 - RNA, 19 nt, Artificial Sequence
  Description of Artificial Sequence: Synthetic oligonucleotide
  Sense strand starting at position 421 of SEQ ID NO: 915214
uguuccagggauuauucua

SEQ ID NO: 1062789 - RNA, 19 nt, Artificial Sequence
  Description of Artificial Sequence: Synthetic oligonucleotide
  Antisense strand to SEQ ID NO: 1062788
uagaauaaucccuggaaca

SEQ ID NO: 1062790 - RNA, 19 nt, Artificial Sequence
  Description of Artificial Sequence: Synthetic oligonucleotide
  Sense strand starting at position 429 of SEQ ID NO: 915214
ggauuauucuaagcucuuu

SEQ ID NO: 1062791 - RNA, 19 nt, Artificial Sequence
  Description of Artificial Sequence: Synthetic oligonucleotide
  Antisense strand to SEQ ID NO: 1062790
aaagagcuuagaauaaucc

SEQ ID NO: 1062792 - RNA, 19 nt, Artificial Sequence
  Description of Artificial Sequence: Synthetic oligonucleotide
  Sense strand starting at position 643 of SEQ ID NO: 915214
auggaauucucauucugua

SEQ ID NO: 1062793 - RNA, 19 nt, Artificial Sequence
  Description of Artificial Sequence: Synthetic oligonucleotide
  Antisense strand to SEQ ID NO: 1062792
uacagaaugagaauuccau

SEQ ID NO: 1062794 - RNA, 19 nt, Artificial Sequence
  Description of Artificial Sequence: Synthetic oligonucleotide
  Sense strand starting at position 663 of SEQ ID NO: 915214
acacuuugacgauggugua

SEQ ID NO: 1062795 - RNA, 19 nt, Artificial Sequence
  Description of Artificial Sequence: Synthetic oligonucleotide
  Antisense strand to SEQ ID NO: 1062794
uacaccaucgucaaagugu

SEQ ID NO: 1062796 - RNA, 19 nt, Artificial Sequence
  Description of Artificial Sequence: Synthetic oligonucleotide
  Sense strand starting at position 664 of SEQ ID NO: 915214
cacuuugacgaugguguaa

SEQ ID NO: 1062797 - RNA, 19 nt, Artificial Sequence
  Description of Artificial Sequence: Synthetic oligonucleotide
  Antisense strand to SEQ ID NO: 1062796
uuacaccaucgucaaagug

SEQ ID NO: 1062798 - RNA, 19 nt, Artificial Sequence
  Description of Artificial Sequence: Synthetic oligonucleotide
  Sense strand starting at position 675 of SEQ ID NO: 915214
ugguguaaucgucauuaua

SEQ ID NO: 1062799 - RNA, 19 nt, Artificial Sequence
  Description of Artificial Sequence: Synthetic oligonucleotide
  Antisense strand to SEQ ID NO: 1062798
uauaaugacgauuacacca

SEQ ID NO: 1062800 - RNA, 19 nt, Artificial Sequence
  Description of Artificial Sequence: Synthetic oligonucleotide
  Sense strand starting at position 752 of SEQ ID NO: 915214
aaguguaacuccucugagu

SEQ ID NO: 1062801 - RNA, 19 nt, Artificial Sequence
  Description of Artificial Sequence: Synthetic oligonucleotide
  Antisense strand to SEQ ID NO: 1062800
acucagaggaguuacacuu

SEQ ID NO: 1062802 - RNA, 19 nt, Artificial Sequence
  Description of Artificial Sequence: Synthetic oligonucleotide
  Sense strand starting at position 829 of SEQ ID NO: 915214
uguggcucauauccauuua

SEQ ID NO: 1062803 - RNA, 19 nt, Artificial Sequence
  Description of Artificial Sequence: Synthetic oligonucleotide
  Antisense strand to SEQ ID NO: 1062802
uaaauggauaugagccaca

SEQ ID NO: 1062804 - RNA, 19 nt, Artificial Sequence
  Description of Artificial Sequence: Synthetic oligonucleotide
  Sense strand starting at position 1039 of SEQ ID NO: 915214
uccugaauucugugaauaa

SEQ ID NO: 1062805 - RNA, 19 nt, Artificial Sequence
  Description of Artificial Sequence: Synthetic oligonucleotide
  Antisense strand to SEQ ID NO: 1062804
uuauucacagaauucagga

SEQ ID NO: 1062806 - RNA, 19 nt, Artificial Sequence
  Description of Artificial Sequence: Synthetic oligonucleotide
  Sense strand starting at position 2266 of SEQ ID NO: 915214
ucuuucucaguugagacau

SEQ ID NO: 1062807 - RNA, 19 nt, Artificial Sequence
  Description of Artificial Sequence: Synthetic oligonucleotide
  Antisense strand to SEQ ID NO: 1062806
augucucaacugagaaaga

SEQ ID NO: 1062808 - RNA, 19 nt, Artificial Sequence
  Description of Artificial Sequence: Synthetic oligonucleotide
  Sense strand starting at position 2306 of SEQ ID NO: 915214
gagguaaaguuguuuaauu

SEQ ID NO: 1062809 - RNA, 19 nt, Artificial Sequence
  Description of Artificial Sequence: Synthetic oligonucleotide
  Antisense strand to SEQ ID NO: 1062808
aauuaaacaacuuuaccuc

SEQ ID NO: 1062810 - RNA, 19 nt, Artificial Sequence
  Description of Artificial Sequence: Synthetic oligonucleotide
  Sense strand starting at position 2314 of SEQ ID NO: 915214
guuguuuaauuugccuuau

SEQ ID NO: 1062811 - RNA, 19 nt, Artificial Sequence
  Description of Artificial Sequence: Synthetic oligonucleotide
  Antisense strand to SEQ ID NO: 1062810
auaaggcaaauuaaacaac

SEQ ID NO: 1062812 - RNA, 19 nt, Artificial Sequence
  Description of Artificial Sequence: Synthetic oligonucleotide
  Sense strand starting at position 2316 of SEQ ID NO: 915214
uguuuaauuugccuuauga

SEQ ID NO: 1062813 - RNA, 19 nt, Artificial Sequence
  Description of Artificial Sequence: Synthetic oligonucleotide
  Antisense strand to SEQ ID NO: 1062812
ucauaaggcaaauuaaaca

SEQ ID NO: 1062814 - RNA, 19 nt, Artificial Sequence
  Description of Artificial Sequence: Synthetic oligonucleotide
  Sense strand starting at position 2604 of SEQ ID NO: 915214
gggaauugguacucuugag

SEQ ID NO: 1062815 - RNA, 19 nt, Artificial Sequence
  Description of Artificial Sequence: Synthetic oligonucleotide
  Antisense strand to SEQ ID NO: 1062814
cucaagaguaccaauuccc

SEQ ID NO: 1062816 - RNA, 19 nt, Artificial Sequence
  Description of Artificial Sequence: Synthetic oligonucleotide
  Sense strand starting at position 2608 of SEQ ID NO: 915214
auugguacucuugagcaca

SEQ ID NO: 1062817 - RNA, 19 nt, Artificial Sequence
  Description of Artificial Sequence: Synthetic oligonucleotide
  Antisense strand to SEQ ID NO: 1062816
ugugcucaagaguaccaau

SEQ ID NO: 1062818 - RNA, 19 nt, Artificial Sequence
  Description of Artificial Sequence: Synthetic oligonucleotide
  Sense strand starting at position 2611 of SEQ ID NO: 915214
gguacucuugagcacaacu

SEQ ID NO: 1062819 - RNA, 19 nt, Artificial Sequence
  Description of Artificial Sequence: Synthetic oligonucleotide
  Antisense strand to SEQ ID NO: 1062818
aguugugcucaagaguacc

SEQ ID NO: 1062820 - RNA, 19 nt, Artificial Sequence
  Description of Artificial Sequence: Synthetic oligonucleotide
  Sense strand starting at position 2708 of SEQ ID NO: 915214
gaucaaagaugugcauaga

SEQ ID NO: 1062821 - RNA, 19 nt, Artificial Sequence
  Description of Artificial Sequence: Synthetic oligonucleotide
  Antisense strand to SEQ ID NO: 1062820
ucuaugcacaucuuugauc

SEQ ID NO: 1062822 - RNA, 19 nt, Artificial Sequence
  Description of Artificial Sequence: Synthetic oligonucleotide
  Sense strand starting at position 2812 of SEQ ID NO: 915214
uggucacaaauguaguaua

SEQ ID NO: 1062823 - RNA, 19 nt, Artificial Sequence
  Description of Artificial Sequence: Synthetic oligonucleotide
  Antisense strand to SEQ ID NO: 1062822
uauacuacauuugugacca

SEQ ID NO: 1062824 - RNA, 19 nt, Artificial Sequence
  Description of Artificial Sequence: Synthetic oligonucleotide
  Sense strand starting at position 2857 of SEQ ID NO: 915214
aaaggauaagacugcgaua

SEQ ID NO: 1062825 - RNA, 19 nt, Artificial Sequence
  Description of Artificial Sequence: Synthetic oligonucleotide
  Antisense strand to SEQ ID NO: 1062824
uaucgcagucuuauccuuu

SEQ ID NO: 1062826 - RNA, 19 nt, Artificial Sequence
  Description of Artificial Sequence: Synthetic oligonucleotide
  Sense strand starting at position 2859 of SEQ ID NO: 915214
aggauaagacugcgauaaa

SEQ ID NO: 1062827 - RNA, 19 nt, Artificial Sequence
  Description of Artificial Sequence: Synthetic oligonucleotide
  Antisense strand to SEQ ID NO: 1062826
uuuaucgcagucuuauccu

SEQ ID NO: 1062828 - RNA, 19 nt, Artificial Sequence
  Description of Artificial Sequence: Synthetic oligonucleotide
  Sense strand starting at position 3000 of SEQ ID NO: 915214
gugcaacaucaaugagcau

SEQ ID NO: 1062829 - RNA, 19 nt, Artificial Sequence
  Description of Artificial Sequence: Synthetic oligonucleotide
  Antisense strand to SEQ ID NO: 1062828
augcucauugauguugcac

SEQ ID NO: 1062830 - RNA, 19 nt, Artificial Sequence
  Description of Artificial Sequence: Synthetic oligonucleotide
  Sense strand starting at position 3155 of SEQ ID NO: 915214
guguaaagugagggugaga

SEQ ID NO: 1062831 - RNA, 19 nt, Artificial Sequence
  Description of Artificial Sequence: Synthetic oligonucleotide
  Antisense strand to SEQ ID NO: 1062830
ucucacccucacuuuacac

SEQ ID NO: 1062832 - RNA, 19 nt, Artificial Sequence
  Description of Artificial Sequence: Synthetic oligonucleotide
  Sense strand starting at position 3168 of SEQ ID NO: 915214
gugagaagcuuccuauucu

SEQ ID NO: 1062833 - RNA, 19 nt, Artificial Sequence
  Description of Artificial Sequence: Synthetic oligonucleotide
  Antisense strand to SEQ ID NO: 1062832
agaauaggaagcuucucac

SEQ ID NO: 1062834 - RNA, 19 nt, Artificial Sequence
  Description of Artificial Sequence: Synthetic oligonucleotide
  Sense strand starting at position 3189 of SEQ ID NO: 915214
cucccugacccuugauaga

SEQ ID NO: 1062835 - RNA, 19 nt, Artificial Sequence
  Description of Artificial Sequence: Synthetic oligonucleotide
  Antisense strand to SEQ ID NO: 1062834
ucuaucaagggucagggag

SEQ ID NO: 1062836 - RNA, 19 nt, Artificial Sequence
  Description of Artificial Sequence: Synthetic oligonucleotide
  Sense strand starting at position 3235 of SEQ ID NO: 915214
ugagcacucugggcagaaa

SEQ ID NO: 1062837 - RNA, 19 nt, Artificial Sequence
  Description of Artificial Sequence: Synthetic oligonucleotide
  Antisense strand to SEQ ID NO: 1062836
uuucugcccagagugcuca

SEQ ID NO: 1062838 - RNA, 19 nt, Artificial Sequence
  Description of Artificial Sequence: Synthetic oligonucleotide
  Sense strand starting at position 3397 of SEQ ID NO: 915214
ccaggagaaguauguuaca

SEQ ID NO: 1062839 - RNA, 19 nt, Artificial Sequence
  Description of Artificial Sequence: Synthetic oligonucleotide
  Antisense strand to SEQ ID NO: 1062838
uguaacauacuucuccugg

SEQ ID NO: 1062840 - RNA, 19 nt, Artificial Sequence
  Description of Artificial Sequence: Synthetic oligonucleotide
  Sense strand starting at position 3493 of SEQ ID NO: 915214
cuguuaauugcccauagag

SEQ ID NO: 1062841 - RNA, 19 nt, Artificial Sequence
  Description of Artificial Sequence: Synthetic oligonucleotide
  Antisense strand to SEQ ID NO: 1062840
cucuaugggcaauuaacag

SEQ ID NO: 1062842 - RNA, 19 nt, Artificial Sequence
  Description of Artificial Sequence: Synthetic oligonucleotide
  Sense strand starting at position 3495 of SEQ ID NO: 915214
guuaauugcccauagagca

SEQ ID NO: 1062843 - RNA, 19 nt, Artificial Sequence
  Description of Artificial Sequence: Synthetic oligonucleotide
  Antisense strand to SEQ ID NO: 1062842
ugcucuaugggcaauuaac

SEQ ID NO: 1062844 - RNA, 19 nt, Artificial Sequence
  Description of Artificial Sequence: Synthetic oligonucleotide
  Sense strand starting at position 3535 of SEQ ID NO: 915214
cuugaaucccaguggaaua

SEQ ID NO: 1062845 - RNA, 19 nt, Artificial Sequence
  Description of Artificial Sequence: Synthetic oligonucleotide
  Antisense strand to SEQ ID NO: 1062844
uauuccacugggauucaag

SEQ ID NO: 1062846 - RNA, 19 nt, Artificial Sequence
  Description of Artificial Sequence: Synthetic oligonucleotide
  Sense strand starting at position 3600 of SEQ ID NO: 915214
gugcuauugacauguagag

SEQ ID NO: 1062847 - RNA, 19 nt, Artificial Sequence
  Description of Artificial Sequence: Synthetic oligonucleotide
  Antisense strand to SEQ ID NO: 1062846
cucuacaugucaauagcac

SEQ ID NO: 1062848 - RNA, 19 nt, Artificial Sequence
  Description of Artificial Sequence: Synthetic oligonucleotide
  Sense strand starting at position 3720 of SEQ ID NO: 915214
ugccuuauuugagaaaccu

SEQ ID NO: 1062849 - RNA, 19 nt, Artificial Sequence
  Description of Artificial Sequence: Synthetic oligonucleotide
  Antisense strand to SEQ ID NO: 1062848
agguuucucaaauaaggca

SEQ ID NO: 1062850 - RNA, 19 nt, Artificial Sequence
  Description of Artificial Sequence: Synthetic oligonucleotide
  Sense strand starting at position 3756 of SEQ ID NO: 915214
caaagugauuugcacaaag

SEQ ID NO: 1062851 - RNA, 19 nt, Artificial Sequence
  Description of Artificial Sequence: Synthetic oligonucleotide
  Antisense strand to SEQ ID NO: 1062850
cuuugugcaaaucacuuug

SEQ ID NO: 1062852 - RNA, 19 nt, Artificial Sequence
  Description of Artificial Sequence: Synthetic oligonucleotide
  Sense strand starting at position 3917 of SEQ ID NO: 915214
cauggacagaguuagugua

SEQ ID NO: 1062853 - RNA, 19 nt, Artificial Sequence
  Description of Artificial Sequence: Synthetic oligonucleotide
  Antisense strand to SEQ ID NO: 1062852
uacacuaacucuguccaug

SEQ ID NO: 1062854 - RNA, 19 nt, Artificial Sequence
  Description of Artificial Sequence: Synthetic oligonucleotide
  Sense strand starting at position 3919 of SEQ ID NO: 915214
uggacagaguuaguguaau

SEQ ID NO: 1062855 - RNA, 19 nt, Artificial Sequence
  Description of Artificial Sequence: Synthetic oligonucleotide
  Antisense strand to SEQ ID NO: 1062854
auuacacuaacucugucca

SEQ ID NO: 1062856 - RNA, 19 nt, Artificial Sequence
  Description of Artificial Sequence: Synthetic oligonucleotide
  Sense strand starting at position 60 of SEQ ID NO: 915215
agucaucugguugacuaau

SEQ ID NO: 1062857 - RNA, 19 nt, Artificial Sequence
  Description of Artificial Sequence: Synthetic oligonucleotide
  Antisense strand to SEQ ID NO: 1062856
auuagucaaccagaugacu

SEQ ID NO: 1062858 - RNA, 19 nt, Artificial Sequence
  Description of Artificial Sequence: Synthetic oligonucleotide
  Sense strand starting at position 62 of SEQ ID NO: 915215
ucaucugguugacuaauaa

SEQ ID NO: 1062859 - RNA, 19 nt, Artificial Sequence
  Description of Artificial Sequence: Synthetic oligonucleotide
  Antisense strand to SEQ ID NO: 1062858
uuauuagucaaccagauga

SEQ ID NO: 1062860 - RNA, 19 nt, Artificial Sequence
  Description of Artificial Sequence: Synthetic oligonucleotide
  Sense strand starting at position 73 of SEQ ID NO: 915215
acuaauaaugcauggauua

SEQ ID NO: 1062861 - RNA, 19 nt, Artificial Sequence
  Description of Artificial Sequence: Synthetic oligonucleotide
  Antisense strand to SEQ ID NO: 1062860
uaauccaugcauuauuagu

SEQ ID NO: 1062862 - RNA, 19 nt, Artificial Sequence
  Description of Artificial Sequence: Synthetic oligonucleotide
  Sense strand starting at position 74 of SEQ ID NO: 915215
cuaauaaugcauggauuaa

SEQ ID NO: 1062863 - RNA, 19 nt, Artificial Sequence
  Description of Artificial Sequence: Synthetic oligonucleotide
  Antisense strand to SEQ ID NO: 1062862
uuaauccaugcauuauuag

SEQ ID NO: 1062864 - RNA, 19 nt, Artificial Sequence
  Description of Artificial Sequence: Synthetic oligonucleotide
  Sense strand starting at position 362 of SEQ ID NO: 915215
cuggaaugcaguuaaagua

SEQ ID NO: 1062865 - RNA, 19 nt, Artificial Sequence
  Description of Artificial Sequence: Synthetic oligonucleotide
  Antisense strand to SEQ ID NO: 1062864
uacuuuaacugcauuccag

SEQ ID NO: 1062866 - RNA, 19 nt, Artificial Sequence
  Description of Artificial Sequence: Synthetic oligonucleotide
  Sense strand starting at position 370 of SEQ ID NO: 915215
caguuaaaguaguuugaug

SEQ ID NO: 1062867 - RNA, 19 nt, Artificial Sequence
  Description of Artificial Sequence: Synthetic oligonucleotide
  Antisense strand to SEQ ID NO: 1062866
caucaaacuacuuuaacug

SEQ ID NO: 1062868 - RNA, 19 nt, Artificial Sequence
  Description of Artificial Sequence: Synthetic oligonucleotide
  Sense strand starting at position 372 of SEQ ID NO: 915215
guuaaaguaguuugaugau

SEQ ID NO: 1062869 - RNA, 19 nt, Artificial Sequence
  Description of Artificial Sequence: Synthetic oligonucleotide
  Antisense strand to SEQ ID NO: 1062868
aucaucaaacuacuuuaac

SEQ ID NO: 1062870 - RNA, 19 nt, Artificial Sequence
  Description of Artificial Sequence: Synthetic oligonucleotide
  Sense strand starting at position 455 of SEQ ID NO: 915215
gacgauaaccaguauuauc

SEQ ID NO: 1062871 - RNA, 19 nt, Artificial Sequence
  Description of Artificial Sequence: Synthetic oligonucleotide
  Antisense strand to SEQ ID NO: 1062870
gauaauacugguuaucguc

SEQ ID NO: 1062872 - RNA, 19 nt, Artificial Sequence
  Description of Artificial Sequence: Synthetic oligonucleotide
  Sense strand starting at position 496 of SEQ ID NO: 915215
ucaagauauuuacaagaug

SEQ ID NO: 1062873 - RNA, 19 nt, Artificial Sequence
  Description of Artificial Sequence: Synthetic oligonucleotide
  Antisense strand to SEQ ID NO: 1062872
caucuuguaaauaucuuga

SEQ ID NO: 1062874 - RNA, 19 nt, Artificial Sequence
  Description of Artificial Sequence: Synthetic oligonucleotide
  Sense strand starting at position 697 of SEQ ID NO: 915215
ggcucuguggaccaucaua

SEQ ID NO: 1062875 - RNA, 19 nt, Artificial Sequence
  Description of Artificial Sequence: Synthetic oligonucleotide
  Antisense strand to SEQ ID NO: 1062874
uaugaugguccacagagcc

SEQ ID NO: 1062876 - RNA, 19 nt, Artificial Sequence
  Description of Artificial Sequence: Synthetic oligonucleotide
  Sense strand starting at position 919 of SEQ ID NO: 915215
ucauuuggauaagaaagua

SEQ ID NO: 1062877 - RNA, 19 nt, Artificial Sequence
  Description of Artificial Sequence: Synthetic oligonucleotide
  Antisense strand to SEQ ID NO: 1062876
uacuuucuuauccaaauga

SEQ ID NO: 1062878 - RNA, 19 nt, Artificial Sequence
  Description of Artificial Sequence: Synthetic oligonucleotide
  Sense strand starting at position 932 of SEQ ID NO: 915215
aaaguaaagugguuacuga

SEQ ID NO: 1062879 - RNA, 19 nt, Artificial Sequence
  Description of Artificial Sequence: Synthetic oligonucleotide
  Antisense strand to SEQ ID NO: 1062878
ucaguaaccacuuuacuuu

SEQ ID NO: 1062880 - RNA, 19 nt, Artificial Sequence
  Description of Artificial Sequence: Synthetic oligonucleotide
  Sense strand starting at position 946 of SEQ ID NO: 915215
acugacaguccaugauguu

SEQ ID NO: 1062881 - RNA, 19 nt, Artificial Sequence
  Description of Artificial Sequence: Synthetic oligonucleotide
  Antisense strand to SEQ ID NO: 1062880
aacaucauggacugucagu

SEQ ID NO: 1062882 - RNA, 19 nt, Artificial Sequence
  Description of Artificial Sequence: Synthetic oligonucleotide
  Sense strand starting at position 947 of SEQ ID NO: 915215
cugacaguccaugauguua

SEQ ID NO: 1062883 - RNA, 19 nt, Artificial Sequence
  Description of Artificial Sequence: Synthetic oligonucleotide
  Antisense strand to SEQ ID NO: 1062882
uaacaucauggacugucag

SEQ ID NO: 1062884 - RNA, 19 nt, Artificial Sequence
  Description of Artificial Sequence: Synthetic oligonucleotide
  Sense strand starting at position 1509 of SEQ ID NO: 915215
aaagguuagcagugacuga

SEQ ID NO: 1062885 - RNA, 19 nt, Artificial Sequence
  Description of Artificial Sequence: Synthetic oligonucleotide
  Antisense strand to SEQ ID NO: 1062884
ucagucacugcuaaccuuu

SEQ ID NO: 1062886 - RNA, 19 nt, Artificial Sequence
  Description of Artificial Sequence: Synthetic oligonucleotide
  Sense strand starting at position 1513 of SEQ ID NO: 915215
guuagcagugacugagaga

SEQ ID NO: 1062887 - RNA, 19 nt, Artificial Sequence
  Description of Artificial Sequence: Synthetic oligonucleotide
  Antisense strand to SEQ ID NO: 1062886
ucucucagucacugcuaac

SEQ ID NO: 1062888 - RNA, 19 nt, Artificial Sequence
  Description of Artificial Sequence: Synthetic oligonucleotide
  Sense strand starting at position 1578 of SEQ ID NO: 915215
acagauguucuuggacauc

SEQ ID NO: 1062889 - RNA, 19 nt, Artificial Sequence
  Description of Artificial Sequence: Synthetic oligonucleotide
  Antisense strand to SEQ ID NO: 1062888
gauguccaagaacaucugu

SEQ ID NO: 1062890 - RNA, 19 nt, Artificial Sequence
  Description of Artificial Sequence: Synthetic oligonucleotide
  Sense strand starting at position 1895 of SEQ ID NO: 915215
gguagaucgcaaggaauac

SEQ ID NO: 1062891 - RNA, 19 nt, Artificial Sequence
  Description of Artificial Sequence: Synthetic oligonucleotide
  Antisense strand to SEQ ID NO: 1062890
guauuccuugcgaucuacc

SEQ ID NO: 1062892 - RNA, 19 nt, Artificial Sequence
  Description of Artificial Sequence: Synthetic oligonucleotide
  Sense strand starting at position 1991 of SEQ ID NO: 915215
gggagaacaucuucuuauc

SEQ ID NO: 1062893 - RNA, 19 nt, Artificial Sequence
  Description of Artificial Sequence: Synthetic oligonucleotide
  Antisense strand to SEQ ID NO: 1062892
gauaagaagauguucuccc

SEQ ID NO: 1062894 - RNA, 19 nt, Artificial Sequence
  Description of Artificial Sequence: Synthetic oligonucleotide
  Sense strand starting at position 2028 of SEQ ID NO: 915215
caaagaaugugaggauuuc

SEQ ID NO: 1062895 - RNA, 19 nt, Artificial Sequence
  Description of Artificial Sequence: Synthetic oligonucleotide
  Antisense strand to SEQ ID NO: 1062894
gaaauccucacauucuuug

SEQ ID NO: 1062896 - RNA, 19 nt, Artificial Sequence
  Description of Artificial Sequence: Synthetic oligonucleotide
  Sense strand starting at position 2136 of SEQ ID NO: 915215
auaaucacaucggaaauuu

SEQ ID NO: 1062897 - RNA, 19 nt, Artificial Sequence
  Description of Artificial Sequence: Synthetic oligonucleotide
  Antisense strand to SEQ ID NO: 1062896
aaauuuccgaugugauuau

SEQ ID NO: 1062898 - RNA, 19 nt, Artificial Sequence
  Description of Artificial Sequence: Synthetic oligonucleotide
  Sense strand starting at position 2428 of SEQ ID NO: 915215
aaggaagucugaucuuuau

SEQ ID NO: 1062899 - RNA, 19 nt, Artificial Sequence
  Description of Artificial Sequence: Synthetic oligonucleotide
  Antisense strand to SEQ ID NO: 1062898
auaaagaucagacuuccuu

SEQ ID NO: 1062900 - RNA, 19 nt, Artificial Sequence
  Description of Artificial Sequence: Synthetic oligonucleotide
  Sense strand starting at position 2434 of SEQ ID NO: 915215
gucugaucuuuauuauacc

SEQ ID NO: 1062901 - RNA, 19 nt, Artificial Sequence
  Description of Artificial Sequence: Synthetic oligonucleotide
  Antisense strand to SEQ ID NO: 1062900
gguauaauaaagaucagac

SEQ ID NO: 1062902 - RNA, 19 nt, Artificial Sequence
  Description of Artificial Sequence: Synthetic oligonucleotide
  Sense strand starting at position 2582 of SEQ ID NO: 915215
ucugauauauggcuaagag

SEQ ID NO: 1062903 - RNA, 19 nt, Artificial Sequence
  Description of Artificial Sequence: Synthetic oligonucleotide
  Antisense strand to SEQ ID NO: 1062902
cucuuagccauauaucaga

SEQ ID NO: 1062904 - RNA, 19 nt, Artificial Sequence
  Description of Artificial Sequence: Synthetic oligonucleotide
  Sense strand starting at position 2699 of SEQ ID NO: 915215
cgguuacuacaguaaacaa

SEQ ID NO: 1062905 - RNA, 19 nt, Artificial Sequence
  Description of Artificial Sequence: Synthetic oligonucleotide
  Antisense strand to SEQ ID NO: 1062904
uuguuuacuguaguaaccg

SEQ ID NO: 1062906 - RNA, 19 nt, Artificial Sequence
  Description of Artificial Sequence: Synthetic oligonucleotide
  Sense strand starting at position 2989 of SEQ ID NO: 915215
augacaauauuguuuaggu

SEQ ID NO: 1062907 - RNA, 19 nt, Artificial Sequence
  Description of Artificial Sequence: Synthetic oligonucleotide
  Antisense strand to SEQ ID NO: 1062906
accuaaacaauauugucau

SEQ ID NO: 1062908 - RNA, 19 nt, Artificial Sequence
  Description of Artificial Sequence: Synthetic oligonucleotide
  Sense strand starting at position 2990 of SEQ ID NO: 915215
ugacaauauuguuuaggua

SEQ ID NO: 1062909 - RNA, 19 nt, Artificial Sequence
  Description of Artificial Sequence: Synthetic oligonucleotide
  Antisense strand to SEQ ID NO: 1062908
uaccuaaacaauauuguca

SEQ ID NO: 1062910 - RNA, 19 nt, Artificial Sequence
  Description of Artificial Sequence: Synthetic oligonucleotide
  Sense strand starting at position 2991 of SEQ ID NO: 915215
gacaauauuguuuagguau

SEQ ID NO: 1062911 - RNA, 19 nt, Artificial Sequence
  Description of Artificial Sequence: Synthetic oligonucleotide
  Antisense strand to SEQ ID NO: 1062910
auaccuaaacaauauuguc

SEQ ID NO: 1062912 - RNA, 19 nt, Artificial Sequence
  Description of Artificial Sequence: Synthetic oligonucleotide
  Sense strand starting at position 3124 of SEQ ID NO: 915215
agccauuguuuauuuaguu

SEQ ID NO: 1062913 - RNA, 19 nt, Artificial Sequence
  Description of Artificial Sequence: Synthetic oligonucleotide
  Antisense strand to SEQ ID NO: 1062912
aacuaaauaaacaauggcu

SEQ ID NO: 1062914 - RNA, 19 nt, Artificial Sequence
  Description of Artificial Sequence: Synthetic oligonucleotide
  Sense strand starting at position 3139 of SEQ ID NO: 915215
aguucucauguauacauca

SEQ ID NO: 1062915 - RNA, 19 nt, Artificial Sequence
  Description of Artificial Sequence: Synthetic oligonucleotide
  Antisense strand to SEQ ID NO: 1062914
ugauguauacaugagaacu

SEQ ID NO: 1062916 - RNA, 19 nt, Artificial Sequence
  Description of Artificial Sequence: Synthetic oligonucleotide
  Sense strand starting at position 3168 of SEQ ID NO: 915215
cauauaauugauuguagag

SEQ ID NO: 1062917 - RNA, 19 nt, Artificial Sequence
  Description of Artificial Sequence: Synthetic oligonucleotide
  Antisense strand to SEQ ID NO: 1062916
cucuacaaucaauuauaug

SEQ ID NO: 1062918 - RNA, 19 nt, Artificial Sequence
  Description of Artificial Sequence: Synthetic oligonucleotide
  Sense strand starting at position 3416 of SEQ ID NO: 915215
uuagguaucuucccuagag

SEQ ID NO: 1062919 - RNA, 19 nt, Artificial Sequence
  Description of Artificial Sequence: Synthetic oligonucleotide
  Antisense strand to SEQ ID NO: 1062918
cucuagggaagauaccuaa

SEQ ID NO: 1062920 - RNA, 19 nt, Artificial Sequence
  Description of Artificial Sequence: Synthetic oligonucleotide
  Sense strand starting at position 3418 of SEQ ID NO: 915215
agguaucuucccuagagua

SEQ ID NO: 1062921 - RNA, 19 nt, Artificial Sequence
  Description of Artificial Sequence: Synthetic oligonucleotide
  Antisense strand to SEQ ID NO: 1062920
uacucuagggaagauaccu

SEQ ID NO: 1062922 - RNA, 19 nt, Artificial Sequence
  Description of Artificial Sequence: Synthetic oligonucleotide
  Sense strand starting at position 3420 of SEQ ID NO: 915215
guaucuucccuagaguauu

SEQ ID NO: 1062923 - RNA, 19 nt, Artificial Sequence
  Description of Artificial Sequence: Synthetic oligonucleotide
  Antisense strand to SEQ ID NO: 1062922
aauacucuagggaagauac

SEQ ID NO: 1062924 - RNA, 19 nt, Artificial Sequence
  Description of Artificial Sequence: Synthetic oligonucleotide
  Sense strand starting at position 3474 of SEQ ID NO: 915215
uuuguuccucaagagcaua

SEQ ID NO: 1062925 - RNA, 19 nt, Artificial Sequence
  Description of Artificial Sequence: Synthetic oligonucleotide
  Antisense strand to SEQ ID NO: 1062924
uaugcucuugaggaacaaa

SEQ ID NO: 1062926 - RNA, 19 nt, Artificial Sequence
  Description of Artificial Sequence: Synthetic oligonucleotide
  Sense strand starting at position 3521 of SEQ ID NO: 915215
acucuccugcgaggauaaa

SEQ ID NO: 1062927 - RNA, 19 nt, Artificial Sequence
  Description of Artificial Sequence: Synthetic oligonucleotide
  Antisense strand to SEQ ID NO: 1062926
uuuauccucgcaggagagu

SEQ ID NO: 1062928 - RNA, 19 nt, Artificial Sequence
  Description of Artificial Sequence: Synthetic oligonucleotide
  Sense strand starting at position 3569 of SEQ ID NO: 915215
gguacaagugugcaugaga

SEQ ID NO: 1062929 - RNA, 19 nt, Artificial Sequence
  Description of Artificial Sequence: Synthetic oligonucleotide
  Antisense strand to SEQ ID NO: 1062928
ucucaugcacacuuguacc

SEQ ID NO: 1062930 - RNA, 19 nt, Artificial Sequence
  Description of Artificial Sequence: Synthetic oligonucleotide
  Sense strand starting at position 3580 of SEQ ID NO: 915215
gcaugagauccuuaguaca

SEQ ID NO: 1062931 - RNA, 19 nt, Artificial Sequence
  Description of Artificial Sequence: Synthetic oligonucleotide
  Antisense strand to SEQ ID NO: 1062930
uguacuaaggaucucaugc

SEQ ID NO: 1062932 - RNA, 19 nt, Artificial Sequence
  Description of Artificial Sequence: Synthetic oligonucleotide
  Sense strand starting at position 3822 of SEQ ID NO: 915215
guggcauaaucaguagaag

SEQ ID NO: 1062933 - RNA, 19 nt, Artificial Sequence
  Description of Artificial Sequence: Synthetic oligonucleotide
  Antisense strand to SEQ ID NO: 1062932
cuucuacugauuaugccac

SEQ ID NO: 1062934 - RNA, 19 nt, Artificial Sequence
  Description of Artificial Sequence: Synthetic oligonucleotide
  Sense strand starting at position 3912 of SEQ ID NO: 915215
cugcacuaucaagguuaau

SEQ ID NO: 1062935 - RNA, 19 nt, Artificial Sequence
  Description of Artificial Sequence: Synthetic oligonucleotide
  Antisense strand to SEQ ID NO: 1062934
auuaaccuugauagugcag

SEQ ID NO: 1062936 - RNA, 19 nt, Artificial Sequence
  Description of Artificial Sequence: Synthetic oligonucleotide
  Sense strand starting at position 40 of SEQ ID NO: 915216
guggaaugcaauugaagua

SEQ ID NO: 1062937 - RNA, 19 nt, Artificial Sequence
  Description of Artificial Sequence: Synthetic oligonucleotide
  Antisense strand to SEQ ID NO: 1062936
uacuucaauugcauuccac

SEQ ID NO: 1062938 - RNA, 19 nt, Artificial Sequence
  Description of Artificial Sequence: Synthetic oligonucleotide
  Sense strand starting at position 168 of SEQ ID NO: 915216
auaagaagcuucucacgau

SEQ ID NO: 1062939 - RNA, 19 nt, Artificial Sequence
  Description of Artificial Sequence: Synthetic oligonucleotide
  Antisense strand to SEQ ID NO: 1062938
aucgugagaagcuucuuau

SEQ ID NO: 1062940 - RNA, 19 nt, Artificial Sequence
  Description of Artificial Sequence: Synthetic oligonucleotide
  Sense strand starting at position 172 of SEQ ID NO: 915216
gaagcuucucacgauguuu

SEQ ID NO: 1062941 - RNA, 19 nt, Artificial Sequence
  Description of Artificial Sequence: Synthetic oligonucleotide
  Antisense strand to SEQ ID NO: 1062940
aaacaucgugagaagcuuc

SEQ ID NO: 1062942 - RNA, 19 nt, Artificial Sequence
  Description of Artificial Sequence: Synthetic oligonucleotide
  Sense strand starting at position 256 of SEQ ID NO: 915216
uuugcacagugauuacaau

SEQ ID NO: 1062943 - RNA, 19 nt, Artificial Sequence
  Description of Artificial Sequence: Synthetic oligonucleotide
  Antisense strand to SEQ ID NO: 1062942
auuguaaucacugugcaaa

SEQ ID NO: 1062944 - RNA, 19 nt, Artificial Sequence
  Description of Artificial Sequence: Synthetic oligonucleotide
  Sense strand starting at position 257 of SEQ ID NO: 915216
uugcacagugauuacaaua

SEQ ID NO: 1062945 - RNA, 19 nt, Artificial Sequence
  Description of Artificial Sequence: Synthetic oligonucleotide
  Antisense strand to SEQ ID NO: 1062944
uauuguaaucacugugcaa

SEQ ID NO: 1062946 - RNA, 19 nt, Artificial Sequence
  Description of Artificial Sequence: Synthetic oligonucleotide
  Sense strand starting at position 708 of SEQ ID NO: 915216
ucacuauggcucuauggau

SEQ ID NO: 1062947 - RNA, 19 nt, Artificial Sequence
  Description of Artificial Sequence: Synthetic oligonucleotide
  Antisense strand to SEQ ID NO: 1062946
auccauagagccauaguga

SEQ ID NO: 1062948 - RNA, 19 nt, Artificial Sequence
  Description of Artificial Sequence: Synthetic oligonucleotide
  Sense strand starting at position 714 of SEQ ID NO: 915216
uggcucuauggauaguaau

SEQ ID NO: 1062949 - RNA, 19 nt, Artificial Sequence
  Description of Artificial Sequence: Synthetic oligonucleotide
  Antisense strand to SEQ ID NO: 1062948
auuacuauccauagagcca

SEQ ID NO: 1062950 - RNA, 19 nt, Artificial Sequence
  Description of Artificial Sequence: Synthetic oligonucleotide
  Sense strand starting at position 758 of SEQ ID NO: 915216
uuucucucaggcuaaguua

SEQ ID NO: 1062951 - RNA, 19 nt, Artificial Sequence
  Description of Artificial Sequence: Synthetic oligonucleotide
  Antisense strand to SEQ ID NO: 1062950
uaacuuagccugagagaaa

SEQ ID NO: 1062952 - RNA, 19 nt, Artificial Sequence
  Description of Artificial Sequence: Synthetic oligonucleotide
  Sense strand starting at position 1094 of SEQ ID NO: 915216
guuguauggcaaggauuac

SEQ ID NO: 1062953 - RNA, 19 nt, Artificial Sequence
  Description of Artificial Sequence: Synthetic oligonucleotide
  Antisense strand to SEQ ID NO: 1062952
guaauccuugccauacaac

SEQ ID NO: 1062954 - RNA, 19 nt, Artificial Sequence
  Description of Artificial Sequence: Synthetic oligonucleotide
  Sense strand starting at position 1095 of SEQ ID NO: 915216
uuguauggcaaggauuaca

SEQ ID NO: 1062955 - RNA, 19 nt, Artificial Sequence
  Description of Artificial Sequence: Synthetic oligonucleotide
  Antisense strand to SEQ ID NO: 1062954
uguaauccuugccauacaa

SEQ ID NO: 1062956 - RNA, 19 nt, Artificial Sequence
  Description of Artificial Sequence: Synthetic oligonucleotide
  Sense strand starting at position 1380 of SEQ ID NO: 915216
gagaguaaagccugcaacu

SEQ ID NO: 1062957 - RNA, 19 nt, Artificial Sequence
  Description of Artificial Sequence: Synthetic oligonucleotide
  Antisense strand to SEQ ID NO: 1062956
aguugcaggcuuuacucuc

SEQ ID NO: 1062958 - RNA, 19 nt, Artificial Sequence
  Description of Artificial Sequence: Synthetic oligonucleotide
  Sense strand starting at position 1576 of SEQ ID NO: 915216
augcaaauguucuuggaca

SEQ ID NO: 1062959 - RNA, 19 nt, Artificial Sequence
  Description of Artificial Sequence: Synthetic oligonucleotide
  Antisense strand to SEQ ID NO: 1062958
uguccaagaacauuugcau

SEQ ID NO: 1062960 - RNA, 19 nt, Artificial Sequence
  Description of Artificial Sequence: Synthetic oligonucleotide
  Sense strand starting at position 1578 of SEQ ID NO: 915216
gcaaauguucuuggacauc

SEQ ID NO: 1062961 - RNA, 19 nt, Artificial Sequence
  Description of Artificial Sequence: Synthetic oligonucleotide
  Antisense strand to SEQ ID NO: 1062960
gauguccaagaacauuugc

SEQ ID NO: 1062962 - RNA, 19 nt, Artificial Sequence
  Description of Artificial Sequence: Synthetic oligonucleotide
  Sense strand starting at position 1607 of SEQ ID NO: 915216
aauguaaagggcugcaaau

SEQ ID NO: 1062963 - RNA, 19 nt, Artificial Sequence
  Description of Artificial Sequence: Synthetic oligonucleotide
  Antisense strand to SEQ ID NO: 1062962
auuugcagcccuuuacauu

SEQ ID NO: 1062964 - RNA, 19 nt, Artificial Sequence
  Description of Artificial Sequence: Synthetic oligonucleotide
  Sense strand starting at position 1892 of SEQ ID NO: 915216
uuagguagaucgccaggaa

SEQ ID NO: 1062965 - RNA, 19 nt, Artificial Sequence
  Description of Artificial Sequence: Synthetic oligonucleotide
  Antisense strand to SEQ ID NO: 1062964
uuccuggcgaucuaccuaa

SEQ ID NO: 1062966 - RNA, 19 nt, Artificial Sequence
  Description of Artificial Sequence: Synthetic oligonucleotide
  Sense strand starting at position 1952 of SEQ ID NO: 915216
guccuaagagaaugaauuc

SEQ ID NO: 1062967 - RNA, 19 nt, Artificial Sequence
  Description of Artificial Sequence: Synthetic oligonucleotide
  Antisense strand to SEQ ID NO: 1062966
gaauucauucucuuaggac

SEQ ID NO: 1062968 - RNA, 19 nt, Artificial Sequence
  Description of Artificial Sequence: Synthetic oligonucleotide
  Sense strand starting at position 1991 of SEQ ID NO: 915216
gggacaacaucuucuuauu

SEQ ID NO: 1062969 - RNA, 19 nt, Artificial Sequence
  Description of Artificial Sequence: Synthetic oligonucleotide
  Antisense strand to SEQ ID NO: 1062968
aauaagaagauguuguccc

SEQ ID NO: 1062970 - RNA, 19 nt, Artificial Sequence
  Description of Artificial Sequence: Synthetic oligonucleotide
  Sense strand starting at position 2035 of SEQ ID NO: 915216
augugaggauucucucuga

SEQ ID NO: 1062971 - RNA, 19 nt, Artificial Sequence
  Description of Artificial Sequence: Synthetic oligonucleotide
  Antisense strand to SEQ ID NO: 1062970
ucagagagaauccucacau

SEQ ID NO: 1062972 - RNA, 19 nt, Artificial Sequence
  Description of Artificial Sequence: Synthetic oligonucleotide
  Sense strand starting at position 2039 of SEQ ID NO: 915216
gaggauucucucugaucca

SEQ ID NO: 1062973 - RNA, 19 nt, Artificial Sequence
  Description of Artificial Sequence: Synthetic oligonucleotide
  Antisense strand to SEQ ID NO: 1062972
uggaucagagagaauccuc

SEQ ID NO: 1062974 - RNA, 19 nt, Artificial Sequence
  Description of Artificial Sequence: Synthetic oligonucleotide
  Sense strand starting at position 2288 of SEQ ID NO: 915216
ugucuucuuggugaauucu

SEQ ID NO: 1062975 - RNA, 19 nt, Artificial Sequence
  Description of Artificial Sequence: Synthetic oligonucleotide
  Antisense strand to SEQ ID NO: 1062974
agaauucaccaagaagaca

SEQ ID NO: 1062976 - RNA, 19 nt, Artificial Sequence
  Description of Artificial Sequence: Synthetic oligonucleotide
  Sense strand starting at position 2326 of SEQ ID NO: 915216
aagguuugugagggaacaa

SEQ ID NO: 1062977 - RNA, 19 nt, Artificial Sequence
  Description of Artificial Sequence: Synthetic oligonucleotide
  Antisense strand to SEQ ID NO: 1062976
uuguucccucacaaaccuu

SEQ ID NO: 1062978 - RNA, 19 nt, Artificial Sequence
  Description of Artificial Sequence: Synthetic oligonucleotide
  Sense strand starting at position 2423 of SEQ ID NO: 915216
uucccuccaugucugauau

SEQ ID NO: 1062979 - RNA, 19 nt, Artificial Sequence
  Description of Artificial Sequence: Synthetic oligonucleotide
  Antisense strand to SEQ ID NO: 1062978
auaucagacauggagggaa

SEQ ID NO: 1062980 - RNA, 19 nt, Artificial Sequence
  Description of Artificial Sequence: Synthetic oligonucleotide
  Sense strand starting at position 2817 of SEQ ID NO: 915216
gaaaccuaugauugucagu

SEQ ID NO: 1062981 - RNA, 19 nt, Artificial Sequence
  Description of Artificial Sequence: Synthetic oligonucleotide
  Antisense strand to SEQ ID NO: 1062980
acugacaaucauagguuuc

SEQ ID NO: 1062982 - RNA, 19 nt, Artificial Sequence
  Description of Artificial Sequence: Synthetic oligonucleotide
  Sense strand starting at position 2819 of SEQ ID NO: 915216
aaccuaugauugucaguga

SEQ ID NO: 1062983 - RNA, 19 nt, Artificial Sequence
  Description of Artificial Sequence: Synthetic oligonucleotide
  Antisense strand to SEQ ID NO: 1062982
ucacugacaaucauagguu

SEQ ID NO: 1062984 - RNA, 19 nt, Artificial Sequence
  Description of Artificial Sequence: Synthetic oligonucleotide
  Sense strand starting at position 2822 of SEQ ID NO: 915216
cuaugauugucagugaaca

SEQ ID NO: 1062985 - RNA, 19 nt, Artificial Sequence
  Description of Artificial Sequence: Synthetic oligonucleotide
  Antisense strand to SEQ ID NO: 1062984
uguucacugacaaucauag

SEQ ID NO: 1062986 - RNA, 19 nt, Artificial Sequence
  Description of Artificial Sequence: Synthetic oligonucleotide
  Sense strand starting at position 2823 of SEQ ID NO: 915216
uaugauugucagugaacau

SEQ ID NO: 1062987 - RNA, 19 nt, Artificial Sequence
  Description of Artificial Sequence: Synthetic oligonucleotide
  Antisense strand to SEQ ID NO: 1062986
auguucacugacaaucaua

SEQ ID NO: 1062988 - RNA, 19 nt, Artificial Sequence
  Description of Artificial Sequence: Synthetic oligonucleotide
  Sense strand starting at position 2862 of SEQ ID NO: 915216
cuugauauauggcuaagaa

SEQ ID NO: 1062989 - RNA, 19 nt, Artificial Sequence
  Description of Artificial Sequence: Synthetic oligonucleotide
  Antisense strand to SEQ ID NO: 1062988
uucuuagccauauaucaag

SEQ ID NO: 1062990 - RNA, 19 nt, Artificial Sequence
  Description of Artificial Sequence: Synthetic oligonucleotide
  Sense strand starting at position 2986 of SEQ ID NO: 915216
ggguuauuggagugaacaa

SEQ ID NO: 1062991 - RNA, 19 nt, Artificial Sequence
  Description of Artificial Sequence: Synthetic oligonucleotide
  Antisense strand to SEQ ID NO: 1062990
uuguucacuccaauaaccc

SEQ ID NO: 1062992 - RNA, 19 nt, Artificial Sequence
  Description of Artificial Sequence: Synthetic oligonucleotide
  Sense strand starting at position 3091 of SEQ ID NO: 915216
aaagcugggucugugaaga

SEQ ID NO: 1062993 - RNA, 19 nt, Artificial Sequence
  Description of Artificial Sequence: Synthetic oligonucleotide
  Antisense strand to SEQ ID NO: 1062992
ucuucacagacccagcuuu

SEQ ID NO: 1062994 - RNA, 19 nt, Artificial Sequence
  Description of Artificial Sequence: Synthetic oligonucleotide
  Sense strand starting at position 3419 of SEQ ID NO: 915216
aucagaggagcuugcauau

SEQ ID NO: 1062995 - RNA, 19 nt, Artificial Sequence
  Description of Artificial Sequence: Synthetic oligonucleotide
  Antisense strand to SEQ ID NO: 1062994
auaugcaagcuccucugau

SEQ ID NO: 1062996 - RNA, 19 nt, Artificial Sequence
  Description of Artificial Sequence: Synthetic oligonucleotide
  Sense strand starting at position 3425 of SEQ ID NO: 915216
ggagcuugcauauaauuga

SEQ ID NO: 1062997 - RNA, 19 nt, Artificial Sequence
  Description of Artificial Sequence: Synthetic oligonucleotide
  Antisense strand to SEQ ID NO: 1062996
ucaauuauaugcaagcucc

SEQ ID NO: 1062998 - RNA, 19 nt, Artificial Sequence
  Description of Artificial Sequence: Synthetic oligonucleotide
  Sense strand starting at position 3504 of SEQ ID NO: 915216
auggguuuccucuauugau

SEQ ID NO: 1062999 - RNA, 19 nt, Artificial Sequence
  Description of Artificial Sequence: Synthetic oligonucleotide
  Antisense strand to SEQ ID NO: 1062998
aucaauagaggaaacccau

SEQ ID NO: 1063000 - RNA, 19 nt, Artificial Sequence
  Description of Artificial Sequence: Synthetic oligonucleotide
  Sense strand starting at position 3510 of SEQ ID NO: 915216
uuccucuauugauuggaua

SEQ ID NO: 1063001 - RNA, 19 nt, Artificial Sequence
  Description of Artificial Sequence: Synthetic oligonucleotide
  Antisense strand to SEQ ID NO: 1063000
uauccaaucaauagaggaa

SEQ ID NO: 1063002 - RNA, 19 nt, Artificial Sequence
  Description of Artificial Sequence: Synthetic oligonucleotide
  Sense strand starting at position 3595 of SEQ ID NO: 915216
auguuaacucaccauaguu

SEQ ID NO: 1063003 - RNA, 19 nt, Artificial Sequence
  Description of Artificial Sequence: Synthetic oligonucleotide
  Antisense strand to SEQ ID NO: 1063002
aacuauggugaguuaacau

SEQ ID NO: 1063004 - RNA, 19 nt, Artificial Sequence
  Description of Artificial Sequence: Synthetic oligonucleotide
  Sense strand starting at position 3646 of SEQ ID NO: 915216
agcuauauucccuagagua

SEQ ID NO: 1063005 - RNA, 19 nt, Artificial Sequence
  Description of Artificial Sequence: Synthetic oligonucleotide
  Antisense strand to SEQ ID NO: 1063004
uacucuagggaauauagcu

SEQ ID NO: 1063006 - RNA, 19 nt, Artificial Sequence
  Description of Artificial Sequence: Synthetic oligonucleotide
  Sense strand starting at position 3648 of SEQ ID NO: 915216
cuauauucccuagaguauu

SEQ ID NO: 1063007 - RNA, 19 nt, Artificial Sequence
  Description of Artificial Sequence: Synthetic oligonucleotide
  Antisense strand to SEQ ID NO: 1063006
aauacucuagggaauauag

SEQ ID NO: 1063008 - RNA, 19 nt, Artificial Sequence
  Description of Artificial Sequence: Synthetic oligonucleotide
  Sense strand starting at position 3707 of SEQ ID NO: 915216
uccucaagggcuuaacauu

SEQ ID NO: 1063009 - RNA, 19 nt, Artificial Sequence
  Description of Artificial Sequence: Synthetic oligonucleotide
  Antisense strand to SEQ ID NO: 1063008
aauguuaagcccuugagga

SEQ ID NO: 1063010 - RNA, 19 nt, Artificial Sequence
  Description of Artificial Sequence: Synthetic oligonucleotide
  Sense strand starting at position 3744 of SEQ ID NO: 915216
gcuagauucuccuuugaag

SEQ ID NO: 1063011 - RNA, 19 nt, Artificial Sequence
  Description of Artificial Sequence: Synthetic oligonucleotide
  Antisense strand to SEQ ID NO: 1063010
cuucaaaggagaaucuagc

SEQ ID NO: 1063012 - RNA, 19 nt, Artificial Sequence
  Description of Artificial Sequence: Synthetic oligonucleotide
  Sense strand starting at position 3808 of SEQ ID NO: 915216
ucaucagagcuuuagcaca

SEQ ID NO: 1063013 - RNA, 19 nt, Artificial Sequence
  Description of Artificial Sequence: Synthetic oligonucleotide
  Antisense strand to SEQ ID NO: 1063012
ugugcuaaagcucugauga

SEQ ID NO: 1063014 - RNA, 19 nt, Artificial Sequence
  Description of Artificial Sequence: Synthetic oligonucleotide
  Sense strand starting at position 3810 of SEQ ID NO: 915216
aucagagcuuuagcacaaa

SEQ ID NO: 1063015 - RNA, 19 nt, Artificial Sequence
  Description of Artificial Sequence: Synthetic oligonucleotide
  Antisense strand to SEQ ID NO: 1063014
uuugugcuaaagcucugau

SEQ ID NO: 1063016 - RNA, 19 nt, Artificial Sequence
  Description of Artificial Sequence: Synthetic oligonucleotide
  Sense strand starting at position 38 of SEQ ID NO: 915217
uuagcauaaugucuaaaga

SEQ ID NO: 1063017 - RNA, 19 nt, Artificial Sequence
  Description of Artificial Sequence: Synthetic oligonucleotide
  Antisense strand to SEQ ID NO: 1063016
ucuuuagacauuaugcuaa

SEQ ID NO: 1063018 - RNA, 19 nt, Artificial Sequence
  Description of Artificial Sequence: Synthetic oligonucleotide
  Sense strand starting at position 71 of SEQ ID NO: 915217
uuucuaaaguuucuugaag

SEQ ID NO: 1063019 - RNA, 19 nt, Artificial Sequence
  Description of Artificial Sequence: Synthetic oligonucleotide
  Antisense strand to SEQ ID NO: 1063018
cuucaagaaacuuuagaaa

SEQ ID NO: 1063020 - RNA, 19 nt, Artificial Sequence
  Description of Artificial Sequence: Synthetic oligonucleotide
  Sense strand starting at position 72 of SEQ ID NO: 915217
uucuaaaguuucuugaaga

SEQ ID NO: 1063021 - RNA, 19 nt, Artificial Sequence
  Description of Artificial Sequence: Synthetic oligonucleotide
  Antisense strand to SEQ ID NO: 1063020
ucuucaagaaacuuuagaa

SEQ ID NO: 1063022 - RNA, 19 nt, Artificial Sequence
  Description of Artificial Sequence: Synthetic oligonucleotide
  Sense strand starting at position 386 of SEQ ID NO: 915217
ggguuuauguaacucagag

SEQ ID NO: 1063023 - RNA, 19 nt, Artificial Sequence
  Description of Artificial Sequence: Synthetic oligonucleotide
  Antisense strand to SEQ ID NO: 1063022
cucugaguuacauaaaccc

SEQ ID NO: 1063024 - RNA, 19 nt, Artificial Sequence
  Description of Artificial Sequence: Synthetic oligonucleotide
  Sense strand starting at position 771 of SEQ ID NO: 915217
gcuuaucaaucaucuagga

SEQ ID NO: 1063025 - RNA, 19 nt, Artificial Sequence
  Description of Artificial Sequence: Synthetic oligonucleotide
  Antisense strand to SEQ ID NO: 1063024
uccuagaugauugauaagc

SEQ ID NO: 1063026 - RNA, 19 nt, Artificial Sequence
  Description of Artificial Sequence: Synthetic oligonucleotide
  Sense strand starting at position 775 of SEQ ID NO: 915217
aucaaucaucuaggaguuu

SEQ ID NO: 1063027 - RNA, 19 nt, Artificial Sequence
  Description of Artificial Sequence: Synthetic oligonucleotide
  Antisense strand to SEQ ID NO: 1063026
aaacuccuagaugauugau

SEQ ID NO: 1063028 - RNA, 19 nt, Artificial Sequence
  Description of Artificial Sequence: Synthetic oligonucleotide
  Sense strand starting at position 781 of SEQ ID NO: 915217
caucuaggaguuuggauaa

SEQ ID NO: 1063029 - RNA, 19 nt, Artificial Sequence
  Description of Artificial Sequence: Synthetic oligonucleotide
  Antisense strand to SEQ ID NO: 1063028
uuauccaaacuccuagaug

SEQ ID NO: 1063030 - RNA, 19 nt, Artificial Sequence
  Description of Artificial Sequence: Synthetic oligonucleotide
  Sense strand starting at position 893 of SEQ ID NO: 915217
aauauauguggaggagcaa

SEQ ID NO: 1063031 - RNA, 19 nt, Artificial Sequence
  Description of Artificial Sequence: Synthetic oligonucleotide
  Antisense strand to SEQ ID NO: 1063030
uugcuccuccacauauauu

SEQ ID NO: 1063032 - RNA, 19 nt, Artificial Sequence
  Description of Artificial Sequence: Synthetic oligonucleotide
  Sense strand starting at position 1019 of SEQ ID NO: 915217
agccaaagauuucgauuua

SEQ ID NO: 1063033 - RNA, 19 nt, Artificial Sequence
  Description of Artificial Sequence: Synthetic oligonucleotide
  Antisense strand to SEQ ID NO: 1063032
uaaaucgaaaucuuuggcu

SEQ ID NO: 1063034 - RNA, 19 nt, Artificial Sequence
  Description of Artificial Sequence: Synthetic oligonucleotide
  Sense strand starting at position 1131 of SEQ ID NO: 915217
acuguagaucaauggauua

SEQ ID NO: 1063035 - RNA, 19 nt, Artificial Sequence
  Description of Artificial Sequence: Synthetic oligonucleotide
  Antisense strand to SEQ ID NO: 1063034
uaauccauugaucuacagu

SEQ ID NO: 1063036 - RNA, 19 nt, Artificial Sequence
  Description of Artificial Sequence: Synthetic oligonucleotide
  Sense strand starting at position 1144 of SEQ ID NO: 915217
ggauuaaguaccggacuca

SEQ ID NO: 1063037 - RNA, 19 nt, Artificial Sequence
  Description of Artificial Sequence: Synthetic oligonucleotide
  Antisense strand to SEQ ID NO: 1063036
ugaguccgguacuuaaucc

SEQ ID NO: 1063038 - RNA, 19 nt, Artificial Sequence
  Description of Artificial Sequence: Synthetic oligonucleotide
  Sense strand starting at position 1385 of SEQ ID NO: 915217
gguugaagccagcagauau

SEQ ID NO: 1063039 - RNA, 19 nt, Artificial Sequence
  Description of Artificial Sequence: Synthetic oligonucleotide
  Antisense strand to SEQ ID NO: 1063038
auaucugcuggcuucaacc

SEQ ID NO: 1063040 - RNA, 19 nt, Artificial Sequence
  Description of Artificial Sequence: Synthetic oligonucleotide
  Sense strand starting at position 1470 of SEQ ID NO: 915217
guagaagugguugaugaca

SEQ ID NO: 1063041 - RNA, 19 nt, Artificial Sequence
  Description of Artificial Sequence: Synthetic oligonucleotide
  Antisense strand to SEQ ID NO: 1063040
ugucaucaaccacuucuac

SEQ ID NO: 1063042 - RNA, 19 nt, Artificial Sequence
  Description of Artificial Sequence: Synthetic oligonucleotide
  Sense strand starting at position 1478 of SEQ ID NO: 915217
gguugaugacacuggaucu

SEQ ID NO: 1063043 - RNA, 19 nt, Artificial Sequence
  Description of Artificial Sequence: Synthetic oligonucleotide
  Antisense strand to SEQ ID NO: 1063042
agauccagugucaucaacc

SEQ ID NO: 1063044 - RNA, 19 nt, Artificial Sequence
  Description of Artificial Sequence: Synthetic oligonucleotide
  Sense strand starting at position 1479 of SEQ ID NO: 915217
guugaugacacuggaucua

SEQ ID NO: 1063045 - RNA, 19 nt, Artificial Sequence
  Description of Artificial Sequence: Synthetic oligonucleotide
  Antisense strand to SEQ ID NO: 1063044
uagauccagugucaucaac

SEQ ID NO: 1063046 - RNA, 19 nt, Artificial Sequence
  Description of Artificial Sequence: Synthetic oligonucleotide
  Sense strand starting at position 1620 of SEQ ID NO: 915217
gucauauauggccacauag

SEQ ID NO: 1063047 - RNA, 19 nt, Artificial Sequence
  Description of Artificial Sequence: Synthetic oligonucleotide
  Antisense strand to SEQ ID NO: 1063046
cuauguggccauauaugac

SEQ ID NO: 1063048 - RNA, 19 nt, Artificial Sequence
  Description of Artificial Sequence: Synthetic oligonucleotide
  Sense strand starting at position 1724 of SEQ ID NO: 915217
aggaaauggucuucucaga

SEQ ID NO: 1063049 - RNA, 19 nt, Artificial Sequence
  Description of Artificial Sequence: Synthetic oligonucleotide
  Antisense strand to SEQ ID NO: 1063048
ucugagaagaccauuuccu

SEQ ID NO: 1063050 - RNA, 19 nt, Artificial Sequence
  Description of Artificial Sequence: Synthetic oligonucleotide
  Sense strand starting at position 1731 of SEQ ID NO: 915217
ggucuucucagauacgaua

SEQ ID NO: 1063051 - RNA, 19 nt, Artificial Sequence
  Description of Artificial Sequence: Synthetic oligonucleotide
  Antisense strand to SEQ ID NO: 1063050
uaucguaucugagaagacc

SEQ ID NO: 1063052 - RNA, 19 nt, Artificial Sequence
  Description of Artificial Sequence: Synthetic oligonucleotide
  Sense strand starting at position 1744 of SEQ ID NO: 915217
acgauauuagucgacaucu

SEQ ID NO: 1063053 - RNA, 19 nt, Artificial Sequence
  Description of Artificial Sequence: Synthetic oligonucleotide
  Antisense strand to SEQ ID NO: 1063052
agaugucgacuaauaucgu

SEQ ID NO: 1063054 - RNA, 19 nt, Artificial Sequence
  Description of Artificial Sequence: Synthetic oligonucleotide
  Sense strand starting at position 1983 of SEQ ID NO: 915217
gccauuuguguuggacauu

SEQ ID NO: 1063055 - RNA, 19 nt, Artificial Sequence
  Description of Artificial Sequence: Synthetic oligonucleotide
  Antisense strand to SEQ ID NO: 1063054
aauguccaacacaaauggc

SEQ ID NO: 1063056 - RNA, 19 nt, Artificial Sequence
  Description of Artificial Sequence: Synthetic oligonucleotide
  Sense strand starting at position 1984 of SEQ ID NO: 915217
ccauuuguguuggacauuu

SEQ ID NO: 1063057 - RNA, 19 nt, Artificial Sequence
  Description of Artificial Sequence: Synthetic oligonucleotide
  Antisense strand to SEQ ID NO: 1063056
aaauguccaacacaaaugg

SEQ ID NO: 1063058 - RNA, 19 nt, Artificial Sequence
  Description of Artificial Sequence: Synthetic oligonucleotide
  Sense strand starting at position 2153 of SEQ ID NO: 915217
guaauuaugguagacuuac

SEQ ID NO: 1063059 - RNA, 19 nt, Artificial Sequence
  Description of Artificial Sequence: Synthetic oligonucleotide
  Antisense strand to SEQ ID NO: 1063058
guaagucuaccauaauuac

SEQ ID NO: 1063060 - RNA, 19 nt, Artificial Sequence
  Description of Artificial Sequence: Synthetic oligonucleotide
  Sense strand starting at position 2159 of SEQ ID NO: 915217
augguagacuuacuauaau

SEQ ID NO: 1063061 - RNA, 19 nt, Artificial Sequence
  Description of Artificial Sequence: Synthetic oligonucleotide
  Antisense strand to SEQ ID NO: 1063060
auuauaguaagucuaccau

SEQ ID NO: 1063062 - RNA, 19 nt, Artificial Sequence
  Description of Artificial Sequence: Synthetic oligonucleotide
  Sense strand starting at position 2194 of SEQ ID NO: 915217
gucauuauaucauuugccu

SEQ ID NO: 1063063 - RNA, 19 nt, Artificial Sequence
  Description of Artificial Sequence: Synthetic oligonucleotide
  Antisense strand to SEQ ID NO: 1063062
aggcaaaugauauaaugac

SEQ ID NO: 1063064 - RNA, 19 nt, Artificial Sequence
  Description of Artificial Sequence: Synthetic oligonucleotide
  Sense strand starting at position 2202 of SEQ ID NO: 915217
aucauuugccuaggcauua

SEQ ID NO: 1063065 - RNA, 19 nt, Artificial Sequence
  Description of Artificial Sequence: Synthetic oligonucleotide
  Antisense strand to SEQ ID NO: 1063064
uaaugccuaggcaaaugau

SEQ ID NO: 1063066 - RNA, 19 nt, Artificial Sequence
  Description of Artificial Sequence: Synthetic oligonucleotide
  Sense strand starting at position 2321 of SEQ ID NO: 915217
cuauaugacugagcuacau

SEQ ID NO: 1063067 - RNA, 19 nt, Artificial Sequence
  Description of Artificial Sequence: Synthetic oligonucleotide
  Antisense strand to SEQ ID NO: 1063066
auguagcucagucauauag

SEQ ID NO: 1063068 - RNA, 19 nt, Artificial Sequence
  Description of Artificial Sequence: Synthetic oligonucleotide
  Sense strand starting at position 2697 of SEQ ID NO: 915217
ccauguagccuugcgugau

SEQ ID NO: 1063069 - RNA, 19 nt, Artificial Sequence
  Description of Artificial Sequence: Synthetic oligonucleotide
  Antisense strand to SEQ ID NO: 1063068
aucacgcaaggcuacaugg

SEQ ID NO: 1063070 - RNA, 19 nt, Artificial Sequence
  Description of Artificial Sequence: Synthetic oligonucleotide
  Sense strand starting at position 2705 of SEQ ID NO: 915217
ccuugcgugaugucauguu

SEQ ID NO: 1063071 - RNA, 19 nt, Artificial Sequence
  Description of Artificial Sequence: Synthetic oligonucleotide
  Antisense strand to SEQ ID NO: 1063070
aacaugacaucacgcaagg

SEQ ID NO: 1063072 - RNA, 19 nt, Artificial Sequence
  Description of Artificial Sequence: Synthetic oligonucleotide
  Sense strand starting at position 2709 of SEQ ID NO: 915217
gcgugaugucauguucuca

SEQ ID NO: 1063073 - RNA, 19 nt, Artificial Sequence
  Description of Artificial Sequence: Synthetic oligonucleotide
  Antisense strand to SEQ ID NO: 1063072
ugagaacaugacaucacgc

SEQ ID NO: 1063074 - RNA, 19 nt, Artificial Sequence
  Description of Artificial Sequence: Synthetic oligonucleotide
  Sense strand starting at position 2743 of SEQ ID NO: 915217
uauugaaacuuaguguaga

SEQ ID NO: 1063075 - RNA, 19 nt, Artificial Sequence
  Description of Artificial Sequence: Synthetic oligonucleotide
  Antisense strand to SEQ ID NO: 1063074
ucuacacuaaguuucaaua

SEQ ID NO: 1063076 - RNA, 19 nt, Artificial Sequence
  Description of Artificial Sequence: Synthetic oligonucleotide
  Sense strand starting at position 2748 of SEQ ID NO: 915217
aaacuuaguguagaagcaa

SEQ ID NO: 1063077 - RNA, 19 nt, Artificial Sequence
  Description of Artificial Sequence: Synthetic oligonucleotide
  Antisense strand to SEQ ID NO: 1063076
uugcuucuacacuaaguuu

SEQ ID NO: 1063078 - RNA, 19 nt, Artificial Sequence
  Description of Artificial Sequence: Synthetic oligonucleotide
  Sense strand starting at position 2846 of SEQ ID NO: 915217
uaaugauuaucuguaggau

SEQ ID NO: 1063079 - RNA, 19 nt, Artificial Sequence
  Description of Artificial Sequence: Synthetic oligonucleotide
  Antisense strand to SEQ ID NO: 1063078
auccuacagauaaucauua

SEQ ID NO: 1063080 - RNA, 19 nt, Artificial Sequence
  Description of Artificial Sequence: Synthetic oligonucleotide
  Sense strand starting at position 2903 of SEQ ID NO: 915217
cagucagaauggcucaaua

SEQ ID NO: 1063081 - RNA, 19 nt, Artificial Sequence
  Description of Artificial Sequence: Synthetic oligonucleotide
  Antisense strand to SEQ ID NO: 1063080
uauugagccauucugacug

SEQ ID NO: 1063082 - RNA, 19 nt, Artificial Sequence
  Description of Artificial Sequence: Synthetic oligonucleotide
  Sense strand starting at position 2975 of SEQ ID NO: 915217
uaguaucuugaggauguuu

SEQ ID NO: 1063083 - RNA, 19 nt, Artificial Sequence
  Description of Artificial Sequence: Synthetic oligonucleotide
  Antisense strand to SEQ ID NO: 1063082
aaacauccucaagauacua

SEQ ID NO: 1063084 - RNA, 19 nt, Artificial Sequence
  Description of Artificial Sequence: Synthetic oligonucleotide
  Sense strand starting at position 3000 of SEQ ID NO: 915217
augacuuaauguguuuaga

SEQ ID NO: 1063085 - RNA, 19 nt, Artificial Sequence
  Description of Artificial Sequence: Synthetic oligonucleotide
  Antisense strand to SEQ ID NO: 1063084
ucuaaacacauuaagucau

SEQ ID NO: 1063086 - RNA, 19 nt, Artificial Sequence
  Description of Artificial Sequence: Synthetic oligonucleotide
  Sense strand starting at position 3002 of SEQ ID NO: 915217
gacuuaauguguuuagaaa

SEQ ID NO: 1063087 - RNA, 19 nt, Artificial Sequence
  Description of Artificial Sequence: Synthetic oligonucleotide
  Antisense strand to SEQ ID NO: 1063086
uuucuaaacacauuaaguc

SEQ ID NO: 1063088 - RNA, 19 nt, Artificial Sequence
  Description of Artificial Sequence: Synthetic oligonucleotide
  Sense strand starting at position 3496 of SEQ ID NO: 915217
ccuggaaggccuugagaua

SEQ ID NO: 1063089 - RNA, 19 nt, Artificial Sequence
  Description of Artificial Sequence: Synthetic oligonucleotide
  Antisense strand to SEQ ID NO: 1063088
uaucucaaggccuuccagg

SEQ ID NO: 1063090 - RNA, 19 nt, Artificial Sequence
  Description of Artificial Sequence: Synthetic oligonucleotide
  Sense strand starting at position 3583 of SEQ ID NO: 915217
aggauugugccagacacau

SEQ ID NO: 1063091 - RNA, 19 nt, Artificial Sequence
  Description of Artificial Sequence: Synthetic oligonucleotide
  Antisense strand to SEQ ID NO: 1063090
augugucuggcacaauccu

SEQ ID NO: 1063092 - RNA, 19 nt, Artificial Sequence
  Description of Artificial Sequence: Synthetic oligonucleotide
  Sense strand starting at position 3901 of SEQ ID NO: 915217
gugauugggcacuauagau

SEQ ID NO: 1063093 - RNA, 19 nt, Artificial Sequence
  Description of Artificial Sequence: Synthetic oligonucleotide
  Antisense strand to SEQ ID NO: 1063092
aucuauagugcccaaucac

SEQ ID NO: 1063094 - RNA, 19 nt, Artificial Sequence
  Description of Artificial Sequence: Synthetic oligonucleotide
  Sense strand starting at position 3907 of SEQ ID NO: 915217
gggcacuauagaugcagaa

SEQ ID NO: 1063095 - RNA, 19 nt, Artificial Sequence
  Description of Artificial Sequence: Synthetic oligonucleotide
  Antisense strand to SEQ ID NO: 1063094
uucugcaucuauagugccc

SEQ ID NO: 1063096 - RNA, 19 nt, Artificial Sequence
  Description of Artificial Sequence: Synthetic oligonucleotide
  Sense strand starting at position 124 of SEQ ID NO: 915218
gugcaagagagaugugaaa

SEQ ID NO: 1063097 - RNA, 19 nt, Artificial Sequence
  Description of Artificial Sequence: Synthetic oligonucleotide
  Antisense strand to SEQ ID NO: 1063096
uuucacaucucucuugcac

SEQ ID NO: 1063098 - RNA, 19 nt, Artificial Sequence
  Description of Artificial Sequence: Synthetic oligonucleotide
  Sense strand starting at position 126 of SEQ ID NO: 915218
gcaagagagaugugaaauu

SEQ ID NO: 1063099 - RNA, 19 nt, Artificial Sequence
  Description of Artificial Sequence: Synthetic oligonucleotide
  Antisense strand to SEQ ID NO: 1063098
aauuucacaucucucuugc

SEQ ID NO: 1063100 - RNA, 19 nt, Artificial Sequence
  Description of Artificial Sequence: Synthetic oligonucleotide
  Sense strand starting at position 143 of SEQ ID NO: 915218
uuauguucccauuauuaug

SEQ ID NO: 1063101 - RNA, 19 nt, Artificial Sequence
  Description of Artificial Sequence: Synthetic oligonucleotide
  Antisense strand to SEQ ID NO: 1063100
cauaauaaugggaacauaa

SEQ ID NO: 1063102 - RNA, 19 nt, Artificial Sequence
  Description of Artificial Sequence: Synthetic oligonucleotide
  Sense strand starting at position 282 of SEQ ID NO: 915218
acaugaguagaauguaauu

SEQ ID NO: 1063103 - RNA, 19 nt, Artificial Sequence
  Description of Artificial Sequence: Synthetic oligonucleotide
  Antisense strand to SEQ ID NO: 1063102
aauuacauucuacucaugu

SEQ ID NO: 1063104 - RNA, 19 nt, Artificial Sequence
  Description of Artificial Sequence: Synthetic oligonucleotide
  Sense strand starting at position 776 of SEQ ID NO: 915218
uugagcaauuucccuuagu

SEQ ID NO: 1063105 - RNA, 19 nt, Artificial Sequence
  Description of Artificial Sequence: Synthetic oligonucleotide
  Antisense strand to SEQ ID NO: 1063104
acuaagggaaauugcucaa

SEQ ID NO: 1063106 - RNA, 19 nt, Artificial Sequence
  Description of Artificial Sequence: Synthetic oligonucleotide
  Sense strand starting at position 802 of SEQ ID NO: 915218
ugaacuuuggcacacauca

SEQ ID NO: 1063107 - RNA, 19 nt, Artificial Sequence
  Description of Artificial Sequence: Synthetic oligonucleotide
  Antisense strand to SEQ ID NO: 1063106
ugaugugugccaaaguuca

SEQ ID NO: 1063108 - RNA, 19 nt, Artificial Sequence
  Description of Artificial Sequence: Synthetic oligonucleotide
  Sense strand starting at position 1039 of SEQ ID NO: 915218
acaugaucugcugaucacu

SEQ ID NO: 1063109 - RNA, 19 nt, Artificial Sequence
  Description of Artificial Sequence: Synthetic oligonucleotide
  Antisense strand to SEQ ID NO: 1063108
agugaucagcagaucaugu

SEQ ID NO: 1063110 - RNA, 19 nt, Artificial Sequence
  Description of Artificial Sequence: Synthetic oligonucleotide
  Sense strand starting at position 1162 of SEQ ID NO: 915218
cacagacuccucuguggga

SEQ ID NO: 1063111 - RNA, 19 nt, Artificial Sequence
  Description of Artificial Sequence: Synthetic oligonucleotide
  Antisense strand to SEQ ID NO: 1063110
ucccacagaggagucugug

SEQ ID NO: 1063112 - RNA, 19 nt, Artificial Sequence
  Description of Artificial Sequence: Synthetic oligonucleotide
  Sense strand starting at position 1287 of SEQ ID NO: 915218
gcagaauggcaaugaggau

SEQ ID NO: 1063113 - RNA, 19 nt, Artificial Sequence
  Description of Artificial Sequence: Synthetic oligonucleotide
  Antisense strand to SEQ ID NO: 1063112
auccucauugccauucugc

SEQ ID NO: 1063114 - RNA, 19 nt, Artificial Sequence
  Description of Artificial Sequence: Synthetic oligonucleotide
  Sense strand starting at position 1418 of SEQ ID NO: 915218
gguggaucugcacaguaga

SEQ ID NO: 1063115 - RNA, 19 nt, Artificial Sequence
  Description of Artificial Sequence: Synthetic oligonucleotide
  Antisense strand to SEQ ID NO: 1063114
ucuacugugcagauccacc

SEQ ID NO: 1063116 - RNA, 19 nt, Artificial Sequence
  Description of Artificial Sequence: Synthetic oligonucleotide
  Sense strand starting at position 1431 of SEQ ID NO: 915218
aguagaaaugguugaucuc

SEQ ID NO: 1063117 - RNA, 19 nt, Artificial Sequence
  Description of Artificial Sequence: Synthetic oligonucleotide
  Antisense strand to SEQ ID NO: 1063116
gagaucaaccauuucuacu

SEQ ID NO: 1063118 - RNA, 19 nt, Artificial Sequence
  Description of Artificial Sequence: Synthetic oligonucleotide
  Sense strand starting at position 1434 of SEQ ID NO: 915218
agaaaugguugaucucaau

SEQ ID NO: 1063119 - RNA, 19 nt, Artificial Sequence
  Description of Artificial Sequence: Synthetic oligonucleotide
  Antisense strand to SEQ ID NO: 1063118
auugagaucaaccauuucu

SEQ ID NO: 1063120 - RNA, 19 nt, Artificial Sequence
  Description of Artificial Sequence: Synthetic oligonucleotide
  Sense strand starting at position 1527 of SEQ ID NO: 915218
aaguaaucagucgaauaca

SEQ ID NO: 1063121 - RNA, 19 nt, Artificial Sequence
  Description of Artificial Sequence: Synthetic oligonucleotide
  Antisense strand to SEQ ID NO: 1063120
uguauucgacugauuacuu

SEQ ID NO: 1063122 - RNA, 19 nt, Artificial Sequence
  Description of Artificial Sequence: Synthetic oligonucleotide
  Sense strand starting at position 1566 of SEQ ID NO: 915218
ugccauaaagcagaggauu

SEQ ID NO: 1063123 - RNA, 19 nt, Artificial Sequence
  Description of Artificial Sequence: Synthetic oligonucleotide
  Antisense strand to SEQ ID NO: 1063122
aauccucugcuuuauggca

SEQ ID NO: 1063124 - RNA, 19 nt, Artificial Sequence
  Description of Artificial Sequence: Synthetic oligonucleotide
  Sense strand starting at position 1794 of SEQ ID NO: 915218
gguuguuaagcugaggacu

SEQ ID NO: 1063125 - RNA, 19 nt, Artificial Sequence
  Description of Artificial Sequence: Synthetic oligonucleotide
  Antisense strand to SEQ ID NO: 1063124
aguccucagcuuaacaacc

SEQ ID NO: 1063126 - RNA, 19 nt, Artificial Sequence
  Description of Artificial Sequence: Synthetic oligonucleotide
  Sense strand starting at position 1936 of SEQ ID NO: 915218
ugucacaucggugaaauug

SEQ ID NO: 1063127 - RNA, 19 nt, Artificial Sequence
  Description of Artificial Sequence: Synthetic oligonucleotide
  Antisense strand to SEQ ID NO: 1063126
caauuucaccgaugugaca

SEQ ID NO: 1063128 - RNA, 19 nt, Artificial Sequence
  Description of Artificial Sequence: Synthetic oligonucleotide
  Sense strand starting at position 1942 of SEQ ID NO: 915218
aucggugaaauugagcauu

SEQ ID NO: 1063129 - RNA, 19 nt, Artificial Sequence
  Description of Artificial Sequence: Synthetic oligonucleotide
  Antisense strand to SEQ ID NO: 1063128
aaugcucaauuucaccgau

SEQ ID NO: 1063130 - RNA, 19 nt, Artificial Sequence
  Description of Artificial Sequence: Synthetic oligonucleotide
  Sense strand starting at position 1967 of SEQ ID NO: 915218
auucuaagucaauaucagu

SEQ ID NO: 1063131 - RNA, 19 nt, Artificial Sequence
  Description of Artificial Sequence: Synthetic oligonucleotide
  Antisense strand to SEQ ID NO: 1063130
acugauauugacuuagaau

SEQ ID NO: 1063132 - RNA, 19 nt, Artificial Sequence
  Description of Artificial Sequence: Synthetic oligonucleotide
  Sense strand starting at position 2139 of SEQ ID NO: 915218
cucugugaugaauaaaugu

SEQ ID NO: 1063133 - RNA, 19 nt, Artificial Sequence
  Description of Artificial Sequence: Synthetic oligonucleotide
  Antisense strand to SEQ ID NO: 1063132
acauuuauucaucacagag

SEQ ID NO: 1063134 - RNA, 19 nt, Artificial Sequence
  Description of Artificial Sequence: Synthetic oligonucleotide
  Sense strand starting at position 2156 of SEQ ID NO: 915218
guagacagucccuauuaua

SEQ ID NO: 1063135 - RNA, 19 nt, Artificial Sequence
  Description of Artificial Sequence: Synthetic oligonucleotide
  Antisense strand to SEQ ID NO: 1063134
uauaauagggacugucuac

SEQ ID NO: 1063136 - RNA, 19 nt, Artificial Sequence
  Description of Artificial Sequence: Synthetic oligonucleotide
  Sense strand starting at position 2187 of SEQ ID NO: 915218
aaaguuuagugacugaaau

SEQ ID NO: 1063137 - RNA, 19 nt, Artificial Sequence
  Description of Artificial Sequence: Synthetic oligonucleotide
  Antisense strand to SEQ ID NO: 1063136
auuucagucacuaaacuuu

SEQ ID NO: 1063138 - RNA, 19 nt, Artificial Sequence
  Description of Artificial Sequence: Synthetic oligonucleotide
  Sense strand starting at position 2188 of SEQ ID NO: 915218
aaguuuagugacugaaaua

SEQ ID NO: 1063139 - RNA, 19 nt, Artificial Sequence
  Description of Artificial Sequence: Synthetic oligonucleotide
  Antisense strand to SEQ ID NO: 1063138
uauuucagucacuaaacuu

SEQ ID NO: 1063140 - RNA, 19 nt, Artificial Sequence
  Description of Artificial Sequence: Synthetic oligonucleotide
  Sense strand starting at position 2198 of SEQ ID NO: 915218
acugaaauacacugguagu

SEQ ID NO: 1063141 - RNA, 19 nt, Artificial Sequence
  Description of Artificial Sequence: Synthetic oligonucleotide
  Antisense strand to SEQ ID NO: 1063140
acuaccaguguauuucagu

SEQ ID NO: 1063142 - RNA, 19 nt, Artificial Sequence
  Description of Artificial Sequence: Synthetic oligonucleotide
  Sense strand starting at position 2217 of SEQ ID NO: 915218
aaguaaugugaguagucau

SEQ ID NO: 1063143 - RNA, 19 nt, Artificial Sequence
  Description of Artificial Sequence: Synthetic oligonucleotide
  Antisense strand to SEQ ID NO: 1063142
augacuacucacauuacuu

SEQ ID NO: 1063144 - RNA, 19 nt, Artificial Sequence
  Description of Artificial Sequence: Synthetic oligonucleotide
  Sense strand starting at position 2394 of SEQ ID NO: 915218
gcauauucucaaugauuag

SEQ ID NO: 1063145 - RNA, 19 nt, Artificial Sequence
  Description of Artificial Sequence: Synthetic oligonucleotide
  Antisense strand to SEQ ID NO: 1063144
cuaaucauugagaauaugc

SEQ ID NO: 1063146 - RNA, 19 nt, Artificial Sequence
  Description of Artificial Sequence: Synthetic oligonucleotide
  Sense strand starting at position 2517 of SEQ ID NO: 915218
agaugauaguagccaucaa

SEQ ID NO: 1063147 - RNA, 19 nt, Artificial Sequence
  Description of Artificial Sequence: Synthetic oligonucleotide
  Antisense strand to SEQ ID NO: 1063146
uugauggcuacuaucaucu

SEQ ID NO: 1063148 - RNA, 19 nt, Artificial Sequence
  Description of Artificial Sequence: Synthetic oligonucleotide
  Sense strand starting at position 2521 of SEQ ID NO: 915218
gauaguagccaucaaaguc

SEQ ID NO: 1063149 - RNA, 19 nt, Artificial Sequence
  Description of Artificial Sequence: Synthetic oligonucleotide
  Antisense strand to SEQ ID NO: 1063148
gacuuugauggcuacuauc

SEQ ID NO: 1063150 - RNA, 19 nt, Artificial Sequence
  Description of Artificial Sequence: Synthetic oligonucleotide
  Sense strand starting at position 2539 of SEQ ID NO: 915218
caaguuaaagggugaauua

SEQ ID NO: 1063151 - RNA, 19 nt, Artificial Sequence
  Description of Artificial Sequence: Synthetic oligonucleotide
  Antisense strand to SEQ ID NO: 1063150
uaauucacccuuuaacuug

SEQ ID NO: 1063152 - RNA, 19 nt, Artificial Sequence
  Description of Artificial Sequence: Synthetic oligonucleotide
  Sense strand starting at position 2552 of SEQ ID NO: 915218
gaauuauugguccauguuc

SEQ ID NO: 1063153 - RNA, 19 nt, Artificial Sequence
  Description of Artificial Sequence: Synthetic oligonucleotide
  Antisense strand to SEQ ID NO: 1063152
gaacauggaccaauaauuc

SEQ ID NO: 1063154 - RNA, 19 nt, Artificial Sequence
  Description of Artificial Sequence: Synthetic oligonucleotide
  Sense strand starting at position 2737 of SEQ ID NO: 915218
uugaauguauucucauaga

SEQ ID NO: 1063155 - RNA, 19 nt, Artificial Sequence
  Description of Artificial Sequence: Synthetic oligonucleotide
  Antisense strand to SEQ ID NO: 1063154
ucuaugagaauacauucaa

SEQ ID NO: 1063156 - RNA, 19 nt, Artificial Sequence
  Description of Artificial Sequence: Synthetic oligonucleotide
  Sense strand starting at position 2808 of SEQ ID NO: 915218
aguggaauucuaggaaggu

SEQ ID NO: 1063157 - RNA, 19 nt, Artificial Sequence
  Description of Artificial Sequence: Synthetic oligonucleotide
  Antisense strand to SEQ ID NO: 1063156
accuuccuagaauuccacu

SEQ ID NO: 1063158 - RNA, 19 nt, Artificial Sequence
  Description of Artificial Sequence: Synthetic oligonucleotide
  Sense strand starting at position 3305 of SEQ ID NO: 915218
auuuguuggagaugcgauu

SEQ ID NO: 1063159 - RNA, 19 nt, Artificial Sequence
  Description of Artificial Sequence: Synthetic oligonucleotide
  Antisense strand to SEQ ID NO: 1063158
aaucgcaucuccaacaaau

SEQ ID NO: 1063160 - RNA, 19 nt, Artificial Sequence
  Description of Artificial Sequence: Synthetic oligonucleotide
  Sense strand starting at position 3334 of SEQ ID NO: 915218
uucuaauggcuauauguua

SEQ ID NO: 1063161 - RNA, 19 nt, Artificial Sequence
  Description of Artificial Sequence: Synthetic oligonucleotide
  Antisense strand to SEQ ID NO: 1063160
uaacauauagccauuagaa

SEQ ID NO: 1063162 - RNA, 19 nt, Artificial Sequence
  Description of Artificial Sequence: Synthetic oligonucleotide
  Sense strand starting at position 3345 of SEQ ID NO: 915218
auauguuaucucuagagca

SEQ ID NO: 1063163 - RNA, 19 nt, Artificial Sequence
  Description of Artificial Sequence: Synthetic oligonucleotide
  Antisense strand to SEQ ID NO: 1063162
ugcucuagagauaacauau

SEQ ID NO: 1063164 - RNA, 19 nt, Artificial Sequence
  Description of Artificial Sequence: Synthetic oligonucleotide
  Sense strand starting at position 3347 of SEQ ID NO: 915218
auguuaucucuagagcaaa

SEQ ID NO: 1063165 - RNA, 19 nt, Artificial Sequence
  Description of Artificial Sequence: Synthetic oligonucleotide
  Antisense strand to SEQ ID NO: 1063164
uuugcucuagagauaacau

SEQ ID NO: 1063166 - RNA, 19 nt, Artificial Sequence
  Description of Artificial Sequence: Synthetic oligonucleotide
  Sense strand starting at position 3474 of SEQ ID NO: 915218
agcagucaggaagguaaau

SEQ ID NO: 1063167 - RNA, 19 nt, Artificial Sequence
  Description of Artificial Sequence: Synthetic oligonucleotide
  Antisense strand to SEQ ID NO: 1063166
auuuaccuuccugacugcu

SEQ ID NO: 1063168 - RNA, 19 nt, Artificial Sequence
  Description of Artificial Sequence: Synthetic oligonucleotide
  Sense strand starting at position 3664 of SEQ ID NO: 915218
ggauuaauuaguggguaca

SEQ ID NO: 1063169 - RNA, 19 nt, Artificial Sequence
  Description of Artificial Sequence: Synthetic oligonucleotide
  Antisense strand to SEQ ID NO: 1063168
uguacccacuaauuaaucc

SEQ ID NO: 1063170 - RNA, 19 nt, Artificial Sequence
  Description of Artificial Sequence: Synthetic oligonucleotide
  Sense strand starting at position 3665 of SEQ ID NO: 915218
gauuaauuaguggguacau

SEQ ID NO: 1063171 - RNA, 19 nt, Artificial Sequence
  Description of Artificial Sequence: Synthetic oligonucleotide
  Antisense strand to SEQ ID NO: 1063170
auguacccacuaauuaauc

SEQ ID NO: 1063172 - RNA, 19 nt, Artificial Sequence
  Description of Artificial Sequence: Synthetic oligonucleotide
  Sense strand starting at position 3666 of SEQ ID NO: 915218
auuaauuaguggguacauu

SEQ ID NO: 1063173 - RNA, 19 nt, Artificial Sequence
  Description of Artificial Sequence: Synthetic oligonucleotide
  Antisense strand to SEQ ID NO: 1063172
aauguacccacuaauuaau

SEQ ID NO: 1063174 - RNA, 19 nt, Artificial Sequence
  Description of Artificial Sequence: Synthetic oligonucleotide
  Sense strand starting at position 3721 of SEQ ID NO: 915218
uguauacugccuuagaaua

SEQ ID NO: 1063175 - RNA, 19 nt, Artificial Sequence
  Description of Artificial Sequence: Synthetic oligonucleotide
  Antisense strand to SEQ ID NO: 1063174
uauucuaaggcaguauaca

SEQ ID NO: 1063176 - RNA, 19 nt, Artificial Sequence
  Description of Artificial Sequence: Synthetic oligonucleotide
  Sense strand starting at position 54 of SEQ ID NO: 915219
cauuaaucaugaguagguu

SEQ ID NO: 1063177 - RNA, 19 nt, Artificial Sequence
  Description of Artificial Sequence: Synthetic oligonucleotide
  Antisense strand to SEQ ID NO: 1063176
aaccuacucaugauuaaug

SEQ ID NO: 1063178 - RNA, 19 nt, Artificial Sequence
  Description of Artificial Sequence: Synthetic oligonucleotide
  Sense strand starting at position 297 of SEQ ID NO: 915219
aucauaguagcuuaugaaa

SEQ ID NO: 1063179 - RNA, 19 nt, Artificial Sequence
  Description of Artificial Sequence: Synthetic oligonucleotide
  Antisense strand to SEQ ID NO: 1063178
uuucauaagcuacuaugau

SEQ ID NO: 1063180 - RNA, 19 nt, Artificial Sequence
  Description of Artificial Sequence: Synthetic oligonucleotide
  Sense strand starting at position 346 of SEQ ID NO: 915219
uugugagucggaugagaac

SEQ ID NO: 1063181 - RNA, 19 nt, Artificial Sequence
  Description of Artificial Sequence: Synthetic oligonucleotide
  Antisense strand to SEQ ID NO: 1063180
guucucauccgacucacaa

SEQ ID NO: 1063182 - RNA, 19 nt, Artificial Sequence
  Description of Artificial Sequence: Synthetic oligonucleotide
  Sense strand starting at position 352 of SEQ ID NO: 915219
gucggaugagaacaguguu

SEQ ID NO: 1063183 - RNA, 19 nt, Artificial Sequence
  Description of Artificial Sequence: Synthetic oligonucleotide
  Antisense strand to SEQ ID NO: 1063182
aacacuguucucauccgac

SEQ ID NO: 1063184 - RNA, 19 nt, Artificial Sequence
  Description of Artificial Sequence: Synthetic oligonucleotide
  Sense strand starting at position 355 of SEQ ID NO: 915219
ggaugagaacaguguucca

SEQ ID NO: 1063185 - RNA, 19 nt, Artificial Sequence
  Description of Artificial Sequence: Synthetic oligonucleotide
  Antisense strand to SEQ ID NO: 1063184
uggaacacuguucucaucc

SEQ ID NO: 1063186 - RNA, 19 nt, Artificial Sequence
  Description of Artificial Sequence: Synthetic oligonucleotide
  Sense strand starting at position 358 of SEQ ID NO: 915219
ugagaacaguguuccaugu

SEQ ID NO: 1063187 - RNA, 19 nt, Artificial Sequence
  Description of Artificial Sequence: Synthetic oligonucleotide
  Antisense strand to SEQ ID NO: 1063186
acauggaacacuguucuca

SEQ ID NO: 1063188 - RNA, 19 nt, Artificial Sequence
  Description of Artificial Sequence: Synthetic oligonucleotide
  Sense strand starting at position 384 of SEQ ID NO: 915219
cugggcagccacuauauua

SEQ ID NO: 1063189 - RNA, 19 nt, Artificial Sequence
  Description of Artificial Sequence: Synthetic oligonucleotide
  Antisense strand to SEQ ID NO: 1063188
uaauauaguggcugcccag

SEQ ID NO: 1063190 - RNA, 19 nt, Artificial Sequence
  Description of Artificial Sequence: Synthetic oligonucleotide
  Sense strand starting at position 484 of SEQ ID NO: 915219
agaagugacauaugugaau

SEQ ID NO: 1063191 - RNA, 19 nt, Artificial Sequence
  Description of Artificial Sequence: Synthetic oligonucleotide
  Antisense strand to SEQ ID NO: 1063190
auucacauaugucacuucu

SEQ ID NO: 1063192 - RNA, 19 nt, Artificial Sequence
  Description of Artificial Sequence: Synthetic oligonucleotide
  Sense strand starting at position 569 of SEQ ID NO: 915219
ccauucugugcacggaaga

SEQ ID NO: 1063193 - RNA, 19 nt, Artificial Sequence
  Description of Artificial Sequence: Synthetic oligonucleotide
  Antisense strand to SEQ ID NO: 1063192
ucuuccgugcacagaaugg

SEQ ID NO: 1063194 - RNA, 19 nt, Artificial Sequence
  Description of Artificial Sequence: Synthetic oligonucleotide
  Sense strand starting at position 979 of SEQ ID NO: 915219
ugcaauguucuccauugau

SEQ ID NO: 1063195 - RNA, 19 nt, Artificial Sequence
  Description of Artificial Sequence: Synthetic oligonucleotide
  Antisense strand to SEQ ID NO: 1063194
aucaauggagaacauugca

SEQ ID NO: 1063196 - RNA, 19 nt, Artificial Sequence
  Description of Artificial Sequence: Synthetic oligonucleotide
  Sense strand starting at position 1084 of SEQ ID NO: 915219
auugacagcucuuugauua

SEQ ID NO: 1063197 - RNA, 19 nt, Artificial Sequence
  Description of Artificial Sequence: Synthetic oligonucleotide
  Antisense strand to SEQ ID NO: 1063196
uaaucaaagagcugucaau

SEQ ID NO: 1063198 - RNA, 19 nt, Artificial Sequence
  Description of Artificial Sequence: Synthetic oligonucleotide
  Sense strand starting at position 1085 of SEQ ID NO: 915219
uugacagcucuuugauuaa

SEQ ID NO: 1063199 - RNA, 19 nt, Artificial Sequence
  Description of Artificial Sequence: Synthetic oligonucleotide
  Antisense strand to SEQ ID NO: 1063198
uuaaucaaagagcugucaa

SEQ ID NO: 1063200 - RNA, 19 nt, Artificial Sequence
  Description of Artificial Sequence: Synthetic oligonucleotide
  Sense strand starting at position 1154 of SEQ ID NO: 915219
uagggauuacugugguaua

SEQ ID NO: 1063201 - RNA, 19 nt, Artificial Sequence
  Description of Artificial Sequence: Synthetic oligonucleotide
  Antisense strand to SEQ ID NO: 1063200
uauaccacaguaaucccua

SEQ ID NO: 1063202 - RNA, 19 nt, Artificial Sequence
  Description of Artificial Sequence: Synthetic oligonucleotide
  Sense strand starting at position 1581 of SEQ ID NO: 915219
gcacacacucuuggacauu

SEQ ID NO: 1063203 - RNA, 19 nt, Artificial Sequence
  Description of Artificial Sequence: Synthetic oligonucleotide
  Antisense strand to SEQ ID NO: 1063202
aauguccaagagugugugc

SEQ ID NO: 1063204 - RNA, 19 nt, Artificial Sequence
  Description of Artificial Sequence: Synthetic oligonucleotide
  Sense strand starting at position 1914 of SEQ ID NO: 915219
cagcgugaagaggagaauu

SEQ ID NO: 1063205 - RNA, 19 nt, Artificial Sequence
  Description of Artificial Sequence: Synthetic oligonucleotide
  Antisense strand to SEQ ID NO: 1063204
aauucuccucuucacgcug

SEQ ID NO: 1063206 - RNA, 19 nt, Artificial Sequence
  Description of Artificial Sequence: Synthetic oligonucleotide
  Sense strand starting at position 1949 of SEQ ID NO: 915219
uggucagucccaggagaau

SEQ ID NO: 1063207 - RNA, 19 nt, Artificial Sequence
  Description of Artificial Sequence: Synthetic oligonucleotide
  Antisense strand to SEQ ID NO: 1063206
auucuccugggacugacca

SEQ ID NO: 1063208 - RNA, 19 nt, Artificial Sequence
  Description of Artificial Sequence: Synthetic oligonucleotide
  Sense strand starting at position 2003 of SEQ ID NO: 915219
uuuccuucgguggaagaaa

SEQ ID NO: 1063209 - RNA, 19 nt, Artificial Sequence
  Description of Artificial Sequence: Synthetic oligonucleotide
  Antisense strand to SEQ ID NO: 1063208
uuucuuccaccgaaggaaa

SEQ ID NO: 1063210 - RNA, 19 nt, Artificial Sequence
  Description of Artificial Sequence: Synthetic oligonucleotide
  Sense strand starting at position 2400 of SEQ ID NO: 915219
uuauaauacugggcagaga

SEQ ID NO: 1063211 - RNA, 19 nt, Artificial Sequence
  Description of Artificial Sequence: Synthetic oligonucleotide
  Antisense strand to SEQ ID NO: 1063210
ucucugcccaguauuauaa

SEQ ID NO: 1063212 - RNA, 19 nt, Artificial Sequence
  Description of Artificial Sequence: Synthetic oligonucleotide
  Sense strand starting at position 2414 of SEQ ID NO: 915219
agagaaugcgcguaaagag

SEQ ID NO: 1063213 - RNA, 19 nt, Artificial Sequence
  Description of Artificial Sequence: Synthetic oligonucleotide
  Antisense strand to SEQ ID NO: 1063212
cucuuuacgcgcauucucu

SEQ ID NO: 1063214 - RNA, 19 nt, Artificial Sequence
  Description of Artificial Sequence: Synthetic oligonucleotide
  Sense strand starting at position 2455 of SEQ ID NO: 915219
gcaauauuugcccgaggau

SEQ ID NO: 1063215 - RNA, 19 nt, Artificial Sequence
  Description of Artificial Sequence: Synthetic oligonucleotide
  Antisense strand to SEQ ID NO: 1063214
auccucgggcaaauauugc

SEQ ID NO: 1063216 - RNA, 19 nt, Artificial Sequence
  Description of Artificial Sequence: Synthetic oligonucleotide
  Sense strand starting at position 2469 of SEQ ID NO: 915219
aggaucuuguucuuuguga

SEQ ID NO: 1063217 - RNA, 19 nt, Artificial Sequence
  Description of Artificial Sequence: Synthetic oligonucleotide
  Antisense strand to SEQ ID NO: 1063216
ucacaaagaacaagauccu

SEQ ID NO: 1063218 - RNA, 19 nt, Artificial Sequence
  Description of Artificial Sequence: Synthetic oligonucleotide
  Sense strand starting at position 2470 of SEQ ID NO: 915219
ggaucuuguucuuugugaa

SEQ ID NO: 1063219 - RNA, 19 nt, Artificial Sequence
  Description of Artificial Sequence: Synthetic oligonucleotide
  Antisense strand to SEQ ID NO: 1063218
uucacaaagaacaagaucc

SEQ ID NO: 1063220 - RNA, 19 nt, Artificial Sequence
  Description of Artificial Sequence: Synthetic oligonucleotide
  Sense strand starting at position 2471 of SEQ ID NO: 915219
gaucuuguucuuugugaau

SEQ ID NO: 1063221 - RNA, 19 nt, Artificial Sequence
  Description of Artificial Sequence: Synthetic oligonucleotide
  Antisense strand to SEQ ID NO: 1063220
auucacaaagaacaagauc

SEQ ID NO: 1063222 - RNA, 19 nt, Artificial Sequence
  Description of Artificial Sequence: Synthetic oligonucleotide
  Sense strand starting at position 2542 of SEQ ID NO: 915219
cucauuuguugcuuucuua

SEQ ID NO: 1063223 - RNA, 19 nt, Artificial Sequence
  Description of Artificial Sequence: Synthetic oligonucleotide
  Antisense strand to SEQ ID NO: 1063222
uaagaaagcaacaaaugag

SEQ ID NO: 1063224 - RNA, 19 nt, Artificial Sequence
  Description of Artificial Sequence: Synthetic oligonucleotide
  Sense strand starting at position 2569 of SEQ ID NO: 915219
ggcucagugcaauagggau

SEQ ID NO: 1063225 - RNA, 19 nt, Artificial Sequence
  Description of Artificial Sequence: Synthetic oligonucleotide
  Antisense strand to SEQ ID NO: 1063224
aucccuauugcacugagcc

SEQ ID NO: 1063226 - RNA, 19 nt, Artificial Sequence
  Description of Artificial Sequence: Synthetic oligonucleotide
  Sense strand starting at position 2715 of SEQ ID NO: 915219
uuccauuauguggaguuaa

SEQ ID NO: 1063227 - RNA, 19 nt, Artificial Sequence
  Description of Artificial Sequence: Synthetic oligonucleotide
  Antisense strand to SEQ ID NO: 1063226
uuaacuccacauaauggaa

SEQ ID NO: 1063228 - RNA, 19 nt, Artificial Sequence
  Description of Artificial Sequence: Synthetic oligonucleotide
  Sense strand starting at position 2740 of SEQ ID NO: 915219
uggaaauucucuccucuug

SEQ ID NO: 1063229 - RNA, 19 nt, Artificial Sequence
  Description of Artificial Sequence: Synthetic oligonucleotide
  Antisense strand to SEQ ID NO: 1063228
caagaggagagaauuucca

SEQ ID NO: 1063230 - RNA, 19 nt, Artificial Sequence
  Description of Artificial Sequence: Synthetic oligonucleotide
  Sense strand starting at position 2784 of SEQ ID NO: 915219
gagaccagauucucuguuu

SEQ ID NO: 1063231 - RNA, 19 nt, Artificial Sequence
  Description of Artificial Sequence: Synthetic oligonucleotide
  Antisense strand to SEQ ID NO: 1063230
aaacagagaaucuggucuc

SEQ ID NO: 1063232 - RNA, 19 nt, Artificial Sequence
  Description of Artificial Sequence: Synthetic oligonucleotide
  Sense strand starting at position 2785 of SEQ ID NO: 915219
agaccagauucucuguuua

SEQ ID NO: 1063233 - RNA, 19 nt, Artificial Sequence
  Description of Artificial Sequence: Synthetic oligonucleotide
  Antisense strand to SEQ ID NO: 1063232
uaaacagagaaucuggucu

SEQ ID NO: 1063234 - RNA, 19 nt, Artificial Sequence
  Description of Artificial Sequence: Synthetic oligonucleotide
  Sense strand starting at position 2787 of SEQ ID NO: 915219
accagauucucuguuuaga

SEQ ID NO: 1063235 - RNA, 19 nt, Artificial Sequence
  Description of Artificial Sequence: Synthetic oligonucleotide
  Antisense strand to SEQ ID NO: 1063234
ucuaaacagagaaucuggu

SEQ ID NO: 1063236 - RNA, 19 nt, Artificial Sequence
  Description of Artificial Sequence: Synthetic oligonucleotide
  Sense strand starting at position 3089 of SEQ ID NO: 915219
aauugauuacagugaaguu

SEQ ID NO: 1063237 - RNA, 19 nt, Artificial Sequence
  Description of Artificial Sequence: Synthetic oligonucleotide
  Antisense strand to SEQ ID NO: 1063236
aacuucacuguaaucaauu

SEQ ID NO: 1063238 - RNA, 19 nt, Artificial Sequence
  Description of Artificial Sequence: Synthetic oligonucleotide
  Sense strand starting at position 3629 of SEQ ID NO: 915219
gcacacaucugguugacau

SEQ ID NO: 1063239 - RNA, 19 nt, Artificial Sequence
  Description of Artificial Sequence: Synthetic oligonucleotide
  Antisense strand to SEQ ID NO: 1063238
augucaaccagaugugugc

SEQ ID NO: 1063240 - RNA, 19 nt, Artificial Sequence
  Description of Artificial Sequence: Synthetic oligonucleotide
  Sense strand starting at position 3678 of SEQ ID NO: 915219
agaugaaugcuuugauaaa

SEQ ID NO: 1063241 - RNA, 19 nt, Artificial Sequence
  Description of Artificial Sequence: Synthetic oligonucleotide
  Antisense strand to SEQ ID NO: 1063240
uuuaucaaagcauucaucu

SEQ ID NO: 1063242 - RNA, 19 nt, Artificial Sequence
  Description of Artificial Sequence: Synthetic oligonucleotide
  Sense strand starting at position 3698 of SEQ ID NO: 915219
augcaauaggcuuagcaua

SEQ ID NO: 1063243 - RNA, 19 nt, Artificial Sequence
  Description of Artificial Sequence: Synthetic oligonucleotide
  Antisense strand to SEQ ID NO: 1063242
uaugcuaagccuauugcau

SEQ ID NO: 1063244 - RNA, 19 nt, Artificial Sequence
  Description of Artificial Sequence: Synthetic oligonucleotide
  Sense strand starting at position 3700 of SEQ ID NO: 915219
gcaauaggcuuagcauaaa

SEQ ID NO: 1063245 - RNA, 19 nt, Artificial Sequence
  Description of Artificial Sequence: Synthetic oligonucleotide
  Antisense strand to SEQ ID NO: 1063244
uuuaugcuaagccuauugc

SEQ ID NO: 1063246 - RNA, 19 nt, Artificial Sequence
  Description of Artificial Sequence: Synthetic oligonucleotide
  Sense strand starting at position 3899 of SEQ ID NO: 915219
augacacucugccuguaau

SEQ ID NO: 1063247 - RNA, 19 nt, Artificial Sequence
  Description of Artificial Sequence: Synthetic oligonucleotide
  Antisense strand to SEQ ID NO: 1063246
auuacaggcagagugucau

SEQ ID NO: 1063248 - RNA, 19 nt, Artificial Sequence
  Description of Artificial Sequence: Synthetic oligonucleotide
  Sense strand starting at position 3900 of SEQ ID NO: 915219
ugacacucugccuguaaua

SEQ ID NO: 1063249 - RNA, 19 nt, Artificial Sequence
  Description of Artificial Sequence: Synthetic oligonucleotide
  Antisense strand to SEQ ID NO: 1063248
uauuacaggcagaguguca

SEQ ID NO: 1063250 - RNA, 19 nt, Artificial Sequence
  Description of Artificial Sequence: Synthetic oligonucleotide
  Sense strand starting at position 3909 of SEQ ID NO: 915219
gccuguaauagguauggau

SEQ ID NO: 1063251 - RNA, 19 nt, Artificial Sequence
  Description of Artificial Sequence: Synthetic oligonucleotide
  Antisense strand to SEQ ID NO: 1063250
auccauaccuauuacaggc

SEQ ID NO: 1063252 - RNA, 19 nt, Artificial Sequence
  Description of Artificial Sequence: Synthetic oligonucleotide
  Sense strand starting at position 3911 of SEQ ID NO: 915219
cuguaauagguauggauaa

SEQ ID NO: 1063253 - RNA, 19 nt, Artificial Sequence
  Description of Artificial Sequence: Synthetic oligonucleotide
  Antisense strand to SEQ ID NO: 1063252
uuauccauaccuauuacag

SEQ ID NO: 1063254 - RNA, 19 nt, Artificial Sequence
  Description of Artificial Sequence: Synthetic oligonucleotide
  Sense strand starting at position 3948 of SEQ ID NO: 915219
guuaguacagaaggaaauu

SEQ ID NO: 1063255 - RNA, 19 nt, Artificial Sequence
  Description of Artificial Sequence: Synthetic oligonucleotide
  Antisense strand to SEQ ID NO: 1063254
aauuuccuucuguacuaac

SEQ ID NO: 1063256 - RNA, 19 nt, Artificial Sequence
  Description of Artificial Sequence: Synthetic oligonucleotide
  Sense strand starting at position 98 of SEQ ID NO: 915220
gcccaaaugggaugcaauu

SEQ ID NO: 1063257 - RNA, 19 nt, Artificial Sequence
  Description of Artificial Sequence: Synthetic oligonucleotide
  Antisense strand to SEQ ID NO: 1063256
aauugcaucccauuugggc

SEQ ID NO: 1063258 - RNA, 19 nt, Artificial Sequence
  Description of Artificial Sequence: Synthetic oligonucleotide
  Sense strand starting at position 335 of SEQ ID NO: 915220
cucagacuuugugucagaa

SEQ ID NO: 1063259 - RNA, 19 nt, Artificial Sequence
  Description of Artificial Sequence: Synthetic oligonucleotide
  Antisense strand to SEQ ID NO: 1063258
uucugacacaaagucugag

SEQ ID NO: 1063260 - RNA, 19 nt, Artificial Sequence
  Description of Artificial Sequence: Synthetic oligonucleotide
  Sense strand starting at position 438 of SEQ ID NO: 915220
uguguaaaugaguacccau

SEQ ID NO: 1063261 - RNA, 19 nt, Artificial Sequence
  Description of Artificial Sequence: Synthetic oligonucleotide
  Antisense strand to SEQ ID NO: 1063260
auggguacucauuuacaca

SEQ ID NO: 1063262 - RNA, 19 nt, Artificial Sequence
  Description of Artificial Sequence: Synthetic oligonucleotide
  Sense strand starting at position 441 of SEQ ID NO: 915220
guaaaugaguacccaucaa

SEQ ID NO: 1063263 - RNA, 19 nt, Artificial Sequence
  Description of Artificial Sequence: Synthetic oligonucleotide
  Antisense strand to SEQ ID NO: 1063262
uugauggguacucauuuac

SEQ ID NO: 1063264 - RNA, 19 nt, Artificial Sequence
  Description of Artificial Sequence: Synthetic oligonucleotide
  Sense strand starting at position 624 of SEQ ID NO: 915220
aguauucuauggccaugaa

SEQ ID NO: 1063265 - RNA, 19 nt, Artificial Sequence
  Description of Artificial Sequence: Synthetic oligonucleotide
  Antisense strand to SEQ ID NO: 1063264
uucauggccauagaauacu

SEQ ID NO: 1063266 - RNA, 19 nt, Artificial Sequence
  Description of Artificial Sequence: Synthetic oligonucleotide
  Sense strand starting at position 625 of SEQ ID NO: 915220
guauucuauggccaugaaa

SEQ ID NO: 1063267 - RNA, 19 nt, Artificial Sequence
  Description of Artificial Sequence: Synthetic oligonucleotide
  Antisense strand to SEQ ID NO: 1063266
uuucauggccauagaauac

SEQ ID NO: 1063268 - RNA, 19 nt, Artificial Sequence
  Description of Artificial Sequence: Synthetic oligonucleotide
  Sense strand starting at position 688 of SEQ ID NO: 915220
caugaaaucuaguuugagg

SEQ ID NO: 1063269 - RNA, 19 nt, Artificial Sequence
  Description of Artificial Sequence: Synthetic oligonucleotide
  Antisense strand to SEQ ID NO: 1063268
ccucaaacuagauuucaug

SEQ ID NO: 1063270 - RNA, 19 nt, Artificial Sequence
  Description of Artificial Sequence: Synthetic oligonucleotide
  Sense strand starting at position 699 of SEQ ID NO: 915220
guuugaggaauauguauau

SEQ ID NO: 1063271 - RNA, 19 nt, Artificial Sequence
  Description of Artificial Sequence: Synthetic oligonucleotide
  Antisense strand to SEQ ID NO: 1063270
auauacauauuccucaaac

SEQ ID NO: 1063272 - RNA, 19 nt, Artificial Sequence
  Description of Artificial Sequence: Synthetic oligonucleotide
  Sense strand starting at position 784 of SEQ ID NO: 915220
uguacacucauuugugagu

SEQ ID NO: 1063273 - RNA, 19 nt, Artificial Sequence
  Description of Artificial Sequence: Synthetic oligonucleotide
  Antisense strand to SEQ ID NO: 1063272
acucacaaaugaguguaca

SEQ ID NO: 1063274 - RNA, 19 nt, Artificial Sequence
  Description of Artificial Sequence: Synthetic oligonucleotide
  Sense strand starting at position 785 of SEQ ID NO: 915220
guacacucauuugugaguu

SEQ ID NO: 1063275 - RNA, 19 nt, Artificial Sequence
  Description of Artificial Sequence: Synthetic oligonucleotide
  Antisense strand to SEQ ID NO: 1063274
aacucacaaaugaguguac

SEQ ID NO: 1063276 - RNA, 19 nt, Artificial Sequence
  Description of Artificial Sequence: Synthetic oligonucleotide
  Sense strand starting at position 793 of SEQ ID NO: 915220
auuugugaguuccuccagu

SEQ ID NO: 1063277 - RNA, 19 nt, Artificial Sequence
  Description of Artificial Sequence: Synthetic oligonucleotide
  Antisense strand to SEQ ID NO: 1063276
acuggaggaacucacaaau

SEQ ID NO: 1063278 - RNA, 19 nt, Artificial Sequence
  Description of Artificial Sequence: Synthetic oligonucleotide
  Sense strand starting at position 799 of SEQ ID NO: 915220
gaguuccuccagugacuaa

SEQ ID NO: 1063279 - RNA, 19 nt, Artificial Sequence
  Description of Artificial Sequence: Synthetic oligonucleotide
  Antisense strand to SEQ ID NO: 1063278
uuagucacuggaggaacuc

SEQ ID NO: 1063280 - RNA, 19 nt, Artificial Sequence
  Description of Artificial Sequence: Synthetic oligonucleotide
  Sense strand starting at position 835 of SEQ ID NO: 915220
gcauauugugaaugaacau

SEQ ID NO: 1063281 - RNA, 19 nt, Artificial Sequence
  Description of Artificial Sequence: Synthetic oligonucleotide
  Antisense strand to SEQ ID NO: 1063280
auguucauucacaauaugc

SEQ ID NO: 1063282 - RNA, 19 nt, Artificial Sequence
  Description of Artificial Sequence: Synthetic oligonucleotide
  Sense strand starting at position 867 of SEQ ID NO: 915220
auaauauuggcgcacauau

SEQ ID NO: 1063283 - RNA, 19 nt, Artificial Sequence
  Description of Artificial Sequence: Synthetic oligonucleotide
  Antisense strand to SEQ ID NO: 1063282
auaugugcgccaauauuau

SEQ ID NO: 1063284 - RNA, 19 nt, Artificial Sequence
  Description of Artificial Sequence: Synthetic oligonucleotide
  Sense strand starting at position 960 of SEQ ID NO: 915220
gugugaaagaguuaccuuu

SEQ ID NO: 1063285 - RNA, 19 nt, Artificial Sequence
  Description of Artificial Sequence: Synthetic oligonucleotide
  Antisense strand to SEQ ID NO: 1063284
aaagguaacucuuucacac

SEQ ID NO: 1063286 - RNA, 19 nt, Artificial Sequence
  Description of Artificial Sequence: Synthetic oligonucleotide
  Sense strand starting at position 1334 of SEQ ID NO: 915220
cagcuacuacaaugagagu

SEQ ID NO: 1063287 - RNA, 19 nt, Artificial Sequence
  Description of Artificial Sequence: Synthetic oligonucleotide
  Antisense strand to SEQ ID NO: 1063286
acucucauuguaguagcug

SEQ ID NO: 1063288 - RNA, 19 nt, Artificial Sequence
  Description of Artificial Sequence: Synthetic oligonucleotide
  Sense strand starting at position 1412 of SEQ ID NO: 915220
uugugauuucuuugaugug

SEQ ID NO: 1063289 - RNA, 19 nt, Artificial Sequence
  Description of Artificial Sequence: Synthetic oligonucleotide
  Antisense strand to SEQ ID NO: 1063288
cacaucaaagaaaucacaa

SEQ ID NO: 1063290 - RNA, 19 nt, Artificial Sequence
  Description of Artificial Sequence: Synthetic oligonucleotide
  Sense strand starting at position 1468 of SEQ ID NO: 915220
gcacaauagaagugauuga

SEQ ID NO: 1063291 - RNA, 19 nt, Artificial Sequence
  Description of Artificial Sequence: Synthetic oligonucleotide
  Antisense strand to SEQ ID NO: 1063290
ucaaucacuucuauugugc

SEQ ID NO: 1063292 - RNA, 19 nt, Artificial Sequence
  Description of Artificial Sequence: Synthetic oligonucleotide
  Sense strand starting at position 1500 of SEQ ID NO: 915220
acagaaguauaagccauaa

SEQ ID NO: 1063293 - RNA, 19 nt, Artificial Sequence
  Description of Artificial Sequence: Synthetic oligonucleotide
  Antisense strand to SEQ ID NO: 1063292
uuauggcuuauacuucugu

SEQ ID NO: 1063294 - RNA, 19 nt, Artificial Sequence
  Description of Artificial Sequence: Synthetic oligonucleotide
  Sense strand starting at position 1529 of SEQ ID NO: 915220
ugcauauuaggcugacaga

SEQ ID NO: 1063295 - RNA, 19 nt, Artificial Sequence
  Description of Artificial Sequence: Synthetic oligonucleotide
  Antisense strand to SEQ ID NO: 1063294
ucugucagccuaauaugca

SEQ ID NO: 1063296 - RNA, 19 nt, Artificial Sequence
  Description of Artificial Sequence: Synthetic oligonucleotide
  Sense strand starting at position 1652 of SEQ ID NO: 915220
ccaucacagccaggauaua

SEQ ID NO: 1063297 - RNA, 19 nt, Artificial Sequence
  Description of Artificial Sequence: Synthetic oligonucleotide
  Antisense strand to SEQ ID NO: 1063296
uauauccuggcugugaugg

SEQ ID NO: 1063298 - RNA, 19 nt, Artificial Sequence
  Description of Artificial Sequence: Synthetic oligonucleotide
  Sense strand starting at position 1883 of SEQ ID NO: 915220
uucccaacagagugaucau

SEQ ID NO: 1063299 - RNA, 19 nt, Artificial Sequence
  Description of Artificial Sequence: Synthetic oligonucleotide
  Antisense strand to SEQ ID NO: 1063298
augaucacucuguugggaa

SEQ ID NO: 1063300 - RNA, 19 nt, Artificial Sequence
  Description of Artificial Sequence: Synthetic oligonucleotide
  Sense strand starting at position 1966 of SEQ ID NO: 915220
agaguaaauucugucacau

SEQ ID NO: 1063301 - RNA, 19 nt, Artificial Sequence
  Description of Artificial Sequence: Synthetic oligonucleotide
  Antisense strand to SEQ ID NO: 1063300
augugacagaauuuacucu

SEQ ID NO: 1063302 - RNA, 19 nt, Artificial Sequence
  Description of Artificial Sequence: Synthetic oligonucleotide
  Sense strand starting at position 1977 of SEQ ID NO: 915220
ugucacauccgugaaauua

SEQ ID NO: 1063303 - RNA, 19 nt, Artificial Sequence
  Description of Artificial Sequence: Synthetic oligonucleotide
  Antisense strand to SEQ ID NO: 1063302
uaauuucacggaugugaca

SEQ ID NO: 1063304 - RNA, 19 nt, Artificial Sequence
  Description of Artificial Sequence: Synthetic oligonucleotide
  Sense strand starting at position 2147 of SEQ ID NO: 915220
uguacaauacaggguuuaa

SEQ ID NO: 1063305 - RNA, 19 nt, Artificial Sequence
  Description of Artificial Sequence: Synthetic oligonucleotide
  Antisense strand to SEQ ID NO: 1063304
uuaaacccuguauuguaca

SEQ ID NO: 1063306 - RNA, 19 nt, Artificial Sequence
  Description of Artificial Sequence: Synthetic oligonucleotide
  Sense strand starting at position 2242 of SEQ ID NO: 915220
gcuauagauguccaugauu

SEQ ID NO: 1063307 - RNA, 19 nt, Artificial Sequence
  Description of Artificial Sequence: Synthetic oligonucleotide
  Antisense strand to SEQ ID NO: 1063306
aaucauggacaucuauagc

SEQ ID NO: 1063308 - RNA, 19 nt, Artificial Sequence
  Description of Artificial Sequence: Synthetic oligonucleotide
  Sense strand starting at position 2245 of SEQ ID NO: 915220
auagauguccaugauugua

SEQ ID NO: 1063309 - RNA, 19 nt, Artificial Sequence
  Description of Artificial Sequence: Synthetic oligonucleotide
  Antisense strand to SEQ ID NO: 1063308
uacaaucauggacaucuau

SEQ ID NO: 1063310 - RNA, 19 nt, Artificial Sequence
  Description of Artificial Sequence: Synthetic oligonucleotide
  Sense strand starting at position 2313 of SEQ ID NO: 915220
agaugcuguggucagagau

SEQ ID NO: 1063311 - RNA, 19 nt, Artificial Sequence
  Description of Artificial Sequence: Synthetic oligonucleotide
  Antisense strand to SEQ ID NO: 1063310
aucucugaccacagcaucu

SEQ ID NO: 1063312 - RNA, 19 nt, Artificial Sequence
  Description of Artificial Sequence: Synthetic oligonucleotide
  Sense strand starting at position 2397 of SEQ ID NO: 915220
guguuacuacuguauuaag

SEQ ID NO: 1063313 - RNA, 19 nt, Artificial Sequence
  Description of Artificial Sequence: Synthetic oligonucleotide
  Antisense strand to SEQ ID NO: 1063312
cuuaauacaguaguaacac

SEQ ID NO: 1063314 - RNA, 19 nt, Artificial Sequence
  Description of Artificial Sequence: Synthetic oligonucleotide
  Sense strand starting at position 2534 of SEQ ID NO: 915220
gcauuuagguugcugcaaa

SEQ ID NO: 1063315 - RNA, 19 nt, Artificial Sequence
  Description of Artificial Sequence: Synthetic oligonucleotide
  Antisense strand to SEQ ID NO: 1063314
uuugcagcaaccuaaaugc

SEQ ID NO: 1063316 - RNA, 19 nt, Artificial Sequence
  Description of Artificial Sequence: Synthetic oligonucleotide
  Sense strand starting at position 2938 of SEQ ID NO: 915220
aaagucucccugggucaga

SEQ ID NO: 1063317 - RNA, 19 nt, Artificial Sequence
  Description of Artificial Sequence: Synthetic oligonucleotide
  Antisense strand to SEQ ID NO: 1063316
ucugacccagggagacuuu

SEQ ID NO: 1063318 - RNA, 19 nt, Artificial Sequence
  Description of Artificial Sequence: Synthetic oligonucleotide
  Sense strand starting at position 2949 of SEQ ID NO: 915220
gggucagaggucuacuaau

SEQ ID NO: 1063319 - RNA, 19 nt, Artificial Sequence
  Description of Artificial Sequence: Synthetic oligonucleotide
  Antisense strand to SEQ ID NO: 1063318
auuaguagaccucugaccc

SEQ ID NO: 1063320 - RNA, 19 nt, Artificial Sequence
  Description of Artificial Sequence: Synthetic oligonucleotide
  Sense strand starting at position 2958 of SEQ ID NO: 915220
gucuacuaauuagcagaau

SEQ ID NO: 1063321 - RNA, 19 nt, Artificial Sequence
  Description of Artificial Sequence: Synthetic oligonucleotide
  Antisense strand to SEQ ID NO: 1063320
auucugcuaauuaguagac

SEQ ID NO: 1063322 - RNA, 19 nt, Artificial Sequence
  Description of Artificial Sequence: Synthetic oligonucleotide
  Sense strand starting at position 3169 of SEQ ID NO: 915220
agccuaaaccacugagaua

SEQ ID NO: 1063323 - RNA, 19 nt, Artificial Sequence
  Description of Artificial Sequence: Synthetic oligonucleotide
  Antisense strand to SEQ ID NO: 1063322
uaucucagugguuuaggcu

SEQ ID NO: 1063324 - RNA, 19 nt, Artificial Sequence
  Description of Artificial Sequence: Synthetic oligonucleotide
  Sense strand starting at position 3240 of SEQ ID NO: 915220
gauaaugauuucugggaga

SEQ ID NO: 1063325 - RNA, 19 nt, Artificial Sequence
  Description of Artificial Sequence: Synthetic oligonucleotide
  Antisense strand to SEQ ID NO: 1063324
ucucccagaaaucauuauc

SEQ ID NO: 1063326 - RNA, 19 nt, Artificial Sequence
  Description of Artificial Sequence: Synthetic oligonucleotide
  Sense strand starting at position 3270 of SEQ ID NO: 915220
auaccuaaauguguaucau

SEQ ID NO: 1063327 - RNA, 19 nt, Artificial Sequence
  Description of Artificial Sequence: Synthetic oligonucleotide
  Antisense strand to SEQ ID NO: 1063326
augauacacauuuagguau

SEQ ID NO: 1063328 - RNA, 19 nt, Artificial Sequence
  Description of Artificial Sequence: Synthetic oligonucleotide
  Sense strand starting at position 3650 of SEQ ID NO: 915220
uaagucugugaauaaggua

SEQ ID NO: 1063329 - RNA, 19 nt, Artificial Sequence
  Description of Artificial Sequence: Synthetic oligonucleotide
  Antisense strand to SEQ ID NO: 1063328
uaccuuauucacagacuua

SEQ ID NO: 1063330 - RNA, 19 nt, Artificial Sequence
  Description of Artificial Sequence: Synthetic oligonucleotide
  Sense strand starting at position 3655 of SEQ ID NO: 915220
cugugaauaagguauuagu

SEQ ID NO: 1063331 - RNA, 19 nt, Artificial Sequence
  Description of Artificial Sequence: Synthetic oligonucleotide
  Antisense strand to SEQ ID NO: 1063330
acuaauaccuuauucacag

SEQ ID NO: 1063332 - RNA, 19 nt, Artificial Sequence
  Description of Artificial Sequence: Synthetic oligonucleotide
  Sense strand starting at position 3825 of SEQ ID NO: 915220
cugggaucaucucccuaaa

SEQ ID NO: 1063333 - RNA, 19 nt, Artificial Sequence
  Description of Artificial Sequence: Synthetic oligonucleotide
  Antisense strand to SEQ ID NO: 1063332
uuuagggagaugaucccag

SEQ ID NO: 1063334 - RNA, 19 nt, Artificial Sequence
  Description of Artificial Sequence: Synthetic oligonucleotide
  Sense strand starting at position 3897 of SEQ ID NO: 915220
cagguauaggagcaguuaa

SEQ ID NO: 1063335 - RNA, 19 nt, Artificial Sequence
  Description of Artificial Sequence: Synthetic oligonucleotide
  Antisense strand to SEQ ID NO: 1063334
uuaacugcuccuauaccug

SEQ ID NO: 1063336 - RNA, 19 nt, Artificial Sequence
  Description of Artificial Sequence: Synthetic oligonucleotide
  Sense strand starting at position 156 of SEQ ID NO: 915221
cugccauauccagauauag

SEQ ID NO: 1063337 - RNA, 19 nt, Artificial Sequence
  Description of Artificial Sequence: Synthetic oligonucleotide
  Antisense strand to SEQ ID NO: 1063336
cuauaucuggauauggcag

SEQ ID NO: 1063338 - RNA, 19 nt, Artificial Sequence
  Description of Artificial Sequence: Synthetic oligonucleotide
  Sense strand starting at position 196 of SEQ ID NO: 915221
acagaaaggguuugcuaga

SEQ ID NO: 1063339 - RNA, 19 nt, Artificial Sequence
  Description of Artificial Sequence: Synthetic oligonucleotide
  Antisense strand to SEQ ID NO: 1063338
ucuagcaaacccuuucugu

SEQ ID NO: 1063340 - RNA, 19 nt, Artificial Sequence
  Description of Artificial Sequence: Synthetic oligonucleotide
  Sense strand starting at position 197 of SEQ ID NO: 915221
cagaaaggguuugcuagaa

SEQ ID NO: 1063341 - RNA, 19 nt, Artificial Sequence
  Description of Artificial Sequence: Synthetic oligonucleotide
  Antisense strand to SEQ ID NO: 1063340
uucuagcaaacccuuucug

SEQ ID NO: 1063342 - RNA, 19 nt, Artificial Sequence
  Description of Artificial Sequence: Synthetic oligonucleotide
  Sense strand starting at position 205 of SEQ ID NO: 915221
guuugcuagaaagaaaugu

SEQ ID NO: 1063343 - RNA, 19 nt, Artificial Sequence
  Description of Artificial Sequence: Synthetic oligonucleotide
  Antisense strand to SEQ ID NO: 1063342
acauuucuuucuagcaaac

SEQ ID NO: 1063344 - RNA, 19 nt, Artificial Sequence
  Description of Artificial Sequence: Synthetic oligonucleotide
  Sense strand starting at position 209 of SEQ ID NO: 915221
gcuagaaagaaauguguca

SEQ ID NO: 1063345 - RNA, 19 nt, Artificial Sequence
  Description of Artificial Sequence: Synthetic oligonucleotide
  Antisense strand to SEQ ID NO: 1063344
ugacacauuucuuucuagc

SEQ ID NO: 1063346 - RNA, 19 nt, Artificial Sequence
  Description of Artificial Sequence: Synthetic oligonucleotide
  Sense strand starting at position 235 of SEQ ID NO: 915221
augaaaguucauggugaag

SEQ ID NO: 1063347 - RNA, 19 nt, Artificial Sequence
  Description of Artificial Sequence: Synthetic oligonucleotide
  Antisense strand to SEQ ID NO: 1063346
cuucaccaugaacuuucau

SEQ ID NO: 1063348 - RNA, 19 nt, Artificial Sequence
  Description of Artificial Sequence: Synthetic oligonucleotide
  Sense strand starting at position 361 of SEQ ID NO: 915221
aguuacauccuuuguaaua

SEQ ID NO: 1063349 - RNA, 19 nt, Artificial Sequence
  Description of Artificial Sequence: Synthetic oligonucleotide
  Antisense strand to SEQ ID NO: 1063348
uauuacaaaggauguaacu

SEQ ID NO: 1063350 - RNA, 19 nt, Artificial Sequence
  Description of Artificial Sequence: Synthetic oligonucleotide
  Sense strand starting at position 426 of SEQ ID NO: 915221
agguuaauacuuuacuugu

SEQ ID NO: 1063351 - RNA, 19 nt, Artificial Sequence
  Description of Artificial Sequence: Synthetic oligonucleotide
  Antisense strand to SEQ ID NO: 1063350
acaaguaaaguauuaaccu

SEQ ID NO: 1063352 - RNA, 19 nt, Artificial Sequence
  Description of Artificial Sequence: Synthetic oligonucleotide
  Sense strand starting at position 439 of SEQ ID NO: 915221
acuuguaaacagugauaac

SEQ ID NO: 1063353 - RNA, 19 nt, Artificial Sequence
  Description of Artificial Sequence: Synthetic oligonucleotide
  Antisense strand to SEQ ID NO: 1063352
guuaucacuguuuacaagu

SEQ ID NO: 1063354 - RNA, 19 nt, Artificial Sequence
  Description of Artificial Sequence: Synthetic oligonucleotide
  Sense strand starting at position 451 of SEQ ID NO: 915221
ugauaacagugcccagaau

SEQ ID NO: 1063355 - RNA, 19 nt, Artificial Sequence
  Description of Artificial Sequence: Synthetic oligonucleotide
  Antisense strand to SEQ ID NO: 1063354
auucugggcacuguuauca

SEQ ID NO: 1063356 - RNA, 19 nt, Artificial Sequence
  Description of Artificial Sequence: Synthetic oligonucleotide
  Sense strand starting at position 591 of SEQ ID NO: 915221
uuaguaaacuaggcugaga

SEQ ID NO: 1063357 - RNA, 19 nt, Artificial Sequence
  Description of Artificial Sequence: Synthetic oligonucleotide
  Antisense strand to SEQ ID NO: 1063356
ucucagccuaguuuacuaa

SEQ ID NO: 1063358 - RNA, 19 nt, Artificial Sequence
  Description of Artificial Sequence: Synthetic oligonucleotide
  Sense strand starting at position 593 of SEQ ID NO: 915221
aguaaacuaggcugagauu

SEQ ID NO: 1063359 - RNA, 19 nt, Artificial Sequence
  Description of Artificial Sequence: Synthetic oligonucleotide
  Antisense strand to SEQ ID NO: 1063358
aaucucagccuaguuuacu

SEQ ID NO: 1063360 - RNA, 19 nt, Artificial Sequence
  Description of Artificial Sequence: Synthetic oligonucleotide
  Sense strand starting at position 616 of SEQ ID NO: 915221
uugcuaaucuagguuauaa

SEQ ID NO: 1063361 - RNA, 19 nt, Artificial Sequence
  Description of Artificial Sequence: Synthetic oligonucleotide
  Antisense strand to SEQ ID NO: 1063360
uuauaaccuagauuagcaa

SEQ ID NO: 1063362 - RNA, 19 nt, Artificial Sequence
  Description of Artificial Sequence: Synthetic oligonucleotide
  Sense strand starting at position 664 of SEQ ID NO: 915221
gaggauggguuuguuguaa

SEQ ID NO: 1063363 - RNA, 19 nt, Artificial Sequence
  Description of Artificial Sequence: Synthetic oligonucleotide
  Antisense strand to SEQ ID NO: 1063362
uuacaacaaacccauccuc

SEQ ID NO: 1063364 - RNA, 19 nt, Artificial Sequence
  Description of Artificial Sequence: Synthetic oligonucleotide
  Sense strand starting at position 693 of SEQ ID NO: 915221
cuguuauagcaggaucuca

SEQ ID NO: 1063365 - RNA, 19 nt, Artificial Sequence
  Description of Artificial Sequence: Synthetic oligonucleotide
  Antisense strand to SEQ ID NO: 1063364
ugagauccugcuauaacag

SEQ ID NO: 1063366 - RNA, 19 nt, Artificial Sequence
  Description of Artificial Sequence: Synthetic oligonucleotide
  Sense strand starting at position 1000 of SEQ ID NO: 915221
cauugaguauucucaagag

SEQ ID NO: 1063367 - RNA, 19 nt, Artificial Sequence
  Description of Artificial Sequence: Synthetic oligonucleotide
  Antisense strand to SEQ ID NO: 1063366
cucuugagaauacucaaug

SEQ ID NO: 1063368 - RNA, 19 nt, Artificial Sequence
  Description of Artificial Sequence: Synthetic oligonucleotide
  Sense strand starting at position 1164 of SEQ ID NO: 915221
gggaaucaccacuguguac

SEQ ID NO: 1063369 - RNA, 19 nt, Artificial Sequence
  Description of Artificial Sequence: Synthetic oligonucleotide
  Antisense strand to SEQ ID NO: 1063368
guacacaguggugauuccc

SEQ ID NO: 1063370 - RNA, 19 nt, Artificial Sequence
  Description of Artificial Sequence: Synthetic oligonucleotide
  Sense strand starting at position 1346 of SEQ ID NO: 915221
ugaggauauagauguagca

SEQ ID NO: 1063371 - RNA, 19 nt, Artificial Sequence
  Description of Artificial Sequence: Synthetic oligonucleotide
  Antisense strand to SEQ ID NO: 1063370
ugcuacaucuauauccuca

SEQ ID NO: 1063372 - RNA, 19 nt, Artificial Sequence
  Description of Artificial Sequence: Synthetic oligonucleotide
  Sense strand starting at position 1589 of SEQ ID NO: 915221
cacugacuuguguggacau

SEQ ID NO: 1063373 - RNA, 19 nt, Artificial Sequence
  Description of Artificial Sequence: Synthetic oligonucleotide
  Antisense strand to SEQ ID NO: 1063372
auguccacacaagucagug

SEQ ID NO: 1063374 - RNA, 19 nt, Artificial Sequence
  Description of Artificial Sequence: Synthetic oligonucleotide
  Sense strand starting at position 1675 of SEQ ID NO: 915221
acgcauucgacuguugcaa

SEQ ID NO: 1063375 - RNA, 19 nt, Artificial Sequence
  Description of Artificial Sequence: Synthetic oligonucleotide
  Antisense strand to SEQ ID NO: 1063374
uugcaacagucgaaugcgu

SEQ ID NO: 1063376 - RNA, 19 nt, Artificial Sequence
  Description of Artificial Sequence: Synthetic oligonucleotide
  Sense strand starting at position 1676 of SEQ ID NO: 915221
cgcauucgacuguugcaaa

SEQ ID NO: 1063377 - RNA, 19 nt, Artificial Sequence
  Description of Artificial Sequence: Synthetic oligonucleotide
  Antisense strand to SEQ ID NO: 1063376
uuugcaacagucgaaugcg

SEQ ID NO: 1063378 - RNA, 19 nt, Artificial Sequence
  Description of Artificial Sequence: Synthetic oligonucleotide
  Sense strand starting at position 1918 of SEQ ID NO: 915221
acucgaaggauuggaucau

SEQ ID NO: 1063379 - RNA, 19 nt, Artificial Sequence
  Description of Artificial Sequence: Synthetic oligonucleotide
  Antisense strand to SEQ ID NO: 1063378
augauccaauccuucgagu

SEQ ID NO: 1063380 - RNA, 19 nt, Artificial Sequence
  Description of Artificial Sequence: Synthetic oligonucleotide
  Sense strand starting at position 1924 of SEQ ID NO: 915221
aggauuggaucaucuguua

SEQ ID NO: 1063381 - RNA, 19 nt, Artificial Sequence
  Description of Artificial Sequence: Synthetic oligonucleotide
  Antisense strand to SEQ ID NO: 1063380
uaacagaugauccaauccu

SEQ ID NO: 1063382 - RNA, 19 nt, Artificial Sequence
  Description of Artificial Sequence: Synthetic oligonucleotide
  Sense strand starting at position 2006 of SEQ ID NO: 915221
gaaguagcugcugacuaaa

SEQ ID NO: 1063383 - RNA, 19 nt, Artificial Sequence
  Description of Artificial Sequence: Synthetic oligonucleotide
  Antisense strand to SEQ ID NO: 1063382
uuuagucagcagcuacuuc

SEQ ID NO: 1063384 - RNA, 19 nt, Artificial Sequence
  Description of Artificial Sequence: Synthetic oligonucleotide
  Sense strand starting at position 2009 of SEQ ID NO: 915221
guagcugcugacuaaauga

SEQ ID NO: 1063385 - RNA, 19 nt, Artificial Sequence
  Description of Artificial Sequence: Synthetic oligonucleotide
  Antisense strand to SEQ ID NO: 1063384
ucauuuagucagcagcuac

SEQ ID NO: 1063386 - RNA, 19 nt, Artificial Sequence
  Description of Artificial Sequence: Synthetic oligonucleotide
  Sense strand starting at position 2175 of SEQ ID NO: 915221
auuuauguguaaucagucu

SEQ ID NO: 1063387 - RNA, 19 nt, Artificial Sequence
  Description of Artificial Sequence: Synthetic oligonucleotide
  Antisense strand to SEQ ID NO: 1063386
agacugauuacacauaaau

SEQ ID NO: 1063388 - RNA, 19 nt, Artificial Sequence
  Description of Artificial Sequence: Synthetic oligonucleotide
  Sense strand starting at position 2435 of SEQ ID NO: 915221
cuggcucaggguuaagaau

SEQ ID NO: 1063389 - RNA, 19 nt, Artificial Sequence
  Description of Artificial Sequence: Synthetic oligonucleotide
  Antisense strand to SEQ ID NO: 1063388
auucuuaacccugagccag

SEQ ID NO: 1063390 - RNA, 19 nt, Artificial Sequence
  Description of Artificial Sequence: Synthetic oligonucleotide
  Sense strand starting at position 2578 of SEQ ID NO: 915221
ggaaacuaaguuugcaaau

SEQ ID NO: 1063391 - RNA, 19 nt, Artificial Sequence
  Description of Artificial Sequence: Synthetic oligonucleotide
  Antisense strand to SEQ ID NO: 1063390
auuugcaaacuuaguuucc

SEQ ID NO: 1063392 - RNA, 19 nt, Artificial Sequence
  Description of Artificial Sequence: Synthetic oligonucleotide
  Sense strand starting at position 2627 of SEQ ID NO: 915221
agugguagaaucuggauca

SEQ ID NO: 1063393 - RNA, 19 nt, Artificial Sequence
  Description of Artificial Sequence: Synthetic oligonucleotide
  Antisense strand to SEQ ID NO: 1063392
ugauccagauucuaccacu

SEQ ID NO: 1063394 - RNA, 19 nt, Artificial Sequence
  Description of Artificial Sequence: Synthetic oligonucleotide
  Sense strand starting at position 2749 of SEQ ID NO: 915221
uuuauagcauaguuggaga

SEQ ID NO: 1063395 - RNA, 19 nt, Artificial Sequence
  Description of Artificial Sequence: Synthetic oligonucleotide
  Antisense strand to SEQ ID NO: 1063394
ucuccaacuaugcuauaaa

SEQ ID NO: 1063396 - RNA, 19 nt, Artificial Sequence
  Description of Artificial Sequence: Synthetic oligonucleotide
  Sense strand starting at position 2751 of SEQ ID NO: 915221
uauagcauaguuggagaau

SEQ ID NO: 1063397 - RNA, 19 nt, Artificial Sequence
  Description of Artificial Sequence: Synthetic oligonucleotide
  Antisense strand to SEQ ID NO: 1063396
auucuccaacuaugcuaua

SEQ ID NO: 1063398 - RNA, 19 nt, Artificial Sequence
  Description of Artificial Sequence: Synthetic oligonucleotide
  Sense strand starting at position 2868 of SEQ ID NO: 915221
cuaguuacauaguuuacaa

SEQ ID NO: 1063399 - RNA, 19 nt, Artificial Sequence
  Description of Artificial Sequence: Synthetic oligonucleotide
  Antisense strand to SEQ ID NO: 1063398
uuguaaacuauguaacuag

SEQ ID NO: 1063400 - RNA, 19 nt, Artificial Sequence
  Description of Artificial Sequence: Synthetic oligonucleotide
  Sense strand starting at position 2879 of SEQ ID NO: 915221
guuuacaauguuuaucagu

SEQ ID NO: 1063401 - RNA, 19 nt, Artificial Sequence
  Description of Artificial Sequence: Synthetic oligonucleotide
  Antisense strand to SEQ ID NO: 1063400
acugauaaacauuguaaac

SEQ ID NO: 1063402 - RNA, 19 nt, Artificial Sequence
  Description of Artificial Sequence: Synthetic oligonucleotide
  Sense strand starting at position 2965 of SEQ ID NO: 915221
ucaaguuaugcuuaugaau

SEQ ID NO: 1063403 - RNA, 19 nt, Artificial Sequence
  Description of Artificial Sequence: Synthetic oligonucleotide
  Antisense strand to SEQ ID NO: 1063402
auucauaagcauaacuuga

SEQ ID NO: 1063404 - RNA, 19 nt, Artificial Sequence
  Description of Artificial Sequence: Synthetic oligonucleotide
  Sense strand starting at position 3311 of SEQ ID NO: 915221
cuuaucuuucuccgaaaug

SEQ ID NO: 1063405 - RNA, 19 nt, Artificial Sequence
  Description of Artificial Sequence: Synthetic oligonucleotide
  Antisense strand to SEQ ID NO: 1063404
cauuucggagaaagauaag

SEQ ID NO: 1063406 - RNA, 19 nt, Artificial Sequence
  Description of Artificial Sequence: Synthetic oligonucleotide
  Sense strand starting at position 3572 of SEQ ID NO: 915221
acacucuagccucagugau

SEQ ID NO: 1063407 - RNA, 19 nt, Artificial Sequence
  Description of Artificial Sequence: Synthetic oligonucleotide
  Antisense strand to SEQ ID NO: 1063406
aucacugaggcuagagugu

SEQ ID NO: 1063408 - RNA, 19 nt, Artificial Sequence
  Description of Artificial Sequence: Synthetic oligonucleotide
  Sense strand starting at position 3942 of SEQ ID NO: 915221
aaguuuagacggcagugaa

SEQ ID NO: 1063409 - RNA, 19 nt, Artificial Sequence
  Description of Artificial Sequence: Synthetic oligonucleotide
  Antisense strand to SEQ ID NO: 1063408
uucacugccgucuaaacuu

SEQ ID NO: 1063410 - RNA, 19 nt, Artificial Sequence
  Description of Artificial Sequence: Synthetic oligonucleotide
  Sense strand starting at position 3976 of SEQ ID NO: 915221
cuguucuuauggguggaua

SEQ ID NO: 1063411 - RNA, 19 nt, Artificial Sequence
  Description of Artificial Sequence: Synthetic oligonucleotide
  Antisense strand to SEQ ID NO: 1063410
uauccacccauaagaacag

SEQ ID NO: 1063412 - RNA, 19 nt, Artificial Sequence
  Description of Artificial Sequence: Synthetic oligonucleotide
  Sense strand starting at position 3977 of SEQ ID NO: 915221
uguucuuauggguggauaa

SEQ ID NO: 1063413 - RNA, 19 nt, Artificial Sequence
  Description of Artificial Sequence: Synthetic oligonucleotide
  Antisense strand to SEQ ID NO: 1063412
uuauccacccauaagaaca

SEQ ID NO: 1063414 - RNA, 19 nt, Artificial Sequence
  Description of Artificial Sequence: Synthetic oligonucleotide
  Sense strand starting at position 3978 of SEQ ID NO: 915221
guucuuauggguggauaaa

SEQ ID NO: 1063415 - RNA, 19 nt, Artificial Sequence
  Description of Artificial Sequence: Synthetic oligonucleotide
  Antisense strand to SEQ ID NO: 1063414
uuuauccacccauaagaac

SEQ ID NO: 1063416 - RNA, 19 nt, Artificial Sequence
  Description of Artificial Sequence: Synthetic oligonucleotide
  Sense strand starting at position 102 of SEQ ID NO: 915222
agugauugauacccuauga

SEQ ID NO: 1063417 - RNA, 19 nt, Artificial Sequence
  Description of Artificial Sequence: Synthetic oligonucleotide
  Antisense strand to SEQ ID NO: 1063416
ucauaggguaucaaucacu

SEQ ID NO: 1063418 - RNA, 19 nt, Artificial Sequence
  Description of Artificial Sequence: Synthetic oligonucleotide
  Sense strand starting at position 137 of SEQ ID NO: 915222
uugggauuguugucugaaa

SEQ ID NO: 1063419 - RNA, 19 nt, Artificial Sequence
  Description of Artificial Sequence: Synthetic oligonucleotide
  Antisense strand to SEQ ID NO: 1063418
uuucagacaacaaucccaa

SEQ ID NO: 1063420 - RNA, 19 nt, Artificial Sequence
  Description of Artificial Sequence: Synthetic oligonucleotide
  Sense strand starting at position 138 of SEQ ID NO: 915222
ugggauuguugucugaaac

SEQ ID NO: 1063421 - RNA, 19 nt, Artificial Sequence
  Description of Artificial Sequence: Synthetic oligonucleotide
  Antisense strand to SEQ ID NO: 1063420
guuucagacaacaauccca

SEQ ID NO: 1063422 - RNA, 19 nt, Artificial Sequence
  Description of Artificial Sequence: Synthetic oligonucleotide
  Sense strand starting at position 139 of SEQ ID NO: 915222
gggauuguugucugaaaca

SEQ ID NO: 1063423 - RNA, 19 nt, Artificial Sequence
  Description of Artificial Sequence: Synthetic oligonucleotide
  Antisense strand to SEQ ID NO: 1063422
uguuucagacaacaauccc

SEQ ID NO: 1063424 - RNA, 19 nt, Artificial Sequence
  Description of Artificial Sequence: Synthetic oligonucleotide
  Sense strand starting at position 270 of SEQ ID NO: 915222
ugaguuuccuaaguaagau

SEQ ID NO: 1063425 - RNA, 19 nt, Artificial Sequence
  Description of Artificial Sequence: Synthetic oligonucleotide
  Antisense strand to SEQ ID NO: 1063424
aucuuacuuaggaaacuca

SEQ ID NO: 1063426 - RNA, 19 nt, Artificial Sequence
  Description of Artificial Sequence: Synthetic oligonucleotide
  Sense strand starting at position 651 of SEQ ID NO: 915222
cucacaauguacucaguaa

SEQ ID NO: 1063427 - RNA, 19 nt, Artificial Sequence
  Description of Artificial Sequence: Synthetic oligonucleotide
  Antisense strand to SEQ ID NO: 1063426
uuacugaguacauugugag

SEQ ID NO: 1063428 - RNA, 19 nt, Artificial Sequence
  Description of Artificial Sequence: Synthetic oligonucleotide
  Sense strand starting at position 677 of SEQ ID NO: 915222
agauaucaggcauguaucu

SEQ ID NO: 1063429 - RNA, 19 nt, Artificial Sequence
  Description of Artificial Sequence: Synthetic oligonucleotide
  Antisense strand to SEQ ID NO: 1063428
agauacaugccugauaucu

SEQ ID NO: 1063430 - RNA, 19 nt, Artificial Sequence
  Description of Artificial Sequence: Synthetic oligonucleotide
  Sense strand starting at position 687 of SEQ ID NO: 915222
cauguaucucaggauaagc

SEQ ID NO: 1063431 - RNA, 19 nt, Artificial Sequence
  Description of Artificial Sequence: Synthetic oligonucleotide
  Antisense strand to SEQ ID NO: 1063430
gcuuauccugagauacaug

SEQ ID NO: 1063432 - RNA, 19 nt, Artificial Sequence
  Description of Artificial Sequence: Synthetic oligonucleotide
  Sense strand starting at position 957 of SEQ ID NO: 915222
uggguaauggucuauggac

SEQ ID NO: 1063433 - RNA, 19 nt, Artificial Sequence
  Description of Artificial Sequence: Synthetic oligonucleotide
  Antisense strand to SEQ ID NO: 1063432
guccauagaccauuaccca

SEQ ID NO: 1063434 - RNA, 19 nt, Artificial Sequence
  Description of Artificial Sequence: Synthetic oligonucleotide
  Sense strand starting at position 959 of SEQ ID NO: 915222
gguaauggucuauggacag

SEQ ID NO: 1063435 - RNA, 19 nt, Artificial Sequence
  Description of Artificial Sequence: Synthetic oligonucleotide
  Antisense strand to SEQ ID NO: 1063434
cuguccauagaccauuacc

SEQ ID NO: 1063436 - RNA, 19 nt, Artificial Sequence
  Description of Artificial Sequence: Synthetic oligonucleotide
  Sense strand starting at position 1154 of SEQ ID NO: 915222
gaaucaccacgguguagaa

SEQ ID NO: 1063437 - RNA, 19 nt, Artificial Sequence
  Description of Artificial Sequence: Synthetic oligonucleotide
  Antisense strand to SEQ ID NO: 1063436
uucuacaccguggugauuc

SEQ ID NO: 1063438 - RNA, 19 nt, Artificial Sequence
  Description of Artificial Sequence: Synthetic oligonucleotide
  Sense strand starting at position 1343 of SEQ ID NO: 915222
agauguaggauauggcuau

SEQ ID NO: 1063439 - RNA, 19 nt, Artificial Sequence
  Description of Artificial Sequence: Synthetic oligonucleotide
  Antisense strand to SEQ ID NO: 1063438
auagccauauccuacaucu

SEQ ID NO: 1063440 - RNA, 19 nt, Artificial Sequence
  Description of Artificial Sequence: Synthetic oligonucleotide
  Sense strand starting at position 1349 of SEQ ID NO: 915222
aggauauggcuaugacaca

SEQ ID NO: 1063441 - RNA, 19 nt, Artificial Sequence
  Description of Artificial Sequence: Synthetic oligonucleotide
  Antisense strand to SEQ ID NO: 1063440
ugugucauagccauauccu

SEQ ID NO: 1063442 - RNA, 19 nt, Artificial Sequence
  Description of Artificial Sequence: Synthetic oligonucleotide
  Sense strand starting at position 1450 of SEQ ID NO: 915222
aguggugaauagucacaga

SEQ ID NO: 1063443 - RNA, 19 nt, Artificial Sequence
  Description of Artificial Sequence: Synthetic oligonucleotide
  Antisense strand to SEQ ID NO: 1063442
ucugugacuauucaccacu

SEQ ID NO: 1063444 - RNA, 19 nt, Artificial Sequence
  Description of Artificial Sequence: Synthetic oligonucleotide
  Sense strand starting at position 1589 of SEQ ID NO: 915222
gggacaugcagguagagua

SEQ ID NO: 1063445 - RNA, 19 nt, Artificial Sequence
  Description of Artificial Sequence: Synthetic oligonucleotide
  Antisense strand to SEQ ID NO: 1063444
uacucuaccugcauguccc

SEQ ID NO: 1063446 - RNA, 19 nt, Artificial Sequence
  Description of Artificial Sequence: Synthetic oligonucleotide
  Sense strand starting at position 1729 of SEQ ID NO: 915222
gagguuucuuuccuuagga

SEQ ID NO: 1063447 - RNA, 19 nt, Artificial Sequence
  Description of Artificial Sequence: Synthetic oligonucleotide
  Antisense strand to SEQ ID NO: 1063446
uccuaaggaaagaaaccuc

SEQ ID NO: 1063448 - RNA, 19 nt, Artificial Sequence
  Description of Artificial Sequence: Synthetic oligonucleotide
  Sense strand starting at position 1730 of SEQ ID NO: 915222
agguuucuuuccuuaggaa

SEQ ID NO: 1063449 - RNA, 19 nt, Artificial Sequence
  Description of Artificial Sequence: Synthetic oligonucleotide
  Antisense strand to SEQ ID NO: 1063448
uuccuaaggaaagaaaccu

SEQ ID NO: 1063450 - RNA, 19 nt, Artificial Sequence
  Description of Artificial Sequence: Synthetic oligonucleotide
  Sense strand starting at position 1731 of SEQ ID NO: 915222
gguuucuuuccuuaggaag

SEQ ID NO: 1063451 - RNA, 19 nt, Artificial Sequence
  Description of Artificial Sequence: Synthetic oligonucleotide
  Antisense strand to SEQ ID NO: 1063450
cuuccuaaggaaagaaacc

SEQ ID NO: 1063452 - RNA, 19 nt, Artificial Sequence
  Description of Artificial Sequence: Synthetic oligonucleotide
  Sense strand starting at position 1838 of SEQ ID NO: 915222
gaugaugacuucuucugau

SEQ ID NO: 1063453 - RNA, 19 nt, Artificial Sequence
  Description of Artificial Sequence: Synthetic oligonucleotide
  Antisense strand to SEQ ID NO: 1063452
aucagaagaagucaucauc

SEQ ID NO: 1063454 - RNA, 19 nt, Artificial Sequence
  Description of Artificial Sequence: Synthetic oligonucleotide
  Sense strand starting at position 1933 of SEQ ID NO: 915222
acuguaguauccucagaua

SEQ ID NO: 1063455 - RNA, 19 nt, Artificial Sequence
  Description of Artificial Sequence: Synthetic oligonucleotide
  Antisense strand to SEQ ID NO: 1063454
uaucugaggauacuacagu

SEQ ID NO: 1063456 - RNA, 19 nt, Artificial Sequence
  Description of Artificial Sequence: Synthetic oligonucleotide
  Sense strand starting at position 2157 of SEQ ID NO: 915222
acaguaucuuauguaagac

SEQ ID NO: 1063457 - RNA, 19 nt, Artificial Sequence
  Description of Artificial Sequence: Synthetic oligonucleotide
  Antisense strand to SEQ ID NO: 1063456
gucuuacauaagauacugu

SEQ ID NO: 1063458 - RNA, 19 nt, Artificial Sequence
  Description of Artificial Sequence: Synthetic oligonucleotide
  Sense strand starting at position 2347 of SEQ ID NO: 915222
aggccaaagacgugauuga

SEQ ID NO: 1063459 - RNA, 19 nt, Artificial Sequence
  Description of Artificial Sequence: Synthetic oligonucleotide
  Antisense strand to SEQ ID NO: 1063458
ucaaucacgucuuuggccu

SEQ ID NO: 1063460 - RNA, 19 nt, Artificial Sequence
  Description of Artificial Sequence: Synthetic oligonucleotide
  Sense strand starting at position 2348 of SEQ ID NO: 915222
ggccaaagacgugauugaa

SEQ ID NO: 1063461 - RNA, 19 nt, Artificial Sequence
  Description of Artificial Sequence: Synthetic oligonucleotide
  Antisense strand to SEQ ID NO: 1063460
uucaaucacgucuuuggcc

SEQ ID NO: 1063462 - RNA, 19 nt, Artificial Sequence
  Description of Artificial Sequence: Synthetic oligonucleotide
  Sense strand starting at position 2354 of SEQ ID NO: 915222
agacgugauugaagggaga

SEQ ID NO: 1063463 - RNA, 19 nt, Artificial Sequence
  Description of Artificial Sequence: Synthetic oligonucleotide
  Antisense strand to SEQ ID NO: 1063462
ucucccuucaaucacgucu

SEQ ID NO: 1063464 - RNA, 19 nt, Artificial Sequence
  Description of Artificial Sequence: Synthetic oligonucleotide
  Sense strand starting at position 2356 of SEQ ID NO: 915222
acgugauugaagggagaca

SEQ ID NO: 1063465 - RNA, 19 nt, Artificial Sequence
  Description of Artificial Sequence: Synthetic oligonucleotide
  Antisense strand to SEQ ID NO: 1063464
ugucucccuucaaucacgu

SEQ ID NO: 1063466 - RNA, 19 nt, Artificial Sequence
  Description of Artificial Sequence: Synthetic oligonucleotide
  Sense strand starting at position 2424 of SEQ ID NO: 915222
ggauguuugagguaucauc

SEQ ID NO: 1063467 - RNA, 19 nt, Artificial Sequence
  Description of Artificial Sequence: Synthetic oligonucleotide
  Antisense strand to SEQ ID NO: 1063466
gaugauaccucaaacaucc

SEQ ID NO: 1063468 - RNA, 19 nt, Artificial Sequence
  Description of Artificial Sequence: Synthetic oligonucleotide
  Sense strand starting at position 2448 of SEQ ID NO: 915222
uaucaaagauguguaguca

SEQ ID NO: 1063469 - RNA, 19 nt, Artificial Sequence
  Description of Artificial Sequence: Synthetic oligonucleotide
  Antisense strand to SEQ ID NO: 1063468
ugacuacacaucuuugaua

SEQ ID NO: 1063470 - RNA, 19 nt, Artificial Sequence
  Description of Artificial Sequence: Synthetic oligonucleotide
  Sense strand starting at position 2449 of SEQ ID NO: 915222
aucaaagauguguagucau

SEQ ID NO: 1063471 - RNA, 19 nt, Artificial Sequence
  Description of Artificial Sequence: Synthetic oligonucleotide
  Antisense strand to SEQ ID NO: 1063470
augacuacacaucuuugau

SEQ ID NO: 1063472 - RNA, 19 nt, Artificial Sequence
  Description of Artificial Sequence: Synthetic oligonucleotide
  Sense strand starting at position 2452 of SEQ ID NO: 915222
aaagauguguagucauuaa

SEQ ID NO: 1063473 - RNA, 19 nt, Artificial Sequence
  Description of Artificial Sequence: Synthetic oligonucleotide
  Antisense strand to SEQ ID NO: 1063472
uuaaugacuacacaucuuu

SEQ ID NO: 1063474 - RNA, 19 nt, Artificial Sequence
  Description of Artificial Sequence: Synthetic oligonucleotide
  Sense strand starting at position 2721 of SEQ ID NO: 915222
ggaucaagcuaucugauuc

SEQ ID NO: 1063475 - RNA, 19 nt, Artificial Sequence
  Description of Artificial Sequence: Synthetic oligonucleotide
  Antisense strand to SEQ ID NO: 1063474
gaaucagauagcuugaucc

SEQ ID NO: 1063476 - RNA, 19 nt, Artificial Sequence
  Description of Artificial Sequence: Synthetic oligonucleotide
  Sense strand starting at position 3122 of SEQ ID NO: 915222
ucaaauggcuuucuggaaa

SEQ ID NO: 1063477 - RNA, 19 nt, Artificial Sequence
  Description of Artificial Sequence: Synthetic oligonucleotide
  Antisense strand to SEQ ID NO: 1063476
uuuccagaaagccauuuga

SEQ ID NO: 1063478 - RNA, 19 nt, Artificial Sequence
  Description of Artificial Sequence: Synthetic oligonucleotide
  Sense strand starting at position 3358 of SEQ ID NO: 915222
uaaagaugcggcugagaga

SEQ ID NO: 1063479 - RNA, 19 nt, Artificial Sequence
  Description of Artificial Sequence: Synthetic oligonucleotide
  Antisense strand to SEQ ID NO: 1063478
ucucucagccgcaucuuua

SEQ ID NO: 1063480 - RNA, 19 nt, Artificial Sequence
  Description of Artificial Sequence: Synthetic oligonucleotide
  Sense strand starting at position 3359 of SEQ ID NO: 915222
aaagaugcggcugagagau

SEQ ID NO: 1063481 - RNA, 19 nt, Artificial Sequence
  Description of Artificial Sequence: Synthetic oligonucleotide
  Antisense strand to SEQ ID NO: 1063480
aucucucagccgcaucuuu

SEQ ID NO: 1063482 - RNA, 19 nt, Artificial Sequence
  Description of Artificial Sequence: Synthetic oligonucleotide
  Sense strand starting at position 3379 of SEQ ID NO: 915222
acgacaauucuuugaggca

SEQ ID NO: 1063483 - RNA, 19 nt, Artificial Sequence
  Description of Artificial Sequence: Synthetic oligonucleotide
  Antisense strand to SEQ ID NO: 1063482
ugccucaaagaauugucgu

SEQ ID NO: 1063484 - RNA, 19 nt, Artificial Sequence
  Description of Artificial Sequence: Synthetic oligonucleotide
  Sense strand starting at position 3463 of SEQ ID NO: 915222
uugugagugccugauagau

SEQ ID NO: 1063485 - RNA, 19 nt, Artificial Sequence
  Description of Artificial Sequence: Synthetic oligonucleotide
  Antisense strand to SEQ ID NO: 1063484
aucuaucaggcacucacaa

SEQ ID NO: 1063486 - RNA, 19 nt, Artificial Sequence
  Description of Artificial Sequence: Synthetic oligonucleotide
  Sense strand starting at position 3602 of SEQ ID NO: 915222
ugaagugaguaccugagau

SEQ ID NO: 1063487 - RNA, 19 nt, Artificial Sequence
  Description of Artificial Sequence: Synthetic oligonucleotide
  Antisense strand to SEQ ID NO: 1063486
aucucagguacucacuuca

SEQ ID NO: 1063488 - RNA, 19 nt, Artificial Sequence
  Description of Artificial Sequence: Synthetic oligonucleotide
  Sense strand starting at position 3608 of SEQ ID NO: 915222
gaguaccugagauggguaa

SEQ ID NO: 1063489 - RNA, 19 nt, Artificial Sequence
  Description of Artificial Sequence: Synthetic oligonucleotide
  Antisense strand to SEQ ID NO: 1063488
uuacccaucucagguacuc

SEQ ID NO: 1063490 - RNA, 19 nt, Artificial Sequence
  Description of Artificial Sequence: Synthetic oligonucleotide
  Sense strand starting at position 3643 of SEQ ID NO: 915222
cuagccuuucugcaaggau

SEQ ID NO: 1063491 - RNA, 19 nt, Artificial Sequence
  Description of Artificial Sequence: Synthetic oligonucleotide
  Antisense strand to SEQ ID NO: 1063490
auccuugcagaaaggcuag

SEQ ID NO: 1063492 - RNA, 19 nt, Artificial Sequence
  Description of Artificial Sequence: Synthetic oligonucleotide
  Sense strand starting at position 3708 of SEQ ID NO: 915222
acaagaaaugaugguaguu

SEQ ID NO: 1063493 - RNA, 19 nt, Artificial Sequence
  Description of Artificial Sequence: Synthetic oligonucleotide
  Antisense strand to SEQ ID NO: 1063492
aacuaccaucauuucuugu

SEQ ID NO: 1063494 - RNA, 19 nt, Artificial Sequence
  Description of Artificial Sequence: Synthetic oligonucleotide
  Sense strand starting at position 3713 of SEQ ID NO: 915222
aaaugaugguaguuacagu

SEQ ID NO: 1063495 - RNA, 19 nt, Artificial Sequence
  Description of Artificial Sequence: Synthetic oligonucleotide
  Antisense strand to SEQ ID NO: 1063494
acuguaacuaccaucauuu

SEQ ID NO: 1063496 - RNA, 19 nt, Artificial Sequence
  Description of Artificial Sequence: Synthetic oligonucleotide
  Sense strand starting at position 16 of SEQ ID NO: 915223
gguacuuucuaauugaaca

SEQ ID NO: 1063497 - RNA, 19 nt, Artificial Sequence
  Description of Artificial Sequence: Synthetic oligonucleotide
  Antisense strand to SEQ ID NO: 1063496
uguucaauuagaaaguacc

SEQ ID NO: 1063498 - RNA, 19 nt, Artificial Sequence
  Description of Artificial Sequence: Synthetic oligonucleotide
  Sense strand starting at position 301 of SEQ ID NO: 915223
acuaauuagccuugaagac

SEQ ID NO: 1063499 - RNA, 19 nt, Artificial Sequence
  Description of Artificial Sequence: Synthetic oligonucleotide
  Antisense strand to SEQ ID NO: 1063498
gucuucaaggcuaauuagu

SEQ ID NO: 1063500 - RNA, 19 nt, Artificial Sequence
  Description of Artificial Sequence: Synthetic oligonucleotide
  Sense strand starting at position 835 of SEQ ID NO: 915223
uuuguauuugaacgugguu

SEQ ID NO: 1063501 - RNA, 19 nt, Artificial Sequence
  Description of Artificial Sequence: Synthetic oligonucleotide
  Antisense strand to SEQ ID NO: 1063500
aaccacguucaaauacaaa

SEQ ID NO: 1063502 - RNA, 19 nt, Artificial Sequence
  Description of Artificial Sequence: Synthetic oligonucleotide
  Sense strand starting at position 838 of SEQ ID NO: 915223
guauuugaacgugguuuca

SEQ ID NO: 1063503 - RNA, 19 nt, Artificial Sequence
  Description of Artificial Sequence: Synthetic oligonucleotide
  Antisense strand to SEQ ID NO: 1063502
ugaaaccacguucaaauac

SEQ ID NO: 1063504 - RNA, 19 nt, Artificial Sequence
  Description of Artificial Sequence: Synthetic oligonucleotide
  Sense strand starting at position 840 of SEQ ID NO: 915223
auuugaacgugguuucagu

SEQ ID NO: 1063505 - RNA, 19 nt, Artificial Sequence
  Description of Artificial Sequence: Synthetic oligonucleotide
  Antisense strand to SEQ ID NO: 1063504
acugaaaccacguucaaau

SEQ ID NO: 1063506 - RNA, 19 nt, Artificial Sequence
  Description of Artificial Sequence: Synthetic oligonucleotide
  Sense strand starting at position 871 of SEQ ID NO: 915223
cugugauggccugaauuga

SEQ ID NO: 1063507 - RNA, 19 nt, Artificial Sequence
  Description of Artificial Sequence: Synthetic oligonucleotide
  Antisense strand to SEQ ID NO: 1063506
ucaauucaggccaucacag

SEQ ID NO: 1063508 - RNA, 19 nt, Artificial Sequence
  Description of Artificial Sequence: Synthetic oligonucleotide
  Sense strand starting at position 983 of SEQ ID NO: 915223
gggaaauaauuacaagaaa

SEQ ID NO: 1063509 - RNA, 19 nt, Artificial Sequence
  Description of Artificial Sequence: Synthetic oligonucleotide
  Antisense strand to SEQ ID NO: 1063508
uuucuuguaauuauuuccc

SEQ ID NO: 1063510 - RNA, 19 nt, Artificial Sequence
  Description of Artificial Sequence: Synthetic oligonucleotide
  Sense strand starting at position 1113 of SEQ ID NO: 915223
uucuuuguuccuuagacua

SEQ ID NO: 1063511 - RNA, 19 nt, Artificial Sequence
  Description of Artificial Sequence: Synthetic oligonucleotide
  Antisense strand to SEQ ID NO: 1063510
uagucuaaggaacaaagaa

SEQ ID NO: 1063512 - RNA, 19 nt, Artificial Sequence
  Description of Artificial Sequence: Synthetic oligonucleotide
  Sense strand starting at position 1118 of SEQ ID NO: 915223
uguuccuuagacuauagau

SEQ ID NO: 1063513 - RNA, 19 nt, Artificial Sequence
  Description of Artificial Sequence: Synthetic oligonucleotide
  Antisense strand to SEQ ID NO: 1063512
aucuauagucuaaggaaca

SEQ ID NO: 1063514 - RNA, 19 nt, Artificial Sequence
  Description of Artificial Sequence: Synthetic oligonucleotide
  Sense strand starting at position 1217 of SEQ ID NO: 915223
gcuguagguacauaaagau

SEQ ID NO: 1063515 - RNA, 19 nt, Artificial Sequence
  Description of Artificial Sequence: Synthetic oligonucleotide
  Antisense strand to SEQ ID NO: 1063514
aucuuuauguaccuacagc

SEQ ID NO: 1063516 - RNA, 19 nt, Artificial Sequence
  Description of Artificial Sequence: Synthetic oligonucleotide
  Sense strand starting at position 1322 of SEQ ID NO: 915223
uuaggauagcggcaauaau

SEQ ID NO: 1063517 - RNA, 19 nt, Artificial Sequence
  Description of Artificial Sequence: Synthetic oligonucleotide
  Antisense strand to SEQ ID NO: 1063516
auuauugccgcuauccuaa

SEQ ID NO: 1063518 - RNA, 19 nt, Artificial Sequence
  Description of Artificial Sequence: Synthetic oligonucleotide
  Sense strand starting at position 1397 of SEQ ID NO: 915223
aggcaaauaucagaauuuc

SEQ ID NO: 1063519 - RNA, 19 nt, Artificial Sequence
  Description of Artificial Sequence: Synthetic oligonucleotide
  Antisense strand to SEQ ID NO: 1063518
gaaauucugauauuugccu

SEQ ID NO: 1063520 - RNA, 19 nt, Artificial Sequence
  Description of Artificial Sequence: Synthetic oligonucleotide
  Sense strand starting at position 1481 of SEQ ID NO: 915223
uuaaguuugggccacagua

SEQ ID NO: 1063521 - RNA, 19 nt, Artificial Sequence
  Description of Artificial Sequence: Synthetic oligonucleotide
  Antisense strand to SEQ ID NO: 1063520
uacuguggcccaaacuuaa

SEQ ID NO: 1063522 - RNA, 19 nt, Artificial Sequence
  Description of Artificial Sequence: Synthetic oligonucleotide
  Sense strand starting at position 1594 of SEQ ID NO: 915223
aucaguguugaauaaugca

SEQ ID NO: 1063523 - RNA, 19 nt, Artificial Sequence
  Description of Artificial Sequence: Synthetic oligonucleotide
  Antisense strand to SEQ ID NO: 1063522
ugcauuauucaacacugau

SEQ ID NO: 1063524 - RNA, 19 nt, Artificial Sequence
  Description of Artificial Sequence: Synthetic oligonucleotide
  Sense strand starting at position 1661 of SEQ ID NO: 915223
ggaaacacucagugaucau

SEQ ID NO: 1063525 - RNA, 19 nt, Artificial Sequence
  Description of Artificial Sequence: Synthetic oligonucleotide
  Antisense strand to SEQ ID NO: 1063524
augaucacugaguguuucc

SEQ ID NO: 1063526 - RNA, 19 nt, Artificial Sequence
  Description of Artificial Sequence: Synthetic oligonucleotide
  Sense strand starting at position 1671 of SEQ ID NO: 915223
agugaucaugaaggugaga

SEQ ID NO: 1063527 - RNA, 19 nt, Artificial Sequence
  Description of Artificial Sequence: Synthetic oligonucleotide
  Antisense strand to SEQ ID NO: 1063526
ucucaccuucaugaucacu

SEQ ID NO: 1063528 - RNA, 19 nt, Artificial Sequence
  Description of Artificial Sequence: Synthetic oligonucleotide
  Sense strand starting at position 1765 of SEQ ID NO: 915223
gguguaauagcagaggagu

SEQ ID NO: 1063529 - RNA, 19 nt, Artificial Sequence
  Description of Artificial Sequence: Synthetic oligonucleotide
  Antisense strand to SEQ ID NO: 1063528
acuccucugcuauuacacc

SEQ ID NO: 1063530 - RNA, 19 nt, Artificial Sequence
  Description of Artificial Sequence: Synthetic oligonucleotide
  Sense strand starting at position 1767 of SEQ ID NO: 915223
uguaauagcagaggaguaa

SEQ ID NO: 1063531 - RNA, 19 nt, Artificial Sequence
  Description of Artificial Sequence: Synthetic oligonucleotide
  Antisense strand to SEQ ID NO: 1063530
uuacuccucugcuauuaca

SEQ ID NO: 1063532 - RNA, 19 nt, Artificial Sequence
  Description of Artificial Sequence: Synthetic oligonucleotide
  Sense strand starting at position 1814 of SEQ ID NO: 915223
ggaaauaguacauaggugu

SEQ ID NO: 1063533 - RNA, 19 nt, Artificial Sequence
  Description of Artificial Sequence: Synthetic oligonucleotide
  Antisense strand to SEQ ID NO: 1063532
acaccuauguacuauuucc

SEQ ID NO: 1063534 - RNA, 19 nt, Artificial Sequence
  Description of Artificial Sequence: Synthetic oligonucleotide
  Sense strand starting at position 2078 of SEQ ID NO: 915223
gguaaaggugaugauuguu

SEQ ID NO: 1063535 - RNA, 19 nt, Artificial Sequence
  Description of Artificial Sequence: Synthetic oligonucleotide
  Antisense strand to SEQ ID NO: 1063534
aacaaucaucaccuuuacc

SEQ ID NO: 1063536 - RNA, 19 nt, Artificial Sequence
  Description of Artificial Sequence: Synthetic oligonucleotide
  Sense strand starting at position 2193 of SEQ ID NO: 915223
uuacuugcagaauaguaaa

SEQ ID NO: 1063537 - RNA, 19 nt, Artificial Sequence
  Description of Artificial Sequence: Synthetic oligonucleotide
  Antisense strand to SEQ ID NO: 1063536
uuuacuauucugcaaguaa

SEQ ID NO: 1063538 - RNA, 19 nt, Artificial Sequence
  Description of Artificial Sequence: Synthetic oligonucleotide
  Sense strand starting at position 2430 of SEQ ID NO: 915223
uugugcgugcuuccauaaa

SEQ ID NO: 1063539 - RNA, 19 nt, Artificial Sequence
  Description of Artificial Sequence: Synthetic oligonucleotide
  Antisense strand to SEQ ID NO: 1063538
uuuauggaagcacgcacaa

SEQ ID NO: 1063540 - RNA, 19 nt, Artificial Sequence
  Description of Artificial Sequence: Synthetic oligonucleotide
  Sense strand starting at position 2543 of SEQ ID NO: 915223
ugcuguagaaauggaaaga

SEQ ID NO: 1063541 - RNA, 19 nt, Artificial Sequence
  Description of Artificial Sequence: Synthetic oligonucleotide
  Antisense strand to SEQ ID NO: 1063540
ucuuuccauuucuacagca

SEQ ID NO: 1063542 - RNA, 19 nt, Artificial Sequence
  Description of Artificial Sequence: Synthetic oligonucleotide
  Sense strand starting at position 2741 of SEQ ID NO: 915223
uaauuugguccuggcuuua

SEQ ID NO: 1063543 - RNA, 19 nt, Artificial Sequence
  Description of Artificial Sequence: Synthetic oligonucleotide
  Antisense strand to SEQ ID NO: 1063542
uaaagccaggaccaaauua

SEQ ID NO: 1063544 - RNA, 19 nt, Artificial Sequence
  Description of Artificial Sequence: Synthetic oligonucleotide
  Sense strand starting at position 2841 of SEQ ID NO: 915223
uuccauugauuaguacuau

SEQ ID NO: 1063545 - RNA, 19 nt, Artificial Sequence
  Description of Artificial Sequence: Synthetic oligonucleotide
  Antisense strand to SEQ ID NO: 1063544
auaguacuaaucaauggaa

SEQ ID NO: 1063546 - RNA, 19 nt, Artificial Sequence
  Description of Artificial Sequence: Synthetic oligonucleotide
  Sense strand starting at position 2882 of SEQ ID NO: 915223
gagugauguccuuaucaga

SEQ ID NO: 1063547 - RNA, 19 nt, Artificial Sequence
  Description of Artificial Sequence: Synthetic oligonucleotide
  Antisense strand to SEQ ID NO: 1063546
ucugauaaggacaucacuc

SEQ ID NO: 1063548 - RNA, 19 nt, Artificial Sequence
  Description of Artificial Sequence: Synthetic oligonucleotide
  Sense strand starting at position 2892 of SEQ ID NO: 915223
cuuaucagauauucugagu

SEQ ID NO: 1063549 - RNA, 19 nt, Artificial Sequence
  Description of Artificial Sequence: Synthetic oligonucleotide
  Antisense strand to SEQ ID NO: 1063548
acucagaauaucugauaag

SEQ ID NO: 1063550 - RNA, 19 nt, Artificial Sequence
  Description of Artificial Sequence: Synthetic oligonucleotide
  Sense strand starting at position 2900 of SEQ ID NO: 915223
auauucugagugcauuaca

SEQ ID NO: 1063551 - RNA, 19 nt, Artificial Sequence
  Description of Artificial Sequence: Synthetic oligonucleotide
  Antisense strand to SEQ ID NO: 1063550
uguaaugcacucagaauau

SEQ ID NO: 1063552 - RNA, 19 nt, Artificial Sequence
  Description of Artificial Sequence: Synthetic oligonucleotide
  Sense strand starting at position 2903 of SEQ ID NO: 915223
uucugagugcauuacauga

SEQ ID NO: 1063553 - RNA, 19 nt, Artificial Sequence
  Description of Artificial Sequence: Synthetic oligonucleotide
  Antisense strand to SEQ ID NO: 1063552
ucauguaaugcacucagaa

SEQ ID NO: 1063554 - RNA, 19 nt, Artificial Sequence
  Description of Artificial Sequence: Synthetic oligonucleotide
  Sense strand starting at position 2908 of SEQ ID NO: 915223
agugcauuacaugaauuaa

SEQ ID NO: 1063555 - RNA, 19 nt, Artificial Sequence
  Description of Artificial Sequence: Synthetic oligonucleotide
  Antisense strand to SEQ ID NO: 1063554
uuaauucauguaaugcacu

SEQ ID NO: 1063556 - RNA, 19 nt, Artificial Sequence
  Description of Artificial Sequence: Synthetic oligonucleotide
  Sense strand starting at position 2920 of SEQ ID NO: 915223
gaauuaagauagucucuug

SEQ ID NO: 1063557 - RNA, 19 nt, Artificial Sequence
  Description of Artificial Sequence: Synthetic oligonucleotide
  Antisense strand to SEQ ID NO: 1063556
caagagacuaucuuaauuc

SEQ ID NO: 1063558 - RNA, 19 nt, Artificial Sequence
  Description of Artificial Sequence: Synthetic oligonucleotide
  Sense strand starting at position 2936 of SEQ ID NO: 915223
uugcuuacccuaugaggaa

SEQ ID NO: 1063559 - RNA, 19 nt, Artificial Sequence
  Description of Artificial Sequence: Synthetic oligonucleotide
  Antisense strand to SEQ ID NO: 1063558
uuccucauaggguaagcaa

SEQ ID NO: 1063560 - RNA, 19 nt, Artificial Sequence
  Description of Artificial Sequence: Synthetic oligonucleotide
  Sense strand starting at position 3025 of SEQ ID NO: 915223
ugugacuauguauaacuga

SEQ ID NO: 1063561 - RNA, 19 nt, Artificial Sequence
  Description of Artificial Sequence: Synthetic oligonucleotide
  Antisense strand to SEQ ID NO: 1063560
ucaguuauacauagucaca

SEQ ID NO: 1063562 - RNA, 19 nt, Artificial Sequence
  Description of Artificial Sequence: Synthetic oligonucleotide
  Sense strand starting at position 3155 of SEQ ID NO: 915223
auguuuaaagcuuacagaa

SEQ ID NO: 1063563 - RNA, 19 nt, Artificial Sequence
  Description of Artificial Sequence: Synthetic oligonucleotide
  Antisense strand to SEQ ID NO: 1063562
uucuguaagcuuuaaacau

SEQ ID NO: 1063564 - RNA, 19 nt, Artificial Sequence
  Description of Artificial Sequence: Synthetic oligonucleotide
  Sense strand starting at position 3421 of SEQ ID NO: 915223
ggacuugaauaugcucaau

SEQ ID NO: 1063565 - RNA, 19 nt, Artificial Sequence
  Description of Artificial Sequence: Synthetic oligonucleotide
  Antisense strand to SEQ ID NO: 1063564
auugagcauauucaagucc

SEQ ID NO: 1063566 - RNA, 19 nt, Artificial Sequence
  Description of Artificial Sequence: Synthetic oligonucleotide
  Sense strand starting at position 3571 of SEQ ID NO: 915223
gaaagagguuuaucuacca

SEQ ID NO: 1063567 - RNA, 19 nt, Artificial Sequence
  Description of Artificial Sequence: Synthetic oligonucleotide
  Antisense strand to SEQ ID NO: 1063566
ugguagauaaaccucuuuc

SEQ ID NO: 1063568 - RNA, 19 nt, Artificial Sequence
  Description of Artificial Sequence: Synthetic oligonucleotide
  Sense strand starting at position 3739 of SEQ ID NO: 915223
caguaagaacguuaacuau

SEQ ID NO: 1063569 - RNA, 19 nt, Artificial Sequence
  Description of Artificial Sequence: Synthetic oligonucleotide
  Antisense strand to SEQ ID NO: 1063568
auaguuaacguucuuacug

SEQ ID NO: 1063570 - RNA, 19 nt, Artificial Sequence
  Description of Artificial Sequence: Synthetic oligonucleotide
  Sense strand starting at position 3843 of SEQ ID NO: 915223
agcgaaguuggauauuaaa

SEQ ID NO: 1063571 - RNA, 19 nt, Artificial Sequence
  Description of Artificial Sequence: Synthetic oligonucleotide
  Antisense strand to SEQ ID NO: 1063570
uuuaauauccaacuucgcu

SEQ ID NO: 1063572 - RNA, 19 nt, Artificial Sequence
  Description of Artificial Sequence: Synthetic oligonucleotide
  Sense strand starting at position 3851 of SEQ ID NO: 915223
uggauauuaaacuggaguu

SEQ ID NO: 1063573 - RNA, 19 nt, Artificial Sequence
  Description of Artificial Sequence: Synthetic oligonucleotide
  Antisense strand to SEQ ID NO: 1063572
aacuccaguuuaauaucca

SEQ ID NO: 1063574 - RNA, 19 nt, Artificial Sequence
  Description of Artificial Sequence: Synthetic oligonucleotide
  Sense strand starting at position 3852 of SEQ ID NO: 915223
ggauauuaaacuggaguuu

SEQ ID NO: 1063575 - RNA, 19 nt, Artificial Sequence
  Description of Artificial Sequence: Synthetic oligonucleotide
  Antisense strand to SEQ ID NO: 1063574
aaacuccaguuuaauaucc

SEQ ID NO: 1063576 - RNA, 19 nt, Artificial Sequence
  Description of Artificial Sequence: Synthetic oligonucleotide
  Sense strand starting at position 661 of SEQ ID NO: 915224
uagaguuauguaggaacac

SEQ ID NO: 1063577 - RNA, 19 nt, Artificial Sequence
  Description of Artificial Sequence: Synthetic oligonucleotide
  Antisense strand to SEQ ID NO: 1063576
guguuccuacauaacucua

SEQ ID NO: 1063578 - RNA, 19 nt, Artificial Sequence
  Description of Artificial Sequence: Synthetic oligonucleotide
  Sense strand starting at position 758 of SEQ ID NO: 915224
auguuugcacaucaaugaa

SEQ ID NO: 1063579 - RNA, 19 nt, Artificial Sequence
  Description of Artificial Sequence: Synthetic oligonucleotide
  Antisense strand to SEQ ID NO: 1063578
uucauugaugugcaaacau

SEQ ID NO: 1063580 - RNA, 19 nt, Artificial Sequence
  Description of Artificial Sequence: Synthetic oligonucleotide
  Sense strand starting at position 784 of SEQ ID NO: 915224
ugcagauuaguuuaaacau

SEQ ID NO: 1063581 - RNA, 19 nt, Artificial Sequence
  Description of Artificial Sequence: Synthetic oligonucleotide
  Antisense strand to SEQ ID NO: 1063580
auguuuaaacuaaucugca

SEQ ID NO: 1063582 - RNA, 19 nt, Artificial Sequence
  Description of Artificial Sequence: Synthetic oligonucleotide
  Sense strand starting at position 793 of SEQ ID NO: 915224
guuuaaacauugucauagg

SEQ ID NO: 1063583 - RNA, 19 nt, Artificial Sequence
  Description of Artificial Sequence: Synthetic oligonucleotide
  Antisense strand to SEQ ID NO: 1063582
ccuaugacaauguuuaaac

SEQ ID NO: 1063584 - RNA, 19 nt, Artificial Sequence
  Description of Artificial Sequence: Synthetic oligonucleotide
  Sense strand starting at position 801 of SEQ ID NO: 915224
auugucauaggcuaugaau

SEQ ID NO: 1063585 - RNA, 19 nt, Artificial Sequence
  Description of Artificial Sequence: Synthetic oligonucleotide
  Antisense strand to SEQ ID NO: 1063584
auucauagccuaugacaau

SEQ ID NO: 1063586 - RNA, 19 nt, Artificial Sequence
  Description of Artificial Sequence: Synthetic oligonucleotide
  Sense strand starting at position 803 of SEQ ID NO: 915224
ugucauaggcuaugaauac

SEQ ID NO: 1063587 - RNA, 19 nt, Artificial Sequence
  Description of Artificial Sequence: Synthetic oligonucleotide
  Antisense strand to SEQ ID NO: 1063586
guauucauagccuaugaca

SEQ ID NO: 1063588 - RNA, 19 nt, Artificial Sequence
  Description of Artificial Sequence: Synthetic oligonucleotide
  Sense strand starting at position 867 of SEQ ID NO: 915224
ggugaauuaguaggcugau

SEQ ID NO: 1063589 - RNA, 19 nt, Artificial Sequence
  Description of Artificial Sequence: Synthetic oligonucleotide
  Antisense strand to SEQ ID NO: 1063588
aucagccuacuaauucacc

SEQ ID NO: 1063590 - RNA, 19 nt, Artificial Sequence
  Description of Artificial Sequence: Synthetic oligonucleotide
  Sense strand starting at position 868 of SEQ ID NO: 915224
gugaauuaguaggcugauu

SEQ ID NO: 1063591 - RNA, 19 nt, Artificial Sequence
  Description of Artificial Sequence: Synthetic oligonucleotide
  Antisense strand to SEQ ID NO: 1063590
aaucagccuacuaauucac

SEQ ID NO: 1063592 - RNA, 19 nt, Artificial Sequence
  Description of Artificial Sequence: Synthetic oligonucleotide
  Sense strand starting at position 870 of SEQ ID NO: 915224
gaauuaguaggcugauuga

SEQ ID NO: 1063593 - RNA, 19 nt, Artificial Sequence
  Description of Artificial Sequence: Synthetic oligonucleotide
  Antisense strand to SEQ ID NO: 1063592
ucaaucagccuacuaauuc

SEQ ID NO: 1063594 - RNA, 19 nt, Artificial Sequence
  Description of Artificial Sequence: Synthetic oligonucleotide
  Sense strand starting at position 880 of SEQ ID NO: 915224
gcugauugaugcuuuauuu

SEQ ID NO: 1063595 - RNA, 19 nt, Artificial Sequence
  Description of Artificial Sequence: Synthetic oligonucleotide
  Antisense strand to SEQ ID NO: 1063594
aaauaaagcaucaaucagc

SEQ ID NO: 1063596 - RNA, 19 nt, Artificial Sequence
  Description of Artificial Sequence: Synthetic oligonucleotide
  Sense strand starting at position 2068 of SEQ ID NO: 915224
ucauguucguuucuuggaa

SEQ ID NO: 1063597 - RNA, 19 nt, Artificial Sequence
  Description of Artificial Sequence: Synthetic oligonucleotide
  Antisense strand to SEQ ID NO: 1063596
uuccaagaaacgaacauga

SEQ ID NO: 1063598 - RNA, 19 nt, Artificial Sequence
  Description of Artificial Sequence: Synthetic oligonucleotide
  Sense strand starting at position 2069 of SEQ ID NO: 915224
cauguucguuucuuggaaa

SEQ ID NO: 1063599 - RNA, 19 nt, Artificial Sequence
  Description of Artificial Sequence: Synthetic oligonucleotide
  Antisense strand to SEQ ID NO: 1063598
uuuccaagaaacgaacaug

SEQ ID NO: 1063600 - RNA, 19 nt, Artificial Sequence
  Description of Artificial Sequence: Synthetic oligonucleotide
  Sense strand starting at position 2092 of SEQ ID NO: 915224
agaugaaauccuugucagc

SEQ ID NO: 1063601 - RNA, 19 nt, Artificial Sequence
  Description of Artificial Sequence: Synthetic oligonucleotide
  Antisense strand to SEQ ID NO: 1063600
gcugacaaggauuucaucu

SEQ ID NO: 1063602 - RNA, 19 nt, Artificial Sequence
  Description of Artificial Sequence: Synthetic oligonucleotide
  Sense strand starting at position 2094 of SEQ ID NO: 915224
augaaauccuugucagcaa

SEQ ID NO: 1063603 - RNA, 19 nt, Artificial Sequence
  Description of Artificial Sequence: Synthetic oligonucleotide
  Antisense strand to SEQ ID NO: 1063602
uugcugacaaggauuucau

SEQ ID NO: 1063604 - RNA, 19 nt, Artificial Sequence
  Description of Artificial Sequence: Synthetic oligonucleotide
  Sense strand starting at position 2143 of SEQ ID NO: 915224
guggauacauuacuguaau

SEQ ID NO: 1063605 - RNA, 19 nt, Artificial Sequence
  Description of Artificial Sequence: Synthetic oligonucleotide
  Antisense strand to SEQ ID NO: 1063604
auuacaguaauguauccac

SEQ ID NO: 1063606 - RNA, 19 nt, Artificial Sequence
  Description of Artificial Sequence: Synthetic oligonucleotide
  Sense strand starting at position 2600 of SEQ ID NO: 915224
cauaaagacugagugcuau

SEQ ID NO: 1063607 - RNA, 19 nt, Artificial Sequence
  Description of Artificial Sequence: Synthetic oligonucleotide
  Antisense strand to SEQ ID NO: 1063606
auagcacucagucuuuaug

SEQ ID NO: 1063608 - RNA, 19 nt, Artificial Sequence
  Description of Artificial Sequence: Synthetic oligonucleotide
  Sense strand starting at position 2692 of SEQ ID NO: 915224
auuauaagaguggguugua

SEQ ID NO: 1063609 - RNA, 19 nt, Artificial Sequence
  Description of Artificial Sequence: Synthetic oligonucleotide
  Antisense strand to SEQ ID NO: 1063608
uacaacccacucuuauaau

SEQ ID NO: 1063610 - RNA, 19 nt, Artificial Sequence
  Description of Artificial Sequence: Synthetic oligonucleotide
  Sense strand starting at position 2693 of SEQ ID NO: 915224
uuauaagaguggguuguau

SEQ ID NO: 1063611 - RNA, 19 nt, Artificial Sequence
  Description of Artificial Sequence: Synthetic oligonucleotide
  Antisense strand to SEQ ID NO: 1063610
auacaacccacucuuauaa

SEQ ID NO: 1063612 - RNA, 19 nt, Artificial Sequence
  Description of Artificial Sequence: Synthetic oligonucleotide
  Sense strand starting at position 2697 of SEQ ID NO: 915224
aagaguggguuguauuuaa

SEQ ID NO: 1063613 - RNA, 19 nt, Artificial Sequence
  Description of Artificial Sequence: Synthetic oligonucleotide
  Antisense strand to SEQ ID NO: 1063612
uuaaauacaacccacucuu

SEQ ID NO: 1063614 - RNA, 19 nt, Artificial Sequence
  Description of Artificial Sequence: Synthetic oligonucleotide
  Sense strand starting at position 2808 of SEQ ID NO: 915224
gagacagucuuucugacca

SEQ ID NO: 1063615 - RNA, 19 nt, Artificial Sequence
  Description of Artificial Sequence: Synthetic oligonucleotide
  Antisense strand to SEQ ID NO: 1063614
uggucagaaagacugucuc

SEQ ID NO: 1063616 - RNA, 19 nt, Artificial Sequence
  Description of Artificial Sequence: Synthetic oligonucleotide
  Sense strand starting at position 2871 of SEQ ID NO: 915224
uugcauuaguacuuacaga

SEQ ID NO: 1063617 - RNA, 19 nt, Artificial Sequence
  Description of Artificial Sequence: Synthetic oligonucleotide
  Antisense strand to SEQ ID NO: 1063616
ucuguaaguacuaaugcaa

SEQ ID NO: 1063618 - RNA, 19 nt, Artificial Sequence
  Description of Artificial Sequence: Synthetic oligonucleotide
  Sense strand starting at position 2886 of SEQ ID NO: 915224
cagaauggugguggauaca

SEQ ID NO: 1063619 - RNA, 19 nt, Artificial Sequence
  Description of Artificial Sequence: Synthetic oligonucleotide
  Antisense strand to SEQ ID NO: 1063618
uguauccaccaccauucug

SEQ ID NO: 1063620 - RNA, 19 nt, Artificial Sequence
  Description of Artificial Sequence: Synthetic oligonucleotide
  Sense strand starting at position 2892 of SEQ ID NO: 915224
ggugguggauacaagagau

SEQ ID NO: 1063621 - RNA, 19 nt, Artificial Sequence
  Description of Artificial Sequence: Synthetic oligonucleotide
  Antisense strand to SEQ ID NO: 1063620
aucucuuguauccaccacc

SEQ ID NO: 1063622 - RNA, 19 nt, Artificial Sequence
  Description of Artificial Sequence: Synthetic oligonucleotide
  Sense strand starting at position 2906 of SEQ ID NO: 915224
gagauuugauucuggagau

SEQ ID NO: 1063623 - RNA, 19 nt, Artificial Sequence
  Description of Artificial Sequence: Synthetic oligonucleotide
  Antisense strand to SEQ ID NO: 1063622
aucuccagaaucaaaucuc

SEQ ID NO: 1063624 - RNA, 19 nt, Artificial Sequence
  Description of Artificial Sequence: Synthetic oligonucleotide
  Sense strand starting at position 2907 of SEQ ID NO: 915224
agauuugauucuggagaua

SEQ ID NO: 1063625 - RNA, 19 nt, Artificial Sequence
  Description of Artificial Sequence: Synthetic oligonucleotide
  Antisense strand to SEQ ID NO: 1063624
uaucuccagaaucaaaucu

SEQ ID NO: 1063626 - RNA, 19 nt, Artificial Sequence
  Description of Artificial Sequence: Synthetic oligonucleotide
  Sense strand starting at position 2925 of SEQ ID NO: 915224
agaugcaccuuguuugcaa

SEQ ID NO: 1063627 - RNA, 19 nt, Artificial Sequence
  Description of Artificial Sequence: Synthetic oligonucleotide
  Antisense strand to SEQ ID NO: 1063626
uugcaaacaaggugcaucu

SEQ ID NO: 1063628 - RNA, 19 nt, Artificial Sequence
  Description of Artificial Sequence: Synthetic oligonucleotide
  Sense strand starting at position 2926 of SEQ ID NO: 915224
gaugcaccuuguuugcaaa

SEQ ID NO: 1063629 - RNA, 19 nt, Artificial Sequence
  Description of Artificial Sequence: Synthetic oligonucleotide
  Antisense strand to SEQ ID NO: 1063628
uuugcaaacaaggugcauc

SEQ ID NO: 1063630 - RNA, 19 nt, Artificial Sequence
  Description of Artificial Sequence: Synthetic oligonucleotide
  Sense strand starting at position 3109 of SEQ ID NO: 915224
auaugaucauuuggucauu

SEQ ID NO: 1063631 - RNA, 19 nt, Artificial Sequence
  Description of Artificial Sequence: Synthetic oligonucleotide
  Antisense strand to SEQ ID NO: 1063630
aaugaccaaaugaucauau

SEQ ID NO: 1063632 - RNA, 19 nt, Artificial Sequence
  Description of Artificial Sequence: Synthetic oligonucleotide
  Sense strand starting at position 3120 of SEQ ID NO: 915224
uggucauuaugccugugaa

SEQ ID NO: 1063633 - RNA, 19 nt, Artificial Sequence
  Description of Artificial Sequence: Synthetic oligonucleotide
  Antisense strand to SEQ ID NO: 1063632
uucacaggcauaaugacca

SEQ ID NO: 1063634 - RNA, 19 nt, Artificial Sequence
  Description of Artificial Sequence: Synthetic oligonucleotide
  Sense strand starting at position 3121 of SEQ ID NO: 915224
ggucauuaugccugugaag

SEQ ID NO: 1063635 - RNA, 19 nt, Artificial Sequence
  Description of Artificial Sequence: Synthetic oligonucleotide
  Antisense strand to SEQ ID NO: 1063634
cuucacaggcauaaugacc

SEQ ID NO: 1063636 - RNA, 19 nt, Artificial Sequence
  Description of Artificial Sequence: Synthetic oligonucleotide
  Sense strand starting at position 3123 of SEQ ID NO: 915224
ucauuaugccugugaaguc

SEQ ID NO: 1063637 - RNA, 19 nt, Artificial Sequence
  Description of Artificial Sequence: Synthetic oligonucleotide
  Antisense strand to SEQ ID NO: 1063636
gacuucacaggcauaauga

SEQ ID NO: 1063638 - RNA, 19 nt, Artificial Sequence
  Description of Artificial Sequence: Synthetic oligonucleotide
  Sense strand starting at position 3135 of SEQ ID NO: 915224
ugaaguccuuggguguauu

SEQ ID NO: 1063639 - RNA, 19 nt, Artificial Sequence
  Description of Artificial Sequence: Synthetic oligonucleotide
  Antisense strand to SEQ ID NO: 1063638
aauacacccaaggacuuca

SEQ ID NO: 1063640 - RNA, 19 nt, Artificial Sequence
  Description of Artificial Sequence: Synthetic oligonucleotide
  Sense strand starting at position 3136 of SEQ ID NO: 915224
gaaguccuuggguguauuu

SEQ ID NO: 1063641 - RNA, 19 nt, Artificial Sequence
  Description of Artificial Sequence: Synthetic oligonucleotide
  Antisense strand to SEQ ID NO: 1063640
aaauacacccaaggacuuc

SEQ ID NO: 1063642 - RNA, 19 nt, Artificial Sequence
  Description of Artificial Sequence: Synthetic oligonucleotide
  Sense strand starting at position 3177 of SEQ ID NO: 915224
augaauuauggcuauccuu

SEQ ID NO: 1063643 - RNA, 19 nt, Artificial Sequence
  Description of Artificial Sequence: Synthetic oligonucleotide
  Antisense strand to SEQ ID NO: 1063642
aaggauagccauaauucau

SEQ ID NO: 1063644 - RNA, 19 nt, Artificial Sequence
  Description of Artificial Sequence: Synthetic oligonucleotide
  Sense strand starting at position 3196 of SEQ ID NO: 915224
uuacuaugauucuuacgua

SEQ ID NO: 1063645 - RNA, 19 nt, Artificial Sequence
  Description of Artificial Sequence: Synthetic oligonucleotide
  Antisense strand to SEQ ID NO: 1063644
uacguaagaaucauaguaa

SEQ ID NO: 1063646 - RNA, 19 nt, Artificial Sequence
  Description of Artificial Sequence: Synthetic oligonucleotide
  Sense strand starting at position 3305 of SEQ ID NO: 915224
cuccuaugauccuuggaaa

SEQ ID NO: 1063647 - RNA, 19 nt, Artificial Sequence
  Description of Artificial Sequence: Synthetic oligonucleotide
  Antisense strand to SEQ ID NO: 1063646
uuuccaaggaucauaggag

SEQ ID NO: 1063648 - RNA, 19 nt, Artificial Sequence
  Description of Artificial Sequence: Synthetic oligonucleotide
  Sense strand starting at position 3306 of SEQ ID NO: 915224
uccuaugauccuuggaaag

SEQ ID NO: 1063649 - RNA, 19 nt, Artificial Sequence
  Description of Artificial Sequence: Synthetic oligonucleotide
  Antisense strand to SEQ ID NO: 1063648
cuuuccaaggaucauagga

SEQ ID NO: 1063650 - RNA, 19 nt, Artificial Sequence
  Description of Artificial Sequence: Synthetic oligonucleotide
  Sense strand starting at position 3494 of SEQ ID NO: 915224
ucagguaugcuaugaauau

SEQ ID NO: 1063651 - RNA, 19 nt, Artificial Sequence
  Description of Artificial Sequence: Synthetic oligonucleotide
  Antisense strand to SEQ ID NO: 1063650
auauucauagcauaccuga

SEQ ID NO: 1063652 - RNA, 19 nt, Artificial Sequence
  Description of Artificial Sequence: Synthetic oligonucleotide
  Sense strand starting at position 3537 of SEQ ID NO: 915224
gcccuugagcucuagaauu

SEQ ID NO: 1063653 - RNA, 19 nt, Artificial Sequence
  Description of Artificial Sequence: Synthetic oligonucleotide
  Antisense strand to SEQ ID NO: 1063652
aauucuagagcucaagggc

SEQ ID NO: 1063654 - RNA, 19 nt, Artificial Sequence
  Description of Artificial Sequence: Synthetic oligonucleotide
  Sense strand starting at position 3628 of SEQ ID NO: 915224
uucuguagugaacaaguaa

SEQ ID NO: 1063655 - RNA, 19 nt, Artificial Sequence
  Description of Artificial Sequence: Synthetic oligonucleotide
  Antisense strand to SEQ ID NO: 1063654
uuacuuguucacuacagaa

SEQ ID NO: 1063656 - RNA, 19 nt, Artificial Sequence
  Description of Artificial Sequence: Synthetic oligonucleotide
  Sense strand starting at position 6 of SEQ ID NO: 915225
gguacagggucacuuauga

SEQ ID NO: 1063657 - RNA, 19 nt, Artificial Sequence
  Description of Artificial Sequence: Synthetic oligonucleotide
  Antisense strand to SEQ ID NO: 1063656
ucauaagugacccuguacc

SEQ ID NO: 1063658 - RNA, 19 nt, Artificial Sequence
  Description of Artificial Sequence: Synthetic oligonucleotide
  Sense strand starting at position 82 of SEQ ID NO: 915225
uuuauuaucgucuagggaa

SEQ ID NO: 1063659 - RNA, 19 nt, Artificial Sequence
  Description of Artificial Sequence: Synthetic oligonucleotide
  Antisense strand to SEQ ID NO: 1063658
uucccuagacgauaauaaa

SEQ ID NO: 1063660 - RNA, 19 nt, Artificial Sequence
  Description of Artificial Sequence: Synthetic oligonucleotide
  Sense strand starting at position 435 of SEQ ID NO: 915225
auauuacuggcuuauugaa

SEQ ID NO: 1063661 - RNA, 19 nt, Artificial Sequence
  Description of Artificial Sequence: Synthetic oligonucleotide
  Antisense strand to SEQ ID NO: 1063660
uucaauaagccaguaauau

SEQ ID NO: 1063662 - RNA, 19 nt, Artificial Sequence
  Description of Artificial Sequence: Synthetic oligonucleotide
  Sense strand starting at position 456 of SEQ ID NO: 915225
ggauauugcaaaggacacu

SEQ ID NO: 1063663 - RNA, 19 nt, Artificial Sequence
  Description of Artificial Sequence: Synthetic oligonucleotide
  Antisense strand to SEQ ID NO: 1063662
aguguccuuugcaauaucc

SEQ ID NO: 1063664 - RNA, 19 nt, Artificial Sequence
  Description of Artificial Sequence: Synthetic oligonucleotide
  Sense strand starting at position 479 of SEQ ID NO: 915225
aagggauguguagggcaaa

SEQ ID NO: 1063665 - RNA, 19 nt, Artificial Sequence
  Description of Artificial Sequence: Synthetic oligonucleotide
  Antisense strand to SEQ ID NO: 1063664
uuugcccuacacaucccuu

SEQ ID NO: 1063666 - RNA, 19 nt, Artificial Sequence
  Description of Artificial Sequence: Synthetic oligonucleotide
  Sense strand starting at position 482 of SEQ ID NO: 915225
ggauguguagggcaaagua

SEQ ID NO: 1063667 - RNA, 19 nt, Artificial Sequence
  Description of Artificial Sequence: Synthetic oligonucleotide
  Antisense strand to SEQ ID NO: 1063666
uacuuugcccuacacaucc

SEQ ID NO: 1063668 - RNA, 19 nt, Artificial Sequence
  Description of Artificial Sequence: Synthetic oligonucleotide
  Sense strand starting at position 602 of SEQ ID NO: 915225
cuagguucuauggaagcuu

SEQ ID NO: 1063669 - RNA, 19 nt, Artificial Sequence
  Description of Artificial Sequence: Synthetic oligonucleotide
  Antisense strand to SEQ ID NO: 1063668
aagcuuccauagaaccuag

SEQ ID NO: 1063670 - RNA, 19 nt, Artificial Sequence
  Description of Artificial Sequence: Synthetic oligonucleotide
  Sense strand starting at position 871 of SEQ ID NO: 915225
gacacauucuugguauuga

SEQ ID NO: 1063671 - RNA, 19 nt, Artificial Sequence
  Description of Artificial Sequence: Synthetic oligonucleotide
  Antisense strand to SEQ ID NO: 1063670
ucaauaccaagaauguguc

SEQ ID NO: 1063672 - RNA, 19 nt, Artificial Sequence
  Description of Artificial Sequence: Synthetic oligonucleotide
  Sense strand starting at position 882 of SEQ ID NO: 915225
gguauugaggugcagagua

SEQ ID NO: 1063673 - RNA, 19 nt, Artificial Sequence
  Description of Artificial Sequence: Synthetic oligonucleotide
  Antisense strand to SEQ ID NO: 1063672
uacucugcaccucaauacc

SEQ ID NO: 1063674 - RNA, 19 nt, Artificial Sequence
  Description of Artificial Sequence: Synthetic oligonucleotide
  Sense strand starting at position 1034 of SEQ ID NO: 915225
agggaaucacaauggugua

SEQ ID NO: 1063675 - RNA, 19 nt, Artificial Sequence
  Description of Artificial Sequence: Synthetic oligonucleotide
  Antisense strand to SEQ ID NO: 1063674
uacaccauugugauucccu

SEQ ID NO: 1063676 - RNA, 19 nt, Artificial Sequence
  Description of Artificial Sequence: Synthetic oligonucleotide
  Sense strand starting at position 1035 of SEQ ID NO: 915225
gggaaucacaaugguguaa

SEQ ID NO: 1063677 - RNA, 19 nt, Artificial Sequence
  Description of Artificial Sequence: Synthetic oligonucleotide
  Antisense strand to SEQ ID NO: 1063676
uuacaccauugugauuccc

SEQ ID NO: 1063678 - RNA, 19 nt, Artificial Sequence
  Description of Artificial Sequence: Synthetic oligonucleotide
  Sense strand starting at position 1112 of SEQ ID NO: 915225
ugaagaggauugucccaua

SEQ ID NO: 1063679 - RNA, 19 nt, Artificial Sequence
  Description of Artificial Sequence: Synthetic oligonucleotide
  Antisense strand to SEQ ID NO: 1063678
uaugggacaauccucuuca

SEQ ID NO: 1063680 - RNA, 19 nt, Artificial Sequence
  Description of Artificial Sequence: Synthetic oligonucleotide
  Sense strand starting at position 1296 of SEQ ID NO: 915225
cugguuugugugaguguca

SEQ ID NO: 1063681 - RNA, 19 nt, Artificial Sequence
  Description of Artificial Sequence: Synthetic oligonucleotide
  Antisense strand to SEQ ID NO: 1063680
ugacacucacacaaaccag

SEQ ID NO: 1063682 - RNA, 19 nt, Artificial Sequence
  Description of Artificial Sequence: Synthetic oligonucleotide
  Sense strand starting at position 1460 of SEQ ID NO: 915225
uguagacucugggugacau

SEQ ID NO: 1063683 - RNA, 19 nt, Artificial Sequence
  Description of Artificial Sequence: Synthetic oligonucleotide
  Antisense strand to SEQ ID NO: 1063682
augucacccagagucuaca

SEQ ID NO: 1063684 - RNA, 19 nt, Artificial Sequence
  Description of Artificial Sequence: Synthetic oligonucleotide
  Sense strand starting at position 1470 of SEQ ID NO: 915225
gggugacaugcucacugaa

SEQ ID NO: 1063685 - RNA, 19 nt, Artificial Sequence
  Description of Artificial Sequence: Synthetic oligonucleotide
  Antisense strand to SEQ ID NO: 1063684
uucagugagcaugucaccc

SEQ ID NO: 1063686 - RNA, 19 nt, Artificial Sequence
  Description of Artificial Sequence: Synthetic oligonucleotide
  Sense strand starting at position 1472 of SEQ ID NO: 915225
gugacaugcucacugaaua

SEQ ID NO: 1063687 - RNA, 19 nt, Artificial Sequence
  Description of Artificial Sequence: Synthetic oligonucleotide
  Antisense strand to SEQ ID NO: 1063686
uauucagugagcaugucac

SEQ ID NO: 1063688 - RNA, 19 nt, Artificial Sequence
  Description of Artificial Sequence: Synthetic oligonucleotide
  Sense strand starting at position 1473 of SEQ ID NO: 915225
ugacaugcucacugaauac

SEQ ID NO: 1063689 - RNA, 19 nt, Artificial Sequence
  Description of Artificial Sequence: Synthetic oligonucleotide
  Antisense strand to SEQ ID NO: 1063688
guauucagugagcauguca

SEQ ID NO: 1063690 - RNA, 19 nt, Artificial Sequence
  Description of Artificial Sequence: Synthetic oligonucleotide
  Sense strand starting at position 1490 of SEQ ID NO: 915225
acaggagaggguuguagau

SEQ ID NO: 1063691 - RNA, 19 nt, Artificial Sequence
  Description of Artificial Sequence: Synthetic oligonucleotide
  Antisense strand to SEQ ID NO: 1063690
aucuacaacccucuccugu

SEQ ID NO: 1063692 - RNA, 19 nt, Artificial Sequence
  Description of Artificial Sequence: Synthetic oligonucleotide
  Sense strand starting at position 1508 of SEQ ID NO: 915225
uggcuacauagcgaucaua

SEQ ID NO: 1063693 - RNA, 19 nt, Artificial Sequence
  Description of Artificial Sequence: Synthetic oligonucleotide
  Antisense strand to SEQ ID NO: 1063692
uaugaucgcuauguagcca

SEQ ID NO: 1063694 - RNA, 19 nt, Artificial Sequence
  Description of Artificial Sequence: Synthetic oligonucleotide
  Sense strand starting at position 1527 of SEQ ID NO: 915225
agccauugcagccaagaga

SEQ ID NO: 1063695 - RNA, 19 nt, Artificial Sequence
  Description of Artificial Sequence: Synthetic oligonucleotide
  Antisense strand to SEQ ID NO: 1063694
ucucuuggcugcaauggcu

SEQ ID NO: 1063696 - RNA, 19 nt, Artificial Sequence
  Description of Artificial Sequence: Synthetic oligonucleotide
  Sense strand starting at position 1775 of SEQ ID NO: 915225
agagguagauugcuagaaa

SEQ ID NO: 1063697 - RNA, 19 nt, Artificial Sequence
  Description of Artificial Sequence: Synthetic oligonucleotide
  Antisense strand to SEQ ID NO: 1063696
uuucuagcaaucuaccucu

SEQ ID NO: 1063698 - RNA, 19 nt, Artificial Sequence
  Description of Artificial Sequence: Synthetic oligonucleotide
  Sense strand starting at position 1981 of SEQ ID NO: 915225
uuguauauacuguacgaca

SEQ ID NO: 1063699 - RNA, 19 nt, Artificial Sequence
  Description of Artificial Sequence: Synthetic oligonucleotide
  Antisense strand to SEQ ID NO: 1063698
ugucguacaguauauacaa

SEQ ID NO: 1063700 - RNA, 19 nt, Artificial Sequence
  Description of Artificial Sequence: Synthetic oligonucleotide
  Sense strand starting at position 2094 of SEQ ID NO: 915225
ggaagaaauggacguucau

SEQ ID NO: 1063701 - RNA, 19 nt, Artificial Sequence
  Description of Artificial Sequence: Synthetic oligonucleotide
  Antisense strand to SEQ ID NO: 1063700
augaacguccauuucuucc

SEQ ID NO: 1063702 - RNA, 19 nt, Artificial Sequence
  Description of Artificial Sequence: Synthetic oligonucleotide
  Sense strand starting at position 2111 of SEQ ID NO: 915225
auuaguuggcuggacuuau

SEQ ID NO: 1063703 - RNA, 19 nt, Artificial Sequence
  Description of Artificial Sequence: Synthetic oligonucleotide
  Antisense strand to SEQ ID NO: 1063702
auaaguccagccaacuaau

SEQ ID NO: 1063704 - RNA, 19 nt, Artificial Sequence
  Description of Artificial Sequence: Synthetic oligonucleotide
  Sense strand starting at position 2121 of SEQ ID NO: 915225
uggacuuauucuguuucua

SEQ ID NO: 1063705 - RNA, 19 nt, Artificial Sequence
  Description of Artificial Sequence: Synthetic oligonucleotide
  Antisense strand to SEQ ID NO: 1063704
uagaaacagaauaagucca

SEQ ID NO: 1063706 - RNA, 19 nt, Artificial Sequence
  Description of Artificial Sequence: Synthetic oligonucleotide
  Sense strand starting at position 2156 of SEQ ID NO: 915225
ugguuaauuuaccacugaa

SEQ ID NO: 1063707 - RNA, 19 nt, Artificial Sequence
  Description of Artificial Sequence: Synthetic oligonucleotide
  Antisense strand to SEQ ID NO: 1063706
uucagugguaaauuaacca

SEQ ID NO: 1063708 - RNA, 19 nt, Artificial Sequence
  Description of Artificial Sequence: Synthetic oligonucleotide
  Sense strand starting at position 2234 of SEQ ID NO: 915225
acaaucuuugggcauccaa

SEQ ID NO: 1063709 - RNA, 19 nt, Artificial Sequence
  Description of Artificial Sequence: Synthetic oligonucleotide
  Antisense strand to SEQ ID NO: 1063708
uuggaugcccaaagauugu

SEQ ID NO: 1063710 - RNA, 19 nt, Artificial Sequence
  Description of Artificial Sequence: Synthetic oligonucleotide
  Sense strand starting at position 2341 of SEQ ID NO: 915225
auaucuacuugucuauaga

SEQ ID NO: 1063711 - RNA, 19 nt, Artificial Sequence
  Description of Artificial Sequence: Synthetic oligonucleotide
  Antisense strand to SEQ ID NO: 1063710
ucuauagacaaguagauau

SEQ ID NO: 1063712 - RNA, 19 nt, Artificial Sequence
  Description of Artificial Sequence: Synthetic oligonucleotide
  Sense strand starting at position 2344 of SEQ ID NO: 915225
ucuacuugucuauagaaug

SEQ ID NO: 1063713 - RNA, 19 nt, Artificial Sequence
  Description of Artificial Sequence: Synthetic oligonucleotide
  Antisense strand to SEQ ID NO: 1063712
cauucuauagacaaguaga

SEQ ID NO: 1063714 - RNA, 19 nt, Artificial Sequence
  Description of Artificial Sequence: Synthetic oligonucleotide
  Sense strand starting at position 2349 of SEQ ID NO: 915225
uugucuauagaaugagaac

SEQ ID NO: 1063715 - RNA, 19 nt, Artificial Sequence
  Description of Artificial Sequence: Synthetic oligonucleotide
  Antisense strand to SEQ ID NO: 1063714
guucucauucuauagacaa

SEQ ID NO: 1063716 - RNA, 19 nt, Artificial Sequence
  Description of Artificial Sequence: Synthetic oligonucleotide
  Sense strand starting at position 2461 of SEQ ID NO: 915225
cugaauuaaguugguucua

SEQ ID NO: 1063717 - RNA, 19 nt, Artificial Sequence
  Description of Artificial Sequence: Synthetic oligonucleotide
  Antisense strand to SEQ ID NO: 1063716
uagaaccaacuuaauucag

SEQ ID NO: 1063718 - RNA, 19 nt, Artificial Sequence
  Description of Artificial Sequence: Synthetic oligonucleotide
  Sense strand starting at position 2463 of SEQ ID NO: 915225
gaauuaaguugguucuaca

SEQ ID NO: 1063719 - RNA, 19 nt, Artificial Sequence
  Description of Artificial Sequence: Synthetic oligonucleotide
  Antisense strand to SEQ ID NO: 1063718
uguagaaccaacuuaauuc

SEQ ID NO: 1063720 - RNA, 19 nt, Artificial Sequence
  Description of Artificial Sequence: Synthetic oligonucleotide
  Sense strand starting at position 2543 of SEQ ID NO: 915225
ucugaauuauucuuuggag

SEQ ID NO: 1063721 - RNA, 19 nt, Artificial Sequence
  Description of Artificial Sequence: Synthetic oligonucleotide
  Antisense strand to SEQ ID NO: 1063720
cuccaaagaauaauucaga

SEQ ID NO: 1063722 - RNA, 19 nt, Artificial Sequence
  Description of Artificial Sequence: Synthetic oligonucleotide
  Sense strand starting at position 2544 of SEQ ID NO: 915225
cugaauuauucuuuggaga

SEQ ID NO: 1063723 - RNA, 19 nt, Artificial Sequence
  Description of Artificial Sequence: Synthetic oligonucleotide
  Antisense strand to SEQ ID NO: 1063722
ucuccaaagaauaauucag

SEQ ID NO: 1063724 - RNA, 19 nt, Artificial Sequence
  Description of Artificial Sequence: Synthetic oligonucleotide
  Sense strand starting at position 2575 of SEQ ID NO: 915225
ugugaauuacuugaucauu

SEQ ID NO: 1063725 - RNA, 19 nt, Artificial Sequence
  Description of Artificial Sequence: Synthetic oligonucleotide
  Antisense strand to SEQ ID NO: 1063724
aaugaucaaguaauucaca

SEQ ID NO: 1063726 - RNA, 19 nt, Artificial Sequence
  Description of Artificial Sequence: Synthetic oligonucleotide
  Sense strand starting at position 2686 of SEQ ID NO: 915225
caaauuucuugugagacag

SEQ ID NO: 1063727 - RNA, 19 nt, Artificial Sequence
  Description of Artificial Sequence: Synthetic oligonucleotide
  Antisense strand to SEQ ID NO: 1063726
cugucucacaagaaauuug

SEQ ID NO: 1063728 - RNA, 19 nt, Artificial Sequence
  Description of Artificial Sequence: Synthetic oligonucleotide
  Sense strand starting at position 3147 of SEQ ID NO: 915225
ugcugaccucagggaaaua

SEQ ID NO: 1063729 - RNA, 19 nt, Artificial Sequence
  Description of Artificial Sequence: Synthetic oligonucleotide
  Antisense strand to SEQ ID NO: 1063728
uauuucccugaggucagca

SEQ ID NO: 1063730 - RNA, 19 nt, Artificial Sequence
  Description of Artificial Sequence: Synthetic oligonucleotide
  Sense strand starting at position 3593 of SEQ ID NO: 915225
ccagaacugaaguguuuag

SEQ ID NO: 1063731 - RNA, 19 nt, Artificial Sequence
  Description of Artificial Sequence: Synthetic oligonucleotide
  Antisense strand to SEQ ID NO: 1063730
cuaaacacuucaguucugg

SEQ ID NO: 1063732 - RNA, 19 nt, Artificial Sequence
  Description of Artificial Sequence: Synthetic oligonucleotide
  Sense strand starting at position 3714 of SEQ ID NO: 915225
uucucuuaccuguggaaca

SEQ ID NO: 1063733 - RNA, 19 nt, Artificial Sequence
  Description of Artificial Sequence: Synthetic oligonucleotide
  Antisense strand to SEQ ID NO: 1063732
uguuccacagguaagagaa

SEQ ID NO: 1063734 - RNA, 19 nt, Artificial Sequence
  Description of Artificial Sequence: Synthetic oligonucleotide
  Sense strand starting at position 3754 of SEQ ID NO: 915225
cuaugaauauggcuaacuu

SEQ ID NO: 1063735 - RNA, 19 nt, Artificial Sequence
  Description of Artificial Sequence: Synthetic oligonucleotide
  Antisense strand to SEQ ID NO: 1063734
aaguuagccauauucauag

SEQ ID NO: 1063736 - RNA, 19 nt, Artificial Sequence
  Description of Artificial Sequence: Synthetic oligonucleotide
  Sense strand starting at position 123 of SEQ ID NO: 915226
aguaaagccagaugugagu

SEQ ID NO: 1063737 - RNA, 19 nt, Artificial Sequence
  Description of Artificial Sequence: Synthetic oligonucleotide
  Antisense strand to SEQ ID NO: 1063736
acucacaucuggcuuuacu

SEQ ID NO: 1063738 - RNA, 19 nt, Artificial Sequence
  Description of Artificial Sequence: Synthetic oligonucleotide
  Sense strand starting at position 129 of SEQ ID NO: 915226
gccagaugugaguagaggu

SEQ ID NO: 1063739 - RNA, 19 nt, Artificial Sequence
  Description of Artificial Sequence: Synthetic oligonucleotide
  Antisense strand to SEQ ID NO: 1063738
accucuacucacaucuggc

SEQ ID NO: 1063740 - RNA, 19 nt, Artificial Sequence
  Description of Artificial Sequence: Synthetic oligonucleotide
  Sense strand starting at position 175 of SEQ ID NO: 915226
cuugcucacuagguguaaa

SEQ ID NO: 1063741 - RNA, 19 nt, Artificial Sequence
  Description of Artificial Sequence: Synthetic oligonucleotide
  Antisense strand to SEQ ID NO: 1063740
uuuacaccuagugagcaag

SEQ ID NO: 1063742 - RNA, 19 nt, Artificial Sequence
  Description of Artificial Sequence: Synthetic oligonucleotide
  Sense strand starting at position 216 of SEQ ID NO: 915226
agucauuucuuacagguaa

SEQ ID NO: 1063743 - RNA, 19 nt, Artificial Sequence
  Description of Artificial Sequence: Synthetic oligonucleotide
  Antisense strand to SEQ ID NO: 1063742
uuaccuguaagaaaugacu

SEQ ID NO: 1063744 - RNA, 19 nt, Artificial Sequence
  Description of Artificial Sequence: Synthetic oligonucleotide
  Sense strand starting at position 259 of SEQ ID NO: 915226
cuacgaagugagcaaggau

SEQ ID NO: 1063745 - RNA, 19 nt, Artificial Sequence
  Description of Artificial Sequence: Synthetic oligonucleotide
  Antisense strand to SEQ ID NO: 1063744
auccuugcucacuucguag

SEQ ID NO: 1063746 - RNA, 19 nt, Artificial Sequence
  Description of Artificial Sequence: Synthetic oligonucleotide
  Sense strand starting at position 273 of SEQ ID NO: 915226
aggauaugcuaguuuguca

SEQ ID NO: 1063747 - RNA, 19 nt, Artificial Sequence
  Description of Artificial Sequence: Synthetic oligonucleotide
  Antisense strand to SEQ ID NO: 1063746
ugacaaacuagcauauccu

SEQ ID NO: 1063748 - RNA, 19 nt, Artificial Sequence
  Description of Artificial Sequence: Synthetic oligonucleotide
  Sense strand starting at position 300 of SEQ ID NO: 915226
agcagucauuuauacauau

SEQ ID NO: 1063749 - RNA, 19 nt, Artificial Sequence
  Description of Artificial Sequence: Synthetic oligonucleotide
  Antisense strand to SEQ ID NO: 1063748
auauguauaaaugacugcu

SEQ ID NO: 1063750 - RNA, 19 nt, Artificial Sequence
  Description of Artificial Sequence: Synthetic oligonucleotide
  Sense strand starting at position 450 of SEQ ID NO: 915226
agcauuuaauuguggaaag

SEQ ID NO: 1063751 - RNA, 19 nt, Artificial Sequence
  Description of Artificial Sequence: Synthetic oligonucleotide
  Antisense strand to SEQ ID NO: 1063750
cuuuccacaauuaaaugcu

SEQ ID NO: 1063752 - RNA, 19 nt, Artificial Sequence
  Description of Artificial Sequence: Synthetic oligonucleotide
  Sense strand starting at position 451 of SEQ ID NO: 915226
gcauuuaauuguggaaaga

SEQ ID NO: 1063753 - RNA, 19 nt, Artificial Sequence
  Description of Artificial Sequence: Synthetic oligonucleotide
  Antisense strand to SEQ ID NO: 1063752
ucuuuccacaauuaaaugc

SEQ ID NO: 1063754 - RNA, 19 nt, Artificial Sequence
  Description of Artificial Sequence: Synthetic oligonucleotide
  Sense strand starting at position 464 of SEQ ID NO: 915226
gaaagaauuuaugauguag

SEQ ID NO: 1063755 - RNA, 19 nt, Artificial Sequence
  Description of Artificial Sequence: Synthetic oligonucleotide
  Antisense strand to SEQ ID NO: 1063754
cuacaucauaaauucuuuc

SEQ ID NO: 1063756 - RNA, 19 nt, Artificial Sequence
  Description of Artificial Sequence: Synthetic oligonucleotide
  Sense strand starting at position 510 of SEQ ID NO: 915226
gaagcuugaguagaucuca

SEQ ID NO: 1063757 - RNA, 19 nt, Artificial Sequence
  Description of Artificial Sequence: Synthetic oligonucleotide
  Antisense strand to SEQ ID NO: 1063756
ugagaucuacucaagcuuc

SEQ ID NO: 1063758 - RNA, 19 nt, Artificial Sequence
  Description of Artificial Sequence: Synthetic oligonucleotide
  Sense strand starting at position 576 of SEQ ID NO: 915226
cuucuuagggcuuauagau

SEQ ID NO: 1063759 - RNA, 19 nt, Artificial Sequence
  Description of Artificial Sequence: Synthetic oligonucleotide
  Antisense strand to SEQ ID NO: 1063758
aucuauaagcccuaagaag

SEQ ID NO: 1063760 - RNA, 19 nt, Artificial Sequence
  Description of Artificial Sequence: Synthetic oligonucleotide
  Sense strand starting at position 583 of SEQ ID NO: 915226
gggcuuauagauugaggaa

SEQ ID NO: 1063761 - RNA, 19 nt, Artificial Sequence
  Description of Artificial Sequence: Synthetic oligonucleotide
  Antisense strand to SEQ ID NO: 1063760
uuccucaaucuauaagccc

SEQ ID NO: 1063762 - RNA, 19 nt, Artificial Sequence
  Description of Artificial Sequence: Synthetic oligonucleotide
  Sense strand starting at position 682 of SEQ ID NO: 915226
acuaguuauaaguguguaa

SEQ ID NO: 1063763 - RNA, 19 nt, Artificial Sequence
  Description of Artificial Sequence: Synthetic oligonucleotide
  Antisense strand to SEQ ID NO: 1063762
uuacacacuuauaacuagu

SEQ ID NO: 1063764 - RNA, 19 nt, Artificial Sequence
  Description of Artificial Sequence: Synthetic oligonucleotide
  Sense strand starting at position 684 of SEQ ID NO: 915226
uaguuauaaguguguaacu

SEQ ID NO: 1063765 - RNA, 19 nt, Artificial Sequence
  Description of Artificial Sequence: Synthetic oligonucleotide
  Antisense strand to SEQ ID NO: 1063764
aguuacacacuuauaacua

SEQ ID NO: 1063766 - RNA, 19 nt, Artificial Sequence
  Description of Artificial Sequence: Synthetic oligonucleotide
  Sense strand starting at position 686 of SEQ ID NO: 915226
guuauaaguguguaacuga

SEQ ID NO: 1063767 - RNA, 19 nt, Artificial Sequence
  Description of Artificial Sequence: Synthetic oligonucleotide
  Antisense strand to SEQ ID NO: 1063766
ucaguuacacacuuauaac

SEQ ID NO: 1063768 - RNA, 19 nt, Artificial Sequence
  Description of Artificial Sequence: Synthetic oligonucleotide
  Sense strand starting at position 807 of SEQ ID NO: 915226
uuggcaaauaugugaugca

SEQ ID NO: 1063769 - RNA, 19 nt, Artificial Sequence
  Description of Artificial Sequence: Synthetic oligonucleotide
  Antisense strand to SEQ ID NO: 1063768
ugcaucacauauuugccaa

SEQ ID NO: 1063770 - RNA, 19 nt, Artificial Sequence
  Description of Artificial Sequence: Synthetic oligonucleotide
  Sense strand starting at position 920 of SEQ ID NO: 915226
agaugugaacucugacacu

SEQ ID NO: 1063771 - RNA, 19 nt, Artificial Sequence
  Description of Artificial Sequence: Synthetic oligonucleotide
  Antisense strand to SEQ ID NO: 1063770
agugucagaguucacaucu

SEQ ID NO: 1063772 - RNA, 19 nt, Artificial Sequence
  Description of Artificial Sequence: Synthetic oligonucleotide
  Sense strand starting at position 2257 of SEQ ID NO: 915226
aagauugcugaauguagaa

SEQ ID NO: 1063773 - RNA, 19 nt, Artificial Sequence
  Description of Artificial Sequence: Synthetic oligonucleotide
  Antisense strand to SEQ ID NO: 1063772
uucuacauucagcaaucuu

SEQ ID NO: 1063774 - RNA, 19 nt, Artificial Sequence
  Description of Artificial Sequence: Synthetic oligonucleotide
  Sense strand starting at position 2454 of SEQ ID NO: 915226
gcuuccaaaugacuagaaa

SEQ ID NO: 1063775 - RNA, 19 nt, Artificial Sequence
  Description of Artificial Sequence: Synthetic oligonucleotide
  Antisense strand to SEQ ID NO: 1063774
uuucuagucauuuggaagc

SEQ ID NO: 1063776 - RNA, 19 nt, Artificial Sequence
  Description of Artificial Sequence: Synthetic oligonucleotide
  Sense strand starting at position 2591 of SEQ ID NO: 915226
guauucuggagauagacgu

SEQ ID NO: 1063777 - RNA, 19 nt, Artificial Sequence
  Description of Artificial Sequence: Synthetic oligonucleotide
  Antisense strand to SEQ ID NO: 1063776
acgucuaucuccagaauac

SEQ ID NO: 1063778 - RNA, 19 nt, Artificial Sequence
  Description of Artificial Sequence: Synthetic oligonucleotide
  Sense strand starting at position 2597 of SEQ ID NO: 915226
uggagauagacguaccuuu

SEQ ID NO: 1063779 - RNA, 19 nt, Artificial Sequence
  Description of Artificial Sequence: Synthetic oligonucleotide
  Antisense strand to SEQ ID NO: 1063778
aaagguacgucuaucucca

SEQ ID NO: 1063780 - RNA, 19 nt, Artificial Sequence
  Description of Artificial Sequence: Synthetic oligonucleotide
  Sense strand starting at position 2694 of SEQ ID NO: 915226
cuguaccuuguuuaucaua

SEQ ID NO: 1063781 - RNA, 19 nt, Artificial Sequence
  Description of Artificial Sequence: Synthetic oligonucleotide
  Antisense strand to SEQ ID NO: 1063780
uaugauaaacaagguacag

SEQ ID NO: 1063782 - RNA, 19 nt, Artificial Sequence
  Description of Artificial Sequence: Synthetic oligonucleotide
  Sense strand starting at position 2696 of SEQ ID NO: 915226
guaccuuguuuaucauaac

SEQ ID NO: 1063783 - RNA, 19 nt, Artificial Sequence
  Description of Artificial Sequence: Synthetic oligonucleotide
  Antisense strand to SEQ ID NO: 1063782
guuaugauaaacaagguac

SEQ ID NO: 1063784 - RNA, 19 nt, Artificial Sequence
  Description of Artificial Sequence: Synthetic oligonucleotide
  Sense strand starting at position 2784 of SEQ ID NO: 915226
ugcaaaguccuuggaugua

SEQ ID NO: 1063785 - RNA, 19 nt, Artificial Sequence
  Description of Artificial Sequence: Synthetic oligonucleotide
  Antisense strand to SEQ ID NO: 1063784
uacauccaaggacuuugca

SEQ ID NO: 1063786 - RNA, 19 nt, Artificial Sequence
  Description of Artificial Sequence: Synthetic oligonucleotide
  Sense strand starting at position 2995 of SEQ ID NO: 915226
gacuucuuuccugauggua

SEQ ID NO: 1063787 - RNA, 19 nt, Artificial Sequence
  Description of Artificial Sequence: Synthetic oligonucleotide
  Antisense strand to SEQ ID NO: 1063786
uaccaucaggaaagaaguc

SEQ ID NO: 1063788 - RNA, 19 nt, Artificial Sequence
  Description of Artificial Sequence: Synthetic oligonucleotide
  Sense strand starting at position 3028 of SEQ ID NO: 915226
auugacaaguaugaagaaa

SEQ ID NO: 1063789 - RNA, 19 nt, Artificial Sequence
  Description of Artificial Sequence: Synthetic oligonucleotide
  Antisense strand to SEQ ID NO: 1063788
uuucuucauacuugucaau

SEQ ID NO: 1063790 - RNA, 19 nt, Artificial Sequence
  Description of Artificial Sequence: Synthetic oligonucleotide
  Sense strand starting at position 3132 of SEQ ID NO: 915226
cuguuauugaaacgguuua

SEQ ID NO: 1063791 - RNA, 19 nt, Artificial Sequence
  Description of Artificial Sequence: Synthetic oligonucleotide
  Antisense strand to SEQ ID NO: 1063790
uaaaccguuucaauaacag

SEQ ID NO: 1063792 - RNA, 19 nt, Artificial Sequence
  Description of Artificial Sequence: Synthetic oligonucleotide
  Sense strand starting at position 3137 of SEQ ID NO: 915226
auugaaacgguuuaguacu

SEQ ID NO: 1063793 - RNA, 19 nt, Artificial Sequence
  Description of Artificial Sequence: Synthetic oligonucleotide
  Antisense strand to SEQ ID NO: 1063792
aguacuaaaccguuucaau

SEQ ID NO: 1063794 - RNA, 19 nt, Artificial Sequence
  Description of Artificial Sequence: Synthetic oligonucleotide
  Sense strand starting at position 3160 of SEQ ID NO: 915226
acacuaaauuuagagguaa

SEQ ID NO: 1063795 - RNA, 19 nt, Artificial Sequence
  Description of Artificial Sequence: Synthetic oligonucleotide
  Antisense strand to SEQ ID NO: 1063794
uuaccucuaaauuuagugu

SEQ ID NO: 1063796 - RNA, 19 nt, Artificial Sequence
  Description of Artificial Sequence: Synthetic oligonucleotide
  Sense strand starting at position 3253 of SEQ ID NO: 915226
gggugacaacucugucaua

SEQ ID NO: 1063797 - RNA, 19 nt, Artificial Sequence
  Description of Artificial Sequence: Synthetic oligonucleotide
  Antisense strand to SEQ ID NO: 1063796
uaugacagaguugucaccc

SEQ ID NO: 1063798 - RNA, 19 nt, Artificial Sequence
  Description of Artificial Sequence: Synthetic oligonucleotide
  Sense strand starting at position 3254 of SEQ ID NO: 915226
ggugacaacucugucauau

SEQ ID NO: 1063799 - RNA, 19 nt, Artificial Sequence
  Description of Artificial Sequence: Synthetic oligonucleotide
  Antisense strand to SEQ ID NO: 1063798
auaugacagaguugucacc

SEQ ID NO: 1063800 - RNA, 19 nt, Artificial Sequence
  Description of Artificial Sequence: Synthetic oligonucleotide
  Sense strand starting at position 3416 of SEQ ID NO: 915226
aaggccaaguguuuauaua

SEQ ID NO: 1063801 - RNA, 19 nt, Artificial Sequence
  Description of Artificial Sequence: Synthetic oligonucleotide
  Antisense strand to SEQ ID NO: 1063800
uauauaaacacuuggccuu

SEQ ID NO: 1063802 - RNA, 19 nt, Artificial Sequence
  Description of Artificial Sequence: Synthetic oligonucleotide
  Sense strand starting at position 3417 of SEQ ID NO: 915226
aggccaaguguuuauauau

SEQ ID NO: 1063803 - RNA, 19 nt, Artificial Sequence
  Description of Artificial Sequence: Synthetic oligonucleotide
  Antisense strand to SEQ ID NO: 1063802
auauauaaacacuuggccu

SEQ ID NO: 1063804 - RNA, 19 nt, Artificial Sequence
  Description of Artificial Sequence: Synthetic oligonucleotide
  Sense strand starting at position 3453 of SEQ ID NO: 915226
cuaacagauccauguggaa

SEQ ID NO: 1063805 - RNA, 19 nt, Artificial Sequence
  Description of Artificial Sequence: Synthetic oligonucleotide
  Antisense strand to SEQ ID NO: 1063804
uuccacauggaucuguuag

SEQ ID NO: 1063806 - RNA, 19 nt, Artificial Sequence
  Description of Artificial Sequence: Synthetic oligonucleotide
  Sense strand starting at position 3585 of SEQ ID NO: 915226
auuccacuuucuguguaaa

SEQ ID NO: 1063807 - RNA, 19 nt, Artificial Sequence
  Description of Artificial Sequence: Synthetic oligonucleotide
  Antisense strand to SEQ ID NO: 1063806
uuuacacagaaaguggaau

SEQ ID NO: 1063808 - RNA, 19 nt, Artificial Sequence
  Description of Artificial Sequence: Synthetic oligonucleotide
  Sense strand starting at position 3586 of SEQ ID NO: 915226
uuccacuuucuguguaaau

SEQ ID NO: 1063809 - RNA, 19 nt, Artificial Sequence
  Description of Artificial Sequence: Synthetic oligonucleotide
  Antisense strand to SEQ ID NO: 1063808
auuuacacagaaaguggaa

SEQ ID NO: 1063810 - RNA, 19 nt, Artificial Sequence
  Description of Artificial Sequence: Synthetic oligonucleotide
  Sense strand starting at position 3587 of SEQ ID NO: 915226
uccacuuucuguguaaauc

SEQ ID NO: 1063811 - RNA, 19 nt, Artificial Sequence
  Description of Artificial Sequence: Synthetic oligonucleotide
  Antisense strand to SEQ ID NO: 1063810
gauuuacacagaaagugga

SEQ ID NO: 1063812 - RNA, 19 nt, Artificial Sequence
  Description of Artificial Sequence: Synthetic oligonucleotide
  Sense strand starting at position 3596 of SEQ ID NO: 915226
uguguaaauccagacuacu

SEQ ID NO: 1063813 - RNA, 19 nt, Artificial Sequence
  Description of Artificial Sequence: Synthetic oligonucleotide
  Antisense strand to SEQ ID NO: 1063812
aguagucuggauuuacaca

SEQ ID NO: 1063814 - RNA, 19 nt, Artificial Sequence
  Description of Artificial Sequence: Synthetic oligonucleotide
  Sense strand starting at position 3821 of SEQ ID NO: 915226
cuuucuuucuguguuagaa

SEQ ID NO: 1063815 - RNA, 19 nt, Artificial Sequence
  Description of Artificial Sequence: Synthetic oligonucleotide
  Antisense strand to SEQ ID NO: 1063814
uucuaacacagaaagaaag

SEQ ID NO: 1063816 - RNA, 19 nt, Artificial Sequence
  Description of Artificial Sequence: Synthetic oligonucleotide
  Sense strand starting at position 403 of SEQ ID NO: 915227
guggauucagcaugaaaug

SEQ ID NO: 1063817 - RNA, 19 nt, Artificial Sequence
  Description of Artificial Sequence: Synthetic oligonucleotide
  Antisense strand to SEQ ID NO: 1063816
cauuucaugcugaauccac

SEQ ID NO: 1063818 - RNA, 19 nt, Artificial Sequence
  Description of Artificial Sequence: Synthetic oligonucleotide
  Sense strand starting at position 425 of SEQ ID NO: 915227
aguacacagcaaugugaaa

SEQ ID NO: 1063819 - RNA, 19 nt, Artificial Sequence
  Description of Artificial Sequence: Synthetic oligonucleotide
  Antisense strand to SEQ ID NO: 1063818
uuucacauugcuguguacu

SEQ ID NO: 1063820 - RNA, 19 nt, Artificial Sequence
  Description of Artificial Sequence: Synthetic oligonucleotide
  Sense strand starting at position 438 of SEQ ID NO: 915227
gugaaaggcauguacuaaa

SEQ ID NO: 1063821 - RNA, 19 nt, Artificial Sequence
  Description of Artificial Sequence: Synthetic oligonucleotide
  Antisense strand to SEQ ID NO: 1063820
uuuaguacaugccuuucac

SEQ ID NO: 1063822 - RNA, 19 nt, Artificial Sequence
  Description of Artificial Sequence: Synthetic oligonucleotide
  Sense strand starting at position 916 of SEQ ID NO: 915227
uccagagaauugcuagauu

SEQ ID NO: 1063823 - RNA, 19 nt, Artificial Sequence
  Description of Artificial Sequence: Synthetic oligonucleotide
  Antisense strand to SEQ ID NO: 1063822
aaucuagcaauucucugga

SEQ ID NO: 1063824 - RNA, 19 nt, Artificial Sequence
  Description of Artificial Sequence: Synthetic oligonucleotide
  Sense strand starting at position 929 of SEQ ID NO: 915227
uagauuguggcugaguaaa

SEQ ID NO: 1063825 - RNA, 19 nt, Artificial Sequence
  Description of Artificial Sequence: Synthetic oligonucleotide
  Antisense strand to SEQ ID NO: 1063824
uuuacucagccacaaucua

SEQ ID NO: 1063826 - RNA, 19 nt, Artificial Sequence
  Description of Artificial Sequence: Synthetic oligonucleotide
  Sense strand starting at position 966 of SEQ ID NO: 915227
uaggguauuugagacaacu

SEQ ID NO: 1063827 - RNA, 19 nt, Artificial Sequence
  Description of Artificial Sequence: Synthetic oligonucleotide
  Antisense strand to SEQ ID NO: 1063826
aguugucucaaauacccua

SEQ ID NO: 1063828 - RNA, 19 nt, Artificial Sequence
  Description of Artificial Sequence: Synthetic oligonucleotide
  Sense strand starting at position 1118 of SEQ ID NO: 915227
uguuccucaggcuauaaau

SEQ ID NO: 1063829 - RNA, 19 nt, Artificial Sequence
  Description of Artificial Sequence: Synthetic oligonucleotide
  Antisense strand to SEQ ID NO: 1063828
auuuauagccugaggaaca

SEQ ID NO: 1063830 - RNA, 19 nt, Artificial Sequence
  Description of Artificial Sequence: Synthetic oligonucleotide
  Sense strand starting at position 1206 of SEQ ID NO: 915227
ggaagaacuuggccggaaa

SEQ ID NO: 1063831 - RNA, 19 nt, Artificial Sequence
  Description of Artificial Sequence: Synthetic oligonucleotide
  Antisense strand to SEQ ID NO: 1063830
uuuccggccaaguucuucc

SEQ ID NO: 1063832 - RNA, 19 nt, Artificial Sequence
  Description of Artificial Sequence: Synthetic oligonucleotide
  Sense strand starting at position 1207 of SEQ ID NO: 915227
gaagaacuuggccggaaau

SEQ ID NO: 1063833 - RNA, 19 nt, Artificial Sequence
  Description of Artificial Sequence: Synthetic oligonucleotide
  Antisense strand to SEQ ID NO: 1063832
auuuccggccaaguucuuc

SEQ ID NO: 1063834 - RNA, 19 nt, Artificial Sequence
  Description of Artificial Sequence: Synthetic oligonucleotide
  Sense strand starting at position 1208 of SEQ ID NO: 915227
aagaacuuggccggaaaua

SEQ ID NO: 1063835 - RNA, 19 nt, Artificial Sequence
  Description of Artificial Sequence: Synthetic oligonucleotide
  Antisense strand to SEQ ID NO: 1063834
uauuuccggccaaguucuu

SEQ ID NO: 1063836 - RNA, 19 nt, Artificial Sequence
  Description of Artificial Sequence: Synthetic oligonucleotide
  Sense strand starting at position 1314 of SEQ ID NO: 915227
guguaucuccaagacugau

SEQ ID NO: 1063837 - RNA, 19 nt, Artificial Sequence
  Description of Artificial Sequence: Synthetic oligonucleotide
  Antisense strand to SEQ ID NO: 1063836
aucagucuuggagauacac

SEQ ID NO: 1063838 - RNA, 19 nt, Artificial Sequence
  Description of Artificial Sequence: Synthetic oligonucleotide
  Sense strand starting at position 1364 of SEQ ID NO: 915227
cugaaaugguacucaguuc

SEQ ID NO: 1063839 - RNA, 19 nt, Artificial Sequence
  Description of Artificial Sequence: Synthetic oligonucleotide
  Antisense strand to SEQ ID NO: 1063838
gaacugaguaccauuucag

SEQ ID NO: 1063840 - RNA, 19 nt, Artificial Sequence
  Description of Artificial Sequence: Synthetic oligonucleotide
  Sense strand starting at position 1415 of SEQ ID NO: 915227
cauugaccuguguaucuga

SEQ ID NO: 1063841 - RNA, 19 nt, Artificial Sequence
  Description of Artificial Sequence: Synthetic oligonucleotide
  Antisense strand to SEQ ID NO: 1063840
ucagauacacaggucaaug

SEQ ID NO: 1063842 - RNA, 19 nt, Artificial Sequence
  Description of Artificial Sequence: Synthetic oligonucleotide
  Sense strand starting at position 1426 of SEQ ID NO: 915227
guaucugagcgagagagua

SEQ ID NO: 1063843 - RNA, 19 nt, Artificial Sequence
  Description of Artificial Sequence: Synthetic oligonucleotide
  Antisense strand to SEQ ID NO: 1063842
uacucucucgcucagauac

SEQ ID NO: 1063844 - RNA, 19 nt, Artificial Sequence
  Description of Artificial Sequence: Synthetic oligonucleotide
  Sense strand starting at position 1428 of SEQ ID NO: 915227
aucugagcgagagaguaau

SEQ ID NO: 1063845 - RNA, 19 nt, Artificial Sequence
  Description of Artificial Sequence: Synthetic oligonucleotide
  Antisense strand to SEQ ID NO: 1063844
auuacucucucgcucagau

SEQ ID NO: 1063846 - RNA, 19 nt, Artificial Sequence
  Description of Artificial Sequence: Synthetic oligonucleotide
  Sense strand starting at position 1587 of SEQ ID NO: 915227
gcuagacauguugacugua

SEQ ID NO: 1063847 - RNA, 19 nt, Artificial Sequence
  Description of Artificial Sequence: Synthetic oligonucleotide
  Antisense strand to SEQ ID NO: 1063846
uacagucaacaugucuagc

SEQ ID NO: 1063848 - RNA, 19 nt, Artificial Sequence
  Description of Artificial Sequence: Synthetic oligonucleotide
  Sense strand starting at position 1589 of SEQ ID NO: 915227
uagacauguugacuguaua

SEQ ID NO: 1063849 - RNA, 19 nt, Artificial Sequence
  Description of Artificial Sequence: Synthetic oligonucleotide
  Antisense strand to SEQ ID NO: 1063848
uauacagucaacaugucua

SEQ ID NO: 1063850 - RNA, 19 nt, Artificial Sequence
  Description of Artificial Sequence: Synthetic oligonucleotide
  Sense strand starting at position 1590 of SEQ ID NO: 915227
agacauguugacuguauag

SEQ ID NO: 1063851 - RNA, 19 nt, Artificial Sequence
  Description of Artificial Sequence: Synthetic oligonucleotide
  Antisense strand to SEQ ID NO: 1063850
cuauacagucaacaugucu

SEQ ID NO: 1063852 - RNA, 19 nt, Artificial Sequence
  Description of Artificial Sequence: Synthetic oligonucleotide
  Sense strand starting at position 1694 of SEQ ID NO: 915227
ccaagaauugcagagcaca

SEQ ID NO: 1063853 - RNA, 19 nt, Artificial Sequence
  Description of Artificial Sequence: Synthetic oligonucleotide
  Antisense strand to SEQ ID NO: 1063852
ugugcucugcaauucuugg

SEQ ID NO: 1063854 - RNA, 19 nt, Artificial Sequence
  Description of Artificial Sequence: Synthetic oligonucleotide
  Sense strand starting at position 1940 of SEQ ID NO: 915227
gguuauugguaauucccaa

SEQ ID NO: 1063855 - RNA, 19 nt, Artificial Sequence
  Description of Artificial Sequence: Synthetic oligonucleotide
  Antisense strand to SEQ ID NO: 1063854
uugggaauuaccaauaacc

SEQ ID NO: 1063856 - RNA, 19 nt, Artificial Sequence
  Description of Artificial Sequence: Synthetic oligonucleotide
  Sense strand starting at position 2035 of SEQ ID NO: 915227
ucauuacgagaaugacagu

SEQ ID NO: 1063857 - RNA, 19 nt, Artificial Sequence
  Description of Artificial Sequence: Synthetic oligonucleotide
  Antisense strand to SEQ ID NO: 1063856
acugucauucucguaauga

SEQ ID NO: 1063858 - RNA, 19 nt, Artificial Sequence
  Description of Artificial Sequence: Synthetic oligonucleotide
  Sense strand starting at position 2229 of SEQ ID NO: 915227
guugaucaacuuugaaucu

SEQ ID NO: 1063859 - RNA, 19 nt, Artificial Sequence
  Description of Artificial Sequence: Synthetic oligonucleotide
  Antisense strand to SEQ ID NO: 1063858
agauucaaaguugaucaac

SEQ ID NO: 1063860 - RNA, 19 nt, Artificial Sequence
  Description of Artificial Sequence: Synthetic oligonucleotide
  Sense strand starting at position 2275 of SEQ ID NO: 915227
ucauuugucuuugcuucua

SEQ ID NO: 1063861 - RNA, 19 nt, Artificial Sequence
  Description of Artificial Sequence: Synthetic oligonucleotide
  Antisense strand to SEQ ID NO: 1063860
uagaagcaaagacaaauga

SEQ ID NO: 1063862 - RNA, 19 nt, Artificial Sequence
  Description of Artificial Sequence: Synthetic oligonucleotide
  Sense strand starting at position 2277 of SEQ ID NO: 915227
auuugucuuugcuucuauu

SEQ ID NO: 1063863 - RNA, 19 nt, Artificial Sequence
  Description of Artificial Sequence: Synthetic oligonucleotide
  Antisense strand to SEQ ID NO: 1063862
aauagaagcaaagacaaau

SEQ ID NO: 1063864 - RNA, 19 nt, Artificial Sequence
  Description of Artificial Sequence: Synthetic oligonucleotide
  Sense strand starting at position 2325 of SEQ ID NO: 915227
acugaaagcucaguacaga

SEQ ID NO: 1063865 - RNA, 19 nt, Artificial Sequence
  Description of Artificial Sequence: Synthetic oligonucleotide
  Antisense strand to SEQ ID NO: 1063864
ucuguacugagcuuucagu

SEQ ID NO: 1063866 - RNA, 19 nt, Artificial Sequence
  Description of Artificial Sequence: Synthetic oligonucleotide
  Sense strand starting at position 2326 of SEQ ID NO: 915227
cugaaagcucaguacagau

SEQ ID NO: 1063867 - RNA, 19 nt, Artificial Sequence
  Description of Artificial Sequence: Synthetic oligonucleotide
  Antisense strand to SEQ ID NO: 1063866
aucuguacugagcuuucag

SEQ ID NO: 1063868 - RNA, 19 nt, Artificial Sequence
  Description of Artificial Sequence: Synthetic oligonucleotide
  Sense strand starting at position 2361 of SEQ ID NO: 915227
gaaacaccauaguuagagu

SEQ ID NO: 1063869 - RNA, 19 nt, Artificial Sequence
  Description of Artificial Sequence: Synthetic oligonucleotide
  Antisense strand to SEQ ID NO: 1063868
acucuaacuaugguguuuc

SEQ ID NO: 1063870 - RNA, 19 nt, Artificial Sequence
  Description of Artificial Sequence: Synthetic oligonucleotide
  Sense strand starting at position 2627 of SEQ ID NO: 915227
uuggaugacuuaucugguu

SEQ ID NO: 1063871 - RNA, 19 nt, Artificial Sequence
  Description of Artificial Sequence: Synthetic oligonucleotide
  Antisense strand to SEQ ID NO: 1063870
aaccagauaagucauccaa

SEQ ID NO: 1063872 - RNA, 19 nt, Artificial Sequence
  Description of Artificial Sequence: Synthetic oligonucleotide
  Sense strand starting at position 2629 of SEQ ID NO: 915227
ggaugacuuaucugguucu

SEQ ID NO: 1063873 - RNA, 19 nt, Artificial Sequence
  Description of Artificial Sequence: Synthetic oligonucleotide
  Antisense strand to SEQ ID NO: 1063872
agaaccagauaagucaucc

SEQ ID NO: 1063874 - RNA, 19 nt, Artificial Sequence
  Description of Artificial Sequence: Synthetic oligonucleotide
  Sense strand starting at position 2632 of SEQ ID NO: 915227
ugacuuaucugguucuaaa

SEQ ID NO: 1063875 - RNA, 19 nt, Artificial Sequence
  Description of Artificial Sequence: Synthetic oligonucleotide
  Antisense strand to SEQ ID NO: 1063874
uuuagaaccagauaaguca

SEQ ID NO: 1063876 - RNA, 19 nt, Artificial Sequence
  Description of Artificial Sequence: Synthetic oligonucleotide
  Sense strand starting at position 2866 of SEQ ID NO: 915227
gucugauuguuauuucuuc

SEQ ID NO: 1063877 - RNA, 19 nt, Artificial Sequence
  Description of Artificial Sequence: Synthetic oligonucleotide
  Antisense strand to SEQ ID NO: 1063876
gaagaaauaacaaucagac

SEQ ID NO: 1063878 - RNA, 19 nt, Artificial Sequence
  Description of Artificial Sequence: Synthetic oligonucleotide
  Sense strand starting at position 2898 of SEQ ID NO: 915227
uauggcauguaccuuaaga

SEQ ID NO: 1063879 - RNA, 19 nt, Artificial Sequence
  Description of Artificial Sequence: Synthetic oligonucleotide
  Antisense strand to SEQ ID NO: 1063878
ucuuaagguacaugccaua

SEQ ID NO: 1063880 - RNA, 19 nt, Artificial Sequence
  Description of Artificial Sequence: Synthetic oligonucleotide
  Sense strand starting at position 2900 of SEQ ID NO: 915227
uggcauguaccuuaagaac

SEQ ID NO: 1063881 - RNA, 19 nt, Artificial Sequence
  Description of Artificial Sequence: Synthetic oligonucleotide
  Antisense strand to SEQ ID NO: 1063880
guucuuaagguacaugcca

SEQ ID NO: 1063882 - RNA, 19 nt, Artificial Sequence
  Description of Artificial Sequence: Synthetic oligonucleotide
  Sense strand starting at position 3046 of SEQ ID NO: 915227
acuuaugaagguugauuaa

SEQ ID NO: 1063883 - RNA, 19 nt, Artificial Sequence
  Description of Artificial Sequence: Synthetic oligonucleotide
  Antisense strand to SEQ ID NO: 1063882
uuaaucaaccuucauaagu

SEQ ID NO: 1063884 - RNA, 19 nt, Artificial Sequence
  Description of Artificial Sequence: Synthetic oligonucleotide
  Sense strand starting at position 3105 of SEQ ID NO: 915227
caaguaaggucagucaaau

SEQ ID NO: 1063885 - RNA, 19 nt, Artificial Sequence
  Description of Artificial Sequence: Synthetic oligonucleotide
  Antisense strand to SEQ ID NO: 1063884
auuugacugaccuuacuug

SEQ ID NO: 1063886 - RNA, 19 nt, Artificial Sequence
  Description of Artificial Sequence: Synthetic oligonucleotide
  Sense strand starting at position 3523 of SEQ ID NO: 915227
ugaccaauguuagaaauuu

SEQ ID NO: 1063887 - RNA, 19 nt, Artificial Sequence
  Description of Artificial Sequence: Synthetic oligonucleotide
  Antisense strand to SEQ ID NO: 1063886
aaauuucuaacauugguca

SEQ ID NO: 1063888 - RNA, 19 nt, Artificial Sequence
  Description of Artificial Sequence: Synthetic oligonucleotide
  Sense strand starting at position 3591 of SEQ ID NO: 915227
gccaaugaaacuugaguag

SEQ ID NO: 1063889 - RNA, 19 nt, Artificial Sequence
  Description of Artificial Sequence: Synthetic oligonucleotide
  Antisense strand to SEQ ID NO: 1063888
cuacucaaguuucauuggc

SEQ ID NO: 1063890 - RNA, 19 nt, Artificial Sequence
  Description of Artificial Sequence: Synthetic oligonucleotide
  Sense strand starting at position 3727 of SEQ ID NO: 915227
auuaaucauugucugagua

SEQ ID NO: 1063891 - RNA, 19 nt, Artificial Sequence
  Description of Artificial Sequence: Synthetic oligonucleotide
  Antisense strand to SEQ ID NO: 1063890
uacucagacaaugauuaau

SEQ ID NO: 1063892 - RNA, 19 nt, Artificial Sequence
  Description of Artificial Sequence: Synthetic oligonucleotide
  Sense strand starting at position 3892 of SEQ ID NO: 915227
cacagagauaugugugagu

SEQ ID NO: 1063893 - RNA, 19 nt, Artificial Sequence
  Description of Artificial Sequence: Synthetic oligonucleotide
  Antisense strand to SEQ ID NO: 1063892
acucacacauaucucugug

SEQ ID NO: 1063894 - RNA, 19 nt, Artificial Sequence
  Description of Artificial Sequence: Synthetic oligonucleotide
  Sense strand starting at position 3894 of SEQ ID NO: 915227
cagagauaugugugaguaa

SEQ ID NO: 1063895 - RNA, 19 nt, Artificial Sequence
  Description of Artificial Sequence: Synthetic oligonucleotide
  Antisense strand to SEQ ID NO: 1063894
uuacucacacauaucucug

SEQ ID NO: 1063896 - RNA, 19 nt, Artificial Sequence
  Description of Artificial Sequence: Synthetic oligonucleotide
  Sense strand starting at position 59 of SEQ ID NO: 915228
auuuguaucucucugcaua

SEQ ID NO: 1063897 - RNA, 19 nt, Artificial Sequence
  Description of Artificial Sequence: Synthetic oligonucleotide
  Antisense strand to SEQ ID NO: 1063896
uaugcagagagauacaaau

SEQ ID NO: 1063898 - RNA, 19 nt, Artificial Sequence
  Description of Artificial Sequence: Synthetic oligonucleotide
  Sense strand starting at position 270 of SEQ ID NO: 915228
cuuauagucuaaucaggga

SEQ ID NO: 1063899 - RNA, 19 nt, Artificial Sequence
  Description of Artificial Sequence: Synthetic oligonucleotide
  Antisense strand to SEQ ID NO: 1063898
ucccugauuagacuauaag

SEQ ID NO: 1063900 - RNA, 19 nt, Artificial Sequence
  Description of Artificial Sequence: Synthetic oligonucleotide
  Sense strand starting at position 663 of SEQ ID NO: 915228
cuccucuuggacuaguuaa

SEQ ID NO: 1063901 - RNA, 19 nt, Artificial Sequence
  Description of Artificial Sequence: Synthetic oligonucleotide
  Antisense strand to SEQ ID NO: 1063900
uuaacuaguccaagaggag

SEQ ID NO: 1063902 - RNA, 19 nt, Artificial Sequence
  Description of Artificial Sequence: Synthetic oligonucleotide
  Sense strand starting at position 690 of SEQ ID NO: 915228
uuccuaguuccauagugau

SEQ ID NO: 1063903 - RNA, 19 nt, Artificial Sequence
  Description of Artificial Sequence: Synthetic oligonucleotide
  Antisense strand to SEQ ID NO: 1063902
aucacuauggaacuaggaa

SEQ ID NO: 1063904 - RNA, 19 nt, Artificial Sequence
  Description of Artificial Sequence: Synthetic oligonucleotide
  Sense strand starting at position 925 of SEQ ID NO: 915228
gggauugagcaaugguaca

SEQ ID NO: 1063905 - RNA, 19 nt, Artificial Sequence
  Description of Artificial Sequence: Synthetic oligonucleotide
  Antisense strand to SEQ ID NO: 1063904
uguaccauugcucaauccc

SEQ ID NO: 1063906 - RNA, 19 nt, Artificial Sequence
  Description of Artificial Sequence: Synthetic oligonucleotide
  Sense strand starting at position 1021 of SEQ ID NO: 915228
acuggcugcauagaagauu

SEQ ID NO: 1063907 - RNA, 19 nt, Artificial Sequence
  Description of Artificial Sequence: Synthetic oligonucleotide
  Antisense strand to SEQ ID NO: 1063906
aaucuucuaugcagccagu

SEQ ID NO: 1063908 - RNA, 19 nt, Artificial Sequence
  Description of Artificial Sequence: Synthetic oligonucleotide
  Sense strand starting at position 1038 of SEQ ID NO: 915228
uuaucacaacagugagaug

SEQ ID NO: 1063909 - RNA, 19 nt, Artificial Sequence
  Description of Artificial Sequence: Synthetic oligonucleotide
  Antisense strand to SEQ ID NO: 1063908
caucucacuguugugauaa

SEQ ID NO: 1063910 - RNA, 19 nt, Artificial Sequence
  Description of Artificial Sequence: Synthetic oligonucleotide
  Sense strand starting at position 1075 of SEQ ID NO: 915228
ggccuuauagcguccagca

SEQ ID NO: 1063911 - RNA, 19 nt, Artificial Sequence
  Description of Artificial Sequence: Synthetic oligonucleotide
  Antisense strand to SEQ ID NO: 1063910
ugcuggacgcuauaaggcc

SEQ ID NO: 1063912 - RNA, 19 nt, Artificial Sequence
  Description of Artificial Sequence: Synthetic oligonucleotide
  Sense strand starting at position 1182 of SEQ ID NO: 915228
ggaugaaaucuguaagcuc

SEQ ID NO: 1063913 - RNA, 19 nt, Artificial Sequence
  Description of Artificial Sequence: Synthetic oligonucleotide
  Antisense strand to SEQ ID NO: 1063912
gagcuuacagauuucaucc

SEQ ID NO: 1063914 - RNA, 19 nt, Artificial Sequence
  Description of Artificial Sequence: Synthetic oligonucleotide
  Sense strand starting at position 1206 of SEQ ID NO: 915228
uggacauaucagugcauga

SEQ ID NO: 1063915 - RNA, 19 nt, Artificial Sequence
  Description of Artificial Sequence: Synthetic oligonucleotide
  Antisense strand to SEQ ID NO: 1063914
ucaugcacugauaugucca

SEQ ID NO: 1063916 - RNA, 19 nt, Artificial Sequence
  Description of Artificial Sequence: Synthetic oligonucleotide
  Sense strand starting at position 1219 of SEQ ID NO: 915228
gcaugagagguugagcaau

SEQ ID NO: 1063917 - RNA, 19 nt, Artificial Sequence
  Description of Artificial Sequence: Synthetic oligonucleotide
  Antisense strand to SEQ ID NO: 1063916
auugcucaaccucucaugc

SEQ ID NO: 1063918 - RNA, 19 nt, Artificial Sequence
  Description of Artificial Sequence: Synthetic oligonucleotide
  Sense strand starting at position 1420 of SEQ ID NO: 915228
gcgaucauaggccauaaca

SEQ ID NO: 1063919 - RNA, 19 nt, Artificial Sequence
  Description of Artificial Sequence: Synthetic oligonucleotide
  Antisense strand to SEQ ID NO: 1063918
uguuauggccuaugaucgc

SEQ ID NO: 1063920 - RNA, 19 nt, Artificial Sequence
  Description of Artificial Sequence: Synthetic oligonucleotide
  Sense strand starting at position 1491 of SEQ ID NO: 915228
ucaugcaucccucaaagga

SEQ ID NO: 1063921 - RNA, 19 nt, Artificial Sequence
  Description of Artificial Sequence: Synthetic oligonucleotide
  Antisense strand to SEQ ID NO: 1063920
uccuuugagggaugcauga

SEQ ID NO: 1063922 - RNA, 19 nt, Artificial Sequence
  Description of Artificial Sequence: Synthetic oligonucleotide
  Sense strand starting at position 1509 of SEQ ID NO: 915228
agauuagcuguccaugauc

SEQ ID NO: 1063923 - RNA, 19 nt, Artificial Sequence
  Description of Artificial Sequence: Synthetic oligonucleotide
  Antisense strand to SEQ ID NO: 1063922
gaucauggacagcuaaucu

SEQ ID NO: 1063924 - RNA, 19 nt, Artificial Sequence
  Description of Artificial Sequence: Synthetic oligonucleotide
  Sense strand starting at position 1624 of SEQ ID NO: 915228
ggguuuguggaggguagaa

SEQ ID NO: 1063925 - RNA, 19 nt, Artificial Sequence
  Description of Artificial Sequence: Synthetic oligonucleotide
  Antisense strand to SEQ ID NO: 1063924
uucuacccuccacaaaccc

SEQ ID NO: 1063926 - RNA, 19 nt, Artificial Sequence
  Description of Artificial Sequence: Synthetic oligonucleotide
  Sense strand starting at position 1634 of SEQ ID NO: 915228
aggguagaaugguuccuaa

SEQ ID NO: 1063927 - RNA, 19 nt, Artificial Sequence
  Description of Artificial Sequence: Synthetic oligonucleotide
  Antisense strand to SEQ ID NO: 1063926
uuaggaaccauucuacccu

SEQ ID NO: 1063928 - RNA, 19 nt, Artificial Sequence
  Description of Artificial Sequence: Synthetic oligonucleotide
  Sense strand starting at position 1637 of SEQ ID NO: 915228
guagaaugguuccuaauug

SEQ ID NO: 1063929 - RNA, 19 nt, Artificial Sequence
  Description of Artificial Sequence: Synthetic oligonucleotide
  Antisense strand to SEQ ID NO: 1063928
caauuaggaaccauucuac

SEQ ID NO: 1063930 - RNA, 19 nt, Artificial Sequence
  Description of Artificial Sequence: Synthetic oligonucleotide
  Sense strand starting at position 1668 of SEQ ID NO: 915228
guguguucucagucagcac

SEQ ID NO: 1063931 - RNA, 19 nt, Artificial Sequence
  Description of Artificial Sequence: Synthetic oligonucleotide
  Antisense strand to SEQ ID NO: 1063930
gugcugacugagaacacac

SEQ ID NO: 1063932 - RNA, 19 nt, Artificial Sequence
  Description of Artificial Sequence: Synthetic oligonucleotide
  Sense strand starting at position 1837 of SEQ ID NO: 915228
aguagagagucuucaguag

SEQ ID NO: 1063933 - RNA, 19 nt, Artificial Sequence
  Description of Artificial Sequence: Synthetic oligonucleotide
  Antisense strand to SEQ ID NO: 1063932
cuacugaagacucucuacu

SEQ ID NO: 1063934 - RNA, 19 nt, Artificial Sequence
  Description of Artificial Sequence: Synthetic oligonucleotide
  Sense strand starting at position 1880 of SEQ ID NO: 915228
ucuuaaugggcuuauauug

SEQ ID NO: 1063935 - RNA, 19 nt, Artificial Sequence
  Description of Artificial Sequence: Synthetic oligonucleotide
  Antisense strand to SEQ ID NO: 1063934
caauauaagcccauuaaga

SEQ ID NO: 1063936 - RNA, 19 nt, Artificial Sequence
  Description of Artificial Sequence: Synthetic oligonucleotide
  Sense strand starting at position 1909 of SEQ ID NO: 915228
acguaaggaguucauguaa

SEQ ID NO: 1063937 - RNA, 19 nt, Artificial Sequence
  Description of Artificial Sequence: Synthetic oligonucleotide
  Antisense strand to SEQ ID NO: 1063936
uuacaugaacuccuuacgu

SEQ ID NO: 1063938 - RNA, 19 nt, Artificial Sequence
  Description of Artificial Sequence: Synthetic oligonucleotide
  Sense strand starting at position 2038 of SEQ ID NO: 915228
uguucugaccuuuggagaa

SEQ ID NO: 1063939 - RNA, 19 nt, Artificial Sequence
  Description of Artificial Sequence: Synthetic oligonucleotide
  Antisense strand to SEQ ID NO: 1063938
uucuccaaaggucagaaca

SEQ ID NO: 1063940 - RNA, 19 nt, Artificial Sequence
  Description of Artificial Sequence: Synthetic oligonucleotide
  Sense strand starting at position 2053 of SEQ ID NO: 915228
agaagcaugcauugagaug

SEQ ID NO: 1063941 - RNA, 19 nt, Artificial Sequence
  Description of Artificial Sequence: Synthetic oligonucleotide
  Antisense strand to SEQ ID NO: 1063940
caucucaaugcaugcuucu

SEQ ID NO: 1063942 - RNA, 19 nt, Artificial Sequence
  Description of Artificial Sequence: Synthetic oligonucleotide
  Sense strand starting at position 2152 of SEQ ID NO: 915228
aaaugagaguuugucuuug

SEQ ID NO: 1063943 - RNA, 19 nt, Artificial Sequence
  Description of Artificial Sequence: Synthetic oligonucleotide
  Antisense strand to SEQ ID NO: 1063942
caaagacaaacucucauuu

SEQ ID NO: 1063944 - RNA, 19 nt, Artificial Sequence
  Description of Artificial Sequence: Synthetic oligonucleotide
  Sense strand starting at position 2154 of SEQ ID NO: 915228
augagaguuugucuuugag

SEQ ID NO: 1063945 - RNA, 19 nt, Artificial Sequence
  Description of Artificial Sequence: Synthetic oligonucleotide
  Antisense strand to SEQ ID NO: 1063944
cucaaagacaaacucucau

SEQ ID NO: 1063946 - RNA, 19 nt, Artificial Sequence
  Description of Artificial Sequence: Synthetic oligonucleotide
  Sense strand starting at position 2492 of SEQ ID NO: 915228
acaauacaucuuggaugua

SEQ ID NO: 1063947 - RNA, 19 nt, Artificial Sequence
  Description of Artificial Sequence: Synthetic oligonucleotide
  Antisense strand to SEQ ID NO: 1063946
uacauccaagauguauugu

SEQ ID NO: 1063948 - RNA, 19 nt, Artificial Sequence
  Description of Artificial Sequence: Synthetic oligonucleotide
  Sense strand starting at position 2731 of SEQ ID NO: 915228
uguacuaaguaucuugaaa

SEQ ID NO: 1063949 - RNA, 19 nt, Artificial Sequence
  Description of Artificial Sequence: Synthetic oligonucleotide
  Antisense strand to SEQ ID NO: 1063948
uuucaagauacuuaguaca

SEQ ID NO: 1063950 - RNA, 19 nt, Artificial Sequence
  Description of Artificial Sequence: Synthetic oligonucleotide
  Sense strand starting at position 2752 of SEQ ID NO: 915228
aggauagaguaucuuccuu

SEQ ID NO: 1063951 - RNA, 19 nt, Artificial Sequence
  Description of Artificial Sequence: Synthetic oligonucleotide
  Antisense strand to SEQ ID NO: 1063950
aaggaagauacucuauccu

SEQ ID NO: 1063952 - RNA, 19 nt, Artificial Sequence
  Description of Artificial Sequence: Synthetic oligonucleotide
  Sense strand starting at position 2877 of SEQ ID NO: 915228
uugugucucauguagacaa

SEQ ID NO: 1063953 - RNA, 19 nt, Artificial Sequence
  Description of Artificial Sequence: Synthetic oligonucleotide
  Antisense strand to SEQ ID NO: 1063952
uugucuacaugagacacaa

SEQ ID NO: 1063954 - RNA, 19 nt, Artificial Sequence
  Description of Artificial Sequence: Synthetic oligonucleotide
  Sense strand starting at position 2879 of SEQ ID NO: 915228
gugucucauguagacaaga

SEQ ID NO: 1063955 - RNA, 19 nt, Artificial Sequence
  Description of Artificial Sequence: Synthetic oligonucleotide
  Antisense strand to SEQ ID NO: 1063954
ucuugucuacaugagacac

SEQ ID NO: 1063956 - RNA, 19 nt, Artificial Sequence
  Description of Artificial Sequence: Synthetic oligonucleotide
  Sense strand starting at position 2909 of SEQ ID NO: 915228
uuacaugggaguugauaug

SEQ ID NO: 1063957 - RNA, 19 nt, Artificial Sequence
  Description of Artificial Sequence: Synthetic oligonucleotide
  Antisense strand to SEQ ID NO: 1063956
cauaucaacucccauguaa

SEQ ID NO: 1063958 - RNA, 19 nt, Artificial Sequence
  Description of Artificial Sequence: Synthetic oligonucleotide
  Sense strand starting at position 2975 of SEQ ID NO: 915228
ggagagaguguggaguuua

SEQ ID NO: 1063959 - RNA, 19 nt, Artificial Sequence
  Description of Artificial Sequence: Synthetic oligonucleotide
  Antisense strand to SEQ ID NO: 1063958
uaaacuccacacucucucc

SEQ ID NO: 1063960 - RNA, 19 nt, Artificial Sequence
  Description of Artificial Sequence: Synthetic oligonucleotide
  Sense strand starting at position 3031 of SEQ ID NO: 915228
ugcgauuucuucucagauu

SEQ ID NO: 1063961 - RNA, 19 nt, Artificial Sequence
  Description of Artificial Sequence: Synthetic oligonucleotide
  Antisense strand to SEQ ID NO: 1063960
aaucugagaagaaaucgca

SEQ ID NO: 1063962 - RNA, 19 nt, Artificial Sequence
  Description of Artificial Sequence: Synthetic oligonucleotide
  Sense strand starting at position 3032 of SEQ ID NO: 915228
gcgauuucuucucagauuu

SEQ ID NO: 1063963 - RNA, 19 nt, Artificial Sequence
  Description of Artificial Sequence: Synthetic oligonucleotide
  Antisense strand to SEQ ID NO: 1063962
aaaucugagaagaaaucgc

SEQ ID NO: 1063964 - RNA, 19 nt, Artificial Sequence
  Description of Artificial Sequence: Synthetic oligonucleotide
  Sense strand starting at position 3180 of SEQ ID NO: 915228
agcauuacucaguacuuga

SEQ ID NO: 1063965 - RNA, 19 nt, Artificial Sequence
  Description of Artificial Sequence: Synthetic oligonucleotide
  Antisense strand to SEQ ID NO: 1063964
ucaaguacugaguaaugcu

SEQ ID NO: 1063966 - RNA, 19 nt, Artificial Sequence
  Description of Artificial Sequence: Synthetic oligonucleotide
  Sense strand starting at position 3352 of SEQ ID NO: 915228
agaguugugguauauaaag

SEQ ID NO: 1063967 - RNA, 19 nt, Artificial Sequence
  Description of Artificial Sequence: Synthetic oligonucleotide
  Antisense strand to SEQ ID NO: 1063966
cuuuauauaccacaacucu

SEQ ID NO: 1063968 - RNA, 19 nt, Artificial Sequence
  Description of Artificial Sequence: Synthetic oligonucleotide
  Sense strand starting at position 3354 of SEQ ID NO: 915228
aguugugguauauaaaggu

SEQ ID NO: 1063969 - RNA, 19 nt, Artificial Sequence
  Description of Artificial Sequence: Synthetic oligonucleotide
  Antisense strand to SEQ ID NO: 1063968
accuuuauauaccacaacu

SEQ ID NO: 1063970 - RNA, 19 nt, Artificial Sequence
  Description of Artificial Sequence: Synthetic oligonucleotide
  Sense strand starting at position 3401 of SEQ ID NO: 915228
cuuauaaucuaguuauagg

SEQ ID NO: 1063971 - RNA, 19 nt, Artificial Sequence
  Description of Artificial Sequence: Synthetic oligonucleotide
  Antisense strand to SEQ ID NO: 1063970
ccuauaacuagauuauaag

SEQ ID NO: 1063972 - RNA, 19 nt, Artificial Sequence
  Description of Artificial Sequence: Synthetic oligonucleotide
  Sense strand starting at position 3443 of SEQ ID NO: 915228
cugaaaguuuaagcuacau

SEQ ID NO: 1063973 - RNA, 19 nt, Artificial Sequence
  Description of Artificial Sequence: Synthetic oligonucleotide
  Antisense strand to SEQ ID NO: 1063972
auguagcuuaaacuuucag

SEQ ID NO: 1063974 - RNA, 19 nt, Artificial Sequence
  Description of Artificial Sequence: Synthetic oligonucleotide
  Sense strand starting at position 3785 of SEQ ID NO: 915228
ucccuuuguguacacaaua

SEQ ID NO: 1063975 - RNA, 19 nt, Artificial Sequence
  Description of Artificial Sequence: Synthetic oligonucleotide
  Antisense strand to SEQ ID NO: 1063974
uauuguguacacaaaggga

SEQ ID NO: 1063976 - RNA, 19 nt, Artificial Sequence
  Description of Artificial Sequence: Synthetic oligonucleotide
  Sense strand starting at position 240 of SEQ ID NO: 915229
cuggccaauagagguuaaa

SEQ ID NO: 1063977 - RNA, 19 nt, Artificial Sequence
  Description of Artificial Sequence: Synthetic oligonucleotide
  Antisense strand to SEQ ID NO: 1063976
uuuaaccucuauuggccag

SEQ ID NO: 1063978 - RNA, 19 nt, Artificial Sequence
  Description of Artificial Sequence: Synthetic oligonucleotide
  Sense strand starting at position 680 of SEQ ID NO: 915229
ugguauaugcaagauacuu

SEQ ID NO: 1063979 - RNA, 19 nt, Artificial Sequence
  Description of Artificial Sequence: Synthetic oligonucleotide
  Antisense strand to SEQ ID NO: 1063978
aaguaucuugcauauacca

SEQ ID NO: 1063980 - RNA, 19 nt, Artificial Sequence
  Description of Artificial Sequence: Synthetic oligonucleotide
  Sense strand starting at position 740 of SEQ ID NO: 915229
ucaguuuggcaugaucauu

SEQ ID NO: 1063981 - RNA, 19 nt, Artificial Sequence
  Description of Artificial Sequence: Synthetic oligonucleotide
  Antisense strand to SEQ ID NO: 1063980
aaugaucaugccaaacuga

SEQ ID NO: 1063982 - RNA, 19 nt, Artificial Sequence
  Description of Artificial Sequence: Synthetic oligonucleotide
  Sense strand starting at position 805 of SEQ ID NO: 915229
cauagucgugcagaaagaa

SEQ ID NO: 1063983 - RNA, 19 nt, Artificial Sequence
  Description of Artificial Sequence: Synthetic oligonucleotide
  Antisense strand to SEQ ID NO: 1063982
uucuuucugcacgacuaug

SEQ ID NO: 1063984 - RNA, 19 nt, Artificial Sequence
  Description of Artificial Sequence: Synthetic oligonucleotide
  Sense strand starting at position 814 of SEQ ID NO: 915229
gcagaaagaauguguugaa

SEQ ID NO: 1063985 - RNA, 19 nt, Artificial Sequence
  Description of Artificial Sequence: Synthetic oligonucleotide
  Antisense strand to SEQ ID NO: 1063984
uucaacacauucuuucugc

SEQ ID NO: 1063986 - RNA, 19 nt, Artificial Sequence
  Description of Artificial Sequence: Synthetic oligonucleotide
  Sense strand starting at position 1071 of SEQ ID NO: 915229
uuguaucaaggucaugauu

SEQ ID NO: 1063987 - RNA, 19 nt, Artificial Sequence
  Description of Artificial Sequence: Synthetic oligonucleotide
  Antisense strand to SEQ ID NO: 1063986
aaucaugaccuugauacaa

SEQ ID NO: 1063988 - RNA, 19 nt, Artificial Sequence
  Description of Artificial Sequence: Synthetic oligonucleotide
  Sense strand starting at position 1197 of SEQ ID NO: 915229
gucauaauccagugaggag

SEQ ID NO: 1063989 - RNA, 19 nt, Artificial Sequence
  Description of Artificial Sequence: Synthetic oligonucleotide
  Antisense strand to SEQ ID NO: 1063988
cuccucacuggauuaugac

SEQ ID NO: 1063990 - RNA, 19 nt, Artificial Sequence
  Description of Artificial Sequence: Synthetic oligonucleotide
  Sense strand starting at position 1278 of SEQ ID NO: 915229
gugagaagcacagguagaa

SEQ ID NO: 1063991 - RNA, 19 nt, Artificial Sequence
  Description of Artificial Sequence: Synthetic oligonucleotide
  Antisense strand to SEQ ID NO: 1063990
uucuaccugugcuucucac

SEQ ID NO: 1063992 - RNA, 19 nt, Artificial Sequence
  Description of Artificial Sequence: Synthetic oligonucleotide
  Sense strand starting at position 1339 of SEQ ID NO: 915229
guagaaauuauguacacgu

SEQ ID NO: 1063993 - RNA, 19 nt, Artificial Sequence
  Description of Artificial Sequence: Synthetic oligonucleotide
  Antisense strand to SEQ ID NO: 1063992
acguguacauaauuucuac

SEQ ID NO: 1063994 - RNA, 19 nt, Artificial Sequence
  Description of Artificial Sequence: Synthetic oligonucleotide
  Sense strand starting at position 1406 of SEQ ID NO: 915229
ggagaaaguuuaucuucuc

SEQ ID NO: 1063995 - RNA, 19 nt, Artificial Sequence
  Description of Artificial Sequence: Synthetic oligonucleotide
  Antisense strand to SEQ ID NO: 1063994
gagaagauaaacuuucucc

SEQ ID NO: 1063996 - RNA, 19 nt, Artificial Sequence
  Description of Artificial Sequence: Synthetic oligonucleotide
  Sense strand starting at position 1415 of SEQ ID NO: 915229
uuaucuucucaaugaggug

SEQ ID NO: 1063997 - RNA, 19 nt, Artificial Sequence
  Description of Artificial Sequence: Synthetic oligonucleotide
  Antisense strand to SEQ ID NO: 1063996
caccucauugagaagauaa

SEQ ID NO: 1063998 - RNA, 19 nt, Artificial Sequence
  Description of Artificial Sequence: Synthetic oligonucleotide
  Sense strand starting at position 1421 of SEQ ID NO: 915229
ucucaaugaggugaguauu

SEQ ID NO: 1063999 - RNA, 19 nt, Artificial Sequence
  Description of Artificial Sequence: Synthetic oligonucleotide
  Antisense strand to SEQ ID NO: 1063998
aauacucaccucauugaga

SEQ ID NO: 1064000 - RNA, 19 nt, Artificial Sequence
  Description of Artificial Sequence: Synthetic oligonucleotide
  Sense strand starting at position 1492 of SEQ ID NO: 915229
ucuuuccuacaguaaggua

SEQ ID NO: 1064001 - RNA, 19 nt, Artificial Sequence
  Description of Artificial Sequence: Synthetic oligonucleotide
  Antisense strand to SEQ ID NO: 1064000
uaccuuacuguaggaaaga

SEQ ID NO: 1064002 - RNA, 19 nt, Artificial Sequence
  Description of Artificial Sequence: Synthetic oligonucleotide
  Sense strand starting at position 1517 of SEQ ID NO: 915229
ucacuacaaugguuggaaa

SEQ ID NO: 1064003 - RNA, 19 nt, Artificial Sequence
  Description of Artificial Sequence: Synthetic oligonucleotide
  Antisense strand to SEQ ID NO: 1064002
uuuccaaccauuguaguga

SEQ ID NO: 1064004 - RNA, 19 nt, Artificial Sequence
  Description of Artificial Sequence: Synthetic oligonucleotide
  Sense strand starting at position 1614 of SEQ ID NO: 915229
gugcagugggucgcagaua

SEQ ID NO: 1064005 - RNA, 19 nt, Artificial Sequence
  Description of Artificial Sequence: Synthetic oligonucleotide
  Antisense strand to SEQ ID NO: 1064004
uaucugcgacccacugcac

SEQ ID NO: 1064006 - RNA, 19 nt, Artificial Sequence
  Description of Artificial Sequence: Synthetic oligonucleotide
  Sense strand starting at position 1695 of SEQ ID NO: 915229
guagaaauauguuuggauc

SEQ ID NO: 1064007 - RNA, 19 nt, Artificial Sequence
  Description of Artificial Sequence: Synthetic oligonucleotide
  Antisense strand to SEQ ID NO: 1064006
gauccaaacauauuucuac

SEQ ID NO: 1064008 - RNA, 19 nt, Artificial Sequence
  Description of Artificial Sequence: Synthetic oligonucleotide
  Sense strand starting at position 1696 of SEQ ID NO: 915229
uagaaauauguuuggauca

SEQ ID NO: 1064009 - RNA, 19 nt, Artificial Sequence
  Description of Artificial Sequence: Synthetic oligonucleotide
  Antisense strand to SEQ ID NO: 1064008
ugauccaaacauauuucua

SEQ ID NO: 1064010 - RNA, 19 nt, Artificial Sequence
  Description of Artificial Sequence: Synthetic oligonucleotide
  Sense strand starting at position 1701 of SEQ ID NO: 915229
auauguuuggaucaugcaa

SEQ ID NO: 1064011 - RNA, 19 nt, Artificial Sequence
  Description of Artificial Sequence: Synthetic oligonucleotide
  Antisense strand to SEQ ID NO: 1064010
uugcaugauccaaacauau

SEQ ID NO: 1064012 - RNA, 19 nt, Artificial Sequence
  Description of Artificial Sequence: Synthetic oligonucleotide
  Sense strand starting at position 1777 of SEQ ID NO: 915229
augacagugguguauaaga

SEQ ID NO: 1064013 - RNA, 19 nt, Artificial Sequence
  Description of Artificial Sequence: Synthetic oligonucleotide
  Antisense strand to SEQ ID NO: 1064012
ucuuauacaccacugucau

SEQ ID NO: 1064014 - RNA, 19 nt, Artificial Sequence
  Description of Artificial Sequence: Synthetic oligonucleotide
  Sense strand starting at position 1779 of SEQ ID NO: 915229
gacagugguguauaagaua

SEQ ID NO: 1064015 - RNA, 19 nt, Artificial Sequence
  Description of Artificial Sequence: Synthetic oligonucleotide
  Antisense strand to SEQ ID NO: 1064014
uaucuuauacaccacuguc

SEQ ID NO: 1064016 - RNA, 19 nt, Artificial Sequence
  Description of Artificial Sequence: Synthetic oligonucleotide
  Sense strand starting at position 1821 of SEQ ID NO: 915229
gaagaaguacauuggaguu

SEQ ID NO: 1064017 - RNA, 19 nt, Artificial Sequence
  Description of Artificial Sequence: Synthetic oligonucleotide
  Antisense strand to SEQ ID NO: 1064016
aacuccaauguacuucuuc

SEQ ID NO: 1064018 - RNA, 19 nt, Artificial Sequence
  Description of Artificial Sequence: Synthetic oligonucleotide
  Sense strand starting at position 2086 of SEQ ID NO: 915229
gaauguauugcggagagug

SEQ ID NO: 1064019 - RNA, 19 nt, Artificial Sequence
  Description of Artificial Sequence: Synthetic oligonucleotide
  Antisense strand to SEQ ID NO: 1064018
cacucuccgcaauacauuc

SEQ ID NO: 1064020 - RNA, 19 nt, Artificial Sequence
  Description of Artificial Sequence: Synthetic oligonucleotide
  Sense strand starting at position 2096 of SEQ ID NO: 915229
cggagaguggcuuauauug

SEQ ID NO: 1064021 - RNA, 19 nt, Artificial Sequence
  Description of Artificial Sequence: Synthetic oligonucleotide
  Antisense strand to SEQ ID NO: 1064020
caauauaagccacucuccg

SEQ ID NO: 1064022 - RNA, 19 nt, Artificial Sequence
  Description of Artificial Sequence: Synthetic oligonucleotide
  Sense strand starting at position 2241 of SEQ ID NO: 915229
acggaauaaggcuggauaa

SEQ ID NO: 1064023 - RNA, 19 nt, Artificial Sequence
  Description of Artificial Sequence: Synthetic oligonucleotide
  Antisense strand to SEQ ID NO: 1064022
uuauccagccuuauuccgu

SEQ ID NO: 1064024 - RNA, 19 nt, Artificial Sequence
  Description of Artificial Sequence: Synthetic oligonucleotide
  Sense strand starting at position 2242 of SEQ ID NO: 915229
cggaauaaggcuggauaaa

SEQ ID NO: 1064025 - RNA, 19 nt, Artificial Sequence
  Description of Artificial Sequence: Synthetic oligonucleotide
  Antisense strand to SEQ ID NO: 1064024
uuuauccagccuuauuccg

SEQ ID NO: 1064026 - RNA, 19 nt, Artificial Sequence
  Description of Artificial Sequence: Synthetic oligonucleotide
  Sense strand starting at position 2425 of SEQ ID NO: 915229
aguggcaaauccuuuagaa

SEQ ID NO: 1064027 - RNA, 19 nt, Artificial Sequence
  Description of Artificial Sequence: Synthetic oligonucleotide
  Antisense strand to SEQ ID NO: 1064026
uucuaaaggauuugccacu

SEQ ID NO: 1064028 - RNA, 19 nt, Artificial Sequence
  Description of Artificial Sequence: Synthetic oligonucleotide
  Sense strand starting at position 2526 of SEQ ID NO: 915229
uguagauauccagagucuc

SEQ ID NO: 1064029 - RNA, 19 nt, Artificial Sequence
  Description of Artificial Sequence: Synthetic oligonucleotide
  Antisense strand to SEQ ID NO: 1064028
gagacucuggauaucuaca

SEQ ID NO: 1064030 - RNA, 19 nt, Artificial Sequence
  Description of Artificial Sequence: Synthetic oligonucleotide
  Sense strand starting at position 2746 of SEQ ID NO: 915229
auauaucuggcugaucauu

SEQ ID NO: 1064031 - RNA, 19 nt, Artificial Sequence
  Description of Artificial Sequence: Synthetic oligonucleotide
  Antisense strand to SEQ ID NO: 1064030
aaugaucagccagauauau

SEQ ID NO: 1064032 - RNA, 19 nt, Artificial Sequence
  Description of Artificial Sequence: Synthetic oligonucleotide
  Sense strand starting at position 2820 of SEQ ID NO: 915229
aggcaacauagagguaauu

SEQ ID NO: 1064033 - RNA, 19 nt, Artificial Sequence
  Description of Artificial Sequence: Synthetic oligonucleotide
  Antisense strand to SEQ ID NO: 1064032
aauuaccucuauguugccu

SEQ ID NO: 1064034 - RNA, 19 nt, Artificial Sequence
  Description of Artificial Sequence: Synthetic oligonucleotide
  Sense strand starting at position 2992 of SEQ ID NO: 915229
gugcuuuauuuaucuagau

SEQ ID NO: 1064035 - RNA, 19 nt, Artificial Sequence
  Description of Artificial Sequence: Synthetic oligonucleotide
  Antisense strand to SEQ ID NO: 1064034
aucuagauaaauaaagcac

SEQ ID NO: 1064036 - RNA, 19 nt, Artificial Sequence
  Description of Artificial Sequence: Synthetic oligonucleotide
  Sense strand starting at position 3432 of SEQ ID NO: 915229
ugucaacuccuagaagucu

SEQ ID NO: 1064037 - RNA, 19 nt, Artificial Sequence
  Description of Artificial Sequence: Synthetic oligonucleotide
  Antisense strand to SEQ ID NO: 1064036
agacuucuaggaguugaca

SEQ ID NO: 1064038 - RNA, 19 nt, Artificial Sequence
  Description of Artificial Sequence: Synthetic oligonucleotide
  Sense strand starting at position 3463 of SEQ ID NO: 915229
uugagaauuguauaguguu

SEQ ID NO: 1064039 - RNA, 19 nt, Artificial Sequence
  Description of Artificial Sequence: Synthetic oligonucleotide
  Antisense strand to SEQ ID NO: 1064038
aacacuauacaauucucaa

SEQ ID NO: 1064040 - RNA, 19 nt, Artificial Sequence
  Description of Artificial Sequence: Synthetic oligonucleotide
  Sense strand starting at position 3482 of SEQ ID NO: 915229
ugauucuaucagugggacu

SEQ ID NO: 1064041 - RNA, 19 nt, Artificial Sequence
  Description of Artificial Sequence: Synthetic oligonucleotide
  Antisense strand to SEQ ID NO: 1064040
agucccacugauagaauca

SEQ ID NO: 1064042 - RNA, 19 nt, Artificial Sequence
  Description of Artificial Sequence: Synthetic oligonucleotide
  Sense strand starting at position 3501 of SEQ ID NO: 915229
gugauauauuuagccaguu

SEQ ID NO: 1064043 - RNA, 19 nt, Artificial Sequence
  Description of Artificial Sequence: Synthetic oligonucleotide
  Antisense strand to SEQ ID NO: 1064042
aacuggcuaaauauaucac

SEQ ID NO: 1064044 - RNA, 19 nt, Artificial Sequence
  Description of Artificial Sequence: Synthetic oligonucleotide
  Sense strand starting at position 3545 of SEQ ID NO: 915229
uuacauuucuugcuuguau

SEQ ID NO: 1064045 - RNA, 19 nt, Artificial Sequence
  Description of Artificial Sequence: Synthetic oligonucleotide
  Antisense strand to SEQ ID NO: 1064044
auacaagcaagaaauguaa

SEQ ID NO: 1064046 - RNA, 19 nt, Artificial Sequence
  Description of Artificial Sequence: Synthetic oligonucleotide
  Sense strand starting at position 3613 of SEQ ID NO: 915229
ucuuauuaauucccgagaa

SEQ ID NO: 1064047 - RNA, 19 nt, Artificial Sequence
  Description of Artificial Sequence: Synthetic oligonucleotide
  Antisense strand to SEQ ID NO: 1064046
uucucgggaauuaauaaga

SEQ ID NO: 1064048 - RNA, 19 nt, Artificial Sequence
  Description of Artificial Sequence: Synthetic oligonucleotide
  Sense strand starting at position 3714 of SEQ ID NO: 915229
uuuacuuuacuagagcagu

SEQ ID NO: 1064049 - RNA, 19 nt, Artificial Sequence
  Description of Artificial Sequence: Synthetic oligonucleotide
  Antisense strand to SEQ ID NO: 1064048
acugcucuaguaaaguaaa

SEQ ID NO: 1064050 - RNA, 19 nt, Artificial Sequence
  Description of Artificial Sequence: Synthetic oligonucleotide
  Sense strand starting at position 3767 of SEQ ID NO: 915229
ggguucuuagucugaggga

SEQ ID NO: 1064051 - RNA, 19 nt, Artificial Sequence
  Description of Artificial Sequence: Synthetic oligonucleotide
  Antisense strand to SEQ ID NO: 1064050
ucccucagacuaagaaccc

SEQ ID NO: 1064052 - RNA, 19 nt, Artificial Sequence
  Description of Artificial Sequence: Synthetic oligonucleotide
  Sense strand starting at position 3772 of SEQ ID NO: 915229
cuuagucugagggaauagu

SEQ ID NO: 1064053 - RNA, 19 nt, Artificial Sequence
  Description of Artificial Sequence: Synthetic oligonucleotide
  Antisense strand to SEQ ID NO: 1064052
acuauucccucagacuaag

SEQ ID NO: 1064054 - RNA, 19 nt, Artificial Sequence
  Description of Artificial Sequence: Synthetic oligonucleotide
  Sense strand starting at position 3822 of SEQ ID NO: 915229
gccucaauggcauagaaau

SEQ ID NO: 1064055 - RNA, 19 nt, Artificial Sequence
  Description of Artificial Sequence: Synthetic oligonucleotide
  Antisense strand to SEQ ID NO: 1064054
auuucuaugccauugaggc

SEQ ID NO: 1064056 - RNA, 19 nt, Artificial Sequence
  Description of Artificial Sequence: Synthetic oligonucleotide
  Sense strand starting at position 139 of SEQ ID NO: 915230
uugucaugucaacaguuua

SEQ ID NO: 1064057 - RNA, 19 nt, Artificial Sequence
  Description of Artificial Sequence: Synthetic oligonucleotide
  Antisense strand to SEQ ID NO: 1064056
uaaacuguugacaugacaa

SEQ ID NO: 1064058 - RNA, 19 nt, Artificial Sequence
  Description of Artificial Sequence: Synthetic oligonucleotide
  Sense strand starting at position 257 of SEQ ID NO: 915230
caauguccagaaggguauu

SEQ ID NO: 1064059 - RNA, 19 nt, Artificial Sequence
  Description of Artificial Sequence: Synthetic oligonucleotide
  Antisense strand to SEQ ID NO: 1064058
aauacccuucuggacauug

SEQ ID NO: 1064060 - RNA, 19 nt, Artificial Sequence
  Description of Artificial Sequence: Synthetic oligonucleotide
  Sense strand starting at position 467 of SEQ ID NO: 915230
caaagaucaguugguagca

SEQ ID NO: 1064061 - RNA, 19 nt, Artificial Sequence
  Description of Artificial Sequence: Synthetic oligonucleotide
  Antisense strand to SEQ ID NO: 1064060
ugcuaccaacugaucuuug

SEQ ID NO: 1064062 - RNA, 19 nt, Artificial Sequence
  Description of Artificial Sequence: Synthetic oligonucleotide
  Sense strand starting at position 747 of SEQ ID NO: 915230
agcauugaaucugcggauu

SEQ ID NO: 1064063 - RNA, 19 nt, Artificial Sequence
  Description of Artificial Sequence: Synthetic oligonucleotide
  Antisense strand to SEQ ID NO: 1064062
aauccgcagauucaaugcu

SEQ ID NO: 1064064 - RNA, 19 nt, Artificial Sequence
  Description of Artificial Sequence: Synthetic oligonucleotide
  Sense strand starting at position 940 of SEQ ID NO: 915230
ggcuguuauaaauggaacu

SEQ ID NO: 1064065 - RNA, 19 nt, Artificial Sequence
  Description of Artificial Sequence: Synthetic oligonucleotide
  Antisense strand to SEQ ID NO: 1064064
aguuccauuuauaacagcc

SEQ ID NO: 1064066 - RNA, 19 nt, Artificial Sequence
  Description of Artificial Sequence: Synthetic oligonucleotide
  Sense strand starting at position 979 of SEQ ID NO: 915230
gcuuaaauguuauugacua

SEQ ID NO: 1064067 - RNA, 19 nt, Artificial Sequence
  Description of Artificial Sequence: Synthetic oligonucleotide
  Antisense strand to SEQ ID NO: 1064066
uagucaauaacauuuaagc

SEQ ID NO: 1064068 - RNA, 19 nt, Artificial Sequence
  Description of Artificial Sequence: Synthetic oligonucleotide
  Sense strand starting at position 987 of SEQ ID NO: 915230
guuauugacuaaccuguuu

SEQ ID NO: 1064069 - RNA, 19 nt, Artificial Sequence
  Description of Artificial Sequence: Synthetic oligonucleotide
  Antisense strand to SEQ ID NO: 1064068
aaacagguuagucaauaac

SEQ ID NO: 1064070 - RNA, 19 nt, Artificial Sequence
  Description of Artificial Sequence: Synthetic oligonucleotide
  Sense strand starting at position 1984 of SEQ ID NO: 915230
uuugguauaugguugcaua

SEQ ID NO: 1064071 - RNA, 19 nt, Artificial Sequence
  Description of Artificial Sequence: Synthetic oligonucleotide
  Antisense strand to SEQ ID NO: 1064070
uaugcaaccauauaccaaa

SEQ ID NO: 1064072 - RNA, 19 nt, Artificial Sequence
  Description of Artificial Sequence: Synthetic oligonucleotide
  Sense strand starting at position 1985 of SEQ ID NO: 915230
uugguauaugguugcauau

SEQ ID NO: 1064073 - RNA, 19 nt, Artificial Sequence
  Description of Artificial Sequence: Synthetic oligonucleotide
  Antisense strand to SEQ ID NO: 1064072
auaugcaaccauauaccaa

SEQ ID NO: 1064074 - RNA, 19 nt, Artificial Sequence
  Description of Artificial Sequence: Synthetic oligonucleotide
  Sense strand starting at position 2285 of SEQ ID NO: 915230
gaagacugucuauagcuga

SEQ ID NO: 1064075 - RNA, 19 nt, Artificial Sequence
  Description of Artificial Sequence: Synthetic oligonucleotide
  Antisense strand to SEQ ID NO: 1064074
ucagcuauagacagucuuc

SEQ ID NO: 1064076 - RNA, 19 nt, Artificial Sequence
  Description of Artificial Sequence: Synthetic oligonucleotide
  Sense strand starting at position 2421 of SEQ ID NO: 915230
gacaguuuaccauggaguu

SEQ ID NO: 1064077 - RNA, 19 nt, Artificial Sequence
  Description of Artificial Sequence: Synthetic oligonucleotide
  Antisense strand to SEQ ID NO: 1064076
aacuccaugguaaacuguc

SEQ ID NO: 1064078 - RNA, 19 nt, Artificial Sequence
  Description of Artificial Sequence: Synthetic oligonucleotide
  Sense strand starting at position 2517 of SEQ ID NO: 915230
guuagauaauuccuguaaa

SEQ ID NO: 1064079 - RNA, 19 nt, Artificial Sequence
  Description of Artificial Sequence: Synthetic oligonucleotide
  Antisense strand to SEQ ID NO: 1064078
uuuacaggaauuaucuaac

SEQ ID NO: 1064080 - RNA, 19 nt, Artificial Sequence
  Description of Artificial Sequence: Synthetic oligonucleotide
  Sense strand starting at position 2520 of SEQ ID NO: 915230
agauaauuccuguaaagca

SEQ ID NO: 1064081 - RNA, 19 nt, Artificial Sequence
  Description of Artificial Sequence: Synthetic oligonucleotide
  Antisense strand to SEQ ID NO: 1064080
ugcuuuacaggaauuaucu

SEQ ID NO: 1064082 - RNA, 19 nt, Artificial Sequence
  Description of Artificial Sequence: Synthetic oligonucleotide
  Sense strand starting at position 2541 of SEQ ID NO: 915230
uagcaucauguuugaguca

SEQ ID NO: 1064083 - RNA, 19 nt, Artificial Sequence
  Description of Artificial Sequence: Synthetic oligonucleotide
  Antisense strand to SEQ ID NO: 1064082
ugacucaaacaugaugcua

SEQ ID NO: 1064084 - RNA, 19 nt, Artificial Sequence
  Description of Artificial Sequence: Synthetic oligonucleotide
  Sense strand starting at position 2573 of SEQ ID NO: 915230
gggaaaucuacauguugac

SEQ ID NO: 1064085 - RNA, 19 nt, Artificial Sequence
  Description of Artificial Sequence: Synthetic oligonucleotide
  Antisense strand to SEQ ID NO: 1064084
gucaacauguagauuuccc

SEQ ID NO: 1064086 - RNA, 19 nt, Artificial Sequence
  Description of Artificial Sequence: Synthetic oligonucleotide
  Sense strand starting at position 2587 of SEQ ID NO: 915230
uugacaucuccuggaauaa

SEQ ID NO: 1064087 - RNA, 19 nt, Artificial Sequence
  Description of Artificial Sequence: Synthetic oligonucleotide
  Antisense strand to SEQ ID NO: 1064086
uuauuccaggagaugucaa

SEQ ID NO: 1064088 - RNA, 19 nt, Artificial Sequence
  Description of Artificial Sequence: Synthetic oligonucleotide
  Sense strand starting at position 2626 of SEQ ID NO: 915230
guuucugagccugaggagu

SEQ ID NO: 1064089 - RNA, 19 nt, Artificial Sequence
  Description of Artificial Sequence: Synthetic oligonucleotide
  Antisense strand to SEQ ID NO: 1064088
acuccucaggcucagaaac

SEQ ID NO: 1064090 - RNA, 19 nt, Artificial Sequence
  Description of Artificial Sequence: Synthetic oligonucleotide
  Sense strand starting at position 2720 of SEQ ID NO: 915230
gggagacuuuaagaauuau

SEQ ID NO: 1064091 - RNA, 19 nt, Artificial Sequence
  Description of Artificial Sequence: Synthetic oligonucleotide
  Antisense strand to SEQ ID NO: 1064090
auaauucuuaaagucuccc

SEQ ID NO: 1064092 - RNA, 19 nt, Artificial Sequence
  Description of Artificial Sequence: Synthetic oligonucleotide
  Sense strand starting at position 2879 of SEQ ID NO: 915230
gagguuggguguucaagau

SEQ ID NO: 1064093 - RNA, 19 nt, Artificial Sequence
  Description of Artificial Sequence: Synthetic oligonucleotide
  Antisense strand to SEQ ID NO: 1064092
aucuugaacacccaaccuc

SEQ ID NO: 1064094 - RNA, 19 nt, Artificial Sequence
  Description of Artificial Sequence: Synthetic oligonucleotide
  Sense strand starting at position 3138 of SEQ ID NO: 915230
gguuguugcaaguauagca

SEQ ID NO: 1064095 - RNA, 19 nt, Artificial Sequence
  Description of Artificial Sequence: Synthetic oligonucleotide
  Antisense strand to SEQ ID NO: 1064094
ugcuauacuugcaacaacc

SEQ ID NO: 1064096 - RNA, 19 nt, Artificial Sequence
  Description of Artificial Sequence: Synthetic oligonucleotide
  Sense strand starting at position 3146 of SEQ ID NO: 915230
caaguauagcauggaguga

SEQ ID NO: 1064097 - RNA, 19 nt, Artificial Sequence
  Description of Artificial Sequence: Synthetic oligonucleotide
  Antisense strand to SEQ ID NO: 1064096
ucacuccaugcuauacuug

SEQ ID NO: 1064098 - RNA, 19 nt, Artificial Sequence
  Description of Artificial Sequence: Synthetic oligonucleotide
  Sense strand starting at position 3147 of SEQ ID NO: 915230
aaguauagcauggagugau

SEQ ID NO: 1064099 - RNA, 19 nt, Artificial Sequence
  Description of Artificial Sequence: Synthetic oligonucleotide
  Antisense strand to SEQ ID NO: 1064098
aucacuccaugcuauacuu

SEQ ID NO: 1064100 - RNA, 19 nt, Artificial Sequence
  Description of Artificial Sequence: Synthetic oligonucleotide
  Sense strand starting at position 3157 of SEQ ID NO: 915230
uggagugauggugacuuua

SEQ ID NO: 1064101 - RNA, 19 nt, Artificial Sequence
  Description of Artificial Sequence: Synthetic oligonucleotide
  Antisense strand to SEQ ID NO: 1064100
uaaagucaccaucacucca

SEQ ID NO: 1064102 - RNA, 19 nt, Artificial Sequence
  Description of Artificial Sequence: Synthetic oligonucleotide
  Sense strand starting at position 3159 of SEQ ID NO: 915230
gagugauggugacuuuaac

SEQ ID NO: 1064103 - RNA, 19 nt, Artificial Sequence
  Description of Artificial Sequence: Synthetic oligonucleotide
  Antisense strand to SEQ ID NO: 1064102
guuaaagucaccaucacuc

SEQ ID NO: 1064104 - RNA, 19 nt, Artificial Sequence
  Description of Artificial Sequence: Synthetic oligonucleotide
  Sense strand starting at position 3165 of SEQ ID NO: 915230
uggugacuuuaacugcaga

SEQ ID NO: 1064105 - RNA, 19 nt, Artificial Sequence
  Description of Artificial Sequence: Synthetic oligonucleotide
  Antisense strand to SEQ ID NO: 1064104
ucugcaguuaaagucacca

SEQ ID NO: 1064106 - RNA, 19 nt, Artificial Sequence
  Description of Artificial Sequence: Synthetic oligonucleotide
  Sense strand starting at position 3166 of SEQ ID NO: 915230
ggugacuuuaacugcagaa

SEQ ID NO: 1064107 - RNA, 19 nt, Artificial Sequence
  Description of Artificial Sequence: Synthetic oligonucleotide
  Antisense strand to SEQ ID NO: 1064106
uucugcaguuaaagucacc

SEQ ID NO: 1064108 - RNA, 19 nt, Artificial Sequence
  Description of Artificial Sequence: Synthetic oligonucleotide
  Sense strand starting at position 3464 of SEQ ID NO: 915230
aagugaggucuauggcuau

SEQ ID NO: 1064109 - RNA, 19 nt, Artificial Sequence
  Description of Artificial Sequence: Synthetic oligonucleotide
  Antisense strand to SEQ ID NO: 1064108
auagccauagaccucacuu

SEQ ID NO: 1064110 - RNA, 19 nt, Artificial Sequence
  Description of Artificial Sequence: Synthetic oligonucleotide
  Sense strand starting at position 3477 of SEQ ID NO: 915230
ggcuauucccauugaaucu

SEQ ID NO: 1064111 - RNA, 19 nt, Artificial Sequence
  Description of Artificial Sequence: Synthetic oligonucleotide
  Antisense strand to SEQ ID NO: 1064110
agauucaaugggaauagcc

SEQ ID NO: 1064112 - RNA, 19 nt, Artificial Sequence
  Description of Artificial Sequence: Synthetic oligonucleotide
  Sense strand starting at position 3486 of SEQ ID NO: 915230
cauugaaucuggguucugu

SEQ ID NO: 1064113 - RNA, 19 nt, Artificial Sequence
  Description of Artificial Sequence: Synthetic oligonucleotide
  Antisense strand to SEQ ID NO: 1064112
acagaacccagauucaaug

SEQ ID NO: 1064114 - RNA, 19 nt, Artificial Sequence
  Description of Artificial Sequence: Synthetic oligonucleotide
  Sense strand starting at position 3499 of SEQ ID NO: 915230
uucugugacugcuuaacaa

SEQ ID NO: 1064115 - RNA, 19 nt, Artificial Sequence
  Description of Artificial Sequence: Synthetic oligonucleotide
  Antisense strand to SEQ ID NO: 1064114
uuguuaagcagucacagaa

SEQ ID NO: 1064116 - RNA, 19 nt, Artificial Sequence
  Description of Artificial Sequence: Synthetic oligonucleotide
  Sense strand starting at position 3593 of SEQ ID NO: 915230
cuugaaacccagugacagu

SEQ ID NO: 1064117 - RNA, 19 nt, Artificial Sequence
  Description of Artificial Sequence: Synthetic oligonucleotide
  Antisense strand to SEQ ID NO: 1064116
acugucacuggguuucaag

SEQ ID NO: 1064118 - RNA, 19 nt, Artificial Sequence
  Description of Artificial Sequence: Synthetic oligonucleotide
  Sense strand starting at position 3604 of SEQ ID NO: 915230
gugacaguagugugaggaa

SEQ ID NO: 1064119 - RNA, 19 nt, Artificial Sequence
  Description of Artificial Sequence: Synthetic oligonucleotide
  Antisense strand to SEQ ID NO: 1064118
uuccucacacuacugucac

SEQ ID NO: 1064120 - RNA, 19 nt, Artificial Sequence
  Description of Artificial Sequence: Synthetic oligonucleotide
  Sense strand starting at position 3713 of SEQ ID NO: 915230
gcguaccagccggaugaau

SEQ ID NO: 1064121 - RNA, 19 nt, Artificial Sequence
  Description of Artificial Sequence: Synthetic oligonucleotide
  Antisense strand to SEQ ID NO: 1064120
auucauccggcugguacgc

SEQ ID NO: 1064122 - RNA, 19 nt, Artificial Sequence
  Description of Artificial Sequence: Synthetic oligonucleotide
  Sense strand starting at position 3715 of SEQ ID NO: 915230
guaccagccggaugaauaa

SEQ ID NO: 1064123 - RNA, 19 nt, Artificial Sequence
  Description of Artificial Sequence: Synthetic oligonucleotide
  Antisense strand to SEQ ID NO: 1064122
uuauucauccggcugguac

SEQ ID NO: 1064124 - RNA, 19 nt, Artificial Sequence
  Description of Artificial Sequence: Synthetic oligonucleotide
  Sense strand starting at position 3724 of SEQ ID NO: 915230
ggaugaauaagcugucuga

SEQ ID NO: 1064125 - RNA, 19 nt, Artificial Sequence
  Description of Artificial Sequence: Synthetic oligonucleotide
  Antisense strand to SEQ ID NO: 1064124
ucagacagcuuauucaucc

SEQ ID NO: 1064126 - RNA, 19 nt, Artificial Sequence
  Description of Artificial Sequence: Synthetic oligonucleotide
  Sense strand starting at position 3727 of SEQ ID NO: 915230
ugaauaagcugucugagaa

SEQ ID NO: 1064127 - RNA, 19 nt, Artificial Sequence
  Description of Artificial Sequence: Synthetic oligonucleotide
  Antisense strand to SEQ ID NO: 1064126
uucucagacagcuuauuca

SEQ ID NO: 1064128 - RNA, 19 nt, Artificial Sequence
  Description of Artificial Sequence: Synthetic oligonucleotide
  Sense strand starting at position 3728 of SEQ ID NO: 915230
gaauaagcugucugagaaa

SEQ ID NO: 1064129 - RNA, 19 nt, Artificial Sequence
  Description of Artificial Sequence: Synthetic oligonucleotide
  Antisense strand to SEQ ID NO: 1064128
uuucucagacagcuuauuc

SEQ ID NO: 1064130 - RNA, 19 nt, Artificial Sequence
  Description of Artificial Sequence: Synthetic oligonucleotide
  Sense strand starting at position 3838 of SEQ ID NO: 915230
cugauugcuguuuaaacca

SEQ ID NO: 1064131 - RNA, 19 nt, Artificial Sequence
  Description of Artificial Sequence: Synthetic oligonucleotide
  Antisense strand to SEQ ID NO: 1064130
ugguuuaaacagcaaucag

SEQ ID NO: 1064132 - RNA, 19 nt, Artificial Sequence
  Description of Artificial Sequence: Synthetic oligonucleotide
  Sense strand starting at position 3898 of SEQ ID NO: 915230
gcaguuauacccuaguugu

SEQ ID NO: 1064133 - RNA, 19 nt, Artificial Sequence
  Description of Artificial Sequence: Synthetic oligonucleotide
  Antisense strand to SEQ ID NO: 1064132
acaacuaggguauaacugc

SEQ ID NO: 1064134 - RNA, 19 nt, Artificial Sequence
  Description of Artificial Sequence: Synthetic oligonucleotide
  Sense strand starting at position 3911 of SEQ ID NO: 915230
aguuguguaacuugggcaa

SEQ ID NO: 1064135 - RNA, 19 nt, Artificial Sequence
  Description of Artificial Sequence: Synthetic oligonucleotide
  Antisense strand to SEQ ID NO: 1064134
uugcccaaguuacacaacu

SEQ ID NO: 1064136 - RNA, 19 nt, Artificial Sequence
  Description of Artificial Sequence: Synthetic oligonucleotide
  Sense strand starting at position 302 of SEQ ID NO: 915231
ggagccuugccauauuaga

SEQ ID NO: 1064137 - RNA, 19 nt, Artificial Sequence
  Description of Artificial Sequence: Synthetic oligonucleotide
  Antisense strand to SEQ ID NO: 1064136
ucuaauauggcaaggcucc

SEQ ID NO: 1064138 - RNA, 19 nt, Artificial Sequence
  Description of Artificial Sequence: Synthetic oligonucleotide
  Sense strand starting at position 379 of SEQ ID NO: 915231
ugccauauuugaguuuguu

SEQ ID NO: 1064139 - RNA, 19 nt, Artificial Sequence
  Description of Artificial Sequence: Synthetic oligonucleotide
  Antisense strand to SEQ ID NO: 1064138
aacaaacucaaauauggca

SEQ ID NO: 1064140 - RNA, 19 nt, Artificial Sequence
  Description of Artificial Sequence: Synthetic oligonucleotide
  Sense strand starting at position 382 of SEQ ID NO: 915231
cauauuugaguuuguuagu

SEQ ID NO: 1064141 - RNA, 19 nt, Artificial Sequence
  Description of Artificial Sequence: Synthetic oligonucleotide
  Antisense strand to SEQ ID NO: 1064140
acuaacaaacucaaauaug

SEQ ID NO: 1064142 - RNA, 19 nt, Artificial Sequence
  Description of Artificial Sequence: Synthetic oligonucleotide
  Sense strand starting at position 398 of SEQ ID NO: 915231
aguagaguuugacuuagga

SEQ ID NO: 1064143 - RNA, 19 nt, Artificial Sequence
  Description of Artificial Sequence: Synthetic oligonucleotide
  Antisense strand to SEQ ID NO: 1064142
uccuaagucaaacucuacu

SEQ ID NO: 1064144 - RNA, 19 nt, Artificial Sequence
  Description of Artificial Sequence: Synthetic oligonucleotide
  Sense strand starting at position 476 of SEQ ID NO: 915231
ggagcugcuaguuacauaa

SEQ ID NO: 1064145 - RNA, 19 nt, Artificial Sequence
  Description of Artificial Sequence: Synthetic oligonucleotide
  Antisense strand to SEQ ID NO: 1064144
uuauguaacuagcagcucc

SEQ ID NO: 1064146 - RNA, 19 nt, Artificial Sequence
  Description of Artificial Sequence: Synthetic oligonucleotide
  Sense strand starting at position 672 of SEQ ID NO: 915231
ucugauuggcuacaugaca

SEQ ID NO: 1064147 - RNA, 19 nt, Artificial Sequence
  Description of Artificial Sequence: Synthetic oligonucleotide
  Antisense strand to SEQ ID NO: 1064146
ugucauguagccaaucaga

SEQ ID NO: 1064148 - RNA, 19 nt, Artificial Sequence
  Description of Artificial Sequence: Synthetic oligonucleotide
  Sense strand starting at position 882 of SEQ ID NO: 915231
aagguuuaccaccguauuu

SEQ ID NO: 1064149 - RNA, 19 nt, Artificial Sequence
  Description of Artificial Sequence: Synthetic oligonucleotide
  Antisense strand to SEQ ID NO: 1064148
aaauacggugguaaaccuu

SEQ ID NO: 1064150 - RNA, 19 nt, Artificial Sequence
  Description of Artificial Sequence: Synthetic oligonucleotide
  Sense strand starting at position 1115 of SEQ ID NO: 915231
ugucauugcggagagugaa

SEQ ID NO: 1064151 - RNA, 19 nt, Artificial Sequence
  Description of Artificial Sequence: Synthetic oligonucleotide
  Antisense strand to SEQ ID NO: 1064150
uucacucuccgcaaugaca

SEQ ID NO: 1064152 - RNA, 19 nt, Artificial Sequence
  Description of Artificial Sequence: Synthetic oligonucleotide
  Sense strand starting at position 1454 of SEQ ID NO: 915231
gccaacugucacgaaagaa

SEQ ID NO: 1064153 - RNA, 19 nt, Artificial Sequence
  Description of Artificial Sequence: Synthetic oligonucleotide
  Antisense strand to SEQ ID NO: 1064152
uucuuucgugacaguuggc

SEQ ID NO: 1064154 - RNA, 19 nt, Artificial Sequence
  Description of Artificial Sequence: Synthetic oligonucleotide
  Sense strand starting at position 1462 of SEQ ID NO: 915231
ucacgaaagaaguggucaa

SEQ ID NO: 1064155 - RNA, 19 nt, Artificial Sequence
  Description of Artificial Sequence: Synthetic oligonucleotide
  Antisense strand to SEQ ID NO: 1064154
uugaccacuucuuucguga

SEQ ID NO: 1064156 - RNA, 19 nt, Artificial Sequence
  Description of Artificial Sequence: Synthetic oligonucleotide
  Sense strand starting at position 1668 of SEQ ID NO: 915231
gucaguggugccuagaaag

SEQ ID NO: 1064157 - RNA, 19 nt, Artificial Sequence
  Description of Artificial Sequence: Synthetic oligonucleotide
  Antisense strand to SEQ ID NO: 1064156
cuuucuaggcaccacugac

SEQ ID NO: 1064158 - RNA, 19 nt, Artificial Sequence
  Description of Artificial Sequence: Synthetic oligonucleotide
  Sense strand starting at position 1703 of SEQ ID NO: 915231
ggaugaugcagcugacaaa

SEQ ID NO: 1064159 - RNA, 19 nt, Artificial Sequence
  Description of Artificial Sequence: Synthetic oligonucleotide
  Antisense strand to SEQ ID NO: 1064158
uuugucagcugcaucaucc

SEQ ID NO: 1064160 - RNA, 19 nt, Artificial Sequence
  Description of Artificial Sequence: Synthetic oligonucleotide
  Sense strand starting at position 1704 of SEQ ID NO: 915231
gaugaugcagcugacaaau

SEQ ID NO: 1064161 - RNA, 19 nt, Artificial Sequence
  Description of Artificial Sequence: Synthetic oligonucleotide
  Antisense strand to SEQ ID NO: 1064160
auuugucagcugcaucauc

SEQ ID NO: 1064162 - RNA, 19 nt, Artificial Sequence
  Description of Artificial Sequence: Synthetic oligonucleotide
  Sense strand starting at position 1710 of SEQ ID NO: 915231
gcagcugacaaaugagaug

SEQ ID NO: 1064163 - RNA, 19 nt, Artificial Sequence
  Description of Artificial Sequence: Synthetic oligonucleotide
  Antisense strand to SEQ ID NO: 1064162
caucucauuugucagcugc

SEQ ID NO: 1064164 - RNA, 19 nt, Artificial Sequence
  Description of Artificial Sequence: Synthetic oligonucleotide
  Sense strand starting at position 1716 of SEQ ID NO: 915231
gacaaaugagaugguguga

SEQ ID NO: 1064165 - RNA, 19 nt, Artificial Sequence
  Description of Artificial Sequence: Synthetic oligonucleotide
  Antisense strand to SEQ ID NO: 1064164
ucacaccaucucauuuguc

SEQ ID NO: 1064166 - RNA, 19 nt, Artificial Sequence
  Description of Artificial Sequence: Synthetic oligonucleotide
  Sense strand starting at position 1799 of SEQ ID NO: 915231
aggagaaauuccgcaggaa

SEQ ID NO: 1064167 - RNA, 19 nt, Artificial Sequence
  Description of Artificial Sequence: Synthetic oligonucleotide
  Antisense strand to SEQ ID NO: 1064166
uuccugcggaauuucuccu

SEQ ID NO: 1064168 - RNA, 19 nt, Artificial Sequence
  Description of Artificial Sequence: Synthetic oligonucleotide
  Sense strand starting at position 1802 of SEQ ID NO: 915231
agaaauuccgcaggaagaa

SEQ ID NO: 1064169 - RNA, 19 nt, Artificial Sequence
  Description of Artificial Sequence: Synthetic oligonucleotide
  Antisense strand to SEQ ID NO: 1064168
uucuuccugcggaauuucu

SEQ ID NO: 1064170 - RNA, 19 nt, Artificial Sequence
  Description of Artificial Sequence: Synthetic oligonucleotide
  Sense strand starting at position 1850 of SEQ ID NO: 915231
uccagcugagcacaauaau

SEQ ID NO: 1064171 - RNA, 19 nt, Artificial Sequence
  Description of Artificial Sequence: Synthetic oligonucleotide
  Antisense strand to SEQ ID NO: 1064170
auuauugugcucagcugga

SEQ ID NO: 1064172 - RNA, 19 nt, Artificial Sequence
  Description of Artificial Sequence: Synthetic oligonucleotide
  Sense strand starting at position 2112 of SEQ ID NO: 915231
uucugagaauauguugauc

SEQ ID NO: 1064173 - RNA, 19 nt, Artificial Sequence
  Description of Artificial Sequence: Synthetic oligonucleotide
  Antisense strand to SEQ ID NO: 1064172
gaucaacauauucucagaa

SEQ ID NO: 1064174 - RNA, 19 nt, Artificial Sequence
  Description of Artificial Sequence: Synthetic oligonucleotide
  Sense strand starting at position 2117 of SEQ ID NO: 915231
agaauauguugaucuauag

SEQ ID NO: 1064175 - RNA, 19 nt, Artificial Sequence
  Description of Artificial Sequence: Synthetic oligonucleotide
  Antisense strand to SEQ ID NO: 1064174
cuauagaucaacauauucu

SEQ ID NO: 1064176 - RNA, 19 nt, Artificial Sequence
  Description of Artificial Sequence: Synthetic oligonucleotide
  Sense strand starting at position 2121 of SEQ ID NO: 915231
uauguugaucuauaguuug

SEQ ID NO: 1064177 - RNA, 19 nt, Artificial Sequence
  Description of Artificial Sequence: Synthetic oligonucleotide
  Antisense strand to SEQ ID NO: 1064176
caaacuauagaucaacaua

SEQ ID NO: 1064178 - RNA, 19 nt, Artificial Sequence
  Description of Artificial Sequence: Synthetic oligonucleotide
  Sense strand starting at position 2184 of SEQ ID NO: 915231
gcagcauggcaauauugaa

SEQ ID NO: 1064179 - RNA, 19 nt, Artificial Sequence
  Description of Artificial Sequence: Synthetic oligonucleotide
  Antisense strand to SEQ ID NO: 1064178
uucaauauugccaugcugc

SEQ ID NO: 1064180 - RNA, 19 nt, Artificial Sequence
  Description of Artificial Sequence: Synthetic oligonucleotide
  Sense strand starting at position 2308 of SEQ ID NO: 915231
gggaguuuaagugacucuu

SEQ ID NO: 1064181 - RNA, 19 nt, Artificial Sequence
  Description of Artificial Sequence: Synthetic oligonucleotide
  Antisense strand to SEQ ID NO: 1064180
aagagucacuuaaacuccc

SEQ ID NO: 1064182 - RNA, 19 nt, Artificial Sequence
  Description of Artificial Sequence: Synthetic oligonucleotide
  Sense strand starting at position 2314 of SEQ ID NO: 915231
uuaagugacucuucuauga

SEQ ID NO: 1064183 - RNA, 19 nt, Artificial Sequence
  Description of Artificial Sequence: Synthetic oligonucleotide
  Antisense strand to SEQ ID NO: 1064182
ucauagaagagucacuuaa

SEQ ID NO: 1064184 - RNA, 19 nt, Artificial Sequence
  Description of Artificial Sequence: Synthetic oligonucleotide
  Sense strand starting at position 2318 of SEQ ID NO: 915231
gugacucuucuaugaucag

SEQ ID NO: 1064185 - RNA, 19 nt, Artificial Sequence
  Description of Artificial Sequence: Synthetic oligonucleotide
  Antisense strand to SEQ ID NO: 1064184
cugaucauagaagagucac

SEQ ID NO: 1064186 - RNA, 19 nt, Artificial Sequence
  Description of Artificial Sequence: Synthetic oligonucleotide
  Sense strand starting at position 2321 of SEQ ID NO: 915231
acucuucuaugaucaggua

SEQ ID NO: 1064187 - RNA, 19 nt, Artificial Sequence
  Description of Artificial Sequence: Synthetic oligonucleotide
  Antisense strand to SEQ ID NO: 1064186
uaccugaucauagaagagu

SEQ ID NO: 1064188 - RNA, 19 nt, Artificial Sequence
  Description of Artificial Sequence: Synthetic oligonucleotide
  Sense strand starting at position 2965 of SEQ ID NO: 915231
acaauuagauaucuugggu

SEQ ID NO: 1064189 - RNA, 19 nt, Artificial Sequence
  Description of Artificial Sequence: Synthetic oligonucleotide
  Antisense strand to SEQ ID NO: 1064188
acccaagauaucuaauugu

SEQ ID NO: 1064190 - RNA, 19 nt, Artificial Sequence
  Description of Artificial Sequence: Synthetic oligonucleotide
  Sense strand starting at position 2968 of SEQ ID NO: 915231
auuagauaucuuggguucu

SEQ ID NO: 1064191 - RNA, 19 nt, Artificial Sequence
  Description of Artificial Sequence: Synthetic oligonucleotide
  Antisense strand to SEQ ID NO: 1064190
agaacccaagauaucuaau

SEQ ID NO: 1064192 - RNA, 19 nt, Artificial Sequence
  Description of Artificial Sequence: Synthetic oligonucleotide
  Sense strand starting at position 2970 of SEQ ID NO: 915231
uagauaucuuggguucuuu

SEQ ID NO: 1064193 - RNA, 19 nt, Artificial Sequence
  Description of Artificial Sequence: Synthetic oligonucleotide
  Antisense strand to SEQ ID NO: 1064192
aaagaacccaagauaucua

SEQ ID NO: 1064194 - RNA, 19 nt, Artificial Sequence
  Description of Artificial Sequence: Synthetic oligonucleotide
  Sense strand starting at position 3119 of SEQ ID NO: 915231
gaaugaaguguugagaguu

SEQ ID NO: 1064195 - RNA, 19 nt, Artificial Sequence
  Description of Artificial Sequence: Synthetic oligonucleotide
  Antisense strand to SEQ ID NO: 1064194
aacucucaacacuucauuc

SEQ ID NO: 1064196 - RNA, 19 nt, Artificial Sequence
  Description of Artificial Sequence: Synthetic oligonucleotide
  Sense strand starting at position 3169 of SEQ ID NO: 915231
ucagaccaacaguguuaaa

SEQ ID NO: 1064197 - RNA, 19 nt, Artificial Sequence
  Description of Artificial Sequence: Synthetic oligonucleotide
  Antisense strand to SEQ ID NO: 1064196
uuuaacacuguuggucuga

SEQ ID NO: 1064198 - RNA, 19 nt, Artificial Sequence
  Description of Artificial Sequence: Synthetic oligonucleotide
  Sense strand starting at position 3238 of SEQ ID NO: 915231
auaguauugaacugaggca

SEQ ID NO: 1064199 - RNA, 19 nt, Artificial Sequence
  Description of Artificial Sequence: Synthetic oligonucleotide
  Antisense strand to SEQ ID NO: 1064198
ugccucaguucaauacuau

SEQ ID NO: 1064200 - RNA, 19 nt, Artificial Sequence
  Description of Artificial Sequence: Synthetic oligonucleotide
  Sense strand starting at position 3254 of SEQ ID NO: 915231
gcaagaaauccagguuuga

SEQ ID NO: 1064201 - RNA, 19 nt, Artificial Sequence
  Description of Artificial Sequence: Synthetic oligonucleotide
  Antisense strand to SEQ ID NO: 1064200
ucaaaccuggauuucuugc

SEQ ID NO: 1064202 - RNA, 19 nt, Artificial Sequence
  Description of Artificial Sequence: Synthetic oligonucleotide
  Sense strand starting at position 3274 of SEQ ID NO: 915231
ggauauuucuguucuguuu

SEQ ID NO: 1064203 - RNA, 19 nt, Artificial Sequence
  Description of Artificial Sequence: Synthetic oligonucleotide
  Antisense strand to SEQ ID NO: 1064202
aaacagaacagaaauaucc

SEQ ID NO: 1064204 - RNA, 19 nt, Artificial Sequence
  Description of Artificial Sequence: Synthetic oligonucleotide
  Sense strand starting at position 3309 of SEQ ID NO: 915231
gaauaagucugggauuuaa

SEQ ID NO: 1064205 - RNA, 19 nt, Artificial Sequence
  Description of Artificial Sequence: Synthetic oligonucleotide
  Antisense strand to SEQ ID NO: 1064204
uuaaaucccagacuuauuc

SEQ ID NO: 1064206 - RNA, 19 nt, Artificial Sequence
  Description of Artificial Sequence: Synthetic oligonucleotide
  Sense strand starting at position 3484 of SEQ ID NO: 915231
uccaaagcuuugguuaaau

SEQ ID NO: 1064207 - RNA, 19 nt, Artificial Sequence
  Description of Artificial Sequence: Synthetic oligonucleotide
  Antisense strand to SEQ ID NO: 1064206
auuuaaccaaagcuuugga

SEQ ID NO: 1064208 - RNA, 19 nt, Artificial Sequence
  Description of Artificial Sequence: Synthetic oligonucleotide
  Sense strand starting at position 3611 of SEQ ID NO: 915231
ugaauaacugcuuaucagu

SEQ ID NO: 1064209 - RNA, 19 nt, Artificial Sequence
  Description of Artificial Sequence: Synthetic oligonucleotide
  Antisense strand to SEQ ID NO: 1064208
acugauaagcaguuauuca

SEQ ID NO: 1064210 - RNA, 19 nt, Artificial Sequence
  Description of Artificial Sequence: Synthetic oligonucleotide
  Sense strand starting at position 3630 of SEQ ID NO: 915231
ucuggagagccucaucagu

SEQ ID NO: 1064211 - RNA, 19 nt, Artificial Sequence
  Description of Artificial Sequence: Synthetic oligonucleotide
  Antisense strand to SEQ ID NO: 1064210
acugaugaggcucuccaga

SEQ ID NO: 1064212 - RNA, 19 nt, Artificial Sequence
  Description of Artificial Sequence: Synthetic oligonucleotide
  Sense strand starting at position 3765 of SEQ ID NO: 915231
augucacacaguuagaagu

SEQ ID NO: 1064213 - RNA, 19 nt, Artificial Sequence
  Description of Artificial Sequence: Synthetic oligonucleotide
  Antisense strand to SEQ ID NO: 1064212
acuucuaacugugugacau

SEQ ID NO: 1064214 - RNA, 19 nt, Artificial Sequence
  Description of Artificial Sequence: Synthetic oligonucleotide
  Sense strand starting at position 3788 of SEQ ID NO: 915231
uguacuauaguuggaaaug

SEQ ID NO: 1064215 - RNA, 19 nt, Artificial Sequence
  Description of Artificial Sequence: Synthetic oligonucleotide
  Antisense strand to SEQ ID NO: 1064214
cauuuccaacuauaguaca

SEQ ID NO: 1064216 - RNA, 19 nt, Artificial Sequence
  Description of Artificial Sequence: Synthetic oligonucleotide
  Sense strand starting at position 219 of SEQ ID NO: 915232
gugacaauccuacauguga

SEQ ID NO: 1064217 - RNA, 19 nt, Artificial Sequence
  Description of Artificial Sequence: Synthetic oligonucleotide
  Antisense strand to SEQ ID NO: 1064216
ucacauguaggauugucac

SEQ ID NO: 1064218 - RNA, 19 nt, Artificial Sequence
  Description of Artificial Sequence: Synthetic oligonucleotide
  Sense strand starting at position 278 of SEQ ID NO: 915232
aggaaaguguuucuagaua

SEQ ID NO: 1064219 - RNA, 19 nt, Artificial Sequence
  Description of Artificial Sequence: Synthetic oligonucleotide
  Antisense strand to SEQ ID NO: 1064218
uaucuagaaacacuuuccu

SEQ ID NO: 1064220 - RNA, 19 nt, Artificial Sequence
  Description of Artificial Sequence: Synthetic oligonucleotide
  Sense strand starting at position 291 of SEQ ID NO: 915232
uagauauauuggcucugag

SEQ ID NO: 1064221 - RNA, 19 nt, Artificial Sequence
  Description of Artificial Sequence: Synthetic oligonucleotide
  Antisense strand to SEQ ID NO: 1064220
cucagagccaauauaucua

SEQ ID NO: 1064222 - RNA, 19 nt, Artificial Sequence
  Description of Artificial Sequence: Synthetic oligonucleotide
  Sense strand starting at position 327 of SEQ ID NO: 915232
agguacauggucuacuuau

SEQ ID NO: 1064223 - RNA, 19 nt, Artificial Sequence
  Description of Artificial Sequence: Synthetic oligonucleotide
  Antisense strand to SEQ ID NO: 1064222
auaaguagaccauguaccu

SEQ ID NO: 1064224 - RNA, 19 nt, Artificial Sequence
  Description of Artificial Sequence: Synthetic oligonucleotide
  Sense strand starting at position 394 of SEQ ID NO: 915232
uuuacaagauguucucaag

SEQ ID NO: 1064225 - RNA, 19 nt, Artificial Sequence
  Description of Artificial Sequence: Synthetic oligonucleotide
  Antisense strand to SEQ ID NO: 1064224
cuugagaacaucuuguaaa

SEQ ID NO: 1064226 - RNA, 19 nt, Artificial Sequence
  Description of Artificial Sequence: Synthetic oligonucleotide
  Sense strand starting at position 414 of SEQ ID NO: 915232
uuugguauuaucugaggau

SEQ ID NO: 1064227 - RNA, 19 nt, Artificial Sequence
  Description of Artificial Sequence: Synthetic oligonucleotide
  Antisense strand to SEQ ID NO: 1064226
auccucagauaauaccaaa

SEQ ID NO: 1064228 - RNA, 19 nt, Artificial Sequence
  Description of Artificial Sequence: Synthetic oligonucleotide
  Sense strand starting at position 568 of SEQ ID NO: 915232
ugcuucucucaugauaaag

SEQ ID NO: 1064229 - RNA, 19 nt, Artificial Sequence
  Description of Artificial Sequence: Synthetic oligonucleotide
  Antisense strand to SEQ ID NO: 1064228
cuuuaucaugagagaagca

SEQ ID NO: 1064230 - RNA, 19 nt, Artificial Sequence
  Description of Artificial Sequence: Synthetic oligonucleotide
  Sense strand starting at position 771 of SEQ ID NO: 915232
aguugacaaguccagaguu

SEQ ID NO: 1064231 - RNA, 19 nt, Artificial Sequence
  Description of Artificial Sequence: Synthetic oligonucleotide
  Antisense strand to SEQ ID NO: 1064230
aacucuggacuugucaacu

SEQ ID NO: 1064232 - RNA, 19 nt, Artificial Sequence
  Description of Artificial Sequence: Synthetic oligonucleotide
  Sense strand starting at position 773 of SEQ ID NO: 915232
uugacaaguccagaguucu

SEQ ID NO: 1064233 - RNA, 19 nt, Artificial Sequence
  Description of Artificial Sequence: Synthetic oligonucleotide
  Antisense strand to SEQ ID NO: 1064232
agaacucuggacuugucaa

SEQ ID NO: 1064234 - RNA, 19 nt, Artificial Sequence
  Description of Artificial Sequence: Synthetic oligonucleotide
  Sense strand starting at position 816 of SEQ ID NO: 915232
gggacuuccuuguugaaga

SEQ ID NO: 1064235 - RNA, 19 nt, Artificial Sequence
  Description of Artificial Sequence: Synthetic oligonucleotide
  Antisense strand to SEQ ID NO: 1064234
ucuucaacaaggaaguccc

SEQ ID NO: 1064236 - RNA, 19 nt, Artificial Sequence
  Description of Artificial Sequence: Synthetic oligonucleotide
  Sense strand starting at position 882 of SEQ ID NO: 915232
acaaguucucaugggagac

SEQ ID NO: 1064237 - RNA, 19 nt, Artificial Sequence
  Description of Artificial Sequence: Synthetic oligonucleotide
  Antisense strand to SEQ ID NO: 1064236
gucucccaugagaacuugu

SEQ ID NO: 1064238 - RNA, 19 nt, Artificial Sequence
  Description of Artificial Sequence: Synthetic oligonucleotide
  Sense strand starting at position 1219 of SEQ ID NO: 915232
gugggucuuagguacauga

SEQ ID NO: 1064239 - RNA, 19 nt, Artificial Sequence
  Description of Artificial Sequence: Synthetic oligonucleotide
  Antisense strand to SEQ ID NO: 1064238
ucauguaccuaagacccac

SEQ ID NO: 1064240 - RNA, 19 nt, Artificial Sequence
  Description of Artificial Sequence: Synthetic oligonucleotide
  Sense strand starting at position 1336 of SEQ ID NO: 915232
gcggacagaauguagauau

SEQ ID NO: 1064241 - RNA, 19 nt, Artificial Sequence
  Description of Artificial Sequence: Synthetic oligonucleotide
  Antisense strand to SEQ ID NO: 1064240
auaucuacauucuguccgc

SEQ ID NO: 1064242 - RNA, 19 nt, Artificial Sequence
  Description of Artificial Sequence: Synthetic oligonucleotide
  Sense strand starting at position 1719 of SEQ ID NO: 915232
gcaggacaugcagauuacu

SEQ ID NO: 1064243 - RNA, 19 nt, Artificial Sequence
  Description of Artificial Sequence: Synthetic oligonucleotide
  Antisense strand to SEQ ID NO: 1064242
aguaaucugcauguccugc

SEQ ID NO: 1064244 - RNA, 19 nt, Artificial Sequence
  Description of Artificial Sequence: Synthetic oligonucleotide
  Sense strand starting at position 1788 of SEQ ID NO: 915232
guaccagauuucuaagaaa

SEQ ID NO: 1064245 - RNA, 19 nt, Artificial Sequence
  Description of Artificial Sequence: Synthetic oligonucleotide
  Antisense strand to SEQ ID NO: 1064244
uuucuuagaaaucugguac

SEQ ID NO: 1064246 - RNA, 19 nt, Artificial Sequence
  Description of Artificial Sequence: Synthetic oligonucleotide
  Sense strand starting at position 1791 of SEQ ID NO: 915232
ccagauuucuaagaaagac

SEQ ID NO: 1064247 - RNA, 19 nt, Artificial Sequence
  Description of Artificial Sequence: Synthetic oligonucleotide
  Antisense strand to SEQ ID NO: 1064246
gucuuucuuagaaaucugg

SEQ ID NO: 1064248 - RNA, 19 nt, Artificial Sequence
  Description of Artificial Sequence: Synthetic oligonucleotide
  Sense strand starting at position 1891 of SEQ ID NO: 915232
aggguuaauauguagguga

SEQ ID NO: 1064249 - RNA, 19 nt, Artificial Sequence
  Description of Artificial Sequence: Synthetic oligonucleotide
  Antisense strand to SEQ ID NO: 1064248
ucaccuacauauuaacccu

SEQ ID NO: 1064250 - RNA, 19 nt, Artificial Sequence
  Description of Artificial Sequence: Synthetic oligonucleotide
  Sense strand starting at position 1894 of SEQ ID NO: 915232
guuaauauguaggugagaa

SEQ ID NO: 1064251 - RNA, 19 nt, Artificial Sequence
  Description of Artificial Sequence: Synthetic oligonucleotide
  Antisense strand to SEQ ID NO: 1064250
uucucaccuacauauuaac

SEQ ID NO: 1064252 - RNA, 19 nt, Artificial Sequence
  Description of Artificial Sequence: Synthetic oligonucleotide
  Sense strand starting at position 1895 of SEQ ID NO: 915232
uuaauauguaggugagaaa

SEQ ID NO: 1064253 - RNA, 19 nt, Artificial Sequence
  Description of Artificial Sequence: Synthetic oligonucleotide
  Antisense strand to SEQ ID NO: 1064252
uuucucaccuacauauuaa

SEQ ID NO: 1064254 - RNA, 19 nt, Artificial Sequence
  Description of Artificial Sequence: Synthetic oligonucleotide
  Sense strand starting at position 1967 of SEQ ID NO: 915232
ggaugaauucugugauuac

SEQ ID NO: 1064255 - RNA, 19 nt, Artificial Sequence
  Description of Artificial Sequence: Synthetic oligonucleotide
  Antisense strand to SEQ ID NO: 1064254
guaaucacagaauucaucc

SEQ ID NO: 1064256 - RNA, 19 nt, Artificial Sequence
  Description of Artificial Sequence: Synthetic oligonucleotide
  Sense strand starting at position 2001 of SEQ ID NO: 915232
gucccuugauacccuagaa

SEQ ID NO: 1064257 - RNA, 19 nt, Artificial Sequence
  Description of Artificial Sequence: Synthetic oligonucleotide
  Antisense strand to SEQ ID NO: 1064256
uucuaggguaucaagggac

SEQ ID NO: 1064258 - RNA, 19 nt, Artificial Sequence
  Description of Artificial Sequence: Synthetic oligonucleotide
  Sense strand starting at position 2041 of SEQ ID NO: 915232
agaaucuuagagcacaguu

SEQ ID NO: 1064259 - RNA, 19 nt, Artificial Sequence
  Description of Artificial Sequence: Synthetic oligonucleotide
  Antisense strand to SEQ ID NO: 1064258
aacugugcucuaagauucu

SEQ ID NO: 1064260 - RNA, 19 nt, Artificial Sequence
  Description of Artificial Sequence: Synthetic oligonucleotide
  Sense strand starting at position 2048 of SEQ ID NO: 915232
uagagcacaguugauuaua

SEQ ID NO: 1064261 - RNA, 19 nt, Artificial Sequence
  Description of Artificial Sequence: Synthetic oligonucleotide
  Antisense strand to SEQ ID NO: 1064260
uauaaucaacugugcucua

SEQ ID NO: 1064262 - RNA, 19 nt, Artificial Sequence
  Description of Artificial Sequence: Synthetic oligonucleotide
  Sense strand starting at position 2058 of SEQ ID NO: 915232
uugauuauaguugggacaa

SEQ ID NO: 1064263 - RNA, 19 nt, Artificial Sequence
  Description of Artificial Sequence: Synthetic oligonucleotide
  Antisense strand to SEQ ID NO: 1064262
uugucccaacuauaaucaa

SEQ ID NO: 1064264 - RNA, 19 nt, Artificial Sequence
  Description of Artificial Sequence: Synthetic oligonucleotide
  Sense strand starting at position 2084 of SEQ ID NO: 915232
ggaggauucugacuaugua

SEQ ID NO: 1064265 - RNA, 19 nt, Artificial Sequence
  Description of Artificial Sequence: Synthetic oligonucleotide
  Antisense strand to SEQ ID NO: 1064264
uacauagucagaauccucc

SEQ ID NO: 1064266 - RNA, 19 nt, Artificial Sequence
  Description of Artificial Sequence: Synthetic oligonucleotide
  Sense strand starting at position 2180 of SEQ ID NO: 915232
ugaugauuuggcugguucu

SEQ ID NO: 1064267 - RNA, 19 nt, Artificial Sequence
  Description of Artificial Sequence: Synthetic oligonucleotide
  Antisense strand to SEQ ID NO: 1064266
agaaccagccaaaucauca

SEQ ID NO: 1064268 - RNA, 19 nt, Artificial Sequence
  Description of Artificial Sequence: Synthetic oligonucleotide
  Sense strand starting at position 2181 of SEQ ID NO: 915232
gaugauuuggcugguucuu

SEQ ID NO: 1064269 - RNA, 19 nt, Artificial Sequence
  Description of Artificial Sequence: Synthetic oligonucleotide
  Antisense strand to SEQ ID NO: 1064268
aagaaccagccaaaucauc

SEQ ID NO: 1064270 - RNA, 19 nt, Artificial Sequence
  Description of Artificial Sequence: Synthetic oligonucleotide
  Sense strand starting at position 2218 of SEQ ID NO: 915232
ucuaauggacuuugaaugu

SEQ ID NO: 1064271 - RNA, 19 nt, Artificial Sequence
  Description of Artificial Sequence: Synthetic oligonucleotide
  Antisense strand to SEQ ID NO: 1064270
acauucaaaguccauuaga

SEQ ID NO: 1064272 - RNA, 19 nt, Artificial Sequence
  Description of Artificial Sequence: Synthetic oligonucleotide
  Sense strand starting at position 2222 of SEQ ID NO: 915232
auggacuuugaauguauua

SEQ ID NO: 1064273 - RNA, 19 nt, Artificial Sequence
  Description of Artificial Sequence: Synthetic oligonucleotide
  Antisense strand to SEQ ID NO: 1064272
uaauacauucaaaguccau

SEQ ID NO: 1064274 - RNA, 19 nt, Artificial Sequence
  Description of Artificial Sequence: Synthetic oligonucleotide
  Sense strand starting at position 2375 of SEQ ID NO: 915232
guaaacguggcugugaguu

SEQ ID NO: 1064275 - RNA, 19 nt, Artificial Sequence
  Description of Artificial Sequence: Synthetic oligonucleotide
  Antisense strand to SEQ ID NO: 1064274
aacucacagccacguuuac

SEQ ID NO: 1064276 - RNA, 19 nt, Artificial Sequence
  Description of Artificial Sequence: Synthetic oligonucleotide
  Sense strand starting at position 3002 of SEQ ID NO: 915232
uuuccuuugaaauggguga

SEQ ID NO: 1064277 - RNA, 19 nt, Artificial Sequence
  Description of Artificial Sequence: Synthetic oligonucleotide
  Antisense strand to SEQ ID NO: 1064276
ucacccauuucaaaggaaa

SEQ ID NO: 1064278 - RNA, 19 nt, Artificial Sequence
  Description of Artificial Sequence: Synthetic oligonucleotide
  Sense strand starting at position 3004 of SEQ ID NO: 915232
uccuuugaaaugggugaga

SEQ ID NO: 1064279 - RNA, 19 nt, Artificial Sequence
  Description of Artificial Sequence: Synthetic oligonucleotide
  Antisense strand to SEQ ID NO: 1064278
ucucacccauuucaaagga

SEQ ID NO: 1064280 - RNA, 19 nt, Artificial Sequence
  Description of Artificial Sequence: Synthetic oligonucleotide
  Sense strand starting at position 3062 of SEQ ID NO: 915232
auaagaagcuuagcaugaa

SEQ ID NO: 1064281 - RNA, 19 nt, Artificial Sequence
  Description of Artificial Sequence: Synthetic oligonucleotide
  Antisense strand to SEQ ID NO: 1064280
uucaugcuaagcuucuuau

SEQ ID NO: 1064282 - RNA, 19 nt, Artificial Sequence
  Description of Artificial Sequence: Synthetic oligonucleotide
  Sense strand starting at position 3065 of SEQ ID NO: 915232
agaagcuuagcaugaaaga

SEQ ID NO: 1064283 - RNA, 19 nt, Artificial Sequence
  Description of Artificial Sequence: Synthetic oligonucleotide
  Antisense strand to SEQ ID NO: 1064282
ucuuucaugcuaagcuucu

SEQ ID NO: 1064284 - RNA, 19 nt, Artificial Sequence
  Description of Artificial Sequence: Synthetic oligonucleotide
  Sense strand starting at position 3128 of SEQ ID NO: 915232
gugagauaacuguaauucu

SEQ ID NO: 1064285 - RNA, 19 nt, Artificial Sequence
  Description of Artificial Sequence: Synthetic oligonucleotide
  Antisense strand to SEQ ID NO: 1064284
agaauuacaguuaucucac

SEQ ID NO: 1064286 - RNA, 19 nt, Artificial Sequence
  Description of Artificial Sequence: Synthetic oligonucleotide
  Sense strand starting at position 3212 of SEQ ID NO: 915232
agauucuuugucuacaaug

SEQ ID NO: 1064287 - RNA, 19 nt, Artificial Sequence
  Description of Artificial Sequence: Synthetic oligonucleotide
  Antisense strand to SEQ ID NO: 1064286
cauuguagacaaagaaucu

SEQ ID NO: 1064288 - RNA, 19 nt, Artificial Sequence
  Description of Artificial Sequence: Synthetic oligonucleotide
  Sense strand starting at position 3287 of SEQ ID NO: 915232
ugcacuaauggccaauaua

SEQ ID NO: 1064289 - RNA, 19 nt, Artificial Sequence
  Description of Artificial Sequence: Synthetic oligonucleotide
  Antisense strand to SEQ ID NO: 1064288
uauauuggccauuagugca

SEQ ID NO: 1064290 - RNA, 19 nt, Artificial Sequence
  Description of Artificial Sequence: Synthetic oligonucleotide
  Sense strand starting at position 3317 of SEQ ID NO: 915232
acgugaucucuuuauauag

SEQ ID NO: 1064291 - RNA, 19 nt, Artificial Sequence
  Description of Artificial Sequence: Synthetic oligonucleotide
  Antisense strand to SEQ ID NO: 1064290
cuauauaaagagaucacgu

SEQ ID NO: 1064292 - RNA, 19 nt, Artificial Sequence
  Description of Artificial Sequence: Synthetic oligonucleotide
  Sense strand starting at position 3909 of SEQ ID NO: 915232
guuagaacaguuuacacga

SEQ ID NO: 1064293 - RNA, 19 nt, Artificial Sequence
  Description of Artificial Sequence: Synthetic oligonucleotide
  Antisense strand to SEQ ID NO: 1064292
ucguguaaacuguucuaac

SEQ ID NO: 1064294 - RNA, 19 nt, Artificial Sequence
  Description of Artificial Sequence: Synthetic oligonucleotide
  Sense strand starting at position 3916 of SEQ ID NO: 915232
caguuuacacgagagauuc

SEQ ID NO: 1064295 - RNA, 19 nt, Artificial Sequence
  Description of Artificial Sequence: Synthetic oligonucleotide
  Antisense strand to SEQ ID NO: 1064294
gaaucucucguguaaacug

SEQ ID NO: 1064296 - RNA, 19 nt, Artificial Sequence
  Description of Artificial Sequence: Synthetic oligonucleotide
  Sense strand starting at position 40 of SEQ ID NO: 915233
cuccaaguuccauaucugu

SEQ ID NO: 1064297 - RNA, 19 nt, Artificial Sequence
  Description of Artificial Sequence: Synthetic oligonucleotide
  Antisense strand to SEQ ID NO: 1064296
acagauauggaacuuggag

SEQ ID NO: 1064298 - RNA, 19 nt, Artificial Sequence
  Description of Artificial Sequence: Synthetic oligonucleotide
  Sense strand starting at position 45 of SEQ ID NO: 915233
aguuccauaucugugaaau

SEQ ID NO: 1064299 - RNA, 19 nt, Artificial Sequence
  Description of Artificial Sequence: Synthetic oligonucleotide
  Antisense strand to SEQ ID NO: 1064298
auuucacagauauggaacu

SEQ ID NO: 1064300 - RNA, 19 nt, Artificial Sequence
  Description of Artificial Sequence: Synthetic oligonucleotide
  Sense strand starting at position 46 of SEQ ID NO: 915233
guuccauaucugugaaaug

SEQ ID NO: 1064301 - RNA, 19 nt, Artificial Sequence
  Description of Artificial Sequence: Synthetic oligonucleotide
  Antisense strand to SEQ ID NO: 1064300
cauuucacagauauggaac

SEQ ID NO: 1064302 - RNA, 19 nt, Artificial Sequence
  Description of Artificial Sequence: Synthetic oligonucleotide
  Sense strand starting at position 2036 of SEQ ID NO: 915233
uuuggugcuagugaaacau

SEQ ID NO: 1064303 - RNA, 19 nt, Artificial Sequence
  Description of Artificial Sequence: Synthetic oligonucleotide
  Antisense strand to SEQ ID NO: 1064302
auguuucacuagcaccaaa

SEQ ID NO: 1064304 - RNA, 19 nt, Artificial Sequence
  Description of Artificial Sequence: Synthetic oligonucleotide
  Sense strand starting at position 2175 of SEQ ID NO: 915233
ggccaaggucuggaucuuu

SEQ ID NO: 1064305 - RNA, 19 nt, Artificial Sequence
  Description of Artificial Sequence: Synthetic oligonucleotide
  Antisense strand to SEQ ID NO: 1064304
aaagauccagaccuuggcc

SEQ ID NO: 1064306 - RNA, 19 nt, Artificial Sequence
  Description of Artificial Sequence: Synthetic oligonucleotide
  Sense strand starting at position 2263 of SEQ ID NO: 915233
cugacauuaccuggaguuu

SEQ ID NO: 1064307 - RNA, 19 nt, Artificial Sequence
  Description of Artificial Sequence: Synthetic oligonucleotide
  Antisense strand to SEQ ID NO: 1064306
aaacuccagguaaugucag

SEQ ID NO: 1064308 - RNA, 19 nt, Artificial Sequence
  Description of Artificial Sequence: Synthetic oligonucleotide
  Sense strand starting at position 2362 of SEQ ID NO: 915233
uuaacaaucuuucugguga

SEQ ID NO: 1064309 - RNA, 19 nt, Artificial Sequence
  Description of Artificial Sequence: Synthetic oligonucleotide
  Antisense strand to SEQ ID NO: 1064308
ucaccagaaagauuguuaa

SEQ ID NO: 1064310 - RNA, 19 nt, Artificial Sequence
  Description of Artificial Sequence: Synthetic oligonucleotide
  Sense strand starting at position 2379 of SEQ ID NO: 915233
gaugguguugcauaguaaa

SEQ ID NO: 1064311 - RNA, 19 nt, Artificial Sequence
  Description of Artificial Sequence: Synthetic oligonucleotide
  Antisense strand to SEQ ID NO: 1064310
uuuacuaugcaacaccauc

SEQ ID NO: 1064312 - RNA, 19 nt, Artificial Sequence
  Description of Artificial Sequence: Synthetic oligonucleotide
  Sense strand starting at position 2389 of SEQ ID NO: 915233
cauaguaaaguuugagaau

SEQ ID NO: 1064313 - RNA, 19 nt, Artificial Sequence
  Description of Artificial Sequence: Synthetic oligonucleotide
  Antisense strand to SEQ ID NO: 1064312
auucucaaacuuuacuaug

SEQ ID NO: 1064314 - RNA, 19 nt, Artificial Sequence
  Description of Artificial Sequence: Synthetic oligonucleotide
  Sense strand starting at position 2398 of SEQ ID NO: 915233
guuugagaaucucuacauu

SEQ ID NO: 1064315 - RNA, 19 nt, Artificial Sequence
  Description of Artificial Sequence: Synthetic oligonucleotide
  Antisense strand to SEQ ID NO: 1064314
aauguagagauucucaaac

SEQ ID NO: 1064316 - RNA, 19 nt, Artificial Sequence
  Description of Artificial Sequence: Synthetic oligonucleotide
  Sense strand starting at position 2408 of SEQ ID NO: 915233
cucuacauuguagauaagu

SEQ ID NO: 1064317 - RNA, 19 nt, Artificial Sequence
  Description of Artificial Sequence: Synthetic oligonucleotide
  Antisense strand to SEQ ID NO: 1064316
acuuaucuacaauguagag

SEQ ID NO: 1064318 - RNA, 19 nt, Artificial Sequence
  Description of Artificial Sequence: Synthetic oligonucleotide
  Sense strand starting at position 2413 of SEQ ID NO: 915233
cauuguagauaaguaguau

SEQ ID NO: 1064319 - RNA, 19 nt, Artificial Sequence
  Description of Artificial Sequence: Synthetic oligonucleotide
  Antisense strand to SEQ ID NO: 1064318
auacuacuuaucuacaaug

SEQ ID NO: 1064320 - RNA, 19 nt, Artificial Sequence
  Description of Artificial Sequence: Synthetic oligonucleotide
  Sense strand starting at position 2537 of SEQ ID NO: 915233
ucugaaauuuacgcagugu

SEQ ID NO: 1064321 - RNA, 19 nt, Artificial Sequence
  Description of Artificial Sequence: Synthetic oligonucleotide
  Antisense strand to SEQ ID NO: 1064320
acacugcguaaauuucaga

SEQ ID NO: 1064322 - RNA, 19 nt, Artificial Sequence
  Description of Artificial Sequence: Synthetic oligonucleotide
  Sense strand starting at position 2602 of SEQ ID NO: 915233
auuucuaugucugaaagau

SEQ ID NO: 1064323 - RNA, 19 nt, Artificial Sequence
  Description of Artificial Sequence: Synthetic oligonucleotide
  Antisense strand to SEQ ID NO: 1064322
aucuuucagacauagaaau

SEQ ID NO: 1064324 - RNA, 19 nt, Artificial Sequence
  Description of Artificial Sequence: Synthetic oligonucleotide
  Sense strand starting at position 2638 of SEQ ID NO: 915233
uuccaaaggugguuguaaa

SEQ ID NO: 1064325 - RNA, 19 nt, Artificial Sequence
  Description of Artificial Sequence: Synthetic oligonucleotide
  Antisense strand to SEQ ID NO: 1064324
uuuacaaccaccuuuggaa

SEQ ID NO: 1064326 - RNA, 19 nt, Artificial Sequence
  Description of Artificial Sequence: Synthetic oligonucleotide
  Sense strand starting at position 2718 of SEQ ID NO: 915233
ugugaauugucauuaagag

SEQ ID NO: 1064327 - RNA, 19 nt, Artificial Sequence
  Description of Artificial Sequence: Synthetic oligonucleotide
  Antisense strand to SEQ ID NO: 1064326
cucuuaaugacaauucaca

SEQ ID NO: 1064328 - RNA, 19 nt, Artificial Sequence
  Description of Artificial Sequence: Synthetic oligonucleotide
  Sense strand starting at position 2719 of SEQ ID NO: 915233
gugaauugucauuaagagu

SEQ ID NO: 1064329 - RNA, 19 nt, Artificial Sequence
  Description of Artificial Sequence: Synthetic oligonucleotide
  Antisense strand to SEQ ID NO: 1064328
acucuuaaugacaauucac

SEQ ID NO: 1064330 - RNA, 19 nt, Artificial Sequence
  Description of Artificial Sequence: Synthetic oligonucleotide
  Sense strand starting at position 2727 of SEQ ID NO: 915233
ucauuaagagucuggaauu

SEQ ID NO: 1064331 - RNA, 19 nt, Artificial Sequence
  Description of Artificial Sequence: Synthetic oligonucleotide
  Antisense strand to SEQ ID NO: 1064330
aauuccagacucuuaauga

SEQ ID NO: 1064332 - RNA, 19 nt, Artificial Sequence
  Description of Artificial Sequence: Synthetic oligonucleotide
  Sense strand starting at position 2790 of SEQ ID NO: 915233
cucagcauuggcuauacau

SEQ ID NO: 1064333 - RNA, 19 nt, Artificial Sequence
  Description of Artificial Sequence: Synthetic oligonucleotide
  Antisense strand to SEQ ID NO: 1064332
auguauagccaaugcugag

SEQ ID NO: 1064334 - RNA, 19 nt, Artificial Sequence
  Description of Artificial Sequence: Synthetic oligonucleotide
  Sense strand starting at position 2835 of SEQ ID NO: 915233
gauugauaccuggguucua

SEQ ID NO: 1064335 - RNA, 19 nt, Artificial Sequence
  Description of Artificial Sequence: Synthetic oligonucleotide
  Antisense strand to SEQ ID NO: 1064334
uagaacccagguaucaauc

SEQ ID NO: 1064336 - RNA, 19 nt, Artificial Sequence
  Description of Artificial Sequence: Synthetic oligonucleotide
  Sense strand starting at position 2893 of SEQ ID NO: 915233
ugagcacuggcccauugaa

SEQ ID NO: 1064337 - RNA, 19 nt, Artificial Sequence
  Description of Artificial Sequence: Synthetic oligonucleotide
  Antisense strand to SEQ ID NO: 1064336
uucaaugggccagugcuca

SEQ ID NO: 1064338 - RNA, 19 nt, Artificial Sequence
  Description of Artificial Sequence: Synthetic oligonucleotide
  Sense strand starting at position 3017 of SEQ ID NO: 915233
acaggcauaucuccaggaa

SEQ ID NO: 1064339 - RNA, 19 nt, Artificial Sequence
  Description of Artificial Sequence: Synthetic oligonucleotide
  Antisense strand to SEQ ID NO: 1064338
uuccuggagauaugccugu

SEQ ID NO: 1064340 - RNA, 19 nt, Artificial Sequence
  Description of Artificial Sequence: Synthetic oligonucleotide
  Sense strand starting at position 3020 of SEQ ID NO: 915233
ggcauaucuccaggaagca

SEQ ID NO: 1064341 - RNA, 19 nt, Artificial Sequence
  Description of Artificial Sequence: Synthetic oligonucleotide
  Antisense strand to SEQ ID NO: 1064340
ugcuuccuggagauaugcc

SEQ ID NO: 1064342 - RNA, 19 nt, Artificial Sequence
  Description of Artificial Sequence: Synthetic oligonucleotide
  Sense strand starting at position 3038 of SEQ ID NO: 915233
augaauaaucauugcugga

SEQ ID NO: 1064343 - RNA, 19 nt, Artificial Sequence
  Description of Artificial Sequence: Synthetic oligonucleotide
  Antisense strand to SEQ ID NO: 1064342
uccagcaaugauuauucau

SEQ ID NO: 1064344 - RNA, 19 nt, Artificial Sequence
  Description of Artificial Sequence: Synthetic oligonucleotide
  Sense strand starting at position 3042 of SEQ ID NO: 915233
auaaucauugcuggauaca

SEQ ID NO: 1064345 - RNA, 19 nt, Artificial Sequence
  Description of Artificial Sequence: Synthetic oligonucleotide
  Antisense strand to SEQ ID NO: 1064344
uguauccagcaaugauuau

SEQ ID NO: 1064346 - RNA, 19 nt, Artificial Sequence
  Description of Artificial Sequence: Synthetic oligonucleotide
  Sense strand starting at position 3070 of SEQ ID NO: 915233
gacagucuuaucuguggga

SEQ ID NO: 1064347 - RNA, 19 nt, Artificial Sequence
  Description of Artificial Sequence: Synthetic oligonucleotide
  Antisense strand to SEQ ID NO: 1064346
ucccacagauaagacuguc

SEQ ID NO: 1064348 - RNA, 19 nt, Artificial Sequence
  Description of Artificial Sequence: Synthetic oligonucleotide
  Sense strand starting at position 3071 of SEQ ID NO: 915233
acagucuuaucugugggau

SEQ ID NO: 1064349 - RNA, 19 nt, Artificial Sequence
  Description of Artificial Sequence: Synthetic oligonucleotide
  Antisense strand to SEQ ID NO: 1064348
aucccacagauaagacugu

SEQ ID NO: 1064350 - RNA, 19 nt, Artificial Sequence
  Description of Artificial Sequence: Synthetic oligonucleotide
  Sense strand starting at position 3192 of SEQ ID NO: 915233
ggucgaucucauuaacuuc

SEQ ID NO: 1064351 - RNA, 19 nt, Artificial Sequence
  Description of Artificial Sequence: Synthetic oligonucleotide
  Antisense strand to SEQ ID NO: 1064350
gaaguuaaugagaucgacc

SEQ ID NO: 1064352 - RNA, 19 nt, Artificial Sequence
  Description of Artificial Sequence: Synthetic oligonucleotide
  Sense strand starting at position 3195 of SEQ ID NO: 915233
cgaucucauuaacuucuga

SEQ ID NO: 1064353 - RNA, 19 nt, Artificial Sequence
  Description of Artificial Sequence: Synthetic oligonucleotide
  Antisense strand to SEQ ID NO: 1064352
ucagaaguuaaugagaucg

SEQ ID NO: 1064354 - RNA, 19 nt, Artificial Sequence
  Description of Artificial Sequence: Synthetic oligonucleotide
  Sense strand starting at position 3229 of SEQ ID NO: 915233
ggagaaauguguuuaggga

SEQ ID NO: 1064355 - RNA, 19 nt, Artificial Sequence
  Description of Artificial Sequence: Synthetic oligonucleotide
  Antisense strand to SEQ ID NO: 1064354
ucccuaaacacauuucucc

SEQ ID NO: 1064356 - RNA, 19 nt, Artificial Sequence
  Description of Artificial Sequence: Synthetic oligonucleotide
  Sense strand starting at position 3314 of SEQ ID NO: 915233
guuuacuaauuauugguga

SEQ ID NO: 1064357 - RNA, 19 nt, Artificial Sequence
  Description of Artificial Sequence: Synthetic oligonucleotide
  Antisense strand to SEQ ID NO: 1064356
ucaccaauaauuaguaaac

SEQ ID NO: 1064358 - RNA, 19 nt, Artificial Sequence
  Description of Artificial Sequence: Synthetic oligonucleotide
  Sense strand starting at position 3321 of SEQ ID NO: 915233
aauuauuggugacuuggaa

SEQ ID NO: 1064359 - RNA, 19 nt, Artificial Sequence
  Description of Artificial Sequence: Synthetic oligonucleotide
  Antisense strand to SEQ ID NO: 1064358
uuccaagucaccaauaauu

SEQ ID NO: 1064360 - RNA, 19 nt, Artificial Sequence
  Description of Artificial Sequence: Synthetic oligonucleotide
  Sense strand starting at position 3356 of SEQ ID NO: 915233
cucuguccugaucaugagu

SEQ ID NO: 1064361 - RNA, 19 nt, Artificial Sequence
  Description of Artificial Sequence: Synthetic oligonucleotide
  Antisense strand to SEQ ID NO: 1064360
acucaugaucaggacagag

SEQ ID NO: 1064362 - RNA, 19 nt, Artificial Sequence
  Description of Artificial Sequence: Synthetic oligonucleotide
  Sense strand starting at position 3426 of SEQ ID NO: 915233
cuuagcaauguaugauuaa

SEQ ID NO: 1064363 - RNA, 19 nt, Artificial Sequence
  Description of Artificial Sequence: Synthetic oligonucleotide
  Antisense strand to SEQ ID NO: 1064362
uuaaucauacauugcuaag

SEQ ID NO: 1064364 - RNA, 19 nt, Artificial Sequence
  Description of Artificial Sequence: Synthetic oligonucleotide
  Sense strand starting at position 3448 of SEQ ID NO: 915233
agguuuaagcuugauaucu

SEQ ID NO: 1064365 - RNA, 19 nt, Artificial Sequence
  Description of Artificial Sequence: Synthetic oligonucleotide
  Antisense strand to SEQ ID NO: 1064364
agauaucaagcuuaaaccu

SEQ ID NO: 1064366 - RNA, 19 nt, Artificial Sequence
  Description of Artificial Sequence: Synthetic oligonucleotide
  Sense strand starting at position 3457 of SEQ ID NO: 915233
cuugauaucuuaguauaug

SEQ ID NO: 1064367 - RNA, 19 nt, Artificial Sequence
  Description of Artificial Sequence: Synthetic oligonucleotide
  Antisense strand to SEQ ID NO: 1064366
cauauacuaagauaucaag

SEQ ID NO: 1064368 - RNA, 19 nt, Artificial Sequence
  Description of Artificial Sequence: Synthetic oligonucleotide
  Sense strand starting at position 3466 of SEQ ID NO: 915233
uuaguauaugcauagcaua

SEQ ID NO: 1064369 - RNA, 19 nt, Artificial Sequence
  Description of Artificial Sequence: Synthetic oligonucleotide
  Antisense strand to SEQ ID NO: 1064368
uaugcuaugcauauacuaa

SEQ ID NO: 1064370 - RNA, 19 nt, Artificial Sequence
  Description of Artificial Sequence: Synthetic oligonucleotide
  Sense strand starting at position 3847 of SEQ ID NO: 915233
ggugguagugaauauccuu

SEQ ID NO: 1064371 - RNA, 19 nt, Artificial Sequence
  Description of Artificial Sequence: Synthetic oligonucleotide
  Antisense strand to SEQ ID NO: 1064370
aaggauauucacuaccacc

SEQ ID NO: 1064372 - RNA, 19 nt, Artificial Sequence
  Description of Artificial Sequence: Synthetic oligonucleotide
  Sense strand starting at position 3850 of SEQ ID NO: 915233
gguagugaauauccuucua

SEQ ID NO: 1064373 - RNA, 19 nt, Artificial Sequence
  Description of Artificial Sequence: Synthetic oligonucleotide
  Antisense strand to SEQ ID NO: 1064372
uagaaggauauucacuacc

SEQ ID NO: 1064374 - RNA, 19 nt, Artificial Sequence
  Description of Artificial Sequence: Synthetic oligonucleotide
  Sense strand starting at position 3962 of SEQ ID NO: 915233
acaaauguauugucucauu

SEQ ID NO: 1064375 - RNA, 19 nt, Artificial Sequence
  Description of Artificial Sequence: Synthetic oligonucleotide
  Antisense strand to SEQ ID NO: 1064374
aaugagacaauacauuugu

SEQ ID NO: 1064376 - RNA, 19 nt, Artificial Sequence
  Description of Artificial Sequence: Synthetic oligonucleotide
  Sense strand starting at position 23 of SEQ ID NO: 915234
uguauugaucuggcguguu

SEQ ID NO: 1064377 - RNA, 19 nt, Artificial Sequence
  Description of Artificial Sequence: Synthetic oligonucleotide
  Antisense strand to SEQ ID NO: 1064376
aacacgccagaucaauaca

SEQ ID NO: 1064378 - RNA, 19 nt, Artificial Sequence
  Description of Artificial Sequence: Synthetic oligonucleotide
  Sense strand starting at position 72 of SEQ ID NO: 915234
caacccagucuuggaugaa

SEQ ID NO: 1064379 - RNA, 19 nt, Artificial Sequence
  Description of Artificial Sequence: Synthetic oligonucleotide
  Antisense strand to SEQ ID NO: 1064378
uucauccaagacuggguug

SEQ ID NO: 1064380 - RNA, 19 nt, Artificial Sequence
  Description of Artificial Sequence: Synthetic oligonucleotide
  Sense strand starting at position 75 of SEQ ID NO: 915234
cccagucuuggaugaauua

SEQ ID NO: 1064381 - RNA, 19 nt, Artificial Sequence
  Description of Artificial Sequence: Synthetic oligonucleotide
  Antisense strand to SEQ ID NO: 1064380
uaauucauccaagacuggg

SEQ ID NO: 1064382 - RNA, 19 nt, Artificial Sequence
  Description of Artificial Sequence: Synthetic oligonucleotide
  Sense strand starting at position 213 of SEQ ID NO: 915234
uuauuuacuucgccucgaa

SEQ ID NO: 1064383 - RNA, 19 nt, Artificial Sequence
  Description of Artificial Sequence: Synthetic oligonucleotide
  Antisense strand to SEQ ID NO: 1064382
uucgaggcgaaguaaauaa

SEQ ID NO: 1064384 - RNA, 19 nt, Artificial Sequence
  Description of Artificial Sequence: Synthetic oligonucleotide
  Sense strand starting at position 242 of SEQ ID NO: 915234
cccuuaguugauuauccua

SEQ ID NO: 1064385 - RNA, 19 nt, Artificial Sequence
  Description of Artificial Sequence: Synthetic oligonucleotide
  Antisense strand to SEQ ID NO: 1064384
uaggauaaucaacuaaggg

SEQ ID NO: 1064386 - RNA, 19 nt, Artificial Sequence
  Description of Artificial Sequence: Synthetic oligonucleotide
  Sense strand starting at position 377 of SEQ ID NO: 915234
cccuuaauccuauggaagu

SEQ ID NO: 1064387 - RNA, 19 nt, Artificial Sequence
  Description of Artificial Sequence: Synthetic oligonucleotide
  Antisense strand to SEQ ID NO: 1064386
acuuccauaggauuaaggg

SEQ ID NO: 1064388 - RNA, 19 nt, Artificial Sequence
  Description of Artificial Sequence: Synthetic oligonucleotide
  Sense strand starting at position 394 of SEQ ID NO: 915234
guccuaauucccuagacug

SEQ ID NO: 1064389 - RNA, 19 nt, Artificial Sequence
  Description of Artificial Sequence: Synthetic oligonucleotide
  Antisense strand to SEQ ID NO: 1064388
cagucuagggaauuaggac

SEQ ID NO: 1064390 - RNA, 19 nt, Artificial Sequence
  Description of Artificial Sequence: Synthetic oligonucleotide
  Sense strand starting at position 836 of SEQ ID NO: 915234
acgauuaaauggucuauga

SEQ ID NO: 1064391 - RNA, 19 nt, Artificial Sequence
  Description of Artificial Sequence: Synthetic oligonucleotide
  Antisense strand to SEQ ID NO: 1064390
ucauagaccauuuaaucgu

SEQ ID NO: 1064392 - RNA, 19 nt, Artificial Sequence
  Description of Artificial Sequence: Synthetic oligonucleotide
  Sense strand starting at position 843 of SEQ ID NO: 915234
aauggucuaugauuauaga

SEQ ID NO: 1064393 - RNA, 19 nt, Artificial Sequence
  Description of Artificial Sequence: Synthetic oligonucleotide
  Antisense strand to SEQ ID NO: 1064392
ucuauaaucauagaccauu

SEQ ID NO: 1064394 - RNA, 19 nt, Artificial Sequence
  Description of Artificial Sequence: Synthetic oligonucleotide
  Sense strand starting at position 889 of SEQ ID NO: 915234
ggaauaacuaggugaagca

SEQ ID NO: 1064395 - RNA, 19 nt, Artificial Sequence
  Description of Artificial Sequence: Synthetic oligonucleotide
  Antisense strand to SEQ ID NO: 1064394
ugcuucaccuaguuauucc

SEQ ID NO: 1064396 - RNA, 19 nt, Artificial Sequence
  Description of Artificial Sequence: Synthetic oligonucleotide
  Sense strand starting at position 917 of SEQ ID NO: 915234
agaauaugucugcacuuaa

SEQ ID NO: 1064397 - RNA, 19 nt, Artificial Sequence
  Description of Artificial Sequence: Synthetic oligonucleotide
  Antisense strand to SEQ ID NO: 1064396
uuaagugcagacauauucu

SEQ ID NO: 1064398 - RNA, 19 nt, Artificial Sequence
  Description of Artificial Sequence: Synthetic oligonucleotide
  Sense strand starting at position 1089 of SEQ ID NO: 915234
caaaguucuccucagggca

SEQ ID NO: 1064399 - RNA, 19 nt, Artificial Sequence
  Description of Artificial Sequence: Synthetic oligonucleotide
  Antisense strand to SEQ ID NO: 1064398
ugcccugaggagaacuuug

SEQ ID NO: 1064400 - RNA, 19 nt, Artificial Sequence
  Description of Artificial Sequence: Synthetic oligonucleotide
  Sense strand starting at position 1134 of SEQ ID NO: 915234
auagauuaauggguuuaac

SEQ ID NO: 1064401 - RNA, 19 nt, Artificial Sequence
  Description of Artificial Sequence: Synthetic oligonucleotide
  Antisense strand to SEQ ID NO: 1064400
guuaaacccauuaaucuau

SEQ ID NO: 1064402 - RNA, 19 nt, Artificial Sequence
  Description of Artificial Sequence: Synthetic oligonucleotide
  Sense strand starting at position 1220 of SEQ ID NO: 915234
guuugagauacaugaaagc

SEQ ID NO: 1064403 - RNA, 19 nt, Artificial Sequence
  Description of Artificial Sequence: Synthetic oligonucleotide
  Antisense strand to SEQ ID NO: 1064402
gcuuucauguaucucaaac

SEQ ID NO: 1064404 - RNA, 19 nt, Artificial Sequence
  Description of Artificial Sequence: Synthetic oligonucleotide
  Sense strand starting at position 1314 of SEQ ID NO: 915234
agaacuguuguguagaaug

SEQ ID NO: 1064405 - RNA, 19 nt, Artificial Sequence
  Description of Artificial Sequence: Synthetic oligonucleotide
  Antisense strand to SEQ ID NO: 1064404
cauucuacacaacaguucu

SEQ ID NO: 1064406 - RNA, 19 nt, Artificial Sequence
  Description of Artificial Sequence: Synthetic oligonucleotide
  Sense strand starting at position 1484 of SEQ ID NO: 915234
caagguugucagcacagaa

SEQ ID NO: 1064407 - RNA, 19 nt, Artificial Sequence
  Description of Artificial Sequence: Synthetic oligonucleotide
  Antisense strand to SEQ ID NO: 1064406
uucugugcugacaaccuug

SEQ ID NO: 1064408 - RNA, 19 nt, Artificial Sequence
  Description of Artificial Sequence: Synthetic oligonucleotide
  Sense strand starting at position 1707 of SEQ ID NO: 915234
agucauacacccugugaag

SEQ ID NO: 1064409 - RNA, 19 nt, Artificial Sequence
  Description of Artificial Sequence: Synthetic oligonucleotide
  Antisense strand to SEQ ID NO: 1064408
cuucacaggguguaugacu

SEQ ID NO: 1064410 - RNA, 19 nt, Artificial Sequence
  Description of Artificial Sequence: Synthetic oligonucleotide
  Sense strand starting at position 1718 of SEQ ID NO: 915234
cugugaaggaaaugauguu

SEQ ID NO: 1064411 - RNA, 19 nt, Artificial Sequence
  Description of Artificial Sequence: Synthetic oligonucleotide
  Antisense strand to SEQ ID NO: 1064410
aacaucauuuccuucacag

SEQ ID NO: 1064412 - RNA, 19 nt, Artificial Sequence
  Description of Artificial Sequence: Synthetic oligonucleotide
  Sense strand starting at position 1724 of SEQ ID NO: 915234
aggaaaugauguucuuccu

SEQ ID NO: 1064413 - RNA, 19 nt, Artificial Sequence
  Description of Artificial Sequence: Synthetic oligonucleotide
  Antisense strand to SEQ ID NO: 1064412
aggaagaacaucauuuccu

SEQ ID NO: 1064414 - RNA, 19 nt, Artificial Sequence
  Description of Artificial Sequence: Synthetic oligonucleotide
  Sense strand starting at position 1731 of SEQ ID NO: 915234
gauguucuuccuugagaca

SEQ ID NO: 1064415 - RNA, 19 nt, Artificial Sequence
  Description of Artificial Sequence: Synthetic oligonucleotide
  Antisense strand to SEQ ID NO: 1064414
ugucucaaggaagaacauc

SEQ ID NO: 1064416 - RNA, 19 nt, Artificial Sequence
  Description of Artificial Sequence: Synthetic oligonucleotide
  Sense strand starting at position 1770 of SEQ ID NO: 915234
agugaugguaguggagaaa

SEQ ID NO: 1064417 - RNA, 19 nt, Artificial Sequence
  Description of Artificial Sequence: Synthetic oligonucleotide
  Antisense strand to SEQ ID NO: 1064416
uuucuccacuaccaucacu

SEQ ID NO: 1064418 - RNA, 19 nt, Artificial Sequence
  Description of Artificial Sequence: Synthetic oligonucleotide
  Sense strand starting at position 1952 of SEQ ID NO: 915234
uuaagccuucgaggauaaa

SEQ ID NO: 1064419 - RNA, 19 nt, Artificial Sequence
  Description of Artificial Sequence: Synthetic oligonucleotide
  Antisense strand to SEQ ID NO: 1064418
uuuauccucgaaggcuuaa

SEQ ID NO: 1064420 - RNA, 19 nt, Artificial Sequence
  Description of Artificial Sequence: Synthetic oligonucleotide
  Sense strand starting at position 1953 of SEQ ID NO: 915234
uaagccuucgaggauaaac

SEQ ID NO: 1064421 - RNA, 19 nt, Artificial Sequence
  Description of Artificial Sequence: Synthetic oligonucleotide
  Antisense strand to SEQ ID NO: 1064420
guuuauccucgaaggcuua

SEQ ID NO: 1064422 - RNA, 19 nt, Artificial Sequence
  Description of Artificial Sequence: Synthetic oligonucleotide
  Sense strand starting at position 1962 of SEQ ID NO: 915234
gaggauaaacucugucaca

SEQ ID NO: 1064423 - RNA, 19 nt, Artificial Sequence
  Description of Artificial Sequence: Synthetic oligonucleotide
  Antisense strand to SEQ ID NO: 1064422
ugugacagaguuuauccuc

SEQ ID NO: 1064424 - RNA, 19 nt, Artificial Sequence
  Description of Artificial Sequence: Synthetic oligonucleotide
  Sense strand starting at position 1963 of SEQ ID NO: 915234
aggauaaacucugucacag

SEQ ID NO: 1064425 - RNA, 19 nt, Artificial Sequence
  Description of Artificial Sequence: Synthetic oligonucleotide
  Antisense strand to SEQ ID NO: 1064424
cugugacagaguuuauccu

SEQ ID NO: 1064426 - RNA, 19 nt, Artificial Sequence
  Description of Artificial Sequence: Synthetic oligonucleotide
  Sense strand starting at position 2236 of SEQ ID NO: 915234
gcuggaucugcugaagaaa

SEQ ID NO: 1064427 - RNA, 19 nt, Artificial Sequence
  Description of Artificial Sequence: Synthetic oligonucleotide
  Antisense strand to SEQ ID NO: 1064426
uuucuucagcagauccagc

SEQ ID NO: 1064428 - RNA, 19 nt, Artificial Sequence
  Description of Artificial Sequence: Synthetic oligonucleotide
  Sense strand starting at position 2512 of SEQ ID NO: 915234
gacacuuauugagugguua

SEQ ID NO: 1064429 - RNA, 19 nt, Artificial Sequence
  Description of Artificial Sequence: Synthetic oligonucleotide
  Antisense strand to SEQ ID NO: 1064428
uaaccacucaauaaguguc

SEQ ID NO: 1064430 - RNA, 19 nt, Artificial Sequence
  Description of Artificial Sequence: Synthetic oligonucleotide
  Sense strand starting at position 2533 of SEQ ID NO: 915234
auaagagguucuguuugaa

SEQ ID NO: 1064431 - RNA, 19 nt, Artificial Sequence
  Description of Artificial Sequence: Synthetic oligonucleotide
  Antisense strand to SEQ ID NO: 1064430
uucaaacagaaccucuuau

SEQ ID NO: 1064432 - RNA, 19 nt, Artificial Sequence
  Description of Artificial Sequence: Synthetic oligonucleotide
  Sense strand starting at position 2536 of SEQ ID NO: 915234
agagguucuguuugaagag

SEQ ID NO: 1064433 - RNA, 19 nt, Artificial Sequence
  Description of Artificial Sequence: Synthetic oligonucleotide
  Antisense strand to SEQ ID NO: 1064432
cucuucaaacagaaccucu

SEQ ID NO: 1064434 - RNA, 19 nt, Artificial Sequence
  Description of Artificial Sequence: Synthetic oligonucleotide
  Sense strand starting at position 2548 of SEQ ID NO: 915234
ugaagagccauguagcaau

SEQ ID NO: 1064435 - RNA, 19 nt, Artificial Sequence
  Description of Artificial Sequence: Synthetic oligonucleotide
  Antisense strand to SEQ ID NO: 1064434
auugcuacauggcucuuca

SEQ ID NO: 1064436 - RNA, 19 nt, Artificial Sequence
  Description of Artificial Sequence: Synthetic oligonucleotide
  Sense strand starting at position 2645 of SEQ ID NO: 915234
aggugaauuucggcaguau

SEQ ID NO: 1064437 - RNA, 19 nt, Artificial Sequence
  Description of Artificial Sequence: Synthetic oligonucleotide
  Antisense strand to SEQ ID NO: 1064436
auacugccgaaauucaccu

SEQ ID NO: 1064438 - RNA, 19 nt, Artificial Sequence
  Description of Artificial Sequence: Synthetic oligonucleotide
  Sense strand starting at position 2672 of SEQ ID NO: 915234
uggcuugcacuugaaauca

SEQ ID NO: 1064439 - RNA, 19 nt, Artificial Sequence
  Description of Artificial Sequence: Synthetic oligonucleotide
  Antisense strand to SEQ ID NO: 1064438
ugauuucaagugcaagcca

SEQ ID NO: 1064440 - RNA, 19 nt, Artificial Sequence
  Description of Artificial Sequence: Synthetic oligonucleotide
  Sense strand starting at position 2973 of SEQ ID NO: 915234
uuuccugaccagugaauaa

SEQ ID NO: 1064441 - RNA, 19 nt, Artificial Sequence
  Description of Artificial Sequence: Synthetic oligonucleotide
  Antisense strand to SEQ ID NO: 1064440
uuauucacuggucaggaaa

SEQ ID NO: 1064442 - RNA, 19 nt, Artificial Sequence
  Description of Artificial Sequence: Synthetic oligonucleotide
  Sense strand starting at position 3063 of SEQ ID NO: 915234
agaccacuugcuuagcaau

SEQ ID NO: 1064443 - RNA, 19 nt, Artificial Sequence
  Description of Artificial Sequence: Synthetic oligonucleotide
  Antisense strand to SEQ ID NO: 1064442
auugcuaagcaaguggucu

SEQ ID NO: 1064444 - RNA, 19 nt, Artificial Sequence
  Description of Artificial Sequence: Synthetic oligonucleotide
  Sense strand starting at position 3098 of SEQ ID NO: 915234
gaagaaauguuuguuuauc

SEQ ID NO: 1064445 - RNA, 19 nt, Artificial Sequence
  Description of Artificial Sequence: Synthetic oligonucleotide
  Antisense strand to SEQ ID NO: 1064444
gauaaacaaacauuucuuc

SEQ ID NO: 1064446 - RNA, 19 nt, Artificial Sequence
  Description of Artificial Sequence: Synthetic oligonucleotide
  Sense strand starting at position 3148 of SEQ ID NO: 915234
acauguauccuguacuauu

SEQ ID NO: 1064447 - RNA, 19 nt, Artificial Sequence
  Description of Artificial Sequence: Synthetic oligonucleotide
  Antisense strand to SEQ ID NO: 1064446
aauaguacaggauacaugu

SEQ ID NO: 1064448 - RNA, 19 nt, Artificial Sequence
  Description of Artificial Sequence: Synthetic oligonucleotide
  Sense strand starting at position 3233 of SEQ ID NO: 915234
cugacauaguacccuuauu

SEQ ID NO: 1064449 - RNA, 19 nt, Artificial Sequence
  Description of Artificial Sequence: Synthetic oligonucleotide
  Antisense strand to SEQ ID NO: 1064448
aauaaggguacuaugucag

SEQ ID NO: 1064450 - RNA, 19 nt, Artificial Sequence
  Description of Artificial Sequence: Synthetic oligonucleotide
  Sense strand starting at position 3257 of SEQ ID NO: 915234
ugccaagauccagaguaca

SEQ ID NO: 1064451 - RNA, 19 nt, Artificial Sequence
  Description of Artificial Sequence: Synthetic oligonucleotide
  Antisense strand to SEQ ID NO: 1064450
uguacucuggaucuuggca

SEQ ID NO: 1064452 - RNA, 19 nt, Artificial Sequence
  Description of Artificial Sequence: Synthetic oligonucleotide
  Sense strand starting at position 3471 of SEQ ID NO: 915234
aucugacagucucuuggaa

SEQ ID NO: 1064453 - RNA, 19 nt, Artificial Sequence
  Description of Artificial Sequence: Synthetic oligonucleotide
  Antisense strand to SEQ ID NO: 1064452
uuccaagagacugucagau

SEQ ID NO: 1064454 - RNA, 19 nt, Artificial Sequence
  Description of Artificial Sequence: Synthetic oligonucleotide
  Sense strand starting at position 3532 of SEQ ID NO: 915234
gcaauuagagccuggaaag

SEQ ID NO: 1064455 - RNA, 19 nt, Artificial Sequence
  Description of Artificial Sequence: Synthetic oligonucleotide
  Antisense strand to SEQ ID NO: 1064454
cuuuccaggcucuaauugc

SEQ ID NO: 1064456 - RNA, 19 nt, Artificial Sequence
  Description of Artificial Sequence: Synthetic oligonucleotide
  Sense strand starting at position 15 of SEQ ID NO: 915235
guaagcuaugaucgaauca

SEQ ID NO: 1064457 - RNA, 19 nt, Artificial Sequence
  Description of Artificial Sequence: Synthetic oligonucleotide
  Antisense strand to SEQ ID NO: 1064456
ugauucgaucauagcuuac

SEQ ID NO: 1064458 - RNA, 19 nt, Artificial Sequence
  Description of Artificial Sequence: Synthetic oligonucleotide
  Sense strand starting at position 38 of SEQ ID NO: 915235
acuccuaucugggugacaa

SEQ ID NO: 1064459 - RNA, 19 nt, Artificial Sequence
  Description of Artificial Sequence: Synthetic oligonucleotide
  Antisense strand to SEQ ID NO: 1064458
uugucacccagauaggagu

SEQ ID NO: 1064460 - RNA, 19 nt, Artificial Sequence
  Description of Artificial Sequence: Synthetic oligonucleotide
  Sense strand starting at position 39 of SEQ ID NO: 915235
cuccuaucugggugacaac

SEQ ID NO: 1064461 - RNA, 19 nt, Artificial Sequence
  Description of Artificial Sequence: Synthetic oligonucleotide
  Antisense strand to SEQ ID NO: 1064460
guugucacccagauaggag

SEQ ID NO: 1064462 - RNA, 19 nt, Artificial Sequence
  Description of Artificial Sequence: Synthetic oligonucleotide
  Sense strand starting at position 76 of SEQ ID NO: 915235
ucaugucuuauuggugaga

SEQ ID NO: 1064463 - RNA, 19 nt, Artificial Sequence
  Description of Artificial Sequence: Synthetic oligonucleotide
  Antisense strand to SEQ ID NO: 1064462
ucucaccaauaagacauga

SEQ ID NO: 1064464 - RNA, 19 nt, Artificial Sequence
  Description of Artificial Sequence: Synthetic oligonucleotide
  Sense strand starting at position 77 of SEQ ID NO: 915235
caugucuuauuggugagau

SEQ ID NO: 1064465 - RNA, 19 nt, Artificial Sequence
  Description of Artificial Sequence: Synthetic oligonucleotide
  Antisense strand to SEQ ID NO: 1064464
aucucaccaauaagacaug

SEQ ID NO: 1064466 - RNA, 19 nt, Artificial Sequence
  Description of Artificial Sequence: Synthetic oligonucleotide
  Sense strand starting at position 79 of SEQ ID NO: 915235
ugucuuauuggugagauaa

SEQ ID NO: 1064467 - RNA, 19 nt, Artificial Sequence
  Description of Artificial Sequence: Synthetic oligonucleotide
  Antisense strand to SEQ ID NO: 1064466
uuaucucaccaauaagaca

SEQ ID NO: 1064468 - RNA, 19 nt, Artificial Sequence
  Description of Artificial Sequence: Synthetic oligonucleotide
  Sense strand starting at position 354 of SEQ ID NO: 915235
uccugaggugcacauguau

SEQ ID NO: 1064469 - RNA, 19 nt, Artificial Sequence
  Description of Artificial Sequence: Synthetic oligonucleotide
  Antisense strand to SEQ ID NO: 1064468
auacaugugcaccucagga

SEQ ID NO: 1064470 - RNA, 19 nt, Artificial Sequence
  Description of Artificial Sequence: Synthetic oligonucleotide
  Sense strand starting at position 586 of SEQ ID NO: 915235
ggaacugauucugcuuuaa

SEQ ID NO: 1064471 - RNA, 19 nt, Artificial Sequence
  Description of Artificial Sequence: Synthetic oligonucleotide
  Antisense strand to SEQ ID NO: 1064470
uuaaagcagaaucaguucc

SEQ ID NO: 1064472 - RNA, 19 nt, Artificial Sequence
  Description of Artificial Sequence: Synthetic oligonucleotide
  Sense strand starting at position 704 of SEQ ID NO: 915235
uucuguguuuaggugagaa

SEQ ID NO: 1064473 - RNA, 19 nt, Artificial Sequence
  Description of Artificial Sequence: Synthetic oligonucleotide
  Antisense strand to SEQ ID NO: 1064472
uucucaccuaaacacagaa

SEQ ID NO: 1064474 - RNA, 19 nt, Artificial Sequence
  Description of Artificial Sequence: Synthetic oligonucleotide
  Sense strand starting at position 706 of SEQ ID NO: 915235
cuguguuuaggugagaaag

SEQ ID NO: 1064475 - RNA, 19 nt, Artificial Sequence
  Description of Artificial Sequence: Synthetic oligonucleotide
  Antisense strand to SEQ ID NO: 1064474
cuuucucaccuaaacacag

SEQ ID NO: 1064476 - RNA, 19 nt, Artificial Sequence
  Description of Artificial Sequence: Synthetic oligonucleotide
  Sense strand starting at position 714 of SEQ ID NO: 915235
aggugagaaagcugugacu

SEQ ID NO: 1064477 - RNA, 19 nt, Artificial Sequence
  Description of Artificial Sequence: Synthetic oligonucleotide
  Antisense strand to SEQ ID NO: 1064476
agucacagcuuucucaccu

SEQ ID NO: 1064478 - RNA, 19 nt, Artificial Sequence
  Description of Artificial Sequence: Synthetic oligonucleotide
  Sense strand starting at position 716 of SEQ ID NO: 915235
gugagaaagcugugacuuu

SEQ ID NO: 1064479 - RNA, 19 nt, Artificial Sequence
  Description of Artificial Sequence: Synthetic oligonucleotide
  Antisense strand to SEQ ID NO: 1064478
aaagucacagcuuucucac

SEQ ID NO: 1064480 - RNA, 19 nt, Artificial Sequence
  Description of Artificial Sequence: Synthetic oligonucleotide
  Sense strand starting at position 829 of SEQ ID NO: 915235
ugcauauguucccuuuaca

SEQ ID NO: 1064481 - RNA, 19 nt, Artificial Sequence
  Description of Artificial Sequence: Synthetic oligonucleotide
  Antisense strand to SEQ ID NO: 1064480
uguaaagggaacauaugca

SEQ ID NO: 1064482 - RNA, 19 nt, Artificial Sequence
  Description of Artificial Sequence: Synthetic oligonucleotide
  Sense strand starting at position 868 of SEQ ID NO: 915235
guaauauugcgagaagugc

SEQ ID NO: 1064483 - RNA, 19 nt, Artificial Sequence
  Description of Artificial Sequence: Synthetic oligonucleotide
  Antisense strand to SEQ ID NO: 1064482
gcacuucucgcaauauuac

SEQ ID NO: 1064484 - RNA, 19 nt, Artificial Sequence
  Description of Artificial Sequence: Synthetic oligonucleotide
  Sense strand starting at position 914 of SEQ ID NO: 915235
acaagaugaucucauaaga

SEQ ID NO: 1064485 - RNA, 19 nt, Artificial Sequence
  Description of Artificial Sequence: Synthetic oligonucleotide
  Antisense strand to SEQ ID NO: 1064484
ucuuaugagaucaucuugu

SEQ ID NO: 1064486 - RNA, 19 nt, Artificial Sequence
  Description of Artificial Sequence: Synthetic oligonucleotide
  Sense strand starting at position 919 of SEQ ID NO: 915235
augaucucauaagagaaau

SEQ ID NO: 1064487 - RNA, 19 nt, Artificial Sequence
  Description of Artificial Sequence: Synthetic oligonucleotide
  Antisense strand to SEQ ID NO: 1064486
auuucucuuaugagaucau

SEQ ID NO: 1064488 - RNA, 19 nt, Artificial Sequence
  Description of Artificial Sequence: Synthetic oligonucleotide
  Sense strand starting at position 1638 of SEQ ID NO: 915235
aucauaugccauugaaguc

SEQ ID NO: 1064489 - RNA, 19 nt, Artificial Sequence
  Description of Artificial Sequence: Synthetic oligonucleotide
  Antisense strand to SEQ ID NO: 1064488
gacuucaauggcauaugau

SEQ ID NO: 1064490 - RNA, 19 nt, Artificial Sequence
  Description of Artificial Sequence: Synthetic oligonucleotide
  Sense strand starting at position 1928 of SEQ ID NO: 915235
gccggaacucuggaugauc

SEQ ID NO: 1064491 - RNA, 19 nt, Artificial Sequence
  Description of Artificial Sequence: Synthetic oligonucleotide
  Antisense strand to SEQ ID NO: 1064490
gaucauccagaguuccggc

SEQ ID NO: 1064492 - RNA, 19 nt, Artificial Sequence
  Description of Artificial Sequence: Synthetic oligonucleotide
  Sense strand starting at position 2291 of SEQ ID NO: 915235
guuauauggaugugucuca

SEQ ID NO: 1064493 - RNA, 19 nt, Artificial Sequence
  Description of Artificial Sequence: Synthetic oligonucleotide
  Antisense strand to SEQ ID NO: 1064492
ugagacacauccauauaac

SEQ ID NO: 1064494 - RNA, 19 nt, Artificial Sequence
  Description of Artificial Sequence: Synthetic oligonucleotide
  Sense strand starting at position 2433 of SEQ ID NO: 915235
ccauacugauauucuguuu

SEQ ID NO: 1064495 - RNA, 19 nt, Artificial Sequence
  Description of Artificial Sequence: Synthetic oligonucleotide
  Antisense strand to SEQ ID NO: 1064494
aaacagaauaucaguaugg

SEQ ID NO: 1064496 - RNA, 19 nt, Artificial Sequence
  Description of Artificial Sequence: Synthetic oligonucleotide
  Sense strand starting at position 2501 of SEQ ID NO: 915235
ccaugaagucaccggguga

SEQ ID NO: 1064497 - RNA, 19 nt, Artificial Sequence
  Description of Artificial Sequence: Synthetic oligonucleotide
  Antisense strand to SEQ ID NO: 1064496
ucacccggugacuucaugg

SEQ ID NO: 1064498 - RNA, 19 nt, Artificial Sequence
  Description of Artificial Sequence: Synthetic oligonucleotide
  Sense strand starting at position 2502 of SEQ ID NO: 915235
caugaagucaccgggugau

SEQ ID NO: 1064499 - RNA, 19 nt, Artificial Sequence
  Description of Artificial Sequence: Synthetic oligonucleotide
  Antisense strand to SEQ ID NO: 1064498
aucacccggugacuucaug

SEQ ID NO: 1064500 - RNA, 19 nt, Artificial Sequence
  Description of Artificial Sequence: Synthetic oligonucleotide
  Sense strand starting at position 2505 of SEQ ID NO: 915235
gaagucaccgggugauaaa

SEQ ID NO: 1064501 - RNA, 19 nt, Artificial Sequence
  Description of Artificial Sequence: Synthetic oligonucleotide
  Antisense strand to SEQ ID NO: 1064500
uuuaucacccggugacuuc

SEQ ID NO: 1064502 - RNA, 19 nt, Artificial Sequence
  Description of Artificial Sequence: Synthetic oligonucleotide
  Sense strand starting at position 2854 of SEQ ID NO: 915235
ugcuauugcuauccugaua

SEQ ID NO: 1064503 - RNA, 19 nt, Artificial Sequence
  Description of Artificial Sequence: Synthetic oligonucleotide
  Antisense strand to SEQ ID NO: 1064502
uaucaggauagcaauagca

SEQ ID NO: 1064504 - RNA, 19 nt, Artificial Sequence
  Description of Artificial Sequence: Synthetic oligonucleotide
  Sense strand starting at position 2867 of SEQ ID NO: 915235
cugauaccaggcugagaau

SEQ ID NO: 1064505 - RNA, 19 nt, Artificial Sequence
  Description of Artificial Sequence: Synthetic oligonucleotide
  Antisense strand to SEQ ID NO: 1064504
auucucagccugguaucag

SEQ ID NO: 1064506 - RNA, 19 nt, Artificial Sequence
  Description of Artificial Sequence: Synthetic oligonucleotide
  Sense strand starting at position 3125 of SEQ ID NO: 915235
gaccacauguagucaaaga

SEQ ID NO: 1064507 - RNA, 19 nt, Artificial Sequence
  Description of Artificial Sequence: Synthetic oligonucleotide
  Antisense strand to SEQ ID NO: 1064506
ucuuugacuacaugugguc

SEQ ID NO: 1064508 - RNA, 19 nt, Artificial Sequence
  Description of Artificial Sequence: Synthetic oligonucleotide
  Sense strand starting at position 3208 of SEQ ID NO: 915235
aucauucugagguguagau

SEQ ID NO: 1064509 - RNA, 19 nt, Artificial Sequence
  Description of Artificial Sequence: Synthetic oligonucleotide
  Antisense strand to SEQ ID NO: 1064508
aucuacaccucagaaugau

SEQ ID NO: 1064510 - RNA, 19 nt, Artificial Sequence
  Description of Artificial Sequence: Synthetic oligonucleotide
  Sense strand starting at position 3210 of SEQ ID NO: 915235
cauucugagguguagauca

SEQ ID NO: 1064511 - RNA, 19 nt, Artificial Sequence
  Description of Artificial Sequence: Synthetic oligonucleotide
  Antisense strand to SEQ ID NO: 1064510
ugaucuacaccucagaaug

SEQ ID NO: 1064512 - RNA, 19 nt, Artificial Sequence
  Description of Artificial Sequence: Synthetic oligonucleotide
  Sense strand starting at position 3246 of SEQ ID NO: 915235
ccaagaggguuuguuagaa

SEQ ID NO: 1064513 - RNA, 19 nt, Artificial Sequence
  Description of Artificial Sequence: Synthetic oligonucleotide
  Antisense strand to SEQ ID NO: 1064512
uucuaacaaacccucuugg

SEQ ID NO: 1064514 - RNA, 19 nt, Artificial Sequence
  Description of Artificial Sequence: Synthetic oligonucleotide
  Sense strand starting at position 3299 of SEQ ID NO: 915235
gucauagagacauggcauu

SEQ ID NO: 1064515 - RNA, 19 nt, Artificial Sequence
  Description of Artificial Sequence: Synthetic oligonucleotide
  Antisense strand to SEQ ID NO: 1064514
aaugccaugucucuaugac

SEQ ID NO: 1064516 - RNA, 19 nt, Artificial Sequence
  Description of Artificial Sequence: Synthetic oligonucleotide
  Sense strand starting at position 3313 of SEQ ID NO: 915235
gcauuugcucaaggcucau

SEQ ID NO: 1064517 - RNA, 19 nt, Artificial Sequence
  Description of Artificial Sequence: Synthetic oligonucleotide
  Antisense strand to SEQ ID NO: 1064516
augagccuugagcaaaugc

SEQ ID NO: 1064518 - RNA, 19 nt, Artificial Sequence
  Description of Artificial Sequence: Synthetic oligonucleotide
  Sense strand starting at position 3317 of SEQ ID NO: 915235
uugcucaaggcucauaauu

SEQ ID NO: 1064519 - RNA, 19 nt, Artificial Sequence
  Description of Artificial Sequence: Synthetic oligonucleotide
  Antisense strand to SEQ ID NO: 1064518
aauuaugagccuugagcaa

SEQ ID NO: 1064520 - RNA, 19 nt, Artificial Sequence
  Description of Artificial Sequence: Synthetic oligonucleotide
  Sense strand starting at position 3408 of SEQ ID NO: 915235
gaaauuauaugccuguguu

SEQ ID NO: 1064521 - RNA, 19 nt, Artificial Sequence
  Description of Artificial Sequence: Synthetic oligonucleotide
  Antisense strand to SEQ ID NO: 1064520
aacacaggcauauaauuuc

SEQ ID NO: 1064522 - RNA, 19 nt, Artificial Sequence
  Description of Artificial Sequence: Synthetic oligonucleotide
  Sense strand starting at position 3432 of SEQ ID NO: 915235
ccuaacuuguuguuguaga

SEQ ID NO: 1064523 - RNA, 19 nt, Artificial Sequence
  Description of Artificial Sequence: Synthetic oligonucleotide
  Antisense strand to SEQ ID NO: 1064522
ucuacaacaacaaguuagg

SEQ ID NO: 1064524 - RNA, 19 nt, Artificial Sequence
  Description of Artificial Sequence: Synthetic oligonucleotide
  Sense strand starting at position 3437 of SEQ ID NO: 915235
cuuguuguuguagauguaa

SEQ ID NO: 1064525 - RNA, 19 nt, Artificial Sequence
  Description of Artificial Sequence: Synthetic oligonucleotide
  Antisense strand to SEQ ID NO: 1064524
uuacaucuacaacaacaag

SEQ ID NO: 1064526 - RNA, 19 nt, Artificial Sequence
  Description of Artificial Sequence: Synthetic oligonucleotide
  Sense strand starting at position 3506 of SEQ ID NO: 915235
ugcugucauguauaaagau

SEQ ID NO: 1064527 - RNA, 19 nt, Artificial Sequence
  Description of Artificial Sequence: Synthetic oligonucleotide
  Antisense strand to SEQ ID NO: 1064526
aucuuuauacaugacagca

SEQ ID NO: 1064528 - RNA, 19 nt, Artificial Sequence
  Description of Artificial Sequence: Synthetic oligonucleotide
  Sense strand starting at position 3558 of SEQ ID NO: 915235
uauaauuaucggcaguguu

SEQ ID NO: 1064529 - RNA, 19 nt, Artificial Sequence
  Description of Artificial Sequence: Synthetic oligonucleotide
  Antisense strand to SEQ ID NO: 1064528
aacacugccgauaauuaua

SEQ ID NO: 1064530 - RNA, 19 nt, Artificial Sequence
  Description of Artificial Sequence: Synthetic oligonucleotide
  Sense strand starting at position 3570 of SEQ ID NO: 915235
caguguuagcuuuaacaag

SEQ ID NO: 1064531 - RNA, 19 nt, Artificial Sequence
  Description of Artificial Sequence: Synthetic oligonucleotide
  Antisense strand to SEQ ID NO: 1064530
cuuguuaaagcuaacacug

SEQ ID NO: 1064532 - RNA, 19 nt, Artificial Sequence
  Description of Artificial Sequence: Synthetic oligonucleotide
  Sense strand starting at position 3902 of SEQ ID NO: 915235
ucagaauuucccgguaggu

SEQ ID NO: 1064533 - RNA, 19 nt, Artificial Sequence
  Description of Artificial Sequence: Synthetic oligonucleotide
  Antisense strand to SEQ ID NO: 1064532
accuaccgggaaauucuga

SEQ ID NO: 1064534 - RNA, 19 nt, Artificial Sequence
  Description of Artificial Sequence: Synthetic oligonucleotide
  Sense strand starting at position 3975 of SEQ ID NO: 915235
uuauuagaaucacaagaag

SEQ ID NO: 1064535 - RNA, 19 nt, Artificial Sequence
  Description of Artificial Sequence: Synthetic oligonucleotide
  Antisense strand to SEQ ID NO: 1064534
cuucuugugauucuaauaa

SEQ ID NO: 1064536 - RNA, 19 nt, Artificial Sequence
  Description of Artificial Sequence: Synthetic oligonucleotide
  Sense strand starting at position 75 of SEQ ID NO: 915236
cgucuuguuggugagauga

SEQ ID NO: 1064537 - RNA, 19 nt, Artificial Sequence
  Description of Artificial Sequence: Synthetic oligonucleotide
  Antisense strand to SEQ ID NO: 1064536
ucaucucaccaacaagacg

SEQ ID NO: 1064538 - RNA, 19 nt, Artificial Sequence
  Description of Artificial Sequence: Synthetic oligonucleotide
  Sense strand starting at position 179 of SEQ ID NO: 915236
auaaguaaccauuguguaa

SEQ ID NO: 1064539 - RNA, 19 nt, Artificial Sequence
  Description of Artificial Sequence: Synthetic oligonucleotide
  Antisense strand to SEQ ID NO: 1064538
uuacacaaugguuacuuau

SEQ ID NO: 1064540 - RNA, 19 nt, Artificial Sequence
  Description of Artificial Sequence: Synthetic oligonucleotide
  Sense strand starting at position 299 of SEQ ID NO: 915236
uuuagauagcaaugaauga

SEQ ID NO: 1064541 - RNA, 19 nt, Artificial Sequence
  Description of Artificial Sequence: Synthetic oligonucleotide
  Antisense strand to SEQ ID NO: 1064540
ucauucauugcuaucuaaa

SEQ ID NO: 1064542 - RNA, 19 nt, Artificial Sequence
  Description of Artificial Sequence: Synthetic oligonucleotide
  Sense strand starting at position 303 of SEQ ID NO: 915236
gauagcaaugaaugaaagu

SEQ ID NO: 1064543 - RNA, 19 nt, Artificial Sequence
  Description of Artificial Sequence: Synthetic oligonucleotide
  Antisense strand to SEQ ID NO: 1064542
acuuucauucauugcuauc

SEQ ID NO: 1064544 - RNA, 19 nt, Artificial Sequence
  Description of Artificial Sequence: Synthetic oligonucleotide
  Sense strand starting at position 356 of SEQ ID NO: 915236
uccugagguccacauguau

SEQ ID NO: 1064545 - RNA, 19 nt, Artificial Sequence
  Description of Artificial Sequence: Synthetic oligonucleotide
  Antisense strand to SEQ ID NO: 1064544
auacauguggaccucagga

SEQ ID NO: 1064546 - RNA, 19 nt, Artificial Sequence
  Description of Artificial Sequence: Synthetic oligonucleotide
  Sense strand starting at position 451 of SEQ ID NO: 915236
aaugcacuggacugauaga

SEQ ID NO: 1064547 - RNA, 19 nt, Artificial Sequence
  Description of Artificial Sequence: Synthetic oligonucleotide
  Antisense strand to SEQ ID NO: 1064546
ucuaucaguccagugcauu

SEQ ID NO: 1064548 - RNA, 19 nt, Artificial Sequence
  Description of Artificial Sequence: Synthetic oligonucleotide
  Sense strand starting at position 706 of SEQ ID NO: 915236
uucugaguuuaggugagaa

SEQ ID NO: 1064549 - RNA, 19 nt, Artificial Sequence
  Description of Artificial Sequence: Synthetic oligonucleotide
  Antisense strand to SEQ ID NO: 1064548
uucucaccuaaacucagaa

SEQ ID NO: 1064550 - RNA, 19 nt, Artificial Sequence
  Description of Artificial Sequence: Synthetic oligonucleotide
  Sense strand starting at position 1638 of SEQ ID NO: 915236
aucauaugccauugagguc

SEQ ID NO: 1064551 - RNA, 19 nt, Artificial Sequence
  Description of Artificial Sequence: Synthetic oligonucleotide
  Antisense strand to SEQ ID NO: 1064550
gaccucaauggcauaugau

SEQ ID NO: 1064552 - RNA, 19 nt, Artificial Sequence
  Description of Artificial Sequence: Synthetic oligonucleotide
  Sense strand starting at position 1928 of SEQ ID NO: 915236
gcuggaacucuggaugauc

SEQ ID NO: 1064553 - RNA, 19 nt, Artificial Sequence
  Description of Artificial Sequence: Synthetic oligonucleotide
  Antisense strand to SEQ ID NO: 1064552
gaucauccagaguuccagc

SEQ ID NO: 1064554 - RNA, 19 nt, Artificial Sequence
  Description of Artificial Sequence: Synthetic oligonucleotide
  Sense strand starting at position 2106 of SEQ ID NO: 915236
uugggugacuucuuuguuu

SEQ ID NO: 1064555 - RNA, 19 nt, Artificial Sequence
  Description of Artificial Sequence: Synthetic oligonucleotide
  Antisense strand to SEQ ID NO: 1064554
aaacaaagaagucacccaa

SEQ ID NO: 1064556 - RNA, 19 nt, Artificial Sequence
  Description of Artificial Sequence: Synthetic oligonucleotide
  Sense strand starting at position 2129 of SEQ ID NO: 915236
ggaucugaauguucugaau

SEQ ID NO: 1064557 - RNA, 19 nt, Artificial Sequence
  Description of Artificial Sequence: Synthetic oligonucleotide
  Antisense strand to SEQ ID NO: 1064556
auucagaacauucagaucc

SEQ ID NO: 1064558 - RNA, 19 nt, Artificial Sequence
  Description of Artificial Sequence: Synthetic oligonucleotide
  Sense strand starting at position 2135 of SEQ ID NO: 915236
gaauguucugaauguacug

SEQ ID NO: 1064559 - RNA, 19 nt, Artificial Sequence
  Description of Artificial Sequence: Synthetic oligonucleotide
  Antisense strand to SEQ ID NO: 1064558
caguacauucagaacauuc

SEQ ID NO: 1064560 - RNA, 19 nt, Artificial Sequence
  Description of Artificial Sequence: Synthetic oligonucleotide
  Sense strand starting at position 2539 of SEQ ID NO: 915236
ucaugauauuggucuggcu

SEQ ID NO: 1064561 - RNA, 19 nt, Artificial Sequence
  Description of Artificial Sequence: Synthetic oligonucleotide
  Antisense strand to SEQ ID NO: 1064560
agccagaccaauaucauga

SEQ ID NO: 1064562 - RNA, 19 nt, Artificial Sequence
  Description of Artificial Sequence: Synthetic oligonucleotide
  Sense strand starting at position 2746 of SEQ ID NO: 915236
ccgauauucuguuuccuag

SEQ ID NO: 1064563 - RNA, 19 nt, Artificial Sequence
  Description of Artificial Sequence: Synthetic oligonucleotide
  Antisense strand to SEQ ID NO: 1064562
cuaggaaacagaauaucgg

SEQ ID NO: 1064564 - RNA, 19 nt, Artificial Sequence
  Description of Artificial Sequence: Synthetic oligonucleotide
  Sense strand starting at position 3161 of SEQ ID NO: 915236
ugcuauugcuaucuugaua

SEQ ID NO: 1064565 - RNA, 19 nt, Artificial Sequence
  Description of Artificial Sequence: Synthetic oligonucleotide
  Antisense strand to SEQ ID NO: 1064564
uaucaagauagcaauagca

SEQ ID NO: 1064566 - RNA, 19 nt, Artificial Sequence
  Description of Artificial Sequence: Synthetic oligonucleotide
  Sense strand starting at position 3403 of SEQ ID NO: 915236
ggaagaaauggcugugaag

SEQ ID NO: 1064567 - RNA, 19 nt, Artificial Sequence
  Description of Artificial Sequence: Synthetic oligonucleotide
  Antisense strand to SEQ ID NO: 1064566
cuucacagccauuucuucc

SEQ ID NO: 1064568 - RNA, 19 nt, Artificial Sequence
  Description of Artificial Sequence: Synthetic oligonucleotide
  Sense strand starting at position 3405 of SEQ ID NO: 915236
aagaaauggcugugaaggu

SEQ ID NO: 1064569 - RNA, 19 nt, Artificial Sequence
  Description of Artificial Sequence: Synthetic oligonucleotide
  Antisense strand to SEQ ID NO: 1064568
accuucacagccauuucuu

SEQ ID NO: 1064570 - RNA, 19 nt, Artificial Sequence
  Description of Artificial Sequence: Synthetic oligonucleotide
  Sense strand starting at position 3414 of SEQ ID NO: 915236
cugugaagguaucuauguu

SEQ ID NO: 1064571 - RNA, 19 nt, Artificial Sequence
  Description of Artificial Sequence: Synthetic oligonucleotide
  Antisense strand to SEQ ID NO: 1064570
aacauagauaccuucacag

SEQ ID NO: 1064572 - RNA, 19 nt, Artificial Sequence
  Description of Artificial Sequence: Synthetic oligonucleotide
  Sense strand starting at position 3415 of SEQ ID NO: 915236
ugugaagguaucuauguug

SEQ ID NO: 1064573 - RNA, 19 nt, Artificial Sequence
  Description of Artificial Sequence: Synthetic oligonucleotide
  Antisense strand to SEQ ID NO: 1064572
caacauagauaccuucaca

SEQ ID NO: 1064574 - RNA, 19 nt, Artificial Sequence
  Description of Artificial Sequence: Synthetic oligonucleotide
  Sense strand starting at position 3418 of SEQ ID NO: 915236
gaagguaucuauguugauc

SEQ ID NO: 1064575 - RNA, 19 nt, Artificial Sequence
  Description of Artificial Sequence: Synthetic oligonucleotide
  Antisense strand to SEQ ID NO: 1064574
gaucaacauagauaccuuc

SEQ ID NO: 1064576 - RNA, 19 nt, Artificial Sequence
  Description of Artificial Sequence: Synthetic oligonucleotide
  Sense strand starting at position 3421 of SEQ ID NO: 915236
gguaucuauguugaucaga

SEQ ID NO: 1064577 - RNA, 19 nt, Artificial Sequence
  Description of Artificial Sequence: Synthetic oligonucleotide
  Antisense strand to SEQ ID NO: 1064576
ucugaucaacauagauacc

SEQ ID NO: 1064578 - RNA, 19 nt, Artificial Sequence
  Description of Artificial Sequence: Synthetic oligonucleotide
  Sense strand starting at position 3423 of SEQ ID NO: 915236
uaucuauguugaucagaug

SEQ ID NO: 1064579 - RNA, 19 nt, Artificial Sequence
  Description of Artificial Sequence: Synthetic oligonucleotide
  Antisense strand to SEQ ID NO: 1064578
caucugaucaacauagaua

SEQ ID NO: 1064580 - RNA, 19 nt, Artificial Sequence
  Description of Artificial Sequence: Synthetic oligonucleotide
  Sense strand starting at position 3424 of SEQ ID NO: 915236
aucuauguugaucagaugu

SEQ ID NO: 1064581 - RNA, 19 nt, Artificial Sequence
  Description of Artificial Sequence: Synthetic oligonucleotide
  Antisense strand to SEQ ID NO: 1064580
acaucugaucaacauagau

SEQ ID NO: 1064582 - RNA, 19 nt, Artificial Sequence
  Description of Artificial Sequence: Synthetic oligonucleotide
  Sense strand starting at position 3476 of SEQ ID NO: 915236
aagcauugagcagagaucu

SEQ ID NO: 1064583 - RNA, 19 nt, Artificial Sequence
  Description of Artificial Sequence: Synthetic oligonucleotide
  Antisense strand to SEQ ID NO: 1064582
agaucucugcucaaugcuu

SEQ ID NO: 1064584 - RNA, 19 nt, Artificial Sequence
  Description of Artificial Sequence: Synthetic oligonucleotide
  Sense strand starting at position 3523 of SEQ ID NO: 915236
ugugguguagaucaaacua

SEQ ID NO: 1064585 - RNA, 19 nt, Artificial Sequence
  Description of Artificial Sequence: Synthetic oligonucleotide
  Antisense strand to SEQ ID NO: 1064584
uaguuugaucuacaccaca

SEQ ID NO: 1064586 - RNA, 19 nt, Artificial Sequence
  Description of Artificial Sequence: Synthetic oligonucleotide
  Sense strand starting at position 3557 of SEQ ID NO: 915236
ccaagaggguuuguuggaa

SEQ ID NO: 1064587 - RNA, 19 nt, Artificial Sequence
  Description of Artificial Sequence: Synthetic oligonucleotide
  Antisense strand to SEQ ID NO: 1064586
uuccaacaaacccucuugg

SEQ ID NO: 1064588 - RNA, 19 nt, Artificial Sequence
  Description of Artificial Sequence: Synthetic oligonucleotide
  Sense strand starting at position 3622 of SEQ ID NO: 915236
uugcucaaggcuuacaauu

SEQ ID NO: 1064589 - RNA, 19 nt, Artificial Sequence
  Description of Artificial Sequence: Synthetic oligonucleotide
  Antisense strand to SEQ ID NO: 1064588
aauuguaagccuugagcaa

SEQ ID NO: 1064590 - RNA, 19 nt, Artificial Sequence
  Description of Artificial Sequence: Synthetic oligonucleotide
  Sense strand starting at position 3713 of SEQ ID NO: 915236
gaagaaauuguaugcccuu

SEQ ID NO: 1064591 - RNA, 19 nt, Artificial Sequence
  Description of Artificial Sequence: Synthetic oligonucleotide
  Antisense strand to SEQ ID NO: 1064590
aagggcauacaauuucuuc

SEQ ID NO: 1064592 - RNA, 19 nt, Artificial Sequence
  Description of Artificial Sequence: Synthetic oligonucleotide
  Sense strand starting at position 3745 of SEQ ID NO: 915236
uuuguuguaguagagguaa

SEQ ID NO: 1064593 - RNA, 19 nt, Artificial Sequence
  Description of Artificial Sequence: Synthetic oligonucleotide
  Antisense strand to SEQ ID NO: 1064592
uuaccucuacuacaacaaa

SEQ ID NO: 1064594 - RNA, 19 nt, Artificial Sequence
  Description of Artificial Sequence: Synthetic oligonucleotide
  Sense strand starting at position 3747 of SEQ ID NO: 915236
uguuguaguagagguaaau

SEQ ID NO: 1064595 - RNA, 19 nt, Artificial Sequence
  Description of Artificial Sequence: Synthetic oligonucleotide
  Antisense strand to SEQ ID NO: 1064594
auuuaccucuacuacaaca

SEQ ID NO: 1064596 - RNA, 19 nt, Artificial Sequence
  Description of Artificial Sequence: Synthetic oligonucleotide
  Sense strand starting at position 3814 of SEQ ID NO: 915236
ugcucucauguauaaagau

SEQ ID NO: 1064597 - RNA, 19 nt, Artificial Sequence
  Description of Artificial Sequence: Synthetic oligonucleotide
  Antisense strand to SEQ ID NO: 1064596
aucuuuauacaugagagca

SEQ ID NO: 1064598 - RNA, 19 nt, Artificial Sequence
  Description of Artificial Sequence: Synthetic oligonucleotide
  Sense strand starting at position 3837 of SEQ ID NO: 915236
auguaaugauugucagaau

SEQ ID NO: 1064599 - RNA, 19 nt, Artificial Sequence
  Description of Artificial Sequence: Synthetic oligonucleotide
  Antisense strand to SEQ ID NO: 1064598
auucugacaaucauuacau

SEQ ID NO: 1064600 - RNA, 19 nt, Artificial Sequence
  Description of Artificial Sequence: Synthetic oligonucleotide
  Sense strand starting at position 3864 of SEQ ID NO: 915236
auuauaauccuagguagua

SEQ ID NO: 1064601 - RNA, 19 nt, Artificial Sequence
  Description of Artificial Sequence: Synthetic oligonucleotide
  Antisense strand to SEQ ID NO: 1064600
uacuaccuaggauuauaau

SEQ ID NO: 1064602 - RNA, 19 nt, Artificial Sequence
  Description of Artificial Sequence: Synthetic oligonucleotide
  Sense strand starting at position 3865 of SEQ ID NO: 915236
uuauaauccuagguaguau

SEQ ID NO: 1064603 - RNA, 19 nt, Artificial Sequence
  Description of Artificial Sequence: Synthetic oligonucleotide
  Antisense strand to SEQ ID NO: 1064602
auacuaccuaggauuauaa

SEQ ID NO: 1064604 - RNA, 19 nt, Artificial Sequence
  Description of Artificial Sequence: Synthetic oligonucleotide
  Sense strand starting at position 3876 of SEQ ID NO: 915236
gguaguauauuagcuuuaa

SEQ ID NO: 1064605 - RNA, 19 nt, Artificial Sequence
  Description of Artificial Sequence: Synthetic oligonucleotide
  Antisense strand to SEQ ID NO: 1064604
uuaaagcuaauauacuacc

SEQ ID NO: 1064606 - RNA, 19 nt, Artificial Sequence
  Description of Artificial Sequence: Synthetic oligonucleotide
  Sense strand starting at position 3877 of SEQ ID NO: 915236
guaguauauuagcuuuaac

SEQ ID NO: 1064607 - RNA, 19 nt, Artificial Sequence
  Description of Artificial Sequence: Synthetic oligonucleotide
  Antisense strand to SEQ ID NO: 1064606
guuaaagcuaauauacuac

SEQ ID NO: 1064608 - RNA, 19 nt, Artificial Sequence
  Description of Artificial Sequence: Synthetic oligonucleotide
  Sense strand starting at position 3880 of SEQ ID NO: 915236
guauauuagcuuuaacagg

SEQ ID NO: 1064609 - RNA, 19 nt, Artificial Sequence
  Description of Artificial Sequence: Synthetic oligonucleotide
  Antisense strand to SEQ ID NO: 1064608
ccuguuaaagcuaauauac

SEQ ID NO: 1064610 - RNA, 19 nt, Artificial Sequence
  Description of Artificial Sequence: Synthetic oligonucleotide
  Sense strand starting at position 3886 of SEQ ID NO: 915236
uagcuuuaacaggaaugua

SEQ ID NO: 1064611 - RNA, 19 nt, Artificial Sequence
  Description of Artificial Sequence: Synthetic oligonucleotide
  Antisense strand to SEQ ID NO: 1064610
uacauuccuguuaaagcua

SEQ ID NO: 1064612 - RNA, 19 nt, Artificial Sequence
  Description of Artificial Sequence: Synthetic oligonucleotide
  Sense strand starting at position 3889 of SEQ ID NO: 915236
cuuuaacaggaauguaagu

SEQ ID NO: 1064613 - RNA, 19 nt, Artificial Sequence
  Description of Artificial Sequence: Synthetic oligonucleotide
  Antisense strand to SEQ ID NO: 1064612
acuuacauuccuguuaaag

SEQ ID NO: 1064614 - RNA, 19 nt, Artificial Sequence
  Description of Artificial Sequence: Synthetic oligonucleotide
  Sense strand starting at position 3917 of SEQ ID NO: 915236
ugaaguuuauaugcucauu

SEQ ID NO: 1064615 - RNA, 19 nt, Artificial Sequence
  Description of Artificial Sequence: Synthetic oligonucleotide
  Antisense strand to SEQ ID NO: 1064614
aaugagcauauaaacuuca

SEQ ID NO: 1064616 - RNA, 19 nt, Artificial Sequence
  Description of Artificial Sequence: Synthetic oligonucleotide
  Sense strand starting at position 53 of SEQ ID NO: 915237
gaaccuuuagcagaguaau

SEQ ID NO: 1064617 - RNA, 19 nt, Artificial Sequence
  Description of Artificial Sequence: Synthetic oligonucleotide
  Antisense strand to SEQ ID NO: 1064616
auuacucugcuaaagguuc

SEQ ID NO: 1064618 - RNA, 19 nt, Artificial Sequence
  Description of Artificial Sequence: Synthetic oligonucleotide
  Sense strand starting at position 56 of SEQ ID NO: 915237
ccuuuagcagaguaauaca

SEQ ID NO: 1064619 - RNA, 19 nt, Artificial Sequence
  Description of Artificial Sequence: Synthetic oligonucleotide
  Antisense strand to SEQ ID NO: 1064618
uguauuacucugcuaaagg

SEQ ID NO: 1064620 - RNA, 19 nt, Artificial Sequence
  Description of Artificial Sequence: Synthetic oligonucleotide
  Sense strand starting at position 304 of SEQ ID NO: 915237
uuaguaucuccagagcaag

SEQ ID NO: 1064621 - RNA, 19 nt, Artificial Sequence
  Description of Artificial Sequence: Synthetic oligonucleotide
  Antisense strand to SEQ ID NO: 1064620
cuugcucuggagauacuaa

SEQ ID NO: 1064622 - RNA, 19 nt, Artificial Sequence
  Description of Artificial Sequence: Synthetic oligonucleotide
  Sense strand starting at position 401 of SEQ ID NO: 915237
cuaagaaauuggcccaauu

SEQ ID NO: 1064623 - RNA, 19 nt, Artificial Sequence
  Description of Artificial Sequence: Synthetic oligonucleotide
  Antisense strand to SEQ ID NO: 1064622
aauugggccaauuucuuag

SEQ ID NO: 1064624 - RNA, 19 nt, Artificial Sequence
  Description of Artificial Sequence: Synthetic oligonucleotide
  Sense strand starting at position 463 of SEQ ID NO: 915237
gcuuuagaacuuugaaaua

SEQ ID NO: 1064625 - RNA, 19 nt, Artificial Sequence
  Description of Artificial Sequence: Synthetic oligonucleotide
  Antisense strand to SEQ ID NO: 1064624
uauuucaaaguucuaaagc

SEQ ID NO: 1064626 - RNA, 19 nt, Artificial Sequence
  Description of Artificial Sequence: Synthetic oligonucleotide
  Sense strand starting at position 573 of SEQ ID NO: 915237
gaggguuuaugaucuuccu

SEQ ID NO: 1064627 - RNA, 19 nt, Artificial Sequence
  Description of Artificial Sequence: Synthetic oligonucleotide
  Antisense strand to SEQ ID NO: 1064626
aggaagaucauaaacccuc

SEQ ID NO: 1064628 - RNA, 19 nt, Artificial Sequence
  Description of Artificial Sequence: Synthetic oligonucleotide
  Sense strand starting at position 582 of SEQ ID NO: 915237
ugaucuuccugaccaagca

SEQ ID NO: 1064629 - RNA, 19 nt, Artificial Sequence
  Description of Artificial Sequence: Synthetic oligonucleotide
  Antisense strand to SEQ ID NO: 1064628
ugcuuggucaggaagauca

SEQ ID NO: 1064630 - RNA, 19 nt, Artificial Sequence
  Description of Artificial Sequence: Synthetic oligonucleotide
  Sense strand starting at position 604 of SEQ ID NO: 915237
uccugaagagcuggauaua

SEQ ID NO: 1064631 - RNA, 19 nt, Artificial Sequence
  Description of Artificial Sequence: Synthetic oligonucleotide
  Antisense strand to SEQ ID NO: 1064630
uauauccagcucuucagga

SEQ ID NO: 1064632 - RNA, 19 nt, Artificial Sequence
  Description of Artificial Sequence: Synthetic oligonucleotide
  Sense strand starting at position 647 of SEQ ID NO: 915237
gguaucuaccauugaucuu

SEQ ID NO: 1064633 - RNA, 19 nt, Artificial Sequence
  Description of Artificial Sequence: Synthetic oligonucleotide
  Antisense strand to SEQ ID NO: 1064632
aagaucaaugguagauacc

SEQ ID NO: 1064634 - RNA, 19 nt, Artificial Sequence
  Description of Artificial Sequence: Synthetic oligonucleotide
  Sense strand starting at position 674 of SEQ ID NO: 915237
cugcuuauguaacuaaaga

SEQ ID NO: 1064635 - RNA, 19 nt, Artificial Sequence
  Description of Artificial Sequence: Synthetic oligonucleotide
  Antisense strand to SEQ ID NO: 1064634
ucuuuaguuacauaagcag

SEQ ID NO: 1064636 - RNA, 19 nt, Artificial Sequence
  Description of Artificial Sequence: Synthetic oligonucleotide
  Sense strand starting at position 816 of SEQ ID NO: 915237
aucucuugggccuaauaca

SEQ ID NO: 1064637 - RNA, 19 nt, Artificial Sequence
  Description of Artificial Sequence: Synthetic oligonucleotide
  Antisense strand to SEQ ID NO: 1064636
uguauuaggcccaagagau

SEQ ID NO: 1064638 - RNA, 19 nt, Artificial Sequence
  Description of Artificial Sequence: Synthetic oligonucleotide
  Sense strand starting at position 909 of SEQ ID NO: 915237
uauaguccucaaggagagu

SEQ ID NO: 1064639 - RNA, 19 nt, Artificial Sequence
  Description of Artificial Sequence: Synthetic oligonucleotide
  Antisense strand to SEQ ID NO: 1064638
acucuccuugaggacuaua

SEQ ID NO: 1064640 - RNA, 19 nt, Artificial Sequence
  Description of Artificial Sequence: Synthetic oligonucleotide
  Sense strand starting at position 1047 of SEQ ID NO: 915237
uugccagugauaugaagag

SEQ ID NO: 1064641 - RNA, 19 nt, Artificial Sequence
  Description of Artificial Sequence: Synthetic oligonucleotide
  Antisense strand to SEQ ID NO: 1064640
cucuucauaucacuggcaa

SEQ ID NO: 1064642 - RNA, 19 nt, Artificial Sequence
  Description of Artificial Sequence: Synthetic oligonucleotide
  Sense strand starting at position 1144 of SEQ ID NO: 915237
ggguuaagcaugggaacca

SEQ ID NO: 1064643 - RNA, 19 nt, Artificial Sequence
  Description of Artificial Sequence: Synthetic oligonucleotide
  Antisense strand to SEQ ID NO: 1064642
ugguucccaugcuuaaccc

SEQ ID NO: 1064644 - RNA, 19 nt, Artificial Sequence
  Description of Artificial Sequence: Synthetic oligonucleotide
  Sense strand starting at position 1156 of SEQ ID NO: 915237
ggaaccacauugguguaaa

SEQ ID NO: 1064645 - RNA, 19 nt, Artificial Sequence
  Description of Artificial Sequence: Synthetic oligonucleotide
  Antisense strand to SEQ ID NO: 1064644
uuuacaccaaugugguucc

SEQ ID NO: 1064646 - RNA, 19 nt, Artificial Sequence
  Description of Artificial Sequence: Synthetic oligonucleotide
  Sense strand starting at position 1216 of SEQ ID NO: 915237
gauguuguuaaguagguga

SEQ ID NO: 1064647 - RNA, 19 nt, Artificial Sequence
  Description of Artificial Sequence: Synthetic oligonucleotide
  Antisense strand to SEQ ID NO: 1064646
ucaccuacuuaacaacauc

SEQ ID NO: 1064648 - RNA, 19 nt, Artificial Sequence
  Description of Artificial Sequence: Synthetic oligonucleotide
  Sense strand starting at position 1231 of SEQ ID NO: 915237
gugaaugucccugacccaa

SEQ ID NO: 1064649 - RNA, 19 nt, Artificial Sequence
  Description of Artificial Sequence: Synthetic oligonucleotide
  Antisense strand to SEQ ID NO: 1064648
uugggucagggacauucac

SEQ ID NO: 1064650 - RNA, 19 nt, Artificial Sequence
  Description of Artificial Sequence: Synthetic oligonucleotide
  Sense strand starting at position 1325 of SEQ ID NO: 915237
agaggauguuggagaguau

SEQ ID NO: 1064651 - RNA, 19 nt, Artificial Sequence
  Description of Artificial Sequence: Synthetic oligonucleotide
  Antisense strand to SEQ ID NO: 1064650
auacucuccaacauccucu

SEQ ID NO: 1064652 - RNA, 19 nt, Artificial Sequence
  Description of Artificial Sequence: Synthetic oligonucleotide
  Sense strand starting at position 1339 of SEQ ID NO: 915237
aguaucaaagcguaagaga

SEQ ID NO: 1064653 - RNA, 19 nt, Artificial Sequence
  Description of Artificial Sequence: Synthetic oligonucleotide
  Antisense strand to SEQ ID NO: 1064652
ucucuuacgcuuugauacu

SEQ ID NO: 1064654 - RNA, 19 nt, Artificial Sequence
  Description of Artificial Sequence: Synthetic oligonucleotide
  Sense strand starting at position 1350 of SEQ ID NO: 915237
guaagagaugacgaugcuu

SEQ ID NO: 1064655 - RNA, 19 nt, Artificial Sequence
  Description of Artificial Sequence: Synthetic oligonucleotide
  Antisense strand to SEQ ID NO: 1064654
aagcaucgucaucucuuac

SEQ ID NO: 1064656 - RNA, 19 nt, Artificial Sequence
  Description of Artificial Sequence: Synthetic oligonucleotide
  Sense strand starting at position 1352 of SEQ ID NO: 915237
aagagaugacgaugcuuau

SEQ ID NO: 1064657 - RNA, 19 nt, Artificial Sequence
  Description of Artificial Sequence: Synthetic oligonucleotide
  Antisense strand to SEQ ID NO: 1064656
auaagcaucgucaucucuu

SEQ ID NO: 1064658 - RNA, 19 nt, Artificial Sequence
  Description of Artificial Sequence: Synthetic oligonucleotide
  Sense strand starting at position 1592 of SEQ ID NO: 915237
gggacauggugaccaugua

SEQ ID NO: 1064659 - RNA, 19 nt, Artificial Sequence
  Description of Artificial Sequence: Synthetic oligonucleotide
  Antisense strand to SEQ ID NO: 1064658
uacauggucaccauguccc

SEQ ID NO: 1064660 - RNA, 19 nt, Artificial Sequence
  Description of Artificial Sequence: Synthetic oligonucleotide
  Sense strand starting at position 1829 of SEQ ID NO: 915237
gggugugaaggcuaggauu

SEQ ID NO: 1064661 - RNA, 19 nt, Artificial Sequence
  Description of Artificial Sequence: Synthetic oligonucleotide
  Antisense strand to SEQ ID NO: 1064660
aauccuagccuucacaccc

SEQ ID NO: 1064662 - RNA, 19 nt, Artificial Sequence
  Description of Artificial Sequence: Synthetic oligonucleotide
  Sense strand starting at position 2045 of SEQ ID NO: 915237
agagucaugacaggcacaa

SEQ ID NO: 1064663 - RNA, 19 nt, Artificial Sequence
  Description of Artificial Sequence: Synthetic oligonucleotide
  Antisense strand to SEQ ID NO: 1064662
uugugccugucaugacucu

SEQ ID NO: 1064664 - RNA, 19 nt, Artificial Sequence
  Description of Artificial Sequence: Synthetic oligonucleotide
  Sense strand starting at position 2433 of SEQ ID NO: 915237
ggauuuccaucuggagaga

SEQ ID NO: 1064665 - RNA, 19 nt, Artificial Sequence
  Description of Artificial Sequence: Synthetic oligonucleotide
  Antisense strand to SEQ ID NO: 1064664
ucucuccagauggaaaucc

SEQ ID NO: 1064666 - RNA, 19 nt, Artificial Sequence
  Description of Artificial Sequence: Synthetic oligonucleotide
  Sense strand starting at position 2804 of SEQ ID NO: 915237
ggaauagaccaugguuucu

SEQ ID NO: 1064667 - RNA, 19 nt, Artificial Sequence
  Description of Artificial Sequence: Synthetic oligonucleotide
  Antisense strand to SEQ ID NO: 1064666
agaaaccauggucuauucc

SEQ ID NO: 1064668 - RNA, 19 nt, Artificial Sequence
  Description of Artificial Sequence: Synthetic oligonucleotide
  Sense strand starting at position 2837 of SEQ ID NO: 915237
ccagguggucuugacaacu

SEQ ID NO: 1064669 - RNA, 19 nt, Artificial Sequence
  Description of Artificial Sequence: Synthetic oligonucleotide
  Antisense strand to SEQ ID NO: 1064668
aguugucaagaccaccugg

SEQ ID NO: 1064670 - RNA, 19 nt, Artificial Sequence
  Description of Artificial Sequence: Synthetic oligonucleotide
  Sense strand starting at position 2917 of SEQ ID NO: 915237
aauuuaagcugcuugacga

SEQ ID NO: 1064671 - RNA, 19 nt, Artificial Sequence
  Description of Artificial Sequence: Synthetic oligonucleotide
  Antisense strand to SEQ ID NO: 1064670
ucgucaagcagcuuaaauu

SEQ ID NO: 1064672 - RNA, 19 nt, Artificial Sequence
  Description of Artificial Sequence: Synthetic oligonucleotide
  Sense strand starting at position 2918 of SEQ ID NO: 915237
auuuaagcugcuugacgau

SEQ ID NO: 1064673 - RNA, 19 nt, Artificial Sequence
  Description of Artificial Sequence: Synthetic oligonucleotide
  Antisense strand to SEQ ID NO: 1064672
aucgucaagcagcuuaaau

SEQ ID NO: 1064674 - RNA, 19 nt, Artificial Sequence
  Description of Artificial Sequence: Synthetic oligonucleotide
  Sense strand starting at position 3379 of SEQ ID NO: 915237
aggccuuuacuauauauga

SEQ ID NO: 1064675 - RNA, 19 nt, Artificial Sequence
  Description of Artificial Sequence: Synthetic oligonucleotide
  Antisense strand to SEQ ID NO: 1064674
ucauauauaguaaaggccu

SEQ ID NO: 1064676 - RNA, 19 nt, Artificial Sequence
  Description of Artificial Sequence: Synthetic oligonucleotide
  Sense strand starting at position 3484 of SEQ ID NO: 915237
agaguuacucucuaggcau

SEQ ID NO: 1064677 - RNA, 19 nt, Artificial Sequence
  Description of Artificial Sequence: Synthetic oligonucleotide
  Antisense strand to SEQ ID NO: 1064676
augccuagagaguaacucu

SEQ ID NO: 1064678 - RNA, 19 nt, Artificial Sequence
  Description of Artificial Sequence: Synthetic oligonucleotide
  Sense strand starting at position 3503 of SEQ ID NO: 915237
gcaggcuuaagguauaaug

SEQ ID NO: 1064679 - RNA, 19 nt, Artificial Sequence
  Description of Artificial Sequence: Synthetic oligonucleotide
  Antisense strand to SEQ ID NO: 1064678
cauuauaccuuaagccugc

SEQ ID NO: 1064680 - RNA, 19 nt, Artificial Sequence
  Description of Artificial Sequence: Synthetic oligonucleotide
  Sense strand starting at position 3525 of SEQ ID NO: 915237
gauggauguaagggucuaa

SEQ ID NO: 1064681 - RNA, 19 nt, Artificial Sequence
  Description of Artificial Sequence: Synthetic oligonucleotide
  Antisense strand to SEQ ID NO: 1064680
uuagacccuuacauccauc

SEQ ID NO: 1064682 - RNA, 19 nt, Artificial Sequence
  Description of Artificial Sequence: Synthetic oligonucleotide
  Sense strand starting at position 3529 of SEQ ID NO: 915237
gauguaagggucuaauccu

SEQ ID NO: 1064683 - RNA, 19 nt, Artificial Sequence
  Description of Artificial Sequence: Synthetic oligonucleotide
  Antisense strand to SEQ ID NO: 1064682
aggauuagacccuuacauc

SEQ ID NO: 1064684 - RNA, 19 nt, Artificial Sequence
  Description of Artificial Sequence: Synthetic oligonucleotide
  Sense strand starting at position 3575 of SEQ ID NO: 915237
uccauaugaucugcuagau

SEQ ID NO: 1064685 - RNA, 19 nt, Artificial Sequence
  Description of Artificial Sequence: Synthetic oligonucleotide
  Antisense strand to SEQ ID NO: 1064684
aucuagcagaucauaugga

SEQ ID NO: 1064686 - RNA, 19 nt, Artificial Sequence
  Description of Artificial Sequence: Synthetic oligonucleotide
  Sense strand starting at position 3747 of SEQ ID NO: 915237
agugucuggacuuggacaa

SEQ ID NO: 1064687 - RNA, 19 nt, Artificial Sequence
  Description of Artificial Sequence: Synthetic oligonucleotide
  Antisense strand to SEQ ID NO: 1064686
uuguccaaguccagacacu

SEQ ID NO: 1064688 - RNA, 19 nt, Artificial Sequence
  Description of Artificial Sequence: Synthetic oligonucleotide
  Sense strand starting at position 3762 of SEQ ID NO: 915237
acaacaaauuguguauacu

SEQ ID NO: 1064689 - RNA, 19 nt, Artificial Sequence
  Description of Artificial Sequence: Synthetic oligonucleotide
  Antisense strand to SEQ ID NO: 1064688
aguauacacaauuuguugu

SEQ ID NO: 1064690 - RNA, 19 nt, Artificial Sequence
  Description of Artificial Sequence: Synthetic oligonucleotide
  Sense strand starting at position 3832 of SEQ ID NO: 915237
ugcagcguuguccuuaaca

SEQ ID NO: 1064691 - RNA, 19 nt, Artificial Sequence
  Description of Artificial Sequence: Synthetic oligonucleotide
  Antisense strand to SEQ ID NO: 1064690
uguuaaggacaacgcugca

SEQ ID NO: 1064692 - RNA, 19 nt, Artificial Sequence
  Description of Artificial Sequence: Synthetic oligonucleotide
  Sense strand starting at position 3897 of SEQ ID NO: 915237
uaauaaaugguaggauguu

SEQ ID NO: 1064693 - RNA, 19 nt, Artificial Sequence
  Description of Artificial Sequence: Synthetic oligonucleotide
  Antisense strand to SEQ ID NO: 1064692
aacauccuaccauuuauua

SEQ ID NO: 1064694 - RNA, 19 nt, Artificial Sequence
  Description of Artificial Sequence: Synthetic oligonucleotide
  Sense strand starting at position 3929 of SEQ ID NO: 915237
uccauauagccaugaaaga

SEQ ID NO: 1064695 - RNA, 19 nt, Artificial Sequence
  Description of Artificial Sequence: Synthetic oligonucleotide
  Antisense strand to SEQ ID NO: 1064694
ucuuucauggcuauaugga

SEQ ID NO: 1064696 - RNA, 19 nt, Artificial Sequence
  Description of Artificial Sequence: Synthetic oligonucleotide
  Sense strand starting at position 45 of SEQ ID NO: 915238
ccugacuacugacuuguaa

SEQ ID NO: 1064697 - RNA, 19 nt, Artificial Sequence
  Description of Artificial Sequence: Synthetic oligonucleotide
  Antisense strand to SEQ ID NO: 1064696
uuacaagucaguagucagg

SEQ ID NO: 1064698 - RNA, 19 nt, Artificial Sequence
  Description of Artificial Sequence: Synthetic oligonucleotide
  Sense strand starting at position 338 of SEQ ID NO: 915238
caaugauuguaugugauug

SEQ ID NO: 1064699 - RNA, 19 nt, Artificial Sequence
  Description of Artificial Sequence: Synthetic oligonucleotide
  Antisense strand to SEQ ID NO: 1064698
caaucacauacaaucauug

SEQ ID NO: 1064700 - RNA, 19 nt, Artificial Sequence
  Description of Artificial Sequence: Synthetic oligonucleotide
  Sense strand starting at position 650 of SEQ ID NO: 915238
cauguaauuucugaggaca

SEQ ID NO: 1064701 - RNA, 19 nt, Artificial Sequence
  Description of Artificial Sequence: Synthetic oligonucleotide
  Antisense strand to SEQ ID NO: 1064700
uguccucagaaauuacaug

SEQ ID NO: 1064702 - RNA, 19 nt, Artificial Sequence
  Description of Artificial Sequence: Synthetic oligonucleotide
  Sense strand starting at position 835 of SEQ ID NO: 915238
guacauaagcuugagucua

SEQ ID NO: 1064703 - RNA, 19 nt, Artificial Sequence
  Description of Artificial Sequence: Synthetic oligonucleotide
  Antisense strand to SEQ ID NO: 1064702
uagacucaagcuuauguac

SEQ ID NO: 1064704 - RNA, 19 nt, Artificial Sequence
  Description of Artificial Sequence: Synthetic oligonucleotide
  Sense strand starting at position 845 of SEQ ID NO: 915238
uugagucuauccucagaaa

SEQ ID NO: 1064705 - RNA, 19 nt, Artificial Sequence
  Description of Artificial Sequence: Synthetic oligonucleotide
  Antisense strand to SEQ ID NO: 1064704
uuucugaggauagacucaa

SEQ ID NO: 1064706 - RNA, 19 nt, Artificial Sequence
  Description of Artificial Sequence: Synthetic oligonucleotide
  Sense strand starting at position 878 of SEQ ID NO: 915238
gugaaaugauccucaagac

SEQ ID NO: 1064707 - RNA, 19 nt, Artificial Sequence
  Description of Artificial Sequence: Synthetic oligonucleotide
  Antisense strand to SEQ ID NO: 1064706
gucuugaggaucauuucac

SEQ ID NO: 1064708 - RNA, 19 nt, Artificial Sequence
  Description of Artificial Sequence: Synthetic oligonucleotide
  Sense strand starting at position 892 of SEQ ID NO: 915238
aagacuuacugugugagua

SEQ ID NO: 1064709 - RNA, 19 nt, Artificial Sequence
  Description of Artificial Sequence: Synthetic oligonucleotide
  Antisense strand to SEQ ID NO: 1064708
uacucacacaguaagucuu

SEQ ID NO: 1064710 - RNA, 19 nt, Artificial Sequence
  Description of Artificial Sequence: Synthetic oligonucleotide
  Sense strand starting at position 958 of SEQ ID NO: 915238
ggaugaugaaccuguuuga

SEQ ID NO: 1064711 - RNA, 19 nt, Artificial Sequence
  Description of Artificial Sequence: Synthetic oligonucleotide
  Antisense strand to SEQ ID NO: 1064710
ucaaacagguucaucaucc

SEQ ID NO: 1064712 - RNA, 19 nt, Artificial Sequence
  Description of Artificial Sequence: Synthetic oligonucleotide
  Sense strand starting at position 961 of SEQ ID NO: 915238
ugaugaaccuguuugagga

SEQ ID NO: 1064713 - RNA, 19 nt, Artificial Sequence
  Description of Artificial Sequence: Synthetic oligonucleotide
  Antisense strand to SEQ ID NO: 1064712
uccucaaacagguucauca

SEQ ID NO: 1064714 - RNA, 19 nt, Artificial Sequence
  Description of Artificial Sequence: Synthetic oligonucleotide
  Sense strand starting at position 1028 of SEQ ID NO: 915238
gagaaacaguguuucuuuc

SEQ ID NO: 1064715 - RNA, 19 nt, Artificial Sequence
  Description of Artificial Sequence: Synthetic oligonucleotide
  Antisense strand to SEQ ID NO: 1064714
gaaagaaacacuguuucuc

SEQ ID NO: 1064716 - RNA, 19 nt, Artificial Sequence
  Description of Artificial Sequence: Synthetic oligonucleotide
  Sense strand starting at position 1113 of SEQ ID NO: 915238
guccuuauuccucaggcua

SEQ ID NO: 1064717 - RNA, 19 nt, Artificial Sequence
  Description of Artificial Sequence: Synthetic oligonucleotide
  Antisense strand to SEQ ID NO: 1064716
uagccugaggaauaaggac

SEQ ID NO: 1064718 - RNA, 19 nt, Artificial Sequence
  Description of Artificial Sequence: Synthetic oligonucleotide
  Sense strand starting at position 1133 of SEQ ID NO: 915238
aaauuaauggguugagcau

SEQ ID NO: 1064719 - RNA, 19 nt, Artificial Sequence
  Description of Artificial Sequence: Synthetic oligonucleotide
  Antisense strand to SEQ ID NO: 1064718
augcucaacccauuaauuu

SEQ ID NO: 1064720 - RNA, 19 nt, Artificial Sequence
  Description of Artificial Sequence: Synthetic oligonucleotide
  Sense strand starting at position 1228 of SEQ ID NO: 915238
augaaugcuccugacccaa

SEQ ID NO: 1064721 - RNA, 19 nt, Artificial Sequence
  Description of Artificial Sequence: Synthetic oligonucleotide
  Antisense strand to SEQ ID NO: 1064720
uugggucaggagcauucau

SEQ ID NO: 1064722 - RNA, 19 nt, Artificial Sequence
  Description of Artificial Sequence: Synthetic oligonucleotide
  Sense strand starting at position 1309 of SEQ ID NO: 915238
guggaaucaauguggaaga

SEQ ID NO: 1064723 - RNA, 19 nt, Artificial Sequence
  Description of Artificial Sequence: Synthetic oligonucleotide
  Antisense strand to SEQ ID NO: 1064722
ucuuccacauugauuccac

SEQ ID NO: 1064724 - RNA, 19 nt, Artificial Sequence
  Description of Artificial Sequence: Synthetic oligonucleotide
  Sense strand starting at position 1466 of SEQ ID NO: 915238
acauguagugguugacaag

SEQ ID NO: 1064725 - RNA, 19 nt, Artificial Sequence
  Description of Artificial Sequence: Synthetic oligonucleotide
  Antisense strand to SEQ ID NO: 1064724
cuugucaaccacuacaugu

SEQ ID NO: 1064726 - RNA, 19 nt, Artificial Sequence
  Description of Artificial Sequence: Synthetic oligonucleotide
  Sense strand starting at position 1472 of SEQ ID NO: 915238
agugguugacaagguuauu

SEQ ID NO: 1064727 - RNA, 19 nt, Artificial Sequence
  Description of Artificial Sequence: Synthetic oligonucleotide
  Antisense strand to SEQ ID NO: 1064726
aauaaccuugucaaccacu

SEQ ID NO: 1064728 - RNA, 19 nt, Artificial Sequence
  Description of Artificial Sequence: Synthetic oligonucleotide
  Sense strand starting at position 1589 of SEQ ID NO: 915238
gagacauggugaccaugua

SEQ ID NO: 1064729 - RNA, 19 nt, Artificial Sequence
  Description of Artificial Sequence: Synthetic oligonucleotide
  Antisense strand to SEQ ID NO: 1064728
uacauggucaccaugucuc

SEQ ID NO: 1064730 - RNA, 19 nt, Artificial Sequence
  Description of Artificial Sequence: Synthetic oligonucleotide
  Sense strand starting at position 1728 of SEQ ID NO: 915238
gcuguucuucuuuaagaca

SEQ ID NO: 1064731 - RNA, 19 nt, Artificial Sequence
  Description of Artificial Sequence: Synthetic oligonucleotide
  Antisense strand to SEQ ID NO: 1064730
ugucuuaaagaagaacagc

SEQ ID NO: 1064732 - RNA, 19 nt, Artificial Sequence
  Description of Artificial Sequence: Synthetic oligonucleotide
  Sense strand starting at position 1960 of SEQ ID NO: 915238
aggauaaacugugucacga

SEQ ID NO: 1064733 - RNA, 19 nt, Artificial Sequence
  Description of Artificial Sequence: Synthetic oligonucleotide
  Antisense strand to SEQ ID NO: 1064732
ucgugacacaguuuauccu

SEQ ID NO: 1064734 - RNA, 19 nt, Artificial Sequence
  Description of Artificial Sequence: Synthetic oligonucleotide
  Sense strand starting at position 1981 of SEQ ID NO: 915238
gaggaauucucagcagcca

SEQ ID NO: 1064735 - RNA, 19 nt, Artificial Sequence
  Description of Artificial Sequence: Synthetic oligonucleotide
  Antisense strand to SEQ ID NO: 1064734
uggcugcugagaauuccuc

SEQ ID NO: 1064736 - RNA, 19 nt, Artificial Sequence
  Description of Artificial Sequence: Synthetic oligonucleotide
  Sense strand starting at position 1982 of SEQ ID NO: 915238
aggaauucucagcagccau

SEQ ID NO: 1064737 - RNA, 19 nt, Artificial Sequence
  Description of Artificial Sequence: Synthetic oligonucleotide
  Antisense strand to SEQ ID NO: 1064736
auggcugcugagaauuccu

SEQ ID NO: 1064738 - RNA, 19 nt, Artificial Sequence
  Description of Artificial Sequence: Synthetic oligonucleotide
  Sense strand starting at position 2281 of SEQ ID NO: 915238
gccagucuccaggaagagu

SEQ ID NO: 1064739 - RNA, 19 nt, Artificial Sequence
  Description of Artificial Sequence: Synthetic oligonucleotide
  Antisense strand to SEQ ID NO: 1064738
acucuuccuggagacuggc

SEQ ID NO: 1064740 - RNA, 19 nt, Artificial Sequence
  Description of Artificial Sequence: Synthetic oligonucleotide
  Sense strand starting at position 2290 of SEQ ID NO: 915238
caggaagaguccucuuaga

SEQ ID NO: 1064741 - RNA, 19 nt, Artificial Sequence
  Description of Artificial Sequence: Synthetic oligonucleotide
  Antisense strand to SEQ ID NO: 1064740
ucuaagaggacucuuccug

SEQ ID NO: 1064742 - RNA, 19 nt, Artificial Sequence
  Description of Artificial Sequence: Synthetic oligonucleotide
  Sense strand starting at position 2347 of SEQ ID NO: 915238
uagggucauccuggacaga

SEQ ID NO: 1064743 - RNA, 19 nt, Artificial Sequence
  Description of Artificial Sequence: Synthetic oligonucleotide
  Antisense strand to SEQ ID NO: 1064742
ucuguccaggaugacccua

SEQ ID NO: 1064744 - RNA, 19 nt, Artificial Sequence
  Description of Artificial Sequence: Synthetic oligonucleotide
  Sense strand starting at position 2379 of SEQ ID NO: 915238
guggacuucccagagcuuu

SEQ ID NO: 1064745 - RNA, 19 nt, Artificial Sequence
  Description of Artificial Sequence: Synthetic oligonucleotide
  Antisense strand to SEQ ID NO: 1064744
aaagcucugggaaguccac

SEQ ID NO: 1064746 - RNA, 19 nt, Artificial Sequence
  Description of Artificial Sequence: Synthetic oligonucleotide
  Sense strand starting at position 2391 of SEQ ID NO: 915238
gagcuuuaguaccugagac

SEQ ID NO: 1064747 - RNA, 19 nt, Artificial Sequence
  Description of Artificial Sequence: Synthetic oligonucleotide
  Antisense strand to SEQ ID NO: 1064746
gucucagguacuaaagcuc

SEQ ID NO: 1064748 - RNA, 19 nt, Artificial Sequence
  Description of Artificial Sequence: Synthetic oligonucleotide
  Sense strand starting at position 2634 of SEQ ID NO: 915238
guacgugacaucugaugga

SEQ ID NO: 1064749 - RNA, 19 nt, Artificial Sequence
  Description of Artificial Sequence: Synthetic oligonucleotide
  Antisense strand to SEQ ID NO: 1064748
uccaucagaugucacguac

SEQ ID NO: 1064750 - RNA, 19 nt, Artificial Sequence
  Description of Artificial Sequence: Synthetic oligonucleotide
  Sense strand starting at position 2745 of SEQ ID NO: 915238
uuauucugaguuuggauau

SEQ ID NO: 1064751 - RNA, 19 nt, Artificial Sequence
  Description of Artificial Sequence: Synthetic oligonucleotide
  Antisense strand to SEQ ID NO: 1064750
auauccaaacucagaauaa

SEQ ID NO: 1064752 - RNA, 19 nt, Artificial Sequence
  Description of Artificial Sequence: Synthetic oligonucleotide
  Sense strand starting at position 2892 of SEQ ID NO: 915238
auuaacaucuacucggaaa

SEQ ID NO: 1064753 - RNA, 19 nt, Artificial Sequence
  Description of Artificial Sequence: Synthetic oligonucleotide
  Antisense strand to SEQ ID NO: 1064752
uuuccgaguagauguuaau

SEQ ID NO: 1064754 - RNA, 19 nt, Artificial Sequence
  Description of Artificial Sequence: Synthetic oligonucleotide
  Sense strand starting at position 3172 of SEQ ID NO: 915238
uguucuuaauaacugaguu

SEQ ID NO: 1064755 - RNA, 19 nt, Artificial Sequence
  Description of Artificial Sequence: Synthetic oligonucleotide
  Antisense strand to SEQ ID NO: 1064754
aacucaguuauuaagaaca

SEQ ID NO: 1064756 - RNA, 19 nt, Artificial Sequence
  Description of Artificial Sequence: Synthetic oligonucleotide
  Sense strand starting at position 3248 of SEQ ID NO: 915238
cucugaccaugucuugaaa

SEQ ID NO: 1064757 - RNA, 19 nt, Artificial Sequence
  Description of Artificial Sequence: Synthetic oligonucleotide
  Antisense strand to SEQ ID NO: 1064756
uuucaagacauggucagag

SEQ ID NO: 1064758 - RNA, 19 nt, Artificial Sequence
  Description of Artificial Sequence: Synthetic oligonucleotide
  Sense strand starting at position 3385 of SEQ ID NO: 915238
auugcugagcugcacaaua

SEQ ID NO: 1064759 - RNA, 19 nt, Artificial Sequence
  Description of Artificial Sequence: Synthetic oligonucleotide
  Antisense strand to SEQ ID NO: 1064758
uauugugcagcucagcaau

SEQ ID NO: 1064760 - RNA, 19 nt, Artificial Sequence
  Description of Artificial Sequence: Synthetic oligonucleotide
  Sense strand starting at position 3462 of SEQ ID NO: 915238
aucaaucucgauugguuaa

SEQ ID NO: 1064761 - RNA, 19 nt, Artificial Sequence
  Description of Artificial Sequence: Synthetic oligonucleotide
  Antisense strand to SEQ ID NO: 1064760
uuaaccaaucgagauugau

SEQ ID NO: 1064762 - RNA, 19 nt, Artificial Sequence
  Description of Artificial Sequence: Synthetic oligonucleotide
  Sense strand starting at position 3464 of SEQ ID NO: 915238
caaucucgauugguuaaga

SEQ ID NO: 1064763 - RNA, 19 nt, Artificial Sequence
  Description of Artificial Sequence: Synthetic oligonucleotide
  Antisense strand to SEQ ID NO: 1064762
ucuuaaccaaucgagauug

SEQ ID NO: 1064764 - RNA, 19 nt, Artificial Sequence
  Description of Artificial Sequence: Synthetic oligonucleotide
  Sense strand starting at position 3607 of SEQ ID NO: 915238
uccuucuucccacgggaua

SEQ ID NO: 1064765 - RNA, 19 nt, Artificial Sequence
  Description of Artificial Sequence: Synthetic oligonucleotide
  Antisense strand to SEQ ID NO: 1064764
uaucccgugggaagaagga

SEQ ID NO: 1064766 - RNA, 19 nt, Artificial Sequence
  Description of Artificial Sequence: Synthetic oligonucleotide
  Sense strand starting at position 3608 of SEQ ID NO: 915238
ccuucuucccacgggauau

SEQ ID NO: 1064767 - RNA, 19 nt, Artificial Sequence
  Description of Artificial Sequence: Synthetic oligonucleotide
  Antisense strand to SEQ ID NO: 1064766
auaucccgugggaagaagg

SEQ ID NO: 1064768 - RNA, 19 nt, Artificial Sequence
  Description of Artificial Sequence: Synthetic oligonucleotide
  Sense strand starting at position 3622 of SEQ ID NO: 915238
gauauuugcuuucucguuu

SEQ ID NO: 1064769 - RNA, 19 nt, Artificial Sequence
  Description of Artificial Sequence: Synthetic oligonucleotide
  Antisense strand to SEQ ID NO: 1064768
aaacgagaaagcaaauauc

SEQ ID NO: 1064770 - RNA, 19 nt, Artificial Sequence
  Description of Artificial Sequence: Synthetic oligonucleotide
  Sense strand starting at position 3928 of SEQ ID NO: 915238
ucacccuauugaucuggau

SEQ ID NO: 1064771 - RNA, 19 nt, Artificial Sequence
  Description of Artificial Sequence: Synthetic oligonucleotide
  Antisense strand to SEQ ID NO: 1064770
auccagaucaauaggguga

SEQ ID NO: 1064772 - RNA, 19 nt, Artificial Sequence
  Description of Artificial Sequence: Synthetic oligonucleotide
  Sense strand starting at position 3964 of SEQ ID NO: 915238
ccuauugaucuggauguuu

SEQ ID NO: 1064773 - RNA, 19 nt, Artificial Sequence
  Description of Artificial Sequence: Synthetic oligonucleotide
  Antisense strand to SEQ ID NO: 1064772
aaacauccagaucaauagg

SEQ ID NO: 1064774 - RNA, 19 nt, Artificial Sequence
  Description of Artificial Sequence: Synthetic oligonucleotide
  Sense strand starting at position 3966 of SEQ ID NO: 915238
uauugaucuggauguuuag

SEQ ID NO: 1064775 - RNA, 19 nt, Artificial Sequence
  Description of Artificial Sequence: Synthetic oligonucleotide
  Antisense strand to SEQ ID NO: 1064774
cuaaacauccagaucaaua

SEQ ID NO: 1064776 - RNA, 19 nt, Artificial Sequence
  Description of Artificial Sequence: Synthetic oligonucleotide
  Sense strand starting at position 278 of SEQ ID NO: 915239
agaggacaguucuccaacu

SEQ ID NO: 1064777 - RNA, 19 nt, Artificial Sequence
  Description of Artificial Sequence: Synthetic oligonucleotide
  Antisense strand to SEQ ID NO: 1064776
aguuggagaacuguccucu

SEQ ID NO: 1064778 - RNA, 19 nt, Artificial Sequence
  Description of Artificial Sequence: Synthetic oligonucleotide
  Sense strand starting at position 311 of SEQ ID NO: 915239
gguuauaucuucccuauga

SEQ ID NO: 1064779 - RNA, 19 nt, Artificial Sequence
  Description of Artificial Sequence: Synthetic oligonucleotide
  Antisense strand to SEQ ID NO: 1064778
ucauagggaagauauaacc

SEQ ID NO: 1064780 - RNA, 19 nt, Artificial Sequence
  Description of Artificial Sequence: Synthetic oligonucleotide
  Sense strand starting at position 312 of SEQ ID NO: 915239
guuauaucuucccuaugag

SEQ ID NO: 1064781 - RNA, 19 nt, Artificial Sequence
  Description of Artificial Sequence: Synthetic oligonucleotide
  Antisense strand to SEQ ID NO: 1064780
cucauagggaagauauaac

SEQ ID NO: 1064782 - RNA, 19 nt, Artificial Sequence
  Description of Artificial Sequence: Synthetic oligonucleotide
  Sense strand starting at position 315 of SEQ ID NO: 915239
auaucuucccuaugaggaa

SEQ ID NO: 1064783 - RNA, 19 nt, Artificial Sequence
  Description of Artificial Sequence: Synthetic oligonucleotide
  Antisense strand to SEQ ID NO: 1064782
uuccucauagggaagauau

SEQ ID NO: 1064784 - RNA, 19 nt, Artificial Sequence
  Description of Artificial Sequence: Synthetic oligonucleotide
  Sense strand starting at position 390 of SEQ ID NO: 915239
ggucccuuaguguagaacu

SEQ ID NO: 1064785 - RNA, 19 nt, Artificial Sequence
  Description of Artificial Sequence: Synthetic oligonucleotide
  Antisense strand to SEQ ID NO: 1064784
aguucuacacuaagggacc

SEQ ID NO: 1064786 - RNA, 19 nt, Artificial Sequence
  Description of Artificial Sequence: Synthetic oligonucleotide
  Sense strand starting at position 411 of SEQ ID NO: 915239
gguguuaaaguagauauac

SEQ ID NO: 1064787 - RNA, 19 nt, Artificial Sequence
  Description of Artificial Sequence: Synthetic oligonucleotide
  Antisense strand to SEQ ID NO: 1064786
guauaucuacuuuaacacc

SEQ ID NO: 1064788 - RNA, 19 nt, Artificial Sequence
  Description of Artificial Sequence: Synthetic oligonucleotide
  Sense strand starting at position 636 of SEQ ID NO: 915239
ucccuuguguauuugucua

SEQ ID NO: 1064789 - RNA, 19 nt, Artificial Sequence
  Description of Artificial Sequence: Synthetic oligonucleotide
  Antisense strand to SEQ ID NO: 1064788
uagacaaauacacaaggga

SEQ ID NO: 1064790 - RNA, 19 nt, Artificial Sequence
  Description of Artificial Sequence: Synthetic oligonucleotide
  Sense strand starting at position 638 of SEQ ID NO: 915239
ccuuguguauuugucuaau

SEQ ID NO: 1064791 - RNA, 19 nt, Artificial Sequence
  Description of Artificial Sequence: Synthetic oligonucleotide
  Antisense strand to SEQ ID NO: 1064790
auuagacaaauacacaagg

SEQ ID NO: 1064792 - RNA, 19 nt, Artificial Sequence
  Description of Artificial Sequence: Synthetic oligonucleotide
  Sense strand starting at position 648 of SEQ ID NO: 915239
uugucuaauucccugaaga

SEQ ID NO: 1064793 - RNA, 19 nt, Artificial Sequence
  Description of Artificial Sequence: Synthetic oligonucleotide
  Antisense strand to SEQ ID NO: 1064792
ucuucagggaauuagacaa

SEQ ID NO: 1064794 - RNA, 19 nt, Artificial Sequence
  Description of Artificial Sequence: Synthetic oligonucleotide
  Sense strand starting at position 649 of SEQ ID NO: 915239
ugucuaauucccugaagaa

SEQ ID NO: 1064795 - RNA, 19 nt, Artificial Sequence
  Description of Artificial Sequence: Synthetic oligonucleotide
  Antisense strand to SEQ ID NO: 1064794
uucuucagggaauuagaca

SEQ ID NO: 1064796 - RNA, 19 nt, Artificial Sequence
  Description of Artificial Sequence: Synthetic oligonucleotide
  Sense strand starting at position 920 of SEQ ID NO: 915239
uguugagaaaguugaauca

SEQ ID NO: 1064797 - RNA, 19 nt, Artificial Sequence
  Description of Artificial Sequence: Synthetic oligonucleotide
  Antisense strand to SEQ ID NO: 1064796
ugauucaacuuucucaaca

SEQ ID NO: 1064798 - RNA, 19 nt, Artificial Sequence
  Description of Artificial Sequence: Synthetic oligonucleotide
  Sense strand starting at position 1120 of SEQ ID NO: 915239
uuccucagacuguauauua

SEQ ID NO: 1064799 - RNA, 19 nt, Artificial Sequence
  Description of Artificial Sequence: Synthetic oligonucleotide
  Antisense strand to SEQ ID NO: 1064798
uaauauacagucugaggaa

SEQ ID NO: 1064800 - RNA, 19 nt, Artificial Sequence
  Description of Artificial Sequence: Synthetic oligonucleotide
  Sense strand starting at position 1466 of SEQ ID NO: 915239
agaaguaaugguugauaau

SEQ ID NO: 1064801 - RNA, 19 nt, Artificial Sequence
  Description of Artificial Sequence: Synthetic oligonucleotide
  Antisense strand to SEQ ID NO: 1064800
auuaucaaccauuacuucu

SEQ ID NO: 1064802 - RNA, 19 nt, Artificial Sequence
  Description of Artificial Sequence: Synthetic oligonucleotide
  Sense strand starting at position 1518 of SEQ ID NO: 915239
acuuguaugagucaaggca

SEQ ID NO: 1064803 - RNA, 19 nt, Artificial Sequence
  Description of Artificial Sequence: Synthetic oligonucleotide
  Antisense strand to SEQ ID NO: 1064802
ugccuugacucauacaagu

SEQ ID NO: 1064804 - RNA, 19 nt, Artificial Sequence
  Description of Artificial Sequence: Synthetic oligonucleotide
  Sense strand starting at position 1587 of SEQ ID NO: 915239
ugaggacaugaucgcauua

SEQ ID NO: 1064805 - RNA, 19 nt, Artificial Sequence
  Description of Artificial Sequence: Synthetic oligonucleotide
  Antisense strand to SEQ ID NO: 1064804
uaaugcgaucauguccuca

SEQ ID NO: 1064806 - RNA, 19 nt, Artificial Sequence
  Description of Artificial Sequence: Synthetic oligonucleotide
  Sense strand starting at position 1592 of SEQ ID NO: 915239
acaugaucgcauuauaaag

SEQ ID NO: 1064807 - RNA, 19 nt, Artificial Sequence
  Description of Artificial Sequence: Synthetic oligonucleotide
  Antisense strand to SEQ ID NO: 1064806
cuuuauaaugcgaucaugu

SEQ ID NO: 1064808 - RNA, 19 nt, Artificial Sequence
  Description of Artificial Sequence: Synthetic oligonucleotide
  Sense strand starting at position 1703 of SEQ ID NO: 915239
ggaccaugcacucagagua

SEQ ID NO: 1064809 - RNA, 19 nt, Artificial Sequence
  Description of Artificial Sequence: Synthetic oligonucleotide
  Antisense strand to SEQ ID NO: 1064808
uacucugagugcauggucc

SEQ ID NO: 1064810 - RNA, 19 nt, Artificial Sequence
  Description of Artificial Sequence: Synthetic oligonucleotide
  Sense strand starting at position 1716 of SEQ ID NO: 915239
agaguaaaggauuguauuc

SEQ ID NO: 1064811 - RNA, 19 nt, Artificial Sequence
  Description of Artificial Sequence: Synthetic oligonucleotide
  Antisense strand to SEQ ID NO: 1064810
gaauacaauccuuuacucu

SEQ ID NO: 1064812 - RNA, 19 nt, Artificial Sequence
  Description of Artificial Sequence: Synthetic oligonucleotide
  Sense strand starting at position 1784 of SEQ ID NO: 915239
agcagaaaucgacgaagga

SEQ ID NO: 1064813 - RNA, 19 nt, Artificial Sequence
  Description of Artificial Sequence: Synthetic oligonucleotide
  Antisense strand to SEQ ID NO: 1064812
uccuucgucgauuucugcu

SEQ ID NO: 1064814 - RNA, 19 nt, Artificial Sequence
  Description of Artificial Sequence: Synthetic oligonucleotide
  Sense strand starting at position 1859 of SEQ ID NO: 915239
ggagaaucaugcccagguu

SEQ ID NO: 1064815 - RNA, 19 nt, Artificial Sequence
  Description of Artificial Sequence: Synthetic oligonucleotide
  Antisense strand to SEQ ID NO: 1064814
aaccugggcaugauucucc

SEQ ID NO: 1064816 - RNA, 19 nt, Artificial Sequence
  Description of Artificial Sequence: Synthetic oligonucleotide
  Sense strand starting at position 1880 of SEQ ID NO: 915239
ccacuacugugaccacaua

SEQ ID NO: 1064817 - RNA, 19 nt, Artificial Sequence
  Description of Artificial Sequence: Synthetic oligonucleotide
  Antisense strand to SEQ ID NO: 1064816
uauguggucacaguagugg

SEQ ID NO: 1064818 - RNA, 19 nt, Artificial Sequence
  Description of Artificial Sequence: Synthetic oligonucleotide
  Sense strand starting at position 2226 of SEQ ID NO: 915239
cugacugacucaguaacau

SEQ ID NO: 1064819 - RNA, 19 nt, Artificial Sequence
  Description of Artificial Sequence: Synthetic oligonucleotide
  Antisense strand to SEQ ID NO: 1064818
auguuacugagucagucag

SEQ ID NO: 1064820 - RNA, 19 nt, Artificial Sequence
  Description of Artificial Sequence: Synthetic oligonucleotide
  Sense strand starting at position 2290 of SEQ ID NO: 915239
gggagaauuucugauagcc

SEQ ID NO: 1064821 - RNA, 19 nt, Artificial Sequence
  Description of Artificial Sequence: Synthetic oligonucleotide
  Antisense strand to SEQ ID NO: 1064820
ggcuaucagaaauucuccc

SEQ ID NO: 1064822 - RNA, 19 nt, Artificial Sequence
  Description of Artificial Sequence: Synthetic oligonucleotide
  Sense strand starting at position 2454 of SEQ ID NO: 915239
auugaaagugucuauuacu

SEQ ID NO: 1064823 - RNA, 19 nt, Artificial Sequence
  Description of Artificial Sequence: Synthetic oligonucleotide
  Antisense strand to SEQ ID NO: 1064822
aguaauagacacuuucaau

SEQ ID NO: 1064824 - RNA, 19 nt, Artificial Sequence
  Description of Artificial Sequence: Synthetic oligonucleotide
  Sense strand starting at position 2652 of SEQ ID NO: 915239
ugagaacaaucucuuguaa

SEQ ID NO: 1064825 - RNA, 19 nt, Artificial Sequence
  Description of Artificial Sequence: Synthetic oligonucleotide
  Antisense strand to SEQ ID NO: 1064824
uuacaagagauuguucuca

SEQ ID NO: 1064826 - RNA, 19 nt, Artificial Sequence
  Description of Artificial Sequence: Synthetic oligonucleotide
  Sense strand starting at position 2714 of SEQ ID NO: 915239
caacuauugccagaagagu

SEQ ID NO: 1064827 - RNA, 19 nt, Artificial Sequence
  Description of Artificial Sequence: Synthetic oligonucleotide
  Antisense strand to SEQ ID NO: 1064826
acucuucuggcaauaguug

SEQ ID NO: 1064828 - RNA, 19 nt, Artificial Sequence
  Description of Artificial Sequence: Synthetic oligonucleotide
  Sense strand starting at position 2743 of SEQ ID NO: 915239
gaauccuagcagugaacua

SEQ ID NO: 1064829 - RNA, 19 nt, Artificial Sequence
  Description of Artificial Sequence: Synthetic oligonucleotide
  Antisense strand to SEQ ID NO: 1064828
uaguucacugcuaggauuc

SEQ ID NO: 1064830 - RNA, 19 nt, Artificial Sequence
  Description of Artificial Sequence: Synthetic oligonucleotide
  Sense strand starting at position 2829 of SEQ ID NO: 915239
uucugaaggugucugagaa

SEQ ID NO: 1064831 - RNA, 19 nt, Artificial Sequence
  Description of Artificial Sequence: Synthetic oligonucleotide
  Antisense strand to SEQ ID NO: 1064830
uucucagacaccuucagaa

SEQ ID NO: 1064832 - RNA, 19 nt, Artificial Sequence
  Description of Artificial Sequence: Synthetic oligonucleotide
  Sense strand starting at position 2861 of SEQ ID NO: 915239
gguguaaaucuugaacuuu

SEQ ID NO: 1064833 - RNA, 19 nt, Artificial Sequence
  Description of Artificial Sequence: Synthetic oligonucleotide
  Antisense strand to SEQ ID NO: 1064832
aaaguucaagauuuacacc

SEQ ID NO: 1064834 - RNA, 19 nt, Artificial Sequence
  Description of Artificial Sequence: Synthetic oligonucleotide
  Sense strand starting at position 3120 of SEQ ID NO: 915239
augucuauuugacaacaga

SEQ ID NO: 1064835 - RNA, 19 nt, Artificial Sequence
  Description of Artificial Sequence: Synthetic oligonucleotide
  Antisense strand to SEQ ID NO: 1064834
ucuguugucaaauagacau

SEQ ID NO: 1064836 - RNA, 19 nt, Artificial Sequence
  Description of Artificial Sequence: Synthetic oligonucleotide
  Sense strand starting at position 3136 of SEQ ID NO: 915239
agaaauauugaaugagcuu

SEQ ID NO: 1064837 - RNA, 19 nt, Artificial Sequence
  Description of Artificial Sequence: Synthetic oligonucleotide
  Antisense strand to SEQ ID NO: 1064836
aagcucauucaauauuucu

SEQ ID NO: 1064838 - RNA, 19 nt, Artificial Sequence
  Description of Artificial Sequence: Synthetic oligonucleotide
  Sense strand starting at position 3150 of SEQ ID NO: 915239
agcuuaaugaggugaacua

SEQ ID NO: 1064839 - RNA, 19 nt, Artificial Sequence
  Description of Artificial Sequence: Synthetic oligonucleotide
  Antisense strand to SEQ ID NO: 1064838
uaguucaccucauuaagcu

SEQ ID NO: 1064840 - RNA, 19 nt, Artificial Sequence
  Description of Artificial Sequence: Synthetic oligonucleotide
  Sense strand starting at position 3151 of SEQ ID NO: 915239
gcuuaaugaggugaacuau

SEQ ID NO: 1064841 - RNA, 19 nt, Artificial Sequence
  Description of Artificial Sequence: Synthetic oligonucleotide
  Antisense strand to SEQ ID NO: 1064840
auaguucaccucauuaagc

SEQ ID NO: 1064842 - RNA, 19 nt, Artificial Sequence
  Description of Artificial Sequence: Synthetic oligonucleotide
  Sense strand starting at position 3168 of SEQ ID NO: 915239
auagucuacucagcaauga

SEQ ID NO: 1064843 - RNA, 19 nt, Artificial Sequence
  Description of Artificial Sequence: Synthetic oligonucleotide
  Antisense strand to SEQ ID NO: 1064842
ucauugcugaguagacuau

SEQ ID NO: 1064844 - RNA, 19 nt, Artificial Sequence
  Description of Artificial Sequence: Synthetic oligonucleotide
  Sense strand starting at position 3186 of SEQ ID NO: 915239
aauggaaagguuuggguau

SEQ ID NO: 1064845 - RNA, 19 nt, Artificial Sequence
  Description of Artificial Sequence: Synthetic oligonucleotide
  Antisense strand to SEQ ID NO: 1064844
auacccaaaccuuuccauu

SEQ ID NO: 1064846 - RNA, 19 nt, Artificial Sequence
  Description of Artificial Sequence: Synthetic oligonucleotide
  Sense strand starting at position 3376 of SEQ ID NO: 915239
uggcacauauuguuaaaua

SEQ ID NO: 1064847 - RNA, 19 nt, Artificial Sequence
  Description of Artificial Sequence: Synthetic oligonucleotide
  Antisense strand to SEQ ID NO: 1064846
uauuuaacaauaugugcca

SEQ ID NO: 1064848 - RNA, 19 nt, Artificial Sequence
  Description of Artificial Sequence: Synthetic oligonucleotide
  Sense strand starting at position 3435 of SEQ ID NO: 915239
auacacuaccuuuguauga

SEQ ID NO: 1064849 - RNA, 19 nt, Artificial Sequence
  Description of Artificial Sequence: Synthetic oligonucleotide
  Antisense strand to SEQ ID NO: 1064848
ucauacaaagguaguguau

SEQ ID NO: 1064850 - RNA, 19 nt, Artificial Sequence
  Description of Artificial Sequence: Synthetic oligonucleotide
  Sense strand starting at position 3439 of SEQ ID NO: 915239
acuaccuuuguaugaagaa

SEQ ID NO: 1064851 - RNA, 19 nt, Artificial Sequence
  Description of Artificial Sequence: Synthetic oligonucleotide
  Antisense strand to SEQ ID NO: 1064850
uucuucauacaaagguagu

SEQ ID NO: 1064852 - RNA, 19 nt, Artificial Sequence
  Description of Artificial Sequence: Synthetic oligonucleotide
  Sense strand starting at position 3584 of SEQ ID NO: 915239
gauuuaaaguguuuggccu

SEQ ID NO: 1064853 - RNA, 19 nt, Artificial Sequence
  Description of Artificial Sequence: Synthetic oligonucleotide
  Antisense strand to SEQ ID NO: 1064852
aggccaaacacuuuaaauc

SEQ ID NO: 1064854 - RNA, 19 nt, Artificial Sequence
  Description of Artificial Sequence: Synthetic oligonucleotide
  Sense strand starting at position 3645 of SEQ ID NO: 915239
gggacaugugcuuaugagg

SEQ ID NO: 1064855 - RNA, 19 nt, Artificial Sequence
  Description of Artificial Sequence: Synthetic oligonucleotide
  Antisense strand to SEQ ID NO: 1064854
ccucauaagcacauguccc

SEQ ID NO: 1064856 - RNA, 19 nt, Artificial Sequence
  Description of Artificial Sequence: Synthetic oligonucleotide
  Sense strand starting at position 144 of SEQ ID NO: 915240
uaaugaaggcaaggaguuu

SEQ ID NO: 1064857 - RNA, 19 nt, Artificial Sequence
  Description of Artificial Sequence: Synthetic oligonucleotide
  Antisense strand to SEQ ID NO: 1064856
aaacuccuugccuucauua

SEQ ID NO: 1064858 - RNA, 19 nt, Artificial Sequence
  Description of Artificial Sequence: Synthetic oligonucleotide
  Sense strand starting at position 197 of SEQ ID NO: 915240
ggaauagugacagguaugu

SEQ ID NO: 1064859 - RNA, 19 nt, Artificial Sequence
  Description of Artificial Sequence: Synthetic oligonucleotide
  Antisense strand to SEQ ID NO: 1064858
acauaccugucacuauucc

SEQ ID NO: 1064860 - RNA, 19 nt, Artificial Sequence
  Description of Artificial Sequence: Synthetic oligonucleotide
  Sense strand starting at position 264 of SEQ ID NO: 915240
caaaucaaugaauguguga

SEQ ID NO: 1064861 - RNA, 19 nt, Artificial Sequence
  Description of Artificial Sequence: Synthetic oligonucleotide
  Antisense strand to SEQ ID NO: 1064860
ucacacauucauugauuug

SEQ ID NO: 1064862 - RNA, 19 nt, Artificial Sequence
  Description of Artificial Sequence: Synthetic oligonucleotide
  Sense strand starting at position 389 of SEQ ID NO: 915240
gucuaauugcuguugugca

SEQ ID NO: 1064863 - RNA, 19 nt, Artificial Sequence
  Description of Artificial Sequence: Synthetic oligonucleotide
  Antisense strand to SEQ ID NO: 1064862
ugcacaacagcaauuagac

SEQ ID NO: 1064864 - RNA, 19 nt, Artificial Sequence
  Description of Artificial Sequence: Synthetic oligonucleotide
  Sense strand starting at position 514 of SEQ ID NO: 915240
auccuuaauucucuggagu

SEQ ID NO: 1064865 - RNA, 19 nt, Artificial Sequence
  Description of Artificial Sequence: Synthetic oligonucleotide
  Antisense strand to SEQ ID NO: 1064864
acuccagagaauuaaggau

SEQ ID NO: 1064866 - RNA, 19 nt, Artificial Sequence
  Description of Artificial Sequence: Synthetic oligonucleotide
  Sense strand starting at position 517 of SEQ ID NO: 915240
cuuaauucucuggaguuaa

SEQ ID NO: 1064867 - RNA, 19 nt, Artificial Sequence
  Description of Artificial Sequence: Synthetic oligonucleotide
  Antisense strand to SEQ ID NO: 1064866
uuaacuccagagaauuaag

SEQ ID NO: 1064868 - RNA, 19 nt, Artificial Sequence
  Description of Artificial Sequence: Synthetic oligonucleotide
  Sense strand starting at position 612 of SEQ ID NO: 915240
auuaaaugcgacuaucacu

SEQ ID NO: 1064869 - RNA, 19 nt, Artificial Sequence
  Description of Artificial Sequence: Synthetic oligonucleotide
  Antisense strand to SEQ ID NO: 1064868
agugauagucgcauuuaau

SEQ ID NO: 1064870 - RNA, 19 nt, Artificial Sequence
  Description of Artificial Sequence: Synthetic oligonucleotide
  Sense strand starting at position 1057 of SEQ ID NO: 915240
ccucuuugucaggaugacu

SEQ ID NO: 1064871 - RNA, 19 nt, Artificial Sequence
  Description of Artificial Sequence: Synthetic oligonucleotide
  Antisense strand to SEQ ID NO: 1064870
agucauccugacaaagagg

SEQ ID NO: 1064872 - RNA, 19 nt, Artificial Sequence
  Description of Artificial Sequence: Synthetic oligonucleotide
  Sense strand starting at position 1120 of SEQ ID NO: 915240
uuccucaggcuauagauua

SEQ ID NO: 1064873 - RNA, 19 nt, Artificial Sequence
  Description of Artificial Sequence: Synthetic oligonucleotide
  Antisense strand to SEQ ID NO: 1064872
uaaucuauagccugaggaa

SEQ ID NO: 1064874 - RNA, 19 nt, Artificial Sequence
  Description of Artificial Sequence: Synthetic oligonucleotide
  Sense strand starting at position 1550 of SEQ ID NO: 915240
gugaguauaccacagccau

SEQ ID NO: 1064875 - RNA, 19 nt, Artificial Sequence
  Description of Artificial Sequence: Synthetic oligonucleotide
  Antisense strand to SEQ ID NO: 1064874
auggcugugguauacucac

SEQ ID NO: 1064876 - RNA, 19 nt, Artificial Sequence
  Description of Artificial Sequence: Synthetic oligonucleotide
  Sense strand starting at position 1583 of SEQ ID NO: 915240
cccugugggacaugacaau

SEQ ID NO: 1064877 - RNA, 19 nt, Artificial Sequence
  Description of Artificial Sequence: Synthetic oligonucleotide
  Antisense strand to SEQ ID NO: 1064876
auugucaugucccacaggg

SEQ ID NO: 1064878 - RNA, 19 nt, Artificial Sequence
  Description of Artificial Sequence: Synthetic oligonucleotide
  Sense strand starting at position 1694 of SEQ ID NO: 915240
aauaaaguugaguaaugca

SEQ ID NO: 1064879 - RNA, 19 nt, Artificial Sequence
  Description of Artificial Sequence: Synthetic oligonucleotide
  Antisense strand to SEQ ID NO: 1064878
ugcauuacucaacuuuauu

SEQ ID NO: 1064880 - RNA, 19 nt, Artificial Sequence
  Description of Artificial Sequence: Synthetic oligonucleotide
  Sense strand starting at position 1723 of SEQ ID NO: 915240
gagauaauguucuccucug

SEQ ID NO: 1064881 - RNA, 19 nt, Artificial Sequence
  Description of Artificial Sequence: Synthetic oligonucleotide
  Antisense strand to SEQ ID NO: 1064880
cagaggagaacauuaucuc

SEQ ID NO: 1064882 - RNA, 19 nt, Artificial Sequence
  Description of Artificial Sequence: Synthetic oligonucleotide
  Sense strand starting at position 1730 of SEQ ID NO: 915240
uguucuccucuggaacaaa

SEQ ID NO: 1064883 - RNA, 19 nt, Artificial Sequence
  Description of Artificial Sequence: Synthetic oligonucleotide
  Antisense strand to SEQ ID NO: 1064882
uuuguuccagaggagaaca

SEQ ID NO: 1064884 - RNA, 19 nt, Artificial Sequence
  Description of Artificial Sequence: Synthetic oligonucleotide
  Sense strand starting at position 1949 of SEQ ID NO: 915240
ucaagccugccaggauaaa

SEQ ID NO: 1064885 - RNA, 19 nt, Artificial Sequence
  Description of Artificial Sequence: Synthetic oligonucleotide
  Antisense strand to SEQ ID NO: 1064884
uuuauccuggcaggcuuga

SEQ ID NO: 1064886 - RNA, 19 nt, Artificial Sequence
  Description of Artificial Sequence: Synthetic oligonucleotide
  Sense strand starting at position 1977 of SEQ ID NO: 915240
ugaagaaugguuugaagua

SEQ ID NO: 1064887 - RNA, 19 nt, Artificial Sequence
  Description of Artificial Sequence: Synthetic oligonucleotide
  Antisense strand to SEQ ID NO: 1064886
uacuucaaaccauucuuca

SEQ ID NO: 1064888 - RNA, 19 nt, Artificial Sequence
  Description of Artificial Sequence: Synthetic oligonucleotide
  Sense strand starting at position 2009 of SEQ ID NO: 915240
agguauuauguguaauaag

SEQ ID NO: 1064889 - RNA, 19 nt, Artificial Sequence
  Description of Artificial Sequence: Synthetic oligonucleotide
  Antisense strand to SEQ ID NO: 1064888
cuuauuacacauaauaccu

SEQ ID NO: 1064890 - RNA, 19 nt, Artificial Sequence
  Description of Artificial Sequence: Synthetic oligonucleotide
  Sense strand starting at position 2262 of SEQ ID NO: 915240
ggcuuaugcccauaauuac

SEQ ID NO: 1064891 - RNA, 19 nt, Artificial Sequence
  Description of Artificial Sequence: Synthetic oligonucleotide
  Antisense strand to SEQ ID NO: 1064890
guaauuaugggcauaagcc

SEQ ID NO: 1064892 - RNA, 19 nt, Artificial Sequence
  Description of Artificial Sequence: Synthetic oligonucleotide
  Sense strand starting at position 2413 of SEQ ID NO: 915240
cuaauccagcucugaugau

SEQ ID NO: 1064893 - RNA, 19 nt, Artificial Sequence
  Description of Artificial Sequence: Synthetic oligonucleotide
  Antisense strand to SEQ ID NO: 1064892
aucaucagagcuggauuag

SEQ ID NO: 1064894 - RNA, 19 nt, Artificial Sequence
  Description of Artificial Sequence: Synthetic oligonucleotide
  Sense strand starting at position 2417 of SEQ ID NO: 915240
uccagcucugaugauauaa

SEQ ID NO: 1064895 - RNA, 19 nt, Artificial Sequence
  Description of Artificial Sequence: Synthetic oligonucleotide
  Antisense strand to SEQ ID NO: 1064894
uuauaucaucagagcugga

SEQ ID NO: 1064896 - RNA, 19 nt, Artificial Sequence
  Description of Artificial Sequence: Synthetic oligonucleotide
  Sense strand starting at position 2622 of SEQ ID NO: 915240
uugagugggccaggagauu

SEQ ID NO: 1064897 - RNA, 19 nt, Artificial Sequence
  Description of Artificial Sequence: Synthetic oligonucleotide
  Antisense strand to SEQ ID NO: 1064896
aaucuccuggcccacucaa

SEQ ID NO: 1064898 - RNA, 19 nt, Artificial Sequence
  Description of Artificial Sequence: Synthetic oligonucleotide
  Sense strand starting at position 2653 of SEQ ID NO: 915240
guggaugugguugacagaa

SEQ ID NO: 1064899 - RNA, 19 nt, Artificial Sequence
  Description of Artificial Sequence: Synthetic oligonucleotide
  Antisense strand to SEQ ID NO: 1064898
uucugucaaccacauccac

SEQ ID NO: 1064900 - RNA, 19 nt, Artificial Sequence
  Description of Artificial Sequence: Synthetic oligonucleotide
  Sense strand starting at position 2692 of SEQ ID NO: 915240
cugagauucuaguuuagau

SEQ ID NO: 1064901 - RNA, 19 nt, Artificial Sequence
  Description of Artificial Sequence: Synthetic oligonucleotide
  Antisense strand to SEQ ID NO: 1064900
aucuaaacuagaaucucag

SEQ ID NO: 1064902 - RNA, 19 nt, Artificial Sequence
  Description of Artificial Sequence: Synthetic oligonucleotide
  Sense strand starting at position 2761 of SEQ ID NO: 915240
agguguaagaccugaacca

SEQ ID NO: 1064903 - RNA, 19 nt, Artificial Sequence
  Description of Artificial Sequence: Synthetic oligonucleotide
  Antisense strand to SEQ ID NO: 1064902
ugguucaggucuuacaccu

SEQ ID NO: 1064904 - RNA, 19 nt, Artificial Sequence
  Description of Artificial Sequence: Synthetic oligonucleotide
  Sense strand starting at position 2863 of SEQ ID NO: 915240
agcugugagaucugaacug

SEQ ID NO: 1064905 - RNA, 19 nt, Artificial Sequence
  Description of Artificial Sequence: Synthetic oligonucleotide
  Antisense strand to SEQ ID NO: 1064904
caguucagaucucacagcu

SEQ ID NO: 1064906 - RNA, 19 nt, Artificial Sequence
  Description of Artificial Sequence: Synthetic oligonucleotide
  Sense strand starting at position 2935 of SEQ ID NO: 915240
ggguguguugcuuucagcu

SEQ ID NO: 1064907 - RNA, 19 nt, Artificial Sequence
  Description of Artificial Sequence: Synthetic oligonucleotide
  Antisense strand to SEQ ID NO: 1064906
agcugaaagcaacacaccc

SEQ ID NO: 1064908 - RNA, 19 nt, Artificial Sequence
  Description of Artificial Sequence: Synthetic oligonucleotide
  Sense strand starting at position 2951 of SEQ ID NO: 915240
gcugaaacacuguauauua

SEQ ID NO: 1064909 - RNA, 19 nt, Artificial Sequence
  Description of Artificial Sequence: Synthetic oligonucleotide
  Antisense strand to SEQ ID NO: 1064908
uaauauacaguguuucagc

SEQ ID NO: 1064910 - RNA, 19 nt, Artificial Sequence
  Description of Artificial Sequence: Synthetic oligonucleotide
  Sense strand starting at position 3140 of SEQ ID NO: 915240
acucaauauguauaucgau

SEQ ID NO: 1064911 - RNA, 19 nt, Artificial Sequence
  Description of Artificial Sequence: Synthetic oligonucleotide
  Antisense strand to SEQ ID NO: 1064910
aucgauauacauauugagu

SEQ ID NO: 1064912 - RNA, 19 nt, Artificial Sequence
  Description of Artificial Sequence: Synthetic oligonucleotide
  Sense strand starting at position 3176 of SEQ ID NO: 915240
ggguguuaucuccaagagc

SEQ ID NO: 1064913 - RNA, 19 nt, Artificial Sequence
  Description of Artificial Sequence: Synthetic oligonucleotide
  Antisense strand to SEQ ID NO: 1064912
gcucuuggagauaacaccc

SEQ ID NO: 1064914 - RNA, 19 nt, Artificial Sequence
  Description of Artificial Sequence: Synthetic oligonucleotide
  Sense strand starting at position 3179 of SEQ ID NO: 915240
uguuaucuccaagagcacu

SEQ ID NO: 1064915 - RNA, 19 nt, Artificial Sequence
  Description of Artificial Sequence: Synthetic oligonucleotide
  Antisense strand to SEQ ID NO: 1064914
agugcucuuggagauaaca

SEQ ID NO: 1064916 - RNA, 19 nt, Artificial Sequence
  Description of Artificial Sequence: Synthetic oligonucleotide
  Sense strand starting at position 3235 of SEQ ID NO: 915240
agaauacucuaagagaaag

SEQ ID NO: 1064917 - RNA, 19 nt, Artificial Sequence
  Description of Artificial Sequence: Synthetic oligonucleotide
  Antisense strand to SEQ ID NO: 1064916
cuuucucuuagaguauucu

SEQ ID NO: 1064918 - RNA, 19 nt, Artificial Sequence
  Description of Artificial Sequence: Synthetic oligonucleotide
  Sense strand starting at position 3261 of SEQ ID NO: 915240
gaguuaccagaaugcaacu

SEQ ID NO: 1064919 - RNA, 19 nt, Artificial Sequence
  Description of Artificial Sequence: Synthetic oligonucleotide
  Antisense strand to SEQ ID NO: 1064918
aguugcauucugguaacuc

SEQ ID NO: 1064920 - RNA, 19 nt, Artificial Sequence
  Description of Artificial Sequence: Synthetic oligonucleotide
  Sense strand starting at position 3296 of SEQ ID NO: 915240
cgggaaguucaggaauucu

SEQ ID NO: 1064921 - RNA, 19 nt, Artificial Sequence
  Description of Artificial Sequence: Synthetic oligonucleotide
  Antisense strand to SEQ ID NO: 1064920
agaauuccugaacuucccg

SEQ ID NO: 1064922 - RNA, 19 nt, Artificial Sequence
  Description of Artificial Sequence: Synthetic oligonucleotide
  Sense strand starting at position 3369 of SEQ ID NO: 915240
aagagaauuuguugaagaa

SEQ ID NO: 1064923 - RNA, 19 nt, Artificial Sequence
  Description of Artificial Sequence: Synthetic oligonucleotide
  Antisense strand to SEQ ID NO: 1064922
uucuucaacaaauucucuu

SEQ ID NO: 1064924 - RNA, 19 nt, Artificial Sequence
  Description of Artificial Sequence: Synthetic oligonucleotide
  Sense strand starting at position 3501 of SEQ ID NO: 915240
ugagaugauguccgacacu

SEQ ID NO: 1064925 - RNA, 19 nt, Artificial Sequence
  Description of Artificial Sequence: Synthetic oligonucleotide
  Antisense strand to SEQ ID NO: 1064924
agugucggacaucaucuca

SEQ ID NO: 1064926 - RNA, 19 nt, Artificial Sequence
  Description of Artificial Sequence: Synthetic oligonucleotide
  Sense strand starting at position 3629 of SEQ ID NO: 915240
guggaacccucccuuacua

SEQ ID NO: 1064927 - RNA, 19 nt, Artificial Sequence
  Description of Artificial Sequence: Synthetic oligonucleotide
  Antisense strand to SEQ ID NO: 1064926
uaguaagggaggguuccac

SEQ ID NO: 1064928 - RNA, 19 nt, Artificial Sequence
  Description of Artificial Sequence: Synthetic oligonucleotide
  Sense strand starting at position 3670 of SEQ ID NO: 915240
cccuguguuggauaugaau

SEQ ID NO: 1064929 - RNA, 19 nt, Artificial Sequence
  Description of Artificial Sequence: Synthetic oligonucleotide
  Antisense strand to SEQ ID NO: 1064928
auucauauccaacacaggg

SEQ ID NO: 1064930 - RNA, 19 nt, Artificial Sequence
  Description of Artificial Sequence: Synthetic oligonucleotide
  Sense strand starting at position 3715 of SEQ ID NO: 915240
aagggaggcugcuuaauaa

SEQ ID NO: 1064931 - RNA, 19 nt, Artificial Sequence
  Description of Artificial Sequence: Synthetic oligonucleotide
  Antisense strand to SEQ ID NO: 1064930
uuauuaagcagccucccuu

SEQ ID NO: 1064932 - RNA, 19 nt, Artificial Sequence
  Description of Artificial Sequence: Synthetic oligonucleotide
  Sense strand starting at position 3736 of SEQ ID NO: 915240
ggucuagugauugaagcac

SEQ ID NO: 1064933 - RNA, 19 nt, Artificial Sequence
  Description of Artificial Sequence: Synthetic oligonucleotide
  Antisense strand to SEQ ID NO: 1064932
gugcuucaaucacuagacc

SEQ ID NO: 1064934 - RNA, 19 nt, Artificial Sequence
  Description of Artificial Sequence: Synthetic oligonucleotide
  Sense strand starting at position 3742 of SEQ ID NO: 915240
gugauugaagcacauucuu

SEQ ID NO: 1064935 - RNA, 19 nt, Artificial Sequence
  Description of Artificial Sequence: Synthetic oligonucleotide
  Antisense strand to SEQ ID NO: 1064934
aagaaugugcuucaaucac

SEQ ID NO: 1064936 - RNA, 19 nt, Artificial Sequence
  Description of Artificial Sequence: Synthetic oligonucleotide
  Sense strand starting at position 200 of SEQ ID NO: 915241
ucaucuagucauuguuaaa

SEQ ID NO: 1064937 - RNA, 19 nt, Artificial Sequence
  Description of Artificial Sequence: Synthetic oligonucleotide
  Antisense strand to SEQ ID NO: 1064936
uuuaacaaugacuagauga

SEQ ID NO: 1064938 - RNA, 19 nt, Artificial Sequence
  Description of Artificial Sequence: Synthetic oligonucleotide
  Sense strand starting at position 289 of SEQ ID NO: 915241
auugcauuacacuguaaga

SEQ ID NO: 1064939 - RNA, 19 nt, Artificial Sequence
  Description of Artificial Sequence: Synthetic oligonucleotide
  Antisense strand to SEQ ID NO: 1064938
ucuuacaguguaaugcaau

SEQ ID NO: 1064940 - RNA, 19 nt, Artificial Sequence
  Description of Artificial Sequence: Synthetic oligonucleotide
  Sense strand starting at position 392 of SEQ ID NO: 915241
ccaucacgcugcucaauuu

SEQ ID NO: 1064941 - RNA, 19 nt, Artificial Sequence
  Description of Artificial Sequence: Synthetic oligonucleotide
  Antisense strand to SEQ ID NO: 1064940
aaauugagcagcgugaugg

SEQ ID NO: 1064942 - RNA, 19 nt, Artificial Sequence
  Description of Artificial Sequence: Synthetic oligonucleotide
  Sense strand starting at position 413 of SEQ ID NO: 915241
uuugaaauuaggugugguu

SEQ ID NO: 1064943 - RNA, 19 nt, Artificial Sequence
  Description of Artificial Sequence: Synthetic oligonucleotide
  Antisense strand to SEQ ID NO: 1064942
aaccacaccuaauuucaaa

SEQ ID NO: 1064944 - RNA, 19 nt, Artificial Sequence
  Description of Artificial Sequence: Synthetic oligonucleotide
  Sense strand starting at position 437 of SEQ ID NO: 915241
cugauaugacuaugcagua

SEQ ID NO: 1064945 - RNA, 19 nt, Artificial Sequence
  Description of Artificial Sequence: Synthetic oligonucleotide
  Antisense strand to SEQ ID NO: 1064944
uacugcauagucauaucag

SEQ ID NO: 1064946 - RNA, 19 nt, Artificial Sequence
  Description of Artificial Sequence: Synthetic oligonucleotide
  Sense strand starting at position 449 of SEQ ID NO: 915241
ugcaguacaccaugaugau

SEQ ID NO: 1064947 - RNA, 19 nt, Artificial Sequence
  Description of Artificial Sequence: Synthetic oligonucleotide
  Antisense strand to SEQ ID NO: 1064946
aucaucaugguguacugca

SEQ ID NO: 1064948 - RNA, 19 nt, Artificial Sequence
  Description of Artificial Sequence: Synthetic oligonucleotide
  Sense strand starting at position 2219 of SEQ ID NO: 915241
ggaacaaauucucuuagca

SEQ ID NO: 1064949 - RNA, 19 nt, Artificial Sequence
  Description of Artificial Sequence: Synthetic oligonucleotide
  Antisense strand to SEQ ID NO: 1064948
ugcuaagagaauuuguucc

SEQ ID NO: 1064950 - RNA, 19 nt, Artificial Sequence
  Description of Artificial Sequence: Synthetic oligonucleotide
  Sense strand starting at position 2391 of SEQ ID NO: 915241
auacguugccagggagaca

SEQ ID NO: 1064951 - RNA, 19 nt, Artificial Sequence
  Description of Artificial Sequence: Synthetic oligonucleotide
  Antisense strand to SEQ ID NO: 1064950
ugucucccuggcaacguau

SEQ ID NO: 1064952 - RNA, 19 nt, Artificial Sequence
  Description of Artificial Sequence: Synthetic oligonucleotide
  Sense strand starting at position 2474 of SEQ ID NO: 915241
uauuuaugcuguuuguuga

SEQ ID NO: 1064953 - RNA, 19 nt, Artificial Sequence
  Description of Artificial Sequence: Synthetic oligonucleotide
  Antisense strand to SEQ ID NO: 1064952
ucaacaaacagcauaaaua

SEQ ID NO: 1064954 - RNA, 19 nt, Artificial Sequence
  Description of Artificial Sequence: Synthetic oligonucleotide
  Sense strand starting at position 2475 of SEQ ID NO: 915241
auuuaugcuguuuguugaa

SEQ ID NO: 1064955 - RNA, 19 nt, Artificial Sequence
  Description of Artificial Sequence: Synthetic oligonucleotide
  Antisense strand to SEQ ID NO: 1064954
uucaacaaacagcauaaau

SEQ ID NO: 1064956 - RNA, 19 nt, Artificial Sequence
  Description of Artificial Sequence: Synthetic oligonucleotide
  Sense strand starting at position 2731 of SEQ ID NO: 915241
uaaguaggugcauaaacua

SEQ ID NO: 1064957 - RNA, 19 nt, Artificial Sequence
  Description of Artificial Sequence: Synthetic oligonucleotide
  Antisense strand to SEQ ID NO: 1064956
uaguuuaugcaccuacuua

SEQ ID NO: 1064958 - RNA, 19 nt, Artificial Sequence
  Description of Artificial Sequence: Synthetic oligonucleotide
  Sense strand starting at position 2752 of SEQ ID NO: 915241
ggcugaggacuaugagaau

SEQ ID NO: 1064959 - RNA, 19 nt, Artificial Sequence
  Description of Artificial Sequence: Synthetic oligonucleotide
  Antisense strand to SEQ ID NO: 1064958
auucucauaguccucagcc

SEQ ID NO: 1064960 - RNA, 19 nt, Artificial Sequence
  Description of Artificial Sequence: Synthetic oligonucleotide
  Sense strand starting at position 2755 of SEQ ID NO: 915241
ugaggacuaugagaauacu

SEQ ID NO: 1064961 - RNA, 19 nt, Artificial Sequence
  Description of Artificial Sequence: Synthetic oligonucleotide
  Antisense strand to SEQ ID NO: 1064960
aguauucucauaguccuca

SEQ ID NO: 1064962 - RNA, 19 nt, Artificial Sequence
  Description of Artificial Sequence: Synthetic oligonucleotide
  Sense strand starting at position 2801 of SEQ ID NO: 915241
ugacucuuccuccaggauu

SEQ ID NO: 1064963 - RNA, 19 nt, Artificial Sequence
  Description of Artificial Sequence: Synthetic oligonucleotide
  Antisense strand to SEQ ID NO: 1064962
aauccuggaggaagaguca

SEQ ID NO: 1064964 - RNA, 19 nt, Artificial Sequence
  Description of Artificial Sequence: Synthetic oligonucleotide
  Sense strand starting at position 2825 of SEQ ID NO: 915241
uagagaagguaucuacugu

SEQ ID NO: 1064965 - RNA, 19 nt, Artificial Sequence
  Description of Artificial Sequence: Synthetic oligonucleotide
  Antisense strand to SEQ ID NO: 1064964
acaguagauaccuucucua

SEQ ID NO: 1064966 - RNA, 19 nt, Artificial Sequence
  Description of Artificial Sequence: Synthetic oligonucleotide
  Sense strand starting at position 2838 of SEQ ID NO: 915241
uacuguuaaggugaauuau

SEQ ID NO: 1064967 - RNA, 19 nt, Artificial Sequence
  Description of Artificial Sequence: Synthetic oligonucleotide
  Antisense strand to SEQ ID NO: 1064966
auaauucaccuuaacagua

SEQ ID NO: 1064968 - RNA, 19 nt, Artificial Sequence
  Description of Artificial Sequence: Synthetic oligonucleotide
  Sense strand starting at position 2869 of SEQ ID NO: 915241
caagguuuccaaggguguu

SEQ ID NO: 1064969 - RNA, 19 nt, Artificial Sequence
  Description of Artificial Sequence: Synthetic oligonucleotide
  Antisense strand to SEQ ID NO: 1064968
aacacccuuggaaaccuug

SEQ ID NO: 1064970 - RNA, 19 nt, Artificial Sequence
  Description of Artificial Sequence: Synthetic oligonucleotide
  Sense strand starting at position 3047 of SEQ ID NO: 915241
ucaaacuuacuuggugaua

SEQ ID NO: 1064971 - RNA, 19 nt, Artificial Sequence
  Description of Artificial Sequence: Synthetic oligonucleotide
  Antisense strand to SEQ ID NO: 1064970
uaucaccaaguaaguuuga

SEQ ID NO: 1064972 - RNA, 19 nt, Artificial Sequence
  Description of Artificial Sequence: Synthetic oligonucleotide
  Sense strand starting at position 3144 of SEQ ID NO: 915241
uuguguguuuguucuauuu

SEQ ID NO: 1064973 - RNA, 19 nt, Artificial Sequence
  Description of Artificial Sequence: Synthetic oligonucleotide
  Antisense strand to SEQ ID NO: 1064972
aaauagaacaaacacacaa

SEQ ID NO: 1064974 - RNA, 19 nt, Artificial Sequence
  Description of Artificial Sequence: Synthetic oligonucleotide
  Sense strand starting at position 3190 of SEQ ID NO: 915241
gugggaaauuaauucguac

SEQ ID NO: 1064975 - RNA, 19 nt, Artificial Sequence
  Description of Artificial Sequence: Synthetic oligonucleotide
  Antisense strand to SEQ ID NO: 1064974
guacgaauuaauuucccac

SEQ ID NO: 1064976 - RNA, 19 nt, Artificial Sequence
  Description of Artificial Sequence: Synthetic oligonucleotide
  Sense strand starting at position 3192 of SEQ ID NO: 915241
gggaaauuaauucguacac

SEQ ID NO: 1064977 - RNA, 19 nt, Artificial Sequence
  Description of Artificial Sequence: Synthetic oligonucleotide
  Antisense strand to SEQ ID NO: 1064976
guguacgaauuaauuuccc

SEQ ID NO: 1064978 - RNA, 19 nt, Artificial Sequence
  Description of Artificial Sequence: Synthetic oligonucleotide
  Sense strand starting at position 3193 of SEQ ID NO: 915241
ggaaauuaauucguacacu

SEQ ID NO: 1064979 - RNA, 19 nt, Artificial Sequence
  Description of Artificial Sequence: Synthetic oligonucleotide
  Antisense strand to SEQ ID NO: 1064978
aguguacgaauuaauuucc

SEQ ID NO: 1064980 - RNA, 19 nt, Artificial Sequence
  Description of Artificial Sequence: Synthetic oligonucleotide
  Sense strand starting at position 3201 of SEQ ID NO: 915241
auucguacacuugaguaaa

SEQ ID NO: 1064981 - RNA, 19 nt, Artificial Sequence
  Description of Artificial Sequence: Synthetic oligonucleotide
  Antisense strand to SEQ ID NO: 1064980
uuuacucaaguguacgaau

SEQ ID NO: 1064982 - RNA, 19 nt, Artificial Sequence
  Description of Artificial Sequence: Synthetic oligonucleotide
  Sense strand starting at position 3315 of SEQ ID NO: 915241
ggccauggaguccaauaua

SEQ ID NO: 1064983 - RNA, 19 nt, Artificial Sequence
  Description of Artificial Sequence: Synthetic oligonucleotide
  Antisense strand to SEQ ID NO: 1064982
uauauuggacuccauggcc

SEQ ID NO: 1064984 - RNA, 19 nt, Artificial Sequence
  Description of Artificial Sequence: Synthetic oligonucleotide
  Sense strand starting at position 3362 of SEQ ID NO: 915241
gcaagcaacccagauguuu

SEQ ID NO: 1064985 - RNA, 19 nt, Artificial Sequence
  Description of Artificial Sequence: Synthetic oligonucleotide
  Antisense strand to SEQ ID NO: 1064984
aaacaucuggguugcuugc

SEQ ID NO: 1064986 - RNA, 19 nt, Artificial Sequence
  Description of Artificial Sequence: Synthetic oligonucleotide
  Sense strand starting at position 3436 of SEQ ID NO: 915241
ggucaaucauggccuuauc

SEQ ID NO: 1064987 - RNA, 19 nt, Artificial Sequence
  Description of Artificial Sequence: Synthetic oligonucleotide
  Antisense strand to SEQ ID NO: 1064986
gauaaggccaugauugacc

SEQ ID NO: 1064988 - RNA, 19 nt, Artificial Sequence
  Description of Artificial Sequence: Synthetic oligonucleotide
  Sense strand starting at position 3444 of SEQ ID NO: 915241
auggccuuaucucugagaa

SEQ ID NO: 1064989 - RNA, 19 nt, Artificial Sequence
  Description of Artificial Sequence: Synthetic oligonucleotide
  Antisense strand to SEQ ID NO: 1064988
uucucagagauaaggccau

SEQ ID NO: 1064990 - RNA, 19 nt, Artificial Sequence
  Description of Artificial Sequence: Synthetic oligonucleotide
  Sense strand starting at position 3445 of SEQ ID NO: 915241
uggccuuaucucugagaaa

SEQ ID NO: 1064991 - RNA, 19 nt, Artificial Sequence
  Description of Artificial Sequence: Synthetic oligonucleotide
  Antisense strand to SEQ ID NO: 1064990
uuucucagagauaaggcca

SEQ ID NO: 1064992 - RNA, 19 nt, Artificial Sequence
  Description of Artificial Sequence: Synthetic oligonucleotide
  Sense strand starting at position 3457 of SEQ ID NO: 915241
ugagaaagcugacccuuua

SEQ ID NO: 1064993 - RNA, 19 nt, Artificial Sequence
  Description of Artificial Sequence: Synthetic oligonucleotide
  Antisense strand to SEQ ID NO: 1064992
uaaagggucagcuuucuca

SEQ ID NO: 1064994 - RNA, 19 nt, Artificial Sequence
  Description of Artificial Sequence: Synthetic oligonucleotide
  Sense strand starting at position 3522 of SEQ ID NO: 915241
gcccaaauggcucaauugu

SEQ ID NO: 1064995 - RNA, 19 nt, Artificial Sequence
  Description of Artificial Sequence: Synthetic oligonucleotide
  Antisense strand to SEQ ID NO: 1064994
acaauugagccauuugggc

SEQ ID NO: 1064996 - RNA, 19 nt, Artificial Sequence
  Description of Artificial Sequence: Synthetic oligonucleotide
  Sense strand starting at position 3530 of SEQ ID NO: 915241
ggcucaauugucuaggguu

SEQ ID NO: 1064997 - RNA, 19 nt, Artificial Sequence
  Description of Artificial Sequence: Synthetic oligonucleotide
  Antisense strand to SEQ ID NO: 1064996
aacccuagacaauugagcc

SEQ ID NO: 1064998 - RNA, 19 nt, Artificial Sequence
  Description of Artificial Sequence: Synthetic oligonucleotide
  Sense strand starting at position 3566 of SEQ ID NO: 915241
ccagcuaccuggcuauuua

SEQ ID NO: 1064999 - RNA, 19 nt, Artificial Sequence
  Description of Artificial Sequence: Synthetic oligonucleotide
  Antisense strand to SEQ ID NO: 1064998
uaaauagccagguagcugg

SEQ ID NO: 1065000 - RNA, 19 nt, Artificial Sequence
  Description of Artificial Sequence: Synthetic oligonucleotide
  Sense strand starting at position 3654 of SEQ ID NO: 915241
cagcuugaguucccaggau

SEQ ID NO: 1065001 - RNA, 19 nt, Artificial Sequence
  Description of Artificial Sequence: Synthetic oligonucleotide
  Antisense strand to SEQ ID NO: 1065000
auccugggaacucaagcug

SEQ ID NO: 1065002 - RNA, 19 nt, Artificial Sequence
  Description of Artificial Sequence: Synthetic oligonucleotide
  Sense strand starting at position 3673 of SEQ ID NO: 915241
gcaggugacuccuuauuuc

SEQ ID NO: 1065003 - RNA, 19 nt, Artificial Sequence
  Description of Artificial Sequence: Synthetic oligonucleotide
  Antisense strand to SEQ ID NO: 1065002
gaaauaaggagucaccugc

SEQ ID NO: 1065004 - RNA, 19 nt, Artificial Sequence
  Description of Artificial Sequence: Synthetic oligonucleotide
  Sense strand starting at position 3870 of SEQ ID NO: 915241
acagaaauacccggagucu

SEQ ID NO: 1065005 - RNA, 19 nt, Artificial Sequence
  Description of Artificial Sequence: Synthetic oligonucleotide
  Antisense strand to SEQ ID NO: 1065004
agacuccggguauuucugu

SEQ ID NO: 1065006 - RNA, 19 nt, Artificial Sequence
  Description of Artificial Sequence: Synthetic oligonucleotide
  Sense strand starting at position 3871 of SEQ ID NO: 915241
cagaaauacccggagucuu

SEQ ID NO: 1065007 - RNA, 19 nt, Artificial Sequence
  Description of Artificial Sequence: Synthetic oligonucleotide
  Antisense strand to SEQ ID NO: 1065006
aagacuccggguauuucug

SEQ ID NO: 1065008 - RNA, 19 nt, Artificial Sequence
  Description of Artificial Sequence: Synthetic oligonucleotide
  Sense strand starting at position 3930 of SEQ ID NO: 915241
agucuagucacagaggcuu

SEQ ID NO: 1065009 - RNA, 19 nt, Artificial Sequence
  Description of Artificial Sequence: Synthetic oligonucleotide
  Antisense strand to SEQ ID NO: 1065008
aagccucugugacuagacu

SEQ ID NO: 1065010 - RNA, 19 nt, Artificial Sequence
  Description of Artificial Sequence: Synthetic oligonucleotide
  Sense strand starting at position 3936 of SEQ ID NO: 915241
gucacagaggcuuaucgaa

SEQ ID NO: 1065011 - RNA, 19 nt, Artificial Sequence
  Description of Artificial Sequence: Synthetic oligonucleotide
  Antisense strand to SEQ ID NO: 1065010
uucgauaagccucugugac

SEQ ID NO: 1065012 - RNA, 19 nt, Artificial Sequence
  Description of Artificial Sequence: Synthetic oligonucleotide
  Sense strand starting at position 3938 of SEQ ID NO: 915241
cacagaggcuuaucgaagu

SEQ ID NO: 1065013 - RNA, 19 nt, Artificial Sequence
  Description of Artificial Sequence: Synthetic oligonucleotide
  Antisense strand to SEQ ID NO: 1065012
acuucgauaagccucugug

SEQ ID NO: 1065014 - RNA, 19 nt, Artificial Sequence
  Description of Artificial Sequence: Synthetic oligonucleotide
  Sense strand starting at position 3944 of SEQ ID NO: 915241
ggcuuaucgaaguaauguu

SEQ ID NO: 1065015 - RNA, 19 nt, Artificial Sequence
  Description of Artificial Sequence: Synthetic oligonucleotide
  Antisense strand to SEQ ID NO: 1065014
aacauuacuucgauaagcc

SEQ ID NO: 1065016 - RNA, 19 nt, Artificial Sequence
  Description of Artificial Sequence: Synthetic oligonucleotide
  Sense strand starting at position 45 of SEQ ID NO: 915242
uaaguauugcuuuagggac

SEQ ID NO: 1065017 - RNA, 19 nt, Artificial Sequence
  Description of Artificial Sequence: Synthetic oligonucleotide
  Antisense strand to SEQ ID NO: 1065016
gucccuaaagcaauacuua

SEQ ID NO: 1065018 - RNA, 19 nt, Artificial Sequence
  Description of Artificial Sequence: Synthetic oligonucleotide
  Sense strand starting at position 69 of SEQ ID NO: 915242
gguuguugagaggguuuaa

SEQ ID NO: 1065019 - RNA, 19 nt, Artificial Sequence
  Description of Artificial Sequence: Synthetic oligonucleotide
  Antisense strand to SEQ ID NO: 1065018
uuaaacccucucaacaacc

SEQ ID NO: 1065020 - RNA, 19 nt, Artificial Sequence
  Description of Artificial Sequence: Synthetic oligonucleotide
  Sense strand starting at position 106 of SEQ ID NO: 915242
guuaacaaguuaucauauc

SEQ ID NO: 1065021 - RNA, 19 nt, Artificial Sequence
  Description of Artificial Sequence: Synthetic oligonucleotide
  Antisense strand to SEQ ID NO: 1065020
gauaugauaacuuguuaac

SEQ ID NO: 1065022 - RNA, 19 nt, Artificial Sequence
  Description of Artificial Sequence: Synthetic oligonucleotide
  Sense strand starting at position 118 of SEQ ID NO: 915242
ucauaucugcauugggauu

SEQ ID NO: 1065023 - RNA, 19 nt, Artificial Sequence
  Description of Artificial Sequence: Synthetic oligonucleotide
  Antisense strand to SEQ ID NO: 1065022
aaucccaaugcagauauga

SEQ ID NO: 1065024 - RNA, 19 nt, Artificial Sequence
  Description of Artificial Sequence: Synthetic oligonucleotide
  Sense strand starting at position 165 of SEQ ID NO: 915242
agcauagaauaggucagaa

SEQ ID NO: 1065025 - RNA, 19 nt, Artificial Sequence
  Description of Artificial Sequence: Synthetic oligonucleotide
  Antisense strand to SEQ ID NO: 1065024
uucugaccuauucuaugcu

SEQ ID NO: 1065026 - RNA, 19 nt, Artificial Sequence
  Description of Artificial Sequence: Synthetic oligonucleotide
  Sense strand starting at position 281 of SEQ ID NO: 915242
guagcucuucgagagauaa

SEQ ID NO: 1065027 - RNA, 19 nt, Artificial Sequence
  Description of Artificial Sequence: Synthetic oligonucleotide
  Antisense strand to SEQ ID NO: 1065026
uuaucucucgaagagcuac

SEQ ID NO: 1065028 - RNA, 19 nt, Artificial Sequence
  Description of Artificial Sequence: Synthetic oligonucleotide
  Sense strand starting at position 283 of SEQ ID NO: 915242
agcucuucgagagauaaau

SEQ ID NO: 1065029 - RNA, 19 nt, Artificial Sequence
  Description of Artificial Sequence: Synthetic oligonucleotide
  Antisense strand to SEQ ID NO: 1065028
auuuaucucucgaagagcu

SEQ ID NO: 1065030 - RNA, 19 nt, Artificial Sequence
  Description of Artificial Sequence: Synthetic oligonucleotide
  Sense strand starting at position 504 of SEQ ID NO: 915242
ugcaaagcagaugauauau

SEQ ID NO: 1065031 - RNA, 19 nt, Artificial Sequence
  Description of Artificial Sequence: Synthetic oligonucleotide
  Antisense strand to SEQ ID NO: 1065030
auauaucaucugcuuugca

SEQ ID NO: 1065032 - RNA, 19 nt, Artificial Sequence
  Description of Artificial Sequence: Synthetic oligonucleotide
  Sense strand starting at position 548 of SEQ ID NO: 915242
acggauauguaacuuauau

SEQ ID NO: 1065033 - RNA, 19 nt, Artificial Sequence
  Description of Artificial Sequence: Synthetic oligonucleotide
  Antisense strand to SEQ ID NO: 1065032
auauaaguuacauauccgu

SEQ ID NO: 1065034 - RNA, 19 nt, Artificial Sequence
  Description of Artificial Sequence: Synthetic oligonucleotide
  Sense strand starting at position 576 of SEQ ID NO: 915242
uugauuauguugcuaaaga

SEQ ID NO: 1065035 - RNA, 19 nt, Artificial Sequence
  Description of Artificial Sequence: Synthetic oligonucleotide
  Antisense strand to SEQ ID NO: 1065034
ucuuuagcaacauaaucaa

SEQ ID NO: 1065036 - RNA, 19 nt, Artificial Sequence
  Description of Artificial Sequence: Synthetic oligonucleotide
  Sense strand starting at position 640 of SEQ ID NO: 915242
aagagauugcugcaggcua

SEQ ID NO: 1065037 - RNA, 19 nt, Artificial Sequence
  Description of Artificial Sequence: Synthetic oligonucleotide
  Antisense strand to SEQ ID NO: 1065036
uagccugcagcaaucucuu

SEQ ID NO: 1065038 - RNA, 19 nt, Artificial Sequence
  Description of Artificial Sequence: Synthetic oligonucleotide
  Sense strand starting at position 814 of SEQ ID NO: 915242
gcuggcauuaaugagucua

SEQ ID NO: 1065039 - RNA, 19 nt, Artificial Sequence
  Description of Artificial Sequence: Synthetic oligonucleotide
  Antisense strand to SEQ ID NO: 1065038
uagacucauuaaugccagc

SEQ ID NO: 1065040 - RNA, 19 nt, Artificial Sequence
  Description of Artificial Sequence: Synthetic oligonucleotide
  Sense strand starting at position 2130 of SEQ ID NO: 915242
guaaguaaaguuuaccuca

SEQ ID NO: 1065041 - RNA, 19 nt, Artificial Sequence
  Description of Artificial Sequence: Synthetic oligonucleotide
  Antisense strand to SEQ ID NO: 1065040
ugagguaaacuuuacuuac

SEQ ID NO: 1065042 - RNA, 19 nt, Artificial Sequence
  Description of Artificial Sequence: Synthetic oligonucleotide
  Sense strand starting at position 2133 of SEQ ID NO: 915242
aguaaaguuuaccucaaau

SEQ ID NO: 1065043 - RNA, 19 nt, Artificial Sequence
  Description of Artificial Sequence: Synthetic oligonucleotide
  Antisense strand to SEQ ID NO: 1065042
auuugagguaaacuuuacu

SEQ ID NO: 1065044 - RNA, 19 nt, Artificial Sequence
  Description of Artificial Sequence: Synthetic oligonucleotide
  Sense strand starting at position 2368 of SEQ ID NO: 915242
cuugccuaaggaugguaaa

SEQ ID NO: 1065045 - RNA, 19 nt, Artificial Sequence
  Description of Artificial Sequence: Synthetic oligonucleotide
  Antisense strand to SEQ ID NO: 1065044
uuuaccauccuuaggcaag

SEQ ID NO: 1065046 - RNA, 19 nt, Artificial Sequence
  Description of Artificial Sequence: Synthetic oligonucleotide
  Sense strand starting at position 2427 of SEQ ID NO: 915242
agauauuacugucagauuu

SEQ ID NO: 1065047 - RNA, 19 nt, Artificial Sequence
  Description of Artificial Sequence: Synthetic oligonucleotide
  Antisense strand to SEQ ID NO: 1065046
aaaucugacaguaauaucu

SEQ ID NO: 1065048 - RNA, 19 nt, Artificial Sequence
  Description of Artificial Sequence: Synthetic oligonucleotide
  Sense strand starting at position 2612 of SEQ ID NO: 915242
cugccauuauuugagggaa

SEQ ID NO: 1065049 - RNA, 19 nt, Artificial Sequence
  Description of Artificial Sequence: Synthetic oligonucleotide
  Antisense strand to SEQ ID NO: 1065048
uucccucaaauaauggcag

SEQ ID NO: 1065050 - RNA, 19 nt, Artificial Sequence
  Description of Artificial Sequence: Synthetic oligonucleotide
  Sense strand starting at position 2646 of SEQ ID NO: 915242
guuaaauggacaggccuua

SEQ ID NO: 1065051 - RNA, 19 nt, Artificial Sequence
  Description of Artificial Sequence: Synthetic oligonucleotide
  Antisense strand to SEQ ID NO: 1065050
uaaggccuguccauuuaac

SEQ ID NO: 1065052 - RNA, 19 nt, Artificial Sequence
  Description of Artificial Sequence: Synthetic oligonucleotide
  Sense strand starting at position 2705 of SEQ ID NO: 915242
acuaaugauacccguggau

SEQ ID NO: 1065053 - RNA, 19 nt, Artificial Sequence
  Description of Artificial Sequence: Synthetic oligonucleotide
  Antisense strand to SEQ ID NO: 1065052
auccacggguaucauuagu

SEQ ID NO: 1065054 - RNA, 19 nt, Artificial Sequence
  Description of Artificial Sequence: Synthetic oligonucleotide
  Sense strand starting at position 2707 of SEQ ID NO: 915242
uaaugauacccguggauaa

SEQ ID NO: 1065055 - RNA, 19 nt, Artificial Sequence
  Description of Artificial Sequence: Synthetic oligonucleotide
  Antisense strand to SEQ ID NO: 1065054
uuauccacggguaucauua

SEQ ID NO: 1065056 - RNA, 19 nt, Artificial Sequence
  Description of Artificial Sequence: Synthetic oligonucleotide
  Sense strand starting at position 2708 of SEQ ID NO: 915242
aaugauacccguggauaag

SEQ ID NO: 1065057 - RNA, 19 nt, Artificial Sequence
  Description of Artificial Sequence: Synthetic oligonucleotide
  Antisense strand to SEQ ID NO: 1065056
cuuauccacggguaucauu

SEQ ID NO: 1065058 - RNA, 19 nt, Artificial Sequence
  Description of Artificial Sequence: Synthetic oligonucleotide
  Sense strand starting at position 2709 of SEQ ID NO: 915242
augauacccguggauaagu

SEQ ID NO: 1065059 - RNA, 19 nt, Artificial Sequence
  Description of Artificial Sequence: Synthetic oligonucleotide
  Antisense strand to SEQ ID NO: 1065058
acuuauccacggguaucau

SEQ ID NO: 1065060 - RNA, 19 nt, Artificial Sequence
  Description of Artificial Sequence: Synthetic oligonucleotide
  Sense strand starting at position 2711 of SEQ ID NO: 915242
gauacccguggauaaguua

SEQ ID NO: 1065061 - RNA, 19 nt, Artificial Sequence
  Description of Artificial Sequence: Synthetic oligonucleotide
  Antisense strand to SEQ ID NO: 1065060
uaacuuauccacggguauc

SEQ ID NO: 1065062 - RNA, 19 nt, Artificial Sequence
  Description of Artificial Sequence: Synthetic oligonucleotide
  Sense strand starting at position 2714 of SEQ ID NO: 915242
acccguggauaaguuaaau

SEQ ID NO: 1065063 - RNA, 19 nt, Artificial Sequence
  Description of Artificial Sequence: Synthetic oligonucleotide
  Antisense strand to SEQ ID NO: 1065062
auuuaacuuauccacgggu

SEQ ID NO: 1065064 - RNA, 19 nt, Artificial Sequence
  Description of Artificial Sequence: Synthetic oligonucleotide
  Sense strand starting at position 2742 of SEQ ID NO: 915242
gugucuugacuccaaaucu

SEQ ID NO: 1065065 - RNA, 19 nt, Artificial Sequence
  Description of Artificial Sequence: Synthetic oligonucleotide
  Antisense strand to SEQ ID NO: 1065064
agauuuggagucaagacac

SEQ ID NO: 1065066 - RNA, 19 nt, Artificial Sequence
  Description of Artificial Sequence: Synthetic oligonucleotide
  Sense strand starting at position 2801 of SEQ ID NO: 915242
uuggcagacuuauuaauca

SEQ ID NO: 1065067 - RNA, 19 nt, Artificial Sequence
  Description of Artificial Sequence: Synthetic oligonucleotide
  Antisense strand to SEQ ID NO: 1065066
ugauuaauaagucugccaa

SEQ ID NO: 1065068 - RNA, 19 nt, Artificial Sequence
  Description of Artificial Sequence: Synthetic oligonucleotide
  Sense strand starting at position 2828 of SEQ ID NO: 915242
gcaagaucaucauuguauu

SEQ ID NO: 1065069 - RNA, 19 nt, Artificial Sequence
  Description of Artificial Sequence: Synthetic oligonucleotide
  Antisense strand to SEQ ID NO: 1065068
aauacaaugaugaucuugc

SEQ ID NO: 1065070 - RNA, 19 nt, Artificial Sequence
  Description of Artificial Sequence: Synthetic oligonucleotide
  Sense strand starting at position 2980 of SEQ ID NO: 915242
ggcauacauuuagaauaua

SEQ ID NO: 1065071 - RNA, 19 nt, Artificial Sequence
  Description of Artificial Sequence: Synthetic oligonucleotide
  Antisense strand to SEQ ID NO: 1065070
uauauucuaaauguaugcc

SEQ ID NO: 1065072 - RNA, 19 nt, Artificial Sequence
  Description of Artificial Sequence: Synthetic oligonucleotide
  Sense strand starting at position 3075 of SEQ ID NO: 915242
uuccaaauggcuuagaguu

SEQ ID NO: 1065073 - RNA, 19 nt, Artificial Sequence
  Description of Artificial Sequence: Synthetic oligonucleotide
  Antisense strand to SEQ ID NO: 1065072
aacucuaagccauuuggaa

SEQ ID NO: 1065074 - RNA, 19 nt, Artificial Sequence
  Description of Artificial Sequence: Synthetic oligonucleotide
  Sense strand starting at position 3521 of SEQ ID NO: 915242
auguaugaauaguccuuaa

SEQ ID NO: 1065075 - RNA, 19 nt, Artificial Sequence
  Description of Artificial Sequence: Synthetic oligonucleotide
  Antisense strand to SEQ ID NO: 1065074
uuaaggacuauucauacau

SEQ ID NO: 1065076 - RNA, 19 nt, Artificial Sequence
  Description of Artificial Sequence: Synthetic oligonucleotide
  Sense strand starting at position 3525 of SEQ ID NO: 915242
augaauaguccuuaaguau

SEQ ID NO: 1065077 - RNA, 19 nt, Artificial Sequence
  Description of Artificial Sequence: Synthetic oligonucleotide
  Antisense strand to SEQ ID NO: 1065076
auacuuaaggacuauucau

SEQ ID NO: 1065078 - RNA, 19 nt, Artificial Sequence
  Description of Artificial Sequence: Synthetic oligonucleotide
  Sense strand starting at position 3613 of SEQ ID NO: 915242
ccuguauuggaauggguua

SEQ ID NO: 1065079 - RNA, 19 nt, Artificial Sequence
  Description of Artificial Sequence: Synthetic oligonucleotide
  Antisense strand to SEQ ID NO: 1065078
uaacccauuccaauacagg

SEQ ID NO: 1065080 - RNA, 19 nt, Artificial Sequence
  Description of Artificial Sequence: Synthetic oligonucleotide
  Sense strand starting at position 3615 of SEQ ID NO: 915242
uguauuggaauggguuaaa

SEQ ID NO: 1065081 - RNA, 19 nt, Artificial Sequence
  Description of Artificial Sequence: Synthetic oligonucleotide
  Antisense strand to SEQ ID NO: 1065080
uuuaacccauuccaauaca

SEQ ID NO: 1065082 - RNA, 19 nt, Artificial Sequence
  Description of Artificial Sequence: Synthetic oligonucleotide
  Sense strand starting at position 3650 of SEQ ID NO: 915242
auaccaaauguugguguga

SEQ ID NO: 1065083 - RNA, 19 nt, Artificial Sequence
  Description of Artificial Sequence: Synthetic oligonucleotide
  Antisense strand to SEQ ID NO: 1065082
ucacaccaacauuugguau

SEQ ID NO: 1065084 - RNA, 19 nt, Artificial Sequence
  Description of Artificial Sequence: Synthetic oligonucleotide
  Sense strand starting at position 3651 of SEQ ID NO: 915242
uaccaaauguuggugugaa

SEQ ID NO: 1065085 - RNA, 19 nt, Artificial Sequence
  Description of Artificial Sequence: Synthetic oligonucleotide
  Antisense strand to SEQ ID NO: 1065084
uucacaccaacauuuggua

SEQ ID NO: 1065086 - RNA, 19 nt, Artificial Sequence
  Description of Artificial Sequence: Synthetic oligonucleotide
  Sense strand starting at position 3663 of SEQ ID NO: 915242
gugugaaguaacuggacuu

SEQ ID NO: 1065087 - RNA, 19 nt, Artificial Sequence
  Description of Artificial Sequence: Synthetic oligonucleotide
  Antisense strand to SEQ ID NO: 1065086
aaguccaguuacuucacac

SEQ ID NO: 1065088 - RNA, 19 nt, Artificial Sequence
  Description of Artificial Sequence: Synthetic oligonucleotide
  Sense strand starting at position 3664 of SEQ ID NO: 915242
ugugaaguaacuggacuua

SEQ ID NO: 1065089 - RNA, 19 nt, Artificial Sequence
  Description of Artificial Sequence: Synthetic oligonucleotide
  Antisense strand to SEQ ID NO: 1065088
uaaguccaguuacuucaca

SEQ ID NO: 1065090 - RNA, 19 nt, Artificial Sequence
  Description of Artificial Sequence: Synthetic oligonucleotide
  Sense strand starting at position 3754 of SEQ ID NO: 915242
acagacacugugcaauaua

SEQ ID NO: 1065091 - RNA, 19 nt, Artificial Sequence
  Description of Artificial Sequence: Synthetic oligonucleotide
  Antisense strand to SEQ ID NO: 1065090
uauauugcacagugucugu

SEQ ID NO: 1065092 - RNA, 19 nt, Artificial Sequence
  Description of Artificial Sequence: Synthetic oligonucleotide
  Sense strand starting at position 3811 of SEQ ID NO: 915242
aacguuugucuacaugaag

SEQ ID NO: 1065093 - RNA, 19 nt, Artificial Sequence
  Description of Artificial Sequence: Synthetic oligonucleotide
  Antisense strand to SEQ ID NO: 1065092
cuucauguagacaaacguu

SEQ ID NO: 1065094 - RNA, 19 nt, Artificial Sequence
  Description of Artificial Sequence: Synthetic oligonucleotide
  Sense strand starting at position 3814 of SEQ ID NO: 915242
guuugucuacaugaagauu

SEQ ID NO: 1065095 - RNA, 19 nt, Artificial Sequence
  Description of Artificial Sequence: Synthetic oligonucleotide
  Antisense strand to SEQ ID NO: 1065094
aaucuucauguagacaaac

SEQ ID NO: 1065096 - RNA, 19 nt, Artificial Sequence
  Description of Artificial Sequence: Synthetic oligonucleotide
  Sense strand starting at position 4 of SEQ ID NO: 915243
aaaugacaaugguuuguaa

SEQ ID NO: 1065097 - RNA, 19 nt, Artificial Sequence
  Description of Artificial Sequence: Synthetic oligonucleotide
  Antisense strand to SEQ ID NO: 1065096
uuacaaaccauugucauuu

SEQ ID NO: 1065098 - RNA, 19 nt, Artificial Sequence
  Description of Artificial Sequence: Synthetic oligonucleotide
  Sense strand starting at position 7 of SEQ ID NO: 915243
ugacaaugguuuguaaauu

SEQ ID NO: 1065099 - RNA, 19 nt, Artificial Sequence
  Description of Artificial Sequence: Synthetic oligonucleotide
  Antisense strand to SEQ ID NO: 1065098
aauuuacaaaccauuguca

SEQ ID NO: 1065100 - RNA, 19 nt, Artificial Sequence
  Description of Artificial Sequence: Synthetic oligonucleotide
  Sense strand starting at position 83 of SEQ ID NO: 915243
ugucaugaguugccucaua

SEQ ID NO: 1065101 - RNA, 19 nt, Artificial Sequence
  Description of Artificial Sequence: Synthetic oligonucleotide
  Antisense strand to SEQ ID NO: 1065100
uaugaggcaacucaugaca

SEQ ID NO: 1065102 - RNA, 19 nt, Artificial Sequence
  Description of Artificial Sequence: Synthetic oligonucleotide
  Sense strand starting at position 106 of SEQ ID NO: 915243
gccaaagcauuacugacau

SEQ ID NO: 1065103 - RNA, 19 nt, Artificial Sequence
  Description of Artificial Sequence: Synthetic oligonucleotide
  Antisense strand to SEQ ID NO: 1065102
augucaguaaugcuuuggc

SEQ ID NO: 1065104 - RNA, 19 nt, Artificial Sequence
  Description of Artificial Sequence: Synthetic oligonucleotide
  Sense strand starting at position 197 of SEQ ID NO: 915243
aucuauaguguaugucuau

SEQ ID NO: 1065105 - RNA, 19 nt, Artificial Sequence
  Description of Artificial Sequence: Synthetic oligonucleotide
  Antisense strand to SEQ ID NO: 1065104
auagacauacacuauagau

SEQ ID NO: 1065106 - RNA, 19 nt, Artificial Sequence
  Description of Artificial Sequence: Synthetic oligonucleotide
  Sense strand starting at position 198 of SEQ ID NO: 915243
ucuauaguguaugucuaua

SEQ ID NO: 1065107 - RNA, 19 nt, Artificial Sequence
  Description of Artificial Sequence: Synthetic oligonucleotide
  Antisense strand to SEQ ID NO: 1065106
uauagacauacacuauaga

SEQ ID NO: 1065108 - RNA, 19 nt, Artificial Sequence
  Description of Artificial Sequence: Synthetic oligonucleotide
  Sense strand starting at position 271 of SEQ ID NO: 915243
uuuggaagacuuugauuau

SEQ ID NO: 1065109 - RNA, 19 nt, Artificial Sequence
  Description of Artificial Sequence: Synthetic oligonucleotide
  Antisense strand to SEQ ID NO: 1065108
auaaucaaagucuuccaaa

SEQ ID NO: 1065110 - RNA, 19 nt, Artificial Sequence
  Description of Artificial Sequence: Synthetic oligonucleotide
  Sense strand starting at position 274 of SEQ ID NO: 915243
ggaagacuuugauuauguu

SEQ ID NO: 1065111 - RNA, 19 nt, Artificial Sequence
  Description of Artificial Sequence: Synthetic oligonucleotide
  Antisense strand to SEQ ID NO: 1065110
aacauaaucaaagucuucc

SEQ ID NO: 1065112 - RNA, 19 nt, Artificial Sequence
  Description of Artificial Sequence: Synthetic oligonucleotide
  Sense strand starting at position 315 of SEQ ID NO: 915243
guaaauuauccuggagcua

SEQ ID NO: 1065113 - RNA, 19 nt, Artificial Sequence
  Description of Artificial Sequence: Synthetic oligonucleotide
  Antisense strand to SEQ ID NO: 1065112
uagcuccaggauaauuuac

SEQ ID NO: 1065114 - RNA, 19 nt, Artificial Sequence
  Description of Artificial Sequence: Synthetic oligonucleotide
  Sense strand starting at position 349 of SEQ ID NO: 915243
ugcagucauguugggaacu

SEQ ID NO: 1065115 - RNA, 19 nt, Artificial Sequence
  Description of Artificial Sequence: Synthetic oligonucleotide
  Antisense strand to SEQ ID NO: 1065114
aguucccaacaugacugca

SEQ ID NO: 1065116 - RNA, 19 nt, Artificial Sequence
  Description of Artificial Sequence: Synthetic oligonucleotide
  Sense strand starting at position 371 of SEQ ID NO: 915243
gaagcuugauguuuggaag

SEQ ID NO: 1065117 - RNA, 19 nt, Artificial Sequence
  Description of Artificial Sequence: Synthetic oligonucleotide
  Antisense strand to SEQ ID NO: 1065116
cuuccaaacaucaagcuuc

SEQ ID NO: 1065118 - RNA, 19 nt, Artificial Sequence
  Description of Artificial Sequence: Synthetic oligonucleotide
  Sense strand starting at position 483 of SEQ ID NO: 915243
cucaaugacuucuuagguu

SEQ ID NO: 1065119 - RNA, 19 nt, Artificial Sequence
  Description of Artificial Sequence: Synthetic oligonucleotide
  Antisense strand to SEQ ID NO: 1065118
aaccuaagaagucauugag

SEQ ID NO: 1065120 - RNA, 19 nt, Artificial Sequence
  Description of Artificial Sequence: Synthetic oligonucleotide
  Sense strand starting at position 691 of SEQ ID NO: 915243
ugugauuaucauuguugug

SEQ ID NO: 1065121 - RNA, 19 nt, Artificial Sequence
  Description of Artificial Sequence: Synthetic oligonucleotide
  Antisense strand to SEQ ID NO: 1065120
cacaacaaugauaaucaca

SEQ ID NO: 1065122 - RNA, 19 nt, Artificial Sequence
  Description of Artificial Sequence: Synthetic oligonucleotide
  Sense strand starting at position 2015 of SEQ ID NO: 915243
uuuagaugacuuugguuua

SEQ ID NO: 1065123 - RNA, 19 nt, Artificial Sequence
  Description of Artificial Sequence: Synthetic oligonucleotide
  Antisense strand to SEQ ID NO: 1065122
uaaaccaaagucaucuaaa

SEQ ID NO: 1065124 - RNA, 19 nt, Artificial Sequence
  Description of Artificial Sequence: Synthetic oligonucleotide
  Sense strand starting at position 2018 of SEQ ID NO: 915243
agaugacuuugguuuauau

SEQ ID NO: 1065125 - RNA, 19 nt, Artificial Sequence
  Description of Artificial Sequence: Synthetic oligonucleotide
  Antisense strand to SEQ ID NO: 1065124
auauaaaccaaagucaucu

SEQ ID NO: 1065126 - RNA, 19 nt, Artificial Sequence
  Description of Artificial Sequence: Synthetic oligonucleotide
  Sense strand starting at position 2051 of SEQ ID NO: 915243
cuggguaaauuagcuaagu

SEQ ID NO: 1065127 - RNA, 19 nt, Artificial Sequence
  Description of Artificial Sequence: Synthetic oligonucleotide
  Antisense strand to SEQ ID NO: 1065126
acuuagcuaauuuacccag

SEQ ID NO: 1065128 - RNA, 19 nt, Artificial Sequence
  Description of Artificial Sequence: Synthetic oligonucleotide
  Sense strand starting at position 2052 of SEQ ID NO: 915243
uggguaaauuagcuaagua

SEQ ID NO: 1065129 - RNA, 19 nt, Artificial Sequence
  Description of Artificial Sequence: Synthetic oligonucleotide
  Antisense strand to SEQ ID NO: 1065128
uacuuagcuaauuuaccca

SEQ ID NO: 1065130 - RNA, 19 nt, Artificial Sequence
  Description of Artificial Sequence: Synthetic oligonucleotide
  Sense strand starting at position 2053 of SEQ ID NO: 915243
ggguaaauuagcuaaguaa

SEQ ID NO: 1065131 - RNA, 19 nt, Artificial Sequence
  Description of Artificial Sequence: Synthetic oligonucleotide
  Antisense strand to SEQ ID NO: 1065130
uuacuuagcuaauuuaccc

SEQ ID NO: 1065132 - RNA, 19 nt, Artificial Sequence
  Description of Artificial Sequence: Synthetic oligonucleotide
  Sense strand starting at position 2169 of SEQ ID NO: 915243
ugcuacucucuggguugaa

SEQ ID NO: 1065133 - RNA, 19 nt, Artificial Sequence
  Description of Artificial Sequence: Synthetic oligonucleotide
  Antisense strand to SEQ ID NO: 1065132
uucaacccagagaguagca

SEQ ID NO: 1065134 - RNA, 19 nt, Artificial Sequence
  Description of Artificial Sequence: Synthetic oligonucleotide
  Sense strand starting at position 2312 of SEQ ID NO: 915243
uacgguguccuuuauuaac

SEQ ID NO: 1065135 - RNA, 19 nt, Artificial Sequence
  Description of Artificial Sequence: Synthetic oligonucleotide
  Antisense strand to SEQ ID NO: 1065134
guuaauaaaggacaccgua

SEQ ID NO: 1065136 - RNA, 19 nt, Artificial Sequence
  Description of Artificial Sequence: Synthetic oligonucleotide
  Sense strand starting at position 2340 of SEQ ID NO: 915243
aguucugccaaggguaaca

SEQ ID NO: 1065137 - RNA, 19 nt, Artificial Sequence
  Description of Artificial Sequence: Synthetic oligonucleotide
  Antisense strand to SEQ ID NO: 1065136
uguuacccuuggcagaacu

SEQ ID NO: 1065138 - RNA, 19 nt, Artificial Sequence
  Description of Artificial Sequence: Synthetic oligonucleotide
  Sense strand starting at position 2351 of SEQ ID NO: 915243
ggguaacagaggugcauua

SEQ ID NO: 1065139 - RNA, 19 nt, Artificial Sequence
  Description of Artificial Sequence: Synthetic oligonucleotide
  Antisense strand to SEQ ID NO: 1065138
uaaugcaccucuguuaccc

SEQ ID NO: 1065140 - RNA, 19 nt, Artificial Sequence
  Description of Artificial Sequence: Synthetic oligonucleotide
  Sense strand starting at position 2362 of SEQ ID NO: 915243
gugcauuauggcuacaucu

SEQ ID NO: 1065141 - RNA, 19 nt, Artificial Sequence
  Description of Artificial Sequence: Synthetic oligonucleotide
  Antisense strand to SEQ ID NO: 1065140
agauguagccauaaugcac

SEQ ID NO: 1065142 - RNA, 19 nt, Artificial Sequence
  Description of Artificial Sequence: Synthetic oligonucleotide
  Sense strand starting at position 2364 of SEQ ID NO: 915243
gcauuauggcuacaucuuu

SEQ ID NO: 1065143 - RNA, 19 nt, Artificial Sequence
  Description of Artificial Sequence: Synthetic oligonucleotide
  Antisense strand to SEQ ID NO: 1065142
aaagauguagccauaaugc

SEQ ID NO: 1065144 - RNA, 19 nt, Artificial Sequence
  Description of Artificial Sequence: Synthetic oligonucleotide
  Sense strand starting at position 2370 of SEQ ID NO: 915243
uggcuacaucuuuggagga

SEQ ID NO: 1065145 - RNA, 19 nt, Artificial Sequence
  Description of Artificial Sequence: Synthetic oligonucleotide
  Antisense strand to SEQ ID NO: 1065144
uccuccaaagauguagcca

SEQ ID NO: 1065146 - RNA, 19 nt, Artificial Sequence
  Description of Artificial Sequence: Synthetic oligonucleotide
  Sense strand starting at position 2485 of SEQ ID NO: 915243
cagaucuaccaguggaauu

SEQ ID NO: 1065147 - RNA, 19 nt, Artificial Sequence
  Description of Artificial Sequence: Synthetic oligonucleotide
  Antisense strand to SEQ ID NO: 1065146
aauuccacugguagaucug

SEQ ID NO: 1065148 - RNA, 19 nt, Artificial Sequence
  Description of Artificial Sequence: Synthetic oligonucleotide
  Sense strand starting at position 2524 of SEQ ID NO: 915243
uggcucuuggaccaaauau

SEQ ID NO: 1065149 - RNA, 19 nt, Artificial Sequence
  Description of Artificial Sequence: Synthetic oligonucleotide
  Antisense strand to SEQ ID NO: 1065148
auauuugguccaagagcca

SEQ ID NO: 1065150 - RNA, 19 nt, Artificial Sequence
  Description of Artificial Sequence: Synthetic oligonucleotide
  Sense strand starting at position 2574 of SEQ ID NO: 915243
gggaguagcggcuaaauaa

SEQ ID NO: 1065151 - RNA, 19 nt, Artificial Sequence
  Description of Artificial Sequence: Synthetic oligonucleotide
  Antisense strand to SEQ ID NO: 1065150
uuauuuagccgcuacuccc

SEQ ID NO: 1065152 - RNA, 19 nt, Artificial Sequence
  Description of Artificial Sequence: Synthetic oligonucleotide
  Sense strand starting at position 2646 of SEQ ID NO: 915243
aguugauaaguguggacaa

SEQ ID NO: 1065153 - RNA, 19 nt, Artificial Sequence
  Description of Artificial Sequence: Synthetic oligonucleotide
  Antisense strand to SEQ ID NO: 1065152
uuguccacacuuaucaacu

SEQ ID NO: 1065154 - RNA, 19 nt, Artificial Sequence
  Description of Artificial Sequence: Synthetic oligonucleotide
  Sense strand starting at position 2765 of SEQ ID NO: 915243
gagggauauuuauauacuu

SEQ ID NO: 1065155 - RNA, 19 nt, Artificial Sequence
  Description of Artificial Sequence: Synthetic oligonucleotide
  Antisense strand to SEQ ID NO: 1065154
aaguauauaaauaucccuc

SEQ ID NO: 1065156 - RNA, 19 nt, Artificial Sequence
  Description of Artificial Sequence: Synthetic oligonucleotide
  Sense strand starting at position 2846 of SEQ ID NO: 915243
uaauuaggagugugccaaa

SEQ ID NO: 1065157 - RNA, 19 nt, Artificial Sequence
  Description of Artificial Sequence: Synthetic oligonucleotide
  Antisense strand to SEQ ID NO: 1065156
uuuggcacacuccuaauua

SEQ ID NO: 1065158 - RNA, 19 nt, Artificial Sequence
  Description of Artificial Sequence: Synthetic oligonucleotide
  Sense strand starting at position 2857 of SEQ ID NO: 915243
gugccaaagauggaguuau

SEQ ID NO: 1065159 - RNA, 19 nt, Artificial Sequence
  Description of Artificial Sequence: Synthetic oligonucleotide
  Antisense strand to SEQ ID NO: 1065158
auaacuccaucuuuggcac

SEQ ID NO: 1065160 - RNA, 19 nt, Artificial Sequence
  Description of Artificial Sequence: Synthetic oligonucleotide
  Sense strand starting at position 2893 of SEQ ID NO: 915243
aaauguagccucuguuaug

SEQ ID NO: 1065161 - RNA, 19 nt, Artificial Sequence
  Description of Artificial Sequence: Synthetic oligonucleotide
  Antisense strand to SEQ ID NO: 1065160
cauaacagaggcuacauuu

SEQ ID NO: 1065162 - RNA, 19 nt, Artificial Sequence
  Description of Artificial Sequence: Synthetic oligonucleotide
  Sense strand starting at position 3239 of SEQ ID NO: 915243
gcacaagauuauguccauu

SEQ ID NO: 1065163 - RNA, 19 nt, Artificial Sequence
  Description of Artificial Sequence: Synthetic oligonucleotide
  Antisense strand to SEQ ID NO: 1065162
aauggacauaaucuugugc

SEQ ID NO: 1065164 - RNA, 19 nt, Artificial Sequence
  Description of Artificial Sequence: Synthetic oligonucleotide
  Sense strand starting at position 3341 of SEQ ID NO: 915243
gcuaaaugauuugaacaca

SEQ ID NO: 1065165 - RNA, 19 nt, Artificial Sequence
  Description of Artificial Sequence: Synthetic oligonucleotide
  Antisense strand to SEQ ID NO: 1065164
uguguucaaaucauuuagc

SEQ ID NO: 1065166 - RNA, 19 nt, Artificial Sequence
  Description of Artificial Sequence: Synthetic oligonucleotide
  Sense strand starting at position 3653 of SEQ ID NO: 915243
acaugucaaugauacaaag

SEQ ID NO: 1065167 - RNA, 19 nt, Artificial Sequence
  Description of Artificial Sequence: Synthetic oligonucleotide
  Antisense strand to SEQ ID NO: 1065166
cuuuguaucauugacaugu

SEQ ID NO: 1065168 - RNA, 19 nt, Artificial Sequence
  Description of Artificial Sequence: Synthetic oligonucleotide
  Sense strand starting at position 3712 of SEQ ID NO: 915243
gaugauauaugacagaaga

SEQ ID NO: 1065169 - RNA, 19 nt, Artificial Sequence
  Description of Artificial Sequence: Synthetic oligonucleotide
  Antisense strand to SEQ ID NO: 1065168
ucuucugucauauaucauc

SEQ ID NO: 1065170 - RNA, 19 nt, Artificial Sequence
  Description of Artificial Sequence: Synthetic oligonucleotide
  Sense strand starting at position 3873 of SEQ ID NO: 915243
aaaguuugccaaggauaug

SEQ ID NO: 1065171 - RNA, 19 nt, Artificial Sequence
  Description of Artificial Sequence: Synthetic oligonucleotide
  Antisense strand to SEQ ID NO: 1065170
cauauccuuggcaaacuuu

SEQ ID NO: 1065172 - RNA, 19 nt, Artificial Sequence
  Description of Artificial Sequence: Synthetic oligonucleotide
  Sense strand starting at position 3878 of SEQ ID NO: 915243
uugccaaggauaugggaua

SEQ ID NO: 1065173 - RNA, 19 nt, Artificial Sequence
  Description of Artificial Sequence: Synthetic oligonucleotide
  Antisense strand to SEQ ID NO: 1065172
uaucccauauccuuggcaa

SEQ ID NO: 1065174 - RNA, 19 nt, Artificial Sequence
  Description of Artificial Sequence: Synthetic oligonucleotide
  Sense strand starting at position 3958 of SEQ ID NO: 915243
acugcuuggcaauaucuua

SEQ ID NO: 1065175 - RNA, 19 nt, Artificial Sequence
  Description of Artificial Sequence: Synthetic oligonucleotide
  Antisense strand to SEQ ID NO: 1065174
uaagauauugccaagcagu

SEQ ID NO: 1065176 - RNA, 19 nt, Artificial Sequence
  Description of Artificial Sequence: Synthetic oligonucleotide
  Sense strand starting at position 222 of SEQ ID NO: 915244
augaauuggagauguagca

SEQ ID NO: 1065177 - RNA, 19 nt, Artificial Sequence
  Description of Artificial Sequence: Synthetic oligonucleotide
  Antisense strand to SEQ ID NO: 1065176
ugcuacaucuccaauucau

SEQ ID NO: 1065178 - RNA, 19 nt, Artificial Sequence
  Description of Artificial Sequence: Synthetic oligonucleotide
  Sense strand starting at position 231 of SEQ ID NO: 915244
agauguagcagugaaccau

SEQ ID NO: 1065179 - RNA, 19 nt, Artificial Sequence
  Description of Artificial Sequence: Synthetic oligonucleotide
  Antisense strand to SEQ ID NO: 1065178
augguucacugcuacaucu

SEQ ID NO: 1065180 - RNA, 19 nt, Artificial Sequence
  Description of Artificial Sequence: Synthetic oligonucleotide
  Sense strand starting at position 235 of SEQ ID NO: 915244
guagcagugaaccauaugu

SEQ ID NO: 1065181 - RNA, 19 nt, Artificial Sequence
  Description of Artificial Sequence: Synthetic oligonucleotide
  Antisense strand to SEQ ID NO: 1065180
acauaugguucacugcuac

SEQ ID NO: 1065182 - RNA, 19 nt, Artificial Sequence
  Description of Artificial Sequence: Synthetic oligonucleotide
  Sense strand starting at position 273 of SEQ ID NO: 915244
gagguuacuguccaguaca

SEQ ID NO: 1065183 - RNA, 19 nt, Artificial Sequence
  Description of Artificial Sequence: Synthetic oligonucleotide
  Antisense strand to SEQ ID NO: 1065182
uguacuggacaguaaccuc

SEQ ID NO: 1065184 - RNA, 19 nt, Artificial Sequence
  Description of Artificial Sequence: Synthetic oligonucleotide
  Sense strand starting at position 276 of SEQ ID NO: 915244
guuacuguccaguacagga

SEQ ID NO: 1065185 - RNA, 19 nt, Artificial Sequence
  Description of Artificial Sequence: Synthetic oligonucleotide
  Antisense strand to SEQ ID NO: 1065184
uccuguacuggacaguaac

SEQ ID NO: 1065186 - RNA, 19 nt, Artificial Sequence
  Description of Artificial Sequence: Synthetic oligonucleotide
  Sense strand starting at position 303 of SEQ ID NO: 915244
cgaguaggcaauuaacaac

SEQ ID NO: 1065187 - RNA, 19 nt, Artificial Sequence
  Description of Artificial Sequence: Synthetic oligonucleotide
  Antisense strand to SEQ ID NO: 1065186
guuguuaauugccuacucg

SEQ ID NO: 1065188 - RNA, 19 nt, Artificial Sequence
  Description of Artificial Sequence: Synthetic oligonucleotide
  Sense strand starting at position 376 of SEQ ID NO: 915244
uguacauggaucugugauu

SEQ ID NO: 1065189 - RNA, 19 nt, Artificial Sequence
  Description of Artificial Sequence: Synthetic oligonucleotide
  Antisense strand to SEQ ID NO: 1065188
aaucacagauccauguaca

SEQ ID NO: 1065190 - RNA, 19 nt, Artificial Sequence
  Description of Artificial Sequence: Synthetic oligonucleotide
  Sense strand starting at position 471 of SEQ ID NO: 915244
augggauaauguguaauag

SEQ ID NO: 1065191 - RNA, 19 nt, Artificial Sequence
  Description of Artificial Sequence: Synthetic oligonucleotide
  Antisense strand to SEQ ID NO: 1065190
cuauuacacauuaucccau

SEQ ID NO: 1065192 - RNA, 19 nt, Artificial Sequence
  Description of Artificial Sequence: Synthetic oligonucleotide
  Sense strand starting at position 522 of SEQ ID NO: 915244
agauuacaggccuaccauu

SEQ ID NO: 1065193 - RNA, 19 nt, Artificial Sequence
  Description of Artificial Sequence: Synthetic oligonucleotide
  Antisense strand to SEQ ID NO: 1065192
aaugguaggccuguaaucu

SEQ ID NO: 1065194 - RNA, 19 nt, Artificial Sequence
  Description of Artificial Sequence: Synthetic oligonucleotide
  Sense strand starting at position 579 of SEQ ID NO: 915244
acagauugcuagucaucac

SEQ ID NO: 1065195 - RNA, 19 nt, Artificial Sequence
  Description of Artificial Sequence: Synthetic oligonucleotide
  Antisense strand to SEQ ID NO: 1065194
gugaugacuagcaaucugu

SEQ ID NO: 1065196 - RNA, 19 nt, Artificial Sequence
  Description of Artificial Sequence: Synthetic oligonucleotide
  Sense strand starting at position 588 of SEQ ID NO: 915244
uagucaucaccgcaugaua

SEQ ID NO: 1065197 - RNA, 19 nt, Artificial Sequence
  Description of Artificial Sequence: Synthetic oligonucleotide
  Antisense strand to SEQ ID NO: 1065196
uaucaugcggugaugacua

SEQ ID NO: 1065198 - RNA, 19 nt, Artificial Sequence
  Description of Artificial Sequence: Synthetic oligonucleotide
  Sense strand starting at position 591 of SEQ ID NO: 915244
ucaucaccgcaugauagua

SEQ ID NO: 1065199 - RNA, 19 nt, Artificial Sequence
  Description of Artificial Sequence: Synthetic oligonucleotide
  Antisense strand to SEQ ID NO: 1065198
uacuaucaugcggugauga

SEQ ID NO: 1065200 - RNA, 19 nt, Artificial Sequence
  Description of Artificial Sequence: Synthetic oligonucleotide
  Sense strand starting at position 635 of SEQ ID NO: 915244
uauuauguugaggaguaug

SEQ ID NO: 1065201 - RNA, 19 nt, Artificial Sequence
  Description of Artificial Sequence: Synthetic oligonucleotide
  Antisense strand to SEQ ID NO: 1065200
cauacuccucaacauaaua

SEQ ID NO: 1065202 - RNA, 19 nt, Artificial Sequence
  Description of Artificial Sequence: Synthetic oligonucleotide
  Sense strand starting at position 638 of SEQ ID NO: 915244
uauguugaggaguauguuu

SEQ ID NO: 1065203 - RNA, 19 nt, Artificial Sequence
  Description of Artificial Sequence: Synthetic oligonucleotide
  Antisense strand to SEQ ID NO: 1065202
aaacauacuccucaacaua

SEQ ID NO: 1065204 - RNA, 19 nt, Artificial Sequence
  Description of Artificial Sequence: Synthetic oligonucleotide
  Sense strand starting at position 685 of SEQ ID NO: 915244
agggaauguaacuggcauu

SEQ ID NO: 1065205 - RNA, 19 nt, Artificial Sequence
  Description of Artificial Sequence: Synthetic oligonucleotide
  Antisense strand to SEQ ID NO: 1065204
aaugccaguuacauucccu

SEQ ID NO: 1065206 - RNA, 19 nt, Artificial Sequence
  Description of Artificial Sequence: Synthetic oligonucleotide
  Sense strand starting at position 686 of SEQ ID NO: 915244
gggaauguaacuggcauua

SEQ ID NO: 1065207 - RNA, 19 nt, Artificial Sequence
  Description of Artificial Sequence: Synthetic oligonucleotide
  Antisense strand to SEQ ID NO: 1065206
uaaugccaguuacauuccc

SEQ ID NO: 1065208 - RNA, 19 nt, Artificial Sequence
  Description of Artificial Sequence: Synthetic oligonucleotide
  Sense strand starting at position 766 of SEQ ID NO: 915244
cuucguaauccuuaugaga

SEQ ID NO: 1065209 - RNA, 19 nt, Artificial Sequence
  Description of Artificial Sequence: Synthetic oligonucleotide
  Antisense strand to SEQ ID NO: 1065208
ucucauaaggauuacgaag

SEQ ID NO: 1065210 - RNA, 19 nt, Artificial Sequence
  Description of Artificial Sequence: Synthetic oligonucleotide
  Sense strand starting at position 808 of SEQ ID NO: 915244
ugaaauagaccaugugcau

SEQ ID NO: 1065211 - RNA, 19 nt, Artificial Sequence
  Description of Artificial Sequence: Synthetic oligonucleotide
  Antisense strand to SEQ ID NO: 1065210
augcacauggucuauuuca

SEQ ID NO: 1065212 - RNA, 19 nt, Artificial Sequence
  Description of Artificial Sequence: Synthetic oligonucleotide
  Sense strand starting at position 2037 of SEQ ID NO: 915244
cccaauuuagcauguagua

SEQ ID NO: 1065213 - RNA, 19 nt, Artificial Sequence
  Description of Artificial Sequence: Synthetic oligonucleotide
  Antisense strand to SEQ ID NO: 1065212
uacuacaugcuaaauuggg

SEQ ID NO: 1065214 - RNA, 19 nt, Artificial Sequence
  Description of Artificial Sequence: Synthetic oligonucleotide
  Sense strand starting at position 2069 of SEQ ID NO: 915244
aguaacugguauucuauau

SEQ ID NO: 1065215 - RNA, 19 nt, Artificial Sequence
  Description of Artificial Sequence: Synthetic oligonucleotide
  Antisense strand to SEQ ID NO: 1065214
auauagaauaccaguuacu

SEQ ID NO: 1065216 - RNA, 19 nt, Artificial Sequence
  Description of Artificial Sequence: Synthetic oligonucleotide
  Sense strand starting at position 2207 of SEQ ID NO: 915244
uagagaagccaguguaaau

SEQ ID NO: 1065217 - RNA, 19 nt, Artificial Sequence
  Description of Artificial Sequence: Synthetic oligonucleotide
  Antisense strand to SEQ ID NO: 1065216
auuuacacuggcuucucua

SEQ ID NO: 1065218 - RNA, 19 nt, Artificial Sequence
  Description of Artificial Sequence: Synthetic oligonucleotide
  Sense strand starting at position 2254 of SEQ ID NO: 915244
ggagaacaaucccugucua

SEQ ID NO: 1065219 - RNA, 19 nt, Artificial Sequence
  Description of Artificial Sequence: Synthetic oligonucleotide
  Antisense strand to SEQ ID NO: 1065218
uagacagggauuguucucc

SEQ ID NO: 1065220 - RNA, 19 nt, Artificial Sequence
  Description of Artificial Sequence: Synthetic oligonucleotide
  Sense strand starting at position 2299 of SEQ ID NO: 915244
acuaauuucugucagggau

SEQ ID NO: 1065221 - RNA, 19 nt, Artificial Sequence
  Description of Artificial Sequence: Synthetic oligonucleotide
  Antisense strand to SEQ ID NO: 1065220
aucccugacagaaauuagu

SEQ ID NO: 1065222 - RNA, 19 nt, Artificial Sequence
  Description of Artificial Sequence: Synthetic oligonucleotide
  Sense strand starting at position 2326 of SEQ ID NO: 915244
aucuuauuauugucagacu

SEQ ID NO: 1065223 - RNA, 19 nt, Artificial Sequence
  Description of Artificial Sequence: Synthetic oligonucleotide
  Antisense strand to SEQ ID NO: 1065222
agucugacaauaauaagau

SEQ ID NO: 1065224 - RNA, 19 nt, Artificial Sequence
  Description of Artificial Sequence: Synthetic oligonucleotide
  Sense strand starting at position 2429 of SEQ ID NO: 915244
uuacaaugaucauugugaa

SEQ ID NO: 1065225 - RNA, 19 nt, Artificial Sequence
  Description of Artificial Sequence: Synthetic oligonucleotide
  Antisense strand to SEQ ID NO: 1065224
uucacaaugaucauuguaa

SEQ ID NO: 1065226 - RNA, 19 nt, Artificial Sequence
  Description of Artificial Sequence: Synthetic oligonucleotide
  Sense strand starting at position 2500 of SEQ ID NO: 915244
agggaaguaucucugacau

SEQ ID NO: 1065227 - RNA, 19 nt, Artificial Sequence
  Description of Artificial Sequence: Synthetic oligonucleotide
  Antisense strand to SEQ ID NO: 1065226
augucagagauacuucccu

SEQ ID NO: 1065228 - RNA, 19 nt, Artificial Sequence
  Description of Artificial Sequence: Synthetic oligonucleotide
  Sense strand starting at position 2511 of SEQ ID NO: 915244
ucugacaucccuugaggga

SEQ ID NO: 1065229 - RNA, 19 nt, Artificial Sequence
  Description of Artificial Sequence: Synthetic oligonucleotide
  Antisense strand to SEQ ID NO: 1065228
ucccucaagggaugucaga

SEQ ID NO: 1065230 - RNA, 19 nt, Artificial Sequence
  Description of Artificial Sequence: Synthetic oligonucleotide
  Sense strand starting at position 2532 of SEQ ID NO: 915244
cagaaugaguaguuguuga

SEQ ID NO: 1065231 - RNA, 19 nt, Artificial Sequence
  Description of Artificial Sequence: Synthetic oligonucleotide
  Antisense strand to SEQ ID NO: 1065230
ucaacaacuacucauucug

SEQ ID NO: 1065232 - RNA, 19 nt, Artificial Sequence
  Description of Artificial Sequence: Synthetic oligonucleotide
  Sense strand starting at position 2537 of SEQ ID NO: 915244
ugaguaguuguugaaugga

SEQ ID NO: 1065233 - RNA, 19 nt, Artificial Sequence
  Description of Artificial Sequence: Synthetic oligonucleotide
  Antisense strand to SEQ ID NO: 1065232
uccauucaacaacuacuca

SEQ ID NO: 1065234 - RNA, 19 nt, Artificial Sequence
  Description of Artificial Sequence: Synthetic oligonucleotide
  Sense strand starting at position 2718 of SEQ ID NO: 915244
guaagugaagaaggucaau

SEQ ID NO: 1065235 - RNA, 19 nt, Artificial Sequence
  Description of Artificial Sequence: Synthetic oligonucleotide
  Antisense strand to SEQ ID NO: 1065234
auugaccuucuucacuuac

SEQ ID NO: 1065236 - RNA, 19 nt, Artificial Sequence
  Description of Artificial Sequence: Synthetic oligonucleotide
  Sense strand starting at position 2742 of SEQ ID NO: 915244
guuguuaaugucuauuaag

SEQ ID NO: 1065237 - RNA, 19 nt, Artificial Sequence
  Description of Artificial Sequence: Synthetic oligonucleotide
  Antisense strand to SEQ ID NO: 1065236
cuuaauagacauuaacaac

SEQ ID NO: 1065238 - RNA, 19 nt, Artificial Sequence
  Description of Artificial Sequence: Synthetic oligonucleotide
  Sense strand starting at position 2770 of SEQ ID NO: 915244
augggaagauaguaagaaa

SEQ ID NO: 1065239 - RNA, 19 nt, Artificial Sequence
  Description of Artificial Sequence: Synthetic oligonucleotide
  Antisense strand to SEQ ID NO: 1065238
uuucuuacuaucuucccau

SEQ ID NO: 1065240 - RNA, 19 nt, Artificial Sequence
  Description of Artificial Sequence: Synthetic oligonucleotide
  Sense strand starting at position 2858 of SEQ ID NO: 915244
ugugaauuagaagggagua

SEQ ID NO: 1065241 - RNA, 19 nt, Artificial Sequence
  Description of Artificial Sequence: Synthetic oligonucleotide
  Antisense strand to SEQ ID NO: 1065240
uacucccuucuaauucaca

SEQ ID NO: 1065242 - RNA, 19 nt, Artificial Sequence
  Description of Artificial Sequence: Synthetic oligonucleotide
  Sense strand starting at position 2927 of SEQ ID NO: 915244
ucuguuaaacagugaauag

SEQ ID NO: 1065243 - RNA, 19 nt, Artificial Sequence
  Description of Artificial Sequence: Synthetic oligonucleotide
  Antisense strand to SEQ ID NO: 1065242
cuauucacuguuuaacaga

SEQ ID NO: 1065244 - RNA, 19 nt, Artificial Sequence
  Description of Artificial Sequence: Synthetic oligonucleotide
  Sense strand starting at position 3709 of SEQ ID NO: 915244
agauauaugacuggucagu

SEQ ID NO: 1065245 - RNA, 19 nt, Artificial Sequence
  Description of Artificial Sequence: Synthetic oligonucleotide
  Antisense strand to SEQ ID NO: 1065244
acugaccagucauauaucu

SEQ ID NO: 1065246 - RNA, 19 nt, Artificial Sequence
  Description of Artificial Sequence: Synthetic oligonucleotide
  Sense strand starting at position 3711 of SEQ ID NO: 915244
auauaugacuggucaguaa

SEQ ID NO: 1065247 - RNA, 19 nt, Artificial Sequence
  Description of Artificial Sequence: Synthetic oligonucleotide
  Antisense strand to SEQ ID NO: 1065246
uuacugaccagucauauau

SEQ ID NO: 1065248 - RNA, 19 nt, Artificial Sequence
  Description of Artificial Sequence: Synthetic oligonucleotide
  Sense strand starting at position 3715 of SEQ ID NO: 915244
augacuggucaguaaguuu

SEQ ID NO: 1065249 - RNA, 19 nt, Artificial Sequence
  Description of Artificial Sequence: Synthetic oligonucleotide
  Antisense strand to SEQ ID NO: 1065248
aaacuuacugaccagucau

SEQ ID NO: 1065250 - RNA, 19 nt, Artificial Sequence
  Description of Artificial Sequence: Synthetic oligonucleotide
  Sense strand starting at position 3970 of SEQ ID NO: 915244
ccagaauucugccucuuag

SEQ ID NO: 1065251 - RNA, 19 nt, Artificial Sequence
  Description of Artificial Sequence: Synthetic oligonucleotide
  Antisense strand to SEQ ID NO: 1065250
cuaagaggcagaauucugg

SEQ ID NO: 1065252 - RNA, 19 nt, Artificial Sequence
  Description of Artificial Sequence: Synthetic oligonucleotide
  Sense strand starting at position 3976 of SEQ ID NO: 915244
uucugccucuuaguauuua

SEQ ID NO: 1065253 - RNA, 19 nt, Artificial Sequence
  Description of Artificial Sequence: Synthetic oligonucleotide
  Antisense strand to SEQ ID NO: 1065252
uaaauacuaagaggcagaa

SEQ ID NO: 1065254 - RNA, 19 nt, Artificial Sequence
  Description of Artificial Sequence: Synthetic oligonucleotide
  Sense strand starting at position 3980 of SEQ ID NO: 915244
gccucuuaguauuuaccca

SEQ ID NO: 1065255 - RNA, 19 nt, Artificial Sequence
  Description of Artificial Sequence: Synthetic oligonucleotide
  Antisense strand to SEQ ID NO: 1065254
uggguaaauacuaagaggc

SEQ ID NO: 1065256 - RNA, 19 nt, Artificial Sequence
  Description of Artificial Sequence: Synthetic oligonucleotide
  Sense strand starting at position 14 of SEQ ID NO: 915245
guugcuugugugccuguaa

SEQ ID NO: 1065257 - RNA, 19 nt, Artificial Sequence
  Description of Artificial Sequence: Synthetic oligonucleotide
  Antisense strand to SEQ ID NO: 1065256
uuacaggcacacaagcaac

SEQ ID NO: 1065258 - RNA, 19 nt, Artificial Sequence
  Description of Artificial Sequence: Synthetic oligonucleotide
  Sense strand starting at position 17 of SEQ ID NO: 915245
gcuugugugccuguaaauu

SEQ ID NO: 1065259 - RNA, 19 nt, Artificial Sequence
  Description of Artificial Sequence: Synthetic oligonucleotide
  Antisense strand to SEQ ID NO: 1065258
aauuuacaggcacacaagc

SEQ ID NO: 1065260 - RNA, 19 nt, Artificial Sequence
  Description of Artificial Sequence: Synthetic oligonucleotide
  Sense strand starting at position 168 of SEQ ID NO: 915245
ugaucaaauuuggaguuau

SEQ ID NO: 1065261 - RNA, 19 nt, Artificial Sequence
  Description of Artificial Sequence: Synthetic oligonucleotide
  Antisense strand to SEQ ID NO: 1065260
auaacuccaaauuugauca

SEQ ID NO: 1065262 - RNA, 19 nt, Artificial Sequence
  Description of Artificial Sequence: Synthetic oligonucleotide
  Sense strand starting at position 231 of SEQ ID NO: 915245
uaacauauucuggguugua

SEQ ID NO: 1065263 - RNA, 19 nt, Artificial Sequence
  Description of Artificial Sequence: Synthetic oligonucleotide
  Antisense strand to SEQ ID NO: 1065262
uacaacccagaauauguua

SEQ ID NO: 1065264 - RNA, 19 nt, Artificial Sequence
  Description of Artificial Sequence: Synthetic oligonucleotide
  Sense strand starting at position 232 of SEQ ID NO: 915245
aacauauucuggguuguau

SEQ ID NO: 1065265 - RNA, 19 nt, Artificial Sequence
  Description of Artificial Sequence: Synthetic oligonucleotide
  Antisense strand to SEQ ID NO: 1065264
auacaacccagaauauguu

SEQ ID NO: 1065266 - RNA, 19 nt, Artificial Sequence
  Description of Artificial Sequence: Synthetic oligonucleotide
  Sense strand starting at position 234 of SEQ ID NO: 915245
cauauucuggguuguauag

SEQ ID NO: 1065267 - RNA, 19 nt, Artificial Sequence
  Description of Artificial Sequence: Synthetic oligonucleotide
  Antisense strand to SEQ ID NO: 1065266
cuauacaacccagaauaug

SEQ ID NO: 1065268 - RNA, 19 nt, Artificial Sequence
  Description of Artificial Sequence: Synthetic oligonucleotide
  Sense strand starting at position 361 of SEQ ID NO: 915245
cugagacuguuaucacugu

SEQ ID NO: 1065269 - RNA, 19 nt, Artificial Sequence
  Description of Artificial Sequence: Synthetic oligonucleotide
  Antisense strand to SEQ ID NO: 1065268
acagugauaacagucucag

SEQ ID NO: 1065270 - RNA, 19 nt, Artificial Sequence
  Description of Artificial Sequence: Synthetic oligonucleotide
  Sense strand starting at position 919 of SEQ ID NO: 915245
caagaucacguuuagucaa

SEQ ID NO: 1065271 - RNA, 19 nt, Artificial Sequence
  Description of Artificial Sequence: Synthetic oligonucleotide
  Antisense strand to SEQ ID NO: 1065270
uugacuaaacgugaucuug

SEQ ID NO: 1065272 - RNA, 19 nt, Artificial Sequence
  Description of Artificial Sequence: Synthetic oligonucleotide
  Sense strand starting at position 1131 of SEQ ID NO: 915245
acuauaaaugaguggauuc

SEQ ID NO: 1065273 - RNA, 19 nt, Artificial Sequence
  Description of Artificial Sequence: Synthetic oligonucleotide
  Antisense strand to SEQ ID NO: 1065272
gaauccacucauuuauagu

SEQ ID NO: 1065274 - RNA, 19 nt, Artificial Sequence
  Description of Artificial Sequence: Synthetic oligonucleotide
  Sense strand starting at position 1204 of SEQ ID NO: 915245
gaauaagacuuucuugguu

SEQ ID NO: 1065275 - RNA, 19 nt, Artificial Sequence
  Description of Artificial Sequence: Synthetic oligonucleotide
  Antisense strand to SEQ ID NO: 1065274
aaccaagaaagucuuauuc

SEQ ID NO: 1065276 - RNA, 19 nt, Artificial Sequence
  Description of Artificial Sequence: Synthetic oligonucleotide
  Sense strand starting at position 1301 of SEQ ID NO: 915245
gcuuuccugaaguggaauu

SEQ ID NO: 1065277 - RNA, 19 nt, Artificial Sequence
  Description of Artificial Sequence: Synthetic oligonucleotide
  Antisense strand to SEQ ID NO: 1065276
aauuccacuucaggaaagc

SEQ ID NO: 1065278 - RNA, 19 nt, Artificial Sequence
  Description of Artificial Sequence: Synthetic oligonucleotide
  Sense strand starting at position 1597 of SEQ ID NO: 915245
auaauaacuggguaacgua

SEQ ID NO: 1065279 - RNA, 19 nt, Artificial Sequence
  Description of Artificial Sequence: Synthetic oligonucleotide
  Antisense strand to SEQ ID NO: 1065278
uacguuacccaguuauuau

SEQ ID NO: 1065280 - RNA, 19 nt, Artificial Sequence
  Description of Artificial Sequence: Synthetic oligonucleotide
  Sense strand starting at position 1725 of SEQ ID NO: 915245
ggaaauauaguuggaaguc

SEQ ID NO: 1065281 - RNA, 19 nt, Artificial Sequence
  Description of Artificial Sequence: Synthetic oligonucleotide
  Antisense strand to SEQ ID NO: 1065280
gacuuccaacuauauuucc

SEQ ID NO: 1065282 - RNA, 19 nt, Artificial Sequence
  Description of Artificial Sequence: Synthetic oligonucleotide
  Sense strand starting at position 1734 of SEQ ID NO: 915245
guuggaagucaguaaguuc

SEQ ID NO: 1065283 - RNA, 19 nt, Artificial Sequence
  Description of Artificial Sequence: Synthetic oligonucleotide
  Antisense strand to SEQ ID NO: 1065282
gaacuuacugacuuccaac

SEQ ID NO: 1065284 - RNA, 19 nt, Artificial Sequence
  Description of Artificial Sequence: Synthetic oligonucleotide
  Sense strand starting at position 1767 of SEQ ID NO: 915245
ugugaugacaguugaguaa

SEQ ID NO: 1065285 - RNA, 19 nt, Artificial Sequence
  Description of Artificial Sequence: Synthetic oligonucleotide
  Antisense strand to SEQ ID NO: 1065284
uuacucaacugucaucaca

SEQ ID NO: 1065286 - RNA, 19 nt, Artificial Sequence
  Description of Artificial Sequence: Synthetic oligonucleotide
  Sense strand starting at position 1847 of SEQ ID NO: 915245
ccaggcggauuaucaauau

SEQ ID NO: 1065287 - RNA, 19 nt, Artificial Sequence
  Description of Artificial Sequence: Synthetic oligonucleotide
  Antisense strand to SEQ ID NO: 1065286
auauugauaauccgccugg

SEQ ID NO: 1065288 - RNA, 19 nt, Artificial Sequence
  Description of Artificial Sequence: Synthetic oligonucleotide
  Sense strand starting at position 1851 of SEQ ID NO: 915245
gcggauuaucaauaucauc

SEQ ID NO: 1065289 - RNA, 19 nt, Artificial Sequence
  Description of Artificial Sequence: Synthetic oligonucleotide
  Antisense strand to SEQ ID NO: 1065288
gaugauauugauaauccgc

SEQ ID NO: 1065290 - RNA, 19 nt, Artificial Sequence
  Description of Artificial Sequence: Synthetic oligonucleotide
  Sense strand starting at position 1880 of SEQ ID NO: 915245
ccagcauaguaauuaggua

SEQ ID NO: 1065291 - RNA, 19 nt, Artificial Sequence
  Description of Artificial Sequence: Synthetic oligonucleotide
  Antisense strand to SEQ ID NO: 1065290
uaccuaauuacuaugcugg

SEQ ID NO: 1065292 - RNA, 19 nt, Artificial Sequence
  Description of Artificial Sequence: Synthetic oligonucleotide
  Sense strand starting at position 1946 of SEQ ID NO: 915245
cugacagucccguaaggau

SEQ ID NO: 1065293 - RNA, 19 nt, Artificial Sequence
  Description of Artificial Sequence: Synthetic oligonucleotide
  Antisense strand to SEQ ID NO: 1065292
auccuuacgggacugucag

SEQ ID NO: 1065294 - RNA, 19 nt, Artificial Sequence
  Description of Artificial Sequence: Synthetic oligonucleotide
  Sense strand starting at position 1973 of SEQ ID NO: 915245
gcacauuuguguuauuucu

SEQ ID NO: 1065295 - RNA, 19 nt, Artificial Sequence
  Description of Artificial Sequence: Synthetic oligonucleotide
  Antisense strand to SEQ ID NO: 1065294
agaaauaacacaaaugugc

SEQ ID NO: 1065296 - RNA, 19 nt, Artificial Sequence
  Description of Artificial Sequence: Synthetic oligonucleotide
  Sense strand starting at position 1988 of SEQ ID NO: 915245
uucuucuacccaugauguu

SEQ ID NO: 1065297 - RNA, 19 nt, Artificial Sequence
  Description of Artificial Sequence: Synthetic oligonucleotide
  Antisense strand to SEQ ID NO: 1065296
aacaucauggguagaagaa

SEQ ID NO: 1065298 - RNA, 19 nt, Artificial Sequence
  Description of Artificial Sequence: Synthetic oligonucleotide
  Sense strand starting at position 2152 of SEQ ID NO: 915245
ggaauuauauugccaaugu

SEQ ID NO: 1065299 - RNA, 19 nt, Artificial Sequence
  Description of Artificial Sequence: Synthetic oligonucleotide
  Antisense strand to SEQ ID NO: 1065298
acauuggcaauauaauucc

SEQ ID NO: 1065300 - RNA, 19 nt, Artificial Sequence
  Description of Artificial Sequence: Synthetic oligonucleotide
  Sense strand starting at position 2156 of SEQ ID NO: 915245
uuauauugccaauguagau

SEQ ID NO: 1065301 - RNA, 19 nt, Artificial Sequence
  Description of Artificial Sequence: Synthetic oligonucleotide
  Antisense strand to SEQ ID NO: 1065300
aucuacauuggcaauauaa

SEQ ID NO: 1065302 - RNA, 19 nt, Artificial Sequence
  Description of Artificial Sequence: Synthetic oligonucleotide
  Sense strand starting at position 2224 of SEQ ID NO: 915245
gcauaauuagaaugaaccu

SEQ ID NO: 1065303 - RNA, 19 nt, Artificial Sequence
  Description of Artificial Sequence: Synthetic oligonucleotide
  Antisense strand to SEQ ID NO: 1065302
agguucauucuaauuaugc

SEQ ID NO: 1065304 - RNA, 19 nt, Artificial Sequence
  Description of Artificial Sequence: Synthetic oligonucleotide
  Sense strand starting at position 2233 of SEQ ID NO: 915245
gaaugaaccugaccuuguu

SEQ ID NO: 1065305 - RNA, 19 nt, Artificial Sequence
  Description of Artificial Sequence: Synthetic oligonucleotide
  Antisense strand to SEQ ID NO: 1065304
aacaaggucagguucauuc

SEQ ID NO: 1065306 - RNA, 19 nt, Artificial Sequence
  Description of Artificial Sequence: Synthetic oligonucleotide
  Sense strand starting at position 2239 of SEQ ID NO: 915245
accugaccuuguucugaau

SEQ ID NO: 1065307 - RNA, 19 nt, Artificial Sequence
  Description of Artificial Sequence: Synthetic oligonucleotide
  Antisense strand to SEQ ID NO: 1065306
auucagaacaaggucaggu

SEQ ID NO: 1065308 - RNA, 19 nt, Artificial Sequence
  Description of Artificial Sequence: Synthetic oligonucleotide
  Sense strand starting at position 2775 of SEQ ID NO: 915245
ccggacauuacucagggua

SEQ ID NO: 1065309 - RNA, 19 nt, Artificial Sequence
  Description of Artificial Sequence: Synthetic oligonucleotide
  Antisense strand to SEQ ID NO: 1065308
uacccugaguaauguccgg

SEQ ID NO: 1065310 - RNA, 19 nt, Artificial Sequence
  Description of Artificial Sequence: Synthetic oligonucleotide
  Sense strand starting at position 2873 of SEQ ID NO: 915245
ugagaauaauacuuaccgu

SEQ ID NO: 1065311 - RNA, 19 nt, Artificial Sequence
  Description of Artificial Sequence: Synthetic oligonucleotide
  Antisense strand to SEQ ID NO: 1065310
acgguaaguauuauucuca

SEQ ID NO: 1065312 - RNA, 19 nt, Artificial Sequence
  Description of Artificial Sequence: Synthetic oligonucleotide
  Sense strand starting at position 2924 of SEQ ID NO: 915245
cucauauuaucugucuaga

SEQ ID NO: 1065313 - RNA, 19 nt, Artificial Sequence
  Description of Artificial Sequence: Synthetic oligonucleotide
  Antisense strand to SEQ ID NO: 1065312
ucuagacagauaauaugag

SEQ ID NO: 1065314 - RNA, 19 nt, Artificial Sequence
  Description of Artificial Sequence: Synthetic oligonucleotide
  Sense strand starting at position 3161 of SEQ ID NO: 915245
cugggaaucucugugacua

SEQ ID NO: 1065315 - RNA, 19 nt, Artificial Sequence
  Description of Artificial Sequence: Synthetic oligonucleotide
  Antisense strand to SEQ ID NO: 1065314
uagucacagagauucccag

SEQ ID NO: 1065316 - RNA, 19 nt, Artificial Sequence
  Description of Artificial Sequence: Synthetic oligonucleotide
  Sense strand starting at position 3162 of SEQ ID NO: 915245
ugggaaucucugugacuau

SEQ ID NO: 1065317 - RNA, 19 nt, Artificial Sequence
  Description of Artificial Sequence: Synthetic oligonucleotide
  Antisense strand to SEQ ID NO: 1065316
auagucacagagauuccca

SEQ ID NO: 1065318 - RNA, 19 nt, Artificial Sequence
  Description of Artificial Sequence: Synthetic oligonucleotide
  Sense strand starting at position 3171 of SEQ ID NO: 915245
cugugacuauagguagauu

SEQ ID NO: 1065319 - RNA, 19 nt, Artificial Sequence
  Description of Artificial Sequence: Synthetic oligonucleotide
  Antisense strand to SEQ ID NO: 1065318
aaucuaccuauagucacag

SEQ ID NO: 1065320 - RNA, 19 nt, Artificial Sequence
  Description of Artificial Sequence: Synthetic oligonucleotide
  Sense strand starting at position 3182 of SEQ ID NO: 915245
gguagauuauucuuuaccu

SEQ ID NO: 1065321 - RNA, 19 nt, Artificial Sequence
  Description of Artificial Sequence: Synthetic oligonucleotide
  Antisense strand to SEQ ID NO: 1065320
agguaaagaauaaucuacc

SEQ ID NO: 1065322 - RNA, 19 nt, Artificial Sequence
  Description of Artificial Sequence: Synthetic oligonucleotide
  Sense strand starting at position 3183 of SEQ ID NO: 915245
guagauuauucuuuaccuc

SEQ ID NO: 1065323 - RNA, 19 nt, Artificial Sequence
  Description of Artificial Sequence: Synthetic oligonucleotide
  Antisense strand to SEQ ID NO: 1065322
gagguaaagaauaaucuac

SEQ ID NO: 1065324 - RNA, 19 nt, Artificial Sequence
  Description of Artificial Sequence: Synthetic oligonucleotide
  Sense strand starting at position 3271 of SEQ ID NO: 915245
uggaccaauuuccaaugaa

SEQ ID NO: 1065325 - RNA, 19 nt, Artificial Sequence
  Description of Artificial Sequence: Synthetic oligonucleotide
  Antisense strand to SEQ ID NO: 1065324
uucauuggaaauuggucca

SEQ ID NO: 1065326 - RNA, 19 nt, Artificial Sequence
  Description of Artificial Sequence: Synthetic oligonucleotide
  Sense strand starting at position 3284 of SEQ ID NO: 915245
aaugaagaauugcuuggua

SEQ ID NO: 1065327 - RNA, 19 nt, Artificial Sequence
  Description of Artificial Sequence: Synthetic oligonucleotide
  Antisense strand to SEQ ID NO: 1065326
uaccaagcaauucuucauu

SEQ ID NO: 1065328 - RNA, 19 nt, Artificial Sequence
  Description of Artificial Sequence: Synthetic oligonucleotide
  Sense strand starting at position 3287 of SEQ ID NO: 915245
gaagaauugcuugguaugu

SEQ ID NO: 1065329 - RNA, 19 nt, Artificial Sequence
  Description of Artificial Sequence: Synthetic oligonucleotide
  Antisense strand to SEQ ID NO: 1065328
acauaccaagcaauucuuc

SEQ ID NO: 1065330 - RNA, 19 nt, Artificial Sequence
  Description of Artificial Sequence: Synthetic oligonucleotide
  Sense strand starting at position 3296 of SEQ ID NO: 915245
cuugguauguuuccaagga

SEQ ID NO: 1065331 - RNA, 19 nt, Artificial Sequence
  Description of Artificial Sequence: Synthetic oligonucleotide
  Antisense strand to SEQ ID NO: 1065330
uccuuggaaacauaccaag

SEQ ID NO: 1065332 - RNA, 19 nt, Artificial Sequence
  Description of Artificial Sequence: Synthetic oligonucleotide
  Sense strand starting at position 3300 of SEQ ID NO: 915245
guauguuuccaaggauaaa

SEQ ID NO: 1065333 - RNA, 19 nt, Artificial Sequence
  Description of Artificial Sequence: Synthetic oligonucleotide
  Antisense strand to SEQ ID NO: 1065332
uuuauccuuggaaacauac

SEQ ID NO: 1065334 - RNA, 19 nt, Artificial Sequence
  Description of Artificial Sequence: Synthetic oligonucleotide
  Sense strand starting at position 3396 of SEQ ID NO: 915245
gaaauuauggauuggucuu

SEQ ID NO: 1065335 - RNA, 19 nt, Artificial Sequence
  Description of Artificial Sequence: Synthetic oligonucleotide
  Antisense strand to SEQ ID NO: 1065334
aagaccaauccauaauuuc

SEQ ID NO: 1065336 - RNA, 19 nt, Artificial Sequence
  Description of Artificial Sequence: Synthetic oligonucleotide
  Sense strand starting at position 9 of SEQ ID NO: 915246
guacauggaaagugauaca

SEQ ID NO: 1065337 - RNA, 19 nt, Artificial Sequence
  Description of Artificial Sequence: Synthetic oligonucleotide
  Antisense strand to SEQ ID NO: 1065336
uguaucacuuuccauguac

SEQ ID NO: 1065338 - RNA, 19 nt, Artificial Sequence
  Description of Artificial Sequence: Synthetic oligonucleotide
  Sense strand starting at position 12 of SEQ ID NO: 915246
cauggaaagugauacaaau

SEQ ID NO: 1065339 - RNA, 19 nt, Artificial Sequence
  Description of Artificial Sequence: Synthetic oligonucleotide
  Antisense strand to SEQ ID NO: 1065338
auuuguaucacuuuccaug

SEQ ID NO: 1065340 - RNA, 19 nt, Artificial Sequence
  Description of Artificial Sequence: Synthetic oligonucleotide
  Sense strand starting at position 125 of SEQ ID NO: 915246
auggguuuauuagagaagu

SEQ ID NO: 1065341 - RNA, 19 nt, Artificial Sequence
  Description of Artificial Sequence: Synthetic oligonucleotide
  Antisense strand to SEQ ID NO: 1065340
acuucucuaauaaacccau

SEQ ID NO: 1065342 - RNA, 19 nt, Artificial Sequence
  Description of Artificial Sequence: Synthetic oligonucleotide
  Sense strand starting at position 414 of SEQ ID NO: 915246
ggcuuugugcaguaaugua

SEQ ID NO: 1065343 - RNA, 19 nt, Artificial Sequence
  Description of Artificial Sequence: Synthetic oligonucleotide
  Antisense strand to SEQ ID NO: 1065342
uacauuacugcacaaagcc

SEQ ID NO: 1065344 - RNA, 19 nt, Artificial Sequence
  Description of Artificial Sequence: Synthetic oligonucleotide
  Sense strand starting at position 514 of SEQ ID NO: 915246
uuauuuaucuugugcacuu

SEQ ID NO: 1065345 - RNA, 19 nt, Artificial Sequence
  Description of Artificial Sequence: Synthetic oligonucleotide
  Antisense strand to SEQ ID NO: 1065344
aagugcacaagauaaauaa

SEQ ID NO: 1065346 - RNA, 19 nt, Artificial Sequence
  Description of Artificial Sequence: Synthetic oligonucleotide
  Sense strand starting at position 546 of SEQ ID NO: 915246
uuaagcuuuagguaacgua

SEQ ID NO: 1065347 - RNA, 19 nt, Artificial Sequence
  Description of Artificial Sequence: Synthetic oligonucleotide
  Antisense strand to SEQ ID NO: 1065346
uacguuaccuaaagcuuaa

SEQ ID NO: 1065348 - RNA, 19 nt, Artificial Sequence
  Description of Artificial Sequence: Synthetic oligonucleotide
  Sense strand starting at position 549 of SEQ ID NO: 915246
agcuuuagguaacguauua

SEQ ID NO: 1065349 - RNA, 19 nt, Artificial Sequence
  Description of Artificial Sequence: Synthetic oligonucleotide
  Antisense strand to SEQ ID NO: 1065348
uaauacguuaccuaaagcu

SEQ ID NO: 1065350 - RNA, 19 nt, Artificial Sequence
  Description of Artificial Sequence: Synthetic oligonucleotide
  Sense strand starting at position 560 of SEQ ID NO: 915246
acguauuacuggcuauaca

SEQ ID NO: 1065351 - RNA, 19 nt, Artificial Sequence
  Description of Artificial Sequence: Synthetic oligonucleotide
  Antisense strand to SEQ ID NO: 1065350
uguauagccaguaauacgu

SEQ ID NO: 1065352 - RNA, 19 nt, Artificial Sequence
  Description of Artificial Sequence: Synthetic oligonucleotide
  Sense strand starting at position 600 of SEQ ID NO: 915246
gaaucuaauucuugggaag

SEQ ID NO: 1065353 - RNA, 19 nt, Artificial Sequence
  Description of Artificial Sequence: Synthetic oligonucleotide
  Antisense strand to SEQ ID NO: 1065352
cuucccaagaauuagauuc

SEQ ID NO: 1065354 - RNA, 19 nt, Artificial Sequence
  Description of Artificial Sequence: Synthetic oligonucleotide
  Sense strand starting at position 602 of SEQ ID NO: 915246
aucuaauucuugggaaguu

SEQ ID NO: 1065355 - RNA, 19 nt, Artificial Sequence
  Description of Artificial Sequence: Synthetic oligonucleotide
  Antisense strand to SEQ ID NO: 1065354
aacuucccaagaauuagau

SEQ ID NO: 1065356 - RNA, 19 nt, Artificial Sequence
  Description of Artificial Sequence: Synthetic oligonucleotide
  Sense strand starting at position 603 of SEQ ID NO: 915246
ucuaauucuugggaaguuu

SEQ ID NO: 1065357 - RNA, 19 nt, Artificial Sequence
  Description of Artificial Sequence: Synthetic oligonucleotide
  Antisense strand to SEQ ID NO: 1065356
aaacuucccaagaauuaga

SEQ ID NO: 1065358 - RNA, 19 nt, Artificial Sequence
  Description of Artificial Sequence: Synthetic oligonucleotide
  Sense strand starting at position 695 of SEQ ID NO: 915246
cuauuaucauuguguccca

SEQ ID NO: 1065359 - RNA, 19 nt, Artificial Sequence
  Description of Artificial Sequence: Synthetic oligonucleotide
  Antisense strand to SEQ ID NO: 1065358
ugggacacaaugauaauag

SEQ ID NO: 1065360 - RNA, 19 nt, Artificial Sequence
  Description of Artificial Sequence: Synthetic oligonucleotide
  Sense strand starting at position 700 of SEQ ID NO: 915246
aucauugugucccaaauag

SEQ ID NO: 1065361 - RNA, 19 nt, Artificial Sequence
  Description of Artificial Sequence: Synthetic oligonucleotide
  Antisense strand to SEQ ID NO: 1065360
cuauuugggacacaaugau

SEQ ID NO: 1065362 - RNA, 19 nt, Artificial Sequence
  Description of Artificial Sequence: Synthetic oligonucleotide
  Sense strand starting at position 917 of SEQ ID NO: 915246
aaucauguuuagugaagca

SEQ ID NO: 1065363 - RNA, 19 nt, Artificial Sequence
  Description of Artificial Sequence: Synthetic oligonucleotide
  Antisense strand to SEQ ID NO: 1065362
ugcuucacuaaacaugauu

SEQ ID NO: 1065364 - RNA, 19 nt, Artificial Sequence
  Description of Artificial Sequence: Synthetic oligonucleotide
  Sense strand starting at position 2163 of SEQ ID NO: 915246
gugccagacucugacucaa

SEQ ID NO: 1065365 - RNA, 19 nt, Artificial Sequence
  Description of Artificial Sequence: Synthetic oligonucleotide
  Antisense strand to SEQ ID NO: 1065364
uugagucagagucuggcac

SEQ ID NO: 1065366 - RNA, 19 nt, Artificial Sequence
  Description of Artificial Sequence: Synthetic oligonucleotide
  Sense strand starting at position 2212 of SEQ ID NO: 915246
uguuuauaugaauggcaua

SEQ ID NO: 1065367 - RNA, 19 nt, Artificial Sequence
  Description of Artificial Sequence: Synthetic oligonucleotide
  Antisense strand to SEQ ID NO: 1065366
uaugccauucauauaaaca

SEQ ID NO: 1065368 - RNA, 19 nt, Artificial Sequence
  Description of Artificial Sequence: Synthetic oligonucleotide
  Sense strand starting at position 2215 of SEQ ID NO: 915246
uuauaugaauggcauauca

SEQ ID NO: 1065369 - RNA, 19 nt, Artificial Sequence
  Description of Artificial Sequence: Synthetic oligonucleotide
  Antisense strand to SEQ ID NO: 1065368
ugauaugccauucauauaa

SEQ ID NO: 1065370 - RNA, 19 nt, Artificial Sequence
  Description of Artificial Sequence: Synthetic oligonucleotide
  Sense strand starting at position 2244 of SEQ ID NO: 915246
agcuuagccuucuauaagu

SEQ ID NO: 1065371 - RNA, 19 nt, Artificial Sequence
  Description of Artificial Sequence: Synthetic oligonucleotide
  Antisense strand to SEQ ID NO: 1065370
acuuauagaaggcuaagcu

SEQ ID NO: 1065372 - RNA, 19 nt, Artificial Sequence
  Description of Artificial Sequence: Synthetic oligonucleotide
  Sense strand starting at position 2306 of SEQ ID NO: 915246
ugccaauauugauguaagu

SEQ ID NO: 1065373 - RNA, 19 nt, Artificial Sequence
  Description of Artificial Sequence: Synthetic oligonucleotide
  Antisense strand to SEQ ID NO: 1065372
acuuacaucaauauuggca

SEQ ID NO: 1065374 - RNA, 19 nt, Artificial Sequence
  Description of Artificial Sequence: Synthetic oligonucleotide
  Sense strand starting at position 2392 of SEQ ID NO: 915246
cugacauuguucugaauga

SEQ ID NO: 1065375 - RNA, 19 nt, Artificial Sequence
  Description of Artificial Sequence: Synthetic oligonucleotide
  Antisense strand to SEQ ID NO: 1065374
ucauucagaacaaugucag

SEQ ID NO: 1065376 - RNA, 19 nt, Artificial Sequence
  Description of Artificial Sequence: Synthetic oligonucleotide
  Sense strand starting at position 2393 of SEQ ID NO: 915246
ugacauuguucugaaugac

SEQ ID NO: 1065377 - RNA, 19 nt, Artificial Sequence
  Description of Artificial Sequence: Synthetic oligonucleotide
  Antisense strand to SEQ ID NO: 1065376
gucauucagaacaauguca

SEQ ID NO: 1065378 - RNA, 19 nt, Artificial Sequence
  Description of Artificial Sequence: Synthetic oligonucleotide
  Sense strand starting at position 2580 of SEQ ID NO: 915246
agagacggcuuauaauacu

SEQ ID NO: 1065379 - RNA, 19 nt, Artificial Sequence
  Description of Artificial Sequence: Synthetic oligonucleotide
  Antisense strand to SEQ ID NO: 1065378
aguauuauaagccgucucu

SEQ ID NO: 1065380 - RNA, 19 nt, Artificial Sequence
  Description of Artificial Sequence: Synthetic oligonucleotide
  Sense strand starting at position 2868 of SEQ ID NO: 915246
aguauauacuuugcuugua

SEQ ID NO: 1065381 - RNA, 19 nt, Artificial Sequence
  Description of Artificial Sequence: Synthetic oligonucleotide
  Antisense strand to SEQ ID NO: 1065380
uacaagcaaaguauauacu

SEQ ID NO: 1065382 - RNA, 19 nt, Artificial Sequence
  Description of Artificial Sequence: Synthetic oligonucleotide
  Sense strand starting at position 2927 of SEQ ID NO: 915246
ugacauuacuuaggguaaa

SEQ ID NO: 1065383 - RNA, 19 nt, Artificial Sequence
  Description of Artificial Sequence: Synthetic oligonucleotide
  Antisense strand to SEQ ID NO: 1065382
uuuacccuaaguaauguca

SEQ ID NO: 1065384 - RNA, 19 nt, Artificial Sequence
  Description of Artificial Sequence: Synthetic oligonucleotide
  Sense strand starting at position 2928 of SEQ ID NO: 915246
gacauuacuuaggguaaag

SEQ ID NO: 1065385 - RNA, 19 nt, Artificial Sequence
  Description of Artificial Sequence: Synthetic oligonucleotide
  Antisense strand to SEQ ID NO: 1065384
cuuuacccuaaguaauguc

SEQ ID NO: 1065386 - RNA, 19 nt, Artificial Sequence
  Description of Artificial Sequence: Synthetic oligonucleotide
  Sense strand starting at position 2948 of SEQ ID NO: 915246
cuaaaugauauguguaugu

SEQ ID NO: 1065387 - RNA, 19 nt, Artificial Sequence
  Description of Artificial Sequence: Synthetic oligonucleotide
  Antisense strand to SEQ ID NO: 1065386
acauacacauaucauuuag

SEQ ID NO: 1065388 - RNA, 19 nt, Artificial Sequence
  Description of Artificial Sequence: Synthetic oligonucleotide
  Sense strand starting at position 3092 of SEQ ID NO: 915246
cuuauauuaucugucugga

SEQ ID NO: 1065389 - RNA, 19 nt, Artificial Sequence
  Description of Artificial Sequence: Synthetic oligonucleotide
  Antisense strand to SEQ ID NO: 1065388
uccagacagauaauauaag

SEQ ID NO: 1065390 - RNA, 19 nt, Artificial Sequence
  Description of Artificial Sequence: Synthetic oligonucleotide
  Sense strand starting at position 3095 of SEQ ID NO: 915246
auauuaucugucuggaaau

SEQ ID NO: 1065391 - RNA, 19 nt, Artificial Sequence
  Description of Artificial Sequence: Synthetic oligonucleotide
  Antisense strand to SEQ ID NO: 1065390
auuuccagacagauaauau

SEQ ID NO: 1065392 - RNA, 19 nt, Artificial Sequence
  Description of Artificial Sequence: Synthetic oligonucleotide
  Sense strand starting at position 3106 of SEQ ID NO: 915246
cuggaaauuugucaaccuc

SEQ ID NO: 1065393 - RNA, 19 nt, Artificial Sequence
  Description of Artificial Sequence: Synthetic oligonucleotide
  Antisense strand to SEQ ID NO: 1065392
gagguugacaaauuuccag

SEQ ID NO: 1065394 - RNA, 19 nt, Artificial Sequence
  Description of Artificial Sequence: Synthetic oligonucleotide
  Sense strand starting at position 3300 of SEQ ID NO: 915246
gaaguuauuugucaaagaa

SEQ ID NO: 1065395 - RNA, 19 nt, Artificial Sequence
  Description of Artificial Sequence: Synthetic oligonucleotide
  Antisense strand to SEQ ID NO: 1065394
uucuuugacaaauaacuuc

SEQ ID NO: 1065396 - RNA, 19 nt, Artificial Sequence
  Description of Artificial Sequence: Synthetic oligonucleotide
  Sense strand starting at position 3331 of SEQ ID NO: 915246
cugugaccacaaggagauu

SEQ ID NO: 1065397 - RNA, 19 nt, Artificial Sequence
  Description of Artificial Sequence: Synthetic oligonucleotide
  Antisense strand to SEQ ID NO: 1065396
aaucuccuuguggucacag

SEQ ID NO: 1065398 - RNA, 19 nt, Artificial Sequence
  Description of Artificial Sequence: Synthetic oligonucleotide
  Sense strand starting at position 3365 of SEQ ID NO: 915246
cuuggauaauuccagagga

SEQ ID NO: 1065399 - RNA, 19 nt, Artificial Sequence
  Description of Artificial Sequence: Synthetic oligonucleotide
  Antisense strand to SEQ ID NO: 1065398
uccucuggaauuauccaag

SEQ ID NO: 1065400 - RNA, 19 nt, Artificial Sequence
  Description of Artificial Sequence: Synthetic oligonucleotide
  Sense strand starting at position 3569 of SEQ ID NO: 915246
auaguuacucuaugacuga

SEQ ID NO: 1065401 - RNA, 19 nt, Artificial Sequence
  Description of Artificial Sequence: Synthetic oligonucleotide
  Antisense strand to SEQ ID NO: 1065400
ucagucauagaguaacuau

SEQ ID NO: 1065402 - RNA, 19 nt, Artificial Sequence
  Description of Artificial Sequence: Synthetic oligonucleotide
  Sense strand starting at position 3807 of SEQ ID NO: 915246
aucagaagguaacaagauu

SEQ ID NO: 1065403 - RNA, 19 nt, Artificial Sequence
  Description of Artificial Sequence: Synthetic oligonucleotide
  Antisense strand to SEQ ID NO: 1065402
aaucuuguuaccuucugau

SEQ ID NO: 1065404 - RNA, 19 nt, Artificial Sequence
  Description of Artificial Sequence: Synthetic oligonucleotide
  Sense strand starting at position 3916 of SEQ ID NO: 915246
uuguacauguacugaaaga

SEQ ID NO: 1065405 - RNA, 19 nt, Artificial Sequence
  Description of Artificial Sequence: Synthetic oligonucleotide
  Antisense strand to SEQ ID NO: 1065404
ucuuucaguacauguacaa

SEQ ID NO: 1065406 - RNA, 19 nt, Artificial Sequence
  Description of Artificial Sequence: Synthetic oligonucleotide
  Sense strand starting at position 3926 of SEQ ID NO: 915246
acugaaagauugcauaaca

SEQ ID NO: 1065407 - RNA, 19 nt, Artificial Sequence
  Description of Artificial Sequence: Synthetic oligonucleotide
  Antisense strand to SEQ ID NO: 1065406
uguuaugcaaucuuucagu

SEQ ID NO: 1065408 - RNA, 19 nt, Artificial Sequence
  Description of Artificial Sequence: Synthetic oligonucleotide
  Sense strand starting at position 35 of SEQ ID NO: 915247
guauguagaaagugauaga

SEQ ID NO: 1065409 - RNA, 19 nt, Artificial Sequence
  Description of Artificial Sequence: Synthetic oligonucleotide
  Antisense strand to SEQ ID NO: 1065408
ucuaucacuuucuacauac

SEQ ID NO: 1065410 - RNA, 19 nt, Artificial Sequence
  Description of Artificial Sequence: Synthetic oligonucleotide
  Sense strand starting at position 71 of SEQ ID NO: 915247
guuauauaugugcacguau

SEQ ID NO: 1065411 - RNA, 19 nt, Artificial Sequence
  Description of Artificial Sequence: Synthetic oligonucleotide
  Antisense strand to SEQ ID NO: 1065410
auacgugcacauauauaac

SEQ ID NO: 1065412 - RNA, 19 nt, Artificial Sequence
  Description of Artificial Sequence: Synthetic oligonucleotide
  Sense strand starting at position 73 of SEQ ID NO: 915247
uauauaugugcacguauuu

SEQ ID NO: 1065413 - RNA, 19 nt, Artificial Sequence
  Description of Artificial Sequence: Synthetic oligonucleotide
  Antisense strand to SEQ ID NO: 1065412
aaauacgugcacauauaua

SEQ ID NO: 1065414 - RNA, 19 nt, Artificial Sequence
  Description of Artificial Sequence: Synthetic oligonucleotide
  Sense strand starting at position 79 of SEQ ID NO: 915247
ugugcacguauuugaaacu

SEQ ID NO: 1065415 - RNA, 19 nt, Artificial Sequence
  Description of Artificial Sequence: Synthetic oligonucleotide
  Antisense strand to SEQ ID NO: 1065414
aguuucaaauacgugcaca

SEQ ID NO: 1065416 - RNA, 19 nt, Artificial Sequence
  Description of Artificial Sequence: Synthetic oligonucleotide
  Sense strand starting at position 80 of SEQ ID NO: 915247
gugcacguauuugaaacua

SEQ ID NO: 1065417 - RNA, 19 nt, Artificial Sequence
  Description of Artificial Sequence: Synthetic oligonucleotide
  Antisense strand to SEQ ID NO: 1065416
uaguuucaaauacgugcac

SEQ ID NO: 1065418 - RNA, 19 nt, Artificial Sequence
  Description of Artificial Sequence: Synthetic oligonucleotide
  Sense strand starting at position 150 of SEQ ID NO: 915247
aaacgaguuuauuagagaa

SEQ ID NO: 1065419 - RNA, 19 nt, Artificial Sequence
  Description of Artificial Sequence: Synthetic oligonucleotide
  Antisense strand to SEQ ID NO: 1065418
uucucuaauaaacucguuu

SEQ ID NO: 1065420 - RNA, 19 nt, Artificial Sequence
  Description of Artificial Sequence: Synthetic oligonucleotide
  Sense strand starting at position 441 of SEQ ID NO: 915247
cgcacugugcaguaaugua

SEQ ID NO: 1065421 - RNA, 19 nt, Artificial Sequence
  Description of Artificial Sequence: Synthetic oligonucleotide
  Antisense strand to SEQ ID NO: 1065420
uacauuacugcacagugcg

SEQ ID NO: 1065422 - RNA, 19 nt, Artificial Sequence
  Description of Artificial Sequence: Synthetic oligonucleotide
  Sense strand starting at position 719 of SEQ ID NO: 915247
cuauuaucaccgugucuca

SEQ ID NO: 1065423 - RNA, 19 nt, Artificial Sequence
  Description of Artificial Sequence: Synthetic oligonucleotide
  Antisense strand to SEQ ID NO: 1065422
ugagacacggugauaauag

SEQ ID NO: 1065424 - RNA, 19 nt, Artificial Sequence
  Description of Artificial Sequence: Synthetic oligonucleotide
  Sense strand starting at position 722 of SEQ ID NO: 915247
uuaucaccgugucucaaau

SEQ ID NO: 1065425 - RNA, 19 nt, Artificial Sequence
  Description of Artificial Sequence: Synthetic oligonucleotide
  Antisense strand to SEQ ID NO: 1065424
auuugagacacggugauaa

SEQ ID NO: 1065426 - RNA, 19 nt, Artificial Sequence
  Description of Artificial Sequence: Synthetic oligonucleotide
  Sense strand starting at position 924 of SEQ ID NO: 915247
uguuuagucaagcaaagag

SEQ ID NO: 1065427 - RNA, 19 nt, Artificial Sequence
  Description of Artificial Sequence: Synthetic oligonucleotide
  Antisense strand to SEQ ID NO: 1065426
cucuuugcuugacuaaaca

SEQ ID NO: 1065428 - RNA, 19 nt, Artificial Sequence
  Description of Artificial Sequence: Synthetic oligonucleotide
  Sense strand starting at position 2144 of SEQ ID NO: 915247
cugggaucacacuauugca

SEQ ID NO: 1065429 - RNA, 19 nt, Artificial Sequence
  Description of Artificial Sequence: Synthetic oligonucleotide
  Antisense strand to SEQ ID NO: 1065428
ugcaauagugugaucccag

SEQ ID NO: 1065430 - RNA, 19 nt, Artificial Sequence
  Description of Artificial Sequence: Synthetic oligonucleotide
  Sense strand starting at position 2231 of SEQ ID NO: 915247
uguuuauaugaaugaccua

SEQ ID NO: 1065431 - RNA, 19 nt, Artificial Sequence
  Description of Artificial Sequence: Synthetic oligonucleotide
  Antisense strand to SEQ ID NO: 1065430
uaggucauucauauaaaca

SEQ ID NO: 1065432 - RNA, 19 nt, Artificial Sequence
  Description of Artificial Sequence: Synthetic oligonucleotide
  Sense strand starting at position 2523 of SEQ ID NO: 915247
uggaguaacuuauccaaag

SEQ ID NO: 1065433 - RNA, 19 nt, Artificial Sequence
  Description of Artificial Sequence: Synthetic oligonucleotide
  Antisense strand to SEQ ID NO: 1065432
cuuuggauaaguuacucca

SEQ ID NO: 1065434 - RNA, 19 nt, Artificial Sequence
  Description of Artificial Sequence: Synthetic oligonucleotide
  Sense strand starting at position 2524 of SEQ ID NO: 915247
ggaguaacuuauccaaagu

SEQ ID NO: 1065435 - RNA, 19 nt, Artificial Sequence
  Description of Artificial Sequence: Synthetic oligonucleotide
  Antisense strand to SEQ ID NO: 1065434
acuuuggauaaguuacucc

SEQ ID NO: 1065436 - RNA, 19 nt, Artificial Sequence
  Description of Artificial Sequence: Synthetic oligonucleotide
  Sense strand starting at position 2556 of SEQ ID NO: 915247
uguugacacugauucuaca

SEQ ID NO: 1065437 - RNA, 19 nt, Artificial Sequence
  Description of Artificial Sequence: Synthetic oligonucleotide
  Antisense strand to SEQ ID NO: 1065436
uguagaaucagugucaaca

SEQ ID NO: 1065438 - RNA, 19 nt, Artificial Sequence
  Description of Artificial Sequence: Synthetic oligonucleotide
  Sense strand starting at position 2592 of SEQ ID NO: 915247
agagaaggcuuauaauacu

SEQ ID NO: 1065439 - RNA, 19 nt, Artificial Sequence
  Description of Artificial Sequence: Synthetic oligonucleotide
  Antisense strand to SEQ ID NO: 1065438
aguauuauaagccuucucu

SEQ ID NO: 1065440 - RNA, 19 nt, Artificial Sequence
  Description of Artificial Sequence: Synthetic oligonucleotide
  Sense strand starting at position 2764 of SEQ ID NO: 915247
uuuagucagguacauuaaa

SEQ ID NO: 1065441 - RNA, 19 nt, Artificial Sequence
  Description of Artificial Sequence: Synthetic oligonucleotide
  Antisense strand to SEQ ID NO: 1065440
uuuaauguaccugacuaaa

SEQ ID NO: 1065442 - RNA, 19 nt, Artificial Sequence
  Description of Artificial Sequence: Synthetic oligonucleotide
  Sense strand starting at position 2883 of SEQ ID NO: 915247
uguauacuuugcuuguaga

SEQ ID NO: 1065443 - RNA, 19 nt, Artificial Sequence
  Description of Artificial Sequence: Synthetic oligonucleotide
  Antisense strand to SEQ ID NO: 1065442
ucuacaagcaaaguauaca

SEQ ID NO: 1065444 - RNA, 19 nt, Artificial Sequence
  Description of Artificial Sequence: Synthetic oligonucleotide
  Sense strand starting at position 2884 of SEQ ID NO: 915247
guauacuuugcuuguagac

SEQ ID NO: 1065445 - RNA, 19 nt, Artificial Sequence
  Description of Artificial Sequence: Synthetic oligonucleotide
  Antisense strand to SEQ ID NO: 1065444
gucuacaagcaaaguauac

SEQ ID NO: 1065446 - RNA, 19 nt, Artificial Sequence
  Description of Artificial Sequence: Synthetic oligonucleotide
  Sense strand starting at position 3006 of SEQ ID NO: 915247
auauauuauucugcgaaag

SEQ ID NO: 1065447 - RNA, 19 nt, Artificial Sequence
  Description of Artificial Sequence: Synthetic oligonucleotide
  Antisense strand to SEQ ID NO: 1065446
cuuucgcagaauaauauau

SEQ ID NO: 1065448 - RNA, 19 nt, Artificial Sequence
  Description of Artificial Sequence: Synthetic oligonucleotide
  Sense strand starting at position 3007 of SEQ ID NO: 915247
uauauuauucugcgaaagu

SEQ ID NO: 1065449 - RNA, 19 nt, Artificial Sequence
  Description of Artificial Sequence: Synthetic oligonucleotide
  Antisense strand to SEQ ID NO: 1065448
acuuucgcagaauaauaua

SEQ ID NO: 1065450 - RNA, 19 nt, Artificial Sequence
  Description of Artificial Sequence: Synthetic oligonucleotide
  Sense strand starting at position 3084 of SEQ ID NO: 915247
auacuuacuguguguaagu

SEQ ID NO: 1065451 - RNA, 19 nt, Artificial Sequence
  Description of Artificial Sequence: Synthetic oligonucleotide
  Antisense strand to SEQ ID NO: 1065450
acuuacacacaguaaguau

SEQ ID NO: 1065452 - RNA, 19 nt, Artificial Sequence
  Description of Artificial Sequence: Synthetic oligonucleotide
  Sense strand starting at position 3091 of SEQ ID NO: 915247
cuguguguaagucaacauu

SEQ ID NO: 1065453 - RNA, 19 nt, Artificial Sequence
  Description of Artificial Sequence: Synthetic oligonucleotide
  Antisense strand to SEQ ID NO: 1065452
aauguugacuuacacacag

SEQ ID NO: 1065454 - RNA, 19 nt, Artificial Sequence
  Description of Artificial Sequence: Synthetic oligonucleotide
  Sense strand starting at position 3127 of SEQ ID NO: 915247
cuuauauuaucuguaugga

SEQ ID NO: 1065455 - RNA, 19 nt, Artificial Sequence
  Description of Artificial Sequence: Synthetic oligonucleotide
  Antisense strand to SEQ ID NO: 1065454
uccauacagauaauauaag

SEQ ID NO: 1065456 - RNA, 19 nt, Artificial Sequence
  Description of Artificial Sequence: Synthetic oligonucleotide
  Sense strand starting at position 3141 of SEQ ID NO: 915247
auggaaauuugucaacuuc

SEQ ID NO: 1065457 - RNA, 19 nt, Artificial Sequence
  Description of Artificial Sequence: Synthetic oligonucleotide
  Antisense strand to SEQ ID NO: 1065456
gaaguugacaaauuuccau

SEQ ID NO: 1065458 - RNA, 19 nt, Artificial Sequence
  Description of Artificial Sequence: Synthetic oligonucleotide
  Sense strand starting at position 3336 of SEQ ID NO: 915247
ccaagaaguuaugugucaa

SEQ ID NO: 1065459 - RNA, 19 nt, Artificial Sequence
  Description of Artificial Sequence: Synthetic oligonucleotide
  Antisense strand to SEQ ID NO: 1065458
uugacacauaacuucuugg

SEQ ID NO: 1065460 - RNA, 19 nt, Artificial Sequence
  Description of Artificial Sequence: Synthetic oligonucleotide
  Sense strand starting at position 3396 of SEQ ID NO: 915247
ucccucucacucggauaau

SEQ ID NO: 1065461 - RNA, 19 nt, Artificial Sequence
  Description of Artificial Sequence: Synthetic oligonucleotide
  Antisense strand to SEQ ID NO: 1065460
auuauccgagugagaggga

SEQ ID NO: 1065462 - RNA, 19 nt, Artificial Sequence
  Description of Artificial Sequence: Synthetic oligonucleotide
  Sense strand starting at position 3405 of SEQ ID NO: 915247
cucggauaauuccagagga

SEQ ID NO: 1065463 - RNA, 19 nt, Artificial Sequence
  Description of Artificial Sequence: Synthetic oligonucleotide
  Antisense strand to SEQ ID NO: 1065462
uccucuggaauuauccgag

SEQ ID NO: 1065464 - RNA, 19 nt, Artificial Sequence
  Description of Artificial Sequence: Synthetic oligonucleotide
  Sense strand starting at position 3474 of SEQ ID NO: 915247
gccauuugccaaggcagau

SEQ ID NO: 1065465 - RNA, 19 nt, Artificial Sequence
  Description of Artificial Sequence: Synthetic oligonucleotide
  Antisense strand to SEQ ID NO: 1065464
aucugccuuggcaaauggc

SEQ ID NO: 1065466 - RNA, 19 nt, Artificial Sequence
  Description of Artificial Sequence: Synthetic oligonucleotide
  Sense strand starting at position 3526 of SEQ ID NO: 915247
gacuaaauguagccauguu

SEQ ID NO: 1065467 - RNA, 19 nt, Artificial Sequence
  Description of Artificial Sequence: Synthetic oligonucleotide
  Antisense strand to SEQ ID NO: 1065466
aacauggcuacauuuaguc

SEQ ID NO: 1065468 - RNA, 19 nt, Artificial Sequence
  Description of Artificial Sequence: Synthetic oligonucleotide
  Sense strand starting at position 3539 of SEQ ID NO: 915247
cauguuaggcuuugugcaa

SEQ ID NO: 1065469 - RNA, 19 nt, Artificial Sequence
  Description of Artificial Sequence: Synthetic oligonucleotide
  Antisense strand to SEQ ID NO: 1065468
uugcacaaagccuaacaug

SEQ ID NO: 1065470 - RNA, 19 nt, Artificial Sequence
  Description of Artificial Sequence: Synthetic oligonucleotide
  Sense strand starting at position 3540 of SEQ ID NO: 915247
auguuaggcuuugugcaaa

SEQ ID NO: 1065471 - RNA, 19 nt, Artificial Sequence
  Description of Artificial Sequence: Synthetic oligonucleotide
  Antisense strand to SEQ ID NO: 1065470
uuugcacaaagccuaacau
